United States Patent Application Publication US 2026/0103690 A1 - sequence listing, part 17

SEQ ID NO: 69898 - protein, 429 aa, unidentified
MERSVSRMRLRVGKVQGLPDKTKGAVAMKASKQYLRFCGIDMAKQKHVACIVDRNGNTLLKPKSIRNNAEGFQQILNCLKQTGRAKSMLAGMEATGHYWYSLHDFLTRNGYDVAVLNPIQTASQAKQAIRKCKTDKSDAFHIANLLRTGQYKAAVVPDELAMTCRQLTRIRYRIVRQISMTKQLIHSRLHPAWPEYDCFFSNTFGTTSMKLLKTVSTPKEFMESDFDDISEIIRKASRGRFGPVHTQRILQSAKNSIGMQRGQYGISTAIKLLLEQIEALGPVRKNLDGEIEKLAAQMPQYMFTLPGATDLTIVSLYGEIGPIEVFEKPSQLVAFAGLDPKVFQTGQYDAPKRQVSKRGSPYLRRTIWLMAHRAVSKEGDLRDFWRRKRRQNKHYLVAVTAAANKLCHIIWRIMTDRRDYIPKGYNPKS

SEQ ID NO: 69899 - protein, 460 aa, unidentified
METDKARQGAGGDRRQLRGLPAIRPLVAGMDIGSERHWVCAPTVDGSGREIADFGATTPELLRMAEWLKQRRVESVAMESTGVYWIAPHEVLEAQGLEVLLVDTRQLARVPGRDKKTDPTDCEWIQRLHGCGLLRGSFRPQENICMLRTLVRDKGNLVAEGGDWVRRMQKSLDQMNVRVHRAVSSLEGLTGMAIIRAIVAGERNPQQIARLRDPHCKKSEEAIAEQLSGHWREDHLFSLQQALRMYDAIQERIAAYEKEILRKLGQMERETGTTAPPLRNTNKARMIRNRGQEQKRQALYRMSGVDVTQIDAIGVEAVEVVLSEYGPDLSRFPTEKAFVSHATLAPHVPKSGGKPVKKKKRNSASARVANVLRMAALSLRNSKTALGAYYRHLAQRLGADVADFATARKLATLIYRLLRWGQPYVDEGVEAYEKRYQEQRIKSLKSKARQLGYEITPLTA

SEQ ID NO: 69900 - protein, 409 aa, unidentified
MDQLIERCCGLDVHRDTVVACVRGPGPNGRRQHEVRTFRTTAVELLALRDWLEAHAVTDVAMESTGVYWKPVFYVLEEAFTCLLVNAAHIKQVPGRKTDVKDCMWIAQCLEHGLLRGSFVPPAPIRELRDLTRHRKVLIQERTRAANRLHKLLEDAGIKLASVATNILGVSGRAMLEALVHGTTDPAVLADLARGKLRKKLPALRQALAGRFRPHHAFLVSQLLAHVDYLDEAITTMSEEVEGRLAPFAAQLTQLDTIPGINTRTAEVIIAELGVDMSCFPSDRHLASWAGICPGNNESAGKHQSGKTRKGNRWLRMTLIEAAGAAIRTKDSALGARYRRVMRHRGHKKAVVAVAHAMLRAVYHLLAEGTTYREPGADYYDRHHTHRVTRRAIQLLERQGYRVVLEPAA

SEQ ID NO: 69901 - protein, 385 aa, unidentified
MGNQTFIPRDYDVFAGLDVDKRSISVTFTDHQGLLKSLHMPYSVEHLVNHVRKHFPNQKVAFAYEAGPTGYGLYDGLVAQDFRCLIASPSMIPKAPGQRVKTNRLDSQGLSQNLRGGQLKSIHVPTAVYRELRHLTQLRDTFVSEMVGMKQRIKSLLLMEGIEFPPAPAGSQWSFMVKNKLRKLPCSSTVRFKLDQWLDSLEFNEKQVLKTTREIRRFCQNDPELSQCIKYVMSVSGIGWIVASQLLARIGNWRELTNIRQLAGFLGLVPTEHSTGDRTDRGSITHTGDGRLRSKLIQASWSAIRKDDELREFFRSICRRHPRRQGPRVAIVAVARKLSVRISVVLMKQRPYVVREKVHSAPLTQEETSPQGTTRRLREPGDKDS

SEQ ID NO: 69902 - protein, 412 aa, unidentified
MQQIYDRVAGLDVHRDNVVACFRKLGPKGGVSFEKDRFKTTTAGLRELAAWLADRQVELVAMEATGVYWKPVLYALESRFTVWLCNARNVKKVPGRKTDMTDAEWLSDVAAHGMIRPSFVPPPPIRELRELTRYRKTQSDARAAEIQRLEKVLQDAGIKLTSVASRVLTQSGRAMIEALIAGERDGAKLAELAIGKMRPKVPALTEALTGHFGPHHAVACHRILGHLDFLNESIAALTEQIDQRTAAFAPIYAALLPVPGFDRLSIDVIIAETGGDMSRFPTAGDLASWVGVCPGSYESAGKRRNVSTTRGNQWLRRALIESARAAVRTKGSYFGAQYRQIARHRGPNKAAVAVAHSLIALVWHLLSTGEVYKDLGDDYFASREDPDRRARRLIAQLELLGFKVTLEAATAA

SEQ ID NO: 69903 - protein, 311 aa, unidentified
MIDKTTVGIDVSKFALDVFIDTSERLIHLENSASGIMQLLKELEGIHISGVIMEATSRYHSLAESMLVSAGLPVAVINPRQIKNFARAMGKVAKSDSIDARIICEYGRRMKPEFRPARDKALQDLALLLTRRRQLVQNRVMETNRLQEKNGMYIETGIAEHIAWLNSQIDTLDQEIKYQLNQNAALSSKRKMLEKVKGIGPVTQAAILSQLPELGALTRRQISALVGVCPYDRDSGQLRGKRAIWGGRAGLRATLYMAMLSAIRYNPQIKDFYTSLIARGKVKKVAITACIRKFITILNAVFRDQKDWVYS

SEQ ID NO: 69904 - protein, 345 aa, unidentified
MKYFIGLDAHSTTSTFAVVDQTGKCVHRSTVKTSEKNLSYVISQINGERVLTFEESTISQWLYLQLREYVDDLIVCNPVYVAKKQGAKTDFRDALHLAQELRTGHLTPVYHDSSHWIQLRVSVSGYLDVVEEIVRTKNRLKAVFRAEALNTDENSFYKNKHRTVELHNESARFVAERLFAQIEYLEEEKLKYIDLFRRNQKKYRPIRNLMTIPGISIIRANIIVALVCQPARFKNKHQFWGYCMLVRHIQKSGGRIYGNKRVFGRRELRDIFIGAAENAMRTKTTLRDHYDALRARGVNHKDAKVSLARQISSISLSCLKNNEIYQDDYRERLKERKKVRQMLSQ

SEQ ID NO: 69905 - protein, 334 aa, unidentified
MVDKVTEAAVVGGVDTHKDLHVAAVVDQNNKVLGTQYFSTTRQGYRQMLAWMTSFGTLKRIGVECTGTYGSGLLRYFQNAGLEVLEVTAPDRMARRKRGKSDTIDAECAAHAAFSGIRTVTPKTRDGMIESLRVLKTCRKTAISARRVALQIIHSNIISAPDELREQLRNMTRMQLIRTLGSWRPDASEYRNVTNVYRISLKSLARRYLELHDEIADLDVMIVAIVDELAPELIKRNAIGYESASQLLITAGDNPQRLRSESGFAALCGVSPVPVSSGKTNRYRLNRGGDRAANSALHIIAIGRLRTDDKTKEYAARRVAAGHTKMGAIRCLKR

SEQ ID NO: 69906 - protein, 375 aa, unidentified
MSDVQPVCGIDVHSKLLITCIIDKSVSPAWNSFENTPAGILRLIGYLKHHDVSKVAMESTGNYASLLYNMLLASDLEPMLLNAYKAKHADPNKTDKRDAHWLAKIARSNLIKGSYVPDATIEKLRILTRERVALVDMRSDIKRRIISLLVRAGIRLDNVFRNMTCKASVMLLRGLAAGKSIDELAKENKVIARRADKIKALMASGDNRIVLKRVAGLLDIMDAYTRQIELVEEQIDECLKPHRELVELLESIPGVGRTSAAVIIAEIGRIDRFKSAKKLISYAGLCPATKQSGQKASKKHPTDKCNKRLRRIMFHVALGAIRKGTPVVSSLYHRQLLRGHVKKQALMAVGAKMLTYVYVVWSRGEKWEYEKATVM

SEQ ID NO: 69907 - protein, 336 aa, unidentified
MKKIFVGIDVSKSWIDVCVTIDGKCILHHQFVNNIMGFKAMIKWIKEFSKQLNEWLICMEHTGIYALPLWNFLSEKNISYCVVSGSVITSGLEIRRGKNDKIDASDIAKFAMRYQDELKLHRLPIQVLQRLKMLFSYRERLVKAKVLISVPANEAKQFAAKESKEVRTDSSSLVQIIEARIKKAERLMLEIINSDKQTSRCYELIVSVPGFGLITACYLLIVTQCFTVLTRSRQLSNFGGTAPHPHKSGTSIKGKTRVSPIADKKLKALLSRGAGSLLQHHEETQYYAARMMAKGKHENLVRNNIKNKMLHTVCAVLKRGTPDIENYVSPYQQDVA

SEQ ID NO: 69908 - protein, 384 aa, unidentified
MAKVVIGVDPHKRMNAVVVVSAKGRVLARQQFSNTARGFRDLRAFSRQWRPRTWAVEGCNGVGKHLAQRLVAQHETVVDVSTRRAALVRVYAGGNGRKTDDTDAHSIAMVGLQTPGLPVVRLDDRTVTLRLLANRRHELVGLRTQAVCRLHRDLANLIPGGAPRALTAKKAKELLATIRPRDEVGRLRRQLAADQLAGLVALDRRLAELERQIKVAVAATPTRLARIFGIGPVSTARILGEVGDVARFRSRHHFASYNGTAPADAGSGGEPIQRVNLKGNRKINHAIHMVAITQARNDTPGRAYYLRKQAQGKTQKEVLRALKRKISDAIYRQLVEDALVEMGPGGQTGTTLRSSVTGPTPTAGSSDKPQPGPEPQATPLPASA

SEQ ID NO: 69909 - protein, 384 aa, unidentified
MRSIIGIDVSQKSSSFHLIGTGNKEGIDGSFSMDREGFESLLAQAGCTNTSRFVMESTGRYHITLAHFLLQKGHQTFIVNPVLVKQFSKAHTLRKTKTDKVDARTIARFAKSDTVAMDNTGRAMDDQRLSIARRREQVAEDVAKAKTHLKADLTVAFPEILSRDVFTMGMLRLLSRFPCASSIEEATDEQLQQALKGERGRGLSLTVAQLRELARDSIGLPSYGPLVADSVESLMFLNRKLDGLTEQLVTIVRQTQSEEMDIITSIHGIGDTTAAHFLTEIGSIDRFERYQNLIAFCGTDPGIYQSGTITKRGKITKRGNASLRKYLYLMGMGLIRCNPHFKAFYDKKRAEGFPHRKAMVALMNKLIKTLFAMLKKKEKFIVQS

SEQ ID NO: 69910 - protein, 375 aa, unidentified
MTAELQVKEYVTAMVLYMATELSNKTWRLAFSDGKRTRQVSIEAADIVALGAQVAKAKEKWALAGDVRVVSCYEAGRDGFWLHRQLAELGIENQVVDAASIEVSRRARRAKTDRLDAQALLEKLMRYVQGERRVWRVVRVPSPEWEDLRQLHREREQLLKERTRHRNRLTSKLVAQGLRMPVGKAFLEELEEATLFDGRPVPEHLRAGLVREWERLQLVQAQLKALEAHIRGLIKESEPLKAVRALMLYTGVGWVGAWTLVLEILGWREIANRRQLGGLAGLVPSPYNSGTLVRDQGISKAGNRRVRALMIQLAWLWLRYPPNSKHSRWFQKRFGGGSKRQRRIGIVALARRLLVDLWRFVESGVVSEGAKLKVA

SEQ ID NO: 69911 - protein, 400 aa, unidentified
MRTVFGIDVSKASSEVAILVNGKRVYGYTMPNDIIGFSRLLEDLKTVSNPEIVFEATGVYSRRLQAFLEEYSYDYTRLNPLEAKKQLDGLRVRKTDKIDAEKLASSQFVLNRKPTYVQEEVYQNLHDLSRFYQNLTEDIVRTKNRLHKVLQIAFPEIENLLSTPTGEQYWNLVSIFPTKHWVLELSEAELKEAIRNSTSKRISENRVGNLTEKLVGLAKQSYSGISKTSPMVEEVKYDAQELIRLTNRREQVLQQLIALAEPLPEYEILLSIPGIAETTATSIIGELGDIRRFKSANQINAFIGIDLKHYESGDFLGQEHITKRGNPYARKILYKCIHNIASASHTNPCHIADFYEKRKRQSQITSTKPHTIASIHRLIRTMYYLIMHNKLYDYTLAQSH

SEQ ID NO: 69912 - protein, 316 aa, unidentified
MTKNNTRTVGIDTSKAKLDVAIHGGECWQVTNEMSGWRSLAKRLAEAGVTRVGIEATGGYERGVVGCLRAAGFTVLVLQPLQIKAYARVHLRRAKNDALDAVLIAACAATIDPPRLEPDARLADLAQHLTFVEQIEEDMARLKVRLEHIEEPRLRRFVLDDLARLKARRATELARISKALRAHPDLGHRLDLVLSIPGIGERTALAIVIRMPELGRVSREEASALAGLAPFDHDSGKYKGQRHIAGGRARLRRSLFAAALPAAFRWNKALVALYARLIARGKAHNAALVACARKLIVYANTVVQRGSPWVESLAVS

SEQ ID NO: 69913 - protein, 450 aa, unidentified
MSKGSGVSRGDRRRNARLAELRLLVCRENAIVGIDLAEDNQAVVVTDHDSKVLARRSPRCKAWQLGEVLDWAVGKAKARGFESVTVACEPTGSRWMHVQQACAERGLNFVCVQTLVTHNARVAEDYTRDKSDQKDAVLIARLTAELRCYRPEVIEEEWAVLRYLGQRRDALVTEALRCRQQITDRLALAWPAALGAAAAPLDSVTFLACLQVTADRCDGDPGKLRRYGLAEFTQLVRGVLPRWGGQRICHRIVACFHAALGDSRGAVPARRRGALKLAGHALADLRRARELQLRAEAEMIAQLDVLGITDVLASIEGLSLPVAACILAEIGDPARFGSSRALVKHAGVAPCDNSSGNSAGQARISRRGRPVLRKTAWRGTWAMIHGANPVLAAKYDHLTSRDTGKLAKGQAHIACVATLLRWIYSVITTRTAWDRRVAGGTISHTAALAA

SEQ ID NO: 69914 - protein, 348 aa, unidentified
MTVTIVETRAITGGVDTHADAHVAAALDPIGGLLGVQEFPATAAGYARLLAWLGGFGTVCLAGIEGTGSYGAGLARHITTAGVRVVEVDRSDRQDRRRQGKSDSLDAVSAARAAQSGRARGASRGRDGAAGAIRALMVAKRSAAGERTQTINQARALILTGPDDLRARFTGHTAAALVAELASLRPRPGSTVGYATRIALRELGRRVEFPGAQHERLDELIGPLAAARAPGLLALYGIGPHTAALLLIAAGDHPERLRSEAAWAHLCGAAPIPASSGKTVRRRLNPGGDRQANHALWRIVFTRLGSDPATRAYAERRTAEGKSKKEIIRCLKRYVAREVYPHLRATVG

SEQ ID NO: 69915 - protein, 393 aa, unidentified
MEVIQMYLVGIDISKYKHNCFIATKTGVQLKEFVFENNLEGFKMFHQSLFELDQSQEIRIGLESTGHYGTNLKQFITASGYTYLEFNPYLTHQFSKAMSLRKTKTDKVDAKTISNMLGSVDYKTLHTQFYHNNELKQLVRDHDDILTNRSKTLVKLTNLLDISYPEFKPFFNNRLGSTAFFILKKYKSAQRISKLAMKDYEVLKSKSKGKFTYSKFSRLKSLAKDTIGVQSEIYVKRIQMLIRDYEYFDQSLEGLDQEIINLFGEVKTKLTSIPGLGIIQAATIYAEIGDIHLFSNPQKLIAYVGFDVSISQSGMSEHYGKIVKRGSPLLRKSIWTYALPSLRFIPVLHDYYHTKKSEGKHHKVALTHVCRKLIRMIYHIKYNQIDFDDKEIK

SEQ ID NO: 69916 - protein, 412 aa, unidentified
MDVVYQRCAGIDIGKRTAKVCVRVQGRGSQPTVSTVTSWSSMMPQILKLRAKLVNEGVQRVVMESTSDYWRPFFYVLAEELDVILVRASDVKAIPGRKSDVSDAEWLADLAAHGLVRASFVPPQQQRQLRDLTRARSRLLADRAREVQRLEKELEDACIKLAAVVTDLQGVSARLMLQALIEARDDPAAMADLAIGRMRTKIDQLTEALTGRFNDHHRFMVTFRLKRIDAATADLAELDARIDALIVDAGFDPARDLLLSIPGLGPHSADELLAEIGPDMSVFDAPEQLAAWAGVAPGSHESAGKRKNAPARRGNRYVKRALGIAAKSAARKKTGFLAARFRRLAARRGYQKALVATEHSMIIAIWHMLSTGEYYHDLGGDHYHRLIPARIIRRKIAELEAAGYTVTHQVAA

SEQ ID NO: 69917 - protein, 335 aa, unidentified
MKKVFIGIDVSKQWIDACVTGDGKVVFHQHFDNNKSGFGKMIKWLKQYGKQSDWLLCMEHTGVYAQLLWHYLTSKAITYCVVPGQVISSGLEIRRGKNDKIDAGDIARFTMRYADELKPHRLPSQVLSKLKILFAYRTRLVKAKGFISVPAGEAKVFAGKESKEMRCDSHSLVQILEARISKVDKLIQQLIASDEQTSKCYQLIISVPGFGPVTASYLLIITQCFTTLTNSRKLANFAGVAPHPHKSGKSIKGKTRVSPVADKKLKALLSSGAGSLITHHKPTQQYFLKLTAKGKNENLVKNNIKNKMLHTVCTVVKRGTPYTDNYQSAYKKYVA

SEQ ID NO: 69918 - protein, 370 aa, unidentified
MGEGTTFIGLDAHKKTIQVALLTPGSRVHVEWEVQNEPAAVRRLAKRLLREGTGRVRACYEAGPCGYALQRQLQEAGVDCQVIAPSLIPIKPGEHIKTDRRDARKLAELLRADLLTEVHPPTPEEESIRDLCRAREDAKEDQLRSRHRLVKMLLRRGILWPPGRNSWTQAHREWLRGLVFERESDRAVFDDYLLALEQVEERVRTLEAKLESISQAEPYREPVAWLRCFRGIDTVTAMTIVAELHDFRRFTSPRGLMSYLGLVPKEHSSGESRRRGSITKAGNNHVRRVLIETAWHYRHPYAIGAALRKRREGQPAKVVAIADKAGQRLYRRFYRLGARGKPGCRIVVAVARELVGFLWSILYPRAAALA

SEQ ID NO: 69919 - protein, 441 aa, unidentified
MATRKRDEEVVFPNAAGIDVGASGHWVAVPKQSADEPVREFGTMTDDLNALADWLLACGVDIVALESTGVYWIPIYEVLERRGLTIWLVDARQMKYVPGRKSDVLDCQWLQKLMSLGLLRAAWRPGDEVCVVRAVVRQREVLLTEQASWVQRMQKALVQMNIQLTEVLADVMGLTGQAIIRAIVAGERDPEVLAKHRNARVKASVAEVQRALTGNWRDEHLFLLQQSLAIYDDLAKRVQECDVKIESLLAPLQRHAIKLKTAPKQRAKNSPSFDVRQAMANWAGVDLTRIDGLGVSAVMKLLSEIGTDLSRFANVKHFCSWLGLCPGTKISGGKVLASTTKRSANRARQTLKMAAMSLSRSDSALGAFYRRLCSRMDKPRANTAVAHKLARMVFFMLTRGQDYVDQGRERYEVQQRQRTIAALKRRAAALGFQITPTVAVP

SEQ ID NO: 69920 - protein, 343 aa, unidentified
MEIVYVGLDLGSSSFQQVAIKADGSIKVNRSFTTSEANLRAAFAGQRSEIHVHLEAGELAPWAASVIAPLVRRVVCSHPKDNAWIAKDADKCDRVDAFKLAELLRLNRFKEVRYPPDQPRRNFKQLVQHYDELTGQQARLKTKIKARLRMQGVLVTGERPFSSKGRKEVLAQVESRDLRTAIKQLYEVLDQAVVAQEQARLLMLRAAQSFPEIKLLRTVPGVGPIGACRFSAYIHTPSRFSSKRKLWKYCRLSVSHRSSNGKPLRRPRLDRRSGCGRLKDVSRKAFEVAIRSRHGNGFKRTYQRALETTHDKTHARLTVQRKIVSTLRAMWITRTPYCDELSR

SEQ ID NO: 69921 - protein, 340 aa, unidentified
MDQVVTIGMDIAKSVFQVHGVNAEGTVAIRQRLTRARVLGFFAKLAPCLVGIEACGSAHYWGRELSRLGHKVRLIAPSYVKPYLKRQKNDAADAEAICEAVTRPNMRFVPMKSSEQQSIMVMHRTRSILVRQRTQLSNAIRGHMFEFGLTAAVGRNGLQTLIKVITDPGDARVPNEARACLLMLVEQLGPINAQILESDRRIIASARSTEVGQRLMGIPGVGPVLASALVATIGDPKSFVSGRNLAAWIGLVPRQNSSGGKERLGSITKQGDRYLRQLLVVGALAVIRYAVRNGARRPWLVQLLARRTPKVAAVALANKNARMAWAIMTSGERYREPLAA

SEQ ID NO: 69922 - protein, 397 aa, unidentified
MYIVGIDIAKRKHEAAVIDGEGTVIIKPFSFTNNCSGYNRLLAMLTKAKLPLDEVSFAMEATGHYWLALFTRLQKEGFRVQVINPVQTNSIRSFYIRQAKTDPMDALLIAEVIRFGHFSESTLHPENIYELRELCRGRHAIVSMQADVKRKVVALLDQVFPEYETAFTNLFSDTSMAILQTCPTPKELSEMPLEELCHLIEVSSHKRFRMAKAQELQALARNSFGFAMAGDVFSTMIRLYAKHLDFLKQQVREMDRKIAEIMDTLDTPITTITGIGPTLGAYILSEIGDINRFSSAAKLAAYAGIDPTMRQSGEYNGVRNRMSKRGSPYLRHAIWLAASSAVLHDPALKLYFQKKRDEGKPYMASVGHACRKMVSIIYAVMRDNKAYTPCIQNEISA

SEQ ID NO: 69923 - protein, 387 aa, unidentified
MPQPNDLSRSLVALDQNSTIIAVVEMSQSSWLVGGILPGIERQPRKKLEPNPERLLALLHRWRDESVRAGRTITRIAVAFEAGRDGFWLARWLEARGVEAHVIHPSSVAVSREHRRAKTDRLDTELLKRGFLGWLRGERGHCSMVRVPTIAEEDAKRPNRERECLVKDRTRLVNRMKGTLARLGIRNFRPTLRNAAEHLAALSTPEGSPLPPNVAAELERDIARLRLVIGQIKQIEEARRQRLEEPPERGPHAMVRLLARVVGIGIETADMLVNEVLSRPLRDRRAVARYAGLTGAPDESGAKRREQGLAKAGNARVRRGMIQLAWRFLRFQKNSALAQWYQARTADHRGATRKTMIVALARKLLIALWRFVTIGEPLDGVTLRPAS

SEQ ID NO: 69924 - protein, 410 aa, unidentified
MEVMYPRCAGLDVHAKTVVACVRVATGGKVTYAHQTVATDTRGLLALADWLATFEVTHVAMEATGVYWKPVWHILSDGDFSLVLANAAHVKNVPGRKTDVNDATWLADLLAHGLIRGSFVPDQQTQEMRDLLRTRKQLTRERSRHVQRLQKTLEDANIKLDSAISDIMGLSGRKMIEALIAGESDPERLAQLAHRRIKATPEALREALRGRVTRHHRFLLRLHLQQIDAIDEVISDIDREVEALVEPFRTTVLLLTTIPGIDELSACVILAEIGRDMSRFPTAAHLISWAGLCPRNDESAGKRRSTRMRKGAAWLKTTLVQCAAAAARRKASYLQAQFHRLRARRGAKKAIGALAASILTIVYHMLLGGELYHDLGPDHFDRRAKSTHIKRLVTRLQNLGYAVQITPLAA

SEQ ID NO: 69925 - protein, 353 aa, unidentified
MDSKKYIGMDVHKESISIAVRNAAGRVVMECVIETKANAILDFIHGLRGELQVTFEEGTWATWLYDLLKPHVTKLVVCDPRKNSRQGNKNDQIDARELADRLYMNKLSSVYHGGAGVRTLKELARSYLTISKDLARVMSRVKAIYRSWGIPCAGKQVYALRHRAEWLAKITEVGVLRRAEFYYQQLDALRPLRHEVRRELLAESKKHKATKLLCQIPSIGPIRAALLIALIQTPHRFRTKRPFWKYSGFAIEMHSSADYRSVKGQLERTQKQVSVRGLNRDCNHDLKNLFKSAATIASVKPGPFQEFYAALVAKGMRPEMARLTLARKIATIVLIVWKKGVSFDAQHLKPQTV

SEQ ID NO: 69926 - protein, 391 aa, unidentified
MVCVGIDVAKDKHDCCILDSDGMVRADCFTIPNNMDGFKQLLQTIRNCTKKSDKIKVGLEATGHYSYNILGFLLDNDLAVYVMNPLHTNLYRKSLSLRKTKTDRVDARTIATMLLSDVDLKSYTDTAYHNEELKSLTRYRFDKVRERAKLKQSVSRLVTILFPELEKLVPSLHIASVYSLISEYPGAKQVSEVHLTKLTNLLTTASKGRYEKDKAIQIRDAARTSIGSVMPAKSLELKHTIKLIRELTSEIDEIEDSIQQIMDELHPPILSIPGVGIQSAAMILAEIGDFSNFESPDKILAYAGCSPSTYQSGKLTNCYAHMEKRGSRYLRYALYNATKYVCHWNPVFAKYLAKKRAEGKHYNVALSHATKKLVRLIYALQKSGKAYLTAA

SEQ ID NO: 69927 - protein, 288 aa, unidentified
MEGETVIAGVDTHKDVHVLCLLDGLGRKIWSGSFRADPEGYDRLAEAIGDPGSCAVVGVEGTASYGAGLTRRLVELGYNVVEVLRPKRDKARPGEGKSDPLDAERAARKAASGRGCSVPKSQDGWVEAVRQLYVARRLAVATSTSCVACAKSMLTTAPGALRERFRGRERPKDLMPLLARRRKAGDALEESVLASLRSVAAVWKEARSQVESCDERIRALLEANAPALLGVEGCGTTTAAALVVAAGDNPGRLKGEAAFSMLCGASPIPASSGKTERQIGRASCRERV

SEQ ID NO: 69928 - protein, 339 aa, unidentified
MNILKQTVGIDVSYKTFDARFGTTNTQQQITLSPSKSFKNSPAGFKLFLRWLKKYILSDDIPLVFVMEATGVYYEHLAHFLFQHNYQVAVILPNKIRNYAKSLESKSKTDPLDAAVITRFGLERQLSLWTPPSDNIKVLRNLCREYHCLKANCTQIKNQLHALKSSFKPHRESFKRKTQLLKFLQRQIALIQKELRALVKSEPQLAQHLKNIKTAKGLGDITILTVLAETRCFQLVTNLKQLTSYAGLDVVFNDSGLKKGKTSISKKGNTFIRKALFMPALSACRANPQLKAFYQRLVAKGKNKKLAIIAVARKLLLLIYTLWKTNSPYVPDYNPVNKC

SEQ ID NO: 69929 - protein, 412 aa, unidentified
MEVMYPRCAGLDVHKETVVACVRIVAGGEVSRSVRTFATTTANLIELGEWLEVNGCTHVAMEATGVYWKPVWQVLADGAFELILANAAQVKSVPGRKTDVNDATWLSELLAHGLVRASFVPEPAIQELRGLLRTRKQLVREKASHVQRLQKTLEEANIKIESVLSDVMGRSGRAMIQALIDGETDPAKLAALAHWKVRASAATLREALHGRIKRHHRFLLRLHLQQVDALDAAIAEIDREADAGLACFRDAVKQLSTIPGVSELSAQVILSEIGTDMGRFATAAHLRSWAGLCPRNDESAGKRRSTRLRRGAPWLKAMLVQCAWAAARTKATYLHAQFVRLRGRRGPKKAICAVAASILTAVYHMLKDGTFYEDLGAAHFDRRRPEMQARRLVKRLSELGFSVELKPVAAIT

SEQ ID NO: 69930 - protein, 375 aa, unidentified
MSKIRFVGLDVHADTIAVAIAEPDGEVRSIGAIPNRLESLRKLVQKLGPANQLRACYEAGPTGYVLYWQLTALGVACEVVAPTLVPVKAGDRVKTDRRDAGKLARCYRAGDLTAVWVPTPAHEAMRDLVRAREDAREDQQRARQRLGKFLLRHGWKPPEDVKKNWTHKHMDWVKRQVCFDQPASQAAFLDYVHEVEHAADRLERVEQAIDDAMAAAPAEIQEVVQALQALRGVGKIVAVSIVAEVGSLSRFRNPRQLMSYSGMVSSEYSSGNRIQRGGITKAGNAHLRRVLVEAAWAYQHKPWIGGWLAKRQQGLDEETKAIAWKAQWRLCTRYKKLAARGKNKPQIVIAIGRELLGFIWAIAVRTEAHSATQAA

SEQ ID NO: 69931 - protein, 415 aa, unidentified
MDSTGKKKKAVKVKKTIKSSSGRVGRSSKQSSKAAVKPKLRWCVQNLVQKLEKAKNAPKQSAADENVEYHIGIDLGDKKCHYCILDKNANIVADGSLATTIIEFELYFREIPRSRIALEVGTHSPWISSLLEAIGHEVYVANTRKMGGGKKKRRQKNDKLDAESLARQVRSDPKALFPIRHRGEKARHALVLLRARHAVIGARTKLINSARGLVKSFGDRLPRCSADSFHNMDRSAVPEMLRDTLEPIFRQIGTMTTQIKKYDAEVKRMCRQAYPETEMLRQVKGVGEITSLAYVLTIDDPNRFAKSRDVGSYLGLVPRQYDSGDIRPQLRITKTGDRMMRQYLVQSAQYIMGRYGVDSDLKRHGLKLAARGGKNAKKRAVVAIARKLAVLLHHLWITAEVYDPLRNSTRQEEAA

SEQ ID NO: 69932 - protein, 399 aa, unidentified
MLAVGIDISKSKSVAAILNQDGSMHTSPFEFHHTQPELDAFIKYILNSKQSATILMENTGHYHYPVLKALQEAGLPVCMVNAYQIKKFGDMDLRKAKTDKKDAVRIARYALEKSYSLVPYTSMEQKYEDLKFLARQYNQRMLTLKTNKVFLLNLLDETMPGITNILPLTTRTPETSLSVLFINRFKSYDRIKKMGKSRFLDAFEKIARKSRNRQTKTYGLAIYEAALRNITTRGENEYTLAAQNQCLELVCESQKATDSIILKMQTLAETLPEYAVLRSMAGVGDRLGPLILAEIGDIRRFHSGKALNAYAGNDAPPYQSGTFESHNRHISKRGNAALRKYCFEVMQALKLTRPQDDPVYLFLLKKEQEGKPYNVAKMAGVNKFLRIYYARAMETLKQQ

SEQ ID NO: 69933 - protein, 350 aa, unidentified
MKEATAGDNRPAWIGLDVAKRTFDAAVHPAWQPGVNVPFSALPKQSFPRTGEGVAQLLSWLDAMEQEGEVRAVMEATGRYSEELAAWLTDARPSLAPVIADPKAVCHFIRSLRLRNKTDQSDAAALARYGAERAPVPPPPSAPEYATLREMSRQRTFIVTSIVAARNRLGEIDAIQEIATLQRRIVRDLERALAQIELLMRQHVKRHANLTEAVRRLDTIPGVAFITAATILGELGDLTRFRKSRSLSAFSGTSPRRAESGDSVKGKTRMCKQGGPRARQALYLASMAAISGKKSNALARFYAALVAKGKPKMAAIGAVMRKMLVLMRALLVGQSDYHDEWLRGKITSPA

SEQ ID NO: 69934 - protein, 313 aa, unidentified
MEAPVAGIDVSKDKLIVYFQGKLYEFTNDKRGYEEIRKILPKGCKVGIESTGVYHVNLAKYLNNEYDVRIINPFILKKFKDFRGKKSDKNDAKKLAELVVSMCSGFTTSDARELTSQWDFVTRSIARVKNRLRRDLVLLGYRDSLSKKNLEEVLRGGDSIVLAEVRFLLEELERLEGRKREIEKELEDFVSKDSLIFTIPGIGKTLGCIILARVGDVKRFSDKKRFVAYCGLDPVVESSGKSVVSRGISKKGDAVLRRAFYLAALTAIKVNPVIKRFYEEHKGRLKGKKLITACARKLAVITWAVLYYNKPFG

SEQ ID NO: 69935 - protein, 358 aa, unidentified
MQKNTISFKGQKIFIGIDVHKKNWDVAVAPEVGVIKRHPQKASAQELFVFLKKHYPDGDYLAVYESGFTGFSTYYALKDVGINCIVIHAADVPTTQYEEVMKTDKVDSVKLARTLKAGLLKGVYVRERDNLDDRSVIRIRKTIQKDLCSYRVRIKHLLHNNGVSIPERFEKSGSHWSRAFMRWLKEDVNLLSSSKNSLNLLISQVEAIRSTLLESTLLMRDLSQTERYKKNVDLLTTIPGIGVTIAMCILTEVYDVSRFRNEREFASYLGLIPTTHSSGDKTMHGEMTFRGNKQLSTMVIEAAWVAIGRDLGLGSLYHHYRERLKPQEAIVRIARKLSNVIFAVLKNRTEYVPYYVDN

SEQ ID NO: 69936 - protein, 416 aa, unidentified
MNAVGIDVSSRKSTVAVLRPLGEVVCLPFDVTHDIAGLASLAEKLKALDGETRVVMEHTGRYYEAVAKALHEAGLFVCAVNPLLIKEYGANSLRRVKTDKADAVKIARYALDNWADLRDFTPMDAIRYDLKTLNRQFQLASKQRTASANNLIALLEQSFPGIRKCFDSPVRSDGTQKWVDFAHSFWHVDCVRKQPFAAFCERYRKWCKLHAYFFKLRNAEEVYALAKRAVVLTPKSKVVKVLVQEAANQLISISRSVEVYRAEMDRLAAMLPEYPVVMAMYGVGKSYGPQLMAEIGDVRRFERKQALIAFAGIDPMPNQSGDKNVRSNKSSKRGSPYLRKTLFNVIRTYLQCAPQDEPVFQFLNRKRAEGKPFYVYMLAAANKFLRRYYAKLRDYFASLDTLQPVAPIPTILKATL

SEQ ID NO: 69937 - protein, 414 aa, unidentified
MDGLSPHHFAGIDWASEKHSLCVIDPAGAIRSSLSFTHTADGIADAIRQLDRLGPRAQLPIAIERPSGLLIDTFVDAGFPIVPIHPNALKATRPRYSAAAGKADPGDAYIAADILRTDGHRFRVLSGPSDHTRALRAAIRTRDDLVATRIQLANQLQALLDSFWPGPLCMFHEVASWICLKFLEEFPSPAAAAKLTEKRLQRFLTRNGYSGRRTPSELLARLHQAPTGHAPELECQVKAQLVRSLVAILRILMAQIRDGEQLIEAQLQQHPDAPIIRSFPRTGSVNAAQILAELGDNRDRFSSFDQLSAESGVCPVTFQSGKHRGVAFRFACNKRLRQAITTWADNSRHGSSWAAAVYKAARQRGCDHPHAVRILARAWLRVLWRCWTDRTLYDPQLHGRALPFLAPEPSALTA

SEQ ID NO: 69938 - protein, 342 aa, unidentified
METQGGAVAPTTTSDVAVNVGVDVSQAELVIAIAGTPGTWSTPNDAAGHAALVARLAPLHPTRIVLEATGGYERLVTAALAAAALPAIVVNARQVRDYARATGQLAKTDALDAHVLARFAAQVQPAVRPLPDAAQDELDAAVLRRRQLVEMLTAERLRRAQATGRPRYALRKGIEKHIRFLERELAETDTTLAALIEASPVWRVKDDLLQSVPGIGPATAHTLLAELPELGTLSRQAIAKLVGIAPLNADSGRWRGQRRIWGGRAAARTALYMAALVASRYNPTIRAFYQRLLARGKPKKLALIACARKLLTILNQLLRTGERWTTRVVDADRCVLRGPANA

SEQ ID NO: 69939 - protein, 387 aa, unidentified
MARKRTLSTLDTSIAYEAVGLDLAKEDVALAAFDSEHKEPYLIDRIPYDKLYELLADMAPTLVAMEPCSGAHQIAEQIQELGHEVMMISGRHVQAWVKDHCNGQKTDLNDAFAILNLAYDRWLTPIRGKTREECRLLALQASYRQLKGQRTKTMVHVKATLHAWGFPIRAGSFNQKVLHELIDTNREAFGDEVVETLHLMINRVRELDHDIATVLKLLTEATKRDPRASLLRSIPGFGILTMSRWCAVIGDIARFDSPKQTMAFVGLVPNNRITGHHTETSSGREARGQGRMSKRGDKMLRSLCILGAASLCLMVRNDRLPDCPFVASIKERLASPRPWFKVLVYVAAKLVRIATALLKYGETFSYEKAGISKAVLKQWELEQAKAA

SEQ ID NO: 69940 - protein, 341 aa, unidentified
MKHFVGLDVSMKETAVCVVDEAGQRVWEGSVPSSADAIAGIIREKAPDLERVGMETGPQAVWLWHALRDQSVFVDCIHARRAAAALKLQANKTDRNDALGLARLVHSGWYEPVAIKSFDRYRMRAVLTARERIVRMCTTMINQIRGLAKTFGLVLSAGKGQVFEQSVRRALPVDVVLRDLFESLLSVLSSLKNQRRAFDRQLARFAREDAACRLLTSAPGVGSLTAIAFVTAVDDPARFRSVSDVGAYLGLTPKRYQSGEVDIGGRISKTGNRLTRKLLFEAATVLLFRASPSIALKQWGLRLNARSGSWKARVALARKLAVILLTMWKTNTVFENRSSAA

SEQ ID NO: 69941 - protein, 411 aa, unidentified
MSYKVAGIDIHKKVLMVVVADVAAEKWEFESRRFGTAAREREHLVAWLQERGVQEIVMESTAQYWKPIWLDLEPHFRQLHLAQAHSNRAPKGRKQDFADAQRLTRRLVAGELILSFVPDAPQRGWRTITRAKVQLVRDRVRLQNQLEALLEETRVKLSSIVSELLGLSGRRILRALADGENDPVALAQLGDFRLKCSQEELADALRGHWQPLHRQMLQLFLERLALLDRQIHQLDRMAAETMQPYEDAVVRLAQVPGFGPDSAQQIIAEVGAQARAFGSAAQFASWAGLCPGREESAEHNRSSRCPKGNPFLRRVLTQAAQAAVKKKGSHFQIVFRRWLRRLGYQAALWAIAHKLGRLVWKILHDGVHYQERGEPSNPVVQRRRARRMIQALRNMGYQVEISSLNPQLAQG

SEQ ID NO: 69942 - protein, 335 aa, unidentified
MSTVPVFVGLDYHDRSVQVCVLDREGRVLANRSVANDVKEIAQVVAAEGRRVFAAIEACNGSAELAEELIKLGWSVHLAHPGYVARIKQNPDKTDFADARLLADLERVGYLPKVWLAPHAIRELRRVVRYRQQLVDERRNGKLRIGALLREQRIRCTESCRPWTIAWLRWLQEEAELSEQSRWIVKQHLRRIRELSKAITEVERRLRGMTAEDSVVETLLKLKGVGLVTAVTIRAEIGRFDRFRTGKQIARFCGLSPRNASSGQKQADAGLIKAGNPQLRATLIQAAHRLKRLDPRWRALAQQMRDRGKAGSLIAAAIANRWIRSIFHVMQPLAA

SEQ ID NO: 69943 - protein, 316 aa, unidentified
MNQSTNSVKFLGVDVAKDSLQLFCNGLKVPAQIQNTPKAITTWLKGLHSHHSQLHIVCESTGGYENTLLRACWKAGVRVTRLNPARVRDFARCRGLLAKTDAIDAKAISEFASTFPPDPTPEPSPQQMLLAELVARREDLKTQRAAESNRSRDIQDKVLRRMLEKHLRFLDAQIKQIDRLIEDTISQDQAMHQKREILVRTKGVGATSAAILLSCLPELGTISGEAISALAGVAPFNRDSGTLRGKRCIRAGRAVARKALYMCALVGSRANPILKDFYQRLISKGKPPKVALTALMPKLVVHLNSSLKTLNPPSPC

SEQ ID NO: 69944 - protein, 338 aa, unidentified
MNNYFIGIDFAKAKFDAVILQRDNLNEEGHHGTFENSKTGYKRFLGWVRTFATKHKDEVLFCGEHTGVYSKLISDLLAKDDYCIWLESPLQIKRSLGIKRGKSDKQDAHDIAEFAARHEDKVRVHKAPSKEMEALGLYFSEYKSWVEAKCKLQCCIKAHRISGAENPFFKREIKTDQHELHRIQERIKAIKRSIEELIKQCPEIKRTYQILTSMKGIGIINAVALILATNNFARFDHDARRLCSYYGVAPFGHTSGTSINGKPHVSHFADSYLKSLISEAALCAMHHCPAIIEYAERLKQKGKHPSIIMNNCKNKMLHILVAMVKHNTEYGLQTLFAA

SEQ ID NO: 69945 - protein, 414 aa, unidentified
MSVNDAAGPVRACSGGVDWAKDDYAVCVVDGDGEPVARTTLPYTISGLRRLVELLDRHGVDAVGIERPDGPIIDTLLAAGRTVLVIPPSQIKSLRRRYGSAGNKDDRFDAYVLADTVRTDRRRLTPLVLDSDATAALRKLCRARKDLVAHRIAVANQLRAHLQTALPAVVDLFRDIDSAISRTFLTRFTTQDALDWLSPKRLAAWLSSVGYSGRTPPTVLHTKISTAARGSTGEHGRALAGITHAYLATLQTISSQIEALAQQITQALTVHPDRDIFTTLPKAGTVRAARLLAEIGDARGRFPTPASLACLAGVAPSTRESGKARVVTFRWAVDKQLRDAVCDFAGDSRHKNLWAANLYTRARARGHDHPHAVRILARAWIDIIWKCWTTNTGYDPDRHRALQHLLQQDQQVVG

SEQ ID NO: 69946 - protein, 320 aa, unidentified
MQVQKIILGADVSQEWLDVCEHGDKTVSQFGNTRRDVDAFLKPYVGRPAAIAIEATNVYHELLAERARHFGLTVYVISGYQLRRYAECLNVRMRNDRVDAILLARFLDREIDALRPYEPPSPQHKRLMRLLKRRALLVKQRQQLNQSFTDVSELRSSVQAIAQRMTRLIQLIDKRLHELARELGWRRDLARLRKLPGIGPLNALALCAAYRSGDFPHRDPFIAFLGLDVRTKDSGKHKGRRKLTKKGNPEYRRLLHNAAMAATKAGRYFHDDYLALQAKGKSKTAALVVIARKLARLAFALLKNETDFDPSRQTGACQST

SEQ ID NO: 69947 - protein, 453 aa, unidentified
MKIPQSTIRLLTGRLVKILLNREVSTMKSNTQNAKIEAITEKTLVLGIDVGSKTHYARAFDYRGIEYSKKPFKFSNTEAGFATFKEWILDLKERHEKDKVVPGMEPTGHYWFNLGKFLQDNEMKPVLVNPHHVKKSKELDDNNPTKNDRKDPKVIVREGRYMIPYLPEGVYADLRTASNIRFQLQAELTRIQNRISRWFNIYFPEYKTVYGKPDAKSGMLILKAAPFPEDILTLGINGVNQIWRDAKLRAVGKARAKTLIEAAEHSVGSKEGAVSARMEIRMLLEDYESRNIRLQEVMTLIEGLVKQIPMAEKLLEIKGVGIRTVSGFLAEVGDISRFNNPKELQKLAGLALVENSSGKHKGETTISRRGRKRLRYLLFEVAMSLVAKNPEFRELHNYYTTRRLNPLKKMQSLMAIAAKLIRVFYAMLTKGVDYDPKKMVSDIKRPAVYLQAA

SEQ ID NO: 69948 - protein, 408 aa, unidentified
MEVVHLRCAGLDVHKDTVVACARVVEGKQVEQEVRTFRTTTKELLRLSDWLTEHRCTHVAMESTGVFWKPVWHVLEGSFELVLANAGAIRNLPGRKTDVNDAIWIADLLAHGLIRWSFVPPQPVQELRDLTRTRSQLVRETARHTQRIQKTLEDANLKLTGLISNVLGVTGRAILEALIAGETDLDALANLRRRGIKASHEELVEALRGSVRDHHRFLLQLHLHQIDALEQAVRDLEGRMETLLEPFRPQLELLTTIPGVSDTTARVLLAEIGFDMARFATSGHLISWAGLCPRSDESAGRRRSNRLRPGNTWLKTTLVQAAWAASRKKDSALRAQYLRLKSRRGPKKAVIAVAASMLTSAYFMLQRGVPYADLGPSHLDARDPKKTAQRLVRRLNDLGFEVELRRAA

SEQ ID NO: 69949 - protein, 349 aa, unidentified
MNNLNTIGVDLAKNVIQVSVVSVRGKELRNSALTRRKFAEFLVRQKASLVAFEACATAHYWARVAQRHGHEVRIIPARAVFPFRQGHKTDQNDALAVAEAAVRPNVKVAPLKTVDQQGLQAIQRSRELLVQNRTALSNHIRGLLMEFGVVIPQGFAALHRQLPEILEDGENELPDLYRPTLHLMYGRLCELRDDVKQLNTEIETLVKQNPSCQRLTALEGVGPIGSVLLYATLGTGEAFIKGRQFSAYLGLTPKQFSSGGKANMVGISRRVANKRLRAVLIQGARAYVHRIKEPKTAKDRWLLALIERAGHGKAAVALANKNARTAWALLTEGTEYDRTRGVELQSASA

SEQ ID NO: 69950 - protein, 354 aa, unidentified
MIIIGVDFHPAYQEIAAVNTDTGEYQEKRLAQPQEAEEFYGSLAWVGQAVRVGMEASGQAQWFERLLEGLRWELWRGDAAVIRAKRGRKQKTDREDARHILKLLLKDAFPRIWVASWENRDLRQLLWHRHRMVQARTRVMNQLQAVALNQGLHCKKRLWRASGRQQLECLQLVPWSSRRRGELLELLDRLNPTIAELSQAVEREAEKCPEAQRLMTHPGVGALTALAFVLIIGNAERFGCGKQVASYLSLVPLEKSSGNRRRLGHITKPGSSLVRFLLVEAAQVTVRSLPEWRSKYHHLVLRRGRKTAKVAMARKLAVRLYWMWRKGWDYEQWKKFGSYVGQPGNRDGVQSITE

SEQ ID NO: 69951 - protein, 429 aa, unidentified
MNSTQNKKIDQVKETTMIVGIDVGSEKHYFRAFNWRGIELTRKPVAFSNSMEGFNSFYNTIVELMQKRELEEALVGIEPTGHYWFDLGQFMGEKNIKFVMVNPHHVHKTKELDDNSPSKNDRKDPRVIAGLVRDGRYFYSYMPTGVYAELRNASNRRFVLVEEQTRAKNRLQKWIAVYFPEYKGIYTHIDAKGGLLVLKQAPTPEEIVRLGVEGIIKIWKDAKLRGNGHKKAMLILNAAMKSIGLKSGLTEARMEIQDLIEDYELQTKRLERVNDLIKELCQQVRYADKLLEIKGIGITTVAGFIAEVGDITRFDSTKELQKLAGLELVSDSSGKHNGKTKISKRGRKRLRYLLFEAAISVVGKNEEFKEIHKYYTTREKKPLKKMQSLIAVACKLIRVFHVILTKGISYDATKMLKDIRHPGEQLKAA

SEQ ID NO: 69952 - protein, 345 aa, unidentified
MNEITQPESGVRFKHVLAFEVSKATLVTKVLPSGKESTIPNTKASVRRLIEKESKANAGLGMGPLLVICEATGSYDRHILEEACDQGIACHRAHGSRMRAYARYRGVTAKTDAIDVRLIADFGRDTPDLGMWKKPTAAQEDLRALVARRSELDQGLGAERARLEHTRNKVVAASINRQIKAIAKEIANIEAELERLVAETEQLDTDTRLMRSVIGIGFISAIAIRAYLPELGTIGRGAIAALAGLAPYDDASGAHDGLRHIKGGRGEARQALYMAAVVGMTHNPHFKDLAERIKAKGRPRKVAIVAVMRKLLTILNAILRDQKPCKMTAAARQDRKGPAETPILA

SEQ ID NO: 69953 - protein, 394 aa, unidentified
MSSRTTAVPAPTPPSVAPAPSTIYLGLDVHKESVTVAVLPAGASAPTRVDKLANDPAKLRRYFDRLATEGTLRACYEASGAGYVLYRAMTEWGHACEVIAPSLIPQRAGHQRKHDQYDAAQLARLYRAGELTAVRIPSEAEERGRDVVRCRATMQRELLKSRQYLLKFLARRGFVYREGTAWSRPHLRWLTQLARDDSPLAAEDRLVFREYLALFEYKLQRRDALDTQIEQLALTPALRDAVGRLQCFRGISVHAAMVLATELVDWRRFATPRQLAAYLGLVPREDSSGDRERKGAITKAGNTHCRHALVQAAWSYRYVPKVAAHLKKRQDGQPPGVLAHAWKAQQRLHKRYTQLTYRKQPQVAVVAVARELVGFLWAVMRDVAPSDAAAPAVA

SEQ ID NO: 69954 - protein, 449 aa, unidentified
MNNGIGVSRGDRNRNARLARLRELVPVGNAIVGIDLADKKQMVVVCDHDSRVLARRTFRCKAWDLGSALDWAAERAAMKGWAGVTVSCEPTGHRWRVLGQLAADRSMPFVCVQPIQTSWARRSEDLTFDKTDEKDAVLIARLTAQLRCYVPEPVDETWGRLRHLGARREELIVANVAQIQQVRDLLECVWPAALGTARQPFRSRTWAAALTVILDRDGGDLDRTRRLGWARFERVVRREITRRGGQKPSLRIARHLFAALADPAGVIAHRRGALERAGLVLEDWDLDRKRLAETERRMVEVLDELELTSLVTSIHGISAVGAAAILAETGDPHRFATARAMVKHAGLAPREKLSGTFVGRTKLTGQGRPRLRVAAWRAVWGSLQTNTVYAARYRHLTTREHNKLKPTQAQTVLAAAILRHLHAVVTTGQAWDPEIASRGTKRSAVTLAA

SEQ ID NO: 69955 - protein, 364 aa, unidentified
MTTVHYVGMDVDKQKIVLARVGAGRDTRAIEQVIANRPSALKKYFAALVADAEVHATYEAGCFGFDLYRQLSALGVSVVVAAPGLIPRKPADRVKTDRRDAHSLALALRAGQLTGVYVPTEQDESVRDYLRMYDGLRGDLRICKQRVLQFLLRRGIRYEGGGPWTVKHKHWLSSLEFPQSRDRQTLDMYLSQIQELEARCAEVATEVESIAAQDCYRQQTKKLTAFKGIKTLIALSFVADIGDFRRFASARQFMAYLGLVPSERSSGNKRRQGGITKAGNSHLRRLLVEAAWHYRSYHPSSRDLTERRRGLDPALLSYANRAGRRLNRKYMHMVLRGKRSQVAVTAVTRELAGFLWGAMTDQVA

SEQ ID NO: 69956 - protein, 326 aa, unidentified
MQGKEVSEQETEGEAYVGIDVCESWLDVHVLPAGKAFRVANTSQGQRQLKRRLVADKVVLIAIEATGKWHRQTHRSLHASGYRVAIVNPLRARLFAQAIGLLAKTDRLDARMLALFASNLAPSAKPPLSQAIEDLKELVQARDSAVGEQTALQNQLASAATTFLRRQLKRRLGRIAIDIAALAREILLQIKADEGFARRYAILVSIPGFGPIVAATLLAQLAELGECSDKQIAMLAGLAPVADDSGKRNGQRIIRSGRPAARRVLYLSALSATRCHAAMKDFYQRLTAAGKPPKLALVAVARKLLVLANALLSNDRVWQPLPPNHA

SEQ ID NO: 69957 - protein, 409 aa, unidentified
MEVIYTRCAGLDVHKQTVVACVRIAGEGPPLQQVRTFETTTSGLLALADWLDSFGVEHVGMEATGVYWKPVWHILEDHFELVLANAAHVKNVPGRKTDVNDAMWLADLLAHGLIRASFVPPVAVQELRSLTRTRKQFVRERAAHAQRIEKVLEDASLKLSVVISDILGKGGRAVLQALIDGHSDPERLASCITTRVKASRAELLEALRGNVSAHHRFMLKLHLGHIDALDQAIATIEKEVGLGLEPFRAAAKLLSTMPGLSAVSAHVVVAEIGIDMSRFATPGHLLSWACMCPRNDESAGKRRSTRLRRGGKWLKTTLVQATWAAVRVKGGYLQAQFHRLRARRGAKKAIIAVAASMLTAAWHMLRDGTECTTWAPPTSTAPTQPKPPTASSAVSSRSAISCRPHRLEC

SEQ ID NO: 69958 - protein, 426 aa, unidentified
MKVLYERVAGIDVHKKMIEVGIRVPGDKPWTRKSEVLQYRTFYGVLQQMAAELRKRGITHVVMEASGVYTEPVYYALAERDFEQVAVINPAHAKALKGHKTGARDCLRLAELFECGLLRGSYIPAPELKEVRDLTRCRIKTVQARTSEIQRLAKALESAGIKLGSVASDITGKSATAMIEALTGGERRGAVLADLARGRMRTAGKLADLSQALAGRFTDHHALLCRLHLDRIAIFDSAVAGLEDTITRKAARWQREQDLLKTIPGFGDAVAQAWLAEIGPAPHSYFAGHDELASWVTLCPGNHMSAGKRKHGRTGDAGAYIKPMLVNAAWAAVKAPGRLQAKYHRLVRRFGGQKNPAAKKKAIIAIAHTLLKIAYQVLQSGQPYQDLGADFYTRRESPEQRQAYLLRQLQQLNPGCTITITPAEAA

SEQ ID NO: 69959 - protein, 349 aa, unidentified
MVADEVDYVLGVDTHRDKHMLAAVTAPTGAVVAGVEVSADARGYRATLRFAARYAPGRRVWAIEGSGSYGAGLARYLAERGETVLEVSRTPKGERRLRGKDDVLDAVRTARAALASRTLTLPRAGQRREALRLLLLARRSAVDVRREALGQLRAVIVTAPDELRKELRELPVGKLLDRCRRLRQTRRASADELATRLVLRSLALRIAAATSEAEQLERELLGHVRARAPALLDEAGVGPVVAAQLIVAWSHCDRLRSEACFARLAGVAPVPASSGQTQRHRLSRGGDRQLNRALHTIALHRRQHDPATRDYIARRIAEGKSKRDATRLLKRYLARHLYRLLEQQQPQMT

SEQ ID NO: 69960 - protein, 411 aa, unidentified
MEAVVECCAGLDVHQGSVVACVLLGAAGRKPRKEVRTFATATADLVALRDWLKALGVTHVGMESTGVYWKPVYAILEGHFELIVGNAHHIKAVPGRKTDVKDAEWIADLVRHGLVRASFVPPPPIRELRDLVRLRRSLSEGLTTERNRTLKLLEAANIKLASVASEVFGVSGMAMLRALVENAATPAEMADLARGKLRRKLAPLARVLEGRLTEHHRFVLALHLRRMAAIEADLAALDARIEAQMEPFRAQRALLRQIPGVDDRVAATIIAEIGIDMGVFGNAMRLASWAGVCPGNYESAGKQRKGSTRRGNVHLKTALVTAAIGASRRKGSYYKDKYHRLKARRGYLRAAIAIAHKILVAAYHMLATGAPFRDLGEAFLDQQARRRTTANLIRRLNTLGYDVMLQPRASA

SEQ ID NO: 69961 - protein, 343 aa, unidentified
MTNITTIGLDLAKSVFQVHVADRDGRPVLCRKLRRSQVLGFFAKLPPCVIGIEACASAHYWARELQELGHSVRLIPPQYVKPFVKTNKNDASDAEAICEALSRPTMRYAAVKSAEQQSVLTLHRARELLVRQRTMLINAIRGHCAEFGIVVAQGASKVTALIGIIEDHQDDRLPALVRQALGSLIRQYEMVQEQILGLERQLTSWHRATEASRRLATIPGVGVITATALVATIGDASQFRSGRQLAAWLGLVPKQHSSAGKDRLGRISKRGDGYLRKLLVHGARTVLLWSRRKKEERSRWQEALLARRPTNVVLVAMANKTARIVWALLSRREVFCAKAHVTT

SEQ ID NO: 69962 - protein, 355 aa, unidentified
MTALADKVDGVIGVDTHRDTLSAAAVTAVGGLLGQLVVAADAVGYRRLLAFARIHVPGRRCFAIEGAGSYGAGLARMLVDGGEWVVEVDRPTRPARRSGKTDALDAVRAAREVLVQERPAVPRRRGDREAPRVLLATRHGALVARTCAINQLKALIVGAPEELRAELRSRSTSGQVAYCAALRDRPARSLEHRMTARALRATAQRTRALAIEAAELHDDIGRLVQAVAPWLLELPGLGPISAARVLVSWSHAGRLRSEAAFAALAGVSPIPASSGQVTRHRLNRGGDRRLNRALHTVALVRLRDDPTTRAYAARRRAEGKSPREIRRCVKRAVARHLFKLLCRYDRPEVEIVRTC

SEQ ID NO: 69963 - protein, 405 aa, unidentified
MKIRRTIGLDIHRDRIYVTELSIWDNSYKQYEISTREKHLGAFLTTLGKDDQVALEATRGSNYYVSRLAPLVAAVSVANPAKLQFFSKNAKNDRNDSYCLALLLALGMLPTVWTPGPEIQQDRDLLNYRCSLVQDQIRIKNRVRAQMAEYGIVWDGSDIQSACAQRFILKLKNRLPWTAKEVLTQRLEQLEQIEQRLKRLEQVIETRAARWPEVALLMTIRGINVLTAFTIMAVIGRIDRFATADSLANYAGLIPRQRSSAGKSRNGGITKAGSKKLRWALTEAVQSLCKVDGPYRNLCRRLARKNRGKGLAVTACARKLLTAIWCMLTRGETFRYAESTLSQDKAQRRVRRLKAALPFVEEQKKRHDHVIQGQLALLQDLSSRRTLMPIPPQLAASFGRLTATG

SEQ ID NO: 69964 - protein, 404 aa, unidentified
MAVVMIGVDPHKASHTAVAVGGDEQPLGQVRVRASALQAMRLLEWAAAWPERAWAVEGAGGLGHLLAQQLVAAGERVPGVQPKLAARVRLLASEAVNKNDPNDARSVAVTALRSRAPREVAADDHSAVLKVWSRRYRDLGRSRTQIACRLHSALCELVPGGISKEITASHAARVLERAAPSGAVQQARWELAADLLDDLRRADERLREANRKLAAAVRATGTTLTGIFGVGPVIAATLIGEVGDVSRFAGRDSFAAYNGTAPIEVSSGKRKVHRLSRRGNRRLNHAAHMTAVTQIRYAHSQGRAYYDKKLAEGKTAKEALRALKRQVSDAFYKHLKADAARAAGSACSPGGQAGNDSVASAAGSHPECRLFGQATPGPETTLRLEPRTGRKSTSRARRKTARTT

SEQ ID NO: 69965 - protein, 347 aa, unidentified
MGAVHMQITTIGLDIAKNVFQVHGIDGNETVVVRKQLRRGKLIAFFESLAPCLVGIEACATAHHWARELTRLGHQVRLMPAKDVKAYVKRNKNDAADAAAICEAVRRPTMRFVRIKSTEQQCQLMQHRTRDLMMRQRTQLINALRAHLAELGIVAAMGDKGIAELLMIVADEDDGRLPVEARASLALLAAQLNALQMLIGSLEKQIKMQHRANPASQRLETIPGIGIIGATAIAATVADPTVFRSGRDFAAWIGLVPRQESSGGKHKLGSISKRGDRYLRRILVVGAHSVLRRAMEKPGKYPWLTQLMARRPFKVVAVALANKMARMAWALLTYGGTYRAPRLSIVP

SEQ ID NO: 69966 - protein, 376 aa, unidentified
MNEKLRFLGLDVHAETIAVAVAEPNGEVRSLGMIANREDSIRKFIRKLGSPEHLRACYEAGPTGFVLYWQLTQLGVKCDVVAPSLVPKKPGDRVKTDRRDALKLARSHRSDDLTAVWVPDEGSEALRDLVRAREAAKQDQLRAKHRLTKFLLRTGQRPPLGVKAWTEKYVEWVQQVRYTHPAQEATLLDCLNEVQHMEERVKRLEQSIVEVIQLAPAPMQEVVRGLQALRGIAHISAVTIAVALGNITSRFESARDLMGYSGAFPSEDSTGKRIRRGGITKSGNAHLRRIVVESAWSYRHRPAIGARLRRRQEGLPAEIIEIAWKAQNRLHKRYMTLMARGKEQRKTMTAIARELLGFIWAIGIKAEAACKQQMAA

SEQ ID NO: 69967 - protein, 479 aa, unidentified
MIRSVGIDLSRTGNHQVCCLDEQARPCDSFSFDSTLEGLEKFEKRVFWEGATPTIVFEPTGLAWIPMAAYLRARHPDCQLVKARLQKVAALRRYLHSRAKSDRVDGITLAKMPFIDAEQLDEAYLPPAEYHALQRLTRQRERLMKSITIRKNRIGSIINGYLPSLRKAFTDEWSDRARLFYRQLLNPFTVVRDGKDAFETLFVSAKTKGAVTESHRVYQLCQKLVEFYEKSRAAGMINEDFFDNLQDEISCELRLMETEEAEVERVSGRIEELYRHLHPSDHLRTIPGIGVRTAQVFLAVIGDPNRFRNQSAFANWTGVVPGARQSADSEGKGLRMTKAGPAMMKRALYQAGDIARRYDPQLADLYYREMVQHGKTHLQAMGAVMSHLAARILAVLQEDRPYELRDNQDRPISKMEAIGLIQQFKVPEETRQARRRRKPNEGRLSGRRTCEAAKAPQSEPLIPPPKIVYCAEELQSTAN

SEQ ID NO: 69968 - protein, 423 aa, unidentified
MMKLKYSICCGLDVHKNVIVATIVTTNKDGISEYKQKSFSTINSDIQRFHNWLIENNCYHVCMESTGKYWIPIFNYLENDIDVCLTHPKYVKAIKGKKTDKKDSKWIADLCKFDLVRCSFIPPKDFRQLRELSRYRFKLVCMKSSEKNRIQNCMTISNVGIASVLSDPFGKTATEIISYLLEHTADSMDEKAVRKLIKKGAKSKSDEIIEAIKGYTIETDQAKKLELARGHLEYLDDMITQTEVELYVRIKPYYEFVEFVSTMPGMTELSSTIVLAETGVDMDIFDDAKHLCSWCGLSPANNESAGKKKSVRIAKAGDYLKPMMVQCALAAIKSKKQPYFAIKYGRIKKRRGHKKAIIAIARMMMVCIYHMVSEKKPFTPTDYEELMDPQNHVESVVLNENNVFAYLESLGYDSSKLVKRNDN

SEQ ID NO: 69969 - protein, 417 aa, unidentified
MSYKIAGIDVHKRVLMVVVIDASTPEEKPERRRFTTMPSDLHRLSIWLREQRVEEAVMESTAQYWRTVWLELEPYLRLQLAQAFSNRAPRGRKHDFKDAERLVRRLIADELILSFVPGEEQRTWRNLTRMKTQLNRDRVRLQNQMECLLEEMRIKLSMVVSDLLGASGVRILRALAQGESDSKKLALLGDNQLKCSEEQLVDALTGRPQPMHREMLRLQLERLQLIDRQIKELNGLIAQAMKPHQEAVIRLAEVPGLGVDSAQPVIAEVGVQANTFPSAAELTSWVGTCPGKDESAEDNHSSRSAKGNKYLRRVLNQSAHAAVKKKGSHFQAVFRRLLPRLGYKSAIWAIAHRLCRLIWKILHEGVRYIERGSESDPKLREHRARTLARALRKLGYDVAITPINPSTAQKAMQTYGV

SEQ ID NO: 69970 - protein, 346 aa, unidentified
MRIIGCDYHPSWQQVCWLETTTGETGEVKLDHASGEATRFYRQLPRQALIGMESTGNCQWFVEMATTSGHDVWIGDAARIRASEVRQQKHDRRDAALILKLLLEGRFPRIWTPSGEEKDLRQLLIHRYKLVRLRATTKNELQHLAMNQGVTRKRRLWSKAGEKVLRELPLKPWASRRREDLFKVRAMLNEQIESLDAAVVEAAEKNEKAKLLMTQPGVGPITSMAFVLTMGDVNRFPRGKQVASYLGLIPREYSSGGKQRLGSISKQGNRFMRMLMVEAAQVAVRYDPGFRNEYLHRCHTKAKGVAKVAAARKLAIRLYWMLRTNTAYPEVVRVESSSRVAVVGAS

SEQ ID NO: 69971 - protein, 523 aa, unidentified
MFADTVSTVIQPAARRARGSSPPPTVNNCARDKNLRSEYDGNGRIARNGSRSYVRRLTKADLSLPARSVAAVPMSERTTACEAPGIRATHDSPPMRATQRKRMKTWQQLTHYAGFDWARDHHDIVIVDFRGQIAAEFRIPHTLAGWQDFRQKVSAYPALGVVIETNQGAAIDQLLQIDLTVYPIHPVAAQRYRQRKAPTGNKTDRLDAWAMADALRLDGSQWKALQPLDPLTQQLRLLCRDEMSLIEQRTALINQLQQALCEYYPAAREAFDDWTRPSSWKFVIEFPTPHILLKRKRSRWEKFLHKHKLWRPDTAEKRLEIFAQAQAFCGSPAVTAAKSLLAVSLARLLCLLQDQLEEYRSQIEKLFAQHPDSGLFGSLPGAARYLAPRLLGEITADPECFEDPQALQCLAGTGPVSYQSGQVHKVKVRHQCRKVLRYVVHLWADCARRAAPWAQTYYQKKRQDGMSHACALRCLGQRLLKILWKMIQTRTPYDADLHAKNQLAHGSWVLQLLPEKPAPSCGK

SEQ ID NO: 69972 - protein, 350 aa, unidentified
MVTIGIDPHKQTHSAAAVDRVGLELSRRTERAVREGFGKLLSWARRLDRERVWVLEDCRHVSGPFERFLIDHGETVVRLAPKLMAGARQSVRERGKSDPIDALAVARGALREGIETLPAARLAGPELEIRLLSVHRERLVGARTRLINELRWQLHDLWPEWQITGRSLIGPVLQTQITRRLGRAKPTVRVRIARDLIRRVRELTVTINQLQQELGALVAQIAPQLLAETGIGVLIAAKLIGEIAGAHRFTSDAQLARLAGCAPIPVSSGRTDRHRLDRGGNRQLNHAIHMIALAKLSHDPQTAIYVAKQRARGKTSREAIRCLKRHLARRIYHLLRDPNPVPTTIHCATP

SEQ ID NO: 69973 - protein, 418 aa, unidentified
MKEELFARLSRRYLALDIHKHYSIVAGVDFEGQVIVEPVRIEHADLESWLAKHIQSTDHVVIESTTNAWHIYDLLEPLAEKVLVANPIKVKQIATARVKTDIRDTLILARMLAANMIPAIWVPPAHVRNLRYLLSQRRHLMGMHTQTVNRMHSVAHRHHLKHARGKRFNQKNTGWQQDEHLSDSEKFQLELDMTTKQHLAEQAAKITRKLARMSHQKPWADSMLYLMQLPGFGVITGMTVLAAIGDITRFETSGHLVSYSGLVPGLEQSGVKVRNKRITKEGRKDLRWAMVEVAQRAVKSDPLWKHRFNALQRRMHRNQAIVAIARQLLELVWHVLHRMQPYRHFSHERIAYKYLTWSWQLSDADRDGLTRQQFTRYYLMRLGIGHDLQRIALNPKHPRRLASEAELLALRPELLQIE

SEQ ID NO: 69974 - protein, 316 aa, unidentified
MVKWNPLKNSTNNANGFQSLLAEFQSHKITAKNSIVCMEATGVYGESLAYYLVGKNFKLVIENPYKIKRAFDISPKKTDKIDSKRIAEYASRFTDKLTFWGPRSQILEEIRIFLSQREQITKQKTSLNNALKALQKKFHKSEKALKLYEDMINNCNTQIKYIDKEIESLINSEPEYKQIIENLKTVPGVGNVLAVHMMVVTEGFEAHLNAKEIGSYLGIVPLPYESGSSIRRRTSSSGVGPSIVRKLLYLSSMSSRRYDENMKKYFFRKVAEGKSKRLVLNNIANKLIKLLIALIISKKPYIKNYFSINPMILKKT

SEQ ID NO: 69975 - protein, 426 aa, unidentified
MRVLYDRVAAIDVHKDMVKVAIRVPGAKRGTRKTDVLEFRTFYGVLQAMARELRGRGVTHVVMEASGVYTDPVYYALRELDFTEVMVINPAHAKALKGHKTDAKDAIRLLDLYECGLLSGSYIPDPDLREVRDLARYRMKTVQARTSEIQRLQKALETAGIKLSSVVSDVTGGSATAMIEALISGERRGAVMAGLAQTRLRTAGKMADLSMALTGRFTDHHALMCRLHRDRIKVFDDAVKDLDAKIAPLVARYAREAELLNTLPGFGDVIVAGWLGAIGPAPHRHFATASRLASWATLCPGNYMSAKKSKGGRTGDGGAYIKPLLIQAAWAAVRVPGRLQARFGRLVRKFGGPRNKGAQKRAITAIAHTLLKIAYGVLKTGTPYADLGADFYTRRESPDARQDYLMRQLQKLNPGCVITITPTEAA

SEQ ID NO: 69976 - protein, 402 aa, unidentified
MNAVGIDISKGKSMVAIMRPYGEIVSAPFEVKHTSSAINSLVALINSVEGESRIVMEHTGRYYEALAHQLSQANLFVSAINPKLIKDFDNDSLRKVKSDKADAVKIARYALDKWQNLKQDSVMDELRNQLKTMNRQFGFYMKHRTAMKNNLIGILDQTYPGVNTYFDSPARSDGRQKWVDFASTYWHVDCVRKMSRNAFIGHYQNWCKRKKYNFSQLKAEEIYGKAKELVPVLPKDDITKIIIKQAVDQLNSASTTVESLRTLMNEIAAKLPEYSIVMAMKGVGTSLGPQLMAEIGDVSRFTHKGAITAFAGVDPGVNESGTYVQKSVSTSKRGSSSLRKTLFQVMDVLIKTHPQDDPVYQFLDKKRAQGKPYYVYMTAGANKFLRIYYGRVKEYFASLPES

SEQ ID NO: 69977 - protein, 347 aa, unidentified
MSEYIGIDLHKAKSFVTRVDRHGRVLEQVELRHAAGELQRYVEKIPGDTRIVVEATGNWMWLYELIEDRHPDLVLAHPLKTKAIASARIKTDKIDATTLAHLLRADLVPAAYIPPRAIRDTREILRYRASLVRLRTQVKNKIAAILSKNGIVTPTKTAFGVKSRQFLATVAMRPCYRLALDGYLRQLAHLTDEITQAAQTIEAQAQADPEAQLLCTMPGIGAYSALLILSEIGNVHRFPDSRHLCSYAGLVPSVHASGGRTRLGRLTKQGSTWLRWILIELSMHAIKGAPQFRQLYHRVARKHGRNAGRTAVARAMLKTIYAMLTHQEAFRPIEQGSTGQRLRAMAG

SEQ ID NO: 69978 - protein, 347 aa, unidentified
MQVTTIGLDIAKNVFQVHAIDTAEKVVVRKQLRRSQVVEFFKALPACLVGMEACATAHYWARELRKLGHQVRLMPAKDVKAYVKRNKNDAADAEAICEAVRRPTMRFVQVKSAEQQGRLMLHRTRDLLMRQRTQLINALRAHLAELGIVAAQGNAGLKELLKIIAGERDARLPVDAHASLVVLAAGLHAVQTMIGSIDKRIMIEHRSNEASKRLRSIPGIGIVGASAIVATVADPMAFRSGRDFAAWIGLVPRQDSTGGKQKLGPISKQGDRYVRRILVVGAHAVLRYAKQNPEKYPWLTQLLARRPFKVVAVALANKMARVAWALLAKGGTYYRARALVTVVTAAA

SEQ ID NO: 69979 - protein, 350 aa, unidentified
MQKIYIGVDFHARQQTICYLTTDSGELLFHQLKHQDKAAVRAFYTQFTGHVIVGLEASGYSPWFERLLEELGCEVWLGHATEIRRRARGRHKNDRRDAELILDLMLHNEFPRLYLPPLQSREVLRMLRYRQKLIKVRTIGKNSLQALALQSGLAKGPHLFTKAGLQELQSAAMTPAMQWQRKQWLQLLESLNERLLETMLWLKQQSQADQRISRLRTHPGVGLLTALCLVHSLEPVSRFANSRKVTAYAGLDPLERSSAERQRFLQISKGGSRVLRFLLVEAAHTALRKDAELKRFYRRLAERHGRPKAKVAVSRKLLIRTYIMLRDEIDYAEFQRRAVAARPARDATGL

SEQ ID NO: 69980 - protein, 351 aa, unidentified
MNFIGIDLHKKTISACVMNQDRKVLKRQTLPCREPKQIVAFFRQWGEFQAVVEATASYEWLWQLLEPLAQRLVLAHPKKLRVIAESKNKSDKLDAQVLADFLALNMIPEAYRPTLRQRQHRALVRQRCFVKKNLTRVRNKIRRLVSDYNADRRDLFTQEGLRYLREAEKKFSKADRFVLHQLMRQWKYHQQQLQVVNRRLKTFAGKAPPKEKEIRAVLGSMPSVGPTTIEIVLSEIGDIERFRSNKRVVAYAGLAPGHRESAGHKKDLGITKEGSGLLRWALVQTAWRTLRCSVRWRWVYENLKKRRGSKRAIVAVARRLLTVMAALWRTGQRYRLEGGDPAGMPALVPAR

SEQ ID NO: 69981 - protein, 378 aa, unidentified
MATEPLRAAQDRTAPGSRVEHEPNRSLVCVVYLRSTRTVARAGLTEPVFTRKGSTVHTNSNATSWAGIDVSQSEIDVAVVRQSEVVAKRRYQRSKEALESMAEWLQPFGVAGVIVEATGGLERPVGVALEGAGIAVIRVNAKRVRDFARAHGVLAKTDALDAKMLALFGERMQPEPRPWLDAERQQLADFIVRQQQLTQLRTAERNRLHRTTAPALRKSIERALRFFEKEMERVEAELNEWWDEHGSTWREPEARLRTMPGVGPKTARVLLAQLPELGRLNRRQIASLAGLAPFACESGQWRGQRHIRGGRAVVRVALYLASWTAIRKAGMFRTIYEDLVRRGKPRQLALIAVARRMLLVLNEMMRAGRDWQHSPVSA

SEQ ID NO: 69982 - protein, 355 aa, unidentified
MNQEKYIGMDVHQATISVAVMDSSGKVIMECILETKAATILEFIAGLRGTLSVTFEEGTSAAWLHDLLKPHVSHLVVCDPRRNALLKDGSKSDRIDARKLAELLHANKLHAVYHGEHGVRTLKELGRSYLTITEDLTRVMSRIKALYRGWAIPCTGTTVYAVRHRAEWLAKIPQPGVRLRAERLYQQLDLLQPVRQGARCDLMVESHKHHAVKLLRQIPSIGPIRAALLVALLQTPHRFRTKRQLWAYSGFAVETHDSGEYRFVRGKLVRNRERITVRGLNHNHNHDLKNLFKGAALSASTRPGPLCDFYVALVEKGMRPTMARLTLARKMAAITLTIWKKGVDFDAKQLNRQAA

SEQ ID NO: 69983 - protein, 367 aa, unidentified
MKKGSTAAAKQRRNFSQQRLTIGLDLGDRNSWYCVVDEAGQIQLEQPVRTTAKALHEVFGAMPRSRIALEIGTHSPWISRLLSELGHEVIVANARKVRLIGESRKKDDRLDAQTLARLARIDPQLLYPVKHRSVQAQADLMMIRARAGLVRVRTGLVNTACGLSKSYGERLRGCNVRNMNQEKAEGLSPEVQAALEPLLAAIESVSQRIAEYNQRIENLAQQSYPQVALLKQVKGVGTLIALTFLLTLEDPHRFRKSRDVGGYLGLQPGRRKSGQSEPQLHISKEGDPYLRTLLVQGAQHILGPFGVDCDLRRWGLKLAERGGRNGKKRAIVATARKLAVLLHHLWVSGEVYEPLHNSCRVAVPAAA

SEQ ID NO: 69984 - protein, 423 aa, unidentified
MTKLIPTAAGAVLVAIDMSKNRQEILIERPEGGRRRRMTVMATRQDYDGFAEQLAAIGRPIIVGFEATGNYHRTLAHRLLTAGFELRLISSVALARTREALHNGWDKNDPKDAQVILHMLRIGATQRYVDPLVAGINDLQELSKTHETISRMKTQTWHRVLTHYLPLYFPEIARFAGNSRSDWFLALIERFPTPATITALDREAFSAAAWPLIGRKVFKARLINDIYETASASTALPVPEDSAAITMFRMVIAQGRSLIHQRDEIERLAHARLADDVDYQLLRNIPGIGPINALTILAEAGDLRRFNHHRQFLKFCGLDLATCQSGTFRGRTKLSKYGNARLRRTFWMAAQVAARQRDNSFRDKLGRYVAGHADDADRRRKAMTALTAKMARVAHAVVKTGTEYRPFLERSDARWKDPSLQVP

SEQ ID NO: 69985 - protein, 416 aa, unidentified
MNAVGIDVSSRKSTVAVLRPLGEVVCLPFDVTHDIAGLASLAEKLKALDGETRVVMEHTGRYYEAVAKALHEAGLFVCAVNPLLIKEYGANSLRRVKTDKADAVKIARYALDNWADLRDFTPMDAIRYDLKTLNRQFQLASKQRTASANNLIALLEQSFPGIRKCFDSPVRSDGTQKWVDFAHSFWHVDCVRKQPFPAFCERYRKWCKRHAYLFKLSNAEEVYALAKRAVVLTPKSKVVKVLVQEAANQLISISRSVEVYRAEMDRLAAMLPEYPVVMAMYGVGKSYGPQLMAEIGDVRRFERKQALVAFAGIDPMPNQSGDKNVRSNKSSKRGSPYLRKTLFNVIRTYLQCAPQDEPVFQFLNRKQAEGKPFYVYMLAAANKFLRRYYAKLRDYFASLDTLQPVAPIPTILKAAL

SEQ ID NO: 69986 - protein, 420 aa, unidentified
MKSATNTPNNALPEFPPNDLTAGVDWARDDHALSVVNDRGREVYRCSVPHTDAGLRALLKALGRHGVGEVAIERPDGPVVDTLLAAGLTVVVISPNQVKNLRGRYGSAGNKDDRFDAFVLADTLRTDRARLRPLVPDTEATIALRRACRARKDLIKHRVAAANQLRAHLRNAFPGAVGLFKDLDSAISLEFLTRFDTQDRADRLTGKRLGGWLTKQGYSGKVDPAVLHQRLLDAPRGATGEHATNQAHITTALVALLRTLLEQIKTLSTHIDHQLDAHADAHIFTSLPRAGRVRAARLLAEIGDCRARFPTPESLTCLAGAAPSTRQSGKLRAVGFRWSCDKQLRDAVTDFAADSRHANPWAADLYNRARARGHDHAHTVRILARAWLHIIWHCWQQNIAYDPTKHRALQRLLATQTAAA

SEQ ID NO: 69987 - protein, 368 aa, unidentified
MCLANKEANVFVAGLDAHTRYVVVSVVNRTGERLVKPTRVRVEDRPRLLALLAPYRPLEVVMETSSSWPWISEVLSGAGITFVLAHARRLRAIAEATYKSDDIDAELLARMRLAGCIPAVYVTPATQREWATLIRHRTALVRQRTMVVNRLHAQLHTRGLHLERGRLLTRAGWQWLRTEAWPHLSAEQRAVVRSHHRLLRVLTPVIRAADRHIAQVAATIPEAQLLMTIPGIGAHRALVVCAEVLPVARFRTANQLTSYAGLVPRTKQSGQGAVWHGPVPAGANRWLRGALVRAVVSHVQHAPTSWLTAHYTHHKARIGWPVARVATARKLARAIHAMLRTQTGWTNDPPRGELARAHAAPPGDGLFI

SEQ ID NO: 69988 - protein, 429 aa, unidentified
MTKTHHKTEQPVLVAIDIAKHRNEVLIAVPGRQRRRRLTVRNVREDVDRLVETLAAFEMPVQVGFEPTGDYHRPLAWRLHQAGFELRLISSLSLARTREAMHNSWDKNDPKDAQVMLHMMQTGLTQIWYDPLVHGVNDIQELSKTHAVISQTKTEFWHRLRTHYLPLYFPEIERFMGNSRSDWFLAFLEQFPTPGSITCMPEQAFIEAAWDVVGRKVAKARLLADMYATAADSIGLPVDPTMPAISMFRLVLNQGRELIAKRDQIEQQASDLLGTHPDFVRLRTIPGIGPINALTILAEAGDLRRFGHHRQFLKYCGFNLSTQQSGVFRGQTKLSKFGNARLRRTFWMAGQVAIRQRENGFRDKYERYIARDHSDPHLKRKALTAVAAKIARTAHSVIKTETGYRPFFEGRGPKRKDPALQVPLRHATS

SEQ ID NO: 69989 - protein, 403 aa, unidentified
MNMNAVGIDVSKGKSMVAILRSYGEIISKPFEVKHTVSGIRSLIEQIQSIDGESRIVMEHTGRYYEPLVRELSKAALFVSAINPKLIKDFGDNSLRKVKSDKADAVKIARYTLDSWTELRQYSLMDEIRNQLKTMNRQFDFYMKHKTAMKNNLISILDQTYPGANTYFDSPAREDGSQKWVDFSATYWHVDCVRKLSLNAFIDHYQKWCKRRKYNFSRSKAVEIYEASKELVSILPKDDLTKLIIKQAVEQLNTASQTVEQLRTMMNEAASKLPEYPVVMAMKGVGKSLGPQLMAEIGDVSRFTHKGAITAFAGVDPGVNESGSYEQKSVPASKRGSSTLRKTLFQVMDVLIKTKPQDDPVYLFMDKKRAQGKPYYVYMTAGANKFLRIYYGRVKEYLSSLPE

SEQ ID NO: 69990 - protein, 391 aa, unidentified
MGTTYKVVQMGLDSHRNFSKVTARDEQGRIAWRQRLEHADRAELREQLATWPRGVPVVLEATFGWGWLADELTLAKLDPHLASSKKVAGWRKSRGIAKCNRTDADLLSELWSEREPWWKVWLAPPEVRDRREWLRYRMGLVQLQTLTKNRIHATLHRHGIVQSFGDLFGRKGQAFLAQLADEQDATLRDSARRTLAGHLELLKQLRKQIAEVTRELRQQVSAHQQAERWRSLPGVSWVLAYTIFAEVGDVGRFKDGRHLSSYALLAPRADESGDESDSTPTGRHVGHAGRRTLKWAFIEAAHGAVRRSAHFKEVFDRRTDCGKKDRNRGYIAVAHALARVGFACCRNATNYSEQRPLRPGSKAAEANEPLKMRTSRPGSGQPEDPMAVAAR

SEQ ID NO: 69991 - protein, 355 aa, unidentified
MEKKEITFEQVIERGCGIDVHKKVLVVTIRGTGIKEETRTFNSFTESIEQLRDWLKKMGITHIAMESTGVYWKPIFNILEADFEIILVNARHIKNVPGRKTDKKDSQMIAKLLLSGLLKASFIPSKPIRELRDLTRYRRKIVGQIASEKNRIQKILEDANIKLSSVVSDMSGATATKIINAMIDGETSINELLKFRHGKMQSSIEELASSLKGNLTEHHKFMLTTIKESIIEKELIIEKLDKRIDEQLQASELKLDAELLQTIPGVGKDGSASIIAEIGNDMSQFPNEQHLSSWAGMSPGNNESAGKKKSSRITHGDKYLKILLVQCAWAATRTKNTYLRKKYDSLVDEEAKKEL

SEQ ID NO: 69992 - protein, 360 aa, unidentified
MPYSTSIGLDVHARSISAAAYIFETGELVEATFGYDAEAVAKWAEGLPEPKAALYESGPTGFDLKRKLDALGLPCHVGAVSKMRKAPGDRVKTDRRDAAYLARLLMVGDYVECVPPTPRMEAARDLSRIREDAREDLMDARHQLSKMLLRHGYVWPAGRASWTKAHRDWLKGIHLAEPTAQYVLEEYMERIRECEARKARLDEAIADRAKEEDVAGIVQRLCLLRGISTLTAFGIAAEIGDFARFRTAQGFMSYVGLVPSEYSSGSSVARGPITKTGNSHVRRLLVEAAWQHSRPLSPASDSMQPPEGVPPEAAGIAAKANMRLHSRALHLRRRGKKACVANIAVARELAGFVWALALCG

SEQ ID NO: 69993 - protein, 350 aa, unidentified
MNLKHPNNQLILGVDTHLDLHVAVLINTIGQVICTAEFETNSTGYDKLLRWCQSFGHLTKAGVEGTGTYGAGLSRFLSSQKVTVCEVNRPNRARRRLRGKSDPTDAENAARAVLADEAKAIPKMQNGSVEAMRFLLIARRSAVKARTQAINQIRALLVTAPDDVRLKYLKSSQLACIEGCNNITVLGGSTLLEMLSISLNLLAKRWLNLTEELKIIDKNLKEITRTTAPNLMNQYGVGPYVAATLLVTAGDNPERLKKESSFAALCGVSPIEASSGKTVRHRLNRGGSRVANNAIWTIALIRMRSDPRTQQYVARRTTEGMSLKEIQRCLKRYIIRGLFPIILNDLAVTT

SEQ ID NO: 69994 - protein, 342 aa, unidentified
MKYYAGLDVSLQFTSMCVVDDDGHLIRETKVLSEPKALRSALEGYAARLHRIGLEAGPLSQHLYSALVESGLPAICVEVRHMARALRAQTANKTDRNDARGIAQMMRVGLFKPVHVKSDRSQRLKVLLTIRRTLKCKVLDIEADLRGVLRNFGLKLGQVSVREFEQRVRELASFDPLIGAVVGPALIARRALREQYARLHAMLLEVVRQDPICRRLMTMPGVGPVVALTYRATIDAPARFTKARTVGAHIGLTPKKYQSGEVDYSGRISKMGDAALRAALYEAAQVLMTRSARWSSLRSWGMRVARKRGRKKAVVAVARKMSTILHRMWTDGTDFDWGVKPA

SEQ ID NO: 69995 - protein, 338 aa, unidentified
MRLYAGIDLHSSRSYLGIINNEDREVYKREHRNDLGEILGVLEPYKKDIVGVVVESTFNWYWLVDGLMDEGYRAHLANPSAIKQYEGLKFVDDKRSALWLARMLRLGILPEGYIYPKEERPIRDLLRKRRHLVRHQVSHILSVENLVARNQGVKISGNRVKQMKEEDAWEIFNEEHLSLAVESSIAVMRFLGSRIRKIEKVVKEKIRVRKPFKALLTIPGVGDILGLTVMLEVGDIVRFPKVGDFSSYCRCVRSTRESSGKQKGQGNRKNGNRYLAWAFVEAANLSIRHCRYAKAYYQRKSAKTNSIVAIKALSHKLARAAYYIMRDQVPYDPLKLFA

SEQ ID NO: 69996 - protein, 410 aa, unidentified
MVERFVGIDVGLREHRIAILDRDGEAVGPSFTIAASTDGVATLVRTLAVRDATPTQTLIGLEASGHLWENLEAALGGAGYRVIVLNPLQTRRYRDVVRRKAKTDDIDAHVIAGLRRSGVAQASYVPDEQIQSLREFARLRARLMADRQDYQRQLVAQLDVVLPEHRAVLGDLLTARARGILAQFPTAQHLAKANPRAIRRAAEDAGARGFSLDDATGVRDRARRSLYSGKAAAARAHVVRTLVSQLERLTSAIDEVDHAATTLLPPSEPGTGPSDAELLQTIPGIGPQTAATLLGELGAFTRFTDARALVAYVGFYPVIHESGDRAAPPRLSRVGSRLARRSLYLAAVNAVRRSAEWRTIYLRKKAQGKTAKQALVVVAVKLLHALYAMLKHRQPYNPSRLLVAPATIGS

SEQ ID NO: 69997 - protein, 309 aa, unidentified
MEIVVGIDVSKERPDVAILPQEEVFAVGNDHAGIDELAERLKGIGVDAIALEATGGFEMLAVAGLSAAGLTVLVVNPAQVRAYAHAIGRRAKTDPIDAAVIAAFVLATKPEIRPLRDAETQALSELVARRRQIVQMVVAEENRLRMALAKQAQKSIKRLLKALRRELESLDADLDSHIRKSPVWRVREALLTSVPGVGATTARTLLAELPELGSLDRRQIASLAGLAPWTRQSGKWKGKSFIGGGRGKVRAVLFMAALVASRYNPDLKAFRDRLVAAGKPKIVATVATMRKLLTILNAIIRDGRPWQNA

SEQ ID NO: 69998 - protein, 363 aa, unidentified
MFTERTSIGLDVHARSVVAAAIDGVTGQVSQTRLTPSYEHIQEWIKQLPGPVAVADEAGRTGFGLYRALTGAGIRCEVLAPSKLQKPAGDRVKTDARDALHLARLLRMDEVTSVSIPSVNREACRDLVRAREDCRGDLMRARHRLSKLLLRHGIVYHGGAAWTDAHDRWLRARAVPQLLMPATRMAFDSDYEHVLMLQARRQCLDSAIEDIAADSEFTAVVRRLSCLRGVGTLTAFALAVEIGDWDRFTGNTIGSFVGLVPSESSSGSTRAQGPITKTGNTHVRRLLVEAAWHHRPKYQVRAVMRSRWELAPAAARARGHEGNRRLHNRWLGFLARRKRSTVANVAIARELAGWCWSLAVMDD

SEQ ID NO: 69999 - protein, 409 aa, unidentified
MHVAGLQIVYERCAGCDVHKKSVVVHVVIPSHSETRTFGTTTRELLSLLDWLAGSQITHVAMESTGVYWKPLYNLLETTGMTVYVVNAAHLKAVPGRKTDVQDAEWICDLMRHGLLKASLIPSRPQRELRELVRYRISLVNERAAEANRIQKVLEGGNVKLGSVISDILGKSGRAMLAALAEGERSPEDIAGLAHPRLKATREELTEALHGRLTSHQHLMLRLQLDHVRYLDQQIEAVEAEVATRLVPFASQKTQLDTIPGVSERVAEVIVAEVGTDMTRFPSAAHLTSWGGMCPGSNESGGKRRTARTRKGSPTLRRTLTEAGQAAGKTKDTYLGAVYHRIKARRGGKKAAIAVGRRILEIAYYVLRDGVAYEELGANYYDERKKDAVVRNAVKRLERLGYKVTVEAA

SEQ ID NO: 70000 - protein, 255 aa, unidentified
MIEEGRLRTTPEAFKRRFASEQPMRIAIEAGTHSPWASRVLEECGHEVLVANARKLRLIYANKRKTDEIDAENLARLARVDPKLLYPLKHRGEESQAHMAIVRSREALVGTRTQLVNHVRGAVKSFGGRLPKGPAVSFHNKAVEHIPRALWPALGPILETIASLTQRIRDYERQLETISKERYPETDLLRQVEGVGVLTALTFVLTLEDPYRFERSRSVGAYLGLVPARDQSGDRDPQKKRISKEGEEMLSVGFW

SEQ ID NO: 70001 - protein, 315 aa, unidentified
MERHPATSSFVGIDVSKDRLDVHVRPSGQSFAALRDSKGLEQLVGQLRQLPPALIVLEATGGFEVTVAAALASAGLPLAVVNPRQIRDFARAMGRLAKTDALDAQVIALFAERIRPEPRPLADADSQSLAELVARRRQVVEMIGMEVNRLHQARSSRVQRMLRTTLKTLTAQLAQLDHDIDEIIKRSSLWRAADNLLTSVPGVGDVTAHTLIADLPELGQLDRRRVAALVGVAPVNRDSGQLRGKRANAGGRIGVRNALYMATLSAVRWNPVISKHYKGLVDRGRPKKVALVACMRRLLGILNAIMRTNTPWQCA

SEQ ID NO: 70002 - protein, 366 aa, unidentified
MVAYRAPARVPSEREEVPVSIVGGLDIHRQQLTYDYLDVDTGQLWRGQIAPADREHLAAWLARFAPADGPVELAMEACTGWRYVAEELARAGVVAHLAEPAETAVLRGPKRRAKTDKADARLLRELLGARRLPECWIPPAHVLECRALLGLFHGLRTEHTAWVQRVHAVCFHQGTPALGVGALSTAEGLARLEELCQRQLSPAGRLQVQTALAMLAALDAQLDVVRRQLLVCSRRLVGARVLHQRLYGVGPVTALALCSWLAGGGRFRSARKAVRLVGLDVTVYASAGKRSPGRLSRQGPPVLRWLVYEAGMTHARKLAPDHDYYATVADRIDGKRAALSQARKLVRRAVHILDELGDQALVWTQP

SEQ ID NO: 70003 - protein, 369 aa, unidentified
MKKIVKYIGLDVHKNSIAIAIAEDGQKRDVIFYGEINNDMDQLHKFLRKQISQGVEPRCVYEAGPCGYNIYRSLKDKGIDCVVIAPSLIPKKSGDRIKTDRRDAESLAKLHRAEELTAVYVPSMEDEALRDLVRAREDSVNTLKRAKQQLGAFLLRHHICYSGKSKWSKAYFNWLADISMPHPAQQITLQEYIDMVQDAKKRVERISKQINQLAEQTQLIELNKSLQSLRGVSQIVSAVVLSELGDLTRFESPGKLMAYLGLVPTQHNSGDKKRPGKITKTGNGHVRRALIEAAQAYRLPARKSRAIAKRNEGLPQEICKIAWQAQVRLCGRYKRMIFRGKNSNLVKTAIARELAGFMWAIAHAIPNTV

SEQ ID NO: 70004 - protein, 352 aa, unidentified
MKVSTVGIDLAKNVFQLHGVNELGKTVFKKQLRRDQMAEFFINLPACLIGMEACGGAHYWARKLQSFDHTVKLMAPQFVKPYVKTNKNDAADAEAICEAVARPNMRFVPIKDVEQQSVLALHTVRQGFVKARTAQANQIRGLLSEFGLIVPQGIWHIAKRVPELIEDASNELPGAFRLLIQRLLDHLKELDTQVDELELQIVKWHRQSSASSKLAQVPGIGPITASALVASLGDAKNFDNGRQVAAWLGLVPRQHSSGGKQNLLGISKRGDTYLRTLLIHGARSVIYSGKDKTDSTCRWINAIVSRRNNNVAAVALANKNARIVWALLTHDREFRPGYTREPVGVYSGRQVK

SEQ ID NO: 70005 - protein, 348 aa, unidentified
MYSFYLGIDLHRTKTYAVLIDKTGEVIDERQILNDEAIQYLEEYVPKDTFAVLEATRNWPFMYDLLAKHVVRVELASPKELKAISAAAVKTDRIDANVLAQLARLNYLPTAYAAPKEIRDLRLYVRHREFLIRQRTQCKNRIHAVLVRYNLISPTADLFGVAGREWLTQLIDGGRLRPAAIRVIAEHLALIDKINEHIKAIEQSMELAPGQKAAVKLLTSIPGVGKTIATIIVAEIGGVERFHSPKALCNWAGLTPRVRNSGTVIRHGHISKEGSTFLRGAMTRAAMVASRSSKRWYLVHEDLLMRCGKKGAKVAVARRLLTVVYHMLTRNEPYQENYGQKQTDHRGA

SEQ ID NO: 70006 - protein, 317 aa, unidentified
MEVSLIFVGIDVSKAQLDVAIRPSGEKESFANDTVGIKALVKRLAKIGPTLIVLEATGGYERQVTRALVSADLPAVVVNPRQVRDFAKATGQLAKTDSIDAGVLAHFAEVIRPQLRPLPDVVTLELRALTSRRRQLLEMIAAENNRLAMTSKAVAKRIAAHLRWLEQELKRANQELDRAIEQSPIWKENEELLRSAKGIGPVTSRTLLAELPELGTLDRKQISALVGVAPFNRDSGSLKGRRSIWGGRAPVRCALYMATLVATRRNPVIRDFYNRLIAKGKLFKVALVACMHKLLTILNSMIKHKTSWSETFSRQTT

SEQ ID NO: 70007 - protein, 415 aa, unidentified
MKERIFVGIDVALREHRVALIDEHGEALGRSFSIEASRKGFDKLLAALRKRGAEPELSLVGLEATGHLWENLEAHLTSAGYRVVVLNPLQTRRYRDVLRKKAKTDDIDAYVIAGLLRSGEAEAGYVPDEQVQSLRELCRLRARLMRERQDYLRQLCAQLDVALPEHRALVGTLTTVRAQAILSAFPTAVHLAKATPKAIARAVAKAGSRGFSVDEAKRMRAVAKDSTFSGKAAEARGQVIRTLVAQMQRLSASVDDLDAAMQQTLSDVEPPDRDGPDDAELLRSLPGVGPQTAATLLGELGRLDRFRNARALVAYVGFHPVIAQSGERSATPRLSPAGSNVARQALYMAAVNAMRRCPEMRTLYLRKRSQGKAPKQALISVAVKLLHTAYALIKQRAHFDPSRLLVAPQPVSLSA

SEQ ID NO: 70008 - protein, 316 aa, unidentified
MTNTKTRKTVVNVGVDVGKASLDIFIYEKDLYWREANTEQGIKRILKRLSHYRVERLVMEATGRYEFDLAQAAHSKGLPVCIAKPLSVRRYAGAIEQLAKTDKIDAAVIAEYAAVVQPRVTPQKSKNLIVIKDLIVRRRQLVNLRTQEMNRLQIMGKALATSCKRIIRTLDTEIGRIEKRLSDQVKQQSEWCEKQAVLKSTPGVGDTLVYTLLADLPELGELNNREISALVGVAPINRDSGKLRGKRRIRGGRASIRTVLYMATLSATQCNPVIKSYYKKLVAQGKHKKVAITACMRKFITILNTMVKNKTEWNYA

SEQ ID NO: 70009 - protein, 313 aa, unidentified
MTPPVFVGIDVAKATLDVAVRPSGECWQHANEPAALLALLARLQPLAPTLVVLEATGGFERGVVAALAAAGVPVVVANPRQVRDFARATGQLAKTDAIDAQALALFAERVRPVPRPLPDEAACALDAVLTRRRQLLEMLTAERNRLGLARTPVARQIRRHIRWLERELADVDADLGRLIEQSPVWRAQDDLLQSVPGVGPVVSRTLLGELPELGRLSRKQIAALVGVAPLARDSGTRHGPRCVWGGRAPVRAVLYMGALVATRWNPVIRLFYQRLRAAGKAKKVALVACMRKLLTILNAMARNGTSWHHEAAT

SEQ ID NO: 70010 - protein, 313 aa, unidentified
MPPIPVFVGIDVAKATLDVASLPSGLQAHIPYTDGELQALTARLAAVGPILIVCEATGGLEGPLVGALAAAGLPVAVVNPRQVRDFAKATGTLAKTDALDAAVLARFAAAIQPTPRPLPDAATQVLAALVARRRQLVEMLTMERNRLGSAPRVLRAELQAHIRWLERRITDLDTDLTHAIRTSPVWRVQEEILRSAPGVGPVLATTLLAHLPELGTVPGKQLAALVGVAPLNHDSGAWRGRRAIWGGRAQVRAVLYMGTLAAVRHNPVLREFYARLRAAGKLPKVALVACMHKFLTILNAMLKSQQRWNPTHV

SEQ ID NO: 70011 - protein, 427 aa, unidentified
METGLFFTIGIDPHKDYHYAVLLSPFGELLKTYEFDDLAIHAFYKDAINDINNFGEKLQGITKRKFGIENAYGYGIKPTKYLFGKKEVVLNVPTSLTEEARLDEIHLDKDDFLDACRVARCVLFHNPKIRLIQVTPKIETSEDLRLLVNERELLVRERTAQKNSLHALYYHMFDNYKEIVTYKNIFCMKAIKQMKDHLKDATDLRSTIIVKKLDKIVSLEDEIDSYEKQMGEVKSEDIEILKTIPKCSTAVAAKIMSAIKDIARFENPDKLAKYCGMGGVTSSSAEGRSKRKKKVGKKDKKGEQKSKQKKKHKKMRKDKRGQVKLKHTLYMLSVSHLGKGGVPKAVEYIKKKREEGFTGLEACQRWAKKLLFGIYFMLKRKEPFKYATGANGKIPNNVIAFPQQKLHATTVIEKKIKQVPIVACNIL

SEQ ID NO: 70012 - protein, 338 aa, unidentified
MAIVFVGIDLAKNVFAVHGIDEHGKPALVRPAVPRARLHELVASLPPCTVAMGACSGGHHWARLFAACGHSVRLIAPKFVAPYRMSGARGKNDAADAAAICEAVQRPSMRFVPVKSIDPQARLMVHRARQGFVEARTATIDRVRGLLSEFGIVLPLKATTVRRAAGACLGDLPGWANTVVGDLLSELHRLDERIEQYDRHIAAIAREDGRARQLMRLPGVGPTTATAILALIGNGHEFKCGRQFAAWLGLTPGQYSSGGKTRLGRITKAGDAYLRTMLILGARAVLVAAKNKTDAVSRWAMALEQRRGYCKAVVAIAAKNARMCWPMLARGEQFKLPA

SEQ ID NO: 70013 - protein, 405 aa, unidentified
MNQVYALGVDWSDEKHEVCVLDEVGVEVLGRSFKESADGFAELGCILDEWSMNDIDLVACIEKPDGRVIDLLLDHNVKLFPVNPKGVKGARNIHRSSGGRSDAFDAFVLADFIRTHWQTLTPILPNSPQIAELKILTRSYAQQMRHRNRLILQLRQTLKSFFRRPLEVFSDLSRPSFRGFLKQVQTPQQLEKLSRYKFFTYAKKYRLGNKEELWEKLKQPQLMVPEHISRPQARAAQTLLRELDLAHKEVEAYRKAIEAFFDNLPVAEIAKTLPGGKSGIMIPSLWAELGDGQHRWESFRHLQASSGAVPLTDQSGNYKATKYRFACNKRLRYLSTTLADYSIIESIWARTYYDQQKKRGKSHRQASRALASKWLKIIYVMWRDQVPYDENLHLANLYRQNENLR

SEQ ID NO: 70014 - protein, 386 aa, unidentified
MNLKYSVGLDVSSKKINACISVIDEKQKVSVKSSCVISNTINGFKSLQDWISKHKKEDLPVVTCMEATGIYHENCAYYLFEKGFDVSIILPNKSKKYLEAIGLKSKNDSIDAKGLAQMGAEQCLETWQPMGTFFYQLRLLTRQHQNVTELKTVLKNQLDALGFAMHQSEPVINQLKQTIILFETQIKELDKAIKNHIKSDKKVEKKVNNILLMKGLGVLTIATILSETNGFELFTNYKQVVSYAGYDVVEAQSGTRVGKTKISKRGNSRIRRAMHMPSLVVIQCQVKPFKDLWDRTYEKHGIKMKSYVAVQKKLLVMIYHLWNKNEPYDTNYQIEIQEGEQKLFSRESVFEENKIKKNSPNLKVGTTQGKHPVNNRKKLPLGITNI

SEQ ID NO: 70015 - protein, 343 aa, unidentified
MKEVSTIGLDIAKSVLQVHGVDEAGAVVIAKRLRRSQVIPFFRKLAPCLIGVEACASSHHWARELGALGHEVRIMPAGYVKPYVKRGKNDAADAAAICEAVTRPTMRFVAVKSREQQSLLMLHRSRSLLIRQRTMLVNAIRAHLAELGMVAPVGRRGLKALLAVISDPEDERLPSLARSCLESLAAALMTVEQEIATSERQILVWHRSNEASRRLASIPGIGPIIATALIASVADPSIFRSGREMAAWIGLVPRQNSTGGKERLGRISKQGDKYLRWLLVAGAMAVIRHGRKTDFAARPWLADLVARKPAKVAAVAVANRIARTAWVLMARGGTYRPPAITAA

SEQ ID NO: 70016 - protein, 362 aa, unidentified
MKIVGCDLHARQQTIAMVDTESGEFTEKTLHHEGNAVQEFYASLNGPVVVGIEATGSMQWFLELLEKLGIESRVGDPAKIRAAETRKQKHDRRDARLILDLLLRDRFPAIWMPSTEQRDLRTLLRDRHQWVKMRSRLQHTLQAMALNHALRKGNGLWSHAGQTALQALPLPPYTSQRRAALLSLYVELQKRIQRLDQELEGQMQQRAQARRLMTHPGVGPVTALATEVFLGDPDRFATGNQVASYIGMIPSEHSSGKRQRLGKMSKQGNSLLRYLWTEAAMHAAQKDPELKRFYRRKLIQKGMGKARIASARKLGIRLWIMMRDQIDYQEFCRRGKLRQREGAHAGMPDFNSGPASGSDRVE

SEQ ID NO: 70017 - protein, 321 aa, unidentified
MTYVGIDVSKTTFVVAYSSDKASKTKTFRNTVKGVHEFIQTISSAGHHCVLEATGNYSSLLVYLLSQAGITVSLENPLKIRNFARVMLSVTKTDETDALLIALYGEKMQPAPYRLRSDAILTLKQKRTVIRQLKKQLIATRNLKGSMEALPFFDSKCKKTIEKTIAFLERQVKDLEEELANLAQGEYRKQMGLLTSVKGIGVTLAAALIMATGGFAYFDNAKQLTRYLGLSPTYQQSGTSVNVKGHINRNGDSSLRSLLYVAAMASLRCNAECKECFNRLRSNGKPGKVAVVAVANKLVRQVFAVVTQEKPYIDGFKSAKP

SEQ ID NO: 70018 - protein, 423 aa, unidentified
MSYISEAAVTFTRGGIAMQIVYGCCCGIDVHKRMIVACLNKSGEQELRQFGTMTSDLRALCDWLIESRCEMIAMESTASYWKPLYNLFELTGLNAMVVNAAHMKALPGRKTDVKDAEWISDLLRHGLLKASFIPDREQRELREISRYRKSMVEERARELNRLQKMLEGANIKLDSVVKNINGKSSRRLLDQIIAGNNLSEDEISALLHGSMRKKLDQIIPAIDGITTALQRRLLAQVVDHIDDMTRRISDLDTLILDYMKQYEQAIAAIDALPGIARRSAETILSEIGINMSRFPSEAHICSWAGLCPGNHESAGKRYSGRTTKGNQTLKTTLIECAKAARNVPNSFFSAQYQRIAARRGKNRATVAVAHSMLIAIYHVLRDGVPFVDLGSDYYTKFNREKKIAAYLKKLNDLGWQQSAFAPT

SEQ ID NO: 70019 - protein, 395 aa, unidentified
MFIVGIDIAKRSHEAIIIAEDGQVVRKAFSFRNNCTGYNLLLEQVRRLTLVKSQIVFAMESTAHYWLALYARLLKDGYAVMVLNPIQSHSLRELYIRKAKTDARDSLIIADLVRFGRCKASNVPQDKILALRELCRSRAYLVDMAADLKRKLIALLDRIFPEYESLFESVFSKASIAVLSKYSTPQKVKNAHLGKLTDILMESSNGHFGEWKAHQLKEVACSSFGIDDSGGVYSTLLGMFLEQILSLTAQADSLEKQISVFFQEFNNPLTSIPGVGTVLAATILSEIGDITRFSSADKLLAYAGLDPSVKQSGEFKSNQNRMSKRGSPYLRRAIWLASTVAVHRDPMFQTYYEKKISEGLHYMNVIGHVSRKMTAVIFAVLRDGQPYQPILQSAG

SEQ ID NO: 70020 - protein, 316 aa, unidentified
MGERSVFVGIDVAKAQLDLAQRPEGPRLSAANTESGIATVVAHLRRVKPTLIVLEATGGLERPLVRALVDAALPVVVVNPRHVRDFAKATGQLAKTDALDAQVLARFAQAVRPALRPVPDAPTQELAALIARRRQVVEMLTAERNRLGGAPKRVQRRIQVHLNWLTTELARAGDDLDQAIRTSPIWREQEDLLQSVPGVGPVVTRTLLAELPELGTLNRKQIAALVGVAPLNRDSGTLRGRRMVWGGRAQVRAVLYMGAIVAARFNPVLRMFYQRLRAAGKAKKVALTACMRKLLIILNAMLKHRTPWRPEMAQCA

SEQ ID NO: 70021 - protein, 342 aa, unidentified
MQAVTIGLDIAKSLFQVHAVDSLGNVVIRRQLKRRQVLPFFKKLPSCLVGIEACATSHHWSRELRSLGHAVRLMPPAYVKPYVKRQKNDATDAEAICEAVTRPHMRFVETKSTGQQSVLMLHRVRHLFMKQQTSLINAIRAHLAEFGIVAPVGRNGVEDLLYVIADPDDDRLPEVARGCLAALGAQLQRTKAQLLEFDRMIIAWHRSNEACRRLDDIPGVGPTLATALVASVPDPKIFRSARDFAAWIGLVPKQSSSGGKERLGGVTKQGDRYLRSLLTIGALAVIRRAKINGAKHRPWLTALLARRPTKVAAVALANKIARMAWAMMAKGERYKEPAALAA

SEQ ID NO: 70022 - protein, 448 aa, unidentified
MPEQTWYAALGLAACVGLDWAMDKHAVTVKDLDSGQRERCQLGNTPEAVELWAGGLAARFGGRPVAVALEQSRGAVISMLSKYAHLLLFPVHPKALADYRKALHPSGAKDDPTDGDLLEEFLELHGRGLRMWQPDTEATRSLQWLTEERRKFVGDQTRFAQRLRGQLQRYYPQVLQWFDQIGTPLVLAFLRRWPTLEEVKKAKPATLRRFFQQHNCRQQSKIEERIQAIASAVAATLDAAVILSGRLAVATLVDQLEAIHTGIAAYDRQIAEITLAHPDNELMDSFPGAGPAMRPRLIAALGTRRDRYLNAAEIQRCSGIAPLIERSGRQYWVHWRWACSKFLRQTFHEWASHSLAFSAWAREYYQAQRDQNKGHHAAVRSLAFKWIRILFRCWKDRTPYDEAKYLQALIARKPKQSRDLQSKLDRGKQPEFIWTSRNGFNKLVGFNY

SEQ ID NO: 70023 - protein, 462 aa, unidentified
MKGNAVKSKRVRRPRSPLALVNPDAAGIDCGLAEHYVAVPQDRDPEHVRRFRTFTEDLHRLADWLVSCGIKTVAMEATGVFWIPVYEILEARGLQVLLVNARHVKNVPGRKSDVADCEWLQQLHSVGLLRGSFRPAADIAALRSYLRHRESLVQAASTALQRMQKALVQMNLQLQVVITDISGTTGLRIIRDIIAGQTDPRQLAKHRNARCNSSEAEIAAALTGNYRPEHVFVLQQNLEIFDALQRQIESCDKRVEAHLQQLTAQAPHASKPIPAARPRRRSRGEPSFDLRIPLHQLTGADLSQIDGIGPYNAVRLISEIGTDMSRWATERHFTSWLTLAPNNKISGGRLLSSRTQPSTNRAAAILRVAAMSLSRTDTALGAFYRRLAGRIGKAKAITATARKLATLVYRCLKGDIVYEDPGAAAYDRHHRESVLRRLRHRAASLGFTLVNQQTGEILEGVS

SEQ ID NO: 70024 - protein, 425 aa, unidentified
MKKTDYLSTLFVGIDIGSRTNVVSAIDFNQDFFIRMKPVPNAKEGAETLESLLVDVLSAHHEFNHVIIGLESTGFYGVHIANYLSASDLLAPFGTEVYCLNPKEVAKYKESFNALDKNDGIDSFVIADFARVGRISIKPWRGAQYLALQRLTRHRLHIAECIAREKTYVLNNIFLKFSEFAMLKKEDHPFSNKYGATAEAILEQYVTNDDIIEASIEELVELIESKSRGRITDPEETAKILKAAANGSYRLDRVVAEPITLSISSSFNCIRAFEKELKAIEKAIEHTVQGLNPVEYQILKSIPGIGHVYAAGILAEIGTIKAFTGNGALAKYCGIVWKENQSGNFRAEDTKMSKAGNRFLRYYVIEATGSVINNCPEYKDFYDKKFAETTTHQHKRALALTSRKFLRMLFGLLDKSQLYSLERSR

SEQ ID NO: 70025 - protein, 309 aa, unidentified
MDVVVGIDVSKDRLDVHVLSSGESFAVANDDEGLDGLAARLLSLKADIVALEATGGYEKLAAAALSGAGLAVIVINPAQVRAYANALGKRAKTDPIDAAVIAAFVAATRPQIRPLRDEQSQALAALLSRRRQIIAMITAEEQRMDPALAKEAQKSIRRLLAALRRELDSLDADLDDHIRKSPLWRVREALLTSVPGVGRVTARTLLAEMPELGSLDRRQVAALAGLAPWTRQSGKWKGKSLIGGGRATVRTVLFMATLVACRHNPVLKAFRDRLVASGKSKIVATVAAMRKLLTILNAMIRDQKSWQTD

SEQ ID NO: 70026 - protein, 421 aa, unidentified
MKNAVASKLRQIPQGYLIIGVDPHKKTHAAVLITQDFTTHAKFKFSNTMEGLEMMLQRTKAEMIKTGCRGVIFAIETGGHYWRNLAYVLDERGIPFHFINQFTLKRRREGKDLNRRKNDYRDSEVAAQLLCTGEFTESKLPQGVYAELRAAHNAYRRLVKERTRITNLLKGLLDSLFPEFTQVFKDPCALTAMSVLSTCAIPKVISNMSEDEFVTTVKAGHHGRLMRKKLLVLHHIARTSIGIEASAGSVSMEISFLVEKFNLIKQHIHTIEGTLVRLVDETEEGKYLLSIRGLNYIAVAGLLAEIGSYKQYRNAKQLIKMAGSNPTESESAGKRGSHTPMSKHGRPVLRYCAWTSVIPMLRFNSDFRAWAKNMRERPAHANPLNGREVVGACLNRLLRLSFALAKKQSYYQMPELARIAV

SEQ ID NO: 70027 - protein, 339 aa, unidentified
MPKFTVGLDIAKSVFQVHVIDRSGQAVIQRKLRRNGVLKFFAGLEPSVVGIEACHSSHYWGRELIKLGHTVRLLPTQYVKPFVVGGKNDANDAAAICMAVSRRDIHTVPVKSAEQQSLQSLHRMREKAIQERTAKSNQIRSMFSEEGHIFPAGLPSLRKGIINLMDNGEAGLTPILKRLGQMYLEQMAVLKAWLDELDAMIDDNFKNNEICQRLATIPGIGPVIATAMVGLVGDPAQFKNGRRFAAWLGLTPRQHSSGGKTRLSGITKRGDGYMRKLLVQGARAVIYNVHRKTDARAEWIKALLARRPANIVAIALANKIARIAWAVFMRGEKFISATS

SEQ ID NO: 70028 - protein, 293 aa, unidentified
MKFTPVGIDIAKSVFQVQYVDEQTGEVINRPLRRSVFVQHFVNRAPCLIGMEACSGAQHWARELIKLGHQVRLLPARFVKAFNIGNKNDAADARAIWLAVQQPGKAVALKTEAQQAVLARLSERLPTMLIESLREQYARLSELDAQIAQIERRLRQWLREDAAAQAVAQMPGVGLLTATAAVASMGDAKVFRSGRQFAAWAGLVPRQTGSGGKVQLHGISKRGDTYLRTLLIHGARSVLQHAKDPGPWVEQLGQRRPPNVVTVALANKMARTIWAVLAHGRAYQPGHVSVRPA

SEQ ID NO: 70029 - protein, 367 aa, unidentified
MMGWMAPLRHRRAKLVFWRITRNREPSMSEITTIGLDLAKHVFQVHGIDAQGATVLRKRLRRGQVLAFFSRLPRCVVGLEACATAHYWARELGALGHEVRLMPAQYVKAYIKRNKHDAADAEAICEAVQRPTMRFVPVKTAEQQATALLHRGRERLVRQRTMLVNALRAHLAEFGMVAAQGLRNVGELIAIVRDDGDTRLPDVARQVLQVLANQIEQIEAAVTALERQLLAWHKTNPVSQRLASIPGIGPIIATAIATTVADPNVFRSGREFAAWLGLVPRQNSTGGKTRLGGITKRGNRYLRRLLINGASANLLRSKATKADPWVIGIRRRRPPLVVAVALANKTARIAWAVMLREKEYQPRPVAA

SEQ ID NO: 70030 - protein, 421 aa, unidentified
MKNTAARKLKQVPEGYLIIGVDPHKKKHTAVAITQDFTVRDRFKFDNTKEGLEFLLRRVRMEMVKSGCRGIMFAIETGGHYWRNVAYFLDERGILFRFINQYTLKRRREGKDLNRRKNDYRDSEVAAQLLCTGEFVESVIPQGVYAELRTAHNAYRRLVKERTRITNLLKGLLDSLFPEFVQVFKDPCGLTALSVLSTCCVPRAIATMTEDEFIATIEARHRGRLMRKKLAGLHCVARSSIGIAAGAQSVSSEISFLVEKLKLIEGHIGVMERRLIRLVDATDEGKYLLSIRGLNYIAVAGLLAELGCFKAYRSAKQMIKMAGSNPTESESGGKRGNHTPMSKQGRPVLRYCAWTSVIPMLRFNPDFRAWAKQRRERPVHANPLGGREVVGAALNRLLRLSFALVKNQTFYRSPQLVQVTG

SEQ ID NO: 70031 - protein, 309 aa, unidentified
MKYYIGIDVSKLKLDICILKSLDSKDFKQIKNDKKDIKDFFISFDDLNDLTVVFETTSTYSYNLAKVLTDLKIKYSELNPLKVSHFLKYISNKKNDKIDSYNLAYYSLKFENEIVFDSFNDKSKLLRSYQTLIELLNKINVQIQNYDDSQIHIYDKNIKSVIDGFLDISNDNKRMLEDKAFDLVCDLLPQTKTILANEKGIGKNLAIYLFPVFYFNQDKNYKQIISYLGLSPKVFESGSSVKKKSIIDKKGNSNIRKALFLSSLSCVRYNPKFKRYYEHLLTQNKNKKVALVAVCNKIIRHLKNQYFRY

SEQ ID NO: 70032 - protein, 401 aa, unidentified
MKSLSGGIDIGSEHHHVIIMGDEEKILYDQKVSHKFSEFHRAVKEFREIEEREEGPISFAIEGKNGYGAPFDRILIDNGFTLYNVDNLKLKRFRDVFGVEWRNDQRDAKMLAKMLRLRDYLDVKDEKAFIRVEKVSEVNERLKILSRHQQTLIDEKVRVQNRLRKRLLEVCPDILEVGDADSKKMLRLLAKYPDFSSYKRLTMRALLKIEMIGEKQASLMFESLRNIKYIEELADTYRTIILSYSRRILELKEEIEILDKKLEEIGERSFDVKRLKTIPGVGTKLSSRLIGEIGDINRFKTESQIAVYCGVACVDNISGKQKMTKVVYKANKIGKAAMIGIAGCTIRYVAESRAYYAKKRAEGKKHNHALRCLARQLIKVIFKMLKEERDYILKEEMKKAA

SEQ ID NO: 70033 - protein, 309 aa, unidentified
MALSVGIDVAKHTLEWNVAGDPKIQHTRNEPRPIAQLVRQLIELAPARIVVESTGGYGRTLVAKLAEAGLPVVVVNPRRVRSFGQALGILAKTDAIDARLLALFAEKAEPELRPIRQGRARLLADLVARRRQLVAMMVAEKNRRETATPGVRRSIETMLRTLAQQVRAIDVRIDQALGEDVENAELATLLQSVTSVGPGVARTLIVDLPELGHLGRREIASLVGIAPFARDSGKLRGARYIRGGRASVRTVLYLAAMNAARFNPVLRDLYQRLRQAGKPPKLAFVAVARKLLTILNAIARDRVAWQSNA

SEQ ID NO: 70034 - protein, 375 aa, unidentified
MPAEEMSVAYLGIDVGKSSHSACALDVGGRVAFRAELANRPDDIDRLLERAGSGALVVVDQKRNIGALVLARAHAHGNPCAYLPGYAEKQARGMFPGIAKTDAIDAEVIARTALGVPRALRPAPEEPEGTASLRILSSQREFASSARTRAKNRLRATLLEADPALEGAVDPSSRWQVSMLAEFGGAAGCSAGAPVAGARRLWEALLASSRSGRRLPAGEDVAVRILAREIASLDADIEELDSLVADSLAGDEVYECLLTVPGIGPKTAAALVTSIDISAFRGHDELASYCGVAPRDRRSGSSIRSTSPQHGGNRQLKNLLIFSCNSLIGTDNRFGRYYGECRARGMRHSKALKAVARKRLKVIYAIMRDAVPYAA

SEQ ID NO: 70035 - protein, 386 aa, unidentified
MSQPKDDLSRSLVALDQCGTLIAVVELSLATWLVGGMIPGIERDPLKKLVPDEEGLLKLLHRWCDEAVRAGHRITRIVVGFEAGRDGFWLARWLRARGIEAYVIHPTSIAVSREQRRAKSDRLDIGLLKRSFLGWLRGEKKHCTMAAIPTLEEEDAKRPNREREQLVGKCTGIVNRMKAALVRLGIRGFNPKLRKAPERLATLRTPEGCPLPPNTLAELKREMAHLRFIHDQIKQIEEARLEQLKQAPQQGSNAKVLQLQRINGLGTETADMLTHEVLSRDLRDQRAVARYAGLTGSPDESGGRRREKGLAKASNARVRRGIIQLAWRFLVHQKNSVLTQWYQQSVAAGKKRKTMVVALARKLLIALWRFVTTGDVPQGLVLRPAS

SEQ ID NO: 70036 - protein, 411 aa, unidentified
MRLFVGDDWAEDHHDVEVMDGAGTVLARRRLPEGVAGMSRLHELIGGFLPGDGDDAEVVIGIETDRGPWVTALIAAGYLVFPVNPLQASRFRDRHGVSGAKSDAGDAHMLADLVRTDSHQLRPAAGDSPEAAGIKALARTHKTMIWERTRQVQRLRHQLREYFPAALEAFGDLDAADTLELLGRAPDPARAARLTRAQVSAALKRARRRNIPDKATAILAALRGEQLGQPDALTAACAATVLSLIAVITTLNEQVKVLQGQVEEHFGRHPDAEIYLSQPGIGTILGARVLAEFGDDPHRYRDGKARRNYAATSPITRASGKKKIVAARFIHNDRLVDALNSQAFAALSTSPGARAFYDELRARDIEHNDALRRLANRLVGILHGCLKTRTLYDETTAWAHREHLPRSSAAA

SEQ ID NO: 70037 - protein, 378 aa, unidentified
MLSENIIHIAIELSVSSWLVAVRLPGTEKSRLHRITGGDTTALLALIAELRARASAKLGQAVEVACCFEAGRDGFWLHRLLTAQGIAAYVLEPTSILVNRRARRAKTDRLDAEGMLRVLAAWLAGDGQICSMLRVPTPEEEDAKRPHREREHLVQTKVRLENRIKALLFTQGIRSRPSLRSWERDMAELRTGDGRALPPLLRTELNRLRRQLVLILELIRELEAEQAAAIEAAADDAMVQKIVGLQRIRGIGPNIAAVLVREVLYRSFANRRQLASYVGITPMPHQSGGMDRTRNISRAGNPRARTTLIQLAWLWLRYQPGSPLALWFRERVGALQGRTRRIAIVGMARKLLIALWRYVETGVIPDSVEITTPEAATA

SEQ ID NO: 70038 - protein, 425 aa, unidentified
MNYKQNEKINQVKESTLVVGIDIGSTTQYARAFDWRGIELGKVFTFSNSREGFESFKAWMRHLQDKYRKSDAIVGIEPTGHYWFDLGAYLEDEGILLVMVNPYAVKQTKELDDNSQSKNDRKDPKVIAKLVTEGRYSAPYTPDGVYADLRIMVTNRKRLIREMTQIKNRFTRWFAIYFPEYTDVFGDYEAQSSMLLLKKVCTPEAIVELGAEKINQIWRDAKLRAVGMKRATTLCETAKRSIGLKKGSSAARYEMKLLLEDYEYKKAQLDAVMEEIEKLCRKIPESGQMLAIKGIGVITVAGFLAEVGDVRRFESPRQIQKLAGLSLRENSSGKHKGQTTISKRGRSNLRAVLFNAAIPLIATNPEFKSLHEYYTTRANNPLKKKQSVIAISCKLIRVFYAILANGVTYDAQKMLSDIHRQPQAA

SEQ ID NO: 70039 - protein, 337 aa, unidentified
MKVKVIKQNVGIDVSKDKIDVSFSHLTAEFRTVVVSTRKFSNTAKGFKQLQDWVNGKKEADMSVHFTMEATGVYYEGLAYFLYEQESYLVHVVLPNKAHKYAQSLGFKSKTDKIDACILAQMGLERELWQWQPVSSSLLGLRQLTRERDALVRNKTNVSNQLHAYSHQGKPNKAVITRSQKLISFLDRQIKQIDKEIKSFVNKDEKLKTKMEYLLSIPGVGMVTATIIVAETNGFAAMTSIKQLTSYAGLDVKISESGKWIGKSKISKRGNSHIRKAVYMPALSKINKDKQTKQFYERLKEKKGVGMIAVVAVGRKLLGLMYTLWKREEMYKDASER

SEQ ID NO: 70040 - protein, 350 aa, unidentified
MIIVGCDYHPGFQQIAFVDTDTGELQERRQEHSEVAEKFYRDLAAQGMKVRVGMEASGHARWFERLLAELNFELWIGDAAEIRAKRVRKQKTDRQDAQHILGLLLENRFPRIWVPNAENRDLRQLLWHRHRMVQARTRIMNQLQAVALNEGLRGKKKLWRQHGREQLESFRLAPWASRRRQDLLKLLDGLDPMIVELSQAIEQEVEKSPEAQRLRTHPGVGPLTAMAFVLIIGKPDRFQCGKQIAAYLGLVPLEDSSGSRRRLCHITKQGSSMLRFLLVEAAQVTARSIPEWRSKYFHLALRRGRKIAKVAMARRLAVALYWMWRKGWNYEQSRKFGSHAGQLGTGDGVQ

SEQ ID NO: 70041 - protein, 341 aa, unidentified
MEYFAGLDVSVKDTSVCIVDDAGKIVREVKVASEPDDLLQVLRNPAYCFKRIGLEAGPLSQWLFSALADLPVICVETRHMRAVLKAQINKTDRNDARGIAQMMRVGLYRPVHVKTLRSQKLRMLLTHRKLLQAKAIAVENDLRATLRNFGLKVGVVGAVKFEARVKELVDNFPDLVTLVESLLVVRRVLREQISILHRRVLGAVRNDEVCRRLMTVPGVGPVVALTYRTTVDVPARFRKSKSVGAAFGLTPARDQSGESDRPGAISRCGDEMMRTTLYEAAQVMLLRSAKWSWLKAWAMKIARHRGMKKAIVALARRLAVIMHRIWIDGTEFRWTREAVAA

SEQ ID NO: 70042 - protein, 366 aa, unidentified
MEFGVRVVDATWRREDQAMLHLGIDLHQYQITIVILNDAGEVVRRATVRTKPPAIDEFLASVNAMARSAGGYRAVIESCGFEHWLVEKLKIHGCSLTVVVQPLKRARHKTDKRDAASLAELLWVNRERLQDGQRVHGIRQVLIPSETDRQDRMLTSHQIEISRQQTRVINQIKSILRRFNLMHDCPTKGFKTKKARAWLRTLDLPEVDKIVLDLAIARWELIEQQLARIELEVERHAEQNAAAQLLKTIPGVGNLTALALASRIGPIERFPRPASLANMFGLTPSINDSGETTGRLGNITKNGHPNVRYLLGQVVAHLARKDRAIREVRRKIRKRRGSKTALVAIMRRIACRIWHMLQTGEAYRVT

SEQ ID NO: 70043 - protein, 347 aa, unidentified
MRIVSHSCAVYGVDLGKTTFHIAGADQHGRPTLRIKLRRDALLQFFATASPALVGMEACPGSHWLARKLIAFGHDVKLIPAQFVKPYLKSNKNDTLDAEAIAEAVTRPTMRFVPVKRHEQLDMQALHRVRAQFVHQRTALVSQFRCFLLEYGIAIHTGIGMFRRDATRILADDSNDLTPTMRQLLTDLWSDFLRIDERVTALSGQIEVSAKHDDVVQRLTTIPGIGPLGASALCAAIGNGKQFRSGRDLAAWIGLVPRQQTTGGKPTLLGISKRGNTYLRRLLVLGAQSCLMHLDRSRDRLGRWLDTLESRMHHNKVVIALANKLARVAWVVLTRPGALYEKMDPRF

SEQ ID NO: 70044 - protein, 450 aa, unidentified
MAKPKRRTHRKLDRSLPEMRPNAGGIDVGATEIFVAVPADRDRDSVRSFPTFTQDLYELADWLKQCRVDTVAMESTGVYWIPLFQILEARGIEVHLVNAQHVHHVPGRKSDVLDCQWLQYLHSVGLLKASFRPEQAVCEIRSLMRHRESLVEMSCVHVQHMHKSLDQMNLQIHHVISDITGVTGLAIVDAIVAGNTDPKELAKMRDHRIKASVETVTKSLVGDYRAEHIFTLKQSLTAYRHYQQLIADCDQEVQRRIQAFDSESAGPTAPADASPSTAPDPVRFDLRRHLERIFGIDLTLIPGFECLRIQTLLSELGADLSKFETPDAFCSWLNLCPKDGSSAGRRIRAPKVKTKNRATQAFRFAAQSLHNNQSYLGVYYRSQRARYGAPKAIKNTAHKLARIFYHLVTTRQPYDETVFAKLEMRSQQRRFRKLQSQATQMGYSLVEIHA

SEQ ID NO: 70045 - protein, 369 aa, unidentified
MEKDTIYVALDDSKRKLGVAMLRPGAAESEEREIPKDPPHIQRLFRRLEREGPVQACYEAGVSGYDLYRQITACGVTCQVIAPALTPRRPGQRIKTDRRDARKLVRLFRAGELTAIHVPDEAEEAARDLVRCREAVRRDVVRWRHRLLKLLDRHGRLWVTEKNWTQRHWSWIRAQHFELSALQRAFEATVFALEQALARPAALDQEIAALAETAPYRDPVGWLRCFRGIGTLSAMVLLAEIVDFHRFRRPRALMAYLGLVPSEYSSGETQRRGGLTKAGNPHARRVLIEAAWHYRHRPTVGRALASRSQAQPAEVVGQAWRAQQRLHRRYRHLIGHGKRPPVAVAAIARELVGFLWAAMTRRETRPQVA

SEQ ID NO: 70046 - protein, 403 aa, unidentified
MTDRYCLFPFYLLEFEQNVRNYVRHDIQDIQPGEKTKGGSSLYIKLKMMKKILKEVLGVDVAQNELVVTAGRMLNDLSIDLYAHKVFKNNESGFLALLDWTKKLSRDEFKVRFVMEATGVYHQKFAFYLYDRGREVTIVLPNKISNYIRTLEDKTITDKSCSAAIAQFGLERNLDQWHRPKKVFHMLQQLTRERDQIVSERVMVKNQIHAEKSEVEPNERSLQRFNERIKLLNKQEKEIKADLKMLVNGDANLSGDIKRICSITGIGELTAIIVLAETNGFELIRNKKQLTGYAGLNVKEKQSGTSVKGKPRISKKGNRHLRKAMYLPALVAVRHDKNFAETYLRIVSKHGIKMKALVAVQRKLLEMIYVIYNSKQEYQKEYSVLKESSVLNLKDQHATLASS

SEQ ID NO: 70047 - protein, 359 aa, unidentified
MEQIKELDFSGQRIWVGIDVHLKRWRVSIMVGDLYQKGFSQQADVQQLINYLHKHYPKGDYVCCYEAGFSGFWAYEELVKAGIACKVAHASDIPTTDKEKRQKTDPRDSRKIVRELSKGGIEGIYIPHREALQARSLVRARYKIAKDSQRAKNRIKSHLYFYGYHRGIPAELGYWSKRYINYLSELASTNRDQGLVLLIEELNQLRQLQVRALKQLRQLSRCEPYQELVVLLKSVPGVGLLTAMVVLTELMDINRFKKLDHLCSYAGLIPQTSSSGESQRVGSMTKRGNTQLKKALIESAWVAIQRDPALALAYQKAKNRYASNDSQAKNKTIVKIARKLLNRIRFVWKNRQEYETGKP

SEQ ID NO: 70048 - protein, 427 aa, unidentified
MSEERSVELRVSVDVGYRRHSVAMGLSSGEVLEEFEIDHRPEGFQEFFSRIEKHQKAKSCTVAVAMEGYNGHARPLDSLVRQRGYRLYNLNNLKFARFKEIFPGAAKSDRIDARRGLELFQLSDHLPLAKEVLQEVRGTPKENEVLKRLTRRRRRLVNERVRVVNNLQADLQAVCPGLLEITSEASNQWFLNFLVSADSLSQLARLRKSSLLKIPAVGRKYAGLIQDWQKRAHFSEEAGWVSEMIQEDAKRCLELEEKIKTLETKIEQVAKDSKIAKILLSIPGFGPVCTSELAGEIGTVERFNKEGSLALYLGMSTLDNSSGNYQGTKAPKHVNTRAKAAMMIALDRHRKYVPESQRYYEKKRIQGKGHNQAIRALGRHLCRIIYKMLKEQREYQLRSKEGDTQARVRSRSCVKTKIRRSKISRTG

SEQ ID NO: 70049 - protein, 355 aa, unidentified
MSSEKYIGMDVHQATISVAVMDSTGKVIMESILETKSSTILEFLGGLRGTLSVTFEEGTWARWLYDLIKPHVAHVLACNPRKNAALQQGNRSDKIDARELANRLRLNDLKPVYHGENGIRMLREVARSYLTIVKDLSRVMNRLKALYRSWAIPCAGRDVYYTRHRSQWLEKIREAGPRRRAEHLYQQLDLLQHLRQQARRELLAEGRRHSITAKLRKIPALGPIRSALAVALIQTPHRFRSKRQLWKYCGLALETRITGEYVYVHGERRRSKKQLSIRGLNKDHNHDLKGLFKGAATQASVKPGPFQEFYQRSLAKGIKPTMVRLTLARKIAAITLTLWKKGEDFDIHKLNSQAA

SEQ ID NO: 70050 - protein, 394 aa, unidentified
MFLVGIDIGKHKHSFCIINKETGESIVKPKFFDNNKVGFEELLSSFKGLPKKDILIGMEDTGHYHFALLKFLLDKKYQVALINPVTTDLTRKLSGSHTKTDKLDTLTICDVLTSNQRTKPYRISKVDRFDLYEQKQLTREHHNLKEQSNVLKNRLQKSIDIVFPEFNSLFKSMYGVVYMNILKEFGSADALAHSDIRTIRKCFDFKGRGKRIELTAKELKNAAINSIGFPSIAEVVQIKHLVDQIELVEEQIEELDKKIEEFSIANNSPILSIPGISHFSGTSILAELGDIHNYSKPSQIIKFAGVAPLTYESSQFMAKHTAITKKGSTYLRKTLYQIILPVINNNKVFKDYYNLKLSQGKGYRCAQGHCVRKLLRVIYQLLSTNAQFDPTLLV

SEQ ID NO: 70051 - protein, 338 aa, unidentified
MDRISVLGVDLAKNIFQVHGVSEKGQVLVRRKLSRAGFKTFMTSLPPCLVGMEATGGSRHWQRTFRKQGHDARLLAPQFVKPFVKSDKNDANDAEAICEAVQRPNMRFVGEKTLEQQEVQMIHRVRSGLVAHRTEICNEMRAVLSDFEVVAPQGLVRLREKTLEVLSAQNEQISAVGKDVLQGLLRQWAFCNEELAAMNKQLESVFDKFEVCRRLVTIPGVGPITATAIIGSVPDINGFKSGRHLSAWLGLVPKQNSSGGKQRLLGITKRGDKYLRMLLVHGGRAVVRCAGNKTDKRSLWVVAKAKARGKNKAAVAVANKNARVIWKILKTDQVYRVQ

SEQ ID NO: 70052 - protein, 430 aa, unidentified
MLGVGIDWAEQFHLVALGSPDDGVSEVVRIEHTAPAMAALITRLGRLEPDPAEVRVVIETSHGMLVEALVDAGYAVLPVNPDLIARRRGPARKKDDTEDARIACLLALDRFTTLRPLIPHGPVAAELRAIARDDERASRDERRLLNRLRADLIATFPAALTIAGEDLGAPTFLRLLQSWPTAAELRAATREEITALARAGRHGWPDHFADRIEHALNSTDVFTARDYLIRAKADTIRLTAVQLLAIGAQRRTWEKRMGALLLGAPRRGRARQPSPTQNGAPHPNGFPGGEIYLSFAGLGDRLAARVAGEIGDHIDYFTSPNALQCYAGKAPVTRRSGKSEYTVAHRLACNRHLRDAVQTWAFCSLNTSGWAREFYDTHRARGHTHHATLRALGNRWLEVLWHCLTKDVLYDEAIHTANRNRALAPKPAAA

SEQ ID NO: 70053 - protein, 355 aa, unidentified
MRFYSGHHRFYCGIDLHARQMYLCVLDETGEIVLHGNMSAGPAELSRAIEPYVEHDLVIAVECVFTWYWIGDFCAERNIPFVLAHALYIKAIHGAKTKNDKIDSRKIAMLLRAGVLPQAYPYPAEMRSTRDLLRRREYFMHQHSELLGHVENTNTQYNLQPFAKRIVHRSNRSGITERFADPLVAASIEADMQLLEVYHRIILELEGQVLKQARVHDPVGLQLLRSIPGVGKVLALVMLYEIHDITRFPSVGQFISYARLVKCPHESGGKRFGGKGNKIGNAHLKWAFSEAAVLFLRGNEAAQRYHEKLVSRYGKAKAMAIIAKKLGRVVYTMLKKRQPFDPKKFFSDAAHESVA

SEQ ID NO: 70054 - protein, 351 aa, unidentified
MSLAELVDHVIGVDPDRDRITAAVVCARTQGEIASKSFATTARGYGQAMRWAKDHTTDGRRAWSIESTGSYGAGLASALATRGEFVIEFDHPATRPSKDGAKSDSLDAVRAAREILGRKTWATPRSRGAREGLRTLVTARDSAKLARVAAINVLKALVVTAPIDLREELRGRPLMDLVGRCQRLRPDTAIDPEHAATKLSLRSTANRVRHLTDECRELELAMIPLVRAMAPALLDEPGIGVLMAAQILVSWSHPGRCRDEAAFARLGGVAPLEATSGQTQTRHRLSRGGDRQLNRALHTVILARAKHHQPTKEYIARRITEGKTKREAMRCLKRYYARHLFRLLEAATMTA

SEQ ID NO: 70055 - protein, 411 aa, unidentified
METIVERPGALDVHKAQVTACVRVPGPKGRREQQVAEFQTTVQGLLALRDWLTAHEVTHVAMEATGVYWKPVWAILEDAFELLLVNARHVKQVPGRKTDVSDAAWLCQLLEAGLLRASFVPPKPIRTLRNLTRYRKAQIGERQREANRLHKTLEDAGIKLDCVASDVLGKSGRAMLDALVAGTRDPVVLAELARGRLRAKIPALQAALEGRFDAEHAIVIGAILAHLDFLDEQIVRLSEAIEERLGPFAPAIELLCTIPGVQRRTAEVIVAEIGTDMTRFPTAGHLASWAGLCPGNDESAGKRRSGRTRKGSKWLAIALTEAALANVRTKDVYLAAQYRRLRPRRGHTRALGAVKHSIIVACWHMLSTGETYREAGGDYFTRLDPDKQTRRLVAQLERLGHVVTLQEAAAA

SEQ ID NO: 70056 - protein, 345 aa, unidentified
MMLIGCDFHPSWQQVCWVDTETGETQQCKLVHAAGEAEKFYGQFSAPARIGMEATGNCQWFVEMLAALGHEVWIGDAAKIRASDVRQQKHDRRDAALLLRLLMEERFPRIWTPSSEQKDLRQLLIHRYKLVRLRAQAKNGLQHLAMNQGLQKKNRLWSKAGQQALRDLALQPWASRRREDLLNVLVMLDRQIESLDLAVQQAAEQNENTKLLMSQPGIGPVTSLAFVLTMGDVSRFPRGKQVASYLGLIPREYSSGGKQRFGPISKQGNRFMRMLLVEAAQVAVRCDPQLRREYLQRCHHDKPKGVAKVAAARKLAIRLYWMLRTQKRYPEIVHVESSSRVALGG

SEQ ID NO: 70057 - protein, 345 aa, unidentified
MNKISVIGLDLAKDVFQVHGVDSAGEVVVRKQLKRSQVRRFFTNVEPCLVGMEACGGAHYWTRELAGLGHTIRMMAPVFVKPYLKTNKNDRNDAEAICEAVQRPSMRFVQPKTPEQQAVLHLHRARRLLVRQRVALSNHLRGILSEYGIVLPQGAKVLSGRLPALLEDAENDLPMLTRDLLAECKEEYDQLMERIERLEGRIKAWHVTHDVSQRLASIPGIGVLTASALAATVGEGQDFSNGRQLAAYLGLVPRQASSGGKVRLLGISKRGDGYLRGLLIQGARNVIYHIRRRLRAGQPGGNAWVEQLLQRSHPNAAAVALANKMARIAWVLLVRNQTWCPARTL

SEQ ID NO: 70058 - protein, 418 aa, unidentified
MGSVGRAIGLDVHRDFCEVAIVEGGALRSAGRIATTPERLELFAQSLARTDRVALEVTGSAWEIARIIEPHVARVVVVSPADTGIRQARAKTDRLDARTLARLLAAGELDGVWSPDQWTRVLRRRLARRAQLVRARSRAKNEIHAVLVRRLVGRPPVSDLFGVKGRDWLRALELPLEEDETVAACLRHVEFLDSEIAAVEREIARQALESPQLRRRLTVPGVNVICAATFLGAIGDIRRFPTSRKLVGYLGLDPRVYQSGSSLAKGGRISKQGSPSARWALVEAAWSVVQQPGPLHAFYQRIRVRRGNKIAVVACARKLAALFWSLLAGGEDYAHQQPSLTAKKLRLLEIRAGAPTRKGTPTGTWATRQQMRTAERQLAQQAEASYKRTVRDRQAATPAEAKAAGSAEVGASVTPGRA

SEQ ID NO: 70059 - protein, 360 aa, unidentified
MNATTVAVDLAKSVFQLAVADEHWRIVETQRLTRTHFERWFANRSVGLVIMEACGSAHHWARWLNALGIEVRLLPAQYVRAYVRRNKTDATDAAALLEAARASDIRPVRVKSVEQQALQGLHRIRSLWMGTRTSRINALRGFLREFGIAVPAGARTGLEAISRVLADPASAVPELIRGSARLLVEEIRLLEARIAQLERELAALARLSPACTTLLSIPGIGLLTATALVAATSGDVTHFKDARHFASWFGLTPREHSSGSSRFLGNISKRGDRYLRMLLTHGARSVLRAAKVAEAAEREVCGVRRWALDVQRRSNHNKAACALANKLARICYATLRDKTPFGDTERLNRKITRETFVMPA

SEQ ID NO: 70060 - protein, 446 aa, unidentified
MSRKKRTHLRGKRGQAFANKIRGISLERILCVSIDIHKYFHVVMLHNALGEIVTPTFEIDIFQTGLEQLCQAIKEATVRAGAQVILTGMEPTSHYFENLARHLQDGPHPVTLINSFAVKENRGQQMMHYEKDDEIDTAAIGDLLRRGEGSPYLPARGIYLEMQQLDRVRISKIKIRTMLKNQIIGHLDRIFPGLVIVADTGKERYTPMFASDFWSCQTIQHLIRVCPDPRQLAAMPTQELIDAFHAHSYAMGHITANKIITYARKVLLPDAELIAIRSELLTHDIALFDQVQHHITQFEERLCALLAKTPYQFWTRLKGFSDIQVASLAAAIGDPANYNCAKQVFRRSGLVCGRNDSGTRKRKGKGKHVSKAGDVYIRRNLMNGVSTLLLHQPVLYRYYQKLKLTKPDGVARVATARRAMGILWAIQRDQHSRTLVLKKGQHNVDC

SEQ ID NO: 70061 - protein, 399 aa, unidentified
MIYVGIDWARSRHFVVVLDQTGSELHRQYVKHNAQELQALADRLSAIEPDPAAIRVTLELHDGAVLLWLVLQGYSVFPMSPKSADRARDRYRPAGGKDDRIDAFVLADSLRTDAGVLRQLVPDSPRAEELLSWLHIRDGLVRERTARMQQLRAILAEWCPELSQLCSNFCSQWQRDLLMAFPLQQQLARADLEQVAATVGRKRCAAHRKQLEAILAAPCLPLPPGRGAALAWQVRELVQRIGELVARIKEIEQQLRKLVDSHPRARLVHSLPVTGVVSCATLLAIMELLDQATWQELVARWGVVPVTKQSGNKKSVRRRRGCDHFVCQVLTQFAHCTAQVQGSWAREFYQTKRTAGVAHHTILRQLARQWVRIFCAMWRDDTTYDEALHQTNQLQRRAA

SEQ ID NO: 70062 - protein, 348 aa, unidentified
MSQSNIHQYVGLDVSLKETSICVVDESGKIVWRGRTDSTPQAIAEAIKKHARHVVRIGLESGQLSTWLFHGLNERSLPVICIDARHAKAALSLKVNKTDANDALGLAQIMRVGWYREVAVKGHDSQAVRALLVARAQLVSQITTLKNCVRGILKTFGFVVRTGLRSQFPKHVREAIHANPALAAIVEPTLRVLEAARAQLLVYDRAVIQRARSDETARQLMSAPGIGAIVVLAYMTGVESPGRFRRSSSVAAYFGMTPARYQSGEVDRAGRVSKCGDGMVRGLLFEAAKVLLSRSARPCALQSWGQALAKRIGTKKATMAVARKLAVILHRMWATGATFRWPTPAPAA

SEQ ID NO: 70063 - protein, 349 aa, unidentified
MVILGIDPHKRTHTVVAIDDAGRQRGQKATVATTTEAHLELVRWADRFGPDRSWAVEDCRHLSRRLEADLIVGGERIVRVPPKLMAHARDAARTYGKSDPIDALAVARAAPREPALPVARLDGPSRELRLLVDHREDLVRERTGHINRLRWHLHELDPSWDPTPRSLVRYKQLDVLRARLEALEGMVARIARDLVGRIRDLTVQANALELEIVQRARSLTPSLLELAGVGGLTAAKLVAEVADVRRFRSKDAFARHNGTAPLPVWSANRVRHRLSRTGNRQINAAIHRVAITQMRVHDGAKAYLERRLASGNTKTEALRALKRKLSDVIYRTLLADATLAMATGYGEAA

SEQ ID NO: 70064 - protein, 341 aa, unidentified
MQALIGIDPHKVANAAVALDERGQVLAEGRFLTNRAGLRQLERWGHRFPSRRWAIEGAQGLGRPLAQRLVARGETVIDVPAKLSARIRLLSGGHGRKTDALDARSTALAAHNGERLTQVQVEDHTAILRLLSDRRDDLVTERTRTINRLHVLLRELVPGGVNRNLSAESAAAHLRRIRTAPGPARARRQLASELVADVRRLDRQIADLERRIRQAVRQAGTTLTELFGLGPVLAAKIIGHVGHPTRFPTKAHFASYTGTAPIEASSGEVVRHRLSRGGNRQLNHCLHMAAIVQVRHDTPGRAYYLRKRAEGKSEKEALRCLKRRISDAVFRVLCMDEERTP

SEQ ID NO: 70065 - protein, 344 aa, unidentified
MQSNKTEKIKRISEKTLLAALDIGKTVHYGYFRTPKNKDIKPFPIYNTGQSFKKFWKKLCRFKEEHMLDEVVIGFEFTGPYAEPITNYLKKKPVNLIQVNPMHTKRIKELTGNSPNKTDKKDPRVIADVISLGHSLTVVMPEGAAAQLRRLTHARERAIEHRTAMSNQLQQLVFVIFPELVSIIKPSTKTGMYLIKNFPDPETIASIGIENLSDIIRKVSRGKFGRDRGEELYNAAKQSIEITEGKESIIFETSHLVSNIESENRYIESLEERIIEHLEQIPYSHSILSVKGIGYVTTAGLIGEVGDFNKFNTISEITKLAGLDLFEISSGKHKGQRRIEVCSK

SEQ ID NO: 70066 - protein, 401 aa, unidentified
MTVHSQDPAVVGGADTHADTIHVAVVSVHGRDLADREFPTTTAGYRAAISFLTSHGSIEAVGIEGTSSYGAGFARAAKAAGLKVVEVNRPDRAERRRRGKSDPIDAYQAAHAVRSGRAATPPKDEAIEGIRALHNARHSAVKARTAAINQIHQMLITSPDNIRTKYAALKGKSLINTLAEIRVVNSDPVTNVVLASLKALAKRCRFLTQQHTDLGALLDALVTAANPGLRAAYGLGPDTTTQLLITAGGNPERLRSEASFAALCGVAPVPASSGKITRHRLSRGGDRAANNALYRIALVRMSSHAPTKAYVARQIAAHKTKAEIIRMLKRAIAREIYRYLSQHILVPEIADLRSARRAKNITLTHVANHFGVWPTVISRIERGTRRDDDFANAYRTWLTAA

SEQ ID NO: 70067 - protein, 339 aa, unidentified
MKYTPVGVDIAKHVIQIHFINEHTGEVVDKQLRRQDFLTFFGNREPCLIGMEACGGSQHWARELTKLGHKVRLLQARFVKAFVMGNKNDVMDARAIWMAVQQPGKEIAVKTEEQQSILVLHRSRRQLVKFRTAQINALHGTLLEFGETIHKGRAAMEREFPEALERMKERLPLYLITVLENQYNRLNELDSLIDDIEKQLTSVARQNETCRRLLDIPGVGPLIATAALAIMGKASVFKSGREFAAYVGLVPRQTGSGGKIRLLGISKRGDKYLRTLFIHGARAAALLTKEPGPWITELKKRRPASVAIVAMANKLARTVWAIAAHGRKYDKNHVSIRPY

SEQ ID NO: 70068 - protein, 412 aa, unidentified
MAGARCNAAARRDTAGQAHTLDARIIDQVVGLFMRDEQVVGVDGLRTASQCARVRLLETQTRRPSVEQIIRIGMDTSKHVFQLHGVNAAEQPVLRKKLRRSEMIAFFEKLPATMVAIEACGSSHHWARLLGGLGHEVKLIAPQLSKPYVKRGKNDAADAEALCEAMSRPTMRFVPVKSAEQQASLMLMGMRDRLVRNRTQLANAIRGYAAEFGLTAAKGMCKVEPLLDRIASDPAVPALARELFASHAMEYRHLEEQLDEIDAKLMKWHRANECSRRLAQIPGVGPVGAALLMMKTPAPELFASGRQFAAWMGLTPKDHSTAGKSRPGIITRAGDETLRCTLVVGATSLLQHVRAGRGKNGTPWLLELLKRKPPKLVAVALANKIARIAWKMMMTGEAYRANTSPPAQACAA

SEQ ID NO: 70069 - protein, 343 aa, unidentified
MSEISTIGLDLAKNVFQVHGVDRSGAVVLRRQLRRGAVEKFFAQLSPCTVGVEACGTAHHWARVIGRYGHQVRLMPPAYVKPYLKRNKNDGRDAEAICEAVSRPTMRFVAVKSIEQQATLAVHTTRALLVRQRTMIANSLRAALGELGIVAAPGFEGLRQLMTGLEAPNEEVPEIMRGALLLLAKHWQALDADERVIERQITKAARADGEARRLMQVPCVGPIIASTVLAKVPDARVFRSGRNFAAWIGLTGRDHGTGGKHRPGRISKQGDRMLRALLITGASAYLRQQRMRGVSDPWLRELLARRPYKVVMVALAAKTARIIWAMLAKGEPYRGRASALAAA

SEQ ID NO: 70070 - protein, 403 aa, unidentified
MNSVGIDISKGRSTIAVMRPFGEVVISPFEVRHTGSELSKLAKQLKSLDGETRVVMEATGNYHASVAKLLHNAGLYGSGINAKLVHGYGNNELRRVKTDRKDAVKLANYGLDRWLTLPRYIPEEDTRLLLKNCYRQYRQYSKVQTVLKNNLISLLDTVFPNANRLFSSPIRGDGSEKWVDFVAEFWHCRCASEKSERAFTSKYLRWCRKHGYNFREAKAHTIYAEASGHIGVLPKSETTKLLVEQAVAQLRATSTALAALKQEMQSLASVLPEYPVVMDMFDVGPTLGPQLIAEIGDVRRFYSKKALVAYAGLDAPPNDSGDVTGRHKSMSKIGASSLRRTLFLVMSVYLQTAPLDEPVCQFMDRKRAEGKPYRVYMMAFANKFLRIYYATVKAYLESLEHTV

SEQ ID NO: 70071 - protein, 424 aa, unidentified
MNLTQNDRLNQVTAETLVVGVDIGSQEHYARAFDWRGIEFTKRAFRFGNTGVGFLTFLRWLQELQGKCRKEEVIVGCEPTGCYWLTFQKFLKDHAVKLVTVNPYSVKRSKELDDNSPEKSDLKDPKTIAGLVRAGRFSTSYLPEGIYAEIREASVCRDMVMKDHVRLSNQIQGWLQKYFPEYLEVYKDWDSTSGLMVLQEAPLPEDIIKLGAGGINSIWRKAKVRAAGIKRATTLVEAAQESVGLQGGEAARLEIWILVNDYIAKTEQMKRLDEYLEQKVMEVPNVEKLLAIKGVGLSTVIGFVAEVGDIGRFTDARQVQKLAGLEITKISSGKKKGQPCISKRGRRKLRRTMYESARALINWNPAFLDVFLYYRNRQRRPLGSMQAKIAVACKAIRVFFVIMQTGCDFDEERFRKDILRPEAA

SEQ ID NO: 70072 - protein, 396 aa, unidentified
MISVGIDVSKGKSTVCIMKPCGEILESPFDIGHTADELDSLISLIKSFDEETRVVMEDTGHYHLPVATYLSSHNIFVCCVNALRMKKFCSQSIRRAKTDKIDSIKIASFGITYWNELVKAYPSNVIYDELKFLARQYYQVTGMLVKSKVNFSNLLDQVMPKINDVLSNQGENHKLTEFVNRYIHFQNILDMGEMKFTSDYCKWAKKKGYRLNERKAAEILALAQNGIPTLPNSQSVKIAVSEAVKLIHSIEESRNTILAQMQELCNTLPEYSVVKEMDCIGDTLAPRIIAEIGDVRRFKNKHSLVAYAGIDAPPYQSGAFHASERHISKRGNSYLRKTGYEIMQSLIKHKPADNAVYNFIQKKRSEGKCGKEAMIAGLNKFLRVYYGKVMEFYSEH

SEQ ID NO: 70073 - protein, 317 aa, unidentified
MQVVLDIGVDVAKDTVVVACARQSFAARTLRNTRTELRAWLKSLPAGTRIGLEATGGYHDLLATMAQEQGFIVYLLNPKDVRHYARALGTRGKTDRVDAQVIARYVAHEHARLHPYLPMNPAQRSIDRLLKRRAKLVVLKDALRQSLRDAPELREDLKTMSKHFDTLTTKIDRALLALTHAIPERKNRQQYVQSIVGVGPLVGSCLANTLERVPFKHSDAFIAFTGLDPRADDSGNHRGKRKLSKRGPSQMRRLLFNAAMSASKTAVWKPLYQRYRDRGWSSTAALVIIARKIARIAFVLWHTQTTFNPSRITTGLT

SEQ ID NO: 70074 - protein, 420 aa, unidentified
MTSQNSIPADAVLVAIDIAKVRNEVLIEAPGHKRRRRLSVLNTRAEHDHLIEILQSYDRPVVCAFEATGNYHRPIAWRLVEAGFETRLVSSLALARTREALHNGWDKNDPKDAQVILHMLRIHSTQVYHDPLRAGINDVQELSKTHEAIANAKTEIQHRILTHYLPLYFPEIERFRGNSRSDWFFAFLDAFPTPSSITTLTKEKFVEAAWDVVGRKVSKSQILMDIYETARTSIGLPLPLDAPAIRMFRMVVAEARSLIRQRNEIEAQADELLRHSRDYQILRQIPGIGPINALTIIAEAGDLRRFHHHRQFLKFCGLDLSTQQSGQYRGQTRLSKFGNARLRRTLWIAGQVAIRQRENGFRHKFERYIARDRDNPDLRRKAMTAITAKMARVVHAVIKSGSDYRPFVEGRVPGGRTSVS

SEQ ID NO: 70075 - protein, 370 aa, unidentified
MKQFSTYVGLDVHKDSISIAVAEHGRDPAKFLGHIPNDLTRLLRKLEKLGPAERVQVCYEAGPTGYGLHRRLVELGHDCQVIAPSKTPRKAADRIKTDRRDAERLAHYLRSGDLTSIRVPSEQEEAMRNLLRAREDAKKAEMRAKRQLNSFLLRSSRIWSGRSKWTKLHFEWIGAQAFDHEADILTLSDYLNEARRVTERVAELTKSIESLSSELESRDLVQALQAFRGIKVLLATWITVEIGDFRRSPTAKHFMSFLGLTPSESSSGATVSRGAITKAGNVRLRSLLMQAAWAYRHKPRVEGTLKRRAQAASQEVRDTAWRAQKRLHNKYYRLTNAGKPKNKALVGVARELAGFIWSVGNSNDLLSTTA

SEQ ID NO: 70076 - protein, 317 aa, unidentified
MNKYIGIDVAKEDLSVYDGTKEYRFRNERGCADLKAYLHPSFEAYVFIFEAIGPYSLYLREFCAKNKLRIVMINPMKSAAFAKALGNRSKTDTIDAKMLYEFHKVILPEHIMVPSIDSRAEKLSIYLASYELMVKTRTALSNHLHALDHTPHVPDMLRETINREMNAVKEAEGELVRQMENCIYSDEKASKEYGNLLSIKGIGRISAISLLALFRIYRSTSRNEITALAGLDPTRTESGTSIRGRRKISKGGNGTVRKILYFPTLNCIQHNKQIRAFYERLVNNHKPKKLAVIAAMRKLLLIAHAVYTNGVAYREAT

SEQ ID NO: 70077 - protein, 408 aa, unidentified
MNAVGIDVSKGKSMVAALRPMGEVALLPQEFLHTEVGLEQMAYAIIALGEDTRVVMEATGRYHEPVAAALHEYGIYVSVLNPLFIKQSGGGSIRKVKTDKADAMKIAKYGLDNWVDLREYTPMDTVRQQLKLCSRQYNLYMKTVVSLQNNLISLTDKTFPGVNELFSSPERADGHQKWVDFVMTFWHCDCICRVSEKAFTERYQKWCKRKGYHFSTEKALDLYAGSCGHFTTLPKNDNIKLLITTAAQQLLAGKMTLAALRAEMTRLAMQLPEYDTVRAMYGVGQTTAAQLMAEIGDVRRFPRRSSIVGFAGVDPGVDDSGKHSAKSVPTTKRGSPHLRKTLYQIVCTYLRKAPADEPVYQFLDKKRAEGKPYFVYMTAAQNKFLRIYYARVKECLEAFDAQQDIAQS

SEQ ID NO: 70078 - protein, 387 aa, unidentified
MPQPNDLGRSLVALDQDSTLVAVIEMGQASWLVAAIVPGLNRHPLKKIAADAEQLLQVLRRWKQEAETAGRTIKRVAVAYEAGRDGFWLARWLRAHGIEAYVIHPSSVPVSREHRRAKTDRLDTELLKRAFLGWLRGEPDHCSMAAIPTLTEEDAKRPGRERENLVGERTRIVNRIRGALARLGIRNFKPMLRNAPQYLETLRTPEGAVLPPNTLAELRRDMARLSFVKQQIKEVETARLERLQRAPGEGGNAMVQLLTRVVGVGVETADMLVQEVFTRNLRDCKAVARYAGLTGAPDESGKRRRERGLAKSGNARVRRGMLQVAWGFLVHQKDSVLAAWYRARTADARGATRKTMIVALARKLLIALWRLATTGEVPSGLALRAAA

SEQ ID NO: 70079 - protein, 324 aa, unidentified
MIDGILGIDVSKNTLDVSISSCTKVRTKSFANTSDGWHHLLDWLVAQKIRRVHACLESTGRYSLGIACALYEAGHIVSIINPAQVRDFVRTKLGRNKTDGIDASRIREYCELFKPLPWAPPSEAHRRLSELQTIRSGIIAGLTEWKNRKNSGIVDAEAQALADATILHFTSQIGAVDKAIALAIENDSDLRSKRDLLLSISGVGDTLAGVVLAELPGPDVLHSSGEVVAYAGLNPRQHQSGTSVDRATRISKIGNGVLRAALYMPALSAMRYNPAIVALVTRLKSRGRLKPKQIVVAAMRKLLVLCFGVLKTGKPFDPAIAMGC

SEQ ID NO: 70080 - protein, 406 aa, unidentified
MEGPIITVDVSKGSCHYQPFIENGHPMRKPKQLSATIDGFQKLGQTIKDLEAKTEREDIPVIFEATGVYHRPLQKYLEDHKIRYYIISPLLSATYRKTDLHSNKTDALDCAHIAKAYYCEKELRQYQAQPQEYKRLYQLSRIYESELVHLRKRKVSLRSMLDIIYPRIDKTFKGNQNLYDPIPMEILKRYPHPSLLLSHREDTIVKTVGHRTGHLKGYTERIVHKIYEKAKECYSGCDIDDIEVVKLPSLIENVQEQKKKCNSLLKEMIEIARTCPYFASVVSIVGIGENLAARIIAELGDVSRFDNRAAIVAYAGLNPKIQQSGDIDGLHLKISKKGNKHLRCLLYLGAQCNYRLRKEDPLYEFTKKKRQQTQCPLSSKAAYTASAHKLLVIIYSLCKNGTLYHS

SEQ ID NO: 70081 - protein, 334 aa, unidentified
MKQVNQVGVDVDSEALVCAAKHTGQRLPLATFANTAAGHKKFIRWATKGGRSAQVCLEATGIYSLEFALALHHAKQVEVMVVNPRAIKDFARACMQRAKTDAVDAGGILEYLERMPFAAWQPPATEILELQAINRRIAQLNAELTREKNRRHASQFAGASATAIAHDIEVNIHHLERRLERMHQSGLQLVRGVPALATKLAHLVSTKGIAEASAMRLLAELLVLPDDLAAPQWVAHAGLDPRPYESGTSVHRPRRITKVGNRHLRAALYMPALVAIQHEPNVKAFYNKLITAGKKPMQAVVAVMRKLLHAIWGMLKHDQDFDGNKFFKIAAKTA

SEQ ID NO: 70082 - protein, 338 aa, unidentified
MRYVGVDLHKHSITVCVVELVGRKRKIIERRRFRCDQEEEMAEYFASLGEYQLVVEATASYEWFVRLVEPTADRVVLAHPAHLRVIAQSKRKTDKLDAQTLAEFLALDQIPEAWRPTPRVREHRVLVRHRQYFVGRTTSVKNKLRRVLSHYNADLKGLFTQQGRKYLAKIELSESDRFVTNLLCEELDQHSERLKQVNKQLKAFAKQASVAEQEAREILDSIPCVGPVTIDVVLAEAGDIRRFGSQRKATAYAGLAPGIRESAGKSKQLHITKEGSRLLRTILVETAWRLVIKTRRWASVYEKLKARCSAKKAIVAVARRVWCVMVSILQSGQKYQPT

SEQ ID NO: 70083 - protein, 394 aa, unidentified
MRFVGIDVAAERHMIASVDAEGSVLLKPRPFTEDAAGYAQVFEQLGAPEATLIALEATGHYWKNVFAALVTRGFSVAVLNPLRTHRFAAADLQRTHTDAIDALGIARFAAQKRPPATRLPEPALEELRELVRFRDRLVQDVGDRVRQLHRLVDLGFPEFTRHVQDLGGPLATALLQAYPTAAAFAGSTQRRVAGLRYDGRHRVGDALAAALLAAAACSVGRHHGEAYRLQVRYLCEDLDRLRQRLRALERDIERLVGTHEVGRLLTTIEGIGPQTSARLVATFGDFSGFASGAAVASYVGAIPALRQSGKRTAIRAGLTPIGAADLRAKLWMPVLVAVRKNPWLRAYYDRLRARGKLPKVALMAAMRKLLHAIYSVATHRRPFVPQVASSATGR

SEQ ID NO: 70084 - protein, 347 aa, unidentified
MRFYTGQHRYYCGIDLHARTMYLCILDHEGGKVVLHRNLRCEPDAFLRAIEPYRDDLVVGVECIFCWYWLADLCAQHDIPFVIGHALYMKAIHGGKAKNDKIDSHKIAVLLRAGAMPVGYVYPQGMRATRDLLRRRLFFVRKRSELYTHIRITFHQLNLHPPSGQFRYPGNRVGVGELIPDPVVRASVEADLALAAHLDEVIRALEGTISDQAKVEDPDTLERLQTIPGVGRILSLTLLYELHDVARFPRVQDFLSYARLVKSQTSSAGKITGISGAKIGNAHLKWAYSEAAVHFLKKNPPGQRLLHRIRSKHGKGKALGILAARLGRASYYMLRRCTAFEMDRFMN

SEQ ID NO: 70085 - protein, 424 aa, unidentified
MIPAVIERCAGIDVGKTFLTVCLLTGPADGEPKVEMRKFGTFHSDLEALRQWLSNERCTQAVMESTGSYWKPVFSVLETSVTVILANGQDVKGRKGHKTDWNDCRWLAHLLRHGLVRPSFIPPRPVRELRDLTRRRKQVLSNATSERNRVQKVLEEANVKVDSVLSDVFGVSGQLILEALLEGKASVEEAANLARHTARRKIPEIIQSLEGNRLDDHYRLLIRLSLEHLAFLEQQLQRIDAEILSRVEQPEFRQAFELLQTIPGIKQDGAASILAEIGPNMAQFPTEAHLSSWAGVCPGNNCTGGKAKPAKIPRGNRWLRTTLVECAWAASKKKNCFLKDRFWRLAARGKKRALVAIAHTILLLVYRSLASGQRYQERGSVEVDETKRQRLIRHHVRRLGRLGIAVSTLRLAGPGESNSAQSIA

SEQ ID NO: 70086 - protein, 469 aa, unidentified
MNEKEKRFLGIDVSKGYADFILLDKEKKIVEKNYQLDDNKAGHQLLKEQLLHQVKQGFKVICGLESTGGYELNWARAIKELSVKETNVEIYKLNARGVKHQLQSELRRTITDGVSAEGIAIYLINNYAVKKEDWQKSLQKATALSSRQMFCKLIVSQQKHQTAKYNQLEKLVYQNFPELLQFCKNGIPKWVVRLLEKYPGLAAIKNSKLIGVDAIKGIIEQKAALVKELAKNSVGVAVKDEMTEAMLQTLASEIIHISKQVEELKERLIKSGVNEEVQLLTSIKGVAEWTAIGILVHLTDVSLFKDADQLAAFFGVHPILKQSGDGKWGAKMSKQGNKTMRSVLYNAAANVVQHNPYFKNIYANQRAKGKTHRSAIGIIMHKLLRVIFGMLKNKTAFNAGVDLENQKKNSNSATNENAINITTRRYQELNTAAPISGRNYRKRKVVLEGCQALTNANTASPKNNLTLQT

SEQ ID NO: 70087 - protein, 393 aa, unidentified
MICVGIDVAKDKHDCFILSSEGEILADVFTIQNNAEGFDTLLQTIRRCTRPEDKIKVGLEATGHYSYNILGFLLDKGLPTYVINPLHTNLYRKSLTLRKTKTDRVDARTIAAMLMSDVDLKSYTDTAYHNEELKSLTRYRFDKVRERAKLKQSVSRLVTILFPELEKLVPSLHLASVYALLSEFPCAKQVAEAHLTHLKAILSDASKGRYGRDMATTLRDAARCSVGSVMPAKSLELQHTIRLIHELDTEIEDIEAATQSMMDEIQSPITTIPGIGVRMGAMILAEIGDFFRFDSPGKILAYAGMSPSTYQSGQLSLSGAYSHMEKRGSRYLRYALYNATKYACLWDPTFAAYLAKKRAEGKHYNVALSHATKKLVRLIYAMEKSRLPYSGAA

SEQ ID NO: 70088 - protein, 346 aa, unidentified
MLDELQGPLRHIRKPVDNQKPQRETAMTQTTCPPTHFLGCDVGKASIVVFDSRDGRTRTIPNKAKELAAFAATLDATCLAVCEATGGYEAVLLDALLAARRPAHRADARKVKAFIRSFGTLGKTDAIDARALARYGQERHAQLARWQAPDVQRDKLQAMVLTRRDLVDQRLACKNRLGAPGSAAVAPYLKKLLACLNAQIAAIEAAARALIKAHPPLDKAVRLLCAMKGMGFLTAASVLALMPELGSTDRKQVACLAGLAPHPSQSGAKDAYRRTKGGRPEVKNVLFMAALTAAKHDPKMKAFYQRLIAQGKKKLVATVAVMRKMIVIANAILRQANQTPVPLGGG

SEQ ID NO: 70089 - protein, 360 aa, unidentified
MTDGMTSVALDAVCVELEGAIVAGFDVHRRQITFDAIDTESGEVLRGKLDSTPAAVEQWIARFPGRVVHVAVEACTGWLFVARALERAGAVTHLAEPIETSALRGRKRRAKTDRADARWLRQLLFEGRLPESWMPPEHVRQWRSRARLRNTLAGERTSWVQRIRAVLYHHGIAGAPDDLRTLAGRQFLATLELPVDASERIAVALEIIDLLEIQIATIERELRALARRQTGCRALMDKLYGIGELSSLVTLCELGDVSRLHASRQAVRLAGIDIGVHRSDRTARLGKLTRQGSAELRWALYEAAQSACRPTSPDYQDYHALKDRGLSHTRASLTIARKLARRSYHVLRELGPAALEPITD

SEQ ID NO: 70090 - protein, 352 aa, unidentified
MKKIVKQVAAIDVAQKELVVCLGRMYDDWSPELCAHKTFANTAKGFEALLAWVKKHSNQQVAVRFIMEATGVYHEAVAYFLEEKGEEVSIVLPNKISSYMRTLDVKTITDRTASEAIARFGLERKLDAWHAPKDIFRKLRQLTRERDQIVQERTIVKNQLHAEEVEAYPNKSSLTRIKARIKMLDKQEQEIKKEIAALIATDTDIQKIVVLICSLPGVGLLTAAIVLAETNGFELIRNKRQLASYAGFDVKEKQSGTSVKGKPKISKKGNKHLRKAMHLPALTAIRHEERFKAVFARLVSKHGIKMKAAVAVQRKLLEMVFTIYKTNKKYDKEYLNKEIKEVQEIAEAYEAV

SEQ ID NO: 70091 - protein, 355 aa, unidentified
MNQEKYIGMDVHDATISAAVKNAQGKLLMECVLETKAATILEFIQGLRGTLALTFEEGTLAAWLHDLLKPHVSRLVVCDPRKNALMRDGNQNDRADARNLAEVLRTNQVHAVYHGKQGIRALRELGRSYLTLTKDSTRVMNRIKSVYRSWAIPCAGTSVYSRRHRSEWLVKLVEPGVRIRAEHLYQQLDSLQPVRQAARRELLRESRKHAAVKLLRQIPAIGPIRSALLVAILQTPHRFRTKRQLWAYSGFAVQTYDSGEYRVVRGKLQRNRERITVRGLNRNHNHDLKNLLKGTAISAIERPGPLQDFYAALVEKGMRPSMARLTLARKIAAITLTMWKKGVSFDPKQLQRQAA

SEQ ID NO: 70092 - protein, 401 aa, unidentified
MKRLSGGIDVGSESHHITILDEEDHILYNQKVSHQINEFTESIKQFKRIEKKEKGVISFALEGKNGYSAPFDRILLDQGFTLYNVDNLKLKRFREAFAGEWKDDKRDALMLSKMLKLKEHINSQREKVFIKIEKPSPLTESLKLLSRHQQILIDEKVRLVNRLSKKLLEVCPQILELGKAKSKKLIAILTKYPDFSKYKRITLCSLLKIKGIEKRQGPFLVKRLNNIEYMPGLTDIYKTIIFSYAKRILELQEEIKDIDKSLDEIGEKNKEVNHLKTIPGVATKLASRVIGEIGDINRFPSEKQLAIYCGIACVDDNSGKVTKAKAVYKANKICKQTLITMAGGSIRLSLQCRAYYQKKRAEGKSHNHTLRCLARQLIKVIYKRLTEDRDYMVRKELRKVA

SEQ ID NO: 70093 - protein, 417 aa, unidentified
MNRLHVGIDPAPSKCVACLVDDAGRTVGKALAFVPNRSGVAGLVRQVHERAPDAECHFFVEASGSFWYGPSAWLRAQGQAVSLINPGYTKTQRKATSRYAKSDAKDAEAIARAPLNMGEKAYHPADIPEGPRLNLRLLCRHRHTLQEDATAIKLRVLAWLGFSTPGLTEILGTDLSAMDREFIRRYPVVARVQKLGPARLHQFLERRSAGDLDPALVDELFALTQEAYRSQDFDDRTFAMQIGMELDRLALLEKQIATLDDEIAQLYPVCDPEGLAKSLPGFGKVIAPIMVAEAGTDVSRFPAVDRFASWTGLVAHASGSAGKQQEGLPMTKAGRSIVKWALHMAANVAVQRDPEMKALYDRLKAKGKHHNAALTAVAHKLARCYWAVMHEQRPYVKRTPDLDADRPPDPTAGPDCP

SEQ ID NO: 70094 - protein, 406 aa, unidentified
MFIGDDWAEDHHDVEVVNDDGRRLAAKRFPEGVSGLAGLHALIADHLPDDADPADVVIGIETDRGPWVQALIAAGYTVYAVNPLQAARYRERHGTSGSKSDPGDAHVLAELVRLDRAHHRPVAGDSDTAEHVKVLARTHQSMIWSRQRQSNMLRSMLREFYPAALVAFGDDLTGRDALAVLAVAPSPEQGRRLTTARVVTVLRKAGRKRNHQVIAEQIVAALRTEQLAARPAVVGAYAASAAALVAVLAALSLQIDLLAEQVAAGFGRHPDVEIYLSQPGLGEILGARVLAEFGDDPKRYADARARKNYSGMAPVTRTSGKSRVVLARHTRNKRLADALYQQAFSAISNSPGARAFYDAHRARNNTHHQALRALGNRLVGILDGCLRHHQKYDETIAWPDQNKAAA

SEQ ID NO: 70095 - protein, 382 aa, unidentified
MSSPSESIATRSMIYLGMDVHKESITIAVLPAGAKTPTRLDRLANDLPKLKRWLDRIARDGELRICYEASGAGYVLHRAIQEWGYACEVIAPSLIPKRPGVQRKHDKRDASDLARLYRAGELTAVRIPSESDERVRDIVRCRETFQCEILKSRHYILKFLARRGFVFREGTNWCTPHLKWLQHLTTDASPLAPHDRLVFREYHSLLMYKLQRRDELDRQIEQLALLPALAPMVGRLQCFRGISLHSAMVLATEIVDWRRFERPAQLACYLGLVSREDSSGDRTRLGSITKAGNSHCRHVLVQAAWSYRHRPQTSVDLGRRQQGQPPAVITHAWKAQQRLHKRFNHLSYRKRPQIAVVAVARELVGFLWATMQDVDVSEYEAV

SEQ ID NO: 70096 - protein, 341 aa, unidentified
MSNAGTYIGVDLHKKTCFITVMNQAGKIKKQTEISTDTDKVAKFFSKHTKAEVAVESTMNWIPFYENLEGLGCSVVLSNPLQTKAIAAARIKNDKVDSRILADLLRTNLLPLSYVQPRDIRDLKELIRQRVAYVELRTRIKNKIHSVLFKNNLKHDFTCLYGKAGMIWLRQLELRDIYRQEMDRYLTTLDLLDKQIEELSMVIMETAKADYDCKLLMTVPGISYFTALTIKSEIGDIERFGSAKKLCSYAGLIPSTYASADKIRHGRITKRGSKWLRKALIDAITSGSRHPSKLTFLYRKLKKNKGTGKAKVATARKLCTIIFAILTDKQPFREFVSVKQR

SEQ ID NO: 70097 - protein, 355 aa, unidentified
MDIKKYIGMDVHKETISIAVMKGDGKLVMESIIETKASTILQFIEGVRGDLHVTFEEGTWAAWLYDLLKPHVTEVVVCDPRKNALMKEGNKSDKIDARKLADLLRGGYLHSVYHGENGLRTVKELARSYLTISKDLTRVMNRVKALYRSWGICCAGQQVYAPRHRSEWLNKIGETGVRRRAEFFYQQLDALRVLHKAVRRDLLAESRKHSATKLLREIPSIGAIRAALLLALIQTPQRFRTKRQLWTYSGLAIDTRDSAQHRFVDGQLQRSKKPQQLRGLNQNHNHDMKAVFKSAATMASGGEGPFHDFYQGLLTKGMEPAMARLTLARKIAAITLTIWKKGAHFDAKQLKPQAA

SEQ ID NO: 70098 - protein, 460 aa, unidentified
MLFAGCDWADRWLDFAVVDAAGSVVAETRIVYTAGHDPVAEYRAFLSTFARQWRATVTGIEDTTLPFARALASSGMAVVHVDPFRAARQRAALGVAKSDRADARMLAAMVRAGSYRAPVPGSSATLALRAVARSHRAAAQERTEALHRLRAGLVRTWPAAVGAWPASVGGLRSPQALAVLAAAPGPRAASRLTRAGLADLVSQAGRVRAVDREAERLRMLFCRPVMLLDPDVEEAEAIRIRDLVAAVQDTVRRTDRLAQDMEIYYGRHPHHSVLRAVPGIGATLGAHLLAEIGDAAEQFPGGRSLAAYAGVSPVTWASGTICRVSARKASSTLLRATLHQAAFSMASHSPGAHQYYRRRRAAGDAHATALRKTARRLVLCLYHCMAARTPYDDGIAFSYDPDAPGAPDRPRRTPPLSEAQICLARGLLDADTPVSAVAKQFDVSPATIHRHVLGRRDRRP

SEQ ID NO: 70099 - protein, 429 aa, unidentified
MRRNYNKQIEKQQQVTPETLVVGIDIGNEFNAVALVDKLGKVYGKYPKIYNSRAGFNYFKEIIKNQQKINGFTKVLIGLEPTGHYWRKIAYFAQEQGFDVKFVRTTAVKHQRELDESSSAKSDMRDAVTIANIVREGKYLDTPIKDGNYRQLRTLCKFRESLQKYNTAMKNILGTVLDDYFPELKKIFWSIEANGLRAILEECGFPKDVLSKGIFKIQEILRKSMRRKAQADKKAIQIYKAAEESVGLKEVYEADRYKLKTSLEEVNRLKVQLKSIEKQIKEILEKIPEAEYLLSIPGIGALSTGIFLGELGDFRNFRDYRGIVKYAGYDPIENDSGQNIGKKRISKKGRYLLRKILYYMSMSVRQRSEYFKNYYLNKLKNRNRFGQELRKKEALCAVAIKLIKVIFSMLRNGRCFSENFSSFKLKLAV

SEQ ID NO: 70100 - protein, 429 aa, unidentified
MSSNEKSNQNPPPAAQAVPAPEAWIGLDWGNKKHAFALQDRSGQSQRGFLEHSPENLHQWLRQIGQRYGGRPVALAIEASRGAVIHALLNYAWLTIYPVNPITSARYRVAFTPSGAKDDQPDADVLLELVRDHAAKLRPLEVQDPHTVKLTELVQVRRDIVDRRTQALNQITSLLKTYYPQALELTRELNTDLALDFLRRWPDLISLKAAKPATIKRFYYQHNVRSTQLVQQRLEFIQKAEALTTEACRVSVAVLQVRHLVDQLRAFGKHIALFDQEIHNAFREHPEAALYRDLPGAGPQLAPRLCAAFGTLRSTYPDPASLQKNAGVAPVRVKSGNQLWTHWRWQAPKFLRQTFVEWAGQTVVYCPWAAHYYERMKNKGKKHAAILRALAFKWIRILWKCWKDRKPYDEAAYLKQLSHRKSPNALPTT

SEQ ID NO: 70101 - protein, 394 aa, unidentified
MGGDSTVVGLDTHKAAIHVAMLLPGATEPVQWQLANEPAAVRQLVRKLRRATDGEVRCCYEAGPCGYALQRQLEAAGVSCTVIAPSLIPVKPGERIKTDRRDARKLAELFRAGLLTAVAPPTAAEEAVRDLCRAREDAVEDRLRARHRLGKFLLRRGLIWRGGKKAWTQRYRDWVRGLRFEDAADQAVVASYLLAIEQVEERGRTLEAQLEVVAQEEPYRERVGWLRCFRGIDTVTAVTLLAELHGFQRFTTPRALMAYLGLVPSEHSSGEGQRRGSITKAGNLHARRLLIEAAWHYRHPPAIGKALRQRRQGQPARVLAVADRAQQRLHRRFGRLSARGKMANKVVVAVARELVGFIWAALTPAADVRAPRRAARAASIGIQGREGPDAATGR

SEQ ID NO: 70102 - protein, 405 aa, unidentified
MSSLYLGIDWSKNKHDIVAVNQQGAVIASLTVPHNPEGFAQLDQLRQNLDVSSTECVVGLETAHNLLVDFLWTRGYEQLYVIPPHVTRSARGRYRQSGARTDQSDAQVIANLLRTDLSRLYPWQPDQPATRHLRTLVSRLAFLTQQSVRLTNRLHAVLWRYYPAATLVFGRLDQALSLAFIQQYPNAHAAAQLSLAQFEAFAHQHNHHHHPKIIASFARLQQPQPQPDPALAQAYQAEALLLAQLLGQIVQAKKDTLNASKHLYQTHPDYPIFASLPGLGWRLGPALLTKFGDDRHRFPTPNSLQALAGTCPVTAWSGKRKSVRFRRACDHHFRLITQQWAAKSLLNSVWANSYYQQVRPRCHSHNHALRCLANRWLAIAWTLWQRHQTYDEAYHLKQRQLRAQP

SEQ ID NO: 70103 - protein, 350 aa, unidentified
MLVIGCDFHTRFQQIAMVDTTTGEIVERRLEHATGEARKFYAGLPGPARIGMEATSDAPWFERMLSEYGHELWVGDAAKIRAAMVRKQKTDTRDALHILDLLVTDRFPRIWIPSRAQRDVRQMLRHRHKLVGFRTSAMNQLHFLAMGQGVCRRKKLWTTVGRRELEGLELGPWASRRRRELLQLLDQLHAWIKELDQAVEKEAASCPEAILLMKQKGVGPVTALALVLTLGPVSRFPTSKKVVSYLGLNPSEDSSGGKQRLGGISKQGNSMMRWLLVEAAQTAARFDPELRRDYLRLKFRRGPGVAKVAIARKLAVRLYWSLREQTSPAPPARMQGSPSVPMVDESPSSF

SEQ ID NO: 70104 - protein, 425 aa, unidentified
MNEVQNKLLVHGDVIIVGIDVAKHNHWARIYNQIELDVVKPFKFHNSKEGYYRLVAKMEEAKEKAQATRVVIGMEPTGHYWKPLAWFLQEQGYTVVIVNPYHVKRRKEEVGNSPTKNDRKDTGIIAKVVKDGNFLHCLLPKGKYAELRNLTVTRRQQRRKLNSALNQLQAILDEYFPELGQIFKNLLGKAALWVLRNCPFPRLILAYKLEELAAKLKEASNHRVGIKRAQALYQTAQESIGVTEGLTGAQHRLNACLDEIAFYQKQIKQTEAAMADILAGIDIAGNLLSIPGIGLVTVAGFLGEIGDPQNYEHWKQIQKLAGLNLSEQSSGQKNGQSKISKRGRAELRNLLYQASITLVAKNHEFKALYHYFLTRRENPLKKKQALIAIAVKLLRVMYGLARKKENYDPDKVLGDYRRAQLQQAA

SEQ ID NO: 70105 - protein, 445 aa, unidentified
MTMEEIREDQADGTVARVAAIDIAKASGVVCMRLPHERIEGRRVQQVWTVASTTNAITELGDRLVCQGVQRVVMEATGTYWKAFFYLLEARGLECWLVNAREVKNVPGRPKTDKLDAVWLAKLAERGMVRASFVPPKPVRRLRDLTRTRIAFTQDRTRHKHRVEKALEDAQIKLSTVVSDLFGVSGRAMLDALVAGERNPRTLADLARGSLIKKHDALIEALTGQFEDHHGHLLRILLDTIDHFTAQINELDRRINALLHTMTAPPSDGAEASAAADASGRPGHDLIQCLDAIPGVGETTAQIVLAEIGLDMSRFPTADHLVSWAKLCPRTIQSGTKNTAGPAGQGNPWLKGALGEAASAAARTDTFLGARYRRIVKRRGHAKALVAVARTILVIAWHLINDADARYQDLGADWHQHHLNTTRRTRDLVRQLQALGHQVTLAPAA

SEQ ID NO: 70106 - protein, 341 aa, unidentified
MQITTIGLDIAKNVFQVHGIDAAEKVVVRKQLRRGQVMKFFAALPPCLVGMEACATAHYWARELRKLGHQVRLMPAKDVKAYVKRSKNDAADAEAICEAVGRPTMRFVEVKSAAQQGRLMQHRTRDLLLRQRTQVINALRAHMAELGIVAAQGREGLKSLLTIIADEKDERLPVDARASLIVLAAQLQALQTMIGSIEKRIIVQHRASEESKRVATVPGIGTLGASAITATVTDASAFRSGRDFAAWIGLVPRQDSTGGKPKLGPISKQGDRYLRRILVVGAHSVLQRAKQNPEKYPWLTQLLARRPFKVVAIALANKMARVAWALLASGGRYRAPRLAAA

SEQ ID NO: 70107 - protein, 440 aa, unidentified
MQKETVFETVYENAAGIDIGAEKIFVSVDGIEVVSFDTFTSDYYKCVEYLQQKNVSHVAMEATGIYWMALYAMLESCGLKVCLVNPKETKQVKGRKTDVKDCQWIQKLFSANILRQSFIPEQNYMEVRQLVRERIDIIEMGSTYVNKMQKCLELMNIKLKEVISQIHGTSGIKMIKAILAGNRDNNYLLSLCDKRIVTKKGDLIIKALEGNYNDTYLFILEQNLLMWEKHQEQITIIDNRIGQLLAQLGEPKKPLTIESKPKLIRHHAPKIEGLHGMLIRLYGVNLSSISGINDYTLLRLLGETGIDMNRFPTAKNFVSWCGLAPKHHKSGKMSKRVKATSCNKTGQVFKEVAQGLINSKYIAIGSFIRKLRAKKDAAIAIKAGARKLAIAYYNALTKGIDYVEQGAKNYEEQIKQKQKAALYKLAKKLNVEIVEKQAAA

SEQ ID NO: 70108 - protein, 340 aa, unidentified
MEKRYVGVDLHRNQFTVCVRLENGRTYLRVWKLEALPQFVKKLRANDEVAIEATGNTRLFYDAVQPHVARVVVVATNQFRVITQSVKKTDANDAQLLALYLEKGLLSEVRMKDQPHGQIASLTKTRDALVKLRTALKNKVNNILSARGINLAKEALSSERKLDEVLELPFEELVWIELRVIVAQIRSLNQSIRELEGIIAQEGSKLEGHKNLTSIKGIGKITGAILLSVIGDVNDFPDEHRLASYFGIVPRVSNSNESERSGRIHKLGSKLGRTALVQSALIAANYNSYLKRFYERVKARRGAGRAIIALARKFLGIIYRTLKNKWVFEDFPNFVLAEGA

SEQ ID NO: 70109 - protein, 470 aa, unidentified
MSTRRNAQEPTNGAVVITSFHKDFRSGSSGAIKPNQTSSAKNMEPSISTHPSAAVAAYIGIDWADQKHAIALRSAAEPSKVQHQVVEQKPEALMQWIGQLEQRFGAQGKILICLEQSRGALIYHLMGYEFLELYPVNPLQLARYRETFSPGGAKDDRPDSELLCELLYCHRDRLRAWKADSVLTRKLAFLNEGRREAVEQRTGLSNAIKSQLKVYFPLALELLNEESSTALAADLLLRWPSLEVLQKQSASTVRKFFYGHNCRGETKMLQRLELIQQAGPLTQDSALIEPAAFRVQLLARQLKSLLADIARYDQKIAQLFAAHPDRFLFENLPGAGAALAPRLVTAFGSDPTRWDSAQEVATLLGIAPVRRASGKNTGKKASVHFRLACPKFLRQSLHEFAGCSIRYCSWARACYESQRARGKAHHASVRAVAFKWIRILFACWKQRTPYDPQRYRSALQHRGSPFASAC

SEQ ID NO: 70110 - protein, 417 aa, unidentified
MSEYAALVALDWADKKHAVCLFAETTGQREQRSLNHTPAALQEWALGLRQRFPAAPIAVGLEQSRGPLIYALLKYDFFVLYPINPKTLARYREAFSPAKGKDDPADADYLLDLLQHHRERLRPWRPDDQKTRTLQLLVEQRRRLVNDATRTTNRLTALLKSYFPQVLDWFSDLRRLIVCDFLDRWPTLDAVQRARPATVHKFLRAHHSVHRLTNERRLQEIKTAIPLTNDPAVLNSSQLIVKVLTAQLRTTILALRELDRHLEALCLTHEDYELFAALPGSGTVYAARLTAAMGSDRTRWRTVDDLLRFSGVAPVIERSGKQHWIRWRYFCPRFFRQSFVEYAEQSIQHSFWARAYYSMQRAKGKGHYASVRALAFKWIRVIWKCWQTRTPYNEVIYLERLRKTGSPLLKWVADHQQ

SEQ ID NO: 70111 - protein, 385 aa, unidentified
MKNVYGSVAAIGTDVHYKFSTVTMRDRQSKVVRRERLDHLDRCKLRRVLSGWPREAPIVMEASFGWGWLADLMKELGLRPELSNCYKLEQMRKARGIAKTNKKDADLLSLLPFESGDWWKVWMAPPEVRDSREWMRHRASLVAVQTQTKNRISALFHRHGIVHEFSDLFGVAGRRFQATLCREGRAGEAVLGVGALAGLRGLRELLEHVRGQLARIARELRGQLERSPLARRLDGIPGIGLILAHTLMAEIGRIERFASHRALAAYSLLAPISDDTGEESGHKPMGRHLGHRGNLTLKWAFLEAAHGAAKTGGRWRRMFDAVTEGGTKDRNRGYIKVARELVKVVYVVWNKSVEYSEQPPRRPGSTPREKLEAFLSSTRSGTGQP

SEQ ID NO: 70112 - protein, 409 aa, unidentified
MLFCGIDWSDQTLEYHLRHAERGELVKGTVAASVAGLADLYATLELHTRPEEIGVAIETCHGVWIQALLDRGYKIYPVSPKAADNFRKALNDSGVKTDAIDSKTLALFLVTFHHDRTPLRPDDPEIVKIRILCQDRLRLSEERVAKVNELTAAIKGYYPAFLGVFGCLDSDIALDFLIQYPTQRQFRKLSAHRFVAWLGRRHYTCRRRIDEMVEKLHAPAFEVAEHLQDSKKHLISYLGRSLKLLNAEIDERDEEINDLLKSLPESDWILSLPGAGGVLGPSLLACIGRDPERFASTGEARAFMGTAPVTKASGKARSVHFRWGCWKFARRTLQLFADQSRHRCAWAAVFYQKQRDSGHGHHAALRALAHRWVKILLAMQRTGSRYDEAIYMRAQRRHLLKCPSVKAAH

SEQ ID NO: 70113 - protein, 345 aa, unidentified
MEHVVIGMDPHKRSVTIEVMTGTEQVLAKHRFDTTADGFASLMRCAKQWPERLWAVEGCNGIGRHVASRLVMAGERVVDVPPKLSARLRMFDTRQGRKTDPDDAHAIAMVAVRMNGLRLVVNDERQALLRILADRRRALGEDHTRMISQAHQLLLELIPGGAKKDLSAAQARVLLAGVRPRDLVGKTRKRVALELVGDLEKIYQRSKALDKEIKQLVVDTGSTLMDLHGIGPSSAARLMIEVGDISRFPDRNHFASWNGTAPLDASSGDQTRHRLSRAGNRQINRALHVMAIVQLRNQTEGRAYFDRRKAAGKTSMEAMRSLKRRLSDIVYRTTMPNTPATEQAA

SEQ ID NO: 70114 - protein, 403 aa, unidentified
MDYDLLAYDVYAGFDVGRSAHHVVAIRAADQQCVMSRRVLQDEGDIRSALDGLARFGRILVAVDQKGSYGRLLVATAKSAGLDVGFLTPSDFHAFSKGYTEVKSDAKDACIIADVAMRLTGRLHPVDGLEESLEALRAMTVLRAALVRDSTQAKNRIRSLLVQTHPAFEAFLGKDALDSPFYLRMLERYGGPEGIRKAGKRGLGAFVSRQPYYKGKAAVLTGRIFDVLASQTVCLPGAGAREAAVSFLAAGLISRRQDIARLEKEIGASYRRFPESAVLDSLPGVADVLGPVLLAEIGDIGQYRDAGHLAAYAGVAPSKRQSGKVLDGSKKKVKCNRRLRNALCESARISVSCDEWSAWYYHKKRREGKEHKQAVLALARHRTDIIYAMLKNGSLYEPKAMTH

SEQ ID NO: 70115 - protein, 424 aa, unidentified
MKVIYQTCCGVDVHKSFLVATIIKTTSGVEPTYQKKRFSTFNNSILEFKQWLIENECRDICMESTGKYWVPVFNLLEEDINVTIANPKWVKAVKGNKDDAKDSKWIGDLFRLGLVPGSYIPCKSIRILREYTRYRYKLVSCRSSEKNRYQNALTVCNVALDSVVSDIFGKSSTSIIDSLLEQSGNSINHEEIASKLLRKLKEKESAVIESIEGYQMTDAQKYRMRLVRAHMDYITAEIQDIDTQIKSLISSNTAFENAIQFLCTIPGVKHDSAITIISEIGIDMSQFSSSKRLCCWAGLTPSSNESAGKKKSVRITRAGVYLKPALVQCAHAAVKSDKSPYYKKKYESLVKRRGKKRAIIAIARMILTAIYQMLSTGETWNPSDLYKIDMPEALVEKQKAKAIKQAKKLLQREGLLPPDEPLAS

SEQ ID NO: 70116 - protein, 346 aa, unidentified
MEIHVIGIDLGKTVFHLVGLNQGGEVVVRKKFSRAQLLRFTSNLHVHLIGMEACGGAHFLGRALRAQGHEVRLMPAQYVKPYVKTNKNDFIDAEAIAEAVERPKMRFVPIKSDGQLDMQSLHRVRERWIVRRTAVVNQIRSLLLERGVTVRKGRKHLVAVLPGILEDPETDLSGPLRVLLAQLQWEMKHLENQIEEVDAVIVRTSGQDEACQRLLAIPGIGPLTATTIVSAIGNGAEFKKGRGFAAWLGLVPAQYSTGGKQKLLGISKRGNCYLRKLLVHGARAVLQTKDKQSSGLSTWLTQLTSRAHSNVAAVALANKLARMAWAVLAKGEAYRPPLLAAELVGQ

SEQ ID NO: 70117 - protein, 348 aa, unidentified
MMNLSIGIDVGDSDCFITGLTEAGELIFEGKMIDTNNEEEWRELLMDLSSRFRMQAAFEIGPHYEWLFDLLMEYCFDVQVINTSDFTLISRSSRKTDKIDSIKIAEALHRGDLPTVYIPAKAVRADRRLVSFIHKHSQSLSKVKGRIRSLLKPLRMKCPYGDVLGKGSRQWISEEVLPRLEDQEKMFLEMLLAQGDLLMEQRAELDSKVSKRLTEYENAKYLQSIPGFGPLTSLAVASAIDDVSRFAEPGRLSSYFGVCGSIFQSGSFRRMGPMTKRGNIHVRWLLSQSLKHLHNKDPKARQRYKRLKRGKPTGVARGAQMRWLTEIIWRLLTNKDVYRIALKPRTAS

SEQ ID NO: 70118 - protein, 372 aa, unidentified
MVEFSVYVGLDVHKETIAVAVAAAGRAEPVYRGEIANTPTAIKRLMHKLSPDDEVLGVCYEAGPCGYGLHRQITQMGHDCIVVAPGLMPRRATDRVKTDRRDALSLARLHRAGELAPVWVPGEAQEAMRDLTRAREDLKAIERVARQRLGAFLLRHGHVYDGKSRWTQAHFRWLERLHMATPVQQIVLTEYIDTVHDAQRRVAALTEQMRQACETWSMRPVVEALMALRGISLITAMTVLAELGDITRFDSPRQLMAYLGLVPSEHSSGGSKRQGGITKTGNAHVRRVLVEAAWAYRFPARKSAVIQRRAEQTSPYVQAIAWQAQKRLCGRYRHLIGAGKNTPQATTAVARELAGFIWAIACEVPVKTATAA

SEQ ID NO: 70119 - protein, 408 aa, unidentified
MNPLFVGIDVSSRNNVAYLMKPDGSKYSSFSVQNNLGGAKLLSERIVSALGSMQLSDVVIGLEATSIYGDSLVYALREDGRLGKFQRKIHVLNPKQVRKFKEAYPDLPKNDWVDAFVIADHLRFGRIAREVYMDDYRYKALQTLTRARFEVIQNLTREKQRFANYLFLKCSGMAQDKDIANSSSTTIALMERFETVDDLANSDLEELTAFVTETGRGRFADPAATAKAVRAAAKGSYRLPKTVNDTVNQAMSVSIASMRALKEQVKVLDKAIEQQFEIIPNTLTSIPGIGKVYSAGIIAEIGDIHRFDSQASVAKFAGLVWHKNQSGEFEAEHSRMIKSGNRYLRYYLLEAANSVRRCDSEFRRYYDLKFKEVNKYQHKRALALTARKLVRLVFRLLKDNRLYIPLEG

SEQ ID NO: 70120 - protein, 349 aa, unidentified
MLADELDYVVGVDTHRDQHAVAIVDAHTGAVIAQTTTAASARGYADTVRFADRHAPGDRLWAIEGTGHYGAGLVRHLQRRGEQVHEVDRTSRGERRLRGKDDQLDAVRAARSPLARERRARPRAGEHQEALRLLLLARRTAVDTRKVALVQLRSVIVTAPDGLRDELRQLPLGQLLNRCSRFRRSSSRTPAQLATILVLRTLARRVQTATAEAETLERELLSHVRALVPELLDEPGIGPIVAAQLIVTWSHHDRIDSEACFARIAGVAPLPASSGQTTRHRLSRGGDRQLNRSLHTIVLHRRQHDPATRDYIARRISEGKTPREAVRLLKRYLARHLYRVMQNAEPTMT

SEQ ID NO: 70121 - protein, 347 aa, unidentified
MKCVCMLNHYREGEVVEEITTVGIDLAKNVFSVHAVGSQGEVVVRRTLSRAKLSELIAQLPPCLIGMEACSGAHEWARRFAASGHTVKLMAAKFVMPYRKSGKNDGNDAEAICEAVARPNMRFVPVKSLEQQSDLSLHRVRQGFVEERTATLNRLRGLLSEFGHVLPLRASEVHRRVPQLLGKLPTRVAACARDLLEHAARLQAKTLEYEHEIKIHVRSNALACRAQTRLGIGPITASALVATVGNGHDFKNGRQFAAWLGLVPRQYSTGGRTRLGHITKRGDPYLRTLLVMGARAVLQRAASLTDPLSRWALAVRERRGYHRACIAIAAKNARVAWALLAKEPVAA

SEQ ID NO: 70122 - protein, 351 aa, unidentified
MIIIGVDFHPSVQQVAYVDTETGETCERRLNHSDGEAERFYRDLERRQVRVRVGIEATGHARWFERLLAELKFELWIGDAAKIKAARVRKQKTDRQDALLLLKLLIEDRFPRIWVPTPENRDLRQLIWHRHRLVQMRTRAMNQLQATAMNEGVRRKKTLWSKAGRQQLESLKLAPWATRRRQDLLDLVDGLNGTIAELTAAIEQEAHKRPEVLRLMTHPGVGPITALAFVLVIESPDRFACGKKISSYLGLIPEEDSSADRRRLGHITKQGNSLVRYLLTEAAQAAVRYDPDWRRRYIHLSKRRERAIAKVAMARRLAVSLYWMWRKSYDYQQHLKFGSYAGELELGHGVK

SEQ ID NO: 70123 - protein, 385 aa, unidentified
MTIQRTACKFIPRDYDVFAGLDVDKRSMSVVFADHDGGQRALRMANKAGPLLNYVRKHYPGQRVAFAYEAGPTGFGLHDELVRQAYTCVVAAPSKVPRARGERVKTNRLDSRKLAESLRGGQLPGIHVPPPIYRDLRHLVQLRDTHVRQLMASKLRIKSLLLYEGIPFPDPQEKWTTRALRALQTLPCSETVRFKLDDLLDTLHFHFQAAARATKQIRQHCLHDPELQQSIDLLLSLPGIGWIVASHLVARLGAPQQIKNGKQIAGFLGIVSSEHSTGEKENRGEITRSGDSRLRNKLIQSAWTAIRKDPELRAFYRRIYQRHPQKVAARKAIVAVARKLTQRIYVVLKEQRPYVIRPDSSIAPLTAEETVGPRDRLDGAQNDQP

SEQ ID NO: 70124 - protein, 313 aa, unidentified
MKSQTYIGIDISKNFFDLHSLPDGQGHHFEYDRKGIQQCLKMLKSSKPKLIVMEATGGYEVQLVCRLQTAGFAVAAVNPRRVRDFAKATGQLATTDKIAARNIAQFAATLQPPAQDLVDENTRIIRALVARRHQLVRMHTAESNRMEHAMDKQIARSIKVVLKAIEDEVARVEQQIRQRIERMPELKQKAEQIDSVPGVGETTASMLVSELPELGRLNRRQIAALVGVAPINRDSGQFRGKRMTGGGRRDIRARLYMPTLAATRHNPVIRRFYLGLIARGKTKMVAVVAAMRKLLTILNTMVATNQYWNPNIA

SEQ ID NO: 70125 - protein, 420 aa, unidentified
MKAYNVDNFAALIGIDWADKKHDICEHPTHSEKYHYAVINSKPEALHEWAMSLKKRYPNQQIAVACELKKGPLIYTLAKYNHLTLFTINPSTVAKYRKAFTPSGAKDDPSDALVQVEILTLHMHKLAVIEPESPPMRSLTQLVEYRRNLVQDSVNLSNKITATLKNYYPQVLEWFKEKDTFIFCDFISKWSSLAKVKRAKKQTLVDFFNSHNSHYAHVNDARILSIKKAMPLTDDIGVIEPNQLLVEVLIAQFRVLLKGIDTLDKAIKLAYKSQDDKVIFDSFPGAGPQLAPRLLVAFGSNRDRYEDASDLQKYAGIAPVIERSGKKMWTHWRYSCPTFLRQTFVEWAGFSIRYSFWAKAYYEQQKSKGKPHNSIIRSLAFKWIRIIFRCWKTKTPYDESKYLEALKRRGSPLLKFAINS

SEQ ID NO: 70126 - protein, 371 aa, unidentified
MRFYSSQHQFYAGIDLHARSMHVCVLDGAGTVVYDRNLACHFPTLLEALAPYRGDLVIGAECMFGWYWLADCCAENHIPFVLGHALYMKLIHGGKAKNDRLDAAKIARLLKGGNFPLAYVYPQGMRETRDLLRRRMYLVHKRAELITHLEILNAQNNLPPFGKKLSYAGNRAELHIPERFAHPSVHMSATLDLDLIDKLDELIAEVELYLTRTAKVDDVQMYHRLRTIPGVGPILALVLLYEIHDLARFEEVGQFLSYARLVRCEHESAGKKLGWGAKKIGNAHLRWAFAEIACLFLRASERAKQWKQKQEQKHGSGKALGILAARLARSVFHMIRKQEAFDAKRFWSGQVSGEQPVASRKKPAKSRRKAS

SEQ ID NO: 70127 - protein, 392 aa, unidentified
MYIVGIDIGKNHHEASIVSPEGKQIGHSLRFATTHKGADSLMSFIFNNIGNSSCIFGMEATGHYWYPIYSFLKARGYTIYVINPIQSDSLRKMYIRQTKNDSIDSFLIAEVIRFGQFTTTSMADENILAIRQLCRYRDSVISSRTEIKLRIGTIMEQIFPEYEKQFSSLWVSTSMGILEKYLTPDNIENAPIDELFEIIKDKSHNRLTRAKAISIKEAAADTFGIKIAQDAFSFQLKQLIDRMNFLDKQIEALDCQILEYYEKFDCYLHTIPGIGMIAAATILAEIGDINRFKSSSALVAFAGIDPTVRQSGEFSSTHNHMSKRGSPYLRHAIFLAATTCSFHNSPLNAYYKKKRDQGKHHLTATGAVARKLTTIIYAVLRDSKPYEPKKFC

SEQ ID NO: 70128 - protein, 346 aa, unidentified
MNANAKVVGLDIAKSVFVAVGQERDGRRVWHRNAKRGEVLRMFREMPAMAVGIEACAGSHYWARELIALGHDVKLIAAQHTRAFVTGNKNDTNDAAAIAEARSRSSTKYVPINTPAQQDLQMLHRARSALMSERVAMINRIRAFATEYGQVFDKGVARFRDGLMAWLADPENGLSGSALMTFRELKEQLDDKEQRILAYERRLNQAAKDELAQRLMEVPGVGPLTATAVLATIADPRHFRSGRDFAANLGLVPREHSSGGKQRLYGITHRGDSYLRTLLIHGARSALRCAGNKTDRQLQWASSLAVRRNFNVAAVALANKMARVIWAILAHGRSYVPVWSNTTRPA

SEQ ID NO: 70129 - protein, 409 aa, unidentified
MRIIGLDIHRAFAEAVAWDDGKLKRLGRVDMRRPLLEAFAKKLSKEDVVVVEATGNAASVAAVIAPHVKKVVIANPKQVRVIAHAKIKTDTIDASVLAQLYASGFLPEVWIPDEPTQALRRQVTRRNQIVRQRSRLKNIIQSIPHSHLIPSCPHADLCGASGRAWLFHQVLPEDERLAVERHLREFDRLGEDLKVIERDLARSALRDEGVKRLMTIPGVDMVVALAIVAAIGDVGRFEQSQKLVSYLGLNPSVRQSGPGPAYHGRITKQGRGHARGMLVEAAWAAARAPGPLRAFFLRVRARRGQHVAAVATARKLAVLIRHLLSKGESYVWARPALHARKLRDLELKAGYKAERGQRGAAHAYNIKSHRDQERRWVEQAETAYARFVAGWNPRGPKQARTGAATEGRR

SEQ ID NO: 70130 - protein, 348 aa, unidentified
MSESYEGRQIVGIDLHRRRSVLVRMTETGERLETVRISNDPEYLREVMTRAGEAPDVVLEACYGWYWAADTLAELGATVHLAHPLGVKMFSYRRVKNDERDAADLADLLRMGRLPEAWIAPPATRELRGWVRHRAKLVGLRSNLKCQVHGILAGAGITVPMSDLFGASGQHLLATASLATESRSRIDSLQRLITALDFEVDLFAKLVAGRLRTHPGYQAIQLIPGVGPVLAAVFVAEIGDITRFRQPEQLASWAGLTPKHHESDTTVHRGRITKQGSRLVRWAAIEAVQRLPGHTRIGQVRDRVAARRGRNIGVVAAARELTELVFYGLRDHHVRALAGHTPRTPVSA

SEQ ID NO: 70131 - protein, 374 aa, unidentified
MPNPTQPFMPAAVFVALDLSRTSWVVALRTSGDDRVSTHKLRPGDVDRLLDLIERARAREEQRSGGPVEVRSCYEAGYDGFWLHRRLRAAGVRNVVVEPTSLLVDRRARRVKTDRIDAGTLLRALVADARGDRGVWRLVRVPTPEQEEAKRLHRERRRLVRERVAHVNRIRGLLASQGIFDLHPLRAGCRERLDALVTGDGRPLGAAWRRDILRELERLELVLSQLAAVEVERDTVAAGDPTIGRLTALRGIGPETATVLAREVFYREFANRRQVAGYAGLTPSPFASGDRSRDQGISKAGNALVRTTMVELAWLWVRYQPDSRLARWFVARAQGAAGRIRRIAIVALARKLLVSLWRYLTQGLVPDGAALKAA

SEQ ID NO: 70132 - protein, 314 aa, unidentified
MSELMHFVGIDVSKNYCDVAVRPSGEKMRFANDDEGIDQVLQRFSGLTLELIVLEATGSYHRLLLSRLIAAGLPAIAINPRQARDFARAIGRLAKSDAIDADVLAEFGEKIRPEIRSIADESTQRLEALCTRRRQLVGMLAAEKNRLHSALSSMRPMIKKHIQWLEKEIEQLEKELDQQIRSNPAWREKDDLLRSCKGIGPTTSSMMLACLPELGTLDRRDIAALVGVAPFNRDTGKHRGRRHVQGGRPDVRCVLYMATLAAIRYNRAIRDFHQRLIAAGKFKKVAITACMRKLLTILNAMVRNNTPWNADYAS

SEQ ID NO: 70133 - protein, 310 aa, unidentified
MERIFVGLDVSKDRLDVHVRPTDDSFAVAYDEEGLAMLVSRLGLLQPTLIVLEATGGYEVKVAAGLANAGLPVAVVNPRQIRDFARATGQLAKTDTLDARANARFAETVQPAARPLATAQAQVLAALVARRRQLVDMLGAEQNRRRQARDPGLQKRIRAHVTWLTRAIEELEGEIKRLIRSSPVWRAAEDLLTSAPGIGDTTAHALIADLPELGRLDRRRIAALVGIAPLNRDSGLWRGRRMIGGGRPPVRRALFMATLVAIRYNPVIRDFYRRLTTAGRPKKVAVIAAMRKLLTILNAMLRDHRQWQPA

SEQ ID NO: 70134 - protein, 436 aa, unidentified
MTSHCQSYHYKLSGGCFLSFKILKHNCCGLDVHKTWIFACVAITDSLNRTEYKQARFSSFTKGLQELCDWLAKYNCIDVCMESTGKYWIPVFNILEKNNLWVTLSHPKYTKPQKGNKTDRKDAKWICDLYMCGMVKPSFIPPADIRELRDLVRYRFKLGCMITSEKNRAHNCLTVSNLKLDDVFSDIFGKSSRSITEQILQHPGETFDVTPFVDSRCKTPVEEIQAAVDGAISAEQAVKLRQCLSHIDELEKHKAEIEREIFRLSDKYGDALTLIRTVPGFDKNPLTAIQVLSEIGGDMSVFPTAKNLVSWAGCCPRNDQSNQKIKSTRISRAGSYFKPVLVQIANALIKSKKHPEFAARYRRIKARRGHKKAIIAICRMLLTAIWHILADLKPYTPEGFLEARPVKEAKVLTTSQALHLLKQRGYIIKDETVPVT

SEQ ID NO: 70135 - protein, 344 aa, unidentified
MDYYVGLDVSLRSVAVCVIDSDGKAVLERSVPCEIEDISQCLLLLRATELRIGFEAGAMSQFLFFGLQAAGFDVVCMEARQVNAALSAMRNKTDKTDARGIAQVLRSGWFNAVHMKSREAHAVRALLSSRKAVQRKCIDLANEIRGLFRIFGIRLPSRVEQGSFDERARPIIEADPSLSFALLPLLDARVVLYQAFLELDRRVKQIASRDEVCLRFMAIPGVGPITALTFKAAVDDPDRFSSSRTVAAHFGLTPRRYQSGEMDNPGRISKAGDGDVRAALYSAANAMMMRSIAGSDIKSWGLRLMKRKGRRRAVVAVARKLAVVMHRMWADNTEFHQRPLEGSV

SEQ ID NO: 70136 - protein, 322 aa, unidentified
MSEPILGVDIAKKKFDVALLMNGKLKHKVFTNNQEGFELLTAWLHKQSVDHVHVCLEASSTYGDELAAYMHDAGHTVSIVNPARIKGFAQSELMRTKNDKVDAGLIARFCHAKHPAPWTPAPPEIQQLQSLVRRVDALITMRTQELHRLGTAHTTIEHSIQEHVAYLDREIDGLKKQIADRIKNDPDLKAKRDLLMTIPGVGEATIAAILAELHMFERCDRVQKLVAFIGLAPKQFISGSSIKGKPRLSKVGHARLRKALYMPALVSIQCNPVVQIMYHRLKGKGKNGKVIVCAIMRKLVHLIFGILKSGRPFDPNYRQLCA

SEQ ID NO: 70137 - protein, 368 aa, unidentified
MVVVVEMSKASWLVSSVVPGVERQPLKKLEPDATALLRLIERWRTEAVRAGRPIRRIALAYEAGRDGFWLARWLIARGIEAHVIHSASVAVSRERKRAKTDRLDAAMLMRVFLGWLRGERGHCGMVAIPTMEEEDARRPNRERESLVNERSRIINRMKSALARLGIRGFKPHLRKAPERLAGLRTAEGTGLPANIIEEFRRDMARLALVREQISSIEKTRAERLERAPDTGPHAMVRLLARVIGIGIETADMLVREILSRKLRDRRALARYAGLTGSPDESGLKSREKGLAKAGNARVRRGLIQLAWRFLMFQKDSALARWYRTRTEGPSGARKTTMIVALARKLLIALWRLVTTGEVPDGVELRTAA

SEQ ID NO: 70138 - protein, 321 aa, unidentified
MEHDIVVGIDVAKLKFDAAVWLGETKYKTKVFANTPKGFELLSAWLQPYQGAHLCMEATGSYFVALATFLYESGWTVSVVNPFQIHSFGKSELIRNKTDQVDARLIARFCASHKPPSWQPAPLNERQLLALIRRLDGLREMRQIELNRLDVADNIVKPSIFEMIEALAQQIHETEKKIKKHIDAAPELRQRKALLTSIPGIGDVLSATLIGYLGDMSKFSHSGKVVAFAGLNPYQKESGKWQGQSHISKRGCANLRKALYMPALTAMTFNPVVKSLRDRMLARGQKGKVVVCAAMRKLLQIAYGVLKSGLPFDEKIPLAKA

SEQ ID NO: 70139 - protein, 400 aa, unidentified
MLSVGIDVSKEKSTVCGMRHLGEIVFGPFEIAHTESDLSELARMIVRLDDDARVVMEATGIYHLPVATFLREQGLFVSIINPYEMKVYRSQDIRKVKTDKRDSMVIANYGVDKWINLREFTPQEDVYAELRLLGRQYRFYMESRIEQLLNLTHLLDYTMPGLKSCFSGWSEYSGKDKLCDFVEEYWHYDNIIKFSESKFVERYQKWTKKKGYQFSETKAVQIYRLAKEGIPTVPSNAPSTKMLLLEATKALREINSALFAILTRMKELAKTLPEYPVVRAMSGVGDVLAVKLMAEIGDVRKYHSSKSLVAYAGIDPPPYESGKLIGTNRHITKRGSSTLRKIGYEVMRCVKANGISEDDPAVYDFMLKKESEGKAKKAAKIAALNKFLRIYYARVLEVYA

SEQ ID NO: 70140 - protein, 337 aa, unidentified
MAHISSSTPNLRFQGIDVSKATFDVAWWGDSPPLRMTNRTYPRTPGGVARWLADLSPSEWGSTGVVMESTGGYCKELAGWILAACPALHVSIANPFKVKAYARSLGTRNKTDRVDARILAQFGQERQPGPWVPLSTSQEALRDLTRTRSKLKSTLTAYRNRLKGHVVTSPLVRKVQEELIGNLTRQIKTLEQGIKDLCAQEPWLKRDLALLMSIKGVGIITAATVMGAVGDLRAFRRRGELCAFLGVSPRQFQSGTSVQGKTRMCRIGSKHARAALYMAAVATCRWKTPLGDYYRRMVVAGKPKKSALGALMRKLLVVMRAVLIQGTPYHAPAQAAS

SEQ ID NO: 70141 - protein, 339 aa, unidentified
MALYCGIDLHSSKSWIAILDDQLEVIRETSVGNDLDRVLEVLEPYRGELVGVAVESTWNWYWLVDGLMDAGYRMHLTNTWAAQQWEGLKYTDDRHDARWLARLLKLEILPEGYIYPKTERPVRDLLRRRGFLVRKRTSFLLSMRGAFECRTGMRTNSNDVKRWTAADVEAHVHDSAAALGITCLLEPMKVLTAQIQTVEKEVLTRARLRDEFALLQTVWGIGKIVALSVMYEVGDIGRFRKVGDFASYCRLVKTARLSVGKSKGSGNRRNGNPYLSWAFSEAAHHAVRHHEIARRYFQRKRSKTNGIIAIRALAHKLARASYHVMRDQVDFDPAKTFGS

SEQ ID NO: 70142 - protein, 347 aa, unidentified
MLIIGCDLHTRTQQIAMLDTETGELVERRLEHENGEAKRFYEGLQEPALVGMESTGYALWFAALLAELGHELVVGDAAKIRAMEPRKQKHDRRDAAHLLNLLVRGDFPRLWLPSVEERDVRVLLEHRHQLVELRTRAKNGLQAIALNYGLARRSRLWSERGQAELQKLPLREGMARRREDLLRLLAQLDSWIHELDQRLKREAEEREAARRLMTHPGVGPLTALGTVLVLGPVERFPDARHVTSYVGLIPQEESSGGHQRFGHLTKQGNRLLRFLLVEAAQTASRFDPGLRRGYRRLAFRKGHALAKVAVARKLLIRLYIMLRDEIDYAEFVRRGSHAGMLGDVALV

SEQ ID NO: 70143 - protein, 392 aa, unidentified
MRKPKRHKALNDLNRSLTPLDLNRTLIAVVELSQKTWLVAGIIPGVERQPLKKLAPGEDGLLKLLHRWRDEAEKAGQKITRIAVAFEAGRDGFWLARWLRAQSIEAHVIHASSVAVPREHRRAKTDRLDTELLKRAFLGWLRGERHHCKMVVVPTFAEEDAKRPNREHQSLVAEQGAIVNRVRATLARLGIRGFNPRLQTAAEGLPSLRTPEGEAIPPNTLAELQRDLQRRRLILEQIQQIEKSRLERLKKAPRTGPNAMVLLLARVIGVGIETADMLVQEILSRNLRDRRAVARYGGLTGSPDASGNKHREKGLSQSGNSRVRRGMVLLAWRFLQFQKDSALAQWFFARTANARGLRKKMIVALARKLLIALWRFLREGVVPEGVVLRSAH

SEQ ID NO: 70144 - protein, 338 aa, unidentified
MFTIGIDPHKCSHLAAVLDERGTLLEQLRVRADCHQRERLLKFATSYSPRVWAIEGARGLGALLAQQLVAAGETVLDVPAKLSARVRVLDNECADKNDAHDARAAAIVAINNRRLVRVGPEDHAAVLRMLAKRHHDLHGRRTQSICRLHALLATMTPGGLPRLLSADRAARELRRIRPTDSVGAARRQACSELLGEVRNADRELEALHTRIVAGVRAADTTVTNVYGVGPVVAAVLIGYTGDITRFATKGHYARYNASAPLNASSGPRPRHRLNNRGNRQLNHALHMAAVTQISHNSTGRAYYQRKVAEGCGDKEALRALKRRISDAVYARLHADATR

SEQ ID NO: 70145 - protein, 342 aa, unidentified
MKITTIGLDLAKQVFQVHGVDQRSRMVVSKRLRRAELVSFFASLPPCLVGMEACAGAHHWARVLGGLGHNVRLMPPQFVKPYVKSNKNDARDAEAICEAVTRPSMRFVPIKGTEQQAVLMMHRVRQLLVRQRTMVANAIRGHLAEFGIVIRQGVKTLPQVLPSLLQEADTNLPPTARSMLALLSEQLRYFSERVSQVERELLGWHRASEPSRRLEAIGGVGPITATAIVASVGDARSFRSARQFAAWLGLVPAQHSSGGKQRLGSISKRGDTYLRTLLIHGARSSLRALQRRPLQQSPWLARLLLRRHPNVVTVAMAHKHARIIWAMLTSGSGFRPELSAQR

SEQ ID NO: 70146 - protein, 391 aa, unidentified
MVYVGIDVAKDKHDCFITNSDGEVLFDVFTISNNRDGFDELYQKISSAMEHSDKVKVGLEATGHYSYNLLGFLVDKGLDTFVINPLHTNLYRKSLSLRLTKTDKVDARTIASMLMSDVNLKSYTSTSYHNESLKSLTRYRFEKVQERAKLKSSVSRLVTILFPELEKLVPTLHMASVYALLSEFPSAESVAAAHLTRLTNLLETASKGHYGKDTAIRFREAAKNSIGSHMPAKSLELKHTIQLIQILSAEIDEIEKEIKIIMDEINSPILSIPGINYCMGSMILAEIGDFDRFDSPDKILAYAGLSPSTYQSGQLDSSHSHMEKRGSKYLRYALFNATKYVCHWDKSFSAYLAKKRAEGKHYNVAISHAAKKLVRLIYQLEKSGQQYRKAA

SEQ ID NO: 70147 - protein, 389 aa, unidentified
MKIFVGIDIAKLNHFAAAISSDGEIILEPFKFTNDADGFQLLVSKLESFDKNSIIIGLESTAHYGDNLVRYLVAEFYQVCVLNPIKTCQMRKNNVRKTKTDKVDTFVIAKTLMMQDDLRFITFFDLDMMDLKALGRFRQKTIKQRTRLKIQLTTYVDQVFPEIQYFFKSGLHQHAVYALLKEAPSPKEIASMHMTHLANLLKVNSHGHFTKEQAKELRVLAQKSVGANDSAISIQITQTIQQIELLDSQLEKIEAEMTDIMKYNDSVIMTIPGIGYINGGMILGEIGDIHRFSNPNKLLAFAGLDPSVYQSGNFQAKTTRMSKRGSRVLRYALVNAAWNVVRNNATFKAYYDAKRAEGRSHYNALGHCAGKLVRVIWKMLTDEVEFNLE

SEQ ID NO: 70148 - protein, 487 aa, unidentified
MTRRKMSTFERLKQGKKLNPQQRKELGRRLQAQDPGLEIIYRDAAGIDVGSESHFVAVPPGRDPQPIREFGSWTAELQQMVGWLKKCEVGTVALQATGVYWMALCDMLEEAGIQVWVVNAQGTKNLPGRKSDVQECEWLRRLHTYGLLRNSYRPPEQIRGVRDLWRLRERWVKDAGRAMQQMQKVLTEMNIQLTNALSDLSGVTGMAIIRAMLAGERNPWKLAQLRDKRVNASEEEIAHSLEGTWREEKMFELRQVVEHYDFMSKQMGELDRELQKRMAAMPGRETAGSAVAEEEKAAEMPQKKCKKPRRKKPPKNAPVFDLRAELRRLLGVDLLTIDGVNVMIAQAVYTEVGPDLSAFPSEAHFSAWLGLTPQRSISGGKLIRHEKRKVKNRLAIALRMGAETLERSDSYLGERFRCLKSRLGARKAVKAMARYLACLIYRLMTKGQAWIDRGKAYFEQKKAEREVRTLTRRAKAIGMQLAPLATT

SEQ ID NO: 70149 - protein, 422 aa, unidentified
MLEETPQDAAPVERVAALDIGKAEVVCCVRVPSLSGSGRRVQEVRTFTTMTRSLQGMGDWLAGLGVTRIVMEATSDYWKPPFYLLEAAGFDVWLVNAREVKHLPGRPKTDLLDAVWLCKIAERGMVRASFVPPAPIRLLRDVTRYRVDLVGERNREKNRVEKLLEDAQIKLSVVASDIFGVSGRAMMAALIAGQRDPKILAQLARTAMRAKIRDLEEAFVGRFSEHHAFLLARMLAHIDALDADIAAVEDRIEELIAPFATAVATLDDIPGVGPTAAQAIIAEIGVDMSRFPTAGHLASWARFAPAVKESAGKNKGNGATGHGNRYLARALGEAAVGASRTNTFLGERYRRIARRRGKKKAIVAVGRSILVIIWQLLNTERATFTDLGPDYYDNRGGTQRAVRNHIRGLQALGYQVTLQTAA

SEQ ID NO: 70150 - protein, 336 aa, unidentified
MMNPVVGLDVSKGESQVQAFLDKGQPFRKSFSVKHTVEGFENLLGFLKEIERVADGKQPSVILESTGHYHSPVIQFLEEQQYVYIIVNPLISHRARSTSLRKVKTDAVDAFLLCELYYKEEVEPYKKRGIQLLNLRNLTRQQETISSISAQTKVQLLTVLDQIFPEYRGVFGNLYSKVSLQTLFLFPTSEHVLNTTESVLTEKIVSLCTRRSEKWAKETAQKLIEAAVQNPFQSNLYESHIFNLKMFITIVLQYQEHLSQLETEIDALAKEIEEYKIIQSIPGIGEKIAATIISEIGGIDRFNHPKKLVAFSGIDPTVYSSGRFTATNNRITKRGF

SEQ ID NO: 70151 - protein, 392 aa, unidentified
MLFVGIDIGKNNHVASMMDEYGKVVFKAFSFSNTTDGGNALFSKLSSYSSNPSDFEIGMEATGHYWLSVYSFLFEKGFLLHVINPIQTDGWRKGTEIRKRKNDTIDSVLIADLIRYGQFVQTRLADEDLFSLRTLTRFRTYLVESISDLKRKVVCVLDQIFPEYQSIFSDIFGKTSKELLLQFSSPIDFETISSESLAELLAQLSRQKVGAAKAEQLKAAASSSFGITFAKNSFTFQLKALIEQISFIENQVKETESEISNIMRKLDSPITTITGIGNVTGAAIISEIGDISKFDNPRKLVAFAGLDATVTQSGEFEASHNVMSKRGSPYLRKAIFQAALIASFHDPVLSVYYQKKKAEGKHHLTCVGAVARKMCNIIYAVLKNNQPYVPKA

SEQ ID NO: 70152 - protein, 392 aa, unidentified
MRISVGIDIAKEIHWVTAIDAEGVVRIDRKLLNTPADIEALAGELTALRGTVRIGLDVIGGIAGLTEAMLAEAGFALVDVPGIAVNRARQGTVGGENKSDPRDARTIAGQVRTRSDLRPIEPATELDLEIRLLVSRRGDIVQAQTQRLSRMRDLLVGIFPGLEACLDLKTKGPLHLLTKFVTPAELRSAGKKRLVRHLQAAGGLPKVKDLADRVLTVAAEQTIAVPAERVTAGLIRELAIEALASRARVIELDRELEALLQRHPDAALIRSLPGMGAVLTAELIAEAGNLARFRSADALASAAGMAPVLRQSGRTRFLRRPNGGNKSLKRIFYQSAFCSLAHDDSRAFYERKRREGKRHHQAVIALARRRVNVLWAVVHSRTPFQTGFKTAT

SEQ ID NO: 70153 - protein, 357 aa, unidentified
MTMAIGIDVHKKTSTFFAYDGDGEPLNDFNQRFKKVPSNREGYLEVLAWLGDSDCEFLIENSTKTHDVYWILQGLGYSRLYVAHSVDLKRITKSNKKTDQFDAEKLATYMRVKQQNIDQFRTCYICTPEDMQIRRLCRIAKQELFEIGRIRRRIRSHLLLTGRDWPGSLSTKWECEILMTKEEDPGLRHLGRQLNDCRLRCDAAEKAVVEAIERNERMSAIFERLKEIPGFGNITAAYLSATIVDIGRFDNPKKLAAYLGVVPRMRDSGETEDHSGLTRSGDPAARWLLIQATFRLVNSSAPDSHLKAFFAKKNGGSIEELREADSSSLLKRPALVAAANKLIHIVFALLTHPDRHW

SEQ ID NO: 70154 - protein, 322 aa, unidentified
MAMLSFGGIDVSKDRLDITVLPDEQCSSVSNDAAGWAELVEQLRGSSITAIGVEASGGYERGVVRALLAANLSVRKINPFKLRQFAKASGTLAKNDRLDARMIASFVAIMPTRPAQRQAPMIEQLAAMLTVRRQLSDHKVATENASKLLEDSMLRRLSRRRVARLTADIELLDQRLVEIVTADAALAYRFRLLTSMPGVGAVLACTLIALLPELGQMSRKQVAALVGLAPYDFDSGKLKGRRCIWGGRARVRHVLYMAALSASNWNPELKAFHDRLEATGKKPKVVIVAVMRKMITMLNAMLRNGTTWVDRYNGRRSVPTAR

SEQ ID NO: 70155 - protein, 341 aa, unidentified
MEQATTIGLDIAKHVFQLHGADAAGHVLFRKRITRVRLLSFLAAQTRCVVAMEACAGAHYWAREIAKLGHHVRLIAPAYVKPFIKRQKNDAADAEAICEAAQRPSMRFVPVKTEEQQANGIVFRARDLLVRQRTQCVNALRGHLMEYGYVFPKGITHVTTLVALVEDPQSSLPDSVRVILKLLVDTFTALEAQIAVLDTEINQRSKSDPTARRLMTIPGVGPIASTAITALVPAPEGFPAGRDFAAWLGLTPLQKSTGGKQKLGAVSKRGERTIRRLLIIGASAVVQQASRRGAPNGSWLAQMLARKPKMLVTVALANKMARVIWALLVKGGTYRAPAVAA

SEQ ID NO: 70156 - protein, 392 aa, unidentified
MYIVGIDIGKNHHEASIVSPEGKQIGRSLRFATTHKGADSLMSFIFKNIGNSPCVFGMEATGHYWYPIYSFLKVKGYTIYVINPIQSDSLRKMYIRQTKNDSIDSFLIAEVIRFGQFGTTSMADENILAMRQLCRYRDSVISSRTEIKLRIGTIMEQIFPEYEKQFSSLWVSTSMGILEKYLTPENIENAPIDELFEIIKDKSHNRLTKAKAISIKEAAADTFGIKIAQDAFSFQLKQLIDRMNFLDKQIEALDIEIMKYYEQFDCYLHTIPGIGIIGAATILAEIGDISRFKNSSALVAFAGIDPTVRQSGEFNSTHNHMSKRGSPYLRHAIFLAATTCSFHNSPLNAYYKKKRDQGKHHLTATGAVARKLTTVIYAVLRDSKPYEPNKFC

SEQ ID NO: 70157 - protein, 364 aa, unidentified
MAEQARAVTAGVDTHADVHVAAVIDEIGRVLGTESFPASVIGYHAALSWMRSHGRLAKVGVEGTGSYGAGLARYLASQDVAVVEVIRPNRQARRRRGKSDTADAIAAAVAALNGEASGSPKSHDGTVESIRALRVARRGAVKAATQAGNQLRDLVITAPEPLRATLVSLSTDARVDRAARFRPGPLTDPIAATKQAMASLARRHQQLRAEIARLDTALQQLVPTAAPATFLARQGVGLQGAATLLSTLGDNPTRLRGEASFAVLCGASPVDASSGKQRRHRLNRGGDRQANSALWRIVVVRMTHDPRTQAYVAKRTAQGKTTKEIIRCLKRYVAREVYKTLIRPTGLEISPQHPTGGSLTTTTS

SEQ ID NO: 70158 - protein, 460 aa, unidentified
MNRKRSKSRIDRTLPMMHPNAAAIDVGATIHMAAVRADRAPQPVRSFGTFTTDLHRLVDWFTECGVETVVMESTSVYWIPIFELLDARGFTVFLVNARDAKHVPGRKTDVSDAQWLQRLHSYGLLRASFRPKGQIAELRAYVRQRERLLEYAASHIQHMQKALTEMNLQLHHVVADITGSTGLRIIRAILAGERDPEVLACLRHYSCHSSAETIAKALTGSYRTEHLFALEQALALYDAYHEKASACDVRIEAVLKELSIHRGRDVGSVPPASRRQHRTDQANALAFDVRAALFALLGKDITRIDGLGPYLSLKLIAECGDDLSSWPSAKHFTSWLGLAPSNKISGGKMLLSRTRRSGGRAAALLRLAAVTVGRTDTALGAFYRRLSSRIGKAKAVTATARKVAVLFYNAVRHGMEYVDPGASSYETRYRTRVVNNLHRRAKAFGFVLQPLELKADAVVS

SEQ ID NO: 70159 - protein, 385 aa, unidentified
MTQAPGTGTVIDYERTLILAIELSNTSWVLAAQIPGLPGVKAKRSIDPTPEALMAAIENYRGRAEKAGRNVDRVIAVYEAGWSGFWLVRWLAKHGVEEAHVIQPSSVPVDRRARRAKSDGIDAELLLRTLLAWLRGEPRVCSMVPIPAEADEDARRRVRERTELVSERVGLVNRIGAVLATLGAGEYNPLRRDRRKRLDEMQTALGDSLPTNAHAKIARMLDRLELLLIQITELEQSRDAVLEDENPDRASSMIQQLAKLRGIGVQSATVLVREGFVREFVNGKALGSYAGLTATPYSSGGIEREQGIGKAGNARLRTVMVELAWLWQRYQPGSAQVRWFRERSGTGRRVRKVMVVALARKLLIALWRFATQGVVPEGAVMKPAS

SEQ ID NO: 70160 - protein, 330 aa, unidentified
MKNYEEAVGIDVSKKTIDAYCHQGQVHKEFVNDISGYKSLLKWVLKESKANKVFYCFENTGYYSLKLALYLHSQEVVYVEESPLKIKRSSGIVKEKTDRLDACLIARYAWLYREELTPSTVKSMSHLELGRLLALRDQLVRNNAGLKGTLKEMRVLLSSPTTDVGCIGLARSITYLQKQIKGIEDRIAEIIALNNSMSRNYELLSSLKGIGLVVACQLIYHTGNFTRFESWRAFSSYCGTAPFEHRSGTSIHRRKQCHYLGDRKMKSLLSMASVSAIQHDSELRLYYKRKLAEGKDKMVAINNVRNKLLARAFAVIKRGTPYVVLQQHAA

SEQ ID NO: 70161 - protein, 321 aa, unidentified
MYKYNQIFGVDISKDVFDVMSSQGKHLQFENSSKGFNQLTKHLTKKDLIVMEATGYYHYCLAQYLYDLGYIVSVVNPLAVKRFVQMKLSKIKTDKSDALAICQYASLNEVPIFTSRDSNQAECLQLMSLIEIYLKQSTALKNKLHGEKTLGIPSKTVYHSLNRSLKLIQKEVQLLENKLLELVKEHQHKQLTLLKSIPGMGTKTSIILIVLTDGFTKFDNAKQLCSYAGTTPTIRLSGTSVRGKSRISKMGNQKLRNLLFLCAFSACKYNKACRELYERIVTKGKSKKLALIAVINKLLKQAFAVAKSGLPYDENYVSNLS

SEQ ID NO: 70162 - protein, 331 aa, unidentified
MKNSQIIGIDVSKSVLDVFIHSLNFHFIVENNPIGFAGLLEICCTRLSCKPDNLSLCFENTGRYSRSLAVFLSQANITFAMVPALDIKKSKGLTRGKSDKIDAKAIALYAWRKRDELVPTKLHSEQVAQLRQLISLRDKLIKHRTAYKNSLKDLKDCFFDGETIFIKESQLRLIDSLNHELGLLEKQIEDIIFSLADWKFNYNLIQTIKGIGPVLAKYLIIYTENFTRFTNPKSFACFAGIAPFEYNSGSSVKGKTRVHPCANKHLKSLLNIAAMCVVQLNGEYKKYYIRRTIEGKNKMSTLNIIRNKLVSRVFAIVKRQTPYVDLTNFAA

SEQ ID NO: 70163 - protein, 345 aa, unidentified
MKITTVGIDLAKNLFQVHAVDERGKAVLRKQLRRAQVAVFFGNLPPCVIGMEACASAHYWGRTLQRFGHTVRLMAPQFVKPYVKTNKNDVADAEAICEAVGRPNMRFVPIKSIEQQAILSVHRVRKGFVKARTAQANQIRGLLGEFGLIIPQGIINVTKRVPELLEDAANELPLAFRQLIERLAQHLKELDRQVKEFEKEIIAWHRSSELSRKLEKIPGIGPLAASALVASIADAHSFDNGRQVSAWLGLVPRQSSSGGKATLLGMSKRGDAYLRTLLIHGARSAILAAKNKTDNTNGWLVNLLNRRHPNIAAVALANKNVRTVWALLAHGGEFKANYVPARMTA

SEQ ID NO: 70164 - protein, 429 aa, unidentified
MNIKPIAGIDVGKFFSEMVILSPSNELFARMRIHHDSNADMRRAIELLKKAEKDFASRPFIVMESTGHYHKILFHFLQKSGFEVSTINPIQTNCIKNFGIRKVKNDKVDARKIALLYRFHELKPTSISNEDIDCLRSLCRQYYKLSDELTAYKNRFISIVDQLMLNFKEVFPNVYSKTAIAVLEECPTPTAIIEADRDKLISIIQNNSRKSLEWATKKYELLVSKAREFEPLSINNAANVTMLGIHIAMIKTLQENLDKVLKAIHQLIADDLSKDLPVMALTIQLLQSIPGVGFLSAATIVAEIGDFNAFSKPKKLVAYFGIDPSVRQSGEFTGTHNKMSKRGSRLLRRVLYTIALANIRTKRNNEPCNPVLMEFYKKKSQNKPKKVAIGAVMHKLVFIIFAVLRDRKPFELRSPEQHAKILAKNRTVA

SEQ ID NO: 70165 - protein, 344 aa, unidentified
MDHFAGLDVSVKDTSVCIVDDAGKIVREVKVASEPEALLAVLKNPAYHFERIGLEAGPLSQWLFSALAEAELPVVCVETRHMQAVLKAQINKTDRNDARGIAQMMRVGLYRPVHVKTLRSQKLRMLLTHRKLLQSKAIAIENDLRGTLRNFGLKVGMAGTVKFEARIRELVENFPDLAGLVEPLLVVRRVLREQIGILHRRLLAIVRDDEVCRRLMTVPGVGPVVALTYRATVDVPARFRKSKSVGAVFGLTCSKYQSGEIDWSGRISRCGDEMMRTMLYEAAQVMLTRTNKWSWLKAWAMQIARRRGMKKAIVALARRLAVILHRIWVDGTEFRWTREQAVAA

SEQ ID NO: 70166 - protein, 366 aa, unidentified
MKKISTVQTFSNEILKEQKLTVGLDLGDRWSFYCVLDEAGKIILEQKVATTPEAMQQTFGKIPRSLIALETGTHSPWVSRLLTELGHEVIVAHAQKVELITKSNRKDDRHDARTLARLARIDPELLGPVRHRSAKAQIHLTVIRARAELVSARTALVNAARGLVKSFGERLPKCGTYQVNEKLAEGVSAELRDVLVPLLREVESLNERIKEYDERMEKIAQEVYPEVFLLKQVKGVGTQIALTYILTIEDPYRFPKSRQVGCFLGLRPGRRNSGESEPQKKISKEGDRYLRTMMVQGAHYILGPFGEDSDLRRWGLKLAERGGKNAKKRAIVAVARKLAVLLHRLWVSGEVYEPLRNSQKAMRAAA

SEQ ID NO: 70167 - protein, 407 aa, unidentified
MSKTCGIDWSERHHDVAIVDDQARVVGRARVSDDAAGFTRLLELLAEHSDGEDGRIEIAIETHKGLFVAGLFAAGFTVFAINPRAVARYRERYGQAGGKSDPGDAGVLANILRTDRHVHRPLPADSELVRAVKTCARQHQEAIWARQQAMNRLRSLLHDYYPQALQAFPNLAHRAAASVLRAVPTPQTAQRLTLNRVVALLKKAGRRNDPGLAETIRTTLRAPALRQPAPIEHALGVAAVGLIDVITAMSDAITALETELATVCDEPRQAAGIPSQPGLGTVLGARVLGELGDDPRRFADTAGLRSFAGTAPITRASGRSRVVTSRRICNRRLGDACHWWAFAAITKSPGARAHYDRRRAAGDTHNAALRNLANKLLAKLWHCLQTGTLYNEATAWPASPTPKQAAA

SEQ ID NO: 70168 - protein, 385 aa, unidentified
MRQVAEEQSAWDGAAVFVAMELSKSTWLLAVQGSPSGKTSSHRLEGGDVAGLLALLDRLRSREQQACHGSVVQIVLGYEAGYDGFWLQRRLVAEGICCHVMDPGSLQVNRKARRAKTDRLDAVMLLRALIAWWRGDRAACHMVQAPSVEREDARRTHRERQRLITERVQHVNRIKGLLSTQGIYDHQPLRRDRWTRLAELRTGDGRELPPRLRREIEREFKRLELVLEQIEAVEAERDAAAMQPVAGDTDAAKVTLLAKLGGIGIELATVLVREALYRPFTNRKEVAAYAGLTPSPYASGDRHREQGISKAGNPLLRKSMIELAWLWLRYQPDSALARWFVERVGTTQGRVRKITAVALARKLLVALWRYVTTGLLPEGARLKAA

SEQ ID NO: 70169 - protein, 344 aa, unidentified
MDKISTIGLDLAKHVFQVHGVDAEGTVVVRKRLRRGEVSGFFAKLGPCTVGIEACASAHYWARAIGALGHTVKLMPPAYVKAYVKRGKNDASDAEAICEAVMRPTMRFVPVKSAAQQASGMIYKVRDLLVRQRAQATNAFRSHLSELGIVAAQGRSKLAELFTMVRDANDTSLPAAACAVLEDLAGQIEALSARIERLDEAIVAQVRSSEAGRRLTSIPGVGPITAGALLAMVPDPGSFRSARHFATWLGFAPRQKSSGGKQRLGSISKQGNRYLRGLLILGAANVLRFMRKSAPVSAWLAALRQRRPFKVVAVALAHKMARIVWALMVKGGVYRAASPAGATS

SEQ ID NO: 70170 - protein, 336 aa, unidentified
MTITTVGIDLAKNVFAVHCVDQNGKAVLVKPKVSRAALSELIAGLPPCVIGMEACSGAHYWARLFRQYGHDVRLMAPKFVSPYRMAGKTGKNDAADAIAICEAVQRPHMRFVPVKDESQQAMQCLHRTRQGFIQERTATYNRLRGLVSEFGVIAPQSTDALRHAVSDQKETLPVQVRLCIDDLLAHVTNIEEKIAEYDRVLSRVAKTDHRSQQLMELKGIGPTTASALVASIGNAHDFKNGRQLAAWLGLTPSQYSSGGKSKLGRITKAGDAYLRTLLVQGARSVMVGAENRTDSFSRWVCSLIGIVKEIKKSYKSTGSKRIVYRCNLIANPCVYV

SEQ ID NO: 70171 - protein, 341 aa, unidentified
MSYLGVDLHTNSFTVCRQTKQDKRSFMTFSLSQMDKFAKTLRNRDEIAVEATGNTSWFVEQIHERVGKVVVVDPNKFKVIRKSVNKTDKNDAKMLAYFLSKDMLPEARMKTKENAQLHSLAATRDKLVRQRTALINKIHNVLNSEGVKFKKETLGTEKGLKAVFSYHWDEVVQIELEVLADQIRHLKDSVKKLDEQISDKGKGLKGHDNLVSIKGIGSNSATILMSVIGDINDFATPAKLASYFGIVPIVRDSNETVHHGRITKHGSKLARTTLVQCTLAAKRFSPYLRKYYERIKSHRGSGKAIIATARKLLNIIFDTLKNNWVFEDFPNFVLASSCIKK

SEQ ID NO: 70172 - protein, 419 aa, unidentified
MSFKIIKNNCCGLDVHKTWIFACIGITDSNNRTEYKQARFSSFTKGLNELCDWLAKYNCNDVCMESTGKYWIPVFNILEQRSLWVTLSHPKYTKPMKGNKTDRKDAKWICDLYMCGMVKPSFIPPADIRELRDLVRYRFKLTCMITGEKTRAQNCLTVSNLKLDDVFSDVFGKSSRSITEQILQHPGETFDVAPFVNSRCKTPIVEIQAAIDGAISKEQAVKLRQCLDHIDELNKHISEVEQEILRLSDKYEVALNLIRTVPGFDKNPLTAIQVLSEIGGDMSVFPTAKHLVSWAGCCPRNDQSNQKIKSTRISRAGSYFKPVLVQVANALIKSKKHSEFTNRYKRIKARRGHKKAIIAICRMILTAIWHILSDLKPYTPEGFLESRPVKEEKVLSTSQALNLLKQRGYIIKDKPLAVF

SEQ ID NO: 70173 - protein, 400 aa, unidentified
MLSIGIDVSKGKSTVCGMKPGGEIVYTPFEVQHTREGMSELVSLLRGSGEEVRVVLESTGSYHCPVVAALLENGIFVSVVNSLRMKRFCSQSIRRVKTDQIDAMQIALYGLAYWQELQPTRLPENTYRELQLLARQYYQMTSLLIKAKVDFNALCDQVLPGMQELMSDHAGRHKLSDFVLGYRHTTHILKMGETRFRKDYCKWAEKKGYRNHERMAALIFATAQNGIPVLPDAPSTQIVITEAIRVLHTVEASRDAILTQMQALAKTLPEYSLVREMPCIGDTLAPRLIAEIGDVRRFHSKRALIAYAGIDAPPYQSGKFCANNRHISKRGNRYLRKTGYEVMQSYVMHKPANDPIFTFIEKKRSEGKSGKLAMVAGLNKFLRVYYGKVTELYRSLPAIE

SEQ ID NO: 70174 - protein, 398 aa, unidentified
MEAAHGVVLGFDVGRYSHHMTAVDARTGEVVASAPVEQVEGQIRDAMAPHAAEGALVVVDQPGDLSSLLFAVARDMGFEVGFITPRAMAKGIELYGGELKSDAHDSFVIADLAARIPSLVRPVPERRADAEELASLMSYDRELTDDVRRAASRIHELLLATCPALGAVYTGQRVKQRLPLAMLARFGGAGGLAASGRDEVEEWARGQPRCGARGLAFVGSALEAVGSQGVTTTSSPFYDELLRIEAASLRSALDAREAVGGRVDELLGRIPEAQVLLSMPGVGRVTAATFVSEVPDVGAFASAAKLAAYAGLAPRVRQSGRSLNSVTKPRAGNKRLKRALVLSAARSVDFCEESRAYYDRKRSEGRCHYSAVVALARRRINVMYAMLRDGKRYESRLG

SEQ ID NO: 70175 - protein, 393 aa, unidentified
MPRKRILVKSIDTSISYQVIGIDLAKHLVSACLITGAGEIFGIDRLTYDDLLKSAERMSPTLFCMEPCPEVHYLAEKLQGYGHHTKVIDGAAVKEYIKTHFGGQKTDLNDAQAIAFLSLDTNLPEITPKNTSNSVLSSIQAVREQFRKEYIQSFVSLKGICQRWGLPISKGVMNKNKVEELVSESKKIPQEVKDWLLELLQSCRELQKRLNKISKYLKEYADNDEICQKIMSVPGIGPITATRLKATIGDIQRFEKPKSIVAYYGLVPKSKATGHNEKKGGITHRGDRVARSLLIEGAGVVLNLAAKGFLRSKPLNKWIEKKRKLKMPWGKLCCALAAKMLRIVRAILIQGTSFNAKIAGVARCSLPKESRNNVMGNNKLSEIPSPNGSVYIH

SEQ ID NO: 70176 - protein, 338 aa, unidentified
MKLYGAIDLHSNNNVTVLMDETDKVVYQKRLTNDLPLILEQLSPYALSIEGIVVESTYNWYWLVDGLMDKGHRVHLANTAAIQQYEGLKYTDDDSDARWLAHLYRLGVLPEGYIYPKEERAVRDLLRKRSQLVHQKTANLLSIQNLYSRNTGQSMSANRIKRLSGEKVDALFPNADLALAVKANLTVMRSLETEIAILERVVKERIKLKAAYRYLLTVNGIGQTLALTIMLETGDIRRFAKVGNFASYCRCVGSEKLSNGKRKGSGNTKNGNKYLSWAFVEAANFAIRFEPLIARYYQRKTAKSHRVVAIKAVAHKLARACYYVMRDEVPFDVNRAFA

SEQ ID NO: 70177 - protein, 411 aa, unidentified
MEAAVITAVGIDVSKSKSTVAVRRPGGEIVLRPFDVRHTNSDLKKLTSTLKKLGGDIRIVMEHTSTYWRPIALTLKEAGFFVSVVNAMLIHDFSDNTIRKLKTDRADALKIANYALTFWDTLPPFNNEEETRLLLKMQSRANERITATATALRNGLIALADQIFPGVNIAFDPNTKNANGHEKWVDFFLRYWHKDCVCQYSMEAFTESYRGWCKRKNYKFRTDTAHQIYLLAQEGVATLPKCESTKMLIMQACKSLNAVCEAKQSTQLEMQRLAAMLPEYEVVMQMEGAGPITGPALMAEIGDVRRFKNKKALVAFAGIDAPPFQSGTFESKSRHVSKRGSPHLRRTIFIVSNIILTRSNPENAVYCFMDKKRSEGKHYYVYTVAGSAKFLRVYYARVTEFLRSKPSPDAC

SEQ ID NO: 70178 - protein, 355 aa, unidentified
MNSVRYIGLDVHRDTISAAVLDDQGKLLMQSVLATRAAAVLDFLQGIKASVHVTFEEGTHSAWLYDLLARRVAKLVVCNPRKNALLKSGNKGDAIDARKLAELLRAGLLSPVYHGEQSGLEVQHRARNYTTLTEDTTRVMARLKAVFRSQAIGCAGQKAYSQRHREQYLASLGTGSLRRRAECLYQELDGLQLLRRQAKRELIAECRKHAAARWLQSVPFLGPIRAALLIGRVQTPHRFRSKRQFWAYCGLALETRASAEYRVVNGQVERRRKPALVRGLNWNHNHELKNLFKGAATTASICPGVFRQFYLGLLAKGMRPEMARLTLARKIAAITLKIWKKGETFDPEYLKPQAA

SEQ ID NO: 70179 - protein, 388 aa, unidentified
MLPVINALEVQKGKPAMKQNTTELENPRRRVVRKNKQRELTIGVDLGDKTSRYCVLDREGNVLFERSTATTKKGLAQAFASMGASRIAMEVGTHSPWVKRLLESWNHEVIVANAHRVRLITESTRKDDRLDARKLARLARVDPELLSPIRHRSEGAQADLVMIRARAALVEARTKLANSARGVTKSFGERLASCDPDQMRVKCLVGLPSSLQSALQPLVTAVESLTRQIHEYDNKVAQIARSEYPETARLRQVTGVGELIALTYVLTLEDPQRFRRSRDVGGYLGLRPKRRDSGASRPQLRITKEGDVYLRTLLVQGAHYILGWHGVDTDLRRWGLKLAARGGKNAKKRAVIAVARKLAVLLHRLWITGERYEPLRQSQATSSLQVAV

SEQ ID NO: 70180 - protein, 365 aa, unidentified
MTSRKRKTSATSTDPPTLGEVVLGVDTHGEVHVAAVLCPLGQVLGTKSFPATAVGYRRLLAWAGKLGTVRRAGVEGTGTFGAGLSRYLVAQQVEVYEVNRPDRTARRLRGKSDPLDAQAAARAVLSGRAKARAKTGDGPVHSARMFKLAKDSAVKARTQAINQLKAVLVIADPDLRERLSGLGNRELFRTCARLRPSDGDDEDTVPQATRITLSLLAQRIEQHTRQIDELNLRLTRLVEHHAPQLLTPVGIGPDSAVTLLIAMGDNPERLSTEASFAALCGVSPVEYASGRRSSRRLNHGGDRQANAALHRIVFTRLRFDPRTQEYYERRTREGKTRREIIRCLKRYAAREVFNLVRPVTNGLLS

SEQ ID NO: 70181 - protein, 431 aa, unidentified
MLKINPLSTLYVGIDVSSKSNYVCALDFYKNKYINSSFANNQPGAEELALKILECLKEHPDITTIVAALESTSVYSIHIANYLSSCEELMRFKPYVFVLNPKCTANYKKSYIGLGKSDPIDAFVIADYARAGNIESEPWRGSQFLALKRLTRHRLHLVECMTREKTYLVSNLYLKFSELQMLEGDDQPFCDIYGATSSSVLMEYFSPEEILDSSEEDLIAFLAKKSRNRIKDISKTADLLKKAARDSYRLDKALYEPLNVSIASSFNCIETFKREIKVIDNAIEKEIKGLNPNAFIILQSIDGIGSVFAGGIIAEIGDITAFHSSDALAKYAGLTWKSNQSGDFDGEDTPMIKAGNRYLRYYLGEAANSMRKHNVEYGTYYRKKYNEVPKHQHKRALALTSRKFVRLVYGLLARNQLYSGVSLDTSIKDSN

SEQ ID NO: 70182 - protein, 337 aa, unidentified
MKYSGIDLHSNNSVLVVSDEVDRVLVRRRVPNDTAAILALLAVHREELVGVVVESTYNWYWLVDALQAAGYRVHLANTAAIKRYEGLKHSDDEDDAAYLAHLLRLGILPSGYICPPAARAVRDLARKRMQLVRNRTAQVLSVENLLSRQTGAGMRSRVVQRLTAQAVEGFGFDQDVQRAMCANVAVIKTLNREIDKLEQRLHQCVRLRPEFRLLTSVPGIGQTLATLIMLEVGTIERFAAVGNFASYARCVDSARISNGKKKGQGNVKNGNAYLAWAFVEAANFAQRYCAEARRFYERKKAKTNGVVATKALAHKLARACYHMLKENKAFDVTRCFA

SEQ ID NO: 70183 - protein, 401 aa, unidentified
MDNAYGVFLGLDVGKTDHHAVALNPEGKRLHDAALPNTEAGLRKLFDKLARHGQILAVVDQPASIGALPVAVARACGHQIAYLPGLVMRRLADLHPGTAKTDARDAYVIADAARTLPHTLRRVDAGDDTLAELEMLVGYDDDLAGEVTRISNRIRGLLTQIHPPLERVLGPKVQHAAVLDLLSRCGGPTGLRKAGRSKLVEIAKPRAPRMGVRLVEQIFTALDAQTVVVPGTTAAETILPKLAENLRDLLKQRDQVAVQVEEMLDAHPLSSVLISMPGVGVRTAARILLEVGDVAAFPTSGHLAAYAGLAPVTRRSGTSIRGEHPPKGGNKQLKRAFFLSAFAALSDPLSRAYYDRKRAEGKKHNAALICLARRRVDVLHAMLRTSTPYQHKPVENLALAA

SEQ ID NO: 70184 - protein, 354 aa, unidentified
MTSLSPGSEKMSKHSVAGGDGAGLLDLLTRLRDKAEQRAGTPVRIVLIQEAGLDGFWIHRLLVAHGIESHVVESASIAVPRRHRRAKTDAIDGAMLLRTLMAFKRGEPRVCSMVVPPSPAEEDRRRIARERRTLIKERIEHINRVKGLLASQGITGYQPMRRGCRERLEELQTGDGRPLPPRLKAELGRALDRIELVRRQIAVVEAERDALVQADDVRARPPAVLLMQLRGIGPEFATVLWMEGLFRNFTNRRQLAAYAGLAPSPWKSGCVDREQGIAKSGNPRLRTTMVELAWLWLRYQPDSALSRWFRERVGSERGRIRRIAIVALARKLLVALWRYTTLGDLPAGAALKTA

SEQ ID NO: 70185 - protein, 354 aa, unidentified
MDIKYIGMDVHKEAIAIAVMNGDGKLVMESILETKAITILEFIQGVRGDLHVTFEEGTWAAWLYDLLKPHVRELVVCDPRKNALMKEGNKSDKIDARKLADLLRGGYLRSVYHGENGLRTLKELARSYLTISKDLTRVMNRVKALYRSWGILCGGQQVYAPRHRAEWLNKIGEAGVRRRAEFFYQQLDALRELRQAVRKDLLAESRKQSATKLLRQVPSIGPIRTALLIALMQTPHRFRTKRQLWTYSGLAIETRDSAQYHYVAGQLQRSKKPLQLRGLNQNHNHDMKAIFKSAATRASSREGAFHDFYQGLLTKGMKPAMARLTLARKIAAITLTVWKKGAHFDAKQLKLQAA

SEQ ID NO: 70186 - protein, 345 aa, unidentified
MQLFVGLDVSQVLTHLCVVDPGGRQVWRGKCSTAPDVLAQTIKTYAGSAAKVGIETGPLTPWLVHTLRAAGLDVVCIEARHAHAVMSAAQVNKNDRNDAKALAQLLRTGWYRAVHVKSYNAHQLRAVLGARAQLVTMTTRISNHIRGVMKIFGLVVASATKTTFAARVEELVADRPEVEAVVGPMLATWRHLRGQIGAFDKQLMAIARARPECRLLMSIPGIGYVSALAFMGAVDVPERFGSARAVGAHLGLTPRQHQSGEVDRLGAISKCGDPYVRTILVEAANSLISRYKKPSPLRDWALALQRRSGPKKARTALARKLAVIMLAVWRSGTPYAPSVPAVAMT

SEQ ID NO: 70187 - protein, 394 aa, unidentified
MRFAGVDIASETHVVALVDEDGKVLVKATAFAEDAAGYEKLFAQLGASAELLVAMEATGHYWKNLFAALAARGFSVALLNPLRTHRFAEEDLQRTKTDAIDALGIARFAAQKRPPATRLPDPATEELRELVRLRERLLQDFGDRVRQLHRLVDLGFPEFTRYVKGLDSELASAILHDYPTAAAFQGVSAKRLAALRYDGRHQVGAELAGLLIAAAKRSVGHHHGEAYRVQVRYACEDLDILRRRLRQLDRDIAGTLGAHEVGTLLTSIEGIGPTTAARLIAELGDPADFRAPGALAAYVGVVPALSQSGKRKNTRAATTPIGNARLRAALWMPTLTAVRRNPWLRAHYQRLLARGKLPKVALVACMHKLLFAVYSVAKHRRPFVAQLATAETTP

SEQ ID NO: 70188 - protein, 366 aa, unidentified
MKKISTVAKSGNKIFKEPKLTIGLDLGDRTSHYCILDEAGNVILEHSFPTTPKGILQVFSRIPRSRIALETGTHSPWVSRQLTAMDHEVIVAHARNVQLITESSRKDDRLDARTLARLARIDPQLLSPVRHRSAQAQIHLTVIRARATLVSARTALVNAARGLTKSYGQRLRKCGSGQMSREIAKELSPELRDTLEPLLKEIESLNDRIDEYDRRIEQIATEVHPEVALLKQVKGVGTLIALTYVLTLDDPHRFRRSRDAGCFLGLRPGRRNSGMSEPQMHISKEGDAYLRTLMVQGAHYILGPFGQDSDLRRWGLKLAERGGKNAKKRAVIAVARKLAVLLHKLWISGEVYEPLRNNHQVVSAVA

SEQ ID NO: 70189 - protein, 342 aa, unidentified
MSGMIIGLDLAKSVFQVHAVDAEGKVVITRKVRRSQMLEFFTRLEPCLIGMEACPSAHHWARELSALGHEVRLMVASYVKPYVKRQKNDMVDAEAICEAVTRPTMRFVPIKSESQQAILMVHKTRALLVRQRTMLVNALRGHLTEMGVVAPKGIRRHADLVERVLAHGADEIDLPPLVRDIVFSSARQIGSLNAEIKELERKILEWHRTSEASQRLATIPGVGVITASAMAATVVDPAAFRSGRDLAAWLGLTPRSNSSGGKERLGRITKAGNRYLRTLLVIGATAVVGFSRRTTEGPLMNWVRKLLQAKSARLTTVALANKMARICWAVMAHKTVFGEAAA

SEQ ID NO: 70190 - protein, 409 aa, unidentified
MQPILESCGGLDVHKSMILACIAHGPLNKPPKFEIKKFPTMTNDLRKLREWLKEYGVTAVAMESTGIYWKPIFNILEDDFDIVLANAQHIKNVPGRKTDVKDCQWIAHLFRNGLISGSFIPPREIRELRDLTRTRKKLVGAMASEKNRVQKVLEDANIKISSVVSKVFGVSALAMICALMEKDELSADEIAEMAKGKLKKKVNQLVEALNGNVTDHHRFLLKQHLGHIDFLVEVIKEFDEEIQRRLVPYQKEFKDIQSVTGIKGVSAASVIAEIGVDMSRFPDEAHISSWAGVCPGNNESAGKKKSGKTRRGNNYLKATLTESAWAAARTKETAFSAMYRNIAGRRGTKRALVAVGPQILIEVYRVLKTGDRYQDAGAEAVTERRLKNREQRMVRELKRCGYDVSKVVA

SEQ ID NO: 70191 - protein, 344 aa, unidentified
MEKPSYFIGVDMSSETFTASVGTYPWRVVGSPESFENSAEGFGNLLEWLQKHGYKPDESIVCMEATGVYGQSLAYFLVAHNYIVAVEPPLKVKRAFPTHGHKNDITDSENLAEYAYRFFDELHIWQPPDNVLKQVKTLLKTREQLTRNLTAYKNTLRILKREVVRTPMAEKMYEGLIGELKTLIGKIDEEIRSLMRKHSFFNPMLNLLLSIPGVGLQLASYVIVITQGGKREPKARELAAYIGICPYEHSSGKSVYRRPHSKKNGSGSIRKLLYLSSLSLRTHEYYFKEYFLRKALQGKPKRLLINNISNKLLRIICAVMRSGRPYIPGYMSLNPVALRVKKCA

SEQ ID NO: 70192 - protein, 475 aa, unidentified
MKRHQKTRKTKPKPTASKPLHEPLPDAAGIDLGATEIWVAVGPDRCQMPVRRFGTFTQDLLTIVEWLLECGIRTVAMEATGIYWVPLHQHLSEAGIEVCLVNARHVKNVPGRKSDVRDCQWLQYLHSVGLLRASFRPAQAICNARTIYRFRQDLLGQSTQHLQHMQAALDQMNIKLHYVIDDLSGQTGQRIIEAILNGERDPLRLAKLRNRRVKASEETIAKSLEGDWRDEQLFVLRTAWENGKQIKEQILKCDQKLLEYTQQLEATTVVAQPMGSLQSRSLTATGPAVAPILTPLKTQPKTSKNEPAGPWRQELTRLFGVDLSLIPGISILTSITLLSELGNDLSAFRSAQHFSSWLCLCPDNETSSGRVLHRRTRRSQSRVRLALRMAASSLHHEKSFLGEKYRRLRTKLGAPKAITAMAHQLARIIWHLITHKVSFEMSIFAALEKAHQRRRLNRLHAAARQMGFQLTQIAA

SEQ ID NO: 70193 - protein, 430 aa, unidentified
MPSHANQKEVPFQERFLAFAGFDWASDHHDLVLLNGTGKLLMELTFADDAEGWRDLSQRLSRGLGLDPGRLGVAVETNNGPAVERLLALGCVVYPLNPKAAQRYRERKSNAGCKDDRLDALSFADALRTDGHAWRPLTPDDPLTQELRLLCRDEIQLIGHRTALVNQLRAALREYYPAALEAFDNWVSEAAWAFVQSFPTPQDLVAAGKRKWERFLHAHKLYRPETYAKRLEIFARADQFCGRAPVTRAKSRLALTLAGQLRLLEKQLTQYRQSIEALFAQHPDHDIFGSLPGAGPKIGPRLLGELGNDPARFQTHQSLQCYGGSAPVTKQLGKNRYVSFRRACNKTLRATLHYWADKSREQCAWAQAYYQHKRQHGQSHAAALRCLAQRWVKILWKMWQTHTCYDEALHTRNQVKHGSWVTKPAEGAIC

SEQ ID NO: 70194 - protein, 339 aa, unidentified
MGLYSGLDLHSRNTYIGILDTDFKRVFKKSVPNNLDLILETLEPFKNQLKGLVVESTYNWYWLVDGLMDAGYGRVHLANPSAIRQYEGLKHSDDKHDAFFLAQLLILGILPQGYIYPKQDRPVRDLARKRMFLVKHKTAHILSLQSLIARCSGQRISSNELRTFRREDLQLLLKEEHLVLSAQANLDSISFFKQQIHGLEKVIKNKLKLNQAFNGLLTVPGIGNILAMTIMLEVGDIRRFAKVGNFTSYCRCAPSQRLSAGKTKGSGNGKNGNRYLSWAFSEAAQMSRRYNQRFRRYHDRKAAQTNTIVAARALSNKLARVCYYIMRDQVAFNEELILH

SEQ ID NO: 70195 - protein, 347 aa, unidentified
MDYYAGIDVSLEASSVCVMDASGKIIREAKVLSEPENLIGWFRDLGLEMTRIGLEAGPLSQWLYAAMKEEGLAVELLETRHVHDAFKAMPVKSDRNDARGIAQLMRLGWFRPVHCKSMPAQEVRALLTARKLVQSKLFDIEMSLRGILRGFGLKIGRTTPNRFGLRVEELVAGHPTLEIIGKALLAAHEVLLREFNGFEKRVRQQARQDKRVRLVMSAPGVGPIVGLTYVAAIDDPARFKSSKQVGPHFGLTPKRYQSGETDYSGRVSKIGDASVRTALYEAANVILTKPLKGATALKSWGMKLAKRAGMAKAKVALARKLGVILHRMWVDGRKFADKGISPMPVTA

SEQ ID NO: 70196 - protein, 373 aa, unidentified
MPKYSTAFVMDVHLRSTTVCALDADTGEAVTRRFPGNPWGEIAGWMDGFPGPSLAAYESGYLGFAPQRELAGLGVECVVAAVSKIPRSAADSASKNDRNDAARMAKAILAHDISPVWIPSPEVEGIRDLAGAYDGATARLATAKQRLLAFLAKRGFVYGGPTPAGNPRKYWAYDFLRWLDKVRPEDDGGVRTLAALRNEVEAAAEARADLLSEYRAAVDASPIAAEVAALQSIKGCAFALAAAFSAEVGDFTRFRSGRQVTAYFGLAPSQRSSGDSVRLGGISGAGNALVRKLAVEGSWCYAAARHQPKLMPRDTGVPLEIRMHGRKGSERLLRRREEMLARGMPQAKANAATAAELVRWLWALGMMCREGAE

SEQ ID NO: 70197 - protein, 404 aa, unidentified
MSVQSAPVTVSTIVVAIDVGKTSAMLSVTDSSRKRLLGPVEFVMTRSGLAAAAHRVMVVVPSSAQVKVSVEAAGHYHRPVLDYRWPADWEVLEFNPAHVAEQRRVAGRRRVKTDAIDLEAITELALAGRGQAITDRETCIGELAAWANHRSRRVATRTATKNQLLGQLDRAFPGLTLALPDVLGTKIGRLVAAEFADPARLSALGVSRLIRFAAARDVQLRRPVAERLVTAARDALPTRDAVVARRVLATDVALLGDLDTQIEAAEGELAALLPVSVYATLTSVPGWGVVRVSNYAAALGDPSRWPGPRQVYRASGLSPMQYESAGKRRDGTISREGSVALRRALIDLGIGLWLSEPAAKAHAATLKARGKHGGIIGCALAHRATRIAYALVRDHATYDSTRWA

SEQ ID NO: 70198 - protein, 352 aa, unidentified
MGKSSKVASGSVVGVDLGDRSSQICRLDRETGEILEERRLSMTASSVQRYFSGLSSCRVILESGTHALWMRRLLESLGHEVITANPSKVQAIASSRQKTDERDARCLAQLGRVDPRLLSPVHVRSAEAQQALAVVRAREGLIKARTMLVNQIRGTVKSFGARLPGCSAKSFARKVPQALPEPLKGAMEPLLAVIADLSERLRVFERDIEALARRFPGAQRLRQIRGVGALTALTFVLILDDPHRFARSRSVGAYLGLVPASRSSGRSTPQLPITKQGDRLLRRLLVQASHYILGPFGQDSDLRSFGLELSTRGGRNGKKRAVVAVARKLAVLLHRLWISGEDYQPRRRPAAA

SEQ ID NO: 70199 - protein, 320 aa, unidentified
MNNKEQKYAGVDISKDFLDIAIVDSDEKWRFNNNQTGIKKAIKLFKKWSPLMVSFESTGGMEIDLWLALNKAKIDAEPINPRQIRNFAQALGKLAKTDNIDAQVIAQFGQATKPKPQVVPDTQQLKEMVVRRNQLVEMISAETCRLKTARQNAIKKDIQTTINWLEKRRDDMNQEILQAIEDDPELRDKAKLLQSTPGVGEITTAALLTELPELGNLNRHQIAALAGLAPFNRDSGRLRGKRTVWVGRASIRRVLYMATLVATGCNPVIRNFYRRLLDAGKPTKVALTACMRKLLIILNSMIKNHTLWQYSTPLVIANCH

SEQ ID NO: 70200 - protein, 360 aa, unidentified
MAQDISLAVRSGTTIGFDLGDKYTHYTVLTAVGKVKERGRVRTTPLHLERFLGDAPRSLVALEVGTHSPWVSRLVTQCGHEVVVANPRQIPLITRSIRKSDATDSEMLARLARVDRSLLTPIRHRGVVAQADLALLRSREALVRSRTLLVNFARGAVKSFGGRIPSGISTEAFAVKAGEHIPEDLRDQLAGVMTSLGVITAQIRKQERAIRRLAKTKYREAETLMAVPGVGILTALTYVLTIEDPHRFTRSRDVGPYLGLVPRRSASGAIDPELRITKAGDTDLRRLLVQCAHCLLSRSRVDSDLKRWGLKLVARGKKNAKKRAVVAVARKLAVLLHRLWVSGEGYVPLRNASPSIQAEA

SEQ ID NO: 70201 - protein, 413 aa, unidentified
MDVLHPRCCGLDVHKSSISACILLREARRVQKHQRRFGAMTQDLRELAEWLRQFGVTQVAMESSGVYWKPVWNILERQFTIVLANAQHIKNVPGRKTDQKDAEWIAQLLQYGLLRASYIPCEIIRDLRDLTRMRTSLSQEASRISSRIQKVLEDANVKLASVATNALGKSGRAMLEDIIAGEDDPEHLASLALGHLRVKIPQLRLALEGKIRSHHRFLLRRLLDQIQFVEHEIALLDERLEDIGRQRPDLAQAVARWDTIPGIDRVAAWALLAEIGDNMAQFPTAEHLASWAALCPGNHESAGKRLRGTTRQGSPWLCRMACQCAWAAARTKNTYLSSQFRRLAARRGKKRAIIAVAHTLIVIGYHLQKNQSNYEDLGGNYFDRIHSDGLKRYLVKRLQQLGHKVTLEPMEAA

SEQ ID NO: 70202 - protein, 313 aa, unidentified
MINIICGVDVSKAKLDACIEPGAIFASFDNDAAGISELATFCRQHQTGLVVMEATGGYERLAFLSLWEAGMPCGMTNPRSVRRYAEAMGVLEKTDRIDASIIARFAHAKNLQPTPAPTPAQQRLKALVARLRQVTDDLTVQKQRRASLLDNVEMLASIDEVIALLKRQSRKLEGEIASMIDDDPLWEQLAKAWRSVKGVAGRTVARLMADVPEIGIYSNKAVAKLVGLAPLADDSGKRKGKRSIRGGRASVRSILFLVARIAAKYDKSLAAFRDKLLAAGKPKMVVRIALAHKLLVRLNAKARDARAQYANAT

SEQ ID NO: 70203 - protein, 371 aa, unidentified
MKQYSTFIGMDVHKNSIEIAIAQRGRNGEVRHYGKIDGTLEALDKVVRKLVSKGGPLHFVYEAGPCGYEIYRHLTAKGYDCSVVAPSRIPKKSGDRIKNDHRDACMLARLDRAGELTPVYVPFAEDEAMRDLTRAREDAKIDEKRSKQRLLSFLLRSGLRYTGKKTWSKAHMRWLSDIKMPHPSQQIVLQEYIDTITERSLRVQRLTDQIRQLLPQWRMFPVVKALQALRGVALIVSATTIAEIGDLKRFENPTELMSYLGLVPSEHSTGEKIRRGSITKSGNGHVRRVLVEAAWAYRLPARVSRVLLKRQEGLSKEVCEISWKAQVRLCARYRRLWAKGKPKQVIVTAIARELCAFMWAIANEIQVSTAT

SEQ ID NO: 70204 - protein, 428 aa, unidentified
MNCNTQNAKIASITEKTLIVGIDVGSETHYARAFDWRNYEYTKKPLEFSNTETGFQTFKAWVEELAERHGKTAVIPGMEPTGHYWFALGKFLQDNGMKPVHVNPHHVKKSKELDDNNPNKNDRKDPKTIAALVNEGRFSYPYMPVGIYAEIRSLSNLRFQTQEELTRIKNRLARWFSIYFPEYKDVYGDLKAVSGRMVLKVAPLPEDILKLGAEGVNQIWRDRKLRGAGMKRAKALLSAAEHSVGSKEAPEAARMELENLLSDMDVHASRMEELLRRIEEKLREIPYIDNLLAIKGIGMVTVSGFIAEVGDIGRFDSPKQLQKLAGYAVVANDSGKHNGESRISYRGRKRLRYVLYEAAISLVGKNAEFREIHEYYRTRKENPLKKMQSVVAVACKALRIFYAVLTKGIQYDPERLLGDIRRPQVQTA

SEQ ID NO: 70205 - protein, 486 aa, unidentified
MTFFKTICSLKKTRMEKEKTIYVGIDVSKGYADFILLDQDKKIFETNFQLDDNHIGHELLQKKLAILNGQGFKVVCGVESTGGYEQNWIRCVKQLIEKKLSVEMYKLNARGVKHQLESELRRTITDGVSAEGIAIYVINNYATKLHDWKRGIAKEEKTTGRQMLCKLIISQQKHLTAKYNQLEKMIYRQFPELLQYCKHGIPLWITRLLEKYPSLTAIKNAKLSGVDKIKCVTETKANILKGLAKSSIGNIIQDTVMDIIMQTLCSEIIHIDNQIDNLKKQLIVHGVDEEVKLLCSIKGIAEWSAVGILVYLGDLSQFEDSHQIASFFGVHPTFKQSGDGKWGSKMSKAGNKTMRYVLYNAATNVVLHNPYFKGIYARHRATGKKHKAAIGIIMHKLLRVVYGMLKSKQAFNEQTDLTNQVKSNQETQNEAIKLSVNKTSRRYQELGTVAPLSGRNYKKRKIALEGHQASTDANTASPKSNLLVQT

SEQ ID NO: 70206 - protein, 391 aa, unidentified
MTKPKTKTVNDFSRCLDPLDMDATLIAVIEMSQSSWLVAGIVPGVERQPLKKLAIDEQALLGLLNRWRAEAEKNGHRITRIAVAFEAGHDGFWLARWLAAQGVEAHVIHASSVAVTREHRRAKTDRLDTELLKRGFLGWLRGERGHCKMVAVPTLAEEDAKRPSRERETLVGEASRIITRVKSAFVRLGIRGFNPKLKAAATRLETLRTPEGEPIPPNTLAALKRDLERHQIVKKQIRELEQTRLENLAQAPAKGPNVMVLLLARVIGIGVETADMLVREVLSRTMRDRRAVARYAGLTGSPDESGAKRREKGLARSGNARVRHGMIQLAWRFLLFQKDSALAQWYRQRTANAPSTRKTLIVALARKLLIALWRFARDGVVPEGVQLRPAA

SEQ ID NO: 70207 - protein, 409 aa, unidentified
MKLFVGLDVSSQDAKICFLNGEGDCLQSFTITNDLPGALILKKKILDTASKSNCKIIKIGLESTSIYSYHPAMFLHNDKELRTYGSQVFMINPKQISNFKKSYPEMDKTDTIDAFVIADYVRFGRHTMSIVKEEQYMALQQLTRSRYQLVHALTKEKQHFLQHLGLKCSQFTQDVESSVFGNAMMELFLERFSLEEMAQMPLQELVFFLQEKGKKRFGNPEDVAKSIQKAVKGSYRLSKVVEDSIDLLLSTSIQIMRTYQAQIKEIEKGIESLMSTLPQTLDSIPGVGPVFAAGIVAEIGQIDRFADETRIAKYAGLFWKKYQSGRFTAENTSLTKSENPYLRYYLVEAANSVRRHVPEYRDYYTKKSAEVPKHKHKRALVLTARKFVRLVDALLRNNQIYAPGRGVDR

SEQ ID NO: 70208 - protein, 333 aa, unidentified
MKNYRTFIGIDVAKLTLDYCLVTQDPQLEQGQILNTQKSVGKFLITLKKAGCEMNEILFVFENTGIYSSLLALVLSENKLDYAQVPALEIKRSLGITRGKSDKVDAKEIAHYAKRNTDKIALSILPEISLQQLKIVFAEREKTVAAIKTFERTKENEMFLTKEVFGSVKTINNQTVKLLKKQLALLDEKIRELIREDENLHQQQQLLKSIPGIGEITSVYILMATKGFTAFTNGRKFACYSGVAPFEHTSGTSIKGKTRVSHLADKKMKTLLHMASLTAIKYDPELKEYYNRKKSEGKHTMLVLNNIKCKMVYRIFAVIQRKSNFVNLHKFAA

SEQ ID NO: 70209 - protein, 341 aa, unidentified
MNATTFGLDIAKNVFFVHGTAQSGKVVVSRSRRRAQVLSFFSNAPAALIGIEACAGSHYWARELIRLGHTVKLLPAQYVRRYVQGNKTDAHDAAAIAEAVRSPRIQAVAINTPEQQDMQMLHRIRRRLVEQRCGLMAQIRGLLGEYGIVFPQGPGKLRRGLAEMDQSAPPTLSVGARELFLDLQTQWQELDKRIAGYDKRVAQACRTNALAQRIDALPGIGVVTATALVAAVGNAVQFPSGRHLASNLGLTPREHSSGGKQTLLGIHKGGNAYVRMLLIHGARTVLRHGANKTDPLTRWALGLQARKGMNVATVALANKLARICWAVLARDRTYQSHWQNA

SEQ ID NO: 70210 - protein, 348 aa, unidentified
MTMTTIARRITGGVDTHLEVHVAAALDDRGSLLGVESFETTPVGYRALLRWLAQFGTVELVGVEGTGSYGAGLTRHLHGQGIAVVEVDRPNRQRRRRKGKSDPEDAISAARAAQGGEAKGEAKTRDGNVESMRVLRIARASARSGRTKALNQMRSIVSTAPDELREELRGLSIYRLLERCATFRPAERRDVVSLTKRTLRMLAQRALALEEEVKEIDRVLKPLLKETAPELLSVTGVGTDVGTALMVAVGDNPERLKSEATFAHLCGVSPIDASSGKNERHRLNRGGDRSANSALWHIVLTRMVCDPRTQHYFERRIKDGKTKKEAMRCLKRYVAREIYKQLPGRLAT

SEQ ID NO: 70211 - protein, 414 aa, unidentified
MQQKMIYVGIDWADDHHDIVITDDSAKTLNQFRINHTPDGFTLLHTTIASHQKSPADVLIAIETNRGLLVHELLRAGYTVYAINPKAVNRYKDRHVLSKAKSDILDAQALAHLLRTDRHRFKALVPLPEDYRLLDRLCGDLRKLVDEKSRIINQIISCLKDFYPKALEIFSLDSQIFIDFLKTFPDHNTLSACKKKTFLAFIKKHRYPYPDKIDEFWKTIQSPTLQPDNIAARAGKLRLLMLLDQLENLKTHLNYYEQEIQKILNNLPESNSIKSLPGVGNRLAPELVAALGPNNKDSRHRFHSAGEIAKLSGCVPVIKQSGKWEKVSIRYACVRPLRRTFSDWAFTSLKTSSWARAYYDYHKARNQSHFTILRNLGKKWIKILFAVWSTGTSYDEALHIQNLKARNIPWAMTL

SEQ ID NO: 70212 - protein, 320 aa, unidentified
MPVDFLGVDISKADFHAHLLQAKGSTKRTFPNSVAGYGQLNRWLKNRKASDLHVCMEATGAYWLGLATHLHTRGVRVSVVNPASIKYFARSQMRRTKTDAVDAAIIAEFCKTQGPALWEPPAREILELRAILAYRNHLVSERTRVRHLVSTINEAHIVEQSTDTHVAMLDDLIKGVEEQLHALIDKTPVLSESVHLLEGIPGIAWRSAASIIAELPYEKLRNSKAAAAYAGLCPSDRQSGTSIHGRSRLSKMGNANLRRALYMPALSAMTTSTALARFATRLKLRGKRGKLVVAALMRKMLTIVYAVLKSRRPYVEGTAA

SEQ ID NO: 70213 - protein, 343 aa, unidentified
MRLYTGIDLHSSNSYLAIIDETGKRVFKKKVPNDPEQILAALAPYKDAITGIVIESTYNWYWLVDALMAEEYKVHLANPTAIKQYQGLKYSDDQHDAFWLAEMLRLGILPEGYIYPKEDRPVRDLLRKRSHLVKLRTSLIISLQNIICRNNGFRLKTNDVKALTTDRVAPFLEQNEDLALAGKVSKKSIDFLTRQIKAVESVIEKRMELREPYKNLLSLQGVGKTLGLTIMLETGPISRFAQVGNYCSYCRKVSTKWISNDKKKGKGNKKSGNKYLAWAFSEAAEIARRYYPEARAYYQRKMQKSNAMIAHQALAHKLARAAYYIMRDGVSFMPEKIFTQRSS

SEQ ID NO: 70214 - protein, 326 aa, unidentified
MEHELHYIGIDTAKEKLDVDVLRPDGRHRTKKFANTTKGHDELVSWLKGHKIDHAHICIEATGTYMEPVAECLYDAGYIVSVINPALGKAFAQSEGLRNKTDTVDARMLAEFCRQKRPAAWEAPPPLERALRALVVRHQALTDMHTQELNRTETAREVQRPSIDAHLLWLEAELKRLEKQIKDLTDDDPDMKHRRKLLESIPGIGEKTSAVLLAYIGLKDRFAHARQFAAFAGLTPRRYESGSSVRGASRMSKAGHVSLRRAFYMPAMVATSKTEWGRAFRDRLAANGKKGKVILGAMMRKLAQVAYGVLKSGVPFDASRHNPVAA

SEQ ID NO: 70215 - protein, 378 aa, unidentified
MIVIGADTHKRSHAVAAVDAGTGRQRGARQIKAEEPGHQAAVRWARGLDCERVWAIEDCRHVSRRLEQALLAAGERVVRVPPHRMGASRRGEREPGKSDEIDALAVARAVVKDGVERFPAAHLDEEAMEIRLLSDHRKDLVRERTGVQNRLRWHLLALCPELERSLKRGSLEQPRQLDRIDRRLRRLPACARVRVAREQVAQIRRLTRQADALERELLVLVRTHRPQLLAETGCGALTAAILIGRTAGVERFRTDASFARQTGTAPIPCSSGQRDRHRLDRGGDRQLNHALHVIAITRARHDPATRAYLERKEAEGKTKKGALRSLKRHLARRFHRLLSVPPDTAQHAPSMVDDLPTPPRPDDASILRAAPALMPCVT

SEQ ID NO: 70216 - protein, 420 aa, unidentified
MRPIKAKTNRIVNEKTLIVTVDIGKTKHMGYCRCPDGSEVLPFEFFNTGHGFEKFWEKVVQTMSVSHLEQAVVGFESTGPYAEPLIHYLRKKPVRLVQVNPMHTKRLKELQGNSPNKTDRKDPKVIADIIELGHALTVVIPEGPAAELRRLTQARERRMEGRTALLTQLQHLLFVLFPEFFHVMKDVKTRSAKYLLSRCPAPQDLLKSDFESLASSIWKLSRGKVRRERLEALYAAARESVGIQVGQEAMAFEIRNLLHMIEESERFVAEVEEKMSSVLKQIPYGRSILSIKGIGEVTAAGLIGEVGDFRQFKTISEITKLAGLDLFEVSSGKHQGRRRISKRGRSLLRKLLFFAALNMVSRAGLMRQIYRGYLERGMLKMKAMIAITRKILRIIFAVVRDQSEYRENNTDGNNALTEAA

SEQ ID NO: 70217 - protein, 446 aa, unidentified
MKKSSRMSVIHPHAAGVDIGAEFHVVAVPPDADAAPVRTFQRFTGDLHRMSGWLKTCHITTIAMESTGFYWLPAFEIPEAAGFNVILVNARDAKNVPGRKTDVNDAQWLQKLHSFGLLRASFRPEHDISVLRSYLRQRERLTEYRAAHIQHMQKALMQMNVQLHHAVSDITGVTGLSIVRAIVSGERDPSVLIQYRDVRCKKTPEVLQQALTGNWQPEHLFAPEQSVAFFDFYQEKIRECDDQIETSLLQLSTGTEEPEGVLPSARHRTKQPNQLSFDVRPLLWKITGADLTQIHGFGPYLALKFVAECGTDMNRWPDASHFTSWLCLSPGNKISGGKVLSSKTRRSSSRIAAALRLAATTIGRSDTALGAFYRRLSSRIGKAKAVTATARKLAILFYNALKYSQKYVDPGADYYEERYRNRVLDGLKRRAKSLGYSLQQDPELCV

SEQ ID NO: 70218 - protein, 410 aa, unidentified
MRVVYERCCGLDVHKKTVVACVLITEPSGELQRHIRTFSTMTAGLLALADWLESMHIPVVAMESTGVYWRPVFNLIEEGRTIILVNAQHMKAVPGRKTDVKDAEWLADLLRHGLLTASFIPPAPIREIRDLVRYRKTLVQERAQEVNRIQKVLETANVKLSSVATDVLGKSGRDMLHAIIEGTTDAEVLANLARGLLRKKLPQLQEALDGRVQPHHRILLKHILAHVAFLEQELEQLQQEIEQRLPPFEEEMGLLLSIPGIQALSAAAILAEIGADMSRFPKASHLASWAGVCPGNKQSGGKRLSGKTRKGNATLRAALAEVVWVISHTKDNYLAAQYHRLARRIGKNKAAMAVAHSLLVIIYHVLHSRKPYSDLGADYFQKQEANQVAQRSLRQLEALGYEVTLTPKVA

SEQ ID NO: 70219 - protein, 370 aa, unidentified
MAKGSMFVGLDVHKDSIDVCVAEEGRRGEVRHVGVIRGDLEALDKVLRTLRTSGRRLRVVYEAGPCGFGIYRHLTAQGDECVVVSPSHIPKRSGDRIKTDRRDANALARLHRAGELTAIHVPTADDEALRDLVRAREDAVGVSTQAKHRLKAFLLRQGRRYPGRAGWTLAYRRWLADLAFPSVPQHVALQEYRDTIDEAEGRVDRLTDQLRQLVPTWRWCAVVEALQALRGVSFVTAAGLVAEVGDLRRFAHPRDLMAYLGLVPSEHSSGPSVRRGAITKAGNPHARHLLAEAAWAYQGRPHIGRTMLARQDHLPKAVRDIAWKAQLRLTGRFRRLVARGKAKPKVATAVARELTGFIWAIGQEVTPTAA

SEQ ID NO: 70220 - protein, 326 aa, unidentified
MDDPLYYIGIDVAKHKFDVAVKLPNGKYKHKVFCNHHQGFDEFICWLNAFDGRFCAVMEATNIYHEALADCLVAQNIMVSIINPKCSASFAKSDNLRSKTDKIDAKLLVDYACEKGHKLVCYQPMLPAQRQLLRKSRQLDHLKDKLAQEKVRLSMLIDEDCIAYTKAMIDFIKGQIKALQQSIRQCVASDDTLKQNVSLLLSIPAIGFDSAVKLICYLGDGSRFKNAKAAAFAGLTPMIKSSGSSLHQVMGISKIGQADIRKALYCPAMNFAFGRYKDGAYRLFVDRLNSQGKAKKVVITALMRKLVSIAQAVLQTQTPFKLELHR

SEQ ID NO: 70221 - protein, 372 aa, unidentified
MKKVSTVAAKQAKNFPARSFSEQKLTVGLDLGDRSSWYCVIDDSGAVQMEQRLNTTPKAIGEVFGGMPRSRIALETGMHSPWVSRLLTELGHEVIVAHARNVRLIGESRKKDDRLDAQTLARLVRIDPQLLCPVKHRSAQAQANLSVIRARAGLVRARTALVNTARGLAKSYGERLRSCNVRNMNPEKAAGLSPELQSALEPLLIALQSLSQQIGEYNERIEKLAEQSYPQVALLKQVKGVGTLIALTFLLTLEDPHRFAKSRDVGCYLGLQPGRRNSGQSQPQMHISKEGDPYLRTLLVQGAQHILGPFGPDCDLRRWGLKLAERGGKSGKKRAIVAPARKLAVLLHHLWVSGEVYEPLHTHQRTTMLAAA

SEQ ID NO: 70222 - protein, 346 aa, unidentified
MRTQPKAASVYGIDLGKNTFHVVGVDLAGNPIQRAKFRRETLLEFFAVAQAAIIGMEACPGSQWLARKLQALGHAVRIIPAQFVKPYVKSNKNDTIDAEAIAEAVTRPTMRFVAVKNTEQVDTQALHRARDQMISSRTRLINQMRAFCLEYGVPIRQGAGIFKLDLPKILVDETNDLTPAMRRLLEELFDDLKRLEIRIGEVTRQIEGLAGGSEIVQRLMSIPGIGPLGATALVAAVGDGRQFKKARDLAAWLGLVPRQYSTGGKATLLGISKRGNPYVRRLLIHGARACLMHLDRSRDRLGAWISQLASRMHANKVTIALANKMARIAWAVLNRPGVFYQRIQPA

SEQ ID NO: 70223 - protein, 355 aa, unidentified
MIIIGCDYHPGFQQIAFVDTETGDYGERRLEHSEGAEKFYRDLAAQGKKVRVGMEASGHARWFERLLTELTFELWIGDASEIRAKRVRKQKTDRQDAQHILQLLMENRFPKIWVPSGENRDLRQLLWHRHRMVQARTRIMNQLQAVALNEGLRSKKRLWRDAGREQLESFRLSPWASRRRRDLLELLDRLTPTIAELTAAIEQEVEKCPEAQRLQTHPGVGALTALAFVLIIGRADRFQCGKQIASYLGLVPLEDSSGQRRRLGHITKQGNSLLRFLLVEAAQVTVRSDQEWRSKYFHLAMRRGRKIAKVAMARRLAVRLYWMWRTGWNYGQLKKFGSQGRKPGSHAGEPTASTR

SEQ ID NO: 70224 - protein, 372 aa, unidentified
MGEHSEVFVAFDTAKLKHAVAIAEAGRGGEIRFLGEVENQPATIERLIKKLGRRYGKLQVCFEAGPTGYGLYRQIQALGYACLVVAPALIPKRSGERVKTNRRDALTLARLFRAGELTAVWVPDDVHEAVRDLVRGRMTAAEDLRRKRQQLLSFLLRHGRIFTAGDHWTRAHHRWLAAQSFIHPAQQIVFQDAVAAIEDAIERLRRLEEQLAAIVPKWSMAPMVAAYQAMRGVSFLVAVTFAAEIGDVRRFDRPRQLMSFLGLVPAEHSTGKTVRRAGLTLAGNRRARRVLVEAAWSYRHPARVSETLRARLEALPKTVRDIAWKAQVRLCGRYRRLNAAGKKLPVIIAAIAREMAAFLWAIGRQVNPAAGT

SEQ ID NO: 70225 - protein, 346 aa, unidentified
MEHYVGLDVSLKLTSICIVDRTGKVEREGVVTSDPEATAKFIKLHAPHVVRIGLETGATSTWLWTELNKIGLPAICIDARHAKAVLKMQINKSDRNDAAGIARIMQCSWYKEVCVKDLDSHATKALLVSRALLVKIKRDIENQIRGLLKNLGLVIGRAKMNMFAVRAAQLAEDRSELFAAVDPLLKAREAVEQQIVDLDRKVLRLARNNAQVRRFQTAPGIGPVTALCYLATIDDPARFKRSRSVGAYAGLTTRRYASGEIDWTGRISKCGDKMLRSYLYEAANVLLTRVAKWSTLKAWGIRLAKRSGLRKAKVAVARKLAVILHRMWIDGTEFKWSSKDAADQPA

SEQ ID NO: 70226 - protein, 339 aa, unidentified
MKVSTLGIDLAKNVFQLHGVGCNGQTVLKKKLTRVKFLPFLMQLEPCLIGMEACASSHHFARVLRQYGHEVKLIPPQYVKPYVKTNKTDAADAEAICEAVARPNMRFVQIKTAEQQAILVLHTERNILIRERTACANSMRAILAEFGTIMPRTLSQLYKKIPEILEEYDNELSPFVRCSVARQLEHLQSVEDQITLIEQELSRWAKTQPACQRVMKVPGVGLMTATYLVASVGNGQQFHSAKQFAAWLGLVPREFSSGGKQRLGRISKRGDRYFRYLLVHGARAVAAVIERHKDNMPWLYRLLNKKAYNVAVVAQANKTARILWSMLVHHTEYRTLSAV

SEQ ID NO: 70227 - protein, 323 aa, unidentified
MHPASGQFVGIDVGKGELAVALRPAGVTFTVANTARGHAQLRRRIGPDPASIVLEATGRYHRALHTALVTANLPAAVINPSCLHGFRISEGIRAKTDGLDAELLARFAEQKRPAPTPLPSAARVQLTDAVRYRDFLVTQKQAFVNRQAEMPAGLKRRHGQVIRTLERQIAETEAEIAELIAADPELAAQAARLASVPGINHLTAATLLALLPELGRVSAKAIASLAGVAPRDDQSGKRTGKKHVTGGRARLRQALSMMALTTTRWDPVIKTHYEQLLARGKPKKVALIACARRTLGVVNAMVREGLTWQETKVGQGQFLPTPP

SEQ ID NO: 70228 - protein, 342 aa, unidentified
MKIIGCDFHPSFQQIAMVDIETGEHTEKRLTPAEAIGFYSQLPGPVLVGMEACGNTLWFERLLAQFGHELWLGDAGKIRALEVRKQKTDRRDAELLLQLLLEKRFPRIWVPSPEQRDVRQLLLHRHKLVGMRRQVKNQLQHLALNQGVQQKHKLWTAAGRKLLEELALTGWTAERREELLSMLDDLDPRIGKLDQAVKAAAEKDRVAQRLQTHPGVGPITALAYSLTLGEVGRFAHSRQVVSYLGLNPAEHSSGGRQRLGSISKQGNPMLRSLLVEAGQSAARLVPELKRAYQRLKHRKHSSVAKVMVARKLAVRLYWMWRNEQPNSATRMRGSPSHPVAEV

SEQ ID NO: 70229 - protein, 316 aa, unidentified
MEAIFENCCGIDVHKKTLTACIMIGGEGKITKKEIRTYSTMTEDIEGLRDWLKSEGVTHVAMESTGIYWRPVYNILEEGFEIMLVNARHIKNVPGRKTDVADSEWLCRLLRNGLLNGSFIPPIYIRQLRDLTRYRSKLNNNIAAEKNRLQKYLEDANIKLSSVATDTLGVSGRLMIRDIIKGNTDAEGLSELAKGRLKNKKEELKKSFNSRVTEHHRMLIEMSLKHIEYIESMMVKLEGKMDELIKKQDLAKDLELLDTIPGVDKIGATAIVAEIGADMSKFPTDAHISSWAGMSPGNNESAGKKKAQGPRMETYG

SEQ ID NO: 70230 - protein, 354 aa, unidentified
MKYHTSTTQFNCGIDLHARQMYVCVLDRDGKKLVHTNIKNNDFAYFLKLVAPYRHDLTVCAECMFGWYWLADACADAGIHFVLAHALYLKAIHGGKNKNDRLDSEKIAHLLRTNFIPPGYVYPTEKRPLRALLRQRLLYVWNRTELLARIQSHQLAYNRPTHRQTLYNRESWSKQLLSAEPDPVRQLALQNDLALIGHYDTQLATLERELLKLTKQTSSRDFTLLQTTPGIGDYLGLTILHEIGDIARFPSVKDFLSYCRLVKGTVASAGKIKGLRGAKLGNPYLRWAFGEAAVIAKRDPLLIGPLAQRLEARLNNKFKANTVLAIKLARAVYFMLKQKTVFDPERLVAALSKN

SEQ ID NO: 70231 - protein, 447 aa, unidentified
MTDERDGFPVLRRDVAGIDVGSEEHWVCAPSRTGDGRDVERFPATTPGLERLIAWLQDRRVRAVALESTGVYWIVPHEMLEQAEFEVRLVDTRELRRVPGRPKSDRRDCEWLQRLFSCGLLRGAFRPPETVCLLRTLVRDRATLIAERADWLRRMQKALDQMNVRVHRAVADLDGVTGMAIVRAIVGGERDPHRLAALRDYRCQKTEAAIAEQLTGHWRADHLFSLQQGLKMYDAITDRLADYEREILQQLAAMAQTDDTPPPPTNVNKARMIKKRGEEPLRQALYRISGVDLTTIDALGVETVNVILSEYGPDLSRFPTEKQVIAHLRLAPHQAISGGKPVRTPKKPQRRSARVTMALRMAATSLRRSRSALGAYYRRIAQRLGADVAVFATARKLAQWVYRVLRWGQPYVDEGAAVYEHRYRQARITRLAATAKDLGYALVSVEA

SEQ ID NO: 70232 - protein, 341 aa, unidentified
MQSTQTNTLYAGADLHGNNVFLSVCDAQGTELFHRRVPADIAAVSAAMEPYLGRISALGVESTCNWYWLVDGLRDLGCRAVLGNPAKMKQYSGLKSSDDRSDARWLAEMLRLGIFPESYIYPRQTRAVRDLLRRRQFFVQRRVQAQLSLESLLCRYGTSLEGGIRTWTQKEIHALGMAPFVEMQIETMLEAFHGNDRLAKRIEEAVTGFVEPCGDFKRVQTVPGIGPVLGMVILLESGEFSRFKNAGNYASYCRTVKSERTSNSRKKGENNRRNGNPYLAWAFIEAAYYAARYYPPIQSWYERKKNNRLEVIAKKALASKLSKAVWHVMNGKEFEMKLMFG

SEQ ID NO: 70233 - protein, 429 aa, unidentified
MNLKPIAGIDVGKFFSELVILSPTNEIFARMRIHHDSNNDMKRAIELLKKAEKDFASRPFVVMESTGQYHKILFHFLCKFGFEVSTINPIQTNSIKNIGIRKVKNDKIDARKIALIYRFQELKATNIPNEDIECLRSLCRQYYKLSDELTAYKNRLTAIVDQLMLNFKDAFPNIYSKAAIAVLEKYPTPTAIIKADKDELISTIQKNSRKSFEWATKKYELLVLKAKEFEPLSIDNAANLAMLAVYISMVKTLQENLDKVLMAIHQLIADDLSKDMPVMALTIQLLQSIPGVGFLSAAAIVAEIGDFKAFSNSKKLVAYFGIDPSVRQSGEFTGTRNKMSKRGSRLLRRLLYTIALANIRTKRNNEPCNSVLMDFYKKKSQYKPKKVAIGAVMHKLVFIIFAVLRDRKPFELRTPEEHAKMLAKKHAVA

SEQ ID NO: 70234 - protein, 452 aa, unidentified
MNVEIKQHGNYNLLRTLFVVIKNTLTGGVTAMHKKNDNKQIEKRQRITEKTLIIGMDIGCEFNAMCLMNKEGIVIGKYPRIYNSRKGFDYFHTIIETVKKKHGFTSVLIGMEPTGNYWRKIAFYAMEMGYEVRFIRTTALKHQRELDESSPSKNDIRDAYTIANIVREGKYIDTIIENGIFRQLRTLAHTRERIQRLATGAKHALQGVMEDYFPELKNIFWSMKARGLWAILDRCPFPEDVLSMGIDGLTALIAKSTRRKKEACKKAYAVYEAAQKSIGLTNIGEADRLKVKTYLADIKHSEAQLQEIEQKIKMLLRDIPCAYHILSIPGIGILTCGVFLGELGNPFNFNDPRKIVKYAGYDPKEHDSGKTIKRRRIISKKGRWLLRKYLYFMAMRVVHRSPYFKNYYENKKKSMSKKEALCAVVIKLIRVIFALLKDKRMFEEHYCLKKAA

SEQ ID NO: 70235 - protein, 352 aa, unidentified
MNTQRKDWTGQTLYAGIDVHKAKWVVTVRTRDVQLKTFVTVSDKEVLLKSFSNLFSGATIKAVYEAGCFGYHLADFLNANGIKTIIVAPHTIPVAPGQFVKTDIIDSRKLAAELANGNLIGIYLRPEENLYDRGLLRKRAQLVKRRVQLQHQIASDLRFYGLDSHITIRAYWSKWLLADLKELSLPNEYYLEAFQMLVTEHEMIRGQILQLDRLLITIADSEKYRDRVKLLRTIPGFGLLSALTFIIEIGDIKRFSSAEKFASYLGLTPSEYSSGEQIHKGSLTGMGHSSLRALLVQIAWRSIKKDPVLLMKFQRLCAGKSKCRAIIPVAKSLANRLRRVLLFQEPYVIGVV

SEQ ID NO: 70236 - protein, 367 aa, unidentified
MPSIALERSDVIVGVDTHKDEHVAFAIDGLGGTLDEPRFFPANPDGYADMLSWAAGLGDVHAFGVEGCGSYGSGLARFLRRSEHTVREVARPPRKGERRLSGKSDAIDAEHAARVLLSGTGSATPKLADGQIEAIRLIKIARDTAVKGHSSAIITLRAVLVTGSDALRAGLEPLTAHKLVVACAGLDTAGDIADPEVAMRATLACLAQRWLTLHEEIKIHTSHLKTLTRAAAPELLDRFGIGFDSAAEMLVTAGDNTDRIRSEAAFAKLCGACPVPAGSGKTSGRHRLNRGGNRQANAALYRIIVVRMRWHPPTIAYVQRRTEQGLTKREIIRCLKRFVAREIYNLLPDPSGPQHPLEAPNNRSSTT

SEQ ID NO: 70237 - protein, 458 aa, unidentified
METRIIGIDLSVRAAHKAAILDQASNTFISPVVSFHTDPAEMDRLLSIARSGAADDVRLIAVLEATGMAWYPVSVYLSDRGVEVYRVSGQQVADQRRVYQRRAKSDRIDARILARLPLTLSERIYPLILPANPQMALQRACRELLRLRRQSTSIKLRLQAMDRLVWLELSDILPPDDPRMYWVREHWYDPWQVLEAGEAAIAQSWLQASEEPSADLAWVSALLRQAERATIVYGSRSRIMGDSLLASVLREQSRLEELESQAHWLCLNTIHPLYRQLHPQRYLETIPGIGQNSAAIYIAFIGDIRRFPSLSEFRGWTGMIPYSKQSGDARVSGLHITQAGPDPIKATAFLNAQVARRWDPQIAAVYHNQMTALGKHYLQAICACATHLLDRVYVILRDNRPYELRDVDGTPVDKDVAHRICQKRYLVPDSVRRHTAHRVRQARREMRLEHLYERRSQK

SEQ ID NO: 70238 - protein, 414 aa, unidentified
MLKIVYRTCCGMDVHKSFVVACIASTNEYGVTTYKSKRFSTFTGDLRRCAAWLAENNCKDVCMESTGKYWIPIYNILEPTCKIVLAHPKYVKAIRGKKTDKRDAKWIADIFKHDLVSGSFIPPADIRQLRDLVRYRWKLTNFTTGEKNRAQNCLTVSNFKLDDVFSDVFGKAASAITARILENPTEKITDVSGFRTKGMKATDEQILAAVDGEMCAQQAEKLRIIRSHMESLELCKLNLESLILSTAEKYLPQLNLVMTAPGIQSFAAIGIISEIGVDMSVFPTSKHLCSWAGLTPQNNESAGKKKTTRISRAGAYIKPLLVQCALCAIRAKQFPEVRNRYLALKKRRGHKKAIIAIARMLLTAIYNMLKKNEPYNPELYRNADRPPAHREVSVAEAIFILQRQGYLVTAPASD

SEQ ID NO: 70239 - protein, 348 aa, unidentified
MIWIGVDAHKRLHEAVAISESGVVGSRRIHNDPPQWAQLLEWATQWPQRVWAVEGAWYLGRGLAQFLAEHGEEVHEVNGRWTAQRRRGMRRPGKSDRLDAHSIAQLLREERATLPRVYAEDDELASVQLWSRLEAELTEDRTRLLNRLHDLLLLCDPRYATALPDLTTQAGIAAARAYVAPGARAVAREREQAVRVTAEQVALLDAQIRDLRRKLERASKSSFRALRAIEGVGALTACTIVAELGAPRPGFGDEQLAALAGVAPLEASSAGVTRHRVNRGGNRRLNLALHRIVLTQARMYEPARAYLARRRAEGRTDREARRALKRLLCRRIIQAWRACFDQPLAAAA

SEQ ID NO: 70240 - protein, 369 aa, unidentified
MNKFSKYVGLDVHQETIAVAVADTAGEVRYMGEIVNTPEAITKLVAQLKRSTGRLAFCYEAGPCGYTICRQLRELKQDCQVIAPSLIPKKPGERVKTDRRDALSLARLHRADELSPVWIPDEAQEALRDLTRAREDMKHLQRQAKQRLLSFLSRHGHRYNGRSRWTQAHWRWLEGIKFSRPEQQIVLQEYIDTVQACSQRVASLDREVETAAHASPVWPVIEALMALRGISLLAAVTVVAELGDLARFANAPQLMAYLGLVPSEHSSGKRERRGGITKTGNGHVRRVLIEAAWTYRHAARKTAILQRRAERTPPEVQEIAWSAQKRLCQRFRNLMARGKLKNQVCTAIARELVGFIWAIGQYVIPLSRA

SEQ ID NO: 70241 - protein, 348 aa, unidentified
MTLTTIGLDVAKLVFQVHGVDENSRAALKRKLHRPEVVTFFEELPRCTVFLEACGASHYWARLLTALGHEVKLIAPEAVKPFAKKGKKNDAVDAAALCVAGSRPEIQFVPIKSVAQQAVLALHTARSLLVKQQTMLANAIRGLASEFGLVVPQGLHRLEELMVQVTAEASFPAVGRQALIVLHAQLQAAAERIVMLEEQIVVHARQNASARRLATIPGIGPITASLIAATVGDNITAFTSARHFAAWLGLVPRQHSTGGKPRLGRITKAGNTEIRRLLVLGATSMVRRAETWNSAAGIWLRGVLARRPVRLTTVALANKMARIAWALLTRNDVYRAQGRSKVAAGAAA

SEQ ID NO: 70242 - protein, 321 aa, unidentified
MSPANVYVGIDVAKDWLDVAQRPGGEAWRVSSDEAGVAALVERLKGVRPTLVVLEATGGLQIPAVAALAAAGLRTVVVNPRQVRQFAGATGRLAKTDAIDAQVLAQFGEAVRPEVRPLPDAATQELSALVARRRQLIEMLTAEKNRLRLATKKVRPNIEAHIRWLEGELLNLEGGLGDVIRSSPVWRERDNLLRSVPGVGPVLSSVLLADLPELGKLSRKEVAALVGVAPLNRDSGLFRGRRQVWGGRSHVRTALYMAALVATRYNPVIKSFYQRLLSGGKPKKVALTACMRKLLTILNAMTRHQTPWQTMDLTLDLKDSC

SEQ ID NO: 70243 - protein, 391 aa, unidentified
MGVQRRVVIGMDPHKRSVTVEVMEADERIVGHCRFGTDVAGFAELVGFAGQWADRVWAIEGCEGIGRHVAQRLLAAGEQVVDVPAKLSARMRMFATGQGRKTDDTDAHSIALVGVRISGLQPVVSDDQLEMLRLLVDRRRRIGQEHVTKICQLHQLLLELVPGGAKKDLSAAQARKILAGVRPGDEVGKLRKRIALELVVDLERIYLRKKQANKELVTLLKTTGTGLLDLHGIGPTGAARLLVEVGNITRFPNRGHFASWTGTAPIDVSSGDRQHHRLSRGGNRQINMVLHMMAVVQLRNHTEGRAYYDRKVAAGKSPNEAMRCLKRRLSDIVYRALLDDYVTAKATGPGGHRGTTHQSSVAGSHPHTSTSDKPLPGPVTTKPTTTLPKAS

SEQ ID NO: 70244 - protein, 416 aa, unidentified
MENLFLCCAGLDLHKESVEACVRRMEPNGHLHQQTRRWETMTQDILMMADWMAAQGVTHVAMESTGVYWKPIYNILESRFTVLLVNARHLKQVPGRKSDIRDCQWIAQLLQHGLLKGSFIPPLPQRELRDLTRHRTQLVEEKTRTSNRIEKVLEDANIKLGSVASEVLGVSGRAMIQALIEGEKDPGQMADLAQRQLRGKIPDLKKALEGRLTEHHRFLLRLLWKQLTQQEALIAELEAKIEEVTVLFAGEIERLDAVPGVDRRVAEVVLAEVGADMNPFPTHRHLAAWAGMSPGNEESAGKRRKRRITPGNRWLKRTLVQAAWAASHTKKSYLASQFRRLVGRRGKKRALIAVGHSILVILYYLLKEGTQYADLGADFFDRLEPQRLTRYYVKRLEQLGHHVMLEHVMLEQHATA

SEQ ID NO: 70245 - protein, 410 aa, unidentified
MELLRSEVPASSLVVAIDPGKAFNRVWLTSGERGLIGEPVSLPVLRDGVDELERLVASSGVVGSPVIGLEATGGLHRAWAAEIERRWPGSLRLFAPSETTAARAQLGSRRFKTDDRDCAALVWLVRQGAGRPAEPRVVETLLGAVRHRSQLVDARRVLQHRLHDQLNALCPGLSAPPGHGRALKLESPTGQAVLSCAAAFAGRAPSKRSLLARAPGRTTDATAAFWTGRWKRLLEPPLDAELRAQRLAGDLRRWQELRQDIALAEEQLTVLLAQTRGQILTTLPGVAIVRAAAFSAYTLPIERWATPEHLYSATGLAPASHQSSTITRRGRISRQGLPEHRDALMGIAWGLSQRSEAFRARDSELRARGFRPIQARVALARNACRLCWRLLQSQHPYDDRRYARTRRRGR

SEQ ID NO: 70246 - protein, 346 aa, unidentified
MAMTIVESTRPVTGGVDTHADVHVAAAVDANGGVLGVESFATTPAGFAELHGWLTGFGAVARVGVEGTGAYGAGLARFLRARHLEVIEVDRPNRQLRRRAGKSDTIDAVEAARAALSGRASGIAKTADGDVEAIRVLMVARRSARDVRIKYLNQIRHLGFTAPDELRERLRDVPTDQLARTAASLRPGAGTVMHATKLTIRTLGRRVLDLEADAHHLDQLIDELVRRTAPSLLDVHGVGTHTAAILLVAAGDNPHRLKNEAAFAHLCGVAPLPASSGKVIRHRLNPGGNRQANHALWRIVFTRMSSDERTRKYVARRTGEGLTTREVMRVLKRYVAREIYPHLVHA

SEQ ID NO: 70247 - protein, 342 aa, unidentified
MEQISRIGMDTSKHLFQLHGVDATEKPVLRRTLRRRDMITFFERLAPTRVAIEACGASHHWARLLRGFGHEVQLIAPQLVKPYVKRGKNDAADAEALCEAVTRPSMRFVPVKSKERQAACMLMTVRERLVSVKSQLSNAFRSYAAEFGIVGPAGRQNVAALIKRVLEDDSLPEMARDLFRLQADEYAAVQARLAKIEAKLMKWHREDDISRRIATIPGVGPIGSSMLSMKAPPPETFRSGRDFAAWLGLTPKDHSTGGRQRLGGITKAGDSILRSTLIVGATALLRHVRKGRHKPTPWLASLLERKPPKLVAVALANKFARIAWRLMISGGVYNQPVATMPT

SEQ ID NO: 70248 - protein, 468 aa, unidentified
MKLRNAIGIDPDSSGCQRAFVKLDGSQVQQREYLATEEGMQSFIRWVKRQDDAIVAIEGSNGLSAPIEKALRDAEIVFYSFKPSDVDKFRKAVLGQNKNNKKDAESTARYAMALESQGKLDKCRRVWKADEELQGLTRWYAQKRKEATREVNRLWKLLRAVSVDLYLALGGRHPEIEISENVVQNEEILALLAAKPDIFEWKSLSEADFMQAMGNRNCKGRKQLLKEIQKVSKSFRPLSPAASLMIQHTAEQIILSRRQLTAIKKMLQCITKDNKAVKALAQHRGIGTLTAATLMAEIVDIRRFVRNDNLASYSGLVNREHKTGKNDKEIPSCYFNHRLKNAFMSAAGNYVHFNPDMHLAGYYKNLVKGGMKKTEARKRVARALVRVFFRELSSAAELDESDKVEQKERGNESDMANGPSRSDKVHSNISIQSLTENNTEGEKKIKREKQKKDVEAGTRLAPEKIPIF

SEQ ID NO: 70249 - protein, 358 aa, unidentified
MRKRTTKSGNGKQVGVAAEDRVFVGLDVHKKSYHAAVRVNGREVTTRVLAPTAEAVRVFLEPYRSGRLHVVYEAGPTGFGLVRALREAKVSADVIAPSKTPQTPREENKTDRLDCCQLAFYDEKGMLKTVAVPTAEEEADRQVIRLRDQVVDARRRVKQQIKSFLLQHGVAEPKGLANWSKESVEMLGQLPLVAPLRFCLDVMVAELKAFDKLLGQVNREVERLSRETRHSEAVTRLRKYSGVGVITAMQYRTEVFRPGRFANERQVAAYLGLAPRVSQSGERHRTGPLLKAGRGRLRALLVEAAWIWIQKDETAKATYKRLVQNTGQPNKAITGMARRLAIRLWRTLVPPEERRGAA

SEQ ID NO: 70250 - protein, 366 aa, unidentified
MKKTSTVQVSKSKLFKEQKLTIGLDLGDGWSFYCVLDEAGQIIVEQKLPTTPEAMKQTFGKMPRSLTALETGTHSPWVSRVLSELGHEVIVAHAQKVESITKSNRKDDRHDARTLARLARFDPELLGPVRHRSEQAQLHLTLIRARAELVSARTALVNAARGLVKSYGQRLPKCGAYQVNEKLAEGLSAELREVLVPLLKGIESLNERVKEYDERMENIAKQVYPEVALLKQVKGVGTQIALTYVLTIEDPYRFPKSREVGCFLGLRPGRRNSGKSEPQKGISKEGDRYLRTMMVQGAHYILGPFGEDSDLRRWGLKLAERGGKNAKKRAVVAVARKLAVLLHRLWVGGEVYEPLRNSQKVLREVA

SEQ ID NO: 70251 - protein, 424 aa, unidentified
MKVTYQTCCGIDVHKSFLVATIVKTTGGIEPSYQKKRFSTFNNSILEFKQWLLDNDCHDVCMESTGKYWVPVFNLLEDEINVVIANPKWVKAVKGNKDDTKDSKWIGDLFRLGLVKGSYIPCKIVRILREYTRYRYKLVSCRSSEKNRYQNALTVCNVALDSVVSDIFGKSSMSIIDYLLEQSGTSINHEEIASKLLRSLKSKEDAVIESVEGYQMTDAPKYRVRLVRTHMDYITAEINDVDKMIENMISSNPDFENAVQFLCTIPGVKRDSAITIISEIGTDMSQFSSSKRLCCWAGLTPGSNESAGKKKSVRITRAGVYLKPALVQCAHAAVKSDKSPYYKKKYESLVKRRGKKRAIIAIARMILTAIYQMLSTGEQWNPSDLYKIDMPVALVEKQKAKAIKQAKKLLQREGILPPDEPLAS

SEQ ID NO: 70252 - protein, 481 aa, unidentified
MALEPLAGYPPLPLRARVSVSCTDPGPWPPARLVPIGSGLPLQEVADGMKVMYEHVAGIDVHKDMIKVAIRSPGDKPWTRKTEILEYRTFYGVLQEMARELRRRGVTHVVMEASGVYTEPVYYALCEQDFTEVAVINPVHAKALKGHKTDAKDCARLAELFECGLLRGSCIPSAEQKEVRDLTRYRIKTVQARTSEIQRLGKALESAGIKLGSVASEITGKASTAMIEALIDGERRGGVLADLAIGRMRSAGKLADLSMALTGRFTGHHATLCRLHLDRINVFDDAVDGLDDRIAAGAARWQREAGLLKSVPGFGDVVSCAWLAEIGPAPHKWFSRHEKLASWVTLCPGNNISAKKRKHGRTGDAGIYIKPMLIQAAWSAIRVRGRLQARYNRLVRRFGGDKNPAAKKKAITAIAHTLLKIAYQVLKSGTPYQDLGADFYTRRNSPEERQKYLERQLQKLHPGCTITITISPPEAALPPGA

SEQ ID NO: 70253 - protein, 402 aa, unidentified
MNCVGIDVSKGKSMIAVMRPFGEVVVSPFEVRHTANELSELAGLLKSLDGETRVVMESTGNYHAPVAWLLHDAGLYVSVVNAMLVHDYGNNSLRRAKTDKKDAVKLANYGLDHWLTLPRYIPEEDTRLMLKICYRQYQQYSKVQTMLKNNLISLLDTTFPDANRLFTSPPRADGSEKWVDFVATFWHCECVCGRSEKAFTTQYQKWCRKHGYNFSEDKALDIYASACRHFGVIPKTDTAKLLVEQAISQLQTTSSALAALKQEMQSLAASLPEYPMVMEMFGVGPTLGPQLMAEIGDVRRFHSKKALVAFAGIDAPPYQSGQIDVRSRSISKRGSASLRRTLFLVMGVLLQCAPMDEPVYQFMDKKRSEGKPYRVYMMASANKFLRIYYASVKAYLDSLEHD

SEQ ID NO: 70254 - protein, 356 aa, unidentified
METAYDGRQVVGMDLHRRRSVLVRMTEDGRRLGTAKITNSPAELRRAIARAGKHPRVVLEATYGWYWAADVLAAAGAEVHLAHPLGVKAFTYRRVKDDVRDSADLADLLRMGRLPEAWIAPHEVRELRELTRYRIKLVRLRTSCKDQVHGVLAKLGVEVTCSDIFGVAGSAWLDGLRLPQPYAGKVTSLRHLAGELTTEITMLSEVIASLLAGDRGYQVIQQLPGIGPVLAAVIIAEIGEVTRFRNAGQLCSWAGLTPRHRESDTKVARGHVTKQGSRLLRWALIEAIQRIPRDSVIGAVKDGIIGRRGKEAKNIAKVAAARRLLTLVYYGMRDGQIRCLSRPPAGPPVTETARAA

SEQ ID NO: 70255 - protein, 356 aa, unidentified
MTWVGLDVHARSTHAAAIDVMTGELKRARFGPGSDDVVDWLAQLPAPRAVYEAGPTGFALFRAAQAKGIAIDVVAPSKTARPAGDRVKTDRKDAELLARLGLAGQLHVVAVPDAFTESARHLSRTREQLRQDLMRARHRVSKLLLLHGRVYPETTTWNRSHRLWLGRQCFDEPAAELAFIDLLAAVDGLVARKTALEERLARLAADERLWPTVARLRCFRGIDTLSALCLHLELGGDWQRFRSPHKLFGWLGLTPSLDQSGESSAQGGITKTGSSYARRLLVEAALHYGRQPLIGATLQNRQLGQPDHVLAIAWRAQHRLHRLYRRLHDRGKPHNVATVAVARELSGFLWAAACAP

SEQ ID NO: 70256 - protein, 409 aa, unidentified
MGLYCGIDWAENHHDFAILNDLGEVVSRGRVDNDAAGFARLLEAFAEAGDTAENLIPVGIETDHGLWVAALRASGRVIYPINPLAASRYRSRHSVSGSKSDSADAVMLANIVRTDATAHRPLPADTDSALAIRVLARAQQDAVWSRQRFGNEVRSLLKEYFPAALTAFQSLEDGLTRPDARSVLAAAPTPTAAAALTRPQLRAALKRAGRSRFLDRDVERLRGILRTPALRQPPQIEAAMGISLMALLRQFDAACAAAETLAAHVSVLFSEHPDAKIITSFPGLGPLAGARVLAEIGDDRNRFATARGLKAYAGAAPITRASGKKTFVLHRHVKNRRLAAAGTIWAFSALQASPGARRHFDARRAGGDWNHQAQRHLFNRFLGQLHHCLITRELFDELHAFPPPLPIAA

SEQ ID NO: 70257 - protein, 338 aa, unidentified
MDHFVGIDLHSNNSYIAVIDTDNNRTFKKKARNNLLEIIKLLAPFKQQIKGIVVESTYNWYWLVDGLIDNGYKLHLANPSAIKQYEGLKHCDDITDAFHLANLLRLGILPEGYIYPKHERPIRDLLRKRIHLVHQRTAQILSFQNLVARNLGSKMHVSTINKLTEEDLEDLFEDEYLILSAKASISTIHFLRSRIIHLEKAIHKAAKLKNEYKLLKTVPGIWNVLALMIMLETGPIERFKKAGNYASYCRCVQSNRFSNSKSKGKGNRKNGNKYLSWAYVEAANHSLWNYEYVKRYYQKKTAKTNNVVAIKAIAHKLARACYYIIRDQKEFNPAKVFT

SEQ ID NO: 70258 - protein, 422 aa, unidentified
MEPVLSEARFAAFVGIDWADVKHDVCLQAVGSNEFEFSTLAHTPEAITAWTSSLHQRFRGKPVAICVELDKGPLVYALREYDFLVVFPVNPLTLARFREAFATSRAKDDPSDARLQLELLLKHRDRLRPLNPSSPIIQALGQLVEHRRRLVGDKVRLISRLTSVLKNYYPQVLTWFKDRDTALFCDFLTRWPTLDKVQRARPSTLQRFFYERRVRSAVLIERRIHGIKTAKALTTDESIIVPNTLMTQALVVQLRDILTAIAQFDEEIAHCAQQHPDFELFNTLPGAGPALAPRLMVAFGDQRDRYTCAADLQKYAGIAPVTERSGNRCSVHWRWRCPKFLRQTFVEWSNKSIHHSFWARAYYQQKRAQGQSHQAAVRALAFKWIRIVFRCWQDRRPYDESVYLTALQKRGSPLLQNLACST

SEQ ID NO: 70259 - protein, 343 aa, unidentified
MYFIGLDVHKKTISYCVKDAAGHVYQEGKIGSTRRELEEWVRTMPQPRTIAMEATIFTGWIYDHLLPHAEKVKVAHPLMLRAIAAAKKKNDRIDASKIADCLRCDFLPECHMATTEIRDRRRTLRYRSLVVKQMVQIKNRVSGLLMETGVSYNKQRLHKVGYFAELMTANEDVHESIRPLLKLSRELISRSQKLDYALLSSLQRDPLLKERLRRLRTVPGVGPITALTWALEIGDFTRFSSIKQAISYCGLCGDEKSSADKVMRMPISKQRNKHIQRVLIEAAKLAPRESPELAVIRARELERGNPNRATLAVARKMVSYMLAVERRKQDFVPAEEFSRTAAA

SEQ ID NO: 70260 - protein, 329 aa, unidentified
MVELGIDVSKAKLDCTLLLNVDSLRGRSKSVPNTPEGVKVLLQWVERHSGCKPEQVRAALEPTGVYHEMAALALYEAGVRVFVVNPGQLRDFAKGHAVRTKTDAKDSLVLALCAAQVKLTPWQPAAPEIRELRALMSRLEAVEAELRAERNRQEKAQIAADPQLVQGSIANAIAFWDAERDRLQRAIDEHIDRHPGLKSEQAWLLSIPAVGEKTANRMLCMLHEGRFRRASQLAAYLGLVPVEYQSGTSIRGRPHLSKAGNARMRAALYMAAVTAIRHNPDVRALYQRLLSRGKAKMSALCAAMRKLVHICFGVFKNAQPYRPQIEQIA

SEQ ID NO: 70261 - protein, 452 aa, unidentified
MNHQTKATSAQTLVVLNPNAAGLDIGSEEIWAAVPPDRDPHPVRVFGTFTPDLYALADWLKACRIETVAMESTGVYWIPTFEILEARGFQVQVVNARHVKNVPGRKSDEKDCQWLQRLHTYGLLSGSFRPDGAMCALRAYLRHRAALLEHRAAHIQHMQKALHQMNVQLTQVLSDITGETGLAIIRKIVAGDRDPVALAQLRDPRCQHSADEIAKALTGNYHPAHVFALKQALALYDSYTEQVCECDGEIARQFSVMKPRHDGTALPPLDVTDKRNSHSKNAPSYDARTLLYRLVGVDLCAITGMNESTVLQALSETGTDMSKWRTEKHFCAWLRIAPANDISGGRVLRSRTLKTHNRATQAFRLAAQAASRSTHSAYGAYYRRMRARLGPEKAMTALAHKIARAYYHMLKYRVPFRDVSAAEYEKRAQEREIAHLRKKAARLGLTLVEQPA

SEQ ID NO: 70262 - protein, 332 aa, unidentified
MGSHHKEGSTKMSKHSMVCAGIDTAKHKLDVALEGRSETLQVDNTADGHMALSAWLRQHWVERVGIEASGGYEQEVVAQLRRDGFVVVVFQPAQVRAYARFLLQRAKNDKIDAGLIAACTAATKKIHAPPDPRLAPFAEHLTLVEQITDDIARLKNRRESCRDPRIRGFWKAEIARCNKLLRIELKALAAAIRQHRDLAERLDLILSVDGVGLRTAVAILVRMPEIGRITREQAASLAGLAPFDDDSAEHEGVRHIAGGRERLRGSLYAAALPAAMRWNPQLMALYQRLIAKGKPHKVALVACARKLLIFVNAVVERGTPWVEEPPARLKPS

SEQ ID NO: 70263 - protein, 386 aa, unidentified
MGEKAFVPQEYDVFAGLDVDKKSISVTFSNHQQGFVRSFHMPYSVEQLVKHVRKHFTDQKVAFVYEAGPTGYGLYDGLSAQGYNCLVAAPSMIPRAPGQRVKTNRLDSRGLSESLRGGQLKSIHVPSPIYRELRHLTQLRDTMVSEVAGMKQRIQSLLLFEGIAFPAAPAGSRWSLKVKSQLRKLPCSRSVRFKLDQLLDNVEFSEKQVVQVTKEIRKLCQNEAELAQSIAYMRSVCGIGWIVASQLLARIGDWRELKNVRQLAGFLGVVPSEASTGEKTHRGSITRTGHGRLRSKLIQGSWSAIRQDGELRDFYRSVCRRHPRHMGPRVAIVAVARKLSARIAAVLMEQRPYVVRQKVHSAPLTQEETSPQGTTRRLGEPGEQNS

SEQ ID NO: 70264 - protein, 334 aa, unidentified
MQNVTLIGIDLGKNSFHIHCQEKHGNTLLRKRFSRIQLTQFLATCPPCIVAMESCAGAHFMARHISQLGHQVKLISPQFVQPFVKSNKNDFIDAEAICEAASRPSMRFVTPRTEDQQAMSALHRVRDALVRERVKATNQMHAFLLEFGISMPRGIAVIKRLATVPEEHELPPYLVRLLTRLHQHYGYLCEQIEEIERELKNHLADDETAQRLLTIPGIGTITASLLATKLGDGKNYLSSRDFAASTGLVPRQYSTGGKSTLMGISKRGDKNLRRLLVQCARVYMQRLEYQSGRLAEWVNGQLTRHHSNVVACALANKLARIAWAVTTQGTVFSK

SEQ ID NO: 70265 - protein, 386 aa, unidentified
MQKLNDLSWSLTALEPNVTLIAVIEMSLSSWLVAGIVPGVERQPLKKLAVDESALLKLLHRWREEAEKTGRGIERIAVAFEAGRDGFWLARWLKARGIEAYVIHASSVAVSREHRRAKTDRLDTELLKRSFLGWLRGERDHCKMVEIPTMKDEDAKRPNREHDSLIGERSRIVNRMKAALVRLGIRGFNPKLKRATTRLDGLRTPEGEPIPPNALAELRRDMERRRLVNNQIRQIEEERLERIEQAPCDGPHVMVRLLARVMGVGIETADMLVHEVLSRNMRDRRAVARYAGLTGSPDESGRKRRERGLARSGNARVRRGMIQLAWRFLLHQKNSALTKWFRSRTENARGTRKSMIVALARKLLIALWRLVREGIVPDGVVLRPAQ

SEQ ID NO: 70266 - protein, 330 aa, unidentified
MTTNPPQIVFNHILAFEVSKEQLLVHTLPADEQCAIDNKPQAVRRLIKAEIKRNRNKQLGQMLVVCEATGGYERHVLDAAVEMGLSVHRAHGTRVRHFGGYCGLLAKTDPIDARLLAQYGLKTENIRLYSPPPPETAALRALHARRTEIQQMLIAETGRLDHAQHKNVLKSLKDHIASLKAALAAIEADIAQLVEKCEVLRKKVALMQTVIGIGPISAMVVLAYLPDIGRLTRGQAARLAGLAPINNDSGKKRGARHVEAGRTAIRRALYMAAGVAMRTNPVVKAFADRLRGKGYPFKYVVTAVMRKLVVILNAVLRDGQSWRGAQVALV

SEQ ID NO: 70267 - protein, 379 aa, unidentified
MKKDTRHVGLDVDSEKIAVAVAEPGGEVRSLGTIPYSSEAVRRLVKKLGPASRLRVCYEAGPHGYGLYWQLAKLGVHCDVVAPTLVPVKSGDRVKTNRRDAEKLARCYRSGDLTAVWVPDAAHEALRDLVRAREVAKKDQLRARHRLGKFLLRRGLRAAAGVRSWTAKHLLWVKTLRFEHAAQEATFLDYLHEVEHAAERVARLEGAIDQAVESMPAEMRAVIAGLQALRGIRKVSAATIVAEVGPLTRFSRPKQLMGYSGMVSSEDSTGSSVRRGAITKTGNAHLRRIVGEAAWAYQHRPAMSPLLKKRQEGLSEEIKEIAWKAQHRLCSRYRRLLAKGKIRQKVATAIGRELLGFIWAIGTQVEKEQRSTKDRSHAA

SEQ ID NO: 70268 - protein, 451 aa, unidentified
MVAVGEPQEIEDEEHEQILGRVAAVDVAKASGMVCARVPHPCRAGKRRTRVWVVDATTGAVLGLADHLVAERVGKVTLESACGYWRIWFYLLEAAGLEVQLVRAADVKQAPGHPKTGKLDAVWLAKLTERGMLRPSSVPPAEIRQLRDYTRLRTDLTRERTRHYSRLEKLLEALIKISAVASRLDTLSVRDMVEALIAGERDPQVLAGLARGRMKAKHDRLVQALTGKPDDHHAELARMLLDQIDALTGQTGKLTTRIEELIAAIPAAQGIDADGTTGPAAGHGQGAPALPAAGRLDEVTGIGRGAAQAIIAEIGLHMSVFPAPGHLVSWAKISPQTIQSGARTRAGHAGKGNPYLKGVPGEAAAAAGKTDTFLGERYRRLVKRRGKLKALVATAGPILVIVWHLLADRAARYHDLGPGYYATRIDKNRKMRSHIRQLEALGYTVSLTQAA

SEQ ID NO: 70269 - protein, 338 aa, unidentified
MPLYGGIDLHANNSVVVLLNEQDQRIYHKRLPNDLATIVEQLAPYHADIEGLVVESTYNWYWLVDGLMDAGYRLHLANPAAIQQYSGLKYTDDHSDARWLAHLLRLGVLPEGYIYPKAQRPVRDLLRKRAHLVEQQTANVLSVQNIIVRNTGARLSANRIKSVSQAEVDTLLPNADQALAVSSALAVLHCLAEQIKTVETRVRTRIQSTPLYELLQTVDGIGPILAQTILLETGDIGRFPSVGDYASYCRCVDSTKVSNGKRKGQGNVKNGNPYLAWAYAEAAHFARRFNLQVQRYYQRKQAQTNVTVAHKTVAHKLARACYHMMRHQAPFDAAKAFG

SEQ ID NO: 70270 - protein, 409 aa, unidentified
MRIIGLDIHRIFAEAVAWNDGKLQRLGRVDMRRDLLEAFARQLSMDDVVVVEATGNAAAVAAVIAPHVKRVVIANPMQVRIIAHAKIKTDTIDAGVLAKLYASGFLPEVWIPDEPTQALRRQVTRRNQIVRQRSRLKNIIQSILHSHLIPACPHADLCGAKGRAWLVAQVVPEDERLAIERHLREFDRLSEDLKVIERDLARSALNDEGVKRLMTIPGVDMVVALAMAAAIGEIGRFEEPQKLVGYLGLNPSVRQSGPGPAYHGRITKQGRGHARGMLVEAAWAAARAPGPLRAFFLRIRARRGQHVAAVATARKLAIVIWHLLSKGESYAWARPSLHAKKRRDLELKAGYEATRGQRGAAHAYNLKSHRDEERRWVEQAETAYARFVAGWHPRGPKKGRTGAATEVRR

SEQ ID NO: 70271 - protein, 327 aa, unidentified
MEGTSPNSTFVGIDVSKDRLDVATLPQSKGWHVPNTSVGISRLVDQLQGLGRCLIVIEASGGWERRVVGELLEAGHAVARVNPRRVRDFARALGHLAKTDRLDAQVLAQFAAQVQPRPLEKAHEKQAELTELVTRRRQLIGMKVAETNRMQQSSAKAARKSVKHLLKSLENEIHDIDKAIAQLIEDDDDWSQRQTLLESIPGLGKVVSCTLVAHVPELGKLNRQAISSLIGLAPFTRESGSWEGKRSIRGGRGRVRSVLYMAALTAYRCNPTIRSFAQRLLDKGKPFKVMITACMRKLLVIINTMIRENQAWNQHRLVNVSQSHLTP

SEQ ID NO: 70272 - protein, 361 aa, unidentified
MLYLGIDVHRKQLTVNVQNEAGESLVRRQVSTEWKRVRAFFTELARRAAEEGGYMAIVETCGFHEWVVELLAEFGCREVVVVQPTGRTKKKTDRRDAQALSEVLWLNRDRLAAGLSIRGLRRIHPPNRTDAENRQLTALRVRVKQLRTRTLNKIHRILLKHNLGQHCPTKGLATKRARRWLEEQLVLPELDRLEIELLVAQWSLWDQQLATLDREIIRRQQLCPTAVLIASMPGAGSLGSLALASRMDRIERFPRPGSLANYWGLTPAVRNSGEATDRLGSITKEGSRLARFVLAQMVLHVLRRDPTIRNWYQRIKRRRGAKIARVAVMRRLATILWHMVKHNEPYHLGGLPRRPLMAAAG

SEQ ID NO: 70273 - protein, 415 aa, unidentified
MAEFLSAPITVFYVGIDWAAETHYVCVLDDTGRINSTFPINHTADGFADLIRRLGKLGARAQVAIGIERPDGRLVDALLEAGHPVVPVSPNAIKTWRDGEVVSGAKSDAGDALVIAEYLRLRQHKLRIVVPFSDQTKALRTAVRTRTDLVEMRVAATNQLSALLDMHWPGARAIFADVESPIALKFLTRYPTPASAAQLGEKRIAAFCAANGYSGRRPAKDLLARLRGAPAGTTSPVLTDAVQHTLMAMVGVLTELNTAIKDLDRTVIAHLGEHPDGEIFTSLPRSGQINAAQMLAEWGDCREAYDSPDAVAALAGLTPVTKESGKHRAVSFRWACNTRFRVAMTTFADNSRHASPWAAEIYNRARANGKDHPHAIRILARSWTHVIYRCWQDRKPYDVASHGAVQRLNQPPQAA

SEQ ID NO: 70274 - protein, 370 aa, unidentified
MNSIVYVGMDVHKNTYSLCAVDGKTGEILGETKISSEVKLIKKFISRIKRKIECDDTEFITGYEAGCLGYSLYHQLNEQGIECVILAPTTMHRSSKDKVVKNDRVDSKTIAINLSNGTYKAVYVPEDRDVEVKEYTRMMDDFKAELKKVKQHINAFLLRHGITYSGKSRWTQIHIKWLKEIELSKLYREILDEYLSEYESLSEKIERYAHKLELLSQEERYKEKVGELRAFKGIDTASAMTLHIETADFVRFPTANAYASYCGLVPGESSSGDKSNRTSITKQGNATIRSTLIECAQSLTKGTVGLKSKRVKSRQKGLSVNVIDYADKAVVRLQKKFHKMIYRGVPRNKAITAIARELACFVWGMETGNI

SEQ ID NO: 70275 - protein, 341 aa, unidentified
MKEITNFVGVDISSEYFTVSFLRAKDMKLVSLENFENSANGFQNLLADFQSHRIDVDSVAICMEATGVYGESLLSFLVARGYSVAVENPYKVKRAFDISPKKSDKIDSGKLAEYAYRFYDELHFWTPKPQIIEEISIFLVQREQFTKQRIATINALHALERKNFRSEKAISLYEAMIKNCEENIKMIDKEIEVLIQKDPEYKQMIENLKTVPGVGNMLATHLLVATDGFRKHLNAKELSSYIGIVPLVYESGKSIKRRNTSSGIGPGILRKLIYLSSLTSRRCDENMQKYFFRKVAEGKSKRLVLNNIANKLLKLLVSLIISKKPYNKNFVSINPLFLKKN

SEQ ID NO: 70276 - protein, 322 aa, unidentified
MYKSKEFIGIDVSKDTFDVWSPSFGHLCLDNTRKGFRKLKKQLKENSWCVMEATGSYHQLLARYLYDSQVIVSVVNPMVIKRFIQMKLQHNKTDKSDAKMIARYAQEQPLKEWEPDPEYIEQCKVLNTNIALYFKQSTALKNKLHSLTSKGAKGITLQSLKRQIKHLQKEIIVLESHLESLIKENESEMLTNISSISGIGKKTAMMLISNTFAFKPFDNYKQVSSFFGMAPIERTSGSSIRGRSRISKKGNPLVRNHLFLCSFTACEHNPQCRVLYERIVAKGKSKKLALIAVSNKLLKQAFAVAKSGIPYDPNYRSHLTIQ

SEQ ID NO: 70277 - protein, 394 aa, unidentified
MAFKIFRKNCCGLDVHKTWIYACMGITDTNGRTEYKQARFSSFTKGLQKLADWLAKYDCNDVCMESTGKFWIPVFNILEKTCWVTLAYPKYTKPQKGNKTDHKDAKWICDLYMCDMVNPSFIPPPDIRQLRDLMRYRSKLTNIMTSEKNRALNCLTVSKLKLDDVFSDVFGKSSRSVIRYILEHPGETFQVAPFIDRRCKHPVEEIQAVIDGTISHQQAVKLRECLQHLDELEVHKTNVEKEILCLVRQYPYQLELLQTVPGFSGNIMTAIALISEIGADMSVFPSAKHLVSWAGCCPRNDQSSKKVKSTRISRAGVYLKPLLVQVAIQPFTANADKLSAAGALEIRCQICDGRFLSMWAALFIFLGCPLPPCPKNLHVHNGRIVILASVAWIF

SEQ ID NO: 70278 - protein, 534 aa, unidentified
MRTRNRRRRKRTLPKLKKAPNSLQPRIEEIGAQHFGILAVDCAKARFQVLLGNFCGTVLMEPQEFDNSGPDLEHLVETVQHEVRRHGLKDLLVALERTGRFHHPVRTVLRRHWTVKMIHPLATKRLRQPADPGNKTDATDLVAILRAAIAGYGTDEEELSERWAAWRLVGREREALVRHRACVRIRIQDRMEALLPGYLALFADPWKMSAAFRVALDYGSAAALAQAGPEALLAHLHQAGLSMRRDTLGRILLWAAKAAPGDPSGELLRRLVADERTLLAALEGQIRAYERDLLAHLVDTPFLLLLSLPGIHVVSAASYAAELGPIEHYPHPRKITGRAGLYPSRYQSDQTDYADGPLVHRRNARLRDALMEIAHNLVRCNTYFKAWADVRRKAGWPEKPLRIAVASTFSRISYAMVAGRRVFEHPAIRGRDAILPKVTAFILDHDIAPEAARDLLRRAAQQIPPEARPAEAEALRPELARRHRRGSIWTRGTGPQLLADILPELLTWLGLPVAPQPERNPSPPTNEESTGTPH

SEQ ID NO: 70279 - protein, 358 aa, unidentified
MKYVGIDVHKKMCQAAILEEDGKLLDEIRFANDPEEIEEFAGKLTTFHDEVKAVVESTGNLWIQIHDRLEEHGFDVALSNLAKTRLIAKAKVKTDKVDARTLAALLRADMLPTCYVPGEELRSRRELLRHRLNLVKIRTGVKNRIHGLLDKHGLRMPGTTPFSNGNIAWLRERNLGFMDDAILCSDLALLETVDEQVERIEEKIAALAAEEKQARLLMTMTGVGYFTAMLILTEVGDISRFRGDKEFASWMGLAPSVHQSGERIRIGGVSGPGNKRLRWALVECAQAAVRYDSRFCGLYERVSRRRGSGCAVVAVAHEMARIMYFILVREEPYRGENRGLTERKLKGMGKKAFNGLRN

SEQ ID NO: 70280 - protein, 329 aa, unidentified
MERIAHHVGLDYHQASVQVCALEEGGRVVANRKTANETRAIVGVLPAGRVRAAIEACSGAAELAEELQRAGWEVVLAHPGYVRRMKLNPDKTDFSDARMLAELVRMGHLPRVWLAPRAVRELRLLVRHREQLARERRAVKLRIRALLREQRIAQPVGLGRWSRAWVAWLGEAPLSEQGRWMVGEHLAHLRGLKERIRGVEARLEVLTRTDPVVARLRELRGVGPITAWWLRAEVGDFKRFRTGKQLARFCGLSPRNASSGARQADAGLIRAGNPGLRACLVQAAHSLARFDPRWRELAGKMLTRGKPRSLVTAAIANRWMRWLHHQMAA

SEQ ID NO: 70281 - protein, 364 aa, unidentified
MDVHLRSTTVCALDAETGEAVTRRFRGNPWGEVAEWMSGFPGPSLAAYESGYLGFAPQRELSGLGVDCVVAAVSRVPRSAADFSSKNDRNDAARMAKAILSHDVTPVWVPSPEIEGLRDLAAAHDAATARLAAAKQRLLAFLARRDYVYGGTTPAGNPRRYWTYGFLRWLDKVRPADDGGIRALAALRNEVEAAAETRDDLLAEYRAAVAAGPLSAEVEALQSIKGCGFALAAAFASEVGDFSRFRSGRQVTAYFGLAPKQRSSADSVCLGGISGAGNALVRKLAVEGSWCYAQAGHQPKLMPKGSGVPLEIRMHGRKGAERLLRRREEMLERGMPQAKANAATAAELVRWLWALGMMCREGAE

SEQ ID NO: 70282 - protein, 460 aa, unidentified
MPLGRTPRQQRLDELACVHPNAAGLDIGSEEIVVAVPPARDPQPVRLFQTFTPDLHALLAWLLECGITTVAMESTGVYWIAIYELLEQAGITCYLVNAQHVKTVPGRKSDWNDAQWLQKLHMLGLLQASFRPDAEIRSLRVLAGHRAELIRHRAPHILHMQQALKQMNIQLSEVLSDITGLTGQAIVRAIVAGERLPVRLAQLRKIGCKHTEAEIAKALMGTWHPAQIFILQQNLQLYDFYTAQLADCDSEMERCYQAMEARGEQDAPLPDLPRAKPGSKSKNEPNFNLRAQLARIVGVDLVGVMGLSASSAQTIITEIGTDMTKFPTVKHFCSWLGLAPRNDISGGKVLRSRTMKVHSRANQAFRQAAESVARSQSSFGRYFRAMRARLGPEQAIVATAHKIARVVYHLLTTKEPYREECADEADQKRQERELKQLARRAQKLGYTLNPLAAPPSAPSP

SEQ ID NO: 70283 - protein, 356 aa, unidentified
MSQKLDSKVAVIGIDIGKNSFHIVGQDRRGALVLRQKWSRGQVEARLANLPPCLIGMEACTGAHHLSRKLQALGHDARLMPAKYVRPYSKGEKNDYRDAEAIAEAVQRPTMKFVATKTADQLDLQALHRVRERLVSQRTGIINQIRAFLLERGIAVRQGLHLLRAELPSILGTRTDVLSPRMLRVIEDLTGDWRRLDERIEDLSGEIDALAHHDKGCERLMTVPGVGPIISSAIVAAIGTGDAFSKGRDFGAWLGLVPKQMSTGDRTILGSISRRGNRYLRKLFVQAAWVVLVKLGPEQWERYGLKSWIEAAKKRLHHNVLAIALANKLARIAWAVLHKGRAFEYVKTNATASRSA

SEQ ID NO: 70284 - protein, 400 aa, unidentified
MMTPDDIDVWVGLDVGKSAHHAHALDHDGNTLYDKPLKQDEKAIRTMLGKLSKHGRVLLVVDQPNTIGSLPLTVARNMGIAVAHLPGTAMRRTAQLLPGDAKTDRRDAHVIAWAALKLPETLRDAGPDDETLAALKLLAGHDEDLAHESTRHVNRLRSLLLQTHPAFERALKGERITRDATLALLERYGGPMGVKRAGIEDVKDWAKSNGLRAGRIIDDMFKAIGEQTVTVPGTLMAETIIPSIAHDIKTIRDRRREVGRQVEKLLEDHPLLTVLTSMPGIGVRTASNILLGIGGDIANFKSSAHLAAYAGISPVTGQSGTSIKGERPSRRGNKRLKNALWQTAFVASTKHPPSVAYYKRKREQGKHHNAAIICLARRRCDVIYSMLKNGTLYQEPALVA

SEQ ID NO: 70285 - protein, 343 aa, unidentified
MKLTRVGVDLAKQVFQVHGVDRAGRPVWCKRLKRSRWIAELERAAEPGAEIGMEACGSAHHWARVLQGKGYRVKLIAPQFVKPYVKTNKTDAKDAEAICEAMSRPSMRFVAVKSVEQQDLQAVHRVRSSLIRERTAKANQMRGLLYEYGLVAPREISSLRRAVPEWLEDAGNGLTPRFRALLAGLYGDLRLFDERVRELDREIAAIAREHEAVGRLEQLRGIGPLTASALYALVGDARQYRNGREMAVSLGLTPRQHSSGGKERLLGISKRGDKYVRTLLIHGARSALRAAPGKTDRLSRWVLALAERSHPNVAATALANKMARVAWAMLRHGTNYEPEHVAA

SEQ ID NO: 70286 - protein, 360 aa, unidentified
MSEIARGEIVRAGVDLAKHAIQVHAVDANGRVVTARMLSRDKFMAWCAQLPPGCLVAMEACAGAHYWGHKLLALGLDARLISASFVTPYRIEGRGGKNDANDAAAICEAASRPKMRFVPIKSIDQQSVMTVHRLREGFEEERTACINRIRGLLTEFGLVFPKSPKALRQVLASVLEDAGNEIGGIARLALQRAQQHWQELDEHLAWGDKRIGHHVKGDPQAKAAAKLHGIGTIGASALVAGVGEFKQFNSGAQFGAWLGIVPRQNSSGGKVSLGRVTKRGDDYLRTLLIQGARSALMTAHKRTDRISPWVVQLRERVRWQKAAVALANKNARILWAVLTKDVRFNADHVSAKPEIPNPVG

SEQ ID NO: 70287 - protein, 358 aa, unidentified
MKYVGIDVHKKMCQAAVLDDDGELLDEIRFPNDPEGIEEFAWKLTTFRDDVKAVVESTGNLWIPIHDRLEEHGFDVALSNPSKTRLIAEAKVKTDKVDARTLAGLLRADMLFTCYVPGEELRSKRELLRHRLNLVKTRTEVKNRIHSLLDKHGLRMPGTTPFSKENIAWLRGLSLGFMDDAILRSDLALLEAVDGQVTLIEEKIAALAAEDRRVRLLMTMTGVGYFTAMLVVSEVGDVGRFRGDKEFASWMGLVPSVHQSGEKTRIGGVSGPGNKRLRWAMVESAQTAVRHDPRLGGMFERISRRRGAGCAVVAVAHEMARIMYFMLVRGEPYRGENRGLTERKLKNMGKRALDGLRN

SEQ ID NO: 70288 - protein, 424 aa, unidentified
MFAESQDEEQIIERVAALDIGKAEVVCCVRLPGAGRRRVQEVSTHSTMVGSLAELADRLVGLGVERVVMEATSDYWRPPFYLFEAHGLQPWLVNAKDVKHLPGRPKTDVLDAVWLCKVAERQMLRPSFVPPADIRRLRDLTRYRIDLVGARNAEKNRVEKLLEDACIKLSVVASDIFGASGRAMMAAMVAGERDPAKLADMAHNRMRPKIGLLEQAFAGLRVGTFDDHHAFLLERMLERVDAADADIAAVDDRIQEHLAPFGDAAARLDEIPGVGPIAAAIIIAEIGLDMTRFPTPGHLASWAKFAPGIKASAGKSKGNGSTGHGNRYLARVLGEAALGASRTRTFLGARYRRIARRRGKKKALVAVGRSILVIAWQLLSDPGKRYHDLGPDHYDRHGGADARKRNHIRQLEALGYRVSIQPTA

SEQ ID NO: 70289 - protein, 333 aa, unidentified
MNEIGSREYGCFPNNTTGYRKLCNWVKTNAWNTIAEEWLFCGEDTGSCSIGLSKWLYGKGYDIWIENAYAIKHSSGIQRVKNDKADSAIIAEYAWRQQDKVVPFEPLNESLAQLREIFLYRHKLVGQRVAMELRKEDKSQSNKSKAISFINRKSKHLIAEINKTIAECDKAIDSIIEADEELKENYAIITSIKGVARQNATCMLVYTNNFKKFGYDPRKIACYYGVAPFGKQSGTSVNTPAHTSHFANKLIKSLLGQAAHIAKIYNPEIRDYYQRLISKGKKPQVALNNVKNKLIRIIVALVRKKVPYDQNTYKYYEEREVIERKKNEKLIYC

SEQ ID NO: 70290 - protein, 391 aa, unidentified
MSFFVGIDVSKEKFDARCIEKQGEKAFSLTCSMNRGGFEKLILNLPADKASLLLGMESTASYHIPLFSYLTAQGYNVVIINPLLINNFAKRSLRKTKTDKKDAFTIAQFLMHEKGSFSAQTHDHMVTELKDLASRREKLADHVTSLKGNMKNILSVTFPELEDLTGVFTKSTLRLLTEYPSAHALREADHTTVADILITRSRGRKPLASVKALMALAASSVGVASPAKELVLKQEASLLLHVQEQMKETTKLLMSLLNKKIKQDMEILCSMKGIGENTAVNFLIEMGGEVEVYENDKKLIAASGLDPSTYQSGKYEGKSRISKRGNRHLRRVIWLMATKVIINNNLFRTYFFKRRKEGLPYKKAVLATAHKLIRVMFAMLSRKTCFVEGGN

SEQ ID NO: 70291 - protein, 368 aa, unidentified
MKKNNSKKQMASKGEKETKQDFAFYVGIDLGDKNSDVCVLDPRGEVSKEFRLRMKEDALRKYFASIPRSRVSIEAGGQSRWVAEAIEKCGHEVYVSNTRKVPYIHQSDAKDDRGDAYKLAELVHFKPQLLHPIQHRSREAQADLSWIRAREVLVESRTQLINAVRGLSKAFAGRLEKCSTESFTAKLAGQVPEEIRGAVAPLLETIDHLNEQIRYYDQMEEHIARERYPKYRLLEQVNGVGVHTALSFMLTIGDAERFEKSREVGSFLGMRPRKQESGESKPQLGITKAGDGYLRKTLVNCAHYILGPMGQDSDLRRFGQRICERGGKNARKRAVIAVARKLGVLLHCLWVSGEVYEPLRNSKRAKAA

SEQ ID NO: 70292 - protein, 322 aa, unidentified
MEEPTVVGIDIAKRKFDVVLLSEGKEKSGTFQNTPGGFSMLARWLERYGASQVHACMEATGVYGDELARYLHGAGHVVSVVNPAKVKGFAQSELSRTKTDKADARLIARFCRTMRPEPWQPPAQHEKQLQALVHRAQSLKDMVSQERNRRETTEGPARASIERTIRHLEEELRITRELIRDHIDQHPDLRGKRELLESIPGIGPATSAMILAEFGDVMRFQDARRMAAFCGLTPRQRQSGSSVRGKTRLSKTGSARIRRALYMPALVAMRRNPAIAAFCERLRSYGKCPMVIVGAVMRKLIHIAFGVLKSGKPFDPALAMTA

SEQ ID NO: 70293 - protein, 401 aa, unidentified
MGRKEPAVKKIYEKVACGGMDVHYKFSTVTFRDCQGKVLCREVLDHRNWPDLVGRFSEWPRGVPIAMEGFFGWGWICDLMIQLGLSPQLANSLKVAGMRKARGDVKTNKKDAELASLLPLEKGDWWKVWMPPAEVRDRREWTRFRSDLVQTQTRTKNRIHAIFHRHGIFHGFSDLFGAAGRRFLEAAVEEGAGLLSGGALWALRGQVSILTQTRKEIAAVLQETHKYLQRTPVTHHLRQAIPGLGAVLTHVVVAETGDMARFGYNHRRFASYCLLAPRADDSGEATEEPAVGRRLGHRGNRVLKWAFIEAARAAVRRGGIWRAMYDRYTQGGTQQRNRGYIKVARALAKLTVREWAKAIGGVEEGSSVPRTAAERKHRRGRRGRGSTRSGTGTPNHPMVKV

SEQ ID NO: 70294 - protein, 354 aa, unidentified
MESVTYVGLDVHKSLVVATALDPMGNRIDQRKFGPTDSELIEYLAGLPGEKHVALEATTVWEHYYDAAESAGASVVISNPLKTRLIAETSLKNDRVDSEALAQLLRLNALPTAFAPPHELRALRRLARDWVFFQRKLVAMRNHTYSLLLAKGIPYSERLLSRKRQREELRGRHPEIDRGLDAVIVLEGLLRPLEKTLKEVYESNPQAQLVGSIPGLGPVTSVVLVAFLTPIERFRNVRQVIAYCGLCPTNFQSADSSYQGHLRNDCNHLLQWMLVEASWRHRRRARSGLAARAGKRAARRHSRGGGAVTAAHRLTQLVYAVLRRGTPYTDHSPGRSRHWGDPVMPTETPAVTCS

SEQ ID NO: 70295 - protein, 353 aa, unidentified
METAYDGRQVVGMDLHRRRSVLVRMTEDGQRLGVARITNSPAGLCRVIAQAGASPRVVLEGTYGWYWAADTLAAAGAEVHLAHPLGVKAFTYRRVKNDERDAADLADLLRMGRLPEAWIAPPEVRELRELTRYRHKLVGLRTSCRNQVHGVLGKLGVPVTCSDVFGVAGSVWLDELRLPQPYAGKVTSLRQLAGELTTEITMLSEVIADLLAGNRDYQVIQQLPGIGPALAAVIVAEIGEVRRFGSAAQLCSWAGLTPRHRESDTKITRGHVTKQGSRLLRWALIEAVQHVPAGSLPGTVKQRIIARRGKQAKNIAKVAAARRLLTLVYYGMRDGQVRCLSQNPAGSPPAQAA

SEQ ID NO: 70296 - protein, 311 aa, unidentified
MTNFTIGIDISKESLDAHRWPDGATRRFPNTPAGHKALIGWIGTDASRIVFEPTGPYHRDLEQRLSEAGQPLVKVNPRQARRFAEATGRLAKTDRVDAALLARMGAVLDLPPRQAGDDKLNDLKELRVAREALIKDRTAALNRAKQLTIALLKRQNADRLKQIEHQLARIDAEIGQRIEAEPTLKARLDILVSIPGISTITAVTLLVDMPELGSLEQAQAACLAGLAPIARQSGSWTGRAFIRGGRSSVRRALFMPALVAARFNPDLKAKYQHLIAVGKPAKVALTAIMRKLVILANALLKAGRTWAPKTA

SEQ ID NO: 70297 - protein, 430 aa, unidentified
MEIVYPRSCGVDVHKSFIVAVICISESVKPKYIKKRFSTFNNQLIQFRDWLVENNCQNVCMESTGKYYIPVYNALEGHISNVVVANPKWVKAIKGEKDDNKDAKWIADLFKFGIVRSSYIPEKDIRVLREFTRYQYKLVNMRSSEKNRFQNALTTGNCKLDIVFSDIFGKSASAIVDTILSNDPYTSEDILSKVHVGCKASHEDILSAVEGIQLNQFQKARIKIVQKHMEYLDSLLDEIQHHINLMVANYEEYIQILCTIPGINRKSAITIISEIGTDMSQWSSHRKLAAWAGLAPGCNESAGKKKSVKISKAGVYLKPCLVQVAHAAVKDKNCDYYADKFNKISKRRGKKRAIIAIARKILTAVYHLLKTGEVFNPTDMTDVETTKKQRIEYVKNNLRNAFNQLSRTGLSEAEILQLIRKGSKNSPQIE

SEQ ID NO: 70298 - protein, 340 aa, unidentified
MAEVNTIGLDIAKQAFQAHGSDALGNVMFRKKIVRAKVMAFFASQPRCVVALEACGGAHFWGREIGKLGHTVRLIPPIYVKPFVKRQKNDAADAEAICEAAQRPSMRFVAVKDEAQQASGVVFRARDVLVRQQTQCINALRGHLTEYGYVASKGPTHVATLIDQIEDPNCGLPESALAVFKVLIATLRSLEENIAVLDVEIKRRSKENAVARRLMTIPGVGPITATAVLALAPAAETFKTGRDFAAWLGLTPLQRSTGGKQRLGATSKRGERTIRRLLILGGSAVVRHACAKGAAAGSWLAQMLARKPRMLVTVALANKTARIIWALLVKGEEYRAPAVA

SEQ ID NO: 70299 - protein, 321 aa, unidentified
MSESYNVGIDVSMDRLDVEIRPGGRGFCVVNDTAGWIELVARLRQCAIVAIGLEPTGGYERGVVRALLAAGFSVRRINPNKLRQFARARGALAKNDRIDARLIAEYVALMPTRAVQRNAMVERLAEIVTMRRQLCEEHVAIENQASHLEDAVLRRMAKRRLARIEADIALLGKRLAEHVAAEPVLARRFDLLCSMPGVGATLAYTLLALLPELGGIGRRQIAALVGLAPYDFDSGKFRGQRHIYGGRMPVRNVLYMAALAAFRFNPVLKAFHRRLVGAGKKPKLAIVAVMRKMIVALNAMLRDGTQWADRHSSGRHTVPAT

SEQ ID NO: 70300 - protein, 385 aa, unidentified
MACSHPDTPAAEREPSTIVVAFELSRAKWLIGVCLPGSDKLSRYTIDAGDLGALTAVLAEARRKVAARCPGAVVAIASCYEAGYDGFWLHRWLREQGVHNEVVDPASIQVNRRARRAKTDRLDLEQLMRVLLAYRRGEPRVCSMVHVPSPEQEDAKRPVRERERLITERGAHTNRIKALLYGQGIGEVFPRRADFVDRLVGMRTADGRPLPPKLVTEIRREHERVCLLDRQVAALEADCAADEENALGAQEARIAQLEQLVGIGAISARLLVREVFYRTFDNRRQVGSYFGLTGTPYDSGQSRREQGIGKSGNARARTLAIELAWLWVRHQPQSALARWFVERVGTLKGRIRRSSIVAVARKLMVALWRYLESGLVPQGARLRAA

SEQ ID NO: 70301 - protein, 422 aa, unidentified
MKNTAARKLKQVPEGYLIIGVDPHKKKHAAVAITQDLTIHDRFKFDNTREGLEFLLRRVKAVMVKSGCRGIMFAIETGGHYWRNIAYYLDERGIPFRFINQYTLKRRREGKDLNKRRNDYRDSEVAAQLLCTGEFVESGIPQGVYAELRTAHNAYRRLVKERTRITNLVKGLLDALFPEFARVFKDPCGLTSLSVLSTCSTPGIIAEMTEDQFIAIIEAAHHGRRLMRKKLGELRSVAKSSIGIEAGAHSVSVEIAFLIEKQKLIKGQIHTIERTLIKLVDASEEGKYLLSIRGIHYIAVAGLLAELGCFKSYRTAKQMIKMAGSNPTESESGGKRRLRTPMSKQGRPVLRYCAWTSVIPMLRLNPDFRAWAKERRERPAHANPLNGRDVVGAALNRLLRLCFAMVKNKTYYQSPHLVQVPS

SEQ ID NO: 70302 - protein, 343 aa, unidentified
MKDIIYDHYIATDWSIKNMAIARMTKKSNKITVIDVPSDINEFQIYLKNLRGTKILAIEETTTSQWLYTELGDYVDEIIICDPYRNKLLGEGPKTDKIDAAKLVHLLKAGLMKEVYHSAEKFIYIRRVVSGYEDMVKAGVRLKNQRYALLRACGKNGKEKKDIKLGTQGDQFVLECLDRQIKAYDEEKSGYEKEFARLAQKHSEIRHQKNLPGIGSINAVKIVSRVVSPYRFAGKGHYLSYAGLIKLAKISGGRSYGKKNSRYSRQLKSVYKSGVLAAIGGNNPINDYYEYLIREKNYPEHNARNKACRRLAILSLGVFRSGKRYQPYRRDRVKGNKEIPSDL

SEQ ID NO: 70303 - protein, 406 aa, unidentified
MAFYGGLDWGGTAHAVCVVDGAGQVIARIEARHDDAGLVDMLARLRKIALPTELPIAIERPSGLLVDALIKAGHPVIPIHPNVVKACRPRYRAAGGKSDPGDAYMLADVLRTDGHRFRPLRPMADEIKALRALVRGRDDLVAQRVALANQLRSLLEGFWPGAAAIFAAIDSPISLAFVARYPTPNSASRLGEKRLASFTAQHAYCGRRSPAELLARLHGAPTGLAGAEADAKGELVRALAAVLGRLVHEIAKLSSRIEHAVAELPDGQIVMSFPRAGRICAAQILSELGNVRERFQTEEQLAAEAGVAPVTHASGKSRGVVFRWACNKNLRVAITCFADNSRHASGWAASIYTRARDRGCKHPSVACSLAHAVRILARAWVRVLWRAWQDGKPYDPARHAGAAPTI

SEQ ID NO: 70304 - protein, 414 aa, unidentified
MTETAYALYVGIDWGTATHQVAVLDTLRAPLGERAVAHDGAALQTFTEWLTLLAGGEPARVAVALEVPRGAVVDTLLERGFHVFALNPKQLDRFRDRYTVAGAKDDRRDAFVLATALATDRPAFRRLELEDPLIVELREWSRAEDELREEWGRLANRLREQLHRFYPQALALCPAADESWFWALVGLAPTPAAARRLRRAAVVALLREHRIRRLTADQVLAALQTTPLRVAPGTVEAASAHAALLIPRLELVDRQRRDCARRIERLLDALATTGEHQGHRDVTILRSLPGVGRVVAATMLAEASRLLAARDYHGLRTQAGVAPVTRQSGKRLLVGMRYACNPRLRNALYYWGFISVRYDAHSRHHYQRLRGRGHSHGRALRGVVDRLLTVLMAMLADQTTYDPARRRAALTQAL

SEQ ID NO: 70305 - protein, 391 aa, unidentified
MSMYFVGIDISKYKHDCCIISAADQQIISKFTITNDKDGFEQLLTALNSLSNPEDIKIGFESTAHYALNLELFLENAHHSFMEVNPVLIKEYKKSTTLRRTKTDSVDCESIARWLITVEYKPHSKGFYHAYSLKSLTRLRDRLIRQRSFYLVKITNVLDHTFPEFKPFFNERLSKTALYLLENYGSAEKMARMNSASYDKLRCISRGKFSIQQFLRLKELAANTVGVNNSIFDLELNTLLTLYKSLSDEINTLETEIIKLIEEVHPHYMSIPGIGPISSAVIYAEYGDISNFSNPGQMLAFAGIEPGINDSGTESHGGRMVKHGSSQLRYVLLNACLPLIRFDLTFATYYEKKRAEGKKHRVAITHVAKKLIRVIYALERQDVDFNAQKLR

SEQ ID NO: 70306 - protein, 401 aa, unidentified
MSLDAHEEPAAIQTHIGAIFISLELSRSKWLITSLAPGGGQRMSRHWVEACDLAGLLARLWAIRDKAKARTGITYPIIVIQEAGLDGFWIHRALEQEGIESHVVDAASIAVSRRRRRAKTDRIDGEALLRVLLAFKRGEPRVCSMARAPTPDAEDRRRICRERKTLLVERIQHVNRIKGLLFSQGIGDYEPLRRDRREALEAVRTGDGRALGANMKAQIGRELGRLELLLGQIAAVEAERDAMLAREAEAAQAEAAQEAKRTPAAVAMLMDVRGLGPDTVAMLWTEALYRSFDNRRQVAAFVGLAGTPWQSGSIDHEQGVSKGGNHRLRTAMIQLAWLWPRHQPGSALARWFVERTKGASKLQRKKMVVALARKLLVALWRWVDAGVVIEGVVLKSAAKAS

SEQ ID NO: 70307 - protein, 346 aa, unidentified
MHYIGMDCHITTLDFAVVNEAGRLVKANSVTTSVNGFMEFVKAVPPPRAIFMEEGTLAAWALETCVRFREKLVITDAKKNHWIGSSGQKDDSIDALKLAQLARGGYIKEIHHPVGQRRRFRELMIAYHDTVRSTTRIKNKIKAKFRQNGIQCAGATVYSETYREEWKGKLPQEATLLLILDGLWRQLQQSEQTEKELLAAARAQAKHYPEIKHFEAIPGIGFIHAATISAILETPYRFANKRKVWMYAGLGIMKRSSGGKTYSEKLSTDYNRLLKYTLKQAAETTIQAKDNPFRRKYLDMTLLHGIAPHRAKLTIARDMLATMWAMWRKGEKYRPEIREKAAYKQG

SEQ ID NO: 70308 - protein, 338 aa, unidentified
MSIVMGLDQHRGQITAEWVETATGEVSRARVAPAHREPVARFLGRFGGVDLDVALEATTGWRFVVEEIRAVGGRAHLAEPAETSARRGSKKRAKSDRADARHLRELLMIARLPESWIAPDHLLDLRARVRLRHTLSDQRGEWQQRIQAVLYHHGCPQRRDLMTHDGRQWLRAQALPETAREQVTVALAMIEALDVQLAPLDRELRAYARRQPGCRALMGHYGIGELTAVTILAELGDCRRFSSSRLAVRYSGLDITVHQSDQRRAPGHLSRQGPPALRWALFEAAQVARRPASPDRDYYTQAAERLGANRACLAIARKLLKRSYHTLRELGEEALAPA

SEQ ID NO: 70309 - protein, 378 aa, unidentified
MSEYTTQVGMDVHARSVSCRALRPDTGECWSGTFRGEGFERALLEWLRGLPQPVRCAYESGCTGFWLSRFLEGAGVACGVVAVSTMPRSPRDRRHKNDRRDAAVVLREMCNPASDVSYVWVPDPQTEGARDLARAADAAARDVRSARQRVSMLLLKHGFAWCERTPSGNLRKTWTREWRRWALSRDLGDALSNRALEMEFAAVELLEREVAGLAAAVAEEAGRPRWRPYVDALVRLKGVDVQTAFLACAEFGDFSRFRSGRAVSRWIGCTASESSSGEADRRGPITKEGSSRLRRALVEGAASMPRRNGRPKRVRPGHEVSPAVEEMAAAANERLRRRYERLRGAGKHANVARVAVVSEMARWIWAIGLQVQRELAAA

SEQ ID NO: 70310 - protein, 335 aa, unidentified
MKKFSTHVGIDVSKSTLDVCILKAEGMSVVGMSVVPNTQQGIRRVFRELRHLNAYGDDTLFCFENTGVYSVPLCLCLSEAGLPYWEVPALEIKKSKGITRGKTDRTDAQDIARYSVRSLDKFKASSMPEVDIQRMKVLFAERDKTVRALKLFESTTEGAAFLPPSIYKSVESQNRKTIAYLRKALRAIDAKIRGVRERNEPLNAQYNLLRSVPGIGDVTATYMIIATGGFKRFGSWRKFACYSGIAPFQYASGSSIRGKTRVNHLADKKMKSLLNMAALSAVKHDPELKEYYERKKHEGKNPMLVLNNIRCKIVSRAFAVIDRASPYVNLKKFAA

SEQ ID NO: 70311 - protein, 367 aa, unidentified
MSADTFVGLDVHAESITAAILRPGSEQPEVIKLSSDLMKVRRLFRRLSGHGPVRSCYEASGAGFVLQRVLAGDGFSCEVIAPSLIPRKPGDHRKTDRLDAVMLARLYRSGHLTAVHVPTEDNEALRRLLRLRTTYHQYITATMHRISGILRNHGFVFNEGKSTWTKKHRMWLARLRLTLQGPLSTALAMELQHLEYLETELHSMDTELERYAQSPLYRSKVEALCCLRGVKILTALTILCEVDDVYRFSSPRKLMAYFGLVPSEHSSGTREYRGSITKAGNIYVRRLLVEAAWNNRHNAGAALILNRRRQGQPPEIVAIALKAQHRLTKKYLRLDQRKHRHVAITAVARELCGFVWAILMALPQTQH

SEQ ID NO: 70312 - protein, 403 aa, unidentified
MNSVGIDISKGRSTIAVIRPFGEVIISPFEVRHTGSELSKLAKQLKSLDGETRVVMEATGNYHASVAKLLHDAGLYVSVVNAKLVHDYGNNELRRVKTDRKDAVKLANYGLDRWLTLPRYIPEEDTRLLLKNCYRQYRQYSKVQTVLKNNLISLLDTVFPNANRLFSSPIRGDGSEKWVDFVAEFWHCRCVSEKSERAFTSKYLRWCRKHGYNFREAKAHTIYAEASGHIGVMPKSETTKLLVEQAVAQLRVTSTALAALKQEMQSLASQLPEYPVVMDMFGVGPTLGPQLIAEIGDVRRFYSKKALVAYAGLDAPPNDSGDVTGRHKSMSKIGASSLRRTLFLVMSVYLQTAPLDEPVYQFMDRKRAEGKPYRVYMMASANKFLRIYYATVKAYLESLEHTA

SEQ ID NO: 70313 - protein, 341 aa, unidentified
MKDTMIGVDLAKRVFQLHGAAMTGEVKFRKKLTRDQFRVFMAAQPAALVVFEACGSASYWAREMEALGHEVRLIAPQYVRPFVKRQKNDAADAEAIVIAARQPEMRFVAPKTADQQAKAALFRGRVRLVHQRTELVNALRAVLYEYGHVFSVGICHLKRMEAVLEDPRCDLPTLVIAECQDLLAQIAEKTERIEAKTKTLKALAAETDTARRLQTMPGVGPLTALAVEAFAPDMALFKSGRDFAAWLGLVPRQHSTGGKARLGRISKAGQSDIRRLLIIGAMSRIIGRGRHKVPAESWLGRKLARKPKVLVGIALANKMARQIWAMLTKNEDYRDPALATA

SEQ ID NO: 70314 - protein, 323 aa, unidentified
MNKGIKFFGIDISHLVFDVTDSDGNYYQFKNNVSGFRKFIKLLDSQSHCVMEATGYYHYQLAYYLLESGIKLSVENPLAVKRFIQMKLSKIKTDKSDSKLICEYAKQMELKLWQGNSKEETECLQIVRALSVYTKQSTMLKNKIHGEAVLGNPSKIVVTSLKRSLRQLTKEMKTLEEKLLALVKQSHQDLFTRLKTIPGIGPKTAIMLVVLTGGFDRFTSASELCSYAGLTLVIRHSGSSVKGRPRISKIGNQKLRNLLFMCSFNACKYNKACRDLYERIVAKGKSKKLALIAVCNKLLKQAFAIAKSGLIYDAEYKSTLVKN

SEQ ID NO: 70315 - protein, 338 aa, unidentified
MESYAGIDLHASNNYTAVIDNHDKRLYGKSQPNRLDVVLSSLDPFKTELKGVVVESTFNWYWLVDGLMENGYKVHLANPSAIKQYEGLKHTDDKWDAFWLAHMLRLNILPEGYIYPKEERPVRDLLRRRLLFVKHRTSHILSLQSMITRNLGVRMACSGIKKLMEGDAESMFDSPYLVLAAKNNIATIQFLTKRIKVIEREIRPVIKIREEFKNLLTIPGIGDILGFTIMLEVGQLSRFPKVGDYSSYCRCVKSERLSNGKKKGKNNKKNGNKYLSWAYIEAANFIRRYCPKANSFYQRKKAKAGGIVATKALSNKVARASYYVMRDQVPFDEDKLFA

SEQ ID NO: 70316 - protein, 349 aa, unidentified
MFAGVDTHKDTLAVAVIDHGGRVVRQLELPNQDSGYARLLALLSSHNVARVGVEGSGNFGWPAAIYLLKRDLNVVEVPPLMTSRERLSRPGQGKTDPVDAVAIARITAREDALPPVRPMTGHAADLRVLTEYRDQLVNERTATANRVHTDLGWLRPGYQHHLPHLTNMAHLHAALELLSGDDSVRAAVTRSRLHRMLTLTEQLADLRIQIDALVKASGSTLPEIYGIGPVVAATIIGHVFDVRRYPTRHHFATANGTAPIPASSGRTVRHRLNRGGNRQLNRALYTIAITQIRADTEGRAYYQRKRSEGKTSREALRCLKRRLSDLIYRTLRADLANAAQPTPTHSIAA

SEQ ID NO: 70317 - protein, 431 aa, unidentified
MKYKQSKKQNQRITRITENTLVIGADIAKETHVSRGIDFRGIELGKECVFQNDRLGLEKLVSWMKELQREHAKTDVIFGIEPTGHYWFTLAEFLQNEGIQLVIVNPHHVNKSKELQDNSPTKNDYKDAKVIADLIRNGHYSEPRLPKRIYADLRILMNHREKVMLNLGQTQRRIQNWLDRFFPEYHRVFADWEGKASLITLTEFPTPQEIVTLGAFAVLKRWKQEVKRAVGMKRAEKLVQAARSSIGLREGLTAAKIELKDLLEQYTLFARQSDDVMQQVEQLLEQIPGAEEMLTVPGVGVVTLAGFLAEVGDLQGYDHSQQIIRLAGFNLRENSSGKKKGKSTITKRGRSRLRALLFRAVMPMVAKNAEFKALHHYYTKRTQNPLKKKQSIVALCGKLIRVLHTLGTKQIRYNATDVLGPVRQSQLQMAA

SEQ ID NO: 70318 - protein, 411 aa, unidentified
MEPKLIVAGIDVHKRMLAVVVVDEDNPKQALVKRTFGSNAGELKHLAAWLIAHGVTQVVMESTAQYWKPVWLALEKDFDLHLAQAQSNAGPGGRKLDYVDALRLARRFLAAELRLSFVPDGEQRSWRCLSRSKYQKRRRRVQLQNQIEALLEESQIKLSSVLTDLLGGTGYRILKALARGESDPQELIKLAANNLKASPEQLADSLSGPMQDRHRKVLTMQLEELDLIDKHIAELNQQLQEALQDHQQAVLRLCEMPGLKQDAALQIIAEIGPRAAVFETPEGLASWIGVCPGREESAGESKSNRSPKGNRAMRRLLNQIAWGAVRTKDCFFRELYNRLVYKLGVHKAIWAIAHRIAKLIWKVLHEQVTYIERGPLALDPIAMKKRVTRLSQQMRKLGYILEVKPLVVEIN

SEQ ID NO: 70319 - protein, 326 aa, unidentified
MDILGIDLAKLSFDATIQTANGAQHYQAFPNTLDGFTQLTAWLLQHDIAQVHACMEATNIYWEALATFLYAQGHTVSVVNPARIKGYAQATMQRNKTDKLDSAIIAAFCAKHHPAAWHPLTPEQQHLRALVRHRDDLLQTRLQQQNRLRDTTNPVVRASLQAVLDTVVGQLAAVEHDIATHLAAHSELRTNLALLTAIVGIGSVTAAKLLAEFGAMERYESAKAAAADTGVTPSHYESGTSVRRRPKMSKMGNANLRAALYWPAITAMTRCPAFKAFAARLAAKGKPKKVIIGAVMRKLVHIIYGVLKHKTPYDPAKVLGPTRATT

SEQ ID NO: 70320 - protein, 344 aa, unidentified
MEHYAGIDVSLESVSICVVDTKGKIAREDKALCEPEAVVGWLKATGWRFDRIGLEAGPLSQWLYVGLREAGFAAELIETRHVRKAFEAMPVKTDRNDARGIAQLMRLGWFRPVHCKSLAAQELRAILTARKLLQNKLHDVEMSLRGVLRGFGLKVGKTTPKTFGRRVRELVEGQPMLTAVAEALLKVRDVLQAEFMGFERRLRTIARGDARARLLMTTPGVGVVTALTFAAAIDDPQRFGSARAVGPLFGLTPKKYQSGEKDVTGRISKKGDVSARTALYEAANVILTRPVKGSALKRWALELAKRAGPKKAKVALARKLAVVLLRMLKDHTTFVAYRGGAHFA

SEQ ID NO: 70321 - protein, 367 aa, unidentified
MKDSITVVGLDVHKSSIEIVTADKFGAMEVRRFGTIGGTMDALERAVRKLSSPGATLQFVYEAGPCGYEIYRHLTKKGFSCKVVAPSKTPRKSGDRIKNDRRDAETLARMERAGELTAIHVPIEEDEAMRDLTRGREDAVRALRTAQQQLKAFLLRYGKRYPGKKSWTPVHLRWLSDLSLPHPSQQIVLQEYIATVREGTERTARMTDQILKLLPAWRWSPVVEAFQALRGVAAIVAVTTIAEVGDLSRFENPRQLMAYLGLVPSEDSSGERTYRGSITKTGNGHVRRALMEAAQAYAFPARVSRHLLKRQEDLPEPIRAIAWKAQVRLCGKFRRLTARGKLRNKVVTAIARELSGFMWAIAREVKV

SEQ ID NO: 70322 - protein, 426 aa, unidentified
MNTQTFSVFAGIDWAEKDHKFDARGPDGSLLAQGTVPHSASGLAKLVGILLPLANGDPAAIAVAVETNHGPVVETCLAYGFAVFSINPKQLDRFRDRFAPAGSKSDELDAYVLADSLRTDMHLFRAVELSDERTLRLRALVSVREDLDRQLRRLANRLRDLLVHNAPGLLELSPAADTPLLWALLEHVDSFPALPRLQVRTVAGILKNRRIRRISAGAVAEALRKPSLIRAPGAPEAAWEQVRYLLPQLRLIHQQVRDCEKLVTEALTVLCANDPDEAQPESPDPDAPQPPSRPTDAEIIRSCPGIGPTIAAALLTEADGAIRKRDLPSLRALCGVAPVTRRSGKSLLVCMRYACRERLRQAVHAWGLGATRCDTRAHEHYTRLRARGYNHNRAVRGVVDRLLAMLIAMLRDNTLYDPAKRIATLA

SEQ ID NO: 70323 - protein, 338 aa, unidentified
MRCYVGMDLHSRNTYLGIIDERGNRVYRSKAANFIEVILQHLELFRRSIVGIVVESTFNWYWLVDGLMEAGYRVHLAHPSANKQYEGLKYTDDWYDTYHLANLLRLGILAEGHIYPKEERAIRDLLRKRLMLVRQRTSHILSFQTLYSCHTGGWLRGDDIKKLTEDDIDEFFGGGYILLSAKANISTIGFLGRKIKEIERVVLRTMKLTPEFQKLTTVSGIGNILGLTISLETGDIGRFPKVGNYVSYCRCVKSERRSNEKKKGENNRKNGNKYLSWAFVEAANYAKRFCPYARKFYQRKVAKTNKIVAIKALSHKLARASYYVMRDRVDYEPRKAFG

SEQ ID NO: 70324 - protein, 348 aa, unidentified
MSKHAVPAGEVSGLLRRFAELRRKAAARTGRDLPIIVIQEAGLDGFWIHRVLQSEGIESHVVDAASILTSRRRRRAKTDRIDGETLVRTLMAYKRGEPRVCSMARAPTPQEEDRRRVCRERRTLMGERVSHVNRIKGLLSAQGVFGYEPLRKGRRERLEDLRTGDRRPLPVRLKAQIIRELDRLEVLLEQLKTVEAERDALLKPASDEAASPAAMLARLKGIGPETAAVLWSEGLFRQFDNRRQVAAYAGLAPTPWQSGSIDHEQGVSKAGNPRLRTAMVELAWLWLQNQPTPALSLWFHERVQRLGRQVRKTIIVALARKLLIALWRFTTAGVVIEGAVMKAAAAAN

SEQ ID NO: 70325 - protein, 402 aa, unidentified
MIFINCLGIDISKSESVVAHYKDEVLVKEMVIQNNQNGYRYLKNYIKHLDSLFILFESTGIYSRGMKRFCEIHKIDYLEMNPLEAKFKTSSLRSWKTDKSDAHKLALLAFRMKDSKVQRQSEEIYFELRERARFHLEMEINQNRLKVELVETLHQTFPGLEKLFTNRYSKIALNIAQAFPHPDFVSTLTHDELVEKVLHSTDKGISVNKAHKYVQKLIEIKNNSFPNVDKSSFLLQKVQYLCDKLLIGIEEMKEFDQEMIDLAKNTTEFENIISIPGIGELTAALLIGELGNIREFKTNKQLNAFVGIDIKRYQSGTSKSRDTINKRGNKKARRLLYLIIMNIIRGRNHYQSHIVDYYYKLREQPHGKTHKTAVIASINRLLKTIHYLIVNNKLYDYQKAPH

SEQ ID NO: 70326 - protein, 363 aa, unidentified
MTEAICFAGLDVHARKTAAAAVQLGSGEVYKAQLPGSSVAAIEWLRSLPGEVRAVYEAGPTGFELARAARAAGLELIVCAPGAIPRQPGDRIKTDTRDALKLARLHAAGQLRAVLVPTLELEALRDLVRAREDLRGDLMSARHRIGKLLLRHGLIWAGPGETWAQRHLQWLSTIRLGQPLLEVVLGEYLAHHEVLLARRERLDQLIAEQSVQGPWAPTVARLRCLRGIDTLSAVGLVAEIGEISAFSHPKQLASYLGLVPSERSSGERRRQGSITKAGSAHARRLLVEAAWHYRRAPSVSLALRRRQKGQPPAAIEAAWRAQLRLHRRWSHLDATRAKKRTTVAVAVARELACFVWEIAQQPD

SEQ ID NO: 70327 - protein, 346 aa, unidentified
MEYYAGIDVSLESSSVCVMDGTGRVMREGKVGSDPETLVAWLGQSGVNFARVGLEAGPLSQWLHAHLREAGFAVELLETRHVRAAFKTMPIKTDRKDAHGIAQLMRLGWFRPVHCKSVAAQELRALLTARKLMQGKLHDVEMSLRGILRGFGLKVGPTTPRSFAGRIRELVADHPTLAAIGEALLSARDELSRQFSWFEAQVRSLARQNAKTRLLMSTPGVGAIVALTFVAAIDDPARFRSSRMVGPHFGLTPRKYQSGEMDVTGRISKIGDVGVRTALYEAANVILTRPVKGSRLKSWAMRVAGRAGMRKAKVALARKLAVVLHRMLADGTAFDATLAAAARASA

SEQ ID NO: 70328 - protein, 400 aa, unidentified
MFCGWDWGSTRHGVCLIDDKGQVVKTWMIEHTERNLSALFTELARLGDPGSIPVAIERGEGLIVGLIAGAGHPVVMIEPAAFKAARPRWGSAGAKSDAADAFMLADFARTDAHRLRRVEPVAQATRELAALVRARSALVQARTAASNQLWAILAEHWPGAAMMFQKLTSQVALAFLTDYPTPQSAALLAEGRMRQFCHRHSYRGGKPPAELVSRLRAAPASVNPIAPQVLEAIVRGSVAHIGLLNTEITNLELHLEAALAAHPKTVLLKALPRVAIVSLAALIAEIGPLIERCENPEQVAALCGAAPVTKASGKSRTVAFRYTANKPARVAITSFADNSRHSSAWAQDCYQRARSRGARHPHAIRILARGWVRVIWACWTTDIAYDPTRHHAEQQLATRT

SEQ ID NO: 70329 - protein, 349 aa, unidentified
MNTTTIGLDIAKSYFQVHGVDAHGKTTLQRQLRRAQVVTFFANLPACLIGIEACGGAHHWARKLAELGHQVKLMPPQFVKAYVKTNKNDARDAEAICEAVTRPNMRFVAVKTVAQQELLMLHRVRQRLVVERTAKANQLRGLLAEFGIVLPQGLHRLRGVMPEILGDAENGLSCLLRERFSHLFSHLRELDATVIEWQRQIVLWHRENPLSRELEKIPGIGPLGASALVASIGDVRTFKSGRQLAAWLGLVPRQESSGGKTRLLGISKRGERYLRTLFILGARSVLRQSKRNPAQAASSWLGKLSARRHPHIAAVALANKNARIAWALLTHGREYRANYRSTRPAMAAG

SEQ ID NO: 70330 - protein, 392 aa, unidentified
MVEKTVAEQDRHAIVPVTRKRAMIKDGHSRPTAIWSRRPPQSRGRCVLGKAVPEQLCGPGVRILLERAIELYLSEGRMSNRMEEKWVGIDVSKSQLDIAVGETGEFWSANNDEIGILKTVERLCNLQPNLVVVESTGGLETLLVSKLYVAGVPLALVNPGRVREFAKSLGLLAKTDKLDARLLAHFAQATQPAPTQLPSEEERLLSAMLTRRRQLIDMRTAEKNRLMSAHSAMRPSIEKLLAFIEQELQLLNQDIDQFISNQPLFKQKDEILRSTPGVGPVTSASVLADLPELGHLDRKKIAALVGVAPFNDDSGYRRGKRRIKGGRPSVRNVLYMATVTAVKFNPIIKAFYERLLKFGKLKKVALVACMRKLLTILNAMIRDMQPWRTVSP

SEQ ID NO: 70331 - protein, 319 aa, unidentified
MMMKIHVGIDVSKKFFDLHILEGRKDSHYEYTEKGVKQCVAMLKEEEAKAGVKVALVVMEATGGYELLLAGELQAAGLPVAVVNPRRIRDFARSQGQLAKTDKIDARICAAFGAALQPPADEQVDDNARKLRSLVARRHQLIASRVAENNRMEHAYDKFVARSINTVLATLKKQIAKIDKEIHDQVQQQPELKEKADILKSMPGIGETTAFMLISELPELGKANKREIAALVGVAPMNRDSGTFRGKRMTGGGRRNVRTRLFMPTLVAIQHNPVIKRYYQHLLAQGKAKMTAIVAAMRKLLIILNTMLKNNQPWMTKNT

SEQ ID NO: 70332 - protein, 429 aa, unidentified
MNYTQNEKIEQVTDSTMVVGVDIGSQIHYARAFDNRGRELTKRIFSFHNDLEGFNSFNLWAETLKTENKKTAVLIGCEPTGHYWFAFAKYVNDHQKRLVMVNPFSVKKIKELDDNSPNKTDSKDPKTIAKLVVDGRYSIPYMPEGIYAEIRDLVYSRDRIMKQHNISANRIQRWLAIHFPEYLGLYTRFDAISGLAVLERAPLPKDVIALGVNGIRKIWHDKKMRGRGVTEDRAKTLVEAAHNSVGLDGGIGTKSELYMLLEEHRLWTSQLEAVNKVLEEMILKVPHVEKLLAIKGVGSITIAGFIAEVGDIRRFDSPKQIQKYAGLELVENSSGKHKGRTRISKRGRRKLRKILYQVMVPLLARNKEFRGIYDYYVTRVKNPLKRRQAMVAVSCKLIRVFYAVLTKGVEYDRFKMMSDIHRKSDIIAA

SEQ ID NO: 70333 - protein, 370 aa, unidentified
MSVRRILAKTINTDLEYEAIGIDLAKNCVSVALLTTDGEAVCIDRLDYSELEKSAQVLCPTTFAMEPCTEMNYLVQKLEAWGHRCLVIGGKNVQNYVENHYSGQKTDLNDAQALPFLAQDTQLRTIKAKDMEQQKYASLTTLREQYIKQYRQTIVSLKGICQAWGLNISKGISGKARLKDLIENHAAFPEELKESLVDMVTHAQTAQKALNKITKTLELLAKNDKVCQLIQTIPGLGPICSCRLRATIGDIRRFKNPKDFPAYYGLVPRSIATGHNEKKGKITHRGDKTMRSLMVQGAGSVINMATKGKLKSKQLTKWILKKQKEKMPWGKLVCAVAAKLLRIVRAVLISRKAYDPKLAGVAKCSLPKAT

SEQ ID NO: 70334 - protein, 366 aa, unidentified
MKKTSTIRVNGNMIFKGHKLTIGLDLGDRWSNYCVLDEAGEVLLEQKLATTPEAMKQTFERIPRSLMALETGTHSPWVSRLLKELGHEVLVAHAQKVELISKSNRKDDRHDARTLARLARIDPELLGPVRHRSAKAQMHLTVIRARAELVSARTALVNAARGLAKPHGERLPKCGTGQVSRELASELTAELREVLEPLLKEIESLNERIKEYDARMEKIARESYPHVELLKQVKGVGTQIALTYVLTLDDPHRFPKSREVGCFFGLCPGRRDSGQSQPQMHISKEGDRYLRTMLVQGAHYILGPFGEDSDLRRWGLRLAERGGKNAKKRAVVAVARKLAVLLHRLWVSGEVYEPLRNSQKAMRAVA

SEQ ID NO: 70335 - protein, 315 aa, unidentified
MTNRNKSKTIINVGVDVGKQFLDVWIHEKSLHWQEENNPEGIKRILNRLAYYKVKRLVMEATGRYEFNLAQAAHSKGLPVCIVKPLLVRKFAGASNQLAKTDKIDASVIAEFAVTMKPAITPKKCKNLIAIKDLIARRRQLIGIRTQELNRKTIMGNNLESSIKRMIRYLDSEIKRIEKKLSTHVESQAEWSEKQAILKSAPGVGNTLIYTLLADLPELGSLNNKEVGALAGVAPFNRDSGTFKGKRRIQGGRANVRTVLYMATLSATLCNPVIKDFYNKLVAQGKHKKVALTACMRKFITMLNAMVRDNCTWAY

SEQ ID NO: 70336 - protein, 329 aa, unidentified
MNIYVGTDISKLHFDSCIEGKVYRFGNDKSGHLNFIKRLPEGSWIVMECTGTYGLRLAETLVEHGFLVSMVNALQVKRFSQSRFKRAKTDKTDAKLLTDYAQSLEQCSDARDGLRLWTPEKTSQLYLKQLRTTCDMLVQVRTMMTNQLEGLAGYSKTIPLASKTLQSLVKTLDAKIEAIETAVNTIIDQDYKEEAKNLESIPGIARKTSTVIIAAVGDIKRFTDAKALAAFAGLAPRVIESGSSVRGRGILSHYGVTWLRSQLYMCALSAMRWNKQCRELYLRLRAKGKSKKTAILAVAHKLIRQIYAVLTNNTLFDKNYSISKNILAN

SEQ ID NO: 70337 - protein, 371 aa, unidentified
MTPNTTAQNESLFMAMELSNKNWKLAFSNGEKVRFINVVAGDQNGLRLAIERSKGKLGLAADCRTFSCYEAGRDGFWIHRCLAGLGVENLVVDPASIEINRRKRHLKTDRIDAEKLVRMLMRYHLHNEKTVWRVVVIPSESQEDERRLHREGERLKNERVRHLNRIRSLLVLHGARPRKIAATDNSRLRDWQGAALPAALQEELRREQIRLELLDQQIKAVDTEQRNAVKKPVTLCDQKAAKLAKLKGIGAMSASVLSREVFGWRTFKNRREVGAMAGLTGTAYASGDKTVEQGISKAGNKRVRYLMIELAWMWTWYQPDSDLAKWFMQRFGAGGKRSRRIGIVALARKLLVALWKYVEFNEVPAGAIVAA

SEQ ID NO: 70338 - protein, 267 aa, unidentified
MKNYLFYVGIDISKLKLDITILDVSSLKSEHFVVENNIKSISLFVKNLSKKIDINQTLFCCENTGVYTNHLSSASMDLKLDLWIVPAVEIKRSKGISRGKTDKSDAKDIAYYSYRNIDKLKLFTLTAIDIQKLKILYTEREKMLKSLLLLETTKENKGFASKEVFKEVSSINQSLTKTIRNAIRKIETKMKEIIKANAQLNKQTQLIRTIPGIGEQTSIYLIIATKGFTAFKNWRQFACYSGVAPFECSSGSSIKGRTKVNHMADKK

SEQ ID NO: 70339 - protein, 338 aa, unidentified
MNHYVGIDVSLEASSVCVVDGNGKIVCEGKIVSEPDALIAWLRGLKLGLTRIGLEAGPLSQWLYAAMRQAGFAVELLETRHVRNALKTMPVKTDRNDARGIAQLMRLGWFRPVHCKSLAAQETRALLAARKLVQVKLHDVEMSLRGILRGFGLKVGPTTPVRFEGRIRELVAGHPSLEAIAQGLLAVRVGLRREFDRFEKQVRAIARSDTRTRLLMSVPGVGAIVSLTFVAAIDDPARFNSSKQVGAYFGLTPTKYQSGETDIDGRISKIGDAWVRAVLYEAANIILTKPLKGCTALKSWAMKLAKRSGMKKAKVALARKIAVIMHRMLADGMSFRNV

SEQ ID NO: 70340 - protein, 460 aa, unidentified
MAQKRKNAPGKGRKGQPHSLNPIQPNAAGIDLGSREHCVAGPPLSDGSPNVKHFGTTTPELLRLAGWLDQQKIATVAMESTGVYWIPLFEILDSRGFDVQLVNSRQIAHVPGRKTDMIDCQWIQLLHACGLLRGSLRPDDDICCLRALIRERNTIVDQRSDWVRRMQKSLDQMNVCVHHAVSDITGYTGMAIIRAIAGGERNPRALASLRDCRCQKSEAQIAEELTGNWRPEHLFNLGQALKVYDQLCGVIADYDAEILKHVDSLQPPDSKDSPAPPPATRAKANKFSRLGQEPMRQALYRMSGFDLTTIDGVGVDTAVVIMSELGPDLSAFPDEGHFVSYLRLAPNISISAGKKVPGKFRAVSSTRVCNALRMAATSLRNSKTALGAYYRRISRRKGASVAVFATARKLAQLIYRLVRYGQAYVDTGSEVYEARFTQRRLATYTRALKEMGYKIQPSAA

SEQ ID NO: 70341 - protein, 391 aa, unidentified
MNAVGIDVSKGKSMVAIMRPFGEIVSTPFEIKHTSSDINSLVKLIKSIEGESRIVMEHTGRYYEVLAHQLSEANLFVSAINPKLIKDFDNDSLRKVKTDKADSVKIARYALDKWQNLKQYSVMDELRNQLKTMNRQFGFYMKHKTAMKNNLIGILDQTYPGVNTYFDSPARSDGSQKWVDFASTYWHVDCVRKMSINAFIDHYENWCKRKKYNFSKSKAEEIYGKAKELVPVLPKDDITKLIIKQAVDQLNSASITVESLRTLMNETASKLPEYPVVMAMKGVGTSLGPQLMAEIGDVSRFTHKGAITAFAGVDPGVNESGSYEQKSVPTSKRGSSDLRKTLFQVMDVLIKTHPQDDPVYQFLDKKRAQKKPYYVYMTAGANKFHASTMDE

SEQ ID NO: 70342 - protein, 405 aa, unidentified
MIYVGIDWSDTHHDFCILDESGKKLDSFVVSHGQDGFELAHKHIGKHASADQARVAIETKDSLLVDFFNELGYTLHFLNPKQTDRFRDRHRMSRSKSDSFDAYVLADAVRTDLHLFNVLSPLDEESLRLRVLTRTREGLVRRKVAVSNEITTYLKRYFPVALDLFGGIDNLEAISFLMQYPTYEQARSVSEIRIASILSKGAGVSKAIALRHSQHVREKLQQLQPLAAASIIRSYPLAIKSLLRQLRAIIDEIARLDNDIRESYNDHPNKDLIGSIPGVAETLGPVIAAEIGADMTRFHNIKILKAYCGSSPVTVQSGKYRSIRFRRACNEHIRRALHLASQSAIRTAAWARQLYDRNRAEGKSYGRALRAVADQLLEMLYVMLIKRTPYDEAYHLKMKELHGHP

SEQ ID NO: 70343 - protein, 354 aa, unidentified
METQSSYNNLQLYIGIDVHKKQWSVSIFTEAAHHRTFCQPPSPEALKTYLDHHFHGAKVCCAYEATKLGYWIYRELSSFGYTCLVVNAADIPTSNKEASNKTDPVDSRKIGKALRAGLLTSIYVPSQTTEGDRQLFRYRKKLLADLTRVKNRIKDKFLFTGTVIPEEFDNGNWSKAFLRWIKTAQLPNSGTRLTIDYLLDQYHFIYRHFLKVSVEVRKLQRTARYKKDAKLLRSIPGIGPLTTVELLCEIEDINRFGNFKKFNGFIGFKPGSHSSGEHDWKGSMTYRRHKALRSSLVECAWSTVQKDPVMLNRYNELKQRLTGKRAIIIIARKLVSRIYFVLKNQQPYTLGLVK

SEQ ID NO: 70344 - protein, 402 aa, unidentified
MNSVGIDISKGRSTIAVMRPFGEIVISPFEVRHTDSELSELARRLKSLNGETRVVMEATGNYHAPVAKLLHDAGLYVSVVNAKLVHGYGNNDLRRVKTDRKDAVKLANYGLDRWLTLPRYVPEENTRLLLKNCYRQYRQYSKVQTVLKNNLISLLDMTFPNANRLFNSPARADGSEKWVDFVAEFWHCECVSERPLKSFVNKYWRWCRKHGYNFSEEKAHAIYDEASGHIGVMPKSETTKLLVEQAVSQLSATSAALAVLKQEMQSLSSQLPEYPVVMDMFGVGPTLGPQLIAEIGDVRRFYSKKALVAYAGIDAPPNDSGDVIGRHKSMSKVGASSLRRTLFLIMSAYLQNSPPNEPVYQFMDRKRSEGKPYRVYMMASANKFLRIYYATVKAYLETLEQF

SEQ ID NO: 70345 - protein, 407 aa, unidentified
MSEFRNLVFVGIDPHKAEHVAIMIDHWGEVFFELTFPNQASGFETLLNHVNTHIPEGKTVVFGIEDTGGLGRSCAQWLTVRDKLVKGINPIMSSNKRNRQPHRSKTDQIDALAVAKVLITDYNQLPTVTVDEYYHALRQLANRREQLVKTSTRCKNHLHKLLHELYPNYKDFFSDPFGVTALAFWTNYSHPSMLQGVGIKRLASFLKKHARNMSTAKAEEILSSVDKHQPMTIDAKMTIAVVKQIVEQLQQLRNHIVEMDQMIDEALLQSDSKLQTMPGVGSVIEITILSRIGPIEKFSSADKLARHAGIAPVDNSSGGTKRQRRSKSGDRGLNAAIHRIALNQISIDRNGVPKCPIALEYYERKISEGKTKLSALTCLKRRLCDIIYAMLRDKAAYQEPKYRFPAA

SEQ ID NO: 70346 - protein, 358 aa, unidentified
MNNVSHKQEKIYFGLDISQKTIEIFALKGEKGVSFGKIPNTPKGLTEFFDKVSVPPETITIALETGTHSAWISRQLEERGYEVIVAHARDLAFIYKGDKKSDRIDAEKLARVARADKKLLHPVKLMDVKRQEDLLTIKARDLLVKEKTCIINAIRGFLRSLGIDDTQYSSETINQIYNELPKKLKQNLRGLFETLTSINRNIKNYDKRIAKISKDYPETETLQQIKGVGPLIALSFALIIGDANRFTSRECSSYTGLAPKRDQSGDVDKQLGISKCGNKLLRRLLVQGAQYIMGPFGEDCDLKDFGKRIAQRGGGIARKKAKVAVARKLAITMLALWRNPDVAYDPHFKINRKKVKSA

SEQ ID NO: 70347 - protein, 372 aa, unidentified
MHEYSELFIGLDTSKAKISVAVAEKERNGEVRFFGDISAEPTSVASMVAKLAKRGAALHFCYEAGPTGYDLYRQIIALGHECQIVAPSLIPKRPGDRVKTNRRDAVSLARLHRAGELTAVWVPDEAHEAVRDLVRARECAHDALKKARQQLQSFLLRHGRIYPGRSPWTRAHFRWLAAQSFTHPAHHIVLAEYIQAIEDAAIREDRLTKQVAEVVASWSMAPVVEAYQAMRGIAFIAAVTFVVEIGDVRRFETAPKLMAYLGLVPSESSTGERVKRGGITKAGNSRARRVLIEGAWTYRYPARVSQTIQTRLDGLPRSVREIAWKAQIRLCARYRRLITTGKLKTVAVAAIAREMAAFLWAIGQEVSPTAQA

SEQ ID NO: 70348 - protein, 465 aa, unidentified
MATDNKSWRNRKERKEWARRLQAEDPGLEVVHSHAAGIDVGNGAHYVAVRPDCDPQPVRRFECFTADLHRLADWLESCGVKTVAMQSTGVYWIPLYEGLEERGFKVYLVNARHTKNLPGRKSDVQESQWLLKLHTYGLLNNSFQPPAEIRILRTYWRQRAEHVRGAATCVQRIQKALTQMNVQLANVISDVSGLTGQTIIRAIVAGERDPVKLAELSQPGIQASREEVAKSLEGNWRPELLFVLQQEIEMYDIYQQRITECDQQLQKQLAGFAGTVPLHSPKAEQKKKRIKPAKNAPRFELRVELQRITGVDLTRIDGIDVMVAQTLVSEVGLDMSQWKTEAHFASWLGLCPDNRTSGDKVLKRGTRRVVNRAATALRMAANSLMRSRTYLGAQFRRLRTKLGAPKAITAMAHRLARLVYRMLKYGQQYVDKGAAYYEQRYRQQQLEFLTKRALKLGFKVIPLQS

SEQ ID NO: 70349 - protein, 342 aa, unidentified
METKRHIGIDLHRNCFTACVRLENGRNYLSEWKLEDLPRFTQKLRAGDEIAVEMTGNTRFFHAAVAPHVARVVAVDPNQFKVISQSVKKTDPNDARNLALYLAKDLLPEVRMKEKTEAQIASLTQTRDTLVKLRTALKNKINNILAAHGINLAKEALSSEKALAGVLEMHFDEMVELELQVIVEQIRGLNQSIGKLEQTIRDRGRKLKGHPNLTSIKGIGNLGASILLSVIGDIDDFANEGKLAAYFGIVPRVQNSNETERSGRITKRGSKLGRTTLVQCALVAKRYSPYLARYYEHIKSRKGGGKAIIALARKFLGIIYRTLKNGWIFEDFPNFVLAEASS

SEQ ID NO: 70350 - protein, 345 aa, unidentified
MELHTIGIDLGKTAFHLVGLNLCGEVVVRKKFSRKQLLHFTANLQVKLMGMEACGGSHFLGRALREQGHEVRLMPAQYVKPYVKTNKSDYIDAEAIAEAVGRPKMRFVPIKTDDQLDLQSLHRVRERWVMRRTAVINQIRGLLLERGITLRQGRGHVDAALPGILEDASAMLSGALRMLLAQLKLELDHLQVRIDEADAMIKKVAGENEACRRLVAIPGIGPVTATAIIAAIGNGAAFKNGRGFSAWLGIVPGEYTTGGKQKLLGISKRGNSYLRRLFVQGARAVLQQSAKQSSGLSAWLAQLTTRTHSNVAAVALANKLARMAWAVLAKNEAYRPPMLVGAATA

SEQ ID NO: 70351 - protein, 435 aa, unidentified
MANFYHSPVVGIDVAANFSVATALKPDGTVFKNNLNIKHNQNGFEKLLDFLKKIEEEFNSVPAVFCESTGIYHLTLLQFLVKHQVVIHVVNPLITNSNKNWNIRKAKTDKLDSYSIAKLCKTGDVKTSCILTEDFLHLRFLVREYYQIADNAAELKIKFSNTIYIHYPGLQFAFANLTGKTPLAFIQAYSTPNDLINAPKEEVITFLRKSSRRGSEWAKNKYEKLIKTAHEANHIGINPNLFTNKVKRFSETYSFLQVQLSNIFDEIQNYIENSSFAESFMQNYDLLMSFKGIGPMTAITLLSEIGDIRDFSNAQKLVAFFGVDPSVNESGNFKGDKNKMSKRGTSLGRRVLYTLAMASIRKSKSGKENNKVLHHYYNIQLSTKKKKKVRLVAVMNKLLRYIFSVLKNQKPYVVRDPRIHKKMFLESQYSNQLTA

SEQ ID NO: 70352 - protein, 349 aa, unidentified
MDKDTMTTIGCDLGDRSSHLCFLGPEGSVLRRAKIATTKKAFDKFFAGLQRSLVVLEVGTHSRWSSALLHELGHQCVIANPRHVRLIYAGTHKNDRLDAEALARLGRMDPTLLRPIQHRSGEAQAELSTLRARDALVRNRTRLVATVRGIAKSVGVRLVACDADYFTRKVTLPRDLQPALGAMVQNIEELTAHIKDYDKQIAQLCAQHPETALFQSVPGVGPITALAYALTLERPERFSTSRQAAAFVGLVPKQRQSGRHDPQLGITKAGDRFVRRLLVQCAHCILGVRGQDTDLRRFGLRLAAQGGKRAKKRAVVAVARKLAVLLHSLWVSGEIYEPLRPVPERSHAA

SEQ ID NO: 70353 - protein, 416 aa, unidentified
MSVALPQALFFTGIDWASAEHAVCVLDAAGKITARFTIKHSAEGIASLVRRLARYGDPAGLPVAIERPSGRLVDLLLEAGHPVVPVSPNAIKTWREGEVLSGAKSDAGDAAVIAGYLRLRYHRLAPAAPYCDETRALRAAVRTREDLVQMRVAATNQLSALLEAHWPGARAVFADVESPISLEFLTRYPTPAAARHLGHKRMAAFLVKHGYSGRRPAAQLLARLHGAPAGTAGRALTEALQDAVLAVVAVLRALNGAVKDLDRSVAAHLGEHPDGPVFTSLPRPGQINAAQMLAEWGDCRPAYDGPDCVAALAGVTPVTKQSGKYRGVEFRWACNKRFRRAVTTFAGNSRHASPWAAQIYAEARAAGKDHPHATRILARAWIRVIWPCWVNGVPYDPARHRAAAALAGQTPSQPAA

SEQ ID NO: 70354 - protein, 360 aa, unidentified
MTESTPIVAFDQHAGSVMAAVLLPGERTPALQPLAPDLPSIRRFLARFETTGVRCCYEAGPCGFDLQRSLHAQGIVCDVIAPALIPRRVGNRVKTDRRDAAQLAVLYRAGALTAIHIPTEHEEAVRDLLRCREDICADLLRAKHRLSKFLLRHGRQCPDGRAWSKRYWAWLAIQRWSLAALEQTFVSYRRAIDETVARLRAVDADLQAALTVEPMATRVARLRCFRGIDDLTALTIAVELGDATRFPAARQVMGFTGLVPAEYSSGASQKRGRITKTGNAHLRRVLVEAAWHYRHRPAVSPRLRIRQHAAPTAAIRVAWRAQHRLHARYRRLLARGKSPQLAVTAVARELSAFVWAALTQ

SEQ ID NO: 70355 - protein, 339 aa, unidentified
MNRIVVGVDIAKRVFQLHWVEPETGEIVALQLKREKFLEHFANRSNCLIGMEACGGSQHWARSLQKLGHEVKLLSGRMVKPFVGGNKNDAADARGIWMAMQQPGIKAVAVKSEEQQAVLALHRMREQLVKFRTAQINGLRGLLTEYGEVMPQGRAGIKRDIPGALGRLSARLPAIVIETLREQYVRLGELDGQISEIERRLRQWQREDSATQRIAAIPGVGLLSATAAVATMGNAKAFKSGREFAAWLGLVPRQTGTGGRVRLLGISKRGDKYLRTLLIHGARAVLSHSKSPPEWLTELMKRRPKNVAVVAMANKMARTIWALLAHERVYQSRYGSRPA

SEQ ID NO: 70356 - protein, 341 aa, unidentified
MKKNLFFIGLDIAKADFAASIYQTPNQPILTKEAIPNNPEGFEMLLLWLSDYHIDKKNCRICMEATGIYSQAIAYYLLFAGFPVSVEPPLKVKRAFDPVGHKTDPVDSKQIAEYAYRFQDELTSWQPRDEILEKIRQLLSVREQFTKQKVALKNAMQAYSKQRVQVTLIKKAHQETLAQIEKQISRIDKELAKLIKQDPEIFQRTNNLDSIPGCGMLLAAHLLVITENFTKIQNSKRLAAFIGIVPYQHQSGSSVFKRAKIRYFGPGPSRKLLRLAAQSVATHNATFRRYYLRKLDQGKAKPLVLNNIANKLLKVACTIIRNNTRYIKDYRSINPMYLKML

SEQ ID NO: 70357 - protein, 386 aa, unidentified
MLSIGIDVSKGKSTVCGMKPGGEIVYTPFEVQHTREGMSELVSLLRGSGEEVRVVLESTGSYHCPVVAALLENGIFVSVVNSLRMKRFCSQSIRRVKTDQIDAMQIALYGLAYWQELQPTRLPENTYRELQLLARQYYQMTSLLIKAKVDFNALCDQVLPGMQELMSDHAGRHKLSDFVLRYHHTAHILKMGETRFRKDYCKWAEKKGYRNHERMAALIFATAQNGIPVLPDAPSTQIVITEAIRVLHTVEASRDAILTQMQALAKTLPEYSLVREMPCIGDTLAPRLIAALIAYAGIDAPPYQSGKFRANNRHISKRGNRYLRKTGYEVMQSYVMHKPANDPIFTFIEKKRSEGKSGKLAMVAGLNKFLRVYYGKVTELYRSLPQ

SEQ ID NO: 70358 - protein, 367 aa, unidentified
MKKVSTRAAAQSRNISQRKLTIGLDLGDGNSWYCVVDETGQIQLEERVRTNAKALEEVFGAMPRSRIAVEIGTHSPWISRLLSELGHEVIVANARKVRLIGESRKKDDRLDAQTLARLARIDPELLYPVKHRSAQAQADLTLIRARAGLVRARTALVNAARGLAKSYGERLRSCNVRNLNPEKAESLSPELQAALEPLLNAIESLSERIVEYNERIENLAQQSYPQVALLKQIKGVGTLIALTFLLTLEDPHRFRKSRDVGCYLGLQPGRRNSGQSEPQMHISKEGDPYLRTLLVQGAQHILGPFGVDCDLRRWGLKLAERGGRNGKKRAIVATARKLAVLLHHLWVSGEVYEPLHNSSPTTVATAA

SEQ ID NO: 70359 - protein, 339 aa, unidentified
MTVKTVGLDLAKDVFQVHGISENGRVIFNKAIKRAKLLRFFETLPPCRVGMEACGSSHHWGRQLRKLGHDVKLMPAGYVKPYVKRGKNDAVDAEAICEAVRRPTMRFVEIKTEDQQAILSIHRTRDLAVRQRTQLANMIRSLLREFGHILPIGIEAVTGFAKRHLDGDHPDMPEIANGMLGIQCYQFIGLNARIDGYSKMIEQHALLNADARRLMRMPGIGPITASAIVATIGDAKQFRTGRDLAAWLGLTPLNKSSGGKERLGKITKQGDRYIRKLLVVGMTSRAVMAKRSPEKVDLWTAKIIADKPFRLATTAMANKAARAIWAMLTKKQEYRRPAF

SEQ ID NO: 70360 - protein, 363 aa, unidentified
MKNNIAKTIYLGMDVHKKTYAVTAICDGLVVKTDTLPANPSTLISYCKKFFPGAKIYSAYEAGFCGFHLHRCLEREGINNIVVDAAGIEVAVSNRVKTDKRDSLKLATHLSLGKLRGIFIPPVEQEDRRAVTRIRDAFIRERTRLACQIKALMYQYGLIGAEDERLVSSKWIKELDALQLLPGLKFALSQYSNLWLHVNAKIKEIDQEIAIQAEQDGPIEMIYRSVPGVGVTSARVLANELGDMSQFKNERQLFSYIGLTPSEHSSGEHIRQGHITRQGKPIIRKILVQVAWKAIKLDNSLKNSYEQLSHRVGGRKAIVGISRKIIGHIRACFRTGELYRTEIVQNVETIETKLQAEEQKTLI

SEQ ID NO: 70361 - protein, 346 aa, unidentified
MTESSDYESVQVFIGVDVGKDTHHAVAINRSGKRLFDKALPNDENKLRSLISDLKQHGQILLVVDQPATIGALPVAVARSEGVLVGYLPGLAMRRIADLHAGEAKTDARDAAIIAEAARTLPHALRTLKLADEQIAELSMLCGFDDDLAAQTTQASNRIRGLLTQIHPALERVLGLRLDHPAVLDLLQRYPSPEKLASLGEKKLAAQLCKLAPRLGKRLAADIAQALAEQTVVVPGTNAAAVVLPRLALQLITLRKQRDEVALAVEQRVLAHPLYPVLTSMPGVGVRTAARLLTEVACRAFASAAHLAAYAGLAPVTRRSGSSIRGEHPSRRDFLYPAGVITCLTT

SEQ ID NO: 70362 - protein, 335 aa, unidentified
MLYVGLDVHQKRSSICILDDNGKTVKQELVRGPWPQVIDRLRSIAQQPISVCYEASCGYGHLYDRIAPLASQVAVAHPGQLRLIFKSKRKHDRVDAAKLAKLLYLDAVPRVHVPSIDVRSWRKLIEFRQKLLGTRVAAKNQIRAVLRGNGIAAPRGLWTRKAMRWLSGGLNLPAGEKLTLEMALEEIAGLTAKIKRVEQELARIAARHPGVTLLQTIPGVGIRTAEAFCAYVDDVKRFARNRQVGSYFGLVPCLDSSAGRDRFGHITREGPATVRKLLCEAAWSCVRHNPKLRSFFQQVMNGDADRKKIALVATAHRLCRIMAAMLRSGEVWRRA

SEQ ID NO: 70363 - protein, 407 aa, unidentified
MEVLHPRCGGLDVDKDSVGACVRCVSFPEAHHVRTFATTTTGLVALADGLETHGCTTVAMEATGVYWQPVWHLLEGHFTLVLANAQHIRKVPGRKTDVNDATWIAELLAPGLIRSSFVPPAPIQELRDLTRTRKQLVRELSQHCLRLEKVREDANLQVASVLSNLLGHSGRAMLAALIAGEQDPERLADLARGSAGQKRPQLIQALRGRGTPHHRALLQLHLDLIAALEAALAQVDTALGKALAPIAAAADLLKTMPGVSDVVAQVILAEIGAERSRFPTAGHLVSWAGLCPKNDESAGKRRSTRLRKGGTWLKTTRVTAAWAAVRHKEGYLHNQFLRLKARRGAKKAIIAVAAAMLPAAYHLVRDGVEYHDLGPQHFDRRDKHKVIARLMRRLTDLRGEVELKQVA

SEQ ID NO: 70364 - protein, 431 aa, unidentified
MDDVSRFEQFCQFRSLIRGSKEHLIVGIDIAKDKHHAFFGTAYGRTLWRRLIFTNDFIGYLRLVEQTELLLKQHRLKEVVFGLEPTGNYHKPLACWLIQHNYPVVLVAGKAVKDNRELLDGRWDKNDTKDSANAADLVSQGKCQFYEQPDSVVIALRNLLLVRKQLKKEEHKLRMRIRNGLIVKYFPELDRHWGSCLEENLAIVRWYLDPHKIADTDFNQFVRHVTTTDRGLRQLQRLKAIHQVAGQSVGLPVDASACYEARLLVERLKAVKDELAQTMQQIEELCRSLAGYKLLLTIPGFGPYIAALVLSALADPFRFVSRKQVIRLAGLDLNASRSGKKSADSVPVISKKGDADLRYALYQAALIASYHNEGFRRIYHRMIENRGGERGIKTKARVKLAAKMLVIAWTLLKNNEPFDETRLLAESGNTR

SEQ ID NO: 70365 - protein, 457 aa, unidentified
MKWYLGIDVSKGYADFALLSDLLVPQEETFQLDDTKAGHEQLKIWLENLFKHRTGLEIDCGVESTGGFENNWFSFIIKLSSSLPVRIARLNPSTVKNASKAMLNTNKTDAQSAKEIAAYLKRYEDQVNYAVRDNQYASFRSVHNHIELLTKQKTQLINELKQVLYSTFPELQRFCKKGVPSWVLELLRLYPSPEKLAKQKPEKLARIKGITTTKAQSLIEKARVTIASRSDASYGFLIAQMASEIKQKQESVKVLKKYLEDHCQGKEKELIQSMKGIGAYSAAAIMIQIEDIHRFASPKELASYFGLHPLIKMSGDKQMVSRMSKQGRPAIRAILFMCAHSAVRSDAHMCSIYARHRANGKAHKQAIGVIMHKMVRVIWGILTTEQPYDNQIDMANQSKKVQCPGQDETKEIENKRRLQKYDSEAPISRMASKKRKAHATSQAGNAELVRDLVHEPG

SEQ ID NO: 70366 - protein, 339 aa, unidentified
MELYAGLDLHSRNTYIGIMDKAFNRVFKKRVPNHLEHILQTLNPFRDQIKGFVVESTFNWYWLVDGLMDAGYSSAHLANPSAIKQYEGLKHSDDQHDAFFLAQLLILGILPQGYIYPKKDRPVRDLARKRMFLVQHKTAHILSLQSLIQRHCAMKVRANDMRHLTVKELEEWLEEEYLVLSAQANLDSINFFKQNIQRLEKAIRKKVKLKKAFHYLKTVPGIGDILALTIMLEVGDINRFNKVGNFTSYCRCVPSRRLSDGKTKGYGNRKNGNRYLSWAFTEAAQLGRRHNQRFRAYYNRKVAQANTSLATKALGNKLARICYYIMRDQVPFREELFCH

SEQ ID NO: 70367 - protein, 354 aa, unidentified
MKYYTSTTQFNCGIDLHARQMYVCVLDRDGKKLVHTNIKNNDFAYFLKLVAPYRHDLTVCAECMFGWYWLADACEAEGISFVLAHALYLKAIHGGKNKNDRLDSEKIAHLLRTNFIPPGYVYPAAKRPLRALLRQRLLYVWNRTELLARIQSHQLAYNRPTQRQTLYNRDAWSEQLLATEPDPVRQFTLQNDLALVGHYDTQLAILEKELLKLTKQTSSRDFTLLQTTPGIGDYLGLTILHEIGDIARFPTVKNFLSYCRLVKGTVASAGKIKGLRGAKLGNPYLRWAFGEAAVVAKRDPLVIGPLAQRLEARLNHKFKANTVLAIKLARAVYFMLKTKTVFDPERLVAALCKN

SEQ ID NO: 70368 - protein, 368 aa, unidentified
MTKSITFVGLDVHKNSIAVALADAGRNAEVRNYGIIGGTLDDVDRLIKKLSASGKELHFVYEAGPCGYDIFRFLTAKGFDCAVCSPAHVPKSPADRIKTDRRDAMMLARLHRAGELTYVFVPRADDEAMRDLTRSREDGVKAQRVARQQLGAMLLRLGYKYPGKSWSKVHFKWLADQKMPTAEQQVVFQEYINAIHETTTRVERLTKHIEALVPKWRMAPVVAALHALRGVSLIVASTMIAELGDLTRFEHPKKLMAFLGLVPSEHSSGEKKQRGKITKTGNGHARRVLIEAAQTYSHQARVTSRLLKRQEGLTKEVIDIAWECQTRLCARFRKLMAKGKNRNTVVTAIARELAAFMWDIANKTPIAA

SEQ ID NO: 70369 - protein, 388 aa, unidentified
MLNQIEGTVQMIVIGADTHKRTHALAAVDAGTGRQRGARQVKAEEQGYLAAVRWGRGLEDERVWAIEDCRHVSRGFEQALVAAGERVVRVAPHRMGASRRGEREPGKSDQIDALAIARAVVKDGVERFPAAYLDPAAMEIRLLSDHRKDLVAERTRVQNRLRWHLLELCPELERSLGRGSLAQPRQLARVDRRLRRLPACARVRIAREQIAQLRDLTRRADALERELLVLVTAHRPQLLAETGCGALTAALLIGRTAGAERFPSDASFARQTGTAPIPCSSGQRHRHRLDRGGDRQLNHALHVIAITRARHDPATQAYLARKEAEGKGKKGALRCLKRHLARRFHYLLSLPAETPQRDPSNGAVHAAAPRPGDTRIVAAAPSLMPCVS

SEQ ID NO: 70370 - protein, 409 aa, unidentified
MAVIDRVVIGVDPHKLSATIEVVTTGGELMGSGRFATDKAGYAAMRGYVRGWPNRVWAVEGANGAGRPLAQRLLEAGEQVVDVPAKLAARARLFDTGHNRKTDALDAHSIAMVAVRTTGLRVLALDGELEALRMLADRRDELSKLRVQTVNRIQRLFSELVPGQRKRDLSALQAKAIVASVGPRDIAGRTRRPMAVDQIADLVAVDSKLKRIKAELKVAVTGRGSSLMDICGVGPAGAARILADVGDIARFMDRNKFASWTGTAPLDASSGEQIRHRLSRAGNRRMNHVLHIAAIVQLRHDTPGRAYYRRKLAAGKTPMEAIRCLKRRLSDVVFKRLLADARASQQPAGALIDAGPGGHCGATQKSSAADSHPHVDTSDQPRPGPAPTTLPATTARDQTNPRNRLQPAT

SEQ ID NO: 70371 - protein, 319 aa, unidentified
MKMTKSSMTTAGIDTAKSKLDIAIHKQSRRWQVKNDLSGWQALAETLTKAGVDRVGIEATGAYERGVVAHLRKAGFIVLVLQPAQVKAYARFRLRRAKSDAIDAALIAACAADLDKPLVGPDDRLTQLADLLTFIEQIEEDITRWKVRLEHIGEQRLRETVAEDIARLKARRIAELANIAAALHSHEDLGRRLDLVLSVQGIGKRTAIAIVVRMPELGQVSREEITALAGLAPFDNDSGKYKGQRHIAGGRDRVRRSLYAAALAAAFRWNPAIKDLYQRLTTRGKPHKLALVACARKLLIFANAVIQKQTPWQTNEPAT

SEQ ID NO: 70372 - protein, 387 aa, unidentified
MTAVGGLRGVGEPISLRSGEIDDVDGPPNPSREMLKSFCATQRRNRVMTFEKITVVGLDLAKNVFQVHAIDDVGNVIVRRQLRRNQLLHFFEQLPPCLVGMEACSTSHYWARELGALGFDVKLMPPVYVKPYVKRGKNDAADAEAICEAVTRPTMRFVPVKNCERQALLMQHKTRDLFVRQRTALINALRGHLAEFGIITPQGKFGLKAALEALHVAKDHLPEPSWQPFKHIQMQLEELSNKIAELDRTIMQWCRDQAAARRLMTIPGVGFLTAAAIAASVGNAEEFKSARQFAAWLGLTPRQNSSGGKERLGRISKQGDRTIRRLLVVGATAVIRRARIDAPSFPWIAKLLQRKPARMVSVAIANKTARVAWALLRREETYRHAAV

SEQ ID NO: 70373 - protein, 354 aa, unidentified
MAVASIAHAHVPVRIIVGVDTHKDSHVGHAKDGLGRDLGHLEVPTTARGYAALLAWAQGFGEVTAFGVEGTSSYGIGLARYLQGQGQLVLEVIRPGRQDRRFRGKSDPIDAEVAAAAVLSGKARHLPRASAAKVEMIRALRIARTSATKARTQAINAIKALVVMAPEAVREPLRELPTARLVATCARFRVGPIDDSTTAIKAGLRSLATRYQMLDAEAGLLERQIDQLTSATDPLLRSCFGVGPDTAAALLLAAGDNPARLRSDASFSMLCGSSPLPASSGQTKRHRLNRGGDRQANAALYRIVMTRLRWHDQTKAYMRRRLNEGKSKTEVIRCLKRYVAREIYQVLTAARERP

SEQ ID NO: 70374 - protein, 410 aa, unidentified
MEVLHPVCAGLDIHKESVVACVRHMAQGKVTTVVKTFKTTTEALLALSEWLAQHSTTHIAMEATGVYWKPVWHILSDGEFQLVLANAAHVKNVPGRKTDVNDAMWLADLMAHGLIRASFVPDEPTQQMRDLLRTRKQLVRERSSHTQRIQKTLEDANIKLDTVVTDILGLSGRRILEALIAGQTMPQALATLAHRNVKASAADLEASLRGRVTAHHCFLLKLHLDQIAAIDAAIASIDKEVEGNIEPFRQAIEQLSAIPGFSQLAARVVVSEIGIDMSRFETAGHLVSWAGLCPRNDESAGKRRSTRMKKGAPWLKTVLIQCAWAAARTKGSYFQAQYHRLRSRSGAKKAIGAVAAALLTTAYHMLKNGTLYQDLGPNHFDQQAKQRHVLRLLNRLENLGFEVQITPKAA

SEQ ID NO: 70375 - protein, 311 aa, unidentified
MVCAGIDTGKHLLDAALHKRRERLAVENSPEGHSKLSAWLREQGVKRVGIEASGGYEIDVVAKLRRDGFKVVVFQPAQVRAYAKFHLQLAKNDKIDASLIAACTAAVVNIHAPPDPRLAPLAAHLTWIDQISEDIKCHKTRLETCRDPRAREFWKQEITRLDKIIKAERAALEKAIRQHRDLAERLDLIASVDGIGLKTAVIILVRIPEIGRLSREQVAALVGLAPYDDDSGDRHGRRQIAGGRKRVRCGLFAAALPASFHHNPQLIAMYQRLIAAGKEHKVALVACARKLVIFANTVVARGTAWQPQGAP

SEQ ID NO: 70376 - protein, 350 aa, unidentified
MTIIGCDYHPGFQQIVFVDTKTGEWKEQRLEHREPAEKFYRELASRREKMRVGMEASGHARWFERLLAELDIELWIGDAAAIRAKRGRRKPKTDRQDAQHILHLMLKDDFPQIWVPSWENRDQRQLLWHRHRMVQARTRLMNQLQAVALNEGLRCKRRLWREKGRKQLEAIRLGPWASRRRKDLLQLLDGLNPTITELTQAIQQEVEKSVEARRLMTHPGVGPITALAFVLIIGRAERFQCGKQIAAYLGLVPLEDSSGERRRLGHITKQGSSMLRFLLVESAQMAARSIPQWRNQYFHLAMRRGRKIAKVALARKLAIRLFWMMRQAWDYEQMTKFGSHAGQPASCNGV

SEQ ID NO: 70377 - protein, 416 aa, unidentified
MEQIFMIKENYIYVGIDLHKETHTAVMIDCYNQKLGEITFPNRPADFPKLVAKVKKCNTDGKTIVFGLENAYGYGRALAVWLIDKGYLVKDVNTAISHRQAKHRGAMYRKSDSDDAEAIALATLNMLDKLPDAYPNDAYWSLGQLVHRRDNIMKQRTRLVNQLHEQLCITYPSYKQFFNDISRPTALYFWEHYPSRKYLKGKSVEDLRAELVPVSHNKCSTKTCEKILDAVASDKVKNNAYQDARDMVTLSIVSDLQHYDKQLAEVDKMLEQMYKMLGCTLTTISGVNVITAVKILAEIGDIKRFSNANKLAQFAGIAPLHLSSSGKGKDVATKQGNRRLQATIYFLAIQMVQVSSKGTPRNSVVRAYYEKRKAEGKTSQQALICISRRLISIIYGMLKHGTEYRMPVVESAGENR

SEQ ID NO: 70378 - protein, 523 aa, unidentified
MATTRTRKPRRARRADVLHKPSGVIHPRVQQVGPEHFGIVSIDCAKARSKWMLGDFFGKVLVPPTVVDHNRDALDAAVARVRQAVADHDLGDCLVAVERTGRYHRVVQSAFTAAGFETRIVHPFATKQFRQPADPGNKTDDTDLAAIHRAAVTGFALCEAPRDEFWTGLQLLIRHRRDLVWKTSTLCCQIREHLEAALPGFAACFDDLWDSACAWHLVQHFASAAALHTAGLAGLSHSLRQAQVRFQHRSLQPVLDWAAHAAASDVAAEQHRRIALALNDDRQRKTLEIQALERDSAARLVHTPYVLLLSFPGINVVSAADFAGEMGPIGHYANARAVTGRAGLRPSRYQSDQVDRADGPLVRCCNRKLRAAILGIADNLVCCNHHFNVLTHHWRAAGKDPRHTRVKVGVRFCRIAFQMVAGRQVFRHPCLQGRHYILDKLTAFHRQHETPAPALLRDLEAAIGQLPRKEYPAEARPLHEELQRIQDGRRRGPQLLADILPIVLARLGVGEVQSQASGDHDPA

SEQ ID NO: 70379 - protein, 487 aa, unidentified
MCRLGHDPDQTVVRERPDISLVVEDPFTGTVDCCFEHECQNPILKPRPPRDDTRRPGRSRPGLSASGRKGASGMEVVHERCAGMDVSKRDVKVCVRSPGKRRGSYAKAVTTFGSVTAEILRLREHLITAGVTLVVMEATGDYWKPFFYLLENGPFEVMLVNPAHARNIPGRKTDVSDAQWLAELAAHGLVRGSFVPPPPIRILRDLTRARVILTQDRVREINRLDKVLEDAGIKLSSVASDILGVSGKAMLEALVAGERDPHLLAGLARMSLRNKTDQLAAALTGRFTDHHAFMVGLHLKLIEQLTAGITDLTHRIDTVIEPFRPVLKLLTSIPGVSDKVAIVIVAETGGDMTQFPSAAHLASWAGVCPGHHESAGKRKSAAPRPGNSYLKGALGNAAMGAAHTNGCYFQARYRRLAARTSPLKALVAVEHSILTAVWNMITNNQTYNDLGGDYYSRRDPTAAMRRITRQANALGLTVRFEPIEQRA

SEQ ID NO: 70380 - protein, 344 aa, unidentified
MKHCKRLSIDLAKNVFQICGVNDHNKIIFNKKVSRNKLLKEVLNANPDEIFIESCYSATYWGRLFKSHGFKVGLIPAQHVKPFVKGNKNDKHDAVAIIEASQRPNLHLVPLKSIEQQDIQNLHKIRQRLIANRTGLSNQIRGLLSDYGIIFAKGHHKVLQDLPYLIENLENDLSFMMREILNDLVEELRNKNSYINKIEQSIELLSSSQTGYKNLLNMPGIGLMNASAIVAAIGDAKQFDSARGFAAWLGLVPKHEQSGDKLKSMGISKNGNRYLRTLLIHGARTVVSLYKNNDDPLKKFAMKIKKNRGKHIAYVAVAHKMARIIWAMQSKGQSYNMNYSLAAK

SEQ ID NO: 70381 - protein, 396 aa, unidentified
MKSYILRSTQTVQSQITTVPAGSKPSVLFIGLDVHNDSIAVSIAPSDSSEVRRYGIIGGEHDDVLKLVKKLQAAHPGAVLKFCYEAGPRGFALCRCLRWHGLDCILVCPSKVPRKPGEWVKTDRRDADQLARLFRAGELTGLYVPEPEDEAMRDLIRARFQVGKAQHRARQQLKMYLLRHNLRYGGQTPWTPAHLRYLAKIKMPFAVQQIVFEEMLEVISEATERLERYDTEIERAVPGWRWEPVVRALMSLRGLALLHAATLVAELGDFHRFDHPGQLMNYLGLVPSEHTTGKDRQQGGITKMGNGPARRALVEAAWQYRAPARISPHLKQRQEGLSKAVTDISWEAQRRLHHRYHHLTRVGKKKSQVAVTAVARELSGFVWAIARQVKPRDAKP

SEQ ID NO: 70382 - protein, 345 aa, unidentified
MIEGGRSRRAGRFATTAEALRRVATTLTAEDHVVLEATCNTEAIARVLQQHAGRVVISNPLRTRAIADAKIKTDKIDATVLAQLLASGFLPEVWLPDEETARRRRQVARRAQVVRQRTQVKNHIHAILHRNLVPPCPYADLFGKGGRVWLASQPLPADEQHAVTSLLRSLDQCTEEVAGIERDVAEETLACRPARRLMTISGVDAAIAMTLVAAVGDIARFPSSRKLVSYLGLDPRVRQSGLHPATHGRISKQGHAHARSMLVQAAWAATKTLAPCGPSSCGSGPTAGNRLPSSRRPASWPCWSGICGARSRTISGRGRRSRPPSCAPWNCAPVGRPAVGNEGRR

SEQ ID NO: 70383 - protein, 407 aa, unidentified
MELSALYKCVIGLDVHQSQITACALIQQPDGGVRIEQRQFGGFMRDRRELAQWAASLNPDEVVMESTGIYWKSPYAALEAVGIRAKVVNARHVKHVPGRKTDVGDAHWLAMLARAGLLRASFVPPAALRELRLIARQRQKLVGQLASEKNRLHKVLTDSGIRLGVVVSDLHGQSARAMVKAIIAGHAPQQVIKLASRRLKASREELLDALQGELSASHRFVLDELMQHIEEIEARISRFDARLLEGLESERDTLALMQTIPGIDQIGAAMLLVEIGADMDAFGSADRLASWVGVCPGNNESAGKRKSGHTRKGNPYVRRLLCEFAHAASRTTSMFKSKFQALVVRRGYKRAIIAIGHKMLRTLFFMLKRREHYRDCATDYEALSVQRNAPRWIKALTRFGFITPASA

SEQ ID NO: 70384 - protein, 453 aa, unidentified
MVQRKQKISIKPGKSREPLTITHPNAAGIDIGSSSHYVSVPPDRDDEPVREFPSFTVDLNALADWLDACGVDTVAMESTGVYWIPLFELLESRGFKVFLVNARHVKNVSGRKSDVLDCQWLQQLMTYGLLRGAFRPTEAVCVLRSLWRQRGMLLRSQGTHVQRMQKALTQMNIQLTNVISDVVGETGQKILRAIVAGERNGQVLAAMKNVRIRATAGEIAKSLQGNWRAEHLFALKQALDMFDFIGTQLAECDCEIDRQLQSLQVHDGEPAKGKKRGRTRNAPKFDLRTQLFRMCGVDLTRIDGIDVTTALAVISETGADMSRFPTAGHFASWLGLCPGTKITGGVVMSGKTKRVANRAAQALRLAAAALRSSQSALGAYFRRMCGRMDKPKAVTAAAHKLARLIYTMLTKGEEYTDQGQGYYEERYRERVLRQLAQRAEKMGMKLVVNEQPA

SEQ ID NO: 70385 - protein, 479 aa, unidentified
MKEYFLGADVSKGYTDFILLDKDKEVKVRNFQLDDTFGGHSKLHQFLSNFFEEHEDSVIYAGFESTGGYEDNWIYFLRKLQKDYPIKVARLNPNNVCNTRKAELAGNVTDHISAKAIAYHLINVLPTIKFNAKSPYSSLKRTWTHLRMLKKQKVQLLNQFESLLYISHTQLISYCSSRVPEWLLQLVIEYPTADLLSRGHIKKISQIPYITENKARELKEEAKKSVASATDAISAELLQDLAKTILSYKQKIKKWEDRLVEECEIDEVKILTTIPNIAEYTAVGLMINMGSVERFDHVKKLASYWGIHPEIKESGDGRGKPGLSKKGRSIPRELLFNAVFASLSDEGNYIQKLYEEFVEDKGKSKMSAIGILMHKLTRIIYGMLKNSTVYNPQIDKENRQESKSKKQRDNDSYSRKRRIHNFDSNAPVSRREKKKRKERIETQDADASIAGSSIPLFSENNIENIMQNLNLEINNIFEN

SEQ ID NO: 70386 - protein, 500 aa, unidentified
MYSIYSKGDEPLLKLFEQVKDPAKILCVAIDYAKAKHVILFCNGVGEVLKHSFAVENSAAGLEQLLAQIQATCHHRGILPKHVLCGGEDSPAYAANFTAALSQKKFLVVRVSASEAKTQRQNFQASNDNLDLYGMVACLITRRGRLLAIQNQEYAQLRILVRERDYLVRCQTALTNRFYPHVDQLFPGFLQPASAVVTPFGPACLWLLEHDFSAPQIARRASQRLVQGLKKHRVPEPDKAVEELQELARQALPPRAQTLGPCQISLAQLVPLRRGLQDAVQNLDRHIGRTLARTPAAVLTSIPGIGVTLAAGLGAEVGVLARLPSLDSLCSYAGIVPCTTQSGGPDQPPVTGHKSRQVNKRLKCCLMLGGEHMAAIQDSQAQRLRQRAEEKKQHACALLAKHLAGLARSLLQRQTIYLPPELYDPSSAPYDRAQYYQTLWPKWLEKWKTSGADLHEVFAATTPLGQWRTMVCQVHKLSLPLPGSAQQIHLCSQAKHTASA

SEQ ID NO: 70387 - protein, 369 aa, unidentified
MKKSIKYVGMDVHKKTIDVAIAEGDRDGEVRHYGTINHDPDSMAKLLRKLASTGGELRFAYEAGPCGYQLYRHLTGNGLRCTVVAPSLIPRKSGNRIKNDRRDAIALARLHRAGELTAVQVPAPEDEAMRDLTRAREDVKIAERKAKQLVSGFLLRHGFVFSGRTPWSNAYWRWIAEIKMGHPAQQIALQEYVHAVKACGEQVDRLTAQVHELLLQWHWAPVVKAFQAMRGVSVIVAVTAIAELGDLGRFETPSKLMAYLGLVPSEHSSGESRKRGGITKTGNGHVRRVLVEAAQAYRLPARISRTLLVRQQGVPPEVRKIAWEAQLRLCSRYQRLVGRGKPANLVVTAIARELAGFMWAIAREVPAVA

SEQ ID NO: 70388 - protein, 392 aa, unidentified
MYIIGIDIGKNHHEASIVSPEGKQIGHSLRFATTHKGADSLMSFIFNNIGNSSCIFGMEATGHYWYPIYSFLKARGYTIYVINPIQSDSLRKMYIRQTKNDSIDSFLIAEVIRFGQFTTTSMADENILAMRQLCRYRDSVISSRTEIKLRISTIMEQIFPEYEKQFSSLWLSTSMGILEKYLTPENIENAPIDELFEIIKDKSHNKLTMKKAISIREAAADTFGIKIAQDAFSFQLKQLIDRMNFLDKQIEALDCQILEYYEKFDCYLHTIPGIGMIAAATILAEIGDINRFKSSSALVAFAGIDPTVRQSGEFSSTHNHMSKRGSPYLRHAIFLVATTCSFHNSPLNAYYKKKRDQGKHHLTATGAVARKLTTVIYAVLRDSKPYEPKSFC

SEQ ID NO: 70389 - protein, 399 aa, unidentified
MSLPVPSSFAGVDWGNFTHEVCAIIQAKVHQRSFDHSPAGLHEMVRWLSSLAPADSVGVALEVPHGPVVEALQDGGFPVYSINPKQLDRFRDRHTVAGAKDDRRDAFVLATALQTDFERFKVVPQPDPEAVELRETSRLYESLTHDLHAHSNRLWQTLIGSAPQLLSLCKGADEPWFWELCERVFGTAPLPRRDWVLRLLGRHRKKLDPDAVLAILRAPGLALPASAAVAPLQVQALVPILRVIAAQREAARAHLAVLVSKAGDLAAIIDSQPGIDVILTGTLLGEARPLLEAADGDALRTLCGTAPVTRRSGKSHHVVMRRSCNLRLRSALRNWAKTAIRCEPRSREIYNDLRARGHRHERALRGLADRLLLRLVACLRDGRSYDPARWISREPASAA

SEQ ID NO: 70390 - protein, 344 aa, unidentified
MTHYKRIGIDTSKAVFTLHGIDQQDRPVLRINLRRPQLLSFFKKLAPTEIAMEACGSAHHWARELTALGHEVRLIPPQYVKPYVKRGKNDRNDAEAICEAAGRPGMHFVPLKTVTQQAQGMVLKVRETLVGQRTQMTNTLRGHAAEFGVIAGKGLRQIGPLLAAIEQETTIPVEAREMAALLGQEIEHLDRRIKEIDVKLTAAHKANEVSQRLATIPGIGPVTALTLAIEIDPATFESGRHLAAWAGLTPQEHSTGGKQRMGGISRAGNERLRVLLVTGATSVIKAAMRPGSALMTEWLRALLQRKPRKVVAVALANKMARMAWALMTRVEVYRRPVAGGAAAA

SEQ ID NO: 70391 - protein, 407 aa, unidentified
MDRLLERCCGLDVHKDSICACLVVPGPDGKRTQTSRTFGATTSDLLQLRDWLAEFGCKHVAMESTGVYWKPVYYILEDEFDVMLVNAAHVRNVPGRKTDVSDAMWIAQLLEHGLLRRSFVPPAEIRELRDLTRYRKTLIEEHAREANRIHKVLQDAGIKLSSVATDALGVSGRAMMKALIDGQRDPERLAALAKGRLRSKEAELQKALLGRFRRHHAFLLSALLAHLDFLDMSIDAVTVELEDLLRPFAASLGLLQTIPGVARRSAEVILAETGGDMSRFPTAGHLASWAGLCPGNHQSGGKRLKGTTREGNRYLRTVLIENALTAIRSKTSFLRTRYYKVKAARGHKLAIVAIAHQLLVSVWHVLSKKEPFKDLGADYYKRRNPKARITYLVRQLKDLGVEVPLAA

SEQ ID NO: 70392 - protein, 321 aa, unidentified
MEAVGIDISKAKFDIAVLVGGKCLSKVFPNTPEGHAQLPAWLEKKGMSREHCHLCMEATSTYYEALALHLHDAGWTVSVVNPLQIKAFGETRLSRQKTDRADARTIALFCAQHRPPAWVPPSREVRQLQRLLARVAAVQDMRVQELNRLHEAQGVAQDSVERVLATLDEELRRLEREIDDHIDRHPDLREKRQLLQTIPAVGPCLSANMLAWLPVERFSDARQAVAFVGLSPRARESGSSIRGKAALCKLGHARLRKMLYMPAMSAMRCNPAAQALTARLREAGKPGKLILGAIMRKLVHWAYAVLRHAEPFDLHKALAKA

SEQ ID NO: 70393 - protein, 382 aa, unidentified
MKQYVGLDVSQKETSVCVVDEVGQVLFEGKAKSDPGALTALLRKRAPQAERIGFETGAMASWLWHELRRVDLPVVCIDARHAHAALSVRMNKSDQNDARGLAELVRVGWYREVKVKSEESQSRAILVARSRLVAMRRDIENQVRSLIKEYGLLLPRTIGLQFRNQVCELLGKDHQLLGVIAPLLSIHEQICKQQSNFDNDVRQLAKSDETTRRLMTVAGVGVVTPLTFRHTIDDPSRFRSASSVGAYLGLTPRRNQSGETDINGQNITIGRPSSPNLPVRGRDRPALSNEEMFLAQGLGNEARQEDWHEEGEDRHRAQDRRCSALHLGRRHIVRLGPGEGSLIRFCKVPGPACRTGDVPLGRCCGDLVHSAGGGLTVLRCRR

SEQ ID NO: 70394 - protein, 349 aa, unidentified
MIVIGVDSHKRTHTAVAADEAGRRSAEKTVAATSAGHLELVRWAGRFPERRFALEDCRHLCRGLSRDLLRAGEPVVRVPPRLMAGARRSSREPGKSDPIDALAVARAALREPDLPVAALDGTERELRLLVDHREDLVAERTRAANRLRWHLHDLDPGNEPGLRTLDRAVVLVALEARLAEVPGTVARIARELVTRIRDLTRTIDALEREIARLVADVAPSLLALPGCGHLTAAKLVGEMAGVGRFRSAAAFARHNGTAPIPVWSGNDERHRLSRTGNRQLNVALHRIAITQMRIDERGKTYLEHRRAAGDTKTGAIRALRRRISDEVYRRMRHDERLRVTRRVPLVAAA

SEQ ID NO: 70395 - protein, 370 aa, unidentified
MKKLIMYVGLDVHKNSIEVAFADAGRDGEVRSYGKIDGNLTALDKVIRKLEAKGSELHFAYEAGPCGYEIYRHLSSNGYDCIVVAPSMIPRQSGNRIKTDRRDAQMLARLHRAGELTSIYVPALEDEAMRDLTRAREDAKAVEKKAKQRILAFLLRHGYRYSGKTPWSKAHFRWIAILKMPHPAQQIVLQESLDALSECTERVNRLTEQIQRLLPQWRMFPVAQALQTLRGVSLIVASTTIAELGDLTRFASPVELMSYLGLVPSEHSSGEQTKRGSITKTGNGHVRRVLVEAAWAYRLPARVSRALLLRQEGMSQNVCAISWKAQLRLCNRYKRLLERGKAKQLIITAIARELCGFMWAIANEVETPSS

SEQ ID NO: 70396 - protein, 448 aa, unidentified
MSKIKTKKEVVKKISQIPIVNNKAAGIDVSDTEMMVAYPINSEELEIRSFGCFTRDLHSIAKCLKENGITTVAMESTGVYWVSLFLLLEEYGFDVFLVNAKHVKNVTGRKDDEGDAEWIMKLHRCGLLKTSFQPDSMTRTLRSLVRHRKNLVNTSSSYLNRMQKALELMNIKLHTIISDIDGKTGLLIIEAILSGERNPEILADLRDRRIKASREDIIKSLEGYWTTEHLFELRQCYEMYCLHRKMIEECDIEIEKQLREMILIKNDDVMPEFPKTKRKTSNKHKVNFDLTSYLKEILGVDVTKIFGISELTALTVMSESGTNMKKWKTANHFTSWLNVAPNTKKTAGKIISCRIEKKKHYAGQAFRVAANSLYNSKSIMGDYYRRIKSKAGPGKAVIASARKLAIIYYNMVDKQESFNPKAMEDYQKKHNEKKINQLKKKIAQLEAA

SEQ ID NO: 70397 - protein, 420 aa, unidentified
MTQSEDSRIIKIVHPICCGMDVHKKSISACIIYPDENGDEKHEIKVFSTFTDELERLKDWLMEYECPVVAMESTGIYWRPVHNVLEGTFQVVLTNARNMKNVPGRKTDIGDSRWIAGLLRHGLLKSSFIPPQEVRQWRDLTRLRKSYVQSEADYRKRTQKLFESANIKIDSVVSDLFGVTGRNLMQLLITDRKDLTVSDIATCTCGKLKGKEEPLLRSIQGFFTDHHRFLLKSLLETISNLEQQIAELDREISRSMVAQKSVLDRMKKAPGISDVAAADILAELGPTLESFPTDSALASWSGLCPGNNESAGKRKSGHSPVYKHHLKTIMLEVAWAAIKKKGSYFKEKYYRLKARRGAKKAIMAIAHRILVGIYHVIKDGVEFRDLGEEYLKNKNRSQKFVQLRKQALALGYELVPQTVK

SEQ ID NO: 70398 - protein, 302 aa, unidentified
MQIRSVGIDLGKTTFHLVALGDNGKVLLKKKFTQKQLIVFMQSALIGMEACAGAHFLGRALRAQGHDVKLIPAQFVKPFVKSNKNDFIDAEAIAEAVDRHNMRFVPIKTDDQLDLQALHRVRDRLMQRKTCVINQIRAFLLERGLVFAKSPIRLREALPEVLENVNENLTPRMRNLVAMLWNEWKDLELQIVEMDQEVERIASSDAACQRLRQIPGIGPLVATAIVASIGNGAAFQKGREFATWMGLVPKQHSTAGKARLYGISKRGNCYLRKILVHGARAVVLRSKRDRIAMGAWLTSLEG

SEQ ID NO: 70399 - protein, 387 aa, unidentified
MIYTGIDIAKDKHFCAIADSDGEVLEKPFGFDNNRAGYSLLLSKLKPFSKESVLIGIESTAHYGSNLLCFLHDNGYRIAVINPIQTATLRKTGIRKTKTDAVDSLLIIKSLMVNNHKPFDKQDIAYLRLKNLCRFRSKQKKSIARLKIQLVSFVDISFPELQTFFKSGIHGKACYELLKNCPAKDDITALHLTRLGNLLSKSSHGRFGKEEAIALKSLAKSSVGTSDTSISYQIVTTIEQIELLEKQIASLDNLIISQVSDLDSVLLSVPGMSHIICAMILGEIGDIKRFSEPCKLLAFAGLDPTVNQSGKFKAKSTKMSKRGSYLLRYALVFAAWNVCRNNNTFNAYYELKRSQGHGHYSALGHVAHKLVRVIFKMLKDNVAFSLE

SEQ ID NO: 70400 - protein, 416 aa, unidentified
MLNSFEWYLGIDWGSEEHHLCLLNAGGGVCGTRPVAHTAVAVHDALQWVRAETGAAPETIAVGLETPRGVLVDTLIEQGFTVFALNPKQLDRFRDRFTAGGAKDDPRDAQVVADALRTDRRAFRRVRPDDPQIIQLRELCRIVEELQEQEGRLANRLRDQLYRVHAPWLTLTAAADEPWLWTVLADTPHPDAWRHLPRRRINAALRAHRIRRLNADDIVTTLRQPTLAVAVGVAEAVAIRIASLVPQLILVRQQRTTAERQIDRSLERLAETTDSELREHRDVEILLSLPGVGRMVTATMLTEATGPLADRDYATLRAYTGAAPVTKRSGKRAYFVQMRYACKWRLRQALYHWARTSIQRDNAARLYYDALRARGHHHARALRSVADRWLRILVAMLRTRTLYDPSRFVQAVAIPA

SEQ ID NO: 70401 - protein, 370 aa, unidentified
MKKDTLFVGLDTDKKHIDVAVAEPLPRGEVRYWGRTANTPASVERMVKKLGHGGRELVVCYEAGPCGYGLYRQLTGKRGVRCLVVAPSMTPQRPGDRVKTNRRDALKLAKLLRAEELTEVWVPDAAHEAMRDLVRARSSVVSALTRCRQHVSSFLLRQGIAYAGKPWTNKHRAWLGTLKFEHAAHRLLLAELLVALDQAQARRDRLTDHIRELVPTWSLAWLAQALQALRGYDLINAAVMVAELGDPRRFAKPRQLMGFVGLNVSEASSGETVRRGRLTKTGNKRARKALVEAAWTYSRPAATTSKPAAARLPAAVQQIADKARHRLSRRYRHLVRRGKLKQVAIAAVARESLGFIWAIAHAAARLPAQS

SEQ ID NO: 70402 - protein, 485 aa, unidentified
MAKHKMSTFERLKSGRLNRKQRRELERQVAAADPGLTIVHANAGGIDVGNESHYVAVPPDRDPNPVREFGCWTAALNQMAEWLKSCRIDTVAMQATGVYWIALYDVLEQHGIRVVLVNAQHTKNVPGRKTDVQECQWLMKLHTYGLLRDSFRLAQEMESVRTIWRLRDRHVKEAGRTVQHMQKALTKMNLQLANVISDINGVSGQEIIAAILKGERDPWKLADLKDYRVRASREEVARSLEGNWREDVLFELQQAVDSYHFAHRQMQACDRKLEDYLASLPARMLEIPAQPEGAQAATPKKNRKKAKKPTGNEPHLVLEAELKRICGVDLTSIDGINVMTALTIISEIGTDMSRFKDENHFASWLGLTPNKDVSGGKTVGRGKRKVKNRVAVALRTAATTLLRSNSYLGARYRNLRRKLPSLAAAVKAMGHHLAILIYRLLTKGEAWVDRGATQFERRRTEHELASLNFKAQAKGFKLIPITEAS

SEQ ID NO: 70403 - protein, 398 aa, unidentified
MLSIGIDVSKGKSTVCGMKPGGEIVYAPFEVQHTREGMSELVSLLRSSGEEVRAVLESTGSYHCPVVAALLENGIFASVVNSLRMKRFCSQSIRKVKTDRIDAMQIALYGLAYWQELQPTRLPEDTYRELQLLARQYYQMTSMLIKAKVDFNALCDQVLPGMQELMNDHAGRHKLSDFVLRYHHTTHILEMGETRFRKDYCKWAEKKGYRNHERMAALIFATAQNGIPVLPDAPSTQIVITEAIRVLHTVEASRDAILTQMQALAKTLPEYSLVREMPCIGDTLAPRLIAEIGDVRRFHSKRALIAYAGIDAPPYQSGKFSANNRHISKRGNRYLRKTGYEVMQSYVMHKPANDPIFTFIEKKRSEGKSGKLAMVAGLNKFLRVYYGKVTELYRSLPQ

SEQ ID NO: 70404 - protein, 358 aa, unidentified
MNNLKRNKLDFTGQPIYVGLDVHKKSWSVSISTQYGQYKSFSQPPEVDKLVHYLQEHFPGAQYLSAYEAGYCGFWIHDRLREKGIGCLVVNPADVPTKNKERKTKRDRIDCRKLSRSLRNGDLEGIYVPPRGKLEDRSLIRTRLSMGRKQTRCKNQIKSMLLFYGVVIPEEKEMGHWSRRFIRWIEGIRMERASGDMALQIHLEELGHLRQIIAKLNRAILALSRAEQYRPWVLLLRTVPGISTLTAMILLTEIGEITRFPSIDELSSYVGLIPDTNASGEKEHIGGITQRSHSQLRWMLIEASWKAVQKDPALMMAFDQYCKRMRKTKAIVKIARKLLNRIRYVLKNRSEYVPAVLE

SEQ ID NO: 70405 - protein, 400 aa, unidentified
MNDRDEIGVFLGLDVGKTAHLGHGLTPAGKKVFDKQLPNTEPKLRAVFDKLRDKFGTVLVIVDQPASIGALPLTVARDAGCTVAYLPGLSMRRIADLYPGEAKTDARDAAVIADAARTMPHTLRSLEVTDEITAELTVLTGFDQDLAAEATRTSNRIRGLLTQFHPSLERVLGPRPDHQAVTWLLERYGSPAALRKAGRRRLVELIRPKAPRMATRLIDDVFDALNEQTVVVPGTGTLDIVIPSLARSLGAVHDQRRATETQISALLEQHPLSKVLTSLPGVAVRTAATLLVTVGDGTSFPSAAHLASYAGLAPTTKSSGTSIHGEHAPRGGNRVLKRAMFLSAFAALHDPASRTYYDKCRARGKTHTQALLRLARQRINVLFAMLRNGTFYKPRTPRLT

SEQ ID NO: 70406 - protein, 406 aa, unidentified
MFYLGIDVALNTHRLVILDDNGERVSNGISFQNNTADFKKVLSKLKELSINPDNSIAGLEATGNNWENLYCFLTGNNFKTILLNPHQTNKFREALRKKAKTDDIDAFVIAGLLRSNEFASSYVPEDKIQTLRELTKLRYEFIKDHKNYQRQVLALLNIIFPEYKQTALKNPFAISSTAIFKSFATAKHLSIVKPKHIEKIVRSIKGNNFNIKEIENLISIAKTSVYSGRCQESRALTLNILLTQVENFDKSIQQLEEQVNLILSPTSSDDINSFPGSNLLTIPGVGPKTLAAILSCVGESGQAFSNGVKLIGHIGFFPQIYESGETKRANKLSNKGPAYLRHALYMASVACIKHNLQLRNLYHTKISQGKKPKQALICVAKKLAHTCLSMLHSGQGYNPARVFSYV

SEQ ID NO: 70407 - protein, 361 aa, unidentified
MNVIHYIGLDVHKKTISYCIKTADGRIVREGKLPALRSALRSWAEGLGEPWCGAMEATLFSAWIYDTLKPYAQRLVMGHPARMKAITAGKKKSDTIDARTIADLLRCDLLPTCYVLPPEMRDLRRLLRYRNMVVQQSVRMQNKMAGLLMESGTPFVKDKLHGKKYFSELMESLEEVPQSVKDLLRMSRGSMEMFESTQKQIVKRLLSEHALQQRVERLKSIRGVGPITALTWALEVSDPHRFSSIGDAVSYCGLTAAFRSSAGKEQRGPISKQRNAWLQTVLIEAAKLAPRWNPQLAALHARQLELGHPNRATLQVARKLVAYLLAVDKSGQPFQVLTPPPTVETSTKTKRRKRASMAKAA

SEQ ID NO: 70408 - protein, 451 aa, unidentified
MAEGVSAGVDWAKDTHDVVVEDGDGDRLWAATVTHDEAGITRLCSSLVTLGVERVAVERPDGLLIERLLDAGLTVIAMHPNQVAAARPRFRPAGGKSDRFDAFVLCELARTDHHRFRELTPDSDQTKALRALTRGREVLVEQRVALCNQLRAELERFWPGAVEIFADLDSPISLAFLARYPSPVDARALGEKRLAQFLARHHYCGRRTPTQLLERLRGAPSGRAGELEADARRGIVLALVAALAPIVEQIRLLTSEIAHAVRAHPDGEIFLSLFRDPKSVICAATLLAEIGDNRARYPTPEHLAADAGMSPVAVESGRKKVACFRRGCDHRLRDATGILADATRHWHPWAQDRYADARARGHDHPRAIRTLGRAWCRILWRCWQDGVPYDPARHRGLQQHIAVTIPTTSGPRPDLAATQRMLDAAVTEPAAPRAEREALDGKPTSANTPKG

SEQ ID NO: 70409 - protein, 397 aa, unidentified
MDTSYAVFCGIDVGKGEHHAVGLDPSGGRLYDKALPNDETKLRAVFDGLAAHGPVLVIVDQPNTIGALPVTVARACGHDVAYLPGLSMRRIADLYPGQAKTDARDAFIIADTARTMPHTLRRVDTGDEALAELEVLVGFDDDLAGEATRISNRIRGLLTSIHPALERVLGPRVTHPAVLEILSRCGGPAGIRQAGKRKLTTLAVKHAPRMGARLATEILTALDAQTVTVPGSKAAEIVLPKLADSLKEVLLQRKTIGEDVERMLDDHPLSRVLTSMPGIGVRTAARILLEVGDGSAFKSAGHLAAYAGIAPVTHRSGSSIRGEHPARSGNRKLKRALFLSAFAALGDPTSRGYYDRKRAEGKKHNAALICLARRRCDVLYAMLKNKTLYQPPLTAAA

SEQ ID NO: 70410 - protein, 346 aa, unidentified
MYYCGLDVSRKSTHVHIEDGQGKRVEHRVVPTTPEGLESALENYFARGLRVAVEAGGSTGWIHDLLRELGARVHVVHPTKVKWIAASKKKTDRVDARLLAHLLRINGLPEAVHMPTRQSREVRRLLRARRQLVQIRTRLINVVRSVLEQQQVNLRAGALGSRKGWKALYDLPLLPGIRDIVSAYDATVAATTAAITTLETQLAIRAQADKRVAQLQTIPGVGPLTAQTVVAAIDRVHRFANARKLVGYIGLAPSVRSSGERVEYGRITKQGRSEVRAVLVQAAHALLAIKRDTAKPLQYWCARVARRRGKKTAIVALARKLLTIAFYLLRDGTTFDPTRVRITAAA

SEQ ID NO: 70411 - protein, 326 aa, unidentified
MQGKELSEQTTAAKSSVGIDVSKSWLDIHVLPSAQTLRVPNTGEGIRKLKRWLARFEVSLVVVEATGKWHRQVHRSLIAGGIAVAATDPFRVRAFAKAKGILAKTDRIDARGLALFAALMSPDIRQPASQALEELAELVTARNSAVAEQTALKNQLAAACGTFLKRQLERRCTRIAKDIEVIEREIARHIAADEGLARRYVILTSIPSFGPTVAATLIACMAELGACSRKQIALLAGVAPIADQSGKREGVRVVWGGRPAVRRALYLAALSAATHNPGMKVFYQRLIAKGKAAKQALIAVARKLIVLANTLIAEDRTWQPSPPKLA

SEQ ID NO: 70412 - protein, 315 aa, unidentified
MAEVVRFEQVVQRGCGLDVHKQTVVGTIDGAGLTRETREFRTTTSSLKELKEWLERSGVTHVVMESTGVYWKPVYHVLEPSGITVWIVNARHVKNVPGHKTDKRDSKWLCKLLLAGLLKPSFIPPREQRELRDLTRYRRKMIEQIASEKNRVIRILEDCNIKLSSVLSDTHGVVGTKLIDKLCKSGTISMEDIEEVYHGKLQASKEEIYEACEGFVTEHHVFMLQAIKKDILSCEGIISELNARIRKMLAPYDNVLELLKEVPGLSTKSVEDLIAEIGLDMSVFPDEKHLASWCGVAPGNNESAGKKKWTHTSWQ

SEQ ID NO: 70413 - protein, 374 aa, unidentified
MKEFSKYVGLDVHKDTIAVSIADAGRSKARHYGTIKHTTAAVSALLKKINAEGEVLELCYEAGPCGYGLYHQLTGSGHECQVVAPTLIPKRASDKVKTDRRDSLRLAELLRAGELTPVWVPDSDQEAIRDLVRTRDDFKVSQRQVRQQLLAFLLRHSLRWTGGKQNWTQGFWRWIEALQMPSAHQQFALKEYIDAVRRHGMQIQAIEKQMLVAKQGWSLEPIVDGLMAMRGINLVSSMGLMAELGDLSRFSRPTQLMAYLGLVPSEHTSGDSRQQGGITKSGNGHVRRLLIESAWCYRFTARKSRDIEARAQRTSPEVQAIAWKAQKRLNARYKALSERGLSSCKVVTAVARELCGFIWAVVQQVRDEQQRAVA

SEQ ID NO: 70414 - protein, 348 aa, unidentified
MNSLHYIGFDVHKKTISFCVKTAAGEIVEEGSTPAQREALRKWAAARPQPWRGAMEATLFSGWIYDTLKPYGEQLEMAHPAKMKAISAGKKKSDTIDARTIADLVRCNLLPACYVAPPRIRELRRLLRYRSLVVSEAVRMKNKMAGLLMETGALYVKEKLHRKKYFANLLEELEEVPESVIDLLRLSRGALEMFESTQKRLVRELLADPELAQRVERLMTIPAVGEITALTWALEVGDPQRFPSCSDAMSYCGLTAALKSSAGKQQRGPISKQRNHWLQTTLIEAAKLAPRWNPQLAALHARELERGHRNRATLAVARKLVSYLLAVDKSCQPFQVRAPSELPTQKAA

SEQ ID NO: 70415 - protein, 342 aa, unidentified
MDTMIGVDLAKNVFQVHGALMSGQVQFRKKLTRLQFQRFMAGREPCVVVMEACGGSHYWAREMARLGHEVKLIAPRYVKPFLKRHKNDAVDAEAIVEAAQRPGMRFVEVKTEDQQARAILFRTREQLVRQRTDLVNALRAHLYEYGYIVPQGIGHQGRLKEILDEPKSELPELVREVGRTILEQIAGKNDAIVGMDRKMRHLAAQSDNARRLQTIPGVGPVTALAVEAFAPSLQAFRCGRDFAAWLGLVPKQYSSGGKQRLGRMSKAGQRDIRRLLIIGAMSRLNWLGRKSIAEGSWLDRLARRKPRMLVAVALANKMARTIWAMVTKQQDYRDPARAAAAY

SEQ ID NO: 70416 - protein, 344 aa, unidentified
MATYYIGADVHSNNTELAIENRRKIMARYSVPTTIPAISTVLDSLQGKKYFAMEEGPMAGWLYRNLNKKVDEFIVSDPRRNKLITSDGDKDDKIDAAKLAVLLRGEFLKPVHHTDDSDRAHLKHWVNLYHDRVRDAVRHINKIRACCRMHGAAIPRKVVRIKKHRHEWLSGFSNTVLKDQLHMLWIGYDATKEQVKIAEKQLSSQGSKYQIINHWRNLAGVGLIRSVTIFAYLDTPWRFKKRSKLHKYCGVGLERSTSGRDKKGKLKPTRLKLPWAVNRRLKNAVLGAATTAIYQKDNIFKDYYERMLSNGINPVNARHSVARKMVSVMSAMWRTGSLFNEQLF

SEQ ID NO: 70417 - protein, 340 aa, unidentified
MSEITTIGLDLAKHVFQAHGIDAEGTTVLRKRLRRGQVLAFFSRIPRCVVGLEACATAHYWARELGALGHEVRLMPAQYVKANIKRNKHDAADAEAICEAVQRPTMRFVPVKTTEQQATALLHRGREQLVRQRTMLVNALRAHLAEFGMVAAQGLRNVGELIAIVRDDGDTRLPDVARQVLQVLAAQLEQIEAAIAALEKQLMAWHKTNAVSQRLASIPGIGPIIATAIATTVADPGVFRSGREFAAWLGLVPRQNSTGGKTRLGGITKRGNRYLRRLLINGASANLLRSKATKADPWVIGLRRRRPPLVVAVALANKTARIAWAVMLRQKEYQPRALAA

SEQ ID NO: 70418 - protein, 437 aa, unidentified
MKYNTQNAKIKSITEKTLIVGIDVGSETHFARAFDWRNYEYSKKPLEFSNTEAGFMTLKAWMADFAEKYGKNVVIPGMEPTGHYWFNLGAYLQDNGMKPVHVNPHHVKKSKELDDNNPNKNDRKDPKTIAALVNEGRFSYPYIPTGIYAEIRSLSNLRLQTQEEITRIKNRIARWFSIYFPEIKDVYRNPDSVSGLMILKEAPLPQDIVKLGVDGINKIWRDAKLRAAGLKRAKTLVTAAEHSIGSQEAPDSARIELKNLLNDYEIYKNREEDLMSLTEEKLSEIPHIDKLLEIKGVGLKTVSGFVAEVGDITRFDNPKQLQKLAGYAIVECSSGKHKGESHISYRGRKRLRYVLYEAAISLIARNEEFKEVHRYYRTRKENPLKKMQSVIAVACKVLRIFYTILTKGVTYDGAKMMQDIKRPQMLAAVGLQYMCYN

SEQ ID NO: 70419 - protein, 449 aa, unidentified
MNRPQVIDDEEHERVHERAAAIDVAKDSGMVCTRTPHPSRPGAWRSTVWTVKARMGAVRALGRQLKADGIEIVTLESTSDYWRIWFFVLEACGLAVQLVHAAQAKNLPGRPKTDKLDAMWLARLTEMGLLRASFVPPKAIRDLRDYTRARTRLVQERTRCWQRLEKLLESALVKVSSVASKLTTVSAQDMIKAMIAGQRDPRQLAALARGRMKAKHDDLVEALDGMFDDHHGELAQLLLDQITSLDAKIAQLGARAAELTAAMPAAWGIDADGTTGPAAGTTPDAPVLSAVARLAQIPGISPDLGRSIIAETGLDMSRFPTAAHLVSWAGLCPSARQSGPRARAGTKGQGDTWLRGSLGQAAIGAARTATFLGERYARIARRRGKAKAQVAVARSILVIIWHLLADPAARYTDLGYGYYQARTDTDRKLRNHIRQIQALGFAVTLTKAA

SEQ ID NO: 70420 - protein, 405 aa, unidentified
MEVLYPYCCGLDVHKKSVVACVMTPAGRETRTFGTFTAELLMLTDWLQATGCTHVAMESTGVYWKPIFNLLEATGLHLLVVNAEAIKKVPGRKTDVKDAEWIVDLCRHGLLRRSFIPSRPQRELRELVRYRRAMIEERVREVNRIQKVLEGANIKLGDVTKVVNKSGRAMIAAMIDGETDPAAIADLARGRLRSKRTALQGAVHGLIGPHQRMLLALQLEHLAALETMIERLTEEVGRRMQADEPALCAADTIPGIARRIAEDVLAEIGTDMDRFPDAGHLAAWSGVCPGLEESAGKRQSGKARKGNRYVRTALVEAAQAAARTKNTYLSTLFNRIAARRGKKRATLAVAHAILVSLYHMLKTGTVYEELGPMYFDRLHETAIARRAVKRLEALGYRVSVEKAPA

SEQ ID NO: 70421 - protein, 388 aa, unidentified
MVSDFRKGRYNLMKIYVGIDIAKLNHFAAAISSDGEIIIEPFKFTNDADGFQLLVSKLESFDKNSLIIGLESTAHYGDNLVRYLVTELYQVCVLNPIKTCQMRKNNVRKTKTDKVDTYVIAKTLMIQDNLRFVSFFDLDMMDLKALGRFRQKTIKQRTRLKIQLTTYVDQVFPEIQYFFKSGLHQHAVYALLKEAPSPKEIASMHMTHLANLLKVNSHGHFTKEQAKELRVLAQKSVGANDSAISIQITQTIQQIELLDSQLEKIEAEMTDIMKYNDSVIMTIPGIGYINGGMILGEIGDIHRFSNPNKLLAFAGLEPSVYQSGNFQAKTTRMSKRGSRVLRYALVNAAWNVVRNNATFKAYYDAKRAEGRSHYNALGHCTGKLVRVI

SEQ ID NO: 70422 - protein, 343 aa, unidentified
MQDVATVGLDIAKQVFQAHGADASGETLFNTQIKRENVLEFFSKLKPCLIGMESCATSYYWARQLLEFGHDVRLIHTSYVKPFVKRGKTDANDAEVINVALTQKTMRFVPVKTLNQQAAITIFRTRSLFVSQRTQLVNALRGHLAEAGLIAAKGIQNYSKLVNLMETAADTVLPTVMKQALTDICDQIHRLNDLVTKLDKEIERRVRHDDNACRLLTIPGVGPKTAMCVIATIPDIHRFPSGRHFSSWLGLTPRTHSSGGRSVLRRITKMGNNELRTMLYLGGTVIMMRDKKTPIGRWASRLRARRPYKVAVIAVANRIARIIWALLTNGGVYDPTYGREASA

SEQ ID NO: 70423 - protein, 361 aa, unidentified
MLQSMSLVGLDVHASQTHAAVLDMATGELRGVRLRGAPGGVVEFLASLPGPVCAVYEAGPTGFGLARAAVDRGIDVRVVAAGKVPRASGDRVKTDKRDAERLARLLAAGELRFAFVPRVADEQFRDVIRAIEDCRGDLMRARHRLSKLLLRRDIRWGGPGSAWTQRHMSWLRSLRFEDLCSQATFVDYLSGVEMLVARRAALVAALEQVIPDSRHAVTIARLRCFRGIDTLTAAGLCAEIGDWQRFRPKQLSGFLGIVPTEHTSDTKRRQGSITKAGSAHARRLLVEAAHHYRHRPAIGEPLARRQHGQDPRAIEIAWRAQRRLHQRWQTLAGQRRKPASVVAIACARELAAFCWEAATLN

SEQ ID NO: 70424 - protein, 361 aa, unidentified
MAGTMTWVGLDVHARSTQAAAINAITGELSRMRFGVGTEGPLAWLGELPGPVRACYEAGPTGFGLYRAAVAAGIGMQVVAPGKTPRGPSDRVKTDRKDAELPARLLLAGSLARVVVPPSEVEAARELTRAHDACRRDLMNARHRVSKMLLRHGRVYPKSTTWTAEHRRWLSLQHFDERASELVFADLLAAVEGLSSRKAAIALRLSELATDEQWWPTVAQLRSFRGIDTLTALSLHLELGGDWRRFERPTALSSWLGLTPSLNQSGESSRQGAITKTGSMLARRLLVESAWHYSRAPRLGATLANRQQGQPDHILQIANRAQQRLHRVNRRMRARGKPHNVVVVACARQLACFLWAAATAD

SEQ ID NO: 70425 - protein, 333 aa, unidentified
MNKFKHFLGIDVSKEYFDAVILFDGRKDKPIHSQFTNDIKGIKALVKWLNEQGSSFENTLVCLEHTGMYGKLIIRHLTAFRFSIWVEMLLKIIRSIGVQRGKNDKLDAQRIANYAMKNVEEAQVFNAPRKEIDKIRNLLSLREKLVETQTHLKRNARELNLFDKEVSKLSVSLQRNTLKGIELDLKNIEKQLDTIIKEDENLSRIFKLTTSVIGVGKVTALFLICFTNEFTMYATPRQLACYTGVVPFEYTSGKSVKAKPKVHYMANKKLKKQLHMCALSAITSDPELKHYFERKVEQGKSKMLVINNIRNKIVHRICACIRNNKTFEKRQVA

SEQ ID NO: 70426 - protein, 400 aa, unidentified
MALREQAFIGLDIGKTHHWVCALDGEGKPLLSRKIANDETEIVTLLTTASALAQQLVWAVDIIGAPSALILSLLSQTRQSVQYASGRIVSAMSAAYPGEGKTDAKDAYVIAETARIRRDLPMIDQDTDLVRNLAVLTGYRADLIADRVRMINRLRDLMTSVFPSLERAFDYSSHKGALVLLTGYASPDRIRRIGQTRLAAWLRTRHVRGFTDVAARAIAAAKAQSVVLPGQDLTASIIAELAGNVLRLDERLKSLDHQIEELFQQHPQAAIIQSMPGFGPFLGASLLVGAGDLRAFPGAGHLAAAAGLVPVPNDSGRRTGNLHRPLRYSRPLRHVFYLSAQTSMMRAGPNRDYYLKKRAHGRTHSQAVIALARRRIDVLWALLRENRTWTATPPQLAQAA

SEQ ID NO: 70427 - protein, 361 aa, unidentified
MKKHTQDLIAEVPRGCSQVGITIGIDLGDVWSHYCTLNEEGEVVDRGRFRTNPSSVDKWFTDLPRVRIAMEAGTHSIWISEQLQELGHEVIVANVRELRAISHSDRKSDQVDAEKLARFARLDPKILRPIAHRTVAQQEALTLIRARNLIVRLRTAGVNAVRGLAKPCGYRLPASSTLCFAKRCMAVLPPGLVQALGPVLEQIADMTLKIKAYDRAIKKLTETEYPETMALTKVYGVGQLTALTYVLTLGSKERFQRSRDVGCYLGLRPRRSQSGERDPQLGITKAGNVYLRSLLVECANHVLGRHGKDSSLRDWGLHLASRGGKQSRNRAIVAVARKLAVLLHRIWVTQEPYVPFYAAAA

SEQ ID NO: 70428 - protein, 329 aa, unidentified
MSNLLKKVIGVDVGSKFLTLSFLDDEKGEQVLNLPNNERSILSFLSKISPSDYCFVIEATGNYSSRLLHLSIGKGFESSLINCMSVKHFAKMKNIITKTDAEDAKLIRNYGEMFRPEFYVPKTQDIEYLDQEIKLLNDLEEEKRRYAVKLKALRFHPVVNPSTEKHYEKRLKQLEKEIKEVEARLPQLQDEEFTETKNLLQSVSGIGEKTSLQLMTATSGFKNFHSSKSLVKYFGLAPRIYQSGKKSYSPGKCRTSKAYIRSILYVCSWTAIKHNQKCKELYLRLLEKGKAKKLALIAVCNKLLRICFSVVKNKTPFQQDFQNKLKIST

SEQ ID NO: 70429 - protein, 343 aa, unidentified
MDHFAGLDVSVKDTSVCIVDGTGEIVRELKVASEPEALLGVLRNAAYHFKRIGLEAGPLSQWLFSALGEAGLPVICVETRHMRAVLRAQINKTDRNDARGIAQMMRVGLYRPVHVKTLRSQKLRMLLTHRKLLQSKAIAIENDLRGTLRNFGLKVGMAGGTKFEARIKELVENLPDLAVLVEPLLVVRRVLREQTAVLHRRLRAIVRDDEVCRRLMTTPGVGPVVALTYRATVDVPARFRKSKAVGAVFGLTCSKYQSGEIDRNGRISRCGDEMMRVMLYEAAQSMLRSKKWSWLKAWAMQVARRRGMKKAIVALARRLAVIMHRIWVDGTEFRWTREAVTAA

SEQ ID NO: 70430 - protein, 402 aa, unidentified
MNAVGIDVSKGKSMVAIMRPFGEIVSAPFEIKHTASDIHSLVELINSVEGESRIVMEHTGRYYEVLAHQLSKANLFVSAINPKLIKDFDNDSLRKVKSDKADAIKIARYALDKWQNLKQYNVMDELRNQLKTMNRQFGFYMKHKTAMKNNLIGILDQTYPGVNTYFDSPARSDGSQKWVDFASTYWHVDCVRKMSLNAFIDHYQNWCKRKKYNFSQSKAEEIYGKAKELVPVLPKDAITKLIIKQAVDQLNSASTTVESLRTLMNETASKLPEYPIVMAMKGVGASLGPQLMAEIGDVSRFTHKGAITAFAGVDPGVNESGSYEQKSVPTSKRGSSDLRKTLFQVMDVLIKTHPQDDPVYQFIDKKRAQGKPYYVYMTAGANKFLRIYYGRVKEYLSSLPES

SEQ ID NO: 70431 - protein, 411 aa, unidentified
MLKIVYPICCGIDVHKTFVVACIASTNEKSVTTYQTKRFSTYTRNLRELAAWLESNNRRDVCMEATGKYWHPVYNVLELTCNVVLAHPKYLKAIRGKKTDKKDAKWIADIFKHDLVSGSFIPPADIRQLRDLMRYRSKLINFTTGEKNRAQNCLTTSNVQLDHAFSDVFGKSATAILDYMLEHPDETDFDVTPFVDRRCKTPIEEIQLSIDGTISHEQAEKLKVIRAHMGSLELCKLNLESAILTLAEPYLPQMELIASVPGIRYFSAIAVIAEIGVDMSVFPAAKHLCSWAGLAPQCNESGGKRKSSRVSRAGAYIKPLLIQCANAVVTSKKHPEIRNRYLSIKKRRGHKKAIVAIARMLLTAIYSILSKNEPYNPELYRKSDPDPIDHKKAAIQLLQKRGFAISPPSVP

SEQ ID NO: 70432 - protein, 424 aa, unidentified
MKVTYQTCCGVDVHKSFLVATIVKTTGGIEPSYQKKRFSTFNNSILEFKQWLLDNDCHDVCMESTGKYWVPVFNLLEDDINVVIANPKWVKAVKGNKDDTKDSKWIGDLFRLGLVKGSYIPCKKVRILREYTRYRYKLVSCRSSEKNRYQNALTVCNVALDSVVSDIFGKSSTSIIDYLFEQSGSSINHEEIASKLLRSLKSKEDAVIESVEGYQMTDAQKYRMRLVRAHMDYITAEINDVDKMIENMISSNTDFENAVQFLCTIPGVKRDSAITIISEIGTDMSQFSSSRRLCCWAGLTPGSNESAGKKKSVRITRAGVYLKPALVQCAHAAVKSDKSPYYKKKYESLVKRRGKKRAIIAIARMILTAIYQMLSTGEQWNPSDLYKIDMPVALVEKQKAKAIKQAKKLLQREGLLPPDEPLAS

SEQ ID NO: 70433 - protein, 350 aa, unidentified
MIVIGSDPHKRSYTFSAVVAGTGELRSSETVSVSSAGHERMLAWARAIDPERVWAIEDCRHVSGKLERFLLARGERVVRVPPKLMAGRRRGSRQRGKSDPIDSLAVARAALEEGIQTLPVARLDGPAREIKLLLDHRDDIVGERTRIQNRLRWLLHDRWPELELPAGCLDRHLWLERLADRLRRSDQHADIRVMRAQVRRLRQLTREAAATERELLGLVRGLQPRLLALPGVGVLTAAKLIAEIAGIERFRSHAKLARLAGIAPIPAQSGQSTRVRLDRGGNRQLNAAVHRIAVTQMRCHQPAKDYINRRLAEGKTKREALRCLKRHLIRTIFNTMTPTTTPLDSALVLT

SEQ ID NO: 70434 - protein, 446 aa, unidentified
MISERLTASASQPEWAAFAAIDWADQKHFWQLVPADSQAFEQGELENTPEAVEAWAATLQQRFGGRPIALCLEQSRGALVYMLSKYAHLVLFPVHPTTAARYRKTFSTAGASNDPGDTAWLLDLLLRHRPRLRSLQPDTVETRLLQFLVEERRRTVDEKTRQSNRLTDCLKQYFPQILRWFDDVTSPLVGDLLANWGSLRELQRAHPGTLRKFFHQHNCRSAERLQERLTAIYAARPATQDAAVVEAGVLTARGYAKVLAALRDQIAVLERRIAELADSHPDGALFASLPGAGPALTPRLIVAFGTRRERYQSAYQVQCYSGIAPVTEASGKSQWVHFRWACPKFLRQTFQEFADHSIGQSEWARAYYQHLRQDEKKSHQVAVRALAYKWIRIIFRCWKDGRPYDEQVYLQSLRRRSSFLRAACPTLLSAGWKEEAGLQRFVANPS

SEQ ID NO: 70435 - protein, 428 aa, unidentified
MNCTQNEKLNQVTPHTLIVGVDIAKFKHVARAQDDRGKILGKALTFTNTKEGFDAFFAWLEEMQHKHEKADVLVGMEPTGHYWLNLAYTLKERLVSFGVVNPLHVKRSKELDDNSPTKNDIKDARVIAQLIKDGRFSYPRLPMDQDAEVKAGITIRNQIVGDLQALRGRIHNWLDKYFPEFLTVFKDWGGKMALATLEHIPLPVQLNQTTPERVAEIWSTYGGVQRPSHKRIQRLQEAAARSVGLTVGLQMAQREIATNIKRYKMLKEELHALEKQLEDLVLTLPGIAEMLTVPGVGMVTVIELYSELGDIKNFENPRQILKYAGLNLRESSSGKHKGQTRITKRERSKLRALLFRTVMPLVRHNRAFKALHQYYTTRQENPLRKKQSLIVLCGKLVRVLHTVGQKQCPFDEERMIRDIPHLSLALGA

SEQ ID NO: 70436 - protein, 504 aa, unidentified
MDWFGFGWRASEVGHRGKRRLAPVDKSAPEVIPDAEHELVIERVAAVDVAKAAGKVCVRLPAKTGRRFSRVWDVPARTGAITELGQQLVELGVEKITVESTSDYWRIWYYLLEAAGLSVQLVNARDVKNVPGRPKTDKLDAVWLAKLTEKGLLRPSFVPPAEIRRLRDYTRLREDLTHERTRYWQRLEKLLEDALIKVSVVASRLDTMSTRDMIEALIAGERDPRRLAELARGRMKAKRSELITALDGRFDDHHAELARMLLAQIDALSAQINTLTGRIEDLIAELPEAAAVDHGGGDDTDTAAPDAGDGPDAGPPPARGAAGLTGGTPRRVDPAIEAECARLSAIERLDEITGVGEHNAQVIIAETGLDMTRFPTPAHLVAWAKLCPRTIQSGPVTRSGRAGKGNPYLKGALGQAAAAAAKTDTFLGQRYRRIVKRRGKLKALVAVARSILVIVWHLLAAPLARFHDLGPDYHARRIDIERRMRNHIAQLTALGYRVTVEPAA

SEQ ID NO: 70437 - protein, 348 aa, unidentified
MPLYGGIDLHSNSNQSAILNEDRKRIVKRKLPNEPDLILSFWEPYKHDLAGIVVESTYNWYWLVDLLQERGYRVHLANPAAIQKYSGLKHADDNHDAFWLAELLLLGILPEGYIFPKELRALRDLLRKRQHFVRVRTALLLSLQNIITRNCGTKLSCNHLKALQEDRAQGYLQDNEDLLLAGSASKAAIDALTRQIRRIEGAVVKKLILQAPYTQLLTLPGVGQIVASTVTLETGPIERFSKVGCYASYCRKVNSQWTSNEKVKGHGNKKNGNKYLAWAFGEAAERARIFHKASREFYQHKLRQKRHPALAHGALAHKLARAAYYILRDNVPFDHEKMFGYPEEPLDN

SEQ ID NO: 70438 - protein, 342 aa, unidentified
MMLYEQGEIIEMCYFTGIDVSKDKFDIGWLRDVATGKKKTKVFKNTAQGHQQAADWLLKSINAKAQEIVIVLEPTGVYHEALLYFLHDCGFKILLVNPGKAKKYAESINIIHKTDKLDAIMLAYYGHAQRSKLMLWQPEAPEVRELKVMIRRLDALEKDLQREHNRQEASQVSLSSDRVLRSLKDMIATLTAEIKRLQQDIDNHINRFPELKRNRKLLESIKGIGPVMSRELVYLFASKKFNSAKQVAAYIGLIPKLRESGKLKGRTTLSKIGSSRIRAKLYMAAVSASMHNPDIKAQKERLLKAGKVKMQALGAAMRKLIQICFGVIKHQTEYQPQLALIS

SEQ ID NO: 70439 - protein, 361 aa, unidentified
MFTERTSVGLDVHARSVVAAAIDGDTGEVFRKRLTPGNDDVIGWVRSLPGPSAVVYEAGPTGFGLARAFTTAGIRCEVAAPSKIQRPAGDRVKTDARDAMLLARLLRLDDIVSVTVPSVAREAARDLVRAREDVRGDLMRARHRVSKLLLRRGIVYYGGHAWTGTHLVWLRRQHFDAPGLQLAFDAEHEAVLQAEARRNRLDKAIEAMAADSEYTPVVRRLGCLRGIATLTAFGLAVEVGDWDRLTGASIGAYLGLVPTESSSGQSRSQGSITKTGNTHARRLLVEAGWQHLKPYRTPGATMRARWELAPAAARARGHAGNQRLHQRWVHFTDRKKNPVIANVAIARELAGWCWSLAVMDD

SEQ ID NO: 70440 - protein, 569 aa, unidentified
MALILNAMPATSSRTRASGATALERIVQDETCCDLEQKGEAMLRQLCPADHWCSLAPALAWARGGHRSLVSPLDSPRSDSNLRRQLGPENRLTPEVSMKKRILARRKRRKGDRTSLEAIRPMVAGVDIGSEEHWVCGPERDDGERLVRVFRATTAQLRDMAAWLLEQGVESVAMESTYLYWIPVYEVLEAAGLDVVLVNARMLHHVPGRKTDLQDCQWLQRLHSCGLLRGSFRPRDAICRLRALQRQRANLVETRSRFVQWMQKALDQMNVRVHRAVSDLTGHTGMAIVRAIVAGERDPLRLAALRDKACRKSVETIAEHLAGNWREEHVYNLSMSLRLFDETERAISEYDQRLLGEIEGLQPDDRRNEAVPAHPNAGKERVIRKRGHQELRQALWRFANVDLTTIDGISAHSAQVILTEVGADLTAFPSENHFASWLRLCPRKAISGGKPLKKRPNGTGASRIAGALRTAAVSIQRSKTALGAAYRRTARYKGAAVAVFSIARKLALYVYRLLRHGSAYIDIGEAQYEARFRQRQLHALTETAKNLGFTLVAAAESPPNTAPVTLVAG

SEQ ID NO: 70441 - protein, 354 aa, unidentified
MKQQAIQYLAFDVHRATIVASLRDENGKVLMRATVPTEARAILTLVNSAGPRVHVAFEEGTQAQWLHDLLIDHAERVIVCNVRGRSETTNKSDRIDADGLSELLRLGALKPVFHGVPEVLMLKELVRCYIALVQDSTRVMLRLKAIFRARAIPTPGVSVYRASQRTQWLAKLEGGARIRAASLLTQLDTLLELRPKAKTAMIAAARQQPGWKVLRSIPFLGPVRVALILAIMRTPFRFRTKRNIWPYAGLAVVKRSSADQEYRNGKLQRSRKAPITRGLNRNHNPLLKSVFKGAATAASAKAGPLGEYYQASLARGVKEDLAKVTLARKIAAVVLRLWKKGELWDPKKLTIQAT

SEQ ID NO: 70442 - protein, 463 aa, unidentified
MAKPYECLIWDRGPKGRVGVLAIASPGEPVRVTVYETGPLLRSDHQEDIMDAVYQGIAGIDVHKKMLAVVIRQPAGDATTYIQRKFGTTKSEISHLAAWLQEHGVREVVMESTAQYWRPVWYGLEAHFQLHLTHPLKTRAPRGRKSDFRDAQRLADRWDSGDLEESFIPGAEQRCWRWLTRTRVQLKRKLGVIRNQVEGILEQGGIKLSAVASDLFGVSGWAMLEKIADGKTDPEELLGEARGALRKKRAELKEALAGELEPVYRLLLKQQMAQVRLLWQQVEEINQALAERMQPHLAALVRLTKMPGLDLYAAQELLAEIGPTAAAFPSAEQFVSWMGVCPGSQESAGVNYSSRSPKGNRYLRRLLTQIAWAAIHTKDTFFAGLFHRLKPRVEGKGAAWAVALRIAKVIWLILHNGVEYIEKGVAPLNQRTLLRKFRRLMKEFGRTGIDVKSLLDQQLATVA

SEQ ID NO: 70443 - protein, 364 aa, unidentified
MPAPVLKRPRKPHGVFHGEGVILGVDTHKDVHVGAVLTMAGVLLATHSFATTSAGYQALLLWAYRFGEVSAAGIECTGSYGSALMKYLHTQHVLVFEVNQPDRALRRKAGKTDAVDAEAAGRAVLAGRSLSTPKDGIGGSENLRQMRLVKSSAVKARTTAINQLKGLVVGAEPGLRDELRGLTTKALTRACAVMLPTSVERMLMAELAHRISSLTDELTRLKTVMTQTVTACVPELLQRSGIGYDSAAALIIAVGDNPERMTNEASFAALCGVSPVEFSSGQTTKRRLNRGGNRQANAALYRIVLTRLRWDPRTQEYLKNRTEKGKSKRDVIRCLKCYIAREIFTIIKTIRDQPKHLTRADLTP

SEQ ID NO: 70444 - protein, 325 aa, unidentified
METPQALVEPSAVGIDVGKDELVARIRRSNGVTEPPALFPNSIIGFRRMIVHFKGNSIIDEPILMESTGAYHWRAARTLTDAGYHVRIANPLHTKQMIRHSIRKRKTDKTDAGHLAFLASQSYGYRFIETEEMAKKKALVRHYWKLRGSATDHLRHEAYLRDYRGIRSYSVSPLLIKRCERLKKEIGQMWSKGNDVKYLDSIPGITPFLAGTLLAELLPLERFRTIDQIVAFAGLDPTVKQTGGKRGHHGPLSKRGSPYLRSALFMAAFGSFSKEPMKSLYLRYKERGLHHNAILCVLARKILRIAVALLKKRRVFDPKYLQTGG

SEQ ID NO: 70445 - protein, 445 aa, unidentified
MLRIIHKRVAGLDVHKKTVVATRMRVREDDRVEWETKTFGTTTPDLLELHDWLHEWELTHVTMESTGDYWKPVFNILEDTFAVWLVNAQHVKHVSGRKTDVKDSEWLAELMLHGLLKPSFIPPKPQRALRELTRYRTRLVQERARVVNRVQKLLEGANIKLSSVASDIMGVSARAMLAEIVAGQTDAEQMADLARGRMRSKIVELEKALTGIVQPHHRFVLAQQLDHIDYLDEKVETFSIRIGQQLESMSWPDEPSEPDASQGREEGTEVADESELPLTWDAAVALLDTIPGVSQRIAEVMLAEMGLEMSQFPTANHLASWAGLAPGNHQSGGKRYSGRTTKGNKPLSSIMVQGAWSAVRTKDTFLKSRYHRLAARRGKKRAIVAVAHSMLISAWHMLTYQRPYQELGGDYYDQRKKETKVSYMVRRLEKLTGGSVSIELQPTAA

SEQ ID NO: 70446 - protein, 344 aa, unidentified
MSEVIIIGLDIAKHVFHVHGADERGRAIFSKRISRVKLLDFFAAHPSCTVALEACGGAHHWARQLTQLGHEVRLIPPAYVKPFVRRQKNDAIDAEAICEAAQRPSMRFVAVKSEQQQAAGLVFRTRDLLVRQRTQLINAIRGHLTEYGWIAPKGPSHVAMLADLIEEEEMASSLPESARAMFRLMLDVLAGLDGKIADLDKEIARRAREDEVSRRLMTIPGIGPISATAIAALAPPAETFAKGRDFAAWLGLTPLQRSTGGKRKLGATSKMGERTLRRLLIIGSSAVVFQASKRGTPRGSWLEQMLARKPRMLVTVALANKMARIIWALLVKQENYRAPVAAKT

SEQ ID NO: 70447 - protein, 396 aa, unidentified
MAQIWAGTDIGKTHHHCVVLDAEGRKMLSRRVLNDEPELLALLADVLALDEDVLWAVDVADGMAALWINVLLNHNQQLVYIPGLAVNRASAGYRGMGKTDAKDAVVIADQARMRRDLTVLQPDDEHTIELRILTNRRADLNADRTRRINRLRGQLTSFFPALERVLDLGNLGPLVLLTGYQTPAALRRSGRSRLETWLRNRKVRGADILAQAALEAAERQHTTVPGEKIAAQVVHTLAREVMGLNEQIAEIDKLIAARFRDHDLADVIASMPGIGPLLGAEFLAATAGDMTRFGTADRLASFAGVAPVPRDSGNISGNLHRPKRYHRGLQRVFYTSALISIRSCDESRRYYERKRAEGKRHTQAVLALARRRVNVLWALIRDGQCFQGGLPVTAAA

SEQ ID NO: 70448 - protein, 345 aa, unidentified
MNIIRVGVDIAKSVFHVHGVDRHGQTQWQSKYSRSKWLDALSRKVPAGAEIGMEACASSHYWARELQSRGYHVRLIAAQFVKPYVKSNKNDRVDAEAICEAMSRPNMRFVAPKTVAQQDIQAAHRIREELVGQRTAKANQIRGLVGEYGIVAPVGIQQLRRALPGWLEDAENGLTDNFRALLNGLAEDLRYLDDRITALDDRITESVKQDPIAKRLMTLRGVGPLTASALAGALGDGKAFRKGRDFAASLGLTPRQHSTGGRDRLLGISKRGDSYLRKLLVHGARAVLRHVDGKDDGLSHWLKGLAARKHVNVATVALANKTARIAWALVHNEEAYDEELAAADA

SEQ ID NO: 70449 - protein, 361 aa, unidentified
MSVQRTSVGLDVHARSVVASALDGVTGEVIERRLTPAHADVAAWVGSLPGPVAVVYEAGPTGFGLARFLTAAGIRCQVAAPSKLQRPAGDRVKTDARDARHLARLLHLGQVVAVAVPDAATEAARDLVRAREDVRGDLMSARHRVSKLLLRQGIVYAGGKAWTGVHDTWLRAQRFDSPVLQLAFDTSYETMLAAVDRRDRLDAAIAAMAADSPFTPVVTRLGCLRGVSTLTSFALAVEIGDWHRLTGRSIGAYLGLVPTEYSSGASRSQGGITKTGNAHARRLLIEAAWHHRQPYRAPGADLRRRWDAASPAARDRGRRANRRLHERWARFDARGKRPVVANTAIARELAGWCWSLATLED

SEQ ID NO: 70450 - protein, 341 aa, unidentified
MKKFIRIGVDLAKNYFQVHALVSDVGPAVTRKLRRSKMHEFFSQIEPSLIGMEACGSAHYWARELKAMGHEVLLMPPAYTKPYVKRGKNDAVDADACCEAMSRPGMRFVPVKSAEQQATLMLHKTRDLLVKQRTMSVNALRGHLSEFGIIAAKGIGRVDELLDLVESDTTLPNAARASAKVLAHALEGLDKAIDDLEDEITNAQAQNEMTRLLYKVPGIGKIIASVIAASVPDPSVFKSGRDFTAWLGLTPRQNSSGGKQALGAITKQGNRYIRKLLVLGATSLLNVVGKRKGALRDWIVGLLAKKPARLVTVALANKLARILWAMMKTGESFRTEMFAKA

SEQ ID NO: 70451 - protein, 371 aa, unidentified
MNRIDQDPFARMIPAAWAGLDVAKATFDAAVYFPLEPDQPPRPLEEIPVSSFARSAEGARAFLAWADEHLRRWAAQRGLAEAPALRALMEATGRYSTELCAWLLEAQPASRPVIADPKAAHDFTKSLRVRNLTDRLAARALARFAYDNKPEPPAPPAPQFAELRELSRQRDFIVQTLVAARNRASESTPSKAAATIHRQMIRGLEKSLERIEKAIEKHIAQHDDLQQTIGRLQSIPGVGLWTSVVVVAELGDLTRFKRARQLGAFAGLSPRQRDSGASVHHRARLCKQGSPRVRQGLYLSALAAIRGETAMRRFYQHLVENHKPKMVAVGAVMRKQLILMRSLLVNQTDYQDDYQQVITPSAAPDPQEVCA

SEQ ID NO: 70452 - protein, 340 aa, unidentified
MGLATARAFAESGAVIVLSDRNEQTLRTATAELTSAGRQALGVACDVSDEEHVAALVERTVSSFGRLDFAFNNAGIQAPPADAADEPAEIFDRVNAVNLRGVWACIKHELRAMRHLRSRGIEVLEVERPKHRRRSSRSNLQKSEPSDAEAAARAVLAGEASGVPKSSDGRVEMIRALHAARRSAIKARTQAANQLQALRVTAPDELLDRMRGLSTKELICVAARFRLGDGPTDVATATKFALRSVARRYEALSADIAELEVHLDRLVAQAAPELVSLLGIATENAATLLIVAGDNPRRLRSEASFASLCGVSPIEASSGKVVRHRLNRGGNREANRARCT

SEQ ID NO: 70453 - protein, 375 aa, unidentified
MKDSQKFVGLDVSKEIISVGIAEEGRGEPRFHGNIQNNPESIRRLFKKLGDPDKLLVCYEAGSCGYSIFRQLLSMDIECIVVAPTLIPRRAGDRVKTDRRDSLRLAQLLRAGELTSVWVPDETHEALRDLIRARFDTREDLQRVRQRLVHFLLRHEIRPPQGVKNWTVKYRTWLNSLTFEKPALRIVFQEYFHSIYEVEERMKRIEAQIHEEAVESEHAPVIQALQSLRGVAEVTAVTLVAEIGQFSRFSNPRQLMSYAGLVPKEYSSGSNRWQGSITKVGNSHIRRALVECSWSYRHRPSLKGELKKRQIGQPIEAQRISWKAQHRLNLKYNRITSRGKTGKFAVVAIARELLGFIWAIGCSIEDVKFNQQRVS

SEQ ID NO: 70454 - protein, 336 aa, unidentified
MDLAVLGIDVGKFEFHCALSVKDLVHTNHFPHSAAGFERLHRWLSNRHVSRVHACMESTGGWSEELATDLHAHGHTVSIVNPLAIKSFGQSELSRTKTDRADAALIARYCVTMHPAPWEPPSPLQQRLKRLARRRVALDEMRVQESNRLGAPGSSDVRTSIEATLSFLDRQIDEIDSQIRSLIDDDPTLRSKRELLTSIPGIGERLAVTILGELPNLSEFRSAKALAAFTGLCPREFRSGKSVSTSWLSKAGNVHLRRMLYMPAVAAIRSNPILRDFASRLRSSGKHGKQIVAAVMRRLLVLAYGVLKSQRPFDPEYRVWATSRTSQAAISPTLNP

SEQ ID NO: 70455 - protein, 387 aa, unidentified
MTVRTVNNLPAATHDATARCLFAIELSKSSWVLAFNTPLSDRISRRTLKGCDWKGLLDLIEEVRSGVVRALGRPVEVISCYEAGYDGFWLHRQLEACGVRNYVIDPASLQVNRRARQAKTDRIDAERLLRSLMAYLRGEPKVWSVVRVPTLAEEDARRLHRERDRLTKERVQHANRIKGLCAIHGIYDYEPLRPQRMARLERLRTVQGEQLPARLKAEIRRELQRLEIVLEMISAVEAERDAIVSDEASAHLNAQKIQALHKLRAIGPEFASVLVGEVFYRKFDNRRQLGSYLGFTPSPFQSGRTEREQGISKAGNSKGRTTMVELAWLWLRYQPDSALSIWYRNRVGATKGRIRRITVVALARKLLVALWRYLESGIAPKGAVLKG

SEQ ID NO: 70456 - protein, 439 aa, unidentified
MSQELPMLDPLAAFVDVGSEHMHVSVGGNKPEVFGTVTSQLHALRDWLLEQGVHSVAMEATGIYWLPLYGVLESAGLEVRMVNGRQTRNLPGRKTDMADSQWGATLHMHGLLHAGFVPPADIRRLQDYLRLRADHVAAAATCVQLMQKAFERMNIKLHDVISSLAGVSGLAVARAIVAGERSPEALVALCDVQIRRKKEQAVIEALRGTWADEHIFALDQALQSWDHYQKLIADCDARIATVLPPHDDTQPPLPRSTRQTGVNAPEIARLREILAQMCGGRDLTKLPALSSYGVLQLIGEVGTDLSVWPTEKHFTAWTGLAPGSHDSGKRRKGVKRGRNRTGRLFCMMAQSLVRSRDIALGGFYRRLAARRGGLVATKALARKLAAWFWRVMVKGDDYVEKGLARYEEQVRKTREQALKRLARELGRELVPVPAVTGTA

SEQ ID NO: 70457 - protein, 386 aa, unidentified
MPQLNDLSRSLVILEQDATLIAVIEMGQSSWLVAGIVPGVERSPLKKLAVDESALLKLLNRWREEAEKAGHRVERIAIAFEAGRDGFWLARWLRARDIEAHVIHASSVAVSREHRRAKTDRLDTELLKRAFLGWLRGERDHCKMVAIPTLAQEDAKRPNRERESLVGEQSRIVNRMKAALARLGIRGFNPKLKKAVERLDCLRTPEGEPIPPNTLAELKHDMERRRLVRSQIRDIEGTRLERLVQGHGEGPHVMVRLLARVIGVGVETADMLVQEVLSRNLRDRRAVARYGGLTGSPDESGKKRREKGLARSGNARVRRGMIQLAWRFLMFQKDSALAHWFYARTKNAPQTRKTMIVALARKLLIALWRLVREGAIPEGIVLRPAL

SEQ ID NO: 70458 - protein, 344 aa, unidentified
MEHYAGIDVSLERSSVCVVDAQGNIVKEAKVASEPEAVVAFFETLGIAVKRIGLEAGPLSQWLHAGLKRAGFETVLLETRHVKAALSAMTVKTDRKDARGLAQLIRMGWFRPVHAKSMASQEVRALLVARKQLLRRLIDVELSIRGILRGFGLKVGPVTRKGFEARIRELVTGQAMLERIAAAMLSARATLKTEYDKLHKTVLAIVREDAVCRRLMTVPSVGPLVAITYKSAMDDPNRIVKSKAAGALFGLTPKKYQSGEKDVTGGITRAGDEMVRTALYEAANVLLARITRFSKLKRWGMDVAKRRGSKRAKVALARKIAVILHRMWVDGTTYRWTDAQLTAA

SEQ ID NO: 70459 - protein, 518 aa, unidentified
MARPRYSKKPRGFLVQKPLGQFTDRVQAVGPEHFGVVAIDCAKARSKFLLCDFYGNVLIEPTPVEHTQSELRAACDRVRSAMGVHALTDIVVAIERTGTYHRPVQDAFRRAHFETRLVHPFASKQFRQPADPDNKTDDADLGGIFRAAVNGFGLLQPLWPDVYLELQQLSRQRRDLVCKTTILRCQIKETLHQLMPGYAELFRDHFFDTPVALPLARVTGSAQAVLDAGLNGLRQRVPQGLHYRMATLARILDWAGTAAPSQNPWQLLREQLDHLADDFLQKAKEIRGLEQRLAHLLVMTPYVQLLALPGICVVSSGELAAEMGPIEHYADGNRITGRAGLCPSRYQSDQVDSHGPLRRRANRRLRAALLRIADNLIRHNHHYRARAERWQRQNKDPRWIRVKVSKSFSRLVFVMLTGRCLVQHPACQPRHSICDKLLGFHCERQTDIQCALADIERLSAQLSGRTQQEERQMLQNQLDDPRCRRHRGPQAIGKIIPLVLARLGIRIVQSQTEGEDPN

SEQ ID NO: 70460 - protein, 366 aa, unidentified
MRSKKLYYIGLDVHKDSIWMAVMVDEQDLPIESKQLPNDYLKIVKAIAPYQEKGKVQVAYEAGCLGYGLQRHLSEFGFDCRVIPPTKVVRPGKNKRVKNDKRDAMLIANMLKRREGESINIPTKEDEAGRDLLRCRNDFKDDLKRAKQRVLNFLLRHEKKYESNRYWTMKHRKWMAGLQFDLAVDKMTYEYYLHYIENMEERIARVDEEIRKEAENERNAEKTRVLRAFRGIDYITALSFICEVGDFRRFATAESFMSYLGLVPSEYSSGKKIKRGPITKTGNNQLRKLLVESAWHYTRPVKESKRLAARRIGTSEQVITYADKAMSRLHRKYYRMVARGKERNIAITGVARELAGFIWGVMKMAA

SEQ ID NO: 70461 - protein, 408 aa, unidentified
MVNVGVDLHKTQFTVCVRKNGEEKFGVLPTTNAGYEKFLKAVSKWQATGEKVRVAVESTGNTRYFKNRMEEAGIDVKVINTSKMKVINESVNKTDKHDAATIALFLEKDMLPESRLCSRESEQIRRLLKVRTSLVKTEVVIKNQIHALLTAEGFEDVKGSLQSKKGRLQVLDTLNQCKNGLVAQPLFDTIEQLEKSVKSVEEECRILMKGDRMVELLLTIPGCGEICAWTIRAYTDDINRFSSAKKYVSFAGLAPWVQNSNETIHHGKITKRGPKELRTALVQVVMGLRRMKAKTLTWWLMQRYEKMKSAKGSGKSIIATARKIAKIIWYMLTVEEEFDVEKMVDKKLEKKAKSMRLASESANQTTRSAKEEEGLVEIKKEKKLEIIKVERKGRKKPGVAGKKIKKSA

SEQ ID NO: 70462 - protein, 391 aa, unidentified
MIYIGIDVAKDKHDCFITNSDSEVLFKAFTIFNNLDGFNDLYQKIESVMDDVTKVKVGLEATGHYSYNLLGYLIDKGLPTYVINPLHTNLYRKSLSLRQTKTDKVDARTIASMLMSDVNLKSYSDTSYHNKELKSLTRYRFDKVKERAKLKTSVSRLVCILFPELEKLVPTLHMASVYALLSEFPSAKHVATAHLTRLTNLLSESSKGRYGKDTAITFRDSARASIGSNMPAKSLELKHTIKLIQELDSEIDEIENEIKIIMDEINSPILSISGINYRMGAMIIAEIGDFNRFDSPDKILAYAGFSPSTYQSGQLDGAYAHMEKRGSRYLRYALYNATKYVCHWDPTFAAYLAKKRAEGKHYNVAISHAVKKLVRVIYHLEKTKQQYIKAA

SEQ ID NO: 70463 - protein, 416 aa, unidentified
MKPHSQLTHYAGFDWARDHHDIVIVDPQGQIVAEFRIPHTLEGWQEFRQKISAYPALGVVIETNQGAAVDQLLQLDVTVYPVHPVAARRYRERKSPSGNKTDRLDAWSMADALRVDGRQWKALQPLDPLTQQLRLLCRDEMSLIEQRTALVNQLQQALCEYYPAVLEAFDDWTRPSTWRFVMEFPTPEILLQRKRSRWEKFLHKHKLWRAETAEKRLEIFARAQAFCGSPALIAAKSLLAVSLARLLCLLQNQLDEYRSQIEKLFQQHPDSGLFGSLPGAARFLAPRLLGEVTADPERFNDPQTLQMLAGTGPISYDSGQIHKVKVRRQCHKVLRHVIHLWADCARHAAPWAQTYYQKKRQDGMSHACALRCLGQRLLKILWKIIQTRTPYNADLHTKNQLAHGSWVLQLMSPKSA

SEQ ID NO: 70464 - protein, 452 aa, unidentified
MKREAPIFEETRRSVAGLDIAGHADHYVCGPRRDDGGHDIEHFGTTTAELHRMLSWLKARGVESVAMESTSVYWIPVADLLASEGVEAVLVDTREVKMVPGRKSDVKDCQWLQRLHSCGLLRGGFRPSEKIAAVRTLLREKDSLVVMRTQCVLQMQKSCDQMNVRIHHAVSDIDGKTGMDIVGAIVGGQRDPVALARLRDKRCKKTEAQIAEHLTGVWREEHLFTLEQAYRTLEFIDGRIAEYDDKIASMYKRIADASGNPPPPPPSADVKPSAKDRRRAEDKRDLQRIAGFDMTTIPGIGYDTSAIVLSELGADFSRFPTERHFASYIGLAPSLGKSAGKNVRQRKRCKNTSRAGRALRMAASTLYRSQTELGAFFRSVARRTDRKTAVKATARRMAHMIYRGVRYGAAYLDKGAEAFEARARGKAVKAVRNLIKTHGINALELNSAFAAT

SEQ ID NO: 70465 - protein, 343 aa, unidentified
MEYYVGLDVSLKHTSICVVDRTGSVVREGVVDSDPVAISVYVKSKAPDALRIGLETGPTSTWLWIELKRLGLPVICIDARHAKAVLKMQINKSDRNDAIGIARIMQTGWFKEVHVKDIDSHSVRALLASRALLVKVKRDLENHVRGLLKNLGLVIGRAKFNVFAVRAEELIEGRPELIAAIRPLLEARNAVGRQVCELDRKVMKLARHDAQVRRFMTVPGVGPITALAFKATIDDPARFARSRSVGAYVGLTSRRHASEEVDWTGRISKGGGARLRSYLFEAAGVLLTRVPKWSAVKAWGVRLAKRNGLRKAKVAIARKLAVILHRMWIDGTEFRWSKEEIAA

SEQ ID NO: 70466 - protein, 369 aa, unidentified
MLYLAIDQHAKQITVCVRNEDGDTVLRRQVSTRAEKIEAFFQQLTEMDAQFMAILEVCGFNDWLIEILRKWKCREIVLIHPERPSKKKTDRRDAHKLADLLWLNRERLAAGQTVHGLRRVYMVTQKEREDRQLTALRKTLGQRRTRTLNKIHRIINRHNLIWDYPTKSFQTQAGRRWLEQLKLPEVDRLEMDMLLEEWKTWDEQIAKVDEKIAQRASQVESGKIFSPTQILMTAPGVSHYSGLTLASRIGPIKRFPRPRSLANYFGLTPSCRNSGNVQDRLGSITKEGSKIARFILGQLVLHFLKKDPKMREWYRRIKLRRGSKIARVAVMRRITTIFWHMLTHEEAYSIGGPPPRLRREAQTARSEAA

SEQ ID NO: 70467 - protein, 355 aa, unidentified
MASITLLGIDLAKDVFQLHGLDELGRPQLKRTLRRRALVQFVAKLPACTIAMEACSSSHHFSRKFQQFGHEVKIISPQFVKPFVQGNKNDAADAEAICEAASRRNRRFVATKSVVQQDIQCLHRVRKRLVHNRTALTNEIRSIVGEFGIVFAKKRSALVEGIKGLLNGSCPREELSSEGLTLLQDLYSELLELEQRIENCELKLKKISSQPQCQRLFKVGGLGLLSVTALAVALADPGQFKNGRNFAAWLGLVPRHQGTGGKNRILGISKRGDMDLRTLLIHGARAKLRGINAKCRAERKLDPLEDWAYRLCQRQGYNKATVALANKNARIAWSISAHKTEFESHQAVASLKKGA

SEQ ID NO: 70468 - protein, 303 aa, unidentified
MNSIIVGIDVSKETFDAAVLINNKVQTRKFNNNSEGFNKLVTWLKSRGTGHVCMEATGIYWKNLAKYLYDYGYKVSVVNPARIKGFAMSKLSRTKTDKADSVLIADFCKAMKPEAWYPQPLYIQELQQLVNRLNVLIKHKTQETNRLEGASKAIANNIQMHIEFLETQIKEIEQLINDHIKNNKDLHNKAMLLESIPGIGAKTQAVVLAFLADIEKFSSAKQVVAFVGLNPKHRQSGSSVRGASRISRTGNSDLRKSFYMPAMSALRHNCIIKQFSQRLSDTGKPKMLILIAAMRKLLHITYP

SEQ ID NO: 70469 - protein, 343 aa, unidentified
MEAKRYIGIDLHRNCFTACLRLENGREYLKTWKLEELPKFTTKLRPTDLLAVEVTGNTRLFHDAVAPHVERVVAVNPSQFKVITHSVKKTDPNDARNLALYLSKDLLPEVRMKDKTQAQIASLTQTRDSMVKLRTALKNKVNNLCSAHGVNLDKESLGSEKGLKAVLAMQFDLLVDVELRIIIDQIRSLNRSIAELEETIGKEGRKLEGHQNLTSIKGIGGLSGSILLSIIGDVHDFADEGKLAAYFGIVPRVSNSNETEHAGRITKRGTKLGRTTLIQCALIAQRYSPYLKNYYEKIKSRRGTGKAIVALARKFLGIIYRTLKNQWVFADFPNFVLAEEARA

SEQ ID NO: 70470 - protein, 321 aa, unidentified
MTYVGIDVSKVTFVVAYSSVKTNKTRTFKNTVNGVHEFVQTISASEHNCVLEATGNYSALLVYLLSEAGITISLENPLKIKNFARVMLTVTKTDEIDARLIALYGEKMQPAPYKLRSDAILVLKQKRTVLRQLKKQLVATRNLKGSMEVLPFFDPKCKKTIEKTITFLEKQIKEMEEELASLAQGEYKKQMDLLTSIKGIGVTLAAALIVATGRFSYFDNAKQLTRYLGLSPTYQQSGTSVNVKGHINRNGDSSLRSQLYVAAFSSLRCNTECKACFDRLRSNGKPGKVVVIAVATKLVRQAFAVVTQGKPYVDGFKSEKP

SEQ ID NO: 70471 - protein, 468 aa, unidentified
MVDQHKKVNKNDRTRSLRSFKTIEPNAAGIDLGSREHWVAGPPRDDDRPNVARFGTTTPELVRLAYWLKEQGVKTVAMESTGVYWIPLFEILDSLGFKVVLANARQLRHVPGRKTDMIDCQWLQLLHACGLLRGSFRPSDGICRLRSLIRERNTMVSQRSDWVRRMQKGLDQMNVCVHHAVSDITGATGMAIIRAIVEGERDPQVLARLRDRRCRKTEAQIAEELTGNWRPEHLFNLSQALKMYDQLCSVIDDYDTEIITYISALHPEEAKDIIVPPPVSKNKAKNIVKLGQESLRQALCRLCGFDLTTIDGIGVDTASILVSELGPRFAMFPDEKHFVSYLRLSPNLSISAGKKVPDKHKASTCTRIGSALRMAASTLRKSRSALGAYYRSVAWRKGASVAVFATARKLAQLVYRLVRYGQAYIDTGAQAYEDRVNHRRLKFYSKILKAMGYNVEPAASGKELPALC

SEQ ID NO: 70472 - protein, 407 aa, unidentified
MGKAKPQVIDDDEQQRVFDRVAAVDVAKATGMVCVRLPRQDGSRYSKVWEVTATMGAVTELGRQLMKDRIEMVTLEATSDYWRIFYYVLEMCGLAVQLVSPSQAKNLKGRPKTDKLDSMWLARLTEWGMLRPCFVPPAPVRALRDYTRARTGLVRERTRCWQRLEKLLEGALIKLSSVASKLTTQSAQDMITAMIAGERDPRVLANMAQTRMRAKHDALVEALTGMFDSHHGELAEMELDQIAFLNKRIGKLGASIRETLAQIPAAQGVNADGTTGPDAGRGPDAAVLPAALRLAEIPGVSEQMAAAIIAETGLDMTRFPAAAHLVSWAGLCRVASQSGPRSRGGKKVPGVWRRGVPAKLGPAAGAGGHGPALLATGVLPVRQAGAVTGSRVAGGGSAVQLVRQFLA

SEQ ID NO: 70473 - protein, 450 aa, unidentified
MARKRKSIQNLPVIEPNAAGADVGATQIFVAVPADRDPEPVRCFDTFTSDLEALADWLEACGIRTVVMESTGVYWIPLFQILEKRGIEARLVNARHVKNVPGRKSDVADCQWLQYLHAVGLLRGSFRPDQEICALRSLWRHRDSLIQMASVHLQHMQKALDQMNLQIHHVISDIAGTTGLAIIDAILAGERDPKRLADLRDWRIRATEETIMKSLVGDYRDEHLFTLRQSLVAYRHYQQLIGEVDEKVKQLLSELPAQVDPAEDPIPKARNPRKTPWRNEPIGLREDLYRAFGVDLTQVPGIDSLTAQRLLTEIGPDLSAFPNVAAFASWLRLCPDKRVSGGKVLSSRTGPTKNRAALALRMAAQSLNRSETFLGEYFRRMRARLGAPKAITAAAHKLARIIYHLLTSRQPYDESIFIVQEIRFRKRKEARLRAQAHELGFQLVPVQAVP

SEQ ID NO: 70474 - protein, 410 aa, unidentified
MEVLHSRCAGLDVHKKTVVACVRIQQGVTVEQEVRTFETTTSGLLDLSAWLSEKGCTLAAMEATGVYWKPVWHILADGEFELMLANAAHVKTVPGRKTDVNDATWLSELAAHGLIRGSFVPDRPTQELRSLLRTRKQLVRERSSHIQRLQKTLEDGNIKLDSVISDILGVSGRAMIEAMIAGQTDPAVLARMANQRIRATPEELREALRGRLTAHHRFLLQLHLEQIDALDRAIGRIDEEVKTDLDPFREATQIVKTIPGFDDLSAQSVLSEIGVEMSRFPSDAHLLSWACICPRNDASAGKRRSTRMRKGSRWLKATLFSCAWAAARTKGSYFQAQFHRIKARRGAKKAIGAVAASLLRTIYHMLKDGTLYQDLGADHFDKRRKTASTRRLVQRLHNLGFAVQLTPAQG

SEQ ID NO: 70475 - protein, 349 aa, unidentified
MGQVSTIGVDIAKSVFQIHGVDADGTVVIRRRVGRARVLEFFADLPPCRVGMEACATAHQWARELKKLGHDTRLMPPTYVKAYVKRGKNDAADAAAICEAVTRPSMRFVPIKNVEQQSALMLHRTRDLLIRQRTQLINALRAHLAELGLVAAKGREGLHQLVTVVTECGDERLPSNARFACQAIVTQLHAVQIEISGLDKRITQIHRTNADSKRLDAIPGFGVILSTAVVATMTDPKAFRTGREFAAWIGLVPRQNSTGGKERLGSISKQGDRYLRRLLVVGAISVINSARARPYKYPWVIELLGRRPTKLVAVALANKMARIAWAVLAKGEPYRAPTRSSNAVVPAAA

SEQ ID NO: 70476 - protein, 340 aa, unidentified
MKQIVTIGLDLAKNIFQVHGIDACGKVVVRKALRRGEVMKFFAGLHPCLIGIEACATAHHWGRELGKLGHTVRLMPPAYVKAYVKRGKTDAADAEAICEAVTRPTMRFVAVKSMQQQGVLMLHKTRDLLVRQRTMLINALRGHLAEFGIIAAQGSAGVKAAIEAFHTTQDSLPTFARKALHGLIKQMRVVASEIDKIEEQILAWHRNNAASRRLAGIPGIGPITASAIVAAAPDATLFSSGRSFAAWLGLTPRSHSSGGKEKLVGISKRGDSYIRRLLVIGATAVIRRARQDNASKNWAAKLLTRKPARLVSVALANKTARIAWALLARNQAYVACAGAA

SEQ ID NO: 70477 - protein, 417 aa, unidentified
MNTMTMQPYAAFVGIDWADTKHDVCIQSADSLRREFAVIPHKVEEIDAWARSLHRRFSGPIAIALELSKGPIVYALQKYDYFVIFPINPSTLAKYREAFQPSRAKDDPTDAELALDLILRHPERFEPLQPQSVELRKLAALVEQRRRLVNDRVRLTNRLRNTLKQYYPQTLEWFDRINTKLFCDFIERWPTLTQVKRARTTTLRTFFRAGHTRNPALLETRLAAIRSSQHLTLDEAVIAPNKLHALMLVRMLQVILDAIKAYDQTIAELAPQHDDYDLFGSLPGAGPSLAPRLLVAFGEQRNRFKSAAELQKYSGIAPVTERSGTKHWVHWRWRCPNFVRQTFVEWAAQTINKSYWAGEYYRQQREKGSAHQSALRALAFKWIRILYRCWQTRTPYDEATYLKALQHRGSPLVAKAV

SEQ ID NO: 70478 - protein, 414 aa, unidentified
MSKRRYQAKEVNQIHWSEVATKLANQVVVMAIDVAKEKFVAALMVAGEIVLRMKWTHPKQTGEWLKAMELLLSHTERLETVMESSGTYGDAIRWQLEKRGAIVFRVSAKWVHDNAESHDGVPSTHDVKAAEIIADLHLRGRSERWERLSPERRAAQAWSRQLYQAKKRFTTEKNRTSALLARYWLEALTIITMNSRTLYALLERYGSPASIAADRDQAAELMHQVGGVMMAQRKIDALLDSAGQTLGEPCVDAEQAVFKRIGGRLKAIAKEVGELERQLTHPLDTIESAAAMAGVIGSVSAMVLYATQGDPANYKDAHSYEKSLGLNLKEHSSGQYKGQLKLTKRGPSISRSYVFFATLRLLEKEPVVKRWFDLKASRPRAVKMKIVVELMRKLTRALWYIAQGEAFDPERLFV

SEQ ID NO: 70479 - protein, 361 aa, unidentified
MSTGKDIVLVADYHAENIEYRWFNEATGEERTGRYATTRAGILRQVEQAAGELAPGGRIVWIMESTTGWARVKDLLGPRAKFVLANVLQMPLPPKGRRRKTDKIDTGRLLREYLHGSLPQSFQPSAWWRQVRRLVDCRQDLVKRQTALKNWMVSLLHHETWEDRKNLWSGMGLRRLSAIRLSPSDRMLVDMRRKQLEQLSEQIERVESAMQAVYDRWPEAQWVDAVRGIGMVTAVSLLAHIGPIERFATAEALISYAGLAPGMWQSDGTCHHGRLGGGGTDSHLRYLLIEATSWLCQIPRYRPAYERVEKKRGKKVARIVVARMLLRSIHKMLTARVRFNPVSALSRKETTTTKATTGCSR

SEQ ID NO: 70480 - protein, 323 aa, unidentified
MGEKNVPNLIHVGIDVSKNSFDVSLGVGGELCRFSNDGDGFEQLLERLKGFEVRLVVMEATGGYEAQLACALQAAGLSVAVVNPRQARDFAKALGYLAKTDRIDAAALSAFAQTLDQHPQRERFLKCLPDPQREQLAAWVTRRRQLVEMLTAESNRLAQSHKAARRSIEAIIKALRKQLDDVEVQMARHVREHHADLEALLTSAKGIGPQSVAVLIGELPELGRLSNRQISKLVGVAPLNRDSGTMRGKRTIYGGRAHVRSALYMPTMSAIRYNPVIRCFYERLLARGKQKMVAIVACMRKLLTILNSMVKTGTTWNASLHNA

SEQ ID NO: 70481 - protein, 343 aa, unidentified
MQTITTIGLDIAKSVFQVHGVDAAGQVVIRRQLKRRYVLAFFQKLPPCLIGIEACASSHYWSRELQALGHTVRLMPPAYVKPYVKRQKNDATDAEAICEAVARANMRFVPTKTPEQQSCLMLHRTRHLFIRQQTAVINSIRAHLAEFGIVAPVGRKGVTELLHIVADPSDKRVPEVARVCLAALGNQLLSLKEQIVEFDRMIMVWHRSNETSKRLHYIPGVGPMLATALVASVADPRTFRSGRNFSAWIGLVPKQHSSGGKDRLGSISKQGDRYLRSLFVAGALAVIRYAKIHGTKHRPWLTALLARRPTKVAAIALANKLARMAWAMMAKGDRYRQPVALAA

SEQ ID NO: 70482 - protein, 318 aa, unidentified
MSKSSTQKPLCAGVDIGKNWIDYGLPDKTVARSATDEAGLAELVAFCKKHNVERVGLEATGSYARKIAEALRAAGLVVIVWQPRQIRAYAQFRGLKAKTDRIDAVLIAICTQNMGEDKLRDAPDPRLASLAEHLTRIDQITEDIARNKTRREHVSEKEILMQMREDLKRLMLQKREAIKALVKKVRVHDDLASKLDLLFSIQGIGEPTALMLVIRMPELGKITREEAASLLGVAPFDHESGQCKGQRRTGAGRARARTSLFAAVQAAARQWNPQLIAFYDRLIAKGKHHNTAIIACTRKMIIYANTVLAQNRAWEATT

SEQ ID NO: 70483 - protein, 376 aa, unidentified
MSISKKFIGLDVSKSKIAVAIAEEGREEARYWGTISHTKEQVVKLMHRLRNTEEVALEVCYEAGPTGYVLYRWLLEMDIPCTIVAPSLIPKRAGDRVKTDKRDALRLAQLFRAGELTSIYVPTPEDEALRDLIRAREDAKEDLNRHKQRLGKFLLRHQLTDPKGSKPWSHAYEVWLDTLKFPHDCQRLAFEEYRQAIWETKERIKRYDQEIERQAETHPTQAPLIQALQALRGVQVLTATTIASEMIHAPRFPSPTHFMSYCGLVPSERSTGDSRRQGSITKAGNAHLRRVLVESSWSYRYSPAIKKKMRERISGLPPQIQAIAWEAQHRLHKKYKRMMRMGKPKGTIMVAIARELAGFVWAIATEMENMQRKAAA

SEQ ID NO: 70484 - protein, 274 aa, unidentified
MYVCILNRDGEIVVHRNLPTNPEVLLKTIAPYREDMVIAVECMFTWYWLADLCAQEGLPFVLGHALYMKAIHGGKAKNDKIDAHKMAVLLRGAMLPQAYVYPAKMRATRDLLRRRMHLMRKRAELLTHVQQTNCPYNWPEIGKKIAYKANRTGVAERFADPAVPKSMEVDLTRIDHYDRVLNDLELSILNTAKQHDAQTLYLLQTVPGIGKILSLVLLYEMHAIERFPRVQDFVSYCRLVKCAKESAGKRYGTSGTKIGNAYLTWAFSEAAVLF

SEQ ID NO: 70485 - protein, 348 aa, unidentified
MLADEADHVIGVDTHRDTHTAAVVETATGVVGESKTTSADSLGHKRMLVFGEEHAPASRVWAIESTGSYGSGLTTYLLERGERVVEVDRPKRPARRSGAKSDELDAIRAAKEALERNHPTQPRRRGEREAVRVLQRTREGAVRGRSRAICHLKALVVTAPEGLRSQLRRLADAELITRCARLRTAPAQSTEHRMTVKALRSTARRVLALEAEAADLESELELLVERVCPELLAEPGVGVFSAAELINAWSHAGRLRSEAAFAMLGGAAPIPASSGQTVRHRLNRGGDRQLNRALHTIVMSRLQHDLETQAYAARRAAEGRTPKEIKRCLKRFVARRMFRLLEAEAGVA

SEQ ID NO: 70486 - protein, 410 aa, unidentified
MGKTTTGGRPELKMVNPGAAAIDIGSKMHMAAVNPDSTDVPVRAFDTFTRDLHDLADWFQSCGVTSVAMESTGVYWIPAFEILEQHGFHVILVNARYAKNVPGRKTDVSDAGWLRQLHSYGLLRGSFRPEAEIATLRAYMWQGERLIEYAAAHIQHMQKALMEMNLQLHHVVSDITGATGMRIIRAIVAGERDPDMLASFRDVRCHSTVETIRAALIGNDRDEHIFALTQSLELYDTYQAKIADCDCKLEAAVAVLTIKASGTITPLPKARVKSKQVNAPSFDVRAALYGVVGVDLTQIHGLGPSLALTLVAECGTDLKAWPSAKHFTFWLCLAPGNKISGGKLLSSRTRRSSSRAAALLRLAAVTIRQSDTALGAFFTGVSRRGSASRRPSPPRPARLPSCSTTPCASA

SEQ ID NO: 70487 - protein, 344 aa, unidentified
MNKLSRVGIDLAKSIFQLHGTDRHGKVLWKRRLSRNKWPKALLEATTSDCEIGMEACGGAHHWARVLQSYGYTVKLIPPQFVKPYVKSNKNDARDAEAICEDMSRPGMRFVSVKTVEQQDIQAIHRVRSGLMTERTALANRIRGLVAEYGLVAPQAFSVLKHTVPDWLEDADNGLSDRFRSLLRGLWEDLQRLSQRIGELDKEIILIAQSNLVTQRLQQLRGVGPLVATALVATVGTGQQYAKGKQMAASIGLTPRQHSSGNKDRLLGISKRGDAYLRTLLIHGARAVVSQAKHRDDRLSCWCTDLAKRSHPNVAAVALANKTVRMAWAMMKNNTDYDPEFSLT

SEQ ID NO: 70488 - protein, 363 aa, unidentified
MIEYRSFVGLDVHARTVEGCVIDTSTGQITHRRLAANTADLVGWVASLPGPQTVTYEAGPTGFGLFRGLTAAGIDCRVAAPSKLQRPSGDRVKTDARDAEHLAKLLRLGQIVEVVVPSAEAEMVRDVVRAREDTRQILMGNRHQLSKLLLRHGLVYDEGAAWTGKHDRWLREHRTSGDRSFTTAFDAYYEAVVQTVARRDRLDAALEDLAADSSFTPMVDRLGCLRGISALTGLALAVEIGDWHRFTGKSIGSFVGLVPSEYSSGQSRVQGGITKTGNSHVRRLLVEAAWQHRRDYRPTSTSVLQARWEKAPAPARLRGQNGNLRLHRQWVAFIARRKRPVVANTAIARELAGWCWSLAVMDD

SEQ ID NO: 70489 - protein, 348 aa, unidentified
MNATRKSLVGVDIAKSVFQVYTVEKETGEVINKQVKRAQFLQWFANRAPCLVGMEACSGSQHWARKLQEMGHEVKLMSGKMVKAFVCGNKNDAADARAIYMAAQQPEVKAVSVKTEAQQAVLAMHRIRQGLVKMRTAQINALRGLLAEYGEVFGLGRKAFDVGMRAALVRLAERLPAPLIDTLRDQWNEIARLDERMARIEASLEAWKRQDPAAKAIAEIPGVGLLTATAAVATMGDAKAFRSGREFAAYVGLIPGQTGSGGKVKLLGMSKRGDTYLRTLLIHGARAVIRHPQTTSPWLQQLSQRRPLNVVIVALANKIARTIWAVLANGRNYDRDHVSSRPLVAAAT

SEQ ID NO: 70490 - protein, 388 aa, unidentified
MIYVGIDIAKLNHFAAVISSGGEVLIEPFKFTNDDDGFCLLTSKLTSFSKDELIIGLESTAHYGNNLLLFLVPKGYKVVLINPIQTAVLRKNNIRKTKTDRVDAILICKVLMTSQPLKFVSLQDLGLMQLKNLGRFRLVTVKQRTRLKIQLTSYVDQVFPELQYFFKSGIHHKGCYALLKEAPSPDSIASMHLTHLSHLLSSNSHGRFKKETAVELRVLAQKSVGNPDRSLSIQIAQTVEQIELLDRQVERIESEMKDIVLSLDSVIMTIPGIGYVNGGMILGEIGDIHRFSNPHKLLAFAGLDPKVYQSGNFQAKRTRMSKRGSSALRYALVNAAHNAVRNNDTFKAYYDRKIAEGRSHYNALGHCAGKLVRIIYKMLYDDVTFDLK

SEQ ID NO: 70491 - protein, 421 aa, unidentified
MRGLRGKRVRALKEGALIATVDIGATTNTGYCTTADGRDIKVFKFGNTKEGFEKFWHMIVAARNRFKCTEVMVGYESTGPYAEPLVHYLMDKPASIVQVNPMHTKKLKEVNDNSPGKTDDKDPRVIADIIRLGHALSVVVPEGDAAYLRRLNNARERHVGERTALLNQMQQLVFLVFPEFKAVIKQMAGKTVRFILKTYTAPDKIGALDKMVFGEEMRRRSMGKLGVKDAELLINAARQTVGVKEGVAGIVLDIKHIVAQLDAVDGLKTEIEAEMALTLGRIACSARLLSIKGLGVISVAGLIGEVGDFSKFRTQSEIMKLAGLDLYEISSGKRKGEKRISKRGRSLIRKILYFAAIQMVRKNGIMYDYYEKLTCRGMLKMRALVAVMRKVLGIIHAIVRDDRDYVGEYSAPKRRVIKKAA

SEQ ID NO: 70492 - protein, 373 aa, unidentified
MSESITYVGMDVHKESVRVAMILPGQKEPVEWSQKNTPSSLIKRLKRKATGSLVCCYEAGPCGYALQRAMTKAGIRCLVVAPSLIPRKPGERIKTDRRDAKKLARYLRSGDLTEVHPPTTEEESVRDLCRAREDAKEDLLRSRHRLQKFLLRRGLVYPRGKRAWTHNHRAWLRSLSFEDESDRLVFDDYLRMVEYLEERVKGWLQALEDLSTHEPYATAVGYLRCFRGIDTVTAMTVVAELHGFMRFTSPRQLMAYLGLVPGEHSSGEKRRQGAITKTGNGHVRRVLIEASWHYRHVPAVSTALKARQKGQPEWAIAVADKAQRRLNRRYWRLINKGKPTSKAATAVARELVGFLWAVMYTASSQQLDQSTAA

SEQ ID NO: 70493 - protein, 483 aa, unidentified
MAAQQKAETGTRPRKSNRKQRREQQRKVWTDNPGLDVVHPHAAGIDVGNSEHYVAIAPAKSAEAVRRFGCFTADLRDLAEFLKAHGIVSVVMQSTGVYWIPLYDVLEEAGFQVYLVNARDTKNLPGRKSDVQESQWLLKLHTYGLLRNSFHPSSEIRVLRTYWRQRSEHVHTAAECVQRMQKALTQMNLQLANVITDIMGMTGQKILRAILAGERDADKLAEMRNWRIRASHEEIVASLTGNWRPELLFALKQEVDRYDFCQRQIAECDQEIEKQLNALPSRPRETVSPLEPAVPPRNSKKSKKAQGNSPEFDLEQELVRIAGVDFTRIDGINVLTAQTILSEVGLDMERWKTEAHFASWLGLCPYNAVSGGKVLRRGTRKVVNRAATAFRIAAFTLRRSDSYLGAQYRRFRSKLGAPKAITAMAHKLAVLFYRMLRFGQEYVDRGQQFYDAKYRQQQISLLNRKAAQLGFSIIPAANPLPPA

SEQ ID NO: 70494 - protein, 462 aa, unidentified
MPGREERETWEKSRRQLEGLPVIRRGVAGIDLGSEQHWVCAPTLDRSGREVARFGATTAELIRMAEWLKARQVESVAMESTGVYWIAPHEVLEAQGLQVLLVDTRQLAQVPGRDKKSDPTDCEWIQRLHSCGLLRGSFRPEEAVCMLRTLVRDKANLVAESGDWLRRMQKSLDQMNVRVHRAVSDIDGVTGMAILRAIAGGERDAQKLASLRDRRCSKTQQEIAEQLSGHWREDHLFSLQQALKMYDAVQERIAAYEQEILGKLGAMEREEPHEPTAPPLQNASKARTIKKRGQEAKRQALYRMSGVDMTQIDAIGVETVEVVVSEYGSDLSRFPTEKQFVSHVTLAPRVPTSGGKPVKKKKRNSASTRVAAALRMAALSLRHSQTALGAYYRRIAQRRGGDIAVFAAARKLATLIYRLLRWGQPYVDEGAAAFENRYRQRRIHRLEATAKELGYQLTPVPA

SEQ ID NO: 70495 - protein, 344 aa, unidentified
MKITTVGIDLAKNVFQIHGIDEHGKAVLKKQLRRDQMAAFFVNLPSCLIGMEACGSAHHWGRKLQSMGHTVRLMAPQFVKPYVKTNKNDAADAEAICEAVGRPNMRFVPVKNVEQQAVLALHRVRQGFVRARTAQANQIRGLLGEFGLIVPQGIGHIAARVPELIEDGANELPGAFRLLIQRLLDHLKELDRQVEELEEKIHAWHRSSDLSRKLAMVPGIGPITASALVASIGDAKNFDGGRQVAAWLGLVPRQHSSGGKSNLLGMSKRGDTYLRTLLIHGARSVIYRVSQRADAYNWISSVVNRRNKNVAAVALANKNARIAWALLAHDRQFDASYVRSAAVV

SEQ ID NO: 70496 - protein, 364 aa, unidentified
MKPVKDIAKRTVRYIGMDVHRDSTTVAVLDAQGNLLMQVTLRTEGNILVDFLSGLRGTLHLTFEEGTYSAWLYTLLSPYVEKLIVCNPRQNALLKHGNKSDSIDARKLAELLRLGSLTAVYHGSPGMRTLKELAASYGTLVRDGTRVMNRLKGLYRGRGIRCGGMQVYSPRHRDRWLQQLHEPGARQRAELLYQELDLLLQLRPQARRALLGESRKQAAQKILRTIPGLGPVRVALLLAWLQTPHRFRNKRKLWGYGGLGLITRGSSQYQLQQGELVVSPKGVRVRGLNPAHHHALKDIFKGAALVACQRPGPLRDAYARCLAQGTAEHLARLTIARKIATLVLTLWKKGERFDAQRLRREQAA

SEQ ID NO: 70497 - protein, 384 aa, unidentified
MNNNNIIFIGLDTHKSFIQVAVLQDHRGANPQDLGRIKSNKSALIKLAQQLQSKFQKATLHFIYEAGPCGYWTYRLLTSLGHCCYVIAPSLIPKKPGDRVKTDKRDAAKLAKLFKAEELTPIYVPESEDEAIRDLSRARETAMKDLKDAKFQLKGFLLRNNIQAVVKDNWSKKHLRWLTDLILPHHSQQIVLQEMIITISERMQRLQRLDNELLHQVKNWRYYPVVKAIQAMRGVRLLVALGTIAELGDLRRFDHPRKLMAYLGLVPTENSSGNKTRRGSLTKCGNSRARRLLVEGAHTYKHKANISVELQLRQEGLPKEIVDIAWQAQQRLCRRYQRLLQKGKHRNVVVAAIAREMIAYIWAIAREVVISNVDPKTRIARLPA

SEQ ID NO: 70498 - protein, 339 aa, unidentified
MKYIPVGVDLAKHLIQVHFINEHTGEVVDKQLRSRDFLTFFSNREPCLIGMEACGGSQYWARELEKLGHKVRLMQGRFVKAFVMGNKNDVMDARAIWMAVQQPGKEIAVKTEEQQSVLVLHRSRRQLVKFRTAQINALHGTLLEFGETIHKGRAAMDRELPAALERMRVKLPPYLIALLEDQYNRLSELDSLIDGIEKQLISVAKQNETCKRLMEIPGVGPLIATAAVATMGEASAFKSGREFAAYVGLVPKQTGSGGKVRLLGISKRGDTYLRTLFIHGARAAALLTKEPGPWITELKKRRPTSVAIVAMANKLARTVWAIAAHDRKYDKNHVSIRPY

SEQ ID NO: 70499 - protein, 473 aa, unidentified
MAKGSGGSGMTRGDRRRNARRERLRELLPRDGAVIGIDLAEDKQALAVIDHDVRVLARKTVRVKAFRLGEALDWAVARARPKGFEQVTVACEPTGPRWLQVQRLCAERGLPLVCIQPLISHIAREQQDFTRHKTDESDCVMIARLAVELHCYVPEELDETWAHLRHLGRRRAQLITAATASAQRIRDFLSVAWPAVPETCARPLESVTWLAALQVVTARCGADPGKLAGMGEQEFTALVRGAVPGWGGRKAHGPISRRVFAALTDTEGVVVSSRRGLLRRIADELGDLQRTRAQLRAVEADMVAVLDELGLSRLGDIPGLTAVGAAAILAETGDPHRYDNSSSLVKHAGMSPSDNASGAFSGQAHISRRGRPGLRLVVWRAVWPMLQFNPVMAAKYQAMTRGADTAAAGAGPQQGAAAAAAARARRAKARVACAASLLRWIYCMVVHDTSWDPAAASGAASRHQTPRTQAKAA

SEQ ID NO: 70500 - protein, 425 aa, unidentified
MKQKRSVEGEFRIYVGLDWGTEFHRACVLDSRGMIRRECRVDHSGQAITDFLRSLAELADGQPANIAMAIEVPRGPVVEAFLEGGFAVFSINPKQLDRFRDRHTAAGAKDDSRDAYVAADSLRTDQHCFRRIATAHPDVVRLRELSRTEESLGEDLRRVVNQLHQLLLRYYPQLLQLNSTPDEPWIWALLEAAPTPERGAKLTLARLKSMLAKHRIRRWTAQALQAILRTPPLPLSAGSAEAISEHVLVLLPQLRLLYGQRAKVRDRIEALLNHMTQLGREHPECREHCDVGLLLSIPGLGCLIAANLFTEGADALAQRDYAALRAHSGAAPVTRQSGKSKQVIMRRGCSERLRNAVYHLARCSVLHDPHSKRHYAQLRSVGHKHGRALRGVADRLLRMLIAMLKTGQPYDATRRGNAAATAQAT

SEQ ID NO: 70501 - protein, 366 aa, unidentified
MRKVMAGMDLHGNNVMVGIVDDQGARLQHRRLACELPEIIEFLAPYKAELESIAVESTFNWYWLVDGLRAAGFPVVLANPAKIDQYSGIKHADDKNDAYFLAELQRLKILPTGYVYDPELRPVRDLLRRRMSLMRQRTTLFLSAKSLHQRTTGRGLELRRLKAMEPEEAAALYTHPANQLIAQIQKEHIDSLDQSIRQIEKAVLKVALQQPYYQRLQTIPGIGIILGLTISMEVGNIDRFAGPGQFASYCRTVDAKRISNGKTKGDNNQKCGNKYLAWAFVEAAHGARRFDATCRRWYDRKAGKKCTTVATKALACKLAKAAWYVMAKGTEYQAGKIFPGLTEPKAEEISGEQASASKGVGPNPEN

SEQ ID NO: 70502 - protein, 344 aa, unidentified
MSTIKVLGIDLGKSSFHVIGRDYSDNQVIRKKYSRSALIHYLHQLPPCTIAFEACGGAHWLGRQCESMGHKVRLIPPQYVKPFVKSNKNDFIDADAICEASTRPNMRFVSVKSEQAQIISAIHKARHGYIKERTACMSRIGALLLEFGIALPTGHSVMKQLFSWLAQQRQTLPALLMQELVELHEHYLLLNSNIEKQDKKLKQLIETDPVGQLLKTIPGIGDMTASLCLANISSATDFKNGRNMAAWLGLVPAQYSTGGKPKLLGISKRGNKELRTLFIHAARAVMSRPEKTGKIYGEWLMNLRATKPFNVVTVALANKLARIAWAVMKTKQAFNSKAFAPGLQ

SEQ ID NO: 70503 - protein, 412 aa, unidentified
MEILYGCCCGIDVHAKMLVACLIKAGKKEVRTFATMTADLLRLLDWLTQAGCTHVAIESTGVYWRPVFNLLEGVLEVILTNARDAKGFTARKTDVIDAEWLADLLRHGLLKPSFIPPRPIRELRELTRYRESLVREQTALANRIQKLIESANIKLGQVASDALGVSGKAMLRALAAGETDAKKMSHLARRTLKRKQPQLQQALAGRMTEAQRWVLGQLLDQYDQSEAALRRVEERLTQQVESSPDPFVPEAVKLLDTIPGVGETVAQIIVAEIGVDMERFPTDHHLASWAGMCPGNNESAGKRKSGKTSKGSRYLRAALVQAAWAASHQKGTYLAAQYKRLVKRMGKKKALVAVGHSILIIVYHVLQKRVPYQDLGGDYFERRHVSTQRQRLIRQLEALGVKVTVEEVKEAA

SEQ ID NO: 70504 - protein, 380 aa, unidentified
MQAPDNCMPIADHNGTIFVAIELSQRNWLVVMRSPERDRISHHKLDGGDFDGLLRLIETARARAARALGLEPAVVSCYEAGYDGFWLHRRLAAAGISNFVFDPASIAVEQRGRRAKTDRIDGEVMLRTLLAHCRGEPRVVRIVQVPSSEQEDARRASRERQRLIQEQTGHINRIKALLRLLGLAAGNPRRRDWAIWLAEQRDWKGEPVPPQLMAELKREHARLRLVGEQLEALASAPAAAPAQMVERKELLQRLKALGPVFAATLTDEMFYKNFRNRREVAAYCGLAPTPWRSGRMERERGISKAGNPRARHKAIELAWLWLRHQPDSALSKWFRQSTNNASGRTRRGAIVALARKLIVALWRYLTTGLVPEGALIKTKV

SEQ ID NO: 70505 - protein, 376 aa, unidentified
MTWGCQAGVETANLITVMKNYKITNTESYESIKLGIDAHAKWYYVARQLDGATPQPVQKMDFEGLLHFVARQKRMAREVHTCYEAGAFGYHLHHRLTALGVTNYVVQPQDWDERGKGVKNDRIDAQALCQRLDRYVRGNLKAFSVVRVPTAEEERERAISRQRQQLVRERQRLQAMGRSLLAMHGIHVSGKWWQGKTWSKIRSEAPEWVIERLEVFSRLIAPLEVESTKLTSQIEAAATDQKIPKGVGPLTFEVLRREVGDWSRFTNRRQVSSYTGLCPREHSSGGKRRSGSVSKSGNPRVRAMLVEMVWRMTRWQPGYHGLQKWLPVLVDPARGGAARKKAVVAIARQLAVDLWRVFTGQTTAENLGLVYLPDAA

SEQ ID NO: 70506 - protein, 402 aa, unidentified
MTAVMIGVDPHKGSHTAVAIGGAEQPLGKLRVDASAGQAGELVAWAAEWPERTWAVEGAAGLGRLLAQQLVAAGERVLDVPPKLASRVRLLEAGDTNKNDPNDARPVAVAALRSRAVRDVTAEDHGAVLKIWARRHRDLARARNQVACRLHAVICDLVPGGIRKEITAGHATSVLVKITPAGPIGTARRDLAAQFLEDLRRLDTQLAQTKKQLAAAVRASGTTVTEVFGIGPVNAGTIIGDAGGISRFPSRDHFAAYNGTAPVEVSSGNRKIYRLSLRGNRRMNHAIHMAAITQIRHAHSGGRAYYDRKIAAGKTHKDALRCLKRKISDAIYARLRADAGITNPPAGKGPGGQKGNGSDSSAAGSHPERRLFGQATPGPATTLRPPDPASTPAAAIPAPKRS

SEQ ID NO: 70507 - protein, 386 aa, unidentified
MIYVGIDIAKLNHFASAVSSDGEIMLPPFKFTNDYDGFHKLQSCLDQFDKAQLIIGLESTAHYGNNLVEFLVLSNYKVCVINPIQTSTLRKNNIRKTKTDKVDTLVIAKALMMNHTRFFTKYDISLLHLKELGRFRMKLIKKRTQAKIQLTSYVDQAFPEIQYFFKGVHHKSCYALLKEAPTAGMIASMHLTHLSHLLEVASHGHFKKETAKEIRVLAQKSVGINDSSVALQITQTIDLIELLDRQVTTVESDMESLVNSLDSVILTIPGIGAINGGMILGELGDITRFSNPSKVLAFAGLDPTVYQSGNFEARHTKMSKRGSRPLRFALVNAAHNVVKNNQTFKKYYDQKRSEGKLHYNALGHCAGKLVRIIYKMLTDNVAFNLK

SEQ ID NO: 70508 - protein, 506 aa, unidentified
MKLPLRTAISISDEEALTLTMPAYLEQDKALGLKVVSIFPKNISKNIPSITGFIMLLDASTGEPKVLMDAAYLTALRTGAVSGLATKYFAQDNAKHVAIIGSGAQAITQLEAVTSVRNIKQVSVWSRNINKAKEFAKKLENQYDIAVYENISLAVRDADIICTATSSTKPLIYLNDIAQPHAHINAIGSHSKSMQEISQDILSNSNVFVDQLEAALSESGEIIEAVEQNSLKNETIIELGQWLLNKDKNYKNDLTVFKSVGLAIQDLSVAEVVYQRFIQSYGNEAKTDKLDALSLALYGYERAQRLELFTPQSTKALALFELVQRRNDLKQMLVAEKNRLKAPRADIIKASCNAMLEVLNNQIKTITDEINTLIEADSVLREKKAILKTIPGIGDIIANELLVLLPELGSLTRRKIASLAGLAPKANDSGQFSGYRCIGYGRCGIKPILFLAAMAARNSNSSLKSFYNQLISSGKKKMVALTALMRKIIVIANARIRDFNSGLFCA

SEQ ID NO: 70509 - protein, 367 aa, unidentified
MNSVVQTAGPIHLGLDVSKNKIAVGVLRWDEQVPDTEMLVNDEASVRRLIGRFPDRSQLRVCYEAGPTGFGLHRLLRSMGVACDVIAPALIPRAPGDRVKTDRRDCRRLARLHRAGELVAIRVPTEAEEAVRDLCRARAAVVGDRTRIRHRVSKFLLRHDRVWRESGWTVRHEQWLGRQRFEDPALRAAYGHYRGMLTACEAELAALEADLAHWFTHGPFTDAVARLGAYRGVAQVGALTIASEVGDWRRFPTARTFMGFTGLVPSEYSSGDAVHRGHITKAGNTHLRTQLIESAWAYQHHPNLGVTLRRRHERVDAATAARSWSAQQRLCARFRRLNARKTSRSVVAVAIARELAGFLWAEMTASQ

SEQ ID NO: 70510 - protein, 348 aa, unidentified
MSQIISTITVIGIDIGKNSFHVIGLDEHGAPALRQKWSRGQVEARLANMPPCLIGMEACVGAHHLSRKLKTLGHDARLMPAKYVRPYSKGQKNDFRDAEAIAEAVQRPTMKFVATKTAEQLDLQALHRVRERLVSQRTGIINQIRAFLLERGVAIRQGFRFLRAELPRILAAPPEVLSPRMVRIIGGLAEDWRRLDERIGCLSGEITALAHQDAGCERLVSVPGIGPIISSAMVAAIGTGEAFSKGRDFAAWLGLVPKQISTGDRTILGKISKRGNRYLRVLFVQAAWVVLIKPQSWERHGLKRWIEAAKKRLHRNVLAIALANKLARIAWSVLARSRIFEASKLQAV

SEQ ID NO: 70511 - protein, 416 aa, unidentified
MKLFVGIDVSSEKLDVCFLTDDNQLSILSEISVANDIEGASFIRETILEFNNSYHFDQIVIGMESTSMYSFHPSMFFHEDEKLKKLNTLVTIENPFRVKQFSRMFDENKTDRNDALRIADFLRIQRFKTSPIKEEKYMALQRLTRTRYQLIKQLIRTKQHFLENLTYKCNTLAREMRDESTSLFSATLISLMTEDFTLDELAELPLEAFCDLLQEKGKGRFKQPEKIAKAIQRAITMSYRLGALAQESINVVLSVLVREIRALEKNIKELDKAIEQVIVVIPEYQCLTSIPGVGKVYAAGLIAEIGQIERFEDQTKLAKYAGLSWKVNQSGNYQSQNTPLTKQGNRYFRYYLVEAANSVKNYLPEYKAFYQSKYKEVPKHQHKRALVLTARKFTRLVDTLLRKHQLYTPPRSVIEK

SEQ ID NO: 70512 - protein, 420 aa, unidentified
METIETAYKVAGIDVHKSMLAVVIADVAREGEFQFERRKFGATESELRQLAMWLTEHRVREAVMESTAQYWKPVWQQLEGQCELYLAQAHSNRAPRGRKRDFADAERLLRRHVAGELILSFVPGPEQRLWRTMTRSKLQLTRDRVRIHNQLESLLEDARIKLSSCVSDLLGLSSRRMLKALAEGETSAARLAAMADPKLRATPERLQDALHAAATLSVLHRQILGLFLARLELIEDQMEILDKSIGEALHGYHDAVLRLAEVPGYGIDSAQQVIAEIGPAAATFPSAAQLSSWVGTCPGREESAEVSRNNRSPKGNRMMRRVLNQVANAAVKTKGSVFQAVYRRLLTRLGHNKAIWAIAHRLCRLTWKILHQGVRYIEQGNRPNPKAVKTRMNKLIRELRSLGYQVQVAPLATPKNDAIE

SEQ ID NO: 70513 - protein, 380 aa, unidentified
MVEAWVSELCQRFGHGPIAVAVEQVKGALVYMLRKYECLHLYPVPSTMTAKMREALYPSGAKDDPRDADLLLDLLLQHRDKLRRLTPDNEATRRVQNLVEERRKLVEEKTAQLNRLIGYLKVYFPQMLEWFAKLDTKLVCDLLERWPSLEELQAVPPGEVKKFFRHRRGRHGELTEWRMQGISQAMPAIRDRAVIEAKRTVVQVIAQLLRTLLEGIATLDRKIAEAAEVHPDYFIFQSLPGAGAALAPRLLAALGSQRDRYASAEEVQKYSGIAPVTERSGKKKWVHFRWACPKFLRQSFHEWAGHSIAQSVWARAYYQQQRQRGKDHHAVVRALAFKWIRIVFRCWQDRVAYDETRYLRTLATRGSHLTSAFAATAASM

SEQ ID NO: 70514 - protein, 407 aa, unidentified
MNKLFVGIDVGSRNNAVYIMLPDGSKHSSFPVQNNLGGAQTLVRKVVSALSDNGLSSVSIAIEATSVYGDNLMCFLREDGNLSKFERKLFVLNPKQVSKFKGAYSELPKNDPVDAFVIADSLRFGRIGFPVYMDDYRYKALQKLTRARFYAVQNLTREKQRFMNHLFAKCSGLAQEKVFANSYGTTALALFEEFDSPDDIVNMDINDLAAFISDKGKNRFPNPHETAKTVQAAARGSYRLPKTVNDSVNQVLSISISSMRAMQAQIKALDKEIERQFDNIPNTLTSIPGVGPVLSAGIIAEIGDINRFDSHARLAKFAGLAWRENKSGTFEGQITRLYSSGNRFLKYYLCEAAFHHVRCDTDYKSFYDLKYNEVNKFQHKRALALTARKFVRLVFRLLKDNRLYIQA

SEQ ID NO: 70515 - protein, 415 aa, unidentified
MNNTISDIDTDLTAVSEVEGNAVQAEAQPAQNESDETYAQAVQEKLALARSRANCRYIGIDLHSNNIWLSVIVNEQRPSGSVGKVIFSRSIGTQRVDGTLPEDLIKPVLERFCKDQPHIACVEATYNWYWLADLFEKNGWNLVLADPSTVSEAKTKAADDRKDAEYLADRLRYNALRYAVIMPKQLREIRDLVRTRGTAVKQRAREKIIVINKLTNLIGRKITGKELRELIKEHAEFGTEAPMLLNWGLTEEVRTILDYHLTMATNIDQGIQKLEEHINAVGRNLRYTRELQKMPGCGPVISSILASEIGSIRRFATAANFVSYCRLASTSKLSNGKSKGLGNAKNGNAYLSWAFTELATLMVRYSEAAKRHFEKLMRKYGQLRVKAIRVLAAKLARSVYQCLSKNEPFDVLRCF

SEQ ID NO: 70516 - protein, 412 aa, unidentified
MQVMIERCAGLDVHQETVVACRLLGSPDVRPTKEVRTFATMTRDLVALRAWLAEAGVTHVGMESTGVYWCPVYAVLEGHFDLIVGNARHIRNVPGRKTDVKDAEWIADLVRHGLVAKSFVPPQPQRDLRELLRYRRKLVESQAAERNRLLKLLETANIKLASVASDVFGVSGRAMLKALIAGDASAEEMADLARGQLRRKRSALILALDGHLEEHHRFLLTLQLRRLEAAEQDIAALDERLAVKLQPYGEQHTLLMQIPGVDWLVAAVLIAEIGTNMSVFNSASHLAAWAGVCPGNHESAGKQKSGRARKGNVHLRTILVGAAISASRTKSSYLKDKFHRLKARRGAMRAALAIAHKILVAAYHMVATRTPYRELGDAYLDHIGQTRTVANLKRRLERLGYRVSLEPNAAVA

SEQ ID NO: 70517 - protein, 393 aa, unidentified
MPVLATQPEAAIAVRTDLCAIFVSLELSRSTWLITSLSPGGGEKMSKYSVSAGDIDGLFRRFGDLQERARVRTGQSFAVVTIQEAGLDGFWIHRLLEREGIESWVVDPASILTSRRRRRAKTDRIDGETLVRTLLAHKRGEPRVCAMVQAPTPEDEDRRRLCRERKVLTAERISHVNRIKGLLFAQGVRDYEPLRRDRRARLEELRTGDGRCLPVHLKAQISRELDRLEIILVQLKTVDSERDALLAKGNEDQPPTPASLLVQLKGIGPEFAAVLWSEGLYRSFNNRRQVAAYAGLAPTPWQSGSIDHEQGVSKAGNSRLRTTMIQLAWLWLQHQPGSALSVWFRERVQRNGGRGKKTAIVAMARKLLIALWKYAAHGVLIEGAVANTAFAKG

SEQ ID NO: 70518 - protein, 336 aa, unidentified
MEPTTIAIDLAKRVFQIHYVEPETGAIRSKVLKRAQLAPFFANRPASRVVMEACGSAHHWARVLARHGHDVRLIAAQFVRPFVKSNKNDAADAAAIWEAAQRPGMRCVAVKTEDQQAMLAMHRIRQQLVRIRVMQVNQLRGLLYEFGVVLPQGRRASIEAAKAALASLADEFPAMLLDSLQDQLSRLRALDEQIARIEQRILSWRRNDDACLRISEIPGVGVLTATAAVSVIGQARTFRSGREFAAYLGLVPRQNGSGGKIKLGGISKRGDVYLRTLLIHGARSVISSSKHLPERLRQMLSRRPTNVVAVALANKMARTIWALLAHGRTYEAAPSQ

SEQ ID NO: 70519 - protein, 428 aa, unidentified
MPRAPISERPAGPLTLQCLAVPGRIAMRFFVGIDWASQTHAVCVIDEAARVRWQGSVAHSADGLAELIRQLRRFRAGSALAIAIERPSGLLVDTLVDAGFQVVPIHPNVLKASRSRYSAAGSKSDPGDAFILADLLRTDGHRFRPLRPLTDDTRALRALVRGRDDLVAQRVALANQLRAVLEHGWPGAAVIFADLDSPIALAFLARYPTAQHAARLGEKRLAQFLTQHSYPGRRSAAELLARLRDAPPSQAGEAEADASGEVVRSFVAVLMPLVAQIQQLSAAITAALRHHPDGPLVQSLPRSGAVNAAQILAELGDDRARFPTDEQLAAEAGVAPVTHASGKHHAVVFRWACNKRLRHALTTFADNSRHASAWAAAVYARALARGCDHTHAIRILARAWVRVLSRCWQDHTPYDVTRHRAAQLVLAA

SEQ ID NO: 70520 - protein, 351 aa, unidentified
MIIVGVDYHPSVQQVAFLDTETGETGERRLNHSDGEAERFYRDLQRRQVKVRVGIEATGHARWFERLLAELKFELWIGDPARIKAARVRKQKTDRQDAQLLLRLLIEGRFPQIWVPSPENRDLRQLIWHRHRLVQMRTRAMNQIQAAAMNEGVRRKKTLWSKTGRRQLEALPLAPWATRRRQDLLELVDRLNTTIDELTAAAEQEARKRPEVLRLMTHPGVGPITALAFVLVLGSPDRFGCGHQIGSYLGLIPCEDSSADRQRLGHITKQGSSLLRFLLVEAAQAAVRWDPDWRRRFVHLAMRRDRRIAKVAMARKLAVSLYWMWRKKCDYQQTLQFGSHAGEPGFGHGVK

SEQ ID NO: 70521 - protein, 349 aa, unidentified
MILVGCDLHTRKQQVALLNTDTGELWDQELSHTGDDVERFYAALPPPVTVGIESTGYSLWFHALLQRLGHTLLVGEAAKIRAMVVRKTKTDRRDARHLRDLLRDDRFPLVWIPDPTTRDLRALIKHRLRLVRIRTMVKNGLHAIALNQRLALGPSLWSRQGLAQLQALVLLPHTRRRRDDSLDLLQWLNRHIDELDLQVATAAAADPDARRLMTHPGVGPVTALATVLVLGPVGRFPGSKHVVSYIGLAPTVNASADKCRLGHISKQGSALLRWVLGQAAPLATRGDAGLKRVYFAVLRRRGRPKAKVALARRLLVRLYVMLRDQIDYDEFCRRGRTQRPGLEPARIPM

SEQ ID NO: 70522 - protein, 350 aa, unidentified
MKIATVGIDLAKNVMQVHGVDERGKTTLKKQIRRDQLLPFFANLAPCLIGMEACGSAHYWARKLEALGHTAKLMAPQFVKPYVKANKNDAADAEAICEAVGRANMRFVPAKDGEQQAVLSLHRARQGFVKARTAQANQIRGLLSEYGIIIPKGIGHIAKRLPEILEDGENDLPGTLRQLLQRLGDHLKELDRQAGELEVQIQLWHRKSDASRKLTAIPGIGPITASALVASVGDARSFDNGRQMAAWMGLVPRQHSSGGKPTLLGISKRGDTYLRTLLIHGARSVVRVAERKVAAGDSWIKRLLGRRNPNIAAVALANKNARTVWALLAHDRSYEADYGMAHRTRICQQA

SEQ ID NO: 70523 - protein, 368 aa, unidentified
MDSSCDSVGIDVPESLLLKQEEEPIMGNDTRIAVDVAKAVFEVAISNRPGHVARRERLQRVEFLPFMAQQPAATVIMEACGSSHHWGRKLLALGHHVVLLPPHHVRPYVRGNKTDRTDAKGILEAGRNEDIQPVPVKTVAQQVLTSLHRLRSGWVSERTARINALRGLLRELGVFIPVGARQVVPAVWMLIEDADSDLPDPLRSILAEACQEIREIEARIKTVERQLEATAEQLPVVAMLFTIPGIGLLTATALVAFLGDIRRFPSGRHLASYLGLTPREFSSGLKRRLGRISKRGDGYLRTLLIHGARSTLLHARKQQPDRLREWAHNLEKTHVHNKAAVAVANKMARIVWAVWKHQTPYGSLPKAA

SEQ ID NO: 70524 - protein, 355 aa, unidentified
MDSRKYIGMDVHQASISIAVRDANGKLVMESVIETKAATILECIRGIRGNLWVGFEEGTSAAWLYDLLKPHVAQVIVCDPRKNALLKTGNKNDRVDARKLSDLLRAGLLTPVYHGESGVRTLRELSRSYLTVTKDLTRVMNRLKALYRSWAIPCAGEKVYSPRHRSAWLEKLSEVGVRRRAEQLYQQLDMLLQIRREARRELLTESRKHPAQELLRQIPRLGPIRVALVIALVQTPHRFRTKRQLWAYCGLALQTRSSAEYQFTGGQLQHSQKLPALRGLNINHNHDLKNLFKSVATNVSTSTGPLGDFYRSLLVKGMKPAMARLTLARKMAAIVLTIWKKGERFDPGQLKRQAA

SEQ ID NO: 70525 - protein, 495 aa, unidentified
MTVRAPPAERLMEASAEALPSVVGRCETSRLPRGGWSTDALILPAEGHRRVAAIRSVADARAFAPVPGSARRRQPRLLAGLPQRSPFSLACGLDGMEWLPRFGGGCGPGPRQRTVRGLLGRGCLPGLSDMCGEAPVFIERTSVGLDVHARSVVAHALDGETGEVFTGRLVPGVEPVTAWLAGLPGPVAVLYEAGPTGFGLARGLRAAGLRCEVAAPSKLQRPSGDRVKTDARDAEHLCRLLRLDEFTAVAVPEAATEAARDLVRAREDCRTDLMRARNRTSKLLLRHGIVYCGGNAWTNEHLAWLARQRLEEAPSQWALEESYDQVLNMVARRDRLDARIAELAADSAWTPVVRRLGCLRGISTLTGFALAVEIGDWSRFDGNSIGAYVGLIPSEHSSGKSRALGPITKTGNKHVRRLLVEAAWHHAPAYRPGKTMRDRWDLASPAARARGDAGNRRLHNRWVRFQTRKKQTGIANAAIARELAGWCWSLAMIDD

SEQ ID NO: 70526 - protein, 341 aa, unidentified
MSIVGAFDVHRRQLTFDYLDTVTGEVKRGRVAPADREHLRAWLARFSGRGDVEFALEGCTGWRYVVEELAAAGVGAHLAEPADTAALRGKKRHAKTDKSDARHLRVHLMAGDLPESWIPPGHVQETRALVRLYKDLLDERGGWQQRIAATLFHQGAPLAASAGIAEGRAPAGQAGLSAAGRQAVETGLRQIERLSGELDPLRRQLGMISRRQPGCRALAATHYGIGPLTAVVIWAELGDVHRFSSSDDVIRHTGLDITVYSSDAKRSAGHLSRQGPGLLRWALYEAAKCAARPASPDYRYYTAFRARRGAGLATLSVARKLARRCYHTLRELGEEALAPAA

SEQ ID NO: 70527 - protein, 403 aa, unidentified
METVFAGLDWASQVHAVCVIDARGSVCKQWEVTHDADGLRALLHQLHALHVACIAIERPSGLLVDALVEGGLQVVPIHPNAVKASRPRYRSHGGKSDASDAYLLADLLRPDGHRFKPLAAQSDAIRALRALVRGRDDLVAARVQLANQLRCLLQSYWAGAAEIFADVDSPIALAFILRYPTPEAASHLGPKRMAAFCAQHAYSGRRSAEDLLQRLHHAPSVTLGELEMDAKGELACSLARTLSTLVDQIRLLSGRIEHHIAASDDGRILMSFPRAGRICAAQILAELGSVRERFDSDEHLAAEAGVAPVTYASGKHRAVAFRWACNHRLRYALTTLADNSRHASAWAAAVYTKARGRGCNHPHAIRILARAWLRVIWRAWMDRKPYDPAIHGSLQNLLKTAGG

SEQ ID NO: 70528 - protein, 349 aa, unidentified
MRFYNQPHRFYAGGDLHARTLFLHILDDQGRTRFEQNLAASPERFLEAVAPFRDGLVVGVECMFAWYWLADLCADEHIPFVLGHALYMKAIHGGKSKNDRIDAGKIATLLRGGMFPQAYVYPRELRETRDLLRRRTFLVRQRAQFFTHIQNTNNQYNLPPLTKRLSYARNRTDPAIVERFPFESVQRSMRSDLKMIDVLDDETRELELYLTRHAKIDDPQTYHLLKTIPGIGPILALILLYEIHQIERFPEVGNFLSYARLVRCAHESAGKVKGFGNKKIGNGHLRWALGEAACLMLRCHEPAKRWLQRKGKKVGKPTALGTLAAKLGRTVFHLWRKQQAFDARKFLTS

SEQ ID NO: 70529 - protein, 318 aa, unidentified
MEGTTFVGVDVSSERLDVGLWPSERTFAEINDPEGIARLAGHLAELGPQIVVLESTGRLGVPLALELGERGLPYRIVNARQVREFARAMGKLAKTDRIDAVILARWAESAKLEPRALPDLARRELRALVMRRVQLIETLTAEQNRLRGETVPTVLKSLADSIAWLKRQIAALDEDLDRTIRKNPEFSALNEQVQSVPGVGPNTARMIAASLPELGRLNRQKIAALVGVAPLNRDSGKRQGKRFCWGGRAEVRSALYMAVLAAIRHNPIIRAHYTHLRAKGKAAKVALVACMRKLLTILNAMVRDQTRWRQPLTAAPVA

SEQ ID NO: 70530 - protein, 495 aa, unidentified
METISIRRVYLSAHPGRRDTAEGEPVSQIKTKQKRKKKEAKVLQLPVIRKDAAGIDIGATLIHVAVGPGRDEEPVRTFETFTRDLKAIAVWLRTAGVKTVAMESTGVYWIPLYELLESEGFKVLLVNAHHVKHVPGRKTDVSDAQWLQYLHSVGLLQGSFRPTEDICAIRSLGRHRESLVQTSSQCIQMMQKALTQMNLQLHNVISDITGASGMRILQAILDGERDTEHLESLCDKGIKAKPEVIMGSLEGNYRSELLFILGQNLKRYKDLQSLIGDCEKEVGRLIDAAPAKVNLADKPLPPATKRGSKRSASAPPCLPDLREKQYRMLGVDLTQVPGINTQTVQDFIGEVGPDLSRFRSASAFSSWITVCPHNKISGGKKLHSKTRKSKSRAAKAFRLAAQSLAHSDEALGEFYRRMRGKFGPPKAITATAHKLARIVFHMVTTAEPYDASVFTRAQEKHRLHQENRLRANARKLGFQLIPIQLPSDNQGVVVP

SEQ ID NO: 70531 - protein, 332 aa, unidentified
MENFYFIGVDVSKKKLDFCVMFEGKVVHEEETANHQNAIMALLHQFEEDYGIAGGQMLVCAEHTGQYTFPLACACKAVECKLWLENPAEIKYSSGVQRGKNDKVDAKRIAIYAKRFQDRVQYYERPTEDIERLKQLESERTLYVTDLAKYKGQMKDQKDYMPRKLYERKMKRLQTLMDDLEKAIQAITYEMDEVIASCPVLCRQRELLMSIDGVGRVVATNMIITTEAFTRFDDPRKFNCYAGVAPFSYSSGSSLHSKAKVSHRADKVMKRLLHLAAVAVTHRIDGELKKYYERKVAEGKNKMSVINVLRAKIVARMFAVIKRNEKYKPILS

SEQ ID NO: 70532 - protein, 345 aa, unidentified
MKKFIGLDIHSATFTMVVVNEKGKVERQCRKPTTEELLMREVGSIVGDKELMLEESHMAQWAKCILDPCADRLIVCDPVRNRYIAAEDFSNDLTSATKLAELFWMGKYKEVYHPDDGLLIELRRVFYHYRHLDSQLTQCKNRLKATFRQVAVLSGGTGIYQPEQRDRWMKRLEEYPAMQFQARQLYGLVGLLQEDKSEARIRLVKAAMKHEAFAILTTAPGVGNILASAYIAIIGTPHRFSHRNKLWKYGALGNVYHESDNHVYRDGTSRTGNRELKRVVSQQMQACVFRSRTPNRFKKKFCEMIAAGKNSRTARRQVRRCMLSAIRSMWMKGEPCRDKLIDINT

SEQ ID NO: 70533 - protein, 351 aa, unidentified
MLKMPSACATENESIVSVGLDVHKESVQVCVLEATGRVLRNRRVTNDVTALVATIRGLGRVSGLALECGTGVAALADALIQATGWDVHLCHPGYVRRMRQNPDKTDLSDAHLLADLVRVGYLPRVWLAPPAVRDLRAAVRYRQQLVDRARNTKLRIRALLREHRVPDVPRSLWSQRGLAWLRTVPSLPPQAGWVLENHWDDLVPDTARLARATTRLKEVAAAEAWILGLLTQPGIGLVTACVMRAEIGYVGRFRTAKQLGRFCGVSPCNASSGNRQADAGLVHGCRRLLRDTLIEAAHRLSRHHPRWKAFKAQLKARGKAGSVIAAAIANRWTRSLFHQLRAVETAAPVAA

SEQ ID NO: 70534 - protein, 486 aa, unidentified
MQKGHKRDKKVVNTPEAQSTAGLPVVHRRAAGIDVGSTFHVAAVNTELDPDPVRSFNTFTGDLNRLADWLVALGVTTVAMESTGVYWIPVFEILEARGLEVLLVNASHVKNVPGRKTDFNDAQWIQRLHEHGLLRGSFRPSEDVAVLRAYVRHRVRLVELAASSIQHMQKALMQMNVQLHHVMSDITGVTGMKIIRAIVDGERDPAVLAAYRNERCKSSEAEIQAALTGNYRPEHVFALQQALELHDIYLIKIRACDERIEAALKVLHRHPDVPNAPEQAHAQEQTETEPALPDKRTKTVRRKRKAPQRNKHDPSFDITRVLAALLGVDLTEIHGFGPNVVLLLIAECGTDMSRWATVKHFTSWLTLAPGCKISGGKVLSSKTRRSANRAAHILRMAAVSVGKTTSAIGAFYRRLAARVGKGKAVVATARKLAVLFYNTLRHGTAYVDPGATAYEERYRQRSVDNLRRRAKGLGFELVPAGVEGVS

SEQ ID NO: 70535 - protein, 404 aa, unidentified
MKGPIVSIDVSKGKSDYQAFKNLNVKYTGSRSIKHTKEGFDEIVNLVREMEKKLEAEVCVVYEATGVYHRVLKKVLEDNNIKQFIINPLLSAKTRKNDSLRCPKTDKLDPKSIAKTYYSHSLHNSHKPETIYHELRELSRYYEDILVHIRKDKVAFRAQLDIVFPGYDTLFDDLYSPVSLTVIEKYPHPEMLQKKKINTVSKVIQSKTCHRQAASDTMADKAIEYSKTIYSGCDKDDIEVLILQRFIKKLKEDMAEAERTIGEMIKLAQELPDFSIIKSIPGIGDNLAARIIAELGDMTRFKKKNELVAFAGLDPRISESGQNDGDHMHITKKGNKRLRCLLYLAVTCSIRLKRDNNSIKDFYIKKKQQSNPMCSKAAKTACASKLVRIIYSMCKTGELYQYNK

SEQ ID NO: 70536 - protein, 413 aa, unidentified
MNVLHPRCCGLDVHKSSISACILLREGGRVQKHQRRFGTMTQELQELAEWLRQFGVTEVAMESSGVYWKPVWNILEGQFTIVLANAQHIKNVPGRKTDQKDAEWIAQLLQYGLLRASYVPCEIIRDLRDLTRMRASLSQEASRISSRIQKLLEDANVKLASVATNVLGKSGRAMLQDIITGEDNPEQLASLALGHLRVKIPQLQLALEGKIRFHHRFLLRRLLDQVQFVEHEIALLDERLEDIGRQRPDLAHAVARWDTIPGIDRVAAWALLAEIGDNMGQFPTAGHLASWAALCPGNHESAGKRLRGTTRQGSPWLCRMACQCAWAAARTKNTYLSSQFRRLAARRGKKRAIIAVAHTLIVIGYHLQKNQSNYDDLGGNYFDRIHSDGLKRYLVKRLQQLGHKVTLEPIETA

SEQ ID NO: 70537 - protein, 390 aa, unidentified
MQNVADRPGASTAICTSLGAIFVSLELSRLTWLVTSLSPGGGERMSRHSVTGGDVAALLARLTDLQGKAQVRTGRCFPVVVIQEAGLDGFWIHRALRKEGVESHVVDPASIAVQRRRRRAKTDRIDGEALVRALLAYKRGEPRVCAMVKVPTPEEEDRRRLCRELKSLIGERIRHVNRLKGLFFAQGITGYEPRRHDRRERLEELCTGDGRPLPPHLKALALREIEVLELLTRQIDTVKAERNALLAVQCTADTMPGRVEMLLRLKSIGPGIAGALWSEGLFRHFDNRRQVAAYAGLAPTPWQSGAIDHEQGVSKAGNPRLRAMMVELAWLWLRHQPDSALSRWFHERVRHNGGRLKKTTIVALARKLLVALWKYVTAGIVMEGAVMKPV

SEQ ID NO: 70538 - protein, 311 aa, unidentified
MDRQEMFVGIDVSKDRLDVHVHPSGEAFACARDAEGLDQLLAWFGPVKPMLVAIEATGGFETVAAAHLAAAGLPVAVVNPAQVRAFATALGKRAKTDPIDALVIAHFAATARPHPKPAPDETLQALADLTTRRRQIVAMIGAEKQREKRAPARLRKSIARLLKALQKELSEVEADIDDTMRGSPLWREKEELLTSVPSIGQTIARALLADLPELGELDRRQIAALAGLAPHTRQSGQWKGHSFISGGRSEPRSSLFIAAMVAIRHNPPLKAFYLRLTAAGKAKKLALIAVARKLLTILNAILRDKKPWQHA

SEQ ID NO: 70539 - protein, 406 aa, unidentified
MRMTASWSGSKRAYRIQVRGARSAPNGELPSDYTQTGTARRRSYQEEAAILRVILPPRAQPSRRCETQAPLSGKPPSCAKCFGPLTASPRSGNLIALAFEAGRDGFWLARWLEARGVEAHVIHPSSVAVSREHRRAKTDRLDTALLKRAFLGWLRGERGHCSMARIPTIAEEDAKRPNRERECLVRERTRIVNRIKGTLARLGIRDFRPTLRKSAERLATLHTPEGSLLPPNVSAELQRDLARLGFVVSQIKEIEKARLQRLEQHPETGPHAMVRLLARVVGVGIETADMLVHEMLSRPLGDRKAVARYAGLTGSPDESGAKRREQGLARAGNARVRRGMIQLAWRFLLFQKQSALAQWYRARTGDSRKGTRKTMIVALARKLLIALWRFVTTGETLEGVILRPAG

SEQ ID NO: 70540 - protein, 465 aa, unidentified
MGAGKMNRKQRKELGRKLQSANPGLEVVHPRAAGIDVGNGAHYVAVRPEQDAEPVRRFECFTADLHRMAGWLEACEVKTVAMQSTGVYWIPLYEILEQRGFEVYLVNARHTKNLPGRKSDVQESQWLLKLHTHGLLNNSFQPTAEIRVVRTYWRQRGEHVRGASTCIQRIQKVLTQMNVQLANVISDLSGLTGQAIVRAILAGERDPRKLAELSHPRILAGREQIAKSLEGNWRSELLFVLKQEMEMYDTYQHKIAECDRELEATLKQFAAPERASTEQPKIPNAKKTKRIQRNAPGFNLTSELHRITGVDLSRIDGVNAIVAQTIISEVGLDMTRWKTEAHFASWLGLCPDNRISGDKVLARGTRHVINRAATALRMAATTLIKSQSYLGAQYRRLRTKLGAPKAITAMAHRLARLVFRMLKYGQEYVDKGTQYYEQKHHEQQLHLLKKKAATLGFQVVETGVA

SEQ ID NO: 70541 - protein, 344 aa, unidentified
MKYYVGLDVSLRSCALCIVDSKGTVLFERDLPCEVSDITECLVEFPHPIERIGFEAGSMSQHLFFGLTAEGFDVVCMEARQVSAALSAMRNKTDKTDARGIAQILRTGWFSPVHMNSREAHGLRALLSTRKALLKKTMDLANEVRGLLKIFGVRLPQTVKHGSFDSVVRPMIEIDDILAHALVPLLDARVVLYQHYLELDRRVKRAASQDDVCMKLMTIPGVGPIAALSFKSAVDDPTRFKSSRTVGAYFGLTPRRYQSGEHDNPWRISKAGDRDVRAVLYAAANALLMRTMASSQIKSWGMRLMRTKGRRRAVVAVARKLAILMHRMWIDGSEFRQDQVGGMA

SEQ ID NO: 70542 - protein, 338 aa, unidentified
MSIVMGLDQHRAQITADWLDTETGEVKRARVTPADRAGVRRFLERFHGPELEVALEATTGWRFVVEELRRVGAAVHLAEPAETAGLRGPKKRAKGDRADARHLRELLMVKRLPESWIAPDHILDLRARVRLRHTLSEQRSEWQQRIQAVLYHHGCPQRRSLMVGDGREWLAAQPLPQSARGQVTVALAMIDALEAQIAPLDKELRAYARRQAGCEALMAHYGIGALTAVTILAERGDCTRFSSSRHAVRYAGMDITVHQSDQRRAPGHLSRQGPPALRWALFEAAQSACRERSPDRDYYGQAAERLGHNRACLAVARKLLKRSYHTLRELGEEALQPA

SEQ ID NO: 70543 - protein, 261 aa, unidentified
MTAAGIDVCKASLDLAVDGQPGVVGFVNNRAGIARLIKRLQALGATRIVVEATGGYEEPLLEACCDAGLWIARVNPRQARDFARATGELAKTDDIDARILALMARLFADRLRPYVAPPPWQRELRDWLRRRSQVVNLLQAQKQQAAMASAAVRKLAARTIAALARELAAIEKTMKALIHEHATPALRSSKGLGPVFQATVLALLPELGHLERRQIAKLTGVAPMNRDSGQGQGKRRIRGGRAPVRVALYMATLSAVRWDPM

SEQ ID NO: 70544 - protein, 349 aa, unidentified
MTEQRRSYAGECVYVGVDVHKETYTVTCVCHKQIVKTATVQAEPAGLAASLLRWFPGATLCSAYEAGFSAFVLHRALITAGITNIVVNPASIAVAANDKVKTDRRDSKRLAIDLADGRLRGIYVPTEAEELARLLPRTRAQIVEHRATIARQIKAKLHQFGLIAPASRRLISNRYLREIAAWSLPPELRVSLTLLAEQWRFTTRQLIEIRRLLRAQATAQAELEQVYRSVPGIGVVVARTLATELGDMTRFANERALFSYTGLTPSEYSSGPSVRRGHISRQGSGRVRHLLIETAWRALPRDTVLQEIFDRIAATRGKKRAIVAIARRLTGRIRACFRQGTTYAVGTYV

SEQ ID NO: 70545 - protein, 345 aa, unidentified
MNYCGIDLGKKSSHFHIVDGDRKTMTAGKFSNNVEAIRKVFAKRERLKIVIEASCKAFWMADRLNEFGHEVVVVDPGRTKAIGAARIKHDKLDARVLAELCQTGLLAAVDIPTQDQRLARLPFTSRDTLVRARIQMTNSVQSILDGEGVELPTVWKGNFSDIIRSVEASMPPTMVPIVARLLKGIDELSRLIDECDQEIEVVAEHDPNIKLLRTVPGVGVLTAAAYVHLIRDPGRFKYGRLVAAYLGLVPSLYSSGQTNVKGGITKHGNKQVRWLLHIAATALLRTKRDTALKRWASHLAERIGRKKAKSAIARKLATILWAVWSRRKPFETRLPVQETAAASAA

SEQ ID NO: 70546 - protein, 412 aa, unidentified
MEILYAICCGLDVHKDSITACLRRLGGRGPVTQELRPFGTTTGELLTLLDWLVAAGCTHVAMESTGVYWKPVFNILEGHFQQVLVVNAQHIKALPGRKKDTLDAEWIAQLLQHGLLRGSFIPPAPIRDLREATRYRKQLIRLRADETNRLQKLLEGGNLKLGSVASDILGVSGRAMLAALVHGETDAAALAGLAKGRLRKKQPQLVAALTGRLTPVQRALLGHQLAHVEYLDKAIATLDALIATLMAPYQAEAERLRSIPGIDTRGTENLIAELGVDMAVFPSDGHCASWAGMCPGHNESAGKRKSGKTRKGSKWLRAALTEAAWAASHTRSYLGAQYHRFARRRGKKKAVVAVGHSILVIAYHILKHGTTYREFGQDYFDRRDTARIQARLVARLQALGLHVTVEPMATAA

SEQ ID NO: 70547 - protein, 413 aa, unidentified
MSVEQISRSRTELNAPTAGIDWASADHAVAVVDAHGTQSVREMVEHTTAGLRRMTRLLSHAGVDEVAIERGDGPVVDALLEAGFTVFVIAPGQVKNLRHRYGAAGNKDDHFDAYVLADTVRTDRRRLHPLTPDSPATVTLRMTVRARKDLIAARVAMANQLRAQLEHVLPGAIKLFRDIDSAITLAFLTRFPTQARVDWLTQKRLENWLRTQHYPHPARAEQLHAHLAAATRGTVGDQAETRAHVTTALVAGLLALRAQIKALGKQIETQLLAHPDAVVFTSLPKAGVVRAARLLVEIGDCRGRYPTPESLTSLAGATPSTRQSGKVRIVSFRWAVDKELRGAVTDFAGDSHHANAWAADLYRKARARGCDHPHATRILARAWLHVIWRCWQDRLAYDPAQHRALQTVLAAAA

SEQ ID NO: 70548 - protein, 312 aa, unidentified
MTSEVFVGIDVSKRWLEVRGHGEAESRKIGNDPDGFTTLIEQMKAVGSALIVFEATGGYESRAVKALSEAGFAVAVVNPTRVRRFAEALGILAKTDKIDAQVIAHFASVVQPAANGRQTALEEQLAACVERRRQLLVELVAEKNRLSTCPACVRKGIEEHIAWLEDHIESLEAEIQTYILQKPEWQERAEIIDSVPGVGLVTATTMVAELPELGQLNRQKIAALVGVAPFNRDSGPKQRKRRIFGGRSGVRRTLYMAALSASKHNPVIRAFYESLLRRGKEKKVALTACMRKLLVIINAMVRKGEAWKVSPA

SEQ ID NO: 70549 - protein, 344 aa, unidentified
MTISILGIDIGKNSCSVVGVDEKGAVIVRRTMRRQTLIEFVSRLPTCTIAMEACCGAHHLGRLFVSQGHQVRLMSPEYVRPYVKAQKNDDRDAEGIAEAASRPTMRFVDLKSEEQLDVQSLHRVRSRLVAERTTLINQMRAILLERGLIFAAGRRKFESAVDKLLDEQSSSLSERVHRLVSELRDEWKLLDSKIAALNAEFLSLVQDDLTARRLTTIPGIGVLNATALIAAIGNASSFDRARDLGAWLGLVPRQFTTGGKPRLLGITKRGNVYLRTLLVHGARAAMPTLSQSDTPLGQWLRGLLSRGMHRNVVIVALANKLARIAWAVLRKERPFERAYGTTAA

SEQ ID NO: 70550 - protein, 358 aa, unidentified
MQRNEITFKGQRIFIGIDVHAKNWEVAIASEVGAVRRHSQKPSARELFEYLKKNYPDGEYQAVYESGFSGFSTYYALKEVGIGCMVIHAADVPTTQYEEVMKTDRVDAAKLARSLKAGQLRGNYIPEKQFIDDRSVVRIRRTIQKQLSGYKSRVKHLLHCHGVEMPERFSKVQTHWSRAFITWLKNDVRLMSDTRASLDLLVRQVEVIRGTLLEATRQLRKMSQTERYRRRHDLLRTIPGIGPVVSMSILTEICDVKRFHNEKEFAAYLGLIPTSHSSGEKTVHGEKTFRGNRLLGPMVVEAAWVAISWDAGLEAQYFQYRKRMKPQEAIVRIARKLSNIIFSVLKNEKEYVPYQAGN

SEQ ID NO: 70551 - protein, 355 aa, unidentified
MKQFKTLSFSGQDIYCGLDVHKKDWSVCIRDDERELRSFSQPPQPGVLTDFLRRNYPLASFHVVYEAGYCGYWIQQALSNEGMDCVVIHAADVPTTDKDRRQKTDLVDCRKLAKGLSEGSLRSIHIPSQQTIEDRNLVRGREQLVQDQTRYKNRIISWLHFFGIAIPEGYKKSTHFSKRFIDWLEQLPMGENAKISLQLKLGALQAIRHQLLLANGSLRKLAGSARYQEQVELLRSIPGIGITNAMIFLTEFENIQRFKSFDHLNSYVGLKPDIYSSSDTTIVKGITHRCNRLMRESLVESAWKAVAKDPALLMAYKEYKKRMNYNNAIIRIAKKLLRRIRYVLLHQTQYVTGIV

SEQ ID NO: 70552 - protein, 344 aa, unidentified
MSNITTIGLDLAKNVFQVHGTDERGRGVLRKRLPRSRVLAFFANLEVCVVGMEACGSAHYWAREISALGHEVRLMPPQYVKPYVKRGKTDAADAEAIAEAVCHPNMRFVAIKSAEQQAVLLLHRSRELLVRQRTMLINAFRGHLAEFGIVARQGPHHVRELAAVVGDIEDDRLPAIAREVLVTLLDQLRDTADKIDALENRLRVWHKTNAASQRLTTIPGVGLITATALIATAGSADSFRSGRQFAAWLGLTPREYSTGGKPRALGISKRGDGYLRRLLIHGARTVVRHRKTRAESHPKPWLDDLLKRRPKNVATVALANKNARTVWALLARGENYQENHMAVH

SEQ ID NO: 70553 - protein, 311 aa, unidentified
MDMIAVVGIDVSKDRLDVHVVPSEEAFFVANDAAGVEKLAGRLTELSAALVALEATGGFETLAAAQLAAAGLPVAVVNPAQVRSYADALGNRAKTDPIDAAVIARFAAASRIEAKPLPDKQTRLLADLVARRRQIIAMIVAEEARLKRAANRQLKKSIARLLTALRRELKSLDEGLDGQVRASPVWRIKEDLLSSVPGVGKAIARTLIAELPELGTLDRRQIASLAGLAPFTRQSGKWRGRSFIGGGRASVRAALFMGALVASRHNPVLKAFRDKLVAQGKPKIVAIIATARKLLTILNAIIRDQRPWQIA

SEQ ID NO: 70554 - protein, 413 aa, unidentified
MDTLFRRCAGLDVHKKNVVVCARIITDDGKLQEQFRTFSTMTSSLLGLKGWLTSLGVTHVAMESTGVYWKPVFNILEGAFEEVLLVNPQHIKNVPGRKTDVKDCQWIAQLLQHGLLRGSFVPARPQRELRDLTRQRAQLINEQTRVVNRLHKVLEDANIKLGSVASDILGVSGRDMLDHLARGEEDPQVLAQLARKSLRKKIPQLEEALRGHFTPHHRFQLKMLLDHLEFLERQIGALSVRIEECTRPFVTSEQKERLDGIPGVNATTIEAVVAEIGSNMDQFPTHQHLASWAGLCPGNHASAGKRKGGKTTKGNPWLRRALAEAAWAAARTKDTYLAAFYRRLAARRGAKRALVAVSHALLIVIYHMLKHGLPYQDLGPDYFDKLHSAGMERYLVRRLERLGYQVSLRPAAA

SEQ ID NO: 70555 - protein, 433 aa, unidentified
MLVVTTKGEGVVLEEDPQVEEIVARVAALDIGKAELVCCVRVPHEDKPRRRLQEVETYSTMTSSLLAMSDHLRCLGVSRVVMEATSDYWKPVFYLLEAQGHDVWLVNAKDVKHLPGRPKTDKLDAVWLCKVAERQMIRPSFVPPPQIRRLRDVTRYRIDLVGVRTAEKQRVEKLLEDAQIKLSVVASDIFGVSGREMMAALVRGQINPKALAQLARGRLRAKLGVLEEAFTGHFTDHHAFLLGTMLARIDALDADIAAIDAKIEEIIAPFALAVEKLDEIPGVGITGARVIIAEVGVDMSRFPTAAHLSSWARFAPGVKESAGRKKGRGTTGHGNRYLARILGEAAVAAGKTDTFLGERYRRIAKRRGKKRAIVAVGRSILVIVWHLLSDPETRFTDLGSDYYDNRTGPERKKRNHIRQLEALGYKVTLEPAA

SEQ ID NO: 70556 - protein, 409 aa, unidentified
MRDYLGVDWADQTHAVWVVDESGTKIAARTVTHTAEGLDAWGRELDEWRAQGSELWAAIERPDGRVVDLLLDHGVVVYPVNPKALDRARDRFRQSGAKSDPFDARVLADFLRTDHTHLRALQPSSEAAQELKLLTEDCQRHIRQQTRLVNQLTATLKAYYPRALEVAELTSALAREFLLAYPTPAALTALTERQWPRWARAHRLTEARTGELWAVLRRPQLPVPAHVVRAKARLMRALLEQLMPVMAAVAQYRKAIDDFFARMPAAQWARTLPIGKHGITAPTLWARLGDAPGRWESFRHLQAHAGTVPVTKRSGKQQRVVLFRFACDKALRYVVDQVAFLSLLSSAWARAYYDQQRPRGHSHRQALRALGAKWLKIIFVMWERHVPYDEQYHLATMTRQQLRRQNQIA

SEQ ID NO: 70557 - protein, 369 aa, unidentified
MVEHTLFLGLDVHKKTISVATVEGAAGAEVRFYGTIENTPEALRRLSKKLSQGGRQLHCCYEAGPCGYNVQRHLTRLGHRCDVVAPSLIPRKAGEKIKTDRRDAMMLAQTLRAGQLTEVWVPDQAHEAMRDLVRLRSQAMRDLRKTRQHLLSFLLRHERLSPYGHWTKMHRRWLGELKFAHPAQHLALEEMLQRIQRAEELCDRLKQAIGELVPQWSLAPVVQALQALRGVSLITAAVLVAEIGNFQRFDSPRQLMAYLGLNPSEHSSGATVRRGAITKTGNGLARTSLVEAAWTYRFPARVTQIIRNRMKELPEPIRAVAWKAQVRLSARYRSLIARGKSAPIAIVAVARELVGFIWAIARMVEPKFI

SEQ ID NO: 70558 - protein, 464 aa, unidentified
MKSRSPRVGRAADRLLVGDDVSSVRNDVRFLSASGDVLLGHQPFANDVPGYHALRECVLELLEQQGCTGVDFAGEATGWYWFHTFYALAHDPELAHVDVRLNLYNPRLTHAFKKALGSLEHSDPLDAHVIAERLRFARTQHAPVLDEVWLGRRLLTRHYFHLSHALAAEKTYFSAFLFLKASAYRQLKPFSEVFGTTSTAILTQYSTIQQLAALPILELEARLRDLSHNHLPQVEKNATRLHAVATHSFPVPPGMVAPLNRLLSSTLDHIRFLEAQLDTLQAAIADAFVGVPELDWLMSIPGIGLIIAACLLAEISPWERFLEGDLVDRHTGRRRPKNARDAEAALAKWVGLWWPRNQSGAFTGEITRLRHEGNRYARYALTQAAHCLKEHSADYAAFYSRKFAESTTHAHKRALVLTARKAIGLFVALLHTGQSYRVPEPYRNVLSPHQARQLADDPTPPDDT

SEQ ID NO: 70559 - protein, 347 aa, unidentified
MTYNHPHRFYCGVDLHARTLFTHVLDAKGKTVFEQDLPADPAAFLTAIKPFRKDLVVGAECMFAWYWLADLCEDHGIPFALGHALAMRHIHKAKSKSDRIDAGKLAAMLRGGLFPLAYAYPKAKRQTRDLLRRRSFFVRRRAQLIAHVVNTNTQFNLPPLAKKLTYKANRTPELLDRFTDPSTRLMVSADLALVDHYDEQIAELERHLVKHARVDDPVTFGLLRTVPGIGPILGLTLLYEIDAIRRFPEAGNFLSYARLVRCEHSSAGKVKGLGPKKVGNAHLKWAFSEAACLMIRAVPAVKSWVQRQERKRGKRKALAVLEAKLGRTAYHLWRKQVPFDLKRFLKG

SEQ ID NO: 70560 - protein, 341 aa, unidentified
MQHIAIDLGSKESQICIRTEQGEILHEGKVQTSSLDRYLKRQPQSRVILESCAEAFRVADFALSCEHQVRVVPATLVRSLGVGARGIKTDRRDAQVLSEVSCRIDLPSVHIPTDVARQRRSMCGTREILVASRTALICCVRGWARTQLLKVRSGDSETFVKRALDATATKPDGIPEYIERLLTAINSLHEQIAAADKELDQLTEQEPICQLLMSVPGVGPVTSMRFVAAIDDVSRFANAHAVQAYLGLTPGENSSSTRQQRTGITKAGPAPVRRTLMQAAWNIRRLRPMDPISQWAMEIEKRRGKFVATVAVARKLAGILFALWRDGARYEPNHQLRKANK

SEQ ID NO: 70561 - protein, 449 aa, unidentified
MREPQEIQDEEYEQVVGWVAAVDVAKASGMVCTRVPDPSRPGKRVTKVWEVDATTNAITELAGHLAGLGVEKVTVESTSDYWRPWFYLLQAAGLSVQLVNARDVKNVPGRPKTDRLDAVWLAKLTERGMLRPSFVPPAEIRQLRDYTRLRVDLTHERARYWQRLEKLLEDALIKVSSVASTLDTLSVRDMLEALIAGERDPGVLAGLARGRMKAKHGALAQALTGRFDVHHAELARMLLDQIDALGAQIGTLTARIQELIAAIPAAQGVDADGTTGPGAGTGPGAVVLPAVARLDEVTGIGLGAAQVVIAELGLDMGVFPSPAQLVSWTKICPRTIQSGAKTRAGTTGKGNPYLKGVLGEAAAAAAKTDTFLGERYRRLVKRRGKLKALVAIARAILVIIWHLLADPAARYHDLGAGYYASRIDKAKKARNHIRQLEALGFTVTLAPAA

SEQ ID NO: 70562 - protein, 430 aa, unidentified
MKKNNSNSQTNSDRAGKPGKARGPVQRDAKEVMAELVARLSQKLEPRSAAARAGEGRQQDLPGPNRDRLTVGVDLGDKWSNFCIVGLDGEKLTEGELRTTQEDFAEFFQSLAAARVVIEVGTHSAWARDVVAGCGHEVLVANPRQMEGPKRRKRKNDRIDAHKLARIGRMDPQSLFPVEHRSVEVRQDLVAVRARDALVAARTQLINTTRGLVKSMGGRLPKCSSPSFPHKVEESLPAEVREALLPLVRLVETLSDGIAAYDEKMEKLGSEKYPQTKLLRQVKGVGPITALAYILTLENPERFAQSRDVGPYLGLVPKQEDSGDSQPQLRITKMGDMMLRRLLVGSAHYILGPFGPDTDLRRYGIRLSERGGKNAKKRAVVAVARKLAVLLHSLWVSGEVYEPLRHALPKATEEEAVRHAPAEATEKEAA

SEQ ID NO: 70563 - protein, 326 aa, unidentified
MTLSHLTDNIFVGIDVGGAGLDVAWHRGDSAHYANRPDAIATLVERLRTGPHVTRIVLEPTGGYEKPLVKALRQAQLPVEVIHTTRFNAYRALVGVKAKSDTSDARLLASYAAAPDEVRGRKAGYVELPEDAIREELSELASRRDQLKHMIHAETCRLGTVRLAGLRQMITAHLETLRAEDKQVHRMMLELVRQRIDLRRDQRLLKTIKGIGVKSALVLLASVPELGRIDNKAAAALIGVAPFVRKSGTMIAPARIHGGRAAVRSILYMAAVTASRHNPVLRPFYERLIAKGKPPKLALIAVLRRLVVFANAVLKSGQAWRGAIAA

SEQ ID NO: 70564 - protein, 318 aa, unidentified
MDVHKESITACIMDKEGNVVRQHTFPYNKESIKAFLFGISNAEIEIAIEACGIWRGVYNVLKELGYRVKLANPNKTHDIACRKKTDKVDSRILADLLRANYLPEVYIPDEEMLRLRDITRHKSNLTRLRVEIQVKIKGYLLRKGVKYGKIWNEKALSKLAEDDPDIKNLINVYWSLREEEKEVMRRIRKIAMNMRKANLLMSMPGIGEFSSLMILAEIGDIRRFESPKQLISYAGLCPGIYQSGSTERNVRNNAVNKWLKWIVYECSGRATMLDSRFQEYYYKIKQRKGFKTARRAVARKMLTIIWYMLTNEEPYRNN

SEQ ID NO: 70565 - protein, 371 aa, unidentified
MKSILSVGMDVHKNSFSLCAYDGYTGEIVSESTFASDVKLVIKFIEALKSRYENDVEIKCGYEAGCLGYSLYKLLTARGVDCVILAPTTMQVSAKNKMVKNDRMDALNIAKNLASGSYKTVYIPDEEDVEIKEYIRMIHDFKKELKRVKQEICAFVLRHGYQYDGKSKWTIRYMNWIRELEMSEIQRETLNEYIAEMENLNDKIDRFMNRINEIYQSERYHEKVSKLRCFKGIETFAAMTIQVETADFERFPSAKAYASYTGLTTGEHSSGDKNNRIGITKQGNTVIRKTLVECAQSLVKGNVYAKKSQRLKSRQKGMDVNIIVYADKATERLKKKYQKLIERNVPRNKAIVAVARELACFIWGMETGNIH

SEQ ID NO: 70566 - protein, 400 aa, unidentified
MLSIGIDVSKGKSTVCGMKPGGEIVYAPFEVQHTREGMSELVSLLRGSGEEVRAVLESTGSYHCPVVAALLENGIFVSVVNSLRMKRFCSQSIRKVKTDRIDAMQIALYGLAYWQELQPTRLPEDTYRELQLLARQYYQMTSMLIKAKVDFNAICDQVLPGMQELMNDHAGRHKLSDFVLRYRHTTHILEMGETRFRKDYCKWAEKKGYRNCERMAVLIFATAQNGIPVLPNAPSTQIVITEAIRVLHTVEASRDAILTQMQALAKTLPEYSLVREMPCIGDTLAPRLIAEIGDVRRFHSKRALIAYAGIDAPPYQSGKFCANNRHISKRGNRYLRKTGYEVMQSYVMHKPANDPIFTFIEKKRGEGKSGKLAMVAGLNKFLRVYYGKVTELYRSLPAIE

SEQ ID NO: 70567 - protein, 420 aa, unidentified
MQSARNTLPEEPPGDVTCGIDWARDDHAVSVVNARGREICRRSVEHSAAGLRELLAVLARNGAREAAIERTDGPVVDALLSAGITVVVISPNQIKNLRGRYGSAGNKDDRFDAYVLADTLRTDRARLASLTPDSPATVALRRACRARKDLVSHRVGLASQLRAHLRNAFPGAVGLFAEIDSPISLRFLARFTTQDRADWLSPRRLAAWLASTGYSGRTDPAVLHARLAAAPRGATGEDGTAQACVTAALHAVLTTLADQIKALSGQIGEQLARHADAHIFTSLPRSGTVRAARLLAEIGDCRARFPTPEALACLAGAAPSTRKSGQMRSVSFRWSCDKQLRDAVTDFAGDSRHASPWAADLYQRARARGHDHPHAVRILARAWLFIIWHCWQDGTAYNPAQHNALQRLLTQQAKINNLEA

SEQ ID NO: 70568 - protein, 347 aa, unidentified
MKHFAGLDVSLDETTVCVVDEAGGIVREARVPSEPEALVAFFRGLGLAMERIGLEACSLAAWLHEGLTAAGLPAVCLETRRAKAAMGAMPNKTDRNDARGIAQIVRTGWFRAVHVKSPACRSWRALLAARRLVLNKMRDLENGVRALLREAGLKLGRPARKELAARVRELVGADAVLSASVEPLLAIVATMAHELAQLTRRVLAIVRDEPVCRRLMGVPGVGPLTALAFRATIDRPERFRRSRDVGAHLGLTPKRYQSGETDVQGGISRCGDELARTALYEAAHSLLVRSRRWSSLRAWGMQVARRRGMARARVAVARKLACVLHRMWADDAEFRWGKQETASAVPG

SEQ ID NO: 70569 - protein, 350 aa, unidentified
MDTQSTASIPKLYVGIDIHKRSWKIHCSTDLFAGKSFSMPPFPEQLFQYVNKHFHGYEVSTAYEAGCCGYYAHRSFESYGWKSLVVKDIHRKGKERHTKTDKIDAQLISRELKDDRLESIVVPDKKREELRSLFRRRNDLVKEMRRIKSMIKMQLLYFGIKEPEEFDNDHWSHKYRNWLDNLSFEFDTARETLNSRMRSFRFTDQELRQVTNQLRAYCRKHYKKDYYLLKSIPGIGGIVAVGILSELGDLRRFNSLKHLAGFVGIAPGMHQSGASNKAMGMNPRSNRLIRSYFVEASWQAIRTDPVMQAYYRTHLGKEDKKIIIKIAHKLLSRTLAVIKTETPYEIGVVA

SEQ ID NO: 70570 - protein, 350 aa, unidentified
MLIIGCDYHPSVQQIAFVDTDTGELRERRLGHREEAEQFYRELKQQNLTVRAGMESSGHSRWFERLLQELGFELWIGDPAEIQSKRVRKQKTDRQDAQLLLRLMMEDRFPRIWIPDAVNRDLRQLLWHRHRLVQMRTRVMNQLHVVALNEGLRRKKALWRPTGRTELEAIALAPWATHRRQDLLDLLDQLTPKIQQLTQALEEEVEKRPVTRLLMTHPGVGPLTALAYELVIGTPERFHCGKQIASYVGLVPEEKSSGDRRRLGHISKQGNALLRFLLVEAAQVTVRSQPQWRSKFLHLAVRRGRKIAKVAMARKLAVHLYWMWRQGRDYGQLQKFGSHVGEPGNLDGEQ

SEQ ID NO: 70571 - protein, 392 aa, unidentified
MIYVGIDVASDKHDFFIMSDQGEIYTKHSVNIPNTDVGYKKLHNAIQEFCGEANDFDVRIGLESTGFYHKNLLHFLLRNNYSTMVINPLLVNLYKKSRKVHIAKNDNLDAMYICNYIMEPSVEFKPYTLISYHTETLKVLSRERFSHVEDLRLAKINIYKLLQQTFPEYLKLFSKVYQGSAIHILEKYPYPSLLAKAHVNTITKMLNGKCKASAFELIQAARVSVGIKSEHLYFLLSQGIKRLKYISSCIDEYDKQIKSYVDSICPVILSIPGISYVTAGLILGEIGDVNKFKNSEHLISFAGLDLIVYESGKYKVTHTSISKRGSNFLRYALYQVARVCWIHDPMFNKYYLKKQSENKHYYVILGHIQKKMVKVIYSVLKNNKPYSPQITI

SEQ ID NO: 70572 - protein, 482 aa, unidentified
MMSEAVGPEVGHHSGASEPELEFDRAVQSTLDCRHGSPFGPGARLLDFMTRTATPTAQLRLEARMEVLHERCAGLDVHKNTVVACIRVLQADKVEREVRTFKTMTRDLLALSDWLEGHGVRHVVMEATGVYWKPVWHILSDGEFELVLANAAHVKNVPGRKSDVSDAQWLADLEAHGLIRPSFVPDTATQELRSLLRTRKQLVRERTSHTLRIQKTLEDANVKLDSTISNIIGLNGRRMIEAMVAGESNPQTLAGLADRRIKASPQELCEALRGRLTKHHRFLLGLHLGHIDAINAAIDRIDGEIEADLQPFRDAVGLLTTIPGVSDLAGQGIVAEIGRDMSRFPTAGHLISWAGLCPRSDESAGKRRSTRVRKGAGWLKTLLVQCAWAASKTKATYLHSQFVRIRARRGEKKAIVAVAASILTAAYHMLSTGTNYHDLGPAHFDRRRKEARVRSLLASLRRLGYVTNIAPLQPDPLPVVSC

SEQ ID NO: 70573 - protein, 353 aa, unidentified
MNEQGRRVIGGVDAHADTHHAAALVDRGALLATRSFEVSAAGYLQLLAWLRSYGEIDRVGVESTGSYAAGLTRSLVGAGVRVLEVNQPHAHTRRRRGKTDAIDAELAARHALSLVATVTPKQTTGIVEAIRQLRVARDSAVKSRSVAMLQLGDLILTAPSALREQLAARKTLKGKASLCRRLRPDTSRLDDPLNAAKLALRSLARRVVLLDAEIAELDAQLAPLVATAAPRTTALLGISTGHAGQLLLTAGQNIDRLHNEGAFAALCGASPIPVASGKRGRYRLNPGGDRQANRALHLIAVCRLRYCPDTRAYAQRRSTEGKTNKEIMRCLKRYIAREVYATLRDDLRSISPS

SEQ ID NO: 70574 - protein, 412 aa, unidentified
MEVLYPRCCGLDVHKSSITACVLLAQAGKPLKHIRRFGSTTRELLELVAWLREFGVEHVAMESTGVYWKPVWNVLEGHFQVVLANAQHIKAVPGRKTDTKDCQWIAELLQHGLLRASYIPSVMIRDLRDLTRARTSLSQEHSRIASRIQKVLEDANIKLASVASNALGKRGRAMLEAIIGGEESPERLADLALGHLRLKIPQLQTALEGRVRDHHRFLLRSLLRQLQFLEAEIELLDARLDEIGREHLDLTEALHRWTTVPGVDRVAAWSFIAEMGIDVTQFPTAAHLASWAGVCPGNNESAGKRISSKTRKGSPWLRRMACQSAWAAARTKNTYLSAQFKRLAARRGRKCAIIAVAHSILVIGHHLQRRCCTYADLGSSYFDRLHADGLKRYLVRRLESLGHAVILQPRTT

SEQ ID NO: 70575 - protein, 405 aa, unidentified
MACVRVMSGATAERTCRTFGTTTVELGELRDWLDGNGCTEVAMEATGVYWKPVWNILSDGRFDLILANAAHIKAVPGRKTDINDAMWIADLVACGLIRPSYVPAERQAELRSLLRTRKQLCREQASHVQRIQKTLEEANIKLASVISDILGVSGRRMIEAMIAGVRNPHRLAELADRRLKASPKQLYDALHGRLTDHHRFLLQLHLGQYDALSTAIEQIDRQVDTAVAQLDEEAATGQASFRALIALLCTIPGVSTLAATTILAEIGRDMSRFLSAGHLVAWAGLCPGQNESAGKRRSAPLRKGAPWLKTMLVQCAWAAKRKKDSYYRAQFHQLSRRRGPQKAICAVAAAILTAIYHMLKNGTVHHDLGANHFDRRPTQVRIKHLIARLAKLGYQVQLQPLPEAA

SEQ ID NO: 70576 - protein, 343 aa, unidentified
MNQYIGLDVSLKDTAISIREDGKRIWRGKCPSDPKLLAQMIRRKAPRARRVVFETGPLSTWFYHTLTSEGLPAVCIEARHAQKVLNETLNKTDANDADGLAQLAEAGFYKAVRVKSFDAMMARTLVAAREQLLNISTQLGNQIRGLMKTFGLIIPRAKGRVFDGEVRKLLNGNSELAKIILPLLEAWHDVRKRAADLGRQLLIVARGSEATKLLMTIPGIGAVTAVSYVTAIENPENFRTSRSVGAWLGLTTRRYQSGEVDYNGHISRRGDNRLRGLLYEAATALLTRTSARTESSLKSWGLKLRERLGFKRAAVAVARKLAVIMHSMLKTGEVFNASAGATV

SEQ ID NO: 70577 - protein, 338 aa, unidentified
MEQITTIGLDLAKNVFQVHGVGAAGKVLVRKQLRRAEVLRFFAPLPPCLVGMEACGTAHHWARELTKLGHTVRLMPPAYVKPYVKRGKTDAADAAAIAEAVTRPTMRFVAVKTVDQQSVLMLHKVRDLLVRQRTMLINALRGHLAEFGIVAARGPGGVTAAIMTLHEAQDDLPDLARQVLHGLIDQMRVIGAEIAKAEKRIMAWHRASEASRRLATIPGIGPITASAIAAAVPDATLFRSGRQFAAWLGLTPRAHSSGGKPRLGGISKQGDGYIRRLLVIGATAVIRFARQDNASKTWAARLLERKPARLVSVALANKTARIAWAVLARNQSYTAPAV

SEQ ID NO: 70578 - protein, 403 aa, unidentified
MSAVDGPGAGIDAGKTHHHCVVIDAAGKRLLSRRVAGDEAPLLELIGEMTALAGQLGGELTWAVDLNSGGAALLIAVLVDHDQRLLYIPGRTVHYAAGMYRADGKTDAKDAAVIADQARMRHDLHVVHAGDPVSVELRILTGRRADLAADRTRTINRLRAQLLDYFPALERAFDYSASTAALVLLTGYQTPAALRRIGANRVETWLRNRKVRNPGTVAQTALEAANAQHTTVTGQDLAAAMVARLAKGVMALDEEISEIDTLIVSRFRQHTHAEVILSLPGFGIQLAAEFLAYTGGDMTAFGSADRLAGVAGLAPVPRDSGRVSGNLHRPRRYSRRLLRVFYLSAMVSIRCCPASRTYYDRKQAEGKRHTQAVLALARRRLNVLSALLRDGTTYQTAPNATAA

SEQ ID NO: 70579 - protein, 350 aa, unidentified
MMIIGCDLHTRYQQIAMLDTETGEEVERRLEHENGEARAFYSTLAGPVRVGIEATGYTHWFEGLLAELGHELWMGDAAKIRASVIRKQKTDARDAMHLLDLLRQDRFPQIWRPSPAERDLRQLVWHRQKLVWMRGAVKNQLHALAMGEGVCRKKKLFTAKGRKELEGLALGPWASYRRQELLRMFDEMAAATAKLDLAVEQAAKSQPLAVRLMTHPGVGPVTSLAFVLIIGPVERFERSKQVVSYLGLNPQEHSSGGKQRLGAISKQGNPMMRSLLVEAGHTAARFDPALKRMYQRLKFRRGASVAKVAVARKLAVRMYWMLRSTADYAQLVRMQGSPWATLVENSPSLG

SEQ ID NO: 70580 - protein, 400 aa, unidentified
MKGFLHMKLIGIDIGKNKHFFCIMDQQTGEIISQPISFSNDKEGFDFLVQKIKSYPKDSILIGMEDTGHYHFALLKYLLNLQYTVALINPKTTDFNRKMQGGITKNDKLDTINICDVLDTPERKKQYRITKVNSFDLYEQKQLTRHHHNLKEEENVYKNRLQKCIDIVFPEFNKLFNSKYGIVYMNILKMFGSAENIANTDIRTIRKCFEIEGRGNRISLTPERLKECAGSSIGISSSAEVIQIKHLTAQIELIEEQLTEIDKKIEEFSIQNNSPILSIPGISHFSGTSILAELGDISNYSKPSQIIKFAGVAPLHYESSQFNAQHTAITKKGSKYLRKTLYQIILPVIRHNPVFTKYYQLKISQGKGHRCAQGHCVRKLLRIIYHLLKTNQQFDPQLLR

SEQ ID NO: 70581 - protein, 394 aa, unidentified
MKLVGIDVGKNSHHFCVMDKETGEFNVTPTSFSNNKEGFDFLINSLKPYSKKSILIGMEGTGHYHVALLKFLLSNGYTVALINPKTTDLTRKMEGGITKNDKLDTITICDVLDTPERKKQYRITKVDRFDLYEQRQLTRHHHNLKEELNVYCNRLQKSIDLVFPEFNTLFSSKYSIVYMNLLKTFGSAEAIASTDIRTIRKCFEIKGRGNRISLTPEKLKECAKNSIGISSEVETIQIKHLVSQITLIKEQIAEIDKKIEEFSITNNSPILSIPGISHFSGTSILAELGDIGNYSKPSQIIKFAGVAPYHYESSQYNAQHTGITKKGSKYLRKTLYQIILTVINNNPVFKKYYLLKISQGKGHRCAQGHCIRKLLRIIYHLLETGQSFDPALLR

SEQ ID NO: 70582 - protein, 476 aa, unidentified
MTTPDYISPKIRVQIEEKLFSIINFKGRRAEEVKKTLVTAALTNDSVENKTKELGISPQTVRNYVEEQPQVIDQNNLHQGTRWKKTCKNINRLDINRIQGKTYIGLLVGESNTLLDWGNMVERETEAKSSATGVTNPYHRTEHCDKIHEYRCDKEVGVIGIDISKEHLITSRGRVRKYENNKKGYEEILKMKPCTIVLEPTGVYAIKPSQYFKEKGIKVLQVSPNVLSREKELRGKKTDFYDAEKLENMVNKAKEYDYNPLKELVTLYLFLKDIETKYKNRLKRALFLVSDNDKVSKDRLEKLAKGDFTQEVLYQLEYTPLVLEEIKILAKNLLEIQERLKEVRRMIEGQVPQDHVLLTIPGVGKLAAGIIIGIVGDVKRFPKPESFVAYCGLDPVVERSGRAVVSRGISKRGNKYLRSLFYFLAMRSYSRNPTLLKFYETHKDRLKGRKLYVALARKLARVVWSVWYNNKPYEPK

SEQ ID NO: 70583 - protein, 457 aa, unidentified
MRQRGKRTKGMEEAHPFAGMSQVNANAAGMDIGAEEIVVCVAGDANTQLVKAFGNYTVDLQNIGKWLQEHQVKTVAMESTGVYWIPLFEELERQGFECLLISSRSLRRVSGRKSDIQDAQWIQTLHSYGLLESSFRPQAELVALRTMLRHRAQLLEHRSPHIQHMQKALLQMNVQLSQALSDVTGETGLKIIRAIVNGERDPHKLAAMRDRNCKKSVEEIGKALTGTWRSEQLFILRQALELYDFYTQQVEACDVEIERMYALTRPDWEPGEVQTLSVRKRNSHSKNAPPNTGEIRKHLKRISGVDLSVVDGFGVSLAQTVLMEVGTDMGKFPSEKHFCSWLGLAPKHEISGAKVLKNKTLKTKNRAGQAFRMAAQSVKRADCVFGSLYRRLKSRLDKAQATVATAHAIARVVYRMLKYKVEYETISVEEYEQKYKEQQIKYMKKKAQKFGFQLVPA

SEQ ID NO: 70584 - protein, 342 aa, unidentified
MEHTTIAVDLAKSVFQVAVSQRAGHVDEERRLSRDRFLAFFAQRPPATVVLEARGSAHYWARQLQPFGHTVRLLPPHDVRPYGRRNKTDRTDAKGLLEANRNEEIHPVPVKSVAHQAIVSLHCLRSTWLATRTARLNTIRGLLREFGIFIPVGAHHVVPRVRALLGEPATVPLLLHTTLQAACDEIDVLEANMRTVERQLAALASDMADVTLLQTVPGVGLITATALVALVTDIRRFPSGRHFASFLGLTPREDSSALRRRLGAISKQGNVYLRMLMTHGARSLLWHAKAAVHPTSLQRWAVQTELRRGHNVAAIAVANTLARIVWAVWGQQRPFAADHRPV

SEQ ID NO: 70585 - protein, 386 aa, unidentified
MQKLNDLSRSLAPLEPDGTLIAVIEMSQSSWLVAGIVPGVERQPLKKLAADEIALLKLLHRWREEAEKAGRRIERTAVAFEAGRDGFWLARWLRTRSIEAHVIHASSVAVSREHRRAKTDRLDTELLKRAFLGWLRGERDHCKMVAVPTSKDEDAKRPNRERESLVGEQTRIINRMKATLIRLGIRGFNPKLKKAAGRLEDLRTPEDEPIPPNTMAELRRDMDRRRLVSDQIRQIEEARLDRLKQAPDDGPHAMLRLLARVIGVGIETADMLVQEVLARNMRDRRALARYAGLTGSPDESGTKRREKGLARSGNARVRRGMIQLAWRFLMFQKESALAQWFRARTENARGTRKLMIVALARKLLIALWRLVREGVVPDGVVLRPAQ

SEQ ID NO: 70586 - protein, 321 aa, unidentified
MTAILGIDVAKNKFDIALLRRCKYKSKSFENKPSGFESLIVWLKQHDVGTLHACLEATGSYGDALARFMFDAGHVVSVVNPARIKAFGESELQRTKNDKMDAKLIARFCEAMKPVAWVPDPPEVEHLRALGRRRDALVSMRTQEGNRLGVADSSVNTSIQKLISFLDDEIEQISKLIREHINNHPDLKKKRELLKTIPGVGDVTIEAILSEINAFEGFDTVEKVVAYMGLSPKEKTSGTSVKGKSSLCKIGSARLRKILYMPALSAIQYNPFVNALYSRLKAKSKNGMIIACACMKKLVHIIYGVIKNGKPFNSAYNLKTT

SEQ ID NO: 70587 - protein, 392 aa, unidentified
MVIVGIDIAKRSHNATIINSDGDVLLRSFSFKNDMNGFNRLLTHIEAYSPKEKKVVVGMESSSHYWVALHDQFVKRDYQVFVLNPIQSSALRNLNIRKNKSDPVDSLLIADTVRYGRFSPSNILESDLLSLRELTRQRFYLVDVASDLKRKIRALVDQVFPKYETLFSAFFCKSSCQLLLKYPTPSMINRVQLRTIEKTISKPSKYRFGLEKAKEIKQLAKNSFGSTTIEDSIGFIIQLQMKQLLEIQEKVDLLDEEIEVLFCLLESPITSVPGVGQILGAIIVSEIGDISRFRNASKLAAYAGMDPSVNQSGEYNSRNNRMSKRGSPYLRRALWLAASSAIHSDPALRNFYDRKRKAGKSHMTTLGHVSRKLLSIIFAILRDNKMYEPHIV

SEQ ID NO: 70588 - protein, 394 aa, unidentified
MIYAGVDIAKMDHVIDAVDDKGNKVAKPMGFKNTEAGFERCVAWLEGVAEDPGEVFVGMESTGHYWMACFAYLMARGYKVAVINPMQVKAMRRLKSMPRVKNDRIDSWLIAEVLRMGDFDVTRLATDEVQSLKMLTRYRQQLKQEQAAVKTQLICVLDAYFPEYADVFGKKGLFGAGSLAVLERCPTPAECGKVRASTLAKVLSEASRGRHGAERAADVKAAAKASVGITLGQDAASYQIKTMVGQIKSLEETVAEVTAKIGLLLQQVEPLVLTIPGVSTATGAQIVAEIGDVARFKSAAAVVSYAGLNSGVSQSGQFEAKGEPITKHGSPYLRRAMWLAADGARKKDPALKAFYEKKRGEGKCHRVAVTAVARKLCHIVYAVMRDQVPYDPDR

SEQ ID NO: 70589 - protein, 387 aa, unidentified
MQKPHDESKACLTAFVQDSTLTVVIEMSLANWLVAGMIPGVDRQPLKKIAPNPELLLQLLHRWRDEATKAGKEIARIAVAYETGRDGFWLARWLRARGIDANVIHATSVAVSREHRRAKTDRIDTAVLQRGFLGWLRGERGHCSMAYVPTVEEEDAKRPHRDRESLLKLRTSTVNRMKSILIQFGVRNFNPILRKAPENLASVRTPEGIPLPPNSVTALRRHMERFRVIKEQIKAIERTRLERLQRDPAEKLNAMVFLLVRIVGLGIETAEQLVHEILSRNLRDRKAVARYARLTGAPDESGSKRRDKGLSRSGNRRVRNILIQLSWRLLRFQPESNLVLWFKKRTANAQGSRKPMIVAFARKLIIALWRYVNTGLVPEGFQLRSAT

SEQ ID NO: 70590 - protein, 390 aa, unidentified
MPKYQDLSRSLAAFDQNSTLVAVIEMGSEGWLVGALVPGLKKDPRKKLSPDKQSLLALLHRWCAEAAKAGRAIKRVCVAYEAGRDGVWLARWLREQDIDAYVIHPTSIPVSREHRRAKSDRLDLRLLLRAFLGWLRGEPGHCSMVAIATVEEEDGKRPLRERETLTGDVTRLINRMKSLLVTHGIRNFKVTLKKAGEKLAELKTAWGEPLPPESLAELQRSFERLRQAKQQIAEIDKARRRRLEKAPEAGVHPMILILARVYGVGLMTAESLVREVLYRNLRDRRAVARYAGLTGSPDESGKKRREQGLAKAGNGRIRRALIQLAWRLLRHQPESALVKWYRARTADGRRDTRKVMIVALARKLLVAFWELVTNGTVPEGMRLHPAKVAG

SEQ ID NO: 70591 - protein, 347 aa, unidentified
MLHAGLDLSRKRLDICLLSGEGEHLDQLVVPPDVDSLRTLTRRIDEVHGEPVRAVVESMTGARIVHDTLEQEGWEVEIADAQKVKGLAPLACKTDRIDSLVLATLSQRDLVPAIWLPDPRIREERELARFRLHLVKHRSMLKHRIHSTLINFGRPCPVTDLFGVEGRRLLERLEVPEPWRGNVSASVVLIDDLERQINEANRRLRQGHTEHPYIPLLMSAPGIGWVLAFTIAAEIGDISRFSSPEKLAGHTGLCPRVNQSGDSDRRGPLSKHGPTYLRWALLEATMHALKHPAYSERYQRNKRRLGKQRGAKVAQIDIARRLAQAIWHMLTRNQGFAPRGAALRLAA

SEQ ID NO: 70592 - protein, 313 aa, unidentified
MATAVWVGIDVSKARLDVALGAAGELLSVANETRAIAGLVARLVELAPALLVLEASGGLETALVAELGAAQLPVVVVNPRQVRDFARATGQLAKTDALDARMLALFAERIRPALRRLPSEQERELKALVARRRELVEMITAERNRLGRAPKLLRKEIAAHIRWLEGRLKERDRDLDRMLRSSPLWREREDLLRAVPGVGPVLCATLLADLPELGALSRREIAKLVGVAPLNRDSGTLRGRRTVWGGRARVRAALYMATLVAVRFNPVLKAFYLRLRGAGKPAKVALTAAMRKLLTILNAMLKQRSPWRPPCVA

SEQ ID NO: 70593 - protein, 369 aa, unidentified
MVENTLFLGLDVHKKTISVATVDGSARAEVRFYGTIENTPDAIRLLCKKLSKDGRRVHACYEAGPCGSNVQRHLTRLGHRCDVVAPSRIPRKAGDKVKTDRRDAMTLAQTLRAGQLTEVWVPDQAHEAMRDLVRLRSQAMRDLRKTRQHLLSFLLRHERISPFGHWTKMHRRWLGELKFAHPAQHLALEEMLHRIERAEELCERLKQAIGELVPQWSLAPVVQALQALRGISLITAAVLVAEIGSFERFDNPRQLMAYLGLNPSEHSSGATVRRGAITKTGNALARTSLVEAAWTYRFPARITQIIRDRLKALPEPIRAVAWKAQVRLSARYRALIARGKSAPIAIVAVARELVGFIWAIARMVEPKFT

SEQ ID NO: 70594 - protein, 410 aa, unidentified
MKMAGIDVHKKVLMVIVVDTNTPEEKPVRRRFATMPSELQRLRIWLEEQGVEEAVMESTAQYWRSVWFELEPHMRLHLAQAFSNRAPRGRKHDFKDAERLVRRLMADELILSFVPSGEPRIWRSMTRMKLQLTRDRVRLQNQIECLLEEMRIKLSIVVSNLLGASGLRILHALANGETDPKKLAQLGGERLQCTEEQLVDALTGRAQPVHGEMLALQLQRLQLIDQQMARLNSMIAAAMKAHQDAVIRLAEVPGLGVDSAQQIIAEVGAQASTFASAAELTSWVGTCPGKEESAERNRSSRSAKGNKYLRRVLNQAAHAAVAKKGSYFQMLFRRLLPRLGYQSAVWAIAHRLCRLVWKILHEGVRYIEQGGEADPRTKKKRAQMLARALRKLGYQVTITPINQITATNEI

SEQ ID NO: 70595 - protein, 343 aa, unidentified
MGLYGGFDLHSNNSYLGIKNEEGTVVFGKRLKNNKQLIIDTLEPFRADMKELCVESTYNWYWLADLLEDNDYNIKLANPLAIQQYKGMKNANDKTDAFWLAEMLRLGILPTGHIHKREERSVRDLLRRRMAFVQQRVEHKLSLMSLFERVFGVRVANDKIINENYDIDENDMDPCVKFHIDSLIRAIEGLTSIIVDIEDKVLSMTKDDPAYDNLSTIPGVGKILSMTIILETGDISRFKKVANYTSYCRCTDAKRTSNGKVKGKNLSKCGNKYLSWAFSEAASGCIRSCEEARRFRDRKLKGKDQKVLANRSLATKLCKAAFYIVRDQTPFSVEKCFGYELEK

SEQ ID NO: 70596 - protein, 362 aa, unidentified
MRIIGCDLHARQQAVAMLDTTTGEVVSMTLKHEGNSVREFYSKLPRPVRVGIEATGSMQWFVNLMEELGIECLIGHPAEIRAAEPRKQKHDRRDADLILKLLAENRFPAIWRPSKELQDLRALVRHRHQWVRMRTRIQNALQSIALANGLRRGPALWTQGGQHAIASLPLAPHTAYRRDELQAMYKKFETEIEKLNQRVEEQASQRPGARLLMTHPGVGPVTALATEVFLGDPARFADGKALASYVGMIPREYSSGPRQRLGGLSKQGNPLLRFLWGEAGAHAVRKDPELKRFYRRKLNQKGFGKASVAVARKLGIRLWIMLRDQIEYNEFCRRGQKQQKSSDACVGMPGTPYGAKSHRTCD

SEQ ID NO: 70597 - protein, 360 aa, unidentified
MKELSKAAGAVAGLDLGDRESQLVVLDRKGRVVEELRLATGPEALRRRFSGCPRMRIALETGMHSPWVSGVLEQCGHEVIVANSRKLRLIYQNPSKDDRVDALYLARLARVDPALLSPVRHRSAAAQKDLTLLRSRDVLVAARTQLINHVRGLVKSAGGRLPVCATSVFGPRTWTHVPEALHAALEPVVEEIASLNDRIRALNGKIKTLAQRSYPQTKLLSQVGGVGVITSLAFVLTLEDPNRFEKSRTLGPYLGLVPGRRQSGDSDPQRRITKCGDRDLRRLLVNAAHYILGPFGKDCDLRRFGLKIASKGGKVSKKKAIIAVARKLAILLHHLWRSAEVYQPLYSQTDKAARCRTNVA

SEQ ID NO: 70598 - protein, 428 aa, unidentified
MSEAEFVKQEPQFAAFLAIDWADKKHVWCLQGAGSEKRESGELEHSPEAVEAWVGQLCQRFAHRPIAVALEQSRGALVFMLSKYEALHLFPVASTMAASMRQALYPSGAKDDPRDADLLLDLLLKHRDKLRRLVPDTEATRRVQNLVEERRKLVDEKTEQSNRLTSNLKIYFPQILDWFEQLDTELVCALLLRWPTLEELQKVPPAQLRRFFRKHHCRDQELIERRIVAIRQAIPAIRDRAVIEAKSTVVKVIVRLIRSLLEGIADLEEKIEEAAAGHPDFFIFDSLPGAGAVLAPRLLAAFGSQRERYGSAGEVQVYSGIAPVMEKSGKKKWVHCRIACPKFLRQSFHEWAGHSIAHSVWARSYYQQLRSRGKGHHAAVRALAFKWIRILFRWKDGVAYDESKYLAALTRRSSPLTAVNVAITGRAL

SEQ ID NO: 70599 - protein, 394 aa, unidentified
MHVGIDAHKRTCTVCVVEEGAVRESFSFPTTREGVREFMEKVHGKATVVIEASTTGKVLSRMLLEKYEIHMVASPERRRPIKTDRRDAERIVREDMLQYLRRCYIPSAYIEELRFLILQQMQIGRKIGRVKNQIHALLERSMVHDLDGVSDIFGVEGLRRIGGVQLPAPDISALGRYLEELKLLVVHHKELESQLARIAQSDEDALLLMSIPGIDFFTALAIKSRIGEVGRFPTKKHLCSYSAVVPGASNSGDYMSSHNRVKHGDMVLKYAFTCAVRGAASARKNSAVKRFYLKQRKRLGAQKAEVAAARKMACVVWKVLSTRQSYREEDKRLTVRKRRILSWKAKQQDRSNPGDIRQLAETLEGEVTILEKYPAGFDEKFGGNLSKESERAWM

SEQ ID NO: 70600 - protein, 345 aa, unidentified
MTIVETRQITGGVDTHLDTHVAAAVDGNGGLLGVWSFPTTTAGFCELHAWLSGFGSLDRVGVEGTGAYGAGLARFLRGAGVAVIEVGRPNRQARRAHGKSDTIDAVEAARAALSGRANAVAKTADGNVEAIRVLLVAYRSGRDSRTKYLNQLRHLGFCAPDDLRERFRGVPAASLARDAAALRPNRNGDPVLYATKLAMHTLGRRVIDIDTDCAQLRGELTDLVKATAPSLLDLPGVGVHTAALLLVAAGDNAERITSEAAFAHLCGVAPIHASSGKVTRHRLNRGGNRQANHALWRIVFTRMGSDARTRAYVERRLGEGRSKPEIMRVLKRYVAREVYRHLPGV

SEQ ID NO: 70601 - protein, 323 aa, unidentified
MIDGILGIDVSKNTLDASMSSCNKVRARSFANSTDGWRHLLDWLITQGRRRVHACLESTGRYSLGIACALNEAGHVVSIVNPAQIRDFVRTKLGRNKTDGVDASHIRDYCELFKPQPWAPPSEAARRLGELQTIRAGIIAGLTEWKNRKNSGMTDAVAHSLADKTISHFASQLGAVDEAIAQTIDNDSVLRRKRDLLLSISGVGETLAGVVLAELPGPDVLRSSAEVVAYAGLNPRQHQSGTSIDRVTRISKIGNAVLRAALYMPAMSAMRYNPAVAALVTRLKSRGRLNGKQIVIAAMRKLLVLCFGVLKTGKPFDPAKAMG

SEQ ID NO: 70602 - protein, 343 aa, unidentified
MDQYVALDVSLQKTAVCVLNASGSVVIEAELPSEPAALTAFIQTHAPRAARVGLESGPTSPWLWHSLKAAGLPVVCMDARHAHAALSVRPSKSDRNDARGLAEMVRMGWYREVQVKSLAAHERMALLGVRRQLVDMRVEIDGQIRGILKTFGMVVGSGNKGAFAQRARMLVQDHPVLSALVDKLIEVRAVAVAKVAALDKEIRRFVRDDPTLRRFMTVPGVGPVTALAFRSTIDEPDRFKRARDVGPYLGLTPRRYQSGETDRQGRISKCGDRFTRTCLYEAANVLLTKVQRWSPLKAWGTRLARRIGSKKARVAIARKIAVILQCIWTDGTEFWWTKEPATA

SEQ ID NO: 70603 - protein, 313 aa, unidentified
MQSSFIGIDISKNTLDVHVLPEDTRYSYAYEPQKIKALIRKLKQLKPVLIVMEATGGYELAVASKFAEAKLPVAVVNPRQIRDYARAIGKLAKTDALDAYVIARFAQDVRPEARQQLTLKEQQLKELIMRRQQLIDMRTAEKNRLSRAFSKEVITGIQKIIKALDEQIQALDEQLDRQIKGNPAWEHKIELITSVPGIGSNTAHTLLFCLPELGKLNRRQIAALVGVAPMNRDSGMMRGKRSIAGGRAAVRKALHMPILAAATRWNKKLRLFYAQLLSKGKKHRVALTACMRKLVILLNTMLKNDRAYDPKFC

SEQ ID NO: 70604 - protein, 460 aa, unidentified
MGKTSESRAAAPKVDWKALDVVHPDAAGIDIGGSEHWVAISPDKDDEPVRCFECFTADLERMAEWLTARGVRSVAMQSTGVYWMPVFEILQQRGMEVYLVNARHTKNLPGRKSDIAECQWLLKLHTFGLLNNSFQPSDAVRAVRTLWRHRSNLVAQAASAIQRMQKALIEMNIQLSNVLSDLSGVSGMAIVGAILSGERDPGKLAALADPQVKKSKAVIAKSLQGNWREELLFVLGQEVEIYRGCRDQMAACDLKLQQLLEGMESKVDLKAQPIGRRPKGKRARGNAPKIFDLRTELYRLTGVDWSQVDGIDVQVAQTIIAEVGTTLDAFPSEKHFANWLGLCPTNETSGGKVLKRRTPKVVNRAKVAFRQAATSLLKSQSYLGAQFRRLRTRLGAPKATTAMARKLACLFYRLLTKGQQYVDKGAEYYESRHREQQIRSVLQRARHLGLQVIRPQAQTA

SEQ ID NO: 70605 - protein, 388 aa, unidentified
MGAVVIGMDPHKRSATIEVMTGNESIVGGGRFATDAEGYRAMLNYAKQFPERTWAIEGCNGIGRHLAMRLLADGEQVVDVPPKLSARARVFATGQGRKTDATDAHSVALVGTRMAGLRPVVNDKQLTVLRVLADRRRALGEEHNRLIARLHHLLLELIPGGAKLHLSHMQARALLAKVRPRDAAGKAIRRVASELVGDLERNHERTKAADKELKQLLAETGTTLMQLRGIGPYNAARLLVEVGDVTRFPSKAHFASWTGTAPIDASSGDHVRHRLSRAGNRQINHVLHIMAVVQLRNQTEGRAYFDRKKNTGKTSMEAMRCLKRRLSDIVYRQLLTDMLTPAGTGPGGHSGTALTSSVADSHPDIDSSDKPLPGPVTTKPRTASLAAS

SEQ ID NO: 70606 - protein, 342 aa, unidentified
MPNFAGLDVSLDQTSICVVDDAGAIIRELKVASEPEDLIVALTPYADALERVGLEAGPLCTHLYSKLAEAGLPAICVEVKHMARMLRAQFQNKTDRNDARGLAQMMRAGLFKAVHIKTERSQRLNVLLRTRKVLLSKLLDVEADLRGVLKNFGLKMGKVTPKTFEARVRELASFDPFIAEVVEPVLAARRAMREQFDRLHTLLLKAAKDDPICRRLMTMPGVGAVVALNYRVVVDVPTRFAKSRTVGAHIGLTPRRHQSGELDWTGRISKAGDPMLRASLYEAANVLMTRVTKPTALKSWAMRLAKRRGRKKAVVALARKMAVILHRMWADETDFRWEGQCP

SEQ ID NO: 70607 - protein, 397 aa, unidentified
MYIVGIDIAKRKHEAAVIDGEGAVIIKPFSFTNNCSGYNRLLAMLAKAKLPLDEVSFAMEATGHYWLALFTRLQKEGFRVQVINPVQTNSIRSFYIRQAKTDPRDALLIAEVIRFGHFSESTLHPENIYELRELCRGRHAIVSMQADVKRKVVALLDQVFPEYETAFTNMFSDTSMAILQTCPTPKELSEMPLEELCHLIEVSSHKRFRMAKAQELQALARNSFGFAMAGDVFSTMIRLYAKHLDFLKQQVREMDRKIAEIMDTLDTPITTITGIGPTLGAYILSEIGDISRFSSAAKLAAYAGIDPTMRQSGEYNGVRNRMSKRGSPYLRHAIWLAASSAVLHDPALKLYFQKKRDEGKPYMASVGHACRKMVSIIYAVMRDNKAYTPYIPNEISA

SEQ ID NO: 70608 - protein, 365 aa, unidentified
MPSVTSPAGLIHLGMDTSKNTIVVAVLMPGEQIPAVDRVFNDEAPVRRLIGRFPDRGLLRACYEAGPGGYDLYRLLASMGVACDVVAPSLIPKGGSDKVKTGKRDSARLARLHRAGELTPVRVPSPAEEAVRDLARARSAVLSDRKRAQQRLTAMLMRHGRVWRNTYWTGPHRAWIAAQAFDEPALGTALAHYRATLDTRETELACIESELAPWARQEPLAGPAGRLGCYRGIAELNGLTLAAEVVDWRRFASARAFMGFTGLVPAEYSSGQRTWRGHITKAGSGPVRTALIEAAWAYRYKPAIGVTLRRRQEGAAPETIARSWKAQRRLHGKYRAMTARGKAAPEAVTAIARELAGFVWAEMTS

SEQ ID NO: 70609 - protein, 493 aa, unidentified
MRMASSSPASRRNAKNALKIKEQARKRAATATSPAQMEKLEPVHRLAAGIDIGSAENYVAVAPEMIGPGESPVRVFGVFSQQQDALVEWLRSCQMSTVAMEATGVYWLTLYDKLEAAGIEVYLVDPHGVKAVPGRKSDWMDCQWLQKLHTYGLLQRAFRPDAPIRRLRTLTRQRAELVCAAASQQQHMEKALVCLNLQLGLVVSDLVGETGLAIIRAILAGERDPEALVKYRSARCSKATVQEMKQALQGTYNDEDLFVLQQSVEMWDFLRNQTANCDRNIELVLSAIPTAAVAELKVPPMPIPAAAEQPKKKGKGTDGKNAPDKDFTPMLRRICGVDLTRVMGLNLLSVLMLLGEIGTDMSRWRSAQAFCSWLGLCPGAKISGGKVLSRRTRKVNNRAATLLRMAAVVVGRTDTWVGQFYRRMKARKGGPKAVTATARKLACILYHMLKYQEEFVALDMGKYAANAQAHRIRYLKREAKKLGMELIEAQVAA

SEQ ID NO: 70610 - protein, 343 aa, unidentified
MEQYVGLDVSQEQTSVCVVDGGGKVIWEGKCTSTPEAIAATLRTRAPEAVRIGLESGPLSAWHWHELRKLDLPVVCLDARHAKAALALQLNKSDRNDARGLAQIVRTGWYREVAVKSVDNHLVRSLLTTRAQLVRMRVDLANQIRGVLKPFGLIAGKGGGRPFAERVRALVAGGPLQEVAGALLAAWQAIGEQIAVLGRRLVAVARQDEAVRRLMTAPGVGVLVALAYVSVVDAPERFAKSSSVGAYIGLTPRRYQSGEADYTGHISRCGDKLLRTYLYEAAGIILHRVPRWSALKAWGTRLARRIGTRKATVAVARKLSVILHRMLRDSSEFRWSAKEVHAA

SEQ ID NO: 70611 - protein, 607 aa, unidentified
MSTIASLDRIGVGIDTARYGHRVSFLRPDRKPAAKPLTVMENRAGYQTLQDRLNQLHDQHPTAHFHVRIDAAGQYAVNLELFLRGLKLPMTISVGEPKRNKDYQKAHFPKRTTDDTESQAMARFAVVELPDATPASSTPMILLREVAGRLQSKVKQTTQAINRLHNLLARVFPELATLTEDMSAGWVLKLLDKYPTAERIAQAQIASLEKIPYLSVEQAHAVHQAAKQSVASLRGELAEALVRDHVNQLRLCQKAEQHLHQLLLEAFADLPASPHLQVLTITGIGDATAAALVAKIVDINRFATPNHLVSYFGVFPEESSSGVDKRGRPLPPGTLIMSPKGNDLVRFYLWNAARNAIQHNPAIRALYRRLRAKGKRGDVAFGHCMRKLLHLVYAVWKTDRPFDKEHFPWEGSSDTQPSATTPPSADAGTTPSANEKAVGHKRDLPAEEVVTTADSTLEPASPAVKPASQSAAPRPKVDFACVREHVTMEQVLQHLGYFASLRGRGQQRRGPCPVHSQPTAPERTFSVHLGKNAFQCFHAECAVKGNVLDLWAAIHRLPLYEAALDLAETFQVPRNREEEPVKGTSSPRTATAKTSAPAPATATSGAK

SEQ ID NO: 70612 - protein, 408 aa, unidentified
MTVVGIDVSKGKSMVAAMKPGGELVAAPYEIRHSDIELSHLALDVLCMEPDTRVVMEATGRYHEPVAALLHSEGIFVSILNPLLIKQSGAGSLRKVKSDPKDALKIAKYGLDNWSTLREYTPMEAIRQQLKLCARQCDLYNKNIVMLTNNLISLSDKTFPGVNELFSSPEKADGHLKWVDFYRSFWHCDCINRMSPDAFEERYKKWCKRKGYHFSTDAADALYAASCGPYTTLPRDNNAKLLVTVAADQLIALRENQSKLEAEMLNLCKQLPEYETVMAMYGVGKSTGPHLMAELGDVRRFPHRSSIVAFAGVDPGVVGSGKMQLSSVTTSKRGSPQLRKALFQVVSTYVKCKPENEAVYQFYAKKRDEGKPFFVCTTAAANKFLRIYYARVKECLNAVESATQVEEG

SEQ ID NO: 70613 - protein, 356 aa, unidentified
MEDSIMRHLAQAQHVATYGVDIGKNLFHVAGLDKTGRPQLRTKFRRDTLLQFFGNVPVAVIAMEACPGSQWLARKLQTYGHTVRIVPAQFVKPYVKSNKNDSVDAEAIAEAATRPTMRFVAVKRVDQVDVQALHRARDMMVYQRTALISQMRGLLLEYGIALRGGAGAFKLDLPGVIEDAENELTPSMRQLLAMQRQHLEELESHIHHLSEEVAAQADRDDVARRLMTIPGFGALAATALLAAVGDARQFRRGRDMSAWLGLVPAQYSTGGKPTLLGMSKRGNSYVRRLLIHGARSCVIHMDRTRNRLGAWLDQLSRRVHFNKVTVALANKMARMAWVVITHRGALYQRNDPRFAL

SEQ ID NO: 70614 - protein, 458 aa, unidentified
MKRNRSKAKIDRMMPMVNPNAAAIDIGATMHMAAVRADRTPEPVRSFGTFTTDLHRLVDWFKECGVETVVMESTSVYWIPIFELLDGRGFTVFLVNARDAKHVPGRKTDVSDAQWLQRLHSYGLLRASFRPKGQIAELRAYVRQRERLLEYAASHIQHMQKALTEMNLQLHHVVADITGVTGLRIIRAILAGERDPKVLTRLRDYRCHSSAETIEKALTGTYRAEHLFALEQALALYDAYREKASACDARIEAVLKELSMGRGHSLDSLPSSGRDRSDQANALAFDARTLLFALLGKDITQINGLGPYLSLKLIAECGDDLSAWPSAKHFTSWLGLAPSNKISGGKILSSRTRRCGSRASALLRLAAVSVGRTDTALGAFFRRLSARIGKAKAVTATARKIAVLFYNAVRHGMEYVDPGASYYETRYRTRVVNNLHRRAKAFGFVLQPMDPAPGVVVS

SEQ ID NO: 70615 - protein, 392 aa, unidentified
MYIVGIDIGKNHHEASIVSPEGKQIGRSLRFATTHKGADSLMSFIFKNIGNSPCVFGMEATGHYWYPIYSFLKAKGYTICVINPIQSDSLRKMYIRQTKNDSIDSFLIAEVIRFGQFGTTSMADENILAMRQLCRYRDSVISSRTEIKLRIGTIMEQIFPEYEKQFSSLWVSTSMGILEKYLTPENIENAPIDELFEIIKDKSHNRLTKAKAISIKEAAADTFGIKIAQDAFSFQLKQLIDRMNFLDKQIEALDIEIMKYYEQFDCYLHTIPGIGIIAAATILAEIGDINRFKSSSALVAFADIDPTVRQSGEFSSTHNHMSKRGSPYLRHAIFLAATTCSFHNSPLNAYYKKKRDQGKHHLTATGAVARKLTTVIYAVLRDSKPYEPKKFC

SEQ ID NO: 70616 - protein, 339 aa, unidentified
MAIQSKKIVQELKSLFAGIDVGAEELILVIRKNGTPYKAQKFANTPADSARLVKKLVNLPGILVCLEATGVYHFDLSIALHDAGVALMVVNPKSSHNFAKVLMKNSKTDAVDADTLAQYAERMDFVAWTRPSDEKISLRSFARRIDALTRQKAAAKNQLHALSASKENPKAVLRDVNLSITQLEKRIDCLSKEALALIEKHPDLEQVFLLLTGIKGIAKTSAIALMGELLLLPQGLSHREWVKFAGLDPRAFDSGKSVHKKTRISKAGNRHIRSALYMPALSAKQHDPHVKAYFQHLVDNGKLPLQALCAVMRKLLHAIHGMLKHDKPFDNTRFYAIPA

SEQ ID NO: 70617 - protein, 370 aa, unidentified
MKKHSSKEKSPKRSKAALEPDPVTIGIDLGDKTSRYCALTGSSDKGEEGSVATTRKAMAQKFGAMPACRIAIEVGGHSRWVSQLLASFGHEVIVANAREVKAITASSRKNDQMDARMLARLARVDPALLRPIRHRGEQAQMHLMRIRVRAALIETRTALINTARGLAKSSGERLPRCDADQMGMARAEGLPEWLAGQLKPLLLQVEQLTVEIRKCDRELEQIAGNEYPETKLLEQVWGVGTLIALTFVLTIDEPQRFRKSRDVGCYVGLRPKRSQSGEREPELPITREGDGYLRILLVQAAHRILCSQGPDTDLKRWGLKLAQGGVKSKKAKKRAIVAVARKLAILLHRLWVTGEVYEPLRNSGVMAAAA

SEQ ID NO: 70618 - protein, 385 aa, unidentified
MDTAVGKAAERSEAGFPTAAGDRSNVSGSSETATEQDRRRFLETSPNSCQSRSRRYAASSSYPQERDHSMDGSITSFVGIDIAKRSLDVCLLPEGKQLSLSYDTAGLKQLFSWLPEAGSCLIVVEATGGYQRRVVAQLADAGHRVAVVNPRQVRDFAKGLGILAKTDRLDAQVIARFGQHVRPRTLAKTHEKQDELAQLVTRRRQLIELRTAENNRMETLVSKPVRKSVQQVVDLLNKQLKRIEKEILALLESDDEWKDKGEIIQSAPGIGPVTTATLLAELPELGLLNRQEISALVGLAPFNRDSGRFHGKRSIWGGRASVRSALYMAALTARRCNPVIRSFAQRLEAQGKPYKVIMTACMRKLLVILNTLVKTNSPWNPDYAQ

SEQ ID NO: 70619 - protein, 443 aa, unidentified
MLAEALQLCHPHAAGIDIGEAEHWVAVPPGCDPQPVRRFGTFTADLDALADWLIDCGVTTVAMESTGVYWIPLFELLEARGVQVLLIDPRQAKRAPGRPKTDRLDCKWLQRLHTYGLLAGAFRPDDQVCVLRGYLRHRQMLLTYAAHHIQHMHKALEQMNLKLTQVVSDLTGVTGMAIIKAIVAGERDPVTLATLRNPHCQHDEDEIAKALQGTWRAEHLFALRQAVELYQFYHQQVALCDQQIKAHLATFADKSAGQPLPPKAHRHKKTNEPRFDARTPLSRMAGVDLTAIEGIEEGTALAILAEIGTDMHRWPSVKHFCSWLGLCPQHQISGGKVLSRRVRPGAHRVTVALRLAARSLHHSQSALGAFFRRMKARLGTPKAITATAHKLARLVYHLLKHGSAYVQQGLAAYEAQYHARKVKTMAKQAKALGYTLVPLAAQG

SEQ ID NO: 70620 - protein, 427 aa, unidentified
MSYRIAAVDVHKKMLAVVVADIAGEGEYQFERRKFGATPSELKVLAEWLVQQEVEEVVMESTAQYWRPVWGALERYWQPARQQREGASKMSGTLHLRQAKSNHGPRGRKNDFADGERMIKRLVAEELVLSFVPDPEQRLLRTVTRRKHQLTRAKVGFKNQLESLLEQAHIKLSSLVSDLLGVSARRMLKALAEGETDPSALAALADRGLRATPEQLRDALGASTQLNGVYRRLLKLALEELQVIETHIEQLDREAMGLLKEHQDVVRRLAEVPGFGPDSAVQMIAEVGPKAANFRTEKKLSSWVGVCPGNEESAGESQSTRSPKGNRHMRRLLNQAAQSAVKVKGSIFEVTFHHLLPGLGYKQAIWAIAHRLCRLLWLILHKGVHYEERGPAVSAKSKRTRAARMIRELKKLGYRIEGGPLPAVAGA

SEQ ID NO: 70621 - protein, 373 aa, unidentified
MTKNLRYLGLDVHAETVAVAVAEPGGEVRSLGIIPNEPSAVAKLVRKLGGREQLRACYEAGPCGYVLYWQLTKLGVACAVVAPTLVPTKPGDRVKTDRRDAEKLARCHRAGDLTAVWVPDAAHEALRDLVRAREAAKADQLRARHRVSKFLLRHGRRAPGDVKPWTQRHRRWLDTVTFAPVAQQTTLADYIHEVDHAGARLERLETALDLAIAAAPPAMQAIMRALQCLRGVRQLTAATIVSEIGPLSRFAHPRQLMGYSGTVPSEYSSGSSVHRGAITKTGNAHLRRVLVEAAWAYRFPPKCGDALRTRQRGQPPGITDIAWKAQQRLHTRYRRLLGRGKPVPHVITAVARELVGFIWAIGIAAEREVAIAA

SEQ ID NO: 70622 - protein, 427 aa, unidentified
MEVVHARCAGLDISKTDAKVCVRIAGRGRRKPSATVTTWSATSSAILRLADMLAEQKVTCVVMEATGAYWKPFYSLLAEAGLPVVLVNASQVRQIPGRKTDVADAVWLADLAAHGLVRASFVPDLEITQVKDLVRARTILVRLRGEEVQRLEKLLESAALKLSSVISDLNGVSGRRMIEALIAGERDPEVLAGLGHGLLKASRAELAEALTGRFSDHHGFLAKMHLDVIDSYTARIADLAARIETYFEPDRPAQAEGPSLHRARELLVTIPGISLIGAEQILAEIGTDMTVFASPGRLASWAGLAPGAHESAGKVKSTRCRPGNSYLKGTLGIVAMTAARQKRSFLSARYRRVRARRGHRRALVALARTILELCWHLLTTDQPYHDRGADYYDKRRPGAAIKTALQRLRDAGCHITTNNKGILITTA

SEQ ID NO: 70623 - protein, 460 aa, unidentified
MLKIKNTSEYNKTTDWQVSKNLIEQREVSTMKSNTQNAKIEAITEKTLVLGIDVGSETHYARAFDYRGIEYSKKPFKFSNTEAGFATFKEWILDLKERHEKDKVVPGMEPTGHYWFNLGKFLQDNEMKPVLVNPHHVKKSKELDDNNPTKNDRKDPKVIAGLVREGRYMIPYLPEGVYADLRTASNIRFQLQAELTRIQNRISRWFNIYFPEYKTVYGKPDAKSGMLILKAAPLPEDILTLGIDGVNQIWRDAKLRAVGKARAKTLIEAAEHSVGSKEGAVSARMEIRMLLEDYESRNTRLQEVMVLIEELVRKIPMAEKLLEIKGVGIRTVSGFLAEVGDISRFNNPKELQKLAGLALVENSSGKHKGETTISRRGRKRLRYLLFEVAMSLVAKNPEFRELHNYYTTRRLNPLKKMQSLVAIAAKLIRVFYAMLTKGVDYDPKKMVSDIKRPAVYLQAA

SEQ ID NO: 70624 - protein, 341 aa, unidentified
MDEYIGLDVSLEETTISIRRDGQRIWRGKCKSDPNVISTLVRKRAPGAKRMVFETGPLSVWFYHALSAEGLPAICIDARHAKAVLNMAANKTDANDADGLAQLAEVGFYREVRVKGYDSMLTRTLVAARTKLVRICTELSNQIRGLMKTFGLIVPPGRGRTFEQNVRELLDGNKALSPIIVTILEAWRGVRKKAAKLGRQLIATARQSAPCRLLMSIPGVGVVTATSFVTAIEDPENFKKSRSVGAWLGLTTRRYQSGEVDYNGHISLRGDAHLRGLLYEAATVILTRSSADSSLRSWGLKLRERVGFKRAAVAVARKLSVIMHAMLKSGEFFERFPGSNA

SEQ ID NO: 70625 - protein, 406 aa, unidentified
MNPFVHKNLIVATIGTTDRQTLITEYIQQSFSTFYSDLIRLKEWFISHDCYDVCMESTGKYWIPIYNVLETELNICLTHPKYVKAIKGKKTDKRDSKWICDLYKCDLVKHSFIPKKEIREMREIARYRCKLVYMRSSERNRYQNCLTVSNISLASAVSDPFGKTATNIMKELMQSEVIEDDKILKLIHKNCKDKDKILDSLQGYHIESDQRFKMDTVMNHIEYLDKQIQACEAELIKRAYPLRDYFQHITHIKGISALSAILIVSEIGTDMNQFESDKQLVNWAGLSPANNESANKKKSVRISKAGQYLKPLLVQCALSSIKDKNSYFGIKYCRIKKRRGHKKAIIAIARMMLVCIYHMILTGEEFNPCDYESLTNPKPKKERIMTVESALQFLKDSNFDFSSIQL

SEQ ID NO: 70626 - protein, 353 aa, unidentified
MAHPQPPRITVGVDTHKDLHVAAARDQLGRRLGTTMARATSAGYATLLVWAQALGDVQAWGVEGTGSYGAGLARFLTARGQRVLEVNRPDRAARRRRGKSDPVDADAAARTVQAGEATGVPKAQDGVVEMLRALRVARQTAVKARTQAINAIKALLVTAPAELREPLDGLANPKLVAAAAALEPGTLTTPTAATMLALRGLAQRYQHLDAEISLLTSRLDQLTTRTASALRQLLGVGPDSAAALLIAAGDNPGRLRSEAAFAALCGASPVEASSGKTRWHRLNRGGDRQANAALHRVVIVRLRWHQPTRDYVARRTAEGKTKKEILRCLKRYVAREVFAVLPQLGEQLLVAAA

SEQ ID NO: 70627 - protein, 341 aa, unidentified
MQITTIGLDIAKNVFQVHGIDRDEKVAVRKQLRRSQVIGFFQNLAPCLVGLEACATSHYWARELTKLGHEVRLMPAKDVKAYIKRNKNDAADAEAICEAVRRPTMRFVQVKSADQQAQLMQHRARDLLMQQRTQLINAMRSHLAELGIIAPQGREGVKDLLAIISNEDNKDLPNDARASLIVLAAQLRALQTTIGMIEKRIVKQHSANKESRRLQTVPGIGVIGASAIAATVTNPRIFRSGRDFAAWIGLVPRQMSTGGKPKLGPISKQGDRYLRRLLVVGAISVMRRAKLHPGKFPWITQMLARRPFKVVAVALANKMARTAWALMMSGKTCRAARYAAA

SEQ ID NO: 70628 - protein, 311 aa, unidentified
MNTTLCGIDISKDWLDAHIEPMGAANRFANDAAGIADLAAWCQNHDVELVIMEASGGYERLAFLLLWEMGQPCGMANARSVRYFAEAMGFLEKTDRIDAAVIARYGAVKRLKPTPPPSAAQQRLKALVARLSQVGGDLTIQKQRKSTADAETIASLDEVIALLARQSRRLEGEIATLIHDDPLWACLDRAFRSLKGVASRTVARLMAQLPEIGILSNKAIAKLAGLAPIANDSGKRSGRRPVRGGRAGPRGVLFLVASIVAKYDPHLAAFKQRLQTAGKEKMVIRIALARKLLVILNAKARDARNEFANAT

SEQ ID NO: 70629 - protein, 457 aa, unidentified
MWRNRELAECENGSGLVSPPVYLQRKSPTTQTMSGRQSADASSRLRNAGRGWGTQFADIGTLTPAACNVRIWAGWRGLMGWSIGLGPRRHRACSWRRGALQTRGDHPVNARTIAIDLAKNVFELAIADEAGKIVDRKRLSRSQLRRYFENYGAAHVVMEACGTAHYWGRWFSERGMQVSLLPPHYVRAYIRRNKTDRADATALLEASRANDIIPVCVKSVEQQALQGMHRVRSAWRGTLTARLNALRGLCREFGIIAPVGARRGLAELVQRVADESSGLPRIIRTVLQGVIEEVRAIQERLRQLELELAAIAEQSAVCQRLRKIPGIGLIGATAFAGSIGDIRSFRSPRRFAAWLGLTPREFSSGNIRRLGSISKRGDGYLRMLLVHGARAVLYSANAAQRAGRPLDALREWGLRVSSRSGHNKAAVAVANKLARIIWASWYRQRDFEFRPPSPATH

SEQ ID NO: 70630 - protein, 344 aa, unidentified
MIYVGVDVHKSFSRVGAFDPATGEIQDLGEVRNEREALAARVSQLASPKTVVLEAGLCSYHMAGLLEAIAEQVWIVDPGEVRRLQQTVSKTDRRDACALAWWAAKGVLTPQWRPDAQTLDLRELTRGKIALTRLSTRLRTMIRMLLARQGYDCPHTGLMSERAQLWLDELELEGYAGEMLPVLREILAVIQRHGDDFEKEIARVSESHAIARRLRTMPGVGPFLSLALATEIGDIDRFPSPAHLRGYSGLTPGVYQSGDKDVRGPLTKSGNKWLRYAAVLAAQRIGQMRHPDSRLKRLFLSVAFRHGRNPAKIAVARRLLDLIYQLLKKGQDYRPSSNHRAAAA

SEQ ID NO: 70631 - protein, 390 aa, unidentified
MIYVGIDVSKDKHDCCILGSDGEILFSPFTFQNSLQGFDELYEKILSLTSDLSEIKVGLEATGHYHLNLLRSLLDNGLPSFVINPLHTNLYRKGQSLRKTKTDKVDAASIAMMLLTDRTLKPYSDTSYHNEELKSLTRYRFDKVQERARLKTSVSRLVSILFPELEKLVPTLHMASVYTLLSEFPGASFIASAHLTRLKHLLYDASKGHYGRDMALSIRDAAISSIGSVIPAKSLELKHTIHLIQVLSAEIDEIEDAINTIMGTLDSPITTIPGIKNRMGAMILAEIGDITRFDNPDQILAYAGLSPSIYQSGQLTSSYAHMEKRGSRYLRYALFNATVYVCQWDPAFKAYLTKKRAEGKHYYVAVSHACKKLVRVIYRMQLTGEAYRSA

SEQ ID NO: 70632 - protein, 353 aa, unidentified
MKTYYVGMDVHRASIVMVVLNGAGKVVMQSVIETGAERVRGYLKQLRGKVYVTFEEGTQANWLHEIVRPLVTEVVVCEPRHNKLLQSGNKNDRVDAQKLAELLRNGALKAVYHGDNGVRALKELVRTYDCLTSDTTRVMNRLKAIYRGRALGCAGHDIYRQDRRVQWLEKLPERGAKQRASFLYQQLAALKPLRHEAKRMMVKEARRQPAYPWLMSVPQFGSVSVAQLLAIVGTPHRFRSKRQFWTYIGLAVVTRTTADHEVVSGVLRRSKRPVSTRGLNRNHNHLLKRVFKNAAKGACHSGPFKASYELRVTQGMVPSLARLTVARQLAAITLAVWKRGEQFNPERMKQQAA

SEQ ID NO: 70633 - protein, 341 aa, unidentified
MRTIYIGMDIHKNFIQAAAMDEQGNIIKEQKFKTDEEEIQRFVKSLKAQKIRAAIEATCTWYHVYETLNALDVETTLVNMRRTKTIAESKIKTDKLDAKTIAQCLRTGFIATAYIPSKTIMEQRNLLRHRMSLRKEIIRYKNKIHAILLRNGIHYPDYSDLFGVGGMRFLQNLKLPDSEQYSLTSYLNIIKTLIHEKTQTAKNIETLCKNNHQAMLLTSIPGISYYSAMIILTEMGEVQRFSNPKKLCSYAGLVPRTIQSGNHVYQGRILKECNHNLKWILDQCTHIHIRHCPNSLITKLYHRVETKKGAGKATVAASRKLLTCIWHMLMKDEMFKYSNDD

SEQ ID NO: 70634 - protein, 343 aa, unidentified
MQTITTIGLDIAKSVFQVHGVDAGGQVIVRRQLKRRYVLTFFQKLPPCLVGIEACGSAHYWSRELQALGHTVRLMPPVYVKPYVKRQKNDATDAEAICEAVTRANMRFVPTKTPEQQSGLVLHRTRHLFIRQQTSVINAIRAHLAEFGIVAPVGRHGVEELLTVVADPNDRRVPEIARACLSALGDQLQRIKQQILEFDRLIRAWHRSNEVSMRLDEAPGVGPVLATAVVATVADPKVFRSGRNFSAWIGIVPKQHSSGGKNRLGGISKQGDRYLRGLFVAGALAVIRYAKIHGTKHRPWLTALLARRPTKVAAIALANKIARMVWAMMVKGERYKEPVALAA

SEQ ID NO: 70635 - protein, 314 aa, unidentified
MAETAGIFVGIDISKTWLDIAVHDTDAVWRVGNDDTGIASLVKRLKPMRPTLVVLEATGGYEMQLVAELAQAKLPVVVTNPRKVRAFARSTGKLAKTDKLDAKLLAHFAAAIRPAVRSLPSEEEEHLTGLLVRRRQLVDMLTVEKNRLHTVRPALRDDIKEHIAWLQAKLSKLDEEIDQFVRKTSLWKDKDAILRSTPGVGRVTSCTLLAMLPELGTLNRQEIAALVGVAPVNKDSGRKQGKRRVYGGRATVRSVLYMAAMAAKRYNPRIKKFYDDLLRRGKEKKVALTACMRKLIVILNAMVRTNQLWRTEVG

SEQ ID NO: 70636 - protein, 465 aa, unidentified
MTKRGQRQASAQRSSKVSRNLTMLNPNAAGIDVGASEHYVAVPAERDEQPVRCFGAFTEDLHRLAQWLRQCGVRTVAMESTGVYWIPLYQILEDYGFVVKLVNARHVKHVPGRKSDVQDCQWLQQLESFGLLSGSFRPEAKICILRSYMRQRQMLISNASRHIQQMQKALTQMNLKLHQVISDLSGQTGMRIVRAILQGERDRLKLAALKDPHIKSSLSTIAKSLEGDYRAEHLFALRQAVELYDYHQQKIAECDQEILKEMQSLESRAAPGSVPPPPLKRKGRSRHNLIPYDGRAELYRIMGVDLTRIDGLNEGTVQLTLSELGLDVCKKWPTEGQFSSWLGLCPNNEISGGKVLRRGTRKVVNRVANALRMCAESLLNSKSALGAYARRMRAKRGSQIAIGATANKLARLIYRTLTYGQEYTDIGQEKYETKYRENVLKSLQKRARHLGFQLVDLHPVSVRVP

SEQ ID NO: 70637 - protein, 340 aa, unidentified
MKRYLGVDLHRNCFTVCTLGEDGNSQLKKWSIHSLAEFAQEVQAGDEVAVEATGNARYFCQALKERGCRLVVVNPHQFQVISRSVKKTDAYDARTLAEFLAKDMLPEVRMKEDLPAEMASLLQTRDKLVKLRTTLKNKINNLLAARGILLPKESLSTEKGLERARQADVGELAQVELMVLVEQIRHLNQGIAKLGAAIKKQGPKLPGYENLKSIKGIGDIGGSTLLSTIGDINDFPTEGKLAAYFGIVPRVQNSNETERSGRITKRGNKLGRTTLVQCALISMRYSPYLASFYARIRAARGTGKAIIALARKFLGIIYKTLKNGWVFEDFPQFVFASAAD

SEQ ID NO: 70638 - protein, 437 aa, unidentified
MNHPRLQRNRELLAGKIVVGIDPSKDKHQAAVVDCHGSQQGSSFSFPVTSTGYGETLWRTLAKVLKSWKPEEIIFAIETACNLWETLAFFLHSRGYTVVLVSPLSTHHARPIMSMEFSRTDPKDAYLVATIAQRGAFHLYEQYPVESNALHMLAITYDKLRKALAQNRARVCALLDRVFPELPHILKPGTESAVYLLKKYLFPDEFLAMDIRSESRVLQQISRQQCGRSVLEEIQKAACTTIGVIRQSDERVAERITLDAYLAMIETVQVQMDRVLEELITRAKERPEFERLTSLSGVGERLGALFLAEVRDLSRYSHYKHIEKLAGYNLRLFDSGRYSGTRHISSIGNCRLRWILYKMAEETARRVPEVRVKYLRRQLKRRNHVRNVVAVVPQVLQLIMAMEKRQRPYELRETVLKELQELETKYAALKAEKKAAA

SEQ ID NO: 70639 - protein, 369 aa, unidentified
MTSIIYVGMDVHTTNYTLCCYSIEENQIFAQVQVNPDYREILRYLNQVQSQRGGNCKFICGYEAGGLGYSLYHELTYHGIECIILAPSTMAVIPGKRIKTDARDAEHISKCLAYHTYSAVHIPSQEDDAVKEYIRMRDDAVTTLKRIKQQTIAFCVRHGKQYDGRSYWTKRHLDWLESLKFDHPILQETFQEYLIQYYQASEKVDIYNIRIEELAQRETYREHVQKLVCFRGIAVHTALSLLVEVGDFHRFKTAQHFASYLGLVPGEHSSGGKQIHTGITKAGNTHLRRLLVESSQVFSRGVIGKKSVKLKAKQEGKPAEIIAYADKANERLRRKYTKIASHSKYNIAKTAVARELACFIWGMMTDNIA

SEQ ID NO: 70640 - protein, 331 aa, unidentified
MLKIVYPNCCGIDVHKTFVVAVIAIANNQGITEYHRKHFSTFTNGLTQLRDWLEYYSCFDVCMESTGKYWIPVFNILEEQTNVCLAHPKYVKAIRGKKTDKKDAQWIADLFKHDLVASSFIPPLKIRQLRDLFRYRMKLTQLQVGEKNRYQNCLTWSNLQIASVVSDVFGKSAQAIIKSILDNPQDKPNIEQLVHKRMKNKVQDLEIAMEGALTPEQAEKIRVIKAHYDALAICKEDLEQMIRELGQDYQHQVKLIQTVPGFKEDLSALRIISEIGCDMTVFDSAAKLCSWAGLVPANNESAGKKFSTRISKGGKILETFPCSSRKRCCQI

SEQ ID NO: 70641 - protein, 338 aa, unidentified
MKLYGAIDLHSNNNVTVLTDEKDRVVYQKRLTNHLPLILEQLSPYASSIEGIVVESTYNWYWLVDGLMEKGHRVHLANTAAIQQYEGLKYTDDDSDARWLAHLFRLGVLPEGYIYPKEERAVRDLLRKRSQLVRQKTANLLSIQNLYSRNTGSSIGANRIKQLTSEKVDALFTSSDLALAVKANLAVMRSLESEIAILERVVKDRLKLRPAYRYLLTVNGIGQTLALTIMLESGDIRRFPKVGNFASYCRCVGSEKLSNGKRKGTGNTKNGNKYLGWAFVEAANFAIRFEPLIARFYQKKMAKTHRVVAIKAVAHKLARACYYVMRDEVPFDVNRAFA

SEQ ID NO: 70642 - protein, 373 aa, unidentified
MPKYSTAFGMDVHLRSTTVCALDADTGEAVTRRFPGNPWGEIAGWMDGFPGPSLAAYESGYLGFAPQRELAGLGVECVVAAVSKIPRPAADSASKNDRNDAARMAKAILAHDISPVWVPSPEVEGIRDLAGAYDGATARLATARQRLLAFLAKRGFVYGGTTPAGNPRKYWTYDFLRWLDKVRPGDDGGVRTLAALRNEVEAAAEARADLLSEYRAAVDASPIAAEAAALQSIKGCAFALAAAFSAEVGDFTRFRSGRQVTAYFGLAPSQRSSGDSVRLGGISGAGNALVRKLAVEGSWCYAAARHQPKLMPRDTGVPLEIRMHGRKGSERLLRRREEMLARGMPAAKANAATAAELVRWLWALGMMCREGAE

SEQ ID NO: 70643 - protein, 383 aa, unidentified
MLNLTDTPAANDYATIYVAFELSKAKWKLGVVVPGSPKTSYFNVAGGDSAALSELLAKWRAKATATGKPVRIMSCYEAGYDGHWLHRWLTDRGVTNYEIDPASIEVNRRARRAKTDRIDVDQLMRTLAAHVRGEPRVCSVVRVPSHEDEDRRRVSRERKRLQNERTQHSNRIIGLLHGQGIRDVQPLKRGLLASLDQLRTGDGRALLAKLKAEIVREHERLCLVNKQLSELEAASQAEVKAAASGSAGAQIKELARLRGIGLRSGRDLVNEVFYRSFNNGRQVGSFLGTVNSPYNSGNSKRDQGISKAGNKRARALSIQLAWLWLKHQPESELSRWFQARVGELKGRIRRIHIVALARKLMIALWKYLTTGLVPAGAVFGRGI

SEQ ID NO: 70644 - protein, 342 aa, unidentified
MYYIGLDVHKKTISYCVKDASGQVHREGTIGANRNELDWWMKTLPQPWTVAMEATIFTGWIYDHLLPHAAQVKVAHPVMLRAIALAKKKNDRIDAGKIADCLRCDFLPECHMASTEIRDRRRTLRYRHLLVRQMVQMKNRVSGLLLETGVSHNKQRLHKVKYFRELISNNEEVHENIRPLLRLSRETIVRCQKTEYALVSSLERDPLLAERIKRLRTVPGVGPITALTWALEIGDVSRFRSIKQAISYCGLCGDEKSSADKVLRTPISKQRNKHIQSVLIEAAKLAPRHSPELALIHEREKQKGNANRATLAVARKMVAYLLAVDRRGKDFLPSEQRSTAAA

SEQ ID NO: 70645 - protein, 428 aa, unidentified
MESMDINRIKEFRQFKKEIRGSDRFLIAGLDIGKSIHYAFLGTANGKTVKRGMRVENSASGFEHLLTMAQFYMDRDGFKDIVFGLEPTSVYHKPLAEFLITHDHLVVYVTNEAIKKNRSLLDGRWDKNDTKDSANAADLVAQGKCQFYDLPDIQLRDLRALLAFRQRLRKQLHSCRVRIRNNLVAQYFPELDKCWNQAQEENLAIVRWCLSPQIINHLSFEDFFKMVTTRNKGQRQYNRLSKIWEIAPYSIGCQAGDAMQLEAQILVDNIKTIEAHIATVDEAIEDICVSFQEYEYLLSIPGFGPYISAVVLAAIGTAQRFENTHQVIKFAGFDLNANRSGKKSQSAVPVISKKGKAALRYAVYQAALIASSLNAQFRGYFHHLLQGREREKGIRTKMRVKLAAKLLVIAWTLMKKKQAFDPSYLKAQ

SEQ ID NO: 70646 - protein, 410 aa, unidentified
MKMAGIDVHKKVLMVVVVDTSVPEEKPVRRRFVTLPSELQRFRIWLQEQGVEEAVMESTAQYWRSVWLELEPHMSLHLAQAFSNRAPRGRKHDFKDAERLVRRLMADELILSFVPKGEQRIWRSLTRMKVQLTRDRVRLQNQMECLLEEMRIKLSIVVSNLLGASGLRILHALAQGETDPKRLAELGDERLHCTEEQLVDALTGRVQPMHRGMLALQLQRLQWIDQQMAQLNSMIAQAMKSHQDAVIRLAEVPGLGVDSAQQIIAEVGAQASTFSSAGELTAWVGTCPGKEESAEQNHSSRSAKGNKYLRRVLNQAAHAAVAKKGSYFQVVFRRLMPRLGYKSAIWAIAHRLCRVVWKILHEGVRYIEQGREVGPREKKQRAQMLARALRKLGYEVTITPINQLAPKPAI

SEQ ID NO: 70647 - protein, 369 aa, unidentified
MDQVVYVGLDVHADTIAVALADEGRAGEVRFYGTIPNSADSVLQLTKRLSAKGRTANFCYEAGPCGYGLYRHLTRLGFECAVVAPAMIPRKAGDRVKTDRRDAEMLARLWRADKLTPIWTPDEEQEAMRDLIRTRHQTMSALKSAKQQLLSFLLRHGLRYRSGGYWTKRHRRWLAELRKFPYPHQQLAFEELKRAIDQLESRINALDLTISETIKDWHFAPVVEALRALRGVNTIIAATVVAEIGDIARFENPRQLMAWLGLVPSEHSSGNTTRRGRLTKTGNALARTMLVEASWSYRHPPKEGHPFLKRSAHLPQEIRDIGWKAQTRLCKRFRHLSQTGKPQPRVLAAIARELSGFIWDIARRTPLPA

SEQ ID NO: 70648 - protein, 345 aa, unidentified
MFYCGMDIASKSSYLYVTTQSGRKLMSGEVDTAREAFEHRLQRYVKDGLTIAIEAGNQTAWIYDTLVAMGAKVIVVNPTKVKLIAESRRKTDKIDAKILCELLRINALPHPVHMPGKPARKLRGLLVARRQLISARTKLCNVVRGMVRQEGTLLPARALSTLTGWKDLLGKGFGQPHLAVIVTAYFDTFKALTTSIHGLDRELAACERQDPRAARLQTMPKVGRIAALTFLAAVDDPKRFPSARKLVGYSGLAPTVRSSGERTEYGSISREGRRELRAVWVQVAHLVAMDTSKATQPLRTWFNRTARRRGKKTALVALARRLLVIAYHLLCDETVYDPARLRRAG

SEQ ID NO: 70649 - protein, 311 aa, unidentified
MTDDTIGIDISKATLDIHRLSDGKTMSFSNCPAGFKALSRFCAKTAVARVVYEATGAYHSGLERALGAHLPLVKVNPLQARRFAQAQGLRAKTDAVDAKMLADMGNAFALEPDEPAAEIQHDLKELRSFRSGLIKDRTGIMSRMKTQTLSITRRQSKARLAQVDKQIAEINAEIERLINSSDTLAHSMKILRSIPGVGAICAATILIEMPEIGSMDRKQVASLTGLAPMTRQSGQWRRKSFIQGGRKIVRDALYMPALVAMRHNPDFKAKYQALIKAGKPPKVAITALMRKLIELANALIKADRNWVTKGA

SEQ ID NO: 70650 - protein, 415 aa, unidentified
MKTFAELTHFAGLDWAKDHHDVVIVDRQGLIVAQFTFPHSAAGWQQWRQCVSSYPALGVALETSSGPAVEQLLDSGVTVFPMNPRSAQSYRQRKAPSGTKTDQLDGWSFADGLRTDGQGWRPLAPLDPLVQELRLLCRDEVELTQQRTALVNQIQQALGEYYPAALEAFDDWTAPYTWEFVKAFPTPADLVKAGRRRWQNFLHAHKLYRPQTVDARLEAFAQATALTASPAITRAKSRLVLTLAATLLALEKHLEQYRAAIAQLFAEHPDHDLFGSLPGAGEKLAPRLLSEVGQDRHLFEDAQGLQCLAGTAPVRFQSGQVDRARIRWHCNKHLRYAVHLWADCSRKYCTWAQTYYQAHRAKGASHASALRRLGQRWLKILWTMWQEHKPYDPERHSRNQQKHGSWLLKLEPAKS

SEQ ID NO: 70651 - protein, 421 aa, unidentified
MRGLRARRVRTVKEGTLIATVDIGATTNTGYCTSTDGRDIRVFKFGNTREGFEKFWHMIVAAQNRFKCTEVVVGYESTGPYAEPLVHYLTDKPVKIGQVNPMHTKRLKEVNDNSPGKTDDKDPRVIADIIRLGRALSVVVPEGDTAYLRRLNNARERHIGERTALLNQMQQLVFLIFPEFKTVVKQMMGKTVRFILKNYTTPDKMGALDKKIFGEELHRRSRGRLGVKDAELLITAAQQTVGIKEGVAGIVLDILHILAQLDVVDGFIADIEVEMAVTLERIPCSARLLSIKGLGVVSVAGLIGEVGDFSKFRTQSEIMKLAGLDLYEVSSGKRKGERRITKRGRSLIRKILYFAAIQMIKKNGIMHEYYESLIGRHMLKMRALVAVMRKLLGVIHAIVRDDRDYVGEYGTPKRKVIKRAA

SEQ ID NO: 70652 - protein, 436 aa, unidentified
MTNNPMTKKAAGIDVGSERMHVGIQGEPVKIFQCFTDSLHALKDYLNTQGVTTVAMEATGVYWLPVFDILEEAGLEVFVVNGAHVKNVPGRKTDIQDCQWLAQLHQQGLLNAGFVPPAKIRKLRQYMRLRQDHVRSGAQHILHMQKALDLMNIKIHDVLSQTVGLSCLNMIRAMVAGERHPLTLLARCDAQVVKRKTADLTRALRGTWDEEHLFSLTQALEGYEFYQKQMAACDVEIGKVLNELAAEKPEPDPQQKPTMKSRRHNAPEVAELEKLMYRWTGVDLTALPCITAYSQMLILSETGTDMSRWLTHKHFVSWLGLSPGSRQSGKRRRNQKRYRGAAGKIFCVIARTLGRSKYLALSGFYRRIRARRGAQIANIACARKIAILFYNALKYGLKYVEQGLEAYEKKYREQSIQRIKRAAAGFGLTIVEAQVA

SEQ ID NO: 70653 - protein, 406 aa, unidentified
MELVALHKRVIGLDVHQAQITGCAIIEEANGTTRVEQRQFGAFKKDRRALAEWAAALLPDAVVMESTGSYWKSPYAALETVGIHAQVVNARHVKNVPGRKTDVGNGQWLATLARAGLVRGSFIPPAKLRELRLISRQRQKLVGQLASEKNRLHKVLTDGGVRLGVVVSDLHGQSARAMTKAIIDGLPPNEVLKFASRRLKASREELFDALQGELTDSHRFVLDELMRHVEEIEARIARFDARLLAQLKDARNALALLQTLPGVDLIGAAMLLVEIGTDMTAFGSADHLASWVGICPGNNESAGKRKSGRVRKGNPYVRRLLCEFAHAASRTKSVFKSKFQSLIVRRGHKRSIVALAHKILRTIFFMLHRNEPFRDSSTNYEALSVQRNAPRWIKALTRFGFIPAPA

SEQ ID NO: 70654 - protein, 337 aa, unidentified
MKYCGIDLHSNNSVVIVSDEEDRVVLSKRLPNDLGQIRAALEPHREDLAGVVIESTYNWYWLVDGLMDTVYQVHLAHPSAIKKYEGLKHSGDFADAAYLAHLLRLGLLAEGYVYPREERGARDLARKRLQLVRYRTAQILAIEGILMRQTGTRLKGEAVKRLTAEQVDEFAFAPDVSLAVQANRAVSQTLSQQIEALEKRLQQRVILRPEYRLLKTVPGIGEVLATTIMLETGTISRFTRVGNFSSYCRCVDSLKESNGKRKGQGNTRNGNKYLAWAFMEAANFALRCCPQARSFYDRKKSRSNRILALKALAHKLARACYHMLQDQKPFDVHLCFG

SEQ ID NO: 70655 - protein, 362 aa, unidentified
MSKASWLVSGVVPGVERQPLKKLEPDATALLRLIERWRNEAVRAGRPIRRIALAYEAGRDGFWLARWLIARGIEAHVIHSASVAVSRERKRAKTDRLDAAMLMRVFLGWLRGERGHCGMVAIPTMEEEDARRPNRERESLVNERSRIVNRMKSALARLGIRGFKPHLRKAPERLAGLRTAEGTGLPANIIEEFRRDMARLALVREQISSIEKARAERLERAPDTGPHAMVRLLARVIGIGIETADMLVREILSRNLRDRRALARYAGLTGSPDESGLKSREKGLAKAGNARVRRGLIQLAWRFLMFQKDSALAQWYRTRTEGPSGARKTTMIVALARKLLIALWRLVTTGEVPDGVELRPAA

SEQ ID NO: 70656 - protein, 355 aa, unidentified
MYGLKHQKEKRSMDHFAGLDVSVKKTSVCIVDDTGKIVREVKVASEPEALLAVLKNPAYQFKRIGLEAGPLSQWLYSALAEAGLPVICVETRHMRAVLKAQINKTDRNDARGMAQMMRVGLYRPVHVKTLRSQKLRMLLTHRQLLLSKAIAIENDLRGTLRNFGLKVGMVGKVKFEARIRELVETLPDLAVLVEPMLIVRRVLREQIVILHRRLLAVVRDDEVCQRLMTTPGVGPVVSLTYRATVDIPARFRKSKSVGAVFGLTCAKYQSGEVDWDGRISRCGDEMMRTMLYEAAQAMLRSKKWSWLKAWAMQIARRRGIKKAIVALARRLAVILHRIWVDGTEFRWTREQAVAA

SEQ ID NO: 70657 - protein, 344 aa, unidentified
MEHFAGLDVSVKETSVCIVDDTGKIVREVKVASEPDALLAVLTNPAYRFKRIGLEAGPLSQWLFSALAEAGLPAICVETRHMRAALKAQINKTDRNDARGIAQMMRAGLYRPVHVKTLRSQKLRMLLTHRKLLQSKAIAIENDLRATLRNFGLKVGVVGAVKFEARIRELVEKLPDLALLIEPLLIVRRALREQVVILHRRLLAVVRNDDVCRRLMTVPGVGPVVALTYRATVDVPARFRKSKSVGAVFGLTCAKYQSGEVDWDGRISRCGDEMMRTMLYEAAQAMMRSKKWSWLKAWAMKIARHRGMKKAIVALARRLAVIMHRIWVDGTEFRWSREQAGVAA

SEQ ID NO: 70658 - protein, 349 aa, unidentified
MRIIGGLDVHRSQITYDWVDTDTGQGHRGQLAPATREHLRGWLEQFTGRPASFALEGCTGWRYVVEELQRAGIAAHLAEPADTSAARGPKRRAKTDKQDARHLRELLARGTLPESWIPPTHVLEARTRVRLYKALLDEHTAWLQRIHATLFHHGVPAERNLLAAQRRDRLQRGSGLSPAARQLVMVALRMVDQLDAELDLLRAELTRFARHQPGCRALDELYGIGPVTAVAIWAELGDPRRFSSSRHAVRHTGLDVTVYSSDGKRTPGHLARQGPPVLRWALFEAAKCAARASSPDHAYYRTVKDRLGGNRAALAVARKLARRCHHLLRALGEQAYAPPAAAPDLGQVA

SEQ ID NO: 70659 - protein, 400 aa, unidentified
MISVGIDVSKGKSTVCILKPYGEIVSKPFNITHTQKDLSELSSMLFRLNDEVKIVMEATGIYHLPVLTYLQEKGFFVSVINPYLMKSYRNESLRKAKTDKIDSRIIANYGIDHWFKMKEFQISGVIYEELKLLGQQSRHYMKLHLLSLAELTHLLDLTMPGIKNLLASWNETNRKDKRSDFVERFWHYDVITSMSEQEFTEKYILWAKEKKYVPSQEKAKVIYTLAQESIPTLPSETSSVKMLVTEAVRVLKEVDATLGLILSRMQEIAKTLPEYSVVREMGGVGNTLAPKLIAEIGDVRRFRNGKALVAFAGIDPPPYESGQFVGCNRKISKRGSASLRKVGYETMRSLKMHSRPEDPVYRYVVKKESEGKSKKSAKIAGLNKFLRIYYARVTELYKNI

SEQ ID NO: 70660 - protein, 390 aa, unidentified
MERPMQKLNDLSRSLTALEPNGTLIAVIEMSLSSWLVAGIVPGVERQPLKKLAVDESALLKLLHRWREEAEKAGRRIERIAVAFEAGRDGFWLARWLKARGIEAYVIHASSVAVSREHRRVKTDRLDTELLKRSFLGWLRGERDHCKMVEIPTMQDEDAKRPNREHDSLIGERSRIVNRMKAALVRLGIRGFNPKLKRATTRLDGLHTPEGEPIPPNALAELRRDMERRRLVNNQIRQIEEERLERIEQAPCDGAHVMVRLLARVMGVGIETADMLVHEVLSRNMRDRRAVARYAGLTGSPDESGRKRREKGLARSGNARVRRGMIQLAWRFLLHQKNSALTKWFRSRTENARGTRKPMIVALARKLLIALWRLMREGIVPDGVVLRPAQ

SEQ ID NO: 70661 - protein, 412 aa, unidentified
MNAVGIDVSKGKSTVTIRRPGDVVIMPPCDIPHTQSAINCLIEQLQNLDGDTKVCMEHTGRYYEPVANWLSDAGIFVSAVNPILIRDFGDDSLRAPKTDKADSKKIARYALDRWAKLKQYGIMDKTRNQLKTMNRQFGFYMAQKTAMKNNLIALLDQTYPGANDFFDSPARSDGSQKWVDFVHTYWHVDCVRSRSPEAFKKHYQNWCKRKGYNFSAQKAENIYHASSDLIAVFPKDDNTKMLIWQAVAMLNTASRTVESLRLEMDKAASALPEYPVVLAMDGVGPTLGPQLMSEIGDVTRFTHRGALTAFAGVDPGKDDSGQRIRKSVPTTKKGSPYLRKTLFQIMDGLIKRSPADDPVYAFMDKKRAQGKPYYVYMTAGANKFLRIYYGRVKEYLASLPQTSDTEAEKDGI

SEQ ID NO: 70662 - protein, 290 aa, unidentified
MTAKKRQVTGGVDTHGKTHHAAAVDQAGRVLGDQQFPATAAGYQQLLLWLRAFGRVVKVGVEGTGAYGAGLARHLSASGITVVEIDRPDRKTRRSKGKSDPIDALAAARTALSGQATGVPKTRTGPVEAIRVLRVARRGAVKARTAALNQLHGLITSAPDALREDLAGLTGAALVQRCVDLRVEESTLTDPVHATNAALAAIATRITALNAEIAHADRRLRPAVARTAPALSRLFGAGPEVAGQLLTTAGDNPDRLRSEAALAHLCGAAPIPASSGRTDRHRLRECWVTQ

SEQ ID NO: 70663 - protein, 352 aa, unidentified
MSKDIILTVDYHDENCVIRRRDEATGEESVQTVPTTATALEKVVQAGMKVAKRRHGQVVWIQESTTGWARVQGLLGERVKFLLANVVQMPQPPKAVRRKTDRLDTARLQREYLNGQLPLAHQPPAWWRQVRRLVGWRENLVNRRTALRNWINRYLAHETWEGRANLWSGKGQAHLRKVAAGLPGCDGAILERKLDELDRLAEQMSWAEVQLHEVYGEWPAAQRIDAVRGIGVIAAVSIAARIGPIERFGNAEQLIAFAGLAPGVRQSDATRRDGRIGGGGTDRHLRHYLIEATVWARQIPRYQATYERVARRRGKKIGRLVVGRLLLRSIYKVLRDGVAFEGEATKTSAATS

SEQ ID NO: 70664 - protein, 326 aa, unidentified
MNSVRMHIGVDVGKSSLDVCFPDGKKEHLKNNKPGRARIIHAAKKLGAIVCFEATGIYEEDLANECLAAEVRAARLDAWKTRQYAKSRGRIEKTDRLDSEMIRDFASSLEEGKLPFVKPRSAAHSLIKEYAKIRENLMKARVVVSSQLEFVRDKSARRNIIAIVERIEREIARLEDECGKSVDEDERMSSLSRRFLEVKGVGPCLVRAIFAECPDIGSFSKKGIAKFCGKAPIASKSCTVEKQSRMRRGRQGLRQAFHMAALSASKHNHVLCETYRRLVANGKPKMVALGAVGRHLAILLNNIAKYPDFKIRHEPEDGKRKLHATG

SEQ ID NO: 70665 - protein, 367 aa, unidentified
MKKISTATTKKVEKVVSQKLTIGLDLGDRWSWYCVLNEAGEVVLEQKVATRPQAMKEVFGGMPRSRMALETGTHSPWVSRVLSELGHEVIVAHARNVRLIGESRKKDDRLDARTLARLVRIDPQLLAPVKHRSAQAQADLMAIRARASLVRARTSLINTARGVTKSYGERLRGCNPRNMNPERAQELSPELQAALGPLLGAIEALSERIGEYNERIEQIGKQSYPEVARLKQVKGVGTLIALTYVLTLEDAHRFGKSRDVGCYVGLQPGRRNSGQSEPQLHISKEGDPYLRTLLVQGAHHILGPFGADSDLRRWGLKLAERGGKNGKKRAVIAVARKLAVLLHRLWVSGEAYEPLRNQRQVALPAAA

SEQ ID NO: 70666 - protein, 398 aa, unidentified
MLTLYMVNNSLIGKAGVGEASVASRANTSRRREIGRVQVFKAVTEQDPRRHRGTSPNSRLNRRRATRSVSSHLQVREKTMSESVYVGIDVAKDTFNVACCPAVLKTSLPNTPQGHRQLRQILQKFSIARIVLEATGGYEKPIVAELLDAGLPVVVVNPRQVRDFARGLGQLAKTDSIDAEVLAKFAELVQPVARGQRTAQTADLAELVHRRRQLNDLRTQESNRLSLVHHREVHKSIQKMLKMLDRQIAEIDELISRHIQSNDDFRQKDRILRSTPGIGPQTSAILLAKMPELGSLNRQEIAALAGLAPWDCASGRWVGKGHIWGGRKDVRSILYMAALSARNCNPVIRQFAQRLEQEGKAFKVVITACMRKLLIILNTMIKNQSLWTPKIFLKTLEI

SEQ ID NO: 70667 - protein, 340 aa, unidentified
MQVSIIGIDLGKNSCSLVGLDVAGKVLLRRRLRRENVVAFLAKSPRCVVAMEACCGAHHMGRALAETGHEVRLMSPEYVRPYVKAQKNDDRDAEAIAEAATRPTMRFVALKSEEQLDMQSLHRARDRLVGERTALMNQIRSLLLERGFVVPQGKAKLAAALADLADGEAGALAPRMRALMMDMREQWRALDKRVATLDVEFSEAAKADEGARRLLSIPGVGPLNATALVAAVGDAAAFARGRDLAAWLGLVPRQVTTGGKPKLLGITKRGSKYLRKMLIQGARAALPTLRASDTRIGAWLRSLLARAHVNTTVVALAGKMARIAWALLRRGQIYAAVPAA

SEQ ID NO: 70668 - protein, 344 aa, unidentified
MTSMQTKYVGLDVHKNFIQGCVLDKEGKVILEQKFKNEPHSMDLFLSNIQQDSKIALESCSCWQYVYDYLSDAGYKELVLANPSRVRLIAESRKKTDRHDAKVLADLLRMNMLPESYAPPLDVRYERQITRHRLSLVRLRADVKRKINALLLRHGYQHEYSDLFGKAGMEQLYSLDLPMCDRFELDNYLKTIDFLTEKIKNTQDRVEDFVKYNPQARLLMSIKGIDYYSALMISAEIGDVRRFNSAKKIISYAGLNPSISQSGDRCYVGHISKQGNNNLRWILVECANIAIMHDSNLALFYHRIKKRKNHKVAIVATARKLLTIIYAMLMNNRNYVPQRKCKAS

SEQ ID NO: 70669 - protein, 316 aa, unidentified
MTPSGTFVGIDVSKVQFDVAVRPAGEHWTSAHTEAGITMLVARLVSLRPTLVVLEATGGLEIALTGACATAGLPIVVANPRHVRDFAKATGHLAKTDTLDARVLAQFAEAVRPTPRPLPDAQTQELAARLTRRRQLVEMLVAEKTRRGQAPGPIQKQIQVHLTWLERRLRALDEDLATAIRSSPLWREKDELLQSIPGVGPVLATTVLASLPELGILSRQQIAALVGVAPLNRDSGTIRGKRTIWGGRAHVRATLYMAAIVASRCNPMIRAFYHRLCAAGKAKKVALTACMRKLLTILNAILRTRRPWQDRWAPEA

SEQ ID NO: 70670 - protein, 375 aa, unidentified
MTIQTDGSRFVPRDFDVFAGLDVDKKSMSVVFTDHQGTMRALRMSGKATPLVNYVRKHFPGQRVAFAYEAGPTGFGLHDELAQQAYTCVVVAPSKVPRVPGERVKTNRLDSRKLAESLRGGQLHSIHVPTPGYRDLRHLVQLRDTHVRQLTASKLRIKSLLLYEGIPFPEPSEKWTARAMRELPTLPCSETVRFKLDDLLDTLHFHFQAAARATKQIRQFCLHDPELQQSINLLLSLPGIGWIVASHLVARLGDPQQIKNGKQIAGFLGIVSSEHSTGEKENRGPITRSGDSRLRNKLIQSAWTAIKKDPELRAFYRRIYQRQPKKVAARKAVVAVARKLTTRIYVVLKEQRPYVMRPVSSIAPLTVEETVGPRD

SEQ ID NO: 70671 - protein, 355 aa, unidentified
MDRYIGMDVHASSCTLAIISEKGRKLKDFPVETNGQALVEAIRMIPGHKHLVFEEGLQSAWLYETLNPHVDDIVVAGITTSRGQKSDKIDAYNLAEDLRTGSLDKHVFKAPRQFTRLRELSRSHMTLVSDTVRVQARIKALYRSRGILVSGANVYGVRHRKEWQKQLPSSIQTRATRLYDYFDFLLEQKEQAEADLIREAKKHPITKILETAPGFGPIRAARLLPIVVTPHRFRTKRQFWSYCGLGIVTRSSSDWIQTADGKWVRARVPQTRGLSRQHNHFLKHIFKGAATTVITQRNKDPIYQRYERLLDGGTKPTLAKLSLARMIAATVLRMWKDEKEYDPGRASPIAKTRES

SEQ ID NO: 70672 - protein, 296 aa, unidentified
MEKTGQWVGIDISKANLDVYLRPLGKTFQVANKETAISGLIEELQTYSLNLIVLEATGGLETELLIQLQAAQLPVALINPRQGRDFAKATGKLAKTDAIDAQVLAHFGEALKPQVVAMESDLARQLKELISRRRQVVEIQTAEKNRRDRSRGKALTDIEQHLEYLEQSLKKLNQEIEELTQSNQEWIDKVNLLKTIPGIGQVISTTLVSYLPELGQLTAKQISRLVGVAPINHDSGQHKGKRMINGGRAPVRASLYMGAVVAIRHNPIIKDFYERLLSRGKPKKLAITACVRKMLV

SEQ ID NO: 70673 - protein, 385 aa, unidentified
MITPKDRQVRTFGTMTQDLLELGEWLVAEGVTHVAMESTGVYWKPVFNLLEGSELELLVVNARHIKAVPGRKTDVKDAEWIADLLRHGLLQASFVPNRDQRELRELVRYRRTLIEQRAHEVQRVQKVLEGANVKLSDVATDIMGVSGRAMLRALIEGEQSPQALAEMAQGRLKRKRGSLEKALRSSVGAHQRYMLGHLLEHIEFMEREIKELDQAIGERMRPFEAAIARIDEIWGIGRRTAEEILAEVGLDMSRWPTHKHFASWAKVSPGNNESAGKRHSGRTGKGNRWLHSTLVEAANNVSRNRASYYGAQYHRIARRRGRKRALVAVAHSLLTAVYHMLRDGTVHQDLGAEYFDSLDRERATHRAVQRLRRLGYEVTLRPVAA

SEQ ID NO: 70674 - protein, 358 aa, unidentified
MKYVGIDIHKKMCQAAIIDDEGELLDEIRFRNDVEGIEDFALKLTTFRDEVKAVVESTGNLWIQVHDRLEEHGFNVVLSNPYKTRLIAEAKIKTDKVDAKTLARLLRADMLSTCYVPNKEERSRREVLSHRMRLVKTRTEVRNRIHSLLDKHGLRMPHKTPFSKKNVAWLRERSLGFMDDAILRSDLAVLESVDEQVGLMEEKIAVLAAEDPRVRLLMTMTGVGYFAAMLLLAEIGDIDRFGSDKRLASWAGLAPSVHQSGEKTRIGGVGGPGNKRVRWVMVQCVHSACRSDPRLRSFYERYSKRKGGKKAVVAVAHEMIRIVFFMLKRGEAYRGEDRGMTERKFKSLERLALNGLRN

SEQ ID NO: 70675 - protein, 456 aa, unidentified
MAKSKKAKMIKSPDGNKLAIVNPDAAGIDIADKEMQVCVPEDRDGDNNRCFGSFTCDLNTIVEWLQACRITTVAMEATGIYYLQLFLKLQDAGIEVLLCNPRDVKNLSGHKTDSADAEWLMLLHRYGLLKPCYQPGNAARQIRNLIRQRNNILRSADKQVLYMQKAMEQMNIKLSTVITDITGMSGRDIINAILAGKRDSMELASLAQANCKTPREDIAKALEGTWDADLLFMLQQSVDAYDFFNMQMKECDKQIEALLDAYQARLDAGTDALVRHKRKKSDRSKNAPEIDIEKYAFAIWGVNVFDIPGLKDLAVMQLIGELGHDFIDKFETAEKFCRWCNLTPENKISGGKILSSRVQKRKNPVGQIFRKAAAPMAREKSEMGNYYRRIRAKSGALQANVATAHKIAKIFYTMIKTKEKYNPAKVGLDEREITQKKILRLERALEKLNQKHKMAS

SEQ ID NO: 70676 - protein, 430 aa, unidentified
MKSNTQNAKIEAITEKTLVLGIDVGSETHYARAFDYRGIEYSKKPFKFSNTEAGFATFKEWILDLKERHEKDKVVPGMEPTGHYWFNLGKFLQDNEMKPVLVNPHHVKKSKELDDNNPTKNDRKDPKVIAGLVREGRYMIPYLPEGVYADLRTASNIRFQLQAELTRIQNRISRWFNIYFPEYKTVYGKPDAKSGMLILKAAPLPEDILTLGIDGVNQIWRDAKLRAVGKARAKTLIEAAEHSVGSKEGAVSARMEIRMLLEDYESRNIRLQEVMALIEGLVKQIPMAEKLLEIKGVGIRTVSGFLAEVGDISRFNNPKELQKLAGLALVENSSGKHKGETTISRRGRKRLRYLLFEVAMSLVSKNQEFRELHNYYTTRRLNPLKKMQSLMAIAAKLIRVFYAMLTKGVDYDPKKMVSDIKRPAVYLQAA

SEQ ID NO: 70677 - protein, 355 aa, unidentified
MNKINSNFEGQTIFVGMDVHKSSWNLGIHLNDMFVKNVHQRPNPTVMANYLKQHFPGANYKAAYEAGKFGFWIQRQLTSLGIECLVVNPADIPKSQKDSLQKTDPRDARNLGLRLQSGVLHGIHIPDEQQEADRMFFRHRKRIWKDLCRCKNRIKGLLAFTGIDIPDQYDNASWSHNFINWLKALDCKQKSRRRALDYMIMQMEYLRKDLLTISNEIRKMMREQRYKTNYYLLRTIPGIGPLTAASILVEIGDVKRFETFCHLNSFVGLLPMEHSSGQSENKLSLTVRKHRQLRSDLVESAWTAKRTDPAMALYFQEQIKRKDSKIVIIKIARKLLNRIRFVLINQQPYEFGIVK

SEQ ID NO: 70678 - protein, 420 aa, unidentified
MKEPVINDFAALVGIDWADKKHDVCEHVIRSEHYHYSIISSQPESLHDWAMSLKKRYPKQAIAVACELTKGPLIYALSKYNHLTLFSINPSTVAKYRKAFTHSGAKNDPSDAFIQTEILEQHMDKLDVIRPESVNVRALAQLLEYRRKVVQDRVDLTNRITATLKNYYPQALDWFKEKDTALFCDFLIKWPSLDIVKKARKKTLMTFFNAHHSRYVAVNEKRVEAIKSAMALTDDLGVIEPNQIMVEVLIPQLKCLLESIERLDKEIKQRYKNQSDRKIFDSLPGAGPQLAPRIMVAFGSDRSRYKCANDLQKYAGIAPVIEQSGQKKWTHWRYSCPKFLRQTFVEWAGQSVRYSFWAKAYYEQQLSKGKPHNTIIRSLAFKWIRIVFKCWQTNTPYDESKYLKALKKQGSPLLNFAANN

SEQ ID NO: 70679 - protein, 402 aa, unidentified
MNAVGIDVSKSKSVVAIMRPFGEIVSTPFEIKHTASDIHSLIELINSVEGESRIVMEHTGRYYEVLAHQLLEANLFVSAINPKLIKDFDNDSLRKVKSDKADAVKIARYALDKWQNLKQYNVMDELRNQLKTMNRQFGFYMKHKTAMKNNLIGILDQTYPGVNTYFDSPARSDGSQKWVDFASTYWHVDCVRKMSLNAFIDHYQNWCKRKKYNFSQSKAEEIYGKAKELVPVLPKDDITKLIIKQAVNQLNSASTTVESLRTLMNETASKLPEYPIVMAMKGVGASLGPQLMAEIGDVSRFTHKGAITAFAGVDPGVNESGSYEQKSVPTSKRGSSDLRKTLFQVMDVLIKTHPQDDPVYQFIDKKRAQGKPYYVYMTAGANKFLRIYYGRVKEYLSSLPES

SEQ ID NO: 70680 - protein, 350 aa, unidentified
MIIIGCDYHPSFQQIAFVDTETGELQGRRLQHREEAEKFYRDLAAQGMKVRVGMEASGHARWFEQLLAELQFELWIGDAAEISTKRVRKQKTDRQDAQLILELMLEDRFPQIWVPSWENRDLRQLLWHRHRMVQARTRIMNQLQAVALNEGLRCKKRLWREAGREQLEGFRLAPWASLRRRDLLELLDRLNPTIAKLTQAIEQEVEKRSEAQRLQTHPGVGPLTALAFVLIIGRADRFQCGKQIASYLGLVPLEKSSGNQRRLGHITKQGNSLLRFLLVEAAQVTARSLPEWRSKYVHLTMRRGRKIAKVAMARRLAVRLYWMMRKEWNYGQMKKFGSHAGQPGTGDGVK

SEQ ID NO: 70681 - protein, 365 aa, unidentified
MSNYKIGCDAHRRFSQFAILDADGQFIEQVRVNHEPGAIRTFLAEYPSGTPVALETVGNWYWIVDEIEEAGCVPLMAHAAKAKVMMGNVNKTDKLDAQGLATLLHLGSLPSVWLPPHEIRDERELHRTRMALSKIRTSLKNRVHSTLAKYALSLDTASDIFSPKWRPELTRACNALPPETHRCMEQHLRTLDHVQSQINKLEERIKQRVEATPNIQLLKTLPGVANILSIVIEREIGNVNRFPSSAQFASYSGTVPTVKGSGGKIRYGRLRKQSNQYLKWAFIEAANVVVRQRRHPNWRPKHVTILFERIRRRKGHSIAVGAVARHLSEAAYWMLRKQEPYKDPARQVVYQDKGQRGPNMVNVKP

SEQ ID NO: 70682 - protein, 424 aa, unidentified
MKVTFQTCCGVDVHKSFLVATIIKTSSGIEPSYQKRRFSTFNNSILEFKKWLLENECLYVCMESTGKYWIPVFNILEDEINVTIANPKWVKSVKGNKDDTKDSKWIGDLFRLGLVRGSYIPCKKIRILREFTRYRYKLVSCRSSEKNRYQNALTVCNVALDSVVSDIFGKSSTSIIDYLLEQSGTSIDHEVIASKLLKRLKAKEDAVIESIEGYQMTDSQKYRMHLVRAHMDYITAAINDVDSEIESLIASDPDYENAVELLCTIPGVKYDSAITIISEIGIDMSQFCSSKRLCCWAGLTPGSNESAGKKKSVRITRAGVYLKPALVQCAHAAVKSDKSPYYKKKYESLVKRRGKKRAIIAIARMILTAIFQMLTTGETWNPCDLYKIDMPEALLEKQKQKAIKQAQKLLIREGLLPPTEPIAS

SEQ ID NO: 70683 - protein, 336 aa, unidentified
MIHIGVDLHQRFCYCTAVKASGEVIAQRSVVNEAESLRRFVRSLPQPAQVVVEACGFWPAFKKAIEKEVERVVMVHPQRVKAIASARLKNDRVDSATLAHLSRCDLLPEAWMADEATRQLRLQVRLRLTLGRQRSRFKNLLQAVLHQEGQRKPVSDLFGKRGRRWLASIELSEAARLVVDTYLPLIDDLNLKIAEQERRLAKLAKDDVRAHWLQTIPGIGAYSAMVILAEIGNIARFPTKKSLASYAGLVPRVHESAGKRSYGSITRAGSETLRWILLQVAQVAARNAPAARSYYERLKRKKRPQIAKVALGRKLLCAVWALLRHGVCYDDQVFAA

SEQ ID NO: 70684 - protein, 312 aa, unidentified
MTKIICGVDVSSEKLDARIGHDGPSMSVECSEEGVSALGAFCKNHGVELVVMEATGGYEKLPFALLWGQGLPCAIVNPRSVRNFAKGMGFLEKTDRIDAGIIAWFGEAKRLVAQEPASDAQKRLRALVTRLRQLTELRTGQTNQRRLLSEAEVQASIDELVAFINRQIRSCEKAIVALLDSDPLWRVLDKTFRSVKGVAGRTVARLMAELPEIGTIPNKAITKLAGLAPIANDSGKRKGKRPVRGGRTHVRSILFTVAEVVRRYVPEFAALHRRLNDAGKLKKVVRVALARKLLVWLNAKARDARKEFACAT

SEQ ID NO: 70685 - protein, 465 aa, unidentified
MTAEKKLWRNRKERKEWGRRLRSEDPSLQVVHPHAAGIDMGNGAHYAAVRPDRDPEPVRRFECFTADLHRLADWLESCGVRTVAMQSTGVYWIPLYEILDERGFEVYLVNARHTKNLPGRKSDVQESQWLLKLHTYGLLNNSFQPSAEIRVLRIYWRQRAEHVQGAATCIQRMQKALTQMNVQLANVISDVSGLTGQTIVRAIVAGERDPRKLAELSDPRIHASREEIAKSLEGHWRPELLFVLQQEIQMYDIYQERITECDRQLQKHLASFADPVPAQPAEETVNRKKAKPAKNAPRFDLSSELQRITGVDLTRIDGIDIMVAQTLVSEVGLDMSRWKTEAHFASWLGLCPDNRISGDKVLGKGTRRVINRAATALRMAANALMRSRTYLGAQYRRLRTKLGAPKAITAMAHRLARLVYRMLKYGQRYVDKGAEYYEQRYRLQQIQLLRKKAAKLGLRITPAGA

SEQ ID NO: 70686 - protein, 423 aa, unidentified
MDILIPCCAALDVHKKFLVACRRRLLSDKTVESQTRRFSTMTRNLEALAAWLAEWACTDVALESTGVYWQPVYNILQEHFTICLVNAAHVKQLPGRKTDVNDATWLAQLLQHGLLRGSYIPPIEQRELRDLTRYRQSLVEERTRILNRLQKVLEDANLKLASVATSIQGITAQEILRSLVAGETDPVVLANLARGQLQKKKTELEQALTGRFRPHHRYLLGQLLSHLDYLDTEIADLDARIDGMLKVLLPFAEAVEHLDTIPGIERTTALIIVAEIGVDMSRYPNDRHLAAWAGLTPGNNETGGRQRSSPIRKGNRYIKRALVQAAWAAVRKKGSYLREMYYRLAQRRGPNKAIIAVARTLLQIAYHLIIRKEVYKELGSKFFDERDRERTQQRLVKRLQSLGFVVTIQDEVRPTAEHSFAAA

SEQ ID NO: 70687 - protein, 401 aa, unidentified
MVSDFRKGRYNLMKIFVGIDIAKLNHFAAAISSDGEILIEPFKFTNDADGFQLLVSKLESFDKNSIIIGLESTAHYGDNLVRYLVAEFYQVCVLNPIKTCQMRKNNVRKTKTDKVDTFVIAKTLMMQDDLRFITFFDLDMMDLKALGRFRQKTIKQRTRLKIQLTTYVDQVFPEIQYFFKSGLHQHAVYALLKEAPSPKEIASMHMTHLANLLKVNSHGHFTKEQAKELRVLAQKSVGANDSAISIQITQTIQQIELLDSQLEKIEAEMTDIMRFNDSVIMTIPGIGYINGGMILGEIGDIHRFSNPNKLLAFAGLDPSVYQSGNFQAKTTRMSKRGSRVLRYALVNAAWNVVRNNATFEAYYNAKRAEGRSHYNALGHCAGKLVRVIWKMLTDEVDFNLE

SEQ ID NO: 70688 - protein, 361 aa, unidentified
MNATTVAVDLAKSVFQLAVADDRWRVVETHRLSRTQFERWFANRDVRLVIMEACGSAHHWARWLIGLGIEVKLLPAQYVRAYVKRNKTDAADAAALLEAARASDIRPVRVKSVEQQALQGLHRIRSLWMGTRTSRINALRGFCREFGIPIPVGARTGLEAIGRVLADPHTAVPELIRGTASLLMEEIRLLEARIAQLERELTHMARLSPACKTLLSVPGIGLLTATAMVAATSGDVSHFKDARHFASWFGLTPKEYSSGSTRHLGRISKRGDRYLRMLLTHGARSVLRAAKVASGAGREVCGVRRWALDVQGRSNHNKAACALANKLARICYATLRDKEPFAEGAVPLAKKINRQAFVMPA

SEQ ID NO: 70689 - protein, 354 aa, unidentified
MTDQPQIIGGIDTHTDVHQAAVIDTFGRRLATAAFPTTPAGYHQLLDWLRSYGTVTAVGVEGTGAYGAELARLLRANRVSVIEVDRPDRRTRRAHGKSDPLDAYAAADAVLAHRAQGTPKTRDGIVEAIRALRLVRASAVKARTQTTNQIHALITTAPSPVREPLRALPTAELIRHLARSRPGSDPSDPACATRTALRRLARRHQHLTEEITDADTELRPLVTQAAPQLVTLLGVGTQTAAQLLITAGDNPDRLKSEASFAHLCAAAPLPASSGRTHRHRLNRGGDRHANSALHMTALVRMRHDPRTRHYVARRTTEGLTKKDIIRCLKRAIAREIYKHLTSTTTTNTPPPQDN

SEQ ID NO: 70690 - protein, 413 aa, unidentified
MSADVPVQPLPVVAGVDTHSETHYAAVISVTGQELGAVEFQTTESGYRALEAWITSLGPLLRVGVEGTGSYGAGLTRHLQKDGITVQEVLRPARRLRRMKGKSDKIDAYAAARTALSQVAPVVPKAGDGPVEALRVTMMAYRSAVKAHTAAGAQIGSVLVTAPEEMRARYRGMSGEPLVRALAAARQRAGEDEVARATRTTLTRLARRSQFLADQSQAAEDDLKRLVTQINPGLLQARGVGPVTAAQLLITAGDNPERITTEAGFAALCGTNPVPASSGRTTRHRLNKSGDRQANWALQMIVENRLSNDHRTIGYQTRRIREGKTKTEINRCLKRAVAREMHHLIVHPRPPVDVTDLGPRRKALNITQLQAADHMRVSNATLSRLERGKTFAPDLYHQYTHWLTELENPQQTS

SEQ ID NO: 70691 - protein, 398 aa, unidentified
MKRYIGLDVHKDFTMIAIMNGRQETLQSPYKVRMGGFNKWMAENITQEDTVAFEASNGCWEIYDRLSEHTPNVLVANTNELKVISKSDVKTDKHDAMVLAKLTSVNMLPTIWVPPVEVRELRSLMAQRKQLIKMRTMTKNRMHGILMRRHIRKPMKEAFRDQHKEWWLDLPLTKVEKLQIKQGLEQIEFLNKQISEIEECVAELSTQSPWKEQAAFVMQSTGIGLNSAMTILAAIGDITHFPSDKKLVGYSGLGSRVHASGNTNRTGKISKQGRKELRTTLVESAWIAIRYNEFWKEEYERLTTRKPANKKITIIAHKTLVVFWHVTNKKAIDRNTTKEATAKKDMKWAMTYQCATKQDLSRPAFVQQELDRLGIGVELKRFKYGSKYYNLPVSSLSS

SEQ ID NO: 70692 - protein, 355 aa, unidentified
MDSTKYIGMDVHKESISIAVRNVAGKVVMECVIETKASMILEFIDGLRGDVLVTFEEGTWAAWLYDLLKPHVTRLVVCDPRRNALLQEGNQNDRVDARKLAELLQNNQLRPVYHGDHGLRTLKELVRSYLTITKDLSRTMTRVKAIYRSWAIPCTGKQVYSSRHRAEWLGKIVEPGVRRRAEFYYQQLDALRSLRQEVRRDLLAESKKHKAWKRLCQIPSIGPIRAAVLLGILQTPHRFRTKRQLWTYSGLGIEVYSSADHHVVKGQLERKKKHVEIRGLNDNCNHDLKNLFKGAAVVASTKPGPFEEFYAALLAKGTRPEMARLTLARKIATIVLIVWKRGVCFDANHLKPQTA

SEQ ID NO: 70693 - protein, 418 aa, unidentified
MKSMEITAVGIDVSKRKSTVAIRRPGGVIVACPFDISHSSHDLEKLVSILKTTGGDIRVVMEHTSNYWKPIALTLKNAGFYVSVVNAMLIHDFSDNSIRKLKTDRADSLKIANYALTFWNQLPPFNDEDETRLVLKEQSRMYERLASTATSLRNGLIALADQTFPSIDQAFGHAIKNADGHEKWVDFFSIYWHRDCVLRLFIEKFTESYRKWCLRRNYKFRTNTAHKLYALAQDAVPTLPKNNGTKALVLQACKSLNAVCEAKQSTQEEMNRLASLLPEYEVVMQMEGTGPITGPALMAEIGDVRRFKNKKALVAFAGIDAPPFQSGNFESKSRHVSKRGSPHLRRTVFLVANIILTLSHKDNSVFCFMDKKRAEGKHYYVYTIAGSAKFLRIYYARVSEYLRTQEPPAAAICLDCKD

SEQ ID NO: 70694 - protein, 363 aa, unidentified
MASPPILDRLTRLSLFTEGEMREKRYIGIDLHRRRFTCCVRLASGRNYLSEWNLQQLPEFAKRLRPTDEGAVEVTGNTRLFYEAVAPHVERVVVVDPNQFRVISHSVKKTDLNDARNLALYLAKGLLPEVRMKEQPQAEVASLTQTRDRLVKLRTALKNKVNNLLSARGIELEKEDLPSEKGLERVLGHDGLEGLAQVELEIIVEEIRSLNRNIRRLEEVIEEAARKLPGYTNLTSIKGIGALGAGVLLSVIGDVKDFPEEGKLASYFGIVPRVQNSNETEHRGRITKRGTKLGRTTLVQCALIAKRYSPYLNRYYEGIRARRGTGKAIIALARKFLGIVYTTLKNNWVFEDFPNFVLAEVKT

SEQ ID NO: 70695 - protein, 343 aa, unidentified
MVYIGMDVSSKDFVIHAIDQRKQKVFEGCVPPSRAGLRKLVEDLGDGPKLFVFEAGNQTKWIALMLMRQEGVKIHVVHPNEVKWISQSSGKTDKVDARKLAHLARGSLLPRPVHIVEGKTRALRELVSAREQLQGKRVALINALRGYIRQEGVRFPAKFFQRPGWKASLEKLSVGPTQRLIFKSFMEAIDALKRSEEKITARMLEVQDSRCDLLETIPAIGKITSRVLVGALDDAGRFDNKKCVANYGALTPTIYQSGGTTHLGRINRDGRQEVRKVLLQCAHTIQRTASHHAAPVREFFERIEKRRGKKRAVVATARKLLTIAYGVLKSGVPYDPERLRAFA

SEQ ID NO: 70696 - protein, 342 aa, unidentified
MKISKKVVRLGIDLGKNNFHLSGVDEAGTLAIKKKLSRKQLVTYLANVSPCLVGMEACAGSHHWAREIGKLGHEARLMSPQFVKPYVKSNKNDYNDAEGICEAVSRPGMRFVSIKTVEQQDVQALHRMRQLVVKYRTALANQIRGLLGEYGIVIAKGIGHIPRRVPEILEDADNGLSERFRGWLVQMWEDFVSMGRRIGLYDKQIRQLYEADEACQRIGAIAGIGPQTATTIVATFGDGKQFSHGRQFAASLGLVPRQHTTGGKPHLLGISKRGDKYIRTLLIHGARSVISKVEGKSDKRSRWLQSLIARRGKNRAAVALANKNARIIWALLSRGDSYRMAT

SEQ ID NO: 70697 - protein, 423 aa, unidentified
MAGVMIGIDPHKGSHTAFVIDGREKPLGQLRVRASCEQAEALLGWAGRWRQRTWAIEGARGLGQLLAQQLLAAGERVLDVPPKLTARVRLLESGQINKTDENDARAVAIAALRARQLPQLTVEDQTIVMRVWARRYHDLGRLRTQAVCRLHTVLCELVPGGVRKQLRTSQAIAVVDSITAESPVAQAKLELAHDLVADLQRLDAQRREVKRRVSRAVAAAPTSITEVYGVGPIVAACVLGYVRDIRRFPSRDRFASYNGTAPIEVSSGDRKIYRLSRRGNRQLNHAIHIAAVSQISHRGSEGHAYYQRKRAKGMTGKCALRALKRKISDTLYERMLHDIRQRKDPGGHSGNDAVSSAAGSHPDGPALRTSHSRATANSKTATTNQRPLTSPPAPDKRRTSRSGTGVKLQPRPRPRRGRGQERA

SEQ ID NO: 70698 - protein, 405 aa, unidentified
MYVGVDWGSQQHTVCVLDQAGGKVAAFSVAHSAAGLGELIARLRRLGDPAERPVAIERPDGRLVDRLLEAGHPVVPVPPHALKAWRRAQSLAGAKSDPGDAALLADYLRCLQHRLRVLQPFSAHTRALRAVVRTRDDLVDQRVAASNQLRACLEAFWPGAAVIFADVCSPIALAFLERYPTPEAAQRLGEQRLAAFLVKHGYCGRRPAPQLLGRLRAAPTGLVGTVEAEARRDAVWALIRVLGALNGAIKDLDRSIVAHLGEHPDAPVFTSLPRSGKLNAAQVLAEGGDCRQAYDGPDAIACLAGVVPVTRRSGKHTSVSFRWACNKRLRRALCIFADNSRHASPWAAKVYADARARGLDHPHAIRVLARAWTRVIWRCWQDEVPYDPAKHRAAQRLTETADSAA

SEQ ID NO: 70699 - protein, 347 aa, unidentified
MEIVVGIDVSKERLDVAILPQEEVFAVGNDHAGIDELVERLKGIGVDAIALEATGGFEMLAVAGLSAAGLTVLVVNPAQVRAYAHAIGRRAKTDPIDAAVIAAFVLATKPEIRPLRDAETQALSELVARRRQIVQMIVAEENRLRMALAKQAQKSIKRLLKALRRELESLDADLDSHIRKSPVWRVREALLTSVPGVGATTARTLLAELPELGSLDRRQIASLAGLAPWTRQSGKWKGKSFIGGGQGTRRPIHGRPRRQPIQPRPQGLPRQAGRGRQAQDRRHRRNHAQAAHHPQCHHQGRTTMAKRLTNKTVALPACGAKGDCRDLSVPRQPLAGHVPSPRLRGEG

SEQ ID NO: 70700 - protein, 348 aa, unidentified
MSILAERVEFVIGVDTHKQSHVAAVVSANGGKLDEREVPATQCGYEELIGFADQHRGRRAWAIEGTSSYGAGLSRLLVARGEEVIEIDSPRRAKRRRGAKSDSIDAVRAARDALAQHRHATPKHGDTRAALRMLLVARSSAVDAYATAQRQLHDLVVTCPESLRAKLRNRTPRGLLSACEHLRQPAHGDIHTATTVSTLRSLAKRIRTLRNEAKDHQKAITELVRSWRGDLLELFGLGPIGAAIILCSWSHPERFHNEAAFAMLAGVAPLPASSGQITRNRLNRFGDRQLNRVLHVIVQHRMQRDPTTKAYVQRRRAEGKTTAEIRRNLKRYIARQLYRQLQNPPTTT

SEQ ID NO: 70701 - protein, 373 aa, unidentified
MKKVRFLGLDVHAETIAVAIAEPDGEVRSLGIIPNREESVRKLVKKLGPAEQLQVCYEAGPTGYVLYWQLTALGVKCEVVAPSLVPVKSGDRVKTDRRDATKLARSYRAGDLTAVWVPNEEHEALRDLVRAREAAKQDQLRARHRLSKFLLRHGRRVPAGIKVWTQRYQDWVKEQVHFAQPAQEYTLLDYLHEVEHMGDRIRRLEKAIEEAVKLAPQRMREVIQGLQALRGIAQISAVTVVAELGEISRFQGARQLMGYSGAVSSEHSSGKRIQRGQITKTGNAHLRRIAMEAAWAYRHRPTIGAALRKRQEGLSEEVKEIAWKAQHRLHKRYRNLLAAGKEKQKVVTAVGRELLGFIWAIGVQVERNSKPVA

SEQ ID NO: 70702 - protein, 343 aa, unidentified
MQVVTTIGLDIAKSVFQVHGVDAAGQVLIRRQLKRRAVLAFFQKLPVCLVGIEACASSHYWSRELQALGHSVRLMPPAYVKPYVKRQKNDMADAEAICEAVARANMRFVPTKTPEQQSCLMLHRTRHLFIRQQTAVINSIRAHLAEFGIVAPVGRKGVTELLHIVADPSDKRVPEVARACLAALGNQLLSIKEQIVEFDRMIMVWHRSNETSKRLHYIPGVGPMLATALVASVADPRTFRSGRNFSAWIGLVPKQHSSGGKDRLGSISKQGDRYLRSLFVAGALAVIRYAKIHGTKHRPWLTALLARRPTKVAAIALANKLARMAWAMMARGERYRQPVALAA

SEQ ID NO: 70703 - protein, 341 aa, unidentified
MNVYIGLDVSLRSVAMCVVDLKGAIVEELNLPCEVESIASHIEAADYQVERIGFEAGAMSQMLFHGLTAKGFDTVCMEARQVAAALSAMRNKTDKTDARGIAHILRAGWYNPVHMKSRESHDIKALLAARKAILNKCIDLENEIRGLFKAFGIRLPSHVSRLRFDEKVRPIIEADEALAFALLPMLDVRGALYDTYRLMEQRVIVVSRHDPVCKLLMTAPGIGPITALSFKAAVDDPTRFNSSRLVGAHFGLTPRRFQSGEMDNPGRISRAGDKDVRATLYNAANSLLLRSTRPSSLKTWGLRLIRTKGTRRARIAVARKLAVILHRMWVTNTPFKAEGTA

SEQ ID NO: 70704 - protein, 394 aa, unidentified
MKLVGIDVGKNSHHFCVMDKETGEFNVTPSSFSNNKEGFDFLINSLKPYSKKSILLGMEDTGHYHVALLKFLLSNGYTVALINPKTTDLTRKMEGGITKNDKLDTITICDVLDTPERKKQYRITKVDRFDLYEQRQLTRHHHNLKEELNIYCNRLQKSIDLVFPEFNTLFGSKYGVVYMNLLKTFGSAEAIASTDIRTIRKCFEIKGRGGRISLTAEKLKECAKNSIGISSEVETIQIKHLVSQIMLIKEQIAEIDKKIEEFSIKNNSPILSIPGISHFSGTSILAELGDIGNYSKPSRIIKFAGVAPYHYESSQYNAQHTAITKKGSKYLRKTLYQVILPVINNNPVFQKYYRLKISQGKGHRCAQGHCIRKLLRIIYHLLETGQSFDPALLR

SEQ ID NO: 70705 - protein, 321 aa, unidentified
MPTFYLGIDVAKAKLDCALRLPNGKFRTKVIANSQDGFATLVTWLTGTEARDVHVCMEATGVYWEDVAQCLATQGLTVSVINPAQIKAYAASRLTRTKTDAVDARLIAEFCAERHPPPWQARSQAEVALRALVLRLDALQAMRTQESNRLEVARDAVRANIQEHLNWLDQQIKSLIKAINEHIDSNPDLKGKRELLESIPGIGERTIAILLAFYAEPSRFANSRQAAAFAGLDPRRQESGTSVKTKPRLSKVGHAFLRKALYMPAMVTLYKTAWGQPFKNRLALSGKPAKLIIGAMMRKLLHVAFGVLKSGKPFDPALHGT

SEQ ID NO: 70706 - protein, 341 aa, unidentified
MMIIGCDFHPRFQQIAYVDLETGEFGERRLSHPEEAERFYRSLAGTQVRIGLEATGNFRWFRQLIEGLGYEFLLGDPSAIRAASPRRQKTDKRDARHILQMLLEDRFPAVWQPSVENEELRQLLLHRCRLVRLRTRITNQLDSMAKNEGLLGSKSWSAERRRRIEALPLSGWYMRRRTDLLDLLDELEKRIEPLEEAAVEAAEKNQQACLLMTHPGVGPIVSLVYVLTIGDWKRFPRSKELASYLGLIPAEESSADKRRLGHISKQGNTLLRWLLVQAAIGAQRSDPSWHRQYLRLSLNKHHGVAKVAIAHKLAVRLYWMLRSGQNYKQVMERGSHAGQPV

SEQ ID NO: 70707 - protein, 378 aa, unidentified
MKRVRFVGLDVHAETIAVAVAEADGEVRSLGVIPNRAESIRKLVKKLGPAEELRVCYEAGPTGYVLYWQLTALGAPCEVVAPTLVPVKSGERVKTDRRDALKLARSYRSGDLTPVWVPDAAHEALRDLVRAREAAKKDQLRARNRLSKFLLRHGKRPPAGVKSSWTGNYLLWIKQEVHFEQFAEEFTLLDYLHEVEHAAGRVERLDRAVEEAVKSAPPPMRAVIEGLQALRGIAQVSAVTIVAELGQISRFARARQLMGYSGAVSREDSSGERVRRGAITKTGNAHLRRIVMEAAWSYRHRPAVNRALRQRQEMVNEEVKEIAWKAQHRLHARYRKLTARGKNQGQVITAIGRELLGFIWAIGVKVEGAQKEPLQRAA

SEQ ID NO: 70708 - protein, 345 aa, unidentified
MDHIGIDLHKNSSQVCILTEDGELIERRIKTDRESFDKLFGERPPARILVESSTESEWCARHLEALGHEVIVADPNFAPMYATRNRRIKTDKRDARALCEACRLGAYRPAHRTSDRQRDVRAHLSVRETLVRTRSKYISLIGALARREGCRIEAGPSPSFARRVEQAGLPAHTLAQIEPLLAMLGVLNEQIKLADKRLEEIVKADEVVRRLCSVPGVGPVVATTFAATRDDASRFLGAKQVRSYLGLVPREYSSGERQRRGRISKAGSARARSLMVEAAWSLLRWKTGQTKALHEWWARIAQRRGKATAVVALARKLAGIMFAVWRDGTQFDPLLLRPGDQAAVT

SEQ ID NO: 70709 - protein, 424 aa, unidentified
MKLQPDTEFAAFIGIDWADVKHDICLQPVNIDTREFDVLPHRPDAIEQWACSLRKRFQGRPVAVCLEISKGPLVYALQKYDFLVLFPVNPATLAKYREAFTPSHAKADPSDAEIALELLLCHRDKLKALSPQSASMRTLEQLVEQRRRLVGDRNRITNRLTGALKQYYPEVLDCFEEKDTLLFCDFLAHWPTPKDAKRARKATLAAFFREHHVRSAGLIEERLRVMKSATPLTEDVAVITPNRLLVQALVEQLRVALHAIARFDAEISTVSKTLPDYPLFSALPGAGPALAPRLLVAFGEQRQRYASAAEFQKYTGIAPVTESSGKKHWVHWRLRCSTFMRQTFVEWAAETITRSFWAGVYYRQQRAKGSSRQAALRALAFKWIRILYRCWQTRTPYDESTYLNALKRRGSPLLTSIGATTKNT

SEQ ID NO: 70710 - protein, 437 aa, unidentified
MKTLAVLDPRAAFVDVGSEHMHVSVAGEEPAVFGTVTSQLHALRDWLKSQDVRSVAMEATGVYWLPLYGVLEAAGFEVRMVNGRQTRNAPGRKTDMKDCQWGATLHMHGLLNAGFVPPADIRRLQDYLRLRADHVASAASHVQHMQKALERMNIKLHDVIASLAGMSGLAVVRAIVAGERSPEALLALCDQQIRRAKAEQVKEALRGTWEAEHIFALRQALQSWDHYQLQIAECDHQIQAVLPPHDPDQPPLPRPKTPKRAGVNSPDIPKLREILAQMCGGRDLTQLPAHTHYGVLQIVGEVGTDLTKWRTEKHFTAWTGLAPGNHDSGKRKGHVKRGRNRTGRLFCMMAQSLVRSKHIALGGFYRRMAARRGGLIATMALARKLAAWYWRVMVKGDDYVEQGLAHYDAQVLQTKQRALKRLAKELGQQLVPIAQPA

SEQ ID NO: 70711 - protein, 417 aa, unidentified
MQVVRPICCGADIHKDIIVATIATSNQNGIAEYIQRKFCTQNYDLINLKSWLKEHNCFEFAMESTGKYWIPIFNVLEDEIKVYVVHPKYTKSIKGKKTDKKDSKWIAELFRHGILTFSFIPPREIRELREISRYRIKLVAMRTSERNRYQNAMTVSNIGLASILSDPFGKSSKTIMEEVLKSSSLSEGKIRSLLNKSAKKKAKEVFASLEGSRIELDQRLKMTVSSEHMNQIDAHIDTLELDLVQRCLPYANLINLLIDIPGISFISAIAVIAEIGIDMSVFKSSKQLTCWAGLAPANNESASKKKSVRISRAGTYLKPLLIQCALSAIKSTSNPYYRIKYNIIKKRRGHKKAIVAIARMILVNIYAILSTGEAYNPCDFKEVTSPKPAKKEMTIENALSFLQAQGIDTSALVLNVS

SEQ ID NO: 70712 - protein, 346 aa, unidentified
MDYHPSVQQIAFVKTDTGECGERRLNHSDGEAEKFDRELKAAGCSVRVGMEATGYARWFERLLAELGFELWIGDPAQIKAKRVRKHKTDRLDAELLLQLLLEDRFPRVWVPSPENRDLRQLLWHRHRLVQMRTRIVNPLQAVAMNEGVRRKKALWSKSGRAQLESLSLAPWATRRRHDLLELLDRLNPTIEELSATVEQEAKQRPEGLRLMTHPGVGPTTALAFVLIIDSAERFAGGKQIASYVGLIPCEDSSSDRRRLGHITKQGNTLLRFLLVEAAQAVVRRDPDWRRRYTHLAMRRDQRIAKVAMARKLAVRLYGMMRKEWNYEQSKKFGSYAGESDYGHGVQ

SEQ ID NO: 70713 - protein, 331 aa, unidentified
MTALTIVAHCHPFVVGVDTHARNHVYAIVDAGNGALIDTQTFPASAAGISRAIAWVSRRTNADTQTLWVIEGAASYGAILAGTVDTRGYLVAEAPRMSPKAYRGVGKSDVLDAHRIATATLPLDTEKLRRPRLNEGIRQSLRILVTARTSMRKDRTRSVNALNALVRTNSLGIDARRKLTGSQMQEISRWREHDEELSLSVARSEAVRLAKHVLELDEQLSCNEKALDDLVTVSEAAPLLEETGIGVVTAAKCFVAWSHEGRVRDEAAFACLAGVNPIPASSGNTTRHRLNRGGDRALNSALHLAAVVRMTHDEQTRAYVEKRRAEGKTDK

SEQ ID NO: 70714 - protein, 351 aa, unidentified
MLIIGCDYHPSVQQIAFVDLETGETGERQLLHKDGEAERFYRDLKLRGISVRVGIEATGHARWFERLLAELGFELWIGDPAQIKAARVRKQKTDRQDAQLLLKLLVEERFPRIWIPSPENRDVRQLLWHRHRLVQMRTRVMNQLQAVAMNEGVRRKKALWSKSGRAQLESFVLSPWASRRRQDLLEVLDRLSPIIDELSTAVEQEAKKRPEVLRLMTHPGVGPLTALAFVLIIGSAERFACGKQIGSYLGLIPCEDSSANRQRLGHISKQGNTLLRFLLVEAAQAAVRCDAEWRRKYVHLAMRRDPRIAKVAMARKLAVSLFWMWRKEWNYEQVIKFGSHAGQSDYVHGVK

SEQ ID NO: 70715 - protein, 424 aa, unidentified
MAGVVIGIDPHKGSHTAVALDVHEKQLGRLRVRASSRQVDGLLEWASGWPRRRWAIEGARGLGQLLAQQLIASGERVLDVPPKLAARVRLLDSGQINKNDPNDARSVAVAALRAHELPELAAEDQAMVMRVWARRYHDLARLRTQVVCRLHAVVCELVPGGVRKYLRASQATDVLDRIVADSPVAQAKLELARELVADLERIDAQRREAKRRTARAVAATRTSINDVYGVGPIVAGTVLGYVRDIRRFPTRDRFASYNGTAPIEVCSGDRKIYRLSRRGNRQLNHAIHMAAISQIRHHDSEGRAYYEKKIAEGMTGKTALRALKRKISDALYPRMIDDARHLAAKDPGGHTGNDSASSAAGSHPETPALRKSHSRATANSRTGTGQRPLTLRPAPDRRRTSRRAAGVQVEPRPGPHRGRGQDRP

SEQ ID NO: 70716 - protein, 341 aa, unidentified
MGDVTTIGLDIGKTSFQAHGADASGAVVFRKKLSRGGLLTYLGAQAPCLVAMEACAGAHHWGRELMRRGHTVRLIPPAYVKPYVKRQKNDEADAEAICEAAQRPTMRFVPVKSAEQQAVGVVFRARDLLVRQRTQIINSIRGHLAEYGKVAPKGLCYVERLVREIEDPESALPLAARASLKILADVMARLDDEVARLDREIANRAKEDPIARRLMSIPGVGPITATALVALAPAPEAFRCGRDFSAWLGLTPVQKSTGGKQKLGQITKAGERTLRRLLVIGASAVIKQALLKGAPPGSWLAQMLARKPRMLVAVALANKTGRIVWALMARGGIYRAPAMAG

SEQ ID NO: 70717 - protein, 387 aa, unidentified
MTATNESSKFKPRDYDIFVGLDVDKKKMVITCSDHGTMQRSLSLPYSAQQLLNYTHKHFPGQRLAFVYEAGPTGFGLHDELTAAQHPCLVVSPSMVPSAPRKRVKTNRLDSKKLSEGLRGGQLQGIHVPPQIYRELRHLVQLRDTQVAQLKATKCRIKSLLLYEGLPFPAANGKWSAQALRALETIPCNASVRFKLDRLLDTLQFHFLTAAKVQKEIRRFCKQDPGLQQAITFLTSLPGVGTITATHAVARLGDWRQIDNVRQIAGFLGLVSQEHSTGDKENKGEITRIGDQRLRNKLIQCAWTAIRQDPELRAFYRQVHDRQPKKVAARKAIVAVARKLTTRMYAVLKQQRPYVIRADSSIAPLAAEETVGLRERLDTAQNDEQSF

SEQ ID NO: 70718 - protein, 395 aa, unidentified
MFIVGIDVAKRSHEVCMITSDGQTVQRPFSIRNNCTGYNLMLEKIRKHTNIKSQIVFAMESTAHYWLALFTRLRKDGYHVILLNPIQTSAMRDMFIRKIKTDAKDSFIIAELIRFGRYAESNVAQDRLLALKELCRNRFYLVDMAGDLKRKLIALIDRVFPEYEAQFDTIFCKSSVALLKKYPTPQKLSNAHLDKLTELLWNSSNGHFGEWKARELKDLARNSFGVEDCDGAYSTLILLMLDQIQSLSGKADALEKEISRLFQSFDTTVTTIPGVGPIIGAVILSEVGDISRFSSADKLAAYIGVDPSVNQSGEFQAAHAHMSKRGSPYLRRCIWMASQVAVQRDPMFRAYYEKKAAEGLKYMTIIGHVTRKMTAVIFAILRDHKVYEPVLPTAA

SEQ ID NO: 70719 - protein, 417 aa, unidentified
MITTKNAKRINEKTLLVTVDVGKKVNVGYGRRPDRSEIKPFEFSNDRSGFEKFWKRLQESQHKHPLERVVVGFESTSVYGEPLVNFLKDRPVELVQVNPMHTKKMKELEGNSPNKTDRKDPCVIADVIELGHFLTVVVPEGPAAELRRLSQARERAIERQGRLENQLHGLIFLLFPEFWGIMKGIKSKSARYLARRYPLPRDILGLGLESLTVELKKVSQGKLGRTRAQALSAAAEYSVGLQEGQQSLLLEVQGLLREWETTQELIEQTEQAMGRQLGQVPYSHSLLSIKGIGEVTAAGLIGEVGDFRKFRTIAEVLKLAGLDLYEISSGQHQGQRHISKRGRAFLRKLLYFAAMSMVRQGGILHTPYQRHLAAGMAKPKALVAMARKLLGIIVALVRDHSQYQIEYVRTAALPLAA

SEQ ID NO: 70720 - protein, 388 aa, unidentified
MPRQRKPNDLSRSLIALDMDKTLIAVVELSLSSWLVAGIVPGVERQPLKKLKTDENALLTLLNRWRDEAVRSGHKISRIAVAFEAGRDGFWLARWLKARGIEAHVIHASSVAVSREHRRAKTDRLDTELLKRAFVGWLRGERDHCKTAAIPSLREEDAKRPSRERESLVGEQSRLVNRMKATLIRLGIRGFNPKLRHAEQRLETLRTPEGEPIPPNTLGELKRDMRRRRFIGDQIRSIEQERLERLERTPDTEPHAMVRLLARVTGIGIETADLLVHELLLRNMRDRRAVARYGGLTGSPDRSGGTNREKGMARSGNARVRRGMIQLAWRFLLFQKDSALAQWYRRRTEHAPKARKTMIVALARKLLIALWRLVREGVVPEGVTMRPV

SEQ ID NO: 70721 - protein, 318 aa, unidentified
MVVGPLGSLVRVHRGACPLYAFPMVFVGVDVSARRLDVAIGSEVRQFPNPEGIPDLLRQLPPGAVVGLEATGVYGRPLAFALHRSGFRVYVFNPLAVKSYARSLLRRAKTDRADARLIARFLAERHADLEPYEPTEDVLYQVGLLVRFARGLVAQRVAVLNRLHAWEYAWPEGLGLVRRVPEVLASLRREVEAMALSLLKTDPEAWRQFQALQALPGVGPSIALTILAYSGDLRRFHSARAYAAYTGLTPRVHQSGQLPERASISRMGPSALRAAFWMAALSAGRVEPYASLVARLLQSGKPKKLAITAVANRLARAA

SEQ ID NO: 70722 - protein, 389 aa, unidentified
MKIFVGIDIAKLNHFAAAISSDGEILIEPFKFTNDADGFQLLVSKLESFDKNSLIIGLESTAHYGDNLVRYLVTELYQVCVLNPIKTCQMRKNNVRKTKTDKVDTYVIAKTLMMQDDLRFITFFDLDMMDLKALGRFRQKTIKQRTRLKIQLTTYVDQVFPEIQYFFKSGLHQNAVYALLKEAPSPKEIASMHMTHLANLLKVNSHGHFTKEQAKELRVLAQKSVGANDSAISIQITQTIQQIELLDSQLEKIEAEMTDIMKFNDSVIMTIPGIGYINGGMILGEIGDIHRFSNPNKLLAFAGLDPSVYQSGNFQAKTTRMSKRGSRVLRYALVNAAWNVVRNNATFKAYYDAKRAEGRSHYNALGHCAGKLVRVIWKMLTDEVEFNLE

SEQ ID NO: 70723 - protein, 382 aa, unidentified
MQASTVGTPTAGHNATVFVALELSQKTWLVTLHSPDRGRLSRHKLDGGDHAGLLGLIEKVRARVAEKLGSAPRVVSCYEAGYDGFWLHRLLEAAGITNFIFDAASIAVEQRARRAKTDRIDGELLLRTLMAYLRGEPRVVRIVRVPSAEQEDARRASRERDRLVTEQTAHTNRIKALLRLVGMAIGNPRRGNWLAWLAQQRDWQGQPLASHLLAEVKREHERLMLVREQLAALEQALAAEATPVPAAMAERRQLLQRLKALGPAFTATLVDELFCKDFRNRREVASYCGLAPSPWRSGGIDREQGISKAGNHRARQKAIELAWLWLRHQPDSALSRWFRTRTANTGKRAKRIAIVALARKLIVALWRYLTTGIVPEQATMKA

SEQ ID NO: 70724 - protein, 343 aa, unidentified
MKLMRIGVDLAKNVFQIHGVDCHEKPIWRQRLPRDRWLQTVLEKVEPGCEIGMESCGGAHHWARQLQAHGFRVRLIAPQFVKPYVKSNKNDANDAEAICEAMSRPSMRFVAVKTIEQQDIQATHRIRAGLVEQRTAKANQIRGLVAEYGLVAPKELLMLRRAIPCWLEDADNGLTARFRRLLDGLWDDLRALDGRVCKLDGEITAIATNEPSAVRLQQLRGVGPMIATALVVALGDARQFANGRQFAASLGLTPRQHSSGGKDRLLGISKRGDTYLRTLMVHGARSALRTAKSKEDRLSQWAVRLAERSHPNVAAIALANKTARMAWAMLHHGTDYQPNQAAA

SEQ ID NO: 70725 - protein, 343 aa, unidentified
MQIRTIGVDLAKNVFQVHGADSAGKVVITRQLRRKQVIEFFSKIPPCLVGMEACGTAHHWAREVSKLGHTVRLMPPSYVKGYVKRSKNDAADAAAICEAVTRPSMRFVAVKSTDQQASLMLHRTRDLLIRQRTQLINALRAHLAEFGLVAETGREGVAQLAALITDESDREALPFAMKQALQAIVDQLAALELQVGTLDRAIHAHHRANDMSSRLETVPGIGVIGATAIASTVTDPSNFKSGRDFAAWIGLVPRQHSTGGKERLGGISKQGDRYLRRLLVVGATAVVRHARQHPQKHPWVMRLLAKKPAKLVAVAVANKMARIAWAIMAKGGYYRAPELAAAA

SEQ ID NO: 70726 - protein, 348 aa, unidentified
MMKRSTEEAAGLDLGDRYSQLCIFHSATGTFVEERRLRTQPETMRSFFSQLPPMLIALEAGTHSPWVSRMLEELGHEVIVANPRKLRLIFENPTKSDTVDARYLARLAALDPGLLAPIQHRGVQAQADLASLKSRDMLVRTRTRLINHVRGLVKSHGERLPRCSTPAFADRVTAALPESLKDTLEPVLEVLRSLNQQIRRLDERIKELATTDYPETTALQQVPSIGPLTALAYVLTMESPHRLPNSRAAGPFFGLVPKRKASGSRDPQQRITKAGDPYMRRLLVGSAHYLLGPFGPDCDLRRYGQRIAQRGGDNAKKRAVVAVARKLAVLLHHLWRTGKVYQPFLKTA

SEQ ID NO: 70727 - protein, 338 aa, unidentified
MALYCGIDLHSNNCWITIIDEDQKVVRESKFGNDLAAILGLFEPYRAELEGVAVESTFNWYWLVDGLMDAGYRLHLTNTCAIKQYDGLKYTDDRHDARWLAHLLSLGILPEGYIYPKQERAVRDLLRRRAFLVHKRTSFLLSMRGAFECRTGTRITSNDIKKWTPTDVEQHIADPLEALGITCLLDPMTAMDGQIKTLEKEALKRGNLRAEFCGLKTVWGIGKVLGLTITYEVGDIGRFAKVGNFASYCRLVKSNRLSNGKPKGSGNSKNGNPYLSWAFSEAAHFAVRHHEPAKKFVQRKRAKTNGIVAIRALAHKLARASYYVMKDNVDFDPDKMLH

SEQ ID NO: 70728 - protein, 347 aa, unidentified
MPPGVIEPVGERVPPSAAPSNPNSRSVSRPHKQGRVKGQPMFIGIDVAKDRLDVHVRPGGEAFAVARDGEGVAALVERLQGVGPGLIVLEATGGFEQVVAAGLAGAGLPVVVVNPRQIRDFARALGRLAKTDRIDAEVIALFAERVRPELRPLPDDQARELDELVTRRRQVIEMMVAEGNRARRLTSRRLQKRIARHQAVLQKELTEIERELDDTIRKSPIWRETEDLLKSVPGIGNATARTLIAELPELGSLDRRKIAALVGLAPFNRDSGTLRGRRMIAGGRAPVRAVLYMAALVASRRNPLIRAFYQRLLAAGKPKKLALTACMRKLLTILNAIVRDRTPWQTV

SEQ ID NO: 70729 - protein, 348 aa, unidentified
MNYIGTDTHISTLDFKVVGDSGKVKMANKVQTSELNFIKFVKSVPKPRQVIIEEGPLAAWLLEMCVENKEQLVITDPKQNHWIGGSGKKEDAIDAEKLAQLARGGFIKEIHHPTGQRRRFRELVQAYHNTNKSIVRVKNQIKAKFLQNGIACPGQTVYLPDHRATWRKKMPQEPALLVIVDSYWKELDQIENSLETILCEIKLEAKGYPEIKLIDEIPGVGFIIAMTIVAILETPHRFADKRKVWAYSGFGINKKSSANKIYSEKLGKEYNRLLKCVVEEAALAAINADNDNAFRHNYLEMTIKKGIAPQRAKLTIARDIIATAWAMWKKEEHYNPEIDRKLKTEVEV

SEQ ID NO: 70730 - protein, 392 aa, unidentified
MEARTMSLPPAASHDDAVRCLLAIELSKKSWIVAVNTPLSDKISRYTLKPCDWKELLKLSERIRTRVAGELKKRVDVVSCYEAGYDGFWLHRLLAAQGIRNYVIDPASVQVDRRARRAKTDRVDVERLVRSLMAYLRGEPKVWSVLRVPSVAEEDDRRLHRERGRLVGERVQHVNRIKGLLAIHGIYDYQPLHRDSMQQLKRLHTADGSQLSPRLKAEIVRELQRLELVLEMIETIEAERDAIALAKTKAKTKMEHSNAKKIQDLVKIKCIGPEFATALVSEVFYRSFDNRKQLAGYVGLTPTHFRSGPMCRDQGISKAGNTMARTTMVELAWMWLRYQPGSPLSVWFHNRVGKLKGRIRRITIVAVARKLLIALWRYLETGLVPDGAILKV

SEQ ID NO: 70731 - protein, 353 aa, unidentified
MYYSGIDLHKDMSLITTINENGALLSQRKVPNHKAHIITYFNQVSPQGSDHKAVVESTANWYWLSDLLSEQGIDLTLAHAKYLKAISYAKVKTDKVDSHTLANLLRLDMVPEAHQISQDLRPIRDLMRARLSLVVKKTSCRNSIHRLLAKYNLNLPQYPKASDFALLKSKLLPEPKLQLSILEEQLQLIIRQIKTLEQSIHPKLIPNPDIQRLLYIPGIGKILAFTIYLEVDGIERFASVNRFFSYCRLVPGADNSNRTIKHKSSKDGNKYLKMAFMEASVRAVQYFKEIKSFHQSKTRKKHKHIAKALVAQELARITYHVLESQTDFNHMFKGVPLSRHKTTKWPRLASPGA

SEQ ID NO: 70732 - protein, 382 aa, unidentified
MNIASIGIDLGKTTFHLVALGERNKVLVRKKFSRATLLTYTANLPAALIGLEACAGAHFLGSALRAQGHQVRLIPAQFVKPYRKSNKNDFIDAEAIAEAVTKQNMRFVQIKTQEQLDWQAMHRVRDRLMQRRTALINEIRGFLLEHGLTFAARPIYLRKNLPTVIEDAEQNLSPLLRWLLARLWQEWKQTEIDIKAITDEIERISNHDARCRRLRQIPGFGPLVSTATVAAIGNGSAFRRGRDFAAWVGVVPRQYSTGGKQRLYGISKRGNVYLRRMLIHGARVVLLRFKYDTGGFGQWVHRLAQRAPRNKVVVAIANKLARMAWAVLSSGQEYRHEGWFKGGGLTGIGADGFHANAEYIPPLSQEGRTFLGQPGSVGSILF

SEQ ID NO: 70733 - protein, 326 aa, unidentified
MKNQVIGIDISKDKLDFHILNKETVQSVCAGVIENNEKAIKKWLNGFKQSDCVFSLEHTGHYGAALAKCLSNDNFTFYLINPLELKKSLGIQRGKNDFIDAYRIAEYTITNKHKLKPHQLPAKSLTQLKALITARERYVKMSVQVQNSLKANEILNKSVDVRMLIKEEKKQLKSVNKSIKTIENEMQKIIESDQELKSTYKKATSVIGVGPVIAIKCIVETDNFTKFDNPRKFSCYCGLAPFPYQSGSSVKGRTRTHFLRDKSLKAILTKGAVTAIQYDPQINTYYNRKIQEGKHRMSVINAVANKLVLRIFAVTKREIPFVKLVA

SEQ ID NO: 70734 - protein, 310 aa, unidentified
MDIIVERGAGLDVHQETVVATIDGPGIQKETRTFGTFTGELERLRDWLKANGVTHVAMESTGIYWKPVFNILEEDFEVILVNARHIKHVPGRKTDVTDSEWLCKLLRNGLVSGSFIPPSDIRELRDLTRYRRKLTQAVSTEKNRIQKVLEDANIKLSSVVSDTFGVSGAAIVEALLAGEMTAKEMSALAVGKLRKKRDALHQALVGRITEHHIFMIRTSLKHIRSIEKLVTKIEKQIDEKLKPYQKEYELLQTIPGVKEHAAASIIAEIGVNMDQFPTADHLSSWAGMSPGNNESAGKKKAVRPPMEARR

SEQ ID NO: 70735 - protein, 429 aa, unidentified
MRTESTPGARGPVFCGVDTHADSHWLCVLDWRGRKVLSRRFPADAAGYEALAGAIAAAGEPACVAMEGTSSYGAGLTRHLASLGMPVREALSPARMQRRRPGQGKCDEADAERAARAAMSGSKLGTPKSQDGWVDGVRCMLAARSGAVKARTSAINTARSLLATAPEGLRSRFRGMAGPRLMEELPSVRAEGALGAALGALADLWAAARDAALDMERAIEASLEENCPALLAMYGCGPVSAAKLAVAAGDNPGRLRSEASFAAICGARPIPASSGKTVRHRLNRGGDRQANSALHEIARQRVMRDPETAEYAERARARGKSDREVMRCLKRYVAREAYRALMRPHEIRRPEDASELVAARRAARVSQVRAASILGTSEKYISMLERGQRELKPIRRAYEAWVEAGLPLDWDRQAFEAERKMDSKKHLAK

SEQ ID NO: 70736 - protein, 366 aa, unidentified
MEKGITFVGMDAHKVAIKLAVLLPGETKPVEWQLANEKAAVRRMVRKVQRLAPGEVRFCYEAGPCGYALQRWIQEAGAACSVIAPSLIPRKPGDRIKTDRRDARKLAELFRAGLLTEVHPPTPEDEAVRDLCRAREDAHEDLVRCRHRLSKMLLRRGWIWNGSKKAWGQGHRLWLRSLRFEQAADQVVLEDYLQAIEQVEQRLRGLEQHIEAASQLPAYAEAVGALRCFRGIDTLTAMGLVAELHDFMRFDSARGLMAFLGLVPSEFSSADSERRGAITKAGNRHARRLLIEASWHYRHQPNAASLKRRRQGQPAEVVALADKAMYRLNRRFNRLLAKGKPRSKAVVAVARELAGFIWAALHSKAA

SEQ ID NO: 70737 - protein, 309 aa, unidentified
MPQNYIGVDVAKNWIDIFDAETGEHRRIETSTADLCDFARTLGDGIVVFEASGGYERPLMDALSTAKVAFTRVNPRQARDFARATGLLAKTDKVDARMLARMGSALDLAPSAAPDPERVRLASLMARRDDLTATIGRERNRHAQTSDAWIRRQISGLLRILARHLKRCDAEINGHIQQHERLVEDHTRLQTIPGVGPVLAAVLIASLPELGQLDRRKIAALAGLAPHACDSGMFKGKRRIWGGRANVRRALYLAAFIASRHDPNFKAFRKQLQDAGKPVKLAVTACARKLLTIINAMLKAGQNYRKTTA

SEQ ID NO: 70738 - protein, 323 aa, unidentified
MNSVGIDLHRSRSHVAVIDEDGELSLSRRIANDPDVFLELLGGLSGETRIAVEATYGWEWLAELLEDAGYELHLAHPLRTKAIASARVKTDAVDARTLAHLLRADLLPEAYVAPRGLRDLRDLLRQRVVLTQMRTALKNRVHALIARQGIGHGHADLFGRAGNATLDRLPLRPEPRRRLEVLLRLITDFDREIDALANEIDRLAKHDPRVEVLTQIRGIGRYIAMLIIAEVGEVERFPSARHLCAWAGLTPTVRSSDGKARLGHISRLGSSTLRWALVEAAQHTQRGGGPLRESFERIANDKFIRNAVEHDGSIAVLAGDVQA

SEQ ID NO: 70739 - protein, 454 aa, unidentified
MAQGSGLTRGDRNRNRRIGALRGVVRRDRAVLAVDLGEDKQAAVLVDHEGRVLARKTVTAKAYQLGGLLEWAAGQAARAGFAGLVVACEPTGHRWMALMGLADGAGHGFCCVQSLAVHREREKDDYTRDKTDHRDAYLIGRLVIRLDCYLPERADEAWARLRHLGARRFALVADVICCTQQVSDLLACAWPAALGTAARPLESTTWLAGMGVVTDRCCGDPSRLRKMGYDTFLAAVRRELPRWGASRAYRKIVRGLWEALADAGGVAAQRRGALERVHLLMADWRSLLARLADVEARMCAVLDELGLTGLVTSIDGLSAVGAAVILAETGDLSRFASARSVVKHAGLNPAENTSATLAGTTRISRRGRPGLRTAAWRAAWAGLRHNRVLRARYAHLTGRDGGNRLSDGQARAACAAALLRWLYAVVTRRQAWDARIAAGTIPARAGAVTVPAAA

SEQ ID NO: 70740 - protein, 346 aa, unidentified
MEHYAGIDVSLERSSVCVVDALGKIVKEAKVSSEPAALVAFFEAFGFAVKRIGLEAGPLSQWLHAGLKGAGFEAVLLETRHVKAALSAMTVKTDRKDARGLAQLIRMGWFRPVHAKSMRSQEVRALLVARKQLLGRLIDVELSIRGILRGFGLKVGPVTRKGFDARIRELVTGQATLERIAGAMLSARVALKAEYEKLHKTVLAIVRDDAVCRRLMTVPSVGPLVAITYKSAMDDPNRITKSKAAGALFGLTPKKYQSGEKDVTGGITRAGDEMVRTALYEAANVLLARITRFSKLKRWAMDVAKRRGSKRAKVALARKIAVILHRMWVDGSTYRWTETQPIAAQA

SEQ ID NO: 70741 - protein, 366 aa, unidentified
MQKLSTRRVVRDRVLEGGQLTIGLDLGDRWSYYCVLDEVGKIVLEQKLPTTPEAMKRIFEKQPRSRIALETGTHSPWVSRLLTDVGHEVIVAHAQKVQLITKSSRKDDRHDARTLARLARIDPQLLGPVRHRSAQAQIHLSVIRARAELVKARTALINAARGLAKSFGERLPKRGSQQVDRNLAAALSTALREVVEPLLQEVESLNERIGEYDQRIEQIAKEVYPEVALLKQVKGVGTQIALTYLLTIDDPHRFPKSREVGCFLGLRPGRRNSGQSEPQKKISKEGDRYLRTMLVQGAHYILGPFGEDCDLRRWGLKLAERGGKNAKKRAIVAVARKLAILLHRLWVSGEVYEPLRNSNRAMSAAA

SEQ ID NO: 70742 - protein, 486 aa, unidentified
MAKRKQSTFERLTNGKLNRKQRKELIRRIHADDPGLEIVHPHSAGIDIGNESHFVAVRPGSDAQPVREFGSWTEDLQKMADWLQACGVKQVVMQSTGVYWMAVYEVLQKRGFQVCLTNARDTKNLPGRKSDVQESEWLRKLHSYGLLRNSFRPPEEIRMIRTIWRLRDRHVAEAGRAIQHMQKALTTMNVQLANALSDVSGVTGQAIIGAILKGERDPYQLTRMKDYRVKASEEEIARSLEGTWQEDMLFELQQAVDGYDFCHKQMDEYDKRLQRYLKALPNRSLVAKPAAAAASGSGAEGGKKERKKRKPGKPRKNEPAFDLEAELARLCGVNLTTIDGVKLMTIMTFVSELGTDMSPWKTEDHLVSWLTLAPRRQISGGKVIKHEQNRSKNRVAGALRMAASTLKASDSYLGARFRHLRARLGPGKATKAMAAHLARLIYRMLTRGEEWVDRGAQEHERRRAEREKVSLQRKAAALGFRLEPAA

SEQ ID NO: 70743 - protein, 341 aa, unidentified
MAIAVLGIDLGKNSCSVVGLDGTGQVILRRRMQRKSIAVLGAKLSPCIIAMEACCGAHHLGRVLSTLGHTVRLMSPEYVRPYVKAQKNDDRDAEAIAEAATRPTMRFVALKSEEQLDMQTLHRTRDRAVGERTSLMNQLRAILLERGVIVPQGRARLRLRVTELLRQGTEQLSSRIRLLIEDMLAAWQALDERIAAFDAEFAAEAKRNESARRLTSIPGIGALNATALVAAVGDAQTFARGRDLAAWLGLVPRQATIGGKPRLLGITKRGSKYLRKMLIQGARAALPTLSRGNTRLGQWLRGLLARAHSNTVVVALAAKMARIVWALLRYGTTFEPQVIAV

SEQ ID NO: 70744 - protein, 420 aa, unidentified
MTRPQLTPPASVLVAIDVAKARNEVLIEVPGSGRRRRLSVLNTRAEHDRLIAILSDLGQPVTCGFEATGNYHRPIAWRLLQAGFAVRLISSVALARTREALHNGWDKNDPKDAQVMLHMIRIGASQVYHDPLAAGINDVQELSKTHDAVSRAKTEVLHRILTHYLPLYFPEVDRFRHNSRSDWFFAFLDRFPTPASITALSKEAFIAAAWDVVGRKVAKAQLLGDIYETARSSIGLPVPPDAPAVSMFRLVIGEARGLIQQRDAIEATADALLTDNSDYKLLRRIPGIGPINALTILAEAGDLRRFGHHRQFLKFCGLDLATQQSGTFRGQTKLSKYGNARLRRTLWLAGQVAIRQRENGFRDKFERYIARDRHNADLRRKALTAITAKMARVVHAVVKRGDDYRPFVEGPVPGGRTPLS

SEQ ID NO: 70745 - protein, 466 aa, unidentified
MMTKQVEEILDEPHEQIVQRVCAVDVGKDSGTVCVRVPAASGTGRRVSKVWDVPARTGAVLGLAAQLSDQGIEKVTLESTSDYWRIWFYLLEAHGLDVQLVNARDVKNVPGRPKTDKLDSVWLAKLTEEGLLRPSFVPSAQVRQLRDYTRMRADLTGDRTRYWQRLEKLLEDALIKVTSVASRIDTLSVRDMIEALIAGQRDPRVLAGMARGRMRLKYADLVESLTGQFDDHHAELARMLLHQIDTLTDQIDVLTARIEALLARLPAGNTPDPDRPAPDGQARPGTGANAPADEAAQRRTPPTAADMIKILDQIPGIGPSNAQVIIAEIGLDMSRFPTAGHLVSWTRLCPRTIQSGKRSTTGKTGKGNRYLRAVLGEAAATGGKTQTFLGERYRRLIKRRGKLKTIVAIARSILVIIWHLLANPGTTFHDLGVDFNDQRIDIGRRTRNHVRQLEALGFNVTLTAAA

SEQ ID NO: 70746 - protein, 390 aa, unidentified
MLYIGIDISKYKHDCIVVDDAGVIIRNAFSFDNSRAGFDQFTEMYRSLDPKETKRIGFEATGHYQDNFKVYLERSGIGFMELNALLVHKFKNSQTLRGVKTDKTDARLIASYLSSIEFKPYPKISYHTLALRSLCKRHFDLINERTKYLIRITNFLDRTFPEFKESINGNIKSKTAMYILRNYGIPSKIANINAQSYENIRKCSHGKFSVAKFNGLRELARNTVGFSYETDLFEIRSLLRVYDTLQDEISLVENEITTHLSKIDSHIPSILGIGKVSAASIIAEIEDVSRFDSPNKILAFAGLDPRIYQSGTQEFRGRMNKKGSVVLRRVLMNCAESVLMYNPAFYAYYRRKRDEGKPHRVAISHVARKLVRIIYKLETERIDFDLSIVK

SEQ ID NO: 70747 - protein, 323 aa, unidentified
MQRKVSFQEDAMPVVYAGVDVSKEWLDVHLHPLGESRRFSNDKTGIRQLKRLLARHRPKSIVMEATGKFHRPAHRSLWLDGFAVAVVDPLRARMFARACGYLAKTDRLDARFLALLAESLRPPADTPPSPHVEALQELVHARSAAKCDITALQNRSKTATTALLRGELNRLVRRLEQHVERLDKEIERRVGEDPQLCRKAEILTSIPGIGRVTALALMAGMDELGSCSGKQAAMLAGLAPIANDSGARTGRRSIRAGRPAPRRALYMAALSACRYNPALARFADTLKAAGKPAKVILVAVMRKLLVLANCLLSQDRLWTPNPP

SEQ ID NO: 70748 - protein, 342 aa, unidentified
MPVVGGIDIHRAQLTFDYVDLDSGEVVRGRIAPADRERLRHWLQRFAGRDQVAFALEGCTGWRYVAEELARAGIGAHVAEPAETAARRGPKRRAKTDRSDAQLLRELLLEGRIPESWIPPAPVLEARALVRLYKDLLDERTGWLQRVHASLFHLGAPDLDVGAMSPAGRERLAAAELSPATRTAVDVALRQVDRLTADMTRVREQICVIGRRQPACRALQAAHYGVGPLTSVVIWAEMGDTRRFSSSDDAVRHAGLDVTVYSSDGRRSAGHLARQGPPMLRWALYEAAVYAGRPSSPDHAYFQQVKARLGGQLALLSMARKLARRCHHTLRNLDDQVLAPAA

SEQ ID NO: 70749 - protein, 411 aa, unidentified
MQETTQHDAVDVFVGVDVDVDVDVGKGRHHAVALDRNGKRLYNKALPNDEVKLRALIAELKTHGRLLFVVDQPSTIGALPVAVARAEGVLVAYLPGLAMRRIADLHAGETKTDARDAAIIAEAARSMPHALRSLRLPDEQLAELTMLRGFDDDLAAQLTQTSNRIRGLLTQIHPALERVLGPRLDHPAVLDLLERHPSPSALAAANEKTLANRLTKLAPRMSKNWAAEIVQALNEQAVIVPGTQAAAIVMPRLAQQLAALRKQRDEIAAEVERLVLAHPLWPVLTSMPGVGVRTAARRLTEAAPKALATAAHLAAYAGLAPVTRRSGSSIRGEHPSRRGNKVLKRALFLSAFAALRDPVSRAYSSCKIQQGKRHNQALIALARRRCDVLFAMLRDGTIYPTIYPPKSAPNA

SEQ ID NO: 70750 - protein, 367 aa, unidentified
MKKINTVATKQSRNISWQKLTLGLDLGDRNCWYCVVDEAGQIRLEQRVRTNAKALREVFGEMPRSRIALEIGTHSPWISRLLSELGHEVIVANARKVRLIGESRKKDDRLDAQTLARLARIDPELLYPVKHRSVQAQADLTLIRARAGLVRARTALVNTARGLAKSYGERLRSCNVRNLNPEKAERLSPELQAALEPLLNAIESLSERIVEYNERIENLAQQSYPQVALLKQIKGVGTLIALTFLLTLEDPHRFRKSRDVGCYLGLQPGRRNSGQSEPQLHISKEGDPYLRTLLVQGAQHILGPFGPDCDLRRWGLKLAERGGRNGKKRAIVATARKLAVLLHRLWVSGEVYEPLHNSSPTTVATAA

SEQ ID NO: 70751 - protein, 404 aa, unidentified
MIFVGVDWAETHHDVCVMGEDGQVLEQRRVSHSVAGIGELHALVAGHAGEGEPVAAGIEVDRGLVVTALLAAGYQVYAVNPLASSRYRDRHATSGAKSDRGDAKVLADLVRTDRHNHRQVAGDSDLAEAVKVLARAHQSAIWSRQRQVNALRSALREYYPAALAAFGTDLAASDAVAVLALAPTPDAGRSLSRAKIASALRRAGRQRNTEQRAAEIQAALRAGYLQAPPAVAGAYGAAARSAIRLISAYTAEITELEEALSGHFEQHPDVKIVRSLPGLGTILGARVLGEFGDDRTRFASPQCRKNYAGTSPITKASGRSHVVLARHARNRRLADALEQWAFCSLTPSPGARAYHDQLRARGKTHRQALRQLANRWVGILHICLERGCTYDETAAWHHPQANAA

SEQ ID NO: 70752 - protein, 351 aa, unidentified
MTMLAEVAGAVAGGGTHRDTHALEMLAPNGTTIAALAISNDDDGFAEAIAWIAGNVPGPRVVAGLEGTRSYGIGLARAVAAAGLIVVEVQAPRRADRRHRGKSDPIDAHLAGLQVLRMPAGELPAPRADGDREALRILLSARRELTMARTRQINRLRALLPGGDDTGRDLSRGTLTGARLQAIARRRARASDTTGQSVRRAGARRLANAIRAAAAGLAANKRHLAGLVRGLAPALLDKTGVGPVSAAQAIVSWSHRGRCRSDAAFAALAGASPLQASSGRTTRHRLNRGGDRQLNRALHDITLTRWRADPRTHDYIARRRAAGKNDTEIRRALKRYVARELYRALQASPAA

SEQ ID NO: 70753 - protein, 454 aa, unidentified
MSKSKKSGNLPIVHRNAAGIDIGSQFHVVAIPPDRAEETVKSFKSFTGDLHAMASWLLMSGIETIAMESTGIYWIPAFEILESYGFEVFLVNAREAKNVPGRKTDFSDAQWLQKLHQFGLLRASFHPTSDIAELRAYLRQREKLLDYKAAHIQHMQKALIQMNIQLHHVVTTITGKTGMSIIQAIVAGNRDPQDLVKFRDARCKNSAETIRAALTGNYKPEHLFALRQSLELYDIYNEKAAACDQEIQTVLDRIQQNIMPPEQPLPKAKHNTVNKNAPDFDIRQVLFNIIGVDLTQITGLVPYLSLKLVSECGTDMSKWPSAKHFTSWLCLAPSNKISGGKILSSRTRPSSSRAAALLRLAAAAISRSETALGAFCRRLSARVGKAKAITATARKIAVLFYNTLRHGLLYVDPGADYYEEQYKSRILGHLRRRADSYGFTLQPKDVSAATIGVS

SEQ ID NO: 70754 - protein, 404 aa, unidentified
MKGPIVSIDVSKGKSDYQAFKNLNVKYTGSRSIKHTKEGFDEIVNLVREMEKKLETEVCVVYEATGVYHRVLKKVLEDNNIKQFIINPLLSAKTRKNDSLRSPKTDKLDPKSIAKTYYSHSLHNSHKPETIYHELRELSRYYEDILVHIRKDKVAFRAQLDVVFPGYDTLYDDLYGPVALAVIEKYPHPEMLQKKKINTVSKVIQNKTCHRQAVSDTMADKAIEYSKTIYSGCDKDDIEVLILQRLIKKLNEDMAEAERTIGEMIKLAQELPDFSIIKSIPGIGDNLAARIIAELGDMTRFKKKKELVAFAGLDPRISESGKNDGDHMHITKKGNKRLRCLLYLAVTCSIRLKRDDNSIKDFYIKKKQQSNPMCSKAAKTACASKLVRIIYSMCKTGELYQYNK

SEQ ID NO: 70755 - protein, 413 aa, unidentified
MNKHTYRSKKVNAINWEQLRERWSGQALLFAVDVAKDGQYAELSCQGPDGAVLMHWDLLEGTAALIAELKGFGSPVAVVMESSGTYGDALRHRCRLAGFEVFRASAKRVHDAREVYDGVPSLHDAKAACLIAKLHRDGLTKPWPEPDARERELGALRREYEMHRGQYERCQNRLEAYLSRHWPEALRILSPDSVTLEQVLKKYGSPAEVAARGEEAAADMRRIGGHFLAEGTIREAVASAGATLGEPCVEAERRYLMALAGEMEHSRLHMRQAGRAMEALVGADGELSGMAKAVGLLTTAILLSLHLDPRHFASARAFQKALGLNLREQSSGKHKGRLMLTKRGSALARKYLYYAALRLIKNDPVVARWYAGRLDPKAKLKAVAAVMRKLAVALWHVARGQAFDAGRLLKPAA

SEQ ID NO: 70756 - protein, 397 aa, unidentified
MIAVGIDISKAKSTVAVIDSDGTVLASPFTMAHTQPEMEAFVTYLKGLGEPTTILMEYTGHYHYPVLKKLQDEGFPVCIVNPYQMKKYGDVEIHKAKTDKKDALRIAAYALEKSYKLVPYSSMEQKYEDLKFLSRQYSQRITYVAKLKVQLIALLDQTMPGITRILPLNSRNPEKCALLLFIRRFKSFDEIHRIGKARFLASYDVLAKKTSERSASSKGLSIYELAVDSITTRGEDPYIWLSQNQCVDLLSTTQNAADEIISQMRNIAETIPEYKVLRAMRGVGDRLGPIILAEVGDIRRFHSGKALNSYAGNDAPPYQSGQFESRNRHISKRGSSALRKACYEVMQALKLTKPQDDPVYLFMLKKEQEGKPFNVAKMAGVNKFLRIYYARAMELYK

SEQ ID NO: 70757 - protein, 366 aa, unidentified
MTVIGIDAHKDWHTLVAVDEVGRRIKELTVEARAVGHRKILTWLEGFETVTVAVEDCRHLTRRLEADLLEAGHRVVRVHTRLMAGMRRSSRERGKSDPIDAEAVARVALREEGLPTAELPGTSRDIKLLSDHRRTLVARRTAMQSKARWFLHEIDPELEIPSRALRRYHLLDELIEYLATADGAVAEIARDLLVDIRELTVRINTLESRLSRLVRASHPSLVAVPGMGTLGAAMIIGETAGIARFRSRDAYARFNGTAPIPVWSGNKVRVRLSRGGNRTINTALHMAALTQIRMGAEGATYYDKLIAAGKTRKEALRLLRRRLSDRVYAAQRADLAPVTQTPEGGAPLEGPSTIEHPASLMPLMAA

SEQ ID NO: 70758 - protein, 377 aa, unidentified
MDKLIRIGVDTSKSVFQLHGVDSAEKPILRKKLRRRQLLEFFGRLETTKVGMEACGAAHHWARELKTLGHEPVLLPPQYVKPYVKRGKNDAADAEAICEAMSRPSMRVVPVKSVEQQAALMLAGTRDRLIRHRTQLSNAIRGYAAEFGLTAAKGLDKIEPLLARIATDATLPGLAKDLFAVDGKEYGQLNVQIAKIEARLMAWHRDNELSRRLVEVPSIGPISASLLAMKVTDPHAFSSGRDFAAWIGLTPKDHSTAGKTRLGVITRAGDEALRSVLVVGATALIQQVRQGRGHPSPWLVELLKRKPPKLAAVALANKTARIAWKLMVSGERYNRAHDAARTASREGRSTTLCGGSAQRPSLTPRTTSREATAMSNA

SEQ ID NO: 70759 - protein, 338 aa, unidentified
MLYSGIDLHKRTAVISTVDDHGTTVTEASLPTSRAAVAHYFQQLPQPTIATVEATSSWYWLHDLLKHEDVPLTLAHAKFVKAIAYAKVKTDKVDALTLAQLLRADLIPRAHMVSPELRPLRDLLRTRLHLVEKRTSAKNSVHRLLEKFNVPTPAQLPDEATLQASLYDEQIDLLTQQIRRIEKQLGPRLIPNADIQRLLWIPGIGRLVAFTLFLEIDGIERFPTVKQFFSYCRVVPGAANSANRRAHRHRKDGNRHIKLALSHAGVRAVQYFPEIKRFYQRKARQKNPAIARTLVQKEIARAVYVVLHEGVDFNHTFKGQPLSKRKAQQWPRQANPHA

SEQ ID NO: 70760 - protein, 340 aa, unidentified
MSEITTIGLDLAKHVFQVHGIDAQGTTVVRKRLRRGQVLAFFSRIPRCVVGLEACATAHYWARELGALGHEVRLMPAQYVKAYIKRNKHDAADAEAICEAVQRPTMRFVPVKTAEQQAAQLLHRGREQLVRQRTMLVNALRAHMAEFGIIAAQGLRNVGQLIAIVRDDGDTRLPDMARQVLQVLANQIEQIETTVAALERQLLAWHKTNPVSQRLASIPGIGPIIATAIATTVADPKVFRSGREFAAWLGLVPRQNSTGGKIRLGGITKRGNRYLRRLLINGASANLLRSKATKADPWVIGLRRRRPPLVVAVALANKTARIAWAVMLREKEYQPRAVAA

SEQ ID NO: 70761 - protein, 358 aa, unidentified
MKILDKNSFLDSHFHIGVDTHLKNWRVTIRLNGIELKTLSMNPSPEELLNYLRKKYPGGNYHIVYEAGFCGFWVARKFKELGVDCIIVNPADVPTSNKEKVNKNDPIDSRKLSRELENNSLEGIYIPDIFHEEPRSLMRLRYRVVQNQTRTKNRIKSLLHTRGIKIPEKFIGNSRWSASFIKWLEQEVIFDSTAGDYCFLNLIAQLKQLRVHYKNILKELRVQAKQKDIEPIINALKSVPGIAFIIAMSLYTEIIDINRFNYEDQLSAFVGLVPSTRSSDETIYGNQISFRKNKYLRPLLIEAAWKAVKEDPAMTAKYKELIKRMKPQDAIIRIAKKLLRRVRHVWIKHEEYIYALVA

SEQ ID NO: 70762 - protein, 456 aa, unidentified
MPVINHHAAGVDLGAAEHCVCVPPDAVPEGQSNVRFFRAFTRDLDKLVEWLQSCGVTTVAAESTGVYWIALAQKLEAAGIEFVLVNAKHLKHVPGRKTDIKDCQWLQQLHSYGLLNGSFRPTQDICSVRSLMRHRENLSQSCGQEVQHMQKALQQMNIHLHHAVSDLIGETGLRILDAILAGERDAQKLVELRDAQCRKTTPEELAAALQGDWREEHLFVLRQALENYRHLIDQLSRCDEQVEKALAQVVIPEPKEPAPEAPQNPAATQQTRKPKFYYIRKAGSGLKRDLKAELERICGIDLTQVIGLNVLSVLIVISEIGLDMSRWRSAKAFCSWLGLCPGNKISGGKVLSSKTAHVINRVAILLRNLAPAVGRTDTWLGTFHRRMRARLGPAGANTATARKLACLIYHLLKYKEQYIEVDQQVFTEKLRKTRISRLRKQAQELGLQVIEQQVAA

SEQ ID NO: 70763 - protein, 354 aa, unidentified
MRTYYVGMDVHQASIAIVVLNGAGRVVMQCVVETGAERVRAFLKQLRGRVYVTFEEGTQATWLYDVVRSLVTEVVVCDPRHNKLITAGNKSDRIDAQKLAELLRNGSLKAVYHNDQSTRQLKELVRLYDCLVQDSTRVMNRLKAIYRGQAINCRGHEVYREDRRQQWLQKLRSSAGKQVRANYLYEQLAALKPLRQRAKQQMIKEARRHAAYRTIISMPLLGPVSVAQLIAIVSTPHRFRSKRQFWTYIGLAVVTVSTGDHEVVNGVLRRSRRPRGTRGLNRNHNHVLKRVFKNAATSACQREPFKAHYQARVAQGMDPALARLTIARQLSAITLAVWKRGEKFKQERMKQLAA

SEQ ID NO: 70764 - protein, 411 aa, unidentified
MTHPKMLYTYVGIDSHKNAHTAVFINCFFEKIGELNFRNCQSHFETFFKRAQVHRPEGGTLMFGMEDCASFGLMLTKFLVGKEQSVKHVNALLVARERKNRNISEKSDSIDAECAARVLLSKFGELPEAEPDDTYWVLRSLVARRLLLVRHRSAAKNYLHSLLTHQYPNYRDYFENVDCKTSLAFLEQYPSPSTLKNTTVEELAAFLEIPSNKTVGLPKAKQILATLPDTTVQFQEVRDSVVQSAVRQVQFCIKEIDQLEDSISGFLKKFDCTLTSMAGIDTVTAAQLRSCIGDIKRFPTPAKLARYAGIAPVNYGSGKRDLQFANQRGNRELNAIFFWLAVRLSMPMGGNHYITNSFFYNYYQRKISEGKTKRQALKCVERRLVNIIWTMLTNNEEYVNPPVIEAPNEKL

SEQ ID NO: 70765 - protein, 351 aa, unidentified
MEKYIGLDVHAASTTFAVIGESGKRLGSYVVETNGQALVEQLKTILGNKHVCLEEGTQSAWLYEILSPHATEVVVTMVPESRGQKDDQRDAFALAERLRTGAIERKVFKEAGDYKVLRELGRTHAMIVQDVVRVQNRIKALFRSRGVAVSGKSIYSEKGRGAFLEKLPDASRRAAKTLYAQYDAVEAIRRQAEKDLVAEAHRHPISRVLETCPGLGPIRVAQLIPIVVSPGRFRTKRQFWSYCGLGIVMRSSSDWVRRPDGGWARAEVQRTRGLNLNHNHTLKWIFKGAATTVISQHEGEPLHQDYQRLISAGTKPNLAKLTIARKLAAIALSMWKSKEKYDPTKHRKQGP

SEQ ID NO: 70766 - protein, 353 aa, unidentified
MKCDKYMGLDVHQAMTVVAVLDADGKVILETMVPTEAAAIIRLVQSLSAPLRVTFEETTQAAWLYEVLRAHVTEVIVCDPRRNKLLGEGSKTDKVDARKLADLLRTGMLRSVYHGHETTRKLKELVRAYETLSIDTQRTMTRIKAIFRGRGIQTPGRGVYQPKQREQWLRMLTEPGVRQRAGWLYEQLDQLRALRRKAKQAMLSESREHRAAGLLKTIPQLGPIRAAFIVATVDTPHRFRTKRQFWSYVGLAVVTHMSSEYEMKAGRVVRRRKPIATRGLNQNCNRRLKEVFIAAATGGSRHKLYGPFLERLKQNGMRAEMARLTLARKIAAVALIVWKKGVEFDPKKLNCTT

SEQ ID NO: 70767 - protein, 343 aa, unidentified
MEYYVGLDVSLKQTSICVVDQTGSVVREGVIDSNPEAISAFVRSKAPDAVRIGLETGPTSTWLWTELKRLGLPVICIDARHAKAVLKMQINKSDRNDAIGIARIMQTGWFKEVHVKDIDSHSVRALLASRALLVKIKRDLENHVRGLLKNLGLVIGRAKFNVFAVRTEELIKDRPELVAAIRPLLEARTAVERQVSELDRKVMKLARRDAQVRRFMTVPGVGPITALAFKATIDDPARFARSRSVGAYVGLTSRRHASGEVDWSGRISKCGDAMLRCYLFEAAGVLLTRVPKWSAVKAWGVKLIKRNGLRKAKVAVARKLAVILHRMWIDGTEFNWSKKEIAA

SEQ ID NO: 70768 - protein, 347 aa, unidentified
MLHVGLDLSRTRLDVHVLDDAGETVDVTIAPPDRDGLAHLAREIGRLRGGPVQAAIESMNGARFIHDTLEFHGWEVEIADAVKVKGLAPLACKTDRIDAWVLAELSRRDLVPAIWLPDPEVRAERERARYRLHLVRHRVMFKNRVHAALIAFGKPCPVSDLFAANGRELLAGLGLPEPWNTTLDAALAHIDALDEEIFSCEKDLRRLGADHPYIPLLTTMPGVAWVLGYTIASEIGDIGRFSSPKKLVGYSGLCPYVRQSGRSDHRGSLVKNGPKYLRWALVEAATHAARHPAYAAHYQRTARRLGRQRGNKVARVDVARKLAEAAWHMLTKSQPFAPARSHGPLAA

SEQ ID NO: 70769 - protein, 318 aa, unidentified
MKTQQATEFVGVDVASDHLDVAVHGQPTVRRFANTIQGIAQLLRMVPPSSVLGLESTGRYHTQLAMAAHAAGLCVHVLNPLDARRYAQSVGQRGKTDRMDALVLARYICHEHAHLQQWQPPTACQAALRELLADRATLVRQRSALAQAGCHNKALARLDEPVLAAMQQAIAQIDEQLASTVQADPASQEAFEYITSVPGLGLVCGSLLVMLFGRMQTRSADAVIAFTGLDPRPNDSGKKTGQRRLSKRGWPEIRRLMYTAAMSAARTKTWNSFYRAQRDKGLSTTAALVVLARKLLRVAFSLFKKRVKFDATLVAASA

SEQ ID NO: 70770 - protein, 401 aa, unidentified
MVSDFMKGRYNLMKIFVGIDIAKLNHFAATISSNGEILIEPFKFTNDADGFQLLVSKLESFDKNSIIIGLESTAHYGDNLVRYLVAEFYQVCVLNPIKTCQMRKNNVRKTKTDKVDTFVIAKTLMMQDDLRFITFFDLDMMDLKALGRFRQKTIKQRTRLKIQLTTYVDQVFPEIQYFFKSGLHQNAVYALLKEAPSPKEIASMHMTHLANLLKVNSHGHFTKEQAKELRVLAQKSVGANDSAISIQITQTIQQIELLDSQLEKIEAEMTDIMKFNDSVIMTIPGIGYINGGMILGEIGDIHRFSNPNKLLAFAGLDPSVYQSGNFQAKTTRMSKRGSRVLRYALVNAAWNVVRNNATFKAYYDAKRAEGRSHYNALGHCAGKLVRVIWKMLTDEVEFNLE

SEQ ID NO: 70771 - protein, 362 aa, unidentified
MNNKTKTNTNTHSHTQPQPIAKAKSIKLGIDVHADSYRVVRQIDHATPQPAQKFTPKDFLDWAKKQLALAHEVHSCYEAGPLGYGLHRKLEAMGIHNVVVRPQDWDELHKGVKTDKTDALMLAQRLGRFVDGNRNELAVVRVPTPEQELARSQSRLREQLMSHRLRLEAQGRSLLLFNGIRPRGRWWQQRGWAALAGQLSSGLQELLEVIRGLVLAVQAQLEAATIRLESAATPQVCGVGALTSQVLEREVLDWKRFENRRQVASMTGLCPGVRASGLKSHHGPITKHGNRRLRTALIELAWRCLRFQPDYGPIKKWSPVLLSTKATSGAKKKAIVAVGRKLAIDLWRLNTARTTAAKLGFK

SEQ ID NO: 70772 - protein, 340 aa, unidentified
MTLYVGLDVSQKETEICVVDGDGRRTWRGKCFSDPECIATALREHAPDAVRVGMETGPLAIWLWHGLRALRVPIDCIHARHVAAALSLQVNKTDVNDAYGIAQVVRSGWYRAVAIKSLQSCRIRALLSARSELVAIRTTLYNQIRGLLKTFGVVLAPGKGGTFERAVLTRCPADPLVRSAIDALLAAWRVAGERKQRLDSQILRLARAHEACRRMVTIPGVGAITALTFATTIDDPNRFSRSTDVGAFLGLTPRRYQSGEVDITGRISKSGDRMARSLLFEAANALMTRVRRDSALRSWGQQLMARIGSRKAKVAVARKLAIILHRLWLDGTEFAAAPAT

SEQ ID NO: 70773 - protein, 400 aa, unidentified
MISVGIDVSKGKSTVCILKPYGEIVSKPFNITHTHKDLSELSSMLFRLNDEVKIVMEATGIYHLPVLTYLQEKGFFVSVINPYLMKSYRNESLRKAKTDKIDSRIIANYGIDHWFKMKEFQTSGEIYEELKLLGQQYRHYMKLHLLSLAELTHLLDLTMPGIKNLLASWNETNRKDKRSDFVERFWHYDVITSMSEQEFTEEYILWAKEKKYVPSQEKAKVIYTLAQESIPTLPSETSSIKMLVTEAVRVLKEVDATLGLILSRMQEIAKTLPEYSVVREMGGVGNTLAPKLIAEIGDVRRFRNGKALVAFAGIDPPPYESGQFVGCNRKISKRGSASLRKVGYETMRSLKMRSRPEDPVYRYVVKKESEGKSKKAAKIAGLNKFLRIYYARVTELYKNI

SEQ ID NO: 70774 - protein, 312 aa, unidentified
MTEKIAPVHIGLDIAKASLQLDLPQHPESLPNAVPGHARLVALVRVIPGAHVVCEATGGYERAVVAALQLAGIPVSVLNPAQVRHFALAQGQRAKNDPLDAQVLTAYGQALCPAPTPVPDALLSELRALVQWREQLKEQLIRARQHGEHATLPWVLKQQAKLTKQLNAQIKLVEKELAATVARAPQLQAQIQKLAALDGIGTLTAVSVLAQMPELGQLNRQQAAALAGLAPWTRQSGPWEGQRHIGGGRAVIRRALYMAAVCLARLTDTTLGRFYRRLRDAGKPAKVALTAVMRKLLLQMNQTLKNHALKSA

SEQ ID NO: 70775 - protein, 406 aa, unidentified
MQVTYPICCGIDVHKSFLVATIIKTTNGFEPSYQKKRFSTFNNSILEFKTWLIQNNCRDVCMESTGKYWIPVFNLLEDEINVTIANPKWVKAVKGNKDDVKDSKWIGDLFRLGLVKGSFVPCKPIRILREYTRYRYKLVSCRSSEKNRYQNSLTVCNVALDSVVSDIFGKSSTSIIDYLLNQTNDSINHEEIASKLLKSLKSKSDAVIESIEGYQMTDAQKYRMRLIRSHIDYITAELNDVNSIIDKFISSNTDYLNAVQLLCTIPGVKYDSAITIISEIGIDMTQFSNSKRLCCWAGLTPGSNESAGKKKSVRITRAGVYLKPALVQCAHAAVKSTKSPYYKNKYERIVKRRGKKRAIIAIARMILTAIFKILTTGEVWNPCDLYKVDMPVALVEKQKTKAIKQA

SEQ ID NO: 70776 - protein, 336 aa, unidentified
MESLIQFWLGIDVSKKKLDVALLDERGKVKQKVFPNEPAGFEQLRQWLSQRGAHPLQSRICMEATGPYSEASATALVDAGWVVAVVNPARVKGYAQSHLLRNKTDAADAALLARFCAQIQPEPWQAAPPEVRQLRALVERLQVLKDMQQQELNRLEAHAGNAKLEASIRDHVEWLERCARQLQSEIDDHIDGHPMLRQDAQLIASIPGIGEVTTPKVLAFLGDVRRFKNAKALAAFIGVTPRLKESGSSVRGRSMLSRSGHAQMRKALYMPAMVAARHNPVVKAFGDRLRAGGMAPKAVIGACMHKLAMLIFGVLRSGLPFDPRIAVPRVDIQDGI

SEQ ID NO: 70777 - protein, 316 aa, unidentified
MQSALCIGVDVAKDNVVVACSSASFATRTVPNKTAALKTFLQSLPAQSSIAMEATGSYHQTLADLAHQQGLRVYVLNPRDLYHYAKGVGLRAKTDRVDAAMIARFLANEGPRLRAYQPPTAEQRQIDQLLRRRSKIVTLKTALQLTCSDAPSLRTESGKLLKSFAALLKKIDQQLAALQKAMPQRSQQLERLESIPGVGPLTACWLANLLSRVPFANSDALVAFTGMDPRPCDSGQKRGQRRLSKRGPAEGRRLLFNAAMAASRCKAWKQTYEHYRERGWTTTEAIMILARKMLRIAFAMHKTQKHFDVQFIAKTA

SEQ ID NO: 70778 - protein, 486 aa, unidentified
MANRKQSTFERLSSGRLNRQQRKELARKLTAENPGLEIVNRNVAGIDVGNESHYVAVAPRCDPQPVREFGSWTADLERMADWLKVCGVEMVVMQSTGVYWMALYDMLEARKFKVCLTNARHTKNLPGRKTDVQESQWLLKLHTYSLLRDSFHPPEEIRALRSLWRLRDRHVKEAGRAVQHMQKTMTMMNVQLSNAISDISGATGQAIIRTILNGERDPWKLAKLRDRRIKATEEEIARSLEGNWRADMLFELKQAVDAYDFTQNQIAECDQRLQTLLAALPEREVKSTEAQAEVPASESAKRKQKRKKSRADGNAPRFDLQAELKRVCGVNLTSIDGIDVMTAQTIVAELGTDYSRWKNESHFTSWLGLTPSRDISGGKIVKQESRKIKSPVAIMLRMAASSLIRSESYLGARYRSLRTRLGAGKAIKAMARYLACLVYRMFTHGQDWVDRGIKEFESKRTQRELSYLQRRAATLGYSIVPQPTSA

SEQ ID NO: 70779 - protein, 347 aa, unidentified
MTIYVGIDLHRKRSQIAALDERGTELLSRRVANEPEALKAILAELGGELQVALEATYGWEWLADLLEGEGHELHLSHPLRTKAIAAARVKTDTVDARTLAHLLRTDLLPEAYVAPRELRDLRDLLRHRVVLTRMRSALKNRVHALLARQGIQREHADLFGKSGRAFLAELPLREPARRRLASLLSLIGDFDREIELAKREIDALARHDPRVDVLRQLHGIGPYTAMLVIAEVGEIERFRSARHLCAWAGLTPTVRSSDGRARLGHISRQGSPHVRWALVEAAQKAATGGVPVRAAFERTAKRRGRNIAKVAVARRMLTLCYYGLRDGEIRCLQAPGPASARPVTAAP

SEQ ID NO: 70780 - protein, 351 aa, unidentified
MHYIGVDYHKRYSYIVVKDGKGQVEKRGVVSNTKEELQHFLEPYRPGMAVLEATRNWGLLYDWLEEVLDDVALAHPLKVKAIAEAKIKTDKISADILADLLRADLLPRAYAPSKQTRNFKNVLRQRMFFVRVQTMVKNRIYDILDRHPEVLLQTPEVSDLFGTAGMQWLSQIVLPGEDSQLLTSELELLKFLKEKISQSNSTVKELAIKDGRTRLLQSIPGIGPFFSVLILYEIDDISRFKDEKKLCAYAGLVPSTHASGGKVFHGRITKTGSKWLRWAAIEAAQTAVRSNTEFYSYYQGIRIRKGTNAAKVATARRLLTIIFRLLRQERFYERRTTTPRKIATPVALVTP

SEQ ID NO: 70781 - protein, 417 aa, unidentified
MESYAALIAIDWADRQHAVCLYDQTTGRREESIVKQTPESLQQWMLGLRARFAGQRLAVCTEQSRGPLIYALLQYDFLVLYPVNPATLAKYRQAFSPGLGKDDPSDADYLLDLLQHHRDRLKAWRPDDEQTRTLRLLVEQRRCLINDRTRISNRLTAQLKGYFPQVLDWFPDLCTLLVCDLLTRWPTLTALQKARPATLLKFFQAHHSVRAATNERRLAELKTAVALTTDAAVLNSSTLMVKVLVAQLRTVLAAIAEYDRHIEALCQTHAEYELFASLPGAGPVYAARLTAAFGSDRTRWKSAEELLCLTGIAPALERSGKQQWIRWRYFCPKFLRQSFHEYAAESVHHSFWAKAYYNMQRLKGKKHHAAVRALAFKWIRIIWKCWQTRTAYNELIYLGSLRKSGSPLLMFIANNHG

SEQ ID NO: 70782 - protein, 353 aa, unidentified
MDRVCVGIDVSAKKLDVAWRNSRRGIERQTFDNDAVGHSKLVGLLKKHAGKKVVRVVIESTGVYGIDLALALDRARFEVMVANPRASANFAKATMQRSKTDRLDCVMLLEFAEQMTFKKWQAPSAEQLQIRSISRRVYALMSTIRDEKNRMHAANQVDGTDVVKRSIRATINVLEKQVRDLRTAALELILADAVLARRYELLLTVKGIGQISAIAILSELAILPADMTDRQWVAHAGLDPREFESGTSLRIPPRISKRGNKYLRSALYLPARVACRFELGVAAYAARLRERGKLPLQIHVAVMRKLLHSIHAIFSSNEDFDGRRFFPKAAVDAVGTSGIASFAISEVSTTVSA

SEQ ID NO: 70783 - protein, 418 aa, unidentified
MTDYAALLGLDWGDQAHALALQVQGHTTIEKSNLPHSAESLQDWIANLRQRFGGRPIAIALEAKHGPLIHALLHVEFITLYPINPKTSALYRQAFSPSGAKDDLPDADLLLNLLVVHRDKLTPWHPEEVQTRKLDGLVQARRSAVDLRTQLANSLTTLLKGYYPQALELVGEDVFSPLACAFLRKWPDLIGLKAARPNTLRAFYQAHNLRRGEVIEKRLQRIAQAKALTTDEAVVSVGVLTCRMLAEQLQKLATSINRYECLIEQVFEAHPETHLFRHLPGAGPTLAPRLLVAFGTQRDRYPAAANLQMFSGVAPVTEKSGQRKWVHWRWSAPRFLRQSLVEWANQSIYHSTWAAAYYTQQKNRGKRHQAILRSLACKWIRILWKCWMDHTPYDEARYLKHLASKNPALLKLTYEKSN

SEQ ID NO: 70784 - protein, 344 aa, unidentified
MDHVAIDLGGRESQICVRAADGRILEETRVPTTGLRKYLGAKTASLVIIETCAEAFRVADDAEELGHQVKVVPASLARSLGVGSRGVKNDVRDARNLSEASCRMSTLPSVHVPAPETRERKAVCGMRDGLVGARTQLVNTVRGWIRGQGVGATKRGAVETYPKRVRDHYQSRRQSPVPDFVERQLKAVEALNELIDQADEQLKALAESDPTCRLLMSMPGVGPVTAVRFSSAIDNPHRFQSAHALESYLGLTPGEDSSSDRKRLTSITKAGSTAVRWTLVQAAWVARRYRRNDPMVQWELALESRRGRPIAIVALARKMAGILWAMWKTGKKYDPNRGASVPPR

SEQ ID NO: 70785 - protein, 360 aa, unidentified
MTTSIPSKTTVSYDSVKLGIDAHAKYYWVSRQLDGATPQPVQKMTYDELLLFVVKQQKLTPNLVTCYEAGAFGFHLHRKFEQLGIKNYVVQPQDWDERGKGVKNDRLDAAALCQRLDRYQRGNTKAFSTVRVPSEDQERERAISRQRQQLMRERQRISAMGRSLLATHNIHVTGKWWKGKTWTVVQKLAPAWVVERLEVFIIILKPLEEQELKLMHQLQEAAQEQKIPRGVGPLTFEILRREVGDWGRFNNRRQVSSYTGLCPREHSSGGKRRSGSVSKSGNPRVRAMLVEMVWRMMRWQPEYKPLRKWAHVLYSLTPNAAAKKKAVVAIARQLAVDLWRIFTGQCKAETYGLIYLPEAA

SEQ ID NO: 70786 - protein, 428 aa, unidentified
MNEADRTRLEEFRQFRKGVRGSAEYLLVGIDVAKDKHYAFFGTATGKTLFRRLVFENNLEGFRKLLVQAETLKVQAGLKQVVFGMEPTANYHKPLGEHLIRCGHLVVLVSGVAAHENRKTLDGRWDSNDTRDAANVADLVSQGKCLFYEYPAEAILDLRNLLSLKRRFKRVEHGYRVRIRNHLVAKYFPELDRYYDQSLSTSLAIVRWCLDPSVIAGLEYKQFVQRVGSGQRRLSQENRLQAIWKMAVESVGCEAGPAVEFEAQVMVEGLKQIREVLRGIEEKIHEICSQVPEYEFLLSIPGFGPDVSSKVLGAIGDPFRFQNGKQVLKMAGLDLNAERSGKTSASVIPVISKKGKADLRYALYQAAMIASIKNNAFIVYYTNKLRGREREPGIKTKMRVKLAAKLLLIAWALMKKKEPFNPDYLAVE

SEQ ID NO: 70787 - protein, 370 aa, unidentified
MLDTTTFIGLDVHARSIKAVSLDVMTGEVRAATFGYDAGAVAEWVRSVDPRARCVYESGVTGFDLQKRLSGLGVGCVVGAVSKMIKPSADRRRKNDRNDAEFLARMLSVGNVVEVWVPDDECEAARDLTRALEDARDDLSRSKQRLSKFLLRHGLVFDERTPTGRRKGNWTRAHWSWIESIRFAERADNDVLAYYVDAVRRAAEEKARLEGLVEAEARKPRWRKRVDSLRCLKGVDTASAADLVFEAGEFSRFRNARSFAAWVGLTPSEHSSGESDRRGAITKAGNKHLRKALVEAAWHYLTCSGRPKGLAKGQAPDRGARRHAAKGVRRLVERREALLARGVHGNKANVATARELACWVWAVGLMAEEA

SEQ ID NO: 70788 - protein, 344 aa, unidentified
MGEVSTIGLDIAKSVFQVHGVDDTGTVLIRKRVSRAKVVEYFGDLAPCLVGIEACPSAHYWSRELQALGHTVRLMPPSYVKAYLKRSKNDANDAAAICEAVTRPSMRFVPTKTKEQQTALMLHRTRQLLVRQRTMLSNALRGHLAELGIVSAKGRNGTGELLRIIADGADNRVPPAVRDILNVLARQYGAIGTEIGSIDKSILALHRSCEASRRLAEIPGIGPIVATALVAEIGDWKEFSSGRNLAAWIGLVPKQHTTGGKDRLGSITKQGNRYLRWLLVVGAMAVIRYAQKHGTRNRPWLGRLMERRPTKVAAVALANKIARMAWAIMVRGERYKEPKLLLAA

SEQ ID NO: 70789 - protein, 414 aa, unidentified
MGLPRWVGRAIGLDVHRDFCVVAICEDGVVRSAGRVPSTPEGLLTLAESLLPTDRVALEVTGSCWEVARLLEPHVERVIVVSPDDTGITSARAKTDKLDARTLASLLWKGELEAVWMPDDRCRVLRRRLARREQLVHSRTRAKNEIHAVLQRRLQGKPPCSDLFGVKGRQWLAGLELPPEERESVDAGVRHVEFLDWEIAEVERLIAKQALAWPEIRRLMSVPGVNLVCAASFIAAVGSPNRFLTSRKLVAYLGLDPKVRQSGEAPTRSGRISKRGSASARWALVEAAWTAVQQPGPLHAFYERTRGRRGHGKAIVATARKLAVLFWCMLTRDEDYAHQQPSLTNKKLRRLEITADAPKYAKTARGTWNTNVAMRQAERQLAEQAEASYKRMVKDWQAGAPTRKTGASATPERA

SEQ ID NO: 70790 - protein, 389 aa, unidentified
MEARTVNNPRPAAPHDDAVRCVLAIELSKKSWIVAVNTPLSEKISRHTLGACDWKELLKLCERIRTRIARELRKDVELVSCYEAGYDGFWLHRLLEAHGIRNYVIDPASLQVDRRARRAKTDRVDVERLLRSLMAYLRGEPKVWSVVCVPSVAEEDDRRLHRERGRLINERIQHVNRIKGLLAIHGIYDYPPLRHDRMQQLERLRTADGRTLSPRLKAEILRELQRLELVIGMIKTIEAERDAIASAKIETEHSSAKRIQDLAKIKCIGPEFATTLVGEVFYRSFDNRKQLASYVGLTPAHFQSGETCRDQGISKAGNAKARSVMIELAWLWLRHQPASPLSVWFHDRVGKLKGRIRRITIVAVARKLLIALWRYLETGLAPEGAILKV

SEQ ID NO: 70791 - protein, 387 aa, unidentified
MAAVMIGVDPAKRSHAMAVLDERETQLSALQVGNDSSGYRDMVRLAKRWPERSWAVEGAAGVGVQLAQRLVADGETVLDVPPKLSTRARIFDVGHGRKNDPGDARTVAVVAIRTAGLRRVVPDDEMVALRLMSERRRDLVRSRTQTVNHLHQLLMELIAAGAQRNLTAKKAKALLATVRPRDIAGQTRRQLAADLIEDLAGLDRKLKDLDKRLKAAVTATETTLTDIKGVGTATAALILGEVGDVRRFPSRHHFATYGGVAPIEVSSGEIECHRLSRAGNRQLNHALHIIALSNKRYDTRGGTYYAKKIAAGKGKKGALRSLKRRLSDSVYRHLVDDQQQRAQRSPGGHLGATLQSSAAGSDPNTDASEQPHTGLHENPTRDLSAAS

SEQ ID NO: 70792 - protein, 428 aa, unidentified
MKYNQNFKISQITDNTLVIGVDIAKKKHYARAFDYRGIELDKVFTFKATSSGFESFIQWSEDIAKRHGKKKITVGIEPTGHYWYTFGQAVMDKGLMLVQVNPYHVKRSKELDDNTPSKSDYKDPKTIAFLVKDGRYQIPYMPEGKYADLRKANNLREEWVQKIIIVKNKITRWLDIHFPEFLNVFSSWEGKTALMTLEKIALPEEIAQQTAKQILCLWRQEVKRGVGIKKAEKLLIEAKSSVGIREGAQIAEYEIKLLIREYMEIRKVLDDIESVLEKTVLTIPGADHFLEIKGVGIKTVAGFFAEVGDIRRFTSAKQIIKLAGLNLRQNSSGQHKGKTTITKRGRSRLRAMLFRAILPITATNEVFNKLHHYNISQKEKPMKKMQSLISLCCRLIRIVYSLITKGQRFDPERLLKDIHRNHEVPVAA

SEQ ID NO: 70793 - protein, 340 aa, unidentified
MQVTTIGVDLAKNVFQVHGITATEEVVFNKPLRRAQFLTFFAKLEPCLIGMESCSSAHHWARELTALGHEVRLIPPMYVKPYVKRGKSDAIDAEAICEAVTRPTMRFVAIKTVEQQSLLSLHRARDLLVRQRTQLINNLRGLVAEFGIFIPRGLARVIGFAEDITLGEVLDLPDIANEVIHNLCEQLMALHKRIRWYEDRVKQVAKEDARVRLLRTIPGVGAVTASAIIASIGDGHQFRNGREFAAWLGLTPANKSSGGKEKLGRITKMGDQYLRSLLVVGMTSLVRQTRSHPERASKWLTSLLERKPARVATVAMANKTARIVWAVLTRNEPYSPRAAI

SEQ ID NO: 70794 - protein, 454 aa, unidentified
MPVMGVPEQIEDEEHEQRLERVAAIDVAKASGKVCTRVPHESKAGKRVTLVWDVAATTNAICELAAHLVEQRIERVVLESTSDYWRPFFYVLEAAGLCVWLVNANDVKQVSGRPKTDKLDAVWLAKLNERGMLRPSFVPPADIRRLRDYTRLRLDLTRDRTRQKQRMEKLLEDALIKLSTVATDIFGKSGRDMIEALIAGKNDPKQLAELARGRMRVKHAALVQALDGRFDDHHADLARILLEQVDGLDAQIQQLTATIDELIAAMPAAAARDQAPTDTNTGGGGSEQQHTTLSVIARLDEVPGIAEHTAQVIIAELGLDMAQFPTPGHLVSWAKLSPRTIQSGPRTRGGKTGRGNPYLKGILGEAATAAAKTDTFLGERYRRLVKRRGKLKALVAVARSILVIVWHLLADPTTRFRDLGPDFYARRVNTDRKIRSLVHQLEVLGHTVTLQPAA

SEQ ID NO: 70795 - protein, 348 aa, unidentified
MTSLADQPRSVVGGVDTHKDVHVAAVIDTAGRVLGTDSFETTPAGYRRLLRWLRGHGEVLVVGVEGTGSWGAGLARHLAAEQVAVVEVDRPNRQVRRRRGKSDPVDAEHAARAALSGEASGSPKSKDGAVEMMRSLRIVRRSAIKARAQASNQLHALVDSAPEPLRSQLRHLRAAALVAKAARFRVSTLDTPTDGVRLALHELAQRWLHLDNQIDRLDARLADLVAAAAPRLLEHKGVGTDVAGALLVAAGDNPQRLRSEASFAALCGVSPVDASSGRNQRHRLNRGGDRQANNAIWPIALVRMSHDPRTRTYIARRISEGKTKKEAIRCLKRYIAREIYNDLHTLTT

SEQ ID NO: 70796 - protein, 342 aa, unidentified
MLIIGCDYHPSVQQTAWVDTETGDCGERRLVHENGEAEQFYRELKKKGVSVRVGMEATGHSRWFERLLAELNFELWVGDPAQIRAKRVRKQRNDRFDAQHILKLMLEENFPRIWVPTPENRDLRQLLWHRHRLVGMRTRVMNQLQAIAMNEGVRRKRGLWGKKGRKQLESLSLPPWSTRRRQELLELLDRFDPNIDQLSKAIEEEGAQLPEVQRLQTHPGVGAITALAFVLVLGTPDRFGCGKQVASYLGLIPCEESSSDKWRLGHISKQGNALVRYLLGQAAQAFARCDEKWGAQYAHIALRRNRSIAKVAMARKLAVRLYWMWRRQWDYQQLKKFGSNVG

SEQ ID NO: 70797 - protein, 283 aa, unidentified
MQNITLIGIDLGKHSFHIHCQDKFGKALLRKKFTRTKLMQFLATCPPSVVVMEACAGAHFMARRISDFGHETKLISPQFVRPFVKSNKNDFVDAEAICEAASRPSMRFVQPRTEPLQAMRALHRVRESLIRDKVKTTNQIHGFLLEFGISLPTGDAVIKRLSLVLAEHEIPEYLSRLLVRLHTHYLYLVEQIAELESELSQSINADDTAQRIMTIPGVGPITASLLSSQPGDGKQFSCSRDFAASTGLVPRQYSTGGKSTLLGISKRGEPPRESWRLNFLRKR

SEQ ID NO: 70798 - protein, 341 aa, unidentified
MKITTVGIDLAKNVFQVHGVDERGKAVLRKQLKRSQFLLFFSNLPPCLIGMEACGSAHHWARKLQGFGHTVKLIAPQYVKPYVKTNKNDAADAEAICEAVGRPNMRFVAIKTVEQQTVLSEHRVRQAFVQARTAQVNQIRGLLAEFGLAIPKGIANLPKQVPLILEDPAYGLPGAFRELMTRLLAHFHELDRQVDELEAQIQAWHRNNPASRKLAQLHGIGPLGASAMVASIGDAKAFKNGRQLSAWLGLVPRQHSSGGKQALLGMSKRGDVYLRTLLIHGARSAILAAQRRSETDSWLAKLVQRRNPNVAAVALANKNARVIWALLAHDREYQSDYAVAA

SEQ ID NO: 70799 - protein, 356 aa, unidentified
MSRDIKYIGMDVHQEAIVIAVLNGSGKLVMETILETKASSILQFIHGLRGERHVTWEEGTWAAWLYDLLQPQVQEVVVCNPRRNALLKEGSKSDKVDARKLAELLRSGMLRPVYHGENGLRTLRELARSYQTIGKDLTRVMNRLKALYRGWGIPCAGIQVYAPRYREEWLSKLAQAGVRRRAELLYQQLDGLQALRRNLRPEFLAESRKHKAAKLLRQIPCIGPIRAARLIALIQTPHRFRSKRQLWTYSGLGIETHDSAQYRYVGGQVLRSKKPQQLRGLNQNHNHEMKEIFKSTATRASCGRGPFHDFYAALLAKGMKPEMARLTLARKIAAITLTLWKKEERFDAEQLKTQAA

SEQ ID NO: 70800 - protein, 387 aa, unidentified
MTVRTVNNLPAATHGETVRCLFAIELSKQSWVIGFNTPLSEKISRRTLSGCDWKGLLELIEDVRARVSREMGRAVAVMSCYEAGYDGFWLHRQLEAHGVRNYVIDPASLQVDRRARRVKTDRIDAERLLRSLMAYLRGEPKVWSVVRVPSVAEEDARRLHRERDRLVLERVQHVNRIKGLCALHGIYDYHPLRPQATARLEQLRTAQGGELPPRLKSEIKRELHRLELVVEMIATLEAERDAIVEDEASTHLNAEKIQNLHKLKAIGPEFAAVLVGEIFHRSFDNRRQLASYVGVTPSPFQSGSMAHEGGISKAGNRKGRTTGIELAWLWLRYQPDSDLSIWFRARVGIMKGRIRRIAIVALARKLLVALWRYLETGLVPRGAVLNG

SEQ ID NO: 70801 - protein, 355 aa, unidentified
MSQEKYIGMDVHQATISVAVMDAKGKLIMECVLETKAATILEFIQGLRGTLAVTFEEGTSAAWLHDLLDPHVNRLLVCDPRKNALLKDGNKSDRVDAQKLAELLRTNQVKPVYHGKHGTRALKELGRSYLTITKDGTRLMNRIKSVYRSWAIPCAGTSVYTRRHRAEWLAKLVEPGVRIRAEHLYQQLDSLQPLRLEVRRQLLLESHKHAAVKLLRQVPAIGPIRAALLVALLQTPHRFRTKRQLWAYSGFAVEVHDSGEYRWVRGKLQRNRERITVRGLNDNHNKEVKSLFKAAAISASTRPGPLHDFYVARVESGMRPTMARLTLARKIAAITLTMWKKGVSFDPKQLYRQAA

SEQ ID NO: 70802 - protein, 341 aa, unidentified
MNAIYYIGLDIHKKTISYCVKKVDGTLVRQGAVCAERKALQQWQSELPGPWYGAMEATIFTGWVYDFLKPYAVDLKVAHPAMLKAITAAKKKNDRADAEKIADLLRVNLLPESHMMSEELRELRRMLRYRNMIVRTAVKMKNKMSGLLMEVGAQYSKKRLYGKKYFSVLLERVEDIPSSVKELLKLSRSGFELYDGIQKKLVNALRENKRIRERVQRLMSIPGVGEITALTWVLEIGELERFSSSRHAISYCGLCSAQHESAGKEQRGPISKQRNKHLQTTLIEAAKLAPRWNDQLALLHEKELARGNRNRATLAVARKLVEFILAVDRRETDFEMLKKVA

SEQ ID NO: 70803 - protein, 312 aa, unidentified
MEKLSYGGIDVSKDRLDVVVLPEGWFFSVSNDTAGWTELVARLRPLAVCAIGLEPSGGYERGIIRALLAARLSVRRINPNKLRQFARARGVLAKNDRLDARLMAEYVAIMPTRAVQRDDAVDRLAEVVTMRRQLCDEHVTVENQTAHLEDAMLRRLSKRRLVRLEADIRLLDKRLAEMVATNAAFARLYELLTSMPGVGPVLAFTLIALLPELGKMGRKQIAALVGLAPYDFDSGKLRGHRSIYGGRMPIRNVLYMAALSASRYNPALKTFSNRLAHANKKSKVIIVAVMRKMITTLNAMLRDNAAWQPRSA

SEQ ID NO: 70804 - protein, 316 aa, unidentified
MDGANQVSIGIDVAKATLDLHVLSAGQTQTLPNTKAGHEQLRKLLPDPAACLIVLEATGGFEREVVADLTDAGYRVAVINPKRARDFAKALGLVAKTDRIDARVLALFAEKVQPAPIDKTPEKQAEIQQLVARRRQLIDLKTQESNRWDSTHAKAARKSIQAVINTLEAEIRGIEKGIETLLESDDDWQNKTQLIQSVPGLGKVTAATVVADVPEIGRLNRQQISALIGLAPFNRDSGAMKGKRCISGGRKSVRCVLYMAAMAARRSNPVIKAFADRLAQHGKPFKVIITACMRKLIVILNSIVKSGRPWNPQLAS

SEQ ID NO: 70805 - protein, 333 aa, unidentified
MACQVYCIGIDVSTAHLDTFNLPGKSGVHRRLSNTPESHAELAAALTDLCGSGNDVLVVMEASGGCERELHHALAGAGVPTAIVNPKRVRDFARSHGWLAKTDRVDAKVLHAFGQSHRPRPTALPDPVRAELKEMIAYRDQVVAEITARSLQRRHLRSAVLIERAEAALKSLRQEAETLALQIDMMMYTDETLGRRADLLRSFTGVGPQTAAVLVGHMPELGTLTDGEVASLAGLAPFARDSGSLRGVRTIYGGRGRVRQALFHATRAGLRWNPVLRAFYDRLRERGKPGKVALVACMRKMLVILNALLKAGQEWAPGHKHEKTGRTAGPASA

SEQ ID NO: 70806 - protein, 376 aa, unidentified
MQATQVKAYESGRVLYMAMELSNKKWKLGFGNGSKIRRKSIAARDRQRCLEEVALAKVKLPAAVPVVCCFEAGRDGHWIYRWLENEGVEVLELDSSSIETAQGRKHVKTDRVDVEQLLDLLIRHHCFGLRQAFRVVRVPSAAAEASQRLHREDEYLVKQRTRISNRIKGLLVAQGVVEVSLRGDFSGWLDRVRLWNDEGLSAELKTELRRMHTQYEVFDCQFKELANDYAEELMADTPLAEARRKLEIFKGIGAKSSRVLSAEVFAWRTFNNTKEVGAMAGLTPTPSHSGDTETEQGISKAGNRRVRRVMIELAWLWLRWQPDSALSQWFDRRWAHGGKRQRRVGIVALARKLLIALWRYTEHGVIPEGAVLKTQG

SEQ ID NO: 70807 - protein, 328 aa, unidentified
MIMLGIDVSKTKIDCCIFPQGLTGKRKNKIFTNTESGFGSLLKWLITLKIEPDQVTAIMEATSVYHENLGYYLYDAGAKVCVTNPSRVRAFAKGMSMLNKTDKADSEALSRYGYTAKLIIWQPEPKNVRLLKALLGRRDVYLGSLLQEKNRLEKAQSTHTSVVVIKLLEENIEYLNQQLEHIDKLINNHIDQDPTLKQDLKLLQTIPSIGERSGLLLLGLFHSHKFEKASQAAAYVGLVPVHQLSGSSVNKQSHLSKAGDSKIRSVLYMSALTAIKYNPHIEALYQRLLSQGKNKMCALGAAMRKLIHLCYGVLKHQTAYQRDYLLVE

SEQ ID NO: 70808 - protein, 432 aa, unidentified
MTVINPTAAGIDVSDTEMMVAYPISPEQLEIRVFGCFTRDLHSIANCLKENGTTTIAMESTGVYWIPLFLLLQEYGFEVYLVNAKHVKNVTGRKDDESDAEWIQKLHSCGLLSASFQPDNMERTLRSMVRHRKNLVRTSSTYLNRIQKALELMNIKLHTIISDIDGKTGLLILEAILAGERDPEVLADLRDKRIKASREDIIKSLEGHWTTEHLFELGQCYQLYCTHRQMIDECDKEIEKQLVIQIASKNEGVIPDIPKVKRKVSGKHKVKFNLTADLKEILKVDVTEVFGINELSALTILSEVGCDMTKWKTEHHFTSWLGLAPNTKISGGKVMSSRIMKKKHHAGQAFQMAANGLYNSKSPLGDYFRRLRAKAGAPKAVVATARKLAIIYYKMVANKEAFNPKALDDYRKKYNEKKINQLKRKIAQLEAA

SEQ ID NO: 70809 - protein, 341 aa, unidentified
MKVSTLGIDLAKNVFQLHGVDHEGHTILRKKLTRAKFVQFVIQLEPCLIGMEACSSSHYFARLFTRYGHEVKLIPPQYVKPYVKTNKTDAADAEAICEAVTRPNMRFVQIKTEEQQAVLALHTERGILIRERIACANSLRATLAEFGITIAAGQNHLTRELPAILEDGENGLSPFVRTSIYRQSKHIRELEEQVKQVEEALASWYRTQEACQRMAKIPGVGMLTATYVVAAVGNARQFSTAKQFASWLGLTPKEHSSGGKQQLGGISKRGDGYFRYLLVHGARALTARVNRNGAVEKNSWLQGLLERKHYNVAVVAMAAKTARIMWSMLSHNTEYQPRQLA

SEQ ID NO: 70810 - protein, 426 aa, unidentified
MQPHYTCVCGVDVHKEFLQVCILRREEDPKVFRVFNNFSGVQELKKRVEEEGCECIACESTGVYWYRLYLAFEGQTRVIVGNAYQIKSIPGRKTDVRDAQWIAELAMNGLINPSRVFPKNDRELRELTRSRESTVKSRTQIKNRIHRIFDSAGIALGKGVRDIFGKSGVHLIWGLLKRADTEDIISTLPSARVKKKADLLREILSGSLSDLQIILIKKNLDMMVHINEHIQTLDEQIIARMMEQDRIRDIEIACSIPGVSVTTAVTVLAEIGDYRDFENAEKLASWAGLVPSVYQSAGKNCSGKITKHGSEHLRWILVQAAKAAGRTVNTTFRKFFNRIAYRKGGNTATVALARKILCILWHLLINKELYIDPSKNTKSIKPPVVQKFAKNSSSDVQQAIDFIIECGFRVIHPDFTLDRKFRGVSQ

SEQ ID NO: 70811 - protein, 311 aa, unidentified
MTHDTIGVDISKDHLDAYRMSDGASRRFTNDRAGHTALLSWLGASHPRVIYEPTGPYHRTFERRLADAGFALVKVNPRQARRFAEATGKLAKTDRLDAAMLARMGALLELEARPACSSILSDLKDLHMAREALVKDRTAAKNRAMTLTLAILKRQNGEQLRQIARQIAAIDAEIMTHIEADPELAHRFAILVSIPGVSTITAFALLIDMPELGLLNNGQAASLAGLAPIARQSGTWTGRAFIRGGRANVRRALYMPALVAIRFNRDLKAKYDQLKTAGKASKVAITAIMRKMIILANALLRDGRKWEQSVT

SEQ ID NO: 70812 - protein, 393 aa, unidentified
MICVGIDVAKDKHDCFILSSEGEVLADVFTIQNNAEGFDTLLQTIRRCVCPGDKIKVGLEATGHYSYNILGFLLDKGLDTYVINPLHTNLYRKSLSLRKTKTDRVDARTIAAMLMSDVDLKPYTDTAYHNEELKSLTRYRFDKVRERAKLKQSVSRLVTILFPELEKLVPSLHLASVYALLIEFPGAKQVAGAHLTHLKAILSDASKGRYGRDMAVTLRDAARCSVGSVMPAKSLELQHTIRLIRKLDAEIEDIETAIQSMMDEMQSPITTIPGIGVRMGAMILAEIGDFSRFDSPDKILAYAGMSPSTYQSGQLSLSGPYSHMEKRGSRYLRYALYNATKYVCFWDTTFAAYLAKKRAEGKHYNVALSHAAKKLVRLICALEKSQQSYRNAA

SEQ ID NO: 70813 - protein, 363 aa, unidentified
MSDGICFAGLDVHARKTAAAAVQLGSGEVWKAQLPGSSLAAIEWLRSLPGPVRAVYEAGPTGFELARAARAAGVELMVCAPGAIPRQPGDRIKTDVRDALKLARLHAAGQLRPVVVPAPELEALRDLVRAREDLRGDLMSARHRISKLLLRQGLIWTGPGETWSTGHLRWLSKVRLGQPLQEIVLGEYLGHHEVLLARRERLDSLIAEQSTQSPWSAMVGRLRCLRGIDTLSAVGLIAEIGDIHAFSHPRQLASYLGLVPSEHSSGTQRKQGSITKAGSSHARRLLVEAAWHYRRPPRVSETLKRRQAGQPPAAIDAAWRAQIRLHRRWAHLDTARSKKRTTVAVAVARELACFVWEIAQQPH

SEQ ID NO: 70814 - protein, 455 aa, unidentified
MEGKGATQTQTDTMASVNGNAAGIDIGTEQIWVCVPPGRDAESVRCFGTFTPDLQHLAEWLKKCAVTTVAMESTGVYWIPLYELLEESGFEVALVNPAHLKHVPGRKSDIQDCQWIQRLHSFGLLNGSFRPTEQICTLRAYVRQRANLIQYRASHIQHMQKALALMNLQLPLVLSDIAGATGLAIIRAIAAGEHNPIKLAALRDWRCKHPESEIRKALTGRYRREHVFALKQALALYDAYTQQIAACDAETEEYLSSLDTVTTDDPPPLPANKDNSHCKNAPSYDARTLLYRITGVDLVAITGLNENSVQTILSEVGTDMSRFPSEKHFCSWLGLAPHHNITGGKVLSRHTVKTANRAGQMFRLAAQAVGRSLDSVYGAFYRRMRAKLGPQRAIVATAHKLARAFYHMLKYRVPFQDTGAQDYEHRTRERELASLAKRAASLGFSLQPTVATGSS

SEQ ID NO: 70815 - protein, 381 aa, unidentified
MTTTATHNAHDTTPGRALFVAFELSEKPWKLGFTTGHGQKPRERSIAARNQTRVLQEVAQAKRRFGLPETAPVFSCYEAGREGFWLHRFLEAQGIPNHVVDSSSIEVNRRKRRAKSDALDVRKLLSMLMRYAHGERDVWRVVRVPSVEAEDQRHLHRDLETLKQERASTTTRIKGLLSSQGGRLTSVNKLPEQLEALRLWDGSPLPSGLRRRVLRVYAHHQFLSEQIAALEAERRARLQSAHDASIEKVHQLMQLRGIGINGAWLLVMEFFGWRELKTRREVGGLAGLTPTPYQSGESAREQGITKSGNRHVRWMTTELAWSWLRYQPESALSCWFRERFGGGGKRMRRIGIVAVARKLLIALWRFLETGVIPQGAELKAA

SEQ ID NO: 70816 - protein, 319 aa, unidentified
MTDQTLAIYVGIDVSKGRLDVSVGEQGDFWSVSNDEKGIDQLVQRMNTVKPALIVLESTGGLEVAAMTEMYAAGLPAALVNPGRVREFAKALGLLAKSDKLDANLLRRFGEAAKPSITRLPDEQEQHLAGLVTRRHQLIEMRVMEENRLNSVHFNQKQNLEEHIGWLNEALANLDQEIQAYVHQSEFWKTKADLMRSVPGVGPVTATTLLAELPELGKLDRRKIAALVGVAPFDDDSGHRRGKRRIKGGRCSVRNALYMAALSASKYNPVLRPFYQEMLKRGKLKKVALVACMRRLLTFLNAMIRDSLPWNPVLKPVHP

SEQ ID NO: 70817 - protein, 425 aa, unidentified
MRITQTLHEIKSNQVLDVSVDVHKKTLNFYFSLEGKEYRDECPNHTRSIEKRLSKYHGIAQEYGITQFRLICEPTGDYQNKLLRTARRQGHLTCLVNAESVCKFRVVETNDTGKTDTKDPQVIATLGRLNKVIRHRVLKEDYQVLRKLGRIYDDLESEITSLRCRIDRILIELFCDFSFTKDFLYGNSGAVLIERFGCNPYRIIKAGFETFAATMKQAIPRIRKDTITRLWQDSESSVLNELPAGYRDVLEEQFRDLITQFRDKELRKEQIVEQIKSIFRRLRDDDPRIPPPTAGVISEKNLALLIAETGPMADFRNWRQLMRYAGLNIRMRQSGQYQGKNKISKKGSPLLRKVLNHIVLPLVRKGYLYGDYYHKKRETEKMAGTKAMTIVSRHFLRKFHGWYKSGAAFNEKRFFACEAEYLKAA

SEQ ID NO: 70818 - protein, 355 aa, unidentified
MSMLSDNYEYVIGGDPDRDTIDLAVLDTATGATRAHIEASADGRGYLRMLNWADDHAPGRRVWALEGTRSFAAGLAEALAKAGEDVVEIGGLKRARGAKNDRLDAVRAARTAMAREHQASPRVRGLREAIRALTATRHGVLVSRTKAINELKSLIVVAPEHLRAVLRGRSLAKQLTLIESMTTTATAAVDHRITIVTLQSITARIRFLTTQLKGIDPELASLIAAHPAGPALLAEPGVGPVVAAQMLISWSHSGRCRSEAAFASLAGVAPLEASSGQRSRHRLNRGGDRALNRALHTVAITRMRCHPESRAYEARRTIQGKTHRDIRRCLKRSIARRLYRIMESSARAQATLTTA

SEQ ID NO: 70819 - protein, 345 aa, unidentified
MNKINVIGLDLAKNVFQVHAIDSRGEVLIRKQLRRAEMLKYFARLSPCLIGMEACGGAHYWARELTQLGHTVRLIAPIFVKPYLKSNKNDRNDAEAICEAVQRPSMRFVHPKGPEQQAVLHLHHGRQLLVRQRVALSNHIRGVLSEYGIVFPQGVNVLTRRLPEILEDAENGLPVLIRELLAELKLEHEQLRNRAERIEKQLKAWHAADAVSQQLASIPGIGVLTATALAATIGKGRDFKNGRELSAYLGLVPRQHSSGGKERLLGISKRGDGYLRCLLIHGARSVIHHIRRRLKAGKAGGNPWVEQLLQRCHVNEVAVALANKMARMAWALLNKDETYRTVLPV

SEQ ID NO: 70820 - protein, 411 aa, unidentified
MRLFVGDDWAEDHHDVEVMSEAGKVLAKRRLPEGVAGMAGLHELIGRHLGEDADEAEVVVGIETDRGPWVTALVSAGYLVFPVNPLQASRYRERLGVSGAKSDAGDAHMLADMVRTDSHQLRAAAGDSAEAEGLKVLARTHKTLIWERTRAVQRLRHQLREYYPAALEAYDDLDAPDTLELLGKAPDPARAAKLTRAQVSAALKRARRRNITDKATAILAALRSPQLGQPAAVTAAYAATVRSLIAVITVLNEQVKILQRQVEENFGRHPDAEIYQSQPGMGAILGARVLAEFGDDPHRYADGKARRNYAATSPITRASGKKKVVAARFIHNDRLVDALNAQAFTALRASPGARALYDELRARGIEHNDALRRLANRLVGILHGCLKTRTLYDEATAWSHRQNLPQSSVAA

SEQ ID NO: 70821 - protein, 359 aa, unidentified
MEAQRKALSFKGQNIYIGIDVHLKSWSVTLMSEATQLKRFSQSPDPDALYAHLVRNYPEAEYHSVYEAGFCGFWIHYRLVGLGIHNIVVNPSDVPTTTSEKLRKTDAVDSAKLARSLRAGELKGIYVPGSESLETRSLIRLRDSITKDQTRLKNRIKSHLRYLGIEIPEEFSGPGRCWNRRFVVWLKGAETGTAYGRQTLDFLVRQYEALRGQRLEMLRAVRALSRTERFEKPLENLMTVPGIGQLTGMSLLSEIDDIRRFKSADQLAAFIGMIPMCHSSGEREGVGDITVRRSARLRSVLVEASWVAVRQDPALSMAYGNYCKRMAPGKAIIKIARKLVNRIYFVMKRNQPYVKCVVA

SEQ ID NO: 70822 - protein, 426 aa, unidentified
MEKTINSLNGKKLQTAGKNAAKIGKAPECKNGRRVGKAVKQDPMVDVTRLQRLNVRCLLQKLEAAKNAPKEAAPDDDVEYWIGIDLGDKKSNYCILDKNANIVAEGSLATSVTEFNLCFKAIPRSRIALEVGTHSPWTSSLLEGLGHSVCVANPRKIGGGKKNNRRKNDKLDARALARLLKADPKLLYPIQHRGEEARHALVLLRARQAAIEVRTKLICAVRGLVKSDGKRLPRCSAESFHKIERTEVPGALQKMLEPLFKQIESLTEQIKKYDKEVKRKCKEAYPETELLRQVNGVGPIVGLAFILTLDNPRRFAKSRDVGAYLGLIPRQYDSGDSRPQMRITKTGDRMMRALLVQSAQHILGRFGKDSDLKRHGLKIAARGGKNAKKRAVTAVARKLAVLLHSLWVTAEAYEPLRNSTAKEKVA

SEQ ID NO: 70823 - protein, 355 aa, unidentified
MKQYIGCDAHARYSVFVSIDETGRIEPPVRVEHQGRDLRDYLEKLEKDTPVAVEASGGWYWFMDELEAAGLDARLVDPLQAKHRMSGKNKTDKLDAKGLAILLRSGTLPEVWVPPSELRDLRGLMRTRLATRAETTVLKNRILAALRRFGVTRDETTTDWFAKKSRLALSVAIGRLPEETRRATLHEWEMLDQVEGHIGEMEVRLRARVGRLGWVRLLKTMPGVAEILGATIYLEIGDVTRFPSADRLASYSGLVPRIHSSGGKFHHGPTSPVANHYLRWAFVEAANAAVMHRHKYADQHVIELYDRLKKHKCHGKAIVAVARHLAEASWWILTKREQYRPPRAHAEAMSPSRNG

SEQ ID NO: 70824 - protein, 438 aa, unidentified
MISAAIERCAGIDVHKRFLAVCVMLGPLDGEPRAEKRRYGTTVTELNDLREWLRSQGVTHVVMESTGSYWKPVFNVLEEAVRVYLANPQEVKNRKGHKTDDKDGWWLAHLLRHAMIQPSFIPPRAIRELRDFTRRRKRLLGNSTSERNRIQKILEDANVKLGNVLSDVFGASGQLMLDALLEGQATPEQVAQLAQRKAKKKIPQIIAALEGHQMSAHHRKLIRYSLEHLQFLEDQIVKLDNDIGAKIREAQLEPQWQLLQSVPAIRETSAAAILAETGGEMAPFPSIKHFSSWAGLCPGNNRTAGKNKSSRTTGGNPWLRSSLVECSWAASVKRNCFLREKFWRIVSKSRDHKKGPALIAVAHTLLQLIFHVLSTGKPYAERGLPPLDERQRNRIIRHHVRRLGKLGIAVNSTQPAATAGLGRPCKSVVLEPRPQGTS

SEQ ID NO: 70825 - protein, 438 aa, unidentified
MELSHSSSSPVDSSSFRYVVGIDIGSEACSFCALKPDKSQVIRPTEFANAAAGFAVLTNKLEGLSSSPEQILIGLEATSRYGENLYHYLESQGYQLCLLHPRQTHQFAQQRGLRAKTDKLDAGTIARLLLSGEARRGYVPSELIATYRELVRLHTQLQDEGARYKNEIHALLAVLFPEMSQVFTDPCRPTALGLLKRYPSAKAMAEAGVEAIAVTLHDLAPRHYGRKTAEQLTQLAQQSVGSTIATSARSTSLKILCDQLEHTQQSVVQLEEEIDKLVEHDEGIKGLKSVPEFGRKMMIVLRAELGDVARFQRTDQVVAYAGMDIEVKESGKWKGQAKLSKRGSGRLRRTLYMTAVRCIRLKDSAFGVYYHRLLARGMKARAALMAVMRKMLIVAYQLLKTEEMYDPAKVCAVPVAQPEVEPQALHTPSSAKLVAGGA

SEQ ID NO: 70826 - protein, 355 aa, unidentified
MDNRKYIGMDVHKETISIAVLNSSGKLVMESIIETKASTIVQFFQGLRGDLHVTLEEGTWAAWLYDLLRPHVTEVLVCDPRKNALLKAGNKSDRIDARKLAELLRSNLLRPVYHGEHGVRTLKELSRSYLAISGDVARAMTRLKAVYRSWAIACAGKQVYAPRCRAQWLAKITEAGVRRRAEIYYQQLDELRSLRQQVRRELLAESGKHKASKLLCQIPSIGPIRAALLIAILQTPHRFRTKRQLWAYGGLGIETHSSADHRYVEGQLRPSKRQISLRGLNRNHNHELKNIFKGAAIIAATKAGPFQEFYAALVAKGIRPEMARLTLARKIAAITLIVWKKGVSFDAQHLKPQTA

SEQ ID NO: 70827 - protein, 345 aa, unidentified
MSYYAGIDVSLEQSSVCVLDGEGKIIREAKVASEPEALIAWFGSLGLAMTRIGLEAGPLSQWLFAAMKQAGLPVELLETRHVRNAFKTMPVKTDRKDARGIAELMRMGWFRPVHCKSISAQETRAILTTRTLIEAKLRDVEMSLRGVLRGFGLKVGKTTPTNFAERIKQLVSEHSNLQVIADALLAVREVLLREFRSFEKRVRTMARHDERARLLMTTTGVGAVISLTYAAAIDDPARFKNSKQVGAHYGITPKRYQSGEIDYTGRISKIGDKSVRTALYQAAHIILTRPVKASAVKSWAMQLAKRIGMAKAKVALARKLAVILHRMLVEGKPFDHKLPNQVAAA

SEQ ID NO: 70828 - protein, 339 aa, unidentified
MIDSGAGEIRTLRLSPKTEAIVAWVRSLPGPVAVTYEAGPTGFGLARALTAAGVRCEVVAPSKLERPPGDRVKTDRRDAERLARLLRIGELPSVRVPSEVEEAARDLVRAREDARGDLMRARHRLSKLLLRHGLVWENSAWTGAHEAWLRTLRFDRVGVQIAFEEAFDAVLSVHARRDRLDTAITEMAATSSFAPVVDRLCCLRGVGTLTGFGLAVEIGDWHRFTGSTIGSYLGLVPSESSSGARRAQGGITKTGNSHARRLLVEAAWHHRKPYRPSRELIRRRNGQPTAVRDRAERGNRRLHRRWTRLDARGKRSTISAVAVARELAGWTWSLAVMDS

SEQ ID NO: 70829 - protein, 344 aa, unidentified
MNCHRRLKCDFDHGCQIAFEAIPLPKSIGWYKLIEIVKKSCGLDIHKRFFIATILSTSSEKQQQRFNRDDDGILALKNWVISEKCDVVACESTSDFWVPIYDSLIKHLPVIIGNARDMKAFTHKKTDKIDSEVIAQLALNNMIQPSRVFPKYHREFRSYVRLRHKLVQKRTDIKNEAHAILALEMFNLNDVLTDIFGKNGRAILSGISSGKNVDEIIESLSPNVRKKSAQIKEILDREISQGAALRLQICLKLIKHLDDEIEALENEIFNYAYGKHKREMEILMSVPGIGELGAATLIAEIDNFKDFSSGDKLASWLGIVPNVYQSADKFYNGRITKRGSKEAR

SEQ ID NO: 70830 - protein, 355 aa, unidentified
MTASYEYHIGVDYHKSYSHLVVQDSSGKTLRSGRVKNDRQSLGGFLERYRENSHAVVEATRNWMVMYDWLDDICDDVVLAHPLKVKAIADAKIKTDKIDATVLAHLLRADLVPEAWAPSEKSRDLRVALRERMFYVRLRTMTKNRIVTVFDRYPEQTAQLKKLGDLFGKTGRVQLAQVNVSEIDRIQIDRGLDFIGDIDVRIKQSEATIRAMTKANANVKLLKTIPGIGEFFARLIDAEIDDISRFRNPKKLAAYAGLVPSTYSSGGKTFHGKIIKQGNKWLRWAFVEAVTPAIASDVQLRARYEHLKIRGVNKARVAIARKLLTIAFQILRDQRAYERRGESTMEGTSTISRLS

SEQ ID NO: 70831 - protein, 348 aa, unidentified
MQSTLNLPVIGLDLAKSVFQLHIVDVESGEIQRRQIKRAKLTEFFAKCTRSLVAMEACGSSHYWARTIRALGHEVKLLPAQHVKAFLLRDKTDAMDAQAIWVAAQQPHILPVPVKSERQQACLALHGMRRQMMKMRIMQTNALRGILAEFGIAMPIGHNQLLKTIQAEIDETQEKSHLPADLVICIQEQLKRIDGLQDDIDHIGQRLGAMIREDRQMQALQQIPGVGDLTASALVAAVGDFCTFKTARQFASWVGLVPRHVGTGWKTQQLGISKRGDTYLRTLLIAGARAVIARSGKSGWIERLLQRRHYNVVVVALANKMARTAWAVLARGMAFDRARWNPLETVTA

SEQ ID NO: 70832 - protein, 457 aa, unidentified
MEQPTRFIGMDVHKDTIVVAVTAAGDSGKATPYGKFPNSAAALEKLVKRLRQAGSGSLKFCYEAGPCGYGIHRTLTKLGEDCMVIAPSMIPRKSGERQKNDKRDADGLAVLHRGGLLTAVWVPDAAHEAMRDLIRARLAAVRAVRTARQQLSAFLLRHERIYRNGGKAWTKTHRGWLADQSFAQPAHQIVLEESIEAVRLGEQRRDRVDGYLRAQIPTWSLFPLVQNLGALRGLDTIASAGLAAAIGDPSRFASAPDFMAYLGLVPSEHSSGPKRRIGAITKSGDVHARTLLIEAAHSYRFPARIARRKLTAIDAVPEAVRTIAWKAQTRLCQRYRYMMAKDKPKPVIVTAIARELAGFVWSIACITSDPPAKTSPATTPSEEVRLTKSTSRSRALRRQPLKATGRRAACPEQAAVPIELRYVTVDRPCPEAANPKVSTPASPTRRSAAVSAEGGCG

SEQ ID NO: 70833 - protein, 370 aa, unidentified
MLDTTTFIGLDVHARSIKAVSLDVMTGEVRAATFGYDAGAVAEWVRSVDPRARCVYESGVTGFDLQKRLSGLGVDCVVGAVSKMIKPSADRRRKNDRNDAEFLARMLSVGNVVEVWVPDDECEAARDLTRALEDARDDLSRSKQRLSKFLLRHGLVFDERTPTGRRKGNWTRAHWSWIESIRFAERADNDVLAYYVDAVRRAAEEKARLEGLVEAEARKPRWRRRVDSLRCLKGVDTATAADLVFEAGEFSRFRNARSFAAWVGLTPSEHSSGESDRRGAITKAGNKHLRKTLVEAAWHYLTCSGRPKDLARGQAPDRGARRHAAKGVRRLVERREALLARGVHGNKANVATARELACWVWAVGLMAEEA

SEQ ID NO: 70834 - protein, 327 aa, unidentified
MARYVGIDIAKSQLDVAVREVERSSGDKEPDSTLGDSFQVENTAEGRDWLTQKLEGVAPTRIVLEASGGLERPVVAALGAADLPVVVINPIQTSKFAKSIGRLEKTDPLDADVLALFGERVRPELRPLPSEAQHELEALVKRRRQLVEMRDAEKNRLERAEKAVEPSLTEHIRYLSEQIEETESELKDLIEESPVWQVQEDLLCSVPGIGETTARVLLARLPELGEANREEIAKLVGVAPIAQESGTWKGERHIEGGRADVRRALYMATLSCIQHNDRIQSFYQRLVDKGKEAKVALIAAARKLLVILNTMLKDQSRWQPNHSPATA

SEQ ID NO: 70835 - protein, 412 aa, unidentified
MDVIYPQCCGLDVHKKTVTACLITSTAGAEPMQEIRTFSTMTADLLALADWLQEAGCTHVAMESTGVYWRPVYNLLEGQFELLVVNAQHIKAVPGRKTDVKDAAWIAELLRHGLLRGSFIPSQPQRQWRELTRYRSTLVQERARTLNRLQAVLEDANLKLASVVTDIYGVSARAMLEAILAGERDVEILADLARGRLRTKRDQLKEALEGRVTAHHSFLLTEHLSTLEYFDEAIARVSGEIDQRLTAEQEAIALLDTIPGVGQRAAESLIAEIGSDMSRFPSAKHLASWAGMCPGNHESGGKRLSGKTRKGNRWLRQVLVEIAHVASKTKNTYLAAQYKRIAARRGKKRALMAVGHTILTIVYMMRTRRQPYQELGAAYCDHREQHRVERRLVQRLERLGYKVSLQPKALAS

SEQ ID NO: 70836 - protein, 428 aa, unidentified
MAKSKAQSVIITDDDGLYYERCAGIDVHKKLLVVCLRIGRRTESREFGTTTAEIREIVAWLTSNGCQMVAMESTGSFWKPLYNIFEQESLPAMVCNAYHIKNVPGRKTDWNNAFWIAKCLAQGLLKPSFVPDRRQRELRDMTRFRKSQIEERSRNINRLQKFLEGANIKLGSWLSDVEGKSATQLLELIIGKPDFTIDDVKSCMHRNLKSSPEELFAALDGYIAPTQREFFSHVMDVIRTQTSQIEKTDALIKSALNEDEIKAVTALDTIVGIGTVSAEQIIAETGTDMRHFRDQHAFSNWIGVAPGNNESAGKRKSGKTIHGNKALKTTLTQCAKSAVKVKNSFFHAQYNRLVSHRGKNRATMAVAHSMAIAIFFVLQGMEFKDLGADYYTQFNREKKINSHLKQLSKLGVNFPDKILADAIERPPD

SEQ ID NO: 70837 - protein, 364 aa, unidentified
MLIIGCDYHPGFQQIACVDTDTGELSEHRLAHREEAEAFYRELKPRNLSARVGMESSGHSRWFERLLGELQFELWIGDPAEIRTKRVRKQKTDRQDAQLLLRLMLEDRFPRIWVPDAENRDLRQLLWHRHRLVQMRTRVMNQLHVVPLNEGLRRKKALWRPAGRKELESIALATWASRRRQDLLDLLDQLTPKIQELTHALEEEVEKRPVTRLLMTHPGVGPLTALAYELVIGTPERFHCGKQLASYIGLVPTEESSGDRRRLGHISKQGNVLLRFLLVEAAQVTVRSQPEWRSKFFHLAMRRGRKIAKVAMARKLAVHLYWMWRQGLDYGQMQKLGSHAGEPGNRDGVQSNTDVMIGHPAPSK

SEQ ID NO: 70838 - protein, 422 aa, unidentified
MKNVTDSGQKVKGQKLLMALERASWILGIDVGKEKLSCALLLKDETFRCRFDVEASLHGFQMMLERVSTETKGDGVVVFALEPTGHYWMVLGQFFEDHNQSYVLVHPLVVARSREVKQLNRGKTDAFDARLIAELACRGTVTRTQIPEDDWATIRFYAREYMDREKEIAREKNRMMSYLETTLPGFLEIFPRPLGMNSRACLRVLTNFREVLQGDIVQFESQARKHITGKRLMTSRVRRLFEMLQRGDFLGLRAGRKTLFWRIINSLDRLELYEKQQDMASKSLVSLYEQSEFKPYLDSVWGTSPLTNSLVLGFMGDPASYDTPASLIKMAGCDPVPNESGKFKGKASISHRGRNLLRKAGDRTSFLLEKRNTVFRNFMHHLTTRPKNKLTKRQARIACINKYFRIIWVLCNHRVLFNPALA

SEQ ID NO: 70839 - protein, 318 aa, unidentified
MTKLSTLTAGIDTSKDKLDVAVHGTATRLTVENCKAGWQSLAGELTKAGVERVGIEATGGYERDVTRHLQAAGFTVVVLQPLQVKAFAKLHLKRAKSDRIDAVLIAACTYIFDARNKLPPDPRFDALADDLTFIEQIEEDIVRFKTRLEHIRDNRLQRTVTADIKRLEKRRAVELKRLIARLRCHADLAERFELVLSIPGIGERTTLTLIVRMPELGRVSREQAAALAGLAPFVHQSGKRQGETHIGGGRSRLRRSLYAAAVAASFHWNPALKAFYRRLTARGKSHNSALIACARKLLVFANTVVARGTPWVVARAGA

SEQ ID NO: 70840 - protein, 352 aa, unidentified
MSWLIKTTRMRETMLYIGLDVHKEFCQACVIDESGRALSNERFSSTKEELDRFMDRFQDAKFVLESTGIWEFIYEGIEKRGFEVQLAHPLKVRAIAEAKVKTDKVDAETLAQLLRADLVPRSWIPPKDVRDLRQLVRQRAYLVREAARFKNRIHAEILRRGVRRPEVLRTPFSQRSIRWMRSLDIPTVTSCLNCLENLQEQVEEVNIQLREEFSRRPDAQLIATVPGIGFYGALLILAEIDDVHRFRHSENLCAYAGLVPTVSQSASSVKYGSISKDGSAYLRWILTESVHVHTMHSPGSQLSRFHARLAKRRGRRIATVATSRKLLRIIYWMLVRHEPFHSHGFNPVKRVH

SEQ ID NO: 70841 - protein, 349 aa, unidentified
MLRVTVGLDLGDRYSRFCMLDGAGSVFEEGRVKTTPEALERRFGGEPRARVVMEVGTHSPWASRLLGELRHEVLVANPRRLKLIYGQTDKSDRLDAEHLARVGRMDPKLLSAVQHRGAEAQADLALLRSRDALVRTRAQLVNHARGSVKSVGARLPKCSTSSFARKVATHLPERLRPALEPVLAAIGDLSQKIRAYDREIERLGNERYPEVQNLRAVPGVGALTGLAYVLTLEEPERFRTSRAVGPYLGLRPKKRQSGESDPSLRITKAGDIMLRRLLIGSAHYILGPFGPDCDLRRWGLTLVARGGRHAKNKAAVAVARKLSVLLHHLWLTGETYDPSYAGTRLQDAA

SEQ ID NO: 70842 - protein, 344 aa, unidentified
MVVLGTDTHKRSHTVVAVDEAGAEIASMTVAATPEGHLRLVKWAAKWPQRRWAIEDCRTLSRRLESDLLRAGELAVRVPPKLMAGVRRSARTRGKSDPIDALAVARAALREPDLPVAQLDGPSREVRLLVDYRESLVKDRTAAQNRLRWRLHELEPGYDPPPGSLNRYKTLDHIDQLLTVHTSMVATLGRREVTRIRELTREANQLERDITHRVTQLVPSLLEIPGCGALSAGKLLGEAADITRFKSRDAYAMWAGVAPIPVWSANNQRFRLNRGGNRQTNAALHRIAITQLRIHPDAQAFIKRRLETGSTKREALRLLKRKLANVVYRTLLTDTQQPALSQAA

SEQ ID NO: 70843 - protein, 327 aa, unidentified
MRQHKSSTEKVKTSVAFDVCKATLDGHILVDGKVFSVPNADDGFDQIAAILTDYHISLVLMESTGGYEDAAACFFQSIGYDVVVVNPRHARRFAQSMGIMAKTDRIDAAVLAQFASVLDSLPDRERYIRPLTDETRKFLSRMVTRRRQIVELITAEKQHLSCADDYSRQSINIVLPFLQAQLKEINDDISLYVKKNFSYLSKILSEIPGVGKQAVGVLIGDVPELGRIDNRQLSAVIGVAPFNHDSGKMRGRRFISGGRKQVRNVLYMGIISATRFNPVIKAFYERKLNEGKPKKVALIACMHKLLRIINAMIRDGTSFNTSLHTVS

SEQ ID NO: 70844 - protein, 375 aa, unidentified
MNSIIYLGIDVHSTNYTFCALSISLGEEPRILAENQTEADDIHALEMVEFLKNKYGEDTNVICGYEAGCLGYTLFHTLDNHGVECRILAPSTMPSARGKKRVKTDKRDARIIAQNLAYNTCSFVTVPEEGDMEIRDYIRMRDDHKNALKKIKQQILSFCMSHGYRCEHRHWTNAHISWLRSFECTEMHRETLNEYILTLDTLNEKIERFDSRINELSSGGKYQEDVRNLSCLLGIKNTGALSILVETGDFARFPTAQNYASFLGLVPGEHSSADDVNRLGITKAGNTHLRKILVEASQSICRGTPGYKSKDLKARQRDCDADVVAYADRANERMRRRYYKLISKGKKRNVAVTAIARELACFIWGIKTGNISLSS

SEQ ID NO: 70845 - protein, 348 aa, unidentified
MTTMVEDTRVITGGVDTHADLHVAAALDSVGGLLGVQEFPATAAGYAELPGWLRSLGNLAVAGVEGTGSYGAGLARYLAAAGVRVVEVDRPDRQDRHRQGKSDPLDAVSAARAAQSGRASGAPRGRDGAVEAIRALMVAKRSARAERVQAVNQARALIVTGPEELRARFARRSPAQLIEAIAVLRPRPGDVPGYATRVALRELGRRARFLDGQLDRLDELIGPLVTERAPGLLALHGVGPDTAALLLVAAGDHPERLRSESSWAHLCGVAPIPASSGKTAGRYRLNRGGDRQANSALWRIVIVRMSSHPATRAYADRRSKEGLSKKEIIRCLKRYVAREVYRQLRDGA

SEQ ID NO: 70846 - protein, 406 aa, unidentified
MTITLLETDPVVGGIDTHQDLHWAAVVDHTGHVLGTEAFSTTRSGYRAMLVWLRSKGDVCRVGVESTGSYGAGITRHLALAGIPVLEVTRPDLESRRRQGKDDSIDAVAAAHAALWGQRVQVAKDRDGAVEALRTLRTTRRSAVKARRATLQLLHNTIVTAPDEIRDQVRNMTRMQRLRTCASWRPDVIGYRDPATSAKIALKALARRILMLNDEIADLDRLIEPLVEELASALLALPCIGVESAGEFLVTAGDNPSRLRSEASFAMLCGASPIPASCGKTNRHRLNRGGGRQANSALPMVVVSRMRTDERTPAYVERRLREGLSKKEIVRCLKRLWPARCFVPWSSRARERLRSPPAVHIGQPAASRSHEVHDRASSDKSQSERARSRRQGRQPRVAGAARSEAP

SEQ ID NO: 70847 - protein, 461 aa, unidentified
MNRNKPTGIQNGSAQKRVDWKALEIVHPDAAGIDVGGSEHWVAISPDRDPEPVRRFGCFTADLREMGRWLVEKGVRSVAMQSTGVYWMPVFEVLEQQGLEVYLVNAQHTKNVPGRKSDVQECQWLLKLHAFGLLNNSFQPTDEIRIARTLWRQRSNLVAEASSVIQRMQKVLTEMNVQLSNVLSDVSGMSGMKIIGAILEGERDPWKLATSVEPEVKAKPEDIAKSLEGNWREELLFVLRQHVELYRIYQEKITDCDLQLRKHLESLGSKVDLRTQPIGNRPKGKKKSKNAPGFNLRTELYRITGIDWTQINGIDVLTAQTVIAEAGADLSAFPSEKQFASWLGLCPTNEQSGGKILNRRTRKVVNRATVAFRNAALTLLRSQSYLGAQYRRLRTRLGAPKAITAMARKLACLFYRLIKHGQPYVDKGTEYYEAKYREQQIRSLAKRAQKLGLQLVIPKTA

SEQ ID NO: 70848 - protein, 391 aa, unidentified
MVCVGIDVAKDKHDCCILDSEGTPLVDCFTIPNNMDGFKSLLQTIQDCSQKSDKIKVGLEATGHYSYNILGFLLDNDLPVYVMNPLHTNLYRKSLSLRKTKTDRVDAKTIATMLLSDVDLKSYTDTAYHNEELKSLTRYRFDKVQERAKLKQSVSRLVTILFPELEQLVSSIHGTSTYALLSEYPGAKQISEAHLTRLANILVKTSRGHYRKDKATHIRDAARTSIGSVMPAKSLELKHTIKLIQELTSEINEIEDAIRKIMDELKPPILSIPGMGFHSAAMILAEVGDFSNFNSPDKVLAYAGCSLSTYQSGKLTNCYAHMEKRGSRYLRYALYTATKYVCYWNPVFTEYLTKKQAEGKHYNVALSHATKKLVRLIYALQKSGKAYLAVT

SEQ ID NO: 70849 - protein, 348 aa, unidentified
MKYFCGLDVSLNSTAICIVNYDGDILREGQVPTEPRAIHDWLGNVGLVMERVGLEAGSLTPWLCHELLSLGYPAICIETRHAKAAMKAQQVKTDRNDARGIAHIMRTGWYREVHVKSHASQRLRVLLNNRKCLLDKRLDIDSQIRGTIKVFGLKTGKVSKLSYEPRIRELIGDDAELQAFIFPMLAVRQALIVQMGKLQKLILDYVKDDEVCRRLMTIPGVGPLTALGYKTFVDRPQRFKHSKAVGAATGLTPKKYASGEVDRDGHITKCGDEFVRSHLFEAAHTMLCRSRKASPLKTWGLRLMKRSSLKVACVAVARKLAVIMHAMWRDGTEFRFSQEGAETLAAAA

SEQ ID NO: 70850 - protein, 399 aa, unidentified
MLSVGIDVSKGKSTVCLMRPFGEIVAGPMEIAHVDSELKTLVKLMKSMSDEVKVVMEATGIYHLPVLTYLKDNDIFTAVINPYQMKQYRVQGLRRVKTDKADSMIIAKYGLDNWNELKDFVSSEDKYMELTLLSRQYRHYMRIHVASLQELTHILDYTMPGVKKEFNSWDPENGKDKLSDFVEKYWHYDNIRRKSERQFVESYLAWAKKKGYHRNQNKAAKIYSMAKEGIPTLPADQTTKMLVIQAIEVLRRVDETLNTILARMQEIAKTLPEYPVVRSMGGVGDVLAPKLIADIGDVRRFHNSKALIAYAGIDAPPYQSGQFTGTNRNISKRGSSAIRKTGYEVMRSLKSHPMPEDGSVYQFILKKEAEGKPKKVAKMAGLNKFLRIYYARVMEVYSC

SEQ ID NO: 70851 - protein, 341 aa, unidentified
MEKNTYFVGLDIAADDFVASIYQCPGKPLITKESIKNNPDGFSMLVSWLKEQDIDNSNSIICMEATGVYSEAVAHYLATYGFRVSVEPPLKVKRAFDPIGHKTDPVDSRQIAEYAYRYSDELRFWQPKQEIVEKIKQLLTAREQFTKQSTAIQNSIKAYERHIIKVPLIINAHQETLKELKKHIKAIDKELDRLIRQNPTISQITSQLKSIPGVGLLLASDLIAITGAFNDISSHKTLAAFLGICPYQHQSGKSVYRQPHMRNFGPNYARKLLMLAARSCATHNIEFRKYYMRKLAEGKAKQLVLNNISNKIIKIACALIKNNAQYNETYRSVNPLCFSLA

SEQ ID NO: 70852 - protein, 422 aa, unidentified
MKELLRVLFIGDDWAEDHHDVEIEDEDGRRLARARLPEGLEGIARLHALVAEHAPAAWAELPPEQTAGQVVVGIETDRGPWVTALRAAGYSVFAINPLSAARYRQRHSTSGAKSDAGDAHVLAEIVRLDREHHRPVAGDSDLADAVKLLARAHQTAVWERTRHVLRLRSTLREFFPAAVEAFEDLAASDSLSLLARAPDPARAAKLTRGQLIAALRGARRHHVEAKADALLVMLRAPALRQPVITEAAYAAVVSGQVAIITAVNAQIAALAQVMGEHFGRHPAADIYLSQPGLGVVLAARTLGEFGDDKGRFADARARKNYSGQSPITRASGKKSVVLARYATNRRLGAALHMQAYAALTGSPGARAYYDALRGRNIGHHAALRQLANRLVGILHGCLKTGTLYDEDTAWQHHRTNTENIAA

SEQ ID NO: 70853 - protein, 346 aa, unidentified
MNKHDVCGIEVSAAQLLAGLEREGATRTRREFPNTPQGHQALVNWLGAPGRTVRVVMEATGLYGLDLALRLDAGTSFELMIANPRAVRHFAHALMKRSKNDPMDTDVLVEFARRMPFQPWARPSAAALALHALAHRLESLTEMHAAEKNRLHAAQLSPALPAAVVRDLQRSLRSLERALDRLTRQAVQIIGADPDLNRRYPLLLSACGIGPTSAVQILAQLAVLAPNLGVRQWVAYAGLDPRQYSSGRSVHKKVRISKTGNRHLRRALYMPALVAIRHQPHLRAFYQHLLARGKAKMQALVAVMRKLLHAIFGMFKHHQPFDGARLCSLPVESSQPLPTFSTTEAP

SEQ ID NO: 70854 - protein, 420 aa, unidentified
MKSFVPVAGVDVSKRFSDLCVLSPDNNVLLRQKIYHDMVSMKLAEKKLHEIELECGARPVVVMESTSHYHLILFQFFTDAGFEVVVVNPIQSGALKNINVRKVKNDRVDAYRIAMLYRLKVLRPSQIPTSSLRGLRLLTRQRSELKGDVARFKNRMTAYLDQIFPGYGEVFSDVGGSASRAVLHMCPTPEELLNADGSLLAKAICEAGNKGPKFGAEKAAKLREAAGSAQVIGVRSASNASLIKNVLDIIEGLLAAIQRIEGEIKELVTQDTRLDEDVKLLCSIPGIGFSSAVVIAAEMGDISLFRKPKQLAAYFGLDPGERQSGTFKGRKNKLSKRGSPQVRAALHMAAVSSVSRNRDGTYRNPVLAEYYERKCAEKPCKVARVAVMRKLSNIIYAVLRDRRPFELRTPQEHMALLAAA

SEQ ID NO: 70855 - protein, 409 aa, unidentified
MSVEHDPSMRRPTAGIDWASTEHALAIVGPDGVEVQRMIVEHTATGLRKLLRRLQQTGVLEVGIERPDGPVVEALLDAGLTVYVIAPNQIKHLRRRYGAAGNKDDRFDAYVLADTVRTDHHRLRPLTPDSPATLTLRMTVRARKDLIAARVAMANQLRAHLEHVLPGVIGLFRDIDSAITLSFLTRFPTQDKVDWLSPRRLQNWLRRVSYPNPARAGLLHAHLRAATRGTTGPEATARAHVTAALVAGLTTLREQINALEEQIEVQLLQHPDAEVFTSLPRAGIVRAARLLAEIGDARGRFPTPEALTCLAGAAPSTRQSGKVKVVGFRWAVDKQLRGAVIDFAGDSHHANPWAADLYQRARARGHDHPHATRILARAWLHVIWRCWQDRVPYDPTRHRALQAVLATTA

SEQ ID NO: 70856 - protein, 311 aa, unidentified
MERSFVGIDVAKQQLDVHVRPTDASFRLGRDDAGLTELVERLQRLAPVLVALEATGGYEITVAAALGSAGLPVAVVNPRQIRHFARATGTLAKTDALDARVIARFAEAIQPVARPLPTAEAQALAERVARRRQLNEMLGAERNRHQQVRDPRLQRRIATHIRWLTQALADLEADLDDLIRSSPLWRETDNLLQSVPGIGDVTAYTLIADLPELGRLDRRKIAALVGLAPINRDSGTLRGRRMIGGGRPMVRCVLYMATLTAVRFNPVIAHFYRRLIAAGRPKKVALIAAMRKLLTILNAILRDQRPWQQPA

SEQ ID NO: 70857 - protein, 398 aa, unidentified
MTESSDYESVQVFIGVDVGKDTHHAVAINRSGKRLFDKALPNDENKLRSLISDLKQHGQILLVVDQPATIGALPVAVARSEGVLVGYLPGLAMRRIADLHAGEAKTDVRDAAIIAEAARTLPHALRTLKLADEQIAELSMLCGFDDDLAAQTTQASNRIRGLLTQIHPAPERVLGPRLEHPAVLDLLQRYPSPEKLASLGEKKLAAQLCKLAPRLGKRLAADIAQALAEQTVVVPGTNAAAVVLPRLALQLITLRKQRDEVALEVEQRVLAHPLYPVLTSMPGVGVRTAARLLTEVACRAFASAAHLAAYAGLAPVTRRSGSSIRGEHPSRRGNKALKRALFLSAFAALRDPLSRAYYTRKMSQGKRHNQVLIALARRRCDVLFAMMRDGTFYTPQGS

SEQ ID NO: 70858 - protein, 321 aa, unidentified
MSAQTFYLGVDVSLSELVIAHFADTAPLTKIANNAKHIKRWLKALPPACTIGMEATGTYHRLLADLAFTAGHTVYVLNPRDVALYLKSLRSRGKTDVLDARGIARYTHNETERCHPYVPLTAQQQTITTLIQRRHQVVKHRTSLRMSFSDSTLCAKALSRLMSAFDTLLADIDCQLKALLAADEALNIRCKRLCSIQGIGPLVSAALAMRMSRVRYANSDALVAAMGLVDPSPRDSGQYAGTRHLSKRGNPEERRLLYLAAVAACRNPLWKAIKTKLLLKGLPCTAVYCIVARKILRIAFAIWNSNTEYDPNLVGKACVPT

SEQ ID NO: 70859 - protein, 354 aa, unidentified
MSQTPNTAIAVIGIDIGKNSFHVVGHDARGAIVLRQKWSRGQVEARLANMLPCLIGMEACVGAHHLSRKLASLGHDARLMPAKYVRPYSKGQKNDFNDAEAIAEAVQRPTMKFVATTTAEQLDLQALHRVRERLVSQRTGIINQIRAFMLEGGIAVRQGIGFLRTELPTILATRTDALSPRMLRVIEELAGDWRRLDQRIDGLSGEIEALARQDQACSRLMTVPGIGPIISSAMVAAIGTGDVFSKGRDFGAWLGLVPKQISTGDRTILGNISRRGNRYLRVLFVQAAWVVLVKIKNWERYGLKSWIEAAKRRLHHNVLAIALANKLARIAWAVLAKGRAFELTRTDDASVRPA

SEQ ID NO: 70860 - protein, 370 aa, unidentified
MKDTIKYVGLDVSKEKIAVAIAEEGRQEPRYWGMIPHTSSAVKKLMKKLGSPENLRVCYEAGPTGYPLYRLFLALGIHCEVIAPSLIPKRPGERIKTDRRDSLRLAQLYRAGELTSIYVPTEEDEALRDLVRCREDAKEDELRIKHRLSKFLLRNNIKPPSGVNKWTVKYFNWLDTLKFENPHLRIVYQEYYHQLKEIKQRLLRLEKEIRLQSTEGVQAPKIQALQALRGVALITATSVVAEIGSFKRFSTPRQFMAYVGLIPSEYSSGESRKQGNITKTGNRHVRHMLVEAAWSYRFQPAVKGELKKRIHGQSPTIQAISWKAQNRLHQKYYRLIARGKNPGKAITAVARELAGFIWAIMQEVESAPNA

SEQ ID NO: 70861 - protein, 326 aa, unidentified
MEHELHYIGIDTAKEKLDVDVLRPDGRHRTKKFANTTKGHDELVSWLKGHKIDHAHICIEATGTYMEPVAECLYDAGYIVSVINPALGKAFAQSEGLRNKTDTVDARMLAEFCRQKRPAAWEAPHPLERALRALVVRHQALTDMHTQELNRTETAREVQRPSIDAHLLWLEAELKRLEKQIKDLTDDDPDMKHRRKLLESIPGIGEKTSAVLLAYIGLKDRFAHARQFAAFAGLTPRRYESGSSVRGASRLSKTGHVSLRRALYMPAMVATSKTEWGRAFRDRLAANGKKGKVILGAMMRKLAQMAYGVLRSGVPFDASRHNPVAA

SEQ ID NO: 70862 - protein, 394 aa, unidentified
MIYVGIDVAKDKHDCIILNSNGKVVFDVFTIQNNIDGFEDLLFKIKTTEKCPDKVKVGLEATGHYSCNILGFLKNKGLSTIVINPLYTSLSRKSISLRKTKTDKVDARTIACMIMSDVNLKPYSDTLYLNEDLKSLTRYRFNKVAQRAKLKISVSRLVNILFPELEKLVSTLHGKAVYELLSEFPSAQHIASANLKHLTNLLHTASKGRFQRASADQIRQAARKSIGSYLPAKSLELKHTIKLIRELNSEITEIEAEIKKIMDVIDSPIISIPGIGQNLGAVILAEIGDFSRFESPDKILAFAGCSPSTYQSGQLYSSHAKMEKRGSRYLRWALLNAAAYVCKWEPTFATYLAKKLAEGKHYYVALSHAAKKLVRVLYHLETTGKTYKPTSILS

SEQ ID NO: 70863 - protein, 312 aa, unidentified
MTQFAIGIDVSKPRLDVVVRPQGPRFAVSNDAAGWAELIARTSPWADAEFGLEASGGYEQGCLAALHAADRKVRLFEASRVRAFARSRGQRAKSDEIDAGMIGDYAASLPPERRHAPPIKPDQLSELVTLRRQIVEQLTRLRNHIEHLRTTTVRALVEQQQAFLRAQLQEVDTELAAAAKAQEGWCERIRRLRTVPGIGTQTAILLLVELPELGQVNRCTIAALVGVAPFIERSGQRDAPRHIAGGRKHLRNGLYMPTLTAIRYNPVIRTCYQRLSGCGKAAKVAIVACMRRLVGILNAMLRDGRDWSPQCP

SEQ ID NO: 70864 - protein, 424 aa, unidentified
MERSKSGALSTVNPRAAAIDIGSTMHMAAINPNADDNPVRAFGTFTGDLHDMARWFKAYGVTTIAMESTGVYWIPAYEVLEGHGFEVILVNARYAKNVPGRKTDVSDAAWLQRLHSYGLLRGSFRPEAGVATMRAYLRQRERLIEYAASHNQHMQKALMEMNVQLHHVVSDITGVTGMRIIRAIVSGERTPKTLAKMRDVRCHASIETICAALSGNWRDEHIFALAQSLSLFDFCQTKILECDRKLEVALKALEIDNGHDVRHLPKVRTKGRQVNTPDFEVRSALYRVLGVDLTQIHGIGPSLALKLVGECGTDLAAWPSSKHFTSWLCLAPGNKISGGKLLSSRTRRSSSRAAALLRLAATTSVEVTPHWEPFTEDCRRALEKQKRSPRPHAKSRCCSITACATAWRIMIPVPHNMRSAVAAA

SEQ ID NO: 70865 - protein, 325 aa, unidentified
MPEEPSKASFNWVGIDVSKDRLDVYLQATQTRLSVSNDLEGIEQLKQHLNLVENLAVICEASGGYESLMALTLNEEGLRVSVVNPRQVRDFAKSLGKRAKTDALDAQVLARFGQATLPAATIFASEADRQLTAWVRRRQQLVEMLGAEKNRRAALKGHLRDDVDSHIDWLEERIKQVDQDIAELMETRAEWRDRKAILQSPKGIGPVIAAGLLSNLPELGQINRKQIAALAGLAPFNQDSGRYRGKRRIAGGRSQVRSWLYMATLVAIRYNPPIQAYYQQLVKRGKPTKLAMVACMRKLLTCLNAMMKTLTPWDDDKVTAVFKTA

SEQ ID NO: 70866 - protein, 423 aa, unidentified
MTTTILKQCVGIDCSKDNNEVCFGHLTKQLDVVYKATASFPNNKKGFKALVEWMKKLADETLKVHVVIEATGVYHEHLANFLVDEHYLVSVVLPNKVNKYANTLPWRTQNDKTAAKVLCSMGLEKKLDLWHKPDPVFVQLKQLTRERERLQKECTASKNQLHAQEYSAYKNDATIKRAKARIKFLEAQIKEIEKEIQQVVNNHPELKNKISKICKIPGVGLITAVIVIAETNGFHYVRSRKQLASYAGYDVQEKTSGTSVHKKPRISKKGNSYIRKAMHFPALSAIHSVKYDHSLKVVFQRIVAKHPDIPMKAYVAIQRKILLLMYTLWKKEEEYIPNYEEKKKSTANREAIAAKENTEQTQLESPTEKAEKSSVIVEKEDVSSDVVNKKGMTMKKKTEELATTNSPKKSRAAMDICPTRAGS

SEQ ID NO: 70867 - protein, 482 aa, unidentified
MKKRNIYSNRSQELLGLFEQAGNNSKVMCVPIDYAKKDHVVMFCNGYGDILRKPFAVKNSPVGMTYLLEQVNRSCRQRGIKNEHVFFGGEDVNSYAENFANTLRSKGWLVANVNAHDAKKQRENLQASTDRLDLMGIATMLLNRRANCMPAQSGVYRNLRTLVRHRKKLVKMKTEVRNRTHTIVDRLFPGFLNEKKSGINPFSKSSLSLMQDRFSAPQIQRRKRSTLVAQLKRLSTPNAEQIAAKLQTYAAQVLTPPDEHTATLQVSLSSHAKHYHCLLDSAEQLQREMALLLCQTQGAYLTSIKGIGIVLAAGVTAEIGNPYEQKPLNNLVSYAGIVPRVKQSGGPEGQPHAGRVSKRNNHILKDYVVQSAFHIGRYGPADLLADYKRREANGQHADFGIARRFLRMAVCLMRTSQVYLPPHLRNVKTKPQERAGYYLAVWPYLKDKWNKLGALKVAFAKDRPLGKWRYIIQELYDIKLNL

SEQ ID NO: 70868 - protein, 370 aa, unidentified
MKEHSIFVGMDVHKNSIDIAIAEKGRQGQLRHFGTIESSLAALDKVVRKLVSKRQRPCFVYEAGPCGYQIYRHLTAKGFDCAVVAPSLVPRQSGNRIKNDRRDCLMLARLHRARELTAVCVPHDEDEALRDLTRAREDAKIDEKKAKQRLVAFLLRSGHRYSGRASWSQAHMRWLADLKMPHRCQQIVLQEYIETLNHCSLRLQRLTDQIRQLVPQWRLFPVVQALQSLRGVSLIVSVTTVAEIGDFKRFQNPQQLMSYLGLVPSEHSSGEKTRRGSITKAGNTHVRRMLVEAAWAYRFRARVSRALLKRQEDLSQSIRDIAWKAQVRLCARYRRLWAKGKIKAVVTTAIARELCGFIWAIATAVEGPTA

SEQ ID NO: 70869 - protein, 361 aa, unidentified
MVRRRSLEVVECGGKEAFHELHVVGIDLGKTVFHLVGLDSTGKVVIRKRCSRAQLLVFTSNLQVQLIGMEACSGAHFLGRALREQGHEVRLMPAQYVKPYVQTNKSDHLDAEAIAEAVQRPRMRFVPIKTEEQLDLQALHRVRERWVMRRTAVVNQIRSLLLERGLTLPKGRSHLDEQLPRILEDAELNLSDSFRVLLAQLKLELEQLAVRIEEMDRVIQKTARENEACQRLTEIPGVGPVTATALIAAVGNGSAFGKGRKLSAWMGIVPGEHSTGGKQKLLGISKRGNKYLRRLFVQGARSVLQQRHRQAPGLSEWLAQLLARMHQNVVVVALANKLVRMSWAVLCKNQRYRAPVSAVAT

SEQ ID NO: 70870 - protein, 371 aa, unidentified
MTAVLHSEVSLYLALEWSNTNWKLAFSTGGKIRLVNVPAGAQARVLEAVALAKTKLGLPADAPVYSCYEAGRDGFWIHRWLATQHITNLVVDPASIAVNRRQRRAKTDRLDAELLMRQLLRHYREPENRGWKVVRVPSVAEEDQRRVHRERERLVAERTGHVNRIRALLVLHGIRIPHLKRMVLEEVRDWAGQSLTPQLQAELQREVARWELVEQQLRALQQFQEQRLTTPQTPAEQQAQHLMRLYSLGPISAWTLSHEFFSWRHFRNRREVGALAGLTGTPYDSGGSRREQGLSKAGNARVRTLAIELAWGWLRFQPDSALSIWFRQRFGAGTARQRRVGIVALARKLLVALWKFIDHAEVPAGARLRAA

SEQ ID NO: 70871 - protein, 373 aa, unidentified
MSQSTTKLFVGLDVHKDSIAVAYAPQGRGAEIISIGSFGTRQCDINKFLKKLLAHSRNIVFAYEAGPCGYWLYRYLTKKGHTCLVVAPSLIPKRPGDRVKTDRRDAIMLARTLRAGDLTTVYVPNVVDEAIRDLSRAREDAKKDLKSAKHRLKSFLLRHDIRFEGKAGWGLKYLRWLGNVACETPAQQIVFQEYVRAITERHERVERLEAELRDQVDGWRLKPVVIAIQALRGIQFITAATLIAELGDITRFDNPKQLMGFLGLTPSEYSSGRKRKLGGITKAGNSHARRVLVEGAWSYRFPARVSRHLQYRLERVPQEVQDISWKAQVRLCKRYHRMIAGGKNKNKVVVAIAREMAAFVWSIAMRTPLEDVN

SEQ ID NO: 70872 - protein, 414 aa, unidentified
MNTLVSNTSLSGTLIALDIAKKHHDAKIRHPDGRTSYLRIENTLEGFNRLLALTASPHDDIIAAFEPTADYHRNIAWWLHKQGVKCHLVSSVRCARAREMLFKTWDKNDRKDASVIMYLLEQGLSSPFYDPLANGIIDIQEISNTYHQVTLARTRCLNSLVNHYLTLYFPEAEQFLHMSRAEWFCQFLLQFPTPSCITSLNRDLFVKQSWDVVGRKQYKKQFLEHLYDVAADSIALPLSEDSLAVTTFRLQLHRYVGLSAQRLQLEKQAENYLQERSDYRHLRTIPGIGAIIALMIIAESGDLTRFAHYRQYLNFCGFNLSASQSGQKHSGYRLSKRGNARLRYAFWLAATVAVRTRENSFRYKYERYIRENGDKPDQKRKAMTAVATKVARVAHAIVKQDIDYKGYYEISHGT

SEQ ID NO: 70873 - protein, 336 aa, unidentified
MSKFKLIIGIDISKNTFDASRLWSDTPELIEHQVFEQTKSGLVSFVKWLKSTGVEPQQTLLCMEHTGLYIHGLLEHLSRYDYVVWVEMPLRIKRSIGLQRGGDDKLSSKLIAQYAYRYQDACKPWVAEDAVLQRLRQLIAQRDRMVRQVKALEVPVGELKQCEQAVLAEELEQIQRKTVSALKTAIKEIESRVAEIVKTNASVQKKIDCVTSIKGISTQTAIHLYVYTKGFTAYENGKQLASYCGVVPFERRSGISVRHRPRVSRYANKDLKRLLHLCAMCAIRHDKELRSYYQRKVLEGKNKMSVVNAVRNKLIQRVFAVVRDERKWVENYVYSC

SEQ ID NO: 70874 - protein, 347 aa, unidentified
MRFYTKQHRYYCGIDLHARSMYVCILDPQGEILLHRNMPCAPELFLKAVAPYREDMAVAVECIFTWYWLADLCSKENIPFVLGHALYMKAIHGGKAKNDKIDAYKIAALLRGGMLPMAYVYPALMRSTRDLLRRRMHLMHKRSELLTHIQNTNSQYCLPQFGKKIAYKKNRQGVAEHFADSSVRKSIEMDLSLIDHYDKLLTEVELYITQNAKIHDVNAFNRLRSVHGIGKILALVILYEIHEIDRFPTVQDFVSYARLVKCAKESAGKRHGSSGAKIGNVHLKWAFSEASVLFLRANPAGQRYADKLTSKHGKAKALSILAHKLGRAVYYMLKRDKAFDMNKFLNS

SEQ ID NO: 70875 - protein, 324 aa, unidentified
MAKRTMICAGIDTGKSKLDVAIDGSSEQLQVDNTAEGYKVLSDWLRRHRIKRIGIEASGGYEQAVVAELRRKRFVVVVFQPAQVRAYARFKGQRAKNDKIDAALIAACTAAVKTVHDAPDPRLLPFAEQLTMIDQIGEDIARLNNRLESCRNVRIQQVWKEDLARLEKRKRAELKALVAAIREHRDLAERLDLISSVSGAGMPTAVAILVRMPEIGKITREQAAALAGLAPYDDDSGARVGGRHIQGGRERLRRALYTAALPASMRWNPQLKELYKRLIAAGKLHKHALVACARKLLIFVNTVVARGTPWQDQPPLCAAIAATA

SEQ ID NO: 70876 - protein, 312 aa, unidentified
MDKGGVIVGIDVSKDRLDVHVLPMDEAFVVARDGDGLAELVARLKALSPGLVAVEATGGFETTTAAAVAGAGLPLVVVNPAQVRAFARALGQRAKTDPIDAAVIARFAQAVNPEVRALPSAAERLLSDLVGRRRQIVQMIGAEKQREKRFTEPRLQRSIRRLVTALQKELTDLDAQIDDEIRGSPAWRAKEDLLRSVPGVGPVVSRTLVAELPELGALDRRQIAALAGLAPWTRQSGKWKGKSFIGGGRTSVRTALFMAALVASRHNPDLKAFHQRLIAAGKPKLVAIVATARKLLTILNAMVKTNTPWRAA

SEQ ID NO: 70877 - protein, 348 aa, unidentified
MGVFIGLDVSLNKTAVCVVDRDGAVLWQGKVPSEPGPLIARLAEWSGKIDLAGIEACPLSEWLHRGLREVGIPVVCVETRHAQRFLSTRPVKTDRNDARGLAEMMRLGHYRPVHVKSPAAQSVRTTLVARMQLVSAQLQIENTIRGLLRLYGLKIGAIHRNRFAARVAELLEMAGMPDLSAAIEPLIRVRESMRIERKAQDRTLAAQSRRDEVTRRFMTVPGVGPVTSLAFKATIDDFGRFDFSKAVGAHLGLTPRVYQSGEVDRSGQISKCGDRMMRHLLYEAASVLMTRTRKWSRLRAWGIAVAKRRGMKRATVAVARKLAVIMHRMWVTGTNFEFGCQPAASNAA

SEQ ID NO: 70878 - protein, 347 aa, unidentified
MQHLAIDLGSRESQICIRSADGNIVSERKLPTARLPGFLAKQPLSRVILETCAEAFMVADAAIEHGHEVRVVPATLVRTLGVGERRQKNDQRDARKLSEVSTRIDLPSVHVPSASSRERKMLCNSRKNLVEARTKLINFVRGQLRLRAIVIRGRARNTFPSVVRDLLVSDCDGLPVHLDRVLQTIEVLNMQLSALDEELVTVAKQDPICQRLMTVPGVGPVIAIRFTAVVDQPERFHSAHHLMSYLGLTPGENSSSMRVQRTGITKAGASDLRCALIQGAWSIMRTKDNNPMMMWATGLAQRRNRFVAVTALARKLVGVLWSIWIKGTTYQPSLLAAASADSALDVM

SEQ ID NO: 70879 - protein, 429 aa, unidentified
MAEEKSLELRVSVDVGYRRHSVAMGLSSGEVLEEFEIDHRIEGFQEFFSRIEKHRKEKNCVVAVAMEGYNGHARPLDSMVRERGYRLYNLNNLKFARFKEIFPGAAKSDRIDARKGLELFQLSDHLPLAKEVLQEVSGTPPANEVLKRLTRRRRRLVNERVRVVNNLQADLQAVCPGLLEITREASNQWFLNFLLRADTLPQLARLKRSTLLKIPSVGVKSAAIIEGWQKRSHFSQEVDWVGEMIQEDAKRCLELDEKIKRLETKIAEVAKGSKIAKTLQSIPGFGAVCTSELAGEIGTIERFGSEGSLSLYLGMSTLDNSSGKYQGTKAPKHVNTRAKAAMMIGVDRHRKYVPESQRYYEKKRSEGKKHNQAIRALGRHLSRIIYKMLKEERDYEIRPEKGDTKTKVSLRSLIKTQIRRPKISVKGKK

SEQ ID NO: 70880 - protein, 433 aa, unidentified
MSKFFNSPTVGIDVSADFSFVAILAPNGDVFKKPFRIKHDISGFTHLLKEIKKVEEEFNMKTAIFMESTGVYHLSLFHFLNKNFDNTFVINPLVTKCNKNVDIRKVKNDKKDALSIAQIGKFQNIKLSQSVSMDIFQLKSLVREYYKLTDNCSTYKKKLSTDLRVIFPGYKNVFSNVTSNSSIAILNEFPTPQAILSAPKDLIINILMEKSKKGLIWSEKVYSNLINYANEATIIGLPLHGFSVKITSTIKIIKTLEDEIKNLLKQIEYLINSPNFSEQIRKNIELINSIPGIGRLTAITIIAEIGDIDGFVKPKHLVAFFGIDSSVNESGKFKGNQNKISKRGTRIGRRALYAAALACIRTNRNGVPINKVLLDYYQVNLNGKKPKVALVAIMHKIINYIFAVLRNQTPFELRDPRIHKQMYLENNSIDYVA

SEQ ID NO: 70881 - protein, 373 aa, unidentified
MRAGKKRGKVKVDRMNSIVTGIDLGDRESLATVLSPIGDVTDRFTFPMNEEGYTFFASRVPKHARVAFESTIMAYPISRALRMHGYSDITVAHPKTLAWIVKSKRKNDRVDSLKIAKLHMAGMLPESHLLDRDQQIVRDLLVQRVKLGVEIGRLKNSVIGYLKREGVYDSLPKSGDNFSIKRRRAIHSLRFHDDRDLVLGTMMDRLRFLEKQCTPLEDSVRENARLSDDVKILMTITGVDYYLASLISSFIGDVERFPSDDHLASFFGIIPTSRDSADIKRRGRMSKDGSSIARWTLSVMVDTVMHHNEPIREYYASVKKRTGSGKLAHVSTMRKLTRMLYHMLKTRQHWKWENLRLTERKMARLQMDGGDLS

SEQ ID NO: 70882 - protein, 412 aa, unidentified
MQVVYPVCCGIDVHAKMLVACLILANGEKKKHTFSTMTADLLQLRDWLVAVQCTHVAIESTGVYWKPVFNILEDALTVILINPEHAHALRGRKTDVKDAEWLADLLRHGLLRPSFIPPPVIRELRELTRYRESVVREQSSVANRIQKLLESGNLKLGQVASDALGVSGRLILKALAKGESDPRKLAALARGKLKEKSLSLEQALQGRLTVNQRFVLGELLSRWEQLEAADARVTSEIDKYVQTNPKLARARELLDSIPGIGPRVAEVIMAEIGMEMAAVFADAAHLASWAGICPGNKATGGKRLSGRTRKGNTYLRSALVQAAWGASLKKHCYLSSQFHRLVKRLGRKKALVAVAHSLLVIIFHVLQNDQTYTELGGDYFDRRHVEQQRDYYVRRLQMLGLKVTLEALPQAA

SEQ ID NO: 70883 - protein, 329 aa, unidentified
MDSQPSTLVVGIDVSKATLAVCYQVDQQLKHLEVSNSKAGFQQLIKVCGTHCLFVMEATGTYNLAAAYYLHEQGGRVAVLNPLVIKRFIQMHLSKGKSDRKDAQWLLRYGQQQPVKTWQPEEAVLVECRQLEQVTEQLLKQKTMVSNSLEALQQQPAVSKIALKRLQLLLKALTQQVDAVEAELLTLLQQRFAAEMTLLCSIPCIGRKTAGMLLLFAGGFTRLDNYRQLIAMAGLSPREHTSGTSIRGKARITKMGGGLIRGKLFMCSFAAKKCNAACQALFDRLVAKGKNKKLALIAVCNKLLKQAFAIVKSGVPYQADFSSKLALNP

SEQ ID NO: 70884 - protein, 320 aa, unidentified
MKTSDNVSVTVGIDVSKLHLDLHVSSGLYDSFRNDGSGFSDIKKLLSKFTVSLILLESTGGYENGIVCYLQRLGYDVVVVNPRFARDFARSLGRLAKTDKVDAELLSQFATVINSRVDRARFVRPLTDETRRHLADMVSRRRQLVDLITVERQRKSVSSQYASESIDAVISYLRSQLELVDADISAHVSLYYSDLSDLLTSFKGVGSATVGVLLGEVPELGKLNRRQISALIGVAPFNRDSGQMRGRRRISGGRSLVRNSLYMPTLSAIRFNPVIRDFYERLLKSGKSRKVAQVACMRRMVCILNAMLRDGSRFEPVMGN

SEQ ID NO: 70885 - protein, 336 aa, unidentified
MMIIGCDYHPRFEKIALLDQTTGEIRVHRLEHENGEAKRFYASLPKGTLVGIEATGSTPWFERLLGACGHELWVGDPAEIRARKVRKQKTDERDALHLLDLLMTNRFPRVWVPSPEERDARQLLQHRQKLVRMRTAVKNQLHGLAMGQGLCRKQKLWSESGRKQLEALELGPWASRRRQELLTLLDGLDPKIAELDEAVEAEAARRPEVRRLRMLRGVGSVTGLAYVLTLGTVDRFRRSRQVVSYLGLNPQENSSGGHQRFGHITKQGNTMMRWLLVEAGQTAARLDPELGRVYKRLKVRRGANVAKIAIARHLAVRMYWILRQAPGDGTAGSHVR

SEQ ID NO: 70886 - protein, 412 aa, unidentified
MIHPKMRYTYVGVDSHKDTHTAVFLDCFFERLGEITFENRPSKFSKFLADAEWLKMDGTDLLFGLEDISLYGRTLTVFLKNNSQAVKHVNALLVASERKNSNITQKTDSIDAECAARVLLSKLSELPDADPQDDYWILRTLVVRRDFIIRNNTAIKNSLHNLLTQHYPNYRRFFENIDCKTSLLFFMRYPSPSTLKGTTLEDLTRFLHKPSNGRISATTAQEILDSLQDTTVELQEFRNMAVQSTIRQLKFNMQELERLENDLENVLSRFNCTLTSMTGIDVVTASQLLSCIGDIKKFSTPAKLARYSGVAPITYASGKKDLQFANQRGNRELNSIIYNLAVRVSTTVGSTNKVMNPFFYDYYHRKISEGKTKRQALKCVQRRLVNIIWTMITNNEEYVNPPMYDLPKLPKK

SEQ ID NO: 70887 - protein, 356 aa, unidentified
MMKVTASFENQTVYVGLDIHKRSWNAAVYLGDQYIRNIHQPPSPQALSHYLQNNYPKANYVCAYECGKFGYWIQRQFNELGMKCLVVNPADIPSTHKDEVYKNDPRDARGIGQALSSGQLKTIYVPDQQQEADRHLVRQRKKIWRDLVRCKNRLKGFLDYTGTAVPPQYDNATWSRNFINWLNKIEFAHSSNRITLNYLIAEMELLRKELLSISNAVRKLMRSKKYNKLYYLLRSVTGIGPLTAASLIVEIGDMKRFKNFYHLNSFIGLMPMEHSSGEREMKGRITVRKHRQLRSDLVECAWTAKRTDPALALYYSEQIKKGNNGKAAIVKVARKLLSRIRYVWLSGEAYQTAVVK

SEQ ID NO: 70888 - protein, 385 aa, unidentified
MAPPRRPEIVIGLDVGKSSHWACVATRDGEVLASKPVANRENALDSLFAEFPGALVVVDQVRNIGALALSRARAAGMPSAYLPGLAAHEAARLFGGDAKTDERDAMVIAKTALGIPDALLPVPHPDPAIAAARALAAQRDFLTRESTRSKNRLRSILLESCPEFESLVDLSDVSELRLMAALGGPWSVADAGRRRAAALARGARRGKVDALVGSVGSSTRPDAAAIAAEDRAVRFLARRIAENAAELQAATAEISALLERDETYRCLLTIPGIGPKTASELAISVNIDDFPNHDRLASYCGLAPRNRQSGTSVSSVSASRQGNKRLKNLLIFSCNCLARTDGRWGEYYARCRDRGMPHGKALKAVARKRLKVIYAVMRDKVPYVA

SEQ ID NO: 70889 - protein, 355 aa, unidentified
MVVVGADVHKRTHTFVAVDEVGRKLGEKVVAATTTGHHKALRWAGKQFGAELLWGIEDCRPLSARLERDLLSAGQKVVRVAPKLMAQARASARTRGKSDPIDALAVARAVLREPDLPVASHDPVSRELKLLVDRREDLVAQRTSTINRLRMRIHELDPAHAPALGSLHRANPRRMLADWLATQPGLLAELARDELADIDRLTHAIDALAGRIGEKIAPAAPTLLTLHGCGDLTAAKLIGETAGVARFKSEPAFARHAGVAPIPVWSGNTAGRVRMTRSGNRQLNAALHRIAITQIRLKGSAGHTYYRKRIDAGDSPKEALRCLKRRLARIVFNRLRADNHPDHAFHTSATTCPLT

SEQ ID NO: 70890 - protein, 316 aa, unidentified
MNSQVFVGLDVSKQHLDVAVRPHNRHFVTPNNDLGIKQLVKRLAALKPQLIVLEASGGYEFLVTAALAEVQLPVALVNPQAVRKFAGASGKLAKTDKIDAQVLAHFAEALRPEPRPLPDQAHQVLKAALQRRQQVVKMIGQEENRLEKTFIPTVRRDIQAHLTWLRQRLTALNRDLDDQIRQSPLWQDRDRLFQSVPGIGPLVSRAVIAQMPEIGTLPGKKAAALVGVAPYNRDSGRFRGKRMIRGGRSYLRRMLYIAAVVASRFNPVIRAFYQRLVAAGKPKKVALTACMRKLVLILNAMVKHNQPWNQFIAQVP

SEQ ID NO: 70891 - protein, 366 aa, unidentified
MKKTSTVRVNGNLIFKGHKLTIGVDLGDHWSCYCVLDEAGKIILEQKVATTPEAMKQTFSKIPQGLIALETGTHSPWVSRLLTELGHKVIVAHAQKVQLITKSNRKDDRHDARTLARLARIDAELLGPVRHRSAQAQIHLTVIRARAELVRARTALVNAARGLVKSYGQRLPKCGTRQVSRELGAGLHAELREVLEPLLKEIESLNERIQEYEVRVEKIAKESYPQVELLKQVKGVGTQIALTYVLTLDDPHRFPKSREVGGFLGLCPGRRDSGESQPQMRISKEGDRYLRTMLVQGAHYILGPFGADSDLRRWGLKLAARGGKNAKKRAVIAVARKLAVLLHRLWVSGEVYEPLRNSQKAMRAAA

SEQ ID NO: 70892 - protein, 345 aa, unidentified
MNGMYYIGLDVHKKTISYCVKDASGQVHREGKIGATRRELDDWIKTLPQPWSVAMEATIFTGWIYDHLLPHAAQVKVAHPLMLRAIAAAKKKNDRIDAGKIADCLRCDFLPECHLAPTAIRDRRRTLRYRHLLVRQMVQMKNRISGLLMETGVEYNKRRLHKVGYFRELLSTNEEVNESIRPLLKLSRETIVRLQKTEYALVSSLQRDPLLAERIQRLRTVPGVGPITALTWALEMGDASRFRSIRQAISYCGLCGDEKSSADKVIRTPLSKQRNKHIQRVLVEAAKLAPREDHKLALVYATEKQKGNANRATLAVARKMVAYLLAVDRGRRNFVPAEEHRQTAA

SEQ ID NO: 70893 - protein, 315 aa, unidentified
MTNLKKSKSVVNVGVDVGKSALDIYIYEKQLHWQEENTSEGIKRILKRLAYYQVERLAMEATGRYEWALAEAAFAKGLPVCILKPLSVRRYAGAIEQLAKTDKIDAAVIAEYAAVTQPRPTPRKSKNLIAIKDLLARRRQVMEMRTKELNRIKVMGKSFERSCKRLIKVFDTEVARLEKQLDKYVQEQAEWAERKAILMTAPGVGETLAYTLLADMPELGTLTNKESAALVGVAPINRDSGRLRGKRRIQGGRAGVRTTLYMATLSATQCNPVIKEFYTRLVAQGKHKKVALTACMRKFITMLNAMVRDNVEWAY

SEQ ID NO: 70894 - protein, 358 aa, unidentified
MTNAIPMDVIIGVDTHKDVHAAAAISGAGVHLATTTVPVSSKGYGELEAWAKSMGAVQAFGIEGTGSYGAGLSRFLRERGHTVVEVNRPNRQLRYQQGKSDAVDAESAARAVLAGQAVGQPKSGTGAVEMNRTRHLKIARDTAVKARTQAMQTLKAIIVCSPDALREQLDQISGKMTLLRRLVALRPGPLTSTLASAKASLRAIARRWLVLDAEIKQHDAHLETLTAARAPELMEAHGIASGTAAEMLLLVGDNPERIHSEAAFAKLCGACPIPASSGKTIRHRLNRGGNRQANAALYRVVIIRMRGHQPTLDYVRRRTAEGKSKSEIIRCLKRYVAREIFGYLCTKPALADAAAISS

SEQ ID NO: 70895 - protein, 444 aa, unidentified
MHVQKTLPMPKGISYLSVGFDVGADFSWMSIMLPNATLSGKPSKILHTDSISRELAVAKIKEAQELYSLESKCFLESTGIYHIPLLYFLRDKGFDCSVINPIITKNSTNLNIRKLHSDKFDTRKTAKIGLDPSLKTSIVPDDDIIDLRNLARDYYYFKDLQSAVVLKLHAELRVSFPAYLHVFSKITTLTSLKLLAEYPLASDMLAAPKEKIIEMIKGISRFGDAYALSKYDAICAAARDAAVFGRALPSNALRIRLYIQTYLEYQKHLDSLLEELHKAMDKLKGKPAYDRFCLLQSLHGVGFLSAVVLIAEMGDFDLFTSPKKLYAYFGLDPAVKQSGKFHGDNVHMSKRGSSLARRVLHMVAVNNLKMDKGTKSPVNPVIYDYYIRKCVGKKKNVAVGAVMHKICNIIFAMLRDNKPFEIITPQEHCSRYTAEHPASIEGAA

SEQ ID NO: 70896 - protein, 393 aa, unidentified
MRISVGTDVAKETHWVVALTEPGEVLLDHAVDNDPAAIEALIAELGALPGECTIGLDVLGGIATLLSAMLLAAGQRVVHVPGLAVNRARQGTTGGETKSDPRDARVIAEQVRSRRDLRSIAVEEEPLAELQLLVGRRRDLVAEQTRRLARLHDLLSRIHPGLERALDLTSKSGLCLLTRYVTPAEIRHAGRARLARHLRASGARHVEAIATAALEAAQRQQIALPGERVAADLVRELAREALAVRERLGEIDTELAQVLAVHPDSTLIRSLPGMGVILTAEFIAEVGIRDRFADADALAAAAGLAPVLRQSGKVRFLRRPLGGDKRLKRVFYQAAFCSLSCPASRAFYARKRREGKRHHQALLALARRRVNVLWAMLRDRRPYELQEPRCGAA

SEQ ID NO: 70897 - protein, 310 aa, unidentified
MNDKEGTNNAFACFVGIDVSKKWLDVGILPQGKTRRFENEEAGIQELIAWLKSLSPQLIVMEASGGFETDVATASGAQGLAVAVVNPKHVRDFARAFGILAKTDRIDSLVLAAFAQKVQPPLRALADEERRELTDLVDRRRQLVAMRAQEKTRLSSATPMARADIKAHIEWLDERLRGLDIDLTAKLRSSSLWKAKEQILQSFPGVGRVTVFTLLARLPELGTLNRRAISALAGVAPFACDSGQHRGRRMIWGGRADVRAVLYMATVTAMRINPVIRNFYRRLRCRQAAQAGTYGLHAQTTLHTQHHAAQ

SEQ ID NO: 70898 - protein, 326 aa, unidentified
MNVIGIDVSKDKLDCLWLRDLATGKAKSKVVPNQPCGYQALLAWAEKSVGCPVAELWFVMEATGVYHEALAAALTRAGAQVAVVNPARIRDYAKALGQRSKNDQRDSYVITHYGLTQQPARWHPEPPEVRELKALLARLEAVAKDAQREANRLEKATISQASKVVIDSIRGMLVALTAEKARLEKLIDEHIEGHPILKRDSALLKSIPGVGAVLSRYLMMTYHSREFQSAAQMAAYLGVVPVEYESGSSVRKRPRLSKAGSGVIRAKLYMPAVVAARCNPQARALYQRLLQKGKTKMAALGAVMRKLVHMCFGVLKHQQTYSPLAA

SEQ ID NO: 70899 - protein, 354 aa, unidentified
MKLYVGLDVGLEETSLCIVDGEGLTVREFKVSTEPAAIRSAVEGYADRLERVGVEASSLGIWLYRELQPAGLPIIVVVARHMRVSLSTMRNKTDRNDARGIAQMIRLGWYRAVHVKNIEMQKMRTLLTSRKLLKRKLIDLENHIRGALRAYGLLVGGVARGAFEARARELIERSDPIFVMTIEAMLDVRRAILEGYDRLHRVLLQVVQHDAVCRRLMTVPGVGPVAALSFKAGVDDPHRFARSRTVGAHFGLAPRRHQSGTSIDYEGRISKQGDVAVREALCEAAASLLLRVRKWSALRAWGLRIAKRSSVLCAITAVARKLASILHRMLVSETDFHVGFGAKVTQRLRLKPSR

SEQ ID NO: 70900 - protein, 341 aa, unidentified
MDMYVGLDVSQRETSVCVVDGDGRILWEGTCSSTPASIARVVHDRAADCRMVAFETGPLAVWHWHALKQAGLPVACIHARHAHAAIALQVNKTDRNDAHAIAQIARSGWFRPVDMKSFDAHRIRLVLSARARVVSMRTTLYSQIRGVLKTFGVVLPPGKGGTFERLVEDAIRDEPYLEQTVGSLLGLWRTLNDELRSYNREVERMAREHGVCRMLMTTPGVGKLTALAYVSAIDDPHRFRRSADVGAYLGLAPRRYQSGEVDRAGRISKCGDRLVRSLLFEAAHILLTRIKEPSQLRDWGRKLTDRIGAKKAKVAVARRLAVTMHRMWIDGTEFDPAPVRS

SEQ ID NO: 70901 - protein, 375 aa, unidentified
MTGVDSRHRPRRDRKPAVASESKPRMSLELRSLVPYPNSCLGTSPHQQERDTKMATVSFCGIDVAKDRLDVVVLPEQRCWSVCNDAAGWAELAKQLGSFSIAAIGLEASGGYERGVMRVLLAADMPVHQINPFKLRQFAKASGVLAKSDRLDARVIASFIAIMPTRRAQRPSPAIERLTEILSVRRQLTDQKIAAQNASAMLQDAMLLRLSRRRIGRLAADIEMLDRSLVEIVRTDAALAHRYRLLTSMPGVGPALACTLIALLPELGSMSRKQVAALVGVAPYTFESGKLKGKRCIWGGRAPVRHVLYLAAMSASNWNPVLKAFHSRLKIAGKLHKVAIVAVMRKMITMLNAMVRDDVAWAGHLGGRQILPTAR

SEQ ID NO: 70902 - protein, 417 aa, unidentified
MKIWTELTHFAALDWADDHHDLVVVDARGQVALELTFAHNAEGWQQAQRALAPWPGLPVAVETSAGPAVDQLLQRGFAVYPVMPKAAARYRERKRPTGSKDDRHDAWSLADALRTDGHAWSALSPLDPLTGELRALCRDEITLIEQRTALVNQLQAALKEYYPAALEAFEDWTVPCTWAFVLAFPTPKALAAAGKRKWEKFLHTHKLWRPQTASQRLEIFARATAFSGSEAITAAKSLLVQSLARLLQTLEQQLANYRARIQALFDQHPDHDLFGSLPGAGAKLAPRLLAELAGVDWSHLSQVQGRAGTSPVTYVSGKTKHVKIRRACTLSLRATLHLWADLSRHYSAWAAAFYRAHRDKGQSHACALRCLAHRWLEIIGGMIRTHTTYNAEHHLREIQKHGSYVLRLINTPDPKTL

SEQ ID NO: 70903 - protein, 482 aa, unidentified
MSKPTQHSKKPGEKKTAAGQGKRSRKRKGMCLEDRPILEPNAAGIDIGAREIFVAVPPDRDADPVRVFSTFTEDLEEMAQWLVSCGVTTAAMESTGVYWIPAYDVLEQHGVKPCLVDAHGMKNVPGRRTDWHECQWIQFLHSVGLLRAAFRPDGEVCAVRSLMRHRSDLVQMTNQHIQHIHKALTQMNVQIHHVIDDITGVTGLAIVDAIVDGQRNPLELAKLRDPRIKASEETIVKSLQGTWRPEHLFTLKQSRQMYRHYQDQIAACDEEIEKLLVAFQPRVDPAEKPLPPDRKKRKRGRQKKKNAKTKQGFDLRTESYKIFGVDLTQIPGLMAMVLTLFSEVGRDMSRWKTAGQFVSWLALCPDNDITGGRVAWRGMRRVHNRAGELFRMAAYSLHHDKSPLGDYLRRMKSKLGPTGATTATAHKIAIIFYTMVKKQVEYDATLWAERDTQREKRFEAKLKRQAQQLGYKLVPIEEKPAA

SEQ ID NO: 70904 - protein, 345 aa, unidentified
MELSTVGIDLAKTVFHLVGLNLLGEVVVRKKVSRAQLLRFTANLSVKLIGMEACGGAHFLGRALRDQGHEVRLMPAQYVKPYVKTNKNDYIDAEAIAEAVSRPRMRFVPIKTDDQLDMQSLHRVRERWVVRRTAIVNQVRGLLLERGITLQKGRSHVDALLPRILEDADLKLSGALRNLLAQLKLELDQMAMRINEADMMLNRTARENASCRRLVAIPGIGPVTATALIAAIGNGAAFRKGREFAAWMGVVPGEYSTGGKQKLLGISKRGNSYLRRLFIQGARAVLQQSTKQTSGLSAWLANLKARTHTNVVAVALANKLARMAWAVLAKDEPYRPPMLANLVAA

SEQ ID NO: 70905 - protein, 342 aa, unidentified
MDHFAGLDVSVKETSICIVDDTGRIVREVKVASEPEALLAVLKNPAYHFKRIGLEAGPLSQWLFSALAEAGLPVICVETRHMRAVLKAQINKTDRNDARGMAQMMRAGIYRPVHVKTLRSQKLRMLLTHRKLLQSKAIAIDNDLRGTLRNFGLKVGMVGTVKFEARIKELVENLPDLAAMVEPLLIVRRILREQFCVLHRRLLAIVRDDEVCRRLMTTPGVGPVVSLTYRATIDVPARFRKSKSVGAVFGLTCSKYQSGEVEWSGRISRCGDEMMRVMLYEAAQAMMRSNKWSWLKAWAIQIARRRGMKKAIVALARRLAVIMHRIWVDGTEFRWTREAAAA

SEQ ID NO: 70906 - protein, 412 aa, unidentified
MQDILTCAMGLDIHRDVIVACLAKGELGTDPEIEIRSFSTLIPEMRKLRDWVLEAECRYVAMESTGIYWQPIYEMLEPCFDGQINILVVNARHMKNVPGRKTDMRDAQWIATLLRAGLLKGSFIPDKTFRELRHLTRYRKSIVRDITAQKNRIDKFLQSSGFRFTAFLSDAFGASGRNIIRHLMEYGNISREALDRCLKTQTRKRIDEILIALNGSLSEHQRGFLRMIFGHLEALEQHRHTVEDAITKEITKHEEALSLLCSIPGIDVTAAAAIIAEIGTDMSAFPDSQHICSWAGLSPGNNESAGKRKSAHINKGNPYLKSMLCEVGWVISGKRSLYLSGWYWRIKQRKGAKRATIALARKLLALIYTMLKTGSPYNEDCFELRRKQTERKRASRMVNELQKLGYFVVAPG

SEQ ID NO: 70907 - protein, 365 aa, unidentified
MSEITRRVPVRVGVDLSKRVFQVHAVDSAGRVVLTKAMSPERFYAWCSSLPAACVVAMEACGGAHHVARRLAGLGLQARLIAGQFVSPYRMAGKSGKNDANDAAAICEAAGRPHMRFVPVKTVQQQGQLAVHRLREGFKEERTALINRIRGLLAEFGLSFPQSPDALRSVLAEVIEDAGNELPTVARLAVQRAHLHWLEIEVQMAWCDERIACHVRNDARAARAADLLGIGPTTASAVVASVGDFNQFANARQFAAWLGLVPSQNSTGGKARLGRITKRGDNYLRTLLIQGAKSAVMSAGKRGDRISLWLQQLKERLGWQKTVVALANKNARILWAVLTREAVFDPDHVPPIPAARLRPAQQPAS

SEQ ID NO: 70908 - protein, 461 aa, unidentified
MLVVAMPTSPSYWVEEERENAMAKVIIGVDPHKLSATIEVVDRRERLLGSGRFSTDQAGYTAMRTFAKAWPERVWAVEGSNGAGRPLAQRLLEAGEHVVDVPAKLAARVRLFDTGHNRKTDARDAHSIAVVAVRTRTLRVLAADGELEGLRMLCDRREELTRLRVQTVNRLQRLLAELIPGQGQKDLTALQAKAILATVRPRDIAGKTRRRIAVEELADLVAVEAKMKKATAELKTIVLARGSRLMDIHGVGPVVAARILADVGDITRFADRNRFASWTGTAPLDASSGEQNRHRLSRAGNRRMNHMLHIAAVTQIRLDTEGRAYYSRKRAAGKKPLEAMRCLKRRLSDVVYRQLVADAERAAMTASSGEAGTGPGGHCGATQESSAVDLPPHIDTSDQPLPGPAHPTLPATKPHANPCAASAPRRSRRRAGAVKVERPTGRTTLTATSAGADSKEPIPAP

SEQ ID NO: 70909 - protein, 504 aa, unidentified
MTFPPWEPAFWLAIPLRKSVNPFGGDLCFGWLGSLRLYLYKPLGCVSTLWKWMPAGKDITMHYQKVLKMPESIPYLSVGFDVGADFTWMSIMLPYGILTGKPFKIIHSDPQSRELAISKIKEAQEMYSLESRCFLESTGIYHIPLLCFLRDKGFDCAVINPIITKNSTNMNVRKLHNDKFDSKKAAKVGLDASLKASIVPDDAIIDLRNLVRDYYFFKDLQSSIVLKLHAELKVSFPAYLNVFSKVTTQTSLKLLEAYPLAADMLAAPKDELVETIRSTARFGETYALARYDAICTAAKDAAVFGRALPSNALRIRLYIKMYREYQAHLDSILEELHQAVGKLEGTPDYDRISFIQTLHGVGFLSAVVLIAEMGSFDLFSSPKKLYAYFGLDPGVNDSGKFHGDRVHMSKRGSSLARRILHMVAINNLKVDKATKTPVNPVIYDYYTRKCASKKKSVAVGAVMHRICNINFAMLRDNKPFELITPEEHRERYAAEHPESVNTAA

SEQ ID NO: 70910 - protein, 361 aa, unidentified
MNATTAAIDLAKNVFQVALADGNGRVIEQHRLTRAQFERFFDNRAVARVVMEACGSAHHWARVFAARGIEVILLPAHYVRAYVRRSKTDAADALALLEAVRCADIVAVKVKSVEQQSLQALHRTRSLWMATRTSRINALRGFCRELGLHVPLGARTGLEAMTRAVADDQSVIPAMLRPVMQLLLDEIRVLETRVAQLERQLALIARESLACRLLMSIPGVGLLTATAIVAATSGSVAHFKSARHFASWFGLTPKESSSGGTRRLGRISKMGDCYLRMLLTHGARSVLRAAKVATAKGQQLIGVRQWALTLQARSNHNKTACALANKMARICYAVLRDQTPFGQPATRLTKKMQRQSFELAH

SEQ ID NO: 70911 - protein, 315 aa, unidentified
MTTSSGKFVGIDVAKEKLDIAVLGEKKASQVGNDEAGIAILIKKLEVQEIELIVVEATGGYQRAVVLGLYEAGLPVAVVNPSRVRQYARASGLLAKTDKLDAFNLAEFGKQMKPRKFEAKSEAGRYVSALLVRRRQVEEMLKAEKSRLRTVYKEMRSSVERMIAVLREEIKQLGKELDKFMQENEDWQAQEQILTSAKGVGRITATTLLAELPELGRLDRKKIAALVGLAPMNADSGKKRGYRKTKGGRMEVRNVLYMSTLVATRYNPLIQAQYQQLLKRGKAKKVALTACMRKFLTILNAMMRDKVPFRQRVTV

SEQ ID NO: 70912 - protein, 316 aa, unidentified
MAQIICGVDVSSLTLEARIGNDGPSRSLANTPEGIAELAAFCQQHGVALVAMEATGGYEKQAFALLWARGLPVAILNPRAVRRFAEGMGLLEKTDRIDAGVIAWFAAVKPVLACTPAAATEQHLKALVTRLRQLTELQAAQRNQRLLVTDTTVWAAFTKLLAFLTAQIRELEVAIAELIAADPLWQKLDQAFRSIKGVAHRTVARLVAEMPEIGTVSNKTISKLAGLAPLAQDSGKKQGKRSVRGGRRNVRNILFVVAGVVRLYHPDFAAFHQRLLAAGKPKKVIRVALAHKLLVRLNAKARQVRQAEKPVAVAAD

SEQ ID NO: 70913 - protein, 345 aa, unidentified
MKQYAGINVSLEASYVCVVDAEGKIVREAKVLSEPDALISWFAEHQVAMERIGLEAGPLSQWLYASMTKAGLAVELLETRHVRAAFKTMPVKTDKKDARGIAQLMRLGWFRPVHCKSVPAQEVRAVLTARKLLQGKLHDMEMSLRGILRGFGLKVGATTPKTYPARIRTLVDGHPALEVIASALLKAREVLVEELRGIERRVRAMARQDERAHRLMTTPGVGVVVALTFVAAVDEPERFRSSRAVGPHFGLTPKKYQSGEMDYTGRISKIGDAGVRTALYEAADVILTRPVKGSDLKTWALSVAKRAGPRKAKVALARKLAVVLHRMLRDQTTFVTYKAAPLAAA

SEQ ID NO: 70914 - protein, 331 aa, unidentified
MDVCFVGIDVSSKTFNVCIQRDQKLIEWELPNTPKGYTKLLKDLNKYKVAVRIGMEATGVYHLNLAFYLSQAKHTEVMIINPFVMHSFAKSIAPRGKSDRKDACMILKYLERMPFESFIPPEQELLHLRSLTRRIEQITVDVRREENRLHAMQSASIVSPFVLAQCKQSISDLKSSIVELQTEMERLIRASSSSKTASQVEILQSIPGIGLRTAIVLISEIGLLPEGLTVKQWVAHIGVDPCQRQSGTSVHTRSRISKRGNKHIRRALFLSAMSASQFSLPISEFKNELVARGKSKKQALVAVMRKLIHCIFGILKHQTPFDPSLFRGRTS

SEQ ID NO: 70915 - protein, 400 aa, unidentified
MSHDRPFAEPAAIRTELGAIFVSLELSRSTWLVTSLSPGTGEKMSKRSIKGGDVAALLARLAELREKALGRTGKTYPIVVIQEAGLDGFWLHRVLEQEGCESYVVDPASISTPRRRRRAKTDKIDGEALLRALLAFKRGEPRVCSMVRPPTPEAEDERRICRERTELIEERVRHVNRIKGLLFSQGVRAYEPLRRDRRKRLDALETGDGRPLEPHLKAAIVRELDRLELLLEQIKAVEDARDRMLERLAESQSRSQDGPASAAAQPSPVAELARLRGIAEELTASIWTEGLSRPFANRRKAGAYPGLTPSPWRSGQLDREQGVSKSGNQRLRTKMMELAWLWPIHQPDSALSRWYRERLATATGKAARKRLTVALARKLFVALWKFVSAGVVIEGAVMKA

SEQ ID NO: 70916 - protein, 372 aa, unidentified
MDESSKILYVGLDVHKESIAVAYAPDDRGAEVVSVGPIGTRQSDIDKLIRKLQSKGPATLVFVYEAGPCGYGLYRYLSGKGFTCHVVAPSLIPRKAGDRVKTDRRDAMTLARLMRSGDLSAIYVPGVEDEALRDLSRGRDDARQDLKRSKRRLKSFLLRQDIRYEGRATWKPAHLRWLAQVVCPTAPQQIVFQEYLRAVSEQQERRQRLEGELHEAVKGWRLFPVVEAIQALRGVELTGAIILVTELGDITRFDNPRQLMSYLGLTPSEYSSGDRRRQGGITKAGNRHARRALVEGAWAYRYPAKVSRHLQLRLEKLPAEIQAISWKAQVRLCKRYRQLSARGKHVNQVVVAIAREMAAFAWAIARLVPLAS

SEQ ID NO: 70917 - protein, 389 aa, unidentified
MEHPMSQLNDLSRSLTSLEQDSTIIAVIEMSQSSWLVAGIVPGIERHPLKKLEPSEEDLIRLLMRWRAEATEHGRTITRIAVAFEAGRDGFWLARWLRARDIETYVIHPTSVAVSREHRRAKTDRLDTGLLKRVFIGWLRGEPDHCHMAAIPTLAEEDAKRPNRERERLVRERTRIVNRMKSCLVRFGVRNFKPTLRKAPERLETLQTTEGVPLPPNTLLELRRDMARLRFVINQIKQVEEARAQRLEQAPQEKSHAMVRLLARVIGVGIETADMLVHEVLARNLRDRRAVARYAGLTGAPDESGSKRREKGLAKAGNARVRRGMIQLAWRFLIFQKDSALAQWYRTRTESAGKKRKTMIVALARKLLIALWRLVTTGEVPAGVILRAA

SEQ ID NO: 70918 - protein, 347 aa, unidentified
MRFYNRPHQYYCGIDLHVKTMYVCILDGAGQVLVHRNVPSTPTAFLEAVAPYRTELVVAVECMFTWYWLADLCATEGITFVLGHALAMKAIHGGKAKNDKIDSHKIAVLLRGGMLPQAYVYPAAMRSTRDLLRRRLHLVRKRGELLAHIQNTRAQYNLPAFEKCLAYPGNREGVVEHFPDPSVRKSVEVDVALIDQYDALVIDLELTIVREAKRHDGDAFHRLRSVPGIGKVLALTILYEIHDIARFDRVQEFASYARLIKCTHESAGKKLGTGGAKMGNVHLKWAFSEAAVLFLRHTTEGKRLLTRLEKKHGKGKALSILAHKIGRAVYYMLARGTVFSMEKFLAA

SEQ ID NO: 70919 - protein, 342 aa, unidentified
MDVSVIGIDLGKNSCSVAGMDEAGSVVFRRRASRPGVMEIVRRHPGCIVAMEACCGAHHLGRVFLEEGHEVRLMSPEYVRPYVKAQKNDDRDAEAIAEAATRPTMRFVPVKSQEQSDLQSLHRGRERLVGDRTALINHLRALLLERGLIVAKGCAKLRSEVDEFLAGAAPELSTRIRVLVADLVEEWNRLDARIKAFDAEFVALARADPAMRRLSTVPGIGPINATALVAAVGDARAFGKGRDLAAWLGLVPRQATTGGKPRLLGISKRGNRYLRKNLVHGARAVLPKLAERDTPIGRRLRDLPARQHKNVVVVALANKLARICWAVLSGDRGFAEEVAELH

SEQ ID NO: 70920 - protein, 368 aa, unidentified
MAATRFIGLDVHKDTIAVAIAGAGREEARFFGQIANTPAALAKLAAKLGKDGGELHFAYEAGCCGYGVYRHLSNLGHQCDVVAPGLIPVRRGERIKNDRRDALTIARLLRAGELTAVWVPDESHEAMRDLVRTRDDAVITLRRSRQQLGGFLLRHGRVYPPGKRWGTVHKRWIRNQVFEHETQTLVLEDYFQAMERAEVRVQEITARIQEHLPTWSLSELVESLQAMRGISIVTAAVLAAEISDFSRFDRPSQLMAYVGLVPSEDSSGNRRRTGGITKAGNNAVRRVLVEGAWNYRMPARISKNMMEQQKHLSPEVREIAWKGQVRLHQRYRSMIARGKKSTVVATAVAREMLGFVWAIGCHVQIARP

SEQ ID NO: 70921 - protein, 363 aa, unidentified
MKQFIGCDAHKKYSVFVAVNERGEASPAIRVGHDREQYRQFLERLPAGSPIALEAGGHYYWMVDEMEAAGHQALFVQPLEAKKRMGKTGKKTDKVDANGLGILLRNGTLPEVWIPPAGLRDQRESLRLRMFLVQQRTRLKNRIQGSLARYNIQIAGVSDMFGVEGRLRLGQRLGELPEHTRQSVEQELVTLDFLEVQLADIEKRLEALMKVTAEADLLKTLPYVGRILSMVMRLEIGKVERFATAAHLASYAGLVPRVHASGGHTRLGQICGDVNQYLKWAFIEAGNLVVIHQQHLAGQHVVRLYQRVKRKKNHQKAVVAVARHLAEAAYWILKKQEVYRDPQPKPKAPAQAQAAPALSSTHG

SEQ ID NO: 70922 - protein, 345 aa, unidentified
MMVVLGVDAHKRTHTVVAADAAGVELAQLTVPATGAGHLRLVRWAAEWPQRRWAIEDCRHLSRGLETDLITVGEAVVRVPPKMMAGVRRSARTRGKSDPIDALAVARAAQREPGLPAARLDGESREIRLLLEYRESLVRERTGLQNRLRWRLHELEPGFDPPSGSLDRYQTLDQIEAMLTPRRGVVADLARLEVTRIREITRQANRLEADIGRRIAVAAPSLLKVPGCGVLTAAKLVGEAADITRFRSSDAYAMFSGTAPIPVWSANTTRFRLNRGGNRQTNTALHRIAITQLRVHPPAQQLMQRLLATGKTKNEALRILKRRLADVAYRTMNQDTRPATLTKAA

SEQ ID NO: 70923 - protein, 408 aa, unidentified
MKRYYLGVDWSDEFHQVCAIDPVGKKVIEKKVLENVDGLSEFGRWLDECRAQGIELWAAIEKPAGRIVDYLLDHGVVVYPVNPKALDRVRDRFRMSQSKSDSFDAYVLAEFVRTDHGHLRALEPSSEQAQELKLLTRDHHRLVRHKTRIHNLLDRTLKEYYPRPLEVFADLESKIALDFLTQYPTPEALSNLNRRQWNRFAKRDHHLGEARCKELWDKLNQPQLGIPPHVVRAKAQLLVVLVAQLRSLSQAVESYSERVQSFFASMPASELLHSLPGGKSGTILPMLWAELGDAKSRWQSFRHLQAEAGGVPVTKSSGKSHVVLFRYACNKLLRYASYWFSFVSLNRSEWANKYYRDQRARGKSHHQALRALAAKWLKIIFVMWRDHKPYDENYHLADIARQVIRQAA

SEQ ID NO: 70924 - protein, 310 aa, unidentified
MERIFVGIDVAKPHLDIHVRPTDERFRLLRDEAGLGNLVERLRPLGPVLVVLEATGGYEVPVAAALGSAGLPVAVVNPRQIRDFARATGQLAKTDTLDALIIALFAEAVQPEARPLPTAQAQALGELVARRRQLTDMLGAESNRQQQAHDPRLQRRIATHIRWLTKALAELEADLDDTIRSSPLWRAQDNLLQSVPGVGGVTAFTLIADLPELGHLDRRKIAALVGIAPLNRDSGAWRGRRMIAGGRPTVRCVLYMAALTAIRFNPVIAHFYQRLTAAGRPKKVALIAAMRKLLTLLNAILRDQRPWQPA

SEQ ID NO: 70925 - protein, 359 aa, unidentified
MSKITIEVPEITIGIDLGNKKHDICVLNSAGEKIDQTKIENNIVCLEEYFEQYKACSKVRVAMEVGASSLWISTKLKDMGFHVIIANARKLRMIWADTNKCDERDAEKIARVARMDPTLLHGIKHRSISAQQMLSVIRAREHFVVARTKCINCVRGLLKSLGATNLPSCASNRFGERMFEYLPDELIPTLGELLEECKDLTDRINRLDDRILQISEESCPEAIKLQQIPGVGPITALSFVLTIDDPKRFHKSRDLGPFLGLTPKRDQSGECDKQLSITKQGDRYLRSLLVGSAQFILSDRSPDSDLKSYGLRITGRGGKIAKKKAVVAIARKLGILMHRIWISGENYDPLHKKTFKKVS

SEQ ID NO: 70926 - protein, 412 aa, unidentified
MSFKIFRKNCCGLDVHKTWIYACIGITDTNGRTDYKQTRFSSFSKGLKELSDWLAKYHCTEVCMESTGKYWIPVFNVLEKADVSVILSHPKYTKPQKGNKTDRKDTKWICDLFMCDMVKPSFIPPADIRHLRDLVRYHFKLICMITGEKNRAQNCLTVSNLKLDDVFSDVFGKSSRSITEYILEHPGDLFDVTPFVDRRCKTPIEEIQAAVDGAVSPGQAVKLRQCLNHIDELEKHLEQIEQEILRLSDKYQTALDLIRTVPGFDKNPMTAIQVLSEIGGDMSVFPSAKHLVSWAGCCPRNDQSNKKIKSTRISRAGSYFKPVLVQVANGLLRSKKHPEITDRYKRIKARRGHKKAIIAICRMLLTAIWHILSDLKPYTAEGFRESCPVNKSKVLTSSQALNLLKQRGYIRL

SEQ ID NO: 70927 - protein, 331 aa, unidentified
MEMKRLNVGIDFAKDKFDICVLKENVAVHYEQFENNLKGFKRFLKYFNVNHIDYVPYIGFESTSTYCRPFQKFLSDNSLPQLLINPLRIKGLKNSMVIQGKTDKTDSLVISSYLKNIDDNSFLDFYSLDNEKLHRYNSTLRHLVGLKQQLKNFYKSINFGLEEDDDISILLTSLRKHIEKLEKQLQKDSLVFLVKIYPVTKDIKKDIQGVGEKLLLSLIPRIYSSVGNYKDKQIIAFIGLNPVKFESGTIKYKEKLNKFGFGHIKKQLYMCAMVARQHNPILKTYSERLVALGKPQKVIIVAVMRKLLLAIIGMIKKSKNKSSKELLLTPT

SEQ ID NO: 70928 - protein, 525 aa, unidentified
MAQVARRRKSVRRQVDSPSPRSAGELTARVREVGVDRLAFVCVDPAKHRSRWMLVNFLGDHLIQPTTVEHSAGQLRALVDRVRLMVQQADLRTVWVIVERTGQYHLPVKRAFAEAGFETRIVHPFATKQYRLVGDPDIKTDDTDLVALHRAAIAGFGLVELPLDENYRALRLLARHRRDLVEKNASLRCQIHEHLHLVMPGYARCFDDLWDSPIALPIARRTGTPQAVLDIGPVHLAQSLRDDKVRYRDSTLDRILVWAREAPTPACDASLHQRIWTTLDDDRRARSLEIKALERDLAAILVRTPHLLLIAIPGINVPSAAELAGEMGPIAHYANPNAITGRAGVYPSRYQSDQTDLPNGRLVRCANRRLRTALLRIADNLVVNNRWFKASADLKRKAGADERAIRVRAAKKFTRLAFVVLAARQVLRHPCCQPGDAVLAKLSEFHRVHSTSAAQLMTDLQAAVEQLPQEAYTHEADALSALSTKLANNVRRRQGPSPLGELLPALLSRLTKTTSRKSSEEQASL

SEQ ID NO: 70929 - protein, 345 aa, unidentified
MIIGCDFHPSWQQVSWLDTETGDCGERKLVHASGDAQQFYQQMAAPVLIGMEATGNSQWFVELVEDLGHEIWIGDAAQIRASYVRKQKTDKRDAAHILKLVVEGRFPRLWMPDREQRDLRQLVLHRHKLVVIRSRVKNELQHLSLNKGVQRKHKLWSQAGQKMLRELPLKPWAACRREDLLGLLAMLHQQIGKLDDAVQQVAEENPQAKLLMTQPGVGPNTALAYVLTIGDVSRFRRGKQVASYLGLIPREESSGGRQKLGSITKQGNRMLRALLVEAAQVAVQHDPGLRKEYLHRCHQKPKGVAKVATARKLAVRLYWMLRTQVAYPEIVRIESSSGLPLVGAS

SEQ ID NO: 70930 - protein, 342 aa, unidentified
MSIVAGFDVHRRQITFDALDTDTGEVTRGRIDATPAAVRGWVYRFKGSEVHVAAEACTGWLFVCDALVAAGAEPHLAEPVETRALRGRKRRAKTDREDARWLRQLLADGRLPEAWIPPEHVRQWRSRARLRHTLIDERTQWMQRIQATLFHHGVSGTPERLRTEDGRAFLERLALPADARERIEIALAMIDAIEAQIAPLERELRQLARRQTGCRALMRLYGMGELTSLITLCELGDVQRLSASRKAVRMAGIDIGVHRSDRRARVGKLNRQGSPHLRWALYEAALAACRPSSPDHAAYLALKARGLSHTRASLTIARKLARRSFHVLRELGPAALDPIPMT

SEQ ID NO: 70931 - protein, 408 aa, unidentified
MKRYYMGVDWGDRLHQVYVGDQEGKKVREMKVQESPQGLAEIGRWLDEKRAEGFELWAAIEKPQGRIVDFLLDHGVEVYPVNPKAVDRVRDRYRMSGSKSDAFDAYVLAEFLRTDQAHLRALRPSSEKAQELKMLSRDQRRVVRHKTRFLNQLTTTLKEYYARPLEVFEDLETEIALDFLKQYPTPAHLSALTRKQFNRFATKQHHLSKQRCEELWEKLNKPQLAVPEHVVRAKAQLVEVLIEQLRASIKAVKIYNHRVESFFASSPAAQFAKTLPGGKSGTLVAAVWAELGDAQGRWESSRHLQAEAGAVPVTKASGKSRVVHFRFACNKHLRHTMYWFSFVSLNHSEWARLYYRGQRDNGHSHHQALRALGAKWLKIIFVMWRDHKPYDENYHLANIARQKMRQAA

SEQ ID NO: 70932 - protein, 410 aa, unidentified
MTNQDHRVGGIDSHKDTIHVAVITAIGQPVTDREFPTTVAGYRRAVAWLIEHGPLSAVGVEGTSSYGIGITTELLAAGIRVVEVNRTRAAEKRKQGKTDPLDAYRAARSVLSGEASTEPKNPSIEPLRALTIARRSAVKSQQAAWRQIGSLLVTTRPALRDRFRDLPETKLIATLRDCRPDQIHDVDDADTLYALRTLARRYLALQDEITALEERMLRRATRANPALMAIKGVGPAVGAQLLITAGDNPDRLRTSASFAALCGTAPIPVSSAAPTNIASPAAVTGKPTPPCTTSSKSACPTSREPAPTATPAWPTGGPRRRSSAPSNAPSHERSSTPWPATPSRPTTPTYDPHATRRTSPSPPPHNTSAYGPPESANSNSADAPTTNSPPATEPGSPPPETPPPQRLDTQ

SEQ ID NO: 70933 - protein, 420 aa, unidentified
MKSFVPVAGVDVSKRFSDLCVLSPDNNVLLKQKIYHDMVSMKRAEKKLHEIELEYGTRPVVVMESTSHYHLILFQFFTDAGFEVVVVNPIQSGALKNINVRKVKNDRVDAYRIAMLYRLKVLRPSQIPTSSLRGLRLLTRQRSELKGDVARFKNRLTAYLDQIFPGYGEVFSDVGGSASRAVLHMCPTPEELLNADGSLLAKAICEAGNKGPKFGAEKAAKLREAAGSAQVIGVRSASNASLIKNVLDIIEGLLAAIQRIEGEIKELVTQDTRLDEDVKLLCSIPGIGFSSAVVIVAEMGDISLFRKPKQLAAYFGLDPGERQSGTFKGRKNKLSKRGSPQVRAALHMAAVSSVSRNRDGTYRNPVLAEYYERKCAEKPCKVARVAVMRKLSNIIYAVLRDRRPFELRTPQEHMALLAAA

SEQ ID NO: 70934 - protein, 389 aa, unidentified
MKNTAARKRKQVPEGYLIIGVDPHKKKHAAVAITQDFTLRDRFKFDNTREGLEFLLRRIKIEMVKSDCRGVMFAIETGGHYWRNVAYYLDEKGIPFRFINQYTLKRRREGKDLNRRKNDYRDSEVAAQLLCTGEFVESKIPQGVYAELRTAHNAYRRLIKERTRITNLVKGLLDGLFPEFTRVFKDPCGLTALSVLSTGSIPGVITGMTGEEFVATIEAKHRGRLMRKKLRALHNAARSSIGIAAGAKSLSSEISFLVEKLELIRGHICVIERTLVKLVDETEEGKYLLSIRGLNYIAVAGLLAELGCFKSYRSAKQMIKMAGSNPTESESAGKKRSRTPMSKQGRPVLRYCAWTSVIPMLRFNTDSVPGQKSFGNAQHMLIPSMVERL

SEQ ID NO: 70935 - protein, 420 aa, unidentified
MREEASAFAAFVGIDWADRKHDVCLQVAGSETCEASILEHRPTAIAAWARELRERFEGQRVAVCLELSQGPIVSALLEHDIFVIFPVNPSTLAKYRKAFTPSGAKDDPTDAALALELLRRHPEKLAPLRRESPDMRALRRFVEARRDLVQDRVRITNRLTFTLKAYFPQVLDWFRDKETDVFAAFLERWPSLLDAQRARRDTIVDFFHAHSVRRAAVIDRRVEAIRSERALTSDPAVIEPARALVGALLPQLRAVSAGIDRFDSEIAQRCQQLPDYRLFADLPGAGPVFASRLLAAFGEQRDRFVDAAAFQKYAGIAPVTERSGNKHWVHWRWACPTFLRQTFVEWVASSIPHSFWARAFYQRHKAKGASHNATIRALAFKWIRILFRCWIDKTPYNESRYLSALQHRQSPLLKFAALPS

SEQ ID NO: 70936 - protein, 401 aa, unidentified
MKYGVGIDVSKGKSTIAILSIEGEVIEMPFDINHDLTSMSSLEEKLGKIPKEDIKIVLEQTGTYHLPILTYLVDKGYCVIAENALKIKKYLDRSLRKAKTDKKDSLKLAEYACDNWYKLKANKIEEEKYQQLKFLSRQYFSLNSMKVQQKVDFSDLTDMLFPGYYQLLEECNFVVGLKIFEKFSDPKIIRKKKLETFLNDVEKIAQKIGQQRAGRNLAIKVYELAKKSVPSCPSNSSTQLILNKRVVALINLIETTNEIIAKMNEIAKNMDEYKEVRNMKGVGDRLAPLLIAEIGDIRRFKNAGSLIAYAGIDSPPYQSGKYEATNRHISKRGNKYLRKTGFEVMQSIKSFCRVDCEVYDYIVKKETEGKCKKSAKIAGLNKFLRQYYGILKKKYIELGTW

SEQ ID NO: 70937 - protein, 315 aa, unidentified
MEAMIERCAGLDVHQETVVACVLFGPLDKKPKTSIETFSTTTTGLLALSDWLATLQVSDVVMESTGVYWKPIWNILEGSFHLVLANARHVKNVPGRKTDVKDAEWLAKLLRCGLIESNFVPPEDIRDLRDLTRYRKKLIHHRTSEQNRIHKILQDANIKLTSVLSDIFGVSGRRILEAILNGEKIETDGLRKMVDWRTKASITDIASAINGRIRRHHRDMLRYHWEHMSYLEKAIEELEKQIDQLLSPYRKEVELLDGIPGVNKAAAATFIAEMGVDMSVFKSAKHLASWAGVSPGNYESAGKKKRVKPHKVTKL

SEQ ID NO: 70938 - protein, 387 aa, unidentified
MGKVDDLSRSLTALDQEETLICVVELSRSSWLIAGMVPGIERRPLKKLEPDALGLLRVIERWRDEAIRAERMITRIVLAYEAGRDGFWLARWLRARGVEVHVIHSTSVAVSREHRRAKTDRLDTAMLTRVFLGWLRGERGHCSMVAVPTIDEEDAKRPGRERASLVGERTRIINRMKAALARLGIRGFKPELRNAPARLETLKTPEEVMLPPNTLGEIRRDMARLDVIREQIKTIEQARLESIGRAPDEPAHAMVRLLARVIGVGIETADMLVREVLLRGFRDRRAVARYAGLTGAPDESGTKRREKGLAKSGNSRVRRGLIQLAWRFLLFQRNSALARWYVERTSGTKGARKTTMIVALARKLLIALWRLATTGLVPDGVVLRSAV

SEQ ID NO: 70939 - protein, 382 aa, unidentified
MLGTEIRWRIDPREYDLFVGMDVDKKQIANSVFDQGAFMKSVSMRNEPRALVSYIKNNYPGKRVAFAYEAGPTGYELHDEIEKAGYPCLVLPSSMIPTSPGMRVKTNRLDSRKIGISLRGGELRGIRVPTESYRQLRHLVSLRELYVKEDVRLKCRMKSLFLFEGMTFPEGDWSQKLLRALETLECKREIRFKLDQLLKTIRHIEEQIKETTREIQRFCREDEDLKRYEELLRSLPGIGHTISVYLMARLGDYRQMRSGEEIASFFGLVPRERSTGDVVRRGPITKSGDGRVRNKLIQCAWVAIQKDGELAEFYERIYQKNPKAIAAKKAIVAVARKICHRMASVLREERPYLIRTKVKEGTASTRTDSGNRRTREEILEVR

SEQ ID NO: 70940 - protein, 438 aa, unidentified
MRKPRDHEYILALDISLDSLDTIILTPDGNWTPHHTFTNNWSGFQELKRETLAYLSALDDPRLTLTGESTGILWWHVFYHIATDPDFAPYDPALALLNPLHVKHFRKAQPEDHKTDADDPRLIATYYHTIGVKNYYTFDLRYLPLRQLTRAYCRLIHTLAAEKAFALTLIYLLASEYPRLKPFSDLFGVTSTSILTDYPDIAAIADISLDTLTATLDTLARGRLKDAAKSATILHQVAQDSYPLPETLRTAVSTTLQMTIEHIRFLQDQRQTCYTLIETELDQLPEARHALEYHGLGPVLVGGCLGEIQDTRRFITGRKFDRHTHQWRERTYRDGQAAVAKLAGLWWPRNSSGRFEGQDRHLGHERNPYLRYWFTQAAYSLKGKQEEYADYYQRKYHEVTKYQHKRALILTARKAVRLIFALLHKGQMARLKEETSTS

SEQ ID NO: 70941 - protein, 415 aa, unidentified
MDLDEVVYERACGLDVHFAFVAACLVIPGPKKKPRVEERQFPTTQKGLRQLRDWLVENKCEVVGMEATGVYWMPVYVALEGTVKLVVGNPQHMKAARGQKTDRKDARWIVGQVRHDRIKASFVPPPEFRDARELARTRRQLVSNRTDIRNEIQRLLARSGITLGTIVSDVFGASGMDILDALSKGKSIKEELPKCLRTKLKSKLAPIAAALEAPLTEEPRFLLTMHLERHEYIEGKIQEVEKRLAAQLSPHQKQLDLLEKIPGVSKLSAAIILAEIGVDMTAWPDEAKFSTWAGVAPGCNQTGGKSKRAPVRKGNPYLCTILMECAGAAVKVANCHLKPKYHKLCAQLGSKMKARMAIAHKLALIIYRNLGTNYEYKEPTPKPLSEKTKRKILQTRVRDLEKLGFRVSIEPMEVA

SEQ ID NO: 70942 - protein, 316 aa, unidentified
MNTTHTEKINYVSIDVASKKIDVLINGKVSSFSNTISSVDKMLNKANKYGNNNHFILEATGGYERVTAWRLLALGEKVSIINPARVREYAKSMGQFAKTDKIDTRIIKEFAEAKKPRLSELPSENQRSLTSLTERRRQLKDIRVDENNRLNTTGEKEYCKRIKKHVAWLDKEIKDIESKLKTLIKKDEDMRIKAERMMRIKGIGITTAITILAFIPEIGTLSRQQVAALVGVAPFNHDSATIKKPRHIQGGRKHVRACLYMAALCAITHNAHLKPIYERLINDNNRCRKVALVAIMRRLIIAANSAVKNPDFALAV

SEQ ID NO: 70943 - protein, 400 aa, unidentified
MISVGIDVSKEKSTICILKPYGEIVSKPFEVCHTEKELSELTSMLLRLNDDVRVVMEATGIYHLPVLCYLQEKGLFVAVVNPFEMKEYRCQGLRRVKTDKQDAVTISNYGIDHWYRLKEYEPEESIYAELKLLGRQYRHYMRMRVESVLELTHLLDYTMPGIKTLLKGWNETNGKDKLGDFVEEYWHYDNITKKSEEQFIESYLKWAKEKGYHQSQDKAAKIYMLAKEGIPTVSSDTSSTKMLVQEAVRVLREIDNTLMTILTQMQTLAKSLPEYPVVRAMGGVGNVLAPKLIAEIGDVRRFHSGKALIAHAGIDAPPYQSGQFTGTERKISKRGSSSLRKIGYEVMRCLKTHKEPEDAAVYRFILKKEKEGKSKRAAKIAGLNKFLRIYYARVMEVYQK

SEQ ID NO: 70944 - protein, 470 aa, unidentified
MAAVMIGVDPHKASHTAVAISAVEEPLGELRVRACAAQAERLLAWAAAWPQRTWAVEGAGGLGHLLAQQLLAAGERVLDVPPKLGARVRLLAAGDVNKNDPNDARSVAIAALQSAGVRDVRPDDHAAVLKIWSKRYRDLGRTRTQVVCRLHAVLCDLVPGGVSRPIYAACAARILQQITPPDAVAAARCELAAAFVDDLRRIDAQIRETRKKLAVAVQAAGTSLTRLFGVGPVIAAAVIGDVRDVSRFGGGDYFAACNGTAPIEVSSGPRKVCRLSRRGNRRLNHAIHMVAVTQIRHRHSEGRACYDKKLAEGKTPKEALRALKRQISNAIFACLQADARRAAARAKGPGGRQGNDSVASAAGLHPRHRLFGQATPGPGHHPTTAAASPAPGPAGGGGRAGHSPIAAILPPATPQVQVERPQRSEDERPGGAARRRPHSATRKARGQGSLVETQRPKGTSHAAKRTDPTS

SEQ ID NO: 70945 - protein, 465 aa, unidentified
MKNKSDKTKKKKKKINLNPDWELINPDAAGIDIGSREHWACVPPGRQPQNVRKFGTFTGDLEALADWFGQCGVKTVAMEATGVYWIPVFQILERRGFAVVLVNPRQTKNVAGRKSDVQDCQWIQRLHTYGLLQASFRPGDVYCVLRTCLRYRDELIAARSTQCQHMQKALQAMNVQLHHVLSDVTGVSGLAIIAAILAGERDTAKLAALVNRRVQASQETIQKALAGDYRPEHLFVLQCAFELYHTYEEKILACDQRIVTEVAQLPRQVDPALTPLPARKPGRGAAQDKLFGLDMRLPLYEKMGVDLTAIEGIGITTALIILTEVGPDVSRFASAKKFASWLGLCPDNRISGGKVLSTRTRRVINRVSDALRLAAMTLERSQSALGAFHRRMKAKLGAAEAITATAHKLARLVYRLLKHGEAYVRQGMDDYERKFHEGKLNRLKKTAAAMGFELTAKQPVTLPVS

SEQ ID NO: 70946 - protein, 367 aa, unidentified
MKGTIKGVATEEQAAGPRPPAAGTPVYLAIDVARDTWVYCVRWAGAERRRLRTPGELRHLQAVVAHHRQCALHVGYEAWGFGYEPAWWLQQEQIAVTVIAPSRVERAPGRSVKTDRLDAGRLARKLESGELKGIYLPPRGLHADRQLGRTHAQGVRDRQRAQLRVRSVLQEHGRLGPPPARGWAASQPWLGTQELPAPVRRCVPAHEQVRAVAAHQAHALRTALTELGRQPADAAVVEALQMQAGVGPLSAIRLLLEWGSLERVARAAALTHYVGLPPSQYSSGELDRRGHILKCGPAAVRAVLLPCAWAAVRSGQDPVLAATFTRLAPRVGRKRAIVAGARRLTQRLYRRWQAALAAPTPTAPMPT

SEQ ID NO: 70947 - protein, 321 aa, unidentified
MAAILGIDVAKNKFDVALYRNGKYKTKVFDNKSSGFEGLAVWLKQHGEMLVHACMEATGSYGDALARFLFEAGHKVSVVNPARIKAFGKSELLRTKNDKTDAKLIARFCEAHKPGPWQPDPPEIEHLRMLGRRREALIDLRTQEANRLNGPDSAVNESVQKVISFLDEEIEQISKAIKDHIHKHDGLRKKQALLKTIPGVGDVTIEAILSEINGFEGFDTIEQVVAFMGLSPKEHNSGTSVRGKAVLCKIGNARLRKVLYMPTLSAIQHNPFVRALYDRLIAKSKNGMIIACACMKKLVHIIYGVIKNGKPFDPAYNIKTA

SEQ ID NO: 70948 - protein, 421 aa, unidentified
MEVLYRRCCGLDVHKETVVACLRIVSGGEIVREVRTFETTTASLIALSEWLAENGCTHVAMEATGVYWKPVWHILADGEFQLILANASHVKNVPGRKTDVKDATWLADLLAHGLIRASFVPDTQTQELRNLLRTRKQLVREKARHVLRVQKTLEDANIKLDSVITEVMGMSGRAMIEALIAGESDPAKLASLANYRLKTSQEKLREALRGRVTKHHRFLLRLHLNQIDALDAAIATIDRQVEAGIAPFRAAVDQVSSIPGIRDIGAQVIVSEIGTDMSRFPSDGHLISWAGLCPRNDETAGKRRSTRLRKGAPWLKTTLVQCAWAAVRKKDSYLQAQFLRLKSRRGPKKAIIAVAASILTAIYHMLKDGTLYQDLGSNHFQSRTKSQQTKRLIKRLADLGYDVALTPLPTNEVPAEGAVSF

SEQ ID NO: 70949 - protein, 348 aa, unidentified
MRFYTQQHQYTCGIDLHARSLYVCILDDTGQTCVHKNIKATPDALLKLIADYQDDLIIGVECMFSWYWIADFCADHDIEFVLGHALYMKAIHGGKAKNDRIDSEKIARLLKGGMFPYAYVYPREMRSTRDLMRRRIKLARDRGELMAHIHNTLSQYNLPAHPKNLRYDLHREPMRHAFPDPSAQRSVDLDLDRIAFYDEQLSKLEWYLKRSAKSFDANTIIRLKSVHGIGDILSLVLLYEIHDINRFPRVQEFVSYCRLVKCQRESAGKIHGTGGARIGNPYLRWAFGEAAALFLRGNPEAQRWLEKKTRKHNKAKALTILAHKLGRAVYYMLKRKTLFDQDRFLASS

SEQ ID NO: 70950 - protein, 409 aa, unidentified
MHETQPVVGSGDVVVIGVDPHKASVTIEARDTREILRASGTFPTTTPGYRAMIQVARQWPRRIWAVEGARGVGRALVARLLAGGERVVDVPAKLSARSRVFDTGQGRKTDAHDAHAIVMVALRDHQLREVMIDEDLEVLRLLVDRRDELAAARTQALNRAHRLFAELVPGGAPTKKSVTQYQALLAGIRPRDGAGRVRRRMLAEELTEARRLEVRVKEITAEIKAAVLARGSHLMDLPGIGPAGAGRILADVGNVARFPSRHHFASWTGTAPIDASSGAHQRHRLSRAGNRRLNHVLHIAATVQMRHHDTTGRVYYDRKRAAGKRPLEAMRCLKRRLSDVVYRQLVTDAVGVQVTKIEAGPGGHSGATLQSSAAGLPPHTGTSDQPLPGPATTTLDRPVPVRQALIAAP

SEQ ID NO: 70951 - protein, 352 aa, unidentified
MMSHSTTTIGIDIGDKYCQVCVLDGAGATRKEMRVGTTRRAIERALATWPAARVVMETGTHSGWIARLLKGAGYDVIVAHARQVQLITQSDRKNDRFDAEQLARLGRVDPKLLRPVEPRCEQRARDMTVLRSRDALVRMRTLAINDARGLAKSLGNRLPACSSGSFPNRVRRELTDPAVFAGLPEMLDVIERLSASIRALEQQIERMCRDQYPETALLRQVAGIGSVTALAFALTIGDPQRFPKSRTVGSYLGLCPRQRDSGQRRSQLSITKGGDRQLRRLMVQAAHYILGPFGPDTELRRVGLRLAARGGKAAKKRAVVAVARKLAVLLHRLWVTGEQYQPLGYDAELEVA

SEQ ID NO: 70952 - protein, 379 aa, unidentified
MTSTDATADTRETVYAAIELSKKTWVLGIAPPDRDRPSIHRIGGGNIAELVSRLRVASRNNRRIVVCYEAGYDGFWLARALVKIGIECRVLDPASIQVNRRARRVKTDRIDVLALLRALIATDRGERHVCAVVRVPSVEEEDARRSHRERQRLVRERTGHINRIKGLLFAQGIRDIKPKLRRTRIDFAALETAEGHPLPDRLRRELEREYTRLALIETQLREVENERDTADSQDPVVEQKRQMLVALHGVGGTSAAILAREVFARSFASRRQLGSYLGLTPSAYDSGSTTRCQGISKAGNSWARRILIEVAWLWRKYQPASPLSNWYVQKTAGQSSRIRRIMLIALARKLAISLWRYVETGLVPEGVVITRSESQCALA

SEQ ID NO: 70953 - protein, 367 aa, unidentified
MKKVSIVGAKPNKKILRQRLTIGLDLGDRNSWYCMLDESGRIQREQRVRTNATALREVFGEMAQSRIALEIGTHSPWISRLLSELGHEVVVANARKVRLIGESRKKDDRLDAQTLARLARIDPQLLYPVKHRSAQAQADLTVIRARAGLVRARTALVNTVRGLAKSYGERLRGCNVRNMNPEKAEGLSPELQAALQPLLAALESLSEQIAEYNERIEHLALESYPQVGLLKQIKGVGTLIALTYMLTLEDPYRFRQSRDVGCYLGLQPGRRNSGQSEPQLHISKEGDPYLRTLLVQGAQHILGPFGVDCDLRRWGLKLAERGGRSGKKRAIVATARKLAVLLHRLWVSGEVYEPLHNSKQRALPAAA

SEQ ID NO: 70954 - protein, 447 aa, unidentified
MDKVLMAVIHACCAGLDVHKKVIQACIRLFNERGEVVMKFREFGTTTRELLALAAWLGEHQVTHVAMESTGVFWKPVFNVLEAQCEVLLCNARHVKNVPGRKTDLKDCEWLAQLLQCGLLRGSFIPPLPQRELRDLTRSRASLQDDKARVANRIHKILEDANIKLGSVATDVLGVTGREILRRLMGGEREPAALAQSARGRLKQKKAQLVAALEGRVSEHHRFMLRLEWAQLRGLEALIERLDARIEMQMARPELSPVETQRASPEAPEAHEGTKASKPLQALPFLAAAKLLDGMWGINQCSAENILAEIGTDMSQFPSAQHFASWAGMCPGNNESAGKQKSGKTTKGNRWLRRALTQAAWAAIHAKKSYFRALYYRLAPRRGKQRALVAVAHSMLITIYHMLKCHTAYADLGPDHFDRRNKERSTRNLIQRLEALGYRVALAPKAA

SEQ ID NO: 70955 - protein, 346 aa, unidentified
MMIIGCDFHPSWQQVSWVDTETGDTGVRKLVHASGDAKLFYQRLSAPVLIGMEATGNSQWFVELVEDLGHGIWIGDAAQIRASYVRKQKTDKRDADHILKLLMENRFPRLWTPNREQRDLRQLVLHRHNLVEIRSRVKNELQHLSLNKGMQRKAKLWSREGQQLLRELPLKPWAACRREDLLGLLATLNQQVGKLDLAVQHAAEQHPQACLLMTQPGVGPNTALAYVLTLGEVSRFRRGKQVASYLGLIPREESSGGRQKLGAITKQGNRMLRSLLVEAAQIAVRFDPGFRQQYLHRCHQKPKGVAKVATARKLAVRLYWMLRTQKPYPEIVRIESSPRVPLVGAS

SEQ ID NO: 70956 - protein, 418 aa, unidentified
MRARPSGRRSGSKGRWPVLFCGVDWASDHHDICLVAEDGAVRWRGRIAHDPAGIERLREAIAAQEVDPGEVCVGVETSHGLLVGALVEAGYVVYPINPKAAERFRDRRKPAGGKHDRLDAEVLAQAVRTDRASLRALLPDSPLANEIATLARDRHALVREHTRLLNQLRSALGEYFPAALVAFDLAADSSLAFLGRYPTPEAAAKLSAFQIAGFLRARRANRDLAAKAAAAKEAFRAPALRARPEIARAKARLVRVVCAQLTTLRPELSAYEHELERLLKTHPEGDLFRSLPGLGVILASRVLAGTGDNPERFRSAAGLCAYAGTAPILLQSGKRAVVKARAACPKEFRDAVQQWADQAHRRSAWAAEFYRRHRKRGHNHNESLRALGNRLLELLFDLRRRGLRYDEAVHAANIRWAA

SEQ ID NO: 70957 - protein, 348 aa, unidentified
MDHIIVGVDTHKANHIAVAINAYGARLDTITIPATRKGYSNLQAWASSLGHIKAFGIEGTGLYGAGLSRELLANGHTVLDVMRPNRQLRYLHGKSDSLDAESAARSVLSGQASALAKAQTGSSEMIRHLKIARDSAVKAKSQAMITLRTLIINAPSDLRDTLDQIKGPITLIRHIAALRPGNIMSPSASAKAAMRAIARRWLMLHEEIVEHEQELDRMVTERAPELMKSFGISTMTVAEMLIMVGDNPERIRSEAALAKMCGVCPIPASSGKTNRMRLNRGGNRQANAAIYRVAIVRMRDDDRTKTYAARRTAEGKTRREIVRCIKRYIIREIYRYLCAPHLSSPHKP

SEQ ID NO: 70958 - protein, 429 aa, unidentified
MRTESTPGARWPVFCGVDTHADSHWLCVLDWRGRRVLSRRFPADAAGYEALAGAIAAAGEPACVAMEGTSSYGAGLTRHLASLGMPVREALSPAGTQRRRPGQGKCDEADAERAARAAMSGSKLGTPKSQDGWVDGVRCMLAARSGAVKARTSAINTARSLLTTAPEGLRSRFRGMAGPRLMEELPSVRAEGALGAALGALADLWAAARDAALDMELAIEASLEENCPALLAMYGCGPVSAAKLAVAAGDNPGRLRSEASFAAICGACPIPASSGKTVRHRLNRGGDRQANSALHEIARRRVMRDPETAEYAERARARGKSDREVMRCLKRYVAREAYRALMRPHEIRRPEDASELVAARRAAKVSQVRAASILGTSEKYISMLERGQRELKPIRRAYEAWVEAGLPLDWDRQAFEAERKMDSKKHLAK

SEQ ID NO: 70959 - protein, 338 aa, unidentified
MSAQAVGIDLGKTTFHLVALDSTGQVVEKKKCSRPQLLRRMSNLSAHVVGMEACAGAHWLAQALTQQGHHVRLLPPQYVRPYVKTNKNDFVDAEAIAEAVQRPTMRFVPIKTEAQLDLQALHRTRQRWMGRRTALINQIRSFLLERGIAVRVGPAWLRKQMPALLANENGTLSGSLLNLLAELWQEWLQLEQRMERANQSLRATAEQDPGCQRLLSIPGIGLLTATALVAAIGNGGTFRKGRDLAAWLGLVPRQHSTGGKTKLLGISKRGNAYLRQLFVHGARAVFFHLKREPHRMGHWLNQLSARKRTSTVIVAMANKLARIAWAVLVRGQPYQATA

SEQ ID NO: 70960 - protein, 439 aa, unidentified
MLPVMRPDAGGIDIGATEIFVAVPADRAAENVRSFATFTQDLYALADWLKQCGVKTVAMESTGVYWIPLFQILEDCGLEVCLVNARHVKNVPGRRTDVCDCQWLQFLHSVGLLRASYRPEQEVCAIRSLLRHRESLVQMAATHVHHMQKALDQMNLQLHHVISDVTGQTGLAIVEAILAGERDPYVLAKLRNDRIKASEAVIAKSLVGDYRPEHLFTLRQSLVAYHHYGKLIDDCEREIRRCLEEFKPPHLPNASEGGSQKSQSMTASPDGVLRSELNRVFGIDLTQIPGIRVGIAQTLFGEIGPDFTKFRSASAFASWMGLCPDNEISGGKVLWVGTRKVKCRAATALRMAAQSLHHSKSALGDFYRRMRAKLGAPKAITAAAHKLARIIFHLVTTGQEFDDSRFAADQLRYQKRQEAKLRAKAKALGFQLIPIEQTG

SEQ ID NO: 70961 - protein, 317 aa, unidentified
MTESVKVNVGIDVSKDFLDVHVGNVALRRVPNRSSGLSVLKRILSRYSVSLVLCESTGGYENLAVTYFQSLGYDVCVINPRQARDFARSMGRLAKTDRIDAQILCRLADVIDVSPERTRFVKPLTDERRQRLVSMVRRRRQLCDLMISERNRRAKTDSYGSESINTVLDFLTAEIARIDRDISAHVGSCFSDISSLLQSFTGIGPVTASTLLGELPELGKLNRRQITALVGVAPFNRDSGYMRGRRRISGGRSGVRNVLFMAVLSAVRFNPVLKAFFARLVAAGKPKKVALVACMRRMVCILNAMLRDGSRFEVAPG

SEQ ID NO: 70962 - protein, 342 aa, unidentified
MEHYAGLDISLEEASVCVMDTAGSVVWRGSVACEGASIVSALAAHAPSLQRVVLETGLLSNWLWHELRRLGVPVVCVDARHARAVLSVRIMKTDANDAESLAQLARIGWYREVRVNSEASQWLRSLLLARERLVRVRRDLSNQIRSFLRHYGLRLGKVTGRNFERRVRDLAADNPALQELVAGLLRARAAVGAELAALDKRVIALAREDRVCRLLMTVPGVGVLTALAYRAAVDDPARFTRASRVGAYLGLVPRLHESGEVSRSGRISKTGDGLARALLYEAANVLLTRVRQPSALRDWGRRLATRIGAKKAKVATARKLAVILHCMWRDGTAFDATAGAAA

SEQ ID NO: 70963 - protein, 336 aa, unidentified
MELYVGMDVSLKETSICVVNGHGEVMSEGTVTSNPEAIARFLADKACNAVRIGLESGPTSTWLWHALRAFGLPVICIDARHAKAALSMQINKSDRNDAVGIGQIMQAGWYREVQVKRLSCHAVRAVLNSRALLVKMKRDLENQIRGLLKNFGLVIGKAGGTTFAVQVKEYVVGTGLLHRAVSPLLEIREHVVVEIAAFDREALRLARNDVNIRRLMTIPGIGPISALSFAAAIDEPARFKRSRSVGAYIGLTPRRYASGEVDRTGHISKCGDTMLRSYLFEAAGVLLTRVARWCGLKAWGIRLAKRIGFNKARVAVARKLAVSASNRNSRNAVAYP

SEQ ID NO: 70964 - protein, 303 aa, unidentified
MRIVSALDVHRRQITTKTLDLESGEVRRSRIVPAAREPVREWLSRFEGVDAHVALEATTGWRFIVEEIERAGLAAHLADPAETAAHRGRKRRAKTDAADCDLQLRLLVRGELPEAWIPPWHILELRVLSRLRKTLLDERTRWQQRLQAQLFHQGVPPGLKLCTASGREALLAAPLSPAGQTLAAVGARMIELLDSELAPLERSLRAIARRQPGCRALIARLYGVGERTSVAIVSELGDARRFRSSDDAVRATGLDVTVYQSDRKRAPGHLSRQGPALFALGAVRGGPVRRPPRLTRSRLLPAG

SEQ ID NO: 70965 - protein, 356 aa, unidentified
MVIIAIDLGKFKSMGCIYDNETQEQQFETLLTERSYFRTMFNSYSPELVVVEACGPSGWVSDLCGEMEIPILVCSTHEEAWLRKNVKRKTDRDDALKLARLASMGELVPTHVPTKSVRERRRLIKYRKKQVDRINSCKSSIRSIFVNQGIRISDGAKTWHTGRKLLNENAKPLSDCEPNELWRGELDLELRLLETIETQLESIEKQLNRMAKTDAQVQRVQTINGVGRVTAEAIVSWIDDPHRFKSAREIGAYAGLVPWQYQSGNTDRRGRITKRGPRLLRTLLVECAWCSLQYNTWSRETYDRIHAGKQPRRKKAAVAMARKILVLAWAMMRDEVDYDPDRNVKPKPDMKEKVTA

SEQ ID NO: 70966 - protein, 375 aa, unidentified
MKETLRFLGLDVHAETIAVAIAEADGEVRSLGTIANREESIRKLIKKLGPVERLKACYEAGPTGYVLYWQLAELGVLCEVIAPTLMPVKAGDRVKTDRRDAERLARSYRSGDLTPVWVPDEGSESLRDLVRAREAAKQDQMRARHRLSKFLLRTGQRPAPGVKSWTLAYMAWVKQVRYTQAARESTRLDYLYEVEHMAERVKRLEQAICEAVKLASPAIQEVVKDLQALRGIAQISAVTIAAELGNISRFESARQLMAYSGAVPSENSSGKRTRRGSITKTGNAHLRRIAVEAAWSYRLRPCVGPALRKRQEGVSEQIKEIAWKAQHRLHKRYMRLLAAGKDQRKTVIAVGRELLGFIWAIGVKAETAGRQQIAA

SEQ ID NO: 70967 - protein, 340 aa, unidentified
MQVNTIGLDIAKNVFQVHGIDGEGRPVLCRKVRRDRLVKLFESIKPCLIGMEACATAHHWARQLTALGHQVKLMPPAYVKAYVKRNKNDAADAEAICEAVRRPTMRFVPVKSADAQSILMLHRARHLLVRQRTAQVSAMRAHLAEYGVVAPKGITHVRDLLTVLESGASMLPDLARQTLIIIAQMIDALSRQIRNIEVELLAWHRASAVSQRLESIPGIGFITASALAATVGDARAFRSGRQFAAWLGLVPRQNSSGGKDRMGGISKMGDRYLRHLLVVGATAIVRYTRRKATAVSVWASRLLERKPARLVTVAVANKMARIAWAVMARQETYRASPIVA

SEQ ID NO: 70968 - protein, 405 aa, unidentified
MFYAGIDWSDTHHDALVIDDAGRQVNAPIRVAHSPDGLKKLHAYLEAIASSSGKENLACIVETSHGLLIPFLLEQGWPVYPVHPTTVDRRRAASGAKTDQIDAYLLAKTGRADFAEVRRLTASSDQIAELKALTRDQDALIQMQTRLVNQLTACLKADYPVALDLFAKLQQRSTLTFLQTYPTLQAAQAASEDQIAAVLKTAGHTSAAKVAPKIVEPLHQPQLEANAITTRTKSRLALALIAQLLPLVEQIAAYEKDIEQLFLSHADSTIFESLPRAGSRLAPRLLAEIGDDRKRYADAASLQALAGTSPVIFQSGTSTRVHRRYACVKPLRNALHQFAWQTTQSDPWALEYYQRKRKEGKSHTVAVRALANVWVRLIYAMWQKSECSQAATFEQARQLHARRAA

SEQ ID NO: 70969 - protein, 312 aa, unidentified
MTNPVFAGIDVGKDKLFVNIYSDNQVRDFPNTHSGLERLSRFLSKQAVALVVMEASGGYERQPASDLRAAGLSVAVVNPTYVRRFAQGMGTLAKTDTIDARLIAHFAFVKQPKAQLAKTAEEEALSALVERREQLVSLMSVEKNRLCKASDYSKGSIQTSIDLLKAQISLIEIEIKALVAKSPERLARMQCMCSFIGIGNVNAFTLLTEMPELGMETREHIAALAGVAPINRDSGKMKGKRRTYGGRARVRRTLYLAALSASRHNPIIRAFYQRLLAAGKEKKVALVACMHKILTILNAMLKKGELFNPAYS

SEQ ID NO: 70970 - protein, 390 aa, unidentified
MSESTSVLSSASDPKSMHYVGLDVHQKRSSICILDANGKQVKSLEVKGHWPKVLEEIARQVPRPFSICYEASCGYGYLYEKLSPLASHVSVAHPGQLRLIYRSKKKNDKVDGQKLAKLLYLDMVPQVHVPRADVRAWRALITYRHKLMNKRVGIKNNLRALLRGLGIVALSGKKLWSRKGLKWLREQSLEESDALRRDIAVEELDEVNAKIRRVEKDLNKRADAHPGVTLLRTIPGVGVRTAEAVVAHLDNVSRFSRNKKVGSYLGLVPCQDSSAGNNRLGHITKDGPASVRKLLCEAAWQGIRHNARIKAYFDRITHDDPDRRKIALVATAHYLARVMAAMLRSGEVWREPAVPTPADNPNKPAPDNQEKNPELMNRKEKVKEKKNAKR

SEQ ID NO: 70971 - protein, 336 aa, unidentified
MNGSTGRWVGIDVSKGKLDVAVLDERDKIKSHVFANDSKGHAALITWLEQRGCGAQLAQVCLEATGCYSESIATALVDAGWQVSVVNPARVKGFAQSELMRNKTDRADAALLARFGQALHPEPWIAPPVEVRQLRALVDRLQSLKEMHQQEVNRLEGATNRSGTRESIESHLQWLQQSIQQLERQINDHIDGHPGLRDDAKLISSIPGVGKATAAKVIAYLGDVRRFKNAKALAAFIGVTPRLKLSGSSVRGRSMISRSGHAEMRRSLYMPALVALKHNPIIKTFGVRLRATGLAPKAVVAASMHKLVHLIYGILKSGTPFTANFLVASLDIQDGI

SEQ ID NO: 70972 - protein, 323 aa, unidentified
MSAFVGIDIAKNSFDIATPLDNGKFRTKAKLPNKPSGFQELEAWLEKHAKPDAWLVMEATSVYHQGVADFLYSKGYRVCVVNPAIIHSFSKQDLRRVKTDKADAKLIATYARDKQMDLRAWVPEPLPRRRLRALVRRLGDLQEILQMETNRLEVSESSVQKSIQSVIDHVKNEIAETKKAIKDGIDDDPDLRQKRDLIVTIDGLGETTAAVILAELGDPLDYRGPRAIVAFAGLNPLVNTSGNWTGPTHISKTGSTRLRTAFYMPGIVAMRYNPAVKALADRLKARGKAPKQIVCAAMRKLLHIVYGVLKSGKPFDPKLALAH

SEQ ID NO: 70973 - protein, 416 aa, unidentified
MKKNSNSQTKTGQKTKPAKARGPVQQESKEVMAELVAKLSERLEQKPTEEKAAEGKPQRAPAPNRDRLTVGVDLGDQWSNYCILGLEGETLGEGQLRTTREDLAAFFKALAAARVIIEVGTHSAWVREVVVGCGHEVLVANPRLMEGTKRRKRKNDRLDANKLARLGRVDPQSLFPMEHRSTEVRQDLVVLRARDAMVSVRTQLINATRGLVKSMGARLPKCSSPSFPDKVEEALPAEVREALLPLVRLAAAVSDCIQVYDERIEQLGREKYGHSELLRQVKGVGPLTSLAYVLTLEKPDRFAKSRDVGPYLGLAPQQEDSGDSQPQLGISKTGDVMLRRLLVGSAHYILGPFGPDTDLRRYGLRLCERGGKNAKKRAAVAVARKLAVLLHRLWVGGEVYEPLRHGAPTAEVGEAA

SEQ ID NO: 70974 - protein, 331 aa, unidentified
MKTYAGIDLHSSNNYTAVIDEHDQRLYRKRLPNRLDAVLSALEPFKDTLEGTVVESTYNWYWLVDGLTEHGYKVHLANPSAIKQYEGLKHTDDQWDSFWLAHMLRLHILPEGYIYPKEERPVRDLLRRRLLFVKHRTAHILSLQSMITRNLGSQMSGNAIKRLEQRDAEILFNHPHLVLAAQNNIAVIHFLKERITGIEREVKSVIKLTIPGIGDILALTIMLEVGDISRFPKVGNYSSYCRCVKAERLSNGKKKDENNRRNGNRYLSWAYVEAANFAKRFSPHAQRFYQRKMAKTNGIVATKALSNKLARASYYVMRDKVAYDVDKLFRK

SEQ ID NO: 70975 - protein, 335 aa, unidentified
MQIYGIDLAKEKFDVSFFDLTSKKVSNQPSHKVVKNNFKSIGRFLETLPSDAVLVAEHTGVYGDTLLKCCMDSNVKIAFVGGYVIHRYRATPDRAKTDVLDCALLREFGERYPDKLKYRKFPEEALYELRQLARHREMLVEQRKQLMTADKSEDCRPIRSLAVKRSMDRIKEMLDTEIAETEKEMLKVINGHDSIHHNYEIVKSVNGVGLVTAVELLVKTDNFTKITTARQYAAYAGTAPYEKSSGKMDKGAHISKIGNRRSKTLLYICAESARLHNKEIKLYYERRTLIDKKPRHYVLNAIANKLLRIIFTLVEKGEVYDVNYIRQDPRLVKHN

SEQ ID NO: 70976 - protein, 353 aa, unidentified
MEQIVKQCAGIDCAKKDFTVTFGVCDALHEIQHQSSRTFKNDELGFKSFNKWVGKMYKRSLPMLFLMEATGVYHERLAVFLHDLGYKVAVVLPKRAKDFSKTLKIKKVTDKIASQYLSTMGLEKKIDLWTKPQKVYADIRHLTREKNQIQDQITQLKNQIEAETSGAQVHKPTLKRLNQTLELLKKQKTEVLKEVKATIDADKELKEKVCKITTIPGIGLLTAATIIGETDGFSQTKNKRQLVSYAGYDVINQESGTSVKTKPRISKRGNKHIRKAMHMPALSSIKHADNSKATFIRIVGKTGIKMKGVVAVQRKLLVLIYTLWKNDTMYDPNYNTKKEGDLKPPHELDLVRS

SEQ ID NO: 70977 - protein, 373 aa, unidentified
MPKYSTAFGMDVHLRSTTVCALDADTGEAVTRRFPGNPWGEIAGWMDGFPGPSLAAYESGYLGFAPQRELAGLGVECVVAAVSKIPRSAADSASKNDRNDAARMAKAILAHDISPVWVPSPEVEGIRDLAGAHDGATARLATAKQRLLAFLAKRGFVYGGTTPAGNPRKYWTYDFLRWLDKVRPEDDGGVRTLAALRNEVEAAAEARADLLSEYRAAVDASPIAAEVAALQSIKGCAFALAAAFSAEVGDFTRFRSGRQVTAYFGLAPSQRSSGDSVRLGGISGAGNALVRKLAVEGSWCYAAARHQPKLMPRDTGVPLEIRMHGRKGSERLLRRHEEMLARGMPAAKANAATAAELVRWLWALGMMCRKGAE

SEQ ID NO: 70978 - protein, 344 aa, unidentified
MDHYAGIDVSLERSRVCVVDGSGKIARETKVASEPEALISWFGSLGLGLARIGLEAGPLSQWLYAAMKQAGLAAELLETRHVSDAFKAMPVKSDRNDARNIAQLMRLGWFRPVHCKSITAQEIRAMLTARKLVQSKLLDIENSLRGILRGFGLKVGKTTRTLFAGRIEELVKGHPNLQTITEALLRARAVLLAEFKGFEKRVRAMSRLHEKARLLMSTPAVGPIVSLTFACAIDDPSRFTSSKQVGPHFGLTPKKYQSGETDYTGRISKHGDASVREALYEAAHIMLTKPVKGCSELKSWAMRIARRAGTNKAKVALARKLAVIMLRMLKDNVPFNPAAKAATA

SEQ ID NO: 70979 - protein, 457 aa, unidentified
MKKDKSKTQKVVEVDALGQINENAAGIDVGAEEFYVGVPKGRDVESVRSFPTFTADIRRLADWLTQCGIETVAMESTGVYWIPLYEMLEERGFRVYLVNARHLKNVSGRKTDVLDCQWLQQLHTYGLLKASFRPSEQICAIRSLVRHREMLVRYRSAHIQHMQKALQLMNLRLTSVLSDITGVTGMKIIRAIIAGERDAQVLASYRNGRCAQSEEDIKKSLEGNYKREHVFALKQALELYDFYDQQLQSCDQELEALYDEFDPPDQSGTEPPAPRTTKRRKNQPHFDLAQSLFRMTGGIDLTQIDGLDTLSVQDILSETGTDMSKWPTVKHFSSWLCLAPNNLVTGGKVKRTSTPHTQNRASNTLRIAAQSLARSDCALGAYYRRMRAIHGAPKAITATAHKLAQIIYFMLKRRVPYQALDAAYYDHQHRERTIRSLQRKAASLGLRLETAAPIFVS

SEQ ID NO: 70980 - protein, 442 aa, unidentified
MARKPSKQRFTVVHPDCAAIDVGGREHFVAVDPRHDNAVQSFTSFTDDLYKLADWLQSLAIKVVAMESTGVYWIPIYEILSERGFEVYLVNARATRQITGRKSDVLDCQWIWQLMTHGLLRGAFRPDDLTCCVRSLVRQRASKVKDQAQTLNRMQKAMSQMNIQLANVISDISGVTGMRILRAICAGERDPVQLAELTDRRIKAGKEAVARSLHGNWRCEHLHALTQELAAYDFLEQQIADCDDAIKTALEQLPVLQTKPEPSNKPLRSPHRSGAQQTELHQTLWKVLGVDLTAIPTIGVDTALVLAGEIGTDLSRFPSSQHFCSWLGLAPPTRISGGHRLAGGGPKIVNRAAQALKQAASNARNDKGFIGASHRARLTRMDTSCAIKATAHQLARLVYNLLTKKQAYVEQGLEEFETRSQDRQVRALLRKARKLGYQLVAA

SEQ ID NO: 70981 - protein, 369 aa, unidentified
MARNGTLAKSQELQPSFQTTTEQITIGIDLGDRFSHCCVLGPDGKILTEGRLRSTPETMARHFKDLPPSRIAIEVGTHSRWLSQLLAEWGHEVIVANPRNLRMIADSIRKSDQVDAHMLARLARVDPKLLSPIAHRKQEIYPDIIQLKARDLLVKNRTRLMNAVRGVLKSAGLRVPNCGTSCFPSKAAQCIPDELKPGLTPLLETISHLNQQIYSFDKAIESTAQNRYPETIRLRQISGVGSITALQYVLTIGDPGRFAHSRDVPAYLGLTPRRHQSGSVEQQLRISKAGNKQLRCLLVQCAQYLLGRFGPDSDLKRWGTRMFERGGKNSKKRAIVAVARKLAVLLHRLWVTGDTYHPLYNVATSSGTP

SEQ ID NO: 70982 - protein, 411 aa, unidentified
MIKENYIYVGIDLHKETHTAVMIDCYNQKLGEITFPNRPADFPKLVAKVKKCNTDGKTIVFGLENAYGYGRALAVWLIDKGYLVKDVNTAISHRQAKHRGAMYRKSDSDDAEAIALATLNMLDKLPDAYPNDAYWSLGQLVHRRDNIMKQRTRLVNQLHEQLCIAYPSYKQFFNDISRPTALYFWEHYPSRKYLKGKSVEDLRAELVPVSHNKCSTKTCEKILDAVASDKVKNNAYQDARDMVTLSIVSDLQHYDKQLAEVDKMLEQMYKMLGCTLTTIPGVNVITAVKILAEIGDIKRFSNANKLAQFAGIAPLHLSSSGKGKDLATKQGNRRLQATIYFLAIQMVQISSKGTPRNPVVRAYYEKRKAEGKTSQQALICISRRLISIIYGMLKSGTEYRMPVMENTGETV

SEQ ID NO: 70983 - protein, 406 aa, unidentified
MELAKLYKRVVGLDVHQAKITACAITEDEAGQTSVELAEFGGFKRDRQAMAQWVAAHGAEMVVMESTGIYWKSPHAALEQVGIVATVVNARHVKTVPGRKTDWADAQWLAMLARAGMLRASFVPPAQFRALRHVGRQRQQLVGILSSEKNRVHKILSDGGIRLSVVVSDIHGVAGRAMVKALIAEHSPAEVLMLAGNRLKADRTELLDALDGELTADHRFVLHELIAHVEELERRIDRFDQYLLDQLTPYRSTLALMQTIPGIDAVGAALLLVEIGNDMSAFGSVDRLASWVGICPGNNESAGKRKTGRIRKGNPWVRRLLCQFAHAASRTRCAFKSKFEALRLRRGHKRAIVAIAHKILKTVFLLISRQTHYRDSATDFEALSVARNAPRWLKMLKKHGFIPAAA

SEQ ID NO: 70984 - protein, 453 aa, unidentified
MAQGSGLTRGDRNRNRKIGALREVVARDRAVLAVDLGEDKQAAVLIDHEGRALARKIVRAKAYQLGGLLGWASERAVRAGFAGLAVACEPTGHRWKALMGLADAGGHGFVCVQSLAVARAREGDDYTRDKTDHRDAYLIGKLVIRLDCYLPERAGEDWARLRHLGARRFVLVADVTCCMQQAGDLLGCAWPAPLGAAARPLESVTWLAGMTVITDRCCGQPGRLRTMGYEKFLAAVRRELPRWGGKFVRHSIVRGLWEALADPGGVAAQRRGALERLHLLLGDWRALRARLADTEARMTAMLDELGLTALVTSIDGVSALSGAVMLAETGDLNRFTSGRAVVKHAGLNPSEHTSATITGQTRISRRGRPGLRTAAWRAVWGALRHNTVLLAKHARWTSRDHNRLADGQARTACAATVLRWLWAVITTGTMWDARIAAGQVTPRRGAAAVPAAA

SEQ ID NO: 70985 - protein, 422 aa, unidentified
MMNSTNTYPLHPKMTRTYAGIDSHRDSHTIVILNCFHEKLGEIKIGSAPSEFAKFIKQAKKYLQTGTTWAIGFEDVSAYGRSFVKYLVDRGFLVKHVDASKVATERGQVLHKTDQYDAECCARVLINQFDKLPNANPEDKYWILQNLVTRRNAITKINVMVKNSLHSAVAENYPHYKKFFSRLTTDSALAFYEAYPAPHHLDNMTVETLASFLHSASKGRLAQTKAQLILNYVKRDKVQQVEFQETRDFTVRSLVRQVKNNLAELSAIDDEIEKILQHFNYPLTSIKGIDTLTSAKLIAEIGDINRFKNAKALAKYSGVSPVTFSSGMTNLQMANARGNRKLNEIFYRIALTSVMPIGSKGALINPIFHEYYHKKISEGKLKNQALKCVQRRLVNIVYSVMKHNRPYINPDMGYVSADPVAA

SEQ ID NO: 70986 - protein, 246 aa, unidentified
MSKKKLDLCLRSNGKDILYDVIPNDLSSIKSWLTRTFEKFFLSEDSLVVCAEHTGQYTYPLVCATKSIGVYLCLEDAAKIKYCHGIPRGKNDKIDACRIAMYAERYNDCLQPYTASELIIQKLKNLSTERSMLVADRAKYQSQLKDQVDYMEHSIYIAKCNRVEGIINTFTDYIAQIDLEIKELINQAPVIAHQMDLLMSVDGVGERVALKMIMETDAFTSFTDPRKFCCHAGVVQIGRASCRERV

SEQ ID NO: 70987 - protein, 343 aa, unidentified
MSAHYFIGLDIHKKMIAYCVKTIDGRLVDQGMVNADRTSLHEWAVSLPGPWVGAMEATIFTGWVYDFLLPYAVHLKVAHPEMLKAITAAKKKNDRADAETITDLLRVNLLPECTMLPQEIRELRRVLRYRNHLVRTAVKMQNKMSGLLMEVGASYNKRRLRGKKYFHELLEKVSEIPPSVKDLLMLSRAGFEMFQESQKRLIQSLRTDALIRERVCRLMTIAGVGEVTALTWTLEIGDPWRFGSIRQAISYCGLCSAQRESAGKEHRSPISKKRNKHLQTILVEAAKIAPLWNPQLAAVHQRELQKGNRNRATLAVARRLVAYMMSVDKNQKDFAMRGEQKAA

SEQ ID NO: 70988 - protein, 373 aa, unidentified
MPKYSTAFGMDVHLRSTTVCALDADTGEAVTRRFPGNPWGEIAGWMDGFPGPSLAAYESGYLGFAPQRELAGLGVECVVAAVSKIPRSAADSASKNDRNDAARMAKAILAHDISPVWVPSPEVEGIRDLAGAYDGATARLATAKQRLLAFLAKRGFVYGGTTPAGNPRKYWTYDFLRWLDKVRPEDDGGVRTLAALRSEVEAAAEARADLLSEYRAAVDASPIAAEAAALQSIKGCAFALAAAFASEVGDFTRFRSGRQVTAYFGLAPSQRSSGDSVRLGGISGAGNALVRKLAVEGSWCYAAARHQPKLMPRDTGVPLEIRMHGRKGSERLLRRREEMLARGMPAAKANAATAAELVRWLWALGTMCREGAE

SEQ ID NO: 70989 - protein, 345 aa, unidentified
MKVETVEKDLCGGLDLHGDNVVVCLMNQQRQVVFERRLPNDMGTIRDALEPFRKRIQALTVESTYNWYWLVDGLQALGYEVKLANTAKMQENIGLKYADDKTDARFLARQLVLGTLPEGYIYPVETRGLRDILRRRMRLVSTRTGEWLSLESLVARHTGRAMNVEELTHCEIDEVLRDQPHALRMAQVNFRLIDFLKKEIKELEKTVMAEFPDRGGYQRLLTVPGIGMVLTRTILLETGPISRFKRAGNYASYCRAVKSIHTSNGRKKGEGNGKSGNKYLAWAYVEAATLSVRYSPEIRAWFQRKLARSGKRVIAVKALANKLCKACYFMMRDGADFDVKRLVGG

SEQ ID NO: 70990 - protein, 358 aa, unidentified
MKRIAIDLAKSVYQVAESVQVGRVDRRKRLDSGAFTRYVQEQIEPVEWVMEACGTAHHWGRLMQEKGHRVVLLHPRYVRPYRRRNKTDRNDCDAILEAARCQDIRPVPVKSVQQQQVQQLHKLREGWKKSRVQRINLLRGILREAGVETPNDIKPFLRQACELIERPEVRALRGALQVVLAEINLYEQSMRECEEQLARWHADDEIVHKLDEVSGIGLLTASAFKTAVGKPERFASGRHLSAWLGMTPSEYSSGERRRLGRISCKGNVYVRTLLIHGARAALLAAKRCKARTPERLTQLQSWALQTAERIGHNKAAVALANKLVRICWAVWCHERSFSGNWHSTKTRLMAGVNQKGCF

SEQ ID NO: 70991 - protein, 412 aa, unidentified
METIFERVSALDVHKAQVTACVRVPDGSGKRAVHLAEFTTTVRGLLALADWLKEYGVTHVAMEATGVYWQPVWHVLEEDFELMLVNARDVKNVPGRKTDVSDAQWLCQLMEAGLLRSSFVPPKSQRQLRALTRYRKTQIAERQREANRLHKALEDTGIKLGNVASDIMGKSGRAMLDALVAGTTDPEVLADLAKGRLREKLPALREALEGHFEAHHSLIIGAILAHLDFLNEQIDGLSEAIGELLGPTGLVSVKLASTIPGVAARTAEVMVAEIGTDMSKFPSARHLASWAGRCPGNDQSAGKRRSGRTRKGSKWLGIALEEAALGAIRGRNTYLGAQYRRLKPRLGHGRALGAVKHSIVIAYWHMFTNGEVYRDLGGDYFQRRDPAKATKRLVAKLQALGHTVTLQPQGAT

SEQ ID NO: 70992 - protein, 432 aa, unidentified
MEKIRENAAGIDIGAKKVFVSIEGQEVRCFFTFTEDFEKLRDYLCEHKIKTVAMEATGVYWNILYEILEESGIDVWLVDGRQTKQVPGRKTDVKDCQWIQQLHSYGLLNRCFVAEADIKELRVYQRLREDHIRSASMHINHMQKALTEMNIRLTEVLSQIHGVSGIAMIEAILQGERNKETLLKLCDRRVIKNKKEDVLKSLNGRYTKHGLFALQQAFDSYLFYQHQIEQCDQMLSEVIGKIGKGKPDQNLQGTRKKIRHNKPDINDLGASLLKIFDGKDATALSGITDYSWMQLLSETGTDLSRWPSEKHYTSWLGLAPGQHSSGKMKRTKRKKGHPKAGQIFRQIAQSLITSKHIALGAFGRRLRTRKGSQIAIKSVARKLAILYWRIMVKGMAFVEEGTKKYEEQLLLQKHKSLERLAKDLNVQIAYNV

SEQ ID NO: 70993 - protein, 419 aa, unidentified
MKEWKEITHYAGFDWARDHHVVVVVDRQGQIVADFQFDHSVEGWKSFRQKTTALESVAVAIETSQGAAVDQLLQYEYTLYPVNPAAAASYRQRKAPSGTKTDHLDAWSLADALRVDGHGWKALAPMDELSAQLRLLCRDEVALIEQRTALVNQLQQALLEYYPAALEAFEDWTMPSTWDFILQFSTPEALVKAGKRRWEKFLHTHRLWRAQTLEKRLALFAQADQFKASVAITKAKSQLALSLCKLLRTLQEQLDQYRKQIEALFENHPDHHLFGSLPGAREKLAPRLLAAIGSDPKRYGSFQVLQSFAGTAPISFQSGQLRRAKVRWACDKFLRHTVHLWADCFRKASAWGQAYYRKKRQDGKSHACALRCLGQRLLKILFRMLTERKPYDAELHARNQQKHGSWVLALLPQPTPPPQ

SEQ ID NO: 70994 - protein, 348 aa, unidentified
MSRTKAQSLSRMGIDIGKNTFHVVGMDDKGNILIRRCFTRVKLIEYLARLPQTTIGMEACPDCHWLARKAKSFGHTPCIVPAQFVKPFVKSNKNDLIDAEAIAEAISRPTMRTVIPKTTAQLDLQALHRIRERVVSHKTAVVNQARAFLLEYGLTIHSGIAKFTHDMPSLLSDEQNELSPSMRDILIDLWEEYRSLEEKLLHLRRQIESIADADGIAKRLTSIPGVGKLTATAMTAFVGNGQQFKSGRNLAAWLGLVPREYSTGGKQRLLGMSKRGNAYLRKLLIHGARTCVLHLNRTTNFLGQWVQLMEERGVHRNKVVVALANKIARIIWAVMTRPGAFYLQQREI

SEQ ID NO: 70995 - protein, 394 aa, unidentified
MFYAGIDIAKNKHEASVIDADGKALLDSISFANSKEGCEKLLALFERLGIAKDDVVIGMEATGHYWLSVHAFFFELDYDVKVINPIQSEAFRKMYIRQTKNDSKDSFIIAQIMRFGQFSATNLSDEGTVALRQFSRYRLALVDSCGDCKRRVIALLDQVFPEYAGMFSDTFGVTSTELLLKYPTPEDMLTVSTRKLTTLLSKASRGRFGEEKAKQLKDAAAGSFGVSFAKDAFAFQIKQLMHQICFLENQIAELENEISALLEQLGSFITTIPGIGDTLGAIIISEIGDIHRFSAPGKLVAFAGLDVKVNQSGEFVGTKNKLSKRGSPYLRRAIWLAATRATFCDPTLSAYYQSLRARGKHHLTAVGAVSRKLCNIIFVILRENRPYQILPPNP

SEQ ID NO: 70996 - protein, 349 aa, unidentified
MSEQYAGKQIVGMDLHRRRSVLVRMTETGERLETVRISNDPEYLRAVMTRAGEAPDVVLEACYGWYWAADTLAELGATVHLAHPLGVKMFSLRRVKNDERDAADLADLWRMGRLPEAWIAPPACRELRGWVRHRAKLVGLRSNLKCQVHAVLANAGVQVGMSDLFSAGGQDLLARVALTPESRARVDSALRLISGLDFEVELFGKLVANRLRSDRGYLAIQAIPGVGPVLAAVFVAEIGDIERFARPEQLASWAGLTPKHHESDTTVHRGPITKQGSRLVRWAAVEAVQRVGGHTRLGQVRDRVGQRRGRNTGVVAAARELTELVFYGLRDGRLRCLTTPSSNTANPAA

SEQ ID NO: 70997 - protein, 355 aa, unidentified
MSQEKYIGMDVHQATISIAVMDAQGKLIMECLLETKATTILEFIQGLQGTLSLTFEEGTSAAWLHDLLKPHVSRLVVCDPRKAALLKDGNKSDRIDARKLAELLRTNQLKPVYHGEHGVRTLKELGRSYLTLTKDVTRVMNRIKALYRSWAIPCSGTTVYAPRHRAEWLAKIGEPGVRVRAERLYQQLDVLQPVRQAARHDLLSESHKHAAVKLLRQIPSIGPIRAALLVALLQTPHRFRTKRQLWAYSGFAVETHDSGEYRCVRGKLQRNRERITVRGLNDNHNKDLKSLFKSAAISASTRPGPLHDFYAARIAKGMRPTMARLTLARKIVTITLTIWKKGVSFDPQQLHRQAA

SEQ ID NO: 70998 - protein, 332 aa, unidentified
MYLGIDVHKRYAQVAVMDEAGKIVEEVRVENANLDDLAQQYAGAQAVLEATSNYYHIHDTLSEHLDVTVAHPKKINQIADTDKKTDRVDAKELARMLRLNSVPESYVPTEEVREARALVRGRQTLVENRTKYANKIHGLLSDHGITEDVKPLNVKGRESLRELSLPVPFDTLLESYLDLIESLTEEIQKFDETIEERAGSLKETQLLMTIPGVSYYTALTIYAELGGIDRFDGDKEVVSYVGLNPVIRESGDSRIEGSISKRGSGRVRWLLVQAANTAVHTSNDEYLSRFYDRLASRKNSQKAIVAAARKMLVSIYHMLDRGEVYDPPGVTA

SEQ ID NO: 70999 - protein, 519 aa, unidentified
MQNLFKTVLLNDINNSFAILVGWRSSFVLGTPETMIGESLNDIPYRILKVESSTCDSALIKKVMKTQTAKDYEKMPMVHLNAAGIDVGSKSHYVAIGQQPEDVREFGCYTNDLHLLCGWLKSVSVQTVALESTGSYWRSLFVLLQAYGLNPILVNGKYTKNVKGKKTDVLDCQWIQKLHTLGLLEGSFIPDLFTETLRQYCRHRHSLIEDASGYISKMQKALRLTNIRLDIALADITGVSGKAILEAIIAGERDPEKLASLVNGNVKKSHQEIVMALTGDWREEYLFELKQSYEVYSYFHQKVNECDDHIDTLLNLRIEDNERTDGEARPEYTPGGRAKKKGKNDPKIDLAKLSYQLTGGVDLYSVEGIGRSTLMSILSEIGVDLKAFPTAKHFTSWLRLSPNNRISGGKVITRRTPKGKNQLADALRHAANGIGNGKEGSLCQFFKRITIRKGRLAAITATARKLAVIIYNMLTKKQAYQPQNQLEYLTKIRMNQIKNMQRRINQLKVLPQELVFVTS

SEQ ID NO: 71000 - protein, 362 aa, unidentified
MERQQQYVGIDLHRRRSVIVRKTSTGEPIETVQIDNDPELLAAELRKAGEHPEVVLEATYGWYWAADVLQAQGANVHLAHPLGNNWGHRRVKNDERDATDLVDLLRLGRLAEAWIAPPEVRELREHVRYRAKLVHLRGALKSQVHAILAKEGVAVPMSDLFGKRGSRLLDDVALATAFRIRVDSLRELIDRVDLELAMVEECAQRALDGDPGYRAIQRIPGVGPVLAGVFVAEIGDVTRFRSASHLTSWAGLTPMHRESDLKVRRGHITKQGSRLVRWAAVGRHPPARPHRRAGAPPPGRRAPRDPDRARRRGPQAPHLRLLRPARRRDPLPGQGGVRHHRTRTDASSPRVMAPAQAARPRT

SEQ ID NO: 71001 - protein, 377 aa, unidentified
MIYIGLDVHQKSTTICIQDDLGKQLLLEKCVTTFDGFRDKLSVWFKDHPACPVGMEACSKAYITSGIIAELGGEPHVYPADEVASKTRSRKKKTDARDAQDLCTNMRTGALMREVSLPPDSMRKLRSLLKARQLQVKIQTQVVNAAKALLREYGLEGSSGSMTTEAAWKVRLSQPMPKIVKTLFETCFSSFLLASEQVKELMKHAAILSNTNPAFNIAQSIPGVGLVTGLALAAHLFEISRFKSGKKVIAYIGLCPSSYDSGERERKGRITREGPSLLRALLVECAQQASRRKNPLNPYYRRYIVKHGVNKAKVAIAAKLCRIVHSLVKRQEYFSDKSLGVIWDISKMCYVFDKSIKLEKQSQQGQQRQQRSKQLAY

SEQ ID NO: 71002 - protein, 291 aa, unidentified
MYYGGIDIHARSMYICIFGDEEKPVLHRNCKASPEAFLKAVESYRNDVVVGVECMFVWYWLADLCAKEKVPFVLGHDLSMKAIHGGKSKNDRIDSHKIAALLRGGTFPVAYVYPKKMRSTRDLLRRRHHLMRKRSELLAHIQNTNSQYNLPEFEKKIAYKADREGVTDHFPDPSVRKSIEVGLQLLDFYDQLLTDLELYIVKKVKAHDVHTWYLLRSIPGVGKILSLVALYEIHDIRRFPRVQGFASYCRLVKCLRESGAKKFGAKNSKIGNVHLKWAFCPPGRALPRSPR

SEQ ID NO: 71003 - protein, 338 aa, unidentified
MEVAVIGIDLAKDVFQIFGVDARGRAMLSKRLRRPQLAPFVAALAPCLIGLEACASAFHWARQFQARGHTVRIISPQFVKPFIRGNKNDGNDAAAICEAVQRPNMRFVPLKSVEQQDVQSLHRARQRLVNHRTALISQMRGILLDRGIVFAKSATRARRFLPLILSDPTSELSPLMRETLASLLELLRELDARVKRFDRQIADVFQASPVCQRIAQVEGVGPKTATAVVAAVGNAHDFKNGRHLAAWLGLVPRHRASGDRITLGGISKRGDQHLRTLLVHGARAVVRTAVRKTDARSQWVNALVARRGVNRAIVAVANKNARIIWALLARQEDYRRAA

SEQ ID NO: 71004 - protein, 350 aa, unidentified
MTTRRMALSKLTMGLDLGDRFTQLCAVDVHGQVVATDRLRTTPAALERRFGGLPRCRLVLEVGTHSPWVSRLLEQLGHEVLVANARQLRLIYGSDRKSDRVDAETLARLGRLDPALLKPIHHRGAEAQADLAQLRARDALVRTRTLLINHVRGAVKAWGARLPASSAPAFVMKAAPGVPGDLRDALGPLLELIATLTREIRRMEHQLERLAAERYPETRRLRQPSGVGLLTALCYVLTLEDPGRFRQSRAVGPYLGLCPRRDQSGGHDAQLRITKRGDAMLRRLLVSGAQYILGPFGPDTDLRRWGLRLAARGGKNAKKRAVVAVARKLATLLHRLWVSGAVYQPLRAAA

SEQ ID NO: 71005 - protein, 458 aa, unidentified
MRRKSKRTPGMEEAHPFSAMSRVNTKAGGVDIGAVEIVACVSGDEETQIVKAFGNYTVDLQALGAWLKKYEVRTVAMESTGVYWIPLFEELEREGFECLLISSRSLRRVAGRKSDIIDAQWIQTLHTYGLLESSFRPQADLVAMRTLLRHRAQLLEHRSPHILHMQKALLQMNIQLSQALSDVMGETGRAMLRAIVSGERDPKALARFRDPGCKYSEAEIEKALTGTWREEHLFVLKQSLELYDFYTKQIEVCDAEMDRLYALTRPDWASGELPAIPKKKQNSHSKNAPRNAREIRKHLQRINGVDLSVVDGFGVSLAQTVTMEVGSNLGEKFPTDKHFCSWLGLAPKHEISGGKVLKNKTLKTKNRAGQAFRMAAQSVKQADCPFGVMYRRLRSRLGPAQATVATAHAIARVVYKMLKYKVEYDPLSVNEYQKQYEAQQVKYMKKKAAKLGYQLVPA

SEQ ID NO: 71006 - protein, 448 aa, unidentified
MSDRSGVSRGDRNRNARLARLRAAVPLGNAIAGVDLADSKQMVVVTDHESRVLARRCFRRRAWELGAALDWAAARAAAAGFAGVTVAVEPTGHRWRVVGQLAAERGLLFVCVQPLMSAWARRAEDLTFDKTDDKDAVLIARLAAQLRCYLPEPVDETWGRLRHLGIRRAQLVVQSVSQVQQMRDLLECAWPAVLDAARQPFKSTTWRAALTVALERADGDLSRVTRLGQRRFDAAVRRQVARWDAVHPWQKIIGAVFTACADPAGVTELRLGALERVQLLLADWRHTQARLAEAEARLTAVLGELGLTGLVTSITGLSAVGAATILAETGDPGRFTSGRALVKHAGLAPRQKNSGNSTGRTRTTGQGRPALRLAAWRAVWGALKSNPVYAARFAHLTSREHNKLSTGQAHAALAAALLRHLHAVITTGQRWNPTIAAGGRPGQAPIAA

SEQ ID NO: 71007 - protein, 429 aa, unidentified
MKIIYPRVCGIDVHKKFIVAVICISESVEPTYLKKRFSTFHNDLIHFRDWLIQNDCQNVCMESTGKYYIPVYNVLESHISNIVVANPKWVRAVKGEKDDDKDAKWIADLFKLGIVKSSFIPQKDFRILRELTRYKYKLVNMRSSEKNRYQNALTSGNCKLDMVFTDVFGKSASNIIDLILSDNPYTDEDILSKVHKNCKASPDMILNSINGTDLTSVQKSRIELVNDHIKQLSSNIQRLDKIIDLMIEPYEDYISFLCQIPGVSRNSAITILSEIGVDMNQFTSTRRLTSWAGLTPSSNQSAGKKKSVRISRAGVYLKPCLVEVAHAAVKDKNHPYYANKFNKISKRRGKKRAFIAIARKILVAAYHMLLTGEIWNPADLAEVETPVEQRIKYVKNNLKSDIKQLLDIGLTVEELTLMIQQNANIIATQ

SEQ ID NO: 71008 - protein, 435 aa, unidentified
MQQAWRNSEPIEEPQFIAFVGIDWADQKHVWCWQGAGENKREGGDFAARAGAVETWVAELRQRFGDGPIAVAVEQTRAALLWQLSKYAQLHLYLVSPQTSANFRKTFYPSGAKDDPRDADLLLELVLQHRHRLRCWAPDSEATRLVQNLVEERRKLVDEKTAVLNNLTNRLKLYFPQMLEWFVRLDTSLACALLQRWPTLAELQKLSPGKLRTFFHRHHSRQRELIERRIREIHQARPALTDGAILQAQAAVVPLLVQVLIKLQEGIAKLDQQMAHAASQHPDYYLFASFPGAGAVMAPRLLAALGSQRERYRSATELQTFSGIAPVIESSGKKKWIHSRWRCPKFLRQSFHEWAGHSIRFCPWARAFYELQRGRGKGHHAAVRSLAFKWMRILFRCWQDHVAYDDNLYLARLAQRGSGLGPCIAAVKKLCITRG

SEQ ID NO: 71009 - protein, 367 aa, unidentified
MMGWMAPLRHLGAKMLVVESPADGEPSMSEIRTIGLDLAKHIFQVHGVDAEGTTVLRKQLRRGQVLAFFSRLPPCVVGLEACATAHYWARELRVLGHEVRLMPAQYVKAYVKRNKNDAADAEAICEAVLRPTMRFVPVKTAEQQAALLLHRGRERLVCQRTMMVNALRAHLAEFGVIAPRGLRNVGELIAITRDESDARLPGLAQQVLQVLAGQIEQIEAAIAALEKQLMAWHRSNPVSQRLATIPGIGPIIATAIAATVVDPISFRSGREFAAWLGLVPRQNSTGSKTRLGGISKRGNHYLRRLLINGASANLLRSKATNADPWVIGLRRRRPSLVVAVALANKTARIAWAVMRRQEDYQRMAAAA

SEQ ID NO: 71010 - protein, 322 aa, unidentified
MAKHTTICAGIDTGKRKLDVAIEGRREQLQVENTPEGHKVLLAWLRQHRVKRVGIEASGGYEQPVVAELRRKRFVVVVFQPAQVRAYAKFHLQRAKNDKIDAALIAACTAAVRKIHAAPDPRLQPFAEQLTMIDQINEDTARLKNRIESCRNAQIKKLWQEDIARLEKREKVELKALVASIRKHPDLAKRLALIHSVDGIGLPTAVAILVRMSEIGQITREQAAALAGLAPYDDDSGEQVGIRHIDGGRKRLRHALYTASLAASFRWNRQLIQLYQRLIAAGKEHKRALVACARKMLIFANTVVARGTPWCDEPPVESLSVS

SEQ ID NO: 71011 - protein, 391 aa, unidentified
MIYVGIDVAKDKHDCFITNSDGEALFKSFTIPNNRKGFETLFQKVQSVSDDLTKVKVGLEATGHYSYNLLGFLLDKGLPTYVINPLHTNLYRKSLSLRKTKTDKVDAHTIASMIMSDVDLKSYSDTSYHNEELKSLTRYRFDKVQERAKLKTSVSRLICILFPELEKLVPTIHMASVYALLSEFPSAHAVASAHLTRLTNLLSESSHGRYGKDTAVMFREAARNSIGSNMPAKSLELKHTIKLIQELTSEIDEIETEIKSIMDEVNSPILSIPGINYRMGAMIIAEIGDFSRFDSPDKILAYAGMSPSTYQSGQLDNCYSHMEKRGSRYLRYALYNATKYVCHWDESFGTYLAKKRAEGKHYNVALSHATKKLVRTIYAMEKTGQSYSSAS

SEQ ID NO: 71012 - protein, 543 aa, unidentified
MSDSTLKPSIPEAAKDSISSTLSKDKAPIITVFEASYNSAVGIDVHLNKMALAYQRAVPESQDLIQDALTTKGTIEELNRAIDWIATKDPEVIIMESTGVYWVPLYLLLEERGFADKTFVLNAYNAKTALGKKSDASDAKHLAQMGRLGAFVGSFIPCKYIRDTRIYSRHINALKKDAVTNKNRLHKLLNMGGIKASTVFSDIRGVAARTILDAVMRGDDAESLKCVIADNCKRLKAQPDEISQAISHLDITAISPLYFDISTKLDQIESEIERYEDLLYKRLKPYYDSIELLTSIPGISQKTACTIISELGDDWSAFTNSKAFCSWVGLAPGNNESAGKRKKAGITKGNKYIRKVLIEAAQSVYRMKSGHLKSGFDRFYSRLHSYHKAVVAIAHKMLRIAYALMTKRELYKDPTLDCVATDDVSAELKLFEEPNMVLNLDDSQDMQSLAVSESADTKSQSDIIIDNSSNASDGDSLEVSSKQVTTAGNTSLPNEQKLSKVVAKPISALKQSVDEPITPKQGSLFSFALGLDQLFSAEPLGQT

SEQ ID NO: 71013 - protein, 330 aa, unidentified
MSWLGIDVSKDSLAVALQPGERKRPYEREVRNDAGGIARLQEWVQERGCELSRLTVVMEATGVYHERVAQALYEAGCNVIVANPKRVRDYAAGLGLLHKTDKVDARALARYGREKGPELVSWSPPPEEVRILRSLYDRLSAVQEDLQREVNRRDQAAISEEPVLVIESLDNSIKRLREECERLKRAIEDHFDQHPGLKAQRELLQSIPSIGPVSGDLLLCLLLAHRFHSARQAAAFCGLIPKAHQSGSSVRKASRLTKQGDGRLRAKLYMAAVVAIRHNPELRQVYRALLAAGKSKLCALGALMRRLVHIAYGVLKHETPYNPQFALRST

SEQ ID NO: 71014 - protein, 352 aa, unidentified
MVSVGGDIHKASGFAVVKDDGGRVVASFTFKNDRLGIGEFVDRLQAFRDVRVAVESSGNFWVKLYEALEARGFRVVLSNPARTKAIAEARIRSDRLDASTLADLLRAGLVAESYVPPKRVRDVRALLRYRVSLVRERTRVKNRVHALLDKHEVSVGFTDLFGARGRSWLRGLKLQGNDGLILKLALDEVDRLDGLIDEVSRVIARQAVEDPRVELLLGFKGIDYYTAMVVLYEVGDIDRFCSARKLVGWVGLCPSVHQSGEHCRRGGITKQGNKWVRWALVQAAHQAARHDPKLRRFFERVAARRGVQKAVVAVARKLAVSIYYVLKRGERYRGEDAGLRRRKVYRLRRMVS

SEQ ID NO: 71015 - protein, 359 aa, unidentified
MLTQSNKFDFNGQHFYVGLDVHLKSWKVSIMTEKLTLKTFSQDPRPELLHHYLVKNFPNGTYHTAYEAGFCGYWIHNKLTALGIDSIVVNPADIPTTDKEKDSKTDKRDSKKIAKCLRNGELKGIHVSSLKTLEDRCLVRMRGTLTKDLARNKNRIKSFLYFHGIEMPERFRPMSTHWSNRFMNWLRSIELEEYSAKKSLNLIIDESEHLRLIILDATKGIRKLSQSETYTNQVQLLQGIPGIGILTAMIILTEIESINRFDSFDKLCSFIGFIPTTHSSGEKEIIGEITHRGNNFLRSAIVESAWFAARMDMALNKNYHDYCRRMEPNKSIIRIARKLLNRIRYVLKNNHPYVYSVVK

SEQ ID NO: 71016 - protein, 314 aa, unidentified
MAEEKVYVGIDVSKAKLDMAVEPKEQIWQIDNTESGIKSLLRRLGTLNPTLIVVEATGGYEARLVEALCLANLPVARVNPGRVRKFAQGMNWLAKTDRIDARLLARFGEKANPRLTKLPSEQEKRLTALVKRRKQVLDMLVAEQNRLENADPDVLAYIQGSINMLKSQLDELDDTIQSHIHQTPDLKKRRDLLTTVPGVGKVTASTLTAQLPELGSCDRKQIAALVGVAPFSHDSGKMRGRRFIRGGRPPIRSVLYMAALSAIRFNPVIRAFYSRLISSGKPFKVALVACMRKLLTILNAMMRHHQVWNPCLSS

SEQ ID NO: 71017 - protein, 340 aa, unidentified
MKMYAGLDVGGKQTAICVMDEVGKIIWRGMADKYPDVIAARLKGFQEKLVKVGIESGPFTPHLHRSLVGLGFPMVCMDARRAADAIKSRRIKSDRADAWALAEMLRTGWFTAVHVKSAESHKIKTLLGARDQLVRVKRSLGNQVRGLLRPFGVRLPSRAGMKKFAEAAHQAVQADKLLRASISALLEALASIDAQIAKLDDELKALARRSEVTWRLMSAPSIGPITALAFIAAIEDPHRFRRTRDIGAYLGLTEKRYQSADTDVGLGISKQGDAMARHYLYEAANVLLTSVKKGSALRSWGLKLLKNIGPKRARVAVARKLAVLLGRMWKDGTHFEAMAA

SEQ ID NO: 71018 - protein, 453 aa, unidentified
MAARNARVSRKLGKSRAALTITHPNAAGIDIGSASHFVAVPPDRDDEPVREFRSFTVDLNAIADWLEACGVDTVAMESTGVYWIPLFELLESRGFTVLLVNARHVKNVSGRKSDVLDCQWLQQLMSYGLLSGAFRPAEQVCVLRALWRQRGMLLKSQARHVQHMQKALTQMNVQLANVISDVVGETGQKMLRAIVAGERDGQVLGAMKNARIHASVEEIAKSLQGNWRAEHLFALKQALDAFDFIGTQVAECDLEVEQQLQNLQAHTGEPAKGKKRGRARNAPKFDLRTQLFKMCGVDLTRIDGIDVTTALAVVSETGANLSRFPTVAHFASWMGLCPGTKITGGKVMSSKTKRCANRAAQALRLAAAALRTSQSALGAYFRRMCSRMDKPKAVTAAAHKLARLIYTMLTKGEDYTDQGQDYYEQRYRERVLRNLSQRAQKLGMQLVAAEQPT

SEQ ID NO: 71019 - protein, 339 aa, unidentified
MKRIFVAGDISKEKIDFCIYDGESFLASKVVKNSKSELSTFLKQVDTIFTDGKKENVYNECVFAFEYTGVYNNIVLKLLEKYNFKVALLYPGSIKAVVNFDRAKNDTIDAQKIAEFAYRFYDKLNFYSPLSNEMQELKALITERSALVKVKSQLISKKDDQNKFLPSNISMFLKKNNEKIEKELDEAINNIEVRILKVIKSDEKLKENFEIAISVPGIGPATAAVLIACTNNFNRFKNAKQLGCYSGVVPFQRSSGAYKGKNKVSPKANKQLKTLLHLGAVSVLNSKNIFGEFYNRKTGEGKNKMSVINSVRNKILKTVFACVTNKQKFKPDYKFQFAA

SEQ ID NO: 71020 - protein, 433 aa, unidentified
MKVLYERVAGIDVHKDMIKVAIRSPGDKPWTRKTEIFEFRTFYGVLQQMARELRKRGVTHVVMEASGVYTEPVYYALAEQDFTEVAVINPAHAKALRGHKTDAKDCARLAELFECGLLRGSYIPVPELREVRDLTRYRMKTVQARTSEIQRLGKALESAGIKLGSVASSITGTASTAMIEALIDGERRGGVLADLAIGRMRTAGKLADLSMALAGRFTDHHALLCRLHLDRIAVFDDAADGLDKRIAGKAARWQREQGLLTSVPGFGDVVAQAWLGEIGPAPHRHFASCEKLASWVTLCPGNNISARKRKHGRTGDAGTYIKPMLVQAAWAAIRVRGRLQARYNRLVRRFGGDKNPGAKKKAITAIAHTLLKIAYQVLKSGTPYQEPGADFYTRRESPEHKQAWLERQLQKLHPGCTVTITITPPEAALPPGA

SEQ ID NO: 71021 - protein, 372 aa, unidentified
MSETIVAYQSFIGVDLHKTTVTLVAVAPDGAVIGRLTINTRCREKIAAWLLALPRPSHLAVEAVGFVEWFIDAFRQRVDRIDIADATELSNRRGKRRKNDWRDALDVAQRLARGECPLGYIADDELMQLRKLGRHWRQLSKTQGFIKQCMRSITLAANLRGPKFDGASAHRWLLAQGKRLKPAQRQAFSDFTWILRLIEQLREPLRYNLVMAIRAERFAPLMRILQSVPGIGDVWGCMIAAEIGPFDRFPNADALEFWAGLTADLKQSAGRTQSGPITKAGSRTLRWALCQAALTLCHSDAKQEAIRQRLIRKTGGIKSKANVAMGRRLLRILYAMVRDNKPYEAGPSRRRNAAANKARAARRARKNGTEAA

SEQ ID NO: 71022 - protein, 315 aa, unidentified
MQTPLDIGADISKDYVIVACAKQSLPSCKLANKRAALLAWLKSLPAGSRIGMEATGTYHELLATLALRLGLVIYVLNAKDVHHYAKAIGQRGKTDRVDAALIARYVAQEHSHLHAWQPASPAQRQLQRLVRRRAKLTSARATLRSSLQTVPSLRSDLRTLLKHFDVLLAKLDAQARKLIEASEEREQAFRRLNTIPSVGNAVGIGLLAALERWPLPRADAFVAFVGLDPRPDDSGKKTGRRRLSKRGDPELRRLLYIAAMSATRTRAWTPLYQRALARGLSRIEALVTLARHIARTAWSIYTHKTQFDPVRLQNN

SEQ ID NO: 71023 - protein, 406 aa, unidentified
MNAVGIDVSKGKSTVAILRPGGEVIASPFEVSHDPRKLNELVTLIKSLDGDTKIVMEYTGNYYLPVALFLQKSGFFVSVVNPILIKDYSNKSLTVRKGKTDKKDSIKLAAFALDRWNELPLFSSRSDTRTLLKSFNRQYNQYVKLKVMLKNNLISILDQTFPGANTLFNTPARKADGHEKWIDFVLKFPHCECVSRKTCSAFSKCYLSWCGKNGYKFSGAKAKEIYEFACNCTPSLADSASAQALVSAAILQLNTLNETLASLQKEMDLLASSLPEYDTVMSFFGVGSVLGSQLIAEIGDVSRFPNKKALVGFAGIDAPPFQSGNFNPQSRSISKRGSAALRKTLFQIMAVILQNAPANEPVFLFMDKKRSERKHFYVYMMAGANKFLRIYYARVMECLNSLQVAA

SEQ ID NO: 71024 - protein, 340 aa, unidentified
MKFIGMDAHSKTCFFVVMNKSGKVIRRQRVNTSESNILDFVRSVKGPKSLVFEEGVMSHWLYLLLKDEVDNLMVCQPREHDGPKTDEIDATENADLYRVGRLKAVYHADNEYMNLRVLVSGYDDLLGVITREKNRYKALYRHVAIPTEGAKFYKDQELLTKLPTDTQNYVACTLFEQIDLLEKQRRGYEERFAANVKRFKEMKLLTSIPGIGPIRANQLVAIMVTPHRFEDKYHLYAYAKLTKHLRESDGKKYGMKRANGRPMLKSIFKSAVLGAMKSDTSFRRKYESMKADGADEYAAKGAVSRMIAGTVLAIWKSGKKYNDKYKEVAQRRNQKKTKGS

SEQ ID NO: 71025 - protein, 420 aa, unidentified
MRNAGIHANSLLEVRRMYNAVGIDVSKGKSTIAVLQPGGTVIRKPFDVSHTSQNLNELADYLSSLDGTTKIVMECTGRYHEPMVKALSEAGLFVSIVNPHLIKNFGNNSLRKVKSDPADARKIARYTLDNWTELRQYSGMDNTRTQLKTLNSQFSFFMKQKVAAKANLIALLDNTYPGVNKLFDSPTREDGSEKWVDYAYSFWHADCVRKIGLKAFTERYMSFCKKHHYIFQQDKPEKLFNASKELVAVFPKEKTYKLLIQQSIQQLNLASEHVERLRREMNELASTLPEYSTVMGIYGVGKTYGPQLIAEIGDVSRFTHREALTAFAGVDPGVDESGQHKSKSNRASKVGSARLRKTLFQIMTTLLQNAPEADPVYRFPDKKRSQGKPYYVYMTAGANKFLRIYYGKVKECLRNLEQTE

SEQ ID NO: 71026 - protein, 419 aa, unidentified
MSFKILKNNCCGLDVHKTWIFACIGITDSNKRTEYKQARFSSFTKGLQELCDWLVKYNCNDVCMESTGKYWIPVFNILEKNNIWVTLSHPKYTKPQKGNKTDRKDAKWICDLYMCGMVNASFIPPADIRELRDLVRYRFKLTCMITSEKNRAHNCLTVSNLKLDDVFSDIFGKSSRSITEQILQHPGETFDVTPFVDGRCKTPIEEIQAAVDGAISAEQAVKLRQCLNHIDELEVHKAEIEREIFRLSDKYEEILALIRTVPGFDKNPLTAIQVLSEIGGDMSVFPTAKNLVSWAGCCPRNDQSNRKIKSTRISRAGSYFKPVLVQVANALIKSKKHPEFTTRYRRIKARRGHKKAIIAICRMILTAIWHILTDLKSYTPEGFLESRPVNESKILTTSQALNLLKQRGYIIKDEAIPVS

SEQ ID NO: 71027 - protein, 422 aa, unidentified
MEEITEEAAELVARVAALDVGKASLVACVRVPHETSAGRRRQEVRTFATTTRSLLELQDWLVCQGVSLCVMEATSTYWKPPFYLLEDVTQCWVVNARDVKNVPGRPKTDRLDAVWLAKLAERGMLRASFVPPPWQRQLRDLCRYRRTLIQERTREKQRVEKLLEDTQIKLSVVISDIFGKSGRDMLEALIAGQRDPHVLARMARGTMRKKISVLQEALTGHFRDHHGYLLRMMLDRVDGLTAQIEALTGRIEEVIAPFARQVAQLDEITGVGPTGAQELIAEIGVDMTRFPTAGHLVSWAKYAPKARQSAGRSKPGTTGKGNPWLGATLGEAAISAARTKTFLGSRYHRLARRRGKQRALVAVGNSILTIAWHLLSNPDAHFTDLGPDWHDRLAPQRRKRQLIAELERLSGKKVLLQQETAA

SEQ ID NO: 71028 - protein, 430 aa, unidentified
MKSNTQNAKIEAVTENTLVVGIDVGSEFHYARAFDWRGIEFSRKPFKFSNTEPGFSEFKAWILHIQTEHDKDAVVPGMEPTGHYWFNLGKFLQDNGMKPVLVNPHHVKKSKELDDNNPTKNDRKDPKVIAGLIKDGRYSYPYLPDGVYADLRTASNLRFQMQSELTRIQNRISRWFSIYFPEYKDVYGKPDAKSGMMILKQAPLPEDIVALGVEGVNRIWREAKLKAVGLKRAKTLYEAAEHSIGSREGATAARLEIRMLLEDYESRAVRLDEIMTLIESLVKQIPMAEKLMEIKGVGIKTVSGFLAEVGDISRFDNPKQLQKLAGLAIKENSSGKHKGETTITKRGRKRLRYLLFEVAMSLVSKNTEFSQLHQYYTTRRINPLKKMQSLMAVACKLIRIFYTILTKQVDYNPQKMISDIRRPENYLQAA

SEQ ID NO: 71029 - protein, 412 aa, unidentified
MEVLYACCCGIDVHAKMLVACLMKAGRKEVRTFSTMTEDLLRLLDWLTQAGCTHVAIESTGVYWRPVFNILEGTLEVILTNARDAKGYKARKTDVIDAEWLADLLRHGLLKPSFIPPLPIRELRDLTRYRESLVREQTALANRIQKLSESANIKLGQVASDALGVSGKLMLRALAAGETDAEQMSHLAQRTLKRKQPQLQQALEGRFTPAQRWILAELLDQYDHVEAALQRVEARVRQEVENSTDPFVPEAVPLLDTIPGVGETVAQIIVAEIGVDMERFPTDHHLASWAGVCPGNNESAGKRKSGKTTKGSRYLRAALVQAAWAASHQKGTYLAAQYKRLVKRLGKKKALVAVGHSILVIAYHVLQTRTPYQELGSDYFERRNVDKQRKRLIRQLESLGVKVTVEEIKEAA

SEQ ID NO: 71030 - protein, 349 aa, unidentified
MLADQVDHVVGVDTHRDEHVLAVVVAPSGAVVAQRSVRASARGYAQALRFVEQYSNGRRVWAVEGVGHYGAGLARHLSSRGETVLEIGRGPRDEQRLRGKDDQLDAIRAARTALASRTLTLPRAGERREALRLLLLARRSAVDVRRDALVQLRSVIVTCPDRLREQLRQLPAGRLVVRCSRFRRSSACTLDELASRLVLRSLARRVEAATVEAAELEREIHAHVRALAPGLLEEAGVGPIVAAQLIVTWSHHGRVRSEAAFARLAGVAPIPASSGQTIRHRLSRGGDRQLNCALHTVILHRRQHDPTTKDYIARRLAEGKTTRDAVRSLKRYLARHLYRVLDSQAPHMA

SEQ ID NO: 71031 - protein, 346 aa, unidentified
MEHYAGIDVSLELSSVCVVDAQGKIVKEAKVASEPEAVVAFFEALGFAVKRIGLEAGPLSQWLHAGLKEAGFETVLLETRHVKAALSAMTVKTDRKDARGLAQLLRMGWFQQVHAKSMASQEVRALLVGRKQLLGRLIDVELSIRGILRGFGLKVGAVTRKGFEARIRELVTGQATLERIAEAMLSARAALKAEYEKLHKAVLAIVREDAVCRRLMTVPSVGPLVAITYKSAMDDPSRIAKSKAAGALFGLTPKKYQSGEKDVTGGITRTGDEMVRTALYEAANVLLSRITRFSKLKRWGMDVAKRRGSKRAKVALARKIAVILHRMWIDGTTYRWAEAKLIAAQA

SEQ ID NO: 71032 - protein, 367 aa, unidentified
MIVNEVAKNVEKIISIDTAKNSFQVLVVNQKTGKKKNTKVQRSKFVEYILKQGPCLIFMESCSASQHWARLFESFRFTVKLIAAQHVKAFLRNRRVKNDERDAEAIYKCDIQPDTKFVRIKTVEEQTVALLHTLRKAAVSQRVELSNRIRGILAEFGIVVARGRGSFNSEIEALFNECEKIHDVNLRVAISSLFEDYHRLEQREKELSEKIEALNKDNELVKIALTCPGVGSLTASAIVAEVGDASQFRNGREMAAWNGVVPSQHSTGGRSTLGGITKTGNRYLRTLLAQCACAVIQKASRHLEQGKDTHLDRFALRLKLNGKPVKKIMIAIANKIIRILWAMLTQRKTFENKANEISDTSAELQLA

SEQ ID NO: 71033 - protein, 343 aa, unidentified
MYYIGLDVHKKTISYCVKDAAGCVHQEGKIGSTRRELDAWIKTLPQPRTMAMEATIFTGWIYDHLLPHAEKVKVAHPLMLRAIAAAKKKNDRIDAGKIADCLRCDFLPECHMASTEIRNRRRILRYRGLVQRQAVQMKNHVSGLLMETGVSYNKLRLHRMGYFAELMATNEEVSENIRPRLSLCREHIDRSIMLDTALLRSLERDPLLADRLRRLRTIPGVGPITALTWALEVGDTSRFRSIKQAISYCGLCSAEKSSADKVMRTPISKQRNKHIQQVLVEAARLAPRYSEELALLYERERQRGNGNRATLAVARKMVALMLAVERRNTDFVPAGEFRRSAAA

SEQ ID NO: 71034 - protein, 309 aa, unidentified
MKQSVVYIGIDVAKTHLDVAWAGTFRRWPNERSGHAALVRWIKQSATPVQLICEASGGYEQALLESLEKSEVKVTLVQAVRVRQYARAAGILAKTDRIDAKVLAAFGSAMQPQPTSPLSAEQKRLRQYEAQRRHLSRILVAEENRLAQLSCTELRTLSRSLISKIKTQIKTIDRGISDLIAQDQTLCVKAQKLTAISGVGVRTAALLLAQMPELGQLNRRQAAALARLAPFNHDSGSVRGKRTIFGGRPALRSGLYMAALSAARFNPILSSFYQRLRAKGKPHKLALIAVMRKLLLALNQTLKTQPVIS

SEQ ID NO: 71035 - protein, 343 aa, unidentified
MEECNIVGIDLAKNVFQVHASDEVGRRLFSKKVSRGQLLKLMSTIGPCVVALEACASAHHWGRQIAKLGHEVKLIPPIYVKPFVKRQKNDAADAEAIVEAASRPTMRFVAVKSADQQAAGMAFKTRDLFVRQRTQLINALRGHLAEHGVVAPQGVAHLKRLRAALADETTGLPTAVVLHAGMILDQISVLQSRIEELEKEILAVSRKEELAVRLMTIPGVGPITAAALLAFAPDPATFRRGRDFSAWMGLTPRQHSSGGKERMGRTSKMGHRDLRRLLITGAMAVVRWAARKGAQAGSWLARMLDRKPKMLIAVALANRTGRIIWALMANGGTYNSHRDTAQA

SEQ ID NO: 71036 - protein, 355 aa, unidentified
MDQTKYIGMDVHKETISIAVLSSSGKRVMESVIETRASTVVQFVQGLRGDLHVTLEEGTWAAWLYDLLRPHVVEVLVCDPRQNALLKVGNKNDRIDAHKLAELLRSNLLRPVYHGEHGVRTLKELSRSYLTLSGDLARVMTRLKAVYRSWAIPCAGKRVYAPRYRALWLDKIAEAGVRRRAEFYYQQLDELGSLRQQVRRELLAESGKHKASKLLCQVPSIGPIRAALLIAILQTPHRFRTKRQLWAYGGLGIETHSSADHRYVDGQLRPSKRQASLRGLNRNHNHELKNIFKGAAVIAATKPGPFQEFYAALVAKGMRPEMARLTLARKIAAITWIVWKKGVSFDAQHLKPQTA

SEQ ID NO: 71037 - protein, 309 aa, unidentified
MKEELVYVGVDIAKAYLDAAIGNEKRRFANDALGHRQLINWIKQMPASVQVICEPSGGYERALVRALVAAQLKISLVPANRVRQFARAAGILAKTDRMDAKVLCAFGEAMQPGTISASQLEQEHLRELESQRRHLTHLLVMEQNRAARMSDLWVCKLNRRLITQIKKQIEQVDLLIQRQIKASRELSSKAEKLTAISGVGARTAALLLAQMPELGQLNRREVAALVGVAPFNRDSGRMRGKRAIYGARRSVRHGLYMAALVAARHNPILRAFYLRLRAAGKPAKVALTATMRKLLIVLNSSLKPDLTYA

SEQ ID NO: 71038 - protein, 457 aa, unidentified
MPQPKRSRSRASLSAVHPAAAAIDIGATMHVAAVGPDRDTEPVRTFRTFTDDLHRLADWFARCGVKTVAMESTGVYWIPVFEILEQRGFEVMVVNARDAKHVPGRKTDVSDAEWLQRLHEYGLLRPSFRPQAEIAGLRAYLRQRERLLDYAAAHIQHMQKALMQMNFQLHHVVSDITGVTGMNIIRAIVAGERDPNVLASHRERGCHASVETICQALVGNYREEHVFALSQAIELYDVYQTKVAACDKQIETILKRLKESATPPASKLLPPKHRSRQPNAPSFDARAALHAILGVDLTQIHGLGPYLALKLVAECGTNLTAWPTAKHFTSWLGLAPHNKISGGKVLSSKTRRTSNRAASLLRLAAVSVGRTDTALGAFYRRLAARAGKAKAITATARKIAVLFYNTLRHGMSYADPGATYYEERYRRRVLGNLQRRAKSLGYVLHQADRDPTQVAVS

SEQ ID NO: 71039 - protein, 312 aa, unidentified
MDAIYVGIDVSKDRLDVAVRPSGESFAVSRNGAGIDELIERLKSLSIKLVALEATGGFETVVAAGLAGASLPVVVVNPAQVRAFAQALGKRAKTDPIDAAVIAHFAEATKPQLRQFPDATTQLLADLVARRRQIVEMIAAESQRARHLTLPRLKKSIARLRKALEKELSELDADISDHVRGSPAWAEKEDLLASVPGIGPIIARTLIAELPELGSLDRRQIAALAGLAPWTRQSGKWRGKSFIGGGRASVRRALFMGAMVAARHNPTLKLFRDRLVAAGKNKLVAIVAVARKLLTILNAILRDKTPWQPKIA

SEQ ID NO: 71040 - protein, 343 aa, unidentified
MQIHSVGIDLGRTTFHLVALGAAGKVIVRKKFNQKQLLAYTANVPASLIGLEACSGAHFLGRAPRQRGHDVRLIPAQFVKPFVKSNKNDFVDAEAIAEAVERKNMRFVPIKTDDQLDLQAIHRVRDRLISRRTAVINQVRAFLLERGLVFAKTPAKLRAALPDILENADLDLTPQMRSLIDLLSKEWKTVEDQIEGLSLELERISAADPGCTRIRQIPGIGPIVATAIVAAIGNGAAFRKGRDFAAWLGVVPRQYSTGGKARLLGISKRGNVYLRKILIHGARAAVLRIKRDRAPIGAWLEALDARAPENVVVVAMANKLARIAWAVLSSGEDYRPMGNIVAA

SEQ ID NO: 71041 - protein, 466 aa, unidentified
MTADNKLWRNRKERKEWARRLRSEDPGLEVLHPHAAGIDVGNSAHYAAVRPDRDPEPVRRFECFTADLYCLAEWLQSCGVKTVALQSTGVYWIPLYEILEDRGFEVYLVNARHTKNLPGRKSDVQESQWLLKLHTYGLLNNSFQPPAEIRVLRTYWRQRAEHVSGAATCIQRMQKALTQMNLQLANVISDLSGLTGQAIVRAIIAGERNPQKLAELSHPRIEASREEIAKSLEGNWRPELVFVLQQEVEMYDTYQRRIAECDQQLQKHLASFGDTVLPQSPEAEPRERKAKPTKNAPRFDLGSELKRITGVDLTRIDGIDVMVAQTLLSEVGMDMSRWNTEAHFSSWLGLCPDNRISGDKLLGKGTRRVVNRAATALRLAARNLIRSRSYLGAQYRRLRTKLGAPKAITAMAHRLARLVYRMLKYGQRYVDKGTEYYENRYRQQQIHLLQKKAAKLGLQITVAVQS

SEQ ID NO: 71042 - protein, 337 aa, unidentified
MSEVSILAIDLAKNSFQVCGVKANGVVVFNRSVSRTRLLRLLSAQAPCIVAMEACATSHHWGRVARSHGHETRLIPAAYVKPFVKRQKNDHADAEAIAEAASRPSIRFVAVKSAEKQARAVAFRTHQCFVRQRTQLINALRGHLAEFGLVAPKGPASLKLLEAALAKPDVDLPGPVREMGGLYLQQIDQLTEIIEQLADDLESATKTDEELRRLCTVPGIGPVTAGAIAAFAPDLETFESGRNFAAWLGLVPRQHSTGGKTRLGAVSKMGQCDIRRLLIIGAMSVIRWVVRKGGSTNRWLASLVARKPRMVAAVALANKMARMIWAMTTKGENYRMA

SEQ ID NO: 71043 - protein, 343 aa, unidentified
MDKFNVIGLDTAKSIFHLVELHANGKELACRQLRRSQLLRRMANLKPTTIAMEACSSSHYWGRRFREMGHQVVLLPAQHIKGYLRGQKNDYNDARAIAEACLHGRIRSVQVKSVEQQDLQALHRSREQLKKSRNQLANQIRGFLRERGVIVAVGLAPLRNALPEILESPNEEVTVFIRELLARDYRRLKSLDEEIDWHDRQLRQQAKASDVCKRLCRIPGIGPVVSTAFANWVGDGQQFQRGRDASAALGLVPRQHTTGGKPKLGGISKRGDRYLRALLVHGARSVVKQSDRRTDSLSQWINRLKARHGVNKATVALANKITRIAWVVVAREENYRPAEALCS

SEQ ID NO: 71044 - protein, 322 aa, unidentified
MSLPGPLCVGIDVSKATLDIAASYAIEQFSVANDADGFDSIIAELRQHDVALVLMEATGGLEAAVACALQAEGFEIAVVNPRQARDFARAMGYLAKTDRIDARVLAQMAEVINRHPERERFIRALPDAERQVLSAMVVRRRQLIAMLVAERNRLYPAHPQSRKSINIIIKALKDELARIDKDMNNHIQNHFKELSERLSGVKGVGTMTAAALLAEVPELGSLSRRQISALVGVAPVNRDSGTMRGRRTIFGGRAGVRTTLYMATLVATRFNPVIKAFYTRLVAAGKPKKVALVACMRKLLTILNAMLRKNEEWNELYHHVAP

SEQ ID NO: 71045 - protein, 417 aa, unidentified
MKPIDEGGIGVWVGLDWADEEHAYGLRMSGSSEIETGEVKQTPEALASWINELRQRSGGGWVAIAVEQSRGALLYALMDYDFVLIYPINPKSLSSYRKAFYPSGSKDDPRDADLVLDFLLKHRERIRLWQPQSPEVRCLRLLCEQRRKLVDLRAELTNQWTANLKNYFPQALKWAGPLKGNKACDFLNRWPSLQILQRARPSTIRRFFKSHRGGGSEQLQLQLEEIKQARALTGDTAIVTACSLLTQSLAGQILQLNDSIQRFDAKIEELFNHHPDHFIFSSLPGSGKALGPRLLTTFGEDRDRFECAEEVQTVSGIAPLLRTSGKSRIVSYRWACPKFVRQGVHEFAALSRHWCPWAQAYYQMQISQGKDHHVAVRSLAFKWLRIIYRCWKNRVPYDDAIYMDSLKANNAPLLAFL

SEQ ID NO: 71046 - protein, 308 aa, unidentified
MNIKFLGVDLAKRVFQLHGINAEGEVVLKKRLNQKGLIEFIAKMPTCFIGMEACSTSHYWARKFKVLGHEVKLINPAFVKPYVKSNKNDEKDSEAICEAMTRPSMRFVQIKSIEQQDLQALHRIREQLISNRTALANQIRGLLSEYGIVLPQEIQNVRKLLPTVLDDASNELTNFSRSLFQELYVDFSYLDNRIKACDAKIAALFKSDERCQRIGDIPGVGNITATALISAIGDLNTFKNGRAFSAWIGLVPKQASSGQKQILKGISKRGNSYLRKLLIHGARSIVFRTKDKTDQRSLWIEQLKIGEE

SEQ ID NO: 71047 - protein, 361 aa, unidentified
MKKHATIPAGGATVGMDLGDKYHHVCVLDADARKIAQTRIAATPQSLDEAFAGLPALTVAIEAGTHSPWVSQRLEALGHHVLVGNPRKLRMISRNDRKSDVRDAELLARIARADPHLLYPIHHRGPQAQAHRAVLKSRDALVRMRTLLVNHARGLVKASGARLPSCSAQAFHKRVRDVVPEALRPALGPVLATIEDLTQRIRGMDHQIEALCEEAYPETQTLRTIHGVGIITALAFVLTLEEPERFARSRDVAVYLGLAPRRDQSGKSDKQLRISKAGDKFLRRLLISCAHYILGAHGADSDLRQWGLQLCARGGKNGRKRAVTAVARKLAVHMHALWVSGEIYEPLRKNTETQEGKSRVA

SEQ ID NO: 71048 - protein, 365 aa, unidentified
MNYVGIDIAKLTHFATCISSDGEIRLEPFKFLNDNNGFDFLSSKLNELEDRDIIIGLESTAHYGNNLLRYLVSKNYNVCILNPITTSSLRKQNIRKTKTDKVDALIIAKAIMLSDNLRFVSFNDLDLLELKSLGRFRQKTIKHRTRLKIQLTSYVDQVFPELQYFFKSGLHQKSVYAVLKEAPSPRAIASMHMTHLASLITKASHGHFNKDTAKNLRVLAQKSVGFSDSALSIQITHTIEQIPIMTIPGIGFINGGMIIGEIGDIHRFSKPNKLLAFAGLDPSVYQSGNFSAKSTRMSKRGSRVLRYALINAAHNVTKNNKTFKTYYENKISEGRSHYSALGHCAGKLVRVIFKILKDDIPFNLE

SEQ ID NO: 71049 - protein, 412 aa, unidentified
MEVMYARCAGLDVHKETVVACVRIADGGQVLRSVRTFATTTVSLIELSGWLEENGCTHVAMEATGVYWKPIWQVLADGSLELILANAAQVKNVPGRKTDVNDASWLSELLAHGLVRASFVPGPEMQKLRGLLRTRKQLVREKASHVQRLQKTLEEANIKLESVLTDVMGRSGRAMIQALIDGETDPAKLAALAHTKVRASEATLREALRGRVKRYHRFLLRLHLQQINALEAGIAEIDREVDAGLDCFRDAVKQLSTIPGVSDLSAHVILSEIGTDMSRFATAAHLRSWAGLSPRNDESAGKRRSTRLRRGAPWLKAMLVQCAWASTRRKTGYLYAQYVRLRARRGPKKAICAVAASILTAAYHMLKDGTMYADLGAGHFERRRPEAQARRLLKRLADLGFSVELKPVTAAS

SEQ ID NO: 71050 - protein, 423 aa, unidentified
MPVSTLYVGIDVSLKTNQVCPINFNQDVFFNEKFDNSPSDTERMIVKILDILNKNKDLNKVLFCMEATSVYHIHVSSLLACDPRLLAYGCKVYAENAKSIQKYKETFLDREKTDPEDAYLCADYARIGKCKDSHPVIGYQKIALQRLTRQRKHIAEQLGKEKQYLSSNLFLKFSALKVNPEDNPFSNAFGKTSSVMLTDFLSNEEIVKADLGDLVVKISEVSNNRISDKDEVARKLKRMAQHSYHLDSYASDSVSMAMASSFRLIETYQNELKKLDKEILRLIEGYDNKYCAILTSIKGVGNVYAAGIIAEIDDIHYFRNDEHLASYCGLRWKKNDSGNKRSDHTRQPNTCNTYLRYYIVEATGSILRFNDEYASYYCRKKSEVKVNSHKRALVLTSRKFVRLVYGMLRDHKLFDDHYLAHRS

SEQ ID NO: 71051 - protein, 337 aa, unidentified
MTMIGIDPHKATHTAVAVDDDENVIDELTLEASNDQAERLTGWADGLGKREWAVESANGLGYLVARQLVSCGETVFDVPPVLASRVRLMGSGRSQKSDPNDVRSIAALRSDRLRVVEPDDHVTVLRLLVKRHRDMARLRNKHCSRLHALLLEFEAGGIGVKISVTNASELLDRIDVTGEASRYRVLVAREVVYDIARLDTTLRASKKRISEAVTASGTSVTNIVGVGPIGAATIIGYTKDITPLPTRGHYATYNATAPIEVSSAGNTRHRLNLRGNRILNHAIHIAAVTQLRHDTNGRGYFDKKVAEGKTPKEAIRALKRRISDAVYRRLIADSDRQ

SEQ ID NO: 71052 - protein, 258 aa, unidentified
MADTHVGIDVAKGKFDVALLRRDDRYRHRTFGNNSTGFARLQAWLKRQDASSAHTCMEATGTYGNALASHLHASETPVSMVNPACIKAFAQSELLRTKTDRVDAALIARFCRAMKPGLWQPPAPEIAELQALVRRLESVQQMLVQEKNRLSAPEISASVRRSLMRIVEALEAEMEGIRQLIADHVEEHPELEHKRDLLASITGIGKATANVLLSEMAGTSFTNARQLAAYAGLAPQARESGSSVRGKSRISKRQRATA

SEQ ID NO: 71053 - protein, 397 aa, unidentified
MIAVGIDVSKAKSTVAVLNSDGSIRAKPFTMHHTLSDMDAMVKYLNDLDESFTILMEYTGHYHYPVLKKLQEEGFPVCLVNPYQMKKYGDVEIHKAKTDKKDALRIAKYALEKSYMLTPYTSLEQKYEDLKFLSRQYNQRISMVSYTKTQLTNLLDETMPGITSLLKLKSRKPNECALLLFIKKYGSFDRVKAMGKSRFLSSYATLMKKSHDRYAPQKSLSIYELACDSITTRGDNDYIIAAQNQLVDLLATVQNAADEEIAQMQNIAETIPEYRILRAMNGVGDRLGPIILAEIGDIRRFHSAKALNSYAGNDAPPYQSGQFESRNRHISKRGSSALRKACFEVMQALKLTKPQDDPVYLFILKKEQEGKPYNVAKMAGVNKFLRIYYARAMELYK

SEQ ID NO: 71054 - protein, 329 aa, unidentified
MSNLSKKVIGVDVGSSFLTVSYKNTQDVECIVNIANNQRSILSFLKKISCEQYHLVIEATGNYSSRILHLSLSHGFTSSLINCMSVKHFARMKNIISKTDSEDARLIRHYGELFSPECYQPKNIEIEYLDQELKLLNDLEEEKRRYSVKLKALRFNPHLNPDTEKHYEKRLKQLEKEIKEVELRLPALQDEEFKEIKNLIQSVSGIGEKTTLQLMAATSGFKNFDSAKSLVKYFGLAPRIYQSGRKSYSPGKCRTSKTHIRSLLYVCSWTAIKHNAPCKELYLRLLGKGKPKKLALIAVCNKLLRICFGVVKNKTAYQADYQKNLKILT

SEQ ID NO: 71055 - protein, 447 aa, unidentified
MPQPILAVGVDPAKRLHRAVAVLFPDQVILDVALPNACDAVANLDDRLTELANQHGAELVYGLEDHRRYGRLFCQVLTERGRELRVVNPLWTSRQRAFYGQDKDDAIDGRSIAAVVLRRHHDLPLATDFGEVAQAVREAERSLQDLDKARTRLINRLHLQLSDTYTATYEGFFGKLRSPLALRFFRHFPLPQDLVGHNVEMLASLLLDLAGGKVGPHKGANRLIAMRSKAQTILESSATMRARPRSLALQLKAELIRQLCDELLANHDRVIRLNRMLRQQLLPATGQTITTITGISTTLAAAIIGETGSITRFRSPAAFAVYNGTAPARASSGGRDRHRARHDCNHRLKRAFYLAARAAVRHDPIAKTYHQCCTSRGLDYCEALKRVARRMSDLVYVLLKSGKAYDRLIVENAIEQRREQAAHAGSRRANKALSAPDQINSNAPLSQ

SEQ ID NO: 71056 - protein, 337 aa, unidentified
MEYFGGLDVSMTQTHVCVMNRDGAVVHEVKVPSMPADIAAALTQAPPCERIVFETGRMAPMLYHGLSQLGLPIVCIESRQAYQALKSLATHKTDRNDARGLAHLARTGFFKPVHVKSLPAHALRSLIIARKKLVGQRVTLENQIRGLAVVFGVRLPRALTAAFVRQALRASEGITGLSAAMRGLIAARTAVLAAVAAIDADIRQLVRASAACRQLMTIPGVGQLTALAFTAAIDDPGRFRRSRDIGPYLGLVPRRYQSGEVDYSGSISKCGDRRVRTLLYEAANVMLTRYKGPLKLKDWAFAIAKRSTMRKARIALARRLAIIMHAMLRHGTEFKPA

SEQ ID NO: 71057 - protein, 359 aa, unidentified
MRIIGCDLHTRQQTLAILDTATGEVVKATLKREGHYVREFYSMLPRPVRVGIEATGSMQWFVNLMEELGIECLVGHPATIRAAEPRKQKHDRRDADLLLSLLVQGRFPAIWLPTKELLDLRALLRHRHQWVCLRVKIQNALQAIALANGLRRGPSLWTQAGQHAIASLPLSPHAAYRRSELQAMYVKFEEEIENLNQRVEQQACERSGARLLMTHPGVGPITALATEVFLGDPARFADSKELASYVGMIPREHSSAGRQRLGGLSKQGNPLLRFLWSEAAIHAVRRDPELKHFYRRKLIQKGLGKARAAVARKLGIRMWIMLRDQVEYNEFCRRGQMQQKRGDACAGMPAARYGAKVTG

SEQ ID NO: 71058 - protein, 309 aa, unidentified
MEIVVGIDVSKERLDVAILPQGEVFAVGNDHAGIDELVARLKGIGVDAIALEATGGFEMLAVAGLSAAGLTVLVVNPAQVRAYAHAIGRRAKTDPIDAAVIAAFVLATKPEIRPLRDAETQALSELVARRRQIVQMTVAEENRLRMALAKQAQKSIKRLLKALRRELESLDADLDSHIRKSPVWRVREALLTSVPGVGATTARTLLAELPELGSLDRRQIASLAGLAPWTRQSGKWKGKSFIGGGRGKVRAVLFMAALVASRYNPDLKAFRDRLVAAGKPKIVATVATMRKLLTILNAIIRDGRPWQNA

SEQ ID NO: 71059 - protein, 370 aa, unidentified
MKETITSFVGLDIHKDSIAIAVAEAGRSAPRFVGTTPSEMASLCKALTRCAKRDNTLLVYEAGPCGYGWARHLSRQGWRCEVISPAHITRKAAEQRSKTDRLDAVLLARESRAGNLVRVGVPDERDEAIRDLSRAREDASGARLRARLQLKAMLLRHGRAYQGKTSWTAAHQRTLGTIKFAHLAQQIAFDEYRQAVRDAHERLERLTQALREQCEHWRMKGVVRALMCLRGVDFIAAITLIAELGDLSRFAHPKALMKYLGLVPSEYSSGNTRRLGPITKTGNKHARRILVEAAWTYRFNPRVSRPIEVRQEGQPKAIREIAWRAQLRLAYRFRKLNAGRKMTQNKCCVAVARELAGFIWDIARHVKIPA

SEQ ID NO: 71060 - protein, 388 aa, unidentified
MPRFMDAFHTPHPYTENAMMTSDPSGFQSFVGVDLHKCTVSLAAVDPAGKILARLTCSTKCIDRIASFLAALPKPVHMAVEAVTFAEWFIDRFGPCVDKTDIAHATELANLRGKRRKNDRNDAMDVALRLARGQCPLGWIADEPTAQLRKLGRHWRSLSCTLGRAKHGIASMLNAANLAGPRLEAAAMHKWFLADGHLLKDVQQRAFADLLEIIGLIERQRAMLRLRIIQANRHQKFTAGIELLRSVPGIDQIWACIILAEVGDFSRFPNADALEFWSGLTADLKESAGRTASGNITKAGSATLRWALGKAALTLCRSDGRQEKLRQRLIVRVGKPKANVAMARRLLRTLYAMFRDGTAYRIGEPTHPTAAANAARLNKRSNPRNQAA

SEQ ID NO: 71061 - protein, 443 aa, unidentified
MTRKNQKRFEVIHPDCAAVDVGGGEHLAAVDPTKCADPVKRFSTFTDDLHAMADWFESMGVKMVAMEATGVYWIPLFEILDRRGFKVYLVNSRATRQITGRKSDVLDCQWILQLMTHGLLRGAFRPSDEVCSLRSLVRQRGNKVRDQAKALNRMQKALVQMNIQLAQVISNIAGVTGMSILRAIVEGERDPEVLAMLRDKRVKADQATVARSLRGNWRAEHLHALSQELAAYDFLEKQIGECDQAIAHALERLPVLQADVVPPSKTLRNPHRSNEQQLILHRALNKVMGVDLTAIPTIGIDTALVLASELGADLSRFPTSQHFCSWLGLAPPTRISGGKPLPGKTVKVINRAAQALKQAASIARNDKSFIGASHRARLTRMDTCCAIKATAHQLARLIYAMLTKGQPYVEKGIEEFEERSRDRQLRALERKARKLGLQLVKAA

SEQ ID NO: 71062 - protein, 431 aa, unidentified
MNTQQFEVIRPKCAGLDVHKKSVVAAVCTSDPVTLTASYKTKVFNTTNSDIAALRDWLLAQDCRDVCMESTGKYWIPIFNILEPHMHVVLTHPKYVKAIKGKKTDKRDAKWIANLFRFDIVKASFIPPADIRALRELSRYRLKLSYMRTAEKNRYQNSMTISRIRIDCVLTDPFCLSATRIMDYLLSDEPFDEETCRSLIDRRVKASKDEVMDAVHGYHILEEQKFKMTHAKAHMDFINRTIGEIETELFLRSRQYDCQVRRIATVPGITELSALFILSEIGADMSVFESDRHLCSWAGLTPANNESASKKKSTRCSKAGQYLKPLLIQCALAAVRSRKEPYFAIKYQRLSKRRGKKKAIIAIARMMLTSIYHILSKGESFHPNDYEATINPPKQKPVILTIENTLQFLREQGADPESLKLIQQQCAAQVG

SEQ ID NO: 71063 - protein, 378 aa, unidentified
MKKNTIARLRPFSNRKGQQKPRTTRQRMTVGLDLGDRSSSYCILDEAGEKASEDRVPTTKPALTAVFGKMAPCRIALEVGTHSPWVSRHLSAMGHEVIVANAHRVKLITQSVKKNDRIDAERLARLARVDPKLLSPIRHRGAQAQADLALIRARAGLVDVRTTLINTARGLTKPMGERLKKCDADYVNESLAEGLSAETQQAIRPLLKAVEEVTKQIQVYEEKIQEIGKRHPEMKLLKQVHGVGTLIALTYILTIEDAQRFAHSRDVGPYLGMTRKQRDSGNSQPELRISKAGDQLLRRLLVQGAHCILRRGAPDSDLRSWGLGLQQGDGKKSNSKRRKKTATIAVARKLAVLLHRLWVTGEVYDPHYQRKAASQTAA

SEQ ID NO: 71064 - protein, 392 aa, unidentified
MKITTLGIDLAKNIFRVHGCDARGKAVVSKALTRQQLTIFMAQLPPCLVGIEACPTSNYWAREIQKHSHQVRLMAPRFVKPYVKANKNDTADAEAICEAVRRPTMRFVAVKSIAQQDVQAVHRIRAQLVKTRIALSNQVRGLLAEYGIVIGKGFAPLRRALPAILENREQRLSGLLLELIAEMSERLKFMEQRLHDYDLRVRRLLRQDERCQRLAEVPGIGELTATALVAAVGNAREFRSGRELAAYLGLVPKHRASGGKTVMLGISKRGDTYLRTLPIHGARAALRINSRWRGAHGAWAEGLKARRGPNIAAVALANKNARVAWKLLSSGEHYRPFPPRPNQSADRGTRAPRAPLGQQTGRRGAVRVVADPKPAASLPPSRPVRGRAEKPL

SEQ ID NO: 71065 - protein, 391 aa, unidentified
MSQNFFIDPSRSLTTLEQDSTIIAVIEMSQTKWLVAAVVPGVERQPLKKLDADKEALLKLLQRWRNEANRAGRDIKRIVVAYEAGRDGFWLARWLLGRDVETYVIHPTSIAVSREHRRAKTDRLDTELLMRAFLGWLRGERRHCSMAAIPTIEEEDARRPNRERKNLVTEQTRIVNQVKAIFARFGIRTLRPTERKVEERLEAVRTAEGAPLPENTRAELRRHLARLRVVREQVHAVEQERLRKLAAAPATDKGSNAMVRLIARVLGVGVETADMLVNEIFSRHWRDRRAVARYAGLTGSPDESGSRRRERGLARAGNARVRCGMIQLAWRFLRFQKASGLAQWFAARTADGRGGTRKTMIVALARKLLIALWRLVTGGEVPQGVVLRPAS

SEQ ID NO: 71066 - protein, 408 aa, unidentified
MQVTFGIDVSKSNSTVCELIGESKNELTITNDRPGFIQLLHELAAFSKHPQIIFEATGVYSRRLQAFLEDYGYEYIVLNPLKAKKEMNMGLRHNKTDKTDAYHLALIQRLYRHPVNQSESQTYKQLNSLSRFYNQLTADLVMAKNRLHQALQSTFPEIENLFSIARGKNYWQIVARYPHCDLVRKDDKKQIINWLMKLKGIAFNHAQRTTDKLIELAHLAYPVVSCSDIEVQQAQYYARRLLNLSNQRQRIITKMVKLAKTLPNHDLENLESIPGFAQTTAVRVLAELGDLRRFSNPNKINAFIGIDPGRYQSGEMDSNLSITKHGNAVARKLLYRAIGQIDNAAKTNPCHIADYYESKKLSSQTKGFKKIAIASIHKLIRTIYALIINDQPYDYNVATHNQKDFSRN

SEQ ID NO: 71067 - protein, 388 aa, unidentified
MFKKFIGIDVSKSSFNYCVIDSQQHTVEKGVCEMNVEGFQMFKDVVKRNDNAVIALESTGSYHVNILSFIASFKKEVCLINPVLIKKFIQTISLRKTKTDEIDANLIAKFIFFHYAQSNYFTPSNMDEIVALARVRENISKEVAKMKTRLKQDLNTTFPELPASYNIFTDTILNLIENFPTIESIRNAKITKIKGVMKNKRGRNSSFDAHDIKELAKNSVSKNNGIYGEIIRHDATTLKFLLEELDKITTRFIKEIKERKEQDMEILTSVKGISDVTAAHFIAEIKDIARFDNRNKLIAFAGTDPAVKQSGTSLHKNGRITKKGSKALRRVIYLMAMGVMKYTDHFRIYYDKKRAEGMQHRKAMIALCNKLLRVLYALLSKKEVYVMK

SEQ ID NO: 71068 - protein, 333 aa, unidentified
MQNFYFIGIDVSKKKLDICVMSNSKVLKEEQVSNHPQAIATVIAGIKEELSMSNDSLIICAEHTGQYTYPLICACKSAGSKLWLENASQIKYCSGVTRGKNDKVDARRIAVYAMRFFDKAKPYQRPTEELMRLKQLEAERSLYLTDLAKYKAQLSDQEGFMEDKIFKRKAKRLKEMIKSLEKTLKEIAQEMADVIDSSEELSRQMRLLKSVEGVGPVVAMNMIIATEAFTRFDNPRQFNCYVGVAPFAYTSGSSQHSRNRVSQRAVKYIKCLLHMAAVAIAHKKTGDLKTYFERKVAEGKNKMTVLNAVRAKLVARMFAVIRNNRVYQPILSV

SEQ ID NO: 71069 - protein, 347 aa, unidentified
MRFYNEQHTYYCGIDLHARSMYVCILDAAGTVLVHKKLGVNPPEFLHIIAPYREGVVVAVECIFTWYWLADLCTREKIPFVLGHALYMKAIHGGKAKNDKIDAHKIAVLLRGAMMPVAYAYPAGMRATRDLLRRRCHFMRKRAEILSHIQNTTSQYNLPDIGRKIAYKGNREGVVERFPDPQVQQSIAVDLALIDRYDQLLGELELTITRTAKVDDVQTYNCLRSVPGIGKIVALVILYEIHDIRRFARVQDLVSYCRLVKCSKISDGKHYGYGGKKIGNPHLKWAFSEAAGLFLRCNVPGRRCFAKLERKHGKAKALSVLAHKLARGVYYMPTLNQTFDLSKFVRA

SEQ ID NO: 71070 - protein, 348 aa, unidentified
MSKHSVQGGDIAGLLRRFAQLKEKARARTGRDFPIIVIQEAGLDGFWIHRVLQSQGIESHVVDAASILTSRRRRRAKTDRIDGETLVRTLMAFKRGEPRVCSMARAPTPQEEDRRRVCRERRTLVGERVQHVNRIKGLLFAQGVFGYEPLRKGRRDRLEDLRTGDGRPLPVHLKAQIIRELDRLEVLLGQLKTVEAERNALLKPATGEVASPAAMLAQLKGIGPETAAVLWSEGLFRQFDNRRHVAAYAGLAPTPWQSGSIDHEQGVSKAGNPRLRTTMVELAWLWLKNQPTSALSLWFHERVRRLGGRMRKTTIVALARKLLIALWRYTTAGVVIEGAVMKAAPATI

SEQ ID NO: 71071 - protein, 391 aa, unidentified
MLGPDITAKFLPRDYDIFAGLDVDKKHIDATFSDHAQGMKSMKIPYSADHLLAYTRRHFPGKRVAFAYEAGPTGYGLYDQLTAAGHPCLVVAPSLVPTAPGQRVKTNRLDSKKISTTLRGGELKSIYVPTGPFRALRHLVQLRDTFVRQAVAAQVRIKALLLFENIAFPDPHGRWSVAAWTALRTLDCGPSIRFKIDRLLLAAEFAQEQTRQTTRELQRLCQSEPTLAAMRDLLLSVPGIGRIIATHLMARLGDGRFLRNGRQLPGFFGLVPCEDSTGDTVNRGSITRAGDRRLRAKLIQAAWVAIRQDDGLYEFYTRIYRRNPRPIAAQKAITAVANKLCKRIACILKERRPYVVREASRTAIKEETATPQGETRTPAETRALSGPCVSS

SEQ ID NO: 71072 - protein, 361 aa, unidentified
MAKAKTLVGLDVHAAKVVAAILDQETGELRFARLGGESEPVISLCRSLPAPVRATYEAGPTGYGLARGLAAAEVDCLVAAPGKIPRGATDRVKTDRRDAEHLVRLLLAGKLSPVRVRGPPEEAMRDLVRAREDLRMDLMRARHRLGKLLLRHEIRFEGPGNNWTKRHREWLARISFDDPATEATFEDYRGGVEALLHRRSELDRQIEGLVPTSPWATEVGRLRCLRGVDTLTAVGLCAEIGDFARFGKAGQLMSYLGLVPSEHSSGESRRLGSITKSGSRHGRRLLVEAAWHYRNQPRVGREIERRQQGQPAAAVAVAWSAQRRLHRTHSRMRRRNKRATVTTVAVARELAGFCWAIAQIE

SEQ ID NO: 71073 - protein, 317 aa, unidentified
MKRSEISTKSAGIDVSKATLDVALASGEEQLRTANSAAGFADLAAWLAGHAVRRVGLEASGGYERAVAEHLRNAGFEVVVHQPAEIRAFAKFKRIRAKNDRIDAKVIALATAQVEGVRAANDPRLVELAEWFTAYEQAADQVAQMKTCLEQVTIAELRLGKREQIRLAQLWKAQLLREILKRIRACPELTRRYALLQSLPGCGPVVAACLVIRMPELGSLQRGRAASLIGVAPWDRDTGQSRGVRRIGGGRGRPRRLLYIASLAASRFDPGFRAFVQRLKAAGKEAKVALTALMRKLIEAANLILARGQPWVPSRLP

SEQ ID NO: 71074 - protein, 353 aa, unidentified
MSQVTTIGLDIAKSIFQVHGVDAAGQSVLRQRLSRSRVLEFFGKLPRCLVGLEACASSHYWARELIRLGHEVKLMPAQYVKPYVKRGKNDAADAEAICEAVVRPTMRFVGVKTTEQQSIMMLHRVRRILMRQRTQLSNALRSHLAEFGIVSPIGREGLARLLKIVADTDDRRVPAEARAPLEMLAAQLEGVKAKILENDRRIIASARATEVGRRLLEVPGIGPVLASAFVASVADPAIFKSGRDLAAWIGLVPRQNSSGGKERLGGITKAGNGYLRQMLMVGAMAVIRYAQRNSTRRPWLVQLMGRRPAKVAAIALANKTARTVWALMTSGERYRDPQAIQAAVSANGMETPD

SEQ ID NO: 71075 - protein, 353 aa, unidentified
MKYVGLDWAYRQAQWCALDPGGELAGEGRFAADRDGLARLVLELGDEVTACLEMMSGALWVRDQLVDCGWQVEVADARKVKTVAPLAAKTDKVDARLLAELSRRQLVPALWLPSLDERALRERLRRRMHLVRLRTSAKGRIFGLQTQWGVRVSLARLRRADGLTLLERAGVPEVWRRSVGECLALIDFLDARLEPLDAELRPFAKADPRAVLLDTIPGIAQLLALTIAVEVGEISRFASPEKLVSYGRLAPRVRQSGQARPRSGPLSKSGSRLLGWAAVEAAQQAWRESNPWHGLYVDVSGRSGNHNSAKAAVARKILIAAWHMLSRNEPFNPAPRSTRGDSVPASSRLALAA

SEQ ID NO: 71076 - protein, 597 aa, unidentified
MSNPASFDRIGVGIDTARYGHRVSFLRPDRRPAAKPLTVMENRAGYQSLHERLNELHERNPDAKFYVRIDAAGQYAVNLEMFLRGLNLPMTISVGEPKRNKDYQKAHFAKRTTDDTESQAMARFAVVELPDATPALSAPMILLREVAARLQSKVKQTTQAINRLHNLLARVFPELATLTDDIAAGWVLWLLQMYPTAERIGGAHLASLEKIPYLSSEQAQAVHQAAKQSVASLRGDLAEALVRDLVSQLRQCQKAEHQLRRLLITAFADLPASPHLQVLTIPGIGEATAAALVAKIGDIDRFATADHLVSYFGVFPEESSSGVDKHGKPLPAGTLVMSRKGNDLVRFYLWNAARSGIQCNPAIRALYRRLRSRGKRGDVAMGHCMRKLLHLVYAVWKTNRPFDEKHFPWEGASDNQSSPSTPPAGDAAVSTDEKAVGHKRDLPAEQVVTTATPTVDLPPRRVKPAPHRATDRRPKVDFEYLRNQLTMQRVLERLGIFTAMRGRGQQRRGPCPVHSQPGGMDRTFSVHLGKNICQCFHSECALKGNVLDLWGAIHRLPLYEAALSLAETFQLARNREEEPVHARSSSRAPTERGKEEQ

SEQ ID NO: 71077 - protein, 343 aa, unidentified
MKLSRIGIDLAKNVFQLHGVDRHEKAVWKRRLKRDQWLKAVFNQAEPGCEIGMEACAGAHHWARELESRGYIVKLIAPQFVKPYVKSNKNDANDAEAICEAMSRPHMRFVTVKSVEQQDIQATHRIRSELMTQRTAKSNQIRGLVTEYGLVAPLTLRALRAAIPCWLEDAENGLTDHFRSLLHGLWSDLSALDDRVLELDQTILKIANSNEITRRLQQLRGVGPMVATALIATVGDAQQYHKGRQMAAAIGLTPRQHSSGGKNRLLGISKRGDVYLRSLLVHGARAVVAQAKHRDDRLSRWVTGIAQRRHPNVAAVALANKTARMAWAMLRNETDYDPDFATS

SEQ ID NO: 71078 - protein, 380 aa, unidentified
MTVTPTSPVVCPVALELSRSTWLVGVLPPDRSKVKSFAVRGGDAQSLLERLRAIADQLAVALGRGIELKVGFEAGFDGFWLARFLLQHGIDTVVLDSSSFLVSRRGRRVKTDRIDVEAIAYILRAHLAGDPTVCRLVRIPTPEEEDAKRLSRERTRLASEKTRHVNRIRGLLALHGIRDIRGLCRGKWRAQVDALTTGDGRPLGRFVRAEIAREFERLHLVLSQMKQLEAERHAILQTPDSPFPETHKVHTLKQLAGIGELSATLLVAEVFHRQFANRRHLASYLGLAPSPYASGASHRDQGISKAGNKPARVLLVEIAWIWLRHQPASALANWYRHSFADRGARGRKVGIVALARKLVIALWHFVEHGVIPDGAILNQH

SEQ ID NO: 71079 - protein, 318 aa, unidentified
MTYTQQQTALYVGIDGSKETLAVATYPTHQVKVIPNDADHCEALADELAQQSVQFVLLEGSGGFEKLIVRALQQAGVPMAIVPPQRARYFAKSLRGNLKTDRVDARLLARFASCYLALEATEVPAVQAQLKELWARREQLVQMLESEKKRVQVATHPLVRASLERTIAGLHAELAQIEAAIEALVAPDEALAQKAALLQRVVGVGWVVASGLLAELPELGQVSHKVIAALAGLAPVRRESGRWRGSARIGGGRCRVRRLLYLAAVVAVSHDARWKAVYQALLAKGKAKKVALCAVARRILVVMNAMVRDGRAYERKRE

SEQ ID NO: 71080 - protein, 394 aa, unidentified
MKLIGIDIGKNKHFFCIMDQQTGEIISQPISFSNDKEGFDFLVQKIKSYPKDSILIGMEDTGHYHFALLKYLLDLQYTVALINPKTTDFNRKMQGGITKNDKLDTINICDVLDTPERKKQYRITKVNSFDLYEQKQLTRHHHSLKEEENVYKNRLQKCIDIVFPEFNKLFNSKYGIVYMNILKMFGSAENIANTDIRTIRKCFEIEGRGNRISLTPERLKECARSSIGISSSAEVIQIKHLTAQIELIEEQLTEIDKKIEEFSIQNNSPILSIPGISHFSGTSILAELGDISNYSKPSQIIKFAGVAPLHYESSQFNAQHTSITKKGSKYLRKTLYQIILPVIRHNQVFYKYYQLKISQGKGHRCAQGHCVRKLLRIIYHLLKTNQQFDHQLLR

SEQ ID NO: 71081 - protein, 341 aa, unidentified
MGQASTIRLDIAKWVFQAHGADATGRVVFRKRLVRAKVLEFFAGQPPCLVALEACGGAHYWARELGKLGHTVRLIPPAYVKPFVKRQKNDVADAEAICEAAQRPGMRFVPVKDEAQQANAVVFRARDLLVRQRTQCINALRGHLAEYGHVVPQGPAHVDSLVALVEDPKSSVPESARGILQVLIRMLNALEEQLKELDGEIARRAKADPVARRLMTIPGIGPIAATAITALVPAPEGFRAGRDFAAWLGLTPLQKSTGGKHKLGAISKMGERTIRRLLILGASAVVRWASRRGAAAGSWLARMLARKPRMLVTTALANKMARIVWALLVKGGTYRAPAVAA

SEQ ID NO: 71082 - protein, 354 aa, unidentified
MQNDRQSSETVILGVDTHLDIHVGAVISQAGKLLGTHIIQTNQAGYLELLDWARSFGSLERAGIEGTGTYGAALTRYLIKNSIYVVEVNRPDRSKRRLEGKSDPLDAENAARTVLSGSSKAIPKMQSGACEALRIISVARRSAVKACTQAINQLRALLVSAPQDVRDKLRKSKPHECVTACINSEVSEHSPLRIALCSTLRSLAKRWMALTEELNELDESLDKLTRKYASNLRSQFGVGPQTAATLLAVAGDNPERLKNEAALASLCGVNPLPASSGKTVRHRLNRGGSREANNALWTIALVRMRSDPRTRIYVDRRTGEGLSTKEILRCLKRYIVRELYPLILSDLAYANRRS

SEQ ID NO: 71083 - protein, 340 aa, unidentified
MDKHDFSGIEVSAGELIVAMEREEGTIRLECFANDASGHQAVLRFLRGAGHTVRACMESTGVYGLDLALVLARAGIEVMVANPRAARHFATAMMQRSKNDRLDARVLLEFARRMPFQAWTPPHPVVLQLHALSRRLEALKDTQAAEQNRLHAARATDTTPAAVRRDLERSLRSLRRAIVRLSVEAVKIIRQDSDLQLRFDLLLSAKGIGETSAIALLAELAVAPQDLDVRQLVAYAGLDPREHSSGSSVHKKPRISKHGNVHLRHALYMPALVALRHQPNLRAFYEHLRARGKARMVALVAVMRKLLHAIFGMFKHQTAFDGNKVFALPTPEISTTEAAA

SEQ ID NO: 71084 - protein, 356 aa, unidentified
METIAPADVIVGVDTHKHIHAAVALNGLGARLGTTSIPVSPKGYRELEVWARTFGCVRAFGIEGTGSYGAGLSRALVAQGHTVVEVNRPNRQLRHQQGKSDPLDAEGAARSVLAGQATACPKSGTSAVEMIRQLKVVRDTAVKSRTRAMITLKTLIVNAPAALREQLDRLTGRVALVRHLAALGPGPLTSTTASTKVALKALARLWLMLDAEIKEHDTALDALTDTCAPGLKAAFGIATGTVAEMLILVGDNPERIRSEAAFAKLCGACPVPASSGKTSRHRLNRGGNRQANAALYRVVIVRLRRLPPTLAYLSKRLAEGLTKREIIRCLKRFVAREVYTHLCGRLRAASVGPAPA

SEQ ID NO: 71085 - protein, 315 aa, unidentified
MANLKKSKTIINVGVDVGKHTLDICIHEKQLYWQEDNTIEGITRILKRLSHYQVERLVVEATGRYEFELAQAAYSKGIAVCIAKPLSVRKYAGAVDQLAKTDRIDAGIIAQYAAVIQPRVTPQKSKNLIAIKNLITRRRQLVNLRTQEMNRKGIMGKDLSVSIKRIIGHIDTEIKRIEKRLSNHVKDQAEWSEKQSIVKSMPGVGDTLTYTLLADLPELGELTNREISSLVGVAPINRDSGRLRGKRRIQGGRAAIRTVLYMATLSATQCNPVIKAFYTKLVAQGKHKKMAITACMRKFITILNTMVKNKTEWAY

SEQ ID NO: 71086 - protein, 348 aa, unidentified
MGMVGGLDLHRGQITFDVVATESGEVWRGRIWQPDRSRLRRWLQVEVAGRAQGEAVALAVEGCTGWRYVVEEIVAAGFEAHLAEPADTQAARGRKRHAKTDRSDAKLLRDLLVAGDLPESWIPPTCVLEWRERVRLYKALVDQRTQWTQRIHAELYQHGVALPDGEIRAETTKSALTDPALAVSPAARRRIAAGYAMIEATDAQAEPLKAELTRFGSRQPACRALVRNHFGIGGLTAVAIWSELGDCQRFTRSMQVVRHAGIDVTVDASDRHRAAGHLSHQGPQILRWALYEAAKSSSRHGAPDHAYYASVKQRHDGKLAALAMARKLARRCYHTLRTLDPEEVYATP

SEQ ID NO: 71087 - protein, 404 aa, unidentified
MDVHKSFVVACIASTDSVGVTSYKSRRFSTFTKDLKLLAAWLSNNNCRDVCMESTGKYWIPVYNILESSCRIVLAHPKYVKAIRGKKTDVKDAKWIADIFKHDLVSGSFIPPYEIRQLRDLMRYRYKLTNFSVGEKNRAQNCLTVSNIKLDDVFSDVFGKSSSAILDQLSVCPNGSFDVAPFVSRKCKAPIAQIQSAIDGSICPEQLHKLGIIRSHLNAIYECKSNLESLICSLSDKFRTQVELVSTVPGIQFFSAVSVISEIGVDMSVFPTAKHLCSWAGLVPQNNESAGKKKTTRISRSGAYLKPLLVQCALTVCNSSKHPEIQHRYLMLKKRRGHKKAIIAICRMLLTAIYAILKTATPYNPFLYRSHSSAPQNRTFTSDSAIAFLKSHGYVIVDCNGVVT

SEQ ID NO: 71088 - protein, 328 aa, unidentified
MTNLDQHGKVHLGIDVSKRTLDACILPEDASQEGESFVVTNDQEGVEEILSRLAKLGTSVELAVMEATGRYERLAATMLAANGISVAIVNPRQARDFAKAIGKLAKTDKIDSFVLARFARAVEPRISVIPDEEAQRLQGILARRRQLIDMLVSENNRTRMAPKALAKRIRAHIEWLEKEIERIDADLDRAIEDNAAFKANEALLRSVPGVGRVLSRTLLAELPELGTITHKRLCALVGVAPFNRDSGQRRGKREAWGGRAPVRAVLYMSALVATRHNPHIREFYERLLAGGKPKKSVALVGCMRKLLSILNALMRDRAIWRCPHALTP

SEQ ID NO: 71089 - protein, 356 aa, unidentified
MGKDIRSVSGLTIGLDLGDKHTVGCVLTRSGEVEETFSVATTMSALGRTMAGFKPSRVVLEVGTHSPWISRLVEQAGHEVIIANPRRVRLIAENDSKTDAVDAELLARLGRIDPGLLKPIVHRGEKAQHDRILLLARDGLVRSRTQLINQVRGFAKSLGHRMPSSSTPAFPRRVREQCRTDLFPGQSVMLNMIDMLTKEIRGMDRAAEKLCKEDYPETGVLRQVKGVGALTALGFVLTLEDPSRFAKSRTVGAYLGLRPRLRQSGEQQPQLRITKAGDALLRRYLVGAAHYILGPFGPDTELRRFGLKLAERGGSAAKKRAVVAVARKLSVLLHRLWVTGEEYQAIGYGRSTQEAA

SEQ ID NO: 71090 - protein, 347 aa, unidentified
MSTHYIGADVHAYNTEIHVENKKKVVGRYSVPTTISAIREVLQSISGEKHLVIEEGPMAGWLYRNLHKCVDEMIVCDPKRNKYVYSDGDVDDQIAAEKLAQLLRGGYLRPVYHSIDEQRVELKQWVALYRDRVRSGVSQVNKIRAQCRMHGVRIPRAAVHNPEARETWLGQQDQSALASQLRLLWIGYDATRQQVKLAKQQLVQLSKKYEIITYWKDLPGFGLIRSVTLYAYLDTPWRFKKKTKLGRYSGLGIRHVTSGKDKRGRPKEAHLALDRQCNRKLKDTIMGAAISAVRTSSPNVFKDYYERLRDEGKLAGNARHSVARKMLRVTWGMWKTMSRFDASLLES

SEQ ID NO: 71091 - protein, 365 aa, unidentified
MQKISTTQTSGKNIFKGKLTIGLDLGDRASAYCVLNDAGEIVLERKLATSPKAMTEIFGKMVRCRIAMETVTHSPWVSRLLTALGHEVIVGHAQRVRLITKSRRKDDRQDARKLARLARIDPELLSPVKHRSVQAQLHLTEIRARAGLVSARTALVNGARGLVKSYGERLRKCDTRQFRREATGGLSTGLRDALEPLLREIESLNDRIQEYDRRIERMAKVTYPEASLLKQVKGVGTQIALTYVLTLEDPHRFPKSREVGCFLGLRPGRRDSGESQPQMHISKEGDRYLRTMLVQGAHYILGPFGADSDLRRWGLKLAARGGKSAKKRAVVAVARKLAVLLHRLWVSGEVYEPLRNSDKALRAVA

SEQ ID NO: 71092 - protein, 351 aa, unidentified
MTTNTMQAQTGQEIVAGIDTHQDSHHVAVLDTAGRLVADEAFPATTSGFAALLSWISVFGTLLRIGVEGTSSYGAALTRFLLAQNVAVIEVPPGDKAERRRRGKTDAFDAEAAARRALSDTAAARLPKDTTSTVEALRLLTKTRKMLVKQQKEIAGQVDQFLITAPDSFRELSRAGVRKTRMTRLKKLPEVGTGDIVTDTLTGLLRQHAIRWLALHEDAAAIEETLAELVELRAPRLLEVYCVGAVTAAELLVAVGENGHRIRSEAALAKLFGAAPQPVSSGKTNRHRLSRGGNRQANCALYQIVIARLCHEQRTRDYRDTHLAAGKTTKDTIRLLKRALCRELFPLLCRP

SEQ ID NO: 71093 - protein, 413 aa, unidentified
MLNLLEVCCGLDVHKEVLVACMLKGGIDEEPEPVIKEFPTLLYGLDEFKKWMIENDCHDVAMESTGVYWYPIYNVLESIFYEDGQVNIIVANPHHMKNVPGKKTDIKDAHWIATLLRAGLLAPSYIPPKEIRELRDWTRYRDILIKELVGHKNRIEKHLQQCGFKLSTILSDIFGMSGFELIKKLCEKGKLTQLDVEECLHGTLRARSAEVQQAVAGQLSAHDKVFLTNLVKTMENCQKEIEEVERHIEGGARQYEPSLHLLETVPAIQRRASTIIISELGVDLSMFPTAGHLCKWAGLCPGDNESAGKKKSTRITKGNPRIKSVMVQCAWAATRCKSFFLRDWFYRLRSRRGTKKALIAVARKLLTIVWHILTTGEIYEETRYEETKKNQEERRKQKLKAEAAKLGFKLIPA

SEQ ID NO: 71094 - protein, 418 aa, unidentified
MPDDLGWFAGLDWASEGHRACLLDSEGMRVGERDFKHDGVGLGDLCDWLLTKSGASAAGVAVAIETPRGPVVEALLERGFAVFSINPKQLDRFRDRFTVAGAKDDSRDAQVLACSLRTDCRAFRRLSVDDPLVIELREWTRIHEELTQERGRLANRVRDQLWRYYPQARELSDDLAADWFLDVWQHVPTPTQAARASEKTIGRILKQHRIRRLDAGTVLRLLRAPALSVAPGTTEAATAHIRTLAARARLINIQIKEAQRRLDELCGAIEAAAETAPGQICEQRDVAILRSLPGLGRITLATLLAEACEPLRRRDYHVLRALTGAAPVTRRSGKACFVVRRHACNKRLAQAVYHWARVAKQHDPTSANRYEELRRRGHSHGRALRSVADRLLYVMCTLLERQVPFDRNFQPRQIAQAA

SEQ ID NO: 71095 - protein, 306 aa, unidentified
MKEIGFVQMVSVGCGIDVHQGLIVASIRKSADEVETREFEAYTSSLISLREWCKSEGVTHVAMESTGVYWKPVFNILEEDFAIILVNARHVKNVPGHKTDKKDSRWLSKLLLSGLLKGSFIPPRDIRELRDLVRYRKKVVGQIASEKNRIIKILEDANIKLSSVLSKVDGAVGTKIINDLIDGETSVNKLMRHYHGKQKVSREEFRKALEGRITEHHRLMLRIHKESISDKESQLSRLDSAIDKATEAYLVEIELLDTIPGVGKEGAIGIISEIGVDMSRFPDETHLSSWAGMSPGNCETGGKKKV

SEQ ID NO: 71096 - protein, 301 aa, unidentified
MQTNSSVPAWVGIDVAQDWVDVAVWQNEQKIQLGRWSREVAELHRLAEKIAGYSPQLVILEATGGLEVRVMATLASAGLAVYRVNPKWVRDFAKAQGLLAKNDRIDAYLLALYGARLRPQWRPLPEAEQQELAELVGRAKQLVAQRATERTRLSRVENQRVRDSIQRHIAFFSKELAKVEKLVTEFLQRHPQWKEKEMLLRTAPGVGPKTARVLLAQLPELGMANRREVAALAGLAPFADDSGKWKGRRHIRGGRSSLRAALYLAPWTAPRAEGQFKHFYQRLVAAENRNNSRSSPSPESS

SEQ ID NO: 71097 - protein, 406 aa, unidentified
MPCGLQAEIGPIRTHDVLVIDETSRQVSSCRVTHTVEGLRQLQAFLLSICGPARKEEMACIIETTHGLLIAARLPAGFPVYPVNPKTVDRHRRASGAKTDQIDAYLLAKHGRAEWADLRRLEPDSSIVAELKALTRDQESLIQSQTRLVNQLTACLKAYYPVALTLFSKLHQRSTWLFLQTYPPPEVAMAASAQQITLVLKKAKHPQAEQVAAKIYHKLHQPHLRADAITTRTKARLMQVGIKQLLPLLEEIATYDEEIERLFLMHEDNEVFSSLPRAGKRLAPRLLAEIGDDRTRYAKTASLQALAGTSPVPYESGNYSKPHRRYACSKPLRNALQQFARPRTQTEAWAQDYYRRKRQEGKSHSEAVRALANLWVRIIFAMWNKKEKYQTRTFEEAQRLHAKRTA

SEQ ID NO: 71098 - protein, 337 aa, unidentified
MIHVGADLHLRFCYMTALDASGRSLKSGPVANQPAELQKWLRGFPEPVTVAVEACSFWPAFKEAIAGEVQAIRLVHPQRVKAIASAKLKNDRVDSQTLAHLSRCDLLPEAWMADRGTQARRQQVRLRISLGQHRAALKNQVHAVLHQQGQRSECADVFGKRGRVWLREVPLPPAARSTVDTYCSLIDQVGQHIRQQEKQLKELAATDARARWLATIPGIGVYSAMIILSEIGEIQRFASPKSLYSYAGLVPRVRESAGHKSHTGISRCGSPRLRWVMVEAAHTALRCCPAAKQYFERLRKRKHPHVARVALARKLLGAAFALLRDGVCFDESTFAAV

SEQ ID NO: 71099 - protein, 360 aa, unidentified
MPMLAEVVDAVVGVDTHRDTHEVEIASPNGVPIARCSIRNDSTGYAQLLAWIVDHAPGPRLVASIEGSRSYGVGLSRALTAAGLPVLESEQPPRSARHGKGKSDAIDAHLAVLSALRLDATHLPAPRVDGDREALRILLGARHDLTVAATAQTNRLRALLLGSDNDADRDLARGALSDAVLTELADRQPRAGATREQAVRHGEIRRLALAIRDGGRALKENRAQLQAVVEDMAPGLTDRRGIGPVTAAQVIVGFSHVGRCRNDAAFAALSGTSPLEASSGRTVRHRLNRGGDRALNSALHTIAMVRMRCCPRTKAYVARRTAEGKTTREIRRCLKRYIARELHRALTATMAATTASDSPA

SEQ ID NO: 71100 - protein, 412 aa, unidentified
MSTSNQQVIERYIAIDAHKHYVVVGGLNAQLEIVLPLRRVDINRFSEWAQKHLRLTDAVVIEATVNTWTLYDIIAPLVSRAVVANAYQVKLIAAARVKTDKHDVWSLARLLVADLIPEVWVPPIHVRELRALISHRRRLIQIRTRTRNRLHSLTHRHNLMPPKGSLFAPKHRDWWLSQDLSPTESLRLRHDLETLDHVDGQLETVDDELNRLTTVEPWSGFYPYLVQLPGFGLVVSMTVLSAIGDITRFPTAKHLVGYAGLGASVHDSGKTHRTGRITKQGRRELRWVLVQAAWVAVNTHPHWKEQYERLRRRKPTNKAIVAIARKLLVVVWHVLTECVADRRADEDMVAFKLMLWSWKLGKERRGGLTTPQFVRAGLMRLEMGEELTHVVRGGTERPIAPVEEVLALKAES

SEQ ID NO: 71101 - protein, 402 aa, unidentified
MISVGVDVSKGKSTVCILKPYGEIVCSPFEVKHVEKELEDLAGLLNKLDGEIRVVMEATGVYHLPILTFLQEKGYFVSVINPYSMKKYAKDNSLRGAKTDRLDSIMIANYGIDRWFKLQKYEGDENTYAELKLLGRRYRYYMELHVKSLQELTHILDYVMPGIKAMFNSWDEASNKDKLSDFVERYWHYDLITSMSREEFTEDYLAWAKEKKYHQSSAQAEAVYETASDGIPTLSSDTPSTKMLVQEAIAVLRAVDSSLFRIISRMQELAKTLPEYSTVRSMGGVGDVLAPNLIAEIGDVRRLHNAKALIAWAGIDPPPYESGQFVGSQRRITKRGSSTLRKVGYEVMRVLKSHREPEDNVVYNYILKKEAEGKSKKAAKIAGLNKFLRIYYARVMAVYQQQ

SEQ ID NO: 71102 - protein, 397 aa, unidentified
MSSLLSTKNWKQMTEQIFKYSVGCDISKDTFNVCILEVSQDMQSKVKASHKFKSETKGFKEFETWVKKHKKHDVPTGFYMEATGVYYENLAWYLFKQEYNVFVLLPYKTKHYLKSIGIKSKNDKIDAQGLARMGSEQKHNPWRPHSKSIYTLRALTRQHESVTKLKTSLQNQLHANEYSAVRNTIVKKQLNATIRLLEKQLMELAGEISNLIDADEKLKEKYCQIESVRGISKLSWATIIAETSGFEAFENQRQLVSYAGYDVVENQSGNHVGKTKISKKGNSRIRRILYMPSLVSVRLKEPVLYNLYQRVHERTGIKMKGYVAVQKKLLVLVYHIWKNDRVFQSDYSKIFGEEESKDLFPFGFGETIKKSSPDKRATQDEHSYELSSKVLFQLAQI

SEQ ID NO: 71103 - protein, 410 aa, unidentified
MGIDVAKKEHWARITDNRGVDLMKPIKVHNSTEGFDKLMALVEKVRAANSCDKVIIGLEPSGHYWKPLGWYLFLHLSNPILVGVNPYHTKQVKELDDNSQTKSDKKDALTIAHLVRDGRYFDVYLPEGAYADLRILCNERKRLQKQLNRANNVIVAVMDEYFPEYERVWDKVTCTTSRAIMRQYPFPSDILKAGIERLAELLRQASPTDSKMRAARILEAATGSIGVTEGLSSAKIRLLSLIDELEFYENKTAIIEDEMAALMDSMEMGELLQGVKGVGPVISAVFLGEVGDVSRFDNWKQVRKLAGMNLVEQSSGQHKGKTKISKRGRPYLRYILFMAGQSGAMHNPEMHGYYRCLRERKQNPLTGYQAFVAVGLKIMRILFHMAKNRVPYDPAKALGKVREQQIAALA

SEQ ID NO: 71104 - protein, 346 aa, unidentified
MLHVGLDLSRRRVDVCLLSGGGELMDRMRAPSDTEGLYGLAKRLAVYGQPVRAVIESMNGARFVHDELVGHGWEVLVADAQKVKGLAPLACKTDKIDAQVLAQLSFRDLVPAIWLPTPELRAERELVRYRMHLVKHRSILKNRIHSALIAFGYHFPVADLFGVAGRQLLTRMEFPEPWKGNVTASLELIDDLNHRIDAITRQLKRAGADHPYVPLLMTAPGIGWINGYTIASELGDIHRFASPAKLVSYTGLCPRVKQSGAVDARGPISKAGPRYLRWGLMEAALNAHDHPVYAERYAATRRRLGRQRGPKVAQIDLARHLTEAIWHMLTRNQPFAPAGALDRLAA

SEQ ID NO: 71105 - protein, 452 aa, unidentified
MATKRKKREQELPVLHPDAAGIDVGASELFVAVPADRDPEPVRSFPTFTQDLYELVDWLQGCGIRSVAMESTSVYWIPVYQILEARGIEVFLVNAHYLKNVPGRKSDVSDCQWIQYLHSVGLLRASFRPPGAICAIRSLWRHRGSLIEMAAEHVQHIQKALDQMNLQIHRVLSDITGLSGLRILDATLEGNRDPVALARLCHKGVKSSQETVAKALAGDYREEHLFALKQSLASFRYYQQLIAEVDTEIASRLQALEKSPEAEGKPPVRTKKSPYSRKHYEPTSFDLRSELYRIFGVDLTDVPGISAVTAHTILCEIGADLSPFRNASAFASWLGLCPERQISGGKVLFTKSRRVRSRLALALRLGANSLHHAHNYLGEFFRRIARRLGKPSAITATAHKLARIVFHLLTRKEAYRESVFMRCEEEAQKRAELRLKKHAAQLGFQLIPATNA

SEQ ID NO: 71106 - protein, 347 aa, unidentified
MEYFVGLDVSLETVNVCIVNAAGDILLEKKIAAEPAAIVHLLKSFGSPFKRIGLEAGPTSSWLYGELRAAGYGAICLECRHVKAGLSAMRNKTDRNDARGIAQLVRLGWFRQVHVKSEEAQRTRMLLVNRQQLLTKALDIENSVRGSLKVFGLRIGVVARRGFEARVLELVADDPIVLAVTKPMLRVRRALLEEFERLDRLCQQLARRDPVCRRLMTVPGVGVVVALTYRTGVDAPERFSKSRDVGAHFGLTPKRYSSGQTDYDGRISRCGDEMVRTALYQAANVLLHHGRWSSLRSWAMRIAKRGSVKGAKVALARRLAVVMHRMWTDGTDFRWSDTSRMTAPTAA

SEQ ID NO: 71107 - protein, 415 aa, unidentified
MDIQMKHACGLDVHQATVVACLLSVLNSGKVKKQIRTFGTTTRELQALREWLQAEGCQHVAMESTGVYWKPVYALLEGPFELIVANAQQIKNVPGRKTDVKDAEWIADLLLHGLLKPSFVPPKPIRELRDLTRYRRKLVDSQSAECNRLLKVLETANIKLASVASDVFGVSGMAMLEALAEGTATPAEMAELARGRLRGKIPQLEPALEGRMEEHHRYLLKLQLRRLRDLDKDLAELDGRIQEKLQPYQKQLELLREIPGVDWTLAAVIIAELGVDMKVFASASRVACWGGLCPGNHESAGKRRNVRVTKGNVHLKTALVEAAHASTRAKGTYLRDKYFRLKARRGAKRAVVAIAHKILVSIYHMLSGDVSYHDLGDLYLDKLNKHHLTRNLVRRLERLGYCVTLKQQAVKQPAA

SEQ ID NO: 71108 - protein, 483 aa, unidentified
MRKRRMSTFERLNSGRITRKQRRELARRVAAADPGLSIVNPHAAGIDVGNASHFAAVPPDRDSTPVREFGFWTADLHKMAAWLVACRIDTVAMQSTGVYWIPLYDILEQHGLRVVLVNAQHTKNVPGRKTDVQECQWLMKLHTYGLLRDSFRLAQHLEGVRTVWRVRGRHVEEAARSVQHMQKALTKMNVQLANVISDVSGLTGQAIVGAILQGQRDPYKLAELSDPHIRASKEEIARSLEGTWREDVLFELQQAVGSYHFAHRQIRQCDDKLKAYLASLESRVLEKPAVPAGTKPLQPKTRKARKQGANAPPMDLTGELVRICGADLTSIDGINIISAMTIVSEVGTDLRQFPDEDHFASWLGLTANENISGGKRVKGAKRKVKNRVADVLRMGATSLLNSASYLGARYRQLRRNAKIPAVAVKAMARHLAVLVYRLLTKGQAWVDRGAELYEQQRRERDLIVLQEKAKRHGLQLVPVAAAN

SEQ ID NO: 71109 - protein, 348 aa, unidentified
MYYAGIDYHKRYSVVSIQNGQGQIVQEERVDHAYPEGFRRLFRECPEPVSVVYESTVNWSWLYEILKPLRNVSSVTLANPFKVRLIAEAQIKTDKISARALATLLRLNVVPACHIPNQKTRRRKEVLRQRSYWVKMRTAVRCRVHQIVGRQHNLSMPQVTDLFGRKGRAALDKALLPEPEDSLLEQNLNVLDALDEEIGDDEKLIRKAGKADHATKLLSSIPGIALILANVIATETDGIGRFRDSPHYTSYSGLSPTVHSSGGKTRTGRMVPQCNRWLKWAYVEAAWVAVGCSPYFGGLYRHHRSRGKQANTAITIVARRMCHIAYQLLTEDRMYEEHPFSPAALVKG

SEQ ID NO: 71110 - protein, 273 aa, unidentified
MAYYVGLDVSVKETSICIMDDKGVVAARTDISTDPDLITNFISKHAPDVERVVHESGILAIWLTRELEKRGVPIICIDARLAHKALSGRINKSDQGDAEGLAQLARTGWFTQVHIRSEASERVRVLIGARERLIRMRKDLEGHVRGVLKVFGVCMTSVGTGKLRRDFRDQLAAAADTDPAIALLSETFIPLHKTLCIARDALDDQVRMMARESELARRLMTVPGVGPIVALAYIATLDDEKRFRKSVDVGAFLGLTPKRHQSGEVDWSGKITE

SEQ ID NO: 71111 - protein, 399 aa, unidentified
MSYQTLFVGIDVSKFKHDIAIVNEQKQFVARPFVIKDDRDGYQQLIQKLDELMQRYDTQRFYIGLESTGDYWKNIYYFLKQQPQPYIVTVINPVQTNAHAKTELRRASTDAVNARDIALFMAEKQPKASFDRAPILDNIKDLDRQIYQLKKQQTMSVNKLRIELTKVAPEIEKNVSNIQGKQILALLAELPTAELIANSSFQRLATIRYGKNNWALSAPFIDKVKALSQQSIAYKTGLGAGYAVQSLVRCIWQFQREIQWLKSQSVALYQSVTDQESLLATIPGIARETAILLEAYIGDVHRFPNVKKFVAYFGMNPTVCTSGTSKRSSYLQKKGNALVRHKLFMAVLCMIRREIDPIHSYYKRLVDAGKPKLVAIGAAMRKLLVAIYYMLSKNKPFEN

SEQ ID NO: 71112 - protein, 373 aa, unidentified
MPKYSTAFGMDVHLRSTTVCALDADTGEAVTRRFPGNPWGEIAGWMDGFPGPSLAAYESGYLGFAPQRELAGLGVECVVAAVSKIPRSAADSASKNDRNDAARMAKAILAHDISPVWVPSPEVEGIRDLAGAYDGATARLATAKQRLLAFLAKRGFVYGGTTPAGNPRKYWTYDFLRWLDKVRPEGDGGVRTLAALRNEVEAAAEARADLLSEYRAAVDASPIAAEVAALQSIKGCAFALAAAFSAEVGDFTRFRSGRQVTAYSGLAPSQRSSGGSVRLGGISGAGNALVRKLAVEGSWCYAAARHQPKLMPRDTGVPLEIRMHGRKGSERLLRRREEMLARGVPAAKANAATAAELVRWLWALGMMCREGAE

SEQ ID NO: 71113 - protein, 350 aa, unidentified
MKTLDFTNEPIYIGIDVHKKSWSVSIMLNGITHKTFSQPPKPDILNNYLNKNFPGGDYICAYEAGFSGFWIQHDLEEKGVQCIVINPADVPTKHKEKNNKTDQVDSRKIARSLQNNELEPIYVPSRQSLEDRSLIRFRYNITTDLTRCKNRIKSILNFYGIEIPRELDKRSQRYYDWLESVKLQHETGTDTMKLLLQEYLNLRKIQLDTTTKIRHLSKTDKYLKNIKWLTSIPGIGIITAMIILTEIDTINRFSNLDKLCNFIGLVPRVHSSGEKESIGGITRRGNTHVKKCLVESAWMAIRLDTALMMNYTEYCKRMPASKAIIKITRKLVNRIRFVLKNQTEYRKRIL

SEQ ID NO: 71114 - protein, 391 aa, unidentified
MKTEFNLAQIDAFYGIDLHQDSVTISRCTTFGEPEYVTSFNYDLEKIRQFFVQEIETYPKIMSTYEAGGCGPEVHRLLCSIGVDNVIAVPSLLPKRKRKRKNDILDSKNLTSYLRNGEIHEVYVHHPDDEARRELSRLRLATKKKQRVAQQQLLAFLRRHGKRYPGKTNWTKTYWKWLWSVNMPSPALQRVLLHLVEAVEHEQSVLQKLESELKESNASWVRKEVVKALMTLKGVDFITAIAFVSEIGSFHRFSSAKEFMAYLGLMPSEHSSGERITPTHVQANKLRRGSITKEGNIRMRSLLVEASQAYRHRPKKSPELLKRWEAVPSVITDHAWKAQKYLHDVYTRFFFRGKPSNVTKVAIARKLAGFIWHIACLAEAQLLTQESSKVA

SEQ ID NO: 71115 - protein, 386 aa, unidentified
MQASTVDTPTAGHCGTIFVAIELSQRSWLVTLHCPDRDRISRHGLESGDHVGLLALIDRARERAARVLGRAPAVASCYEAGYDGFWLHRLLLAAGITNYVFDPASIAVDQRARGAKTDRIDGERMLRTLMAYLRGEPRVVRIVRVPAAEQEDARRVTRERDRLITEQTAHTNRIKALLRLVGMAVGNPRRRNYLTWLAAQRDWQGQGVPPRMLTEIKHEHARLLLLREQLKELEQPRAEADLSPAAAEMAQRSERLQRLKCLGPAFSTTLTNEVLYKDFRNRREVGSYVGLAPSPWKSGGIDREQGISKAGNPRARCAAIELAWLWLRHQPDSKLTQEYRRRTLGASKRIRRIAIVALARKLIVALWRYLTTGLVPEGAVLKAVEM

SEQ ID NO: 71116 - protein, 424 aa, unidentified
MKPHSDVEFAAFAGIDWSDTKHDICLQAANSEERELAVIPHRPAAIDAWASALRQRFGGQPVAVCLELAKGPLVYALQKHDFLVLFPVHPATLAKYREAFAPSHAKADPTDAQLALELLLRYRAKLKPLTPQSAPMRVLLRLVEQRRRLVGDQSRISNRLTDTLKQYFPDVLAWFADKDTLLFCDFLTRWPTLKQLKRARRTTLLSFFHEHHVRSPSRIAERLKAINSATPLTNDLAVILPNQLLVLALVEQLRVTLQAIDRFDAEIATVSQTLPDYALFRGLPGAGATLAPRLLAAFGEQRERYQSAAELQRYTGIAPVTESSGNKHWVHWRLQCPTFLRQTFVEWAGATIPRSFWAAAYYRQQRDKGCSHHAAVRALAFKWIRILYRCWQTRTPYDESTYLHALKRRGSPLLVSIGATVKNT

SEQ ID NO: 71117 - protein, 341 aa, unidentified
MGQASTIGLDLAKHIFQAHGADASGRVVFRKRLTRAKVVQFFAAQAPCVVALEACAGAHHWARELGKLGHTVRLIPPAYVKPYVKRQKNDMADAEAICEAAQRPSMRFVPVKSEEQQANGVVFRARDLLVRQRTQCLNALRGHLAEYGYVVAQGSTHADAVIAHVEDPNTSVPESARSILAVLVGTYKALEAQIRALDAEITRRAKADPVARRLLTIPGVGPIAATATTALVPAPEGFRAGRDFAAWLGLTPLQKSSGGKQKLGAVSKQGERTIRRLLILGASAVVRWASQRGAPEGSWLARMLARKPKMLVTVALANKMARVVWALLVKGGVYRAPAVAA

SEQ ID NO: 71118 - protein, 450 aa, unidentified
MAKAKKRKHRKLDRSLPVMRQNAAGIDIGATEVFVAVPADRDSESVRSFPTFTQDLYELVDWLQRCRVDSVAMESTSVYWIPLFQILEARGIEVHLVNAQHVHHVPGRKSDVLDCQWLQYLHSVGLLRASFRPEQAVCEIRSLMRHRENLVQMACVHVQHMHKSLDQMNLQIHHVISDITGITGLAIVDAIVAGETDPETLVKLRDHRIKASIDTVRKSLVGDYRPEHIFTLKQSQTAYRYYQQLIADCDREIQQRIETFHDPADPSAPAESSAESAANGNSPFDLRAHLERIFGVDLTGVPGFDILRIQTIFGELGADLSGKFSTEDAFSSWLNLSPKDGTSAGRRIRSPRIKTKNRVTQTLRMAAQSLHNSQSYLGDYYRSQRARFGAPKAIKNTAHKLARILYHLITTRQPYDETVFAKLEARNQQRRFRKLQSLAKQMGYSLVQTA

SEQ ID NO: 71119 - protein, 396 aa, unidentified
MNEDNSLQVKPFSFNNDELGFKKLLMHLQSLSCDLSDILIGMEATGLLFENLYRYLQGLEYNVVLLNPYQTAKFREMDTMKRVKNDNIDSVMIAALLKSGRFSEGYVSQEQLQSLKELYRHRASIENQLKALKRQTSTILTVVFPELETVIRDPFNVSGLALLDKYPTAKHYTNASVERILKTFRGIRGNNFNRDKAQALLDASRRTIYSGVAKDARAFNIRTNIEQIRLLQKQLEQTLEMMQSLFGNNSQLKVEDKEVMEDLIDNLRTIPGVADKTILALLSECGNLDRFYAPKALIGFLGLYPTLSQSGDSTRHGRLAKRGASLAKKAIYLASIAAIRHNDEMRTIYMNYRSKGRAKKEAIIIVARKLLTIIYTIYTRNIPYDPQRVFVARPNQ

SEQ ID NO: 71120 - protein, 420 aa, unidentified
MDVIYPRCAGLDVHQKSVMVCLRIWTDGKSRKTVRRFGTMTHDLVAMAEWLGGEGVTHVAMESTGVFWKPIYNILEGRFEVLLCNARDVKQVPGRKTDVKDCEWLAQLLQHGLLRGSFVPARELRQLRDLTRGRAQLVGERTRTANRIHKVLEDANIKLGAVATDVLGASGRRMIQAMVAGETDANVLSELAQKQLRAKIPELRLALQGHLTDHHRFMLRFYMEQLQRLDHATTELSERIETTMAEADRAHAGETDIIPFAEAVNLVMSIPGIDRRTAQNEIAEIGTDMGQFPDRGHLASWTGICPGNNESAGRRKSGTTPKGNRWLRRALSQAAAGAARTKNSYLKARYGRLARRRGKKRALIAVAHTLLVVTYHVLRERKPYFELGPGYLDQRNPERLTRYLVRRLESLGHKVTLQAA

SEQ ID NO: 71121 - protein, 355 aa, unidentified
MKNGNRKIAKDETIFVGIDLHIKRWHVTIRTADVELFCSSIPGIWPSLEKHLSLYKKHSIHVVYEAGYFGFWLHDLLIDFGADCVVTPPSLIPIEYGNKVKTDKRDSRKLALLLAKGMLKRVHVPTEKERYHRQATRRRRQLVNDRVRTQGRIKAELQLYGIDILSPSGKWTQVYLENLCRIKFKDRWMQKSFNQLLEQYKFLENLIAEQTTLIKELSETPRYKEKVEILRTIPGVGILVAMVMLIELQDVSRFQKADQLAAYVGLTPSQYSSADKVRMGRITCIGKKILRSMLIQASWHLIRKDAFMQEKYDKIKVRAGGKRAIVAVARTLVICMRRLLLDKVSYAPRIASSTC

SEQ ID NO: 71122 - protein, 309 aa, unidentified
MKQSIVYIGIDVAKAHLDVAWAGTFRRLPNERSGHAALVRWIKQSATPVQLICEASGGYEQALLESLEKSEVKVTLVQAVRVRQYARAAGILAKTDRIDAKVLAAFGSAMQPQPTPPLSAKQKRLRQYEAQRRHLSRILVAEENRLTQLSCAELRALSRSLISKIKKQIKTIDRDLSDLIAQDQVLCVKAQKLTAISGVGVRTAALLLAQMPELGQLNRRQAAALAGLAPFNHDSGSIHGKRAIFGGRPALRSGLYMAALSAARFNPILSSFYQRLRAKGKPHKLALTAVMRKLLLALNHTLKTQPIIA

SEQ ID NO: 71123 - protein, 355 aa, unidentified
MSQEKYIGMDVHQATISAAVMDAHGKLLMECLLETKADTIVEFIQGLHGTLSLTFEEGTSAAWLHDLLKPHVSRLVVCDPRKAALLKEGNKSDRMDAQKLAELLRTNQLKPVYHEEHGIRALKELARSYLRITKDVTRVMNRIKALYRSWAIPCSGADVYAPRHRAEWLAKLAEPGVRVRAEHLYQQLDSLQPLRLQARGELVWESYQHPAVKLLRQIPSIGPIRAALLVALLQTPHRFRSKRQLWAYSGFAVETHDSGEYRCVRGKLQRNRERITVRGLNDNHNQDLKSLFKSAAISASTRPGPLRDFYVARVEKGMRPTMARLTLARKIATITLTMWKKGVGFDPQNLPRQAA

SEQ ID NO: 71124 - protein, 308 aa, unidentified
MTSTKYIGMDVHTESISIAVRNSVGKVVMECVIETNASTILQFIDGLSGDLRVTFEEGTWATWLYDLLKPHVTEVLVCNTRKNASRNGSKSDRIDARKLSEQLYMNNIKSVYHGEHGLRTLKELARSYLTITKDLTRVMNRLKALYRSWGIPYAGKEVYAPRHRAEWLAKISETGVRRRAEHYYQQLDVLRPLHQEARRDLLLEAKKHKPWKLLRLIPGIGPIRAAIVIAVMQTPHRFRTKRHLWTYSGLALETHDSAQYRVAEGQLERSRKPATVRGLNKDYNHDLKDIFKGAAMRASTAAGPMHDF

SEQ ID NO: 71125 - protein, 346 aa, unidentified
MKILALDLGKYKTVGCAYESESGAHQFQRGLTTAAGLAGMVQAVKPDRVVIEICSIAGWVCDLMWGLGVEVQVANTSDDAWRWRKVKQKDDRRDALKAARLSAVNQIREVYVPAIEVRQWRALITYRQQLVRRRTKIKNHIRDLLLREGQLLGRGSSCWSEAGLKQLGEQARPFSECGPAELWRGELQVELEQLQEMQRQVATVTAQLNKMGAGEARVQLLRTVPGVGARLAEAIVALLDQPQRFRKASQVSGYIGMVPKALDSGETERRGHITRQGSRVVRSLLVEVAWAGLRHNAWVRQTYQRLSGGKKARKKIAIVAVGRKLLVKCWAMLRDHRAWDWQPQIT

SEQ ID NO: 71126 - protein, 385 aa, unidentified
MAEQIFKYSVGCDISKDAFNVCILEVSQDMQSKVKASHKFKNETKGFKEFDAWVKKHKRHDVPTGFYMEATGVYYENLAWYLFEQEYNVFVLLPYKTKHYLKSIGIKSKNDKIDAQGLAQMGSEQKHNPWRPHSKSIYALRALTRQHENVTKLKTSLQNQLHANEHSAVRNATVKKQLNATIRLLEKQLDELAGEISNLIDADEKLNQKYCQIESIRGISKLSWATIIAETSGFETFENQRQLVSYAGYDVVENQSGKHVGKTKISKKGNSRIRRILYMPSLVSVRLKEPALFNLYQRVHERTGIKMKGYVAVQKKLLVLVYHIWKNDKAFQSDYSKIFGEEESKNLFPFGFEETIKESSPDKRATQDEHSYELSSKVLFPLAQI

SEQ ID NO: 71127 - protein, 349 aa, unidentified
MNQIMRIGMDTSKYIFQLHGVDGSEQVVLRKRLSRKAMLEFFARLSPTVVVIEACGAAHHVARELGKLGHTAKLIAPQLVKPYVPRNKNDGRDAEGLCEAASRPRMRYVPVKTAEQQASLMLLGIRDQLVARRTQLSNTIRGHAAEFGLIEAKGLDKLGSFLAAIEQDESVPVLARELFAMLACEYARVQVELKAIEVKLLAWHRANALSRRLAQIPGVGPVTAAALVMKAPDPQAFRSGRLFAAWLGLTPKDHSTAGKTRLGKITRAGDERLRQLLVVGATSVVKQAKAKGRGPRWLIELLKRKTPKLAAVALANKMARIAWKLMTTGEKYESTPLGAQTDAHVTAAA

SEQ ID NO: 71128 - protein, 340 aa, unidentified
MITIGIDPHKSSLTAVAVQPSGEVSATIRLEVNRDTVTRLQAWAQQWPQRQWAVEGAAGLGRGVAQGLAAADEPVVDVPAQLAARARLLNTGHARKTDPIDAAAVATVAQHHRRLHPVRAEDDSLVLRLLSERRDDLAGERTRTVNRLHALLRDLIPGGAERNLTAEQAAALLRSVHPVTAVDTQRKQLSRELVADLRRLDAALGRNSEDIAAVVTVSGTTVTQIHGVGPVLAAKIIGHSGAIMRFPSRHHYASYCGTAPIEASSGEQRRHRLSRAGNRQLNRALHLVAVCQIRTSCSGREFYQRKLGEAKTPAEARRALKRRLCDTIYRHLVQDQHAAT

SEQ ID NO: 71129 - protein, 423 aa, unidentified
MKDSTAKRLRQIPAGYLLVGIDPHKKKHAAVAMTQDATVRNKFKFDNTRQGYEDALQRLRTQMVRNECRGIIFAIETGGHYWRNLAYFLDESGIPFRLIHPFTLKRRREGDDVNRRKNDFRDAEMAAELLRTGKFIETKLPQGVYAELRAAYSAYRRLVKERSRITNLLKGLLDGLFPEFTSVFKDPCAHTALTVLSVCSVPGVIAKMTEEDFVDAVKAEHPKERRLMRMKLRALYHAAQTSVGVAPGATSVSAEVSFLVEKLCLIREQVGRMVERLIRLVDSAEESKYLLSIRGINYLSVAGLLAELGSFGSYQSAKQLIKMAGTNPTESESAGRRGSRTPMSKKGRSGLRYCAWSAVIPMLRHNSDFRAWAKRLRERPVHANPLNGKEIVGAAVNKLLRLAFALVKKQAIYQMPQLAEVAS

SEQ ID NO: 71130 - protein, 444 aa, unidentified
MIRKVMDAIYQCVAGLDVHQETVVACRRRLIGNGQAELEIRTFKTTSADLRELAKWLAEWQVTHVAMESTGIYWVPVWNVLEGQFKLTLANAQHLKKVPGRKDDQGDAEWIAQCMQCGLLRGSFVPPAEVRQWRHLTRQRVKLIDQRTGVINRLHSVLEQGNIKLSNVASDIMGVSGRAMIKAMSNGESDPAKLAALSQGRLKADFEQLVAALDGQLNENQRWLLKRLLGQVKTLEDEIAIYSERIAEQMRPYKTQLERLDTIGGIGQRSAENLLAEIGPDMSPFPTDDQLVSWGGLCPGKNQSGGKNRSGKTPQGNKWLKRTLTEATWAAKLKKGSYLAALYHRLAPRRGKKRAIIAVARTILQSAWHVLKEEVDYKELGGDYLDHLNEEKTTKYFVKRLEKFGYEVELRPRKDKPAKAELKPKPAKKVTVRRKPKPATQATV

SEQ ID NO: 71131 - protein, 348 aa, unidentified
MLIIGCDYHPGFQQIALVDTETGEADERRLTHREEAEQFYRMLKGRRVRIGMEASGHARWFERLLNELQFELWIGDAAEIRTKRVRKQKTDRQDAQLLLKLLMEDRFPRIWVPDAENRDLRQLLWHRHRLVQMRTRIMNQLHVVALNEGIRRKKALWRPAGRSELESLVLAPWALRRRRDLLDLFDQLTPKIHDLTRALEEEVEKRPIARRLMTHPGVGPLTGLAFELVIGTPERFHCGKQIASYVGLVPTEESSGDRRRLGHISKQGNALLRFLLVEAAQVTVRSQPQWRSKFFHLALRRGRKIAKVAMARKLAVHLYWMWRQGLDYGQFEKLGSHAGEPGNRHGVQ

SEQ ID NO: 71132 - protein, 420 aa, unidentified
MDRVVADIIHPIACGLDVHSAVIAACLVRPGPNGGPHYEERSFPTTLRGLRELRDWLKAGQCEAVGMEATGVYWIPVFAILEGHIPMVVGNPNHMRNLRGHKTDRKDAKWIAGLIRHGLIRPSFVPPAEFREARELTRCRRQLINARTAIRNEVTRLLAHQGIPLGADGLLTNIFGVSGMGILEALAEGRNVLEELPKLLARNVKHKQELLSAALESGLGAVARKLLGLHLTRLDAAEEDLQKVEKLIADQLAPHQDRLNLLMTIPGISYISACILLAELGVDMTQWPTHRHLSAWGGVAPGCRESGGKAHKAATRKGNPFVCTTLVECAGAAAQKKDCHLAGKYRHLCARTGSKMKAKVAIARKLLVIVYHVLSTLKPYEEPKPQGPPSQAKQKTIQRHLRELRKLGLEVQLTPLSPSA

SEQ ID NO: 71133 - protein, 400 aa, unidentified
MRVVFGIDVSKASSEVAILVNGEKVHNYTMSNDAIGFSRLLGDLKTVHKPEIIFEATGVYSRRLQAFLDEHGYAYTRLNPLEAKKQLDSLRVRKTDQIDAEKLAQSQFVLNRKPTYVQEEVYQNLRDLSRFYQNLTEDIVRAKNRLHKVLQVTFPELENILSTPSGEQYWNLVIAFPCKDCVLELSNDELSKSIRLSTSKRISDKRVAYLAEKLIALANQSYCAVKKTSPILEEVRYYTKELLRLSEQRQAVLDEMVELAQPLPEYDILLSIPGIAETTATSIIGELGDIRRFQSANQINAFIGIDLRHYESGNFLAKEHITKRGNPYARKILFKCIHNIASASHTNPCHIADFYEKRKRQSQTTSTKSHTIASIHRLIRTMYYLIMHNKLYDYASTQNR

SEQ ID NO: 71134 - protein, 366 aa, unidentified
MQKISTMWRSGKKIFEKGQLTIGLDLGDRSSAYCVLNEVGEIVFEHKLATTPEAMEQVFGSMPRCRIAMETGTHSPWVSRLLTALGHEVIVGHAQKVRLITKSRRKDDRLDARTLARLARIDPELLSPVQHRSAHAQLHLAEIRARAGLVSARTALVNAARGLVKSYGERLRKCGTQQFRRETTSKLSVGLREALDPLWREIESLNERIQEYDRRIAKMAKEEYPETALLKQVKGVGDLIAMAYVLTVEDPHRFRKSRDAGCFVGLQPGRRNSGESEPQMRISKEGDEYLRTLLVQGAHYILGPFGEDSDLRRWGLKLSARGGKNAKKRAVVAVARKLAVLLHRLWVSGEVYEPLRNSQKAMSAAA

SEQ ID NO: 71135 - protein, 448 aa, unidentified
MFIMHYKRLLTFIDGVSSYLSVGLDVGADFTWMSIALPNGSFVGKPFKIIHSDSRSRDLAVTKIKEAQETYSLKSRCFLESTGIYHIPLLCFLRDKGFDCSVINPIITKNSTNINIRKLHNDKFDSKKAALVGLNVSLKTSILPDDSVVDLRNLVRDYYYFKDLQSAVALKLTAELKVSFPAYAKVFSKVTTQSSLKLLSSYPLPADMLAASKEDIVDIIRSTARFGEAYALRKYDAIIAAAQDAAVFGRALPSNAVRIRLYIDTYQEYQKHLDALLKALHETIEKLQDTLIYDQICLLQSLRGIGFLSAVVLIAEMGNFKLFSSPKKLYAYFGLDPAVKQSGKLNGDKVHMSKRGSSLARRVLHMAALNNVKVDKGSGTPVNPVVYDYYTRKCSGKKKPVAMGAVMHKICNIIFAMLRDNKPFEVITPEEHCRRFAAEHPNKIRKAA

SEQ ID NO: 71136 - protein, 346 aa, unidentified
MTIIRIGLDTSKRVFQLHGVDEQEQPVLRRQIRRSELEKFFAKLPPTRVGLEACGASHHWARVLRGMGHEAVLMPPQYIKPYVKRGKNDAIDAEAICEAMGRPGMRFVPVKSTDEQAALTLLKVRDLLIKQRTMVANAIRGHAAEFGVIGAKGPTKLAVLLQQIAEDAHLPALAREMLATLGGQLAAIEMRLGVIGARLMARHKADPRSRLLATIPGVGPIGAVSFALKVPDATVFRSGRHFAAWLGITPREHSTAGRQRLGKISREGDEGLRRLLVIGATAVIQQANRRAKSAGKGPAGHTSPWLAQLLARKPKKLAAVALANKMARIIWAVLVSGAAYRRPQAA

SEQ ID NO: 71137 - protein, 327 aa, unidentified
MSVILGIDVSKAKLDVCLLRDDQRPATKTLANTLTGFEQLAQWLQQRQVNELHACLEATGRYGEEVALFLHDQGYTVSVVNPAQIKAHAQSQMQRNKTDKLDAALIADFCRKQQPPAWTPPDPAERELQALVRHYDDLKVALQQHRNRLEAGIASSLVIAQLQAQITLIQQQMDEVLRQINDHLDQHPDLKRQRDLLTSIPGLGNLTAAQLLAECRDIRRFQDVRQLVAFAGLNPKHRQSGSSVRGYPHISKMGRASLRAALYMPAVTAMRYNPILRAFAERLRQRGVRGKAVVAAVMRKLLHLVYGILKSGQPFDPDYLVKCSTAS

SEQ ID NO: 71138 - protein, 408 aa, unidentified
MAVSGLPFILDRGCGLDVHKDTVVATIKGSDFDTETKTFLTFTDDLYSLVEWVQSHSIRQVAMESTGVYWRPVYAVLEDYFDILLVNARHIKNVPGQKTDKKDSEWITKLLLSGLLKGSFIPPQHIRELRELYRHTRKLIAMRTAEKNRLQNILESANIKLRSVVSDVFGVSAMKMVRAMAEGPSDPLILANMAKGSLVKKHAELLKALTGKITDHHRFMLNLILQSIDHINLQIAQLEAQMEQYTRLMKQELELLKSIPGVSSRVALGIVSEIGTDMTHFATHQNLASSVGVCPGNNESAGKKYSSKITHGNKYLKTTLVEAAWVASRSKANPLLAVKHHQIAARRGQKKATIAIAHKILIAAYHVLRDKEPYQLHPQDIKIVENRRLKKIKRLQKQLSNLKNTSYK

SEQ ID NO: 71139 - protein, 308 aa, unidentified
MNTYVGVDVAKQTLAVHILPDQQALCLPNTLEGHRQLCQQLAGRTVVNVLLEATGGYERAVVAALSQAGVPVTRVDPRRAKGFGMALGKRAKTDPIDAAVLARMAQCVLAPVTAADSRREQLREAVQRREQLVAQRDDERRRLHQATTALVKRSLQAHIASLVSQINTLTKAIAQLRNQLDADLAARLEAVPGIGPVTTASLMAYLPELGQLDRRQIAAMVGLAPYNRDSGQRSGARSIGGGRAPLRRVLYMACHSVIRTHAEFKARYEQLRARGKPAKVAITACMRVLIVRLNAMVRDQTEWRAAAS

SEQ ID NO: 71140 - protein, 343 aa, unidentified
MKLTRVGVDLAKNIFQLHGVDRAGRPVWCKRLKRNRWIREIEQYVEPGVEIGMEACGGAHHWARLLQSKGYRVRLIAPQFVKPYVKSNKTDANDAQAVCEAMSRPSMRYVAVKTIEQQDIQAVHRVRASLISERGAKANQLRGLAYEYGLVAPREIAALRLAVPAWLEDASNGLTVRLRALLSGLYADLRALDERVRELDKEIRAIGRENEAVGRVQQLRGIGPLIASALVAMIGDARQFKNGRHVAVALGLTPRQHSSGSKERVLGISKRGDSYVRTLLIHGARSALRTAPGKNDRMSRWALALAKRSHVNVAVTALANKMARVAWAMLRHGTTYEPNGLAA

SEQ ID NO: 71141 - protein, 393 aa, unidentified
MSKKNTRNALDTSLSYAVIGLDLAKADCAVAAVPCSDDELGLIDRMDYESLFEQAEKLEPTLFAMEPCCGYSQISLRLQNMGHEVKVISGHAVKNWIATHKSNQKTDLNDATALAKLALYDHDLQPIRVKNVEECRIASVQAIRIQLRTQATKSLVCFKSLCQCWGIVIRRGSSNTKKMAEAVAAVEKLLGAEVASSLMILRDAYKFTMKQINALDKLLDALVEANEQARTMKTAARLAVTTGDIKRFPMPRSYVAYFGLAPRNIITGHSGTPSPSKRGALKPVSSRGQGKVSRRGDRVARSFIIQGAATIYMLYCKDMLPECQLRRWLHEQIKRGKPYGKIIVSLAAKLLRIVWALLTYGEKFDSHKAGVPRSVLAAMEKPLKHDVAAESAA

SEQ ID NO: 71142 - protein, 448 aa, unidentified
MVPDAGLHNELSLKLAHRAGEARRREYAKEASPQPVREVTVDVVHARCGGIDVHQASLAVCVSIKEEGRRETHKLRCGTSTAELLRMSDWLREQGVTHVAMEATGVYWKPVWHVLENQFHLLLANPLQVKALRGRKTDLKDGERIADFLQHGLLQGSFVPPPAIQQLRDLTRSRTVLKQEQTRIGNRILKVLEDANIKLSAVMSDVMGVSGREMLRAIVQGECDAAKLAEMARGRLRGKIPVLQQAATGSLNEHHRFLLEQWLAMWDELGVRVAKFEERIEERMRPFEPAVKAWASLPGIERVTAWTLVAEMGVDMSQFPTAAHAASWAALCPGQEESAGKQHSGRTRRGNVWLRRALTQAAWAASFTKGSYFKALYHRLAARRGKKRAIIAVAHSVLVTGYMLLWTKREFQDLGADYFERIDSHRLTRRLVKRLERLGHKVSLQPAA

SEQ ID NO: 71143 - protein, 331 aa, unidentified
MNHKHAIGIDVSKQTLDVVCQTTAAHIQVQNNPKGFNKMLSWVKKQIKGALDQTLFCFEHTGLYSRELTVFCHTQQLLFCMESPVNIKRSLGLKRGKNDRVDAREIAHFAYLRRDELNLYRLPAVTVQQLQLLLTQREQLVTQRAALISIQNEQKGVLKIKEHNLLFDVYEKTIAYLSKQIERIEAEMKTIVISDSELKRNFRLITSIKGIGDIIGYYLLVYTDCFTRFQTWRQFACYCGIAPFDHESGTSLKAGKHVHPMGHRKIKSLLFLAASTAIQFDPELKAYYQRRIREGKNRMYTLNAVKNKLVARVFAVVKRQTPYVQIHQHAA

SEQ ID NO: 71144 - protein, 317 aa, unidentified
MLQTSTNTAGIDTSKLKLDVAVHGRTECWQVANALPGWRSLVVNLIKAGVARVGIEASGGYERGVAEHLRAAGFVVLVLQPSQVKAYARVHLRRAKNDALDAVLIAACAATIDAPRIAPDPRLVKLAGYLTFLEQTEEDIARFKTRLGHVDEPGLRRIVTNDIARLKARRSAQILLIERQLRAHPDLGRRLDLVLSVPGIGKRTALALIIRMPELGRVSREEAAALAGLAPFDDDSGKHKGQRHIAGGRGRLRRSLYAAALPAAFRWNKALVELYARLIARGKAHNAILIACARKLLVYANTVVQRGTPWIESAVRV

SEQ ID NO: 71145 - protein, 421 aa, unidentified
MKKRTYRKIDVKEVDVAALATELGAGRAVFAIDVAKVDMVAAIVAGDGRVVRTVCWKNSSENGLVLELLSGLRRAGLLVEAVMESSGTYGDVLRQQLLAHGVPVYRMSGKRVHDAAEVYDGVPSLHEAKSAAIIAKLHLDGASAPWGPLSEEKRELKAAIATMDLYREQHQRLIHSLESSLARYWPELTEHLELSSATLVALLARVGGPHDVSGALEQSRGLLRGLSHGLMSQETIEAVLQSATRSAGVRLLTQERLALMTLAAEAHRALKEFKKAKLAVERLSTSGAAQRLAPTTGKATAAVLIADVGDPRDYPSTRAYLKGYGLNLKEKSSGKQKGQLSITKRGPGRARQYLWLAVFRWLQKDAVARAWYAEKIKRDGGRRARAVIALMRKFAQALFHVARGVPLDSSKLFDVSRLRLT

SEQ ID NO: 71146 - protein, 323 aa, unidentified
MAKRNTICAGIDTGKRKLDVALDGSSERIQVDNTPEGYTVLLEWLKRHKVRRVGIEASGGYEQAVVAELRRKRLVVVVFQPAQVRAYAVFHLKRAKNDRIDAALIATCTAAVKKIHPAPDPRLQPFAEHLTMIEQITEDIARLKNRLESCRNARVQKLWKEDIARLAKRERVELKALAVAIREHHDLAERLDLINSIDGIGLKTAIIILVRMPEIGQITREQAAALAGLAPYDDDSGNHVGFRHIAGGRERLRRALFTAALPASFRWNPQLIAFYGKLTGAGKEHKRALIACARKLLIFANTVVARGSPWQKKSPEVASVPAI

SEQ ID NO: 71147 - protein, 338 aa, unidentified
MTIVMGLDQHRAQITAEWLDTDTGEVSRRRVAPADRAGVRAFVARFRGRELEVALEATTGWRFVVEEFEAIGAQVHLAEPAETAARRGTKKRAKSDRADARHLRELLMVGRLPESWIPPEHLLELRARVRLRHTLVDQRREWQQRIQATLYHHGVPPRAWLLGAQARAWLTTLELPSAAREQITIALALIDAHEAQLAPLDADLRAYAKRQPGCRALMRHYGIGPLTAITILAELGDTRRFNSSREAVRYSGLDITVHQSDARRAPGHLSRQGPSALRWALFEAAQCARRPGSPDHDYYREAAARLGGNRACLAIARKLLKRSYHTLRELGEEALQPA

SEQ ID NO: 71148 - protein, 342 aa, unidentified
MTFVGCDLHTRMQQVAVLDTRTGEVSERQLAHDGSAIEEFYGALPGPVTVGIESTGYATWFHTLIQRLGHTLLVGDAAKIRAMVVRKTKTDRRDALHILDLLRHDRFPTIWVPDPATRDLRALLAHRMRLVRIRTMVKNGLHAIALNYRLARGSKLLRQAGLAQLHALALPPHTAQRRDQSLELLAGLTTQIRELDEAITTAALAHPDGPRLITHPGVGALTALATLVVLGPVARFHDSKHVVSYVGLAPALNASADKHHLGHITKQGSPLLRFALGQAASHAARMDADLKRTYFTLVHRRGRPKAKVAVARKLLVRLFIMLRDQIDYDEFRRRGRTALASA

SEQ ID NO: 71149 - protein, 434 aa, unidentified
MRKSAQSSQPDPADSSAASTPKNTIQVGIDWADKEHAYSALLPSGKIKTGSFKQSKTGIEEWISELSKLAPECNIDVCIETSSGALINALMEYSQVRIFPVNPLALANYRKAFAPGGGKNDPADARLIMQFLQHYRDQLRQLVPNSPETRELTALAQDRRQLVEQRVALANRMMSYLKAYFPTILELKPARAYSEFVVRLVHAYPTLEEAQKAGKVKLRKIFFGTGAKAKMESRLETILQAKPITTDPVILRTNARRSRSLAAQINVLNESIKSYDAEIKELVKKHADYEIVKNLPGASDKTHARIIAALGDDRTRYANAESLQAAAGIAPITTQSGNSRFVSARWSSSKFIKQTFHEYAGLSIAKCAWAKAYYEEQLAKGKSAQMAKRALAFKWIRIIFRLWQSRIGYDDSHYVSRLNKTGSPLAKKLQSAAT

SEQ ID NO: 71150 - protein, 416 aa, unidentified
MLFIGDDWAEDHHDLEIEDQDGHRLARARLPEGLVGITRLHALVAGHAPAVWADPPPEQVAGQVIVGIETDRGPWVTALRAAGYQVFAINPLSAARYRQRHSTSGAKSDAGDAHVLAEIVRLDRDHHRAVAGDSDLADAIKLLARAHQSAVWERTRQVLRMRSTLLEYFPAAVQAFEDLAAPDALALLGRAPDPDRAAKLIRSQLVSALRTGRRHHVEVKADMLLAVLRAPALRQPATLQGAYAAVVTGQVGIIAALNEQLAGLHEVMAEHFGRHPAADIYLSQPGFAVVLAARTLGEFGDDENRFASSRARKNYSGQSPITRASGKKSVVLARYATNRRLGAALHLQAFAALGAAPGARAYYDALRARDIAHHAALRQLANRLVGILHGCLKTGTVYDENIAWQHHQITTRTVAA

SEQ ID NO: 71151 - protein, 337 aa, unidentified
MRYAGVDLHKTQFSVCWKGEDGSSKFERYPMSAEGLGRFREGLDRETEVGVEATANSKYFYDQIVGSAKRVRVINPLQFKIISESVKKTDREDARLIAEYLSKGLLPEVRVMEKERRELRSLIQTRDKLVKLRSSLKNKIHGILLEHGIQSKREMFSSHKALQKVLEAPVSETSRFELEVIVKQINSLTEGIKELEGKIKDKGKGLKGHKNLQSITGIGELSSTIILCTIGDIADFENKKKLAAYAGLVPRVYESNEKVRRGRITKRGDKIFRTTLVQVALIAIRYNGYLRSFYERLRAKKGSGKAIIATARKMLEIIYDTLVNDWVFEDFNNFVLA

SEQ ID NO: 71152 - protein, 411 aa, unidentified
MKFIGLDWKDKGYTTRIINEKGTDLSGSFEVEKNREDFSEFIHKVRKYCDGGSDVLFGIERERDPIVEYLLSLGYKVYLVCPNMMKSLRKRYSSTGKYNDEFDSYIIADTVRTDRNRLTQIKPRDDKIRKIEFLLRHRDKTVDDKRRLTNRLTCYLKEYFPAFLDFFSDITRSTALSFLKAYPTYEDIKELNKEEIRAFLKKHYYHKESGVLRIYKAIKKGQVEIDPIVIQERNKSAISLIKRIEILDKEIEEYEKDLKETTKGDKDAETFKSLPGSGDTLAPGLMIIFGKKRSRYENAEEINSLSGIVPFTKQSGNWESHLFRFGCNHFYRNIVTMLAYCSLTKSEWARGYYNGKRAEGKSHYHALRCLARIWIKVAFALWKKREKYNEDKLMAAVQRHKIRNRLARKSA

SEQ ID NO: 71153 - protein, 432 aa, unidentified
MKSKQNQRIEEITETMLVVGVDIAKKVHWARFTDYRGMEVGKAVSFKSDREGFESIVAKIEMLRKNKGQKKPFDNVVIGMEPTGHYWKTLAHYLIKSGYRVVGVNPHHTKKAKELDDNSPTANDKKESLVIARLVKDGRYFEPYLPQDVYAELRGLSNARVKVMKRNNAVKNNIVAILDEYFPEIFCVFKNPLTGKASRQVLRVCPFPSIVKTMGEKKVLAEIKKAVKRTVGIKKVRELMEAAKTSVGVNYGIEAARLRLEQLLDELEMVEKHTGRIETLMEQMLTLTGYAESILSIKGIGIVTAGSFLGEVGDPLRFDNARQIANYAGYNLVEDSSGKSKSGTSISKRGRSQLRSLLYKMAFTMVGQNAEMKALHKYLTTRPDNPLKKKQSLVVVSKKIITVIYSLLKKQALYDPALALGEVRREKMKAAA

SEQ ID NO: 71154 - protein, 349 aa, unidentified
MRFYNQPHQFYCGIDLHARTLYLCVLDQAGTTRLHKEIPAEPAALLEALAPFRDGLVIAAECMFAWYWLSDLCADQGIPFVLGHALAMKAIHGGKAKNDKIDAHKIAVLLRGGMLPQAYVYPKGMRETRDLLRRRMFLVHKRAEAITHVQNTNSQYNLPPFGKKLVYAANRAELAVAERFTDPSVRRTVEVDLDLVDHLDESIAELERYLTRTAKVDDVQTYERLRTIRGVGPILALVLLYEIHDIRRFETVGQFLSYARLVRPDHESAGKKKGFGNKKIGNAHLKWAFSEAVCLLLRGNPPAQRWQARRDKKHGKGKTLAILAAKLARAVYHMLRRKEAFDAGKFWSN

SEQ ID NO: 71155 - protein, 307 aa, unidentified
MTYIGIDVSKDSFVAAYPAKSGYATKTFKNTSSGVHQFIQSLPAECHCVMEATGNYSMLLLYLLQQANIIVSMENTTKTDDIDAKLIAMYGEKMEPAPYKIPSESIMLLKQKRTVLRQLKKQLTMLLNLQHSLSVLPKQDPTAKVATEKTIKFLRKQISKLEEEITHLSNKEFKRQMDLLTSIKGIGKTLASALIVATGGFAYFSNAKQISRFLGLCPTYQQSGTSVNFKGHINRNGDTYLRSQLYIAAVSSIKFNAACKETFKRLKDKGKSGKVAVIAVANKLIRQAFAVVTNNRPYVDGYVSALP

SEQ ID NO: 71156 - protein, 337 aa, unidentified
MNITALGIDIAKNVFELHGVDSKGKTVLKKTISREKLPEFMANLPSCLIGIEACGGSHYWARKFKKMGHETKLMNPQFVKPYVKSNKNDSHDAEAICEAVQRPTMRFVGIKAVEQQDIQAVHRIRARLVSERTALVNQIRGLLAEYGIVIAQGVQQLRKKLPIILEDTDSELSHYGRELFSDLLTQFYNVDLKIDEYDARIEKICKQSKICQRLTQITGVGALTATAMVASVGDAKVFKNGREMAAFLGLVPKQHSSGGKQVLLGISKRGDRYLRCLLVHGARAAVTRAKNLPPRRGAWINALIERRGRNRAIVALANKNARTMWALMVSDKEYRVA

SEQ ID NO: 71157 - protein, 362 aa, unidentified
MRKHTTFVALDDSKRTIVAGILRPGVQGPELRQLPNEPRHLRHLVTRLKREGPVGICYEAGPAGYGLYRQITALRVPCQVIAPALTPAGDRIKTDRRDAAKLVRLFPAGELTPIHVPDEAAEAARDLLRCREDVQEDLLRWLHPLVKFLARHGRIYREWRHWTWLRSQRFALPVLERTYQEYRFTVEQLVARRAALEQEILALAETEPYRERVGWLRCFRGIDTRSAMGLLTEVGGFPRFPQPRELMAYLGLVPSEDSTGGRERGGSITKAGNTHARRILVEAAWHYRHPPRLGRALATRSQGQPKAVLAQAWQAQRRLHRRYRHLVGHGKRPPVAVVAVARELVGFLWAALTQAAPAAQAA

SEQ ID NO: 71158 - protein, 309 aa, unidentified
MKQSVVYIGIDVAKAHLDVAWAGTFRRVPNERSGHAALVRWIKQSVTPVQLICEASGGYEQALLESLEKSEVKVTLVQAVRVRQYARAAGILAKTDRIDAKVLAAFGSAMQPQPTRPLSAEQKRLRQYEAHRRHLSRILVAEENRLAQLSCTELRTLSRSLISKIKTQIKTIDRGISDLIAQDQTLCVKAQKLTAISGVGVRTAALLLAQMPELGQLNRRQAAALAGLAPFNHDSGSVRGKRAIFGGRPALRSGLYMAALSAARFNPILSSFYQRLRAKGKPHKLALTAVMRKLLLALNHTLKPQPILA

SEQ ID NO: 71159 - protein, 331 aa, unidentified
MTIAADTAAPDVGPHDYIGIDVAKAKFDWNVHGAPVCHSAGNDPTGFEALLEDLRTRRIKLIVVEATGGLEQSLIGFLVGHGFPVARVNPRAAREFARSQGHLAKTDAIDAQALAHYAHTLAHKADQLGVQFEALPEQIEALQVLVVRRKQLLDMRTAELNRRSGAMRVLRKSIDAVILTLNEQIAALNTDISSHLGEHFKDLDRRLESIKGVGPNTCAAVIAFMPELGHIDNRRAAKLAGLAPLNNDSGKQRGKRSVWGGRSLVRCALYMATLSAVRHNPVIKAFYDRLVAAGKPKKVALTACSHKLLRILNAMARSGQDWNPQLHGVPA

SEQ ID NO: 71160 - protein, 402 aa, unidentified
MNCVGIDVSKGKSMIAVIRPFGEVVVSPFEVRHTASELSELARLLKNLDGETRVVMESTGNYHAPVAWLLHGAGFYVSVVNAMLVHDYGNNSLRRGKTDKKDAVKLANYGLDHWLTLPRYVPEEDTRLMLKTCYRQYQQYSKVQTMLKNNLISLLDTAFPDANRLFTSPPRADGSEKWVDFVATFWHCECVCGLSKKAFTAKYQKWCRKHGYNFSQDKALDIYASACGRFGVMPKTNTAKLLVEQAISQLQTTSAALAALKQEMQSLAASLPEYPVVMEMFGVGPTLGPQLIAEIGDVRRFHSKKALVAFAGIDAPPYQSGQIDVRSRSISKRGSASLRRTLFLVMGVLLQCAPMDEPVYQFMNKKRSEGKPYRVYMMASANKFLRIYYASVKAYLDSLEHD

SEQ ID NO: 71161 - protein, 349 aa, unidentified
MRFIIGCDFHPSYQQVAILDTHSGELMEKSLGHENKEEVRAFYAGLPGPARVGVEASGQSQWFERLLGELGHEMWIGDAAQIRARENRKQKTDRRDALLLLELLQQGRFPRIWVPSPAERDARQLLLHRHKWVRMRTQVKNQLQALALNQGVRRKSKLWSVAGRAELEALSLAPWTHRRRADLLKLLDDLQPGILDLDRDVAEQAEARPEARRLMTHPGVGPVTALAFVLTMGPVGRFPRGKQVASYLGLIPSEHSSGGKQRLGHISKQGNAFLRGLLVEAAQSAVRHEPRLRREYLRLAQRKGRAIAKVAMARKLAVQLYWMLRDGKEYAQRVQVRVQDSPRHPVVVA

SEQ ID NO: 71162 - protein, 214 aa, unidentified
MSKNKEFFGIDISKDVFDVVDASEKHHQFKNDPSGFKEFSKLLSEKSHCVMEATGSYYQGLATWLYDSFINVSVVNPLSVKRFIQMRLKTSKTDKLDAQMIRMYGESEQPKLWSPPPKLIIEASELHKLIELLVRQRAGLKNRLHALESKGITRSLVLTQGFEKFESSRQLISYLGLNPTIRESGSSVRGKSRISKTGDKQVRKLLFLCAFTAG

SEQ ID NO: 71163 - protein, 391 aa, unidentified
MDGMSSVDAMGIVRLPSQQQPDNMKNPTSALTEEVTKQNVQPSREATGIVLGVDVHLRSYQVARKVDNLAIGPVQSFRSQTELLLWLERLKARAEQIEVVYEAGPLGYTLYRELRARGINCRVCAPDSSEQKRKRIKTNSIDARALAGRLYSYLNGDERALRLVRIPSMEEERRRLRSRQHDQLVQERKRLAARGNSLLLAAGYGSIKHWWRPKSLERLTAVLEPELQQMLELWVGLLRLLDEKIALAKAALMRRQTEPRPKGLGALSMEQLESELLSWQRYSSGRKIACLTGMIPSQWSTGEAQRLGSITKVGLGPIRRIMVEAVWRMKGFQPHYEPFQKWRAALEGQNRAHKKKAVVAIGRQLAVDLWRLKTRRVTAQQLKLIMVGGSL

SEQ ID NO: 71164 - protein, 354 aa, unidentified
MPRKTTSLEAVATIGIDIGKNTFHLIGLDKIGAIVLRQKLSRGQVDARLANMPPCLIGMEACVGAHHLSRQLKALGHDARLMPARYVRPYSRGQKNDFGDAEAIAEAVLRPTMKFVAIKTVEQLDLQALHRVRERLVCQRTSVINQIRAFLLERGIAVRQGLRALRTEMPIVLAMTDKLSPRMIRMIEDLCTDWRHLDARIATVSNEIKTLSEQDDGAKRLMTVPGIGPIISTATVAAIGSGDVFSKGRDFGAWLGLVPRQMSTGGRTVLGPISKRGNRYLRMLFVQAARAVLLRPQSWEKYGLRSWIEAAARRLNRFKLAIALANKIARVAWGVLHGDRNFEVRSMRTAPQAA

SEQ ID NO: 71165 - protein, 415 aa, unidentified
MIPAVVENCAGIDVGKKLIVVCVLNGPANGEARAEIRKFGTTNAVLTEMREWLVSCGCTQVVMESTGEYWRPIFNVLEEAASLHIVLANSQQVKGLRGHKTDPEDAHWLAHLLRHGMIRPSYIPPKHIRELRDLTRRRRKMVQAGAQERNRIQKILEGANIKLGSVLTDVFGLSGQLMLEALLDGEESTEKIADLAQRSAKKKIPQIREAIEGHRMNEMHRRLIGFSLDHMAFLEEQIEAIEDLIVTHIRTSQLEQPHQNLQTVPGVKQDAAAAILAELGPDMKVFGSGGKCSAWSGVAPGNNESAGRKKRAPALKGNPWIRSVLVESAWSASRKKDTEFQKKYDALKPRLGHKRAIVAVAHLLALVIFQVLARGEPYTQPGANPMPETKAARLVRHHTRRLKNLRKRLTKKSKA

SEQ ID NO: 71166 - protein, 429 aa, unidentified
MRTESTPGARGPVFCGVDTHADSHWLCVLDWRGRKVLSCRFPADAAGYEALAGAIAAAGEPACVAMEGTSSYGAGLTRHLASLGMPVREALSPARTQRRRPGQGKCDESDAERAARAAMSGSRLGTPKSQDGWVDGVRCMLAARSGAVKARTSAINTARSLLTTAPEGLRSRFRGMGGPRLMEELPSVRAEGALGAALGALADLWAAARDAALDMELAIEASLEENCPALLAMYGCGPVSAAKLAVAAGDNPGRLRSEASFAAICGACPVPASSGKTVRHRLNRGGDRQANSALHEIARQRVMRDPETAEYAERARGRGKSDREVMRCLKRYVAREAYRALMRPHEVRRPEDASGLVAARRAARVSQVRAASILGTSEKYISMLERGQRELKPIRRAYEAWVEAGLPLDWDRQAFEAERKMDSKKHLAK

SEQ ID NO: 71167 - protein, 440 aa, unidentified
MLLAFGVTQTTVFYFLNVNQLAKTRSFIFVITRIRNCKDHRLKFSLKEVLSMYLIGIDISKYKHDCFIATEAGEIIKDSFSFDNNALGFSQLLDVLQALDSSQTKKIGLEATGHYGYNLKVFLDRHGFDYMEFNPFLVKKLSTALSLRKTKTDKADARFLSMILLSVDYRTYPVKSYHIQELKSLTRYYKSLVKKRSRELVELTNTLDLIFPEFKSFFQNRFSQTAYYILAHYHTPKRISRMTYQNFEKLHSISKGHFSYAKFLHLKDLAKHTVGSSSELLVFEMKSCIRLLNDIKQEIKALESLLIAWTHKIDSPVFSIKGIGFVSALSLIAEYGNFISFDSPAQMLSFAGLEPSIIQSGTSNKQGHMVKHGSGYLRDTLMNITIPFMMHNPVIYDYYLKKKNEGKPHLVALSHVAKKLIRIIFFLVKSNQQFNETKLV

SEQ ID NO: 71168 - protein, 335 aa, unidentified
MPDPSSPVPVCIGIDISKDSFDVCVLHPDGQKSAKSFANVPAGFEAFLAWNGECGSAPARLGVEATGPYALELLYFLCAAVPHMEVALLNPRHVKNYGRSLGRRVKTDRVDAEVIAHFIRSVPPRRWTPPPVEIRELQSLMRRRAQLVAGKLAARNRLQSLGRKVPGEGTEALASVRREIAFLDGELKRIEEALTSLLRRSVVLKKAEALLRTVPGIGRVVALTILAEVPFIASFGRAREVAAFAGVTPALQESGTSVRRRGRLSKEGSSALRTQLYMAALNVARRDNPLRSGYEAFVKRGKPKMVALGATMHRLLRIAYGVLKHETPFTEAFLK

SEQ ID NO: 71169 - protein, 345 aa, unidentified
MKITTVGIDLAKALFQVHGVDERGKAVLRKQLKRKDVLSFFANLQPCLIGMEACGSAHYWARKLSELGHTVRLMAPQFVKPYVKTNKNDRNDAEAICEAVARPNMRFVPVKTASMQAVLALHRARQGLVKARTAQANQIRGLLAEFGVVIPKGLGHIARGLPEILEDGENALPGMMRQLIERLGEQLKALDQQVGEMQRQITLWHRANEQSRKLEDIAGIGPITASAFVASVGEAKSFKNARQVTAWLGMVPRHEGTGGRATLGKISKRGDVYLRTMLIHGARSVIAKLERKPEQASPWLRRLLARRNKNIAAVALAAKNARIAWALLAHERRFEPDYVAIRPAA

SEQ ID NO: 71170 - protein, 364 aa, unidentified
MHATTKPASVGSSAVSLAIDLAKDVFELAFADASGRIVERKRLKREPFARCLENRPPLRIVMEACGSAHAWARRFARLGHEVRLLPAQHVRPYVRRNKTDRADAAGLLEAARCGDIRPVPVKTPEQQGTQGLHRIREHHKAQRTAAINAVRGLLREFGIAIPAGADKVRPATLAALEDGDNDIPMALRHALAGLLDQIAACQEAMAAIEKQLADIAKLDTRCQRLMAASGVGLITATALSAGIGDFARFPSGRHFASALGLTPREYSSGGTRKLGRITKQGDVFLRTLLIHGARSALIVAATARKRGQPLDRTQQWALALAERKGHNKAAVALANKVARRLWASEHHGTSFDPEHISRREPRAA

SEQ ID NO: 71171 - protein, 419 aa, unidentified
MLTARWFVGIDWATEAHEVCVLDPEGQVCDRRSVPHSATALQAFVDALLERAHGDASTVAIGIEVPRGAVVDVCVERGFGVYAINPKQLDRFRDRFTAAGAKDDRRDAHVIGDSLRTDPQAFRRVRLDHPLVIQLREWSRFDEDLAGDLTRMTNQLRDLVYRIAPGLLTLCPAADERWLWTLLRDAPTPADQRRLSLRRLERLLRDHRVRRLEAAQVREVLQQPSVYTAPGVVDAVAAHIQLLLPRVDLLAGQRRDAEKQLERLLDALDAQEPAAGDPREHSDVAIVRSMPGIGTRVAARMLAEASQPLVERAYHVLRATMGVAPITKQSGRRRTVSMRYACNARLREAGYHWARTGAQKDPASRAYYAQLRARGHSHGRALRSVADRLLRVLMTLLNHGQLFDLTHGQHAPAAIGAGA

SEQ ID NO: 71172 - protein, 449 aa, unidentified
MDWRTTELKHDLEEIPDAEHELVLNRVCAIDVAKASGKVCVRVDSRAGRRVSKVWDVDATSRAVGALADHLVEVGIEKVTVESTSDYWRIWFYLLEAAGLSVQLVNARDVKNAPGRPKTDKLDAVWLAKLTEKGLLRPSFVPPAPIRELRDYTRLRIDLTRDRVKYWQRLEKLLEDALIKVSSVASRMDTLSVRDMLEALIAGERDPHRLAGLARGRMKPKHAALVETLTGRFDAHHAELAQMMLDQIDALSTKIGTLTNRIEELLAAMEPESGTGTPGRGADAAAELTTIERLDEIPGIGPGAAQIILAEIGLDMSRFPTARHLVSWAKLCPRTIQSGPVLRSGKAGKGNPYLKGALGEAAAAAAKTNTFLGERYRRIVKRRGKLKALVAVARSILVVIWNLLNDPTARFRDLGADYHATRVNTERRTRNYVSQLMAMGYHVTLQPAA

SEQ ID NO: 71173 - protein, 361 aa, unidentified
MFTERTSVGLDVHARSVVAAAIDGDTGEVFRKRLTPANDDVIGWVRSLPAPVAVVYEAGPTGFGLTRAFATAGIRCEVAAPSKIQRPPGDRVKTDARDAMLLARLLRLDDIVPVSVPTVEREAARDLVRAREDVRGDLMRARHRVSKLLLRQGIVYYGGTAWTGTHLRWLRKQHFDTPGLQLAFDAEHEAVLAAEARRDRLDAAIEAMAADSEYTPVVHRLGCLRGVATLTGFGLAVEVGDWERLTGSSIGAYLGLVPTESSSRQSRSQGSITKTGNTHARRLLVEAAWQHLKPYRTPGATMRARRELAPAAARARGHAGNRRLHERWLHFNDRKKDPVIANVAIARELAGWCWSLAVMDD

SEQ ID NO: 71174 - protein, 371 aa, unidentified
MEHTRFIGLDIHKERISVAVAESGRSGAVEYLGEIANEPGAISKLCDRLRRPGKPLAFCYEAGPCGYGIHRQLTRLGHRCDVVAPSLIPTKAGDRVKTNRRDATMLARLHRAGELTPVWVPDADHEAMRDLIRLRSVVRQIVTRARQHLQGFLLRHGRKHGRGTAWRMAYRRWLSTLAFEHPAQQIALQDYVDAVMDAERRLKRVEEQVFGLLPDWNLRPVVDGLQAMRGIALINAVVLVTEVGDFTRFSNPRQLMAYFGLVPGERSSGETVRRGAITKTGNAHVRRALVEGAWAYRMKARIGRHKVDRIEALPKVVRDIGWKAQVRLCTRYRRLRARGKTANVVNVAIAREMVGFIWSIACTIQSAPRAA

SEQ ID NO: 71175 - protein, 428 aa, unidentified
MKFKQSEAQNQRIERITTSHLVVGIDMAKETHVAQATNYRGIVLTNKHLSFNNTIEGFEKLQRWVQGLHQKHRLNSVILGMEPTGHYWWNLANWLTNKGMNVVLVNPATTKRNKENRDNCPSKSDPKDALVIADVVCRGYYYEYTRQTYVFQKLRTMMSDREFWVANSVRLQNRIIRWLDIRFPEYTSVFKDWTCKRSMATLKELLSPQDLASQSVTEIIAVWRKHMKRAGGSTGTQKAAELISEAKRSVGDITALDEAKQDLERLITEYERIEEMLENMEKQISSLLSEIPIANQLRTMKGLGPILVAAILAGAGDLKQYAHGSQLLRKAGLNLAESKSGKRKGQIILSKRGDSTLRKYMYLATIQLIGVNPVFRELHENNVKVKQMKKQQSVFKLLGKVARILISLVQKGEAFMPEKASSKFTQAA

SEQ ID NO: 71176 - protein, 408 aa, unidentified
MNEKTITSEPAALVAIDWSDQKHDIALLPAGAERAEYLQLAHQPQDLTEWACGLRQRFSGKKVAVAVEQKRGALIHALMAYEFFELYLVNPGSLANFRKTFKHSGAKSDALDRDLLLELIQKHRDRLSHWKPDDVQTRHLDLLVQDRREAVNECTRLGEQLRATLKNYFPAMIDLAVNLTTPLACNLILKWPDFASLQRAKSQTLRRFFYAHNFRRLDILEQRLEALQAALPLCVDAAIIGAGRLKTVRLARSILTLLTAIKQYDKEIAALFKTHADASIFESFPGAGPVLAPRLLTVFGSHRERWQHSLDLATYSGIAAVIERSGKHFITHWRWACPKFVRQSLHEFAGCSVRFCPWAKCFYQTQLNRGKSHHVAIRALAFKWIRILFRCWQDRCPYDSTKYAPANL

SEQ ID NO: 71177 - protein, 351 aa, unidentified
MLIIGCDFHTRYQQIAMAEETTGELLLEQRLDHESGAARAFYRSLQGPVRVGIEATGPIHWFERLLTELGHELWIGDSAKIRASEVRKQKTDERDAALILDLLLAKRFPRIGVPTPAERDLRQLLWHRHKLVRLRTMLGNQLHFLAMSQGLCRKKKLFTKKGRAELGNLTLGPWASRRREELLKLLGQLDPPIAELDRAVLEEAQRRDDAVLLMTHPGIGPVNALAFVLTIGPVTRFPCSRKIASYLGLNPTEESSGGRRRLGGISKQGNTMVRWLLIEAVHHAVRQDPALRQDYQRLKFRRGHAVAKVAIARKLAVRMYWMLRSGADYARLVRRQGSPGATLMNAGSSLG

SEQ ID NO: 71178 - protein, 446 aa, unidentified
MQKFYLGCDVSKGYSDFVIIDEELNCVEENFQLDDTALGHAELRHRIDKLFEKYPSAVLYAAVESTGGYENNWYGFLSKQQKIYNLHAARVNPNGIAHDNKAGMVRNLTDKISARSVAEYQVRHPEKVPYGQTNPYASLKKVWVHLRMLKRQRGDHLNELESLLYSGNPEILQYCRNKMPQWVLKLLMKYPTADMLSRARGKSVASIPFLKRQLAPELIKNAKTSTAEASDETTAFLITSTVRQLVHMDKSIELYEKRLETMCDWPDVDLLMTIDGVGRMTAIVLMLYIEDIKRFDSAKKLAAFLGVHPEYRLSGDGTKKGSFRMSKKGQKAPRAMLYMAVLAGLSKKSRNPIVRRIYDDKKAQGMVAKAAIGVCIHKLVRIAYGVLASQAAFNPMIDELNRQKSTPAQQNTAIGKGRRYQGYDAKAPISRRQNKKRMEQIKSQDR

SEQ ID NO: 71179 - protein, 337 aa, unidentified
MEYFAGLDVSMEETHVCVVDREGVVTHQAKVASTPADIAQELAKAPACRRVVFETGRMAPMLFHGLVDHGVPVVCVESRQAYQALKSLTTHKTDRNDARGLAHLARTGFFKPVHVKSLPAHAVRSLIIAHKKLVGQRVTLENQIRGLAVVFGVRLPRALSPVFIEQALRSSEGIAGLSAAMRGLIGARTAVLAAVAAIDADIKRMVRASDACRRLMTIPGVGQLTALAFTAAIDNPERFKRSRDVGPYLGLVPRRYQSGEVDYTGSISKCGDRRVRTLLYEAANVMLTRCRQPLKLKAWALAIAKRSTMRKARIALARRLAIIMHAMLRQGSEFKPA

SEQ ID NO: 71180 - protein, 347 aa, unidentified
MSITMIGLDTAKSVFQVHGVNETGKMEIRRKLRRSELIPFFEKLEACTVVMEACGAAHHWARILSSLGHEVKLIAPEAVRPFVKKGKKNDPADAAALCTAASRPDMMFVPIKSIGQQGILTLHSARSLLVKQQTMLANAMRGLATEFGLTVPKGIDRLEELLALVGADKAFPEKARQVFTGLFDQCRALAESIRAFEVEIVAHARHDDTARRLATIPGVGPITASLIAATVVDIGLFKSARHFAAWLGLVPRQFSTGGKTRLGRITKTGNREIRKLLVLGATSMVYRAPQWNSVVGAWTRGVLERRPVRLVTVALANKMARIAWALMTRKEVYRATGRVTTATEAVA

SEQ ID NO: 71181 - protein, 390 aa, unidentified
MRFYNQPHQFYCGVDLHARTMYLCILDHAGAIVFHDNLPAEAHAFLQAIAPYREGLIVACECLFCWYWLADLCQAHGIPFVLGHALYMKAIHGGKTKDDHIDSEKIARLLRGGTLPYGYAYPKGQRETRDVLRRRMYLVHKRAEIVAHTVNTNSQYNLPVLGKKLIYARNRAELDVPSRFIDPSVRLSMDVNMRLLDTLDELIGEVELHLTRTVKVEAPHSYYLLQSIPGVGKILALVLLYEIHDVRRFANEGDFLSYARLIRPKKTSAGKITGMGGAKIGNAQLKWAFSEAACLLARESDQAKRFLARKTNKHGKAKALGILAARLGRAVYHMLRQGRPFDPRRFWNGAATPAPNEGLGTHRAKAQAKRAKAKKKTSRPSEAPRCVLEA

SEQ ID NO: 71182 - protein, 361 aa, unidentified
MKGISMPDQQQAVIGGIDCHTDFHAAVALDPLGRALGTESFPATGDGYRSTHRWLTSFGPIAAVGVESTGSYGAALTRFLVEHGCRVIETCQPHAHLRARRGKNDAIDAEAAARKVLSGEATAAAKDTTGIVESIRQLSVARNSAVKARSAALCHLGDLLVTAPAALREQLDTRRSLEGKAGVCARLRPDPDRLADPAQAAKAALRSLGHRIAQLGAEADELGRRLDRLVATAAPATTSRLGCGTHHTAALLVAAGQNIDRLGSEASFAHLCGTAPIPASSGRTSRHRLNYAGNRAANRALHMIVIVRLRYRERTRSYLERRLSEGKTKKTPSAATDASSPERSTAPSCVASDFATIKTRT

SEQ ID NO: 71183 - protein, 341 aa, unidentified
MSDYSYFCGIDLAKNHFSLHAVDQNGKVILHKSVTRSKLLTTIANMPLMRIGVEACGGAHYWARTLNTLGHEARIMAVKYVIPYRTKGKNDLNDAVAICEAVQRPSTRFVPVKSPEQQAILSVHRMREHWVRERTALMNRMRALLSEFGLIIPVGRSSLMKHVPLMLEDAENELPHLARTGIADAYHHLGELNQRIADTEQVFESFAKVSANVQRVMKVRGIGPQTATAILASIGNGSQFDKSRDFSAWLGLVPKQYSTGGKPRLGRITKHGDKYLRTLLVHGARTVIANLGDKQDKLSQWCRGVLERRGMNRAIVALAAKNARIIWSLLHNQTEYENYAA

SEQ ID NO: 71184 - protein, 339 aa, unidentified
MTLYCGIDLHSNNHVVVVIDEQDQKIFEKRLTNELRETLQALAPFTEQLSGIAVESTFNWYWLVDGLMDAGYPVMLVNTAAVKKYDGLKHADDQHDAFWLAHLMRLNILPTGYIYPKEDRGTRDLLRLRQKLVQQRTSLVLSGKSHFERLTGKAASGAILQRPSAMDIYLPKLDDPAHRLRLESQLQLIHTLTLHIDRVEQEVFNTVKHNPTFDYLQTVPGIGKILGLTITLETGDIRRFPAVGDYVSYCRCVAATQTSNGKKKAEGNRKNGNRYLGWAYIEAAAHALPNCDSAKRFYDRKKAKSNGAVAMKALAHKLARASYFVVRDQVPFDEVKLFG

SEQ ID NO: 71185 - protein, 341 aa, unidentified
MGQASTIGLDIAKRVFQAHGADATGRVVFRKRLVRAKVLEFFAGQPRCLVALEACGGAHYWARELSKLGHTVRLIPPAYVKPFVKRQKNDVADAEAICEAAQRPGMRFVPVKEEAQQANTVVFRARDLLVRQRTQCINALRGHLAEYGHVVPQGPAHVGSLVALVEDPKSAVPESARGILQVLIRTLNALEEQLKELDGEIARRAKADPVARRLMTIPGIGPIAATAITALVPAPEGFRAGRDFAAWLGLTPLQKSTGGKHKLGAISKMGERTIRRLLILGASAVVRWASRRGAAAGSWLARMLARKPRMLVTTALANKMARIVWALLVKGGTYRAPAVAA

SEQ ID NO: 71186 - protein, 344 aa, unidentified
MQHYVGLDVSVKETSVCIVNKAGKVIREVKVATKPAEILAVLTEEALAIERIGLEAGPLSQWLYSALAEAGLPVICVETRHMKAALSAQINKSDRNDARGIAQMMRVGLYRPVHVKTLASQKRRMLLTSRQLLQAKALDIENDLRGTLRNFGLKVGMVGTVEFEARIRELVADHPDLAAIVEPLLIARRVLREQLGVLHRQLLEIVRQDEVCRRLMTTPGVGPVVALTFRATVDVPSRFKNSKAVGAAFGLTPRRQQSGEIDRMGGISKSGDAMMREMLFEAALVLMTHSRKWSWLKAWGMKIARHRGMKRAIVAVARRLAVIMHRMWVDGTEFRWSRKEAAAA

SEQ ID NO: 71187 - protein, 362 aa, unidentified
MEFFSGLDVRMDETAICVVDDKGKVALQTTAVTDPDAIKRALKPYLGRHRRVGHEAGSWSPWLHPELEKLGLPVVCLETQHVRAALKAQRNKTDKTDALGLAHLMRTGWFRQAHIKSEACYRLRLLLTHRRNLKRKFMDLENAIRHSLKAFGMRFKGCGRGGFAQAVREAAAGDPLVTELIEAMLNARAALWKEYLKLHEMVVKFVAGHELCRRLMQIPGVGPVAALSFVTAIDDPSRFKRSRDVAAYFGLTSRRWQSGKSIDVQGRISKAGDPDVRRALYEAASALLTRFKRKDKIKTWGLAIVKRSSHRKATVAVARKLAVVMHAMWVDGTFYCGDPATRAADVSARAAAKDRKLLGAYA

SEQ ID NO: 71188 - protein, 437 aa, unidentified
MQFNKTFNQKNAIGGKFVIGIDPGEYYHRAVILDPSGKVIGKPISFSVSFDGFHSKFLDSIKNLIPDFSPDKVVVAIESSINFYQTFTAFAISRGIQVLHVSPLKTYLARGYHDNDFSKSDSKDAMLVAETAFNGKYVKAELYSDVFNSIHLLSIQYDKLLKNRCEYRMKLRAFMHQVFPEYLKVFDIETQTSLYLLRKYFTPEDFQKLIVENESPVISKISISQHGAKTLLKLKELSRKTIGIPVSSGVKSYMRSILDSHLDILENVKKHSELIIEQMIALARESVYFNILVSIQGISKILAAQFVAEAPQIENFKSRQQLEKYIGFNLRAYQSGTYAGVRHINKLGNKRLSRVIFQMTEQTSRYVPVVRLKYLKRKTKCRNYKKNIIAAASALIKLLIDLFNSKKYYTPTHDENILNKIKELENKTTKCNKNKSA

SEQ ID NO: 71189 - protein, 328 aa, unidentified
MSYVGIDISKDSFVVAFSSASKSKTITYQNDDKGIEKFINTLDKEQHHCVMEATGNYGVNLLYHLCEQEIKVSLINPKQSNFLSKMKLSTAKTDNKDARLLVEYGEKMNPEVYKMPSDKIILLKQKQTVLTHLIKQRTASKNQLKSLELLNKKDNLAIDMLKNNIDNLDKLINNLEKDIVSITEEEFEKQVQLLTSIKGIGKKVATTLVIITNGFSFFENPKQLSRYIGICPTYQQSGKSLNYNGHINRNGHSTLRGQLFIASWSAAKYNSSCKALFERLREEGKPWKLAQIAVCNKLIRQAFAVIKSGVAYIDGHVPTLSAPMQTAI

SEQ ID NO: 71190 - protein, 412 aa, unidentified
MDVVVQRCAGLDVHQATVTACVRLPGRTGERTQVIQTFGTTTPDLLTLRDWLAAHQVTHVAMESTGVYWKPVYYALEDGCTLLLVNAAHMANVPGRKTDVQDCVWIAQLLECGLLRGSFVPPPAIRELRDLTRYRKALIQDRTREANRLHKVLEDAGVKLATVASDILGVSGRAMLTALVAGTTDPAVLADLARGKLRKKLPALRQALTGRFRGHHAFLVTQLLAHLDYLDETIATLSDEIEGHLRPFAREVGRVQTIPGVKQRTVENLVAEIGVDMTRFPTAGHLTSWAGVCPGNNESAGKRRRGRTRKGDRWLKITLIEAALAAIRVKGSALGARYRRIARHRGHKIALVAVARAILEIVWHLLTHGTTYTELGSEYIDRRDKEQAARRYVRLLENLGHRVTLEPAPIAA

SEQ ID NO: 71191 - protein, 338 aa, unidentified
MTCYSGIDLHSTNSVVVVSDEADRVLYQRRLPNDLGTILAALQPHRAQLAGVVVESTYNWYWLVDGLQAAGYSVHLANPAAMKRYEGIKHSGDETDAAYLAHLLRLGILPTGYICPPAERAVRDLARKRSQLVRTRTAQVLAVENVFARETGGRMSANVIKRLEAAALGEFGLSEDVTCSLAANVAVIQALTAEIGKLEARLRQRVRLRPQFRVLFTAPGIGEVLATTIMLETGPIERFAAVGNFASYARCVDSKHLSNGKKKGQGNVRNGNRHLAWAFIEAANFARRYCPEARRFHDRKRTQTNGIVATKALAHKLARACYHMLKDGQPFDVKRCFA

SEQ ID NO: 71192 - protein, 308 aa, unidentified
MTTIYTGLDIAKLNLQLHLVGRIHDLPNTAAGHRRLLKLLTTQAGVHVVCEATGGYERDVVAALHEAKVAVSVLNPARVRHFARATGQRAKTDDIDAAVLTAYGQALQPKPTAPRTKQEQQLAELIRRRVQVLEILVGQRQQVERLTVPALRRQAQSLVRRLERDVAHIEEQLKALRTQAAILDARVQKLEAITGVGAITALGVLAELPELGTLNRRQAAALAGLAPHPRESGQWHGRRSIGGGRAPVRRALYMAALVAAHSNRQLKEFYQRLRAAGKPAKVALTAVMRKLIVLMNHILKNPNFALQN

SEQ ID NO: 71193 - protein, 357 aa, unidentified
MTPMLTDKVDFVIGVDTHRDSHTAAIVTAAGGLVERLTVATDAFGFRKLDTFAAKHATGRRVWAIEGTGSFGAGLTTHLLERGEWVVEIDRPARPARRDGAKSDDLDAVRAAREALTREHLAAPRARGDREAMRVLLTAREGAILARTKAIGQLKAMIVNAPQPLRDQLRRGTTDEQLNRCARLRTLPSHSVEHRATVRAIRATARRALMLEAEAAEHETELELLVTAACPQLLDRPGIGVITATQFLISWSHRDRIRSEAAFAALAGAAPIPASSGTTVRHRLNRAGDRQLNRALHTVALTRLRFEPTTKAYAARRTAEGKTAREIKRCLKRAIAREVYRIMQTDAASITTVKQAA

SEQ ID NO: 71194 - protein, 394 aa, unidentified
MKTSGLDVHKDTIFCAIYDGNSYSVGKEFSTTTNSIRLLGAYLQSEKVKKVAMESTASYWVPVWDILYEMEFELKLVNSLHIKQMPGRKSDAKDAQWIAELLHKNMLRGSLVPSPLIQELRSYTREYRTLVNQRTKVLTQMDRILVMCGIRLSSYISNIDSKSFMLIVEALIRGETDPDTLVKLVYGNRKNKESGRLKECLTGNMKAHHRLKLTTCKQQFDLLENQIQLYLNEMQKLCSEHFSEEISNLTTLPGVSQISAMIIVAETGGDMSAFENSGKFTGWTGLRPRNDESAGKFKSTATTKGNTIIVQVAWAASRTKGSFFMDKFTKLAIRKSRKKALVAIGRKMLVIIWHILSEKTQYNPNLVHIYDPVKVEHKIKYHEREIERAKKLIV

SEQ ID NO: 71195 - protein, 349 aa, unidentified
MSRKQSNPTVIGIDIGKNNFHLIGLDDAGEIVMRRKLSRRQLAERLVNLPPCLIGMEACVGAHYLSRRLLALGHDARMMPAQYVKPYLRGQKNDYRDAEAIAEAVQRPRMRFVTPKSVDQLDLQSMHRVRSRLVRHRTSVINQIRTLLLERGIPVRQGARFLFAALPEILGQHGDLLSPRMEQLMMDLSGDLRHLDERLEVITEEIGAIAKENQACQRLMTVPGIGPVIASAMVATVGDGTAFDRGRDFAAFLGLVPRQMSTGGETILGRISKRGNTYLRTLFIRGAKIILMHSKNWPKHRFGPWLEAASKRMHKNVLAVALANKLARIAWSVLRHGDDYDPKGLFLAA

SEQ ID NO: 71196 - protein, 422 aa, unidentified
MQVLYERCAGVDVGKDVIAVAVRLPGGGPGGRVTVKRTYKTFYGVLAEAAKWLVSQGVTHVAMEATGIYSMPVYHALLEHGDFEQVLVCNAGHVKNVPGRKTDLADAEWLAQLLECGLLAGSFIPPADVKAVRDVIRYRAKIAQQRVSEVARLGNVLQDAGIKIDSVASSIATKSGRAMIEALADGERRGQVLADLAKGKMRSKIPDLSMALEGRFGDHHAMLCRLHLDHLDHLDAMIAKLDAQVEKMMQPFRAARDLLITIPGIGPLSAAAVISEIGADVRAFFPSAAHLASWAGLCPGNHESAGKRHSGKRRPGNKHLQPVLVECAWAAVRHDGYLKALYHRHVMKWGGYRSPIAKKKAIIVVAHALLVIIWHVLATGKPYGDLGADYFTRRQDPDQETRRLIAKLEALGHRVTIEDTAA

SEQ ID NO: 71197 - protein, 346 aa, unidentified
MNHYAGIDVSLECSSVCVVDTSGKIVREGKVASEQEALIAWFGALGLELERIGLEAGPLSQWLYAGLKGAGLAVELLETRHVRDAFKSMPVKSDRNDARGIAQLMRLGWFRPVHCKSIEAQEVRAVLTARKLVQTKLLDVENSLRGILRGFGLKVGRTTARSFAGRIQELVAGHPSLEGIGEALLSVRAVLLREFNAFEKRVRLMARTDVKARLLMSTPSVGPIVALTYASAIDDPGRFRSSKQAGPHFGLTPRKYQSGEIDRSGRISKIGDGAVREALYQAAHVMLTKPIKGCTELKSWAMRIAKRAGMSKAKVALARKLAVVLHRMLADNAPFNPIAKAAALAI

SEQ ID NO: 71198 - protein, 363 aa, unidentified
MKIIGCDFHPGFQRIAMVDTETGELSKHRLDHASGEAGKFYEALAGQEVLVGVESSGNMLWLERLLVRLGLALWIGDPTAIRASAPRKQKTDERDALHILQLLLEHRFPRIWVPSLEERDLRQLLKHRHTLVQMRTRVKNQLQHIALNQGFQKKHKLWSRPGREWLQALELEPWTKRRRDDLLKMLQEMDTRIGELDDAVAEAAQQCREAELLMSHPGVGPILSLATVLTLGDVQRFAGSRQVASYVGLIPSEDSSGQRRRLGAISKQGNSFMRFLLVQAGLTAARGDAGLGRVYKRLAQKKHHGVAKVAVARKLLVRLYWMLRTNQRYPVVVRMQGSPSHPVAEKAKAEPLSGRPASQGRKQ

SEQ ID NO: 71199 - protein, 349 aa, unidentified
MRFYNQPHAAYCGVDLHARTMYLHVLDAQGQTRFEKNLPARPDAFLDAIAPWRNGLVVGCECMFAWYWLADLCEDQHIPFVLGHALYLKAIHGGKTKNDRLDAAKLAALLRGGAFPQAYVYPRAMRQTRDLLRRRTFLVRQRAQLLAHVQNTNSQYNLPPIPQKLSFAGNRDEDELAGRFAHDSTQASIRADLRLTAAYDEQIRTLELHLTRHAKVDDPVTYQLLRTVPGIGPVLALILLYEIHDIARFPEPGNFLSYARLVRCEHESAGKKKGFGGKKIGNGYLRWALGEAACLMLRCHEPAKQWLARQQKKGSKARALGILAAKLGRTVYHLWRKQVAFDARRFLTS

SEQ ID NO: 71200 - protein, 360 aa, unidentified
MKLDAALDTSATTTAICVVNSRDGAIVLETTVPTNPKAIFRALEPFLPRLHLVGHEATGWSAWLQRELEARGVPMVLLETHHTARMLEAQRNKTDKNDARGLAQIVRSGWFKPVHAKSDASNRMKLLLAHRRTLKRKLMDIENEIRQSLKMFGLMVGRRVQRASFETRVTALVADDPLLGSTTACMLRCWAALWTEYKRLHALLVQVVGRDELCRRFCGIPGVGPVAALTFKAAIDDPARFAKSKIVGAHFGLTPKREQSGTSVDHDGHISRRGDGEVRTALYEAANAMMTRSQKHCAVKAWGLRLAAKRGHKRALVAVARKLAVIMHRMWLDGSEFRFAASDQPAGKERNPAPAAPACA

SEQ ID NO: 71201 - protein, 381 aa, unidentified
MKRNKKLTPTSHQQTEATAEVIKLGIDIHKSKYVAIRQIDNQPPQSPQSFTPDEFLVWVQRQRLLAKRVVSCYEAGCFGFVLHRKLEEVGVENFVVRPRNWDEYGSSVKTDARDARELCGHLDRYLAGNDRALCVVRVPSLEQEQERSLSRQRETLAKERKRLQNVGTSSGLYHGVDVPSNWWKPKVYANLCAEIPDFLKRILEPFQQILEVIDKQLRETTAREERKANRKIPVGLGALTASILDQEFVDYTRFNNRGQVSSFTGLCPGESSSGNKRQQGSINKHGNPRIRHMLLEAVWRMIQFQPDYKPIIHWKDRMANESFGAAKKKKMAVAIARQFSVDWWRIQTGRIQPEDVGLRIEYPSAYSTRALREGRISKVYA

SEQ ID NO: 71202 - protein, 313 aa, unidentified
MTTLTLGIDVSKQNLDVFDSHFQKHQRLKNTGEDMDQLINLYASFQDKQAIIESTGVYQRLIHQKLEEAGFRVCIVNPYKTRCFAKSAGFLAKTDKVDSKMLCVYGQKVDCRVTPYASSAQQELESLVHYKQILKDELIRLRNQQEVGHASPLVQTLIEQQTKEFQSHLAQIEKQIETVLETDDNFRHQCEKLETVPGVGKGTIATLLCSLPELGTINRKQLAALVGVAPLAVESGTLRGKAMIKGGRAHLRKALYMPVLSCIRCNQPLKMFYDRLRQKGKPPKVALIAVMRKLILTLNVIIKTNSSWKQKNA

SEQ ID NO: 71203 - protein, 343 aa, unidentified
MQAITVVGLDIAKSVFQVHGVDALGSVVVRRQLKRRYVVAFFKKLQPCLVGIEACATSHHWSRELQALGHTVRLIPPAYVKPYVKRQKNDAADAEAICEAVQRPSMRFVPTKTPEQQSCLMLHRTRHLFIRQQTAVINTIRAHLAELGIVAPVGRNGVEQLLYAVADTKDDRIPDVARACLKALGALLGKLKAQILEFDRQINAWHRSNETSRRLDELPGVGPALATALVASVADPKAFRSGRDFSAWIGLVPKQNSSGGREKLGSITKQGDRYLRSLFTTGALAVIRYAKIHGTKHRPWLARLLARRPTKVAAIALANKIARMAWAMMAKGESYREPVALAR

SEQ ID NO: 71204 - protein, 412 aa, unidentified
MTAIDQFAAHVGLDWADKKHDVCVQFKNGERTFHVIEHTAEALDAWLNALHKQVKGKIAIALEPKKGPVVYALQKYPFITVFPVHALSLARYRQAFSPSGAKDDPQDAELALELMLRYPQKIKAIEPDNADIRLLQQLVEQRRQLVEDKRRFVNRIINTLKQYYPQPLEWFSHRGSLLLCELIMRWPSLQQLKRARRDTIRNFLNAKGGRAIALTEQRVASIDNAIPLTTDPSVIEANALMATALATQIKVVSEIIKTYDERIETLFGTLPDAGLFKSLPGMGPCMGPRMLAALGDNRDRFNSAEEIQNYAGIAPVTERSGQKSWVHWRWQCAKFVRQTFVEWAAKTVNSSYWAKLYYQGQREKGKSHQSAIRALAFKWLRIIYHCWKTRTRYDEAKYLLALEERKSPLLMP

SEQ ID NO: 71205 - protein, 350 aa, unidentified
MTSVARHFIGVDLHKKALQFCVLDDRGNLLHEQAVKIAPDAAGELVFASFQPWRGTCRVAVEAVGMNRWFVNGLQARGYDVVVADPIKLNLKVLGKKTDKRDAREIARRLWLGDIDRDAKTWYPDDAVYGDRKLVRTRQQLMKHRLGLNNEIRAQLRAYNISPPARDLHSKKGIAGLLEIQMPNAVLTACLHALTRAMADIETQIGTLTEQIDKRVASDERLQRLQKQLPSMGAITTLTLVCELGDVHRFRNAKAIASSGGVVPRVYQSSDTAHHGRMTKRGSRSLRSVLGQWSVRLMARDDLVSAWAAPKKQRLHKNKVRMMLARKLLVGVAVSLRRDEPFDLQRCLGR

SEQ ID NO: 71206 - protein, 423 aa, unidentified
MDHVGIDVHKKESHICIVAEGGELIERRVRTEVGRLAEMFEQRPHARILIEASTDSEWVARCLEGLGHEVVVADPNFAPMYATRRRTVKTDRRDARALADACVLGAYRPAHRLSDAQRHVRGRLGVREALVRTRTRYISLIRARLRQDGWQVPTGSAEGFGRRVLALRLPGRLLSEVAPLLAVMRHGDRQLAYADERIAAFTATDPRVRRLRSVPSVGPVTAAAFVAALDDAQRFRRAHEVEAYLGLVPQEWSSGESQRRGRITKAGSRRVRWLLIQAAVSMRRLRDPRTAGLREWAERIAARRGRKIAVVALARRLAGILFALLRDGTVYESRLGQAPPPAGRAGLREEVQMNDVAALPHRLHTRPWPGRTGMTTYSDQVDSLHASQSHDLRATHISVSPLAGGGPCGHDVSGSHCESKGGR

SEQ ID NO: 71207 - protein, 410 aa, unidentified
MQVKYERCCGIDVHKDTVVACVIVSKSSGHVQKTIRTFATTTSGLQALAQWLTETGCTHVAMESTGVYWKPVYNLLEGAFELLVVNAAHIKKFGDKTDVTDAEWLADLLRHGLLRGSFIPSALQRALRDLTRYRTRLIDDRSREVNRVQKVLEDANLKLASVASDVMGVSGRAILAQLIEGQRDPVVLADLAKGRLREKRAALEQALTGRFTAHHRFLLVQHLSHIDYLDEQIAQVDAEITEQIRPFQAAVDRWDQLPGINQRGGQVIVAEVGADLKPFADGAHLASWSGMCPGNQESAGKRQSGKTHKGDKWLRRALVEAAHGAARTKNSYFATLYHRLAGRRGKKRAWVAVGHSLLVTGYTLITRQVDYQDLGANYFDELNKEAVKRRTVKRLQQLGFQVELKPIVAA

SEQ ID NO: 71208 - protein, 269 aa, unidentified
MEYYVGLDVSLKQTSICVVDQTGSVVREGVVDSDPEAISVYVRSKAPDAVRIGLETGPTSTWLWTDLKRLGLPVICIDARHAKAVLKMQINKSDRNDAIGIARIMQTGWFKEVHVKDIDSHSVRALLASRALLVKIKRDLENHVRGLLKNLGLVIGRAKFNVFAVRAEELIEDRPELVAAVRPLLEARTAIERQLSELDRKVMKLARRDAQVRRFMTVPGVGPITALAFKATIDDPARFARSRSVGAYIGLTSRRHASGEVVRPNLQMR

SEQ ID NO: 71209 - protein, 344 aa, unidentified
MATIAHIGIDLAKYVIQVHGIDANGKVLLKKMVKRSELIKTIMNIEPCVIGMEACGGAHYWARRFSEFGHEVKLMAAQFVAPYRKNQKNDANDAEAICEALTRPSMRFVPKKSVDQQVVLSLHRTRALLVGQRTAIVNHMRGLLLEFGIAISRGIQKARNQLPGILEDGDNELPDIVRELIAHNVQHLKLLDARIGDLDKQLDHLAKQSELSQRILKIEGIGPLCATAMIASIGDAKLFNNGRQLAAWLGLTPKQYSSGGKTRLGRITKGGNRYLRTLLIQGAKSALFQCARKKDQKSHWAMQIRERRNHNIAVVALAAKNARTIWALLAKNREYQHDYQPMAA

SEQ ID NO: 71210 - protein, 321 aa, unidentified
MIKDRKIYGIDISKSVFDIYSRSKGHAQLKNDESGFKQLLKNLPKQALVVMEATGYYHYRLAQFLYKKGVSVSVVNPLSVKRFVQMKLAKVKTDKSDAKAICEYGTINEVPLYNALTDVQAECLQLFRLLDSYVKKSTATKNKLHGEDVLGVPSKTVYRSLKRNLIHLKKEIKLLEERLLELVKQDQQHQLTLLQTIPGIGMKTALFLIVVTDGFKKFETASQLCSYVGITPTTRESGSSVRGRSRISKVGNKKLRNLVFLAAFSAYKYNKACKALFDRIVAKGKSKKLALIAVANKLLKQAFAIAKSGLPYDENFVSRLA

SEQ ID NO: 71211 - protein, 378 aa, unidentified
MGGDSTVVGLDTHKVAIHVAMLLPDAIQPVQWQIANEPAAVRHLARKLRRAAEGEVRCCYEAGPCGYALQRQLEAAGVSCTVVAPSLIPVKPGERIKTDRRDARKLAELFRAGLLTAVAPPTAAEEAVRDLCRAREDAVEDRLRARHRLGKFLLRRGLIWRGGKKAWTQRYRDWVRGLRFEDAADQAVVATYLLAIEQVEERVRTLEGQLETVAQAEPYRERVGWLRCFRGIDTVTAVTLLAELHGFQRFTTPRALMAYLGLVPSEHSSGEAQHRGGITKAGNLHARRLLIEAAWHYRHPPAIGKALRRRRQGQPARLLAVADRAQQRLHRRFSRLSARGKMANKVVVAVARELVGFIWAALTPAAEVRTPRRAARTA

SEQ ID NO: 71212 - protein, 403 aa, unidentified
MISVGVDVSKGKSTVCILKPYGEVLMSPSDYEHTQRDLKKLVDQMDSFEDEIHVTMEATGNYHFPIATYLKKRDYDVRIVNPLEMKRYRCQGIRNPKTDSIDAIMIAQYGIDFWFRSFQEYVASDERMELKTLGMQYFKTMKTRQDRYLVLESVIDRTLPGIGGVLNGYDKSTGKDKKSDFVYDFYHAEKITVYSENRFCDRYESWSKKKGYRYSEKEARQLYSIAKDSIPTLPSSKNTKLMIQDAVKILREVDSALYSILNRMNVIAKKLPEYTTVMEMKGVGISIGPRLIAEIGDPRRFHSAKALIAYAGIDAPPYQSGKYTGTERHMSKRGSRIMRKLGFELMDTINKHQKLYAGDPVCEYFLAKRNEGKKYRVAMFAAYNKFLRIYHSRVSSVLNESVK

SEQ ID NO: 71213 - protein, 401 aa, unidentified
MALVTIGVDPHKASHTAVAVDGGEAVPGQVRVRASAVQAKRLPEWAAAWPERTWAVEGAGGLGHLLARQLVAAGERVLDVPPKLAARVRLLAAGAVNKNDPDDARSVAVTALRSRALREVVPDDHSTVLKVWSKRHRDLGRSRTQIACRLHSALCELVPGGISKEITAARAARVLAQVMPSDAVQQARWELAAGLLDDLRRADERLREVHKKLTAAVQAAGTTLTEIFGVGPVIAATVIGEVAGISRFAGQDGFAACNGTAPIEVSSGNRTVRRLSRRGNRKMNHAAPMAAVTQVRCKHSEGRACYDKKLAEGKTVKEALRALERQVSDAFYKHLKADAARNARGPGGQAGNVPVATAAGSHPKRQLFGQATPGPQPTLRPQPRTRRNSTSQPRGQITTSP

SEQ ID NO: 71214 - protein, 390 aa, unidentified
MTIIGIDIAKYHHQALILSENGEVIVNSFSFENNHQGFQEFHHVLLSLDPTHKIKIGFEATGHYGNNLKNFLMNLGFDFMEIHPVLINQFSKAYTLRKTKTDKLDVKVICSYLTSVDYQPYLTESYHINQLKSLTRFRDSLVKQRSLQLQSMTNIMDHVFPEFKPFFKNSLKSATAIYLLTSFETPSRIARLNLNSYNKMKSQLHRTISYARFCELKTLAKNTIGIEDPLRTFQLQACLKLYLEYHHQIQETEQLIEYEFSKVTSHIQTIPGIGLISAAGIYSEIGGISRFNHPDKLVSFCGLDVSYYQSGEAEFTGRMVKRGSSYLRQYLMNVATTSLIHNPHLYEYYSKKRREDKHHRVALSHVAKKLIRTIFKLETDQIDFDIEKVR

SEQ ID NO: 71215 - protein, 352 aa, unidentified
MSKVKTLSFEGETICVGLDVHKTNWKVHSRMENVDLAAFSQDPNPQVLSNYFKKNYPGAKVKVVYEAGFCGFGIQRSLKQLGMECIVVNAADVPSSDKERKRKDDKRDARKLSRELADGSLNAIYVPSVEMEQARSLIRQRYRLVQDQTRCKNRIKHMLMFNGIRLNRDKERWSNQYVKALEEVQCDSAALRQALNLAIEQYKQIRLILKRAVEAIGNMAIQSPFAQVQQYVQSIGGIGLINGMVIQTEIQDMHRFKTLSQLCDYAGFVPDISSSDKKMVVKGITYRCNEFLRKAIIESSWMLIRKDPAMLMKYTEYRNRMSKNKAIIRIGKRRVVRQHCPTLFRYGFINYK

SEQ ID NO: 71216 - protein, 389 aa, unidentified
MSQPFDASKSLATLEQDNTVIAVIEMSQSKWLVAAVVPGVKRQPLKKLQADEEALLKLLNRWRTEAGQTGREIKRVVVAYEAGRDGFWLARWLRTRGVEAYVIHPASIAVSREHRRAKTDRLDTELLMRAFLGWLRGEKRHCSMAAVPAAEEEDARRPNRERENLVTERTRIANQMKAILARFGIRSFKPTLRKAAQKLDGLRTAEGTPLLENTRAELSRHLARLRVVREQIRAIEQKRLHKLAAAPAEENGPHVMVRLIARVFGVGVETADMLVNEVFARHLRDRKAIARYAGLTGSPDESGKRRRERGLARAGNARVRRGMIQLAWCFIKFQKNSALAKWFDARTADGRGSTRKTMIVALARKLLIALWRLVTTGEVPEGVILRPAA

SEQ ID NO: 71217 - protein, 330 aa, unidentified
MKITEILGVDVSKSSLDCFLYSRQLSLEPTTNNEKGFKSISKWLKKIVGKDLSSLMVVMEHTGIYTWQLEQYLHKHCIAYVKRPALDIKRSVGMVRGKSDKVDAGFISKYGWLRKEELTAVKPLSSKQFSLQQLMSYRDKLVADRASYQSRFKELSEQAGKNLNEKMGASAQYIMEVLAVEIKQTEAEIKKLINEDEELQTNYELIISVVGIGFATAVHVLISTENFTRFTDPRKFNCYCGVAPFEHTSGSSIRGKTRVSHLANKKLKSLLTMAAISAVRFDPELKAKYEQKVKEGKAKMSALNIIRAKLIERIFAVIRKQTKYQLRLAA

SEQ ID NO: 71218 - protein, 399 aa, unidentified
MTPQDFDIWLGIDVGKTDHWATAINTVGEQVYSHSLPNDEARLRQIYTDLATEGQVLVVVDQPATIGALAVAVAQAMGIAVAYLPGLAMRRIADLYPGNAKTDQRDASIIAQAARTMPHTLRTLRTLDEEEAELGMLTGFDDDLARQITQTRNRVRGLFTQIHPRLERVIGPRLDHPAILAVLQTWPVPAALKKAGRARIGAKLKKHGARRWQTWSEEITDALATQTVTVTGTNAASIVIPHLTATLEGLYKQRGDIEEQIEAVVTDHPLYPVLTSMPGVGVRTAAVIIAEIAGKDFASAAHLASYAGLTPRTRQSGTSIKSETVSHTGNKRLKRALFLSAFASLRSDPISRRYYDKKRLAGKRHNQAIIALAHRRLTVTYAMVRDGTFYETKPAKLAT

SEQ ID NO: 71219 - protein, 394 aa, unidentified
MKLIGIDIGKNKHFFCIMDQQTGEIISQPISFSNDKEGFDFLIQKIKSYSKDSVLIGMEDTGHYHFALLKYLLDLQYTVALINPKTTDFNRKIQGGITKNDKLDTINICDVLDTPERKKQYRISKVNSFDLYEQKQLTRHHHNLKEEENVYKNRLQKCIDIVFPEFNKLFNSKYGTVYMNILKTFGSAKNIANTDIRTIRKCFEIEGRGNRISLTPERLKECARSSIGISSSAEVIQIKHLTAQIELIEEQLTEIDKKIEEFSIQNNSPILSIPGISHFSGTSILAELGDISNYSKPSQIIKFAGVAPLHYESSQFNAQHTAITKKASKYLRKTLYQIILPVIRHNPVFNKYYQLKISQGKGHRCAQGHCVRKLLRIIYHLLKTNQQFDPQLLR

SEQ ID NO: 71220 - protein, 414 aa, unidentified
MTKSYPTPEAAILVAVDIAKDHNEVLIELRHNHRRRFRVANTLEEYERLVAYLRQFDTPALFGFEATGNYHRPLAYFLHARGFELRLIPTMALARTREAMHNSWDKNDPKDAQVILHMLKTGLSQTWHDPLVSGTNDAQELSKTHHQVTLARTRVWHRLRNHYFPLYFPEIEHFIRSDHSDWLIQLLLQFPTPGSITSLASEDFAAQAWSLVGRKVHKAALLAEIYAAAQRSIALPVPPDGAAVAMLRLVLEEYLMLGRMRESIAQQAEIILASNADRRRLMTVPGVGPLTALTILAEAGDLRRFAHYRRFLKFCGMSLSTQQSGRFRGISRLSKYGNARLRTAFWMAAKTAVRMRENSLRRKFDRYVRANPLDADLRRKGYSAVAAKLARIVYGLIKNGTDYRPFFEEAIPGG

SEQ ID NO: 71221 - protein, 433 aa, unidentified
MNTPHPYDLVIGLDRSDKKADLHLITTATGQRRSQTIDTAPEALWEWLLQLRQEQPQARVGLCLEQPAVHLIAFLESYEWIMLYPINPITLQKFREAFVTSRAKDDAKDALYLAELLLTHHDQLQPWAPEDSATRAVQQLVFHRRAVVDERTALTNRLIALLKQYFPQALVLCGEDLWRPLATRFLLKWSSLQAVQKAKPATLKQFYYLNGSRSAKRLEQRLALVEKAVPVTDETALIESFALRVQLICRQLQLVQQTIQSYEKQIASAYAAHPDREIFASLPGAGPVLGPRLLASMGSQRERFGAAADLQHYTGVAPVTKRSGGSCYIHRRYLCPKFHKQSFHEYAKESILWSRWAAAYYLQQRIKGCPHHTAVRALAYKWQRVIWRCWQDRTVYREEIYEAALRKNGSPLVALFDKVELGKSPFKNPAKKS

SEQ ID NO: 71222 - protein, 411 aa, unidentified
MDRVVERCCGLDVHKDTVVACVRTPGEGGSRHQEVRTFGTTTAALLALRDWLVTEGVSLVGMESTGVYWKCPYYVLEDELECWLLNARHLRNVPGRKTDVGDAEWICQLVEHGVVRPSFVPPKPIRELRNLTRYRKAQIEERGREAQRLDKVLQDAGVKLSSVATDIQGKSARAMLAALVDGERDPEVLARLALGRLRKKVPQLEEALVGRFGEHHALLVRTILAKVDFLDQAIEELSAEVDRLLAPFAAEAELLRTITGVDRRTAEGVIAEIGVDMGRFPTSGHLASWAGMCPGNHESAGKHKGGRSRKGSKWLGAPLAEAAAAAGHSKGTYLGAQHRRLTGRIGYAKANKAVGHSILVASWHILATHTPYQDLGENWFLRRRPEAHARRLARQIEALGYTVTITPTQAA

SEQ ID NO: 71223 - protein, 358 aa, unidentified
MARFSLSDLKRFLAVDPECPYWMGVDVHKNSYHIALRRDDESIFTWSAPASPLKMLEMIIDLRIPIEGVCYESGPTGFTLARTLENAGILVIVGAPGKISRSIIKGSKTDRLDCIKLACFASKGLIKPIAVPTETEESERSILRRRNQLVDEIRRCKQRIKSMFLYHGFDIPKSTTYWRKGCLDELKSTPLPSGMKMTLLSHVRELEYMNEELNIVMKQLKDICQRPEHRKVVESLKSVPGVGDVVATTFLLELFNPGRFGRAEEVASYLGLAPTVHHSGEKTPRGYLVPIGQTRLRSLLVEAAWIWKSRDDYGQQQYNKLISRTGIPQKAITALARKLSIILWRLSIEQRAYRPVVI

SEQ ID NO: 71224 - protein, 433 aa, unidentified
MRSLERRRPDFTVGPVRSRLAPAERCYGAGGEDGNFVAYINRWSAAMPQPNDLSRSLVALDQDSTIIAVVEMSQSSWLVGGVVPGIERQPRKKQEPSPERLLALLHRWRDESVRAGRTITRIAVAFEAGRDGFWLARWLEARGVEAHVIHPSSVAVSREHRRAKTDRLDTELLRRGFLGWLRGERGHCSMARVPTIAEEDAKRPNRERECLVKERTRLVNRIKGTLARLGIRNFKPTLRQATERLATVHTPEGTPVPPNALAEMQRYLARLRFVVGQIKQIEEARRQRLEEEPECGRHATVRLLARVVGIGIETADMLVNEVLSRPMRDRRAVARYAGLTGAPDESGAKRREQGLAKAGNARVRRGMIQLAWRFLRFQKNSALAQWYQARTADRRGATRKTMIVALARKLLIALWRFGTIGEPMDGVTLRPAR

SEQ ID NO: 71225 - protein, 412 aa, unidentified
MEGETVIAGVDTHKDVHVLCLLDGLGRKIWSGSFRADPEGYDRLAEAIGDPGSCLVVGVEGTASYGAGLTRRLAELGYNVVEVLRPKRDKARPGEGKSDPLDAERAARKAASGRGCSVPKSQDGWVEAVRQLYVARRLAVATSTSCVACAKSMLTTAPGALRERFRGRERPKDLMPLLARGRKAGDALEESVLASLRSVAAVWKEARSQVESLDERIRALLEANAPALLGVEGCGTTTAAALVVAAGDNPGRLKGEAAFSMMCGASPIPASSGKTDRHRLNRGGNRQANWALYEIAIKRMAYDERTRRYVARRTSEGKSRREAVRCLKRYIAREVYRVLMDPNPDGAAPEGPELAKMRKAMRVTQKQAAAGLGMSAASLGHLEHGRRRSTKLERRYYELLCELKGALPQTAY

SEQ ID NO: 71226 - protein, 357 aa, unidentified
MKQQGKRLDFSKQELFIGLDVHKRSWTVTIRIENLELKTFTMKPSSEKLKNHMEKHYPGGNHNSVYEAGFSGYWLHRELTEFGFNNIIVSPTDIPTSGKERLRKTDKVDSRKLARELSAGNLKGIYVPSLLFQELRGLSRQRYQQTKKLIRIKNQIKGYLSYYGQHLPENCELQHWSKKFINHLGTLEFSYKMGKEQLENYVEELLVLRERKLKILQSLKTHLQNHNLYNIIELLLSVPGIGYITAITLLTEIVDIHRFKNTDSFASYIGLVPSTRSSGEKDKVLGLTVQFNRYLRQLLVEASWVAVRNDPALTLSFNDYSKRMCKQKAIIKIARRLLNRIYYVLKNEKKYVYSIVA

SEQ ID NO: 71227 - protein, 428 aa, unidentified
MSERDYNRQAAKRQRISKTTLIVGVDVGKAFNAVGCMNKDGNVLGSCSKLYNSREGFEQFVKMIEGLKTRHRFRDVLIGMEPTGHYWRKLAYFAKEHGYEVRFVRTTALKHHRELDESSSAKSDQRDALTIANITREGKYIDTVIEDGVLRQLRTLSKARERLLRYSVSAKNSLHAALDDYFPELHEIFWSMGSRSLWVILEKCPFPEDVMSMKVSTLQELIARSSRKRAGSARKARALYEAAQKSIGVKQIGSADRYRLRMCLEEVKRTVLTLKDMDRQLKCMVKDIPSAIYLMSIPGIGPLSAAVFLGELGNPAHFHNARQIVKYSGYDPQETDSGSWVGRKFISKKGRWLLRKYLFFMSMRVVVLSKYFQEYYHRKLETKNRVGQQPRRKEILCAVAIKLIKVIFALLRDKRSFEDTASAAVVIA

SEQ ID NO: 71228 - protein, 340 aa, unidentified
MKAEECKGFWVSADVSEETLDVSVAQMDTPLTERKTLPVLHVEKTPVGLRNMVTWVRHCLTDKGRVLGICVESTGRLSRRLADELGKVEPSWPAVSIVNPKRVVDFGRSLGLRDKTDRIDATVLALFGVTFRPRPTPAPPTIYGQLRELARAYDSLLTHKQSLDNNRRDNTDEFVCQCLRECSESLATEIAELEKRARQLVKKDPPMKRDMALLDSIRGIGFKTAWVLVAELGDLRTYSRKQLVASVGMYPRQFRSGKSVEKRPRLAKGAHPLVRKFLYNAARSIYQSQHNTLKDYLVRREKEGRTSMQCIVGIMRKLLLIARAVLIQGKKYDPRYGQVR

SEQ ID NO: 71229 - protein, 383 aa, unidentified
MTGTEPQAWETGLMENITYVGLDVHKATVCVAIAEGGRSGEVRQIGVFENRPELLLKLVARLSKGGRGLSFCYEAGPCGYGLHRLLSGRGHDCVVVAPSLIPMKAGDRVKTDRRDAVMLAKLHRAGELTPIWIPDAAHEAMRDLVRARATAGRVLSKARQHLQSFLLRHDQIYRGARAWTLAHRRWLTTVRFAHPAQQIVLQDYIHAVQDAEARLDRLTRQIEELLPNWSMAPVVTALQAMRGIALVVAVTVVAEVGDFRRCANARQLMAYLGLVPSEHSSGASIRRGGITKAGNALARRVLIEGAWTYRMPARVSRKLHDRNEGVSPVIRDIAWKGQIRLCSRYRRLAAAGKPKVVVTTAIAREMVGFIWAIARIAQPTLQV

SEQ ID NO: 71230 - protein, 316 aa, unidentified
MTQSSTLSIGMDVHKDAIAVAYVAQEHHAEVVSLGNRGTRQCDIDKLSRRLPSKSSHLVFVYEAGPCGYWLDRYLTKKGHVCWVVAPSLIPKKPGDRVKTNRRDAITLAPLMRSGDLTPVYVPTVDDEAMRDLCRAREETIHDLKAAKFRLKAFLLRHDIRYTGRATWSPAHLRWLSEVVCPTPAQQIVFQAYVRAVTEHTERLARLEQELTDQVPTWRLAPVVDALQALRGGPCTVAVTTGAELGDLTRFEHPRQLMNYLGLTPSEYSTGERRRQGGITKTGQQPCPPCPGGRGLGLSLPRQSPPASPTTSGEST

SEQ ID NO: 71231 - protein, 441 aa, unidentified
MKKVISFEQVNEAAAGIDIGSEKIFVSPDGTIVDNFGTYTGEYHRLISYLQQRSIKRVAMEATGIYWIGLYNLLEAAGIRVSLINPKETKQKKGKKTDVRDCRWIQKLFSAGLLKESFIPEGKMLEIRYLVRERLDIIEMGSTYVNKMQRCLELMNIKLTEVISQIHGASGMRMMKAIISGERNTEALLLLCDERIKKQKSIEIIKALEGNYNDTWLFMLAQNIRLWEQHQQQITQIDKRIEKLLQDLTADKKVDESVIGKVKPVRHHKPQINNLHETLVKFFGVNVTSISGINSYTLLRLIGETGADMSRFETVKHFASWCGLSAGHHQSGKRNKWIKQAPCNKAGQIFKEVAQSLENSKYIAIGSFIRRLKTRRGASVAYKAGARKVAEAYYNILTKGTAYVEQGLKQYEEQLKKRELIILKKLAKKHQVQIVEKQEAA

SEQ ID NO: 71232 - protein, 371 aa, unidentified
MNSILYVGMDVHKDNYTLCCYGFDRDKVEYRQTVPSDYRLILKYLEQARRKYPEEVEFICGYEAGCLGYSLYHQLTDHGVKCIILAPTTMGITNTNRVKTDRKDAANIARCLAFHTYSAVYVPDGEDNAVKEYLRMRDDQKLALKKIKQQITAFVLRLGKQYTGGKSLWTENHLKWLRGLDLTLLEKETLQEYLITYDYLTDKLERLDARIEELARNERYGERVRRLGCFIGIKPHTALSLLVEVGDFRRFEKAPNFAGFLGLVPGENSSGGGRNRLAITKAGNSHLRRLLVESSQSYSRGTIGFKSKELKKRQEGNPPEVVAYADRANERLRRRYYRMTLKKGAKRNVAIVAVARELACFIWGIMTDEIA

SEQ ID NO: 71233 - protein, 313 aa, unidentified
MKKTICGVDVSKARLDVCIEPGRRFASFDNDAAGIAELGRFCREHAVTLVVMEASGGYERRAFVELWETGISCALTNPRNVRRYAEAMGILEKTDRIDSSIIARFADAKSLAPTPLPSQAQQRLKALVARLRQVTDDLTVQKQRRASLLDNPEMLASLDEVIALLKRQSRSLEGEIASMIDDDPLWAKLAETWREVKGVAGRTVARLHAEIPEIGTLSNKAIAKLVGLAPIANDSGKRKGKRPTRGGRAGVRSILFLVAAIAARYDKSLGEFRDRMLKAGKEKMVIRIALARKLLVRLNAKARDARAEYANAT

SEQ ID NO: 71234 - protein, 354 aa, unidentified
MNTTQNSTKSKIVKVIGVDLAKDHCDVIGYDENGIICLRLDGCSYAKLREILANLPQAVVLMEACKGSMFHARSIADLGHEVRLVKGTDVKALRNVKHKNDLRDAAYIANLYFVPGIKYVYIKSQQQQSLQFLQNEYKSLQELRIQVGNQIHAGLEEFGCPVRKSSKFIKTRMVAHLEKHAELIPEDVMASFKRRREIWLNLLQQEEEAKRRLEQVAATDANAKRLMTVPCVGPQTAVGLLVHVGVDFGRFKNSRQFAASLGLVPKQNSTGGNNTLNHITKCGPKSLRSNLVQCAQLVLMYAEKWKGNFGDWVRKMRDSGKKHGVIVCAIAAKLARIIYRLMKDKVDYTPILSC

SEQ ID NO: 71235 - protein, 345 aa, unidentified
MKIVGCDLHTRYQQIAMLDEETGELVERRLEHANGEAKEFYTSLKGPVRVGIESTGHTRWFERLLAELRHELWVGDAARIRAADVRKQKTDARDAALLLELLLSGRFPRLWRPSPEDRDLRQLLWHRQKLVWMRNAVGNQLHALAMGEGICRKKQLFTKKGRTELEALKLDPWASRRRQELLRMLDQIDASLKQFDQAVNEQASGNELAVRLMTHPGVGPVTSLAFVLIVGPVTRFQRSKQLVSYLGLNPQEHSSGGRQKLGSISKQGNPMLRGLLVEAGHTAARLDPELRQDYQRLRLRRGGSVAKVAIARKLAVRMYWMLRREINYTQLVRMQGSSRATLVQL

SEQ ID NO: 71236 - protein, 367 aa, unidentified
MDKGTTYVALDDSKRKVVAGILRPGETQPELRELPKEPPLIRRLFQRLRREGPVEACYEAGVSGYDLYRQITALEVPCQVIAPALTPRRPGQRIKTDRRDAAKLVRLFRAGELTAIHVPDEAEEAGRDLLRCREAVRRDVLRWRHRLLKFLDRHGRLYVTGKNWSQRHWGWIRGQHFDLPTLQRTFEATLFALEQARARLAELDKEIEALAETDLYREPVGWLRCFRGIDTLSAMILVAEIEDFQRFSRPRALMAYLGLVPSEYSSGTTQHRGALTKAGNGHARRALVEAAWHYRHRPGVGPHLTRRSEGQPAAIVTHAWRAQQRLHRRYRHLVGLGKRPPVAVAAIARELVGFIWAAMTIRREAAA

SEQ ID NO: 71237 - protein, 343 aa, unidentified
MKTSRVGVDLAKNVFQLHGVDRHGETVLKRRLSREKWISVLIKSAEPDCEVGMEACGGAHYWARLLMAKGFRVKMIPPQFVTPYVKSNKNDANDAEAICEAMSRPTMRFVKAKSVEQQDIQATHRIRSELMCHRTAKGNQIRGLATEYGLVAPLQMASLRSAIPRWLEDAENGLTDRFRALLHGLWDDLLTLDKRIETLNKDIESIAKSDPVAQRLQQLRGVGPLVATALIARVGNGDEFRTGRQMSASVGLTPRQHSSGGKARLLGISKRGDAYLRGILIHGARAVVSQAKNKEDRLSRWVTGLADRRHPNVAAVALANKTVRMAWAMMKHDADYNPEFAAS

SEQ ID NO: 71238 - protein, 359 aa, unidentified
MASKVKKNKVNFKGKMVSIGVDMHKISWRITALVEGDTVLAITLASPNYEAFKKVISRFKGNHLRIVYEAGPGGFDLYDRLTEDGIECIVTPPSLIPTESGSKVKTDKKDSYKLARFLESGMLKAVWVLSPEERAHRQLLRTRRQIVNHRSDVMRQIKSLLLFNSIDVPFKGTQHWRGPFMNWLLKLDLGYEPLNRSLKALVDLFNYLSAEKKKITKDVLELAKEEKYAKRVELLESIPGIGTLSAMEILVELQDITRFKTADELAAYLGLTPSQYSSGEHIRMGHITHAGNKRARTTLVESSWILIGKDPEMKRKYQRIKERRGGKRAVIAVARNLSGRIRRMLLDHVPYELNFQKAA

SEQ ID NO: 71239 - protein, 455 aa, unidentified
MTRTTTCDRPELKPVNVGAAAIDIGSTMHMAAVDPACADTPVRAFGTFTQDLHELADWFKVCGVTSVAMESTGVYWIPAYEILEQHGFEVILVNARYAKNVPGRKTDVSDAAWLCQLHSYGLLRGSFRPDAEIATLRAYLRQRERLVEYAAAHIQHMQKALMEMNLQLHHVVSDITGATGMRIIRAIVAGERNPDVLATYRDVRCHASIETIRAALVGNDRDEHVFALTQSLELYDTYQAKMLDCDRKLESLITALTNKAAKPVGKLFGPRVKTKQVNTPSFDVRAALYGVLGVDLTEIHGLGPSLALKLIGECGTDLRAWPSAKHFTSWLCLAPGNKISGGKVLSSRTRRSSSRAAALLRLAATSIGRSDTALGAFYRRLSSRVGKAKAVTATARKIAVHFYNTLRHGMTYRDPGADHYEEQYRSRVLANLKRRAKSLGFVLQAVPCDAEVAVS

SEQ ID NO: 71240 - protein, 354 aa, unidentified
MTYFVGLDVGLEETSVCIIDSEGRTIREVKVSTEPTAIRSALEGYADRLERVGVEASSLGIWLYRELSPAGLPIIVVEARHMRVSLSTMRNKTDRNDARGIAQMMRLGWYRAVHVKNMEMQKMRTLLAHRKLLKRKLIDIENHIRGALRAYGLLVGTVGRGGYEARVRELLERCDPIFVMTIEAMLDVRRAIFEGFERLHKVVLLAVQHDPVCRRLMTVPGVGPIAALSFKVGVDDPRRFARSRTVGAHFGLTPRRHQSGTSIDFEGRITKQGDVAVREALCEAAASLLLRVRTWSALRAWGLRIAKRSSMLCAIVAVARKLASILHRMWVSETDFHVGFGAKVTQRLRLKPAQ

SEQ ID NO: 71241 - protein, 523 aa, unidentified
MSATRVRQRPRSRRREVLQKPAGVIHVRVQKVGPEHFGIVGVDCAKARSKWMLCDFFGNILIPPTVVEHNRADLEAAVVRLRQAQQVHALDDLIVAVERTGRYHHIVRQAFAAAGYEVRIVHPFTTKRYRQISDPGNKTDDTDLAAIHRAAVNGFALLERPVEPSWRELQLLVRHRRDLVFKTSALSAQIREHLEAALPGFASCFDKLWDRALAWTLLRHFESAPAMHEAGLPKLLELLHRQEVRFQRPTVERVYAWAGQAAPSDEAAALHRRIGLALYDDRTRKTQEILERERDIAGYLTQTPYVLLLSFPGINVVSAADFAGEMGPIGNYANARCITGRAGLCPSRHQSDQVDLRNGPLRRCANRRLRAAILGIADNLILCNHHFNALAVRWRAAGKDPRHTHVKVAQRFCRIAYHMVAGGQVFHHPALQQRHYILDKLLAFHREHDTPLPQTLTGLESAVGHIPPSAHADEAKPLAAELLRIHAGRRRGPQALGDILPLVLARLGVGALQSTESGERDST

SEQ ID NO: 71242 - protein, 367 aa, unidentified
MSGDKYIALDVHPATTVTSVLNAAGRELDGSILATQARPIRSYLEGFCGPLHVTLEEGTYAAWLYDVLEGRVAELVVCDPRHNALLKEGSKTDRNDARKLADLLRTGMLRPVYHGSRSLLPLQELAHSYETLVEDTTRAMNRIKALYRSRGIDCAGRGVYAPRQRASWLEKLPAGAVRLRGELLHEQLDHTRSLRRQARRALLQESRKHGISVRLRAVPGFGPLRAAQRIARVQTPHRFRTRRNFWTYAGLGLVTCNRSEYRLVKGRIVRRTQAVKIRGLNRNHSPQLKELFKSAALSAIRQPGPFKDYYDSRLQQGRDPALLRLTVARKLAALVLSLWKKGGEHYPAASIGGTPQEMNESWTTGRP

SEQ ID NO: 71243 - protein, 412 aa, unidentified
MNLFIGIDVGKLNLSYCAINSDDQCLFQDEASNDLNGASQIKQAILAETKLSDYQKVIVGMEATSVYNFHPTTFLSEDQELQKNQLEVITINPYTSHHFSELFDDGKTDEVDAKQLAELIRVKPLGTSVVRQEKYMALQRLTRERYHLIHQLVDAKNQFLNNLYYRCNTLDQTLPTSVFGSTMMSLITDEELSLDEAAAMPLDQLAVKLQQLGHGKFGNPEEVAKAIKKAVRSSYRLSKAVTESVDSILAVYAEIIRTLQAQITKLDKSIQQLSVQITEIKCLTSIPGIGAVFAAGIVSEIGQITRFPNESHIAKYAGLAWMPHESGTSIRQSTPRTRKGNQYLRYYLVEAANSVRRYDPTFQRYYQKKYKEVPKYRHKRATVLTARKLVRLVDVLIRNNQLYVPPETGIAE

SEQ ID NO: 71244 - protein, 365 aa, unidentified
MNAIHYIGFDVHKKTISFCVKTADGQIVEEGRLQAERTVLRRWAAGRKQAWHGAMEATLFSAWIYDTLKPYAQQLSMGHPAKMKAITAGKNKSDQIDARTIADLLRCNLLPVCYVLPPQLRDLRRLLRYRNLVVQQSVRMQNKVAGLLMESGTPFNKQKLHQKKYFSDLMKSLEEVPESVKDLLRMSRGSMEMFQSTQKQLVKRLLSEPALEQRVERLMRIRAVGPITALTWALEIADPHRFASIADAVSYCGLSAAFRSSAGKQQRGPISKQRNAWLQPVLIEAAKLAPLWNPQLAAVHARALERGHANRATLQVARKLVAYLLAVDKSGQPFQVRTPPPPASAKARKKSARKSKKAVALAPAA

SEQ ID NO: 71245 - protein, 412 aa, unidentified
MEVLYRRCAGLDVHKKTVVACVLTSTTRGTATQEVQTFGTMTRDLEALSAWLVAAQVEQVALESTGVFWWPVFNILEEKGLAVTLVNPQHTKQRPGRKTDVGDAAWLADLLRHGLVQASFIPPAEIRALRELTRYRANQVRARAKEVQHLLKTLESANLKLASVATDVVGASGWQMLTAVAAGEEDPEVLAQMAKTGLRRKLDDLEQAFIGRVKPHHRVLIRATLDHLRFLEQSIEHLDAEVERTLVPFAAQQAALDAVPGIGPVAAVAIIAEIGVDMDRFPTAEHLASWAGVCPGNKQSGGRRLSSATTKGNAWLRRILGEVAWASIHERDSVFRARYYRLKPRLGAQQALVAIMHQLLKVIYHILKTGDCYRELGPDYYQPADTQRLTRRLTKRLQRLGYTVTLAPSSAA

SEQ ID NO: 71246 - protein, 400 aa, unidentified
MYVGWDWAGKVHDVTVLDEQGRVVEHFEVGHHEAGFEHALKRLCRHGRPEALPVAIERPSGLVVERLVEAGHPVIPIHPNAFNAARSRWGASHAKSDPGDSYRLADDLRTDGRRLRRLRPMDAVTRQLQALVRMRDDHIKARIAAANQLEALLNAHWPGALSIFADLASDIALNFLERYPTPHSTAGLGATRLAAFLKRHSYCGRRSPAQLLERLRRAPTAPDRLDSEVLAELVRHQVCLLRTLLHTGKELEHAITAVLPDHAKARLLAGLPRIGDGVNLAQVLSEVGPILDASLDVDHAAAQCGASPVTKASGQSRGVQFRWAANTHARQALQIFADNSRHASPWAARLYARHVAAGKRHPHAVRILMRAWLRVIWSCWHSNIPYDPARHRSELRLAGA

SEQ ID NO: 71247 - protein, 356 aa, unidentified
MKRIAKPKPAAVATLGVDIGKNTFHLVGLDKRGAIVLRERLSRAQVEVRLANTAPCLVGMEACVGAHHLGRRVAALGHDVRLMAAKYVRPFCCKQKNDFNDAQAIAEAVTRPTVRYVALKTPAQLDLQALHRVRERLMSQRTGVINQIRAFLLERGIAIRQGWRALRAELPRALTLTDRLTPRMVHLVEDLATDWRWLDQRIAAVSTEIEELAQADDGAVRLMSVPGIGPFISSATVAGIGKGDVFRKGRDFGAWLGLVPKQTFTGGRPILGRISKRGNRYLRQLFVQAARVVLLRPQSWERYGLNHWIAAAARRLHYNKLAIALANKLARIAWGVLHSGRKFETRTESDHVPQPA

SEQ ID NO: 71248 - protein, 404 aa, unidentified
MELTAVFRCVAALDVHQAKLTVCILYENDTGEVVTEIREFGGFKRDRREMAAWVASFQPQWVVMESTGIYWKSPYAALEWHGLNLAVVNARHVKQVPGRKTDIADAQWLAILARSGLLRGGFVPPQHFREYRLIARQLQKLTGIASGEKNRLHKLLTDAGIRLSVVVSDLYGKSAKAMILGLLNGETPEQLLTHADPRLKATPDELREALEGDLSDCHRFVICELMAHIDELDARSQRFRQSLMSQLSAYQPILQNLQTIPGIDELSAAMLLVEIGDDMSAFGSADKLASWAGVCPGQNESAGKRKSTRARKGNPYVRRLLCEAANAASRTRCGLQDKFKGLLIRRGRKRAIFAIAHKLLKTVFLLIQRGDYYRDAATDYEALTVQRNAPRWIKKLIQYGYITA

SEQ ID NO: 71249 - protein, 411 aa, unidentified
MNTFQDMDAVTVGIDAAVTANHHVVVRRPEPGGVGGVVDEFTVAPTLDGLARLSRRLADRDVRLAVAEPTSMTWLGLSIALDEVGIDLALVGSRHVARLRGAVSGKNKSDVIDAQLLSRAGELFALRPATLPDAATLALQRACRRRHKLLIEANRCWRRIVALGRWAFPDTWNALGGSRAAILAVLRRWPHLETLSRARVGSITDEIAAHTRGVGDVTARATKVRDTARDWAAFWHGHLDLDALAWEVTDLLDELAELDARVAGAGAQATRWWQARDDELLLSVPGVGPTVAPTIRAFLGDGSRFPAAKHAASFVGTAPSNWSSGTVTQPSRAITKEGPPAMGSPLLPPPPGSSTDHPRPAPRRHRRPSPPHTRAAVHLGRHQQHPALGRFAGTRPPLGTRDPQPPPRRRR

SEQ ID NO: 71250 - protein, 485 aa, unidentified
MKTKQQEGASKTSRQAAAGSQDKWHEMNRKQRREMMRKIQNEDLRLEVVHPDAAGIDIGNESHYVAVPPSRDSQSVRRFGCTTAELKAMAAWLNQCSIHTVAMQSTSVYWIAVYDILEQVGLEVYLVNARDTKNLPGRKSDVQESQWLMKLHTYGLLRNSFRPSQEVRTIRTYWRQRNDLVRAAVRHIHRIQKALTQMNIQLANVLSDVSGMTGQAIIKAILAGERDPRKLAAFRDPRVKASEEQIALSLEGNWQQDLLFVLHQEQDGYEFCQRQMTECDRQLNHYLEQTEDRSQGAPLPEEKRTERLKKKKGNKPQFDLREGLFRMTGTDLTQIDCVDVMTATTVISEAGWDMSKWETEHHFVSWLRLCPDNRISGEKIIGKGRLPTNNRVTTALKISASNLRLSNTYLGAQFRRLRTKLGAPIAIKAMAAKLARLVYRILRYGMKYVDRGAAFYEAQHRQLQIKHLKWKAAKLGFKVVEAPAA

SEQ ID NO: 71251 - protein, 342 aa, unidentified
MEHYAGIDVSLECSSVCVVDANGKIVREAKVASEPQALIAWFGSLGFGLERIGLEAGPLSQWLFAGMKAAGLAVELLETRHVRKAFEAMPVKSDRNDARGIAQLMRLGWFRPVHCKSLSAQETRSLLTARKLVQSKLHDVENSLRGILRGFGLKVGKTTGQKFAGRIEELVAGHPHLQTIAKALLAVRAVLRAEFAAFEKQTRRMVRSDMQARLLTSVPAVGPIVALTYASAIDDPARFKSSKQAGAHFGLTPKKHQSGETDYTGRISKIGDASVRTALYEAANVMLTKPVKGCSQLKSWAMRIKRRAGMSKAKVALARRLAVIMHRMLADGTPFNAAAAAA

SEQ ID NO: 71252 - protein, 426 aa, unidentified
MFAESTDEEQIIDRVAALDIGKAELVCCVRVPASGGSKRRVQEVTTHTTMTRSLAELANRLVDLRVERVVMEATSDYWKPVFYLLEAHGLDPWLVNARDVRHLPGRPKTDVLDAVWLCKVAERQMLRPSFVPPHPIRVLRDLTRYRIDLVGARTAEKNRVEKLLEGACIKLSVVASDIFGVSGRAMMAALIAGERDPKRLADLARARMRAKITILEEAFAGLPAGGFDDHHRFLLERMLGRVDAIDADIAVLDAQIEAHLAPFDQAVQRLDEIPGIGPVAAAIIIAEVGLDMTRFPTAGHLCSWAKFSPGIQSSAGKSKGNGSTGHGDRYLARVLGEAAVMAARSRTFLGERYRRIARRRGKKKAIIAVGRSMLVIIWHLLSDDTTRFHDLGPGYFDSRINPERKKRNHIRELEALGYKVILEPAA

SEQ ID NO: 71253 - protein, 372 aa, unidentified
MPQRSRVFVGLDTSKLKISVALAEEGRQGEVRFLGEIDNTPEAVRRLVGKLASRYSEVLFCYEAGPTGYGLQRQIAALGHECDVIAPSLIPKRPGERVKTNRRDALTLARLHRAGELTAIWVPDPGHEAVRELVRAREAAMADLRAKRQHLQSFLLRHGRLFPGRKPWTRAHARWLSELAFEHPAQYLVLREYRQGLEDAQARLERLTQQIAEVLTTWSMAPVVEAYQALRGVALVAAVTFVAEIGDVRRFESPRQLMAYLGLVPCESSTGERVRRGSITKAGNTRVRRVLIEGAWTYRFPARMSRLLQERQANLPQIVRTIAWKAQVRLCARYRRLMAAGKRQTVVTTAIAREMAAFLWAIGHAIEPRSAA

SEQ ID NO: 71254 - protein, 356 aa, unidentified
MSHDVKYIGMDVHKEAIVIAVQNESGKLVMESVIETKASSILQFLHGLRGELHVTWEEGTWAAWLYDLLQPQVQHIVVCNPRRNALLKEGSKSDKVDAGKLADLLRTGMLRPVYHGENGLRTLRELGRSYQTISKDLTRVMNRLKALYRSWGIPCAGTLVYAARCREEWLSKIPQAGVRRRAELLYQQLDGLQALRRDVRPEFLAESRKHKAAKLLRQIPCIGPIRAARLIGLMQTPHRFRSKRQLWTYSGLGIETHDSAQYRFVRGQLQLSKKPQQLRGLNRNHNHEMKEIFKSAATRASGGRGPFYDFYAALLAKGMKPEMARLTLARKIAAITLTLWKKEERFDVEQLKTQAA

SEQ ID NO: 71255 - protein, 355 aa, unidentified
MKNTEQTSYTGKEVFIGIDVHKKSYSVVARCDKEVVKKWTTTASPQELSQQLQKYFRGALVYSVYEAGFSGFALHRELVKHGIKNIVVHAASIEVAVNDRVKTDKRDAEKMAALLEAGRLKGNRIPTEVEERRRMLTRTRQQLVEERTAIKNKIRMKFHQLGLIKYDENRAMSHKLVKELLNGADSSEFRIVIQAYWNIWKKLDEEICNLASAIKEQVKTDPHDATYRSAPGVGPLSARILANELGDMSQFKNERQLFSYTGLTPCEYSSGENIRRGHISRQGNSRLRAILVESAWRAIGKDRALGEFFERLYPRTGKKRAIVAVARKLIGRIRAAFHQGVNYQMEYQVSQALTT

SEQ ID NO: 71256 - protein, 342 aa, unidentified
MNTSILGIDLAKNYFQVCGLNQANKVQFNRKMTRNKLAEFMQQQNPVLVAMEACCSSNYWARKFEEMGHTVRLVPAQHVKPFVKGNKDDRNDAVAICEAALRPNIHFAMIKTHVQQDTQMLHRIRQLHVRQTTAIVNQIRAYLAEYGIVVQKQVDPLLRTLPSIIDDEENDLTPLARQLISEHYQSLLDSRNKAIELKKQIELSNNQNLYCQRLQALPGIGPIIASALYAAVGNGSQFSKGRQMSAWVGLTPAHFGSGGKNTNVDTTKRGDRYLRTLLIHGARTVVSWAIKSNKKDPLSCWIQRLAARRGKRKAYVALANKLTRAAWRVLQGERYDARKITT

SEQ ID NO: 71257 - protein, 370 aa, unidentified
MKKYSEAFVGIDTAKKKHAVAIADAGRDGEIRYLGEIDSSPATVARVIGKLADRYETLHVCYEAGPTGYGLFRDIRALGHDCIVVAPSLIPKKPGERVKTNRRDAVTLARLLRAGELTSVWVPDAVHEAVRDLVRAREAAAEDFRKKRQQLLSFLLRHGRIFMGHKHWTQAHRRWLAGQKFERPAQQIVFQDAIDAIEDATTRAQRLEEQLALIVPSWSMAPVVAAYQAMRGVSFVVAVTFAAEIGDVRRFDNARQVTAFVGLVPSERSTGESVRRGGLTLAGNRRARRALIEAAWTYRYPARVSKVLQTRIEGLPKAVREIAWKAQIRLCARYRKLIAHGKKKPVAVAAIAREIAAFLWAIARHVAPAA

SEQ ID NO: 71258 - protein, 341 aa, unidentified
MQITTIGLDIAKNVFQVHGIDAAEKVVVRKRLRRSQVLKFFASLPPCLIGMEACATAHYWARELTKLGHEVRLMPAKDVKAYVKRNKNDAADAEASCEAVRRPTMRFVGAKSAEQQGRLMQHRTRDLLMRQRTQVINALRAHLAELGIVAAQGREGLKELLKIIADEKDARLPIDARASLIVLAAQLQALQTMIGSIERRLLLQHRANEASKRLESVPGIGTIGASAIAATVTDPKAFRSGRDFAAWIGLVPRQDSTGGKQKLGPISKQGDRYLRRILVVGAHSVLRRAKQNPEKYPWLTQLLARRPFKVVAIALANKMARVAWALLAKGGTYRVPALAAA

SEQ ID NO: 71259 - protein, 342 aa, unidentified
MNSTTIAVDVAKLVFEVAVSEHPGHVRERHRLSRARFHRFLGEQPPATVLMEACGSAHHWARRAQACGHRAVLVPPHVVRPYVLRNKTDRTDTKGLLEAFRNEEVRAVPVKSETQQALSALHRLRSTWLATRTARLNTVRGLLREFGVVIPIGARQVVPHVMTLLEDADAGVPGLLRPALAEATHEIRELEARIRAVARQLETAAAQTVVVGQLRTIPGVGLLTATALVATVGDVQRFPSARHFASYLGLTPRERSTGQRRHLGAISKRGDTYLRTLLIHGARSVLCHAKTKTAPPPDRLRRWALQLERLRGHNKAAVAVANKLARIAWAVWRHGTEFSSAA

SEQ ID NO: 71260 - protein, 339 aa, unidentified
MELYAGLDLHSRNTYIGIMDKAFNRVFKKRVPNHLEHILQTLDPFRDQIKGFVVESTYNWYWLVDGLMDAGYSSAHLANPSAIKQYEGLKHSDDQHDAFFLAQLLILGILPQGYIYPKTERPVRDLARKRMFLVRHKTAHILSLQSLIQRCCAMKVRANDMRHLTVKELEAWLEEEYLILSAQANLDNINFLKQKIKVLEKAIRKKVKLKKAFHYLKTVPGIGDILALTIMLEVGDIKRFPKVGNFTSYCRCVPSRRLSDGKSKGSGNRKNGNRYLSWAFTEAVHLGRRHNERFRAYYNRKAAQANTSLATKALGNKLARICYFIIRDQVPFREELLCQ

SEQ ID NO: 71261 - protein, 344 aa, unidentified
MSQVITIGLDIAKSSFHAHGADERGEAVFSRKLSRGKLLDFFATQPACLVAMEACGGAHHWARELTQFGHEVRLIPPAYVKPFVKRHKNDAVDAEAICEAARRPGMRFVAIKTEEQQAAGMVFRTRDLLVRQRTQLINALWGHLAEYGWVAPRGKAQMTILADLLDEDEMASSLPEAARAMFRIMTDMLAELSDRIADLDKEIARRAREDEVARRLMTIPGIGPIAATAIVALAPHAATFSKGRDFAAWLGLAPLQHSTGGKQKLGRISKMGERTIRRLLIIGGSAVVRQATIHGAGPGSWLEGMLARKPRMLVSVALANKMARIAWALMTRKEDYKAPVVVAA

SEQ ID NO: 71262 - protein, 426 aa, unidentified
MPYKIAGIDVHKRMLAVVVADIAGEGEYKFERHKVGTSPDQLRLLAQWLEQEAEEVVMESTAQYWKPVWQALERYWKAASQKREGAGPKSGTLHLAQAKSNRGPRGRKNDFADAERLVKRLVAQELVLSFVPDTEQRLWRTVTRKKQQLTCDKVRLQNQLECVLEEAHIKLSSLVSDLLGVSARRMLQALADGETNPETLAALADRRLRATPSQLCDALGACQQLNQVYRRLLKMALDELKLLEQQQEQLDKMISELLALHQDAVRRVAEIPGLGVDSAHQVIAEVGPTAAVFPSAKNLASWVGVCPGEQQSADQSQSSRSPKGNCSMRRILNQAAHAAVKVKGSIFEVVFRRLKARLEYQEAIWAIAHRICRLIWKILHENVRYEERGPEVSAKSKQTRTAKMIRQLRALGYLVEPTNLPAGNPA

SEQ ID NO: 71263 - protein, 420 aa, unidentified
MKTPSNKSFTAFIGIDWADAKHDVCIQAAGDENREFARISHKVDEIEDWAQSLYRRFGGPIAVALELSKGPIVYALQKYDFFVIFPVNPSTLAKYREAFAPSGAKDDPTDAELALDLILRHPHRFKPLKPQSIEMRTLVSLVEQRRRLVNDRVRITNRLRNTLKQYYPQALQWFDRIDTPLFCDFIERWPTLVQIKRARRTTLQTFFHQHNMRFAHVLQSRLESIKAASPLTLDQAVITPHRLQALVLVDLLRATLAAITRFDQEIAELAPKHPDYTLFDSLPGAGPSLAPRLLVAFGEQRERFNNAAELQKYSGIAPVTERSGNKHWVHWRWQCPTFLRQTFVEWAAQTINKSFWAGAYYRQQREKGCTYNAAVRALAFKWIRILYRCWETHTPYNESVYLKALQRRGSPLLNQLSTTK

SEQ ID NO: 71264 - protein, 400 aa, unidentified
MRSIGMDVHRAFAQIAVVEDGLCRDEGRIGVRPEDLRAWAATLEPDDEVALEATTNSDAIATMLRPVVARVVVSNPRKTRAIAEAKVKTDKVDARILAQLLAADFLPETWVPDDRTRMLRRLVMRRTHLVRQRTRLKNQVHGILARNLVPTCPHADLFSGVGRRWLAAQDLPADEWRSAEALVRQLDFHGDELAGVERDIACQAIDDPIVTRLMTVPGIDVTVAIAVVAAVGDFSRFDTPQRLVSYLGLNPRVRQSGNSPAVHGRITKAGPAQARGMLVEAAFAASRTPGPLRAFYRRVKDRRGLQVATVAVARKMTVLCWHLITKSEDYAFARPSLTAHKRRKLELAAGAHPHPGPVAGASRDYHIKRLRDQEKAIVEHAERAYQVAVAHWQPRRPATR

SEQ ID NO: 71265 - protein, 616 aa, unidentified
MIAVARFIERDLNSSDSFDSIALLNTYRRTACRELRAIRRTVICPPCSTQDTPWYDALDPQNTSSGVRQLGLLWGKFQVHTFTFPDYGESKMPYHVRRKGRQQHKAKPRRQSLQKPRGVISPRVQRVGGEHFAIVCIDPAKHRSEWMMADYFGNLLIEPQTVEHQSVFFQVAVEMIRQAQQQHDIRDTIVVVERTGNYYLPPKRAFARAGFETRVVHPFATKQYRMPADPGNKTDENDLYAQHRAAVAGFGLCELELEPPYRDLQLRARHRRNLVQKTAALACQIRDHLHLAMPGYAGLFDRLFESPTALVIAARCDSPTKLLELGQNRLSRFLSKSKVPHQLRTVDKVLAWAAQAADDPIRDGPMHHAIWTDLHELYQHFQRRIAALERQLACDVVQTPYVRLMAIPGINVVSAAELAAEMGPISGYANANAITGRAGLFPSRYQSDQTDNASGEMIRQANRRLRCVLMAIADNLACHCNYYRGQAELDIARGVDKRAIRVKIAKRFSRLALACVAGDEPMRHPCFQKPDSILDKLRRFHQQHATPIDVLLADLEAAVGKLPYNTCRHEAEIVADVLQQHTRRRRGAGLIGDVLPAVLARLNLRITQANKKRDRS

SEQ ID NO: 71266 - protein, 326 aa, unidentified
MKKNIIGIDISMDKLDYCNLEEDTVEVLQKGVLLNEKKTISKWLRQFDSDQVIFAFEHTGHYGAMLAECLTNKSFKYYLLNPYNLKRSLGVKRGKTDQKDAYNIAEYAILNKHKLNYYKLPTQQLRKLKALMTAREKFVKISVQLQNSIKANIILGKTIDLKMLIKEEKKQLKNIKQSIKNIKREIKEIIESQQELKQSYDKITQVIGVGPIIAAKCIVVTNNFLNFKDGRKFSCYSGFAPFPYESGSSVKGKTKTHFLRDKPLKALLIKGALTAINHDPQLKKYYNRKVSEGKDERSVRTAVANKLILRIFAVVNREEPFVKLSA

SEQ ID NO: 71267 - protein, 403 aa, unidentified
MAKVFIGVDPHKLSATIEVVDDRETVLATGRFGTDKVGYAAMRKHVQAWPERVWAVEGSNGAGRPLAQRLLADGEHVVDVPAKLSARARLFDTGHNRKTDAHDAHAVAAVAVRTRGLRVLSYDEELEALRMLADRREELTRQRVQPVNRLHRLLAELTPGRAKKDITTLQAKAILAGVRPGDMAGKTRRRLAAEQLAELVAVEKKIKALTAELKQMVKASGSGLMDLRGVGPVVAARVLADVGDVARFADRNRFASWTGTAPIEASSGEIVRHRLSRAGNRRMNHMIHIAATTQIRLDTPGRAYYRRKLAAGKTRAEAMRCLKRRISDALYRQLLADARAVPAAGLDAGPGGHRGASHESSAAGSHPHTDTSDQPLPGPAPTTLPAPSPVRKTNTASHLEPAS

SEQ ID NO: 71268 - protein, 407 aa, unidentified
MDPLKDGSRFAGVDWGGHEHQLCVVDGEGRKELELRVVHDVAGLNDLARALASLGDHLPVAVERAEGLLVEHLQAHGHAVFPVSPRIAARARERYRVAPIKDDRFDAFVLADTLRHEHGHWRALAVPSPLLAELRALTRDRDRLLETQQATEAQLRSILESYHPAPARLFSSMDRQIALAFVADYPTPAVASRVRTTRMAGFLRRNGYTGRVPAQVLAERMRANLLSGSAGTVAGRAHSAKTFAHLLGAMNEAIAEFDDAIASVVAEHPDAPIFASFPGVGPILTAVLLAEIGEDRGRYPTPQALLAESGLAPVTRSSGRSSSVRFRYAANTRLREAVMWWAFNSLKTSPWAASAFREARDRRGLRYHRALRGLGARWMRVAWRCWQDGTAYDSSRHTGATLIERSA

SEQ ID NO: 71269 - protein, 364 aa, unidentified
MELSEKKWVLAVQLPGVKRHTRHVLGASGEELATLIERLKARCGATGHPIARVILTHEAGREGFWLARFLMRRGVEVHVMQPSSLPVDRRARRAKTDVIDVEMLLRTLMAWLRDEPRVCSMVPIPDEADEEARRAHREREDLVRERRSILNKIDAILATLGVKGYRGLRSDRREQLALLRQPDGDPVPQAARVRIERLLDRLELILRQIKEVEAARDAVLKKPAPADEAERMIRSLVDMRAIGPQLATLLVREAFSRPIANRRALGSYVGLAGTPFSSGGSEREQGIGKDGNRRVRVAMVELAWLWLRWQPDSTLSAWFHERVGKAGGRIKKIMIVALARKLLIALWRYAKDGVIPEGAKMKTA

SEQ ID NO: 71270 - protein, 372 aa, unidentified
MTSIIYVGMDVHTTNYTLCCYSMEDDRFFAEVQVEPDAKNILKNLARIEKQQSRDCRIVCGYEAGCLGYSLYHQLHAHGIDCVILAPTTMMTKPGKRIKTERRDARLISKCLAFHTYSPVYIPTEVDDAVKEYIRMRDDANSALARVKQQIIAFCIRHGKIHDGKSYWTNKHLEWLSSLDLGNKILSEVLQEYLIRYYQLREQVDMYDMRINELAQAEPYRQKVEKLGCFRGIAAHTALSFCVEVGDFRRFATAQQFASYLGLVPGECSSGDKQQYTGITKAGNSHLRKLLVETAQVFGRSATKSGKSVALKERQAKCDSLTVAYADKANARLKKKYFKIAMRSKVNIAKTAVAREMACFIWGMMTDNISCA

SEQ ID NO: 71271 - protein, 388 aa, unidentified
MLHDHPSDGLTAIRTHIAAIFISLELSRSNWLATSLSPGKGEKMSKQGVAAGDTAGLLALFTELKRKAEVRTGQSYSIITIHEAGLDGFWLHRVLQQQGIESHVVDPASIATPRRRRRAKTDKLDGEILLRTLLAYKRGEPRVCAMVVAPSPEEEDRRRLCRERRTLIQERVTHVNRIKGLLFAQGCDYAPLRRDRRKRLEALRTGDGRELPSHLKAQIGRELDRIELLLEQIKSVEVAQEALLASARKPASEKAAPDPITMLLALKGMGSNFAAVLWSEAFYRGFSNRRQVAAYAGLAATPWQSGRIRHEQGVSKAGNPRLRTTMIQVAWLWIRHQPQSALTRWFKERSQQGRKRAIVALARKLLVALWKHVTQGVVIEGAVMKSAG

SEQ ID NO: 71272 - protein, 368 aa, unidentified
MSTIHKYVGLDVHKDTISIAVAEEGRSEPRSLKKIPSCGTQLLRILKRLGPLSMIVCAYEAGPTGYWLQRFLTKKGVRCQVIAPSEVPIKPGRHVKTDRIDALALAKFLRSGDLTPITIPNEEIEAMRDLSRTRSDAKLVEKDAKKRLGAFLLRHKLINPFKTNWTGMHLDWVRKQKFGHEAQNIVLREYLSALEQTSARVKRLAESLATLSETCTLRPQIKALRACRGIDTITAASLMFELVDLKRFPSAPHLMSYIGLVPSEDSSGQKRRQGGITKAGNGEVRRLLVEAAHNNCRPPKVTFRLRKRQEGVSPEVIDIAWNAQERLYRKRLALFNRGKPKTCIVIAMARELAGFIWAIGQETRLVTN

SEQ ID NO: 71273 - protein, 347 aa, unidentified
MRFYTKQHKFYCGIDLHAKKMYVCVLDSAGEIVLHRNINTEREIFLAVIEPFRENVVVAVECMFTWYWIADLCAKEAIPFVLGHALYMKAIHGGKAKNDKIDSHKIAVLLKGGMIPMAYTYPAKMRATRDLLRRRNHLMRKRAELYAHIQNTRSQYNLADSFGRIAKPQNREGVAERFEDPAVQNMIATDFAVITAYDPIIAKMERDIISMANHHDPVAYALLKSIPGIGRILGLVILYEIETIKRFPSVQDFVSYCRLVKSIKESNGKRYGSSGKKIGNAHLKWAFSEAAVLFLKGNEPAKRYLNRLTAKHGKGKALSILAHKLGRAAYFMLKNKEPFDQKKFLGL

SEQ ID NO: 71274 - protein, 411 aa, unidentified
MAQVIFAGIDISALKCDLVCLDEQGHQLAPAKSFPNNREGASGLVEMLDHLARKFNIQQLHIGLEATSVYGIHLREFLLDASQLKAYPTEVYEINPVMVAGFKKAFGARRPKTDALDAYVIAERVRFGHLVPYRRKTMVTEPLRQLTRLRLHLVELLTAEQNRALNLLFLKFSNYHQDKPFSQTFGKSSLAVLQEFTPDELVEMPLEDLVDFIQSHGNNRLIEPGEMAKTLKQAARRAYRLNPKMLEACQVALSLTLQNIDHLKRQLKQLDKVICRELEAIPQTLTSVKGLGPVSAAGIIAEIGDIKRFKNQAALAQYAGLTWTRYQSGDFDAEERRLTKSGNRYLRYYLVQAANSLRVHNEEYKAYYQKKYHEVTKHQHKRALVLTARKLVRLVFALLSKGQIYKGTVIN

SEQ ID NO: 71275 - protein, 366 aa, unidentified
MKKISTVATNRNEIFKEPKLTIGLDLGDRASHYCILDEAGNVILEHSLPTTPKGIHQVFCRIPRSRIALETGTHSPWVSRQLTQLGHEVIVAHARNVRLIGESSRKDDQLDARTLARLARIDPGLLGPVRHRSAKAQIHLTVIRARAGLVSARTALVNAARGLTKSYGERLRKCGSGQVNRETAKELSQELRDALDPLLGEIESLNERIAEYDRRIERIAKEVYPEVTLLKQVKGVGTLIALTYILTLDDPHRFRRSRDTGCFLGLRPGRRNSGMSEPQMHISKEGDGYLRTLMVQGAHYILGPFGEDSDLRRWGLKLAERGGKNAKKRAVVAVARKLAVLLHKLWVSGEVYEPLRNNHKVVSAVA

SEQ ID NO: 71276 - protein, 402 aa, unidentified
MNAVGIDVSKGKSMVAIMRPFGEIVSTPFEIKHTTSDINSLVELINSVEGESRIVMEHTGRYYEVLAHQLSEANLFVSAINPKLIKDFDNDSLRKVKSDKADAVKIARYALDKWQNLKQYNVMDELRNQLKTMNRQFGFYMKHKTAMKNNLISILDQTYPGVNTYFDSPARSDGSQKWVDFASTYWHVDCVRKMSLNAFIDHYQNWCKRKKYNFSQSKAEEIYGKAKELVPVLPKDALTKLIIKQAVDQLNSASTTVESLRTLMNETASKLPEYPVVMAMKGVGTSLGPQLMAEIGDVSRFTHKSAITAFAGVDPGVNESGTYERKSVPTSKRGSADLRKALFQVMDILIKTHPQDDPVYQFLDKKRAQGKPYYVYMTAGANKFLRIYYGRVKEYLSSLSES

SEQ ID NO: 71277 - protein, 392 aa, unidentified
MEPVIGLDVAKGKSVIQAFLKRNEAYGKSETITHTEEGFRRLSNVVQELYKRTGVEPVVILEATGHYHRAVEVFLSASKIPHFIMNPLVSKRSKSAQLRKVKTDAVDARHLAEMYYRGDVKPHRSWETCYSELQHVTRQYEFVSSLYVQARLNTRALLDQVFPAYEGIFSDLFSPTALKTLQTCLSRETEDWTEVIRPFTGKSHSEKWIRAKAKHVEVIHQQWVGSQRSLSQTLMLQSMISLLLSMQEQLQGIEEQMRRLAEEMPEVELIKSIPGLGDKLAAAIVSEIGNAKQFEEPKQLVAFAGLDPSVHSSGQFTASRNRISKRGSKRLRRALFLAVQCGLRRSCNTRLKAYYDKKRQEGKPYKVTVIACANKLLHHIYAILKKGQPYQA

SEQ ID NO: 71278 - protein, 363 aa, unidentified
MDTNIQTDPDKVTVSFSDQQIFLGIDVHKKNWNISVYIGDTFFQNFHQEANSLLLLNYLNSHFPEGHYVACYEAGFCGFSVQRELKSLGIDCIVVNPADIPQTNKGMLSKTDTSDSRRLGTALSRGLLNPIYIPDKITESDRQLIRYRRKTLTDLQKKRKILKSAFHSMGIVIPKEHDKPYWTKRFIEWIRNLNPAEISSRILISHVVDDVEFLRRRLLQINKDVRQLSSHERYKEAYSILISAPGIGIITAMTLLTEIGEIKRFDNFGKFNSFIGLCPSEFSSGETIRKGKMTSRANTALRPLLIEAAWIAIRTDPALALKFQELIKTRTKKRAIVVIARKLLSRIYHIWTNTRLYEKGILK

SEQ ID NO: 71279 - protein, 460 aa, unidentified
MNRNRSKSRVDRTMPMVHPNAAAIDIGATMHMAAVRADRAPEPVRSFGTFTADLHRLVDWFTECGVETVVMESTSVYWIPIFELLDARGFAVFLVNARDAKHVPGRKTDVSDAQWLQRLHSFGLLRASFRPKGQIAELRAYVRQRERLLEYAASHIQHMQKAPTEMNLQLHHGVADITGATGLRIIRAILAGERDPEALAGLRHYSCHSSAETIAKALTGSYRTEHLFALEQALSLYDAYHEKASACDVRIESVLKELIIHRGHDHGSAPPVSRRRNRTDQANALAFDVRAALFGLLGKDVTTIDGLGPYLSLKLIAECGDDLTSWPSAKHFTSWLGLAPSNKVSGGKMLSSRTRRSGGRAAGLLRLAAVTVGRTDTALGAFYRRLSSRIGKAKAVTATARKIAVLFYNAVRHGMDYVDPGASSYETRYRTRVINNLHRRAKTFGFVLQPLEPKAGAAVS

SEQ ID NO: 71280 - protein, 366 aa, unidentified
MLARGTEDKEHAMSPKPNSAIAVIGIDIGKNSFHIVGQDRRGALLLRQKWSRGQVEARLANLPPCLIGMEACVGAHHLSRKLKALGHNARLMPAKYVRPYSKGEKNDYRDAEAIAEAVQRPTMKFVATKTADQLDLQALHRVRERLVSQRTGIINQIRAFLLERGIAVRQGLHFLRAELPGILAKCPDVLSPRMLHLIEDLATDWRRLDERIEGLSDEIGALARHDKGCERLMTVPGIGPIISSAIVAAIGTGDVFSKGRDFGAWLGLVPKQISTGDRTILGPISRRGNRYLRALFVQAAWVVLVKIKPEGWERYGLRSWIEAAKQRLHHNVLAIALANKLARIAWAVLHKGRAFECVKTNASRAA

SEQ ID NO: 71281 - protein, 332 aa, unidentified
MMAQSEVVVVGIDEAKDKVDACIRSLSQRQTFSSTAEGQRALIRWLRKHRVGKAAMEASGGYEQDWAKALREARIEVRIVDPKRVRSFARSAGRLAKNDPIDAEMIAWFAETFTEAPGQAYDAARERLVKIVNARQGLLDLQTSLKNSGEHSVPDVVQKMQARLLKKIAVEVVKLETAIAAQVKATPHFAELAEIIESVPGLGKITSAGLIATMPELGQVNDNIVAALLGVAPYDDDSGQRRGNRHIKGGRRRARNLFYMPCMGAATRHNPVLKAFYDRLIAKGKEPKVALTACMRKLIVILNTMIARRQKWDANRYKVSDSARLPPSACPA

SEQ ID NO: 71282 - protein, 322 aa, unidentified
MNKYSETFGIDISKDVFDCYGSTQGHLQFKNTESGFKKFQKLLRKDSLVVMEATGYYHYRFAQFLYHQGFVVSVVNPLSIKRFIQMKLAKVKTDKSDAKAICNYGLSQEVPLYNALTEVQSECLQLFRWMDSLLKKRTATKNKLHGEKVLGIPSKYVYHSLNRTLKHLDRELQGIDKKLLSLVKQDQQKQLSLLKSIPGIGVKTALFLIVITDGFKKFETASQLCSYAGITPTIRASGSSVRGRSRISKVGNRKLRNLLFLCAFSAYKHNKGCRELYERIVNKGKSKKLAMLAVSNKLLKQAFAIAKSGIPYDETHVSLLPK

SEQ ID NO: 71283 - protein, 349 aa, unidentified
MDYAQIDSTYYCGIDLHARSMYVCIMDRTGNILFHREMRNEFSLLLDALAPYRPQVVVGVESTFNWYWLADGCHQAGIPFYLGHALYMKAIHGAKKKNDRLDSKVITDLLRGNLFPLAYPYPQQMRATRDLLRRRHRYVALRAEAYTHIQNTCSQHAVLDLPATEVKKKTTRRTIPQRLPHPDLSLTVDCDLEVIDTLDALIAQLDKHIWQQAKDHDRNAREILTTTPGLGEMIALTILYEVHTIQRFPTPQCFASYARLVKVERTSDGKPVAGGQGNNKIGNPHLRWAFGEILVHAPRQSAPIRETYQRLQDKHGPAKAKSILAHKFAVAIYYMLKKGQAFDEQRFVN

SEQ ID NO: 71284 - protein, 344 aa, unidentified
MQPQEYVGIDLHRRRSVIVRRSAEGETLEVSHVNNDDLLAFERAVTAAGEHPEVVLEACYGWYWATDLLEELGCNVHLAHPLGNNWGNRRVKNDTRDAEDLADLLRLGRLAEAWIAPPKVRELREFIRYRAKLVSLRTNCKLQVYAVLAKEGVNVPMTDLFGVSGTELLESCHLATAYRTRVESLRDLIEVFDHEIAKLEGDVRHELRGHAGYQALQQIPGVGPLFASVFVAEIGDVTRFRSPAQLASWAGLTPKHHESDLTVHRGPITKQGSRLVRWAAVEAAQRQAAGTKLRADYVRITAHHGDSAGARKIARVAVARKIVTLVYYGLRDGTIRSKAISEAA

SEQ ID NO: 71285 - protein, 358 aa, unidentified
MHRCTTQSAGQIIGQVAGLQVIGLDIAKSVFQLHTVDMSTGEIVNVQLKRAKVLGHFANRAPCLIGIEACGGAHHWARELTAQGHAVRLIHAKAVRPFVNGNKTDATDARAIWLAIQQPGTKFVGVKTLAQQATLTLHRQREMLMRMKIMQINALRGLLYEFGATLARGKKALLGELELALEALANSIPQYVVDSLREQAQRIKQLAIDIKAIEVRLAEVLRIDVDMKRVAAIPGVGLLSATAAIATMGEAKAFKSGREFCAWLGLVPKQRGTGGRVNLLGISKRGDTYLRTLLIHGARAVLRHAKEPGPWLEQLQARRPTNVVIVAQAAKMARTIWAVTARQQDYQRGHQSTRPLGA

SEQ ID NO: 71286 - protein, 355 aa, unidentified
MENVIRQCIGIDCGMKEHVASFSRMYVDLRVECLSTLAIPNGPGGFVKLSKWIRKLIDPSMPCQIVLEATGVYHETLACFLTEKGWPVSVVLPNRAKYFSKTLTVKTVNDKVSSQTLAAMGLEKKLDVWSPPDPIYNQLRQLTRERDQLKAESTQIKCQLHAEESGAWPNKSSIKRMNQRLSLIERQVEEVETSIREVVAESPEIDQAVRRMTSIVGVGMLTAVTVLAETNGFNLVRNKKQLVSYAGLDVVERTSGISVRGRSRISHRGNRYLRKCLYFPAMTAARHSNDHKALYNRLISKHGIAMKAAVAVQRKLLVMMYAIWKNGTIYDPNYESKKQQNELGQTRRPALTELA

SEQ ID NO: 71287 - protein, 324 aa, unidentified
MTTTAFLGIDIAKRKFDAFLQRHQRSYHRQFANTASGFAQLQHWLHQSADGPIHAGMEATSRYGEALALFLHQAGVRMSVINPARIHAFAKSELARNKTDKLDAAVIARFVATQAPAAWTPPALEQRQLQALVRRLDALQAMRQAEQNRLDLEDVDSPIRDSLTQHIGHLDEQLRQLRRDLAGHVRAHPTLQHHSRLLQSIPGIGETTALKLLAELPALAEQRSAREVAAYAGLNPAQRCSGSSVHGRSRLSKIGNPRLRRALYLPAVVAIRCNPLVQPFAQRLCERGKVPMVIVGAAMRKLLHQACGVLKHGQPFDPNYASTH

SEQ ID NO: 71288 - protein, 319 aa, unidentified
MQSKLTFGMDIGKNEVVVACHEGAFAILKMANAVAGLRRWLGSVPAGSRLGLEATGGYHEPVAELAYSLGFTVYILNPKDVHFYARALGARGKTDRLDAQIIAAYVAEHCARLHPFTPLSADEKLLRELARRRATLVNAKSMLQQSLRVLPGFEREGRELLRAMGSFADRLERKLAQIAARSSERATLVKRLQTIDGVGTLTSIRCATLFTRVPFHSSDAVVAFFGLDPRPNDSGQHRGRRRLSKRGPSEDRRLLYNAAMSAIRTPAWRPLYLHLRNRGLASTEAIIIIARRIVRIAFAMYQNHSNFNPRLVPRPCCAA

SEQ ID NO: 71289 - protein, 423 aa, unidentified
MRAAPAVSCAMCTRSAHTSIQGSGGIRHSLRNGFTAYSVLLCPQNLPECANGRFSKKRPSLDLSPSVLEGLESLSGSVGQSGVFLNPNSCMGFEPEPSKEGSWMMAQNDLIVAGIDVAKDKVDVCIRPLSLRRTFASTTEGRRELASWLRRKKVGKAEMEASGGYEREWAKALRDAKIEVRIVDPKRVRDFARSAGRLAKNDTIDAEMIAWFAETFDEAPGQAHDAVREELAQIVNARLGLIDLQTRLLNRDEHAGPEPVQKMHARMLKKIAVEIAKLETVIAAMIKATPRFVELAEIIESVPGLAETTSATLIAKMPELGQVNNKIGAALLGAAPYDDDSGCRRGERHIKGGRRKVRNLFYMACLGAATQHNPVLKAFYDRLIAKGKEKKVALVACMRKLIVILNIMIARRQKWDPNLHVLG

SEQ ID NO: 71290 - protein, 412 aa, unidentified
MSSRSNVVALLDFESQKPLQTFTVTNNQPGAIELANRLADYLQCRKDLTGLVVGLESTSFYGIHIANYLSSCETLAPFQTKVYCLNPKVIRNYKKSFVDLGKNDFVDAFVIADFARANRITAKPWRGSQFLALQRLTRHRLHLAKALTREKAYMLSNIFLKFSEFSLLEADKQPFSNTFGTTAASVLTDFLSTEEILEMPIEDLVAFLGEKGHHHFNNPKQTADLLRQAARNSYRLDKCLYEPLTISIASSFTLISTYQAEMKLVNKAIEKTLRGLDPNAYQSLLSIPGIGPVMAAGILAEIGHIEAFSSQEALAKYAGLIWRENQSGNFKSDDTPLSKAGNAYLRYYLIEATSHVKEHCSEFAAYYKKKYAEVKLHQHKRALALTARKFVRLIFGLLANHQLYSSDRVEQN

SEQ ID NO: 71291 - protein, 346 aa, unidentified
MMVIGIDAHKCSHTAVSVDDMGRQRATKTVGTTTRDHLRLLQWAASLDGERLWAIEDCRHLTRRLERDLIAAGESVVRVCPKLMADVRDSARTYGKSDPIDALAVARAALREPDLPVARLDGVERELRLLVDHREDLVAERTRIISRLRWHLHELDPGWTPRAKMERASAFDAVAAHLGACGQGGTLVGRLALRLVEHLRVLTLEIDELTTEITERVAKVAPSLLAIVGCGALTAAKIVGETAQVSRFRSKDAFARLNGTAPLPVWSSNKQRHRLSRTGNRQLNAALHRIAMTQARMHPPARELLARRKSNGDGGMEALRVLKRRLSDVIYRAMLTDQNQSSPVPA

SEQ ID NO: 71292 - protein, 424 aa, unidentified
MKFKMQDKQNQLIERITEKHLVVGVDIAQQFHVARAVNFRGIVVGDPITFPNNEEGFSSLLIWINSIKSLHKLEAAIVGMEPTGHYWINLSKWLMKQDIEVVTVNPHLVKRNKENRDNTQSKSDKKDALVIADMVKNGYYSFVRDTSESFEKLRVLMSNRDVIVKRLVSSINQLNRWVDIVFPELRQVFKDITAKGAIATLRLFPSPMELGSMKPEEIVAGWKLLMKRQPGLKKAYLLLNVARKSVGTRQALEAYKFHLEQLLEEYDLAIQQLERVELAIKDELPKIPFANKLLMIKGISEISLAGILGEAGDLSGFSHGNSLLRHAGLHLAEASSGKWKGQIIISKRGRSRLRRFLYLATMSLVMNNPEFKALHSNNVKLKKMKKMKSIMKLIGKLARIFVGIARKNEAYCAKKVQPLTELAA

SEQ ID NO: 71293 - protein, 342 aa, unidentified
METKRYIGIDLHRNCFTVCVRLENGRNYLSQWKLEDLPRFTKKLRGGDEIAVEMTGNTRFFHEAVGPHVARVVTVDPNQFKVISQSVKKTDPNDARNLALYLAKDLLPEVRMKEKTEAQIASLTQTRDTLVKLRTALKNKINNILAAHGINLPKEALSSDKALAGVLEMHFDEMVEVELQVIVEQIRGLNQSIAKLEQTIRDRGQKLKGHRNLTSIKGIGNLGASILLSVIGDIDDFADEGKLAAYFGIVPRVQNSNETERSGRITKRGTKLGRTTLVQCALVAKRYSPYLARYYDKIKSRRGGGKAIIALARKFLGIIYRTLKNDWVFEDFPNFVLAEEEV

SEQ ID NO: 71294 - protein, 315 aa, unidentified
MNYAGIDVSHKELVIVVSVQGKTHKAKTFENTASGHKAIIQLLSKLKGESRVCLEATGVYHFDLAVALSRAEGIEVMVVNPKASHHFAKVLMKRSKTDAVDAELLATYCERMPFEAWQRPADENIALRAIARRIAALTKLKTQTKNQLHALKATEETPVLVIEYTEELIEVVDKQIQVHRDSARKLIQQHDELAEAFALITGIKGIAMASAVQLLGELMILPKDMNAKQWVAYAGLDPRQFESGSSVTKKPRISKAGNKFVRRALYMPALVATCHEPHIKGYYTHMIQDNGLKEDTGCMRGNAQTFTRHPWHAKS

SEQ ID NO: 71295 - protein, 361 aa, unidentified
MDSTKYIDRTKYIGMDVHKETVSIAVMNSTGKLVMESIIETKTATILQFIQGLRGDLQVTFEEGTWAAWLYDLLKPHVTKIVVCDPRRNALLKEGNKSDKVDARKLAELLRAGLLRPVYHGENGLRTLKELSRSYLTISKDLTRVMNRLKALYRGWGICCEGATVYAPRHRSEWLGKITEAGVRRRAEFFYQQLDALQVLRQQVRRDLLAECRNHSARKLLRQIPSIGPIRAALLIALIQTPHRFRTKRQLWAYSGLAIETHDSAQYRYVAGQLQRSKRPQQLRGLNRNHNHDLKAIFKGAATKAASGAGPLHDFYEALLTKGMRPAMARLTLARKIAAITLIVWKKGAHFDAEQLKPQAA

SEQ ID NO: 71296 - protein, 362 aa, unidentified
MGCETRDPGIEPQRRRIAVERYLGMDVHAESCSFCVLEASGKELRRDVVETNGQARIQYLKQFSGGLHLCYEESEWAGWLWEILSPHVSELVVFRGERKKGSKSDAGDARALAERIRTGQVGMPIFKAPKRFAKLRELAQVYGLLTRDVVRAKNRLRSRFRRRGVRCSGEEVYSFERRKRRLAELPAAMRPAVELLGVELDCLEALKAETERAMVEASHAAPISRVLETIPGLGPVRVAQILPIVVTPHRFRTKRQFWAYCGFGVVMHSSADWVQRNGGWVRDRVAQTRGLNFNFHRTLKYIFKGAATTVIAHARPNPFREAYDRLCAEGTKPNLAKLTVARKIAATTLALWKSGEEYDAKR

SEQ ID NO: 71297 - protein, 398 aa, unidentified
MRSIGLDVHRDFCEVAIFEDGKVTKHPRVPARRAELAVFALSLRRTDQVGLEATGNALAIARIIEPHVARVVVANAAVTNLIGAARAKTDQLDARTLAQLLGTGFFPEVWLGSEQTRLARRRMSRRSQLVRERTGLKNQIHAVLHRNLVERPPASDLFGVKGLRWLDGVDLPDDERETVSSCLRQLQFLGEELDRLDQVIAEAALGDRSIQLLLTVPGVNLTTASAFMAAVGDISRFDSPSQLVSYLGLDPKVHQSGIAPARHGSISKQGCAGARWALVESAWVVARAPGPLHAFAERIRARRGANVATVAVARKLVVLFWHMLTKNEEYAYGRPSLTAEKRRRVELTAGAPSVRGKRNGGRVYASSEQRLREQQVAINAERAYREFVSQRSAVTRTT

SEQ ID NO: 71298 - protein, 312 aa, unidentified
MRPEQFVPWVEELLRGGHTVHVVYEACGFGFSLYRQLMAVGAHCYVIAPRKLDEECTRVKTDPRDATTLCQRLSRYLEGNTRELAVIRVPTEAEEQARHVSRQREQLVHLRQKLEVQGRSLLVNHSLPAPAHWWKNQTWSRLCKLLPAWICIRLEVHRPALLTLQQQIDALTAELEAAAPADVPAGLGKLSTVVMTREICSWERFRNRRAISSYTGLCPGERTSGSKRIPGSVTKHGNPRLRAALVECVWRMVRFQPNYPPVKKRLAILAKGARATGGQRKKAIVAVARHLAVDLWRLHTGRCTAAQLGLTN

SEQ ID NO: 71299 - protein, 307 aa, unidentified
MSEKIYFGVDVCKESLAFCGAGVAGQVANNAPGVRRLLARLPKGAHLIIEASGGYERELVRVAQQSAVQLSVVNPRQVRDFARGVGRLAKTDPIDAEMLARFGAEVNPPPDAVPTAAEVVLQELVSARQQLVEERTVLLQQKAQHLNSIVRRLDCARLKLLQRQIAQLELAIGSILEEQSALKQKVERLQQVKGVGLITAVTCVALCPELGSLSRGQTAALVGVAPYNDDSGARKGWRHIAGGRPKLRRALYMAAISAIRSNPVLRRFYQQLRQRNKPPKIALVAVIRKLAILLNQLLRNPSFLPAS

SEQ ID NO: 71300 - protein, 457 aa, unidentified
MSKVRGKKAGRLRRRLSTINREAAGIDVGATFHMVAVAGDRCDDPVRSFRTFTSDLRELADWLAEVGIKTVAMESTGVYWIPVYELLEERGFEVLLVNARDVKNVPGRKTDVNDAQWLQQLHEYGLLRGSFRPRDALVCLRAILRHRERLVEYAASHIQHMQKALMQMNVQLHHVVSDITGLTGMQIIRAICQGERDPAVLAQFRDRRCKASTDLVREALTGHYRPEHVFALRQALDLYDAYQAKIGECDVEIESALVEINRDRIPAEEPLPKRRDAGGRNAPRFDVRAALYTLLGRDLTQIHGFGAYTVLRLVGECGDDMTKWRTAKHFTSWLALAPGNKISGGKLLSSKTRRSSNRGAALLRIAAVNVGKTQSALGAFYRRLAARAGKAKAVTATARKLAVLFYNAIRFGRTYLDPGADYYEERYRKRVIRSLHRRAAQLGLVLTGPALAESGVS

SEQ ID NO: 71301 - protein, 371 aa, unidentified
MEPITFVGLDVHKRKTSVAIAEPGRGGEVRFMREVPSNPEALHRLVGRLKGRHRRLSFCYEAGPCGYGVHRLLSGLGQDCSVVAPSLIPSRPGDRVKTNRRDATTLARLHRAGELTPVWVPDAAHEAMRDLVRARATARRVLAKARQHLQGFLLRHGRIYRGGRGWTKAYRRWLTAVRFDHPAQQIVLQDYIHAVEDAEVRRQRLERQIEELLPTWSMAQVVEAVQAMRGVGLIVAVTVIAEVGDFSRFANPRQLMAYLGLVPSERSSGASVRRGGITKAGNAHARRVLIEGAWTYRMQARVSRKLHDRIEHLPPAVRDVAWKAQLRLCHRYRRLAAAGKPKVVVTTAIAREMVGFIWAIARMVQPRPAIA

SEQ ID NO: 71302 - protein, 364 aa, unidentified
MAARRQARTHAGFPILVLLNKASSLHPHIPPMIASSPLLILPRLGIDISKLTFDVHLCMLDGRTHSAKFANNQEGFAQLDAWLAQHRATKTCAGLEATGPYGVLLLWHLHTGGHTVHQLNPRRVKDYARSQGRRVKTDATDAAVIAAYLKASEDLQPWQPASKALQGLQDLVRRRAQVITSLDAERKRKEKDTCKVVSASLDRLIKHLKAEVAELDKAIEAHVLKHTALQKSVRLLRSIDGVGLKVAVTILAEVPQISAFERARDVAAFAGLTPSLSQSGTSVKRRGRITKEGSALLRKMLYMAALQAVKRTNNAFHECYQSFVQRGKPKMCALGAIMHKIIRVAFGVLKHDTPFVKNFAKVEA

SEQ ID NO: 71303 - protein, 376 aa, unidentified
MTMMHQRQIRYIGLDVHKATISAAIAEESGVPTSYGRIPNDPAAMRTLMTRLGGPQVELRVAYGAGPTGYALHRQLTSMAISCMVVAPSLIPKQPGNKVKTDRRDALKLARLLRSGDLTPVWVPDEAHEALRNLVRARADAKADQLRAKHRLSKFLLRQGCWPPVGVRNWSKRYVTWLHQLEFEHLPDRVVFADYLTEVTAAGERIKRLEVALYECAQSSRQVALIRALQAFRGIAFLSAVTLVAEAGDLRRFRTAPQFMAYAGMVPSESSSGGKQQRGSITKTGNSLLRHVLGEAAHHARHAPRVTSKVKQRQTDLPADIVDLAWRAQVRLHTRYRHLSGRIGALKALTAIARELAGFVWAAGQALQEEEVPTAA

SEQ ID NO: 71304 - protein, 416 aa, unidentified
MSDEDKIASIDIHPKVLMVVVGAREEEAKASEGKLQRRRFGTMASDRRSLLAWLQAQGVKEVVMESTGPYWKPIWWELEPYMRLHLAQAFSNRAPRGRKGDFRDAERLRRRLVAGELILSFVPDPEQRAWRTMTRTKTQLARERVRLYSQVDGLLQEMRIKLSNVLSDLFGASGLRILHALAGGETDPKKLAALGDDRLKCTEEQLRDALTGNVQAMQQELLKLYLQRLELVEEQTEKLEGMITQALKGHQEVVARIAEVPGFGPDSAQQVIAEVGVQASAFPSAGNLASWVGTCPGQEESGEKNRSSRSAKGNKYLRRLLTEAAQAAVKTKGSHFQAVFRRLLPRLGYKQALWAVAHHLCRMIWKILHDGVRYVEQGEYRDSKAKKQRAQTLARLLRKLGYEVKLTPIEPEAAKA

SEQ ID NO: 71305 - protein, 346 aa, unidentified
MEHHAGIDVSLELSSVCVVDSQGKIVKEAKVTSEPEALVCFFKGLGFPVKRIGLEAGPLSQWLHAGLAQGGFEAVLLETRHVKTALSAMTVKTDRKDARGIAQLLRMGWFQPVHAKSIGSQEIRALLVARKQLLGRLVDVELSIRGILRGFGLKVGQATRKNFEVRIRELVTGQATLEHIAGAMLSARAALRAEYEKLHKAVLAIVREDAVCLKLMTVPGVGPLVAVTFKSAVDDPSRITKSKAVGALFGLTPKKYQSGEKDVTGGITRAGDEMARTALYEAANVLLSRITRFSRLKRWGMDIAKRRGSKRAKVALARKIGVILHRMWVDGTTYRWTEVKPIAAQA

SEQ ID NO: 71306 - protein, 370 aa, unidentified
MDQIIRIGVDTSKSVFVLHGVDAAEQPCLRRKLRRSQVLEFFGKLARTKVGLEACGAGHYWARELKALGHEAMLMPPQYVKAYVKRNKNDGIDAEAACEAMSRPTMRFVPVKSAEQQAALMLAGRRDGLVRRRTQLSNAIRGHAAEFGLIAAKGLHKIEPLLQRIATDAKMPDLAKELFADYGEEYAALQTRISAIEARLMAWHKANELSRRLAEIPSVGPIGASLMAMKVNDPHAFRCARDFAAWLGLTPKDHSTAGKTRLGVITRAGDEALRSVLVAGATAVIQQVRKGRGHPSAWLTELLKRKEPKLAAVALANKTARIAWKLMVSGERYDRQRTDKSFVHPNASVAPRSRRQGRFAPPSAVASGQS

SEQ ID NO: 71307 - protein, 342 aa, unidentified
MGNIKVLGIDLAKNVFQVHGTDAKGKCLLRKRLSRSKLIEFVANIPPAIIGIEACSGAHHWARCFKQYGHEVRMMSPQFVKPYVKSNKSDRNDSEAIAEACTRPSMRFVPIKTAAQQDILAVHRARELSIKSRTSSSNQIRGLLNEYGIIVPQGLRQIRRLAEVIEPHRNQLSDIFLNLLTELIKQFKSFDEQVKLYDDWISRLAQENDICKEIQKIAGVGPIIASAIVATIGDANMFKNGREVSAWLGLVPRQYSSGEKIVLGGISKRGDRYMRTLLIQGARSVVMGCTNKSDKLNHWITKKKERGGFNKASVALANKNARMIWAIMATGECYRQPPNVVN

SEQ ID NO: 71308 - protein, 336 aa, unidentified
MSELVTVGIDLAKSVFQIHGVDENGLVLVRRQLRRSQLLAFFQNRPRCLIGMEACAGAHDWGRRLQEMGHDVRLMPPSYVKPYVKRGKTDAADAAAICEAVTRPSMRFVAIKSEACSSVMVLHRTRDFLVRQRTQIGNAIRAHMTEFGIITSKGAQNVERLKEQVDQLPQTARMPLILLFDQLSETNKRIERLTDEIEETYSQSETSQRLATIPGVGVLSATIIAATTPDVDNFNCARDYAAWLGLTPKPHSTGGKQRVGAISKMGNRYIRRLLYLGAMAQIMLRRRLKREPGSDWLSGMLMRKKTRVVAIALAHRMARMIFAVLRDGSRYEPQAA

SEQ ID NO: 71309 - protein, 336 aa, unidentified
MISLGVDIAQNKIDVALYDTEDKQNKMSATFVNKIDGYIALFDELHENKIDIKKLLVYMESTGGLEEPFFEFIREKVGEAYILNAKQVKSFKETLGLDQKTDLIDAKALAMMVVLPSINNCLKANADSLSNELVALISQRNFLIGERTRAIVRKQRIFRIKKGLAGKFIVKQLQSVIENLDKEIKNIDNEITNFINTNNDFANNVGLLKLIPGIGEKTANLLVSYLGAGAELFNNADKFAAYSGLYPTENSSGVFVGKKKLSRKGCRALKKALYLCALSAVRREGKLKNYYQAKVADGKEKKQVLIAMANKLAKVSWSVIKHQQKFDETKFLPSFA

SEQ ID NO: 71310 - protein, 312 aa, unidentified
MANLVYAGIDVGKDKLFVNIHLDSQVRDFPNTHSGLERLSRFLIKNAVNLVVMEASGGYERLPASDLRARGLSVAVVNPTYVRRFAQGMGTLAKTDTIDARLIAHFASVKQPKPQQAKTVEEEELAALVERREQLVSLLSVEKNRLSKASDYSKASLQISIQFLTGQIASIETEIKALVAKSPERLARMRCMCSFIGVGDITAVTLLTEMPELGMESGKHIAALAGVAPINRESGKMKSKRRTYGGRARVRRTLYLAALSASRHNPIIRAFYERLLAAGKEKKVALVACMHKMLTILNAMLKKGELFNPEYS

SEQ ID NO: 71311 - protein, 352 aa, unidentified
MEKRIRQSVGIDCSKDHLDCSFGIMHASFDEVVISNSKFTNNAAGLKKLLLWSKKLMNTDCEVVFLMEATGVYHERAALFLYESKNKVAVLLPNKVKAFAGTLKVKTVNDKECAKIIALFGLEKNVDPWSPPQEVFNQIRQLTRERDQLLLERTMKKNQLHAEKSGAWPNSGSIKRIEQVVKILNKQIKEIETEIKDLINANPFLKEKMKKLCSIKGVGMITAAIVVAETNGFNLIRNKSQLISYAGLDVIEKQSGTSVRGKTRISKRGNKYLRKCLYFPAFTSINHYEPSKNLYTRIISKTGLKMKGAVAVQRKILVLIYVLWKKDQFFNPDYHKAKQEEPHQDAALHELA

SEQ ID NO: 71312 - protein, 466 aa, unidentified
MKHNRRRRPGKPRVSPSVLERINPNVAGIDCGSAEHFVAVPPDRDPNPVRSFPTFTSDLQRLADWLSTCRVTSVAMEATGVYWIPIYEILEARGFEVHLVNARHVKNVPGRKSDVSDCEWLRELHSVGLLRGSFRPTDAIVALRAYLRHRQTLIESAGAHIQRMQKALVQMNLQLPLVVSDITGVTGLRILRDIIAGRRDPSQLAEHRDHRCRASKAEMVAALTGNYRPEHVFVLQQNLELFDVCQTQLAACDSAIEAHVQTLTASMSAPATPLPPPRVTKKPRDNEPRFEIRTPLHQLTGGVDLTQIDGITSYTALKLLSEIGTDMGRWPSEKHFTSWLTLAPKNKISGGRLLSSRTQPSANRAAAILRMTVMSLGRTQTALGAFYRRLAARIGKPQAITATARKLAILIYRTLKGELVYRDPGADAYEAQQRTRVLRRLRQRAATLGFELVSRATGELLDGVVS

SEQ ID NO: 71313 - protein, 408 aa, unidentified
MNAVGIDVSKGKSMVAALRPMGEVALLPQEFLHTEVGLEQMAYAIVALGEDTRVIMEATGRYHEPIAAALHEYGIYVCVLNPLFIKQSGGGSIRKVKTDKADAMKIAKYGLDNWVELREYTPMDTVRQQLKLCSRQYNLYMKTVVSLQNNLISLTDKTFPGVNELFSSPERADGHQKWVDFVMTFWHCDCICRVSEKAFTNRYQKWCKRKGYHFSTEKALDLYAGSCGHFTTLPKNDNTKLLITTAAQQLLAGKTTLAALRTEMTRLAKQLPEYDTVRAMYGVGETTAAQLMAEIGDVRRFPRRSSIVGFAGVDPAVDQSGKHSAKSVPTTKRGSPHLRKTLYQIVCTYLKRSPADEPVYQFLDKKRAEGKPYFVYMTAAQNKFLRIYYARVKECLEAFDERQDTVQN

SEQ ID NO: 71314 - protein, 438 aa, unidentified
MSNKVIFNLDELFISVGIDVGADFSWMSIALPNQQFVGKPFKILHNSIDSLTTAVSKIKEAEELYSLESRIFLESTGIYHYPLFCYLRDKGFNCSVINPIITKNSTNINIRKVHNDRFDSKKAALVGLKPDLKVSLMPSDLALNCRNLCREYYDLMDNRSAYVNKLQGELRMAFPQYLGIFSKVTINTSLTLLETYTSPSAFLEADKQEIIDIIKSTARFGLTYAQNKYNAIIQAATDANQFGYIIDSNIKRIRLYISFIRKYDEELNSILESLHELVDAHEDADFVKQIHLIETFKGAGFLSAVSIMGEIGDFSAFSKPKQLFAYFGLDPAVKQSGKFEGTKVQMSKRGSAIARCVIHTLTLQSISISRNGEAKNPVLREYYLKKCDSKPKLVAMGAVSHKVCNMIFAILRDNKPFKIIAPQEHIKQYNAAKCDIAA

SEQ ID NO: 71315 - protein, 353 aa, unidentified
MKIVSALDVHRRQITYKTVELASGESWRGRISPAAREPVRAWLERFAGQDAHFALEGTTGWRFVVEEIERAGHVAHLADPAETASKRGRKRRAKTDDADCDLQLRLLLAGELPESWIPPAQILELRTRVRLRKTLIDQRTAWLQRLQAQLFHQGAPVGLKPRTLAGRRALAAVELSASGRELVELALRMLDMIDRELGPLDRALQAYARRQPGCRALITRLYGVGAVTATAILAELGDTRRFTSSDDAVRHSGLDVTVWQSDRKRAPGHLSHQGPALLRWALFEAAQCAARRSSPDHAYYLQVAKRLDHNRACLSVARKLCRRAHHILRELGDDALATLDDAPASNEVVPVAA

SEQ ID NO: 71316 - protein, 461 aa, unidentified
MRIIGIDLAVRGAHKAMVADETGQYVSKLLTFHTDVHELEKLLSTARPKGDQETVKVIMEPTGMAWFPIAVYFARQKNVITYLVNTQQVADLRRFYKRHAKSDRIDCRLLAKLPLINGDNIHELVLSGGQALACQRGSRQLVRLEGEMTALKNRMRAIDRFAWPGLEELVFTDVQSPSARWFRQYWYHPVKVLNAGATTIQKSWQEAQIAPNDMGDWIEPLVCLAERIVALYGRDNSYLDYDLLQEEILREQVLLIHLEQTSYALRMHTVRKLYRTLHPSRHLETIKGVGQDSAAVYVSGIDDPHRFSSNRTFRGWHGLIPDSRQSGNCEGKGLHITKAGPNLIKKYAYLDADVARQWDPQIAAIYYDQMVNKGKHHNQAVCVCATHLMDRVLAVMREDRPYQLRDTDGSPVTVAQARTIIANKYKVSEEIRSRRNKSKRKERADKSAEKRENQKESRGNS

SEQ ID NO: 71317 - protein, 423 aa, unidentified
MMKLKYSICCGLDVHKNVIVATIVTTNKDGISEYLQKSFSTINSDIQRFHNWLIENNCYHVCMESTGKYWIPIFNYLENDIDVCLTHPKYVKAIKGKKTDKKDSKWIADLYKFDLVRCSFIPPKDFRQLRELSRYRFKLVCMKSSEKNRIQNCMTISNVGIASVLSDPFGKTATEIISYLLEHTADSMDEKAVRKLIKKGAKAKSDEIIEAIKGYNIETDQAKKLELAQGHLEYLDDMITQTEVELYVRIKPYYEFVEFVSTMPGMTELSSTIVLAETGVDMDIFDDAKHLCSWCGLSPANNESAGKKKSVRIAKAGDYLKPMMVQCALAAIKSKKQPYFAIKYGRIKKRRGHKKAIIAIARMMMVCIYHMVSEKKPFTPTDYEELMDPQNHVESVVLNENNVFAYLESLGYDSSKLVKRNDN

SEQ ID NO: 71318 - protein, 381 aa, unidentified
MKNIYTKRTGQAARPSVVRDRSVARVVPSLLPKSSNSCLGYPSPHVLQGRARLEQITTIKEDCPLEVPLIFVGIDVCKAQLDVAIRPTAQILSVPNDKAGIKTLVKHLEKLRPTLVVLESTGGLERQVMLGLVGAEISVVMANPRQVRDFAKSTGQLAKTDRIDAAVLAHYAEAIRPQPRPLPDELTLELRALTVRRRQLIDMIVAEKNHLATATKVIKKRITAHITYLEQELDDADQDLDRFIGKNPLWKQNQEILCSTPSIGPVSSRTMLAELPELGTLDRKQIAALVGLAPFSRDSGTLKGRRTIWGGRASVRNALFMAALVATRFNPVIRDFYKRLKAKGKPSKVALVACMHKLLTILNAMIKNKTRWSDTFSLKTA

SEQ ID NO: 71319 - protein, 412 aa, unidentified
MGRAAEVVAPSSSIRTDGGCPVVQVNDLSRSLAAFDPISTLVVVVEMSKASWLVSSVVPGVERQPLKKLEPDATALLRLIERWRNEAVRVGRPISRIALAYEAGRDGFWLARWLIARGIEAHVIHSASVAVSRERKRAKTDRLDAAMLMRVFLGWLRGERGHCGMVAIPTMEEEDARRPNRERESLVNERSRIINRMKSALARLGIRGFKPHLRKAPERLAGLRTAEGTGLPANIIEEFRRDMARLALVREQISSIEKTRAERLERAPDTGPHAMVRLLARVIGIGIETADMLVREILSRKLRDRRALARYAGLTGSPDESGLKSREKGLAKAGNARVRRGLIQLAWRFLMFQKDSALARWYRTRTEGPSGARKTTMIVALARKLLIALWRLVTTGEVPDGVELRPAARGIL

SEQ ID NO: 71320 - protein, 313 aa, unidentified
MDQISVGIDVSKAMFVVAVSPTGERWTSDTDPTAIDALVTRLQRLTPAVMVVEATGGYERALVAACAAAGLPVAIVNPRQVRAFAQALGLTAKTDDIDADVLAAFGARVQPTPRPLADAATQALAALVARRRQLIEMIGMERQRLQQAPPTGRITRDLRNHIRWLERRVSDVDDEIGTAIQASPVWRVHEDLLRSVPGIGPITARTLLAELPELGALDRRAIAALVGVAPFNCDSGQHRGQRHIWGGRASVRAALYMAAVSAARHNPALATFYRRLRTAGKPTKVALVATMRKLITILNAMLKHQARWNAATA

SEQ ID NO: 71321 - protein, 346 aa, unidentified
MKEITTIGLDLAKHIFQVHAADAEGSPVFSRKLRRAAVLSFFMKTPLCLVGLEACGGAHDWAREIAALGHEVRLIPPAYVKPYVKRGKTDAADAEAICEAVTRKTMRFVPVKSVDQQAAAMVLKTRELLVRQQTQAINALRAHLAELGIIAATGTAKVASLIEIVRDETDKPLPQAARFALSEIADQIEGLTRKIGKLEHAIVKEAKCDDDMRRLCTIPGVGAIIAASIKAMVPDPGGFTSGRHFAAWLGLTPKPHSSGGKERLGGISKMGNPMLRSLLVLGATSVLRHVKGNASAPPWLSALLARRPFKVVAVALANKMARVIWALLTKGGTYRTSGTTSEAAHA

SEQ ID NO: 71322 - protein, 388 aa, unidentified
MADRNVTPTVGLDSATLLVPLELSGSRWLVGVQSPGEARLSEHKLEAGDVRGLQELIERFARKLRQQGIARVRVVTCYEAGRDGFWLQRMLAAEGIESLVLDAASIEVPRRARKAKTDRLDLKGLLRVLQAIERGETSCKLVRVPAPQEEDARRLGRERGWLIKERIAHVNRIMALCAQEGVWGFKPLRGDRRARCAELRTAAGAALPRHLRAAIERELTRLELLLEQLAAIEAERDAVIEGAAVDDPAVDKIRKLVRLRSIGAETATMLTREAFYRSFANRSQVGAYFGYDGSPWCSGRMRREQGISKAGNPRARTVGIEAAWSWVRYQPDSELSHWFHRRLAGAKGAVKRKLIVALARKLMVALWRYLTIGLVPQGATFKPHTAQA

SEQ ID NO: 71323 - protein, 447 aa, unidentified
MPKRIIRYVGLDVHKRVVEACIVDGAGNVLRRERFTLNRQTLERFAAKMLRRTDHVALEATTNCWAVADMLRPHVARVLVSNPMATKAIAQAKVKTDKVDAHVLAQLLRCDFLPEVWQPDEATRRLREMTGRRSTLVGMRTAMRNRIHAVLAVRLIETPIKLFTPAAREWLAGVELDEQGRLLVDLELRQMDHVQKEIDLLDEELARRAYASDAVKLLMTLPGVDAATALAILAAWGDPTRFPDADHAAAYLGLVPSTKQSADRCYHGPITKRGNSQARWMLIEAAQHLDKHPGPLGHFFRRLARKKSRNVAVTACARKLAVIAWQMLIAGEPYRYAIPRSTEDKLRRLRVKATGERRKSGSPKGTKCTAKLPGGSRTIRSLPEVCRSEGLPAPRGLSPGERRTVRQAACEAHVARIAEPQLAPRRSDKSSKPPADYPRKASSRRKA

SEQ ID NO: 71324 - protein, 417 aa, unidentified
MAEEIAWFVGIDWASQSHQVCLVNARGECLGERAVAHGGAGIEELCDWLIARTGATPEVIGVAIEMTQGPVVEALLERGFCVYGINPKQLDRFRDRFTVAGAKDDRRDAHVLGDSLRTDRHAFRRLSNDEPVIVKLREWSRMADDLQQERARLASRMREQLWRYYPQMLELADDLAADWFLDLWNQAPTPAKAARLRQTTIERFVKAHRLRRWQAPEVLRILKQKPLSVAPGVVEAASDHIRTLTVRIRLVNQQLKAAHRKLDELCAQLVPSEEDEPGQQCEQRDVVILRSMPGLGRTILAVLLAEVWQPLRRRDYHALRSLSGVAPVTRRSGKTCVVVRRYACNKRLANALYHWARVATQHDALSRRRYAALRQRGHSHGRALRTVADRLLSVACTLLEQQTLFDPTYEVREAAGA

SEQ ID NO: 71325 - protein, 351 aa, unidentified
MIIIGVDYHPSDQYIALVDTETGEYEERQLHHSAGEAEKFYRELAARGVSVRVGMEATGYTRWFERLLAELGIELWIGDAAKIKTKRVRKQKTDREDARLLLRLLRENNFPRIWVPSPENRDLRQLLWHRHRLVQMRTRIMNQLQALAMNEGQRRKKKLWSEAGRAQLDKLPLAPWASRRRKDLLELLDRMNPSIEELTAAIEREARKWPEALRLMTHPGVGPLTALAFVLIIGTVERFQCGKQIGSYVGLIPCEDSSAGHQRLGHITKQGSSLLRFLLGEAAQAAARCDADWRRRYMHLALRRQRNIAKVAMARRLGVRLYWMWRKGWEYSDWVKFGSHAGQLGTGDGVQ

SEQ ID NO: 71326 - protein, 435 aa, unidentified
MEEVTDEPLYRDRVCGIDIGKAELYATIGVPSDTSPQRRMSETRAFATTRRGVLALADWLRSWQVPAVVMEATSTYWMGPFFRLKAEGFECVLADARQVKNLPGRPKRDPSDSSWLAQCFERGAVRPCFVATKEFRIIRLHTRYRRDLINERTREKNRAEKLLETAAIKLSSVLTGLHGVTGRDIMGHLIAGERDPKVLAQLARTRARAKITELQHALEGAEFFTGHHARLLKTMLERIDQIDTQISDLTAVTEELLAPYEEQLAQAESMPGWGRRSAEDAVAETGVDMTRFATGGHLVSWAGRAPLDKQSGKRKGQARHKKGNTYLGGVLGETAVCAGRTQTREGARYRKLARSRGKNKACVAVGNTQLKACHKLLSSPGMRYADLGPDYYQRRAQNRRKIDYHVRELEALGLEVTLCRIPEPEPGQAATTPAA

SEQ ID NO: 71327 - protein, 339 aa, unidentified
MKVTTIGLDIAKKFFQLHWVDMTTGEVHRKQLKREQIAEFFATCEPSLVAMEACGSAHYWARKLQAFGHEVRLVAAQFVRPFVKTNKTDAADARAIWEAAQRPEMKFVAIKTEAQQSVLALHRLREQMVKFRTMQGNQLRGLLYEFGVALPPGRAKGMPAALEALGVLEETLPAMVIDALHQQMIRIQKLDEDIADIEKKLTLWKKEERSAMNLMEIPGVGILSATAAVATIGDATAFKSGREFAAFLGLVPKQSGTGGRVRMLGISKRGNVYLRTLLIHGARARINFQKQRDPWIEQLLARRPFNTVVVALANKMARTIWAMMAHDRTYQKNYAANIA

SEQ ID NO: 71328 - protein, 346 aa, unidentified
MEHYAGIDVSLELSSVCVVDAQGKIVKETKVASEPEALVSFFEALGFAVKQIGLEAGPLSQWLHAGLTQAGFETVLLETRHVKAALSAMTVKTDRKDARGLAQLIRMGWFRPVHAKSMRSQEVRALLVARKQLLGRLIDVELSIRGILRGFGLKVGPVTRKGFEARIRELVTGQVTLERIATAMLSARAALKVEYEKLHKAVLSIVRDDAVCRRLMTVPGVGPLVAVTYKSAMDDPNRIMKSKAAGALFGLTPRKYQSGEKDITGGITRAGDEMVRTALYEAANVLLARITRFSKLKRWGMDVAKRRGSKRAKVALARKIAVILHRMWVDGTTYRWTEAKPIAAQA

SEQ ID NO: 71329 - protein, 373 aa, unidentified
MVNFKCQSKTNQKIQLMEQSNRISFKGQNIYVGIDVHLKSWSVTILSETSVLKKMSQGADPDALHRFLTSHYPEAEYYSVYEAGFCGFWIHDRLTELGIHNIVVNPADVPTMSSEKLRKTDAVDSRKLAVSLRAKQLKGIYTPDSEALEIRSLIRLKNSITKDMTRQKNRIKSQLRYLGIEIPTEYLEPHSNWSKRFLNWLREVEMRTPSGRQTLDILIMQFEALRKQKAEMTRRLRALSHTDRFEEMLGLLMTIPGIGQTTGLALMAEIVDITRFDNAEQLAAYVGMIPMCHSSGEHEGVGDITLRKHTILRSNVIEAAWVAIRKDEAMQLCYLNNCKRMVPSKAIVKVARKLVNRIYFVLKRHQPYVNAVA

SEQ ID NO: 71330 - protein, 348 aa, unidentified
MKKIAIGIDFSKETFDATIMLRDGDHYIELAYSKFDNDAKGFKAFEKWVRRTLKWQADVKDRCSWIFCGEHTGPCSLGLCDYLTAKGYFMWLEDARRIKVTKPLARQKNDRGDSRMIAEYALREFNSTVRPYKLDSLDLKQLRSLLTAHTILTQDKVAKINQLKSGALDNSPLAKEHIQRELDTIRASLKEVDKEINSLLRKSQEFQHHFEIANSFPGVGALTIAWLIVKTRNFQDMTDPRVLGCFIGVRPFGSQSGTSINKPPKTSRFRDPALNALLTTCATCAIMYKNPIVRPYYDRLVARGVHPNKAKNNCKYKIINVLMAMIRNNTKFSMEIHGKSKAQWKTAV

SEQ ID NO: 71331 - protein, 368 aa, unidentified
MTSLSDLVEVVIGVDTHVDTHTAAIIDAGTGGVLGQVQVAATPAGYAELVEFVDTHLRGEDEADIETDPCAATGGRAWAIEGTRSHGAGLTRHLQARGELVIEIDRPQRAKRRRGAKSDPIDAVRAAREALTREHLATPRSGGNRHALAILLSTRDSLVTEAGRAARQVFHLIITAPEPLRAKFAGKKLPAMITTAARLRTRPGQDIETTTTITILRDLARRAQDLTTQAAQYKKQIHHIVTSMRADLLDQPGIGPIVAARILCAWSHPGRIHSEAAFAMLAGVAPIPATSGRTTNRHRLNRHGDRQLNRALHVIVLTRLRHDPHTRAYAQRRTTQGRTHREITRCLKRYIARDIYRQLEHHNPTNTP

SEQ ID NO: 71332 - protein, 361 aa, unidentified
MTGMVTYAGLDVHARSTYAAAIDVFSGELLRARFGPGVEEPVRWLAGLPGPVRACYEAGPTGFGLYRAARAAGVDVQVIAPGKTPRGPSDRVKTDRKDAELLARLLLAGSLTAVVVPPIEVEAAREMTRAHDVCRQELMRARHRVSKMLLRHGLVYPKPKTWTAEHRRWLSQQRFQEQPSDAVFADLLAAVDGITSRKAAIALRISQLATDEQWWPTVSRLRAFRGIDTLTALSLHLELGGDWRRFERACALSSWLGLTPSLNQSGESSRQGAITKTGSMLARRLLVESAWHYSRPPRLGATLANRQQGQPDHILAISNRAQQRLYRVNRRMRARGKPHNVTVVACARELACFLWAATTAD

SEQ ID NO: 71333 - protein, 434 aa, unidentified
MRLTARSTRAREKGDQVSDEFEWFMGIDWGSEAHAVCLLDPTGQIRGTRTVAHTAGAVHEALSWVREQTGAEPAAIAVGIETPRGALVDTLIEQGFPVFALNPKQLDRFRDRFTAAGAKDDDRDAHVLADALRTDRRAFHRVRPDDPLIIQLREVTRLREDLQEDEQRLANRLRDQLYRVHAAWLTISPAADEPWLWAILAQTPDPTRWARLSQRRLAAALRAHRIRRVTPEAIRAALQEPRLTVAPGVTDAVATRIAAVVPQLQLVGGQRVAAERRIEGLLEQLASRETADPEPREHRDVEILQSLPGVGRMVTATMLTEATGPLAERNYATLRAFAGAAPVTKRSGKRARFVHMRYACKPRLRQALYHWARISIQHDDAARRYYDGLRTRGHGHPRALRSVADRWLRILVAMLKTRTVYDASRFVQFGAVPV

SEQ ID NO: 71334 - protein, 338 aa, unidentified
MHYIGIDHHRQYSHITLLDEKGEKLKSGRVTNLRSELENFLSGIEEVKAVVEAGRSSYTMVDVLDDMGIEVTVAHPKEVKAIAKAKIKTDKRDSYMLAHLLRTDLIPEVYKRSRENRSYQRVLRQRAFYVGSITRVKNRIHALLSQQSEDIQEEISRAKNLFGTKGMKVLVGLSLPAGEKELIDSLLKTYRHLDESRKQTNGLVEKLYFEISEARLIHTVPGFGVFLSVLTAVEIADIGRFENVRKFHSYAGVIPSTHSSGERTYHGRIVKEGNRWLRWAAVEAVWPAIRADFDLRCYYERLKRKKGANSAKVATARRLLTIIYRMLKESRPYIPYKR

SEQ ID NO: 71335 - protein, 342 aa, unidentified
MAGIDLHGNNLVIGVINQDGKRITHRKVDCDLKQVTDFLEPLKPQLESMAVESTFNWYWLVDGLRAQGYKIDLANPAKIEQYSGIKHADDKHDAFHLAELQRLNILPKAHIYDVQLRPVRDLLRRRTNLVHQRTALFLSFKSLYARTTGQAMALNVLKIMQPKEAKNLYAHPANQLIAQVQLEHMEALHKSIVRIEKAVLGCAREIPLYEKLLTMPGVGRILGMTITMEVGDVKRFKTDGDFASYCRAVDSRRLSNGKQKGENNQKCGNKYLSWAFVEAANFAKRYDQNCRRWYDRKKARTSTVIAVKALACKLAKAAWHVMAKGTDYDATRMFPELALKKN

SEQ ID NO: 71336 - protein, 337 aa, unidentified
MPGTIDPVPTRLSAKGVNIMMIQDRKCHIGIDVSKAVLDVYILPCKKYMQFKNDMKGIQKLARKLKSFSQASIVMEATGGYEKTVAQSLQKMDFSVSVVNPRPIRDFAKALGKLAKTDRIDAEVIALFAEKMQPQENLIYNENQQKLADLNARRRQLVGMITMEKNRLDKASPELKKSIQRIIRALEKELQTINEALEKSIQNDADYVQKNTLLKSIKGVGSVVAAGIIADLPELGKVSSKQISALAGLAPYNRDSGMLRGKRTIWGGRATVRCILYMATLVATRHNPQIKSFYERLCNAGKLKKVAITACMHKLLITMNAMIKNGELWRNATAVEI

SEQ ID NO: 71337 - protein, 422 aa, unidentified
MDEERKWFIGIDWGSQEHVVSLCDDRGKKIGQRKFAHGGVGLSDMIAWLLQASGGEPGEMHAAIETPHGPIVEALLERGFNVYSINPKQLDRFRDRFSVAGAKDDSLDADVLADSLRTDMRLFRKLTIAEPLIVELREWSRIDEELKVQRVRLTNRLRDQLWRYYPQMLELADDLGADWVLDLWEAVPTPEKAARVREAAVARILKTYRIRRFNAAHVISELRKPALSVAQGTTEAASAHIRVAVQQLRLVNRQLANAELQLDGLCKKLAEPVDGDEGENVPGQQQEHRDVTILDSLPGVGRTVLVTMLAEAQDALQRRDYHALRNLCGSAPVTRRSGKSCIVMRRRACSRRLSNAVFYWGRTAIQRDPTSRAKYEALRARGHGHARALRSVVDRLLYVACAMLENRTLFDSSVMEKKNAAA

SEQ ID NO: 71338 - protein, 415 aa, unidentified
MALKIVYKICCGIDVHKNFVVACIAKTDKQGITTYERHHFSTYTKGLKQLLKWLLDRNCKDVCMESTGKYWIPVYNVLEHDCSIVLAHPKYVKAIRGKKTDKKDAKWIADLFKHDLVAGSFMPPADIRQLRDLMRYRFKLTCFKSSEKNRYQNCLTVSNIQLASVVSDTFGKSSQKIIAKILENPDNTSFDIESLIHGSMKDKLPELELAIDGYITPEQAAKLKIIKEHFDNLESRKAELEELILALANPYQQEISIILTAPGFKNTFTAIGIISEIGTNMEAFPSAKHLCSWAGLTPTNNESAGKKKSVRVSKAGCYIKPLLVQCANAAIKSKKHPEIRDRYLRIKKRRGHKKAIIAIARMLLTALYHMLKNGENYNSDLYQKSDILPTTREITVEQAILMAQFQGYRIKSATE

SEQ ID NO: 71339 - protein, 424 aa, unidentified
MKVTYQTCCGVDVHKSFLVATIVKTTGGIEPSYQKKRFSTFNNSILEFKQWLLDNDCHDVCMESTGKYWVPVFNLLEDEINVVIANPKWVKAVKGNKDDTKDSKWIGDLFRLGLVKGSYIPCKKVRILREYTRYRYKLVSCRSSEKNRYQNALTVCNVALDSVVSDIFGKSSTSIIDYLLEQSGTSINHEEIASKLLRSLKSKEDAVIESVEGYQMTDAQKYRMRLVRAHMDYITAEINDVDKMIENMISSNPDFENAVQFLCTIPGVKRDSAVTIISEIGTDMSQFSSSKRLCCWAGLTPGSNESAGKKKSVRITRAGVYLKPALVQCAHAAVKSDKSPYYKKKYESLVKRRGKKRAIIAIARMILTAIYQMLSTGEQWNPSDLYKIDMPVALVEKQKAKAIKQAKKLLQREGLLPPDEPLAS

SEQ ID NO: 71340 - protein, 398 aa, unidentified
MTESSDYESVQVFIGVDVGKDTHHAVAINRSGKRLFDKALPNDENKLRSLISDLKQHGQILLVVDQPATIGALPVAVARSEGVLVGYLPGLAMRRIADLHAGEAKTDARDAAIIAEAARTLPHALRTLKLADEQIAELSMLCGFDDDLAAQTTQANNRIRGLLSQIHPALERVLGPRLDHPAVLDLLQRYPSPEKLASLGEKKLAAQLCKLAPRLGKRLAADIAQALAEQTVVVPGTNAAAVVLPRLALQLITLRKQRDEVALEVEQRVLAHPLYPVLTSMPGVGVRTAARLLTEVACRTFASAAHLAAYAGLAPVTRRSGSSIRGEHPSRRGNKALKRALFLSAFAALRDPISRAYYTRKMSQGKRHNQALIALARRRCDVLFAMMRDGTFYTPQAS

SEQ ID NO: 71341 - protein, 371 aa, unidentified
MHNMVRESLLIGVDVHKDTHTAVGISPFGEKLFEVKIGNYREDFATLAAKVEAVAKGAKLSPYFGLEDCHGYGERLATYLDGVGYPVFHVASTLVDRQRKNNTHPEKSDSLDAYGVAEVMLRKSDSLPRYTVTEASKIAKDIKDVATDRDNLVLECTRLKNQLHDLLHRIWNSAYQEKFVDPFSQKALRHWAQAQKKDASPFLMRTVKRKVRRLQALHEEVKELDRELAVLVQASGHTITTASGCGNEIAAALIAEIGDINRFDSPAALAKYAGCAPREYGSGKKQRYRKTRSGNRRLNRAFHVMALAQISPTGNARGRKYFEKKVSEGKSKAQALVYLRRQLVNVIWCMMKYKTVFDLEHKSSVNNRNKN

SEQ ID NO: 71342 - protein, 339 aa, unidentified
MTDVNTIGLDLAKTVFQVHGIDASGTVTLRRPLRRDRVVAFFAKLPPCLVGMEACATAHYWARELRKLGHDVRLIPPAYAKAYVRRNKNDPADAAAICEAVSRPSMRFVAIKTEQQQAATGIHKVREMLMKQRTMLMNHMRGLMAEFGIVVAEGPAHVAELLAVLADPDDHRIPAPLLDGLVKIAELLRTIEQKLEAIDKQIVVSGRDNATVRHLITAPGYGPILSSAMAACVVNPAVFRSGGDFAASLGLVPRQDGTGGKVKLGPISKRGNGYLRRLLVNGAMSVLNSKRGRQDPWLVKLLASKPRKLVAVALANKMARIGWALMMRQEDFRTMPAAA

SEQ ID NO: 71343 - protein, 348 aa, unidentified
MLHVGLDLSRRRLDYCLLRGDGVVVETGAVAPDGDGLRGLVRVVALRHGSGPVAAVIESMNGARFVHDALERSGWDVQVADAVKAKGLAPLACKTDRIDAWVLAELSRRELVPAIWLPDFEQRGARERARFRLYLVRQRSSLKNRVHAQLMAFGHTCPVSDLFGAQGRRLLERLDFPEPWRAGVLSAVALIDELEDRIAAIERELKTLGAEHRYVSRLVTVPGIAWVLGYTIAAEIGDIERFATPTKLCGYSGLCPRVYQSGNTDRRGALSKQGPKYLRWALMEAATVACRHPLYHQRYERTKDRHGKQRGAKIAQIQLARTLTEAIWHMLTRDQDFAPAGATLPVAA

SEQ ID NO: 71344 - protein, 423 aa, unidentified
MIPAVLERCAGIDVHKKFVMVCALLGPAQANPEAKIRRFGTYNAELEQLRGWLQELNCMHVVMESTGPYWKPVFNVLEEAGVQTTLANPQQVKNLRGHKTDMKDCQWLAHLLRHGMIRASYIPPRPIRELRDLTRRRKQLVRHGAMERNRVQKLLEEANVKLGSVLSDVFGASGQEMLFALVQGTATAEQIAQLAKQRARKKIPQIQAALEGHRMNQTQRELIHQCMAHMAFLEEQIEEVDRQIQDKIRSFGLSQAYDLLQTVPGMKKEAAATVLAEVGANMDAFSTPAKLSSWAGVCPGNNESAGKRKSTRTTKGNPYLRDMLLECAWASSHRKNSQMQHRYQRLQQRKGHKRAIVAVAHALIQAVYYVLSTRQPFVDTAEPPRSPAIVRRLIRHHTRRLRKLSCWLERQTNTLHQQQITSG

SEQ ID NO: 71345 - protein, 357 aa, unidentified
MSSNMKKYIGLDVHKEATSIAVLNGVGKLVMESIIETKAATLLEFLHGLRGELHVTLEEGTWAAWLYDVLKPHVAEILVCNPRRNALLKEGSKSDKVDARKLAELLRAGLLRAVYHGENGLRTLRELARSYLTISKDQARVMSRLKALYRSWGIPCSGRQVYTPRHREQWLSRIAQPGVRRRAELFYQQMDALSVVRHAVRGELLAESRKHQAVKILRQIPLIGPLRAALLLALMQTPHRFRSKRQLWTYSGLGVETHDSAQHRYVEGQLQRSKKPQQIRGLNQNHNHEMKKIFKSTAMSASRCAGPLQDFYAGLLAKGMKPDMARLTLARKIAAITLTLWKKGERFDAEHLKSQAA

SEQ ID NO: 71346 - protein, 388 aa, unidentified
MTKVDDLSRSLAALDQDSTLIAVIELSLKSWLVAGLVPGVERRPLKKLAAEPEAVRHLLERWRGEALKAGRRIKRVAVAFEAGRDGFWLARWLREREIEAHVIHPASVAVSREHRRAKTDRLDTELLMRAFLGWLRGERKHCQMCLVPSLADEDGRRPGREHEALTRERTRLVNRIKATMGWLGIAGFNAKLRRAAERLAELRTPDGLGIPPNTQAELRRAIERLRLIRQQIKEIETERLERLERTRAAKPKAAMLLLQRIVGLGLETADTLTNEVLLRPLRDRRAVGRYGGITGEPDESGAKRREKGLARAGNARVRQTMIQLAWRWLMFQKDSALARWYRERTENASKLVRKKMIVALARKLLIALWRYVTDGVVPEGAVLRPAAA

SEQ ID NO: 71347 - protein, 328 aa, unidentified
MIQLGIDVGKSKIDLCLRPDGPEGRKKTKILTNGPDVAVSVLEWLAKQKVAPADVQVVMESTSTYHEHLAYGLYERAVRVIIANPARVRAFAQGMGILTKNDTVDADVLARYGAMRQPDVWHPPSPAIQELKALLSRRDALVHDVGREQSRLEKLLSTRCSSLVEASVRKILQVLNNELQVVQALIDNHIDNHPELKRDMEYLTSIKGIGSAVGSTMLVVLRGNHFISAEQAASWVGVVPKEKRSGSSVRGRTRLSKNGPPEVRAKLFMAAIVAVKHNPLLKQFYDRLLAAGKAKMSALGGVMRKLVHICYGVVMKQQKYDENYATAA

SEQ ID NO: 71348 - protein, 458 aa, unidentified
MGRKGKRTKGIEEAHPFAGMRQVNPNAAGVDIGAVEIVVCVDGENKTQIVKGFGNYTVDLQSIGTWLKEHKIKTVAMESTGVYWIPLFEVLESMGFKCLLISSRSLRRVPGRKSDIEDAQWIQTLHSYGLLESSFRPQADLVALRTMLRHRAQLLEHRAPHIQHMQKALLQMNVQLSQALSDVMGETGQAIIRTIVKGERSPQLLAAFRDPGCKKSEEEIGKALTGTWRDEHLFVLKQSLELYDFYTQQLEVCDKEIDRQYALIRPDWETGELPPIPKKKQKTHSKNAPENAKEIRLHLKRINGVDLSLVDGFGVSLAQTVTMEVGSNVSEKFPTEGNFCSWLGVAPKHEISGGKVLKNKTLKTKNRAGQAFRMAAQSVKKSDTVFGVMYKRFRSRQGPAQATVSTAHAIARVVYRMLKYKVEYETINVNEYEKKYEEQQVKYFKKKAAKLGYQLIPA

SEQ ID NO: 71349 - protein, 345 aa, unidentified
MQPMYYIGLDVHKQKISYCVKDASGKVFAEGWIPATRFDLDRWMKRLPQPWSAALEATMFSGWIYDHLKPHATALKVAHPLMLRAIAAAKKKNDRIDANKICDCLRCDFLPECYMAPTAIRERRRTLRYRNLLVRQMVQMKIKISTLLMEAGVSYNKQRLHKVGYFRELLASNPNINEGLRPLLRLCREMVVRLSKTESALVRSLECDPLLRRRVERLASIPAIGPITALTWALEISEVQRFSSIKKAISYCGLCGDEQRSANSVQRTPLSKQRNKHLQTTLIEAAKMAPRYSPTLALLYDREKQKGNANRATLAVARKLVAYLMAVDRGQTHFLVIDQEARTAA

SEQ ID NO: 71350 - protein, 339 aa, unidentified
MELYCGIDLHSNNCVVAILAKDLEHVACRRLRNDLSQVVGFLEPYREQLVAVAVESTYNWYWLVDGLVERGFDLRLVNTTKSAKYSEMKYTDDKHDARWIARLLALGILPEGYISPPEERRLRDLLRRRAFLVRKRTDFLLSMGTLVQRSTAQRVESVVMVKWNGKEVRALLRDPFVAESVIAMIPVVRALTRQIKAVEKVMMAEAKPRKEYELLKTAPGIGDILAPAIMYETVTIDRFRDAGNYVSYCRCAKSVHTSNDKRKGAGNRKNGNKYLSWAYSEAAHHAARVEPLARQYLERKKKRSHPMVAKRALAAKIARGCYYVLRDQTPFDAIRTFQK

SEQ ID NO: 71351 - protein, 429 aa, unidentified
MSEVEFIKQEPEFAAFLAIDWADKKHVWCLQGVGSEKRESGELEHSPEAVEAWVGQLCQRFAQRPIAVALEQSRGALVFMLSKYEALHLFPVPSTMAASMRAALYPSGAKDDPRDADLLLDLLLQHRDKLRRWLPDTEATRRVQNLVEERRKLVDEKTEQTNRLTSHLKIYFPQIVNWFEHLDTELVCALLLRWPTLEDLQKVPLARLRTFFRKHHCRDQEVIERRILAIRQATLAVRDRAVIEAKSTVVKVIVRVIGSLLEGIADLDEKIQEAAAAHPDFFIFDSLPGAGAVLAPRLLAAFGSQRERYGNAGEVQAYSGIAPVMERSGKKKWVHCRIACPKFLRQSFHEWAGHSIAHSVWARSYYQQLRRQGKEHHAAVRALAFKWIRIVFRCWKDGVAYDESKYLATLARRGSPLAAVTVSIVRKAV

SEQ ID NO: 71352 - protein, 421 aa, unidentified
MTPPNGMVWAGIDTHTDTHTIALLDERGRPVGSETFAASPDGYDRLIDMLPGPGAVAAVGVEGTNSFGAALARRLAAAGYEVREVLRPKRNVRRRNGKSDPIDAVAAARSVMAGDDAGPPKSSDGWVEALRHLNAQRAQLVSAMTAISNSTNGLLVTAPEPVRERYRGLKGGARMNRLAECRPAGGLVEHSALVALKSAAKAWKALKRQSGLLEERMRAILEEHARPLLDMYCVGTVIAAALAIVAGDNPERIRSEAAFAKLCGACPLPASSGRTSRHRLNKGGNRQGNVALHRIAIVRLRCHQPTRDYAARKTREGKGKLEIIRCVKRFIAREAYRALIAIRNGGNGRGTSGERGARLRELRMNHGITQQQVGEALCVPSSRISEIERGRRDLPELEQRAIQWIHSITDPKQHAQTLDNV

SEQ ID NO: 71353 - protein, 438 aa, unidentified
MRGSLLQRSHTLRQKRPKLPWLPAAKRCYGAGDEGMAPSLLPNNLMERPVKRNDLSQSLIAFDHSSTLVAVVELSFGSWLAAGLVPHLSRQPLKKLRPDPDALLRLLLRWRDQGIKAGGPIKRIVLAFEAGRDGFWLARWLRARGIEAYVIHPASIPVSREHRRAKTDRLDTGLLMRAVLGWLRGEPKHCNMVAISTIAEEDARRPTRERETLVRDQTRSVNRIKATLIRFGIRTFKAKLRQATKHLEQLRSPEGEPLPPNTMAELRRDLARLQLIRGQIGEIERARLERLKRAPRQGTHPMIRMLARIMGLGIETADMLVHEVLSRKLRDQRAVARYGGLTGSPDESGSKRRERGLARAGNARVRRGMIQLAWRWLMFQSKSTLTKWYRANGRRQARIAQSHDRRFGTQTADRLVALRHDRRSPGWCRPAFGDMSEL

SEQ ID NO: 71354 - protein, 342 aa, unidentified
MEISTVGLDLAKSIFQVHAIDAAGTAVVRKALRRAQVVPFFAKLPRCLIGMEACGTSHHWARELARLGHEVRLMPPAYVKPYVKRGKTDAADAEAICEAVTRPSMRFVPVKSAEQQAALALHRTRDLLVKQRTQLVNMVRGLLAEFGIETARGLHHALSLAARLSAGDAPEVPALAQRVVKGLADQIGALQVQLDLLEKDLLAWHRSNELSQRLATIPGVGVISATALAASVTEPERFRSGRQFAASLGLTPLQNCSGGKERMGRISRMGDRYLRRLLVLGMTSLVRRARSTPDAVDPRFVAMLQHKPVRVVTVAAANRTARVAWAIMTHGGTYRTPPAAAA

SEQ ID NO: 71355 - protein, 385 aa, unidentified
MQMILGQSRFVPFGLPYWGLKRFNEGEQNVTALYDYHIGVDYHKAYSHLVVQDSAGKTLRSGRVKNDRQSLASFLERYRDNSHAVVEATRNWMVIYDWLDDICDDVVLAHPLKVKAIADAKIKTDKIDATVLAHLLRADLVPEAYAPSDRARELRLALRERMFYVRLRTMVKNRIVTAFDRYPEQTAQLKKLGDMFGKVGRQQLATLDVSEIDRVQIDRSLAFIGDINERIKQAETTIRAMTKTNANVKLLKTIPGIGEFFARLIDAEIDDIGRFRNPKKLAAYAGLVPSTYSSGGKTYHGRIIKQGNKWLRWAFVEAVQPAVATDPHLRAQYEHLKLRGTNKARVAIARKLLTIAFQILRDQRPYERRDANAEEGASSTISRLS

SEQ ID NO: 71356 - protein, 384 aa, unidentified
MVNNSITFIGLDTHKEFFEVAYIEDNRDAKPVSLGRINGTKPALQKLVRQFESKHPGSTLHFVYEAGPCGYWIYRFLTSLGHCCYVVAPSLIPKKAGERVKTDKRDAVKLALLLRSGDMAPIYVPEPEDEAMRDLSRARETAMKDLKDAKYQLKAMLLRNNIRCHIQDNWSAKHLRWLTELILPHPSQQIVLQEAIQTITERIRRLERLDNELSYHVKNWRYYPVVKAIQAMRGVRLLVAVGVIAELGDLSRFDHPRKLMSYLGLVPSEHSSGGKRKQGGITRTGNTRARRLLVEGAHTYRYAAKISTELQKRQESLSKEIVDIAWQAQLRLCRRYQRLMKRGKHYNLVVTAIAREMIAYIWAISREVVLTPVNPAKRLARVPA

SEQ ID NO: 71357 - protein, 344 aa, unidentified
MEHFAGLDVSVKETSVCIVDDTGRIVREAKVTSEPEALLSVLKNPGYHFKRIGLEAGPLSQWLFSALAEAGLPVICVETRHMRAVLKAQINKTDRNDARGMAQMMRAGLYRPVHVKTLRSQKMRMLLTHRKLLQSKAIAIENDLRGTLRNFGLKVGMVGKVKFEARIHELVENLPDLAVLVEPMLTVRRVLREQIVILHRRVLAIVRDDDVCRRLMTTPGVGPVVALTYRATVDVPARFRKSKSVGAVFGLTCAKYQSGEIDWSGRISRCGDEMMRVMLYEAAQSMLVRSKKWSWLKAWAMQVARRRGMKKAIVALARRLAVIMHRIWVDGTEFRWTRQEAAAV

SEQ ID NO: 71358 - protein, 345 aa, unidentified
MHHTITGVDLAKEEIQVCVAKHNKVHSNQAMTPEQFTSWLANAKPMTIVFEACATSNYWKQLALKYGHDARLISAKLVANVRQNQKTDKNDALAVVQAAQLTDISFINGKSKEQQELQTLARLHKLAVKHKIAMGNQLSALLLEFNIRVSPSKGGLSGVIQGVLEDADNGFSFSFREALHTAWTQFLASLEAIEKYEVCIEKASKKHKHCQRLQALEGVGPMNAINLYISLGCDEIGTFNKGRDASACIGLTPIQHSSGGKIKLGSVGKYVKNNAVRSCLVAGAMSAVHHATRRTAKTKKDLWIQQLVERRGKRCAAVALANKTVRTAFAMLKNDTEYKAELLPA

SEQ ID NO: 71359 - protein, 341 aa, unidentified
MNKHMTIGIDLAKSVFFVVALSPSGKQLQRKKLRRAQVLLWLANQPPCVVALEACSGAHYWAREVQALGHEVKLLPPQHIKAYLRKQKNDYNDAEAIAEAAQHGRIRPVTPKTVEQLLDQHLHRMRKALVADQTRLVNRTRAVLAEHGVVFPEGKARFRSTVASLLEDAENGLPWRLRQLLDRQYQQYCLWEEELAWYRQEIESRAEQDEVCQNLKSIPGFGVINSSAFRSWIGNGQQFSCGRDAAAALGLVPRQHSTGGKSILGGITKTGDRYLRALLVHGARSVVRNADKHHDRLRQWVLSLVERRGYNKAVVALANKMARIGWAVVVRSERYQPSPCQ

SEQ ID NO: 71360 - protein, 339 aa, unidentified
MAIIGCDLHSRYQVIATVETDTGEVTTRRLQHENGEARRFYAGLSQPSRIGIEATGYTQWFERMLAELGHELWVGDPAEIRARAVRRQKTDSRDAEHLLDLLVSDRFPRLWVPTVEERDLRQLLKHRDKLVRMRTALKNQLHFLAMSQGVCRKQKLWSARGRAELEGLALGAWASRRRQELLKTLDELDPRIAELDEAVKTEAERCPQAVRLLAHKGVGPVTALAFVLTVGPVERFAHSRALVSYLGLNPREASSGGHQRLGHISKQGNQMLRWLLVQAGQSASVFDEELGRKYQRLAFRRGRNVAKVALARHLAVRLYWTLRQARSAPAPVRMPGSPK

SEQ ID NO: 71361 - protein, 461 aa, unidentified
MRESRGQEGKATPGAAGGLPVVRADAGGIDAGSTEHWVCCPPKPDGSANVRRFGTTTVELERIAGWLAAEGVKSVAVESTGVYWIPLYELLESRGIEVVLVNARQLRHVPGRKSDMADCQWLQTLHACGLLRGSFRPAGPICALRALMRECANLMEERTRAVRRMQKALDQMNVQVHRAVSDVTGATGMGIIRAIVAGERDPLALAGMRDKRCQKSAAEFAEHLRGTWREEHLFNLAMNLELHDKLAEMIETYGTKIAGLMEALVPEDRRDGGPPQHPNPTKARTIERGGDQSLRQTLWRMSGVDLTRIDGVNVGVAGVALAEIGPDLSAFPTENHFSSWLRLAPNRPVSGGKVLKKKRNAAGATRLANALRQAACSLQRSKTALGGQFRRLARRKGYSVAVFAMARKLAILIYRMLRHGQDYIDEGLAAYEERFRQRRLHNLASTANEMGYQIIPIPVAA

SEQ ID NO: 71362 - protein, 364 aa, unidentified
MSKVLFVGLDVHAETIAVAVAEQAGEVRSIGTIPNRLDSVRKMIHKLGAVKNLKVCYEAGPTGYVLYWQLTELGVDCQVIAPSLVPTKAGDRVKTDRRDAEKLARCHRAGELTAVWVPNAAQEALRDLVRAREAAKRDQLKARHRLGKFLLRHGRQRPDGVKAWTKKHREWIKSKVRFEEAALEATLADYVNEVDHVGERIVKLEKAIDEAIQQAPPAIRAVIEALQALRGVAQTTAASIVSEVGCLSRFPTAPQLMGYSGLVSSEHTTGNRVQRGSITKTGNGHLRRVLVEAAWAYQHRPNVIGHLLRRQKNLASVRRQSRSPGKHNNGCINATKRWLRAVRTRTRLWPHSDENSSASSGRSE

SEQ ID NO: 71363 - protein, 340 aa, unidentified
MDEYIGLDVSLKETAVSIRRNGKRVWRGKCASDPQLLAALIRKHAPTAKRVVFETGPLSVWFFHALTAEGMPAICIDARHAKAALDMAANKTDANDADGLAHLAEVGFYKEVRVKSFDSMLARTLVAARTRLVRIGTELSNQIRSLMKTFGLVVPPATGSKFERQVEALLADNADLGRIIRPLLEAWHAVRLRAAELGRKLLADARRSDACQLLMSIPGVGVVTATSFVTAIEDPTNFKRSRSVGAWVGLTTRRYQSGEIDYDGHISRRGDSHLRGLLYEAATVLLTRSRSECDLRKWGLQLRERLGFKRAAVAVARKLAVIMHTMLITGEPFRGAQATA

SEQ ID NO: 71364 - protein, 351 aa, unidentified
MIIIGVDYHPSVQQIAYVDTETGETCERRLNHSDGEAEHFYRALERRQVRVRVGIEATGHARWFERLLAELKFELWIGNAAEIKAARVRKQKTDRQDALLLLKLLVEDRFPRLWVPSPENRDLRQLIWHRHRLVQMRTRAMNQIQATAMNEGVRRKKALWSKSGRQQLESLLLAPWATRRRQDLLELVDRLSGTIAELTTAIEQEAHKRPEVLRLMTHPGVGPITALAFVLVIGSPDRFACGKQIGSYLGLIPCEDSSANRQRLGHITKQGSSLLRFLLVEAAQAAVRRDPDWRRRFVHLAMRRDRRIAKVAMARRLAINLYWMWRKGYDYQQSLKFGSHAGEPGYRHGVK

SEQ ID NO: 71365 - protein, 402 aa, unidentified
MAYDFVIGVDVGKYFHHACVLDPQGRQVLSTRINQHEGSLRKLFGQFLAHGASVLVIVDQPNNIGRLTVAVAQDMGADVRYLPGLAMRQLSRIHVGNCKTDVRDAYVIAHAGLNLPDSLRSVDRVEEVFIQLKVLNGIDEDLARAYTRLINQMRSALVGTYPAFEHVLRGQMIHRKWILHLLAKYGGPTKIRRIGRTRLAAFARKHRARNPEPVIDAMLAAIHEQTVSIAGAEYAELGVAMSATDALAKLEHRKEIEAQVLKLIQDIPQTEILLSMPSIGPRSAAQILMTVGDMSDFPDAAHLASYAGLSPRTNQSGTSIMSNSPNRAGNKKLKNALWQSSFASIRFHERSRQFYERKRKEGKRHNAAVVALARRRLNVLFAMMRNGELYRDISTVQEAAAA

SEQ ID NO: 71366 - protein, 401 aa, unidentified
MKRLSGGIDVGSESHHIIILDEEDNVLYNKKVSHKLNEFAENINLFKQIEKKEGGKISFALEGKNGYSAPFDRILLDEGFTLYNVDNLKLKRFREAFAGEWKDDQRDALMLSKMLKLKDHLNSEREKVFIKIEKPSPVTESLKLLSLHQQTLIDEKIRLINRLGKKLLEVSPQILKLGKLKNKKMIAILAKYPDFSKYKRITLKSLLKIEGIGKKQAPLLLKRLNNLEYIPGLTDIYKTIILSFAKRILELQNEIKDIDKSLDELGNQSREVKHLKTIPGVAIKLASRLIGEIGDINRFPTEKQLAIYCGVACVNNNSGKITKAKAVYKANKKCKQTLITLAGCSIHFNPQSKTYYLKKRKEGKSHNHTLRCLARQLIKVIYRMLTEDRDYIIKKELKKAA

SEQ ID NO: 71367 - protein, 390 aa, unidentified
MTTKALYIALELSQDKWLLACATAAAEKPRFRPVPARELARLDQEIAKAKERFGLPAEAPVYTCYEAGRDGFWLHRALTSRGIHHVVVDSSSIEVDRRKKRVKTDPVDAAKLLNLLCRYHSGERKVWRVVQVPSVADEERRQLHRGLKDLQRQQTECSNRIKGLLASLGLTAEVDAKFRTTLAELRDWAGQRVPAALAQRLLQEYAVWEALHAQVREACTEQERRLRTGTEPYLEQVRRLLGLKAVGVRGAWILVAELFAWRGIKNGKELGALVGLTPVPYNSGRSERDQGISKAGNKHVRGLIVELAWLWLRWQPGSALSQWYEQRFGAGNKRARKVGIVALARKLLIALWRCLERGEWPDGALAKDWRLTVDSTARRHATKARAVAAA

SEQ ID NO: 71368 - protein, 336 aa, unidentified
MKILYVGVDMAQAKFDGVAWCKQGQRQVDGYANNADGYRQFAEKLEAQQAAEGADALHLIVEPTAGYQAGLLVFAYRKRWRITVVNPPDIRRWAQGMGKRAKTDVQDALMLAEYGERTQPDPQEEMPADLQALDLLLRRQQDVKELVQSERNRLFNVQNHPNLPEGVRQSLERSIERLEQESEQLQQEIDNFVKSRPTLRKLRRLLLSIPGVGKNSVLPLLVLLHRFSALTSGKGTSKQLVAFLGLDPMPYQSGRSVRRPSSISKKGDKVGRALLYMAALGGVSGHNALRAFYRTLVDRGKPKKVALIAAARKILVWAWAVFCSNSPFDPALHPIS

SEQ ID NO: 71369 - protein, 350 aa, unidentified
MKSIIYIGMDVHKKTYSLCALLKETGEIIGETKIPADVSLIIKFIENAKKSVDSDDVQIKTGYEAGCLGYSLYWQLAEKGIECDILAPSTMHRSAKNKVVKNDRRDAKNIATNLANGTYKSVHVPTDEDVEIKEYIRMMHDFKIELKKVKQHINAFLLRFGHQYPDKSKWVPAHIKWLKELELSDMHREILDEYLSQLEILSEKIERFKHRLEELSQKETYNEKIGQLRCIKGIDTTAAMTMHAETSDFDRFPTANAFASYCGLTPGEDSSGESYHRLSITKQGNSMIRTTLIEAAQVLVRGTIGKKGKKVKSKQKDQDVKVIDYADKAVIRLQKKYHRMIFRGVKRKAS

SEQ ID NO: 71370 - protein, 342 aa, unidentified
MAEYVGLDVSKEETSFCVKDGDGMILARGKALSDPQSLFEALREHTLCPDRIVLETGSLSNWLARGLRGYGLPVDVIDARQVHGVMKLQHNKTDAKDADLLAEISRTKFCRPVSVNSEAAQKQRLLIKARSHLVRQRRDTENAIRGFLTSFGLRFAKGSGKLAGRVRAALEERPDLLVMIEPLLASVEAQKAQIERLHREVLAEAKASPAARLLMTIPGVGEVTALTFAATIDEPGRFARSRAVGAYLGLTPRRCQSGEMDYTGRISKYGDSLLRSLLYEAANSLLTIVLKAHPIKDWARRIKKRSSHKKACVALARKLAVIMHRMLISGEAFRWPEKQAAV

SEQ ID NO: 71371 - protein, 401 aa, unidentified
MEGPIVSIDVSNGNSHYMCFIKNNKRFGKVKKIDHDIEGFKRLLEDIQKLEAETNEKVCAVFEATGVYTKPLERFLSKNSIKTYIINPLESARKRKEEIHNKKTDKLDPISISKVYYDKEEMMELKKKYETYNWLRKKNRLYEDQLNHLRKYKVTFQNQLSICFPGYLDLFRDGYSDIPMTILKKYPHPDLLKNKKAETVARYLEKNTCHTHKVSLEYALKIIEFAKKTYPGCEKDDVEVEIFKILLDKVIETQRECEKTLNEMITVASTLEEYRYISSIDGIGPNLAARIIAEIGDIEEFKSREALVAYAGLDPHIYQSGDQDGKHLKISKKGNKYLRCLLFLAVGCSIRGAKDNPVNRFYQKKKQQSNPLNSKAAKTACTAKLLKIIYGICKNKTTYKR

SEQ ID NO: 71372 - protein, 353 aa, unidentified
MEQFIGCDAHKKFSLFIAMNEEGEYGRPIRVGHERERMRAFLEALPVGSQIALETSGSYYWLVEEMERAGHRPQLAHALTAKRRMEGRHKTDERDARGLAMLLRNGTLPRVWIPPAALRDQREMLRLRMILVESRSQVKNRIHGVLLRYNVELKGKDIYTQGGREELDGHLTELPEWTRESVHKQLGMVDHLDQQIEACEQSLEIMLEPNAERDLLKTLPGVGKILSAVIALEIGDIARFGNAERLVSYAGLVPAARESAGRKRPGQCPSACNTYLKWAFVEAGNVIATHHHKWPERHVAQLYVRVKHNTKMHGKATVAVGRHLAEAAYWILSKQELYREPKSNRQALSSTHG

SEQ ID NO: 71373 - protein, 367 aa, unidentified
MEQITRSGAAGEARIARVGADLAKRVFHVHAVDGAGRGVCRRWLPREKFLPWCARLPAGCVVAMEMSSGAHHFARRLQALGLQPRLMSAQLVAPYRSEGATGKNDANDAAAICEAASRPKMRFVPVKSVEQQSMLCVHRLREGLKAERTACINRIRGLLAEFGVVRAQGSQALQRVLPEVIEDAANEMNALARRVIQRAQAHWHELDAHIAWCDERVAEHVRNNPAVRRAAQLMGIGAVGASAAVATVDDFGQFRNGAQFGAWCGITPRQHSSGGKTQLGAITRRGDSYLRSLLVQGAKSAVFTAHKRADPISRWALALRERSGWQVAAVALANKNARILWAVMTKAERFDAHHVSLKPGANAPPPA

SEQ ID NO: 71374 - protein, 342 aa, unidentified
MHSVTTIGLDIAKSVFQVHGVDAAGKVVIRRQLKRRYVLAFFEELAPCLVGIEACASSHHWSRELQALGHTVRLMPPAYVKPYVKRQKNDAADAEAICEAVTRANMRFVATKTPEQQSCLMLHRTRHLFIRQQTAVINAIRAHLAEFGVVAPVGRRGVEELLDVVATSSEERVPEVARGCVAALGVQLRMLKAQILEFDRQIMAWHRSNETSRRLDEIPGVGPALATALVASVADPKAFRSGRNFSAWIGLVPKQHSSGGKHRLGSISKQGDRYLRSLFTAGALAVIRYAKIHGSKRPWLAALLARRPTKVAAIALANKIARMAWAMMVKGERYKEPAALAA

SEQ ID NO: 71375 - protein, 401 aa, unidentified
MEGPIVSIDVSNGNSHYMCFIKNNKRFGKVKKIDHDIEGFKRLLEDIQKLEAETNEKVCAVFEATGVYTKPLERFLSKNSIKTYMINPLESARKRKEEIHNKKTDKLDPISISKVYYDKEEMMELKKKDETYNWLRKKNRLYEDQLNHLRKYKVTFQNQLSICFPGYLDLFKDGYSDIPMTILKKYPHPDLLKNKKAETVARYLEKNTCHTHKVSLEYALKIIEFAKKTYPGCEKDDVEVEIFKILLDKVIETQRECEKTLNEMITVASTLEEYRYILSIDGIGTNLAARIIAEIGDIEEFKSREALVAYAGLDPHIYQSGDQDGKHLKISKKGNKYLRCLLFLAVGCSIRGAKDNPVNRFYQKKKQQSNPLNSKAAKTACTAKLLKIIYGICKNKTTYER

SEQ ID NO: 71376 - protein, 331 aa, unidentified
MKKVTIIGVDLAKRVFQAHGAAAGGSVVFRKKLSRAQLLPFLAQQSACTVAMEACATSHYWGREIEKLGHAVKAVPPIYVKPFVKRQKNDTADAEAIAEAASRVTMRFVALKTEEQQARAMLFRARDLLVRQRTQLINALRGHLAEYGVVAAQGIVNVTRLQAAIEDPQTRLPPMVSDVGRTYLDQIAACSERIAALEKTLRTEAAKGETTTRLQTMPGIGPIGAMAIEAFAPPMASFRRGRDFAAWLGLVPRQKSTGGRQVLGRTSKMGQRDIRRLLIIGAMAVVRWAVRNGAPEGSWLTRMLARKPRIPRMLVAIALATRWPGLSGPCW

SEQ ID NO: 71377 - protein, 371 aa, unidentified
MNESSKPLYVGLDVHKDSIAVAYAPEDRGGEVLSLGAIGTRQSDIDKLIRTLQSKGAPPVFVYEAGPCGYWLYRYLTGKGLACHVVAPSLIPRKAGDRVKTDRRDAITLARLMRSGDLSSIYVPGIEDEARRDLSRGRDDAMQDLKRSKRRLKSFLLRQDIRYAGRATWNAAHLRWLSEVVCPTPPQQIVFQEYVRAVTEQHERLQRVERELHEAVKGWRLSPVVEAIQALRGVQLTGAVILMTELGDLTRFDTPRQLMSYLGLTPSEYSSGERRRQGGITKAGNSHARRALVEGAWAYRYPAKVSRHLQLRLEKLPAEVQAIAWKAQVRLCRRYRQLTARGKHVNQVVVAIAREMAAFAWAIARIVPLAS

SEQ ID NO: 71378 - protein, 322 aa, unidentified
MHTSYLGIDVAKAKLDCALRLPEGKIRHKVVPNTPAGFEALHAWLVKQGAEACHACMEATGIYWEAVAEFLAAFETITVSVVNPAQIKAFGASQMVRTKTDKVDAKLIAQFCFERHPVLWQAPSAAEQALRALVLRLDALQTMHTQESNRLQVARPAVEQGIADHLQWLDKEIKRLVKAIHEHIDRDPTLREKQRLLESIPGVGERTIAVLLAYLIDPQHFPNARQAVAFAGLDPRQHESGTSVRGRPRMSKVGHAFLRKALYMPAVATLYRTHWGQHFQQRLAANGKIPMIIIGAMMRKLVHVAYGVLKSGKNFDPAMHGA

SEQ ID NO: 71379 - protein, 352 aa, unidentified
MHDITPDAIVIGVDTHKDAHVAVAINGLGARLATASFPVTTQGYRQLADWAASHGSVHTIGIEGTGSYGAGLTRELTGMGVRVIEVGRVNRQLRRRHGKTDTVDAESAARSVLAGDAQGQPKTGDGAVEMIRHIKIARDTALKGRTQAMVTLKTLLVNAPQALRERFIGITGKMALIRGIAALRPGTPVSTTASAKMALRALANRWLMLDAEIKEHETVLEQLVRAQAPALMETPGISTGTIADMLVVLGDNPQRIRSEAAFAKLCGVCPVPASSGKTSRHRLNRGGNRRANAALYRVALVRMRHHPPTREYIQRRTVEGKSPREIRRCLKRYIAREIYQHLCTDKQRPHPA

SEQ ID NO: 71380 - protein, 342 aa, unidentified
MKKPKYYVGIDMSSASFTVSIGTVPWQIVAEAAEFENNSDGFSAMLNWMERSDIQADRAVLCMEATGVYGEGLAYFLTAKHYRLAIEPPLKVKRAFMPQGHKNDRVDSQQIAEYSYRFYDELHYWQPKEAVLEQIKVLLSTREQFVSQKTVHSNALKTLKRKVVATPLAETLHQQSIDRIKKSIKEIDAEIQRLIDQDPTYGQKIKLLMSIPGVGLLLASNVLLMIEAAPNYPPTHRQLAAHLGICPYEHRSGRSVYKPATSRHYGPAMARKLLYLASLSVRTHNPAFQKYFLRKVAEGKPKKVVLNNIANKLLKIMCAVIRTQTPFIPGYRSVHPALLNTP

SEQ ID NO: 71381 - protein, 453 aa, unidentified
MSRKKTKLQSVTQPPQIRPDAAGIDISPEVIYVAVDPRKDAKPIRHYGTVTAELYRIANWLKACGVCTVAMESTGVYWIPLYQILDEYGFEVYLVNARHYKNVPGRKTDVCDSAWLQYLHAVGLLQGSFRPPQEICAFRTILRHRASLVEAASKHVQHMQKALDQMNVQVHRVLSDLTGVSGLAILDAILAGERDGSRLAALRDGRVKASQESIVAALDGDYRPEHLFTLRQSLDSYRHYQKLIADCDRQIREQLGTLRGPDENGEPPESRKQMRRADDEQLRQEFFRIVGVDLTAIPGINVRTVEVLLGEVGPDLKGFRSAGAFANWLGICPNNSITGGKIQSSKTKKCANRLAAALRMAAESLCRDKSYLGQFYRRMKMQLDGAPEAITAAAHKLARIIYAMVTKRTEYDETRFAEIEKRNHERARQRLAKQARKFGCILAPIQASAEFVS

SEQ ID NO: 71382 - protein, 341 aa, unidentified
MLKNTFFIGLDIAADDFAASIYQSPEKPVITKEAIKNNPEGFGMLISWLKEHNIDCTNSVICMEATGVYSEAIAYYLSTYGFKVSVEPPLKVKRAFDPVGHKTDPVDSKQIAEYAYRYSDELKFWQPRKDILEKIKQLLTAREQFTKQNTAIKNAMKSYERHVVQVPLIIKAHHETLKELKKHIAEIDKELNRLIRQNPIISQMSNQLKGIPGVGLLLASNLITITGAFNDISSYKTLSAFIGICPYQHRSGKSIYKAPHIRNFGPAYARKLLMLAARSVATHNIAFRKYYLRKLAEGKAKQLVLNNIANKIIKIACALIKNNSQYLEGYYSVSPLCLNLA

SEQ ID NO: 71383 - protein, 418 aa, unidentified
MFYIGIDWADDHHNIYVTDDSAQRLDSFQIKHSYEGLQLLKSKVEKLTPDKSQVIFALEKSQGLLAGFILQQGYTLYSINPKAVDRYRDRYRSSGAKDDDFDALVLANILRTDRARFQPLLPDSPLVREIRILVQDENTFIRQLTRLTHQLDASLKEYYPVARELFCDLAQPITLDFLESFPTPESTQQLTSVHLREFLKEHHYRRLNRTSQLYEKITRPQMPVEPFITRAKSHQMLTLVKQIRSLLKSMAEYDRLISELFQQHPDHEIYESLPEAGGRLAPRLLVVMGDRRERYPDFRSLQCTVGTAPITKSSGKYKHVQMRYACIKFGRDTFWQFAFCSKNASQWAQVYYAQQRAKDKSHSVALRALSNKWSKIIYTMWKTGTKYSEEYHLKHQLDYLSRMKQLLTKTPQVTLAYA

SEQ ID NO: 71384 - protein, 427 aa, unidentified
MRVLYDRVAAIDVHKDMVKVAIRVPGAKRGTRKTDVLEFRTFYGVLQEMARELRRRGVTHVVMEASGVCTEPVYYALTELDFEEVMVINPAHAKALKGHKTDAKDAVRLLDLYECGALPRGSCIPSPDLKEVRDLARYRMKTVQARTSEIQRLQKTLEMAGIKLSPVVSEVTGVAATAMIEGLISGERRGAVLAENAHSRMRNAGKMADLSMALAGRFTDHHALMCRLHLDRIKIFDAAVGDLDATIAPLVARYSREAGLLKTLPGFGDVVVAGWLGAIGPAPHQHFATADRLASWATLCPGNYKSAAKSKGGRTGDGGAYIKPLLIQAAWAAVRVPGRLQARFRRLVRKFGGPRNKGAQKRAITAIAHTLLKIAYSILKTGKPYQDLGDDFYTRRESPAARQDYLMRQLQKLNPGCVITITPPEAA

SEQ ID NO: 71385 - protein, 409 aa, unidentified
MDVIYERCCGLDIHKKTVVACLLIPGTDGQPVKAVRTFATVTDQILALATWLREAGCTHVAMESTGVYWKPVWNVLEAQFTLLLVNARHVKAVPGRKTDVKDAEWLADLLRYGLLRPSFVPDRAQRELQELTRYRTSLVQERTAEVNRLQKTLEGANIKLGDVATDILGVSGRRMLRALIDGTTDAAAIADLAQGKLRGKRSALEQALHGQIGAHQRFLLAQQLAHIEQLETTIAAVSAEIETRLLPLASELERLVTIPGVGKRTAQVLVAEIGTDMRRFPSAGHLASWAGMCPGNDESAGKRRSGQTRKGNRWLRSALIEAAHAAARTQGTYLAAQYRRLAARRGVKKSAVAVGHSILISAYHLLRDEASYHDLGGHYFDARNRQVVEQRLVRRLEALGHKVILEPAA

SEQ ID NO: 71386 - protein, 413 aa, unidentified
MLLVHVFCGIDWAEDHYDVALVDQVGVVLTERRIDDNATGYQLLLAILAEHGDNQVEPIPVAIETPRGLVVACLRRTGRQVYAINPLSVARYRERHSVARTKSDRVDAQLLANILRTDRTAHRPLPADSELAQAIAVLARAQQDAVWNRQQVANQLRSLLREYYPAFLEAFKDRRPGGLVHPDACAVLAVASTPTQAARLTRPQLSAALRRAGRQRGIAAASIRLQAIFRRTSLHQLPKVEQAMGCQALALLKQLEAATQAADDLAEATRLVFQQHPQMAIFTSFPGLGELPAARLLAEIGDDSNRFADARGLKAYAGAAPVTRASGKKLVVLHRKVKNQRLAAVGYLWTFAALRLSTGARAHYDRPRLAGDRHTAAQRHLFNRFLGCLYYCLQTGQTFAEAQAFPVAQPIAA

SEQ ID NO: 71387 - protein, 274 aa, unidentified
MFIDELKNIIIDATLIEHNKNEFDNLFNPIKNYSNLIVVMESTSIYHLPVENYFRSKGIDTVVMNPKLVKQFKDTLNKSKTDKLDCFKIARCYLGTIDNFYYKNDEYFMYNPLARQYWSLFEGQTRLKNRYKQLIEIVFPEFNLVFNDLYDDLALNFIHDFPHPILFVNTRFDDKYQFVSFLGIDSVTSQSGISAYHGAISKTGCKFGRTILFNVVTIILQISAHANTSNSIYLFFRKKQSEGKHHYKCIIACETKLYKIIYKLCSSNCLYENK

SEQ ID NO: 71388 - protein, 345 aa, unidentified
MEITTVGLDIAKRVFQLHGVDAAGKAILLRRLQRSEVLAFFKALPPCLVGIEACGTAHYWAREIRELGHEVRLMPPSYVAAYVKRGKTDAADAAAICEAVTRPTMRFVPIKTAEQQAVLMLHRTRDLLVRQRTMLVNALRGHMAELGIIAPQGIARVADLMAVLLGEDTTNVPALAREALRGLAAELEALDRRVKEIEVAIVRWHKDNEASRRLATIPGVGPITASAIVATITDPFQFHSARHLAAWIGLVPRQHSSGGKQRQGGISKQGDRYLRRLLVLGATAVIRHSRSKSTAEAGWLKSLLERRPARLVSVAQANKTARIVWALLVRGEAYRMPAAVPGGAA

SEQ ID NO: 71389 - protein, 390 aa, unidentified
MIYVGIDVAKDKHDCCILGSDGEILFSPFTFQNTLQGFDELYEKIWPLTSDLTEIKVGLEATGHYHINLLRSLLDNGLPSFVINPLHTNLYRKAQSLRKTKTDKVDAASIAMMLLTDRTLQPYSDTSYHNEELKSLTRYRFDKVQERARLKTSVVRLVGILFPELEKLVPSLHMASVYALLSEFPGASFVASAHLTRLKHLLYDASKGRYGRDMAVSIRDAASSSIGSILPAKSLELKHTLHLIDVLTEEIDEIEVAISSIMDTINSPITTIPGIKNRMGAMILAEIGDFSRFDNPDQILAYAGLSPSTYQSGQLTSSYARMEKRGSRYLRYALFNATQYVCMWDPVFKAYLSKKRAEGKHYYVAISHACKKLVRVIYRMQLTGEPYRTA

SEQ ID NO: 71390 - protein, 322 aa, unidentified
MQYLGIDISKEIFDVALIVDIKNPEKVKQKNFTNDQAGFDNLGKWLSSRASEPVHVAMEATGSYWEALAEHLYDVGILVSVINPSLIKKESQSWALRNKTDELDAKTIARFCLAKQPRFWVAPDPAVRELRDMVRHLGNLQSEKQRHTNRLEARSCQPVEDSLEKMVSVLDEEISMLEKLISKHIDSNHQLKQSAKLLNSIPGIGEKSIGVLLGELMNLTSFAHSKAVAAYAGLSPRRIESGKMKGRSRLSKMGNSRLRRALYFPALTAARYNPIVKAFYERLLEAGKTKMSAICACMRKLLVLVYGVLKNGKSFDPAFKKI

SEQ ID NO: 71391 - protein, 414 aa, unidentified
MDTMYERCCGLDIHKKTIEACFRSGKKKTHMSFGTTSAELRKLTMWLVENDCQSVAMESTGSYWKPIFNILELSGTDMEIIVFNARHMKNVPGRKTDVNDAEWIAELLQYGLLRPSFIPDREQRELRELSRYRKSLVGERAREINRLQKMLEGGNIKLTSVVSEVTGYSSRRLLDRLLRNDEPMTEDVISGLVHTSLAGKSKELEIALDGLLSELQKELLIKVLDHIDDMSRRIADLDDFCRKQMDRYEDALDKLDEIPGIARRTAETILIETGLDMSRFPTAKHFARWAGLAPGNNESAGKRSSGRTTKGNPTLKSTLIQSAKVAARKKDSFFKARYQKIAAKRGANRASVAVAHSMHIAIYHILKSGERFKDLGEDYYNQFNREKKKNYYLKKLTKLGVNLKEATLSIQTAT

SEQ ID NO: 71392 - protein, 428 aa, unidentified
MAKSKAQSVIITDDDGLYYERCAGIDVHKKLLVVCLRIGRRTESREFGTTTAEIREIVAWLISNGCQMVAMESTGSFWKPLYNIFEQESLPAMVCNAYHIKNVPGRKTDWNDAFWIAKCLAQGLLKPSFVPDRRQRELRDMTRFRKSQIEERSRNINRLQKFLEGANIKLGSWLSDVEGKSATQLLELIIGKPDFTIDDVKSCMHRNLKSSPEELFAALDGYIAPTQREFFSHVMDVIRTQTSQIEKTDALIKSALNEDEIKAVTALDTIVGIGTVSAEQIIAETGTDMRHFRDQHAFSNWIGVAPGNNESAGKRKSGKTIHGNKALKTTLTQCAKSAVKVKNSFFHAQYNRLVSHRGKNRATMAVAHSMAIAIFFVLQGMEFKDLGADYYTQFNREKKINSHLKQLSKLGVNFPDKILADAIERPPD

SEQ ID NO: 71393 - protein, 423 aa, unidentified
MTSMTVAPSPANLFSSAGGLVAGVDTHKNTHHVAILDHVGRPVADREFRADGRGYAQIIAFLREHGEVDRVGVEGTGSYGAGLTRALTAAGVSVVEVARQDRRARRLRGKSDPLDAYQAAVTVLADTNTAIPKTGDGAVESMRILLGERRSAAKARAQAMNQIHALLITAPELVRQAFRALSGQRLIRALAKTRPGTSASADPEVVARQTLRRLAVRYLTMQAEIDLIEQQLDALIRQVNPALLSLSGVGPVTAATLLVAAGDNPERLATRASFAALAGVAPIPASSGQRTRHRLSRGGNRHANAALHRIVLLRMRHREPRTMAYFERRRAEQLTDRDIMRCLKRHIANEIYAILLSPATDNPVGRELRARRQEIGVPISVLAASLGVPYQRLRRLEIGTRADPELEQRATLALARLRPPRAA

SEQ ID NO: 71394 - protein, 372 aa, unidentified
MSHMSELNTKTIVAGIDVHKYSHTAVAIDCFGQKLADHEFSNDYLSEFVAWLDSLGARENLLVALEDVNGYGGHIVKRLANENILMRYVPGILTERRRKQSIHREKSDPADAMRVTKVILTNYEETLPAKESIADPGERSAAANLDFFLAERRSLVAGQTILKNQLHVLLHQYWGDHYADNFAKAFNPKSMAYYQKNLKPKNMADPEQPALAMSIKRRLERLKLLVSQIREIDAAMRTAAKDCQPVQALRQNLKGCGQITACALLAEVTTIKRFRTKAQFARYAVIAPIHKSSGSHKRLYTSPYGNRKVNRALHTIALYQISRADGLGRLYYEKKLAEGKTKLWALRCLKRQLANRVFQTLKHEYESRIKPV

SEQ ID NO: 71395 - protein, 275 aa, unidentified
MPIIGLDVGKDELFACLRDGGQQPKQAATHFANTPTGHRKLLSWLGKITTAAEQIHVVMESTSVYWESIAICVHEAGHLVSVVNAAQIKFFAKSLLRRGKTDVLDAELIAHYGEVMRPACWTPPEAELVELRALVRGRDAIVELITLEKGRHHAMEHQSRPSRTAQDWVEARQQFLEAQLKAANQAIGALVKSSAGLRAQVEVLVSVPGVGPLTAVTLLTETMHVGDMKHSDQWAAFAGLSPMPCQSGNFTGKTRMSRIGNARLRRAFYLCALGD

SEQ ID NO: 71396 - protein, 358 aa, unidentified
METAYDGRQVVGMDLHRRRSVLVRMTEDGRRLGMARITNSPQDLRREIARAGKSPRVVLEATYGWYWAADTLAAAGAEVHLAHPLGVKAFTYRRVKNDERDAADLADLLRMGRLPEAWIAPAEVRELRELTRYRAKLVHLRTSCKDQVHGVLAKLGVPVTCSDIFGVAGSAWLNGLGLPQPYAGKVTSLRQLTGELLSAEITMLSVVIADLLAAHRGYQVIQQLPGIGPVLAAVITAEIGDVTRFRNAGQLCSWAGLTPRHRESDTKVTRGHVTKQGSRLLRWALIEAIQRVPRDSVIGSVKDAIIARRGKEARNIAKVAAARRLLTLVFYGLRDGQIRCLSQTPEGSPPVTPPRRAP

SEQ ID NO: 71397 - protein, 437 aa, unidentified
MQIIHSHAAGIDVGSRSHFAAVGQNPGDVSEFGVYTQDHQELIKWLKGHGVTTIAMESTGSYWQTLFSALQRAGFEVLLVNGRQIKNVKGKTDVKDCQWIQRLHCLGLLTGSFLPSEQLEQLRTYQRHRNWLVEQCAKMSNKMQKSLRLMNVRIDVVLSDIMGKSGQSIIKSILEGNRNGEQLALLADARVKKSKQEIALALEGNWCEEHLFELQDCYELYHVFERRIASCDLKTEALLSQFIRQVDNKKENQLTSRHKRHFKNEPGFDVPSLSTRILGVDLFAIDGVSHSTVMTFLSEVGVDIYKFKTAKQFASWMRLAPNNKISGGKTISSRTPKGKNTLALALRNAANAIGQMKRSTLKNFFSRIAYKKGRAAAITATARKLAVIIWNMIIRQQPFQPLDELVYQETIKASVLFNIKAKMKRLNLSVIDLNLTC

SEQ ID NO: 71398 - protein, 438 aa, unidentified
MRKKKNKANKRIHLQSLPLINPNAAGIDVGAKQHLVAVPPDRDPQPVRTFQAFTPDLHELARWLKRCGIETVALESTGIYWISLYEVLEQYGFEVRVVNARHVKNVPGRTKTDVLDCQWIQKLHSFGLLNGSFRPDHQIRKLRTYMRLRDNLVVERTQAIHHMQKALFEMNVQLSNVISDIVGETGLRIIEAILAGERDPEQLAALCSTRIKSSRQTVAKSLHGNWDEALLFCLKTALETYRFNENKIQECDHCIERQLATFDSRAQLSQQGESLRSQLHRVCGVDLTKIPGIKEQAAQIIISEVGLDMGPWKTEKQFSSFLGLCPNNLITGGKVLRRATRKVYNRAADTLRLCAQSLTHSKSALGAKYRRLRARLGAPKAIVAMAHHLARLVYRMLRYGQNYVEKGIEHYEEKFRLQRIKWLKKEAQSLNLQLVATQ

SEQ ID NO: 71399 - protein, 409 aa, unidentified
MQVIHARCAALDLGKDVLVAAARLQDAAGVTRQCRTFETTGQKLLSLATWLESEGVTHIVMEATGSYWKAVWHVLENRFDLTLANPAHIKNLPGRKSDVNDATWMADLHAHGLVRGSFVPPAEIGALRELTRARKQFVREINRHTQRIQKTLDIAGIKLTGAVSQVLGVSGRKILAALIAGETNAKKLAALAHPRLKASPDRLEEALQGRLTTQQRRLLGMHLSLIQTLEAAIAELDADIAKAVDPFRGIVERLHEVPGLSEINVPAVLGEIGVDMSRFPTHGHLISWARLCPRLAESAGKVHSTRTMKGAVWIKELMIQAAWAAIRTKDSYLRAQFLRLRARRGSKKAIVAVAASILTIVYHVIRDGTSYHDLGPNHFTARDRTHAARRLVARLQQLGYNVSVTAEVA

SEQ ID NO: 71400 - protein, 371 aa, unidentified
MNEFSKYVGLDVHKETIAVSVAEANGGEVRYIGGIANTPEAIEKLVKQLRKGGANLSFCYEAGPCGYGIHRQLTDLGWDCQVVAPSLIPKKAGDRVKTDRRDSPMLARLHRAGELTAVWVPDGAQEALRDLVRAREDMVHLQRQVKQRLLAFMLRHGKRYDGKTNWTRAHYLWLEAVKLDHPVQQIVLQEYLDTAKAMTKRVAALDKQIESAAAESVFWPVIEGLMALRGVNMLTATTIVAEIGDLRRFASAPQLMAYLGVVPSEHSSGGTKSRGGITKTGNGHVRRVLVEAAWTYRHPARKTTYLRRRVERTSEAVQEIAWKAQTRMCGRYRLLEARGKLKVQVCTAIARELAGFIWAIGQALPQPTIKV

SEQ ID NO: 71401 - protein, 400 aa, unidentified
MKRACGLDVHKDTIFCATFNGKKHGPVTEYSTLTSSIRAMGKDLHTEGVYAIAMESTGMYWIPVWNIMEDMGFNLILVNPFLIKQMPGRKSDVKDAQWIATLLHKGLLRSSLVPSKEIRELRTYSRRYVKLQQRQTSVLQDMERTLEICSIRITSFVSNISSKSVLSVIEHIVQGETAPDVLVELIHGRIINAHTKQHIKESLTGFITEHHRLMLEFSLQEYTLLIGQSNTCLLKMEELCNIHYANEMKLLLTIPGISNISAMIVLAETGADMKAFENSGKFSGWTGLRPRNDESAGKYKSTATTKGNRFLRAVLVQIAWAASRSKGCYFKEKFNQLAMRSSRKEALIAIARKVGVLIWNVLYYEQQYNPEKVIVYDPGRLKAKLSYHQKEYDRLQKLMK

SEQ ID NO: 71402 - protein, 480 aa, unidentified
MSRQKKHPKKPGEENTTVGKGKRGKRKGMCLEGRPILEPNAAGIDIGAREIYVAVPPDRDEHPVRVFSTFTEDLQKMAKWLVSCGITTAAMESTGVYWIPPHDVLEQHGVKPCLVDARGMKNVPGRRTDWHECQWLQFLHSVGLLRAAFRPEAEVCAVRSLMRHRSDQVLMANQHIQHMHKALTQMNLQIQHVISDITGVTGLAIVDSIIDGERDPAVLAKLRDPHIKASEETIRKSLEGNWRGEHLFTLRQSRKSYQHYQEQISACDEEIEKLLLAFESRVDPEERPLPPDRKRKQRGRKKKNVNPKTGFDMRTEAYKLFGVDLTQIPGLMAMVLTLFSEVGRDLSRWPTAGHFASWLALCPDNDISGGRVLWRGMRRVHNRAGDLFRIAAYTLHHDQTPLGDYLRRMKSKLGPAGATTATAHKIAIIFYTMVKKQVEYDASIWAERDAAREKRFDAKLHRQAQQRGYKLVPIEEEPAA

SEQ ID NO: 71403 - protein, 319 aa, unidentified
MQDILETCCGLDVHKETVVACLLKGDRNNKPEAITRTFSTLIPSLEELKTWLEEENCRHVAMESTGVYWQSVYNVLESAFDGTIVLIVANARHMKNVPGKKTDMKDAEWIATLLRAGLLQGSFIPSQPIRRLRDLNRYRKSIVEEITSQKNRIEKHLQSCGFKLSTFLTDIFGVSGRAIIDHLARVGSISPEEVDPLVKKRARNKLNDIKQAVNGDMDRLQRDFLTILLKRLDESLEHLQLIEQKIDEELLKYEQQLKQLDGIPGINKIAAAAILAEIGIDMAQFKTAEHICSWAGLSPGNNESAGKKSPPVHSVGIPI

SEQ ID NO: 71404 - protein, 457 aa, unidentified
MRIVYQRCCGMDVHKDSVTTCVLLIDEYGEWRSEKRKFRTMTRDLREMATWLASLRVEAIAMEATGIYWKPAWNILEAEKKFHLLLVNAHHIKQVPGRKTDQKDSEWIADLLQHGLLKASFVPPQTIRRLRDLTRMRVKIRQMLATFANRIQKVLEDANIKLGSVASDVLGVSGRHMLHALVEGQQDPEQLAALAQGRLREKRAELQLALEGHITDHHRFQLKFLLEFVQFGEKQLSKLEAEIRCLLAQVDPASVPPEDTVTAELAAPGAKPEAPATAQKSPLQTVVELWDTIPGVDELTATTLVAEMGANMDQFPSAGHAAKWAGMCPGNKESAGKRLSGKTPKGSVWLRRALCQAAWAASRTKNTYLAAQYHHLIVRKGKKRTIVAVAHTMLVMAYYMAKRQCTYQELGGDYFDRRNADTMQHRLVKKLKNLGYEVTLTPINAPPTAQEPSAQCC

SEQ ID NO: 71405 - protein, 370 aa, unidentified
MTHEHGVAGIDPHKNSATIAVLDQRGGVVGSESFPITEEGIDELLTFLLGIELTIDRIGVEGSGFLGRPIVLALTAAGYDVREVQANRTAERRKRRRRAKTDIEDAEAIARETLADPHLPPAGKHTTPSPAWQTLTVLRDWRASLVLQRVRLLTEAEAVLVTLPVAIRDALPSTSRVLPQLVALADGHVVPAALAPADRLRLDRLATSLLDITTLTKRIKELDQRIPALLAELGSTLTDLHGVGVVTAMDLLAEIGDPHRFTSEAQFARWCGIAPVAVSSGEGHGPARRHRLDLGGNRAVNSILHIIHVTQAHCHPPAKEYVARKIPENKSKREARRCHKRQLANVIIRHMWNDTERHAQTATTDRMAAA

SEQ ID NO: 71406 - protein, 412 aa, unidentified
MFKIFRNNCCGLDVHKTWIYACIGITDPNGRTEYKQARFSSFSNGLRELAAWLAKYSCTVVCMESTGKYWIPVFNILEKSCSVTLAHPKYTKPQKGNKTDRKDAKWICDLFMCDMIKPSFIPSPEIRQLRDLVRYRVKLTNMLTGEKNRAQNCLTVSNLKLDDVFSDVFGKSARSITNYILEHPGETFDVSPFVDPRCKTPVSEIQAAIDGAISPEQAVKLRQCLAHIDELEAHRKEIESEILQIAEPFSAVLDLLYTLPGLDKNPMTAIAILSEIGPDMSVFPSSKHLVSWAGCCPRNDQSNQKVKSRRISRAGSYLKPLLVQVANALIKSKKHPEFKERYHRIKSRRGHKKAVIAVCKMLLTAIWNMLSKLEPYNPEGFLEHRPVRQEKTLTVSQALELLRLRGYTITNQ

SEQ ID NO: 71407 - protein, 371 aa, unidentified
MKSNSTTKFIGLDVHSKTISVAIADEGRKGEVRHYGTIENTTEAIDKVIKSLTADGNELRFIYEAGPSGFALYRYLAGNGFKCIVTAPGLIPKRSSVRIKNDRRDALTLARLYRAGELSGIYVPEPEDEAIRDLGRARDDARVAERKAKQRLNSFLLRNNLIYPGKTKWNRTYFNWLGSVGMKYPAQKVALQEYIEAVNECTGRVKRLSEQIGVAVEEWRMAPMVKALQALRGVSLICATITVAELGDLSRFNKPKELMAYLGLVPSEHSSGESIRRGGITKTGNSHARRVLVEGAWTYKHHARVTLPLIKRQRELPKSVCQISWKAQLRLCARYRKMMARKKPMQVVVIAIARELAAFMWAIAQEVKTAA

SEQ ID NO: 71408 - protein, 318 aa, unidentified
MDATAQEPNAYAGIDVSKDQLDVHIHPAGEAFSVSRDAAGLEELIEKLKPFALKAVAMEATGGFESVVVASLAAGGLPVIVVNPLQVRKFAAALGKHAKTDTIDALVIARFAEATKPQIRPLPSAETLALADLMARRRQIIQMITAERQRAMRITNASLHKSIARVLNALTQELANLDDNIDTTVKGSPVWRENEDLLSSVPGVGKVIARTLLAELPELGTLDRRQIAALAGLAPYTRQSGKWKGKSFISGGRTSCRTVLFMGALAAAKHNPDLKAFRQRLIDAGKPKMVAAIAVARKLLTILNAIIRDKAPWIQKTT

SEQ ID NO: 71409 - protein, 295 aa, unidentified
MKYIGIDYHKQYFVATIMNDQGEVIRRDKASTDRSSIRNYFKNADLAGGAKAVMEACYGWEYFYDEASDLVDELIMAHPLKTRLIAEARIKTDTIDSETLAHLLRADLIPQAYAPDTETRRQKNLLRYRSSLVAMKVRIKNIIHSVLTRSHIEDQLFTSLSDKFGKRGLSYLRAVSLKGNDTVILNDYLDLMEETDKKIKEAEKRIRTVCREDKICNLLSSIPGIGPILAVTIRYEIDDIERFMSAGKLCSYAGLVPSTYSSGNRTYQGKITKQGNKWLRWAMIETAQQAPAKDL

SEQ ID NO: 71410 - protein, 370 aa, unidentified
MKKNSKNSKSPTRSTKTKLRKTDQVTIGMDLGDKTSRYCVLNAAGEVLLEGSCATTKAGMAQVFGAMPYAGSRSKWVRHSPWVSRTLKRLGHEVIVANARQVKLISQSSRKNDKLDAQMLARLARVDPALLRPIRHRSEEAQKDLMTIRIRAALVESRTGLVNAARGLAKSTGERLAACDADQMEVEKLEQLPADLRETLKLLVEEVESLTEKIKECDRKIEQIARDRYPETKLLRQVSGVGPLIALTYILTIEDKQRFPKSRDVGCYVGLRPKQNESGERQPELRITKEGDVYLRKLLVQGAHCIMAKRAPDTDLKRWGTKLAGRGGKNARKRAIVAVARKLAILLHRLWATGEVYEPLRNSQAMAKAA

SEQ ID NO: 71411 - protein, 410 aa, unidentified
MEVLYAVCCGLDVHKASVTACLRAPGDGPQRRQEVRTFGTTTRELLRLADWLSAAGCTHVAMESTGIYWRPVYNLLEGRFELSLVNAQHVKMVPGRKTDVRDSEWLARLLELGLLRRSFVPPAAQRELRDVVRYRKRLIEERAREANRVQKVLETANIKLGSVVTTVLGVSARAMLKALITGEGAPEQLADLAKRRLRRKRAALGEALTGRVTAHHRFLLDQLLCHIEFLDGAIAVCDRQVETRTAPDADALARLDTIPGVARRTAEVIAAELGCDMSRFPTAGDAASWTGLCPGNRESAGKRLSGRTRHANRTLRQALVESARGAVRKRDSYLAAQYRRLVKRRGDKKAIVAVAHSILVIAYHLLRDGTSYRELGGDYFERLNADRLTRYHTKRLAALGYAVTLTKCAA

SEQ ID NO: 71412 - protein, 386 aa, unidentified
MRAVCGLDVHKDSVFLCILCETGEIFEKVYGVLTHELRGMCREMRRRGVTEVSMESTSVYWIPIWRVLEPHFQLKLVNPYFIKQLPGRKSDVKDAQWIAECTLKDLIRGSFVPPERIQQLRQYDRRIFDLDTEIVRKLSKLDAVMQRCNIRLSNYVSNTDTKSYKEVVRKLCEGVTDPEELIEVIFGRIINRHGRETILAALTGVVSDAEKDAMRQLRDELDLAEKHKQECQDRMLHICKTYYPDELKRLMTIPGIRERAATSLIAEIGVDMTKFQTAAHLASWSGLKPRNDESNRKIKSRRITHGNVFLRKTIIECAWGASRTKDCFFSRFSYHQTQVRRKNKMKVLVAVARKLLIAVWHVLHDQTGYKDFGAGDCDASAVKNNG

SEQ ID NO: 71413 - protein, 416 aa, unidentified
MNERGTVAAGIDTHKDTHALCVIDLVGRVVATGAYAADGEGYDRIAAAIGDPRDCVVVGVEGTGSYGAGISRRLAELGYDVVEAVGPKREKRMAGRDKNDPADAERAARDALAGKASGAPKAGGGWVEALRFRMVARDAAVSESTRAANSAHALIVTAPAPIRGELGGMKTPALMKALSRRRRARDVVESSLWESLRSLSLSWIGAKKAAAAHEEAMREILLANAPALLDIHCCGTISAARLAVTAGDNPERVSGESAFASLCGASPVEASSGKVKRHRLNRGGDRQANRALHTIARQRMKRDSRTKLYVDKRTKEGKSRREIERILVRYIAREVYGALMRPMDAACEPYRASARAAKSERLRAGAAQAQASRALGVASARISEMERGRLVDAPLLQRYRSWLESLSAGERRESPE

SEQ ID NO: 71414 - protein, 354 aa, unidentified
MDKTKYIGMDVHKEAISIAILNSSGKLVMECVIETKASTILQFFQGLSGSLHVTLEVGTWAAWLYDLLTPHVTELVVCNPRKNALLKQGSKSDRIDARKSAELLRNRALSVVCHGENGLRLLQGLSLSYLTISPDLGRVMNRLKAFYRSWAIPCAGTQVYAPRHRAAWLAKISEAGVRRRAELYCQQLDALRPLHQQARKELLAEGRMHSATKLLSQIPGIGPLRAAQWVALLETPHRFRTQRQLWSYSGLVLETHDGAQYRYAQGQLQRSKKPQPLRGLNTNHNHDLKNIFKGAAMRASTCQGPLRDFYQALLARGMRPTMARLTLARKIAAINLILGKKGVGFDAPYLKQAA

SEQ ID NO: 71415 - protein, 338 aa, unidentified
MKVYAGLDLHATNTYVAMIDAENKVLYKHRHRNDVSSILSALDPFKEDIQGVVVESTFNWYWLVDALTDHGYRVHLANVSAIKQYEGLKQIDDRRSSLWLANLLRLNILPTGYLYPKEERPTRDLLRKRRQLVRHRTSHVLSVKNILARNLGIRMKTYDIKKLRASEVSTLFADVEMRLAIMSSIGLIQHFQEEIDRIETVMIKKFKVKEEFKKLLTVPGIGEILGLTIMLEVGHIDRFPTVGDDSSYCRCIRSIHTSNGKVTGYGNSRNGNKYLSWAYLEAAHFARRHHEMIQRYYERKRAKTNKVVAIQAVSHKLARASYYVMRDGVDYDEARLFV

SEQ ID NO: 71416 - protein, 374 aa, unidentified
MPMMHQQRSRFIGLDVHKATISVAVADADAPPVSYGKIPNDPSAVRKLMARLGGPDVQLQVAYEAGPTGYVVQRQLTALGIRCLVAAPSLIPRRPGDRVKTDRRDALKLARLLRSGDLVPVWVPDQEHEALRNLVRARADAKVDELRARHRLSKFLLRLGRRPPPDARNWSKRHLAWLRQLEFEPLADRVVFADYLAEVTAASERVKRLHSALRECAQSTRQQALIEALQAFRGIGFVSAVTIVAEAGDLRRFPTATQFMAYTGAVPSEGSSGSRQQRGPITKTGNRALRHMLGEAAHHARHAPYLSNDLKRRQQRLPRAVVDLAWRAQLRLHARYRHLCTRLGPPKAIMAVARELAGFVWAVGHALPEAARAA

SEQ ID NO: 71417 - protein, 346 aa, unidentified
MKVLLKQTVGIDVAQNELVVSLGRMDEQISIEVYAYKVFPNTRKGFSSLVSWVNKQTLTSTEVRYVMEATGVYHESLAYYLCSNQKQVSIVLPNKISNYARTLDIKTITDKSASQAIARFGLERKLEAWQPPLKIFNDLRQLCREREQLVQERTMLKNQLHAERTSAISSEKSIKRTKRRIALIDTQEKEIREEIATHIKGNESLAEKMKIISSIPGIGTLTAVTIIAETNGFELIKNKRQLVSYAGLDVREKTSGTSVKSKPRISKRGNRNLRKVMHFPALAAIRTDESFRYIFIRLVSRHGIKMKAIVAIQRKLLELTYILWKSNTSYCPNYHNQSITMETITI

SEQ ID NO: 71418 - protein, 435 aa, unidentified
MLLSFFRKGGDFLLKLAYPKCCGADIHKNSIVATIVTTDKSGVSDYLQKTFSTINSDLQRFHDWLIENDCFHVCMESTGKYWIPVFNYLEQDIHVCLTHPKYVRAIKGKKTDKKDSKWIADLFKFDLVRNSFIPPKDFRQLREIARYRFKLVCMKSSEKNRVQNCMTVSNIGIASVLSDPFGKTATQIMSYLLKHSPDSMDEKAVRRLIQKKAKAKSDDIIEAIRGYRIETDQAKKLELARGHLDYLEDMITQTEVELYVRIRPYYRFVEYVSTMPGMTELSSTIVLAETGVDMSVFEDAKHLCSWCGLVPANNESAGKKKSVRISKAGDYLKPMMVQCALAAVRSRKEPYFARKYQPLKHRRGHKKAIIAIARMMMVCIYHMVSEQKPFNPTDYAEMMDPHFYQPKVALNDENVFAYLEAQGYDISLITKRNGN

SEQ ID NO: 71419 - protein, 379 aa, unidentified
MLMFSAPTSIEDNLYAALELSKNSWLLAIQFPDRDKPSLYPIKGGDADGLLAKLDAARQRLAKMTGQEPKLVLCYEAGYDGFWLSRLLEQHGIDCRVMDPASLQVDRRARRVKTDRIDVEKLLQALIAWGRGERHVCSMVVIPSVEEEDLRRSHRERNRLVRERTAHINRIKGLLFGQGIRGINVKSRYKTLVPAELVTADGRPLPERLAREIAREVERLAQVQEQIRETELERDQAPALCQASESKRQQLLLLKGIGVTTAAIFAREVYYRQFANRGQVASFIGLAPSPYDSGESRRSQGISKAGNGLVRAVMIQTAWLWLRHQPDSALSKWFHRRTEGHSKRVRCIMIVALARKLAIALWRYLEQGLIPEGATLSAK

SEQ ID NO: 71420 - protein, 421 aa, unidentified
MRGFGLDVHRDFCEVAIWERGRVRSAGRVATRVDALEVFAQSLGPDDIVALEATSGSDKIVEILQRHGIRVVVANTRKLRSITEAKAKTDRLDARALARLLMAGLLDGVWTPDERTRALRRLTNRRERIVRSRTRAKNEVHGVLGRNLCERPPVTDAFGKAGRRWLAEVQLPFDERLTLEGCLRQIDFLDGEVAALDREIARQSLAWPEVLRLMTIPGVNVHTAATFMAAIGDIQRFSSPRKLVSYLGLDPRVRQSGNGPARHGRISKAGASEARHMLGEVAWKVMQTPGPMRAFFERVRARRGPQIAATATARKLTVLFWHMLTRGEDYAFARPAMTRNKIRQLELLTGAPSQKGRKGIAGGKSPKVFEAERELSRQAEAAYRRFVSDWKATAPAKAGAGVTRGRASQRPSRGKAARQTP

SEQ ID NO: 71421 - protein, 319 aa, unidentified
MAQNELAVVGIDVAKDKVDLCIRALALRQTCPNTAQGRRKLVAWLRRHQVGKAVMEASGGYEREWRKVLHDAGIEVRIVDPKRVRHFAQSAGRLAKNDTIDAEMIAWFAETFAETPSQTHDAAQEELAALVKARLALVELKIRLQSQSAHAAPGPVQKAQARVLKSLVTEIEKLEFAIAAKVKATPHLAERAEIIESVPGFAETTSAILVAGMPELGQVSDQIAAALVGIAPYDDDSGKRRGERHIKGGRRWIRNAIYMPCLGAATQNNPVAKAFYRRLIAKGKEPKVALVACMRKLICILNVMIARHQKWDAARYAPA

SEQ ID NO: 71422 - protein, 423 aa, unidentified
MLEEARDTGEIIERVAALDIGKAELVCCVRVPDESRPGRRLQEVTPHSTMTRSLLVLADRLRALGVTRVVMEATSSYWKAPFYLLEAAGFEVWLVNAKDVKHLPGRPKTDKLDAIWLCKVAERQMIRPSFVPPPEIRRLRDLTRYRTSLVVARNAEKQRVEKLLEDAQIKMSVAVSDIFGVSGRKMLAALVGGQRDPKVLAEMACGSMRRKIPTLEEAFTGHFTSHHAFLLTKMLARVDDIDADIADLDTRIEAEIGPFADQVERLDAIPGIDRTAAQAIIAEIGVDMSRFPTPAHLASWARFAPGVKESAGKQKGTGATGHGNRYLARTLGNAAAGAGRTQTFLGARYRRLARRRGNKKALVAVGRSMLVIIWHLLSDPTLEYVDLGADYYDLRNADPKRRQREHVRQLEALGYKVTLEPAA

SEQ ID NO: 71423 - protein, 370 aa, unidentified
MKDTIKFVGLDVSKEKIAVAIAEEGREEPRYFGMIPHTPEAVKKLIKKLGDTETLRVCYEAGPTGYPLYRLLLTLGVHCDVIAPSLIPKRPGERIKTDRRDSIRLAQLYRAGELTSIYVPTPEDEALRDLVRCREDAKEDELRAKHRLSKFLLRNNIQPPSGVNKWTVKYRRWLDTLKFKSSKLQVVFQEYYHQIKELEQRILRLEEEIRVQATVGVHAPTIQALQALRGVALITATSLVAEIGSFKRFSTPNKLMAYVGLIPSEYSSGESRRQGKITKTGNRHVRRLLVEAAWSYRYQPSVKGELQKRQAGQSPTIQAISWKAQNRLHKKYYRLISRGKEGGKAITAVARELAGFIWAITQELEEVPNA

SEQ ID NO: 71424 - protein, 347 aa, unidentified
MAMTIVEAGRVVVGGVDTHLDVHVAAALDPVGGVLGVESFAATPRGYKAMLEWMSAFGTLAKVGVEGTGAYGAGLGRFLHRAGVEVVEVDRPNRQARRTKGKSDPADAIEAARAVLSGRCTGAPKSRDGNVEAIRALLVAKRSAREGRLRAVHQMRHLSYTAPDQLRCRLKGLSTKRLIAEAAALRPRVGGDPVVYATKVSLSTLGRRVLALEQETAAIDGLLNELVTAIAPQMLELFGVGLDTAATLLVTAGDNPERLRSEAAWAHLCGAAPIEASSGKVKRHRLNRGGDRHANQALWRIVMTRISHDPRTREYLERRTKEGCSKREVIRILKRYVAREVFKHLPR

SEQ ID NO: 71425 - protein, 357 aa, unidentified
MGKSIRNLSTVTRVGLDLAKRVFQVHAVDAKGEMVVARKLTRSQLIPFFAELPPSVVAMEACSSAHHWGRALIELGHEVRLIPPAHVKPYVRRNKSDQVDAAAICEAMSRPGQRFVPVRSIDNQAALMRHRARELLAGQRTAALNALRGHLAEIGVVAPQGAQHAYGLKRMVADGFNENGEIVVPDCVRGALRPLVGQIDALDEAIGAIDKELAASVKADETAKRLMTIPGVGPVTASAIMATIQDANVFASGREFAAFLGLTPRQNSTGGKTRLGRITKMGDRYLRKLLVVGACATLRHRKGHNDAMRLWASGMLERKTVKYKFNLTAVALANKVARIVFVLMTRGGQYDGRPIAA

SEQ ID NO: 71426 - protein, 352 aa, unidentified
MARTTKFHSVTTTIGIDMGKNTLHMVGLDANGAIVLREKVSRGRIGSRLANLPPCLIGIEAGMATHYVARELAALGHNVKQVPPAYARPFRQGHKNDFRDAHAVAEAVQRPTTRFVPAKTNEQLDLQALHRVRSRLVSERTAVINQIRGFLLEHGIVVRQGQRFLRHLLPDILAKRTDVLSPRMVRIISDLVGDWRQLDERIETMTDEIETLAKSDDSCRRVMTVPGIGPLISSAMVAAIGNGTAFAKGRDYSAWLGLVPRQMSTGDRTILGRITKHGNGYLRMLFMQAARVILLRPTNWSKHGFGAWLVRAAQRLHPNVLAAALANKLARIAWTVLAQERSYEARVTKAAA

SEQ ID NO: 71427 - protein, 319 aa, unidentified
MAQNDLVVAGIDVAKDKVDVCIRALSLRRTFASTAEGRRGLASWLRRQKVAKAVMEASGGYEREWAKALRDAGIEVRIVDPKRVRSFAQSAGRLAKNDTIDAEMIAWFAETFDEARGQAWDATREQLHQMVNARQALKDMQTKLESQGEHALPATVQRIHARIMKTITVELVKIEAAISALVQATPRFTELAEIIESVPGIGRTTAAVLIAAMPELGQANNKIVAALLGVAPYDDDSGRRRGERHIKGGRRRTRNVFYMACLGAATQHNQVLKAFYDRLVAKGKEKKVALIACMRKLISILNIMIERRQKWDASRYALS

SEQ ID NO: 71428 - protein, 355 aa, unidentified
MDSTKYIGLDVHKETISIAVLNSSGKLVMETIIETKASMLVQFVQGLRGNLHVTFEEGTWAAWLYDLLKPQVTKIVVCDPRRNALLKEGNKSDRIDARKLAELLYLNKLKPVYHGEHGVRALKELSRSYLTISGDLARVMTRLKAMYRSWAIPCAGKQVYAPRYRSEWLGKITEAGVRRRAEFYYQQLDALRSLRLQVRRELLAESAKHKASKLLCQIPSIGPIRAAQLIAILQTPHRFRTKRQLWAYGGLGIETHSSADHRYVEGQLRPSKRPVSLRGLNRNHNHELKNIFKGAAIIAATKAGPFQEFYAALVAKGIRPEMARLTLARKIAAITLIVWKKGVCFDAQHLKPQTA

SEQ ID NO: 71429 - protein, 442 aa, unidentified
MSKQKKQKNQQSLNLGIIYPQAAGLDVGSMNMVVSYPGPDGVQTVREYGAYTQDLHQMAKDLQQAGVTNVGMEATGVYWMSVYEVLEEYGFTVTLVNARHYKNVDGQKTDVQDCQWLQQLHAHGLLRASHIAQEQYRELRTYIHERNVLQNQKSDTLNRIHKVLTQMNIKFQHVISDIEGVTGMQVIRRIADGVTGVENLLAGIKTDRLKVSKEDLTKSLEGIFKLQYQTVLKNHLIAYDFYKKQMLAYEHLVKDVLKKMLPSNDAQQQIKEKTAKARKNQYHFNLKDYLHQIVGVDLTEIDGLDENTVLMIIAVVGLNMHKWPTAEHFVSWLNLAARPKKSGGKVLGHQKRFTNNTATQAFRMAAQTMWQHKGSLGNLYRRLSHTKGSKKAIKAVARRLAVIFYNMVKKQISYDPKKVVADEEKIRAKKIARLQKEAEMSL

SEQ ID NO: 71430 - protein, 354 aa, unidentified
MPRHSKDTVAILGIDIGKNTFHLVGLNKRGAIVLRQKLSRRQLEARLANLPPCLIGMEACVGAHHLSRRLKAFGHDARLMPAKYARAIQKGNKNDYRDAEAIAEAVQRPTMRFVPTKTAEQLDLQALHRVRSRLVSERTAIANEIRAFLLDRGIAVAQGLHRLRVALPDILATRTDLLAPRLLHLLEDLIGDWRRLDQRIHSVSLEIQLLAQEDPACDRLMTVPGIGPIISSATVAAIGTGDAFAKGRDFGAWLGLVPKQISTGDRTILGRISKRGNKYLRTLFVQAARVVLLRPATWQRRGLQPWIAAAAQRLHHNVLAIALANKLARIAWSVLHHGRNFEVRKMTEPTSQRA

SEQ ID NO: 71431 - protein, 387 aa, unidentified
MQKPHDDSKACLTAFIQDNTIVVVLELSLSSWLVAGMIPGLSREPLKKIAPDPELLLRLLYRWRDEAIKAGKEITRISVGYETGRDSFWLARWLRARGIDAHVIHATSAAISREHRRAKTDRIDTAMLRRGFLGWLRGEPGHCSMAIVPTLAEEDAKRPHRERESLVQERTSTINRMKSILIQFGVRDFNPVLRKAAQKLHAVQTPEGVPLPPNAASALRRNVERLRLINEQIKAIERSRVQHLKRDPTDKFNAMVFLLVRIIGLGVETAEQLVREILSRNLRNRKAVARYAGLTGSPDESGARRREKGLSRSGNGRVRSILIQLSWRLLQFQPDSELVLWFNKRTAGAKGSRKPMIVALARKLIITLWRYVNTGMVPNGFKLRSAG

SEQ ID NO: 71432 - protein, 355 aa, unidentified
MAVQLPGVSRHSRHVLDASGDGLVSFVERLKAKCAASGRKITRVILTHEAGRDGFWLARFLARRDIEVHVIQPSSLPVDRRARRAKTDIIDVEMLLRTLMAWLRGEPRVCSMVPIPSEADEEARRAHREREDLTGERRSIVNKVDAILATLGVKGYKALRRDRREQLNCARQPDGDPIPARAKARIERLLDRLDLVLRLIEGVEAERDAVLKKDAPADEAEGMIRSLTELRSIGPDFATLLVREAFVRPFRNRRALGGYVGLGGTPFSSGGSEREQGIGKDGNRRVRAAMVELAWMWLRWQPDSALSVWFRARVGAMGGRIKKIMIVALARKLLVALWRYVKDGVIPEGAKMKAA

SEQ ID NO: 71433 - protein, 399 aa, unidentified
MHRDSVTACVRLVEDGEVVEELERFTTTVAGVGELGVWLLDRAVSTVAMEATGVYWKPVYYGLEGLFEEVWLCNAAHVKNVPGRKTDLADAVWLADVVAHGMVRASMVPPPPIRELRELSRYRKTQVDARGREIQRLEKVLQDACVKLTSVASTVWSQSARAMVEALIAGERDPAVLAELAKGRMRAKIGELTEALASHWGDHHSVVAARILAHIDFLDTTIVELTAAMGERLGPFDDLIGRMCEVPGVSRTTAEVVIAETGGDMSRFPTPEQLCAWAGVAPANYESAGKRRPAGTRPGGRWLRRSLIESAKAAARTKDTYLAAQHRRIARRRGPNKATVAVAHSILTILWHLMADPDLAYHDLGGDYFERRRDPEREADRLVRQLAQLGFNATLEPAA

SEQ ID NO: 71434 - protein, 381 aa, unidentified
MNTETTLTNQYNRFEPYLFLAFELSQNLWKLGFTIGVAQRPRIRNISARDLLALQHEIQAAKKRFGLPANAPVLSCYEAGRDGFWIHRYLGENGIQNLVVDSASIEVSRRARRRKTDKLDVNKLLAMLIRFHSGEQKVWRVVRVPTKEAEDSRQLHRELMILKSERTRHTNRIKGLLTSQGISISVKLDLPDRLETLRLWDGSRLSEALVMRLQREYQRWVLVDQQIDQLTAHRKELLKTSQQPSVEQVRQLMRLKGIGVNSAWLFVMEFFSWRDFRNRREVGACAGLTNAPYQSGDTSRDQGIEKAGNRFIRAIAIEIAWSWLRYQPISKLSQWYQQRFGHGSKRQRKIGIVALARKLLIALWRYLETGTVPEGALLKAA

SEQ ID NO: 71435 - protein, 354 aa, unidentified
MKRTTKYVGLDVHQATTVASVREESGRVIARTILPTEEPALVEFFGGMRGSIQVTFEEGTQAQWLHDLLSSQLDRVVVCDRRGQRRQGNHGDQVDADRLSDELRRGGLRAVYHGSAERLALKEFARTYQNLVEDSTRVMQRLKALFRARGIKTSGKHVYHPRERAEWLAKLPDRAVRFRAAALYAELDVLRELRPKAKAAMVAEARRDPAWPVLLGIPFLGPVRVSLLMATLRTPWRFRTKRNLWSYCGLAVVTHTSSEYILVDGRPRRRRRAPMTRGLNRNHNRLAKNIFKGAATAAATRPGPLQDFYLEIIARGMREELARVTLTRKLAALTLRLWKTGEHYDPAKLTMQAR

SEQ ID NO: 71436 - protein, 400 aa, unidentified
MFVGWDWASTTHDITVIDATGAVVDRWAPPHTEHGLTQTITRLARHGHPADLPVAIERPSGLVVDRLLAAGHPVVPIHAAAFHAARPRWGAASAKSDPGDSYKLADYLRTDGHRLRRLQPLDDATRHLQALIRLREDHIKAKTAASNQLNALLDAAWPGAAAIFSRLASDIALAFLQAYPTPQAAARLSQARLAGFCRRHSYRGGRSPAELLQRLWAAPTPPVGLDPETLTELVNAQARLLRTLLATIADLDRAIGAALLGHTKAKLLAPMPYIGEINLGQIVAEVGPILDRASSAEHAIAECGAAPVTRASGKTRTVGFRWAANRHARTALHAFADNSRHGSPWAARLYADARRRGKRHPHAIRILARAWLRVMWACWHTNTAYNPTKHRAEQRLAART

SEQ ID NO: 71437 - protein, 350 aa, unidentified
MLIIGCDYHPSFQQIAFVDTESGELGERRLVHREEAEQFYGKLRDQSVPVRVGMEASGDARWFERLLRDSDFELWIGDAAEILTKRVRKQKTDRQDAQLLLRLMMEDRFPRIWVPDAENRDLRQLLWHRHRLVQMRTRVMNQLHVVALNEGLRRKKALWRPAGRKELESLVLAPWASRRRGDLLDLLDQLTPKIQELTRALEDEVEKRPATQRLMTHPGVGPLTALAFELVIGTPDRFHCGKQIASYVGLVPSEKSSGDRRRLGHISKQGNALLRFLLVEAAQVTVRSQPQWRNKFFHLAMRRGRKIAKVAMARKLAVHLYWMWRQGWDYGQWQKFGSHAGEPGHPDGEQ

SEQ ID NO: 71438 - protein, 345 aa, unidentified
MKHYAGLDLSMDSTQVCIVDENGGKVTSVKVESAPDKIACALDRVGDIERAVIESGRMSPAICHGLRALGVPVVCIDARQAHQSLKALKANKTDPHDAAGLAQLARTGFYKEVHVKSAAAHGVRSVIATRSHLVEARVRLDNMIRGICATFGFKPGPGQGKGFIDRVMTAADVPGLGQSITALVAARAGLVEQIRQLDRVLREFAHQSSACRQLMSIPGVGVQTSAAFAAAIDQADRFRQSRTAGAYFGLVPRRHQSGEIDWTGRITKQGDSMVRKLLYEAANSILTRSRGNFALKTWAQKIAKRRGLRKARVALARRLAVIMHAMLRDGTLFEAGGEIEIICQR

SEQ ID NO: 71439 - protein, 344 aa, unidentified
MTNIQYKETTQEAKPDLFAGIDVGAEELILVIRKNGKPFDPQKFANTPADRDRLVKKLVKLPGIIVCLEATGVYHFDLSLALHDASVLLMVVNPKASHNFAKVLMKNSKTDVVDANTLAEYAARMDFVAWTRPSDETIALRSFARRINALTGQKAAAKNHLHALTATSETPKAVLKDAKLAITQLEKRIDRLTADALVLIGKHPELKRILALLTSIKGVGETSAIALMGELLLLPPDLTHREWVKFAGLDPRAFDSGKSVHKKTRISKAGNRHIRAALYFPALSAKQHDKHVKAYFQHLVANGKKPLQAVCAIMRKMLHAIHGMLKHNEPFDNTRFYAIPASAE

SEQ ID NO: 71440 - protein, 395 aa, unidentified
MLYLAIDQHRKQLTVNLRNDAGDVILKRQVSTEWKRVREFMEEMQKRSVPEGGFVAIVEVCGFNDWFLKMLTEYGCRETVLVQPEKRSKNKTDRRDANALGELLWTNRERLLAGKRVQNVRQVVSPSERDAEDRQLTALRQRVGRLRTRAINKVQHLLLKHNLQQECPTKGIQAKKARKWLETLPLGTIDRLEMDQLLAQWELMDKQLEHLDRTIVERQAKNETAQIIASIPGAGSYGSLAIASRIGSIDRFPHARSLAHYFGLTPSSNNSGDATRRLGSITKEGSALVRFILAQIVVHVLRRDAVMKEWYRRIKKRRGAKIARVAVMRRLATIIWCMVKRQQHYQRGGAPATGNGSECVIVPNRNAFLEEIQGRSRNSKEKGRQGLETVAAARP

SEQ ID NO: 71441 - protein, 343 aa, unidentified
MVNHYIGADVHSNNIELGVERQGRIIQRHSLPTSIQAIREVLDRIAGPKHLTFEEGPLAGWLYRNLKDHVDTLVVCDPRRNRLVACDGDKDDRIDAAKLARLLRGGFLRAVYHSDDLERLSLKRWVALYHDRVQAATRSINKLRACARLYGERIPRATLQDVGARRTWLATLDRDLADQLRLLWRSYDSHRTDVRIAKRQMLRRARRFAVVGHWSALPGIGPIRSATLFAYLDTPWRFKKKTHLWKYCGVGLQRTGSGKDRRGRDRPARLELFWMVNRRLKDVVMGMTLSAIRSRDNVFRDAYEERIRHGALASNARHAAARKMLTVMWGMWKSQRPFDASLC

SEQ ID NO: 71442 - protein, 316 aa, unidentified
MNTFQNNEINVGIDTGQAQLDFNVRPTGESFSYPNTPKEALVAAKRLAGLNPTRVLIEATGRLEANFVQAARKVGLPLVVCNPSQVRNFAKSTGRVAKTDTLDAQDIAHFGEALKPRLTLVKSAKLQEISDLIAVRSQCLSMSTMQKNRLTRMPKSVHGPIRRILKAIQSEVAKIDQQLDKLIDRCPEWAEKRDLLLSAKGVGKVLAFTLLSELPELGQLNRKQIAALVGVAPMNRDSGKFEGKRIIRGGRHKVRTVLFVSIMSAIQCHPKLKPMYERMVAAGKPKKVAMVACMRKQLTILNVMMRDGTHWQENMI

SEQ ID NO: 71443 - protein, 333 aa, unidentified
MGRCIGLDIHRDFCEVAIWQDAVVRRAPRVAARPEPLEKFARQLGPEDRVALEATGNALLIARILRPHVKQVVIVNTRRLAAISDAKQKTDRHDARTLAQLLAARMLEGSWIPDETTRALRRRVSRRARLVVHRARCKNEVLAVLHRNLKDRPPMTDPFGVAGRHWLSEQTLPLDERETINAALRQIDFLTGEITALERHLAAFVLQSADARRLMSVPGVGMITAAAFLAYVGDITRFRTPDRLVGYLGLDPKVRQSSNGPAHTGRISKEGAAIVRHVLVEAAHTTVRSPGPLRAFHDRIRARRGQQIAIVAVARKDVRAVLAPAHHQPGLRL

SEQ ID NO: 71444 - protein, 324 aa, unidentified
MTAVVGIDIAKQTFDIATLQSNGKHRTKAKLPNDLKGFETLQQWLLKHAEPQAWIVMEATGIYHEALAEWLFKQGYRVCVLNPAQPAFYARSQLQRVKTDKVDAKLLADYGSRHLAELRSWQPEAPEIRRLRALVHRLKDIQELEQIERNRLETTRESKVRNSIQSVLDHLKQQTDETLKAIKQLFDDNDDLRGKRDLLTSIDGIADRTAALLLAELGDIQRFDSSKAVTAFSGLNPMLQESGKHKGHVRISRMGSARLRAGLYMPAVSSLTHNRAIREMAERMKAKGKAGKQIACAAMRKLLCIAYGVLKSGQPFDPALAIAR

SEQ ID NO: 71445 - protein, 350 aa, unidentified
MSEHITIGMDLGDRNHILVIFDNKGKEIACKRIANTKLALRKYFQRYSGATVALEAGTHSPWISRELQQLGLVVYVGNPRKLRLIWDSHDKSDERDARILAMVCRVEPRLLWPVKHRNAQAYNDLEVIKARDMLVQTRTKLINHVRCVVKSHGERLPGCSAVSFARRVAELLPAQLSDALSYLIETIADVTQRISDLERKIEQLSNQRYPETQQLRQVAGVGPTTALTYMLTIENPSRFSKSRMVGAYLGLTPRRDQSGASDKQLRISKAGNGYLRRLLVNCAHYILGRFGPDCDLRRFGLAIAARGGKNAKKRAAVAVARKLAVLLHRLWASQHCYEPFYAGAINRKAA

SEQ ID NO: 71446 - protein, 463 aa, unidentified
MSNRHRITKATRRTTKRVSVEGSLPLLRPNAAGIDVGAEEHYVSVPADRDSESVQRFGCYTSELRRMAEWLKACRIETVAMESTGVYWVPVFEVLEEYGFEVYLVDARQTKNVSGRKTDVVDCQWIRQLHSYGLLSAAFRPAQEIAAMRAYWRHRQGLVESCTRQIQLMQKALEQMNVQLHKAVSDVTGVTGLSILRRIVAGDRDPKALATMRQRGIRRSEEEIAEALNGNYRDEHVFALAQAVEGYDFLQGQIERCDREIQQCMTGIATKISPPLESKRSSRQRAKNQPHFDLRGELHRIAGVDLTRIEGIDALTAQTVISECGVDMTRFPSDKNLASWLGLCPNNKKTGGRIRSRRTKRIKNRAADALRRAAQTLHHSKSALGAEYRRLRARLGAPKAITAMAHKLARLIYRLLKYGEAYVSEGLEQYETRHRERALRSLNHQAQELGYELVLRATGEVVS

SEQ ID NO: 71447 - protein, 349 aa, unidentified
MLADEVDYVVGVDPHRDSHALAVVQVVSGAVLFEAAVDASSDGYAHALRLVEQHARGRRAFAVEGTGSFGAGLTRFLSAHGEWVLEVGRLRRERRSGGKTDALDAIRAARSVLAQKRPATPRASGEREALRALMAAREGAVNARRAGLCQLQDLLVTTPEPLRSELRPLTRARLLQRLAATRPDRRHDPELRGALLALRSVARRVLQLTAEERELAREIETLTRMLAPQLLAQPGVGPLAAAQLVLSWSHPGRISSEAAFARLAGCAPIPASSGQTVRYRLDRSGDRRLNRALHMILVTRRRTHAPTIAYINRRTQEGKTNREATRCLKRYLARSLYRQLEHGAAPLTT

SEQ ID NO: 71448 - protein, 335 aa, unidentified
MQIYGIDLAKEKFDVSFFDLTSKKVSNQPSHKVVKNNLKSIGRFLETLPSDAVLVAEHTGVYGDTLLKCCMDSNVKIAFVGGYVIHRYRATPDRAKTDVLDCALLRDFGERYPDKLKYKTFPEEALYELRQLARHREMLVEQRKQLITADRSEDCRPVRSLAVKRSMDRIKEMLDTEIAETEKEMLKVINEHESIHHNYELVKSVDGVGLITAVELLVKTENFTKITTARQYAAYAGTAPYEKSSGKMDKGAHISKIGNRRSKTLLYICAESARLHNKEIKLYYERRTLIDKKPRHYVLNAIANKLLRIIFTLVEKGEYYDANFIRQDPRVVKYN

SEQ ID NO: 71449 - protein, 272 aa, unidentified
MKFCGIDLHSNNSVVVVTDETDRVLLSRRCPNELTKILPLLELYRAELLGVVVESTYNWYWLVDGLKAAGFEVKLANPVAMQRYDGLKHSGDKDDAAFLAHLLRLGILPTGYIHPPQERALRDLARKRIQLVRSRTQHILAVENIMARQFGHGLSCNEVKGLSATSVDRLGLTTDVALAMKANVAIIQAAQAQINILEDRLHEARLRPEFCLLKTMPGIGEVLATVIMLETGDIERFADVGNFASYARCVQSAHYSNGKKRAKATPRTATLT

SEQ ID NO: 71450 - protein, 339 aa, unidentified
MRYIGVDLHKKTFTVSYRELDGTDPKTKTFRTNTEGLRKFLKTITKEDKVAVETLGNTYHFVDQIKEHVLEVQIVNTRKFKVVTKSSKKTDKNDANLLSLYLQKDMLPTVRYQDKQSRDLKSIIATRDRLVKKRSSFKNKLHSILLSNGIETKKEQFSSKKGIDNILTSYKLSQSNKLEVEILIEEIELQNRHIERLTKEIEAWSNKLEGSKNLQTITGFAKLSTVILLNGIGPIKDFKGAKSLSSYFGIVPYVSDSAETVRHGHITKLGNSILRTTLIQSTFTAIKYNHYLRNYYDKKKAAKGSGKAIVATSRKMLGIIYETLNNKWIFKDFNNFVLE

SEQ ID NO: 71451 - protein, 403 aa, unidentified
MSNYFAGLDWASKTHALCVIDERGGVVERFDIDHDAGGLTELRRRLRRFGSPPVAIERPSGLLVDTLVDADFTVVPIHPNAVKASRPRYRSHGGKSDASDAYVLADLLRTDGHRFKALTPQSDEIRALRALVRGRDDLVATRVHLANQLRTLLESFWPGAAAVFADIDSPIALAFIERYPTPESASRLGPKRMAAFCAQHAYCGRRSPDDLLARLQEAPSAVSAETEMEAKGELARCVARTLTRLVEQLRLLSSRIEHLVASLDDGRILMSFPRAGRICAAQILAEIGSVRERFATDAQLAAEAGVAPVTYESGKSKAVTFRWACNHRLRAAITCLADNSRHVNAWAAHVYANARARGCDHPHAIRILARAWLRVIWRAWTDRKTYDPMQHRAAQLLLKAAGG

SEQ ID NO: 71452 - protein, 358 aa, unidentified
MKIIGCDLHAQQQTIAMLDTDTGEFVEKTLEHDGEELRKFYSGLSRPVLVGIEATGSMQWFLELMEELGIECRVGHPAKIRKAETRKQKHDRRDARLLLTLLAENRFPTIWMPSTEQRDLRTLLRHRHQWVRLRSRVQHTLQSMALNHGLRRGHALWNQAGQQALRALPLAPHASERRAALLSLYPRLQESIGELDQQVSQQVQQHPQARRLLTHPGVGPITALATEVFLGDPLRFSDGKTLASYIGMIPSEHSSGDRQRLGAMSKQGNALLRYLWCEAAMHAVERDPELKRFYRRKLVQKGLGKARVAAARKLGIRLWIMMRDQIDYQEFCRRGKARQESGSVRAGIPAINSGPAQQ

SEQ ID NO: 71453 - protein, 361 aa, unidentified
MFTERTSVGLDVHARSVAAAAIDGASGELIRARLTPAHDHIRDWVQGLPGPVAVAYEAGPTGFGLYRALTAAGVRCEVVAPSKMHKPSGDRVKTDARDALLLARLLRLDEITPVSVPSADQEAARDLVRNREDSRADLMRARHRLSKLLLRHGIVYYDGKAWTDRHDRWLRKQRLDSPASRLAFDSDYDAVQSIASRRDRLDEAITAMATASEFTPLVRRLGCLRGISTLTGFALAVEIGDWQRFTGNSIGSFVGLVPSEHSSGASRAQGSITKTGNAHVRRLLVEAAWHHRTRYAPGAVMRARWDLAPAAARARGDLGNRRLHRRWVRFTDHKKRSTIANVAIARELAGWCWSLAVMDDD

SEQ ID NO: 71454 - protein, 351 aa, unidentified
MQVSVLGIDLGKNVCSIVGLDAAGAVVLRRRVKRETLIGLAAKLPRCIVGMEACCGAHHIGRLFANQGHDVRLMSPEYVRPYVKAQKNDDRDAEGIAEAATRPTMRFVELKAQDQLDMQTLHRSRDRLVGERTALINQLRAILLERGIVVPQGKRNLERHLAVLLDGEEAPGMSPRMRLLIADGRAQWQELDYRIAVFDAEFAAFTKENEDAKRLATIPGVGVMIASAMIAAIGKAEAFEHGRDLSAWLGLVPRQSTTGGKPKLLGISKRGNKYLRKLLIHGARAALPHIAERDTALGRWVRDCSPACVRMSPLWRWPTNWRGSPGRCCGAAKHSPSRERPWRHRYWLVGA

SEQ ID NO: 71455 - protein, 337 aa, unidentified
MTIIRVGLDTAKHVFQVHGVDEDEQPVLRRRVRRGELVRLFARLAPTRIGLEACGASHHWARVLRGLGHEVVLLPPQYVKPYVKRGKNDAADAAAICEALSRPGMRFVPVKSAEQQAGLMLLGVRDLLVKQRTMLINAMRGHAAEFGIVGAKGREKLAVLLQRAAEEAAGVPALAQEMLRLLADQLAALEARIETIEARLMRLHKDNPVSQCLATQPGIGPIAGVSFALKVSDPGGFGSARHFAAWIGITPRENATGGRARPGRISRAGDEGLRRLLVLGATAVIRQAKPGRAAPWLLALLARKPKKLAALALANKMARTVWAMMMSGELYRPVMPA

SEQ ID NO: 71456 - protein, 387 aa, unidentified
MSSTIAAAARSIIYLGMDVHKESITIAVLPADAKTPTRVERLPNDLPRLKRFLDRLARDGEVRACYEASGAGYVLHRAMREWGYACDVIAPSLIPKRPGVQRKHDKYDAAELARLYRAGELTPVRIPTEAEKRVRDVVRCRETFQREILKSRHYILKFLARRGFVFREGTNWCTPHLRWLQHLTTEHSPLAPADRLVFREYHALLLYKLQRRDELDREVARLAEWPTLAPAVRRLQCFRGISLHSAMVLATEIVDWRRFERPAQLASYLGLVSREDSSGDRERRGSITKAGNSHCRHVLVQAAWSYRHRPAISVDVKRRQTGQPPGVIAHAWKAQQRLHQRYNHLAYRKQPQIAVVAVARELVGFLWAVMQDVPLIEHVEHRTASAA

SEQ ID NO: 71457 - protein, 360 aa, unidentified
MIVQGTSVGLDVHALSVVAHAVDEETGKVARARLCPDHGEVLGWLHQLRAPVRVTYEAGPTGFGLARAITEAGMECLVAAPSKLQRPAGDRVKTDARDAAHLARLLRLGEITAVRVPEREIEAVRDLVRAREDARADLMRVRHRLSKLLLRQGIVYSGGTPWTCVHEEWLRRHRFDDIHLTAAFDHSFDAVLAATAARDRLDEQIMVVAASPRFADPVNRLGCLRGISALTGLALTVEIGDWSRFSGSSIGAYVGLVPCEYSSGNSRVQGSITKAGNTHVRRLLIESAWHHRKSYSTSGPTLRARWAKVDPALRARGHAGNRRLNKRWRSFTERGKNPLVANVAIARELAGWCWSLATMQ

SEQ ID NO: 71458 - protein, 397 aa, unidentified
MYIVGIDIAKRKHEAAVIDGEGAVIIKPFSFTNNCSGYNRLLAMLAKAKLPLDEVSFAMEATGHYWLALFTRLQKEGFRVQVINPVQTNSIRSFYIRQAKTDPRDALLIAEVIRFGHFSESTLHPENIYELRELCRGRHAIVSMQADVKRKVVALLDQVFPEYETAFTNMFGDTSMAILQTCPTPKELSEMPLEELCHLIEVSSHKRFRMAKAQELQALARNSFGFAMAGDVFSTMIRLYAKHLDFLKQQVREMDRKIAEIMDTLDTPITTITGIGPTLGAYILSEIGDINRFSSSAKLAAYAGIDPTMRQSGEYNGVRNRMSKRGSPYLRHAIWLATSSAVLHDPALKLYFQKKRDEGKPYMASVGHACRKMVSIIYAVMRDNKAYTPYIPNEISA

SEQ ID NO: 71459 - protein, 415 aa, unidentified
MSLGGYIMQVTFGIDVSKSNSTVCELIGESKNELTITNDRPGFIQLLHELAAFSKHPQIIFEATGVYSRRLQAFLEDYGYEYVVLNPLKAKKEMNMGLRYNKTDKTDAYHLALIQRLYRHPVNQSESQTYKQLNALSRFYDQLTSDLVIAKNRLHQALQSTFPEIENLFSIARGKNYWHIVARYPHCDLVRKDDKKQIINWLMKLKGIAFNHAQRTTDKLIELAHLAYPVVSCSDIEVQQAQYYARRLLNLSNQRQRIITKMVKLAKTLPNHDLENLESIPGFAQTTAVRVLAELGDLRRFSNPNKINAFIGIDPGRYQSGEMDSNLSITKHGNAVARKLLYRAIGQIDNAAKTNPCHIADYYESKKLSSQTKGFKKIAIASIHKLIRTIYALIINDQPYDYNVATHNQKDFSRN

SEQ ID NO: 71460 - protein, 339 aa, unidentified
MKVTTIGIDLAKQVFQVHGVDGQGKAVLRKRLSRSELARFMMNLSPCLVGMEACGGANYWSRKFQTFGHEVRLMSPQFVTPYVKSNKNDANDAAAICEAVTRPTMRFVAPKTVAHQDLQSLHRVRQRLVQARTALVNQIRGLLAEYGITVPRQIGQLRRQLPGILENPMNELTEMGRELFADLSRELAAVDERVDHIDGRLKRLFAGSELCQRLAQVEGIGPLIATAMTAAVSDPRVFRNGRQLAAWLGLVPRQHSSGSRKILLGISKRGDRYLRTLLIHGARSVVARAGTKHDARSRWIAEIQQRCGTNRACVAVANKNARIIWALMAKGEGYRRAAA

SEQ ID NO: 71461 - protein, 340 aa, unidentified
MNSFTRIGVDLAKNFFQVHAIDQEGKVALARKLTRRKFREFFQRMTPCRVGMEACGSAHYWARELRAMGHDVVLMPPAYTKPYVKRGKNDAADAAAICEAMSRPDMRFVPVKSAAQQATLMLHKTRDLMVKQRTMSVNALRGHLAEFGLIAAKGIHRLEELLALARAEGALPEEARAAVEMLALQIEQLDMRIDGLAKSIGKTAKTPTGRLLMEIPAFGPLVSSAMAASYPDASVFKSGRDFSASLGLTPSQHSSGGKDKLGAITKKGNRYLRKMLVVGCTSVLRVAAKYKGGLADWIAAMRKNKPERVVAVALANKLARICWAIMTTGEGFREELFTRA

SEQ ID NO: 71462 - protein, 337 aa, unidentified
MKKNYQTFVGIDVSKSKLDYCIVFNPSSVQNQFGIIENNEKSIRSFISNLQKKNLTNENVLFCLENTGVYSIPICYWLQTNNFDYLVVPALQINRSVGIKRGKSDKVDAKDIAMYAVSHLHQLTLSVLPEKSFLELRVLLAEREKLVKSIKTFISTSENKGFLPKEILKSVLQQNKKTIVLLKQQLMKLEKLIEELIHEDQLLNQQFKLLQTVPGIGKQTAVNLIVYTHAFSTFKNWRKFACYCGIAPFPYQSGTTIKGKTRVNDLANKKLKSLLNLAALSAKKYDIEMNNYFERKVGEGKNKMLVLNAIRCKVVSRAFAVIQRNSSFVDVNRFKAA

SEQ ID NO: 71463 - protein, 380 aa, unidentified
MASGQETAGSQGTVYAAIELSKKSWVLGIARPDRDRPSIHRVAGGDMGELVGRLRKATVEHQRIVVCYEAGYDGFWLARSLAKLGIECRVLDPASIQVNRRARRVKTDRIDALALLRALIAIDRGERHVCAVVRVPSVEEEDARRSHRERQRLVRERTGHINRIKGLLFAQGIRGIEPKLRRTRIDFATLITAEGDHLPQRLRHELQREYQRLELVEDQIKTVERERDTADAQDPAVDRKRRLLCALQGIGGTSAAILSREVFARSFASRRQLGSYLGLTPSAYDSGSTTRCQGISKAGNSWARRILIEIAWFWRKYQPDSPLSRWYATKTADQSPRIRRIMLVALARKLAISLWRYVETGLIPEGVVMAKAAPQRTAAM

SEQ ID NO: 71464 - protein, 390 aa, unidentified
MSQSFDASKSLTAFEQDSTLVAVIEMSQSKWLVAAVIPGVERRPLKKLDADAGALLKLLRRWREEARKAGRTIRRIVCAYEAGRDGFWLARWLQARAIETYVIHAASIAVSREHRRAKSDRIDTELLMRSFLGWLRGEKRHCSMVTIPTMAEEDARRPSRERESLVSEQTRIVNRFKAVLALFGIGGFNPKLRNAAQKLKTLCTVEGTPLPENAHAELRHDLERLRLVRDQIRAIESERLRRLALAPMAATGPHAMVRLIARVFGVGIETADMLVNEALARNLRDRRAVARYAGLTGAPDESGKRRREKGLARAGNGRVRRGMIQLAWRFLIFQKDSRLVRWFRERTADGRKTTRKTMIVALARKLLIALWRLVTTGEMTEAIKLRPAGT

SEQ ID NO: 71465 - protein, 360 aa, unidentified
MKSHPQHFISKPRRSSRVGITIGIDLGDIWSHYCTLNEDGEVVDRGRFRTNPSGVDKRFRNLEPVRVAMETGTHSIWVSEQIQELGHEVIVANVRELRAISHSDRKSDQVDAEKIARYARLDPKILRPIAHRTVAQQETLTLIRARDVLVRLRTGAVNSVRGLAKPCGYRLPASSPLTFAKRCLAVLPQGLAQALGPLLHQIADMTVKIKQYDREIQRLTETAYPETQALIKVYGVGHLTALTFVLTLGKKERFQRSRDVGCYLGLRPRRSQSGDSDPQLGITKAGNGYLRQLLVECANHVIGPHGKDSTLRRWGLGLGARGGSHARRRAVMAVARKLAVLLHRIWITQEVYVPFYEVAA

SEQ ID NO: 71466 - protein, 457 aa, unidentified
MKKSHKKRGSRKIVKLESLKQINLNAAGLDIADEEIWVAIPEGRQDISVRQFATFTADLHALADWLEQSQVNTVAMESTGVYWIPVFEVLEARGFEVLIVNARHIKNVPGKKTDIIDCQWIQQLHTYGLLRGSFIPGAEVRSLRAYIRHRDSLIRHRSAHIQHIQKALQLMNLKLTNVLSDITGSTGMSIIRAILAGERDPHKLAQFRHGQCAKSEEEIAKSLHGNYKPEYLFSLRQMVDMYDFYNRQIADCDAQIEAQFAVMKPQVDLETKPLSSPKHSGCRSRNEPAFDLRTSLYKSIGVDLTSIDGIHVLTAQTVLSEIGLDMSRWPTVKHFTSWLGLCPHNDVSGGKVQKRYAKKSKNRTAQALRNAARSVSRSQSSLGAYYRRMRARKGVMQANVATAHKMARIIYFMLKYKTEYHDTGIEAYEANVIAQRMKRLQHQATRLGMKLEPISAN

SEQ ID NO: 71467 - protein, 343 aa, unidentified
MQTHSMYYVGLDVHKKTISFCVKDVSGKILQEGSVPAHRAALDTWSRELPQPWIGALEATLFTAWIYDHLRDRAYQLKVAHPARLKAITTAKKKNDRIDARTLADLLRCGLLPEVHLLPRELRELRTVLRYRNLLVHQSTQIKNKIAGLLMQTGTEYQRRRLHGKRYFQQLLTQLEHVPDSVVELLKVSRRSLDYLCVLERRVLQGLLRHPRLVDRLECLRSIPAVGPILALTWALEIGEVRRFSSLDQAISYCGLCSAQTESAGKLKRGPISKQRNKYLQRVLVEAAKMAPRCSPPLRALYQRERQRGDYNRATLAVARKLVAYLMAVDRRQIPFVPEPTAG

SEQ ID NO: 71468 - protein, 325 aa, unidentified
MRQPQSAVKPKTQVALDVSSQMLDVHVWVDKKAFSVPNTDEGFEQLSDVLFAYDVTMILMESTGGYEDNAACYLQLQGYDVVVINPRHARRFAQSMGKLAKTDRIDAAVLAHMAFMIDSGPDRDRYIKPVTNEQRKQLSRMSSRRRQIVDLITTEKQRLTHSDAYTRASINAIVSLLRAELKRIEADIIRYVKKNFSELATRLLAIPGVGMQAVTVLIADLAELGYVNRRRISALLGVAPFNHDSGKFKGQRRIRDGRQSVRNVLYMGIISATRFNPVIKTFYDRLIGRGKPKKVALIACMHKLVNIINAMMRTGKPFDMTLHGV

SEQ ID NO: 71469 - protein, 313 aa, unidentified
MESHTFIPRDYDVFAGLDVDKRSMSVTFSNHQGFIRSLRMPHKVEHLLNYVRKNFPDQKIAFAYEAGPTGYGLYDRIVAQAYPCLIAAPSMIPKAPGQRVKTNRLDSRGLSENLRGGQLKSIHVPSVLYRELRHLIQLRDTFVSEMVGMKQRIKSLLLLEGIEFPPAPAGSQWSFIVKKKLRKLPCSSTVRFKLDQLLDSLEFNEKQVLKTTQQIRRFCQNDPELSQCIKYMMTVSGIGWIVASQLLARIGNWRELKNIRQLGGFLGLVPTSSKLPGRRSEKTVSSESSSARFAAPSLAIELRGSPLLRWRAN

SEQ ID NO: 71470 - protein, 438 aa, unidentified
MKITEKTLEVNANHILNIGVDVSSRKLDVHFECPLQLNKREVYREQILNRSVEIEEALKNYLSLAQSKGFLNLRIVCEPTGPYSLNLLSMATHLNCLTAYVSGEAVKNSKIIEFNGTNKNDLVDAELINSLAERNKVLIHRTYSANYTRLRMLNSHYEDVDKAYVSARNQVHNTLKQLWPDYSSKLSLLYASTGQALYRCYGFNPWKIVSYNYSYFERRMRTHCKGVWSSTLKQIYRDAEESVRNHCSDAASTLESILSDHYENCLRGLERKASLKTEMKTILSEIREQDDRIPQARVNFISEFHIARLLAETGPLSDFKNLKQLTKYLGLNLRERQSGEYQGRVRLSKRGRSLARKILSLVVLPLTTQKALYGPDYHRIKTQKDKPGKLVMCIFMKRFLKSFFGIYRSHQSFDSRRLFIDRGSYEKLNSQEVLEAIS

SEQ ID NO: 71471 - protein, 371 aa, unidentified
MKSIIYIGMDVHKKTYSLCALLKETGEIIGETKIPADVSLIIKFIENAKKSVDSDDVQIKTGYEAGCLGYSLYWQLAEKGIECDILAPSTMHRSAKNKVVKNDRRDAKNIATNLANGTYKSVYVPTDEDVEIKEYIRMMHDFKIELKKVKQHINAFLLRFGHHYPGKSKWIPAHIKWLKELELSDMYREILDEYLSQLEILSEKIERFKHRLEELSQKETYNEKIGQLRCIKGIDTTAAMTMHAETSDFDRFPTANAFASYCGLTPGEDSSGESYHRLSITKQGNSMIRTTLIEAAQVLVRGTIGKKGKKVKSKQKDQDVKVIDYADKAVIRLQKKYHRMIFRGVKRNIAITAVARELACFVWGIETGHIS

SEQ ID NO: 71472 - protein, 364 aa, unidentified
MSSLSQRSLIHLGMDVHKDSISIGILRPDDSLDVERIFHDEESVRRFIARMGEPRRLVACYEAGPTGYELQRLLQRLKVPCHVVAPSLIPKAPGDRVKTDRRECRRLARLHRAGELVAIRVPSPEEEAVRDLCRARGDVVIDLDRARRRLGAFLLRHGQVWRGGSNWTLKHEQWLLGLRFEDAALASTFAHYRSIVEERRLRLQALEADLAPYCERDPYAEGVARLCCYRGVDSIGALTLVSEVCDWRRFAKASSFMGFVGLVVSEYSSGDRTYRGHITKAGNVHLRTQLVESAWAYQRGPYVGERIRRAQEVCPPATRERAWAAQVRLCGRFRRLAARKNVKSVVAAAVARELAGFLWGEMTA

SEQ ID NO: 71473 - protein, 459 aa, unidentified
MNRKRSKSKAERTLPMMHPNAAAIDVGATMHMAAVRADRATEPVRSFGTFTADLHRLVDWFTECGVETVVMESTSVYWIPIFELLDARGFTVFLVNARDAKHVPGRKTDVSDAQWLQRLHSHGLLRASFRPKGQIAELRAYVRQRERLLEYAASHIQHMQKALTEMNLQLHHVVADITGTTGLRIIRAIIAGERDPEVLARLRHYSCHSSAETIAKALTGSYRTEHLFALEQALALYDVYHEKASACDVRIEAVLKGLSIDRARSGSKELPTPRRHRTDQPNALAFDVRAALFRLLGKDITMIDGLGPYLSLKLIAECGDDLSSWPSAKHFTSWLGLAPSNKISGGKILSSRTRRSGGRAAALLRLAAVTVGRTDTALGAFYRRLSARIGKAKAVTATARKVAVLFYNAVRHGMEYVDPGASAYETRYRARIVNNLHRRAKAFGFVLQPMEPTPNVVVS

SEQ ID NO: 71474 - protein, 392 aa, unidentified
MQSSEGWPSEDGSEPHAWETSQVKAITRYIGLDVHKSTISVAIAEEGRGGEVRHYGVVENRADILARLTDRLGRRGERLRFCYEAGPCGYGLHRLLNRLGHDCAVVAPSLIPKKPGDRVKTNRRDAAMLARLHRAGELTSVWVPDAAHEAMRDLVRARATAGRVLTKARQHLTGFLLRHGKGYAGARAWTLAHRRWLTTVRFDHPAQQIVMQDYIYAIEDAEKRIIRLVEQIEMLLEHWSMAPVVKAIQAMRGVAFVNAVTIVAEIGDFARFDNPRQLMAYVGLVPSEHSTGDSVRRGGITKVGNSQARRALIEGAWTYRMQARVSRKLHDRIDDLPQGIRDTAWKAQVRLCARYRRLIARGKTKVIVTTAIAREMIGFIWAIARQVGPQSA

SEQ ID NO: 71475 - protein, 354 aa, unidentified
MQNAIRVEVQAVVGVDLGDRFSQVCCLARETGAILEEKRLSTTSASFQSYFEGRGPCLVVVESGTHSPWVRRLLSSSGHQVIVANASKVRAISASLRKTDERDARCLAQLGRVDPELLSPVHARSEQSQQALAVVRSREGLVKARTMLINQVRGTVKSFGSRLPGCSAKSFAQKVSNSLPQGLTAAVEPLLAVIADLSERIRGFDQDIEAWAKRFPVTERLRQIKGVGALTALTFVLTLDDPHRFARSRSVGAYLGLVPASRSSGNSAPQLPITKHGDQLLRRLLVQAAHYIVGPFGQDSDLRSFGLELARRGGKNGKKRAVVAVARKLAVVLHRLWVSGQDYEPRRQPLSVVA

SEQ ID NO: 71476 - protein, 382 aa, unidentified
MSKVIMIGCDLHDRSMLLRYSVGEGAPVQASFFNDLSGRARMIRRMLALAKKVQSERIVFAYEASGQGYGLSDLLDAHGIECYVLSPTHLPKTPKSAKQKTDVKDAQMLLEQLRGFVLAGNPLPVVWTPPQRLRDDRELVRARVDAADEITRIKLQVLSMLKRRGIVKPTWYTARWSKRFMKWLRADIVANLDSVVAVVLENLVDRYEFYHREQLKFDKAIQALATTDRYQVSHQELRKLAGVGLLSAMTFLTEMGDVNRFHNRREVAAYLGLCPSSFESGNANNRKGRITRQGPSRLRKMLCQAAWVSLSHCKESSQTYQRIKQGQSKRTKKALVAVMRLLSIKMWHRAVSCGVSDELWGRGGPHASEATEHPLQRDIAFV

SEQ ID NO: 71477 - protein, 345 aa, unidentified
MYTIGIDLHKRESQLCIQTPEGTFVERRIATTRERFTAVLAPYAPARVLLEAATESEWVARHLEAAGHTVIVADPNFAPMYATRSRRVKTDKRDARTLCEACVRGTYQPTHRVSEAQRHVRAELTVRTTLVRTRTRCVSVIKAAVRREGLRVSAGTPEHTARKLALLPLSPATRDEVAPLLTLIATLNTQIAAADARLADLAADSVPATLLQSMPMIGPVTALGFVAALDDVTRFPSADHVAAYLGLVPSEHSSGDRQHRGHITKRGDTRTRWLLVEAAWRVMRSTQPTLAPLQRWAAAIIARRGRRVGIVALARRLATLLYTLWRTGTPYRGGTVRIRHAEVAS

SEQ ID NO: 71478 - protein, 424 aa, unidentified
MSKKKSSLAGLQALYARACGLDVHKKLVVACVRILDSKDGTVQSTLRKFGTMTADLLELRQWLAELKVTHVAMESTGVYWQPVFNLLEGHFQTWVVNAQHIKKVVGRKTDMKDAEWIAQLLQCGLLKPSFVPDRQQRELRDLTRQLTKLVQQRNAVDNRIQKVLETANIKLGSVASDVLGVSGRKMIEALMAGEKDVVVLAELAQRKLRGKIPELQRALEGELTEHHRFLLRQLLGQYDFLEKEIASVSERLGAVAPPSFRAAVEQLDAIAGVGERGARALLAETGTDMGRFPTHKHFASWAGRCPGNHESAGKRRSGKTPAANRHLDAVLTEMAHAAVRSKNSYFKAQYHRLAGRRGKKRAIGAVKHSLLVTVYFMLRDNRPYNDLGVDYFDKLNPQQRIRYHVRRLQQLGQEVELSPIADAA

SEQ ID NO: 71479 - protein, 423 aa, unidentified
MNTHWTEQPYFAALDWAKEHHDVIVVDRVGTIVADFQFEHTFEGWEQFDQRMEPLGKCALAIETSCGMVVDQLLQRDYPLYPVNPMAAKRYRERKVPSGSKTDRHDAWALADALRTDGHAWLALHAQDEPTAALRLLCRDEIVLIEQRTALVNQLQAALREYYPLALQSFDDWTKPFTWAFVRAFPTAAALQQAGKRRWEKFLHMHKLWRSETAPRRLELWARGQQLNASPAVVTAKCLLAVSLASVLESLQRQIDEYRRRIDEAFAKHPDHDIFGSLPGAREKLAPRLLSEIGTAREIFPDAQSLMCLAGVSPVSYQSGQIRKAYIRWACNRVLRCTVHLWVDESRKTCQWAQAYYRAKRDAGHSHASALRCLGKRWLKVLWRLWQSHTPYEESKHIHSLQEHGSFVWKMLQNAPVRTAPSV

SEQ ID NO: 71480 - protein, 353 aa, unidentified
MAPLPSPTAPLKCVVGIDIAKDSFVACFGQSSFSQQLHFGKETTFDNTASGFAALLSWVVKQHISGSPLWFVVEATGVYYEELAYFLADNNQLLSVLLPNKVKHFARSTELKSKTDQLDARLLCRLGLERALPAWQPPTPALRQLRALARERQFLVRQAAQLKIRVHAYQHSYQPDNRTLARLAAQQQLLVQQLKGLDQDLADLLQAEPELARKLDQLTSIPGIGLTTAIVVVAETNGFVLVENERQLASYAGLDVVQRQSGLSAHATRISRRGNVRLRTALYLPAVSSLRYNPQQMAFYARLRARQPSGKPGVIAIMRKLLVLCYSLWKNDCVYDPHYHPAHLAEKEVAPTT

SEQ ID NO: 71481 - protein, 422 aa, unidentified
MKYAPVQVLPDVPAGGVFAGIDWATADHVACVVDVAGRILDRFSAAHDKAGIEMLIMRLRENGATEVAIERGGGVLVEALLAAGLTVVVVSSRQVKNLRARYRSAGGKDDRFDAFVLADTLRTDRARLRPLVPDTSATLALRAAARARRDLVAHRVAACNQLRAHLAVAFPAAAGLFFDLASPISLRFLASFGSQDAAARLDEQAITAWLKTIPERGKTAPASVLCARLRAAPDGVTGEDGAALAVITAALTVTVGMLAAQVKILETRIGAQLAAHPDGDIFTSLPRAGTLRAARLLAEIGDCRSRYPGPQSLAALAGVVPVTRESGTHTSHAFRWAVSRPLRDAVCDFADGSRHASPWAASVYQAARDRGKDHPHATRILARAWILVIWRCWQEGTAYDPARHTALQRILDQQAAQAGDTP

SEQ ID NO: 71482 - protein, 350 aa, unidentified
MDKIGMDLGMKQSEICELDEEGNVLSRASISTTRASIKRWFGGRREAEICLEAGGSSPWVDRLLRELGHDVVVVNPRRVKLIAESTLKTDRIDAEILARILRGDRTLLRPIQHRDQETQRMRAHLRAREALIKSRTTCINSVHGILRGFGYRLQTGSTAKFVERFERARLPEELKDVVTPLVESIRALSEQIEAQNDWVEEAASAYPEVEHFKEIDGIGTLTALAFVLCIEDPARFANSRRVGAYLGFRPKVRQSCTDPRMGSISKEGDAGMRRLLVQCAHGVLRSRSNSELREFGMRLMEKKNRNVAAVAVARKLSVLMHHLWTTGEEYDPFYERHRLEHLAQVSATTH

SEQ ID NO: 71483 - protein, 376 aa, unidentified
MGSYLGIDAHSKTGLELATIDAAEGQLLWRDRCRLDQRQLQEVVERAPRPCTVVLEEGELATWLHMVLSGVCEEVLVADPRHNRLIATSPDKDDPFDAFMLADLGRGGYVREVFQPPQQFAHLRLRVRHHYRLSRHVTALKNQIKACYRQQGIGVSGKAVYSPRGRQAFLKCLPGPARLAAEDLYAVLDVAKQRNEASLQCLERAARRFAPAKRMLAVPEIGPVTAATFVGYVVTPQRFPSRSHLWSYCGFGLTRRRSGSQVEPVRLRPFYNRHLKRVIKSTAQRLVGRPGDPFNASYHARLHRGMLPSPASSSTYCVACGQERSTTTQNASASAELLPVPRLHSSSSMGGPTACGGTRAAESLDYSHRPRVSREG

SEQ ID NO: 71484 - protein, 400 aa, unidentified
MKGFFTYEIIGIDIGKNKHFFCVMDQQTGEIISQPVSFSNDKEGFDFLVKKIKSYPKDSILIGMEDTGHYHFALLKYLLDLQYTVALINPKTTDFNRKMQGGITKNDKLDTINICDVLDTPERKKQYRITKVNSFDLYEQKQLTRHHHNLKEEENVYKNRLQKCIDIVFPEFNKLFNSKYGIVYMNILKMFGSAENIANTDIRTIRKCFEIEGRGNRISLTPERLKECAISSIGISSSAEVIQIKHLTAQIELIEEQLTEIDKKIEEFSIQNNSPILSIPGISHFSGTSILAELGDISNYSKPSQIIKFAGVAPLHYESSQFNAQHTAITKKGSKYLRKTLYQIILPVIRHNPVFNKYYQLKISQGKGHRCAQGHCVRKLLRIIYHLLKTNQQFDPQLLR

SEQ ID NO: 71485 - protein, 368 aa, unidentified
MKKNTNTKQNASKGKRTEQKETFAFYIGIDLGDKNSDVCVLNPAGEVHKEFRIRMNAAAIDEYFAGIGRSRVAIEVGGQSQWVAEVIEKYGHEVHVANTRKVAYIHESDDKDDPGDAYKLAELVHFKPRLLHPVRHRSQALQADLTWIRAREAAVAGRTHLINTVRSLSKGFGERLQRCSTEAFTAKLAEQIPTAIRSAVAPLLEMIDHFNEQIRYYDQMEEHIARERYGKYTLLSQVDGVGVHTALSYMLTMGDPNRFEKSRQVGAFLGMRPRKKDSGASQPQLGITKAGDEYLRKTLVNCAHYILGPHGRDCDLRRFGQRICERGGKNAKKRAVIAVARKLSVLLHRLWVTGEVYEPLRNSHKKAA

SEQ ID NO: 71486 - protein, 339 aa, unidentified
MNVVIGVDPHKASHTAVAIDEAEDEISSVQVRATRRQVEQLVRWAEPFEKRRWAIESAGGMGYLLAQQLVAQGEVVLDVPATLASRIRVLGTGRSNKNDPNDAHSIAVAAFRAPSLRNVEPADHSQVLRLLAKRNLDLGSHRTRVVCRLHALLAELVPGGIAKELYVSDAERFLANITPETPVEQVRHDMALELLDDVRRLDAQTKESHRRIRIAIKASGTSLTEIYGVGPIIAAQLIGYSGDVRRFANRDAFASYNATAPVEFASGGRVVHRVSQRGNRRLNHALHMVAVTQIRNPGTEGRIYFERKAAEGKTKKEALRSLKRQISNAVYRQLLLDAR

SEQ ID NO: 71487 - protein, 339 aa, unidentified
MQLYTGIDLHSNNSYLAIIDDTGKRIFHQKLFNDPVAINQALAPYEGTMAGIVVESTYNWYWLVDALMTAGYHVHLANPSAIQKYSGLKHADDKHDAFWLAELLRLNILPEGYIYPKEERPLRDLLRKRGHLVNLRTSLLISLKNIISRNCGQTLKANDVKKIREDLVAPLLAGNEDLALAGQVSKEAIDFLTKKIRKIETFIETKVKLQEPYEYLLGLPGVGKILALTIKLESGPIARFPQVGNYASYCRKVCAKWSSNGKAKSGGNKKNGNKYLAWAFSEAAELARRFDPQSRAYYNRKLQKTNYMVAHGALSHKLARAAYHIMRDNVPFMPEKLFG

SEQ ID NO: 71488 - protein, 346 aa, unidentified
MHLNAAGIDVGATEHWVAVPEDRDEEPVRRFGAFTADLYVLAEWLRQCQIETVVMESTGVYWIALFEVLEERGFDVKLVDAHDARQVPGRKTDVKDCQWLQELHTYGLLRGAFRPEDQICVLRSYLRQRSMLVAMASRAVQHMQKALEQMHLQLPEVVSDMNGKTGMEILHAILAGERDPQRLASHRARRCTHDQATIAKAWEGHWRAEHRFALPQALEQEEFLQQQLQACETQIDACLQTFVTHVDVDTPPPAPARQWRARQRHAPGFDVHGYLAAMTGVDLTQIDGIDALTALKVISEIGLDMTRWPTGKHFASWLGLCPGNKLSGGKRYRMRSKPTANRAASA

SEQ ID NO: 71489 - protein, 382 aa, unidentified
MRTKPKVSQIGLDVHRKFSIAAARDAEHKVVWRERLQHVNRTQLKEVLTSWRQGTPVILEGTFGWEWMSDELLAAGLDPHLASSRKVAGWRDARGLAKSNKIDADLLSELWDQKPRWWEVWLVPQDVRDQRELLRHRMSLVRMQTGLKNRIHALLHRHGIVNEFSDLFGVAGRRFLSLLVNDPRLRATTQKVLKDQLTLLDALRRSIARATRQFRLTVRQSAPAKRLISLPGVSTVLAYTIVAEVGRIERFKDARHLLSYSLLAPRADDSGEAREGAPIGRKIGHCGRTTLQWAWIEAAHAAVRRDPRLRAIFDRRTDHGKKDRGRGYITVANQMCKIAYSMWKNDNDYQEAPPPRPGSKNADSSRPGTGQLCHPIAACALT

SEQ ID NO: 71490 - protein, 345 aa, unidentified
MLYVGVDFHKNYSFITEMDKDGEVKDQQKIDNDRTILKGYLSKLPSDTKIAIEATCNWYYFYELAEEYDFDISLAHPLKTKAIASARLMNDKISSTTLAHLLRANLLPRAYIPDQETRDIREVLRTHAFLISMRTRIKNRIHAILLKNGVKCPYSDILGKKSLKWLNTLNFRVCYQEAIKSYIRLAEAFNGEIKLLKQTIESLAVDNKYARLLDTHPGISYYSGLLIASEIGDVNRFSNHGKLCSYAGLVPTMHASGGKIRRGHITKQGSKWLRWILVECSTHAVKKSSRYYSLYHRVAYKHGKGTARIAVARSMLRVMYYMLKYNTPYEERSGSKRTPASASGS

SEQ ID NO: 71491 - protein, 350 aa, unidentified
MKRILKQSVGIDVAQKELVVQIGRLYEDLSTELYAYKCFANTAKGFVLLVQWVLKLTEPTVGVRYVMEATGVYHESLACYLADHGYSVSIILPNKISNYFRTLSIKTITDKSASEAITLFGLERKLENWKRPKPVFKYLRQLTRERDQLIQERTMIKNQLHAEKTESDPNSSTLKRIKQRIDFLNKQEKVIKEEIATLFKKEKGLKEELALLCSIPGIGTLTAATVLAETNGFELVRNKRQLASYAGFDVQEKQSGTSVKGKTRISKKGNKNLRKAMHLPALTAIRHDQRFRAIFARLVSKHGIKMKGAVAVQRKLLEMCYTIFKTGKPYNKNYLQEVQAVVEEYETQVA

SEQ ID NO: 71492 - protein, 373 aa, unidentified
MNQNTLKNYTVEATPVASAKQIKDQKTPKAKRIAVGADVHLRGYQATRKVDNAAIGAVANLRSETELLLYVEKQCEQAEEVVVVYEAGPLGYGLYRKLEARGVKCLVCAPDSTQQKRKRRKNNQIDARTLTSNLFNYLNGNEAALQLVRVPTVEQEQARIASRQHDQLVEERKRLGAQGNALLLSQGFGSWKNWWRPKAFSRLEQLLPAWLFEMLQSWVDLLRALDEKIQRAKAALSKGWSGPRPKGAGANSLVQLQSEVLDWELYANRRKIACLAGMVPSEWSTGDDQRRGSITKVGVPAIRRIITEMVWRIVQFQPQYPPVQKWQEVLRGTNGTLKKKAVVAIGRQLMVDLWRMETGRVTAEELNLVMIGA

SEQ ID NO: 71493 - protein, 341 aa, unidentified
MKPEMSVLGIDIAKRVFHAVGMDERGKIVLRKRLSRHDLMPFLAKLPAVRIGVEACGGAHDWARRFRAHGHEVKRMAPQFVKLYVKSNKNDSRDAEAIAEAVTRPTRRFVPIKDVDQQDIQALHRVRERLIGERTALINEVHGLMHEYGIVMPKGVSKFRQAVVEKLESEKDKLTALSQEMFWKLVEEFAALEKQLAYYQEKLDTLATTHPECQRLMTIPGIGPLTATALVAAVSDASAFKNGRQFAAWLGLVPRQHSTGGKERLLGISKRGDSYLRKLLVHGARTTIRWVGRKTDRRSQWIRQLVERRGKNRAAVAVANKNARIVWALLTSHQDYQLATG

SEQ ID NO: 71494 - protein, 427 aa, unidentified
MGAQSTVAALTETRGGPSLAGNRLYVGIDVGRHEHVVAAIPRERMENGSWERAAVRRVSTSGRGFRQLTEWLQSLGFALQEVEVGCEPTGGWYAQTVAAWLERHGYVVSWLQNAALHERRELLIGKQVKTDALDARLIARLLYERDCFGLRRGFLHHPPRSTDALRMLVRNRSKLIEQRTRYRLQLTAIEDVLFPELKDFFKNSITGRATRHLLEAYPTPDLVAAAAPADLHRVLVVEGRARRLGAKLMDLQRAAYDSAGLVEGIEPILHAQKWLLAELCLVDDQVGYIEASIKSALLAWPAQERAILDSLPGMSSMRQAVLLSTIGDLFSFSDDRQLRKFLGWYPELRESGTSTSKHRLGLSGNRLARRELWLWSLQLLSPAFPETPFRAYYRRLRARGMAGQVAMGHVAGKLISVLFFCLRRGQP

SEQ ID NO: 71495 - protein, 323 aa, unidentified
MNKDIKYFGIDISYLVFDVTDSDGNYYQFKNKVSGFKAFRKLLNSESHCVMEATGYYHYQLAYYLFEEGLNVSVENPLSVKRFIQMRLSKIKTDKSDSKLICSYAEQVELKLWKGSSKEVQECLQITRTLSIYTKQRTMIKNKLHGESVLGEPSIAIVRSLKRSLKHLDKEVSNLEELLLVLVKEAHKDLFTRIKTIPGIGRKTSIMLIVLTGGFERFSSASELCSYAGLTPVIRQSGSSIKGRPRISKMGNQKLRNLLFMCSFTACKYNKACRDIYERLVAKGKSKKLALIAVCNKLLKQAFAIAKSGLIFDKEYKSALVKN

SEQ ID NO: 71496 - protein, 402 aa, unidentified
MRFFVGIDWASRAHAVCIIDQTGRIRWQGSIPHTAEGLTELVGRLRRFRGPGRLRVALERPSGLLVDSLVDAGLEVVPIHPNALKATRPRYSAACGKSDPGDAFILADLLRLDGHRFPALRPPSDETRALRALVRGRDDLVTQRVALANQLRALLERVWPGAAAIFADIDSPIALAFLARYPTPHSAARLGEKRLAQFLGQHAYSGRRPVVELLARLRTAPASQVGEAEAEASGDLVRALVAVLTPLVGQLQQLSAAIEAALAQHPDGRLVQSLPRSGAVNAAQILAELGDDRARFPSDEQFAAEGGLAPVTHASGQHKAVVFRWACNKRLRRALTTFADNSRHASRWAALVYQRARARGCRHQHAIRILARAWARILWRCWQDRAPYDVRRHRAAQALAAA

SEQ ID NO: 71497 - protein, 407 aa, unidentified
MNQLLVGIDVSKNTNAIYIMKPDGSKHSSFSVSNNLNGAKVLTDRVVKALNDLGMQGVKLGMEATSVYGDNLARYLRADDALCRYDRKVMMLNPKQVKKTKDTFNDLPKNDPTDAFVVAEVLRNGRIGHEIPSDDRFAALQVLTRGRYHTVLALVREKQNFMNHLFLKFSGLTQEKVFSDAFGATSLAIVEEFATADEIIDMSLDELAAFISKKSRNHFENPEEVAKAIRAAVSGSYRLPKTVADSVNRLLAISISTMRALERSIKAFDEEIERQISAIPNTLTSVPGVGPVYSAGIIAETGDVTRFGSHPSLAKYAGLTWSQHQSGDFEADDTKLIRSGNRYLKYYLCEAANKLRCYDADYRQFYAKKYHEVRKHQHRRALVLTARKFVRLVFRLLKDGTLYRPPR

SEQ ID NO: 71498 - protein, 396 aa, unidentified
MIEVCSFKSIHALTGAKRRLALKKNSNTTRPRKGAGQKISTPLSTRTVGIDLGDQTSHYCILDEQGDVISEGTVRTTEAGFQEQFRHMAHARIVLETGTHSPWVSRYLERLGHEVLVANARQVRIIYDNDRKTDKVDARTLARLARVDKSLLHPIRHRGAEAQADLAILRARDQLVSVRTTLIKCVRGMVKSVGGRLPRASGAYFATKVREQVPACISGALLPLLEEIEQLTVRLREYAKRIEELAKTKYPRTELMRQIPGVGVVTSLAFALTIDDPNRFRRSRDVGSYLGLQPKQSESGSSKPQLSISKAGDHLVRHLLVNCAHYVLGHWGPDCDLRRWGLSLMAHGGKNAKKRAVVAVARKLAVLMHTLWVSGEVYEPIRQSMEAASTEAVPAA

SEQ ID NO: 71499 - protein, 417 aa, unidentified
MTDFAALLGIDWSDKKHDLCLIDSATGRREASVLPHSPQEIDQWATALRARYGGQSVAVCLEQSRGPLIYALLKYDFLTLYPVNPRTLSKFREAFSPSRHKDDPVDAEYLAELLLHHRERLRAWSPDDERTRTLRLLVEHRRRLVGDRTRLSNRLTSLLKCYFPQPLEWFPDLRTELVCDFLLRWPSLEALRRVRRETLLRFFRAHHSVRRETLERRVNSIKEAVPLTTDKAVLNSSVAMAKALAAQMKATLAAVRQFDREIEALCAAHEDFKVFESLPGAGAVYASRLTAALGSDRERWQSADELACLAGVAPVMERSGQSCWVRWRYFCPKFLRQTFHEYAGESLRHSFWARAYYESQRAKGKRHHAAVRALAFKWVRIIFRCWQTRTAYDEVKYLESLRRKGASLLSYAANNPA

SEQ ID NO: 71500 - protein, 367 aa, unidentified
MKQQTSAAPETGNKGKQQHYEGRVIYVGIDVHKKDWQVAAFYEGITLGNHRMGAGAEGVITHLRKRYPGASFKCVYESCGWGFELQRKLSAAGLECIVVNAADVPGSNKEKSNKTDKTDAERLARHHGAGLLKAIHVPDEQLQKHRNLIRFRKRVVADLGRSKNRLKSILKYQGIEIPRQFDNSSWSNNFLEWVSREAQKDQDLTDILLLMLEEIRALKSLLLNVNRKVRALTRHERYQKMIERLMSIPGVGEITAITFLLEVGDIRRFKRFDQLNSMVGFYPDSHSSGETNRHTGISNRSNKYLRSMLIESSWQLIRHDMEMNDMYQELKKRMKGTEAIVRIARKLLRKMRAMLLTDTAYELNIAA

SEQ ID NO: 71501 - protein, 317 aa, unidentified
MGVDEMEQEIFVGIDVSKARLDTCVWPAQEFSVAPNDTDGIEKLISELLENKPALIVLEATGGLETAFASAACAAGLRVAIVNPRQVRDFAKAVGALAKTDALDAAVIARFAATIKPQPRPLRDEDTDALASLVVRRRQLVLMRIQEKNRLGAAKSKQREGIREHIRWLEEHIDQLDIDLTATLRQSDAWRVKEDLLKSVPGIGPVACVTFLSLMPELGKLNRAEIASLGGVAPFNCDSGKHRGQRMIWGGRAEVRSVLYMVTLTAIRFNQTIRAFHTRLIARGKPSKVAIVACMRKLLTILNAMLKTNQPWNPNFT

SEQ ID NO: 71502 - protein, 332 aa, unidentified
MENFYFIGVNVSKKKLDFCVMFEGKVVHEEETANHQSAIMSLLHHFEEDYGIDNTRMPVCAEHTGQYTFPLACACKTVECRLWLENPAEIKYSSGVQRGKNDKVDAKRIAIYASRFQDKVRYYEHPTEDIERLKQLESERTLSVTDLTKYKGQMKDQKDYIPKALYERKMKRLQALMDDLKEAIQAITDEMDEVIASCPVLFRQQELLMSIDGVGRVVATNMIIATEAFTRFDDPRKFNCYAGVAPFSYSSGSSQHSKARVSHRADKVMKRLLHLAAVAVTHRVGGELKKYYERKVAEGKNKMSVINALRAKIVARMFAVIKRNEKYKPILS

SEQ ID NO: 71503 - protein, 318 aa, unidentified
MSSAAPAFVGIDVAKAELVIAIRPSGERWTTANDLAGIQTVVQRVRGHAPMLIVLEATGGYERAAVAALAAAQLPVVVANPRQVRDFARATGQLAKTDRIDANILALFGERVRPAPRALPDAAAQALDALLTRRRQVLEMLIAERNRLEHAVPAVRRGITQHIRWLERQLDDVDRDLDDTIQASPVWRAKENLLRSAPGVGPILSRTLIGELPELGTLPRKQIAALVGVAPLARDSGTLKHKRLVWGGRAPVRAALFMAALVGTRCNPVLRAFYRRLLAAGKPKKVALTACMRKLLIILNAMMRTNTAWHHIDHSPIT

SEQ ID NO: 71504 - protein, 437 aa, unidentified
MLSYLNLNAAGVDIGATEIYIAVPGDRDPQPVRCFSTFTEDLHAAADWLKACHIETVAMESTSVYWIPLFQILEARGFQVFLVNAHHVKNVPGRKSDVSDCQWLQYLHSVGLLRGSFRPEQAVCTVRSILRHRDGLVQMASSHVQHMQKALDQMNLQLHHVISDITGRTGITILEAILAGERNPHQLAKLRDRRVKATEETIAKSLLGDYRREHLFTLRQSLTAFRQYQDWIADCDHEIAQYLEQFESKLDPPPRPTSPSEDGSKPKANEQRFDLQTHLHRIFGVDLTQVPGIQVLTAQTLLAEIGPDLSRFEDGSALASWLGLCPDNRISGGKVLSVKTRKVKNRAATALRMAAHSLHHSQSFLGHFYRRMRAKLGAPKAITATAHKLVRIVYHMVTTGHAYDETICAQNELQNRQRLEARLRKQARELGLQVVAA

SEQ ID NO: 71505 - protein, 408 aa, unidentified
MTKRIMFVGMDVHQHSIDLTVAESGHDGAVTHFASIGGDLAALDRAVTTLRERRAELHFVYEAGPCGYGIYRHLREVGLTCAVVAPAQVPKKAADRIKTDRRDSRTLALQHRAGTLRPIYVPDEDDEAMRDLVRAREDTVHGRRRARQRINSFLLRHGRPYPCGKKNWGARHRRWLAEQYFERVAQRITLEEYVGAGDEADARVTRLTEQIVSLLAPWRWRDVVAALQALRGVSLIVAVTVVAEVGDLTRFTPRALMAFLGLVPSEYSSGARRRQGGITKTGNAHVRRVLAEAAHAYRATPALTQFVRQRQRDLPQAIRDVGWKAQLRLCGRFRHLSAARKHPHKIRMAIARELTGFMLDIARRVATPVSATAAAAAADPIVLRRRPRPAAAPGSVRARAARPAAGAH

SEQ ID NO: 71506 - protein, 408 aa, unidentified
MKTLHKRCAGLDVHKAEVVACLRVITNRKVGREVRRFPTTTQGLLALAEWLENAGCTHVAMEATGVYWKPVWHILEGHFVLILANAAHVKNVPGRKSDVNDATWLGDLLAHGLIRSSFVPPPEIQELRDLTRTRRQLTREIVQHVQRIQAVLEEANIKLCSVITDIMGASGRRMLKAMIAGETDAEKLAALGHERLGCTRAELVEVLTGCVREHHRFLLGQHLRTIEQLEDSIAAFDARIEGALSPFHDIVERLKEVPGLAATATETVIAEIGTNMSPFPTAGHLLSWAGFVPRLDESAGKRRSTRIRKGAPWLKPVLVQAAWGAARKKNSYFQAQFLRLKARHGAKKAAIAVAASILTTVYHMLRDGTCYQDLGPEYFTRRNPAKAAARLANRIRNLGYHVENRVAA

SEQ ID NO: 71507 - protein, 369 aa, unidentified
MEKTMEKLNLVNLSNHLYLGVDTHKDQHAVVGLDCFSQILYEKEINNSEEDFKQLIKEVENMGLTPVFGLEDCYAYGSRLAGCLYQQGFSVRIVSPVLVERERKYQTHPEKSDLLDAKGVAEALIHRIGTLPHYSISKEGKVSQEIKELVMDREFLVKEQTRLKNQLHRLLHKAYNSEYRDKFKNPFSDKALRYWLKSSLKIESPVLKNQIRRKVKRLADIRKEIKEIEEELRILVNQTDQRLETMNGCGLVLAASVLAEVKNIDRFRSDDALAKYGGFCPRERSSGKTIRHIKTKSGNRRLNKAIHRIALSQIGRNGNIYAKEYFLRKVSEGKSKSQALCCFKRRLVKIIFMMMKYRQEYRYFKNILT

SEQ ID NO: 71508 - protein, 344 aa, unidentified
MDMSIIVIGLDLAKSVFQVHGINAEGEVVVRRKLSRSRVLAYFNQLEPCLVGMEACATAHYWGRELRALGHDVKLMPPQFVKPYLKSQKNDMRDAEAICEAVTRPTMRFVPIKTPDQQALLALHGVRDHWVRLSTRLINTLRGYLAEFGIVAARGRMGVEAILDTLADEQDDRIPELARECLMPLASELRHVKRQILETDRKIIRAHRSSNICQRLETIPGVGPVIATRVVAEVPDPKIFKSGRAFSAWVGLVPKQHSSGGRDRMGRITKTGNPELRRLLVAGAMSMIIRAKQLGFTRHPWLSRLLERKPMMVVAIAMANKIGRMIWALMVKGEKFNPAKLMPV

SEQ ID NO: 71509 - protein, 357 aa, unidentified
MNTKVKQIDFSKQAIFVGIDVHKKSWKVTIRTNGIELKTFSMNTSVEELSRYLRKNYPNGSYKSVYEAGFCGFWIHRKLREVGIKNIIVNPADVPTKSKERRNKNDKIDSRKLARGLENGALTGIYIPTEKEQELRSTNRLRYQLVKDRVRIKNRIKGLVLYYGKTIPENYEVKNWSKNFIKHLEQMEFSTTVGKQCLGMYLTKLKENQAMIAKVVKQLKDVIKRYGREELIKKLCSVPGVGFLTAVTLLVELIDINRFNNIDKLCSYVGLIPSVNSSGDREKVLGLNGRHNKYLRNLMIESAWVAVRKDPVLTLKFNKLSTRMSKQKAIIRIAKKLLCRVRFVWKNNQPYEKGIIS

SEQ ID NO: 71510 - protein, 329 aa, unidentified
MEHYAGIDVSLELSSVCVVDAQGKIVKEAKVASEPEAVVAFFEALGFAVKRIGFEAGPLSHWLHAGLKEAGFETVLLETRHVKAALSAMTVKTDRKDARGLAQLLRMGWFQPVHAKSMASQEVRALLVGRKQLLGRLIDVELSIRGILRGFGLKVGAVTRKGFEARIRELVTGQATLERIAEAMLSARAALKAEYEKLHKAVLAIVREDPVCRRLMTVPSVGPLVAITYKSAMDDPSRIAKSKAAGALFGLTPKKYQSGEKDVTGGITRTGDEMVRTALYEAANVLLSRITRFSKLKRWGNGRRQAARFKASEGRLGSQDRSNPAPYMD

SEQ ID NO: 71511 - protein, 390 aa, unidentified
MIYVGIDVSKNKHDCLIVNSDGEILFEGFTILNNQSGFDELYSKAIYCSEDLSKVKVGLEATGHYSDNLLEFLINKGFTTHVINPLHTSLYRKSLSLRKTKTDKVDAHSIVTMLRSENLKPYSHTSYHIRELKSLSRYRFSLVQDCARLKTSYSRLMVILFPELESLVSTLQISSVYTLMLELPSARSVADCHLTRLTNLLSDASRSHYGKEKAVEIRTAARNSIGSSNVAKSLELQQTIRLIQLMKEQIAQVENQIKPIVDSLNNPIMTIPGISYRMGAMIIAEIGDFNDFDSAEKILAFAGMEPSVYQSGQMTSTHAKMVKRGSKYLRYALFNAAKYVCHWDPTFNAYLQKKRAEGKPYNVAVSHAAKKLVRVIFYLVKSDQAFTKSA

SEQ ID NO: 71512 - protein, 344 aa, unidentified
MTHYAALDVSLRSVHICVIDTEGKIKAETKLPSEVEDILAYLGSLGLEIAAVGFEAGTLTQYLSYGLTAAGYEVICMEARQVKAVLSAMRNKTDKHDARGIAQILRSGWYSKVHVKSLESHHIRALLSSRKAVLAKCVDLENEIRGLFKIFGIKLPPRLGHGSFDGAVRETIETDEALSHALLPLLDVRLKLYHAFRELDNRTRKLAHSDEVCRRLMTAPGVGFITALTFKAAVDDPARFRRSRTVAAHFGLTPRRFQSGELDIEGHISRCGDRDVRSALYVAANAMMTRSSKWSPLKAWGMQLAKKRGHRRAAIAVARKLAVILHKMWIDETQFQWSTEGLTA

SEQ ID NO: 71513 - protein, 434 aa, unidentified
MRLKEYSRKESHRKAYVSQEGLLLVGVDVSKDKHDVCTGTRADILRRKVQVSNSRAGFDRLSDLIESDLHKTGCKRVLVAMEATGIYWYGLYHEMASRGYEVCLVSSQGVSHNRRTMPGGSSKTDRKDAYSIYDLLSQGKFFLPVKRDDQLQASYRLMRRHASLEKRITRIRNQMRGTLHMAFPELQEELGKITMPTALRFLRSNPTPASILRQGRSRFLERWKPRRRCGQWKRDRFERIYELAKTSIGLKDPLRMTEYEIREQAEDLADAVAKSKAWKDKAISLLEGRADFKHLLQLPRMGKATVTAVLTATGGADEFSHGKQFVKLAGIDVREFQSGSSVHGRAHISRAGSAYLRHWMYFYSVQLVGHDAYFKAYFERKKKASPGPGSGKRALVAVADKMLRIIYRMLVTREDYSPDVHQRLEERYRLSQAA

SEQ ID NO: 71514 - protein, 342 aa, unidentified
MDRLSPVTRICKVGFTMENELHFIGIDVAKAKLDVDILRPDGRHRCKKFDNTLSGHEALVRWLRGHDVNRAHVCMESTSTYMEDAAAHLSDAGYTVSIINPALSKAFAQSEGLRSKTDKVDARMLAHFCREKRPSAWEAPHPTERALKALVLRHQALTEMQTQEKNRRETAPEVQLASIDILLGCLSAELARIEKQIKDLTDNDPDMKRRRKLLNSIPGIGEKTAAVLLAYTGLRLKFGTARQFAAYAGLTPVQHESGSSVMRASRMSKAGPVQLRKALYMPALSALYHTAWGKAFRKRLEDNGKRAKVIIGAMMRKLAQVAYGVLKSGKAFDASQHELLIA

SEQ ID NO: 71515 - protein, 412 aa, unidentified
MDVLIERCAGLDVHKDTVMACVRFPGPDGRRAQEIHEFGTTTAELLALGDWLAAHGVTVVGMESTGVYWKAPFYVLEDAFTCHLLNARHLKNVPGRKTDVRDAEWIAQLVEHGLVRPSFVPPKPIRELRNLTRYRKAQIEERTREAQRLDKILQDAGVKLSSVATNILGVSSRAVLKAMVQGTTDPEVLAELARGRLRVKIPALKEALVGRFGPHHALIVGTILSKLEFLEEVISHLSDEIEEAIAPFGRQVELLETIPGVDRRSAESIIAEIGVDMARFGSSARLASWSGMCPGNNESAGKHRSGKTRKGSKWLRVTLTESAKAAARSKGTYFSAQHARLRGRRGAGRATIAVGHSILVAVYHLLDRNEPFHDLGADFFVGRHDPQRHANKLVRQLKTLGFEVNLQPVEAA

SEQ ID NO: 71516 - protein, 466 aa, unidentified
MQLRLGIDIACRAAHQASLADERGEFIWTGQRFRTRVQDLERLWAMLPAGEPENVTVIMEPTRNAWVPLAAWFRRRGARVVLVPPERSADLRAYYAKHTKTDRLDSRLLARLPLLHPEGLHEEQGLGPGDPLRRATRLHQTLTKRRSQSLARLDALLEILGPAWLEVFRADLSNKTPLRFLAAGYACPNTAKRLGKARLARFFHRHSRGRWGQEQAEAVLVAAAETLELWGDELDYGELAEDVAIEARLALHLGEELKDLDERIGIFFAEADPNGILTSVPGVGAILGAQILGRLGDPNRFRSLAGVRSFSGLVPSLDSSGISGHHGPPTKRGDACLREAIFMAADQARRVDPSLAARYHRLMVEAGKHHNSALCHIAATLLTRIVACWRAGEPYVIRDTEGTPVSLAEGRRIIAERYTVPAELREQRRAANRSPWHKGTDRRSKESLRAPSTGPSHGNATAVAMA

SEQ ID NO: 71517 - protein, 296 aa, unidentified
MEQISRVGMDTSKRFFQLHGVNATEKVVLRKKLRRKEMMAFFEKLAPTVIGIEACGASHHWARHLRSFGHEVKLIAAQLVKPYVKRGKNDMADAEALCEAMSRPTMRFVPMKTAEQQAALMLVGLRDRLIRNRTQLSNAIRGYAAEFGVSAAKGMAHLDPLFDRIQADESLPDLARELFAAQAEKYAQLQAQIAKVDAKLMAWHKADECSRRLAKVPGVGPIGAALLMMKTPAPEMFRSGRQFAAWIGLTPKDHSTAGKVRLRVITRAGDEALRSVLVVGATAVIQHVRRGGRGSP

SEQ ID NO: 71518 - protein, 320 aa, unidentified
MEQFTDKIYIIGIDVSKAKLDIKYNDDSPVLVIENKKQAFKRFNSFFPKDKGQILVLLEATGGYEKAVVKWLLSHHIPVAIVNAKRVRDFAKSSGQFAKNDTIDAAMIRDYGQIFSHKLHLEQEKGELEERIEDLNRRRNQLVSLRNTEKRHLACIQNTLGRQSINRTIKYLDKELLRIEEKLQQALEQDKILLAKAQLFMTAKGVGLITAYTLIGELPELGQVDNRKIAALAGIAPYCSDSGNHKGKRTIFGGRGMVRSALYMATLSARKFNPTIKRFYDRLIAKGKPHKVTMVACMRKLLTILNTMAKNNEPWHENFA

SEQ ID NO: 71519 - protein, 392 aa, unidentified
MYIVGIDIGKNHHEASIVSPEGKQIGRSLRFATTHKGADSLMSFIFKNIGNSPCVFGMEATGHYWYPIYSFLKAKGYTIYVINPIQSDSLRKMYIRQTKNDSIDSFLIAEVIRFGQFGTTSMADENILAMRQLCRYRDSVISSRTEIKLRIGTIMEQIFPEYEKQFSSLWLSTSMGILEKYLTPENIENAPIDELFEIIKDKSHNRLTKAKAISIKEAAADTFGIKIAQDAFSFQLKQLIDRMNFLDKQIEALDIEIMKYYEQFDCYLHTIPGIGIIAAATILAEIGDINRFKSSSALVAFADIDPTVRQSGEFSSTHNHMSKRGSPYLRHAIFLAATTCSFHNSPLNAYYKKKRDQGKHHLTATGAVARKLTTVIYAVLRDSKPYEPKKFC

SEQ ID NO: 71520 - protein, 328 aa, unidentified
MTPTQQTYNHVVAFEVSKEALVVHTLPTDEQCTIANKPQSVRRLLKSQLKHNRKQKLGPILIVCEATGGYERHVLDAAIDLGLPVHRAHGARVRFFARYCGLIAKTDPIDARVLAHYGVKTDKLRLYVPPPPETAALRALHGRRTEIQQMMIAETSRLDQVHHKSIVKSLKAHIAQLKSALEAIEDEIAQLVRDNASLKKKVELMRTVIGIGPVSAMILLAYLPDIGSLTKGEVARLSGLAPINNDSGKKRGARHVEAGRTAIRRALYMAAVVAMRTNPVIKRFADRLRGKGYPFKYVAVAVMRKLVVILNAVLRDGQPWKGAQAACA

SEQ ID NO: 71521 - protein, 347 aa, unidentified
MTIVETRAITGGVDTHADMHVAAALDSVGGLLGVREFPVTAAGYAGLLGWLGGFGTVSLVGVEGTGSYGAGLTRHMAAAGVRVVEVDRSDRQDRRRQGKSDSLDAVSAARAAQSGRAAGAPKGRDGAVEAIRALMVAKRSARTERVQAINQARALITTGPEDLRERFARHTAPALVTALAQLRPRPGGDVPGYATRVALRELGRRAQFLDAQAGRLDELIIPLVTGRAPGLLALHGVGPDTAALLLIAAGDHPQRLRSEAAWAHLCAVAPIPASSGKRTRHRLNPGGDRQANHALWRIVITRMSSHPPTRAYVERRTGEGKSKTEIIRCLKRYVAREIYPQLRAAAD

SEQ ID NO: 71522 - protein, 359 aa, unidentified
MEAQRKALSFKGQNIYIGIDVHLKSWSVTLMSEATQLKRFSQSPDPDALHAHLVRNYPEAEYYSVYEAGFCGFWIHHRLVGLGIHNMVVNPADVPTTTGERLRKTDAVDSDKLARSLRAGELKGIYVPGSESLEIRSLIRLRDSITKDQTRQKNRIKSHLRYLGIEIPEEFAGPGRCWNRRFTAWLKGVETNTAYGQRTLDFLVRQYESLRGQRLEMLRAVRALSRTERFEKPLENLMTVPGIGQLTGMALLSEIDDIRRFRSADQLAAFIGMIPMCHSSGEHEGIGDITVRRSVRLRSALVEASWVAVRQDPAMSMAYGNYCKRMAPGKAIIKIARKLVNRIYFVMKRNQPYVKCVVA

SEQ ID NO: 71523 - protein, 345 aa, unidentified
MQYYTGLDVSVKETAICIVDETGKICREVKVVSHPDHLIEVLKDQQWQIERIGLEAGPLSQWLFEGLARAGLPVICIETRHTKAFLKAQPNKSDRNDARGIAQMMRVNLYRPVHVKTLTSQKRRALLTARKLLQEKAIAIENDIRGLLRNFGLKVGMIGTIKYEERIRELVDDIPDLLEIMEPLLDARRKLREHFVTLHRKLLTIVRDDTVCRRLMTIPGVGPVVALAYTATIDIPARFKRSKAVGPVLGLTPVLKQSGESHRVGRISLCGDGIMRTLLFEGAQTLLTNVKKWSWLKAWAMNVAKRRGIKKAIVALARRMAVIMHRMWTNETEFCWTREELPARI

SEQ ID NO: 71524 - protein, 351 aa, unidentified
MRKITYLGMDVHQNHCVLGEMDSTGKFRGTSTFSTSETHIVHALESIKAKEKVLTLEEGNLARWVAQVARPHVTEVLVCDPKENALIYKGSHKEDKVDTGKLCRLLRIGELKRVYQAESDERAIFKAAARHYIDLRNQQVSLKQKIKAMYTHWGVINVGGEAVYSVKKRHEYLKEVKHPSIRNQLEHLYGLMDEAESMQAKALKDMKEMGRSYPEIKHFKKIPGVGEILSHIFDAFIQTPERFANKRKVWRYCRLGVTERSSDGKPLGYKRLDRNGIPELKGLFYQAWMSALKGDNEVRRFYLSSLKRTYNRVHARLNTQRKIIAVMYGMWKRGEAYRPQLFLDSSQSGVV

SEQ ID NO: 71525 - protein, 344 aa, unidentified
MDHFAGLDVSVKETSVCILDDAGKIVKEVKVASEPQALLKVLGNPAYCFKRIGLEAGPLSQWLFSALAEAELPVICVETRHMQAVLKAQINKTDRNDARGIAQMMRVGMYRPVHVKTLRSQKLRMLLTHRKLLQSKAIAIENDLRGTLRNFGLKVGVVGTVRFEARIRELVETIPDLAVLVESLLVVRRALREQLVILHRRLLAIVRDDEVCRRLMTTPGVGPVVALTYRATVDVPARFRKSKSVGAVFGLTCSRYQSGEIDWSGRISRCGDEMMRVMLYEAAQSMLRSKKWSWLKAWAVQIARRRGMKKAIVALARRLAIIMHRLWVDGTEFRWTREPTAAAA

SEQ ID NO: 71526 - protein, 355 aa, unidentified
MDSKKYIGMDVHKEAISIAVLNASGKLVMESIIATKAITIVEFMQGLRGELHVTLEEGTWSAWLYDLLKPHVQKTVVCDPRRNALLKDGSKSDRIDARKLAQLLYTNMLRPVYHGESGVRTLKELARSYLTISKDQVRVMTRLKALYRSWAIPGSGKQVYAVRHRSEWLDKIREVGVGRRAEFYYQQLDALRCLRREVRRDLLTESAQHRASKRLRQIPSIGPIRAALLIAIRQTPHRFRTKRQLWTYSGFGIETHDRGEHRYVDGELRRSKKKVSVRGLNRNYNHDLKNLFKSAATNAAAKPGPLQEFYTALLVKGIRPDMARLTLARKIAAITLTIWKKGKSFDAQHLKHPTA

SEQ ID NO: 71527 - protein, 351 aa, unidentified
MPRTSTVHAVTAIGIDMGKNTLHMVGLDSRGAIVLREKVSRGRIALRLANLPPCLIGIEAGLATHYVAREVAALGHDVRQVPPTYAKPFRQGHKNDFRDAQAVAEAVQRPTTRFVPAKTDDQLDLQALHRVRSRLVSERTAVINQMRGFLLERGIIVRQGLRFLRQGLPDILAKRTDVLSPRMVRIIADLASDWRQLDERIEAVTDEIETLAKSDDSCRRVMTVPGIGPIISSAMVAAIGSGAAFAKGRDFSAWIGLVPKQMSTGDRTILGRISKRGNSYLRTLFMQAARVILLRPASWPKHGFGIWLARAAQRLHPNVLAAALANKLARIAWTVLAQERSYEARIMKAAA

SEQ ID NO: 71528 - protein, 342 aa, unidentified
MYYIGLDVHKKTISYCVKDASGQVHQEGQIGATRWELDGWMKTLPQPWTVAMEATIFTGWIYDHLLPHAQQVKVAHPLMLRAIAAAKKKNDRIDAGKIADCLRCDFLPECHMASTAIRDRRRTLRYRHLLVRQMVQMKNRISGLLMETGVSHNKRRLHRVGYFRELLASNEEVNESIRPLLRLSRDTIVRLQKTEYALVSSLQRDPLLAERIQRLRTVPGVGPITALTWALEMGDVARFPSIRQAISYCGLCGDEKSSADKMTRTPLSKQRNKHIQRVLVEAAKLAPRLDHELALVYETEKQKGNTNRATLAVARKMVAWLLAVDRGERDFVPAEEYRTAAA

SEQ ID NO: 71529 - protein, 413 aa, unidentified
MIVGIDVGSETHYARAFDWRNIEFSKKPFAFSNDEAGFASFKAWLEDIKEKFGKTIVLPGMEPTGHYWFNLGAFLQDNGMKPVHVNPHHVHKSKELDDNNPSKDPKTIAALVNEGRFNYPYIPTGVYAEIRSLYGLQVMTQEALIRVKNRIARWLSIYFPEYKDVYRSCDAISGVMVLKVCPLPADIVMLGADGVNKIWRDAKLRAAGMKRARPLVEAAKHSVGSTESPDAAKYEMELLLGDYEVYTKRLEELTEKIEVKLEEIPYVDKLLEIKGVGKKTVSGLIAEIGDISRFDNPKQIQKLAGYAIVACSSGKHKGESHISYRGRKRLRYVLYEAAISLIGQNAEFKEIHRYYLTRQNNPLKKMESVIAVACKALRVFYAILTKGVSYDGKFMLESIRYPENQVLGNRIAA

SEQ ID NO: 71530 - protein, 341 aa, unidentified
MDHYAGIDVSLEQSSVCVVDANGKIVREAKVTSEPEALSVWFRSLGLVLERVGLEAGPLSQWLFAGMKQAGLAVELLETRHVRDAFKAMPVKSDRNDARGIAQLMRLGWFRPVHCKSMGAQETRAMLTARKLVQSKLRDIENHLRGILRGFGLKVGKTTNRGFAGRTRELVANHARLEIVTEALLSVHAVLLREFNLFEKQVRSMARSDTKARLLMSTPAVGPIVALTYASAIDDPGRFKSSKRVGAHFGLTPKRYQSGETDYTGRISKIGDGSVRVALYEAAHIMLTKPVKGCSRLKSWAMRIAKRAGMNKAKVALARKLAVILHRMLTNGTPFNAAAAA

SEQ ID NO: 71531 - protein, 361 aa, unidentified
MRYVGIDYHKRYSICSATDERGQAVRERRIDGNSAAGFAQFFSELGEPAKVVMEACWNWGWLYDLLGETPGVAEVVLAHPYKTRLIAEAQIKTDRIDARVLARLLRGDLVARSHAPGPATRQRKHLLRQRLFWVRLRTMLRNRTHALLDRQRDLERPQLKDLFGRRGQTWLQAVRLPAPGDQPLLAQDMEVMQLLGVKIKELDRLIGQSQSTQEKLLESLPGIGPVFSSVIASEIDGIQRFVTPAKLCAYAGVVPTTHASGGRVFHGRLLWQCNKWLRWALVEASWSAIQFSGYFGGIYRAARERGKNRNVAVTMVAHRLCKMIWLLLNEKRPYTETFPDRSEPKMTAATGPKPARRAPRR

SEQ ID NO: 71532 - protein, 415 aa, unidentified
MSQEEIGAWVGIDWADKEHRIVLEEAATGRRVWMAVGQSAEELHEWLTGLRSRYMGRRVAMALEQSRGALFYVLNRYEFIDLYPVNPKTLARYRDALRPSGAKDDPDDAALVLELLLRHRDRLRLWKADDARTRQLRLLVEYRRKLVDDRTALLNQLTQLLKESFPQALRWAGGLDTKQAFDFLLRWPTLAAVRQARTQQLRAFYRTHSHSAEHIEKQIDAIRTAIPLIDDPAIVAACSTMILAIAGQLRVLRESIAQFDRSIDELFAHHQDASIFQSFPNAGAVLAPRLAVAFGTDRDRYSAAVEVAQWSGIAPVTRRSGGSMIVCSRWACPKFLKQTFHEYARVSIAASPWARAFYDQQRLRGATHHAAVRALAYRWIRIMFRCWKDRVPYHELTYQQSLRRRGSPLAGRLAA

SEQ ID NO: 71533 - protein, 386 aa, unidentified
MFITSATVVATTARANDITLFASLELSKSKWVVTINSPGSEKFSRHGVEGGDGAGLLDLLSRSRAKAGERYGAPIKVVVIQEAGLDGFWIHRLLLANGIESHVVDAASIAVDRRHRRAKTDGIDGETLLRTLMAWARGERRVCSMVRAPSPEEEDRRRLTRERGTLLKERIQHTNRVKGLLSSQGVRGYNPLRRDRFERLEALRTGDGRELPPLLKAEIRRELDRIAVAATQLAAVERARDALIRTDAEERMNPAALLLKLKGMGPEFASLLWLESLFRSFGNRRQVAAYAGLAPSPWQSGGVERDQGISKSGNRRLRKTMIELAWFWLRHQPDSALSRWFHARVGTAKGRVRRIAIVALARKLLVALWRYVTQGVVPEGAVFKPA

SEQ ID NO: 71534 - protein, 417 aa, unidentified
MAEEIEWFVGIDWASQSHQVCLVDARGECLGERAVAHGGAGIEELCDWLIARTGATPEVIGVAIEMTQGPVVEALLERGFCVYGINPKQLDRFRDRFTVAGAKDDRRDAHVLGDSLRTDRHAFRRLSNDEPVIVKLREWSRMADDLQQERARLASRMREQLWRYYPQMLELADDLAADWFLDLWNQAPTPAKAVRLRETTIERFVKAHRLRRWPASEVLRILKQKPLSVAPGVVEAASDHIRTLTVRIRLVNQQLKAAHRKLDELCAQLIPSEENEPGQQCEQRDVVILRSMPGLGRIILAVLLAEVWQPLRRRDYHALRSLSGVAPVTRRSGKTCVVVRRYACNKRLANALYHWARLATQHDALSRRRYAALRQRGHSHGRALRTVADRLLSVACTLLEQQTLFDPSYEVRDAAGA

SEQ ID NO: 71535 - protein, 419 aa, unidentified
MKTETGEPISVVHPCCCGLDVHKREVQACLLTSLADGRVRQEQRTFKTMTADLLTLLDWLVAAACTHVAMESTGVYWKPIYNLLDGHVALLVVNAQHIKQVPGRKTDVKDVAWIAGLLRHGLLRPSFIPDRDQRELRELTRYRMSLVDERSAEVNRLQKTLEGANIKAAGIATDIMGKSGREMLDLLVAGETNPAVLAQCARGRMREKIPQLERALAGNFGAHQRFLVARQLAHIDFLDRAIEEVSAEVAQRLTPCEEEIALLDTIPGVGRATAEALIAEIGLDMGQFPSAAHLASWAGLAPGNHESAGKRKSGKTRKGSRWLRATLVNAAHAAGHTKDTAVGTRYRALVARRGKKRAAVAVGHSILLIAYHVLQSHEPYDDRAVRPLPPRRAPSPAYLVQQLHDLGFDVSIAPRAPAA

SEQ ID NO: 71536 - protein, 339 aa, unidentified
MAHTIVGVDIAKNVMQVHWVDPDSGEIVNRPIKRAAFLEYFANRRPCLIGMESCSGSQHWARRLIEMGHRVKLMPAKFVKAFNIRNKNDAADARAIWMATQMDCKEVAVKSEAQQAILALHRMRQQLVKFRTMQTNSLRGLLSEYGEVMGVGRAALDKAMIGVLERLSGRLPAILIDTLREQWKGLDEVDRQIGQIECRMREWMKNDPAAKAIAAIPGVGLITATAAVATMGHAQAFKSGREFAAWLGLVPGQTGSGGTIKLQGISKRGDTYLRTLLVHGARSIIYRAKEPGLWVEQMKQRRPLNVVIVAMANKLARIIWAVLAHQQPYRKDYVSPRPA

SEQ ID NO: 71537 - protein, 464 aa, unidentified
MKVLGIDPDAGGFECALVESGIERPRCRRYSVSARGLEEFVRWAQTEGPQIVAVEGIHGQSEPIEKALRKAGVVCYSLVARRVEKYRKAVLGENKNNQRDAEAVAAYALSLKEQGRLERWRGVWEPDEELRLLTRRHDSAGKQINGETNRLWKLLRAASGDLYLALGGGGQEAEGAPGMLENKGILRLLATEPQIGRWKELSEDALMAAMGGGEYRGRRQLLQGLRPAMGTVPRLSESMQAVIRGIAGHLVGLRQEQGQIESLLGRLGEDRPAVLALDRRPGIGGLTACKIAAEIIDIRRFPSESNLASYSGLGRVEFKTGNQERERAACGYNRRLKDALMTAARNVVRFDPDSHLAGYDRWLLRRGMEPQEATKRVARALVRVIYRELKALVDPRPSPAKGPRQASAPANRCTRKQPRRAPRRSSRRGDPAHQTSQAKRTPRVTAHSSTEVRKRRRVRVKESA

SEQ ID NO: 71538 - protein, 521 aa, unidentified
MTGFSMVPACPYRSLVLRFSADTLAKFRGLWRVRGTILFKRLQFFMPLLGRNHNHHMKSKTQKSKKQKKKISIDQDWEAINPHAAGIDIGAREHFVCVPPAATPKNVRSFGTFTADLEALADWLQECGVTSVAMEATGVYWIPVFQILEARGLAVLLVNARQTKHVAGRKSDVQDCQWIQRLHTYGLLQGSFRPEDPYCVLRAYLRYRDELVGARSTQAQHMHKALQQMNVQLAQVLSDLTGVSGLAIIQAILAGERNAAKLAGLVDRRVRATPTKIQKALAGDYRSEHLFVLQHAFSLYGTYEEKINACDEQIVRETAALSDKVDPKNKPLPPRKEGRPASKDQMQGQDMREPLYRKFGVDLTAIEGIGVATALVVLTEVGPNLASFKTEKHFCSWLGLCPDNRISGGKVLSSHTRRVINRLSDALRMAAVTLERSQSALGGFYRRMKARLGAAEGITATAHKLARIIYRLIKHGEAYVRQGMEDYEKKFQERKLHALRKTAAHLGFNLVAQQQVTSPVS

SEQ ID NO: 71539 - protein, 344 aa, unidentified
MVTFGVDAHKRTHTIVAVNDRGTPVGQTTVGTTSQDHLVLLRWAARFGAERRWAVEDCRHLSRRLERDLLAAGESIVRVPPKLMAHVRDSARTYGKSDPIDALAVARAAQREPNLPLARLDGPDREVRLLVDHRESLISERTRLICRLRWHLHELDPAWEPKARSLDAQRTLDEVRGRLQDHVGVVARLAVELTERCAELTITIKALEKEITELTTQLAPALLELPGCGALTAAKIIGETAGVDRFKSRDAYARFNGTAPLPVWSSNKARHRLSRTGNRQLNAALHRIAPTQARWHPPAKEMIERRQSGGNSGREALRVLKRRLSDAVFQALLHDQTAGLTLAA

SEQ ID NO: 71540 - protein, 366 aa, unidentified
MYIVGLDVHAKRSSMCILDENGKLVKHLEVKGSWQRMLQVVDEQVPKPFAICYEASCGYGYLHDQFAKRAERVTVAHPGQLRLIFRSKKKNDRVDADKLAKLLYLKEVPAVHVPGMDVRAWRGLINYRRKLIGRRAAVKTQIRAHLRGLGIAVGVKGGLWTKKGIAWLSEQAMSSSAADGLRRDVMVDDLTELEAKVRKVERELDRIGRAHPGVTLLRTIPGVGPRTAEAFVAHVDDVSRFARVKQVGSYFGLVPCQDASADRNRLGHITKDGPAPVRWLVAEAAWQGRRRSPKIRAYFDRVMRGDPQRKKIALVATAHHLTRVMAAMLRSGEVWREEEPQQPQTPPPASDQQEAKKTKTKTSNKE

SEQ ID NO: 71541 - protein, 382 aa, unidentified
MQPINTVNPTIYLAIELSASTWLIAARLPGSEKPHLHRIEGGDTAALFALISSLRARVARRLDAAIGVVCCFEAGRDGFWLHRLLTAHGVANYVLEPTSILINRRARRAKTDRLDAIGMLRVLAAYLRGDRQSCSMVRVPTPEDEDAKRIHRERENLVQEKLRIENRIEALLFTQGIRKRPSLRSWERDLAVLRTGDGREMPRHLRAELDRLRRRLVTILELIREVEAERDEVVTTNPEHQTSRKIVALCRIRGLGENFAGVLTREVFYRSFDNRRQIASYVGITPMPYQSGSMDRDRRISRAGNPRARTTMIQLAWLWLRYQPGSELAEWFRKRVGTLAGRTRRIAIVAMARKLLIALWRYVETGVLPAGAEIRLESVAAA

SEQ ID NO: 71542 - protein, 347 aa, unidentified
MVHFVGLDVSVKETSACVVDDAGKVILEQKVPTEPADIIALLTSLGEPYGWIGIEAGPLSQWLVNALTAAELPVICVETRHMKALLTAQQINKTDRNDARGIAQMMRVGLFKPVHVKTLVAQEQRMLLTTRKLLQRKLLDVESDLRGTLRNFGLRVGAVSGGRYEARVRELVEGFPRLAAIAAPLLNVRRVMRQQFAVLHKMLLDTVRDPVCRRLMTAPGVGAVVALTHRATVDQPQRFVHSRAVGAHVGLTPKRYQSGEIDYDGGVSKCGDALLRTMLYEAAHSLLIQSRKWSWLKAWGIRVAQRRGIRRAIVAVARRLAVVLHRMWVDGSEFHWKKDSAAVPAVA

SEQ ID NO: 71543 - protein, 315 aa, unidentified
MSKDTLDANCARGQRKQARTFENNPDGWKRLLSWLKAIGGKQAHVCMEATGRHSLGIALALHDAGHVVSVVNPAQIRDFARTKLGRNKTDKVDAALIREYAALFNPAPWTPPSPAMRRLCELQTVRAGIISNRAEWKNRLGSGLGDSTATGLVAMTIEHFTRQLETVDQAIDETIDQDATLRGRRDLLLSVVGVGKTLAASLLAEMPEPGVLRRSGEIVAYAGLNPSHHRSGTSIDRPTRISKIGNATLRSSLYMPALSAMRFNPAVAALVARLKEAGRLKPKQIVVAAMRKLLVLCFGVLKTGKPFDPAIAMPA

SEQ ID NO: 71544 - protein, 474 aa, unidentified
MTTTTLEFSEHLDNTRFFCGLDVHKRQLAVAIYGKDDAGHEYVKCETFGTDTRSLEALFAFTSRFQPKCYGMEATNVYHHVIATMLEEKAKVVDWTYDIFVFNPADATGIPGYHKHDRLDATQIARYIASGLLKPGRAINVVLEDMRAIFRMAARLSEDRTAIKNRIKKTLDRAGIRPEGLNLNMQWVIELLSALCDHEGTLKELLDGLGTRPGFPERHVTTINRNANKFEPYLNMSLTAGQRALIKQDLVELDFKTARIALLAVEVDHVIATRPGLRQSIMNIASIPGLTPFSAAWLVSEVGPVSRYPTHRKFSAYCGCCERVVNSAGKTYSAHILRRSNKFARTILFNAARVLCFAVKKDSVLKQYSKRVLARKGGKGIILAYCTIATKLSRIIYVMLRDGIKFNPDLAADNRGPADIGNSLLTITDKKSIARAQKALKRVAKLKQLGLLSDQAAYFADGLERALKENKDAV

SEQ ID NO: 71545 - protein, 386 aa, unidentified
MIFIGIDIAKSTHFASAVNSDGEVLVKPFKFTNDNSGFNLFIDTFKDYDLSNCLVGLESTGIYGDNLTTFLFDKGFKIGRINPIQTDSLRSSNIRKTKNDKIDTFLISKCLMLGNYTLVTKKDIQIINLRTLCRFKFNVKKSQSKAKVQLVTCLDIAFPELANFFKGNLHIKSSYSLLSKYPTAKIISNTRIDALTNLLYSASKGHFKSDKAVALKELAKNSVAMDNPAIGTQIKMLIEQIQILQKQLDLLDIDISNIMDELNSPISSIPGIGTWLGAIIISEIGDISRFSSATKLLAFAGLDPSVRQSGNFNATNTKISKRGSKHLRYAIHYAAEIIIWNDDTFYQYYTTKLAQGKSYLNAIGHVAHKLTRVIFKLLTTNTTFKG

SEQ ID NO: 71546 - protein, 374 aa, unidentified
MADYSEVFVGIDTSKLRNAVAIAEGGRNGEVRYLGEIDNTEAATSKLVKKLAAQHRRLTFCYEAGPTGYGLHRLIKTLGHECVVVAPSLIPKKPGDRVKTNRRDALNLAKLLRAGELTAVWVPDARHEAMRDLVRAREAAVDDLKSKRQQVLSLLLRLGRHFTGKRTWTRAHMNWLVSQKLAHREQRIAFEEMLLAVRQANERVIRLERAIAAAVPDWSLAEVVTALMAVRGLDLISATIFLAEIGDLSRFASPRQLMAYLGLVPGEASTGDRVWRGGITKAGNHRARRILVECSWSYRHPPRVGKKKLAKVEAAPPAVQEIAWKAQARLTARYRALARRGKRPTLIVTAIARELSGFIWAVSRAAGAPMTPAK

SEQ ID NO: 71547 - protein, 325 aa, unidentified
MIQFTLGIDVSKDTLDFALLGGKKTEYRHFTNNEAGYSHLVNWLYKAEAKTLHACLEATGQYGEGVATYLHNHGYRVSVVNPARIKSYAGSMMRRFKSDKGDAEVIALYCQKEVPALWTPPPDSFRELQYLVRYLADLKNMRQQERNRLKSGVTSLRVRADLKAHIDFISAQIEQLTKEIARHINKCPELKKQKELLKSIPGIGDTTAAALLSEVRDFRAFDSARQLAAYAGLVPEQRDSGTSVHKKPRMSKKGNSHLRKSLYMPAIVATRHNPIVRALSERLKATGHCAMSIVGAAMRKLLHLAYGVIKTGKPFDPAYGQNLAA

SEQ ID NO: 71548 - protein, 394 aa, unidentified
MIPHFYGFDIHQKYIVAAAVDREQHMNLAPERVSMDHLADWVARHLTAADTVVVEAGTNAFHIADLLAGHVKQVVVANPYKTKLIAEAQIKNDKVDALALAKLLAANLICDVWIPSAQVREQRTLSAHRASLQQRCTQVKNQLHNMCHRRSQQCPESSLFTAAGRQWLLDLPLPDVDRMRIRHLLQQLECLEEQLDETNREVARRSAQDERIPRLMQICGVGYYTAYAILACIGNIQRFPSGDKLAAYAGLVPRQYQTGNRAFFGHITKCGNPLLRWLLVEAARSAVRYDPHWHQIHDRIARRRGSNIATVAVARKLLVVIWHLLTEKSVYRHLRPQTFVTKLQEWAFRIGRNHLPANSSKEFVYDHLSCLGLYNMAESLAYKGKNCRLRLQAA

SEQ ID NO: 71549 - protein, 421 aa, unidentified
MQQEASEEFAAFVGLDWADAKHDVCLQAAGSEQREHSSLDHTPEDIDAWVCSLPKRFEGKPIAICLELNKGPLVCALRKYHFLVLFPVNPLTLARYREAFTPSRAKYDPTDAELQLELLRIHRDKLQPLNPQSPTMRALAPLVEHRRRVVGDNVRLTNRLTSTLKNYFPQALQWFQDKDTIIFCDFLSRWPTLKAAQLARRSTLETFFREHHVRSADVMTQRINAIKAAIPLTPDEGIITPNVLLVQALVSQLRVTLQAIQDFDNAIAQHAQRHPDFPLFQTLPGAGSVFAPRLLVAFGEHRDRYASAAERQQFAGIAPVTERSGKKCWVHWRFQCPTFLRQTFVEWAAESIRQSFWARAYYQQQREKGKAHQAAVRALAFTWLRMLLRCGQDRTPYHASVYLHALNRRGAALLQNLPQAS

SEQ ID NO: 71550 - protein, 350 aa, unidentified
MPCKTVAIAHTIGIDTGKNTLHMIGLDKKGTIVVREKVSRTRIAARLVNVPQCLIGIEAGMASHHVARELLALGHEVKQVPPAYAKPFRQGHKNDFRDAHAIAEAVQRPSTRCVPVKTADQLDLQALHRVRSRLIGNRTAVINQLRGFLLEHGIPVRQGLRFLRQQLPQILAMRTDVLSPRMIRIIEELIGDWEHLDERIERVTDEIETLARADENCRRLMTVPGIGPITASAMVAAIGNGAAFAKGRDFAAWLGLVPKQMSTGDRTILGRITKRGNRYLRMLFIQGARAILFRPAGWAKHSFGPWLAAAARRLHRNVLATAFANKLARIALTVLVEGRSYAARVEPRAA

SEQ ID NO: 71551 - protein, 420 aa, unidentified
MYYVGIDIAKAFHIACVLDESNKLIVKNLRIESEISDFSLLNSELINITEDKTEFLIGMEATGLLFENLYLFLQNQGYNVVLLNPYQTNRFREMDTMKYVKNDNIDSQMIAALLKSGRYSQGYVSEDLYQAIKSLYRHKATLMQEVKSAKRQVSTTLAVVFPEFEQIIKDPFSVSGMALLEKYPTAKHYKGASADRILKVFRNIKGNNFNLQKANDLLDLARLTIYQGNAQEERAYVILSNLRRIRFLKQEIEACESQMFTLLNESEQAVSSSISEDEEIYIADLVDNLRSIDGVADKTIFALLSECGDIARFKSGQAFIGFLGLYPTLYQSGNSTKYGKLAKRGARLAKLALYQAAIACVRHNDELKKVYLDKKSSGRAPKECVIIVARKLAMIIYSIYKNNTPYNPARVFNTQASLSH

SEQ ID NO: 71552 - protein, 408 aa, unidentified
MDTLYACCCGLDVHLKTVVACLLKTDGHKVHKQVRVFKTMTQDILALSDWLQAEECTHVAMESTGVYWKPIYNLLEAHFELLVVNAQHIKTVPGRKTDVADAEWIADLLRHGLLRGSFIPDAPQREVRELTRYRRTLVEERARLINRLQKVLEDANIKLSSVVSNIMGVSARAMLEALLAGQTDPTTLAALARGRLREKQDQLVQALAGYFKPHHTFMLTEHLAHLDYLTEAIERTEAEVEQRLHSVTLEVALLDSIPGISQQIAQVILAEIGPDVSRFPSARHLASWAGLCPGNNESAGKRYSGKTRKGSPYLRNALVEAAHGAVRTKNTYLIAQYRRIAARRGRKRALVALAHTLLTIIYHILKRKEPYHDLGGNYFDEHDRQAVEKRLVGRLHKLGYDVTLHPTV

SEQ ID NO: 71553 - protein, 348 aa, unidentified
MVTIGVDPHKQTHTAAAVDDVGRELSNRTERAEQDGFGALLVWARRLAPDERIWVIEDCRHVSGPFERFLLDHGESVARLAPRLMADARQSVRERGKSDPIDARAVARAALREGLDTLPTARLAGPELEIRLLVVHRERLINARTRLINELRWQLHDLWPDYKIPKRALTAGRWQRSVAQRLGRAEPTARVRVARDEIRRIRDLSITIDELAQQLAGLVAQVAPQLLLERGIGVLIAAKLIGEIAGIARFTSDAKLARLAGCAPIPVSSGRTDRHRLDRGGNRQLNHAIHMLAITKIIHDPETGLYIARQRSRGKTNREAIRSLKRHLIRRVYNLLTHPDRVRLTICT

SEQ ID NO: 71554 - protein, 369 aa, unidentified
MQNTIFVGLDVHKATISVAIAHGERGGEVRHLGTIPNRADHVRRLAEKLGRDGRQLHFCYEAGPCGYGLHRQLTELGHDCMVVAPSLIPVKTGDRVKTDRRDGIMLAKLHRAGELTAVWVPDAAHEAMRDLVRARATAVRVAGKARQHLQGFLLRHGRIYPGKKGWTKAYRRWLTTVRFEQPAQQIVLQDYIHAVIDAEARIERLTKQIADLLPGWSLAPVVEAVQAMRGVAFIVAVTVVAEVGDFSRFDNPRQLMAYLGLTPSEHSSGATVRRGGITKAGSGLARRALVEGAWSYRMQARVSRKLLDRIEALPQTVRDIAWNGQLRMCQRYRHLMAAGKPKVVATTAIAREMVGFIWAIARTVTPARA

SEQ ID NO: 71555 - protein, 391 aa, unidentified
MVCVGIDVAKDKHDCCILDSEGTTLVDCFTIPNNMDGFKSLLQTIQDCSQKSDKIKVGLEATGHYSYNILGFLLDNDLPIYVMNPLHTNLYRKSLSLRKTKTDRVDAKTIATMLLSDVDLKSYTDTAYHNEELKSLTRYRFDKVQERAKLKQSVSRLVTILFPELEQLVSSIHGTSIYALLSEYPGAKQISEAHLTRLANILVKTSRGHYRKDKATHIRDAARTSIGSVMPAKSLELKHTIKLIQELTSEINEIEDAIRKIMDELKPPILSIPGMGFHSAAMILAEVGDFSNFNSPDKVLAYAGCSPSTYQSGKLTNCYAHMEKRGSRYLRYALYTATKYVCYWNPVFTEYLTKKQAEGKHYNDALSHATKKLVRLIYALQKSGKAYLAVT

SEQ ID NO: 71556 - protein, 316 aa, unidentified
MREYIGIDVSKATLDVYDGKKSYKFENNETGFKKIIGLVKELKSVVFIFEPTGVYSYALTDFCSQKNINIVMVGPKESRDFARSLKVRSKTDKIDAKVLYKYQSHIEPSMVKVPVVNHQGIKIQEMLNVYENIQSSKQTFKNQVESTSKNDKYLLRTLTRIIKELDTEALKLFNKIELILLKNKEIKAKYDAISTIPSIGQKSALYLTAFFLKYPTANAKEMTALIGLDPVIRDSGTFKGKQRISKQGGQKLRNLLFLPTLCAIQHNDRIKSFYERLTANAKTKKLAVIASMRKLILMAFSLFKSKEVYQPLILRD

SEQ ID NO: 71557 - protein, 431 aa, unidentified
MMILALDLGKFNTMCCFFDSETRKHEFIVAATQREYLTKIFKLKHVDIVVMEACGPCGWISDLCEELGLKTFVCSTNEDAWKWANVKRKTDRDDALKLARLFILNELKPVHVPSKEHREFRLLVKNRKSIDYRITRVKNCIRSIFVNQGVSIGRGSTAWTKEGRKYINSFRNPMSTCLPREYWKGQLDLELSQLDALVEQLGIAEKPLEDIAKKDPRIIRLMTIPGVGRKTAEVIVAAIDNADRFANCRQVSAYFGLVPKQFQSGETDRNGRITKRGSSLVRAILVECAWCSIRYNPWAKAVYERIHGKQKTRKKKAAIALARKLVVVAWAMLRNKTDWDPAIMAKVTSSYKGGEPRVETAQNASSVSAPKEETSTESPERVERVVASKPKERSSRATSSLTGQVKTPGRKVVIDAAEAKVRKPSRRAVAT

SEQ ID NO: 71558 - protein, 371 aa, unidentified
MTSRQRTTSSSTDPPVRREVVLGVDTHGEVHVAAVVSPLGKILGTESFPATAAGYRQLLVWARKRGTVRRAGVEGTGTFGAGLSRYLLAQQIQVYEVNRPDRSARRLLGKSDPLDAQAAARAVLSGRARAQAKSGDGPVHSARMLKLAKDSAVKARTQAINQLKAVLVIADPALRERLSGLGNAELFRTCATLSPPDGGGDEDAVAQATHMTLRMLAERIEQLSGQINELNQRLTRLVERYAPQLLVPVGIGPDSAATLLITMGDNPERLNTEASFAALCGVGPIEYSSGRRRTRRLNCGGDRQANAALHRIVFTRLRHDPRTQAYYERRTQERKTRREIVRCLKRYAAGEVFNLSDRFPAPPCFRGVRET

SEQ ID NO: 71559 - protein, 345 aa, unidentified
MELHTIGIDLGKTVFHLVGLNLHGEVVVRKKFSRTQLLRFTTNVHVELIGMEACGGAHFLGRALREQGHEVRLIPAQYVKPYVKTNKSDYIDAEAIAEAVARPTMRFVPIKTDDQLDLQSLHRVRERWVMRRTAVINQIRGLLLERGITLRKGRCHVGAALPGILEDADAKLSGALRMLLAQLKLELDHLDLRIDEADALIKKTACENEACQRLMAIPGIGPVTATAVIAAIGNGGAFRKGREFAAWMGVVPREHSTGGKQKLLGISKRGNSYLRRLFVQGARAVMQQRTKQSSGLSAWLAQLTSRSHRNVAGVALANKMARMAWAVLAKNEPYRPPVLADVAAA

SEQ ID NO: 71560 - protein, 378 aa, unidentified
MNRIIKIGMDVHTTNYTLCIFEPSFEHDGTVHCITQVKPEIKKIIHVIETFKKKHENEELNIVCGYEAGCLGYSLYHELKEKGMECVILAPTTMKTEKGGRKLKNDYRDAKMIAECLAYGGYSAVHVPTELDNSVKEFIRMRDDIKENLKSIKQQIIAFLTRNGKQFNGKSYWTRKHIDWINAVSFSEPLLQDTLKEYMIEYNHLCNRVETLDKQIEEISLKEEYVEKVQQLQCLIGIKTHTALSLIVETSDFNRFKKGNMYSAYLGLIPGDDSSGGHEKKLGITKAGNSHLRKLLVEAAQGFTRGKVGFKSKDLKARQEKCSSEVVAYADKANERLRRKYYRMILRGKKYNIAKTAIARELACFVWGIMTDHIDLCS

SEQ ID NO: 71561 - protein, 411 aa, unidentified
MAAVACGVDWAQDHHDVAVVDHDGKVVASERISDSAEGLTILLRMLVEHDPTDAQLPIAIETSRGLLVAGLRAAGRKVFAINPFSVSRYRDRYRSSRGKSDAFDAMVLANILRTDIDTHRPLSDDSVEVQALRVLTRAQQDAVWEGAEVTNRIRTLLKAFFPMALSAFERGGRHRLDSAACRTILSTAPTPEAARSLTVRRLSSLLKKAGRQRGIDEEATRLHAALRQEAMHQPAAVERAMGLQLQGLLRQLDAICDTVAELEEAVETAFHAHPDSGIVSSFPGVGTQLGARFLAEIGDDRARFADARGLRAFAGAAPVTRASGKSSFVHARRAKNNRLATTGYVWALAAVRHDKNWEALYRARRDHGDRHTAALRRLFSIMLSKLHYCLKSGRVYNPAYAFTVGEIPAAA

SEQ ID NO: 71562 - protein, 340 aa, unidentified
MKFKFFVGIDVSKDTLDIGLLNAVNSETVNHQQVGNNDVGIVAMFKWLQEQEGFSIEETLFCLEHTGMYNYPLLQFFSQQRASVWVENPIQIKKSLGLQRGKNDKVDAIRIAQYAYRSKEQAKLWQPAREVVNKLKHLAALRERLVETRKRLLTPIEELFKVGNETMAKVLERSMRKTMKGLDKDLEAIEVQMKDVIDRDDELKKLYGLITSVVGIGFVTAVNLIVYTNEFRLFSNHRQFACYSGVAPFEYRSGSSIRGRTKVSHMANKKMKRYLHMASLTGIKLDEGLKAYYERKVIEGKNKMSVLNAIRNKLLARIFAVVNRGSVYQKINYQNSLVLS

SEQ ID NO: 71563 - protein, 482 aa, unidentified
MKKRTIYAEQSQELLRLFEEAGNNAKIMCVPIDYAKKDNVVMFCNGYGDILRKPFSVKNSPEGIEYLSDQVTRSCLSRSINPNHVFFGGEDVGSYAENFANALRAKGWFVGGVNAHDAKKQRANAQASTDRLDLMGIAIMLINRRANCSPAQSGIYLNLRNLVRHRGSLVKLSTKVRNQIHTAVDRLLPGFLDEKKTGIAPFSKSSLYLMKDRFSAARIRRKKTDTLTEILRQYGTQNPERAASKLKEYAKAVLIPPNEYIGTLQVSLAQHVKHYRCIRENIEQLEKEIALWLAQTQGAFLTTVRGIGIVLAAGVTAEIGDPNKQKPLNNLVSYAGIIPRVKQTGGPEGNTYTGKVAKRCNRLLKNYVVQSGLHLGLHGPDDLMTDYKRREASGQHADFGIARRYLRMGMCLMRTSQVYLPQRLRNRNVEPKERASYYLMIWPKFRDKWSKLDALNAAFAKDRPLGRWRNMVQELYGITLKL

SEQ ID NO: 71564 - protein, 318 aa, unidentified
MQHFIGIDISKRDFHACFSEDGKVKIFMNDPSGIKAFIRYLRSIKCATGNTIIGLESTGSYHLPVAYLCTQAGYTVNVINPLIVRKQNQTSLRRVKTDKKDASLIRYCLVSGAGYPFRETADSLTLKTLVRQRSSFSNLRLKTRLKQEEVERREDYLNCPITRANRQLHVFLDDRIRELDILLRQHDRPMQKLLMSIPGVGPQTATTLLSEIGDITRFPDSQKLTAFIGLDPRVHQSGTSVNGKGYITKRGNKLLRTRLFNAASVAVIHPPNIFYEFFQKKLSEGKPYRVALVATMHKMVHVIYAVWTRGTPFVNEYR

SEQ ID NO: 71565 - protein, 372 aa, unidentified
MSPPDLREALIVRQQLWAGLDLGQRRTQVCVVDKDGAPVYEQECETNLASLRAALSHIDTDQLALIAVEAAGGTHLVRELRDAGYPVAMFETRKASKFLSLRRNKTDAGDAKGLADLGRLGRNTVSQVFLKSAECERLRSLIVMRKRLVHLRVAAEGALRSRMAMHGVRLKSTAAPSGIRHQVSNSVAHLRSSADHDLQSQLAPLVDVCEALRAYVRSLDGDLRTLAKAHRTCRLLMEVPGVGPICAMSFYTAIEDPGRFRRVSDVAAYLGLVPRRYQSGALSRTLGITKTGSKLTRTHLVTAATVFGTRAPDCALKQWYLTLRSRVGPARARVALARKLAIVLLTMWKNDTHFDPQHRYGVEKAPAAAISA

SEQ ID NO: 71566 - protein, 412 aa, unidentified
MDVIHSRCAGLDISKKDAKVCVRINGAGRRKTSETVTTFGATTRQIMAMRDHLAAQQVTCIVMEATGDYWKPFYYLLEDLTGVEVMLVNARHVKNLPGRKTDVADATWLAQLGAHGLVRGSFVPPEPIRQLRDLTRARTAVTRERTREIQRLEKLLEDAGIKLSSVAADLNGASSRAMLEALLAGETDTAAMADLAKKQMRVKIPQLTEALYGRFTSHHAFLTRMHLDLIDQHTAAIAQLTDRIEVVIEPFRSFRDLICTIPGIGGYTADVVVAETGADMTRFPTAQHLASWAGTTPGNNESAGKVKSRRTRPGNPYLQGALGTAAMSISHTRNTYLATKYRRIATRRGPLRANVAVQRALLVAIWNLATTNTTYHDPGGDYFTRLNPQKARNNAIRQLEAMGYHVTLDQAS

SEQ ID NO: 71567 - protein, 339 aa, unidentified
MAIYAGIDLHSNSNFLSVVDDVGKIIEKRKLANDVQAILHPLTAYREQLQGIAIESTFNWYWIVDALMDEGYRVHLANPAAIQKYSGLKHSDDASDAAWLAEMLRLGVLPEGYIYPKGERPIRDLLRKRGHLVRLRTSLITSLKGIVSRNNGHSISVNMIKQLKTNHVAPLCVANEDLALCGEVSKDTIDYLGRQIKKIEKQAEERIELRPTYKALLSMPGVGVILGLTIMLETGPIDRFAKAGNFSSYCRKVPSTWISNGKRKGRGNTKNGNKYLAWAFSEVAELARRYDDASRSWYDRKLARSNRMVAHSALAHKLARAAYFIMREGVNFEHEKCFA

SEQ ID NO: 71568 - protein, 363 aa, unidentified
MKNGNAKTANKQAKRVSAKAAAWTVGIDLGDRKSHYCVLNRKGEMVEEGQVRTRRQEMAGFLEQWRGAEVVIEASTHSPWVHDLIVERGQKAVVANMRELPRLRNKTDREDARRLARMGRADRELLKPIWHRPARERADLAVVRSREQLMTTRTALVNHVRGLVKSYGERLPGCASEAFVSKCAGLIPEPLRAAAEPILRALGEINRQIKELNKTVARLCQQYEETRLLRTVPGVGELTALTYRLTVSDPGRFACSRNVGAYLGLKPGRAQSGEQDPQLGISKTGDRLLRRLLAQVACYILGPFAPDSALRQWGLKLKQAGLKRNGKNKGHRRAMVAVARKLAVILHRMWVKQEAWQAFPSAA

SEQ ID NO: 71569 - protein, 406 aa, unidentified
MDVIYPRCAGLDVHKQTVVACSRLCGDGAPRQEVRTFATTTSGLLELADWLESLGVQHVAMEATGVYWKPVWHVLEGHFVLVLANAAHVKNVPGRKTDVNDAMWLADLLAHGLIRASFVPPVAVQELRTLTRTRKQFVRERGSHAQRIEKILEDANLKLSSVISDILGKSGRAVLKALIDGETDPQALVSHIGRVKATHSELLEALRGRITAHHRFMLKLHLDHVETLDKAIAQIEKEVGLGLEPFRQAAQLLSTMPGLSSVSAHVVVAEIGIDMSRFATPGHLLSWACLCPRNDESAGKRRSTRLRRGGKWLKTTLVQAAWAAIKVKGSYLQAQFHRLRARRGAKKAIIGVAASMLTAAWHMLRNGTEWHDLGAAHFDRADATKTANRLIRRLQQIGYKVQATPA

SEQ ID NO: 71570 - protein, 385 aa, unidentified
MANQNDLSRSVVAFEQHNTIIAVIEMSLTSWLVAGIVPGIERRPLKKLSVDEDILLKWLYRWRDQAVNAGHTITRMVVAFEAGRDGFWLARWLRARGIEAYVIHPTSVAVSREHRRAKTDRLDTESLKRAFLGWLRGEPDHCSMAAVPSLQEEDAKRPTRERENLVGERTRIVNRMKACLIRFGIRNFNPTLRRTPERLNELCTPEGVSLPPNTLAELRRDLARLRFVTDQINEIEAARLQRLQQAPTEQPYAMVRLLARVIGVGIETADMLVHEILSRKLRDRRAVARYAGLTGAPDESGSKRREKGLAKAGNARVRRGMIQLAWRFLLFQKNSALSQWYRTRTESAGKKRKTLIVALARKLLIALWRLVTTGEVPGGVMLRAA

SEQ ID NO: 71571 - protein, 313 aa, unidentified
MSRNEAFVGIDTSKAWLDVAVLGAAGVERYANDPDGRLRLAETLLGLQPQAIGIEASGGYEKAVIEALVAAGLQVRCVDPRRLRCFAEACGIKAKNDRLDAAVIARFVEALPGRTVEPEPISEALAELVDARRQLCEEQVRVSNQTDQVRDVTLRRMAQRRLTRIRADIVLIEKRIAEFIAANPLLAERERLLRSAPGVGPVVAWTLLACLPELGRLGHRQIAALVGVAPYDHDSGKMKGRRAIRGGRVHVRNIVYMAALVGGRRNPVLAAMRDRLRAAGKPPKVAIIAMARKLLCRLNAMLRDGCAWQASLA

SEQ ID NO: 71572 - protein, 349 aa, unidentified
MRFYNCQHRHYCGIDLHVKTMYLCILNATGQVLLHRNIKTTPEAFLDAVAPYRDDLVVAVECMFTWYWLADLCAAQGITFILGHALAMKAIHGGKAKNDKIDAHKIAVLLRGGLLPQAYVYPAAMRATRDLLRRRLHLVRKRGQLLAHIQNTRAQYNLPAFEHRLAYPANRDGVSLHFPDPSVRKSVEVDLALIDQYDTLIADLEQTLVREAKCDDGDAFHRLRSVPGIGPILALTILYEIHHIGRFDRVQEFASYARLVKCAHQSAGKTLGTGGAKMGNVHLKWAFSEAAVLFLRHAHTPRVQKLLARLEKQHGKAKALSILAHKIGRAVFYMLARGTVFSMDKFLAA

SEQ ID NO: 71573 - protein, 308 aa, unidentified
MMITPDVVGIDVSKHHLDIFYGSSGEAERLANTADKVGELAMRLDGRFVVFEATGAYDELLRRAFAGAGVCFARINPTQARSFAKAAGFLAKTDQVDARMLAALGSALRPRPAEAADEARERLGRLHKRRDQLAASRKQERTRRREAKDPELLEGIARHLAFLDEEIAALEANIADLIAAEPSLKSTLKLLVSIPGVGTLTGACLLALMPELGQRNPKAIAALAGLAPLNHDSGLRRGQRSIRGGRKRVRDALYMAAVAATRSNSRFKAGYQKLRADGKPAKLALIALARKLLTVANAIVRDQQPFAA

SEQ ID NO: 71574 - protein, 343 aa, unidentified
MQTVTTIGLDIAKSVFQVHGVDANGQVVIRRQLKRRYILAFFQKVPPCLVGIEACASSHHWSRELQALGHTVRLMPPAYVKPYVKRHKNDATDAEAICEAVGRPNMRFVATKTPGQQSCLTLHRTRHLFIRQQTSVINAIRAHLAEFGIVAPVGRHGVEQLLQVVADKSDKRLPEVARTCVAALGAQLQTLKAKILEFDRLIMAWHRSSETSRRLDDIPGVGPALATALVASIADPNAFRSGRDFSAWIGVVPKQNSSGGKDRLGSISKRGDRYLRGLFVAGALAVIRYAKIHGTKHRPWLTALLARRPTKVAAIALANKIARMAWAMMAKGERYKEPVALAV

SEQ ID NO: 71575 - protein, 317 aa, unidentified
MDKVYAGVDVGKATLEVGIYGETWVGQYNYDVAGLEQLIEAVQARQVGLVVVEATGDLERRLVAALVVAGVPVSVVNPQRVRYFARADGRLAKTDRLDAQVLAKFGQAMQPALYEAQSAEGEELSALVTRRKQLVEMLAAEKNRLNTATGSVRRQVEAHIRWLEEEVKALDEAISQLMQTDPQWQERDALLHSVPGVGAVTASTLLAELPELGTLSRQKVAALVGVAPINHDSGRRRGERHILGGRATVRRVLYMAALTATRANPVIRSFYQRLLAAGKCKKVALTACMRKLLVILNAMLRDRRRWNPELALMPAPA

SEQ ID NO: 71576 - protein, 449 aa, unidentified
MSKGSGLTRGDVRRNARKAALRGLVPLSNAVLGVDLGEKKQALVLADGDGVVLWRRSPQVRVHELGRYLDAAAERAARGGFAGVTVACEPTGSRWMTVQELCRARRVPLVCVQPLVSHVAREQQDLTGDKTDEGDCVLIARLARELHCYVPEDLDAGWAELRAAGRDRAAQVTRSTAAKQLIRDQLGLVLPGMLEVHGEPLESATWLACLETVLEHAAGGDLGAAAAAGYEQFAAAAAARLAAWGGRRLGPTAARVLAALGGPQPVPRMLRAARRRLAGALEDLKHARDRRERAEAEMIAMLGELGIDAGRVCRIPGLSPASLAAIIAEAGDLRRYASSSSLVKHAGMSPARNESGSFQGKTAISRRGRPALRLAAWRATWAVLRHCDVLAAKFTTLTSRDDGRLRDAQARAACAASLLRWIYSLIVHRTSWDPAIAAGELSHHHAIAA

SEQ ID NO: 71577 - protein, 348 aa, unidentified
MTLTIVETRAVTGGVDTHADTHVAAALDAIGGLLGVEEFPATAAGYARLLDWLGGFGTVCLVGIEGTGSYGAGLARHVAAAGVRVVEVDRADRQDRRRAGKSDPLDAVSAARAAQSGRACGRPKGRDGQVEAIRALMVAKRSARSERIQTINQARSLIVTGPDDLRARFAGHAADDLVAGLASLRPRTGDTVGYATRMALRELGRRTQFPGAQLERLDELIVPLVTTRALGLLALYGVGPDTAAMLLVAAGDHPERLRSEAAWAHLCAAAPIPASSGKVTRHRLNRGGDRQANHALYRIVITRMSSHPPTRAYVDRRTKEGLSKKEIIRCLKRYVAREVYPHLRPPVR

SEQ ID NO: 71578 - protein, 356 aa, unidentified
MKYVGIDVHKKHCQAAVLDEDGELVDQARFLNRKKSIKEFAVKLLTFRDDVKAVVESTGNLWIQIYDILEKFGIDVSLSNPGKTRLIAEAKNKTDKVDAKILARLLRADMLFTCYVPGEEVRNRREFLRARQDFVKNKTQVKNRIHGILDKHGLRFPGTPYSKKSIVWLRKQDLGFMDNAVVKGQLALLETLDDQIRVMEDKIAVMGMEDPQVKLLMTMPGIGFFTASMLVAEIGDINRFGSDKKISSWAGLAPRIHQSGETTHIGRVGQGNKRISGLLVQCAHNARRYDPRFKRFYDRYSKRSGKGKALVAVAHEMIRIVYFMLKRNEPYRGENVEMTTRKLKSMKYRASIGLRT

SEQ ID NO: 71579 - protein, 370 aa, unidentified
MAKSTPLFVGLDVHKDSITVAHAAGGCAAPPVFVGAIGSRQADIDQLIRRLRSKTSTLTFAYEAGPCGYGLHRYLTRQGLTCQVVAPSLIPKKPGDKVKTDRRDAVEIARLLRSGDLTAVYVPSIDDEAIRDLCRARDAARVTLKQAKLRLKAFLLRLGLHYVGRADWNAAHRRYLAKVVCPTAAQQIVFQENMRAVDEQVDRLQRIEMELRELAPRWRLYPVVQALQALRGVQWLVAITVVAELGDLTRFDTPRQLAAYVGLIPSEYSSGHARRQGGITKAGNGRARRVLIEAAWAYRYPAKVSLHIQQRIDQLPKRLQDIGWKAQVRLCKRFRRLTTRGKHANVAVTAIARELLAFMWAIAREVPVTA

SEQ ID NO: 71580 - protein, 342 aa, unidentified
MEIAVLGIDLGKNSCSVVGLDGTGQIVMRRRMQRDSVIKLAAGMAPCVVAMEACCGAHHLGRIVRDHGHQVRLMSPEYVRPYVKAQKNDDRDAEAIAEAATRPTMRFVELKSVEQLDMQSLHRVRDRLVGERTALMNQLRAVLMERGITVPQGRRKLERHLAVILDGEELQLSPRVRSLVEDMRAEWGALDRRIEAFDDEFAAQAKTDDAARRLASIPGIGVLNATALAAAVGNAASFARGRDLAAWLGLVPRQMTTGGKPRLMGISKRGNKYLRKLLVHGARAALPSLSASTTPLGRWLWNLLQRAHKNTVIVALANKLARIVWAVLRHGGTYDAGALTAA

SEQ ID NO: 71581 - protein, 338 aa, unidentified
MTIETLGIDIAKNVFQLHGVNRNGRVALKRRVMRDRLLAVLAQIGPCTVVIEACTGAFYWARKFEAVGHQVKIISPQYVKPFVRRQKNDGNDAEAICIAARQPHIPFVPKKTVAQQDIQALHRARQRMVNHRTAVVSQIRGLLLDRGFAIAKSITRARRAIPEILADLKNELTAMAREALSELYDLFRDLDRRIGSFDKKIERIFRQSEPCQRIAKIKGVGPKTATAVVAAIGDGSEFKNGRHFAAWVGLVPRQHSSGDRKVLMGISKRGNQHLRSLLVHGARAVVRTAPNRTDPNNLWVNQLRERRGFNRATVAIANKNARIIWAVLRTGEPYRATF

SEQ ID NO: 71582 - protein, 382 aa, unidentified
MPAYADPTPTPISADTIFLAFELSGTSWLVALHAPDTDKVERHRLPAGVAAEVLGLIARTKARVTRRLGTTPRVACCYEAGLGGFWLHRVLEAEGIASHVMDPTSLQVDRRARRAKTDRLDAQALLRALMAWSRGEREVCSMVRPPSPEHEDERRLSRERGTLLKERLRLSNRIKGLCAAQGIYDYEPLGADRRERLARLVTGDGRALPGRLAAEIGRQLDCLELVLRHLAEVEAVRDTRAAQAREEGGSKLAALLRLKGIGPELATVLELEVFHRHFANRRDVAAYAGLAPSPYASGGTSREQGISKAGNRRARKALIELAWLWLRHQPESALARWYRDRVGTATGRVKRIAIVALARKLLVAIWRYVETGLVPAEAAVRT

SEQ ID NO: 71583 - protein, 340 aa, unidentified
MTQSSTITIDLAKTVFQVAFFNKFGVLKSNEKMTEHKMLSFIVNHPEALICMEACSSAHYYGRKFEGQGHKVKLLPPHIVAKYRAGNKNDANDALAIYEALKRPNIYSVAVKSISQQDLASLLKLRKGYIKQRTQVSNRARGLGAEYGVKLPEGITSLKKRLPDILEDDGNQLTPASRFILADLLEEVHRLDSKIKHATAQLVELAKSISECELLTSLPGVQWITASALYARLGNGSEYKYGRNASASVGLVPSHSGSGGKNKLHGISKRGDKYLRSLITHGARAVVSNIRDKQDKLSCWIRALSSKHHFNKITIAVANKLVRMALAMLKSATPYRADLA

SEQ ID NO: 71584 - protein, 420 aa, unidentified
MAKLKIVYPICCGMDVHRDFLIACIASTNAQGVTDYNSKRFSTYSGGLRDLRDWLALNNCRDVCMESTGKYWFPVHNILESICHVVVSHPKFVKAIKGKKTDKKDAQWIADLFKHDLVRGSFIPPEDIRQLRDLCRYWVKLTSYTTGEKNRAQNCLTVSNFKLDSVFSNVFGKSASAIINHMLEHPGELFDVAPFVDGRCKTPISEIQAAVDGVFNPFQAEKLTIIRAHMGDLEKRKTLLETQIFALARQYAHQVELLLTLPGISDPMTAIRIIAEIGADMSVFESAKHCCSWAGLTPQNNESAGKKKTTRIGKAGQYIKPLLIQCALAASNPRSTKHLEIRTKYQQLKKRRGAKKARVAIARRLLTAIFQMLLKDEPYTPYIAPAAESIPPKRILSPEQGLALLRSQGFIVLNELPPPA

SEQ ID NO: 71585 - protein, 352 aa, unidentified
MKVVVGVDTHMESHAVVVLDSVGAVLHSISVKASPEGYALAIAAVAPYEDVAWGIEGSGSYGRGLVDALLRAGSIVYEVPGALTKRHRKNASRRGKSDAQDARAIAEAVLRDRERLPRCLEMDEQQALRLLYDRRDRLVRARTEAINRLRGAALRLDLRNLPTKLTSRTALQTVLRTSTSFRGTSYTADALVDDIEDAAADIERFGQRIAAIEKQLGPFVERIAPSLLGLRGVSSVVAAGLIGHAGLLENCRNAAAFAMRAGAAPVACSSGRNQSVRVNTGGDRQLNRCLHTIAITQVRARSHAGRVYYDRKRAEGKTHRQALRALKRQLATIVFYRLVSTLQGRPDERRAA

SEQ ID NO: 71586 - protein, 417 aa, unidentified
MDTLHFRAAGLDIHKKFVMACIRLTDPTTGQARESVKRFGTMTDDLQSLLKWLQEAGVTHVAMESTGVLWKPLWNVLDDQRLELVLANPQELRQVPGRKTDVRDCQWIAHLLSCGLITSSFVPSRAQRELRDLTRYRACLEDERVRTVNRIHKVLEDANIKLGVVATDILGKSGRDMLSALAEGETDAVRIAEFARGKLKAKIPDLRRALTGCMKDHHRFLLKHLLKDLDHTETQIAELDARVQELRRPFVDEATLERLDEIPGVNVRTIENVMAEIGCDMTQFPTAGHLSSWAGICPGNESSAGHVKRRAVTRGNRWLRRALVEAARAAARKKGSYFNAQYHRIAARRGANRAAMAVAHSLIVVIYHLLKNPDQPYQDLGTAWFDTLDPQRLTRHLVKRLEQLGFQVQLTPKDTAA

SEQ ID NO: 71587 - protein, 460 aa, unidentified
MTLLEKLGAELPTRYYLGVDVGYREHVAVAVSLQTFVRGDDRWKRARCVHFPSTQAGLHKLQRYLERCSTNPSQFLGLCEPTGGHYGATVFQSLLDQGYDMHLIENTTVSRVRKQLFPGLPKTDEMDGRVMARIGYLHEAVGEEFTLRPLELSNPDDTHLLALCRDSWKISTIITRARNQFTQLMAVTFPELKTFFTGSVSSLAPVSLIAEYPTPALLAAAPEEEVREILWKTGAYHHAKRASELCVLAGDSSGLLPDPGRAWRQEWLTHFLLTNFEYQAALDRRIKQLLEQRDDYRLIANIPYSGPNTLGIILAVTRDVANYSNYRKYVAYTGYFAGLLKSQNIDRTRMSRRGNRSLKRAYFQIAAPLVWFDKGENPYKELYQRKMAEGKEWYKAMPFVCAALSRHIYHCLKFNDPYDVEKTFRGTALQPASEEEWLDLGTCLDERFEEMEAHLCQIEG

SEQ ID NO: 71588 - protein, 350 aa, unidentified
MKRPKDKVIAGLDLHSNNIVIGIINQDGKRIAHRKVDCDLKQVMEFLKPFKAQLQSLAVESTFNWYWLVDGLRAEGYPIDLANPAKIQQYSGLKHGDDQGDAFHLAELQRLHILPKAHVYDPQLRPVRDLLRRRTLLVHQRTALLLSFKSLHARTTGQALTLNETKQLGPKEASKLYAHPANQLVAEVEAEHIQALGKSVQRIEQVVQACAREIPLYEKLLTIPGIGRILAMTITLEVGDIGRFKTDGEFASYCRLVDARRLSNGKCKGDNNQKCGNKYLSWAFVEAANFSRRYDEQCRRWYDRKAAKTLKVVATKALACKLAKAAWHVMAQQCSYEAKHMFPEQAMKTE

SEQ ID NO: 71589 - protein, 339 aa, unidentified
MQISTLGIDLAKNIFVLHSVDHSGKTVLRKKLNRSQFVPFVIQLPPCLIGMEACSSSHHFARIFIREGHEVRMMPPQYVKPYVKTNKTDAADAEAICEAVTRPNMRFVHVKTIDQQAVIALHTERDLYMRQRTATSNCRRAMLSELGFCIPTGMSALYKSVPAILEDAENELPSFVRRSISRRLEELQAKEEQIAQAEQDLQSWFQTQPDCQRVAKVPGIGLLTATYLIASVGNCKQFNSAKQFAAWLGLTPREHSSGGKQRFGGISKRGDGYFRYLLVHGARSVLKLIERYKESMPWLYALSQRKHHNVAAVAQATKTARVLWAMLTKGSEYKISLAT

SEQ ID NO: 71590 - protein, 351 aa, unidentified
MKIVPVFYIYAFLLTFCCLFSISIKVKQTNMETVEFVQVVSRGCGLDVHKKTVVATIDGEGLKRETREFGTFTNSLTELKDWLLENGITHVAMESTGVYWKPVYNVLEPSGIMVWIVNARHVKNVPGHKTDKKDSAWICKLLLAGLLKPSYIPPKEQRELRDLTRYRRQLIQDIASNKNRIIRILEDCNVKISSVLSNTSGVTATKLIEKICDGKSITMEDIDAVYHKKIEATKEELWEACNGIISDHHIYMLQTIRENNRHIERLINELNQQIKKVLSPYDNALERLREIPGLSRKTVEDLIAEIGLDMNVFPTEHHLASWVGVSPGNNESAGKKKVDELRMETSKPNLH

SEQ ID NO: 71591 - protein, 416 aa, unidentified
MKLFIGLDVSSQKLDTCFLTDSKEILFEDSLSNDLIGASEIKQRILKYQETCGFSRIVIGMESTSVYSFHPSMFFYLDEDLKQLPVEVTVENPYRIKQYSRMFDQDKTDKIDARIIADYLRVDLHTLSPIKEEIYVGLQRLTRSRYQLVTQMVEAKQHFLENLTYKCNTLSKELANEDNKTSVFGTTIMNLLTEDITLDEFSEMPLEEAAELLQKLGKGRFKNPEQLVKSIKKAVRSSYRLGKVTKNSIDLVLGIIANEIKFLKKQIKEIEKAITALLETIPEAQCLLSVPGLGPVYTAGLIAEIGQIERFDDQSKLAKYAGLTWTKNQSGNSQSENTPLNRSGNRYFRYYLIEATNRVRITLPEFKEYYQKKKNEVPKHKHKRALVLTGRKFVRLIDVLLRNGQLYQPTKVVIEK

SEQ ID NO: 71592 - protein, 407 aa, unidentified
MTVFVGDDWAEAHHDVHLMNDAGERLAAKRLPEGLAGITAFHELVAALVDDPAEVMVGIETERGMWVQALVATGYRVYAINPLSVSRYRDRHNVAGAKSDPGDAKVLADLVRTDRHNHRPIAGDSDQAAAIKVLARAHQNLIWDRTRHTNRLRNDLREFFPAALGAFDDLAHPDALAVLAKTPNPADAARLSIPQIRAALKRGGRQRNLDRRATEIQTALRAPQLTAPPAVTAAFATTSRSLVEIISGLNTQISVLQRQLADHFDSHPDAGIYHSLPGLGDVLGARVLAEFGDDPERYNDAKSRRNYAGTSPITIASGRKHAVLARHVRNRRLYDAIDQWAFCALQTSPGCRAFYDARRTAGDLHHQALRALGNRLVGYLHGCLRTRTTYNEHTAWAHRNQQNPIAA

SEQ ID NO: 71593 - protein, 347 aa, unidentified
MSISMIGLDTAKTVFQIHGVDEAGKAAIRRKLRRNDLIAFFEKQAACTVIMEACGAAHHWARMLTGLGHSVKLIAPEVVKPFVKKGKKNDAADAAAICEAASRPDVKFVPAKSVEQQGILALHAARSLLVKQQTMLANAMRGLATEFGITVPKGIHKLDELMAAVDADEIIPRQAKQAITGLHDYCNDLSEGIETLEAEIVAHARHDETARRLATIPGIGPITASLIAATVGDISLFKTARQFAAWLGLVPRQSSTGGKTRLGRITKTGNREIRKLLVLGATSMVYRADGWNSAVGAWLRSVLERRPVRLVTVALANKMARIAWAVMTRKEVYRPKGGVAAVAQATA

SEQ ID NO: 71594 - protein, 337 aa, unidentified
MTIKVLGIDLGKRYFHVHAVDKNDVLITRKKLKRKELLLFLSNLEPCLIGMEACGGAHYLARKCQEFGHEPKLMAAKFVKPYVKSNKNDFLDAEAICEAVQRPNMRFITPRSMDQQALGALVKVREATVRRRNAVSNQVHGFMLEFGIEYPKGRKTVLRLREIVSLHEGELPASMIVLLYRLEEEFRGLLEQIADIEDDMQSIVLADDRGSRLMDMPGVGLITTACLLSWVGDAKHFRSGRDLAAWIGLVPKQSSTGGKTTLLGIGKRGNTRLRCNLIHGARSALQWQIDKPSRWSSWAQEIKATKKPNVAAVAMANKMARMIWVILARNENYKAFA

SEQ ID NO: 71595 - protein, 404 aa, unidentified
MKGPIVSIDVSKGKSDYQAFKNLNVKYTGSRSIKHTKEGFDEIVNLVREMEKKLETEVCVVYEATGVYHRVLKKVLEDNNIKQFIINPLLSAKTRKNDSLRCPKTDKLDPKSIAKTYYSHSLHNSHKQETIYHELRELSRYYEDILVHIRKDKVAFRAQLDIVFPGYDALYDDLYGPVALAVIEKYPHPEMLQKKKINTVSKVIQSKTCHRQAVSDTMADKAIEYSKTIYSGCDKDDIEVLILQRFIKKLKEDMAEAERTIGEMIKLAQELPDFSIIKSIPGIGDNLAARIIAELGDMTRFKKKNELVAFAGLDPRISESGKNDGDHMHITKKGNKRLRCLLYLAVTCSIRLKRDDNSIKDFYIKKKQQSNPMCSKAAKTACASKLVRIIYSMCKTGELYQYNK

SEQ ID NO: 71596 - protein, 411 aa, unidentified
MDIVHERSVGMDISKRDAKVCIRVPGKRQGQFTSTVTTWGSTTNQILELRRFLEEQNVTVVVMEATSDYWKPFYYLLEESLPVMLVNARHARNLPGRKTDVSDAAWLAQLGAHGLLRASFVPPGPVRELRDLTRARAVTVQDRTRELQRLEKFLESTGIKLSGIVSELTGVSSRAMLEALIRGERDPQVLAQFAQASMRSKIPALTEALTGMFGEHHAFMVRLHLDRIDQLARTVTVLTEQIDTAMEPFRAAREALSTIPGVSTLVADVIIAETGGDMSVFPTAAHLASWAGVCPGSNESAGRVKSARIMPGNKYLKGALGIAAMAASRGKNTYVSVKYKRIALRRGRVKAIVAIEHVILTATWHMLANGEVYKDPGADFYLKREPEQTKARAIRQLKTLGYDVNLTLAVA

SEQ ID NO: 71597 - protein, 397 aa, unidentified
MSRQQAALAAKLPALMKNKQIEIRRENGSDQARVEQDGKRVLKLGLDLHYRQVTVALQEDGGQIKVAGKMSHEVFAGWIGKKLSQGWSISSCYEAGASGYWLHRELAALGIDNLVVAPQPMGRGAKKQKTDKRDSVQLVDCLDRYLRGQKKALSPVTVPSLEGEQQRALIRYHRQIMADRGRYQARGKSLLCAQGIQVSGKWWQVRGWITLNSDGRCQDWMREQLKAWREKILSTEAQQQGLRQQVQALAPTTSRPKGMGSYSAAVLEYEMKGWHRFHNRRQVSSYTGLCPGVHLSDGRGKEGAINRCGNRMVRWTLVEMIWRLAKWQPDYQPVRLLAQGLIKSSRAKKRLAVKAARCFAIDLWRLQTGQTTAQKLGLVLQQDLENKTPPAAPAASV

SEQ ID NO: 71598 - protein, 379 aa, unidentified
MQYIGLDLHKASFSLCVLSDDGEMLLQQTRTTSGEVLIRLVSAFAGAKTVAVEESTLADWAFRLLSPHATVIVADPRHNRWIAGDEKINDEAAARKLAELLRAGLLKPVHHSQSLERQEFKELVQTYHDLSKQITRHKNKLKAKFRRRGIPCTGSAVYGEQGREAWLTKLPSAGARLQVQLLWDTLDHLLSQQGDLRRKLARLAKQFVQVDRFQALPGVGLIRAATFFAFVDTPHRFATKSKLWTYCCLGIAKAKSGQTSGPEHLTYFGNRVLKDALKGAALSAVHASDNPFAEKYRRQVVDKKAPELALLDTARSIASTLWAMWRRDEEYQPNRPSPQQWRRVATGSAHNTATTTATASSSETAKTTATTGAAMHTNA

SEQ ID NO: 71599 - protein, 334 aa, unidentified
MNKPLFYVGLDVHQNMTAYAVRNNAGEIVNSGECATRFEDIHKALEPQLFSVRIGLESCTSYYHVYQSFKKQGYDIQVANTLRMRQLVAKSDRLDAERLSDMLRLGSFPTSYVPDEKIMKLRTMINLRHSFVEESTRFKNQIQSALMKYGFKISERTSFSKRWCEQLRKLMALHPELIELRYAFEHYGIIDYKLEALSEEIIAYCNVHWKKQMELLDSIPGIASTLAAYFIAEIHPITRFASKKKLRRYAGVIPCSRESGGRVYGSSLPKTSSRTKLRWALVQASWASVRGKNRLAAYFNKKRKTRKKNRAIVAVASSLCDIVYNVLMTQKSYS

SEQ ID NO: 71600 - protein, 400 aa, unidentified
MNERKTQVWAGVDAGKGHHWTAVVDETGATLWSKKVDNDESAILTALGEILDLADEVHWAVDISGTSSALLLALLAAHGQQAVYVPGRTVNRMSGAYRGEAKTDARDAYVIAETARHRNDFTAIDVPAQLAVDLALMTAHRTDLVADRVRMINRLRDVLTGVFPALERAFDYSAHKGALVLLTGYQTPVAIRRRGRARLTAWLANRGVRGADAVAETALAAAQAQQTALPGEDVAAQIVAELAGQLLALDDRMKRIDKQIRETFRSHPQAEIIESLPGMGPILGAEFVVAAGDLSAYADAGHLASAAGLVPVPRDSGRRTGNLHRPKRYSRRLRRVFYMSAQTSMTREGPNRDFYLKKRGEGCKHIQAVIALARRRASVLWALLRDNRVFTPAPPVTQAA

SEQ ID NO: 71601 - protein, 351 aa, unidentified
MTHHTAAEPIATIGIDLGKNTFHLIGMDARGSIVLRRKIARGQLLSCLANLPVCLIGLEACAGAHHVGRQLAALGHDVRLLPAQYVKPFLKGHKNDYRDAEAIAEAVQRPTMRPVPLKTAEQLDLQALHRVRQRLIGQRTAVINQIRGFLLECGVPVRQGPAGLREALPVILTQRTDVLSLRLIHLIEDLADDWRRLDARIDTLTWDITALARQDASCRRLMGIPGVGVITASAMVAAIGTGAAFAKGRDFAAWLGLVPKQISTGDRTILGGLSKRGNRHLRTLFVGGAQALLQRPHHWKGHRFGRWLLAAAPRLHRNVLAAALANKLARMAWSVLYRERGYEAEFATRMP

SEQ ID NO: 71602 - protein, 338 aa, unidentified
MDHFVGIDLHSSNSYTAIIDNDNRRVFKKKVKNDLQNVLQVLEPHRKQIKGIVVESTYNWYWLVDGLMDNGYKVHLANPSAIKQYEGLKHSDDVTDAFHLANLLRLGILPEGYIYPKEERPVRDLLRKRLQLVQQRTAQILSFETLITRNLGKKMNVNEINKLSEDDVEHIFRQEHLVLSSKASIATVIFLRARIKEIEKAVHKVAKLRGEYKKLMTVPGIHKILALTIMYETGPIERFAGVGNYASYCRCIGSERFSNGKRKGKGNSKNGNKYLSWVYVEAANHALWNYEYVKRYHQRKMAKTNNVVAIKAIAHKLSRACYYIMRDQKEFDPGRVFV

SEQ ID NO: 71603 - protein, 401 aa, unidentified
MQEFNAATDRIETASALAAVRAVGEAKEHAAYIGLDVHKETIAIAVAEPGRDEPIYRGEIANTPKKVEKLIAKLSEAYDGGLLLFCYEAGPCGYGLHRRLIASGHDCEVVAPSKIPKAPGERIKTDRRDALKLARLLRSGDLTSVWVPDREQERMRDLSRARDDLKSQERKARQQLNAFLLRHGHHWPKGKSRWTPAHENWLAALKMDDPWEQIVLQTYIDAERAAGERVAQLTDQLMRALPEWSLAPVVDSLVALRGIDTLAAIVLLAELGDISRFDSPKQLMAFLGLVPSEHSSGGRRRQGAITLTGNSHARRMLIESAWSYRFPARQTKHLKAKAANASAQAKGIAWKAQVRLCGRYRTMTRAGKNTKLVCVAIARELAGFLWDIARQEMPQPAQRAA

SEQ ID NO: 71604 - protein, 415 aa, unidentified
MKAWEQITYYAGFDWAKDHHDVIVLDSSGKIVADFRFEHTARGWEQFREKLTAFPEIAIAAETKHGVAIERMLDELKLSVFAVHPQSAKSYRQRKVPSGNKTDRIDAWALADALRLDGNNWKPLTAQDPLIKELRLLCRDEIALIRDRSALITQLQQALSEYYPAALAAFDDWTKPAAWAFVVAFPTPEALIKAAKRKWEKFLHLHKLARPETYQRRLEIFACATSFAGSTPAVNAKSRLAMARARQLQLIEKQLEEYRHEIQRLFSSHSDAALFGSLPGAGDKIAPRLLAEIGDDRALFPDAQALQCLAGTAPVSFQSGQVHRVRVRHQCNKLLRHTVHLWANLSRDRCPWAAAYYDALKKKGKTHAGALRALGQRWLKILWKMWQSRTHYDPELHMRNQVKHGSWVLSLPPVK

SEQ ID NO: 71605 - protein, 408 aa, unidentified
MAKELLNVFVGVDTHADTHHVAIISEYGKPLADQEFLAVGSGYRKILDFIAGHGTVAAVGVEGTGSYGAGLSKVLRSEGLTVLEVNRPNRAQRRLKGKSDPLDAYQAAQSVLAQRGLSSPKAKDGPVECLRILRTARSSAMKARTAAINQIKGLLVSAPDALRAKYRGMATPTMITALQRSRPSGHVADPEYMTLLTLKTLATRYQALAEEITAADAALQEILDSYAPLLCDLSGVGPDVASQLLITVGDNRGRIGNEAQFAALVGVAPIPASSGKTTRHRLSRGGDRNANRALHQVVLTRMSSCPRTKNYVSKRTTEGKNKREIMRCLKRYVSREIYRQIFNPVPAPDITDLRQKRKSLGLTVNAVAGELSQWPSIISRLERGILRNDDLAASYRKWLEEQATQKPN

SEQ ID NO: 71606 - protein, 344 aa, unidentified
MKDVRILGVDLGKNSCSIVGLDGEGRVLLRRRTRREGVIALAAKLPGCVVAMEACCGAHHLGRLLVEQGHEVRLMSPEYVRPYVKAQKNDDRDAEAIAEAATRPTMRFVALKSEAQLDVQVLHRVRDRLVGQRTSLTNQIRSILLERGIVVPQGRRSLLEALAVLSSEPDGRRVGTRVQRLLDDMLDQWRALDARIKALDDEFAEMARNDPAARRLATIPGIGVLNATALVAAIGDGRTFSRGRDLSAWLGLVPHQATTGGRPKLLGITKRGSRYLRKLVIQGARAALPSLARTATPLGGWLRGLLARAHGNTVVVALASKLIRIAWALLRNETRFVAGGAAVA

SEQ ID NO: 71607 - protein, 342 aa, unidentified
MEAAVTIGLDLGKSVFQVHGVDVGGAVVVQRRLTRSRLLAFFAKQPACLVGMEACAAAHHWGRELQKLGHRVRLMPPRYVKPYVKRQKNDAADAEAICEAVTRPNMCFVEIKTCEQQGTLVLHRVRLMLTRQRVQLSNAIRGHMAEYGLVAPVGRNGLQRLIAIINDPDDVRVPAVARASLAPLVRQLGLVNDQVLENDRLVRASARSTELGHRLMEVPGVGPVLASAMVATVPDPTAFKSGRDLAAWIGLVPRQNSSGGREKLGGITKQGDRYLRQLLVAGALAVIRYAQRHGTRRPWLIHLLARRTPKIAAVALANKMARMIWAMMVTGERYREPRVAAA

SEQ ID NO: 71608 - protein, 400 aa, unidentified
MHLTANISIPQKNFIAIDLHSDNAVICVRRNALNKAGELVGKNIWCGRVSIRDGLDNFIKVLVPHCQDFDHVAVVESTYNWYCLADAFEERGWLLRVADPSTVSQANLKSSDDRTDAQYLAERLRVGSLKHYLPLNYSSRALRDLCRYRMAMVQDCASLKIKLINLYRNQLSKNVRVADLLERCQPHMQPNYRFNSDILEEFKDPNIRLRVAFEISRIAMLEEMIEECNAEIQKQCKDQELVKLCKTIPGCGPVLSAVICTEIGTMQRFKSAGDFVSYCRLCSTSKLSNGKSKGLGNAKNGNAYLSWAFTEVAQYASRNPVIREILQRLLRKYGGLRVKAIRTLAAKIARVTFYVLKNKQPFNAAKCFGMELTKNIVKKLPHKPLREDAAVVLPAVAGQA

SEQ ID NO: 71609 - protein, 477 aa, unidentified
MTPIILLATPSVLCLGTRTAPTLCCERLERIVPQADQTALSKTYCAKSAITGAQALVTDGGLRSKPKRRFHVTVYIGIDWSEKKHDLCFLNQVGEVLQTLTIARTPAGFLELEQARRRLGVPVEECVVGIETHHNPLIDFLMERGYTCLYVLPPNAVKSARGRYWQSGSKSDLQDAHLIADMLRTDQAKYHAWVPDRPLTRQIRARISLIGYLNKEIWQVGNRLRAALVRYYPTALEIFSTLDSPITLAWIQEYPTPAAGQALNYAEFQDFLRRHRHTQPRKWAACYARLQEAQVCASDEIVQVYAQEARLLAQLMIQLVQARLHLLKEVDRLYQKHPEAYIYQSLPGTGRYLEPALLAMLGEDRERFPTSAILQSLAGTCPVTKQSGKTRYVVFRYSCNHEFRQIVQQWAKLSIDRSPWAAAYYQKTRPHCHSENEAYRKLANRWLEILWRLWQDHQPYNEQKHLSAHARRSLPKP

SEQ ID NO: 71610 - protein, 415 aa, unidentified
MTSSPLIAGVDVHRKTNTYCLMTQDGREVVPHFTLGNNRPGAQALIEKVRQVMEADDFTELRLAAEATGWYWFHLFETLQNDPGLRAWPHELFLINPRLTANFKKSYVDLDKSDPIDAYVIADRLRWGRDIQTPYRYDEKLLALRFLTRYRYHVVHQLASEKAYCTAILYLKASEYSNDDKQAFSNLFGAASRAVLQEFASMEEVAAMPFDELVEWLDVHGKRHFSDPAENAKRLQRIARDSYPLPEPLQPAVNLVLSLSLKNISNLEALSKRLETAIAEQMEDIPNTLTTIPGFGLVLAAGIMAEIGGVERFDCNEAKVAKFAGLKWRKSGSAEFQSEETRLTRTGNSYLRYYFCEAAFSVQRCDSEYGAYFQRKFKEVRKHQHKRATVLTARKLVRLVVRLLATNQPYQPRRP

SEQ ID NO: 71611 - protein, 353 aa, unidentified
MRRPTDKLIAGIDLHSNNLMIAVINQDGKRVAHRKLDCDFGAVLRFLDPLKPQLQSMAVESTFNWYWLVDGLRAQKYPIDLANPAKIEQYKGMKHVDDMDDAFHLAELQRLKILPKAHVYDPQLRPVRDLLRRRTSLVHQRTALLLSFKSLYARTTGQPLDLSDAKKMEPKEAPKLYKHPANQLIAQVQTEHIQALDKSIGRIETAVLACAREIPLYERLLSLPGVGRILGMTITMEVGEVSRFKSDGNFASYCRLVDAKHLSNGRQKAENNQKCGNKYLAWAFVEAANFARRYDEHCRRWYDRKAAKTSKVIATKALACKLAKAAWHIMARQCNYEEKRMFGELVTKTMNAS

SEQ ID NO: 71612 - protein, 413 aa, unidentified
MEVLYPRCAGLDVHKATVVAAVRLVAGGKVAREVRTFATTTAGLLALAAWLGENGCTHVAMEATGVYWKPVWHVLAEGGFDLVLANAAQVKNVPGRKTDVNDATWLAELLAHGLVRASFVPDAPTQELRSLLRTRKQLVRERASHVLRLQKTLEDANVKLDAVLSDLLGRSGRAMLEALVAGETDPEKLAAFAHPRLAATPERLQEALRGRVTAHRRFLLRLHLDQVDALEAAIGRIDREVEERLAPFSTAVDLLASIPGVGALAARVIVAEIGLDMGRFPTAGHLVSWAGLCPRNDESAGKRLSARLRKGAPWLKTILVQCAWAASRKKASYLQAQYHRLRARRGARKAVCAVAASILTAAYHMLKDGTVYRDLGPGHLDRRSRETQARRLVRRLANLGYAVELAPLEPAPA

SEQ ID NO: 71613 - protein, 362 aa, unidentified
MDYRIGCDAHKHYSQFAVLDQEGGLIAQQRVDHQPGAIRTFLASLPEGTPVALESVGNWYWIADEIEAAGCLPLLTHAAKAKVMMGNVNKTDKLDAKGLAKLLHLDSLPTVWLPPGEIRDERELHRTRMALSKLRTALKNRIHATLAKYGITSTEHSDIFTGKGRVWLHATLCRLPPETGRCVAQEIEALDGLQLQIAQLEERIRERIALTPSIQLLKTLPGVGNILAIVVDREIGSIDRFCTSGQFTSYAGLVPTVHASGGKTRFGHMRKPSNQYLKWAFLEAANVVVRHRRHPAWKVTYVCQIYDQVSQRKGHAVAVGAVARHLAESAFWILKRQEPYRPPALRQASPKQVRGRAQLVST

SEQ ID NO: 71614 - protein, 325 aa, unidentified
MTDRVVGIDVAKGSFDIAVELDPKGKYRTKAKLPNTPAGFAQLADWMAKHAPGAAVCMEATGVYHEDLATFLIKQGVTVYVVNPAQVTAYGKSELSRTKTDRTDAKLITRFALAQLRGKGLRPWVPLTPAQRKLRALVRRLDDLEGMCQMEHNRRDVADDTVRSSIDDVIGTLETQIDAVKKEISDHIDSDPDLKRDNILLTSIPGIGELTSAFLLGCAGDLRRFDNPGKLDAFVGLNPAIRQSGQWAGQSRLSKLGHALLRAKLYMPALTAARYNVAVRALVDRLAARGKTGKLAIGAAMRKLLHIAWGVIHSGQKFSAETALA

SEQ ID NO: 71615 - protein, 315 aa, unidentified
MSAPLLFVGIDVAKAEVVVAVRPTGTTWTVPQTEAGWAALATRLQALAPTLVLCEATGGLELPLASVLAAAGLPLAVVNPRQVRDFAKARGLLAKTDALDAAVLAHFADALRPVPRPVPDAITQTLAALVTRRRQLVEMCTAEENRLGSAPPPLRASLRAHIRWLQRQLASLDTDLDQAIRTHPGWRVQDDLLRSAPGVGPILSATLLGGLPELGTLSRGAIAALVGVAPWARDSGRHRGARRCWGGRADVRAVLYMATLAAVRCNPVLRAFYQRLLAAGKLKKVALVACMRKLLTILNAMVKTQTPWTPRLAGA

SEQ ID NO: 71616 - protein, 394 aa, unidentified
MTAAYTGKVSTPGGVLHLAFELGWTHWKLAFTIGYGQKPRQRTIGARDLSALEQEIAKAKKRFKLGDTAPVVSCYEAGRDGFWLHRYLTARGIANVIVDSASIEVNRRKRRVKSDKLDANKLVNMLIRYHAGESKVWSVVWVPSVVDEDQRQLHREMQELKDDQTRHSNRIKGLLASQGLALEVVDELLPNWLGAARLWDGTALGSDLQRRLVREYERWQFVHRQVLDLSRERRRRMLCDETAHVGMVRRLLGLAGIGVNGAWLLVYEFFAWRKLQNRKQAGALVGLTGTPYHSGGSEREQGISKAGSKRMRKMLVELAWCWLRWQPESALSYWYARRFGTGKGPARKIGIVAVARKLFIALWKYLERGEIPAGAKLVDWRSKLIRCKVKKPAA

SEQ ID NO: 71617 - protein, 366 aa, unidentified
MKIMVGIDLHSNNALCGLMDENGRRLVHQKLPCDLAVILKLLEPYKDRIATIAVESTFNWYWLVDGLQDHGYHVVLANPARMQPYSGMKYTDDVSDAYFLAELLRLNLLPTGHLYDRKTRPVRDLLRRRLLLVRQRTTLILSFKSLNERTLGQRVPLARVKVMQAEEAQARFTDPADQLLSGQQIILMGHLTDSIMKLEQHILGVVGKWSTYQRLQELPGIGKILGLTIALETGDAQRFADAGNFASYSRCVKSLRTSNGKKKGENNRKCGNKYLAWVPPCGMEAAHFACRYDDQCRRFYDRKKQQTNPVIATKSLACKLAKAAWHVMKDDVPFDAARVFGPARKSDFGETGREPAKGSGHPSQQD

SEQ ID NO: 71618 - protein, 421 aa, unidentified
MKKAGTGKIGRVKEDTLIVTIDIGLEMNRGYCTTPDGRDIKPFRFDNTRAGLDRLWSMIVVNKNRFGCNEVIVGYESTGPYGEPLSHYLAKKPVMVVQVNPMHTKRIKEINDNSPLKTDDKDPRVLADIILLGHSLSVVIPEGDAAYLRRLNNSRERHVGERTALLNQLQQLVFLLFPEFRTVIKDIQVKTALYILNKYLTPEIIGGLKKEALGEEMRKRSRGKFRESHAEMLIKLAKDTIGIREGAAGLSMDIRHILIQLELVNRLIAEIENEMEIALGRIPYSSKLLSIKGLGTVTVAGLIGEVGDFKKFRTQSEIMKLAGLDLYEVSSGKWKGRRRISKRGRSLLRKILYYAAMQAIRKNGILHEYYTRLTGRGMKSMMALVAVSRKLLRIIHAILRDEGEYIIDYESVKGQVIKKAA

SEQ ID NO: 71619 - protein, 411 aa, unidentified
MEVLHPRCSGLDVHKDTVVAAVRCVSPPVHHEVQSFPTTTRGLFALADWLGSHGCTHVAMEATGVYWKPVWHVLEERFELVLANAQHIRNVPGRKTDVADAVWIADLLAHGLIRSSFVPPAPIQELRDLTRTRKQLVREIAQHSLRIQKVLEDANLKLGSVLSDVLGHSGRAMLQAIIAGEDDPVRLAELAQGTARKKTAALVEALHGRVTPHHRALLKLHLGLVEAVESALEEVDRHVGKALEPIRDLARLLTTMPGVGDLVAQVILAEIGFDMSRFPTSGHLISWAGLCPRNDESAGKRRSTRLRKGGTWLKTTLVTAAWAGVRVKDSYLHALFLRIKSRRGAKKAVLAVAASMLTATYFMLRDGVEYQDLGPDHFDRRDRSKVIHRLVRRLQDLGCAVQITHEAACPV

SEQ ID NO: 71620 - protein, 392 aa, unidentified
MACVIVPGPKGKPQKTIQAFGTMTDDIVALGDWLAARQVTHVAMESTGVYWQPLWNLLEERFTLLLVNAHHIKQVPGRKTDVGDSEWIADLLRHGLLRASFVPDRAQRELRELTRYRTALLQERAAEVNRLQKTLEGANIKLAAVASDVLGKSGRQILQALVAGGSEAAELAQLAKGRMRDKIPQLERALTGSFRPHQQFLVARHLALIDAIDETVAQVSAEIEERLRPVEADVELLDAITGIGRRTAEVWLAEVGTDLERFPTHSHLASWAGMCPGNNESAGKRKSGKTRKGNPNLRTALVEAAQAAARKRDSYLSAQYRRLAARRGKKKAIVALGHSLLIIAYHVLKRRVDFQDLGPTYFDERDRTNVERRLVRRLERLGYKVALEPAAA

SEQ ID NO: 71621 - protein, 439 aa, unidentified
MFSRSEERSLNKKGKQTPMKAAQTILHVGLDVHKDSIAVALAAQDGSLRRYGEIPGHIEAVDKLLKRLDRADQQIRLCYEAGPFGFVLCRHLRRKGYVCEVVAPSLIPKRAGDRVKTDARDAEQLARLFRAGELTAMRVPDEADEALRDLIRGRLSAVFEQHRARHRLKGFLLRLGLRYPGKTSWTPAHMNYLSKLKMSHPAQQIVLEEYIQAVQSATERLDRLTTQVHAQLPGWKWEPVVRALMCLRGVSVINGMTLVAEIGDIDRFESPRQLMSFLGLTPSEHTSGDKRHQGAITKAGNGACRRALVEAAHHYRIPPRISPTLRQRQHGQPEQVRQIAWKAQQRLYSRQRTLSLRRKKSVVVVTAVARELCGFVWAICRALKHPHPKAPTRTSEGSARVYVLKPDLKFKSGAGRSRLASSAAAPPARARKGPTSLAS

SEQ ID NO: 71622 - protein, 345 aa, unidentified
MRSMYYIGLDVHKKTISYCVKDGSGQIHSQGAIPATRLDLDRWMKTLPQPWTAAMEATIFTAWIYDHLLPHAAALKVAYPLMLRAIAAAKKKNDRIDAHKIADCLRCDFLPECYMASTEIRKRRRTLRYRNLLVRQAVQMKNKIAVLLMEAGVSYNKQKLHKVGYFRELLATNKDIDDGLRPLLRLCRETLVRLGKTESALVRSLGRDPLLVERVERLMTIPAVGPITALTWVLGVGDVRRFSSIKKAISYCGLCGAEKSSAEAIKRTPLSKQRNKHLQSVLIEAAKLAPRRSPDLALVYDQEKQKGNANRATLAVARKLVAYLVALDRRQKEFLPVERENRTAA

SEQ ID NO: 71623 - protein, 344 aa, unidentified
MPTIDYIGFDIHKKTISFCVKAQDGTILEEGTIPALRKNLLAWAKARPRPWIGAMEATLFTGWVYDLLKPLAQALQVAHPPMVEAIAAAKKKNDKVDARMIADLLRCNLLPECYMAPVAIRDLRRVLRYRNLVVRQATRMKNRIAGLLMETGTAYNKERLHGKAYFSELLGSLQEVPHSVVELLQLSRGQVEFFATIQRRLLQGLREHPELSQRVMRLESIPSVGEILALSWALEVGEVGRLPSIGQALSYCGLTSAQHNSAGKEQRGPISKQRNRHLQTILIEAAKLAPRYNPQLAAVHQRELQRGNRNRATLAVARKLVAYLMAVDKSGQPFQMRASGKEAA

SEQ ID NO: 71624 - protein, 411 aa, unidentified
MEVLYERCAGLDVHKESVYICVLLGQGRDLRKLKRKFGTFPHQLLELSKWLVELGVTHVLMESTGVYWMPIYDVLEGHMEIVVGNAQHIMHVPGRKTDESDAEWLAKLLRCGLIKPSFVPPREFRDLRQLTRYRRSQIQARSSEQNRVEKNLQIAGVKLSSVASDIFGVSGTLMLKQIATGQTDPSKLASLARGTLRKKMPALEQAFSGTIREHTQKLIEIQMEQLNRIECTIAEVELKLAERAKPLEDAISRLDQIPGVDRTVALDILAESGTDMSPWETHRQFAAMSGLAPANYISAGKRLKNRSRRGNPYLKSILVQAASAAIRKNGSYYQAKFAKLKQRRGHKRALLAIAHAMLVAIYHMLKRGTDYEELSANHVANHETVRQKASLVRQLEQLGYSVSLSPTQLPT

SEQ ID NO: 71625 - protein, 352 aa, unidentified
MASVMIGIDPHKASHTAVAISGSEEALGELRVRASGAQAERLLAWAAAWPQRAWAVEGAGGLGHLLAQQLLSAGERVLDVQPKLGARVRLLASGNVNKNDPNDARSVAVAALRSPAVREARPDDHAAVLKVWSKRRRDLASARTQVVCRLHAVLCELIPGGVAKKIIAAHAARLLESIAPPDAVAAARCELAAALIEDLRRIDAQLRETRGKLDTAVRASGTSLTSLFGVGPVVAATIIGEVRDVTRFKNRDRFAAYNGTAPIEVSSGGRKVHRLSRRGNRRINHAIHMAAITQIRQPHSEGRAYYDKKLAEGKTHREALRALKRQISDAVFARLRADARRGADQSRDPGGQ

SEQ ID NO: 71626 - protein, 418 aa, unidentified
MSEPDNIPREPFAVFCGLDVGKSEHHACALDVAGRRVHDKALPNDEPALRGVFTALAEHGRVLVVVDQPASIGALAVAVARTMGVEVAYLPGLAMRRIADLHPGQGKTDARDAHIIADAARTMPHTLRRVGSDDETLAELTVLAGYDDDLAGQSTRLTNRLRDALLHVHPALERLLGPRLDRGGVLDLLIAAPTPQALAALGGDGIAEVMAPRSPRPARTLPAQILLALTAQAVVVPGTAAFARVIAGVASPLRDVRLERADLATTLEERLEAHPLGEVLTSMPGLGVRTATKILTIVGDGSAFPTAGHLAAYAGLAPVTRRSGTSIKGETRSQRGNHALKSALFLSAFASLADPVSRAYYDRKRAAGKRHNAALICLARRRTDVLFAMLRTKTNYRDPNKGPTTDTESAAAEPPRAA

SEQ ID NO: 71627 - protein, 400 aa, unidentified
MLSIGIDVSKGKSTVCGMKPGGEIVYTPFEVQHTREGMSELVSLLRSSGEEVRAVLESTGSYHCPVVAALLENGIFVSVVNSLRMKRFCSQSIRKVKTDRIDAMQIALYGLAYWQELQPTRLPEDTYRELQLLARQYYQMTSLLIKAKVDFNALCDQVLPGMQELMSDHAGRHKLSDFVLRYRHTTHILEMGETRFRKDYCKWAEKKGYRNCERMAALIFATAQNGIPVLPNAPSTQIVITEAIRVLHTVEASRDAILTQMQALAKTLPEYSLVREMPCIGDTLAPRLIAEIGDVRRFHSKRALIAYAGIDAPPYQSGKFCANNRHISKRGNRYLRKTGYEVMQSYVMHKPANDPIFTFIEKKRGEGKSGKLAMVAGLNKFLRVYYGKVTELYRSLPAIE

SEQ ID NO: 71628 - protein, 355 aa, unidentified
MNFTAIDYHKRYSFASALNEQGQRIGEARIVGNSPAGFVQFFRSLGGPSQVVLEACWNWGWLYDQLQQIEEVTEVILAHPYKTRLIAEAQVKTDKLDARALAQLLRGDLIARAHVPSAAMRQRKNVLRQRLFWVKLRTALRNRVHTLLARQRGLSVPERTDLFGKKGQQWLERVELSAPDGWLLRQDRELLAVLDAHVREIERYTEAEIADDANLQRLRSIPGIGTVLAAVIGTEIDTLDRFVRPTKFTAYAGLMPTTHASGGHCYHGPLVRGCNRWLRWALVEAAWIAVGCDAYFGALYRHHRDRGKSATIAITIVARRLAEIVWHVLHEARDYQDRNWQIKSDRSGVTLVGGS

SEQ ID NO: 71629 - protein, 356 aa, unidentified
MSSTIENTYFIGMDLHQKTSTFSVKEKEGKVIEAKTVPTTKESIAKFLVPYRGSLLTLEPVSQWYCYADFIESLGLEVKIANPNRVKAIAWARIKTDTIDAGVLADLLRVNMLPESYHAPAHVRDWKDEVRLRMSLVRLRVQVKNKIHALLWKQGIRSPYTLFTKKGLLWLDAQTLTEQKTIALATYRETLALLDRQIKEAEERMIADNKHREEVKLLVTIPGIKYLSALTIMAEIGDITRFPSAKKLMGYAGVVPSTYASGGKVRHGKIIKQGSSWLRYILVEAAHHQLHCTKRKGLADYYNGIKDRKGGKAAAIATARKLCAVIFRVLTDKQPFVSPEEWDNRRAHHFGIATQR

SEQ ID NO: 71630 - protein, 398 aa, unidentified
MLTGASLTQSRGLPSASPRGRPFRHVWEAPVFCERTSVGLDVHARSVAGAAIDGETGEVFRARLTPSHEEVIDWVRGLPGPSAAVYEAGPTGFGLYRALSGAGIRCEVAASSKLQRPGGDRVKTDARDAMHLARLVRLDEVVSVRVPTETQEAARDLVRAREASRSDLMRARHRLSKLLLRHGIVYAGGKAWTAAHDAWLLRQHFDLAGTQAAFEDAYETVALAGGRRDRLDEKITVMAADCEFTSMVHRLACLRGISTLTAFALAVEVGDWDRFTGASIGAYLGLVPSEHSSGQSRSQGAITKDRQHPRPQASGRGSLASPQALPTRGDPASTMGPGLARSAGARARWQPASAHTLDELRRTQEAASDRERRRRPRAGRLVLVLGDPGGLTPIHPTS

SEQ ID NO: 71631 - protein, 346 aa, unidentified
MEHYVGLDVSLKRTAICIVNERGKIVREGAVASNPEAIAAFVESHAPHVARIGLETGATSTWLWTELSMMGLPVICIDARHAKAALKMQINKSDRNDAVGIARIMQCGWYKEVRVKDLDSHAIKGLLVSRALLVKIKRDLENQIRGLLKNLGLIIGRAKMNVFAVRAAAFVEDRPELVAAVEPLLKTREAVERQIADLDRKAMRLARNDAQVRRFMTAPGVGAITALCFLATVDDPTRFKRSRSVGAYLGLTTRRHASGETDWTGRISKCGDKLLRSYLYEAANVLLTRVAKWSVLKAWGIRVAKRSGLRKAKVAVARKLAVILHRMWVDGTEFNWSAKEVAAQST

SEQ ID NO: 71632 - protein, 356 aa, unidentified
MSLKLNSEIVVIGIDIGKNSCHVVGQDKAGSIVLRQKWSRSQVGARLANLPPCLIGMEACVGAHHLSRSLRALGHDARLMPAKYVRPYSKGQKNDYRDAEAIAEAVQRPTMKFVATKSADQLDLQALHRVRERLVGQRTAIINQIRAFLLDRGIAVRQGLHFLRAELPSVLATRTDVLSPRMLHILEDLATDWRRLDERIEDLSGKIEGLARQDQACVRLMSVPGIGPIISSAIVAAIGTGDAFSKGRDFGAWLGLVPKQMSTGDRTILGSISKRGNRYLRALFVQAAWVVLVKLGPKQWDRYGLKSWIEAAKKRLHHNVLAIALANKLARIAWAVLHNGRAFECVRVNETASQSA

SEQ ID NO: 71633 - protein, 390 aa, unidentified
MFYLGIDIGKFHHAAALMDQRGKVIATLPSFPNTRSGFHKLLALITAHLPPAEELRIGMEATGPYWIPLAEWLKAHGWIPVILNPIKTASLRNYGVRGSKTDNIDSVLIANTLRIEEEQPQQASPKLSEELRHFTRLRADMVKDRTRIALRVTSLLDRLFPELLSSFSKTLAPSCLTLLAAAPTPARVLALGEERLTTLLRKASGGNLKATRAKEIMDKAAVSVGITTQASEEVLALLLEQINLIGSQLTTLDHRITKLYKQAGLYFTSIAGVGTLTAGTILGEFGSVTRFTQAKQMVAFAGVDPKLRASGQHQGQVHISKRGSPYLRRALYLACQGAVRNDDYFHSIYQRHRDNGKSYKEAIIAVMNRFIHVLYAIWRDNRPYYPLTSA

SEQ ID NO: 71634 - protein, 364 aa, unidentified
MSYDVKYIGMDVHKEAIVIAVLNEGGKLVMESVIETRASSILQFLHGLRGELHVTWEEGTWAAWEEGTWAAWLYDLLQPQVQHIVVCNPRRNALLKEGSKSDKVDAHKLADLLRTGMLRPVYHGENGLRTLRELGRSYQTISKDLTRVMNRLKALYRGWGIPCAGTQVYAARCREEWLSKIPQAGVRRRAELLYQQLDGLQILRRDVRSEFLAESRKHKAAKLLRQIPCIGPIRAARLIGLMQTPHRFRSKRQLWTYSGLGVETHDSAQYRFVSGHVQRSKKPQQVRGLNQNHNHEMKEIFKSAATRASCGRGPFYDFYAGLLAKGMKPEMARLTLARKIAAIALTLWKKEERFDAEQLKTQAA

SEQ ID NO: 71635 - protein, 461 aa, unidentified
MRETLGTGEPEYAAYVALDWADREHAWVLEEAGGGKRESGKLKQTPESIEAWAAGLATRFGGRPIAVGLEQSRGALIYALQAYGHLELYPIHPSTSANYRKAIFPGGRKNDPVDADLLLDLLTRHRDRLRRMRPDQEETRKLQLLTEKRRQLVDEQTSETNRVTDLLKSYFPQALRWLDDLSSPLAVAFLQRWPTLQQVQAEEADCVRKFFYEHGSRSKERIELRLKEIQEARPLIEDRAIIEPAVLMVRALLEVIAALRRGIKTLQDACAAVFASHPDAEIFASFPGAGPVLAPRLLAAFGSQRDRWENVDDFQSYTGIPPITEGSGKSLDIHFRWRCAKFLRQSFHEFAEQSIQQSEWAGAFFHHQRHVNHLDHQAAVRSLAYKWIRIMYCCWKKRTPYQESFHQERLLTRPRSSENPTTVAAVQKKSGAPTNGRPGSNRVHFQFKKVAGFCKLSAATS

SEQ ID NO: 71636 - protein, 342 aa, unidentified
MTIVTVGIDLAKNVFAVHGVDAAGKPALVRPSVARSNLLELIATLPPCLIGMEACSGAHHWAREFEKLGHTVRLMAPKFVAPYRLSGKRGKNDAADAAAICEAVTRPQMRFVPHKSIEQQGQLMVHRTRQGFVEQRTATLNRIRGLLSELGLVLPLKAATVRREALAPPEELPGWANTVIGDLLSEVTRLDERIAEYDRHIALMARHSTQAQQLMQLGGIGQTTAMALISTVGNGHDFACGRSFSAWLGLVPGQYSSGGKQRLGRITKAGDAYLRSLLVMGARAVLAAAMNTRTPKQDPISRWARSLAERRGYWRAVVAIAAKNARMCWAVLQRGEAFKMPA

SEQ ID NO: 71637 - protein, 366 aa, unidentified
MGWMAPLRHQCAKLVFSKNHQEREPSMSEITTVGLDLAKHVFQVHGIDAEGTTVLRRRLRRNQVLAFFSRLRRCVVGMEACATAHYWARELAALGHEVRLMPAQYVKAYVKRNKNDAADAEAICEAVGRPTMRFVSVKTAEQQASQLLHRGREQLVRQRTMLVNALRAHLAEFGIVAAQGLRNVSQLIAIVRDNGNKHLPDVARQVLKVLACQIEQIEAAITALERQLLAWHKSNPVSQRLASIPGIGPIIATAIATSVADPHAFRSGREFAAWLGLVPRQNSTGGKPRLGGITKRGNRYLRRLLINGASANLLRSKATKADPWVIGLRRRRPPLVVAVALANKTARIAWAVMLRQNEYQPRAVAA

SEQ ID NO: 71638 - protein, 334 aa, unidentified
MKEKVRFLGLDVHAETIAVAVAEPDGEVRSLGTIANREESIRKLIKKLGSADQLRACYEAGPTGYVLYWQLTQLGVECVVVAPTLVPTKAGDRVKTDRRDALKLARSHRSNDLTAVWIPDGDSEALRDLVRTREAAKQDQLRARHRLSKFLLRMGRRPAVGMKAWTEPYMAWVRQVQFERPAQQATLEDYLHEVDHMAARIKRLEQGITEVVKLASPQIQEVVKGLQALRGIAEISAVTIVAELGNIARFDTPRQLMGYSGVVPSEDSSGKRKRQGSITKTGNAHLRRIVVEAAWSYRHRPAVGPRLRKRQEGVPEPMPGWRRQARTSARSLPP

SEQ ID NO: 71639 - protein, 321 aa, unidentified
MHKYNQIFGVDISKDVFDVMNSQGKHLQFENHSKGYNQLIKHLSKKDLIVMESTGYYHYCLAQYLYDKGYTVSVVNPLSVKRFVQMKLSKIKTDKSDALAICQYACSNEVPIFTSRDSNQAECLQLMSLIEIYLKQSTALKNKLHGEKTLGIPSKTVYHSINRSLKMIQREIQLLETKLLELVKEHQQKQLTLLKSIPGMGTKTSIILIVLTDGFTKFENAKQLCSYAGTTPTIRMSGSSVRGKSRISKMGNQKLRNLLFLCAFSACKYNKACRELYERIVAKGKSKKLALIAVINKLLKQAFAVAKSGLPYDENYVSNLS

SEQ ID NO: 71640 - protein, 427 aa, unidentified
MSVTQNETIRQVTDTTMVIGVDIASELHWARAFDWRGLELGKTVKFENSAEGFNFFLRWVSELTVEQKKDSVMVGLEPTGHYWFTLAAHLQGGDFKLVLVNPYHVKRSKELDDGHPSKSDKKDPKTIAKLVLEGRYVYPYIPQGLYAELRVAMNCRWRIRKELASLQNQIQRWLKIYFPEHSKVFGRFTGAGSMALLHSAPFPSDLISLGVEGISGIWKQMKLRGIGRKRAQRIYEAAQTSVGCTTGMEAARMELQILLEDYDAKLQQYERVMQVVENLCSQIPAVAELLKIQGLGLVTVAGLFAEIGDIRRFESPRQIQKLAGLAITENSSGKHKGPTEISRRGRSRLRAILFRAAIPLLAKNREFQLLHRYYTTRQNNPLQKIQSVIAICCKLLRVFYALATKGCAYSPEKMLADIQRNHPLKAA

SEQ ID NO: 71641 - protein, 437 aa, unidentified
MSYKYLQQKREYILDKIVIGIDPSKHHHQALILGPDRLQIGKTFSFRHSSEGFQIKLWNYIQKYIDDLDKSNIVFAIEASTDVWQNLAYYLVRSGHLVVLVSPRITWSSRRLPDQSYSKTDPKDALVIAQAACSGYYSVFKIHTENQEALRTLAITYSKLKKNLTQTKARIRSVVSKYFPEFISILSPGTDTAGYLLRHYLHAEDYHNLDVQNEAPVILKISKQQHGVDTLVKLKKAAQKTIGIPRSGTEIEIDRIVLDAWLNTQDTIKSQLDVIEKRLHALAGQTDYFHILTSLKGISSTLAALFIAEVVDLYRYDHYKQIQKLAGLDIQMSQSGSYRGRGKISHMGNRRLRWIIYLMTRETVKYIPEVQIKYLKRQIKRVNYTKNVIACTSPLLQLIMALVRDRRVYGYREESIAQIVQLKNKYEKERKKRSRVA

SEQ ID NO: 71642 - protein, 364 aa, unidentified
MSRAVYVGMDVDKEKIVAAKLGNGTDGQVEERVIANRPSAVKKYFAALAGEGDVVAAYEAGCFGYGLYRQLTEMGVACLVAAPGLIPRKPSDRVKTDRRDAKTLALALRGGQLTGVHIPTKHDESVRDYLRLYEDLRGDLRKAKQRVLHFLLRRGIRYEEGSNWTVRHKEWLSRLEFDSEIDRQTLEVYLAHLLELEHKCAEVTSVVEQIGEGKRYREAVKSLSAFKGIKTLTALAFICEIGDFRRFATAGQFMAFLGLVPSERSSGNKRRQGGITKAGNSHLRKLLVEAAWHYRSYHPSSRTLIGRRKGVDPQIVAYANRAGRRLNRKYLRLLYRGKPSQVAVTAASRELAGFLWAAMVGQVA

SEQ ID NO: 71643 - protein, 413 aa, unidentified
MAGRAGSIAQVSSRTRAGSGSKRESRFTAQIWRRKPDHQKWPRACCRIRAEATLHQNIAAFSGSGILYVDVRRQDFGLCNRLHGIDKSGRAVLRRKLYRSELVRFFEQQPQCTVFLEACGSGHYWGRLLSGLGYEVKLIAPEAVKPFVKKGKKNDAVDAAALCVAGSRPEIQFVPIKSVAQQAVLALHTARSLLVKQQTMLANAIRGLASEFGLVVPQGLHRLEELMVQVTAEASVPAEGRQALIVLHAQLQAAAERIVMLEEQIVVHARQNASARRLATIPGIGPITASLIAATMGDNITAFTSARHFAAWLGLVPRQHSTGGKPRLGRITKAGNTEIRRLLVLGATSMVRRAETWNSAAGIWLRCVLARRPVRLTTVALANKMARIAWALLTRNDVYRAQGRSKVAAGAAA

SEQ ID NO: 71644 - protein, 408 aa, unidentified
MSENDRIVFGGVDTHRDTHVAAAVDATGRVLGTSPFDADAAGYEQLGTWLGSWGRVARVGIEGTGSYGAGLSRHLLSIGVEVAEVNRPNRQLRRRWGKTDTVDAEAAARAVLSGQATGTPKTGDGPVEGIRMLVVARRSAVKARTQAINQLHALVVTAPDQVKHQLGELSPKTRVKVCAAYRPGTAQTTIRYAKQALRSLARRYQTLTAEIQQLDTEIHQLCARANPALLAASGIGPETAATLLVTAGDNPHRLTSEASFAALCGASPVQASSGRTVRHRLNRGGDRQANNALWRIAMVRLRADPRTIEYAQRRQTEGKTRKEIIRCLKRYIARHVYQLLTNPHPTPSGAHLRCLRQNTHITLAQAATALHANPTSLSQLERGQYHNHHLATRYQTWLTTPPNPICKT

SEQ ID NO: 71645 - protein, 426 aa, unidentified
MNETDSIRLEEFRQLKKEIRGSKEYLIVGIDVAKEKHHAFFGTATGKTLLKRLIFDNTIEGFRKLGVQVHAIQVAQQLAKVVFGLEPTANYHKPLGEHLIRCGKMVVLVSGVAVKRNRELLDGHWDKHDDKDAANIADLISQGKCLFYEYPDMRLRDLRSLLMLKRKLKKQEHSYRVRIRNHLLAQYFPELDRYSGRPEIEAIVRWCLDPSRIAGFENDQFMSLVAPGRQSPAKHRRLQAIQELAVDSIGCKMGEGACLEAQVMVEGLRHIREAIKVTEAKIEEICRPFPEYAYLLTIPGFGPDISAKVLGALGNPHRFLNQKQVLKTAGLDLSANRSGKTSKATVPIISKQGKADLRYALYQAALVASTQNIDFMRYYTRQLEGREKEQGIKTKRKVKLSAKLLIIAWTLMKKQEPFDPRYFNQA

SEQ ID NO: 71646 - protein, 400 aa, unidentified
MNPELRVAVDVGCTRHRVAVGLSEGELLEEFDINHDAAGLSEFFERVGRLERQWGRPVAVAMEGYNGYARPLDERVLLHGYRLFNVNNMKLARFKEIFPGPAKSDPVDARKMLEMFSLKDKLPLAREALQEVAPVAEVNLQLKALTRRRKQLVNERMRVSSRLQAELQAVCPGLLDITGEADNLWFLNFLTCRADLTKLKTVREPSLLALQGVGKAYAGKIRHWQKQTTFSETVAWVGPMIIEDAKRMLELRKHIDALQMQIDALAKHSEIARRIDTIPGFGRVCAPELAGEIGSLQRFRGESSLALYVGMAPLDDKSGARSGSKPPRHVNTRAKAAMMIAAARNAATVPESKAFYDKKRAQGKTHNQALRALGRNLVRVMWSMFKHGRDYQLKSPSKRA

SEQ ID NO: 71647 - protein, 422 aa, unidentified
MNKHRYQAKELQQVNWVQVGEDVTGKRLVFGVDVAKEDFFGAFMLSPLESLITIKWQHPKETRALGDFLSTLPAARIEVALEPSGTYGDSLREFLRDLGFAIHLVSPKRVHDVAEVYDGVPSLHDAKAAYLIGRLHLEGASSPWCEASEDRREQQALVSELDLYQSEHRRNLNRLGALLSRHWPELDRIVELNSAGVLHLIAAYGTPQAVCVDCTEAEALLHHARRGIANPERVGAILDSAKATLGLPCTHGERHLLQVLASELLRTRKALQAVERRIAERVNQDPPLQWIAQAFGKTTSLVLETTLGSPLAYTDPHAYIKAMGLNLKERSSGKHKGRLKITKRGPGRARHYLFLAALRFVQKDPVVQAWYHKKVVRDGRLPRYNALVAVMRKLGMAIWHVARGQAFDSCKLFDLKALGMAS

SEQ ID NO: 71648 - protein, 364 aa, unidentified
MKRKVYVGMDVHKETIQIAYLTSNSKEILKEQQIKHNEVQIKKFIKKLKTEWNEIHCCYEAGVTGYPLYRYLKSLGVNCILVAPGKIPRQNTDKIKTDKRDAIKLARLMRRGELESIHVPSEEDEAVRDYLRSRDSLRLDLGRNRQRLMKFLLRKDIKYSTTKYWTVSHYKWLNNLHFNNEILQETFNDYYSRVRVQEENLKAMDKKIQEIAESEPYREKVGILRCFRGVDYLTAMFLLCEVNDFKRFKTAGSFMSFLGLVPGEYSSGSKRKQTGITKTGSPRLRRILTEAAWQHRFPGTGSKIITARRSGQPALVVALAEKASLRLHKKFRNLQLRGKTPQVMITAVSRELSGFLWAAMNLVA

SEQ ID NO: 71649 - protein, 397 aa, unidentified
MPAVWAGVDSGKRTHHCVVINQIGMVLLSRRVNNDEAELLELIGAVVDLADGDQVCWATDLNAGGAALLITLLAAHSQRLLYIPGRVVHHAAATYQGSGKTDAKDARIIADQARMRTDLQPVRDADQISVDLRMLTARRTDLICDRVRAINRLRATLLEYFPALERAFDYSKNKAALTLLSEYQTPDRLRRLGATRLAAWLRKRGCRNSAAVAAAAVDAARQQFTTLPAEPIGSTLVIRLAAEISAIDRDLVELDAQLTDRFRQHEAADILLSVPGFGPVLAATFLANIGGNLNGFDTVDRLAAVAGLAPVPYDSGRISGNLHRPRRFNRRLLRTCYLAALSSLKNSPASRAFYDRKRREGKSHKQALIALARRRLNVIWALLRDRAHYQEPALAAA

SEQ ID NO: 71650 - protein, 424 aa, unidentified
MFKIFRKNCCGLDIHKTWIYACIGITDENGRTAYHQARFSSFTKGLRELAGWLATHDCVEVCMESASKYWIPVFNILEKTCLVTLSHPKYTKPQKGSKTDRKDAKWICDLFMCDMIKPSFIPPPDIRHLRDLLRYRFKLTNMITGEKNRAQNCLTVSNLKLDDVFADVFGQSSMSITKHILDHPGVQFDVKPFVHWRCKKPIEEIQAAVDGSISLEQAAKLREILSHIDELEIHKMNIESEILRLAEPYIHQLDLIHTVPGFFANPMTAIALISEIGVDMSVFPTAKNLSSWAGCCPRNDQSAGKRKSNRISRAGVYLKPLLVQVANAIVKSDKYPEFRDRYRRIKSRRGHKKAIIAICRMILTAIWNILSKNEPYNPEGYLVKRIIPDGDTFITKAQALNYMRARGFVITNDYDVEVVAEAPA

SEQ ID NO: 71651 - protein, 366 aa, unidentified
MRDYTGKTVFIGIDVHKKTYSLSCICENEIVKRDTLKASPERLKEYIDNYFAGATIKTVYEAGFSGFVLHRYLLSQGIENLVVHAASVEISARDRVKTDKRDSLKLAVQLSHGRLKAIFVPTQQREGYREVSRLRDKIARDKRRVGNRLKSLLFRQGLLNADDDEKVSKKWVEKVVTFNCDDSIKYTIQVCADEWVYLSNKQKEIDKTLAKQALSDKKLEKIYRSSPGIGPVHARVLANELEDMSHFPNENSLFSFTGLTPSEYSSGQHKRQGHISRQGRSLLRKTLVQAAWKAIYKDPSLKFAYERIAMTSGKKRAIVGIARRLIGQIRSCFKSNSLYRSHKARDVEFCKETGEISLAINSRSLI

SEQ ID NO: 71652 - protein, 397 aa, unidentified
MIAVGIDVSKSKSTVAILNSDGSVLVKPYTMAHTQSDMCALADYLRTFDEPLIILMEYTGHYHYPVLKKLQQEGFPVCVINPYQMKKYGDVEIHKAKTDKKDAIRIATYALEKAYKLVPYNSLEQKYEDLKFLSRQYNQRISSVSYTKVQLINLLDQTMPGITHLLPLRSRNPEQCVLLLFIKRFKSFDEIIKIGKTRFLSSYATLVKKTRDRHAPSKGLAIYELAKNSITTRGEDPYIQLAQSQCVDLLASSQNAADEIILQMQTIAETIPEYKVLRSMAGVGDRLGPVILAEIGDIRRFHSGKALNSFAGNDAPPYQSGQFESRNRHISKRGSSTLRKACFEVMQSLKLTKPQDDPVYLFMLKKEQEGKPYNVAKMAGVNKFLRIYYARAMELYK

SEQ ID NO: 71653 - protein, 343 aa, unidentified
MDHFVGLDVSVKETSVCIVDEVGKIVREVKVASEPEALLAVLKKPAYRFKRIGLEAGPLSQWLFGALAEAELPVVCVETRHMQVVLKAQINKTDRNDARGIAQMIRAGLYRPVHVKTLRSQKLRMLLTHRKLLQSKAIAIENDLRGTLRNFGLKVGIAGTVKFEARIRELVENLPDLAALVEPLLIVRRVLHEQISVLHRRLLAIVRDDAVCRRLMTIPGVGPVVALTYRATIDVPARFKNSKAVGAVFGLTPSKYQSGEINRTGAISKCGDEMMRVMLYEAAQVMLTRTNKWSWLKAWAMKIARQRGMKKAIVALARRLAVIMHRVWVDGTDFRWTRKVVAA

SEQ ID NO: 71654 - protein, 369 aa, unidentified
MGEYSELFVAFDVAKKKHAVAIAEGGRRGEVRFVGEIENSPAIIERLIKKLAARYDRLHVCFEAGPTGYELYRQIRALGHDCTVVAPALIPKRAGERVKTNRRDAITLARLHRAGELTSVWVPDATHEAIRDLVRAREAAADDLRRKRQQLLSFLLRCGRIYCGGGHWTLAHRRWLAKQAFEHAAQQIVFQEGIDAIEDAAQRLHRLEQQLAVIVPSWSMAPVVAAYQAMRGASFLVAVTFAAEIGDVRRFDTPRKLMSFLGLVPAESSTGDTVRRKGLTLAGNRRARRALVEAAWTYRYPARVSETLRARIEGLPKPVRDIAWKAQLRLCARYRRLSAAGKKLPVVVAAIAREMAAFLWAIGREVAPL

SEQ ID NO: 71655 - protein, 347 aa, unidentified
MQVVYTRCAGLDVHKKTVSACISICEPEGGKQQQMRVFGTFTSDLLALADWLKEHGVTHVGMEATGVYWRPVWAVLEGQFEQMLVNPQHIKAVPGRKTDAKDCEWIADLLQHGLLKGSFVPPTPIQDLRDLTRYRAELRQSQNRVANRIQKFLEQANIKLSSVASNALGVSGRQMLEAIIAGQDNAEQLAKLARGKLRNKIAELEQALEGRVRDHHRFILAEYLDEWEALGQRITRIETEIDKQIRPFEQAVALWQTIPGVDHVTACNLVAEIGVNMNQFPTAQHLASWAALCPGNHESAGKRKSGKTRDGNKWLRRTLCQAAWAVTRKKNCYLSAQFKRLAARRGV

SEQ ID NO: 71656 - protein, 412 aa, unidentified
MEGETVIAGVDTHKDVHVLCLLDGLGRKIWSGSFGADPEGYDRLAEAIGDPGSCMVVGVEGTASYGAGLTRRLVELGYNVVEVLRPKRDKVRPGEGKSDPLDAERAARKAASGKGCSVPKSQDGWVEAVRQLYVARRLAVATSTSCVACAKSMLTTAPSALRERFRGRERPKDLMPLLARGRKAGDALEESALASLRSVAAVWKEARSQVESLDERIRALLEANAPALLGVEGCGTTTAAALVVAAGDNPGRLKSEAAFSMMCGASPIPASSGKTDRHRLNRGGNRQANWALYEIAIKRMAYDERTRRYVARRTSEGKSRREAVRCLKRYIAREVYHVLMDPNPDGAAPEGPELAKMRKAMRVTQKKAAAELGLSAATLGHLERGKRRSTKLERRYYELLCELERALPQTAS

SEQ ID NO: 71657 - protein, 414 aa, unidentified
MEILHECCCGLDVHKGTVVACLLRGGGRQGHKEVRTFGTRTADLLALADWLQAAGCTHVAMEATGGFWKPVYNILEGQCALLVANAAHIRAVPGRKTDVKDAEWIADLLRHGLLRASFIPDRPQRELRDLTRTRTSLTDARSAAVNRLQKVLEDANLKLAGVATDVTGVSGRAILAALLDGEEDPAVLADLAKGKLRKKRDDLARALDGRMSDHHRLLLTTHLAHIDFLDEEVARLSAAIDERLRPFADELARLDTIPGVDRQTAEVLIAEIGTEMGRFPTAGHLASWAGMCPGNHESAGKRQGGKTRKGSKWLRRALTEAAHGAARTKRTGRTALARQYRGLVVRRGKQKAAIAVGHRILLLAYHLLLHREDYRELAPADLEARRRTHLQHKALRQLRQLGFEVTLTPKEDAA

SEQ ID NO: 71658 - protein, 342 aa, unidentified
MQIAVLGIDLGKNSCSVVGLDLVGRVVLRRRLRRDGVIKLAAAMSGCVMAMEACCGAHHLGRLLRDHGHQVRLMSPEYVRPYVKAQKNDDRDAEAIAEAATRPTMRFVELKSEAQLDMQSLHRVRDRLVGERTALINQLRAVLLERGIVVPQGRRKLERYVDALLAEEEIRLSPRTGLLVEDLRAEWRELDRRILAFDDEFVAQARTDETARRLTSIPGIGPLNATALTAAIGNGQTFGRGRDLAAWLGLVPKQVTTGGKPKLLGISKRGNGYLRKMLIHGARAALPTLSKGETPLGAWLRGLLARAHVNTVVVALAAKLARTAWAVIRRGATFDMKAATAS

SEQ ID NO: 71659 - protein, 410 aa, unidentified
MEVMFDRVAGLDVGKESVTVCVRMPGPRGGRRSETRTFKTMFGSLRVMRDWLIEAGVTIAAMESTSTYWKPPFYCLEEVMVVWLLNAAHMKAVPGRKSDVRDAEWIAQLLEHGLLAPSFVPPPEIRRLRMLTRYREQLLGDRIRETTRLELMLEDASIKLSSVASSLNTVSARAMLTAMIDGEADPLALAEMARGRMRRKIPDLAQALTGTFDAHHAQLAKSMLRRLQLVEQAQAELDAVIAEACRPWQHQIELLQTIPGVGEKVAQVFVAETGADMSRFPTAAHLASWTGLVPAMNESAGRQSPAGKRHGNKWLTAMLVEAAGSVGRMHNKNYLAVKHARLTRRRGMGRAQVAVAHSILVAAYHMLQRDQAYTDLGPDWHERRNNEAHTKRLIAQLERLGHTVMIKPAA

SEQ ID NO: 71660 - protein, 391 aa, unidentified
MDHEICVVIGMDQHKRSVTIEVMTGDEQVLGGGRFATDVAGFASMLAYVAAWPNRVWAIEGCEGIGRHVAQRLLAEGETVVDVPAKLSARVRVFATGQGRKTDDTDAHSIALVGVRMSGLRSVVNDEQLELLRLLVDRRRRIGEEHTRMVCQLHQLLLELIPGGAKRDLSAAQARKLLAGVRPRDVVGKTRKRHAMELVVDLERVYQRKKAANKELVEIIKTTGTGLLDLHGIGPSGAARLLVEVGDTTRFPDRGHFASWTGTAPIDASSGDRVRHRLSRGGNRQINMVLHMMAVVQLRNPTEGRSYYDRKIAAGKSPNEAMRCLKRRLSDIVYRTMLNDLVANKATSPGGHRGASLQSSAAGSHPHTGSSDKSLPGPAKTKTRTPLPTAS

SEQ ID NO: 71661 - protein, 345 aa, unidentified
MEIRTVGIDLGKSVFHLVGLDQRGNIVAKKHFSRTQLLAYTANLPPCLFGMEACCGAHFLGALLVKQGHQVRLIPAQFVKPFVKSNKNDYLDAEAIAEAVQRPTMRFVPIKSIAQLDLQALHRVRDRLISRRTGVINQVRALLLERGTIFRKGRRYLCRQMPLILEDAEQNLSSQMRRLLEQLWQEWKNLEEQIQRLSDEIESIARQDDACQRLLAVPGVGPLVATALLASIGDGTAFRKGREFAAWLGLVPRQFSTGGKTKLLGISKRGNPYLRRLFIHGARSVAMHLNRNEHALGSWMNQLESRAHHNVFVVALANKLARIAWAVLAKENIYRPLPEMQGSSV

SEQ ID NO: 71662 - protein, 361 aa, unidentified
MANHIFVGIDLGDKNSVARIAVEREKSERFGFVNNRAGRARLFAEVSKRAEQAGGAKVVMVYEASSCGFILSDEAKAAGQDCYVLAPTKIEKSVEQRKHKNDDRDAEDVLDKVRAHVLAGNRLPTVWVPDLQTRDDREVVRTRMELAEKQTQVKSQIQMLLKRHGVEKPTGLGVGWTKRYRQWLTGVAESSHLGWGGRQALGSLLRQLTWIESEMDSIEKLVQQLAEAPRHRAIVDELMQEPGVGLMTAIVYRTEIGYAGRFRRSRQVGKFVGLTPTSHESGQQNDRKGHISRQGPPRLRKILCQASWAHVRRDEQARQVYQRVAERNPKKKKIALVAVMRRLAVRLWHRMRKAEAQLAPV

SEQ ID NO: 71663 - protein, 400 aa, unidentified
MLSIGIDVSKGKSTVCGMKPGGEIVYTPFEIQHTREGMSELVSLLHNSCEEVRVVLESTGSYHCPVVAALLENGIFVSVVNSLRMKRFCSQSIRKVKTDRIDAMQIALYGLAYWQELQPTKLPEDTYRELQLLARQYYQMTSLLIKAKVDFNALCDQVLPGMQELMSDHAGRHKLSDFVLRYRHTTHILEMGETRFRKDYCKWAEKKGYRNCERMAALIFATAQNGIPVLPNAPSTQIVITEAIRVLHTVEASRDAILTQMQALAKTLPEYSLVREMPCIGDTLAPRLIAEIGDVRRFHSKRALIAYAGIDAPPYQSGKFCANNRHISKRGNRYLRKTGYEVMQSYVMHKPANDPIFTFIEKKRGEGKSGKLAMVAGLNKFLRVYYGKVTELYRSLPAIE

SEQ ID NO: 71664 - protein, 323 aa, unidentified
MSQPNPLCVGIDVSKTTLDIATANNEFAQFTAGNDTDGFELIIAELRKHSVALVLMEATGGLEAAVACSLQAEGFDIAVINPRQARNFSRAMGYLAKTDRIDAKVLSQMAEVINRHPERERFIKAIPDAERQILAAMVVRRRQLITMLVAERNRLHPAHPQNRKSINTIIKALEDELSRIDEAMNNHIKTHFKELAARLSSIKGVGAMTVATLLSEVPELGSLSRREISALIGVAPVNRDSGTMRGRRTIFGGRAGVRTALYMAALVATRFNPVIKAFYTRLITAGKVRKVALVACMRKLLTILNAMLRKNEEWSDSYHKFSL

SEQ ID NO: 71665 - protein, 318 aa, unidentified
MTQTPTYYAGIDVAKDRLDVVLRPSGEYMEATNDERGIRSVVRRLRKEDVALAVLEATGGLEQPIAADLALAGVPVAIVNPRQVRDFAKATGKLAKTDRIDAAVLAHFAEAVKPQPRPLADEQVRELWALVLRRRQILAMTTAEANSRARTAPKAVRKRIEAHLRWLRKELARVDGELERAVKESLVWKERAALLMSVPGVGPTLSATLLAELPELEYLERRRLAALVGVAPLNRDSGTLRGIRTVWGGRSGVRTTLYMATLCAVRHNPAIREFYGRLVASGKPKKVALTACMRKLLTILAAILRNRTPWQPRLLAAS

SEQ ID NO: 71666 - protein, 343 aa, unidentified
MKITTVGIDLAKNVLQVHGVDARGKAVLKKQLKRGQVLAFFANLPPCLIGMEACGSAHYWARQLQALGHTVKLIAPQFVKPYVKTNKHDAADAEAICEAVGRPNMRFVPIKTVEQQAILSVHRARHGLGKARTAQANQIRGLLSEFGIVIPKGMAHIAKRLPEILEDGENGLPGVFRHLLQRLGEHLKELEHQVAALEGEIQHWHRDNEASRRLAAIPGIGVLTASATVATAGDGKSFTRGRQLSAWLGIVPKQHSTGGKPTLLGISKRGDSYLRTLYIHGARAVIAQVERHPERADDWLKRLLARRPKNVVVVALANKNARIAWALLAHGCDYQPRGTPLAR

SEQ ID NO: 71667 - protein, 352 aa, unidentified
MDRYIGLDSHAQTCTVAVMGPSGRRLQEQVLETNGKVLVSFLKSIAGDRYLCFEEGALSEWLYEMLEPFTKETMVVQASEHQGPKDDSHDAWNLANEYRTGHLQKVVFKAPKCFTGLRQAVRAYQTATQDLVRAKSRFKAVFRSRGVLVDNSVYQPGLRPKWLRRLSGAYRKLAELRAAQLDAVAEVHAQAEEWLSEEAAKIDAVKRVSTVPGIGTIRAAQIVAIVVTPNRFRTKRQFRNYCGFGVVTRSSSDYVRGLDGHWKRQAVQQTRGLNRNRNATLKAVFTGAATTVIQQGKDQPLHRDYERMLASNVKPSLARLTLARRIAGATLAIWKNKENYDPAKHESPRPTP

SEQ ID NO: 71668 - protein, 448 aa, unidentified
MSDRSGVSRGDRNRNARLARLRAAVPLGNAIAGVDLADSKQMVVVTDHESRVLARRCFRRRAWELGAALDWAAARAAAAGFAGVTVAVEPTGHRWRVVGQLAAERGLLFVCVQPLMSAWARRAEDLTFDKTDDKDAVLIARLAAQLRCYLPEPVDETWGRLRHLGIRRAQLVVQSVSQVQQMRDLLECAWPAVLDAARQPFKSTTWRAALTVALERADGDLSRVTRLGQRRFDAAVRRQVARWDAVHPWQKIIGAVFTACADPAGVTELRLGALERVQLLLADWSHTQARLAEAEARLTAVLGELGLTGLVTSITGLSAVGAATILAETGDPGRFTSGRALVKHAGLAPRQKNSGNSTGRTRTTGQGRPALRLAAWRAVWGALKSNPVYAARFAHLTSREHNKLSTGQAHAALAAALLRHLHAVITTGQRWNPTIAAGGRPGQAPIAA

SEQ ID NO: 71669 - protein, 377 aa, unidentified
MSKIIMCGCDVHDRSMLLRYCVDSSSPVQASFVNEAEGRAKMVARLKKYAQEQGATRIIFAYEASGQGYGLCDLLHEEGIECHVLSPTLLPKTPKSAKQKTDARDAQMLLEQVRGYVLAGNPLPVVWTPPQRLRDDRELVRARIDSANEATRIKLQVLSMLKRRGIPKPAWYTCPWTKRFVRWLREIADGLEATVAPVLASLIDRYELYVAEQGKLNKAIQKLSQTDRYQAACGELHQLPGVGLLTAMTYLTEMGDLHRFHNRREIGAYLGLCPTSFESGEANDRKGHITRQGPARLRKLLCQAAWVSVRYCPESAATYARIRGGKRQRTKKALVALMRRLAIKMWHRATACGVACELQGRGGPHGLPPTPFLPSTA

SEQ ID NO: 71670 - protein, 322 aa, unidentified
MNRKTFVGIDVSKDTFDAAILSDDRIMEKANFPNSKKGYTQLSKWHKKYDLNPHICMEATGHYSEPIAEHLFSSGFKVSVENPYKIKQFARMRLTRNKNDQLDAEVIARYAQQIIPADFKPRPKAQKEIRELSQLIDTLKEGLVRLRNQLSCAQTTRAKTIYKQIITQRKKQIQKLKLKLDDIVENHDEFKQAIDLLQTIKGFGHDSAITLLAYLPDINLFPSAKSLAAFIGLSPRQNQSGRFVGKTHLCKLGSSRLRRIFYMPALSAKRFNEALQPFVRRLEDKGLAPKAIVGAVMRKLVHIIYGILKHQRPFDACLACAP

SEQ ID NO: 71671 - protein, 344 aa, unidentified
MDHFAGLDVSVKETSICIVDDTGRIVREVKIASEPEALLKVLGSQAYRFKRIGLEAGPLSQWLFSALAEAELPVVCVETRHMQAVLKAQINKTDRNDARGIAQMMRVGLYRPVHVKTLRSQKLRMLLTHRKLLQSKAIAIENDLRGTLRNFGLKVGMVGTVKFEARIKELVENFSDLAVLVEPLLMVRRVLREQFSVLHRRLLAIVRDDEVCRRLMTTPGVGPVVALTYRATVDVPARFRKSKAVGAVFGLTCSRYQSGEIDWSGRISRCGDEMMRVMLYEAAQSMLRSKKWSWLKAWAMQIARRRGMKKAIVALARRLAVIMHRIWVDGTEFRWTREQAVAAT

SEQ ID NO: 71672 - protein, 344 aa, unidentified
MTHEAIIFGLDLGKNWFHVVGINGRGKPVLRKKFNRTQLTEFAGTTAHCIVAMESCPGSQHWGRRFAERGHEVRLIPAQFVKPYLKGNKNDFNDAEAIAESASRASMRFVPLKNAEQLELQATHRVRERFVSERTAVVNQMRALLLEHGIVVPVGRVKFEKAMPDILEDAENGLSVRMRDLLRRLRERWRALDVEVDEVTALLRTIGSQSDLCRRALTVPGVGPIISTAVVAAVGNAQMFRRGRDMAAWLGLVPRQHSTGGKSTLGSISKRGNVYLRKLFIQGAQVLLLHLKRDQSRLGEWIRSIELRRHHNVAVVALANKLVRICWKMLATDAEYRPYPGQVA

SEQ ID NO: 71673 - protein, 322 aa, unidentified
MMSTTTVEERYAGVDVSKARLDVAVRPTGERYSVTNEPEGINTLIERLGEAGPPQLVVLEATGGFERPAAAAIVASGIAVAVVNPRQARDFAKATGTLAKTDKIDANVLARFAEALKPEPRTIPSEEALLLGEILGRRRQLISMLVAENNRLSVIVSAPVKRRIRAHVRWLEKELSRTDLELEKVLEASPIWRENEALLRSVPGVGPTLARTLLVELPELGTLTHKRLSALVGVAPFNRDSGKIRGKREVWGGRAKVRTALYMSAMVASKHNPIIREFYERLVEAGKPKKVALVACMRKLLAILNAMMRDRRPWRFTHALTP

SEQ ID NO: 71674 - protein, 353 aa, unidentified
MKPKMEPNIGSLAVIGVDIGKEVFHIVGLGVDGKIAFRRKIRRLGLKEAFEKLPPCIVGMEACLSAHFVSRVLRALGHEPRIIPAIYVKPFLKGQKNDYNDAEAIAEAALRPNLRVVQEKSQDQLDLQACHRVRSRLVSRRTATINQIRAFLIEQGIAVRAGPRALRNSLFAILENRKDEISPRTAGLILGLYEDWCRLDERIETVTGEIEKLSQVEATCRRLMSVPGIGPLISTGIVAAIGTGEAFERGRDFAAWLGLVPRQHSTGGRTILGRISKRGSKYLRTLLIQAAKVLLMRPHNWARYSFGAWLKTASERLHRNKLAVALANKLARIAWSVLRNDKAFDTHPEAAAI

SEQ ID NO: 71675 - protein, 482 aa, unidentified
MSHNKKQGKTRLPRTQAQLGRRKKQKGMCLADRPCLEPNAAGIDIGAREIFVAVPPDRDECPVRVFDTFTEDLQAMARWLKACGITTVAMESTGVYWIPLYEILEAHGIRPCLTNARHMKNVPGRRTDWHECQWLQYLHSVGLLRAAFRPEAEVCAVRAVIRHRGELVQMAVQHVQHMQKALTQMNLQIQHVLSDLTGTTGLAIVDAILAGERDPAVLAQRRDPRIQATAETIQKSLVGNWQPEHLFVLRQSRLLYKTYQQQIADCDQEIEKLVGTFAPRVDPAQKPLPADRKRNRNASKKRNKRGLPANGFDLRTEAYKLFGVDVTQVPGVETSVLPLFSEVGRDLARRWPTAPHFVSWLNLCPDNDISGGRVLWRGTRKGQNRAGQIFRMAAYSLHRSPTPLGNYLRRMKAKLGPKAATTATAHKIAVIFYTIVTKQVEYDESIWAARDAQRQKRLEHKIRRQARQLGYQLVPMQEKPAA

SEQ ID NO: 71676 - protein, 476 aa, unidentified
MTTRRRLVGIDLGIASAHTVRVLDETGDTLAKRKAYPTVESLAEVERSALADCPEGTRLEVIVEPTGPAWLPIAVFFISRGHLVFRVSSAKASDLRRFFSRHTKTNGIDADTLARLALIDPDGLQPLQLPGTERAALDRRVRACDRLTRVAAEHKVRIKDLVRQLLPMTPLTGDLGAADLAVLERWADPNTLVKTGAKRLTALITKASNNHQGTDRAEQWLAAARASIDLYGNHPAVAFTDLAAEVATEVRLLRAVQAELAAHAGARETAYRRVDPTGLARSLPGLAEVGGPALVAVMGDPHRFPKGKHFRAFTGLTPKAFETGNTDRKGQAMSKAGSSLLRTTLIRAADHARKQDPQLARLYYIQMVERGKDHLGALCVVAANLAERSWAVMNRRMPYVICDTDGRPITPTEAKTIIAEHWTVPAEVRTRRRNRKKGKAPQTTRTGRHARGDLPQHSIVDQHHRHSQQTPHRKTA

SEQ ID NO: 71677 - protein, 322 aa, unidentified
MEQKLKTKVIGVDVSKSTLDCYFLHNDQFKQYNNTKKGIESLIRYCRSESIELIVCESTAHYHKQLEILMLEDKLPLAVANPRHTRRYAQALGYLAKTDKLDAKVLALFGQATNPPIRELSRIEVRNLRVYVNRRNQLINVKTSETLRKSSITEDFVIDEISEHIEQIEKQIKIYDKKIMDLINSDEEFTKIFKIIISVPGASVVTASTLIAYLPELGKRKRNQIAALVGVAPYNNDSGTKSGKRTCFGGRKEVRNILYLGMLSAVRCNDYIKPIYQRLRQNGKPSKVAMNACARKMIIMINTLVKKETLWMNAEERAENLV

SEQ ID NO: 71678 - protein, 333 aa, unidentified
MNKITLIGLDTAKQTFHLVGVDAHGHYVWRKQASRCRLLSTLAQIECCEVVLEACGASHHWARSIQALGHAVRLIAPQHVKPYRRGQKNDYRDAEAIISAALSPGMRFVGVKRVEQQAEQALHRVRSRLMSHRNAAANALRGLLGEYGVVFGRGLKPLRDGARCFAETEEAHILGLVDLVNDVLEEIGVLQARMDHYEHLIEQRVEADETSRRLREELRGVGKLSASALRVKVADVRGYGNGRHFAAYLGLAPGHSGTGGQVHIGHLKRGHDRYLRQLLIHGARSALCHLGDKQDPQSRWLRGLLERRGFNIASVALAHKNARQAWAIMAREQ

SEQ ID NO: 71679 - protein, 414 aa, unidentified
MFAVGVDVSNGRSTVAVLGAQRKVVMKPFEVPHTADGFASLSEKLRGLNGEARIVMEHTGRYYEPFAMSMYRAGFFVSAVNPLVIKDYREGVDVRKVKTDRADALKIAQFALDKWEILPQYTPMDTIRYDLKTLHRQFQLSGKTRTALNNNLIALLEQSYPGANRYFDSPVRPDGSQKWVDFVDTFWHADCIAGVSRSAFVERYRKWCKRHGYNFSERKAVELHVDARQKFPLVPKSDTCKLLVKEAVSQLRTVSRTIETYRAEMNRLAAQLPEYETVMAMTGVGKSMGPQLIAEIGDLRRFAHQKSLVGFAGTDPIKDDSGDKVSDSKPSSKRGSPYLRKTLFVVMTILLQLQLQDDPVYQFLDKKRSEGKKYYVYMTAGMTKFLRIYYGRVRDCLKARGLWEQPMLESGSSD

SEQ ID NO: 71680 - protein, 315 aa, unidentified
MSQMVVIAGIDVSKDKLDIHVLPSNQTFMVGRDPRGLASLARRLRKAGVEQVALEASGDYERIVIEALEADGFVVQLLNPARVRAFAEAIGMLAKTDPIDARLIALYCQHFPDTGLTRRPEQARKLGEFLNMRAMLLKLAGEIRNSLEHVREPGLKALADTLSADIAAKLKDVDDRIAKVIAGDDATMRKARIIRSFTGARPVLTSGLLARVPELGGVTRHAAARLCRAAPTDRQSGRTRHRSSIEGGRDQVRPVLHMAALAAIRSNPIIKAFAHRLSAAGKPKPLVIAACARKMVVILNAMLRDNTEWKYAKAA

SEQ ID NO: 71681 - protein, 338 aa, unidentified
MGLYGAIDLHSNNSVLVVLDERDQVLYEKRLPNDLGRVLEVLLPYRDQLVGVVVESTFNWYWLVDGLMAAGYRVHLANTTAIQQYKGLKYTDDAHDARWLAKMLRLGILPEGYIYPKEARAVRDLLRRRAQLVRQRTTNLLSMINQFARLTGCGVSVRRLKQLSEAQIDEWVSDPNVASALRANLAVIRVLDKEIERLEGEILRQAKIAAQFSPLLSIPGVGEILALTIMLETGDVGRFAKVGQFSSYARCVDSKRISNGKKKGEGNVKCGNPYLAWAFGEAAALAVRFNPRIKRFFERKRSKASAPLAYKAVAHKLARAAYHVMRERVPYEERRAFG

SEQ ID NO: 71682 - protein, 378 aa, unidentified
MQQAQHPNAKATLTASLELAGKSWKLAATDGRRVNATVLKLEAEERWARLHDLLAQLEALKGKWSLPANACVAVIYEAGQDGFWIARELQSRGVQVFVVDAASIPVARQARRRKTDRLDALKLLEVLRAWLRGERSEVHMVRIPSEDAEAQRLLSRNRGLLQKEVSQHRDRMGKLLLLHGCTDALDPTFPERVMAGQVRRRDGTALPPQLWECLLLEWERLELVQRQLAAMEKTLLQQLPQPIQRCIAILAQLKGVGWVGAMRLVLELFWRDFTNRRQIGACTGLVSQPYDSGDSHTDQGISKQGNRRVRALLVEMAWMWLRHQPRSELAQWFARRTAGANKRGKRVAIVAVARRLAIALWRYLRDGVVPAGAQLKTS

SEQ ID NO: 71683 - protein, 329 aa, unidentified
MYARCAGIDVQKRTVVVTVVLTGLEGPAQKQTRPFGTMTADLLALGEWLEEERVTPVALESTGVSWWPVSHRLEEGCRLLLVTPQHLKTVPGRTTEVKDSDWLADLVRHGLLHASVIPPAPLRALRELTRSRKTLIRARVHQANRLQQGLASATSKLAAVASAVLGMRARQMLEALLAGEEDGAALADLARRHLRRTIPALKQALEGRLLPPQRFLLRALRAHVDFLDAAIVRVQAEMEHHVVPSQEARRLVQTIAGVNETAAAAIRAAIGTDMSRFPSAGHLASWAGVCPGTKQRGGQRLKEATTQGSPWLRAILGAVVFAIAHTRDT

SEQ ID NO: 71684 - protein, 409 aa, unidentified
MYDKTKYIYVGLDLHKEQHTAVIMDCFNEKLGEITFENKPSEFKKLITKCKKHCTDSKGIVFALENSYGYGRGLAVWLIERDYIVKDVNPALSYAYRKSVPQYKKNDSYDAQCVARVAINELNKLPDAMPEDMYWTLSQLVNRRANLKTHHIRLKNQLHEQVCVAYPSYKQFFQDIGRPTALYFWEHYPSPRLLRGKTVEELAEELIPVSHNQFSTRKCQIILDAVKADGDTTRDYQPERDEITRGLVKDVRHYVEQLEAVDKSIADFLPRFECPLNTIPGVSDTTVAKLLSEIGDIRRFPNADKVANFAGIAPVNFSSAGKGDDKHSKQGNRRLQGTIYFLAIQMIQLSSKGLPRNPAFYVYYQRQLARGKTKPQALILISRRLISIIYGMLKNKTEYVMPKVQDNWG

SEQ ID NO: 71685 - protein, 376 aa, unidentified
MGTPSAQTLDDVGVREIFQELEEVPLMTMVGGLDVHRAQITFDYVDDDGLVHWGQIRPATRKTLRGWLAEHCPDGDAEFALEGCTGWRYVSEELAGAGVGVHLGDPAEIAVLRGPKKRAKTDRADARLLRTLLLQGRFPESWIAPAHVLEIRTLGRLYCTLMDERRAWQQRIHAQLFHQGCPPVRALLSVTGRAALAGAELSAVGGQYVDTALGRIDELSTEIEPLRAQLVNFARHQTGCQALQRHYGIGWLCAAIIWAEIGDARRFSSSDQLVRFAGLDVTVYSSDGKRSPGHLSRQGSPELRWAAFEAAKCAARRGSPDYGYYRKLAAKRDGHNGKNPTLAVERKILRRCHHTLRELGDAAVALPVAEPQEVAA

SEQ ID NO: 71686 - protein, 370 aa, unidentified
MESIIYVGMDVHKESYSLCCYDPRTDRYLYEHKMKSTTTNVLKYLDSVKKQLGDVIFICGYEAGPTGFGLCRDLLRKDIACVVMAPTSLKRNANYKVKNDKVDARLLAKDLFTHDYSPVHLSSQKEEAIKEFCRMRRSIMTELKTAKQVLLAFLLRQGKHFDGKTHWSGEHRKWLKQIIFEQPYLQEAFDEYLISVNELEARLKRVEHRLEEISKDEEVESKVKKLICFCGIDTLTAVSIVSEVGDFMRFARAWDFANFVGLSVGEHSSGGKERHLGITKSGNCYLRRLFTESAKSLKKTSMKSKKSKRLIDRQQGNDLRVIAYADKCRYRLKYKMMNLENRGKAANVASTAAARELACFVWGMMTDHIA

SEQ ID NO: 71687 - protein, 334 aa, unidentified
MLIIKQVIGIDISMDSFTCCVGIINTDQRTVIAPHKEFKNHITGIKQFYTFALTQQIQNVPQYFIMEATGVYYESLAYFLKSQGAHVIVVLPNKSKHFSKTLTIKSKTDPIDAHMLTQMGLEKRLSEWEPPSELMKELKLLTREHLSLKELKTDAKNRIHAKRHSFKPSKDTIKRLKQQIALYDRHIKIVESSIQMLLKKDQKTWEKIDNILTVNGIGFMTIAKVLAETNAFALIRNGKQLTSYAGLDVVLKESGKHRGKTIISKKGNHHLRMSVYMPAISAIKSNPLMKTYYNRMLDNGKPKKAGVVAVARKLLLLIYYLWVNNTPYNPHYSP

SEQ ID NO: 71688 - protein, 315 aa, unidentified
MFAGIDVSKDWFDVAWEVAGQIRCQQFAYTDEGMEQLLEQVPPTAVLVMEATGTYHARLALRLYEAGRQVSVINPLVIKRYGQMKLLRVKSDRADAQLILEYAQQQNPALWEPASEQVQELQQAHGWLSDLLAERTRLLNRQHAMSYRAKPSAFVVAQMDAQLQQLQQRVDECERHLEMLVKKSFAELYERLLTIPSIGAKTALELIIVTDGFTRFEDVKQLCAYIGVSPTTMRSGSSVKGKGGIAKLGQGRMRQLLYLCTWTARSCNPACQQLHQRLKAQGKPAKVINIALAHKLLRQAHAVATKNVRFSAEFS

SEQ ID NO: 71689 - protein, 358 aa, unidentified
MPVYIGVDFHARQQTISYLTTEDGEIQRLRLEHSQEDLRQGDVRKFYSQFTGEVIVGFEAGGYSQWFEAMLERLGHEVWIGDAHEIRLLAKRKQKNDKRDANHILELMVSGRFPRLVRRTAESREVLRQMGYRHKLVKMRTMAKNSLQAIALGAGLSLRSRLHSKRGRATLKELNLTAATACQSDKLIELIDYLTTEIERVERWLIERAKSDERVKLLQTHPGIGLLTSLALVHTLHPVERFSNSRKVTAYVGMDPVEDSSADRKRIGSISKAGSRMVRFLLAEAAQVAIRTDRDLRQLFNRVSKRRNTPKAIVAISRKLLVRSFIMLRDRIDAEEFLRRGVEARSSRIAHRPTMPEP

SEQ ID NO: 71690 - protein, 400 aa, unidentified
MLSIGIDVSKGKSTVCGMKPGGEIVYAPFEVQHTREGMSELVLLLHNSGEEVRAVLESTGSYHCPVVAALLENGIFVSVVNSLRMKRFCSQSIRKVKTDRIDAMQIALYGLAYWQELQPTKLPEDTYRELQLLARQYYQMTSLLIKAKVDFNAICDQVLPGMQELMNDHAGRHKLSDFVLRYRHTTHILEMGETRFRKDYCKWAEKKGYRNCERMAVLIFATAQNGIPVLPNAPSTQIVITEAIRVLHTVEASRDAILTQMQALAKTLPEYSLVREMPCIGDTLAPRLIAEIGDVRRFHSKRALIAYAGIDAPPYQSGKFCANNRHISKRGNRYLRKIGYEVMQSYVMHKPANDPIFTFIEEKRSEGKCGKLAMVAGLNKFLRVYYGKVTELYRSLPAIE

SEQ ID NO: 71691 - protein, 396 aa, unidentified
MPRIWAGVDIGKEHHHCVVIDDSGERLLSRRVQNDETELLALIADVAAIDTDALWAIDLNSGGAALLIGLLVNHAQELVYITGLKVHRAAGTYRGEGKTDAKDAFVIADQARVRRDLGPLRAGEEIAVDLRTLTNRRTDLVCDRTRAINRIRHQLLEYFPALERRLDLSRKGHLLLLTGYQTPDAIRRLGEHRLAHWLRHRKARNADTVAHLAIEAAAAQQTTLPGQKLAAAMVERLAKGVIALNTEIAETDAMIEQRFRQHRHAEVMLTLPGFGPVLAAEFLAATGGEMTAFGSADRLAGYAGLAPVPRDSGRIHGNLRRPRRYHRGLLRSCYLAAMASLPACPISKAYYQRKRAEGKRHEQALLCLARRRLNVIWAMLRDDTGYHASPPIPAAA

SEQ ID NO: 71692 - protein, 347 aa, unidentified
MDKELYIGVDVSKQTLDLAYYDGESIDWKNAHIKVSNNNAGFKKIDSWVAKVSKRFDIVLFCMEYTGLYTQNFRLWLEEKHYIYRMVEPRKMHRFEPDLDDGLRSLDRIKTDELDSFRIAIYCEQNHRKILRNPSKLPPPVYFKLKRLLAERKQTVKQSVLYKQQLHDICAYDTDLSVERKNGQLKTLNDALKGIDNEIDMYIKEDADINKNFSLLTSIPGIGRVVALETIVLTENFMAIDNPRKYACYIGVAPFKKESGTSVRKGSSVSKKGFKQAKADLSIACLVCMQHIPNIRDYWERKRKEKCSGIVFNAIKFKMILRMFAVIKRGTPYVETDNYRNGKNKQP

SEQ ID NO: 71693 - protein, 377 aa, unidentified
MGDYSEAFVGIDTSKLRNAVAIADAGRGGEVRFLGEIENTAAATAKLVRKLAGKYERLTFCYEAGPTGYGLHRQIKGLGFECAVVAPSLIPKRRGDKVKTNRRDALSLAKLLRADELTPVWVPDGRDEAMRDLTRARETAMLDLRTKRQHVSAFLLRLGRPYPESKKTWSKTHVSWIVSQKLEHPQQRLVLEEMMLAIREAQDRLVRLEQAIAAAVPEWSLAPLVTALMAMRGMDLISATTLLAEIGDLSRFQTPTELMAYLGLVPSEASTGDTVKRGPITKAGNRRARRMLVECSWSYQHPPRVGQAKQPKVDAAPLAVREIAWKAQCRLYRRYRMLISKGKLKTVAIIAIARELAGFIWAVARAVSTMRVAAATT

SEQ ID NO: 71694 - protein, 343 aa, unidentified
MQTVKTIGLDIAKSIFQVHGVDANGQVVIRRKLKRRYVLSFFEKLPACLVGIEACATSHHWSRQLQAHGHRVRLMPPAYVKPYVKRQKNDVADAEAICEAVTRANMRFVETKTPEQQSCLVLHRTRHLFIRQQTSVINAIRAHLAEFGIVAPIGRKGVEQLLDVVANTKDKRIPEVARACVAALGAQLRALKGQILEFDRQIMIWHRSHETCKRLDEIPGVGPALATALVASIADPKAFRSGRDFSAWIGLVPKQHSSGGKEKLGSISKQGDRYLRSLFTAGALAVIRYAKIYGSKHRPWLTALLARRPTKVAAIALANKLARIVWAVMTRGERYREPVALAA

SEQ ID NO: 71695 - protein, 410 aa, unidentified
MQVLHPCCCGLDVHKRFVVACLIWSTEDGKQHKELRRFDTLTPDLLRLIDWLQNAACTHVALESTGVYWMPIFNLMEGLFEIVLVNAQHMKAVPGRKTDTKDAEWIADLLSHGLLKASFIPPQPQRDLRDLTRYRTSLKQERTRHVNRIHKLLEETNLKLSSVFGDLMCKTGRAILHELAAGEANPEVLADLALLRAPHKRDALVPALQGCMRAHHRFLLQELLEMVQTLERAIGRLDHEIEERLQPQKELMEQLDAITGVSQRVLETLFAEVGWELDSFPDAAHLASWVGICPGQHESGGKRRSGRTRKGNRHAKTMLVQAAHAAGKTKTYLGAQYRRLSKGRGIKRAAVAVGHSILVIYYHMLTTSQPYEEKGENYFAQHDHQEKQRRLVKQLERLGYTVKLTQEHIA

SEQ ID NO: 71696 - protein, 371 aa, unidentified
MTKEQLTIHVGIDVSKDKLAVAIAGGGVRDEVLSLGTFENTPASVDRLLKKLSGRGLPVSVCYEAGPTGYGLYRQVRAFGFECCVVAPSLIPVRAGDRVKTDRLDAIRLARLFRAGELTPIWVPDETHEAMRDLVRARESAAEDQRHKRQLVSAFMLRHGRIYHRTRPWTMRYRRWLQSQSFDHPAHQIALQEMLQAERNATERHDRLIGHIEALVPEWDLAPAVNALQALRGVALISAVTFMAEIGDVRRFETPVKLMSYLGLVPSEYSTGKTTKRGGITRAGNSRVRHKLIEGAWTYRLPARPGARKLYILQEQPAEVQDIAWKAQSRLTARYRKLSQRGKKSTVITTAIAREMAAFMWDIARRTMPAR

SEQ ID NO: 71697 - protein, 344 aa, unidentified
MAYHTALDVSLRSVSICVVDDEGTIQYEGKTSSDVEAIVDCLRRFSPGIRSVGFEAGALTQYLTYGLQAAGYEVICLEARQVSAALSAMRNKTDKNDARGIAQILRTGWYSRVHIKSMESHLIRVLLSSRKAVLKKCVDLENEIRGLVRLLGIRLPGSFKHGAFDTHVRDAIKAHTTIAQSLIPLLDARLVLYKTYLKLYSQARALAREDSVCQRLMTAPGVGPVTALTFKAGVDDPARFKRSRTVAAHFGLTPRRYQSGEVDNPVRISKAGDPDVRSALYVAAHALVVRSAKWSSLKVWGLRLAKTRGHRRAVIAVARKLAVILHKMWVDGTDFQYGSTEATS

SEQ ID NO: 71698 - protein, 344 aa, unidentified
MAIVGGFDIHRRQITYDILDTDTGETRRGQLSPATRLELRAWLARFTGQQADFAFEGTTGWRFVAEEVMDAGFRAHLAEPADTRALRGPKRRAKTDRTDAHHLRELLRAGTLPASWMPPAHIADARTQVRLRRALVGEHTGWYQRIHAVLFHHGLPDRSQLLTADGRAWLARVELPAVARQAVELALRMIDHLDTELDLLDRELARIARAQPGCTALQRRYGIGWLTAVAIWAEFGDVRRFANSRQAVRFTGLDITIAESDGKRARGHLARQGSPVLRWALHEAAMCAARPSSPDHAYYLQVRQRLGGKRAALSVARKLAREAYHTLRELGDQALVPAELVTAA

SEQ ID NO: 71699 - protein, 388 aa, unidentified
MFFLGIDVGKNTHVASLLDEKAKVIFKAYSFANTLDAAEALLVKLEPYKDSLEIGMEATGHYWLSLYSFLTEHNFIVHVINPIQTDGWRKGIEIRKRKTDVIDSVLIADLIRYGDFLETSLADEDILSLRNLTRFRAYLVNSVSDLKRKAIAVLDQIFPEYASVFSNVFGQTSKELLKSLSLPSDYENLSATKIEEVLSNITQKKKASETISTLSDKASHSFGISFCKDSFAFQLKLIIEQICFIEEQIASVELEIEQLMSKLGTNIKTIPGVGNVIGAVILGEIGDIERFDNPSKLVAYAGLDASISQSGEYEASSGKLSKRGSPYLRKALYMAAQRAEFCDPVFHAYYEKKRNEGKHHLVATNAVARKLCHTIYAILKKDIPYEIQ

SEQ ID NO: 71700 - protein, 450 aa, unidentified
MAKAQRKKPRKLERNLPVMRPNASGVDIGATEIFVAVPADRDAESVRSFPTFTADLHALADWLRQCRVDTVAMESTSVYWIPLFQILEARGIEVHLVNAQHVHNVPGRKSDVLDCQWLQYLRSVGLLKASFRPEQAVCEIRSLMRHRDNLVQLACVHVQHMQKSLDQMNLQIHHVISDITGVTGLAIVDAIVAGNTVPQELAKLRDYRIKASIETVTKSLVGDYRPEHIFTLKQSLTAYRHYQQLIADCDQEVQRRIETFQSKDAGPTAPADSASPATAPQTSFDLRTHLERIFGVDLTRIPGFDVLRVQTIFSELGADLSDFRTDHSFASWLNLCPKDGTSAGRRIRGPRVKTKNRVTQAFRMAAFSLHNNKSYLGDYYRSQRARHGAIKATKNAAHKLARIFYHLVTTRQPYDETVFAKLEASNQKRKLHKLQTLARHLGYSLVTLPA

SEQ ID NO: 71701 - protein, 391 aa, unidentified
MKSIIYVGMDVHTTNFTLCCYRFGFDDIFAFAQVEPDYKNILTYLNKVKQNVGNDCQFLCGYEAGCLGYTLFHQLTTHGVNCVILAPTSMPVQLRPAIKTDKRDAMRIAKCLANGDYSAVYIPSDEDNSVKEYIRMRDDAKIALKRIKQQLLSFCTRNGKMFTDGSTYWTLRHLSWLRKLDFGNTLLQETFQEILATYYQASEKVGRYDKRIEELAQMESYREKVKKLTCLIGVGTITALATIVETGDFRRFQTARHFSAYLGLVPGEESSGKHIQRTGITKAGNSHLRKLLTESAQCYGRGAVGSKSKMLIRRQAGNTPQVIAYADKANERLRRKFYKINFRSKRNIAVVAVARELACFIWGMMTDTIEPVGGLSTEPTPNVLDREAIHA

SEQ ID NO: 71702 - protein, 415 aa, unidentified
MEGLQPLHRRVAGIDVHRMLHVVTVVIEQPDGSIEQTSREFGGFRRDCRALAAWLSELRVELVVMESTGIYWKSVHAHLENAGIAAWVVNAHFIKHVPGRKTDMSDSQWLAVLARFGLVRASFIPPKDLRELRLVSRYRRKLTQMHSAELNRLHKVLDDAGIKLGGVVSDINGVSATAMVKGLIEGQPIDSLLGLARGALKLKRDDLQAALDGDLSARHLFVLKHIHAHILSLQRELADIDAYLLAAMQPYALAHGLLQTIPGIDQIAAALILIEIGDDMERFGCAERLASWAALCPGNNESAGKRKSGRTRHGNGVIRYILCECANAARMTKSSLAAKYRSLMGRKSHKKAIVAVAHKMIRLIYVLLTRQQAYLDQHIDYAAMSARKNAPRWIKQLKLIGKWPAPKSAPATATT

SEQ ID NO: 71703 - protein, 318 aa, unidentified
MKTTINQNINVGVDTGKHQLDIYIRPLDIYFTVSNDEKGIKEAVKNLKKYNVERIIIEATGRLEMPFIMACAKADLPFVIANPVHIKRFAGAIGQRAKTDKLDAQLIAHYGEAIKPALSQLKPDAMQAMSDLVARRSQLLSMQTMEKNRLQILPKELVMTIKPILTAFKNQIEKIEGKIGQLIEKNPDYQAKSLILQSMPGIGKIAAASIIGNLPELGYINNKQASALVGVAPMNRESGRYKGQRKIQGGRHQVRTVLYMAMMSAMQCNPVFKETYQRLIAAGKPKKVAIIACVRKMIVILNSMLRDGVMWDATTVKN

SEQ ID NO: 71704 - protein, 313 aa, unidentified
MSQEKVFVGIDVSKVELDVAVSSLQEREVFAHTEEGLGRLVERLKPLSPALIVLEATGGLEMDVVAALLAGELPVVVANPRQVRDFAKATGQLAKTDALDAQILARFAESVRPEIRPLKSAESRDLSALVARRRQILEMITAETNRLRMAPVCTRKNLEAHIAWLKKCLQDLDKELGQAIRKSPAWREKDEILKSTPCVGQVLSTTLLADVPELGLITGKEVSALVGVAPMNCDSGQFRGRRRVWGGRAHVRAVLYMSTLAGIRCNPVLRSFYQRLRLAGKEHKVAMTACMRKLIITLNAMMKNHSRWSPSHA

SEQ ID NO: 71705 - protein, 319 aa, unidentified
MTLTPVFVGLDVAKATLDVALRPSGEQWSVPNDEAGAGALVERLRPLHPTLVVCEATGGFERAAIAMLAAAGLPVVVANPRQVRDFARATGQLAKTDRLDADTLALFAERVRPTPRPLPDEAAQLLDALLTRRRQLLEMLVAEKNRLGFAPRPLHHGIHQHIRWLERQLDNVTKDLADQIERSPVWRAKDDLLQSVPGVGPIVSAVLLAELPELGALSHKQLATLAGVAPLARDSGTLRGKRQVWGGRAGVRTALYLAALCGRRWNPQLRVFYERLVAAGKPKKVALIACARKLLTILNAMLRDSTHWVAPATALQHSC

SEQ ID NO: 71706 - protein, 361 aa, unidentified
MNHIAIDLGSRESQICIRDSSGRILTEERRGTCSLGKYLAGKEKSRVVVESCAEAFVVADAAKAAGHEVVVVPAMLVRQLGVGDRGLKNDVRDAQQLSNVSCRLPELPTVHIPSTLSRERKAMCNMREAQIEARTKLVNTARSWLRTQGIGVMRGGGQETFPERFRRHVKSRGRNVPEEVNRVLQALEALNLGIAEADKQLAKAAEEDPVCKLLMTAPGIGPVSSLRYAAALDDISRFHSAHGVEAYLGVVPGENSTGESRKRRMTGITKAGPPRVRWTLTQAAWVILKCNKHRTTEVMDPMAAWAREVAKRRGKKCAAIALVRKLSGVLYAMWRDRKPYDPSHMRKAMQQAGMVAQLPAL

SEQ ID NO: 71707 - protein, 384 aa, unidentified
MNKHSILFIGLDTHKEFNEVAYIEEHRGAQPVHLGRFSSSKVAVQKLVRQFESKYPGATLHFVYEAGPCGYWIYRLITSLGHCCYVVAPSLIPKKPGEKIKTDKRDALKLAKLLKSEDLTPIYVPEPEDEAVRDLSRAREVAMKDLKDAKYQLKALLLRNNINYKGTANWSQKHLRWLTELVLPHPAQHIVLQEFLQTITERISRLERLDNELTHHVHQWRYYPVVKAIQAMRGVRLLVATGVVAELGDLSRFDHPRKLMSYLGLVPSEHSSGGKRHIGAITKCGNGRARRLLVEGAHTYRYAANISTDMQKRQEGLPKDIIDIAWKAQLRLCKRYKKMIAKGKHYNLVVTAIAREMIAYIWAIAREVVLTPVNTKLRLARVPA

SEQ ID NO: 71708 - protein, 365 aa, unidentified
MERYIGLDVHCKESVYVVQDEEGRVVKEGAVETTEAGLKAMVEGAEAPGGTKVGLETGTQATWVARVLEGLGMTPVVIDAHEVRAKARRVGQKSDRRDAWELCDGVRRDLYTAIVYVPSEAVERLRRILSRRRHFIKARTQQVNAAKFVLRSQGLRGMCRSLKSAKAWQRLLADERGSAVRDHLALHASVWHVVQETVEVLDQELTEAVNPFAPTVARLQTLDGIGPITAAAYVAALGTPERFPDSSHVVSYLGLAVSTYDTGERERHGHITKRGSANVRGLLCEAAQHASNPTHPLNPCFLRLYARYGRNVAIIAVAQRLARILFQMWRTGQDFDLRQLNVRPIRRTRSRTYYFEIKSPAAVTV

SEQ ID NO: 71709 - protein, 355 aa, unidentified
MSKTNPVKIIIGVDTHKDIHVAVAINGIGAHLGTLTIPVSPKGYQNLETWARAFGSIHAFGIEGTGSYGAGLARFLQAKGHTVVEVNRPNRQLRHQNGKSDPLDAESAARAVLGGQANARPKSADSSVEMIRHLKVARDTAVKSRTQAMVTLKTIIINAPAALRQAIDRIIGKMALIRHLAARPGPILSVTASAKGALRAIARRWLTLDAEIRAHDADLEALTASCVPAMLEAHGISTGTAAEMLILVGDNPERIRSEAAFAKLCGVCPVPASSGKTNRHRLNRGGNRQANAALYRVVIVRMRNHQPTLDYVKKRKADGKGKMEIIRCLKRFVAREIFGYLCGAQRSVPSISKAT

SEQ ID NO: 71710 - protein, 385 aa, unidentified
MYQLSGSTQAALDYNSTIIGALELSEKKWVLAVQLPGVSRHSRHVLEACGDGLASFVERLKARCAAAGRKIARVILTHEAGRDGFWLARFLARRGIEVHVIQPSSLPVDRRARRAKTDIIDVEMLLRTLMAWLRGEPRVCSMVPIPSEADEEARRGYREREDLTGERRSIVNKIDGILATLGVKGYKALRRDRREQLTAVRQPDGDPIPQKARARIERLLDRLDLVLKLIEQVESARDAVLKKDAPADEAERMIRSLTDLRSIGPDFATLLVREAFVRQFRNRRALAGYVGLGGTPFSSGGSEREQGIGKDGNRRVRAAMVELAWMWLRWQPDSALSVWFRGRVGAMGGRIRKIMIVALARKLLVALWRYVNDGVVPDGAELKAA

SEQ ID NO: 71711 - protein, 461 aa, unidentified
MKKKAKQIEKPEKVNQSDAMISVPVVNPHAAGIDIGSTSHYVCVAQNNVKEFPVFTADLHEIAKHLLAHGVKTVALESTGFYWKPLFVMLQDYGLEVFLVNARHLKNVKGHKTDVVDSRWLQFLHSIGLLSNSFQPEAFTHQLRTYCRHRRSLIQDASKYISKMNKVLVLMNIQLKVVLRDISGVSGMRVISAILAGERDANKLESLVSTKCQSERKDIVKALTGDFREEYLYELQDCYDLYNYYWQKIVQTDKEIERLLALNSQKEPHQISKEDYHPAKKIQKQKKDPKFDVPAYAYEMTQGVDLTEIPGVKLNTILTMMTETGFDLSKFKTAKHFVSWLGLTPNRKITGGKVKSSKTRKQTNPLAQMLREAANSAGNSKTRLGDFFRRLAFRKDRMVAIIATARKIGVIIYNMLKNKQSYSYEYSHDDAQRIKSVKIRQIIKTIQSYNISKDDIEFALT

SEQ ID NO: 71712 - protein, 341 aa, unidentified
MEVATVGLDLAKHVFQVHCADAQGRPVIRKRLRRTQVQAFFEALPPCRVGMEACASAHHWARELSKLGHRVRLVPPQYVRPFVKTNKNDAADAEAICEAIQRPTMRFVPAKSVDQQAVLTLHRSRDLLVRQRTMLVNALRGHCAEFGLIGSQGRQGVQTLIELVRTGSTQLPELAQAALGFVVSEIASISDQIKQIEIKLRAWHRQNPDSQRLATIPGVGLIVATALSATIGSATQFRSGRPLAAWIGLVPRQFSTGGKPKLGGISKRGDGYLRRLLIHGARSVLLRHYTGEARSTWVAGLTSRRSTNIATVAIANKNARIAWAVLTRSVTYEPAKTSLAG

SEQ ID NO: 71713 - protein, 387 aa, unidentified
MAQVNDLSRSLTAFDPISTSVVVVEMSNASWLVSGAVPGVERQPLKKLEPDATALLRLIERWRNEAMRSGRPISRIALAYEAGRDGFWLARWLIARGIEAHVIHSASVAVSRERKRAKTDRLDAAMLMRVFLGWLRGERGHCGMVVIPTMEEEAARRPSRERESLVNERSRITNRMKSALARLGIRGFKPHLRKAPERLAALRTAEGTGLPANVIEEFRRDMARLALVREQISSIEKTRAERLERAPDTGPHAMVRLLARVIGIGIETADMLVREILSRKLRDRRAVARYAGLTGSPDESGLKRREKGLAKAGNARVRRGLIQLAWRFLMFQKDSALARWYRMRTEGPSGARKTTMIVALARKLLIALWRLVTTGEVPDGVELRPAA

SEQ ID NO: 71714 - protein, 361 aa, unidentified
MRIIGCDLHARQQALAMLDTTTGEVVAMILKHEGNNVREFYSKLPRPVRVGIEATGSMLWFVNLMEELGIECQVGHPANIRAAEPRKQKHDRRDADLILKLLVENRFPKIWLPSKEQQDLRALLRHRHQWVRIRTRIQNALQAIALANGLRRGPGLWSQDGQRTIASLPLAPHAAYRRSELQAMYAKFAKEIEKLNQRVEEQACERPGARLLMTHPGVGPITALATEVFLGDAARFADSKALASYVGIIPSEYSSGERQRFGGLSKQGNPLLRFLWGEAAMHAVRRDPELQRFYRRKLVQKGLGKTRVAVARKLGIRLWIMLRDEIDYNEFCRRGQKQQKSSEACAGMPDTGHGAKQSPTD

SEQ ID NO: 71715 - protein, 428 aa, unidentified
MTPNSESSTGVLFVAIDVAKQIHEVLIESPTGGRQRWRMVNCQRDFDLLRQRLQAFQTPARIGFEATGTYHRPLAYFLHQCGFELRLISSLAVARTRDALYNSWDKNDPKDTQVLLHLLKTGVTQRYHDPLVHAINDVQELAQTHYQVSLRKVRVQHSIMTHYLPLYFPEAERYYTNSRAQWFTHLLCQFPCPAAITRYSHEAFEQEAWAVVGRKVNKRGVLHDLYLTASQSIGLPVAEESEAIQMFRVILMEHQQLCIRRAEIEQQADQALHGHPDYQRLRTLPGIGPILALTILAEAGDLRRFPHHRQFLKFCGWDLSTQQSGQFRGTSRLSKHGNARLRYAFWMAAQGAVRMRENTFREKYARYIKSDPQNPDRKRKALCAVAAKVARVAHGLIKTGTDYRPYFEALPPSGALRSRGPSRQILTS

SEQ ID NO: 71716 - protein, 337 aa, unidentified
MEYFAGLDVSMEETHVCVVTRNGNVIHEAKVPSMPASIAAALARVPSCQWVLFETGRMAPMLYHGLSQLGLPVVCVESRQAYQALKSLATHKTDRNDARGLAHLARTGFFKPVHVKSLPAHAVRSLIIARKKLVGQRVTLENQIRGLAVVFGVRLPRALSPAFIRQALEASEGIPGLSAAMRGLVAARVAVLAAVVAIDGDIRKMARASGACRRLMSIPGVGQLTALAFTAAVDDPGRFQRSRDIGAYLGLVPRRYQSGEVDYTGGISKCGDRRVRTLLYEAANVMLTRYKGQLKLKDWALAIAKRSTMRKARIALARRLAIIMHAMLQHGTEFKPA

SEQ ID NO: 71717 - protein, 344 aa, unidentified
MQHYVGLDVSVKETSVCIIDKAGKVIREVKVATEPVAILAVLTEEPLALERIGLEAGPLSQWLYSALAEAGLPVICVETRHMKAALSAQINKSDRNDARGIAQMMRVGLYRPVHVKTLASQKRRMLLTSRQLLQAKALDIENDLRGTLRNFGLKVGMVGTVKFEARIRELVADHPDLAAIVEPLLIARRVLREQLDVLHRQLLEIVRHDEVCRRLMTTPGVGPVVALTFRATVDVPSRFTSSKSVGAAFGLTPRRQQSGEIDRMGGISKCGDAMMREMLFEAALVLMTHSGKWSWLKAWGMKIARHRGMKRAIVAVARRLAVIMHRMWMDGTKFRWSSKEVAAA

SEQ ID NO: 71718 - protein, 370 aa, unidentified
MTRYVGLDVHSKQSVFVIQDGRGTRVAEGEIPTTPAGCRELRDAHHLPAETPVALETGNLAFFVARQLAALELRPVVIDAHEVRLKAHRPTQKCDRRDARALCDGIRTGMYHSIVHVPPHDIAVLRDTLWRRRHFVRVQAAEINAVKSLLRAAGQGHLCRYLRNERGWMTLLATLAPSALRNYVEQHHALWRCADEQRRALETSLGVQAIHFAGPLRQLQTIPGVGPIVAATAVAVYSDATRFPDAKHAASYIGVIPSMCQSGAHNPSGRITRRGSAELRGLLCEAAHHARRPTHPLNPYFAKLCARRGYRMAVLAVAHRLARIIYAMLRHRTDFDATKLGLECGHFEFTTVRAYRLRKLGRATRMLSRA

SEQ ID NO: 71719 - protein, 364 aa, unidentified
MFQLLLRQEESEMNATTVAVDLAKNVFELAAADGSGRVVERARLTRTQFERWFGNREVGRVVMEACGSAHHWGRVLRARGIEVWLLPPHYVRAYVKRNKTDAADACALLEAARASDIKPVAVKSVEQQALQGLHRTRSGWMASRTGRINMLRGFCREFGLVVPEGAARGLAQIARFLADERSGLPTILRGSMRLVLEEIRLMEARIQSLEQELTELAKLSPACQVLQSVPGIGLLTSTAMVAAVGDPRSFDSARRYASFLGLTPREFSSGGHRYLGRISKRGDRYIRMLLTHGARSVLRAATVARRCGRQLDRLKTWALQVQARTNHNKAACALANKMARIAWAVWVKHEKYRTEPAFTAQPGA

SEQ ID NO: 71720 - protein, 403 aa, unidentified
MNAVGIDVSKGKSMVTILRPFGEIVSSPFEIKHTSSDIHSLIKLIHSIEGESRVVMEHTGRYYEALAHQLSAADLFVSAVNPKLVKDFNNDSLRKIKSDKADSVKIARYALDKWQSLEPYSITDELRAQLKVMNRQFHFYVKQKTAMKNNLIGLIDQTYPNANTYFNSPTRSDGSQKWVDFVSTYWHVDCIRKMSLNAFVEHYQNWCKRKKYAFNKSKAEEIYTKTKELVPVFPKNEITKHIIRQAIDQLNSTSVTVETIRTLMNETASKLPEYSIVMQFKGIGPSLGPQLMAEIGDVTRFTHKGALTAFAGVDPGVNESGSYAQKSVPTSKRGSSNLRKTLFQVMDVLIKTMPQDDPVYQFMDRKRTQVKPYYVYMTAGANKFLRIYYGRVKEYLSVLPDPS

SEQ ID NO: 71721 - protein, 348 aa, unidentified
MQVTTLGIDLAKNVFCVHGCDANGKPVLRKQLSRRQLLSFIANLPRCLVAMEACASAHYWAREIEKLGHQVRLIAPRFVRPFVKANKNDASDAEAICEAASRPSMRFVAVKSTAQQDVQAVHRVRQQLIKTRTALVNQARGLLAEYGIVVAQGVSRLRRALPAILEDRDNGLSGVMRELLAEIAERLRFIDDRLRKYDLTIHRLFRQDERCQRVAAVEGVGPLSATALVAAVGNATDFKSGRELAAYLGLVPRHRASGGRTVLLGISKRGDRYLRTLLVHGARSALYRIERQRGARAIWAARLKLRRGANVAAVALANKNARVLWALLSRGQSYQPAPFPARVPQAGG

SEQ ID NO: 71722 - protein, 349 aa, unidentified
MKTYYVGMDVHSATIRIAVLNGAGKVVMELVIETGAERVRSFLKQLRGKVYVTFEEGTQANWLHDIVRSLVTEVVVCDPRHNKLLQSGNKNDRVDAQKLAELLRLGSLKAVYHGDHGVQTLKELVRTYDCLVSDTTRVMNRLKAIYRGRAIACAGHDIYRQDRRKQWLAKLSEPGAKQRAGFLYEQLAALKPLRRKAKLAMVKEVRRQTAYRSLMSVPKLGSVSVAQLIAVVGTPHRFRSKQQFWTYVGLAVVTRSTADHEVVNGVLRRSQRPVSTRGLNRNHNHLLKRVFKTAATSACHSGPFKAGYDVRVARGMAPSLARLTIARQLAATTLAIWKRGEQFDPERKK

SEQ ID NO: 71723 - protein, 407 aa, unidentified
MEVLYPHCAGLDVHAGSVTACARIATGAQISYEHRTVSTTTRGLLELDEWLTAHGCTHVAMEATGVYWKPVWHVLEEHFTLVLANAMHIRNVPGRKSDMNDATWIADLLAHGLIRSSFVPPAPIQELRDLTRTRRQLVHEVARHVLRIQKTLEDANLKLTQVMSDMVGVSGRAILNALVAGETDPERLADLTRGRLKATRADLVDALHGRVTDHHRFMIQLHLSQIDALETAIAHIEARIGDALGPFRAAVSLLTTMPGLSETTARVLIAEIGTDMSRFPSVGHLISWAGFCPRLDESAGKRRSTRTRQSTPWLKPTLINAAWAATRKKDSYLRAQFLRIKSRRGAKKAILAVASSMLTAAYVMLRDGVEYHDLGSHHFDQRDKQHLAKRLLQRLRDLGVAVEVKAA

SEQ ID NO: 71724 - protein, 391 aa, unidentified
MEVICPRCAGLDVHKQSVVACARIAGEGPLVQEVRTFATTTSSLLELADWLDSFGVEHVAMEATGVYWKPVWHVLEGHFELVLANAAHVKNVPGRKTDVNDSMWLADLLAHGLIRASFVPPVAVQELRPLTRTRKQFVRERAQHVQRIEKVLEDANIKITSVLSDILGTSGRAVLQALIDGCSDPEHLASLVRGNRLKASRAELTQALGGRIRAHHRFMLKLHLGHIDALDKAIADIEKEVGLGLEPFRAAARLLSTMPGLSQISANVVVAEIGIDMSRFATPGHLLSWACMCPRNDESAGKRRSTRLRRGGKWLKTTLVQAAWAAVKVQGSYLQAQFHRIRARRGAKKAIIAVAASMLTPAWHMLRDGTEWHDLGAAHLIALTPKKPPTG

SEQ ID NO: 71725 - protein, 355 aa, unidentified
MDVHKYAHHAVALNCLGQELSQLSFTNDELAHCRTWLNGLGAKPAIVVGLEDVNGVGTRLSQFLLQEGFTCRYVPAILTERERKHSVQHDKSDYLDAKRVGKVILTKSEETLPVSPILTQENTYIKELDLLLQERQELVREQTAVKNQLHVLLHQYYGNNYHQEFKHIFSQKALTWYKKDLRIIQSDTKGSALLAAAILRRVERLQLILSQVAAIDKTLNGTSKTISEVEVLTKELVGCGKLTACKIIVEVGTIQRFNSKDKLAKYAGIAPVRDQSSSKNRFYTNSGGNRKLNQAIHTVALSQIGAGGYEDAKKYFQKKVNEGKSKLWAIRCLKRQISNRIFLLLKNASNTKLTN

SEQ ID NO: 71726 - protein, 414 aa, unidentified
MLKIVYRVCCGMDVHKSFVVACIASTNEYGVTTYKSKRFSTFTGDLRRCAVWLAENNCKDVCMESTGKYWIPIYNILESTCNIVLAHPKYVKAIRGKKTDKRDAKWIADIFKHDLVAGSFIPPADIRQLRDLFRYRWKLTSFTTGEKNRAQNCLTVSNFKLDDVFSDVFGKAASAITSRILENPTERITDVSSFRTKGMRATNEQVLAAVDGEMCAEQAEKLRIIRSHMSSLELCKLHLESLILATAEKYLPQLNLVMTAPGIQSFAAIGIISEIGVDMSVFPTSKHLCSWAGLTPQNNESAGKKKTTRISRAGAYIKPLLVQCALCAIRAKQFPEVRNRYLALKKRRGHKKALIAIARMLLTVIYNMLKKNEPYNLELYRKDDRPPAHREVSVEEAIFILQRQGYLVTAPSTT

SEQ ID NO: 71727 - protein, 361 aa, unidentified
MPKSVAAAKPARSTAVIGGVDTHTDTHTAVALDSVSGVRLGVAVFPTDTAGYQALLDWLGGFGRLGRVGVEGTGSYGAGLAWFLQDHQVEVIEVNRPNRQLRRLKGKSDPIDAEQAARAVLAGTATAVPKAHNATVEAIRVLFNTRTSAVGDRTAALNQLHSMLVTAPETLRAQLRGLSTVKLVNTAAKLRPGANLTDPTQATKHALRSLAERIHHLDAEIATTTKLLDTLVAVHAPLLVAECGVGTLTAAQLLITAGDNPDRLHTPEAFVALCGANPIPVASGHTHRHRLNRGGDRQANRALYLIALTRIRSHPETQALMARLEANKKTKKEALRIIKRYLARRLYAILIETATPQATAA

SEQ ID NO: 71728 - protein, 318 aa, unidentified
MNNPTFQSINVGVDTGKTQLDIFIRPIGLFFSVSNDDKGIKEAITTIKKHKPERIVIEATGRLEVPFVLACSKAKLPCVIANPIHVRRFAGAIGQIAKTDKLDAQLIALYAERIEPPLSTLKPENIRLMSDLVIRRNQLLSMQTMEKNRLQILPKELAMTIKPILTTFKNQIQKIEEKIIKLIESCDEYKHKNEILQSVPGIGKVAAASLISNLPELGSIGNKKASALVGVAPMNRDSGRYKGHRKIKGGRKQVRTVLYMAMMSAMQCNPVFKSTYSRLVAEGKPKKLAIIACVRKMVVILNSMIRDGVMWDENHANN

SEQ ID NO: 71729 - protein, 327 aa, unidentified
MTNPELFVGIDVSQARLDVALHPTGETFSVSNDDEGFTLLCTRLAASSPTLIVCEATGGMERPVVLACTLAGLPITVVNARQVRDFARATGQLAKTDRLDALILARFALAVRPEVRAIPDAQLRHLEALAVRRRQIVAMLTAERNRLGAAQSKVVRTHIEQLISHLQTLRKDLDRELLEAVQAEPVTQHRFELLCSAPGIGPVVALTLLSALPELGVLSRGQIAGLVGVAPINRDSGRMRGRRTTWGGRAEVRTALFMATTVAVRHNQTIKAHYEQLLARGKPKMVALIACLRKFVVRLNAMIRTDKPWQDQAEEASRPVGTANAVS

SEQ ID NO: 71730 - protein, 397 aa, unidentified
MIAVGIDISKGKSTVAILDGDGSIRAHPYEMNHSKAELDALIKYIKAVDDHPIILMEPTGHYHHPVLKAFLDAGLSPSLVNPYLLKKYGDAELRKAKTDKKDAMRIARYALEKWYSLVPYSPMDQKYADLRFLSSQYRQRISMVTKSKVQLINLLDESMPGITTILALKSRNPEKCMLLQFIKRFHSFDYINSIGKTRFMNSYTTLARKVGERNAAAKGLAIYELSKASITTRSNSDYMDIALDQCVDILSDSQRAADEIMLQMQNIAETIPEYKVLLSMNGVGDRLGPVILAEIGDIRRFHSGKALNAYAGNDAPPYQSGQFESRNRHISKRGNPALRKACFEVMQALKLTKPQDDPVYLFMMKKEQEGKPYNVAKMAAVNKFLRIYYARAMELYK

SEQ ID NO: 71731 - protein, 347 aa, unidentified
MNHYVGLDVSLEETAICVVDGTGRIVKEARAASEPEALIAALREIDWPLERVGLEACSLTAWLHDELHSAGLPAVCIETRHANAAMKTMPNKTDRNDARALAQIMRTGWYRQVHVKSRQCRLWRSLLVARRTVLNEMRSIENVVRAVLREGGLKLGTPSRAAFAERVRDLMAEDASVKPLVDPLLTILVTMLDQFARLTKQVLDIVRREKVCRRLMSVPGVGPITALAFRATIDRPDRFRRSRDVGAHLGLTPARYQSGETDVSGRISRCGDELARTALYEAAHTLLVRSRKWSSLRAWGMKVAKTRGMARARVAVARKLAVILHRMWSDETEFRFGRNPAAALAAA

SEQ ID NO: 71732 - protein, 425 aa, unidentified
MCHAEEPNHSQIKEEESAMKLTHSEVKHLSDRSPRAVHAKAQRAAPGDRKVYTVDLAKEHFHLNVYSAHGELLSSKGLSRQQFEKRVSDPQRARGMWVMEACAGAHGWGRKLLALGDQVKLVPPQFVAKQRIGNKNDCNDAAAIFAVHLDARVHPVPVKGEVPQGQLAIHGARQLLKASRTKISNHLRSLLAEHLYVTAKGARALKKLVSELSEIESAAQLNVDVQVVLASLQTMLKSIDEQLALLDDKVKRQVTQSPIAMSLIEAPGIGPITASAMAAEYAGGVARFSDSRQFAANLGLTPGEHSSGGKTRMGGITKRGNAYLRQLLVQGAQGIVTSACPKPNSKRGLAQEVNPNAIKQDDLHVFARDLHARKPRHVVVIAVANRMARMVYAMLKSKAAYRPQRDRTKTKVNAVNTMPGHAMAA

SEQ ID NO: 71733 - protein, 349 aa, unidentified
MNPSIAQAQFIVGVDTHKTSHTASVVDRAGAEVETITLAADAFGYKRLLTFARRAGPGDRLWAIEGTGSFGRGLTTFLLEQGEVVAEIDRPARPARRSGAKTDELDATRAAREALARDHLAQPRRRGDREALRVLLRTRAGAVSAKSRAICHVKALVVTAPELLRQHLEALASEELVPRCARLRTALHHSVEHRATILALRATARRVLTLEAEANDLESQIELLVRAMAPGLLVETGVGPLTAAEILIAWSHPGRLRSEAAFAALAGVAPIPASSGQVTRYRLNRCGDRQLNCALHTIVLCRLTHDAETRRYAERRAAEGRSPREIRRCLKRFVARRLFRILEHGNAAA

SEQ ID NO: 71734 - protein, 378 aa, unidentified
MTKHSTKPPARKTQNSSSGRRRSTELRSIAPCAIGVDVGDRFSHVCILDGDGVPCKEERVRTSEAGFRQYFEALPRAQIALEAGTHSGWVSRLLQACGHSAVVANARELRKIHQSDRKNDRADAEILARMVRFDPQLLCPIRHRSAQMQADLAVIRARDTLVAARTKCVNAARGLVKSVGARLPKCSTHSFAAAVLDHVPVELHAALSPLIETISNLSEQIRRYDRNIEALAKNYPATDVLRQVSGVGALTALTFVLTVADPQRFRKSRDIGPYLGLVPRQDDSGDHVSQLPITKAGDAHLRRLLVGSAQYILGPFGPKCSLRSYGERLAQRGGRNAKKRAVVAVARKLAVLLHRLWITGEVYEALRSEPTQRSDRAA

SEQ ID NO: 71735 - protein, 316 aa, unidentified
MKKYIGIDISKSSIDVYDGKQSYKFENNEIGFQKIVSLVSDISNATFIFEPTGVYSYPLTEFCDKHSIACVMVGPKVSRDFARSLKARSKTDKIDAKLLYKYQCQVESNMIKVPKVNYHAIEIQEMLNVYEGIQLSKQKLKNQLESISKKHKDLIRIINRMIKVHEKEANALFTKMETLLLKDTTMKNKYEAMLTIPSIGNKSALYLISFFIKYPLANAKELTALVGLDPIIRDSGTYKGKQRISKHGGQQLRNLLFLPTLSSLKHNDRIKEFYTRLTTKAKPKKLAVIAAMRKLVLMAFSIFKSEQNYQPLLAKI

SEQ ID NO: 71736 - protein, 332 aa, unidentified
MSDQAKTIDIIGADISSGEVVAAWVRSNKPQQTIANNRKAILAWLKQLPPNCVIGMEATGRYHYLLADLAVMCGHTVYVINPKHLASYARGVGQRGKTDPLDAQVIARYVDRERDQLHPYVVPSPLQRTLRSLLSQRSGMVRHSVAIKQNLEATPVEANTALKRARQKVLHSLAGLIAEIDRELKRIVITDTTLETKRKQLQAITGIGLLNSMALTHRFDRTPFANSDAVVAAYGMDPRPKDSGKHVGKRRLTKQGNPEDRRLIYLAAQSASKTKLFNPLYKSLLARGFATTEAILILARKLLRIAFAVWTSGKPFDPTKIGAKGVLPHLKI

SEQ ID NO: 71737 - protein, 366 aa, unidentified
MVTAALDLGDSESLATILSPDGDVVDSFSMSMSDDGYSSFASKVPKDARIAFEATSMAYPVSRRLTALGYSDITVAHSKELAWIVKSKKKNDRIDSLKIARLHMAHMLPESHLLSREEQVKRDLLIQRVTLGKEIGKMKLKLIAYLKREDVYLSLPESSDSFSRERRQAIRSMRFGGDGDDDGRGLVVGTMMDRLEFLERQCAPLEEKVRTIVKDSEDIRRLMSIKGVDFYLASLASSYVGDVNRFPDDDHLASFLGIIPESWDSANVKRRGHMSKEGPSTARWAFSVMTDTVMRYNPRLKTYYLSVKKRKNSGSLAHVATMRKLVRMIDHMLRYKENWRWEDEASTAKKLANLDREAEAKTTGGD

SEQ ID NO: 71738 - protein, 483 aa, unidentified
MAERKKNTFQRLKKGQLNRKERRDLERRLSTEAPGLEIVNRNVAGIDVGNESHYVAVPPSRDPQPVQEFGSWTADLERMADWLKMCGIETVVMQSTGVYWIALYDVLEKRGFQMCLANARHTKNLPGRKSDVQESQWLLKLHTYGLLRNSFRPPDEIRALRSLWRLRDRHVKEAARTVQHMQKSLITMNVQLSNTISDLSGTTGLAIIRAILTGERNPEKLAKLRDWRIKASEEEVARSLEGNWREDMLFELRQSVDAYDFIQKQVAECDQRLQTLMAELPMREAPAAVPAVRDGVKPPVRKKKSTRNKKNVPRFDLKAELQRVCGLDLTSIDGIDVMTAQTVVAELGTDFSRWKDEAHLTSWLGLAPCRDISGGKVLKQTTLRVKNRVAAALRGAANTLLHSDSYLGARFRSLRTRRGAPKAIKAMARYLACIIYRMFTRGQAFVDRGAQQYENSRAQRELAALQFKASAHGFRLVDVQHPA

SEQ ID NO: 71739 - protein, 458 aa, unidentified
METRTLGIDLGIRAAHKAVVLDQASNTFVSPVLSFHTDPADMDRLLSIARSGTSDDVRLIAVLEATGMAWYPVSVYLSSKGVEVYRVSGQQVADQRRVYQRRAKSDRIDARILARLPITLSERIHPLFLPTGPQMALQRACRELLRLTRQSTAIKLRLQATDRLAWLELSHVLSAHDPTLCWVREHWYDPWRVLEAGETAIAQAWLEASGESSPDLSWIPALVRQADRVVAVYGSHQRVAYDYLQTSVLREQARLEELQSQAHLLRLNTIRPLYRQLYPQRYLETIPGIGQDSAAIYIAFIGDVRRFPSLREFQGWAGMIPFSKQSGDARASGLRITQAGPDPIKTTSFLNAQVARLRDPQIAAVYYNQMTHLGKHYLKAMCACASHLLDRVYIVLRDNRPYELRDVDGTPVDKHRAYSICQKLYHVPDNVRRRTAHRVRQTRRETRLERRHEQHSQK

SEQ ID NO: 71740 - protein, 343 aa, unidentified
MQVATTVGLDIAKSVFQVHGVDAAGQVVIRRQLKRRYVLAFFEKLPACLVGIEACASSHHWSRELKTLGHTVRLMPPAYVKPYVKRQKNDTADAEAICEAVTRANMRFVATKTPVQQSCLTLHRTRHLFIRQQTAVINVIRAHLAEFGIVAPVGRKGIETLLDVVANPTDKRVPVIARACLAALGAQLRRLKEQILEFDRMIMAWHRSNEASKRLDAIPGVGPVLATALVASIADPKAFRSGRNFSAWIGLVPKQHSSGGKDRLGNISKQGDRYLRSLFMAGALAVIRHAKIHGTTHRPWLTALLARRPTKVAAIALANKMARMVWAMMTRGERYKDPIALAA

SEQ ID NO: 71741 - protein, 347 aa, unidentified
MLIIGCDFHPGFQQVAIFDNRTGEIEEKRLQHRAEAEQFYRSLAGQEVLVGMEACGHYPWFEGLLQELGMELWFGDAAKVRASVVRKQKTDRRDAEHLLDLLRENRFPRIWVPSLEVRDVRQLLVHRHKQVQARTRTKNQLQAMALSHGVQKKRKLWTKAGRAELEQLPLLAYAAQRRKKLLEALDELDVEISELDRRVAEEARERPEAVRLMTHPGVGSVTALAMVLTLGPAERFGSGKQVGSYFGLIPSEESSGGKQRLGKISKQGSSFLRFLLVEAGQTAARYDPQLKRFYRRLAVRKNRSVAKVAVARKLATRLYLMLREQWTYAQLSQAVMQVSPSHSVAGE

SEQ ID NO: 71742 - protein, 394 aa, unidentified
MKLVGIDVGKNSHHFCVMDKETGELNVTPSSFSNNKEGFDFLINSLKPYSKKSILIGMEDTGHYHVALLKFLLSNGYTVALINPKTTDLTRKMEGGITKNDKLDTITICDVLDTPERKKQYRITKVDRFDLYEQRQLTRHHHNLKEELNVYCNRLQKSIDLVFPEFNTLFSSKYGIVYMNLLKTFGSAEIIASTDIRTIRKCFEIKGRGNRISLTPEKLKECAKNSIGISSEVETIQIKHLVSQITLIKEQIAEIDKKIEEFSIKNNSPILSIPGISHFSGTSILAELGDIGNYSKPSQIIKFAGVAPYHYESSQYNAQHTAITKKGSKYLRKTLYQIILPVIKNNPVFKKYYLLKISQGKGHRCAQGHCIRKLLRIIYHLLETGQSFDPALLR

SEQ ID NO: 71743 - protein, 346 aa, unidentified
MAASLPPPVYRLFVGVDIAAVTATVAWLLPGTPITRPITIDQTPSGLAQLQARLQATGIAPGDTLVVLEATGSYWITLATALHQAGYAVSVINPMQAHHFAKALLKRAKTDAIDAQTLTHLAAQLQPARWTPPPTVYYELQQRLAQRDALLDLRQQVRNQLHALVQGPVVIATVRMRMEQLIATLTDQIAAVEAEIAPALQQDAAWAAAAERLRTIKAIGLLTAAWLVVTTVNFRLCPSADAAVGYAGLAPMPYDSGSSVRGRRRIGHRGNGRLRAALYMASLSAAQHNPIIREFYERLRAAGKLKKVARCAAARKLLRIAWAVAVKGQVFDPAYRRPAASEAQAT

SEQ ID NO: 71744 - protein, 438 aa, unidentified
MSNKVIFNLDELFISVGIDVGADFSWMSIALPNQQFVGKPYKILHNSIDSLTTAVSKIKEAEELYSLESRIFLESTGIYHYPLFCYLRDKGFNCSVINPIITKNSTNINIRKVHNDRFDSKKAALVGLKPDLKVSLMPSDLALNCRNLCREYYDLMDNRSAYVNKLQGELRMAFPQYLGIFSKVTINTSLTLLETYTSPSAFLKADKQEIIDIIRSTARFGLTYAQNKYNAIIQAATDANQFGYIIDSNIKRIRLYISFIRKYDEEINSILELLHELVDANEDADFVKQIHLIETFKGAGFLSAVSIMGEIGDFSAFSKPKQLFAYFGLDPAVKQSGKFEGTKVQMSKRGSAIARRVIHTLTLQSISISRNREAKNPVLREYYLKKCDSKPKLVAMGAVSHKVCNMIFAILRDNKPFKIIAPQEHIKQYNSAKCDIAA

SEQ ID NO: 71745 - protein, 378 aa, unidentified
MRIVCGLDVHKDSVYLCILSSTGEIVEKVFGVLTFQLAKMRDLMLKHHVQEVGMESTSVYWIPIWRILEPHFKLKLVNPYFIKQLPGHKSDVKDAQWIAECMQKELVRGSFVPPERIQQLRQYDRRIFDLDDEINRKLSKLDAALQRCNIRLSNYVSNTDSKSYKEVVARISEGITDPKVLVEEIHGRIINRHGRKTIIAALTGVITQADSDMMRQIREEIDIAERHKQECIDKMQEICEKEYSDQLRNLQTIPGVKLRAATSLIAEIGIDMSHFETANHLASWSGLKPRNDESNKVIKSKRITHGNRYLRRTIIECSWAASRTQGCFFSRFSYHQTQVRKKTKMKVQVAISRKLLICAWHILSKNVPYQDFYERGIS

SEQ ID NO: 71746 - protein, 347 aa, unidentified
MRFYTGQHQYYCGVDLHARTLYVCVLDDTGTVRLHKRLPCDRARVVEALEPYRSDVVVGCECIFCWYWLADLCVAEEIAFVLGHALYMKAIHGGKAKNDKIDAHKTATLLRGGAFPMAFVYPPEMRATRDLLRRRLFFARKRGELFGHVRSTFQQYNKPFPSSGQLRYKKHREGLAEAFDDPALRATIEADLALADRYDTVLAELERIIEDQARVHDPEALELLRTIPGVGKILALTLLYEIHHIGRFDSVQKFSSYCRLVKSEHRSAGKRVGSGGAKIGNAHLKWAFSEAAVLFLKGNPRAQAHLKRLQRKHGKAKGLSILAARLGRSVYFILKNQEAFDMDRFFA

SEQ ID NO: 71747 - protein, 359 aa, unidentified
MQAQKNELNFNGHNIYVGIDVHLKGWTVCIMTEHLEHKQFTQLPNAKTLYNYLVRNFPGANYYTVYESGFSGYWAHRQLEELGIHSIVTNAADVPTGQKEKLKKTDSVDSRKLARSLRANELDAIYIPSESTVQERNLLRIRSALVKDLVRFKQRIKSLLYFYGISYPEQFSKSSNHWSRNFMKWLRDGVQFSEESGRQTLDIMLQAVEELRKLLLLVTRHIKALSTKEKYAANIKLLKTVPGVGLITAMTLLTEIETIERFKDTDHLAGYVGLVPTRSNSGEVNRDGEMTFRGQDRLKKCLIESAWVAARIDPALSLAYNTYVFRMEANKAITRIARKLLNRIYRVLKNKEEYVKGLV

SEQ ID NO: 71748 - protein, 395 aa, unidentified
MNPYALGWDNHRKFSKVSVMEQTPDGEIRAVERARLEHNDKQAMRAWLARLDPEIPVALEATFGWPWVADLLEELGHPVHLAHPPVIRALAKHEAKTDRCDSDRLGKFQLRGILPESYLAPTEVRQRRERTRYRMALSALRTAVKNRAQAVLHRHGILHDFSDLFGKAGRRFLEDLALPEDSRQALQGCLELLDKLALLIHEVEQWMIENLEEDESVRLLMTIPGIGLILAHVIRAEIGEIERFPTFRHLASYAGLAPMSDDTAGREGPRHCSSACNHVLRWAFIEAVHGVQRTKGEHGFRLRQLYSRLCGQGRPKGRKSSAKVAVAHELCKLVYVVWTKRVPFTDAPPSRPGSREDRRQPRETKETLIVKTTLRSDQPRHPMVRRRETVGQTRS

SEQ ID NO: 71749 - protein, 474 aa, unidentified
MLCTRKEENLRDAIGIDPDSTGFICAVVTAASSVAKTKGFLATEAELGKFVKWVKAHGDIIVAIEGYNGLSKPVEKALRTAGVVFYSFKPADAGRFRKAVLGQNKDNEKDAEAVARYAMALEAQGRLDRNRRVWFADVDLQLLTRRYERKSSAMTAEVNGLWKLIRHASPDLYLALGGKHPEVRFSENMLRNLGILGLLGEQPDLGEWKDLSEEQLLAAMGGNQNGRRQLVHQVQELAGNLPAVTPAAALMIQDSARNILRLKREEDEIRRMLEELTKSSPEVQALKQKRGIGTVTAATMIAEIIDIRRFSREDNLAGYMGLGMREYSTGDSTRMVHSQLFNHRLKDAFMTAARNYVHFNPGSHLTGYYRNLVKTGMTPLEATKRVARALVRVIFRELCALQGIEAHPQVVEKAKEGESDVASGVTRSEQSHPSNTSPSSLASTKAPRMGRVKVGNTRRSRTTRTSKNAVSKEA

SEQ ID NO: 71750 - protein, 539 aa, unidentified
MERMLERCCGLDVHQASVVACLLVDEGPRKPRREVRTFGTVTKELEKLAAWLQEEGCTHVVMESTGVYWMPVYAVLEGKFELVVGNAQHIKQVPGRKTDVSDSQWLAHLLRCGLIRPSYIPPKPLRELRDLLRYRRKLVGARSTERNRLQKLLETANIKLASVMSDVFGVSGKAMLQAILENQLTNEEIAALARGTLRQKQVALRDALDGRFEEHHRFLLQMQLERMDELDAHITTMEQRVDEKLTPYHEQHTRLMQIPGVSRIVAATIIAELGIDMSIFRSADECAAWVGVCPGNHQSAGTRKRVKSRQGNEHLTTALVEAAQAAARTKGTYLRDKFYRLKARIGYGKAVMALAHKILIAVYHMLKTGGDYRELGETYLDERDQKRLTQRLVRRLERLGHQVTLRPRDEVASSEDAPGPPQEVPANSAVCAPTPSPPRAVRPPEHRPAQPRRPAPKPRAPHDHTRRQVTTHCDPRIPPVGHVLRRTHQGVEHHVHIRVGGFEYQGQLYASLSRVARVITGTAWNGFRFFGLDTPSPVL

SEQ ID NO: 71751 - protein, 488 aa, unidentified
MKLKKERREKNTNKTERIARGRKFISWHEMNRAQRREMTRKIQAEDLSLEVVHPHAAGIDIGNESHYVAVPSTRDDKPVRRFGCTTAELKAMAAWLQQCGIRTVAMQSTGVYWIAVYDILEAAGLEVYLVNARETKNLPGRKTDVQESQWLMKLHTFGLLRNSFRPCQEIRTMRTYWRQRHDLVQAAGRHIQRIQKALTQMNIQLANVLSDISGKSGQAIIHAILEGERDPYELAALCNPNVKASEEEIARSLEGNWQEDLLFLLKQEQEGYGFCQKQMAECDQRLQQYLAQKKDRSAGASLPEEKRRGRRQKNKKNNPQFDLRQQLFRAVGADLTRIDGIDVLTAMTVISEAGWDMSKWPNEDHFVSWLRLSPDNRISGNRIIGKGRLPTNNRLSVALRMAASTLRNSDTYLGAQFRRLKRRLDAPVAIKAMAAKIARLVYRTLRYGLQFVDRGAEVYEAAHRQREIDYLKRKAANLGLHIIEAPAF

SEQ ID NO: 71752 - protein, 343 aa, unidentified
MEYYVGLDVSLKQTSICVVNQTGSIVQEGVVDSEPEAIASFVRSRAPGTVRIGIETGPTTTWLWTELNRLGLPVICIDARHAKAVLKMQINKSDRNDAAGIARIMQTGWFKEVRVKDLDSHAIKALLASRALLVKIKRDLENQVRGLLKNLGLVIGRAKFNVFAARAEELIEGRPELIAAVGPLLAARKAIEQQVGDLDRKVLKLARHDAQVRRFMTAPGVGPITALCFKATIDDPTRFKRSRSVGAYIGLTTRRHASGEIDWSGRISKCGDAMLRMYLFEAAGVLLTRVPKWSGLKAWGAKLTKRNGLRKAKVAVARKLAVILHRMWIDGTEFNWSTKKAAA

SEQ ID NO: 71753 - protein, 414 aa, unidentified
MTEQIHVSAGLDLHKKFILATILTDTGLKKQLRFERTELGLLALKEWTIENKCETVACESTSDYWVPVYDILEGHVTVIVGNARDIKMFSHKKTDKVDSELIAQLALKGMIRPSRIFPREQREFRSLVRLRHKLVQKSTDIKNEIHHILDSELFRLSSVLTDLFGKSGTLILRALVNGMPMDEVITILPPRVLKKKDQLIEVVQTTVSPGAIFRLKHCLNLLKCMKEEIDAITKRSFQFATENFHQEMKILKSVPGIGNIAAFTLIAEIGDFSDFPSGNKLASWLGIVPNVYQSADKLRTGSITKRGSDHARWILTQVAHSATRSHNNDFRRFYDRKKPIIGTGKAIIALARKIASLIWHLITNNEFFNHSDKCPKNPSKMVKVRIPSIVTLEEILRIFQEAAIVLKDPDPGIG

SEQ ID NO: 71754 - protein, 348 aa, unidentified
MMIIGCDYHPSWQQICWLDTATGETEEKKLEHASGEAEKFYRQLPGPALIGMESTGNCQWFVEMATTLGHEVWIGDAAKIRASEVRQQKHDRRDAALILKLMLEKRFPRIWAPSGEEKDLRQLLIHRYKLVRIRAQVKNELQHLAMNQGVTKKKKLWSKAGEQVLRALPLKPWASRRREDLFQVREMLDEQIAPLDQAVAEVAEKNQKARLLMTQPGVGPITSMAFVLTMGDVSRFQRGKQVASYLGLIPREYSSGGHQRLGSISKQGNRFLRMLLVEAAQVAVRYDPGFRNEYLHRCHTKAKGVAKVAAARKLAIRLYWMLRTNRGYPEVVRVESRSRVPVVVRHDG

SEQ ID NO: 71755 - protein, 425 aa, unidentified
MAGVMIGIDPHKGSHTAFAIDAREKRLGQLRVRASSKQVEVLLGWAAGWPRRIWAIEGARGLGQLLSQQLIATGERVLDVPPKLAARVRLLDSGQINKNDPNDARSVAVAALRAHDLPQLSGEDQTMVMRVWSRRYRDLGTLRTQAVCRLHTVLCELVAGGVRKQLRTSQAIELLTRIVVDTPIAQAKLELARDLVADLQRIDTQRREARRRTAQAVAASGTSITDIYGVGPIVAGTVLGYVRDIGRFPNRDRFASYNGTAPIEVSSGDRTIYRLSRRGNRQLNYVVHMAAVSQIRHRGSEGRAYYDKKIADGMTGKCALRALKRKISDALYERMIDDARRRDAGKDPGGQSGNDAVSSVAGSHPGRPALWTSHSRAETNSRTTTGQRSLASRPAPDRRRSSRSAGGVQVEPRPGPRRGRGQERP

SEQ ID NO: 71756 - protein, 313 aa, unidentified
MNAEKKYLGIDVSKDSICAFMYPTNETWNIKNEPREISKWIKTLPEDIELAVMEATGKLQELVAAQLDAAGIPVRIVNPRQIRDFAKCIGKLAKTDKIDAKVIAMFANAIKPDPQKLPNKMESALKDLVMRRLQIVDFIIVEKNHLSSTKNEIIKKDVEENIKSLQKRLNDIESKIKAMIHESPVWREKVELLKSVIGVGNVTAFVLIATFPEIGSLTGRKAVSLAGLAPMARQSGKWTGPSYIQGGRKYIRSSLYMVALSAIRHNAVIREFYQRLIANGKPFKVAITACMRKLLTILNAIARDNTKWRFAKI

SEQ ID NO: 71757 - protein, 343 aa, unidentified
MGEVSTIGLDIAKSVFQVHGVDFDGAVVIRKRISRAKLLEFFASLPSCLIGIEACPTAHHWSRQLQALGHTVRLLPPSYVKAYLKRSKNDANDAAAICEAVTRPSMRFVATKSEQQQSGLMLHRSRQLLVCQRTMLSNAIRGHLAELGIISAKGRNGTAELLEIIADEQDDRIPAPARFSLDVLARQYAAVREEIAAIEKRIHAWHRSSEESRRLEEIPGVGPIVATALVAEVGDWKVFSSGRSLAAWIGLVPRQHSTGGKERLGRISKQGNRHLRWLLVAGAMAVIRYARQHGTKRPWLARLMDRRPIKVAAVALANKIARMAWAMMVRGERFKEPMLLPAA

SEQ ID NO: 71758 - protein, 362 aa, unidentified
MKRYLGVDLHRNCFTVCTLGEDGKSELKKWSIHSLREFAQQVQATDAVAVEATGNARHFCQALEASGCRLVVVNPHQFQVISRSVKKTDAHDAKTLAEFLAKDLLPEVRMKEQLSAEVASVLQTRDKLVKLRTTLKNKINNLLAARGILIKKESLSTDKGLEQALSAAVGELARLELGVLVEQIRHLNRSIAKLEAAIKQQGPKLPGYENLKSIKGIGDIGGSTLLSTIGDINDFADEGKLAAYFGIVPRVANSNETERSGRITKRGNKLGRTALVQCALIAMRYSPYLANYYARIKAARGTGKAIIALARKFLGIIYKTLKNGWVFEDFPRFVLAPAVTQGGGFAPTPPGFIALGATSGAG

SEQ ID NO: 71759 - protein, 350 aa, unidentified
MFKLLTSNININNKVMEFTYFIGIDVSKNDLDFAVMKKKNFLFHKRISNSPSAIISLLKELVQLPEFSIRQAIFCMEHTGIYSNHLLSILFKKQFSVCLEAALHIRNSLGNIRGKNDKIDAIRIAEYAYKNRDQLRLWQPKREVIIRLAQLSATRSRLIEVQKVLNVPIKESKEFIPAAVTKENSMVCQSTLKAIKADLVKVDKAIQKIIALDSELSRLFNLITSVGGIGKATATQIIITTNEFKNINKPEKFACYAGVVPFTKESGLFKSRPRVSHLANKKMKTLLHLAALSAIRYNDDMRAYYERKVIQETKNKMSTLNAVRNKLIHRIFACVNNNRPYEKNYQRLVA

SEQ ID NO: 71760 - protein, 352 aa, unidentified
MERYVGVDAHAQSCTLGVMSATGQHLRSLVVETNGEALVQAVQGIGGRVHVCLEEGTQSAWLYELLKPHVSEIVVSMPPEKRGAKSDERDAWTRANELRTGTIETRVYKAPQQLAALRCAVRAYDFAVTDLARAKNRLKSVFLSRGVRAESGVYNPEKREEWLKQLTAPYQRLARWIGREIDQLLPLREEAEVQLAEEFKRHPIIRKLSTVPGMGPIRSAHVVAIGGTPERFRTKRQFWSYAGLGIITRTSAEWGQERGGEWVRAPKVQTRGLSRRRQPRLKAVFKGAATTVISQLPEDPLHADYQRLLRSGTKPPLARLTLARKIAAIVLSMWRHQEVYNPKRHRLAVSKP

SEQ ID NO: 71761 - protein, 412 aa, unidentified
MYYVGIDIAKITNVTSIINDKDVFIKKSFKFNNDEKGFKEFTNLLSSIDKNIDNFIIAMEATGLLFENLYLYLKGKGYNVILLNPYQTSKFREMDTMKKVKNDNIDAIMIASLIKSGRYSKAYVSEEVYASLRALHRHRASLEEELKKHKRQVSSLLAVVFPEFEQVVKNPFSVSGLALLEKYPTAKHYKHASAQRILNVFRKIKGNNFNIQKAEKLLALAKSSIYSGNAYDERAFVIQSHIRAIKFLQKEIESIDNEMLKLFNASPSFTKEEEQEVTDIIDNLRSIPGVSDKTLFTIMGECGNLDRFKNINAFIGYLGLYPTLEQSGNKTSYGKLAKRGSKLAKKALYQAAVAAIRHNDEMKKLYCDKVSQGKAKKEALVIVARKLAAIILAIYKNNTPYNSKRVFNQNTA

SEQ ID NO: 71762 - protein, 448 aa, unidentified
MSNEIAVTAAAPEPEWAAFVALDWADQKHHWRLAVAGAQKQKQEQGELENTPEAVAAWAADLNVRFAGRPIAVCLEQRRGALVYMLLKFPQLVLFPVNPQTAACFREAFYPSGSKGDPGDTALLLDILLHHRHRLRQLKPDTVQTRLLQRLVEQRRRMVNEKTRQSNRLTACLKQYFPQILNWFDDVTSPLVGALLERWPDLEQLQRAHDGTLRDFFHKQNCRSKERNQERIEAIRQAVPATTDAAVLEGEAMVAHCLLKLIATLRDNIAELDERIAKAFAAHPEKVLFDGLPGAAAVLAPRLLVAFGTDRQRYASAQEMECYSGIAPVTEASGQSQWVHFRWACPKFLRQTFHEFAGHSIAKSAWARAFYDLQIGKGKEHHAAVRALAFKWIRVLFACWKNRTPYDEQIYLQSLRKRNSPLKALLPGGGALGWKDVAGFQKLSEDPS

SEQ ID NO: 71763 - protein, 353 aa, unidentified
MKTYYVGMDVHRASIVMVVLNGAGKVVMQSVIETGAERVRGFLKQLRGKVYVTFEEGTQANWLHEVVRPLVTEVVVCDPRHNKLLQSGNKNDRVDAQKLAELLRNGALKAVYHGDNGVRTLKELVRSYDCLVSDTTRVMNRLKAIYRGRAIACGGHDIYRQDRRKQWLEKLREPGAKQRAGFLYEQLAALKPLRHRAKQEMVKEVRRQTAYRWLMSVPKLGSVSVAQLIAIVGTPHRFRSKHQFWTYVGLAVVTRSTADHEVVEGVLRRSKRPVSTRGLNRNHNHLLKRVFKNAATSACHSGPFKAGYDVRVAQGMAPSLARLTIARQLAATTLALWKRGEQFDPERKKQQAV

SEQ ID NO: 71764 - protein, 342 aa, unidentified
MGSVKRRGRSRHTMSALVCGLDVHKDSTYATILDSEGKIVDQTRMENEKVASYLSQFKVRRVAMESSTAVAPLYRQLKKEGFNAVVSHPKKTKLIAEAKIKSDRVDSKAIAQLLRMDWLPLSYVPDDVTGALREKVRRRAFLVRERVKLRVKIKSYLTYQGLKWPADHGLWTKSGLVWLHGLGLDPVESYLRLIDIFSEEIRVLSRELEGLAKNDEDVKLLMTIPGIGYYSALLVTSEIGDICRFPFAEKLCSYAGLVPSTYQSGGTVHHGAITKEGSRWLRWIMMECASTHVSKYDTWISRSYRCLAGRRGKKTARVAAARKLLVVCFSVLKNKKPFYDQP

SEQ ID NO: 71765 - protein, 370 aa, unidentified
MKKYSEAFIGIDTAKKKHAVAVAEDGRNGEIRYFGEIDSAPTTVEKVVGKLAARYAKLHVCYEAGPTGYGLYRQVKALGHECAVVAPSLIPRKPGDRIKTNRRDAVTLARSLRAGDLTPVWVPDAIHEAVRDLSRAREAAGEDVRKKRQQLLSFLLRHGRIFSGRKHWSLAHRRWLAEQKFEHPAQQIVFQDAIDAIEDGAARLRRLEEQLLAITPSWSMAPVVAAYQAMRGVSFIVAVTFVAEIGDVRRFDSPRQLMAFLGLIPSERSTGETVRRGGLTLAGNRRARRVLIEGAWTYRYPARVSETLRPRLEGLPKAVRDIAWKAQIRLCARYRRLTAAGKKTPVVIAAIAREMAAFLWAIAHQIEPLT

SEQ ID NO: 71766 - protein, 370 aa, unidentified
MKETITSYIGLDIHKDSIAVAVAEAGRSAARFVGTTPPDLATLCKALTRCSKRSSTLVVYEAGPCGYGWARYLNAHGWRCEVISPAHITRKAAEKLIKTDRLDAVLLARESRAGNLVNVVVPDTRDEAIRDLSRAREDACAARLRARLQLKAMLLRLGRAYYGKTSWTAAHERHLAGVHFDHPAQQIAFDEYRQAVKDANERVERLTQALREQCEQWRMKGVVNALMCLRGLDFTAATTFIAELGDLRRFAHPKALMKYLGLIPSEFSSGNTRRQGAITKAGNKHARRILIEAAWTYRFNPRVSRPIQVRQEGQPKAIRDIAWRAQLRLAYRFRKLNAGRKMTQNKCCVAVARELAGFIWDIARQVKIPA

SEQ ID NO: 71767 - protein, 284 aa, unidentified
MNQYVGLDVSLEETKIHVLDEAGGRVWRGKCASHPDELETTICKHAPGAVRIGLETGPLTTWLWTELSKRRLPMVCLDARQAQRALDMRANKTDANDADGLAHLVRAGWYKEVRVKSRDAMLSKAVSAARRQLLDISTNLSNQVRGLMKTFGLVVPKGKGRIFEANVRRLLDEEHALAAVVLPLLEAWCAIRNRAAELDRLLLRRVRDDANCRRLMTAPGIGAVVAASYVAAIESPANFKHARDVGAWVGLTPRRFQSGEMDYDGHISRRGDERLRALLTRQQP

SEQ ID NO: 71768 - protein, 388 aa, unidentified
MYLVGIDISKYKHNCFIATETGVPLKEFVFENNFEGFKLFHQALSDLDQSQEIRIGLESTGHYGTNLKQFITASGYTYLEFNPYLTHQFSKAMSLRRTKTDKVDAKTISNMLGSVDYKTLHTQFYHINELKQLVRDRDDILINRSKTLVKLTNLLDIVFPEFKPFFNNTLGVTAFFILKKYKSPARISKLTMKDFEDLKSKSMGKLTYPKFSRLKSLAKDTIGVHSEIYNKRILSLIRDYEYFDQSLDDIDQEIIHLFSEAKTKLKTIPGLGIIQAATIYAEIGDIHLFSNPEKLIAFVGFDVSISQSGMSEHHGKIVKRGSPLLRKAIWTYALPSLRFIPTLNDYYHKKKAEGKHHKVALTHVCRKLIRMIHHIEYNQIDFDNKNYK

SEQ ID NO: 71769 - protein, 342 aa, unidentified
MQITTIGLDIAKNVFQVHGIDATEKVVVRKQLRRAQVIKFFAALPPCMIGMEACATAHYWAREFTKLGHQVRLMPAKDVKAYVKRNKNDAADAEAICEAIRRPTMRFVEIKSAEQQGRLMQHRTRDLLMRQRTQVTNALRAHMAELGIAAAQGREGLKTLLEIIANEGDGRLPVDARASVIVLAAQLQALQTMIGSIEKRIIAQHRANEASKRVTTIPGIGFLGASAITATVTDPDAFRSGRDFAAWIGLVPRQDSTGGKPKLGPISKQGDRYLRRILVVGAHSVLRRAKQNPEKYPWLTRLLTRRPFKVVAVALANKMARMAWALLAHGGTYRAPELAATA

SEQ ID NO: 71770 - protein, 460 aa, unidentified
MNAKRSNSKDGGKMPMVHPNAAAIDIGATMHMAAVGADRAPEPVRSFGTFTADLHRLVDWFLECGVETVVMESTSVYWIPVFELLDARGFAVFLVNARDAKHVPGRKTDVSDAQWLQRLHSFGLLRASFRPKGQIAELRAYVRQRERLLEYAASHIQHMQKALTEMNIQLHHVVADITGLTGLRIIRAILAGERDPEALACLRHYSCHSSAETIAKALTGSYRAEHLFALEQALALYDAYREKASACDARIEAVLKEMSIDRGRCHGSAPRVSRRRNRTDQANALTFDVRDALFALLGKDITAIDGLGPYLSLKLIAECGDDLSSWPSAKHFTSWLGLEPSNKISGGKMLSSRTRRSGGRAAALLRLAAVTVGRTDTALGAFYRRLSSRIGKAKAVTATARKIAVLFYNAVQNGMDYVDPGTSSYETRYRARVVSNLHRRAKAFGFVLQPLETKVGAAVS

SEQ ID NO: 71771 - protein, 308 aa, unidentified
MTTIYTGLDIAKLNLQLHLAGRIHDLPNTAAGCRRLLKLLASQPGVHVVCEATGGYERDVVAALHEAHVPVSVLNPARVRHFARATGQRAKTDHLDAAVLSAYGQALQPKPTAPRTEQEQQLAELIRRRVQVLEILVAQRQQAERLTVPALRRQAQSLVRRLERDVAQIEEQLKALRTQAATLDARVQKLEAITGVGAITALGVLAELPELGTLNRRQVAALAGLAPHPRESGQWHGRRSIGGGRAPVRRALYMAALVAAHSNRQLKEFYQRLRAAGKPAKVALTAVMRKLIVLMNHLLKHPNFALQN

SEQ ID NO: 71772 - protein, 371 aa, unidentified
MKKYSIFVGMDVHKNSIEIAIAQRGRNGEVHSYGKIDGTLDALDKVVRKLVSKGGRLHFVYEAGPCGYGIYRHLTAKGYDCSVVAPSRVPKKSGDRIKNDRRDACLLARLDRAGELTPVYVPCAEDEAIRDLTRAREDAKTDEKRAKQRLKSFLLRHGLRYAGTASWSKAHMHWLSDIKMDHPGQQIVLQEYIDTIGECSRRVQRLTDQIRQLVAQWRMAPVVKALQALRGVSLIVAATTVAEIGDLNRFENPAELMSYLGLVPSEHSSGEKTRRGSITKSGNGHVRRVLTEAAWAYRLPARVGRGLLKRQEKLPEKVCDISWKAQVRLCSRYRQLWAKGKPRQVVVTAIARELCAFMWAIAREIEVPPTT

SEQ ID NO: 71773 - protein, 351 aa, unidentified
MPHKLNSGIAVIGVDIGKNSFHVVGHDKRGAIVLRQKWLRGQVEARLANLRPCLIGMEACVGAHHLSRKLQMLGHDARLMPAKYVRPYSKGQKNDFRDAEAIAEAVQRPTMKFVATKTAEQLDLQALHRVRERLVSQRTGIINQIRAFLLERGIAVRQGLRFLRAELPRILAASCDALSPRMLRVIEDLAGDWRLLDQRIEGLSSEIEALARKDKDCERLMTVPGIGPIISSAMVAAVGTGDAFSKGRDFGAWLGLVPKQISTGDRTILGSISKRGNRYLRTLFVQAAWVVLVRIGPKHWDRYGLKSWIEAAKKRLHHNVLAIALANKLARIAWSVLAHGRAFEATKIQAA

SEQ ID NO: 71774 - protein, 410 aa, unidentified
MELLHRRCCGLDVHKETVVACLRLVADGKVTTEVRTFQTITSDLLRLSEWLAANECTHIAMEATGVYWKPVWHILDDGEFALVLVNAAHVKNVPGRKTDVNDAMWLAELLAHGLIRASFVPDTQTQEMRNLLRTRKQLVREQSSHVLRVQKTLEDANIKMDSVLSDLMGKSGRAMLEALIAGETNPTKLASLADRRVKASPQEFREALRGRVTKHHRFLLRLHLNQIDALDAAMATVDAQVEANLGPFRTAVELLMSIPGIKSLGAHVIVSEIGIDMSRFPSAAHLISWAGICPRNDESAGKRRSNRLRKGAPWLKTTLVQCSWAAIKKKDSYLQAQFYRIKARRSSKKAIMAVAASILTAIYHMLKDGTMYKDLGRNHFDRRSTDQQKKRLVKRLADLGYAVEIKPLAA

SEQ ID NO: 71775 - protein, 347 aa, unidentified
MRFVGIDVGKAKCRASIMDHGGIILEEFTFTNNNEGIEGLASRLTLDDRVVMESTGSVWTNLYNQLDEKHIPVALANPLKTKAIASARIKSDKVDARILAHLLRSNLVAESYVPPKQLREIRALIRHRAGIVKIRTMVKNNVHALVDKYGFRHEFSDLFGRGGIRWLTTLELNESDRLMLNNHLDHLENLNQQIQRVDEEIHSKACEDEDVKLLLSMTGVDIYTALLIKSEIGSIDRFPDYKRLVSWSGLAPSLHQSGSVEYHGSITKQGSRMLRWIMVEAARVAVNHDDRMRSFYERVKHRRGDQKAIIAVANKMLKITWFMLTRKEPYESRNEKRYQQKLNSITA

SEQ ID NO: 71776 - protein, 315 aa, unidentified
MSRMVVIAGIDVSKDKLDIHVLPSNQTFVVGRDPRGLASLARRLRKAGVEQVALEASGDYERIVIEALEADGFVVQLLNPARVRAFAEAIGMLAKTDPIDARLIALYCQHFPDTGLTRRPEQARKLGEFLNMRAMLLKLAGEIRNSLEHVREPGLKALADTLSADIAAKLKDVDDRIAKVIAGHDATMRKARIIRSFTGAGPVLTSGLLARVPELGGVTRHAAARLCRAAPTDRQSGRTRHRSSIEGGRDQVRPVLHMAALAAIRSNPIIKAFAHRLSAAGKPKPLVIAACARKMVVILNAMLRDNTEWKYAKAA

SEQ ID NO: 71777 - protein, 366 aa, unidentified
MDTIYIGVDFHARAQTICYLKTETGELVTDELKHQDKQQVRAFYAQFQQPVVVGLEASGYSPWFEAMLQQLGCEVWLGHASEIRRRARWRQKNDRRDAELILDLMLHQEFPRLHRPAVQSREVLRMLRYRQKLIKMRTMTKNSLQAIALQAGLAKGKQLFSQAGQAEFKAAAMSPVLQWQREHWSDLLKPLNEQVLETMVWFKAQSKDEVSIQRLRTHPGIGLLTSLCIWHTLQPVSRFRKARKVVAYAGFDPVERSSAERQHFLGISKAGSRILRYLLVEAAQTAVRKDEDLKRFYKRLAERRGRPKAKVAAARKLLIRAYIMLRDEIDYAEFRRRAVAVRLARRGQGPTNVPEVLIGQSASPGA

SEQ ID NO: 71778 - protein, 445 aa, unidentified
MHLNAAGIDVGAACHWVAVPGDRDEQPVQRFGAFTADLYALAEWLRQCQIETVVMESTGVYWIALFEVLEERGFDVKLVDAHYARQVPGRKTDVQDCQWLQELHTYGLLHGAFRPEDQVCVLRSYLRQRGLLVATASRAVQHMQKALEQMNLKLTEVVSDITGKTGIEIIRAILAGERDPQRLALHRDRRCKHDQATIAKALEGHWRAEHLFALQQALEQYEFLQQQLQACEQQIDACLQTFVTHVEVDAPRPTPARKRRARQRHAPGFDVHVYLDAMTGVDLTQIDGIDELTALKVISEIGLDMTRWPTGKHFASWLGLCPGNKLSGGKRYRMRSKPTANRAATALRLAAQGLVNSHSALGAYYRRMRTRLGAPKAITATAHKLARLVYSMLRYGTAYVDAGQQAYEQQYRDRVLTNLQRKARAFGYQLVQVSDPDSSEVAATP

SEQ ID NO: 71779 - protein, 482 aa, unidentified
MKKRNIYQNQSQELLSLFEQAANNAKVMCVPIDYAKKDHVVMFCNGYGDILRKPFSVKNSPQGVDYLTDQVIRSCRQRAISEKHVFFGGEQVGSFADNFVTTLRSHGWLVAGVNAHEAKTQRENLQASTDRLDLMGIAKTLLNRRANCSPAQSGIYLNMRTVVRHRRKLVDITTEVRNRIHAVVDRLFPGFLNESKSGITPFSKSSLWLMKERFSAPQIRRRRRSTLIEALRRLGTKKPERTADKLQQYATQVLKPPQDYVHMLQLSLAQHVKHFSCLQESIGQLEKEIAVNLAQTQGAFLTSVRGIGIVLAAGVSAEIGNPYEQKPLNNLVSYCGIIPRVKQTGGPQGETKTGKVAKRCNRILKDYAVQSASHLGLHGPADLMSDYKRRDAAGQHADFGMTRRYLRMAMCLMRTSQIYLPSGLRKAQAQIEERADYYLINWPYLRDKWQKLGALETAFKADHPLGQWRKIVQQFYGIKLTL

SEQ ID NO: 71780 - protein, 318 aa, unidentified
MQDIIGIDISKDRLDAFRLSDRQHNAFGNDKAGFKALLKWIGSAEGLRIVYEPTGPYHRGMEAALADVGHALVKVNPRQARRFAEATGTQAKTDRVDAMLLARMGLALDLPPRPVRGELMNELRELHVARLALIKDRTATGNRADTATIGLIRRQAKARLAIIEKQLAEVDEAITARIADDPDLAERLGILTSIPGIGAVTACMLLIEMPELGTLEPKQAASLAGLAPFTRRSGKWKGKEMIRGGRASLRAAIFMPALVAIRFNADLKRKYQQLIDGGKAPKLAITAVMRKLILLANALLRDGRKWALLHKSCKGFIS

SEQ ID NO: 71781 - protein, 398 aa, unidentified
MSKVIMIGCDLHDRSMLLRYAVGTGQPQQLSFENDARGRGQMVSRLQSIAKKEQAARIVFAYEASGQGYGLSDLLESQGIECHVLSPTHLPTTPKRAKLKTDAKDAQMLLEQVRGFVLAGNPLPVVWTPPQRLRDDRELMRARIDAGDETTRVKLKILSLLKRRGIVKPSWYRSKWSKRFVQWLREDVQLSLDPVVAACFERLVDRYEVFHSEQTKLEKAIRNLSQTRRYKVSCAELRKIPGVGLLVAMTFLTEMGDLTRFNNRREVAAYLGLCPSSFETGGPGKDRKGRITRQGPSRVRKMLCQAAWVSVRDCDEASAAYQRIKQGQSKRTKKALVALMRKLGIKMWHRALSCGVSAELMGRGGPHAAERAWTETEQASARAPQRDDSINYEFKDRC

SEQ ID NO: 71782 - protein, 355 aa, unidentified
MSSEKYIGLDVHQATISVAVMDSQGKTIMESILETKASTLLEFFAGLRGSLFVTFEEGTWAAWLYDLLKPHVSDVLVCNPRKIPLHKQGNKSDKIDARKLAERLRLHDLKPVYHGETGVRMLRELARSYLTVVKDLSRVMNRLKALYRSWAIPCAGRDVYYTRHRSQWLEKIPEAGTRRRAEQLYQQLDMLKHLRQQARRELLAESRKHAITAKLRQIPALGPIRSVLAVALMQTPHRFRSKRQLWTYSGLGLETRDSGEYHYVHGQVRRRKKQATIRGLNKDYNHDLKGLFKGAATRASVQPGPFQDFYQRSLAKGIKPTMVRLTLARKLAAITLTLWKKGEDFDIHKLNSQAA

SEQ ID NO: 71783 - protein, 424 aa, unidentified
MKVTYQTCCGVDVHKSFLVATIVKTTGGIEPSYQKERFSTFNNSILEFKQWLLDNDCHDVCMESTGKYWVPVFNLLEDDINVVIANPKWVKAVKGNKDDTKDSKWIGDLFRLGLVKGSYIPCKKVRILREYTRYRYKLVSCRSSEKNRYQNALTVCNVALDSVVSDIFGKSSTSIIDYLLEQSGSSINHEEIASKLLRSLKSKEDAVIESVEGYQMTDAQKYRMRLVRAHMDYITAEINDVDKMIENMISSNPDFENAVQFLCTIPGVKRDSAITIISEIGTDMSQFSSSKRLCCWAGLTPGSNESAGKKKSVRFTRAGVYLKPALVQCAHAAVKSDKSPYYKKKYESLVKRRGKKRAIIAIARMILTAIYQMLSTGEQWNPSDLYKIDMPVALVEKQKAKAIKQAKKLLQREGLLPPDEPFAS

SEQ ID NO: 71784 - protein, 454 aa, unidentified
MMKGKKNRTNTHKKRLQQHLEHVNLYAAGIDIGSREHYVAVPPSLDEDSVKKFGCFTPDLEAMADWLVKIGITTVAMESTGVYWIPAFEILESRGLKVILVNARHVKNVTGRKTDVKDCQWLQQLHTYGLLHGAFRPEDDYVSLRAYMRQRETIVSHLASKIQHMQKALRLMNVLLDNVVSDITSQTGMAIIRDILSGIRDPKELAKNRDCRCKNSAEIIAKSLVGNYRDEHLFALKQSVELYDFYNAMLDECDHVICQYLSTLRTQADASERPAQKKRKKCNSNALRFDASINLYELCGVDLTAIDGMEEHGLLKIIAETGIDMSKWATENRFTSWLGLSPNNKISGGKVLSSSSIKTKNRAKQAFKMAAFSLSNSRSGLGAFYRRLRARIGAPKAISATARKLAVIFYKMLKNKTEYRKQSQEEYDELHKSRVLKQLKHKAKLFGMELIASE

SEQ ID NO: 71785 - protein, 375 aa, unidentified
MITMTRTSESTAPTGGLLLAFELGQRSWKLGFTVGMGQHPRIRQIPAGAVSVLVTEIERAKKQLGLSSDAPVTSCYEAGRDGFWLHRYLVAHGIINYVVDSSSIEVNRRARRAKTDRLDLAGLLSLLARYVLGDRRAWRVVRVPTVAEEDARHLPRTLEALTQDRTRLMNRLKSLLATQGVSVAIDAQFLNRLEAAHLWDGAPLPPGLQERLTRTWTQLQEVDGQIRGLKTLRLTRPEMLTPATSRALAQLLTMRAIGPIGASVLATEIFGWRRIRNGRELAALVGLVPAPYQSGETDYDQGITRAGNAHVRRVIVQLAGGWIRHQPVSALTHWYQRRFGAGGKRLKKIGIVALARKLLIALWRYLETGSLMARS

SEQ ID NO: 71786 - protein, 339 aa, unidentified
MFMIGIDPHKGSHTAVVVDRSEAVLDTIRVDADRFQRERLLAWAARFEPRTWAVEGATGLGAMLAQQLVAAGEHVVDVPAKLSSRVRLLERGRIDKTDPNDARSAAIVAWRTPALNVVAGLDEHRVVLRLLADRDHQITAHRTRTVCRLHALLCVLIEGGTGRSLKADKAEELLASINVVDPVVAQRVATARQLLAEIRVLDEARDDVRAATAAAVVASGTTVTEVFGIGSLMAAIIIGRTGDIRRFPSSGHFARHNGTAPIEASSGPKARHRLNPRGDRQLNHAIHMAAVTQVRNDTPGRVFYLRKQDEGKTRKEAMRALKRHISDAVYQRLINDTRA

SEQ ID NO: 71787 - protein, 350 aa, unidentified
MREWEERMALYGGIDLHSRISWLVILDGALKLVHQVKLSNDLKEFLRLLEPYREDLAGLAVESTPNWYWLVDGLQGAGYRMHLTNTCAVQQYSGLKYTDDRHDARLLAHLLAHLLALGILPEGYIYPAHERPLRDLLRRRGFLVDKRTSMLLSLRSAYECHTGHRVSSDTIKKWTAVEIEELLDNATVARGLTCLLEPIKVMTTQIKMLEKEVLAQAKLRDEFALLRTVWGIGPILALTVMLEVGDIKRFEKVGNFASYCRLVKTDRLSVGKRKGSGNAKNGNPYLSWAFSEAAHFAIRYHDAAKRFYQRKLAKKNGIVAVRALAHKLARASYYVMRDKVEFNPDRLFTS

SEQ ID NO: 71788 - protein, 361 aa, unidentified
MSPTTTLDKPYPAVVVGVDTHADTHTACVLDADNGARLATHTFPTSGAGYQALLAWASNFGTISQMGIEQTGSYGAALARAARTAGIHDLVEINQPSQQVRATKGKTDALDAESAARSLLNGTAIAVAKDTNGIIESIRLIKVARASAVKDRTAAMNQLRSIVITVEDDLREELRNLAATALINTCARLRPDRTRLSDPTQAAKRALRSIAKRIQSLTQDVNELHADLDALTIQAVPTLRAESQIGPVSAADLVIAFGGKGRITSHAAFARLTGVAPIPASSGKTDRHRLHRGGNRQANKALHMIVVGRIKSDPRTRTYIDERTPTTKDKKKGNQKPAIRSLKRHIVRRCWRLINHDLNRT

SEQ ID NO: 71789 - protein, 451 aa, unidentified
MVKSKRRCPEQDFSPTHPNAAAIDIGSRMHVAAVPPDRDLKPVRAFGTCTGDLQRLADWFERCGVRTVAMESTGVYWIPAYELLEQRGFEVVLVNARDAKHVPGRKTDVSDAQWLRRLHEYGLLRASFRPKGELAALRAYLRQRERLLDYSASHIQHMQKALMQMNVQLHHVVTDMTGETGMRIIRAVVAGERDPAVLATHRDRRCHASEQEIAAALAGNWREEHIFALGQALELYDAYHIKAVECDLRIEAVLRRLRDAAARPVGRLPPARHRDKTANAPAFDARAALHAVLGVDLTQIHGLGPSLALKLIGECGTDLSAWPNAKHFTSWLCLAPANKISGGKVLSTRTRRSGSRAAALLRLAAVTVGRTQTALGAFYRRLSARVGKAKAVTATARKIATLFYNTLRHGLDYADPGASYYEDRYRARVLANLRRRAKSLGYMLHEMPAPA

SEQ ID NO: 71790 - protein, 337 aa, unidentified
MKYSGIDLHSTNSVVVVMDEAGRVLAERRLANELGKVVGFLQPWRDDLAAVAVESTYNWYWLVDGLEAAGFRVKLANTGAIKQYDGLKHSGDETDARHLAELLRLGILPTGTILPPAQRAIRDLSRKRMQLVRSRTAHILAVENVVARQLGARISSNQIKRLTEDGIDLLALPADVGLAIKSNVAVITTLNEQIERLERRLRESVGPRRDYALLHSVPGIGNILATTILLEIGTIERFAGVGNFASYARCVDSRHVSNGKKKGEGNTRNGNKYLAWAFVEAANFALRYCAEAKRFYERKKAKTNAVVAVKALAHKLARACYHILKEGKPFAVTRCFA

SEQ ID NO: 71791 - protein, 373 aa, unidentified
MNYSIVYLGIDAHMQSFSLCCYTNEKEKAEYPQKVDGHYSKVINYIEAMRFHFGDDALFICGYEAGSLGFTLYHQLTDHGVKCVILAPTTMPTQKGGKRIKTDKRDAALIARCLAHRDYSPVHIPTEQDEQTKEYIRMRDDHKLALKKVKQQILSFCLRHNYRFDGTKHYWTQAHLNWLRALKPEGLYAEILMEYLLTYDNLTNKIERLDKRIEELAAGDAYRQNVHKLSCFLGVKTITALSVLTEVGDFKRFASAQHFSSYIGLTPGEDSSGNDKKRLGITKAGNRHVRTLLVEAAQNYSRGRIGVKSKALMARQEGNAPEVIAYADKANERLRRKYYQMVLKNNKKTNVAKTAVARELACFMWGMVTGNVV

SEQ ID NO: 71792 - protein, 395 aa, unidentified
MNKIVHYIGLDVHKETIAVSIAPQNSTEVRRYGIIGGTLDAVDKIVKKLAQENVELHLVYEAGPCGFVLCRHLRSRGFHCEVIAPSLIPRKASDRVKTDRRDADQLARLYRAGELTAIHVPDQEDEAIRDLVRARTCGMTDQRQARNRLKGFLLRLGFRYTGKSSWNDAHKRYLSSLVMPQGPQQIAFQEYIHAIDDATDRLDRLAKAVEDALPGWKWEPVARALMSLRGVQVLTAMTLVAEVGDFSRFEDPRSLMHFFGLTPSEHSSSDKRVQGGITRCGNAHCRRVLTEAAWHYRLKPKVSETIQKRQEGQSKPVRLIAWKAQERLHKRFHQLSAKKKSVVAATAVARELVGFVWAIACQVKPAQQPAAPEIIRTCRGKVYRLDPQKKFQKNK

SEQ ID NO: 71793 - protein, 421 aa, unidentified
MADVDKVTVISSLDIHKRSVVGHVLNVFFDKNENKFVAESHAAKQVPRTLTGLGDLADFLRGFNVHTVVMESSGPYSLVVYYFLESEGFDVWMVPARDNKSRGGKKTDIEDAKRLARNFVAGSIRAYKLPSDPKVRALRTYVRARKKLVDQLVALKNMIIKTFDEACIDIKSVFSSLGKGFLVFLEGYLKGDSLDRIIERWPRLGKKREKLEAIMKTRLSEASLASLSSYLAIAKTIMKEIEKLDARIESLLVEFGDEIRLLLTVPGVGLKSAALILAEIGDIKRFASAKKLASYAGLVPTVYQSGDEVIYGRLRSECNRRLRWGLYEVALNAVKVSPWLRSFYERLIARGKKKKQALIAVARKIAVGIWHILTKRVPWKEAVRKNVRMPKKRRVPKITVREALRILREAGYIVIKAKSGL

SEQ ID NO: 71794 - protein, 418 aa, unidentified
MTDAFKWLLGIDWGSAAHELCLLDVSGAICGTRSVAHTAVAVREAVQWVCERTGVAPEEIAIAIETPRGALVDTLIEQGFVVFAINPKQLDRFRDRFTAAGAKDDARDAHVLADALRTDRRAFRPVRPDDPQVIHLREVCRMMEDLQDEERRLANRLRDQLYRVDAPWLTLSPAADEPWLWTILAETPNPVAWGSLPRRRIALALRAHRIRRFTVEDLVHVLGQPRLAVAAGVAEAVATRIASLVPQLRLIHEQRMTAERQIDRLIERLAAPETTDSEQREHPDVEILLSLPGVGRMVAATMLTEAVGPLADRDYGTLRAYTGAAPVTKRSGKRAFFVHMRYACKRRLRQALYHWSRTSIQHDAPTRTYYEQLRARGHGHARALRSVADRWLRILVAMLKARTLYDPLRISRVAAATA

SEQ ID NO: 71795 - protein, 404 aa, unidentified
MKDVPVLSIDVSKSKSYATMFRSYGDMYLKPFPFNHCPTDLDYLTSQLVLLEQETGKKPSIVMEATGNYSKPISSFFRENGYNVFVINPLQTHAQKKKSVRKVKTDPIDTNRIAQVFYLDDSPLEYCYEPHILELRNLCRQYESFNNLYTETQNKYRAILDLCFPKFELVFSHMRSPTALNILSLFSSPADLLAASRSELLESLKPARKSRDWNEMKVDQLIMAAKESLPFNQAQQSSVRVLRSYIDLLLSQQKILADLRAQMIYWANLSPYYALLYSIPGVGEITATTILAEIGDIERFPSSKQLVAFAGLDPSVFESGNFKASKNRISKRGSSYLRKALYQATVAGISNRQGGPLNKILYAFYSKKLAEGKPPKAAIIATSNKLVRMIYGILSSGKPYSLNQ

SEQ ID NO: 71796 - protein, 433 aa, unidentified
MTQSPNPSTPTPVAFVGIDWADQQHAACLSPADTLLPEQFTIQHTPEAIAEFVAMLRARFGGRPVAIALEQARGALLYALMRYEFLLLYPINPATAKRYRDAFAPSGAKDDPVDAHLIWELLVKHRDQLRPWTADDVATRQLALLCEHRRDLVSQRTRFVQQLRAALKTYFPQALPWTGEDLTTVMAADFLVKWPTLEALQKAKPQTIRAFYYAHHCRRPDLVNQRLTQIKSATALTTDPAIIIAHALRVQSLARQLRPLLASIAEYDRQIKTLFAPHPDAAIFASFPGAGDCLGPRLVAAFGTKRDRFPEADGMERLSGVAPVTRRSGKFQSVHRRHACAKFLLQTFHEFAGCSRKCCEWARLYYEAQRAKGKGHHAALRALAFKWVRILWRCWRDRRPYDDATYTDALRRAGSPLAKRLPVAAPLAPTAGL

SEQ ID NO: 71797 - protein, 458 aa, unidentified
MSTVTPAAEPQYAAYVGIDWGDREHAWALEVAGSGKIENGKLPQTPEALEIWATDLASRFGERPIAVGVEQSRGALIYALQKFSHLVFYPIHPNTSTSYRAAMSPSGAKDDPVDAGLLLDLVVRHRDRLRCLHIDTVETRKLQALVEKRRQLVDERTAQTNRITDLLKQYYPQALAWVDDLSSPLGVAFLQCWPTLQKLQKEPPEVVRAFFLQYGSRSQQRIQERLDGIQKARPALEDPAIIDPCVLMLQALLDIVTGLRQGIERLQKAIDQIFAQHPDAPIFASFPGAAKVMAPRLLAAFGSQRDRWESLQDFQNYSGIPPVTVRSGKSRSVHFRWACPKFLRQTFHEFAAISVQQSEWARAYYHHRRHTVNQDHQAAVRSLAYKWERILYRCWINRTPYQETIHQERLLSKATPAPSADHKPKTEPPRPSKRPNENPVHFEFKKVAGFWKISDQTS

SEQ ID NO: 71798 - protein, 372 aa, unidentified
MKNNITIGMDLGDRSHQVCVLDAKGKEVGSATIGNTRQALKRHFGRYGGATVALEAGTQSGWVSRELEAMGCEVLIGNPRKLRAIWMNRGKSDVRDAEMLARIARFDRKLLYPIHHRGQAAQVALETIKARDRLVRSRADVVNHVRSVVKGMGGRIPTGSTRAFARRAREAIPGELEPAVGPLLRVIDELSEQIRSYDRAINLLSDREYPQTERLRKVVGVGPVTSLAYVLTLEETSRFAKSRTVGPFLGLTPRRDQSGQTDKQLPISKAGNLYLRRLLVGCAHYILGPFGPDCDLRRHGQRIAARGGKNAKRRAVVAVARKLAVLLHRLWRGGEEYQPLRSTVAKRAAEPRSAKRTDLQEVKRTGQTVGKS

SEQ ID NO: 71799 - protein, 344 aa, unidentified
MTIVEEKPAITGGVDTHSEIHVAAALDPLGGLLGTREFPATAAGYASLLGWLGKFGDIALVGVEGTGSYGAGLARHLEAHGVRVVEVDRADRQDRHRNGKSDPLDAVSAARAAQSGRASGIPKGGDGAVEAIRSLMVAKRSARHERTQAINQARALILTGPGELRARFAGQRAAALAEAVAALRPRPGDAADYSLRVALRELGRRVEFLDAQIERLDDLIVPLVTACAPGLLSLYGVGPDTAALLLAAAGDHPERLRSEAAWAHMCAVAPIPASSGKTRRHRLNRGGNREANHALWPIVITRMSAHPATRAYVQRRTAEGLSKKDIIRCLKRYVAREVYPCLRG

SEQ ID NO: 71800 - protein, 335 aa, unidentified
MKKFHYYVGIDVSKLTLDITVLYEQEGKHRTEYCKIQNNQKSIAQFVKKNLKNYNPEQLLFCFENTGIYSLPLTYYLNDNKQNYWCVPSMEIKRSRGICRGKDDKIDSKAIAFYALTHTHKFSQSKLPSKAIQKLKILFTYREQIQKSIALFSKTDENKGFVSADMLKLVSNGSKSIIVKLKNELKSIEKNMLEIIASQEELTQQYKLITDIPGVGMQTAIYIIVLTNGFENFQNWRKLACYAGVAPFPYQSGTSIRGRNKVHPMANKKLKSLLNMCALSVIRFDKEIKEYYKRKVDEGKHKMLVLNNIRCKILSRVFAVVKRGTPYVDTHKFVA

SEQ ID NO: 71801 - protein, 366 aa, unidentified
MKKISTVAKRGNEIFKEPKLTIGLDLGDRSSHYCILDETGEVILEHGLPTTPKGIHQVFSRIPRSRIALETGTHSPWVSRQLTQLGHEVIVAHARNVRLIGESSRKDDQLDARTLARLARIDPELLGPVRHRSAKAQIHLTVIRARATLVSARTALVNAARGLTKSYGERLRKCGTGQMNREIAKGLSQELRDALDPLLQEIESLNERIAEYDRRIEQIAKEVYPEVALLQQVKGVGTLIALTYVLTLDDPHRFRRSRDAGCFLGLRPGRRNSGMSEPQLHISKEGDRYLRTLMVQGAHYILGPFGQDSDLRRWGLKLAERGGKNAKKRAVVAVARKLAVLLHKLWVSGEVYEPLRNNHKVVSAVA

SEQ ID NO: 71802 - protein, 411 aa, unidentified
MHNRQNYLYVGVDLHKEHHTAVIINCWQEKLGEIQFDNKPSAFSKFLLEVETYVSDGLSVVFGLEDVGGYVRALAKYLVDHEQVVKEVNPALSFLERKSQVMIQKNDSWDAECVARILVNKFNQLPDAKPNDLLWSIQQLVSRRNALVKAQSSLKNQLHIQLNHHYPSYKKFFSELDGKTALAFWEQYPSPSCLEGANIKQLTAFLLDVSNNTCSVKKASEILKLVKEDGQTMKEYQETRDFLVRSIVRDIEFKKKEMKYIERELKQLVKLLDYQLETMPGIELVTASALIAEIGDVRRFPNANKLARFAGIAPVYFGSGGKGKTHKSKQGNRALHALFYNLAVQQVQVAKGSKMPRNPVFHAYYQKKLKEGKTKGQALVCIMRRLVNIIYGMMKYKTAYELPIVEEKEVV

SEQ ID NO: 71803 - protein, 348 aa, unidentified
MLTYLKLKPKVMENSPQCQWVLGIDVSKDSIDACLIRQTDGQLFEQKFHNNLSGFKHLKSWCKEKQCECNEQTLCCMEHTGLYTRPLVHYLVSREVKVWLESSLQIKRSQGLVRGKTDKVDAQRIARYANVYQKKAQVIQISSLTLEKLKDLQANRTRLMKALQSLRVSAQELQQFDPDSGKVIEKVNREAIRGLETSLDKVDEKILAYIRQDEALKQKYDLMLSVKGVGKVLAALLLVYTQGFTRLADSRKLACYSGVAPFAYQSGTSIRGKTGVSKFANNDLKRVLHMAAVSSIQHDSELHLYYQRKVQEGKNKMSVINAVRNKLLSRVVAVIKRGTPYQLQLKNN

SEQ ID NO: 71804 - protein, 348 aa, unidentified
MLADELDYVLGVDTHRDEHVLAVVAAPAGAVLAREVVHADARGYGEALRFAERVAPGRRAWAIEGTGSYGAGLARFLAGRGELVLELSRTPRAERRPRGKDDTLDAERTARAALASDTLALPRAGERREALRLLLAARRSAVDVRRQALGQLRGVIVTAPERLRRELRDLPTGKLLDRCSRLRRTTPGADELATRLVLRSLARRIQAATVEAGELEHEILGHVRAVAPALLDEPGVGPIVAAQLIVAWSHRGRRRSEACFARLAGVAPVPASSGQTQRHRLSRGGDRQLNRAVHTVVLHRRQHDPATKDYIAKRIAEGKSRRDATRLLKRYLARHLYRVLQQQEPLMT

SEQ ID NO: 71805 - protein, 349 aa, unidentified
MIIIGVDFHPEFQQIALVDTDTGELEERRLHHPQEAEEFYREVVNQGKTVRVGMEASGHGRWFERLLSELQIELWIGDAAEIRTKRVRKQKTDRQDAQLILKLMLKDDFPKIWVPSWENRDLRQLLWHRHRMVQARTRIMNQLQAVALNEGLRCKKRLWRTERPRLESFQLAPWASRRRHDLLELLDRLNPTIAELSQAVEQEVEKFPEAQRLATHPGVGPLTALAFVLIIGEAERFQCGKQVASYLGLVPLEDSSGGRRRLGHITKQGSSILRFLLVEAAQVTVRSLPEWRRRYFHLMMRRGRKIAKVAMARRLAVCLYWMMRQGWDYQQWIEFGSHAGQPGNRHGVQ

SEQ ID NO: 71806 - protein, 338 aa, unidentified
MAMYCGIDLHSNNNYVAIQDETYEDVVCRRLRNDLGVILKFLEPYREELEAIAVESTFNWYWLVDGLKEAGYDMRLVNTTKASDYSGLKYTDDRHDARWIAHLLALGILPEGYIMPPKERGLRDLLRRRSYLVHQRTALYLSVKTIFARSKCQKVTTQDIRTWDSEAVRGMFDDPHVAESVIAMLPVVRVVTAQIKGIEKIALETGKLRDEFRLLFTVPGIGDILALTIMCETGDISRFRKVGNYGSYCRCVKSEKFSNNKKKGKGNRKNGNKYLSWAYSEAAHHAKQYEPLAKRYFDRKKSRCHPMVAARALANKMARACYYVMRDQVPFDPSRTFC

SEQ ID NO: 71807 - protein, 349 aa, unidentified
MRTTPKPDAAAYGIDIGKKAFHVVALDAKGQPIQRVKFSRETLLKFFEAADTALIGMEACAGSQWLARKLAVLGHDARIIPAKFVKPYVKSNKSDMIDAEAIAEAVTRPTMRFVQVRSEAQVDLQALHRIRDRLIRNRTGLMNQARAFCIEYGLAMRTGAGGFHADIRRHLDNEENDLSTAMRGLLTELLDDLAYLEGRIGNLTGQIEAIAHSDETVRRLLTIPGIGPLGATALVAAAGDGRQFRKVRDMAAWLGLVPAERSSGGKQTLLGISKRGNGYVRRLIIHGARSCFLHLHRESHALGRWLSALEERTHRNKAVVALANKLTRIAWAILTRPGENYLRTKGAAA

SEQ ID NO: 71808 - protein, 418 aa, unidentified
MDTIYFMVAGLDVHHKRIEAAVRCRQETGKLFCRVRSFGTMTRDLRAMADYLKSLGVTHVAMEATGVLWKPVWNILDGHFTLLLANPHHLKRVPGRKSDVSDAQWIAHLLQCGLLRGSFVPSRPLRDLRDLTRHRAQLISEHTRVANRIHKVLEDANIKLGAVASDVLGKSGRAMLRALLDGQRDPAHLAELALGTLRKKIPELRLAMEGHFTEHHTFMLRRLLSHLNYLEQQIERFTERIKPRVEELLSPADQHRLDAIPGVNDITIENVLAEIGPDMSVFPDEHHLCSWTGLCPGNEESAGKRKRSRTRKGNRWLRRALSEAAWAASHAKDSYLAKQYRRLAARRGKKRALLALGHTILVVIYHLLKNKELRYHDLGADFFDRVQPERLRRYLVRRLQQLGYEVVLSPAEGSPHAA

SEQ ID NO: 71809 - protein, 339 aa, unidentified
MKLYAGIDLHSNNSVVSVIDEADQVVFEKRLPNELERIVLALAAFRDALVGIVVESTFNWYWLVDGLMAAGFRVHLANPAAIVQYEGLKHSGDEHDARWLAHLLRLKILREGYIYPKAARGVRDLMRRRMQLVQTRSTQLLAMQTQLMRSTGRSLSSAQLKGAQAAALLPGLVDEPNVVSALQANLAVAQALSAEIERLEREIVSQVKLAAQFEPLLSVPGIGKILGLCIMLETGEIARFAKVGNFASYARCVDSERLSNGKKKGEGNAKCGNRYLAWAFVEAAHFAVRYNGRIQRFYQRKAAKTNQMVAIKAVAHKLARAAYHVMRTCEPFEEERAFA

SEQ ID NO: 71810 - protein, 428 aa, unidentified
MNNEDIIRREQFCQIISEIRGSDDYLVVGIDVAKDKHHAFMGSATGKSLLRKLVFENNLEGFRKLLERSEAIGIQNALSKVVFGMEPTANYHKPLGAHLIGCGCHVVLVTGKAVKYNRELLDGRWDKNDDKDAANVADLVSRGKCLYYDYPSSSINELRQLLSLRRRLKKEEHSLRMRIRNNLLALYFPELDRFYKVCESETLAIVRWCLDPGRIAGMEFDEFFSMVTSTTRGIAQKLRLQKIHRLAVESIGCPMGPAAEFEATLLVEKLKEVRRQLKEISDLMADFCMQFAEYRFVLTIPGFGPYISARVLASIANPWRFDKSSQVLKLAGYDLSAQRSGKRSADAVPVISKRGNGELRYALYQAAHVASSRNRDFIRYFTRMLRGRERERGIKTKMKVKLAAKMLKIAWTIMKKKEVFDPNHLVIE

SEQ ID NO: 71811 - protein, 342 aa, unidentified
MEYGAIDLHLQRSQIRIVAEDGTVRLDQRIVTSRPEFVGLFGGRAPMRVLLETGTESEWVAQTLEACGHEVIVADPNYTLMYGARARAVKTDKRDVATLAEACRLGIYRPAHRVSAAQRQQRRELRVREQLVRVRTQAINLLRAQLRQEGYRLASGSAETVVARYDRLAVPAALQQVLTPLLDVLRHLAPTLTQAAETLRARAAADPIARRLMTAPGIGPITALTYRATVDTIDRFADAGSASAFFGLVPREASSGERQRRGRITKAGPPVARSLLIQAAWVVWRQRATGGQMHAWVLRLADRRGKRIAIVALARRLSRILYAMWRDGTDYRVGPRTAVSNV

SEQ ID NO: 71812 - protein, 468 aa, unidentified
MKRKHWTKGHKPRKHISLLERINPDVAGIDCGSAEHFVAVPVGRDPNPVQSFQTFTAGLHRLAEWLAACGVRSVAMEATGVYWIALFEILEARGFEVILTNARHVKNVAGRKSDVLDCEWLRELHSVGLLRGSFRPAEAITALRGYVRHRDTLVAEMSSTIQRMQKALVQMNVQLPQVITDITGTTGLAILHDIVEGRTDPQQLVLHRDPRCHASPEQFVAALTGNYRPEHVFALKQNLALFEYCQGMLVECDAAIERHLQVLTAQTDQTEAPSAPLPPRRTKAQPRSKEPRFDIRGYLYRLTGTDLSQIDGIGPYQALRLISEVGTDMSRWPSEQHFTAWLTLAPQNKISGGRLLSSRTPASANRAAAMLRMVAMSLARTQTALGAFYRRLAARIGKAKAITATARKVAILVYRMLKGEIQYQDPGPVAYDARQRQRLVRKLHKRAEALGFALVAIDTGELAPAGVS

SEQ ID NO: 71813 - protein, 338 aa, unidentified
MKTFIGIDYHKRFSYGTIMTEAGQIVKQSRFNNHPKAVAAFLGDCCNHDSSAVLEAGYNSLVMHDWLEELIGSVTLANPLKVKAIAEAKIKTDKIDSATLAHLLRCDLIPSAHVSSPAARIGKKLLRHRMFLVRLSTMVKNRIHSLMDGFPLIRDTRSMKDLFSKKGVGWLKQIELPRYARRILDSEISLLEYLGLQIKHIDSGISGFGRKDQRVKNVMTIPGIGKFFSLLVVSEIDNINRFRSPAKLHAYAGLVPSTYSSGGRTYHGRIIKQGNKYLRYAMIEAVWPALSKCMDLEKVYNRVYSRRGSNSAKVAAARRLLTIVYRVLKENREYRYRY

SEQ ID NO: 71814 - protein, 454 aa, unidentified
MNNNGFLGLDISKGYADLYVINSDKIPVEAAFRLYDVQDGHQRIEELIDKWFEKQSFETLYCGVESTGGYENNWINLLQELAIKRPLKIARLNAKGVKSLSDAALKRTITDSVSAENIAMYLFYFRHKIKWIDDPQSFKKYTDGRRHNTFIRMLKKQRIQLSNQLEKLLYQELSPILTYCRHGAPGWLLNLLLKHSSVAAINKAGVKGLLKIKGITTEKAEAILNKTRESKHCTSAHISSVIKGTIKQMLHLDETIKEEKNKLIAEYSDSEEVKLLTSISGLGNQSAVEILIEIENIHRFEDAKKLSAYFGLHPVFKQSGDGKWGNHMSKKGRSEIRAVLFMSSLTAIRYSDLFKNIYSNARAKGKNHFNAMGVVMHKLLLVIYGVLKNKIAFSQAIDAKNVENAELKQQAEKEKSKEQKREQVQKLERYNRAELDHSPISKRHAKKRKVLQVT

SEQ ID NO: 71815 - protein, 342 aa, unidentified
MTQITFFVGVDIASASFMACVGTAPWKLTVKPVKFDNDENGFASFLSWLKNNSLVPEKTVVCMEATGVYGEGLAYFLFASEYPVAVEPPLNIQRKFPANASKTDELDCQYIAEYACRYVDKLAFWKPRADLLEKVKVLLTTRQHFSVQLTGHKNALIAVNRKKVTSELARQVHQDMIEQINKHIKAIDQEIRRLIDDHPTFKQTFLLLLSVPGIGLQLAAHLLIHMQETLDPKVLAAFIGICPIKHESGTSVYSAPTSRHYGPPVMRKLLYLGACSVRTHKKQFQQYFFRKVAEGKHKKVVLNNIENKILKIACAVVRSQKPYLPNYVSLNPLVFQKTLTAS

SEQ ID NO: 71816 - protein, 342 aa, unidentified
MYYVGVDYHKEIAVACITDKNGKEKDILDLPATPSGMDTLIEIMKGKKFKVLGEAFTYSIDLHNYLIGQGVDSDLVRPTDFKLVTTSKKKTDRHDARTIAWYLRLKDKGEIVLNSSFIVKDEQMRFRDICRLRENLAEQSGVTSQRIRSHMRRNGEYLPVEVFGDKPKISSGKVQQYIIENYGSDFTLQELLREYIYYGERSKVVDTQMRLYNTSVRDVDLLMSIPGIGETTALELMSMIVDISRFPNADVMRSYFGMAPKVRDSGESVHHGHITKQGDPMMRKVLDRATKSHMRFCTESKVKTKYDSVVKRSPKAVAGMAAANKLLDVIFSVLVNKRPFRV

SEQ ID NO: 71817 - protein, 334 aa, unidentified
MENIALIGIDLGKNSFHIHCQDRRGKAVFRKKFTRPKLFEFLVTCPATTIVMEACGGSHFMARKLTELGHTPKLISPQFVRPFVKTNKNDFVDAEAICEAASRPSMRFVQPRTESQQAMRALHRVRESLVQDKVKTTNQMHAFLLEFGVSVPRGAAVISRLSTILEDNKLPLYLNQLLQKLQQHYHYLVEQIKDLEAQLKRKLNEDEVGQRLLTIPCVGTLTASTISTELGDGKQYASSRDFAAATGLVPRQYSTGGRTTLLGISKRGNKKIRTLLVQCARVFIQKLEHQSGKLADWVRELLCRKSNFVVTCALANKLARIAWALTARQQTFHS

SEQ ID NO: 71818 - protein, 360 aa, unidentified
MRTYYIGADVHSNSTELAIEHNGNIVCRRSVSTTIPAIKEVFASVGGKIHLTFEEGPMAGWLYRNLKDTVDRIVICDPRRNKLICSDGDADDKIDAAKLASLLRGGYLRAVYHSDDQRRAELKQWVSLYHDRVRDAVRMINKIRARCRMYGIAIPRNVIRDKSQRPQWLSGIKNQSLAKQLEMLWIGYDATAVQVRRTKRQLCTLSRNYPIIKIWSDLPGIGIIRAVTAFAFLDTPWRFAHKNKLWKYCGVGLQRTASGADRKGIPKPAGLQLAWAVNRLLKNIILGAVHTAISQGENVFRRDYERMIHEGIIPSNARHAVARKMLTVMWGMWKTNSRFYEKPVQAAVMTAGSSCPAVRK

SEQ ID NO: 71819 - protein, 355 aa, unidentified
MKLNKPEDIDEIVVIGVDIGKDTFHLVGFDQFGQRVLRKKIKRLALQPTFEDLPRCIVGMEACMSAHFVSRMLRELGFEPRIIPAIYVKPFNKGQKNDYNDAEAIAEAAMRPNLRTVTEKSQDQLDLQAMHRVRSRLVARRTATINQIRAFLIEQGITVRAGRHRLQSSFEAILENRRDEISPRMRSTLLGLYGDWLWVDERIKALSSEIEEISRSEENSANVMTIPGIGPLISTAIVAAIGKGEVFDRGRDFAAWLGLVPRQFSTGGRTILGRISKRGNNYLRMLLVQAANVILMRPHRWDAIGLGPWLRGVVSRMPHNKAAVALANKLARIAWSVLRHGKIYTVGGDETLGAI

SEQ ID NO: 71820 - protein, 344 aa, unidentified
MGEVSTIGLDIAKSVFQAHGVDVDGIVVIRKRVSRAKVLKYFGELAPCLVGIEACPSAHHWGRELQRLGHTVRLIAPSYVKAYLRRSKNDANDAAAICEAVTRPSMRFVPIKTTGQQTVLMLHRTRQLLVRQRTMLSNALRGHLAELGIISAKGRNGTAELLKIIADGEDSRVSPLVRSILEVLARQYGAIGAEIASIDKSIKALHRVCEASRRLAEIPGIGPLSATALVAEIGDWSTFSSGRSLAAWIGLVPKQHSTGGREKLGHITKQGNRYLRWLLVVGAMAVVRYARKYGARRRPWLARLMERRPTKVAAVALANKIARMAWAIMVRNERYKEPKLLLAA

SEQ ID NO: 71821 - protein, 347 aa, unidentified
MVIVDSSRLIVGGVDTHRDVNVAAVVDMNGGLLGVESFPTTGEGHKMLASWMAGFGTIERVGIEGTGAYGAGLARHFARSSVMVIEVDRPNRQKRRQRGKSDRLDAIEAARGALSGRCEGIAKSGDGHAEALRALLVAKRSARSTRIRTIVQLRYLMFTAPDELRARLGGLSAALLVSEAAKLRPRPGGDIVMHGVKTTATILARRVQALDVELAVIDAQIAPLVKAAAPDLLNVFGVGIDTAAVLLVTAGDNPERITSEAKWAMLCGIAPIPATSGMIDGRYRLNSGGDRHANNAIWRIVITRLGQHEPRTIAYMERRREEGKSKRYVIRCLKRYVAREVFQVLPR

SEQ ID NO: 71822 - protein, 347 aa, unidentified
MKYYCGLDVSLNNTAACVVNQDGTIIREGEVLSEPAAIDQWLKKLGLPMERVGLEAGGLSSWLCHELLAARWPVICIETRHAKAAMGAQQVKTDRNDARGLAHIMRTGWYKEVHVKSQESQELRMLLNNRRFLLDKRLATDNEIRGSLRTFGLKLGKVTPKTYEPRIRELVGDNKKFQDCIFPMLEVRRVLIEQYQKLHKLVLDYVKEDQVCQLFITAPGIGPMTSLAFKTFVDRPERFKKSKAVGAALGMTPRKYASGEVDYDGHITKCGDAFVRMHLYEAAKVLLSRSGEPSDLKSWGLRLAKRSSKKKACVAVARRLAVILHAMWRDGTVFQSTQVQAELVAAA

SEQ ID NO: 71823 - protein, 341 aa, unidentified
MKIIGCDFHPSYQQIAMVDSETGELREGRLEHEQGEARRFYQALQGQTVRVGIEAVGNSQWFEQMLAEMGHELWIGDAAQIRRLVVRQQKTDRRDAQHILDLLLDGRFPRLWVPSQQMRDVRQLLRHRQKLVELRTQVKNQLQHLALNQGVRRKRRLWSVQGRTVLEQLPLQGWTARRRSDLLAMLDRLDEQVGELDRAVRAEAEQRPEVRLLMTHPGVGPVVGLAYVLTLGPHTRFERGKKVASYLGLIPGEHSSGDRQSFGPISKQGNTMMRTLLVEAAQTAARFDEELRRAYGRLKAKKHSAPAKVMVARKLAVRMYWMLRENKSYTELYTRRPVARM

SEQ ID NO: 71824 - protein, 326 aa, unidentified
MTDVSEPIFVGIDVSQATLEVALDGAGKTQTLGNDEEGIAALLRQLEGVKERVGAVLLEATGGLERRAAVALCMNGFAVMVVNPRQARDFAKSMGYLGKTDSIDARALSQFARALHGSKQRERLLFRMPSIEQEELQALVIRRTQLVAMRVAEANRLASAHKSQRKSIQALIKVLDLQIGRIDDDVGRRLKEHFKDKLDLLKGLKGVAQGTQSVLMAALPELGQLTRRQIAKLVGVAPLNRDSGTLKGRRTTWGGRSLVRSALYMATLSAVRYDPVLRAFYERLLGAGKAKKVALTACMHKLLTIINAVIKSGQPWRPGYPQQPAT

SEQ ID NO: 71825 - protein, 341 aa, unidentified
MQFVGLDVSVDETSVCVVDAAGAILREFKVRTDPVAIGRAVAQHARDAERIGLEAGGSSSWLCRELKAQGLPVVHMEARHAHRALSMRINKTDRNDARGLAELMRVGWFKPAHAKSVDAHRIRSLLLARKRLIDMRRDLTNQARNIMKTTGTMLGSTAGRGFIAKATAACDADEKLASMCRPLLEVARTMVVQIRAYDRALLAMARHHETARRMMTVSGVGSLTALAFISAIDDPLRFKHSADVGAYLGLTLRRHQSGEMDWSGRISKLGDGLARTYLFEAASVLVGRISRWSALKDWGVRLTKRVGSKKARVAVARKIAVILHCIWVDGTEFEWGTPVEA

SEQ ID NO: 71826 - protein, 318 aa, unidentified
MSTASFVGLDVAKAQLDVAVRPSSEGWSITNDEAGIAQLVGRLKALRPTLIVAEATGGFEHAAIAALAAVGLPVVVANPRQVRDFARATGQLAKTDQLDAGILALFAERVRPAPRPLPDAAAQLLDALLTRRRQLLEMLVAEQNRLGFAPKPLHRSIRQHIHWLERQLDDVTTALTHQIEQSPVWRAKDDLLQSVPGVGPIVSATLLGELPELGTLSHKQIAALVGVAPLARDSGTLRGKRMVWGGRASVRTALYLAALSGRRWNPQLRVFYERLRAAGKPTKVALIACARKLLTILNAMVRNNTRWQALTPSAQHSC

SEQ ID NO: 71827 - protein, 388 aa, unidentified
MNVRADKSEPLTAIHTDLGAIFVSLELSRSSWLITSLSPGGGEKMSKHSVPGGDFAGLMERFAQLQEKARLRTGQSFRIIVIQEAGLDGFWIHRALQNEGIESHVVDAASIATSRRRRRPKTDKIDGETLVRALLAYKRGEPRVCAMVKAPTPGEEDRRHLCRERKALTAERVRHVNRIKGLLFSQGISGYQPLRRDRRQRLEELQTGDGRAFPQHLKALVNRELDRLELLLKQIKTVEAARDALLAVGQTAKPAPAAMLLDIRGIGPEFAAILWSEGLFRHFENRRQIAAYAGLAPTPWQSGAVDREQGVSKAGNPRLRTTLIQLAWLWLRNQPRSALSLWFHERVSRNGGRLRKTTIVALARKLLVALWKYVTAGVVIEGVTMKVA

SEQ ID NO: 71828 - protein, 343 aa, unidentified
MKVMAIGVDLAKNLIQLHGVDAQGKVALKKQLKRNQVLSFFANLSPCVIGMEACAGAHHWARKLESFGHRVKLMAPQFVKPYVKTNKNDAADAEAICEAVTRPSMRFVPTKNIEQQAVLALHRARQGFVKARTAQANQIRGLLAEYGIVIPQGLSHISKRVPMVVEDGESELPGVFRQLLQRLVEHLKEIDRQVLELEARIQLWHRQNEASRKLAQIPGIGPITASALVASIGDAKSFANGRQLAAWLGLVPRQHSSGGKQVLLGISKRGDVYLRTLLILGARAVLRILEQRTDCTQAWLKRLLARRNSNVAAVALANKNARIVWALLAHGREYDAAYAAALK

SEQ ID NO: 71829 - protein, 423 aa, unidentified
MKVTYQTCCGVDVHKSFLVATIVKTTGGIEPSYQKKRFSTFNNSILEFKQWLLDNHCHDVCMESTGKYWVPVFNLLEDKINVVIANPKWVKAVKGNKDDTKDSKWIGDLFRLGLVKGSYIPCKKVRILREYTRYRYKLVSCRSSEKNRYQNALTVCNVALDSIVSDIFGKSSTSIIDYLLEQSGTSINHEEIASKLLRSLKSKEDAVIESVEGYQMTDAQKYRMRLVRAHMDYITAEINDVDKMIENMISSNPDFENAVQFLCTIPGVKRDSAITIISETGTDMSQFSSSKRLCCWAGLTPGSNESAGKKKSVRITRAGVYLKPALVQVAHAAVKSDKSPYYKQKYERIMKRRGKKRAIIAIARMILTAIYQMLSTGEAWNPTDLFKIDMPEPMKEKQKEKAIKQAMKLLIREGKISESQLAS

SEQ ID NO: 71830 - protein, 319 aa, unidentified
MAQNGLVVAGIDIAKDKADVSIRALSQRQTFPSTAAGRRQLISWLRKHKVTKAVMEASGGYEREWAKALRDARIEVRIVDPKRVRSFAQSAGRLAKNDGIDSDTIAWFAEIFGEAPSQAHDAARETLQQMVNARRGLLDIRTMLSNKGEQDVPEPVQKSHARLLKTVAVELARLEAAITALVKATPHFAKRAEIIESVPGLAATTAAGLIAAMPELGEVSNEAIAALLGVAPYDDDSGKRQGERQIKGGRRKVRNLFYMASLGAATRHNPALNAFYRRLIAKGKKAKVALVACMRKLIVILNTMIARGEKWDANRCPVS

SEQ ID NO: 71831 - protein, 425 aa, unidentified
MTQSYGNTGENVLVAIDIAKQRNAVLIQFPDESGKKFIVANKRSDYQEFTAYLKSLRFPCVIGLEATGNYHRPLAYYLQQEGFELKLVSSVAAARTREAMYNSWDKNDSKDAQVILHLLKTGLTQIYHDPLLHRINDIQELSKTCYQVSLRKTRVQHSIMTHYLPLYFPEVQKYYHTSRAQWFSSLLLRFPSPSSVLKYSREEFIEEARDVAGRKVNKTAWLTDFYETATSSIGLPVAEDSEAMRMFRIVLQEHQDLCRLRQSIEERANLYLKDNADYNRLRTIPGIGPVIALSILAEAGDLRRFSHYKKFLKYCGLNLSTHQSGNFRGMSKLSKHGNARLRCVFWMAGTVAIRMRENTFRKKYENYIKADPGNPDLKRKAYTAVAAKMARVAYGLVKTEKDYRCFFESSIPSGKIPSVGPLRHL

SEQ ID NO: 71832 - protein, 309 aa, unidentified
MDAQYVGIDVSKARLDVHVRPSGDAFVVARDDKGMAELVERLRAIAPRLIAVEATGGYETVVAAAIGGAGLPLAVVNPAQVRHYAQALGKRAKTDPVDAEVIARFAEATHPEPRALPDEASQALAELVTRRRQIITMMVAERQRATRLPKRLRKSCERVVRMLEKELAALDIDIDTTVRGSPAWRATEDLLASVPGVGSITARALIAELPELGRLDRRCIASLVGVAPFTRQSGQWRGKSFIAGGRRSVRAALFVATMAAVRHNSIIRDFRQRLLAAGKPKMVAMIACMRKLLTILNAIARDQKPWQPA

SEQ ID NO: 71833 - protein, 419 aa, unidentified
MNKVKTKKLRIVNPKTLIVTVDIGKTTDMGYCRAPQGREIKPFEFSNNLMGFEKLWERICWAKATYHLEEVVVGFESTGAYGEPLVHYLRKKPVKLVQINPMHTKRMKDLEGNSPGKTDRKDPKVIADIIGLGHALSVVIPEGVAAELRRLSQARERSVHRRTALYNQLQELVFIIFPEFLQVMKDVKTRSAQYLLRHYPSPQDMVRCGADALASILRRVSRGKLGRQRAEALYEGARQTVGLEEGRRGILFEIQELVSLIEAGEGFIERVEQEMVKGLKEIPYSNSLLSVKGVGEITVAGLIGEVGDFRQFHTLSEITKLAGLDLFEISSGNHKGKRRISKRGRPLLRKLLYFAAINTVRKGGVMRASYQRYLEGGMLKKKALIAIARKLLRILFALVRDHSQYVESYSERKVLKLAA

SEQ ID NO: 71834 - protein, 410 aa, unidentified
MPKIVYPICCGMDVHKSFVVACIASTNDKLVTTYKSKRFSTFTGDLRRLADWLMENNCRDVCMESSGKYWIPVYNILELSCNIVLAHPKYVKAIKGKKTDKRDAKWIADIFKHDLINGSFIPPSDIRQLRDLVRYRVKLTSYSTGEKNRAQNCLTVSNIKLDDVFSDVFGKAASAITDRLLENNEPFDVRPYLTKHIKTSPVDIQAAVDGAMCANQAEKLRIIRSHMKNLELCKMNLDSEILTVAEKYLPQVNLISTVPGIQSLSAIAIIGEIGVDMSVFATSRHLCSWAGLAPQNDQSAGKKKTTRVSRAGVYIKPLLVQCALCAIRSKSNPEVANRYSAIKKRRGHKKAVIAISRMLLTAIYNIIKKDEPYNAELYRLSDKPPVQREVSVEQAIFILQRQGYLVTDDA

SEQ ID NO: 71835 - protein, 338 aa, unidentified
MTIVMGLDQHRAQITAEWLDTATGEVSRRRIRPADRQGFCSFLAEFESERVEAALEATTGWRFLAEELKAAGHVAHLAEPAETASLRGPKKRAKSDRADARHLRELLQQGRLPESWIPPTHILELRSKVRLRHTLGEQRGEWQQRIQAQLYHHGAPQRSGLLSAESRAWLEGLDLPEAARRQVDVALAMIDALEAQLAPLDAELRAYARRQVGCRALQGHFGIGELTAVTILAELGDPGRFSSSRQAVRYAGMDITVAESDRRRAPGHLSRQGPPALRWALYEAAQVARRPSSPDRAYYEQAARRLGGNRACLAIARKLLKRSFHTLRELGEEALAPA

SEQ ID NO: 71836 - protein, 420 aa, unidentified
MEEVTDEPAELVERVAALDIGKASLVCCVRVPHESRPGARRQEVRTYDTVTPALLELRDWLICQGVTRVVMEATSAYWKPPFYLLEDDIECWVVNARDVKNVPGRPKTDKIDSVWLCKLAERGMLRPSFIPARPQRQLRDLTRYRRTLTQERSREKQRAEKLLEDAQVKLSSVISDIFGVSGRDMLAALIAGQRDPHALANLARKTMRAKIGVLRQALTGHFTEHHAFLLRMMLDRVDALTAQIDTLTARIEEAIAPLAAQVAQLDEIPGIGVTTAQEIIAEIGTDMTRFPTPGHLVSWAKFAPKARQSAGRSKAATTGKGNPWLGGTIGEAAAGAARTSTFLAARYKRVVKRRGKKRALVAVGNSILTICWHLLSDPGAHFTDLGPDWHDRLAPQRRKHQLIAELERLSGKKVTLHDAA

SEQ ID NO: 71837 - protein, 440 aa, unidentified
MLYLGIDLHSKQLTVNLRGENGEVIMRRQVSTRGEEPRQFLEEVARRSGADGYVAILEVCGFHDWLTELLPQCGCRETILIQPKEHGRRKTDRSDASHLSEILWVNRQRLLAGQKVNGVRRVVPPTPPERHDRRLTQLRRDAGAALTRTINGVQHILRRLNFSQHCPTKGIQTKAARKWLQTVKLPDLDRFEMNALLARWRALEEHLAALEERIAERACNHPQAKLLRTVPGVGLFMSLAFAARIGKIERFATPRSLPNYFGLTPSCRNSGETGQRLGSITKEGSVLVRFLLGQLVIHVLRKDATLREWYRRIKKRRGAKIARVAVMRRLAVVFWHMLKHGQPYDLAAQARPKPTPRCKAKAADTAQAGAAPSGPSLGALPPNPRDLSPRAPFEGAGGKTTQRRKKTSGRSQPPALSRRAGRAGSGARVASQQRPILPPG

SEQ ID NO: 71838 - protein, 387 aa, unidentified
MPQPNDLSRSLVALDQDSTIIAVVEMSQSSWLVGGVLPGIERQPCKKLEPSAERLLGLLHRWRDEAVRAGKKITRIALAFEAGRDGFWLARWLRAHGVEAHVIHPSSVAVSRQHRRAKTDRLDTELLKRGFLGWLRGERGHCSMARVPTMAEEDAKRPNRERECLVGERTRIVNRMKATLARLGIRNFKPTLRKAAERLATLQTPEGMPLPPNVSAELQRDMARLGFVVSQIKEIEEVREKRLEQAPETGSHAMVRLLARVVGVGIETADMLVHEVLSRPMRDRKAVARYAGLTGSPDESGAKRREQGLARAGNARVRRGMIQLAWRFLLFQKQSALAQWYRARTADSRLGTRKTMIVALARKLLIALWRFVTAGETLEGVILRPAG

SEQ ID NO: 71839 - protein, 387 aa, unidentified
MIAHYIDEKFQKEFTIQNNKNGYNYLLNYLHRVNQPKLIFESTGIYSRAMVRFCRVNQINYIELNPLEAKFKTSSLRSWKTDQSDAHKLAQIAPFLNDSDSLNNTNDDIYFELRERARFHLEFENEQNRLKVEIIEILHQTFPGLEKLFKNRYSMIALNIAEIFTHPDFVQQNDMESIISTILKSTDKGLSQRKAESYGETLFKLANDSYPNVNSSSFLVKKAQLLIQKLKKSIGQLSQLDKEMIQLAQELDCFEIICSIPGIGDLTAAMIIGELGDISRFKSNKQLNAFVGIDIKRYQSGGTHYRDTINKRGNKKARRLLFLVIMNIIRGQHRYNNHIVDYYYKLRKQPNEKSHKTAIVACINRLLKTFHYLIMKHKLYDYEMSPH

SEQ ID NO: 71840 - protein, 376 aa, unidentified
MDCTSTAGSILPCALELSKNTWLLGIQFPDRPQPSLYPIRGGNTEDLIAKLTAARDRCAKISGRAPSIVLCYEAGYDAFWLARFLKARGIECLVVDSTSMQVNRRARRSKTDRIDVGKLLRGLIAWLRGDRHVWSVVRIPSVDEEDLRRSHRERDYLVHERTAHINRIKGLLFAQGIRGINVKRQYKTLHVDKLVTGNGHPIPPRLASEIVREIARLALVQEQIETLERERDERPTPCTATEKKRAQLMYLNGIGPAISAVMTREVYYRQFDNRRQVAGFIGLAPSPYDSGEVERSQGISRTGRGQVRGTMIQAAWLWIKHQPRSTLTRWFLERTMGQGGRVKRMMIVAVARKLAIALWRFLEHGLVPQGAILSSK

SEQ ID NO: 71841 - protein, 349 aa, unidentified
MQYYIGLDLHRKFTEACVLDEGGDILMRNRLYHEDEQHVADFFEQFPKDTSVAMEATIGWPWISDLLESFGFDVHLAHPLKLRLIAEARLKTDKVDAWVLAHLLRIGFLPESYLAPSHVRDQRNLLRHRESMKKIRCNIKNRVHGLLAYHNIHPKESDIFGKAGMEMLCNMELDPHSRRILDDMLDHIEYSNKEIKKLERYLRKTLARDPRVGWLRTLPGIDYLSAYYIIAEIGDISRFSTPGKLVSYIALCPTTRSSGGKTWHGPPEGGRKLLKWVLVEAAHTAVKRDSYFATVFNQKKRKKGKHSAYFIVAHKMAKIIWHMLTEERPYKVRKKQTQVGSRLNMAVTQ

SEQ ID NO: 71842 - protein, 373 aa, unidentified
METIITYIGMDTHKKEHAIALHYPGQEEIVRFTVRNTSSEISKMVKRILKKAPGEVRFCYEAGVCGFDLKRKIEALGCKCAVIAPSLTPIKPGERIKTDHRDALKLLMMFKAGLLTEVYAPDPQQEAARELTRLRQSARKNLMTARHRLLKFLVRHGYIYHEGSHWTGRHFRWLGGLEFKNPLMRDIFDSYFTEMQHCMQRLDSLDKEVEQLAESEPYKEIVGILRCFYGIDTLTAISIITEVFDFGRFANPGCLMSYLGLTPSESSSGEKQNKGPITKAGNKRVRRLLIEVSWHYRHPYHVSKALKERRKNQPQWAIDIADRAGQRLRKRYWYLINRGKMPCKANTAVARELAGFIWSVLKEYQARNTEKVA

SEQ ID NO: 71843 - protein, 411 aa, unidentified
MRLFVGDDWAEDHHDVEVMDEAGKVLAKRRLPEGVAGIAQLHELIGRHLGEDADEAEVIVGIETDHGPWVTALIAAGYTVFPVNPLQASRYRERHGVSGAKSDGGDAHMLADMVRTDSHQLRPAAGDSPEAEGIKVLARTHKTLIWERTRAVQRLRHQLREYFPAALDAFEDLDAPDTLELLGKAPDPARAAKLTRAQVSAALKRARRRNIPDKATAILAALRAGQLGQPPALSAAYAATARALIAVIATLNEQVKVLQGQVEENFGRHPDAEIYRSQPGMGAILGGRVLGEFGDAPHRYADGKARRNYAATSPITRASGKKKVVAARFVHNDRLVDALNAQAFASLNASPGARAYYDELRARGIEHNDALRRLANRLVGILHGCLKTRTLYDEATAWGHRQNLPQSSVAA

SEQ ID NO: 71844 - protein, 474 aa, unidentified
MGKGSGMTRGDRRRNARRERLRAMLPRDGAVIGIDLGDEKQAIAVVDHDVRVLARKTVRVKAFRLGEALEWAVAQARGKGFTAVACEPTGARWLQVQRLCAERGLPLVCIQPLVSHIAREQQDYTTHKSDESDCVMIARLATELHCYIPEELDEAWAQLRHLGRRRAQLITSATASVQRVRDFLSVAWPVAPEACKHPFESVTWLAAMQVVTSRCGGQPGKLAATGLAEFTALVRQAVAGWGGQRPAGPVCRAVFAALASTEGVVVSHRRGLLRRCADELGDLRRIRAQLRAVEAGMVAVLGELGLSRLADIPGLTAADAAAILAETGDPCRYDSSSSLARHAGLSPSGNASGAFEGQAHISRRGRPGLRLTVWRAIWPLLSCNSVMAAKYAAMIAAADAAAAQAAQAQSGTGSRQGSAAAAARARRAKARVACAAALLRWIYSIAGCDTGWDPDVASGAASRPHAPRCQPEAA

SEQ ID NO: 71845 - protein, 410 aa, unidentified
MGGGMRLYIGVDWADAADAVWVEDEDGKKLLSRSVPHTVDGMRDWGHWLDERRAEGHEVWAAIERPEGRTVDFLLDHGVVVFPINPRVVDRVRDRFRMSGAKSDPFDARVLASFLRTDHGHLSPLRPSSEYAQELKGLTRDYARHVRQQTRLLNQVTATLKAYYPRALEICDDLKSEWARAFLREYPTPDALARLTERRWQRWARDHRLRAERPVELWPIIQRPQLAIPAHVVRVKARLLRALLEQLAVTIRTVQAYTETITDFFAGMPGPNWATSLPGAASGTTVPSVYAELGDAAGRWQTFRHLQGCSGTVPVTDRSGKVANVKFRFACNHYLRQAVQQFAFQSLTKSEWARAYYDRCRKRGHRHHHALRALAAKWLKIIFVLWSRQAAYDENRHLATMARQQLRQSA

SEQ ID NO: 71846 - protein, 356 aa, unidentified
MRHYVGLDVSMKETFVCIEDENGKIVNQGRCKTDPLCISQYLNKFQLSFHKVGIESGSLSHWLVEELRKLNIPAICIDARKMAAVLSVQINKTDKNDAKGIAEAMRCGLYREVSQKSQAALEIGTLMGSRRLLIQQKTQLSNAIRGFLKTYGIRLNLCGERLFAERVREKLSDRYHIAKEAIEALLRNFENICCEINKLSKRVEELAHEDEDVKRLMTVPGIGSITAMTYKMEIDDPKRFKNSRSVGAYLGMTPRQYSSGESQRQGRVSKCGSTEARALLNEAALVMLTRSKKWSKLKAWGLKIQKKHGFKKAMMAVGRKLAVTMHRMMMDKTDFNYGKPREEKAAKVTEMSLQAC

SEQ ID NO: 71847 - protein, 367 aa, unidentified
MKQSSKIFVGMDVHKDSIDITLAEQGGEVRRFGEVRGDRAALLKAVRKLTSRGCELVFVYEAGPCGFWIQRDITALGHPCWVVSPSLIPQRPGNHVKTDRRDSENLARLARAGELTPVHVPDVRDEAIRDLVRARDDAVIAQRRARQQLKALLLRNDIRYVGKTSWTSAHLRWLAELKLPQPAQQIAFQEYVDAITVATGRIERFEQAMRDEVLTWRFAPAVAALQAMRGIQFVHAMTLVAELGDLTRFASPRQLMAYLGLVPSEDSSGPRRRQGSITKAGNTYARRALVEAAWAYRHPARLTRIIALRQDALPKQACDIAWKAQLRLCAKYRRLRARRVLETKIIVALARELSGFVWAIGQHVKPQ

SEQ ID NO: 71848 - protein, 393 aa, unidentified
MYIVGIDIAKRVHVACVIDRDGEVIIKSIKIPNTVEGFNNFITKLREISADFSEFEFGMEATGHYWLNIYTNLVELGCNVHVINPVQSDALRGLYIRKTKNNAKDSMIIADVIRFGRYRESVMTEPDLLEMRELTRQRFYVVDSISDLKRKALTLIDRVFPEYPTLFSDTFGTTSLELLANCATPEDIVAIDTDKLVEMLHKVSRGRFNRDKVERIKETARNSFHAILATNSASFMLKQFVEQIRFLEKQVAEIDTMIASYLSKFNTLITTITGVGNTLGASIISEIGDIERFESSEKLAAFAGIDPSVVQSGNFTGTRNRMSKRGSPYLRRSIWLAACAAIMHDPALKVFYDLKKSQGKHHYTCVGYICRKLINIIFAVLKSGKPYQPVFPK

SEQ ID NO: 71849 - protein, 312 aa, unidentified
MDLCILDQAGETLLHRHMQATPEALLKAIAPYRGQIVLAAECLFTWDWLADLWAEHEIPFGLGHALSMKAIQGGKAKNDTIDAQKIAVLRRGGLLPQASVSPAEMRATRDLLRRRMPLTRTRAALLAHVQNTNSQYTLPAIGTKMAYTANRDGVAERFADPAVHKSIAGDLALITSDDELWRDVERTIVKTAKHHDAQTLYLLHTVPGIGKILSLVLRYDIHQIDRVPRVQAFASSCRLVKCAKASAGTRSGTSGTTIGHAPLTWAFSEAAVFFLRDNPAGQPCLTRLEKKHGKGKALTILAHTLARAISCM

SEQ ID NO: 71850 - protein, 352 aa, unidentified
MRFYEQQHPFYCGVDLHARTMHVCVLDQEGQVLVHQNIDACPDACPDAFLALTAAWRKRNMLVGCECMFAWYWLADLCQEHGIPFVLGHALYMKAIHGGKTKSDPIDSHKIAKLLRGGNFPLAYVYPKARRATRDLLRRRMRLVHLRSEAMGHVQNAFHQYNLPRWPKRLDRAKNREGVLERFEDPSLRRSMEIDLGLIEYLEEQIRSLELHLERTARVDDPYSLSLLRSVPGIGAALGLAILYEADDIRRFATPGQFLSYSRLVAGQHESAGKTKSGKGRKMGNRYLKWAFGEAATLMLRDCEGAQRLVDRRTRQHGKARAMSCLARKVGRAVYYLLKKQEPFDVKKFFNP

SEQ ID NO: 71851 - protein, 468 aa, unidentified
MGHNRSRSRQPGGKKAKHPSLLKRINRNAAGIDCGSEAHYVAVPPERDPEPVRSFKTFTADLHRLADWLKACKIKTVAMESTGVYWIPIFEILEEHGFEVVLVNSRHVKNVPGRKSDVLDCQWIQELHSVGLLRGSFRPTAEIASLRAYLRHRGKLVEGAASHIRRMQKVLVQMNLQLHNVISDITGVTGMRILRDIVAGVTDPMALAAHRDYRCRASVEQIAASLTGNYRAEHLFVLRQNLELFDNFQQQIQTCDGEIESLLRTLAAKQRKPKTPVPSPRCKPKFCDNEPRFEIRDPLYRLAGADLTQIDSIGPYTALKLIAEIGTDMSRWPTPGHFTSWLTLAPKNKISGSRLISSRTQPSANRAATVLRMCAMVVGRTSTALGAYYRRIAYRIGKPKAITATARKLAILVYLTLKGDLDYNDPGAQAYEEQHRDRTLRNLRNRARQLGFGLVNVETGELLHGPVT

SEQ ID NO: 71852 - protein, 353 aa, unidentified
MRIVCALDVHRRQITYAIVDVRSGEMSRGRITPATRESVREWLARFDGVDEVGFALEGTTGWRFVVEEVERAGHRAHLADPAETAAKRGRKRRAKTDRADCDLLLRLLSARELPESWIPPAQILELRTRVRLRKTLIDERTAWQQRLQAQLFHQGVPRGLRPRTRAGREALAKVELSPAGLELVALALRMIETIDDELAPLDRALSLYARHQPGCRALIARLYGVGPVTATAIVAELGDARRFGCSDDAVRHCGLDVTVHQSDTKRAPGHLSHEGPELLRWALFEAAQQACRSASPDYEYYRQVARRIDHNRACLSVARKLCRRAYHILRELGDEALAPIETPDREEVIAAAA

SEQ ID NO: 71853 - protein, 368 aa, unidentified
MKKNSTCLKSPKRNKSRERSITIGMDLGDKTSHYYVLDSEGEMVRESSVATTKKGMKQRFGHLPKCRIAIEVGTHSPWVSRLLSSFGHEVIVANARQVKLISASSRKDDRLDAQTLARLARMDPELLRPIRHRGEKTQGDLMQVRVRAALVDTRTGLVNTARGLAKAMGERLPSCDADQMGVEKMQGLPAVLVEALRPLLETVESLTQQIKASDQKLEQLAGRDYPETELLRQVSGVGSLISLTFVLTVEDPSRFRKSRDVGSYVGLRPRRSESGESRPQLGISKEGDVYLRKLLVQGAHCILSQKSPDTDLKRWGLKLAGKGNKNAKKRALVAVARKLAILLHHLWVNGEVYEPLRNSRPLEPKAAA

SEQ ID NO: 71854 - protein, 341 aa, unidentified
MQLKRVGVDIAKSVFQVHGVDSHEQVKVRKQIRRQDFLHFFRQLAPCLVAMEACGGAHYWARELIKLGHEVRLIAPQFVKPYVKSGKNDANDAEAICEAASRPTMRFVAIKMAEQQAGQALHRVRSRQVGARTALVNELRGLLAEFGIISPTHGVSACRRLVAEALEDGDNGLPGAFRALLAQLSEELQQLDAHVATLDQQIRQQCAADERIRRLMAIEGVGPISASAIVASVGDARQFPNGRAFAAWLGLVPSQHSSGGKARLGGITKRGDTYLRTVLIHGARAVVNTRKEKTDRRSRWVQDLVTRRNKNIATVALANKNARIIWSVLSSGEAYRAAVTS

SEQ ID NO: 71855 - protein, 369 aa, unidentified
MNKIETKKQRIVNDKTLIVAIDIGKATDTGYCRCPSGKDIKPFEFTNNSEGFRKLWDRICWEKTSNHLEEVVVGFESTGAYGEPLVHYLRQKPVKLVQVNPMHTKRMKELQGNSPGKTDRKDPKIIADIIGLGHALSVVIPEGAAAELRRLTLARERSIQRRTALYNQLQDLVFIVFPEFLQVMKDVKTQSARYLLRHYPTPQDMAACGSEALAVILKRVSRGKLGKAHAQMLYDAAAQSVGLQEGRMGILLEMEEILSGLEACNCFIEKLEEEMLPYLGQIPYSDLLLSVKGIGVITVAGLIGEVGDFRQFHTLREVMKLAGLNLFEISSGKHRGNRHISKRGRPLLRKLLYFAAINTIRKGGVMHAC

SEQ ID NO: 71856 - protein, 385 aa, unidentified
MSAHPTPIQAAAQLQANTLFASLELSKARWLVTVSAPGSDKLSRHQVPGGDGQALLELLWRLQAAAARRTGAPVMIIVIQEAGLDGFWIHRLLVQNGITSHVVDPASIAVNRRHRRAKTDKIDGVKLLRTLMAWMRGERQVCTMVQPPSPEDEDRRRLARERARLLKERIQHTNRIKGLLSGQGIPDYDPLHRDRRRCLAALTTGDGRPLPERLKAEIGRELDRLEMVVSQLTVVERERDALVARTAEADACAAPAALARLRGIGPELAALLWLEALFRRFDNRRQIAADAGLTPSPWQSGGIDREQGIAKSGNPRLRRAMIELAWFWVRHQPGSALSRWFVERVGTARGRVRRIAIVALARKLLVALWRYVTQGVVPQGAVLKA

SEQ ID NO: 71857 - protein, 402 aa, unidentified
MLAVVIAAVQPGEWEFQRRRFGTTPAQLRELAGGLREQGVSEAVMESTAQYWRPVWAALQGQLRLHLAHAHSNGARRGRKSDFRDAERLTHRLVAGDLVLSFVPDAEQQSWRDLTRTRYQLVVERGRVQSQVENLLERASIKLSSVITDLFGSSGRRILQALSEEAGAPWHSQNLARLAHPSLRASHEQLAEALDGHWSSEHRLLLQLHLERLSLLDRQIETLQQQMAESMKAHQAAVARLCQVPGIRTDAALQLLAEVGPTAASFPSASHLASWAGLCPGQQESAGQSYSKRPAQGNWQMKRVFHQVAHAAALKKGSFFQHLYRRLIVRMGPQKAIGALANRLCRLIWKILHEGVHYVEKGTAPLDPRAIRRRQQKVAAEFRKLGYNVQYVPLQPVITLAT

SEQ ID NO: 71858 - protein, 343 aa, unidentified
MQTVTTIGLDIAKSVFQVHGQDDAGQVVIRRQLKRRSVLAFFQKLPPCLVGIEACASAHHWSRELQALGHKVRLIPPAYVKPYVKRQKNDAADAEAICEAVTRANMRFVPTKTPEQQSGLVLHRTRHLFIRQQTAVINAIRAHLAEFGIVAPVGRHGVEELLKVLADPNDKRVPEIARACLSAFGAQLRRIKEQVLEFDRLIRAWHRSDEMSMRLDEAPGVGPVLATAVVATVADPKSFRSGRNFSAWIGIVPKQHSSGGKNRLGNISKQGDRYLRGLFVAGALAVIRYAKIHGTKRRPWLTALLARRPTKVAAIALANKLARMVWAMMVKGERYKEPVALAA

SEQ ID NO: 71859 - protein, 321 aa, unidentified
MTGIICGVDIGSSSLAARIGQDGAAATFANTPEGIAELAAFCKTHQVALIAMEATGGYEQRAFAQLSGHGLPVAVVNPRAVRQFAQSMGWLEKTDAIDAGMIAWYAETKKSQPLCLAPPTQLELRARVTRLRQLTEVRTAQLNQQRLVTNEAVQKSFGAMLTFLAGQIRELEQAIAALIQADPLWRELNQAFRTIKGVADRTVARIMAEMPEIGTLSNKTISKLAGLAPLANDSGKHQGKRAVRGGRAAVRDILFLVGSVVARYEPDFLCFQQRLRAAGKPPKVVRIAVAHKLLVRLNAKAREVRQQSAHTQLSCSASQQP

SEQ ID NO: 71860 - protein, 374 aa, unidentified
MSKKEETIMKVYAIDWATRKDLAIYDGKKIKKIANTISEFDKFLESIKGGGATIIVPKVGARPGLPAPILLFEFGGADSYKIMAYRAGFQVLQVPGKKVHDYRESLGIEKTDENDAKLIYDFYMKERESAMIIMPQSAKVKLPLPENKRGGGAICKMSKKIVLSLPAPFSIFTEQSADIAEIKILFRRHEDLKKVMVREKNKKFALQKQYEITNIGKKTVKKLLSHSDYSIAGKEKEIAEIKKILKSKVSKFRVWNNYLKDIKGVGEFIASGLIGELGGRQFDSDDSLKHYAGMVKKSAHSDYNHYIKVVLFQFAEGIIKARTPIWRELYDNMKVFYQKKHEDWSKGKVNNYAKKFIETKFLCEFWKQWKLGEN

SEQ ID NO: 71861 - protein, 347 aa, unidentified
MKFYTQQHKHYCGIDLHAKAMYVCILDQSGTKLVHKNLPTTPEAFLRVIAPYREDVVVGVECIFTWYWLADLCNKEGIAFVLGHALYMKAIHGGKAKNDKIDAHKIAVLLRGGMIPQAYVYPAEMRATRDLLRRRCHLVRKRAELLAHIQNTNSQYNLPEIGKKLAYKANREGVEDHFPDPSVRKTIEVDLSLIDHYDKLLGEVELYIIRSAKAHDAHTFARLQSVPGIGTILALVILYEIQDIARFPRVQDFVSYCRLVKCAKESNGKRLGTSGKKIGNVHLRWAFAEAAILFLRHNQPGKEYFTKLEHKHGKAKALTVLGHKLARAVYYMLTREQPFDLQRFVSV

SEQ ID NO: 71862 - protein, 355 aa, unidentified
MIIIGCDYYHPGFQQIAFVDTETGDYGEQRLEHSEGAEKFYRELAAQGKKMRVGMEASGHARWFERLLEELRFELWIGDASEIRARRVRKQKTDRQDAQHILQLLMENRFPKIWVPSGENRDLRQLLWHRHRMVQARTRIMNQLQAVALNEGLRCKKKLWRDAGREQLESFRLSPWASRRRRDLLELLDRLTPMIAELSAAIEQEAEKCPEAQRLQTHPGVGALTALAFVLIIGRADRFQCGKQVASYLGLVPLEDSSGQRRRLGHITKQGNSLLRFLLVEAAQVTVRSDQEWRSKYFHLAMRRGRKIAKVAMARRLAVRLYWMWRKGWNYGQLKKFGSHAGEPGNRDGVQSNTE

SEQ ID NO: 71863 - protein, 344 aa, unidentified
MKITTVGIDLAKNVFQVHGVNEFGKTVVKKQLRRDQVAQYFVNLPACLIGMEACGSAHYWARKLQGFGHTVKLMAPQFVKPYVKTNKNDAADAEAICEAVARPNMRFVPIKNVEQQAVLALHRVRQGFVKARTAQANQIRGLLGEFGLIVPQGIGYIATRVPELIEDASNELPGSFRVLVQRLLDHLKELDRQVGELEVQIQTWHRSSEVSSKLAKIPGIGPITASALVASIGDAKSFDSGRQVAAWLGLVPKQHSSGGKQNLLGISKRGDTYLRTLLIHGARSVIYRAGQKPESCSWINGVVNRRNKNVAAVALANKNARIVWALLAHDREFRSDYTTANAAM

SEQ ID NO: 71864 - protein, 427 aa, unidentified
MNEIKTNRVDAFRQFKRQIRGSKDYLIVGLDIAKRKHHGFFGDANGRTLLKGLIVENNAEGFEHLLTQVRFYMDREGLSRVVFGLEPTSVYHKPLGEHLIEQGHLVVYATNEAIKRNRSLLDGRWDKNDTKDSANVADLVAQGKCHYYDLPEIRLRDLRSLLLFRKRLKKQQHSCRVRIRNNLVAQYFPELDRFWNNAEAENLAIVGWFLDPGSIRQLTCEQFIAKVTTHNGGLRQLRRLRQIWEAAGRSIGCRPGPAMKLEAELLVQTLQSVQVQLGLVEKAIQQIAQGFEEYGYLKSIPGFGPYVSATALAAIGNPHRFENRAQLIRLAGFDLSASRSGEKSNTAVPVISKKGKGDLRYALYQAALVASSLTAHFRDYYNRLLEGRQREKGIRTKMRVKIAAKMLVIAWTLMKRKEPFNPAYIQA

SEQ ID NO: 71865 - protein, 346 aa, unidentified
MSYSTTVGVDLAKNVIQISVVNGRGKELFNRSLSRKKFAEFLGKQKPSLVAFESCATAHYWARAAERHGHEARIIPAKAVAPFRQGHKTDSNDALAVAEAARRPNIKEAPMKTTEQQGLQAIHRSRELLIQESTALSNHLRGVLLEFGVAIPQGFASLLRTLPEVLEDGDNELPDLYRPTLHRMYTRLLELREDIEAMTEEVARLVKEHPVCNKLTALEGIGPIGALLLYATMGSGKAFSGSREFAAYLGLAPRQYSSGGKTHIVGLSKKIGNSRLRSVLILGARAYTYRMKEPKGSKDKWLKAIVERNGVSRAAIALANKNVRTAWAMVTQGTEYQRRPRLEVAA

SEQ ID NO: 71866 - protein, 410 aa, unidentified
MERLIERCCGLDVHKKTVTACVRVPGANGAREQHVRTFGTTTADLLSLRDWLEAFQGTRVAMESTGVYWKPVFYVLEETAICVLANAAQIAQVPGRKTDVKDCVWIAQLLEHGLIRESFVPPAPIRELRDLTRYRKAVIQERTREAHRLHKVLEDAGIKLASVASRVLGVSGRTMLDALVAGTTDPAVLADLARGRLRKKLPALRQALVGRFRGHHAFLVAQILAHLDYLDEAIEAVSTQIDTVIVPFADDLTRLDTIPGVNKRTAEVLIAELGVDMRVFPTAGHLASWAGLCPGNNESAGKHRSGRTRKGNRWLRGALIEAALSAGTHSATGALAARYRRVMRHRGHKKAVVAVAHAILTTAYHLLAQQTTYQDPGADYYDRRHAERVRRRAIHTLERQGFRVTLEPAA

SEQ ID NO: 71867 - protein, 344 aa, unidentified
MYHYAGIDVSLESSTICVVDGAGKILRETKVASEPEALIGWLRSLGLALERIGLEAGPLSQWLFAALRGAGLAVELLETRHVRDAFKSMPVKSDRNDARGIAQLMRLGWFRPVHCKSIEAQETRAILTARKLLQSKLRDVENSLRGVLRGFGLKVGKTTERTFAERIRELVAGHPGLELVARALLEAHAVLRHEFNGLDKHTQKLARLHPPTRLLMTTPAVGPIVALTYAAAIDDPNRFRSSKATGAHFGLTPKKYQSGQTDYTGRISKIGDAAVREALYQAAHVMLTKPVKGCSALKSWAMRIAKRAGMRKAKVALARKLAVIMHRMLADAKPFNPMAKAMAT

SEQ ID NO: 71868 - protein, 387 aa, unidentified
MIYYVGIDISKYKHDFCIISNTGEVIVENSSFDNNKKGFQLFLEQLKPYNKQDVQIAFEATGHYSLNLELFLTNQDYSFMKVNPLVVHQFLKARSLRRTKTDKADSFTMASYLMSIQYKPNSYLLYNIYTLKSLCRSRELLIKERSKFEVLLTNELDKSFPELKPFFNNMISTTLLFILDKYKNVEHISLMKDYDSIRCISHGKFTYAKFAQLKELSKNSVGHHDENTDLLISTYVSIINNFNEKIVPINKQISTIIKDLNPRMLTIPGLGEISAAIILSEYGDFSNFSSPNKLLAFAGLEPSIIQSGTLEHNGKMVKHGSGHLRYAIMNISMTILRYSPTFYDFYLKKRSEGKCHRVALSHVCKKLIRVIYTLEKNNIDFDPSLLK

SEQ ID NO: 71869 - protein, 354 aa, unidentified
MAPIQKQSIGIDIAKDKFDVCFSLVDASGRVVVKSSRQFDNHKSGFVAFDQWIVKWQDPGVELCFTMEATGVYYENLAWHLHQQSRQVAVVLPNLAKKYLQSLGYKSKNDSIDARGLAQMGAERKLPAWQPFSKQLYLLRKLTREHEQLNKAKTSIKNLLHVEAYALISGKSTVKRLEKTLALFDQQLAAIEKEMQAVVVVDEQLQAKVANIISIKGVGFLTAVLIIAETNGFALFENQRQLVSYAGYDVVENQSGKRAGKTRISKKGNAHIRRCLFMPAFNLVRYDLPVFRKLYERLLAKGRTKMQAYVAVQKKLLVLIYTLWRKNGSYEAKNTTILNQEAGAPLWGCCAAAG

SEQ ID NO: 71870 - protein, 375 aa, unidentified
MLGNPSEKGKVMDKITRIGVDLAKNVIQLHGVDSMERVVVRKAISRQKFLEWFANLEPCLVAMEACSAAHYWARKLRALGHEVRLIAPQFAAPYRKGGKHVKNDRLDAEAICEAAGRPHMRFVAVKTADQQNVLVVHRMRSGFVEERTALINRLRGELVEFGVFLPQGIDAFRAHFVEALEDGATELDGVARTALLRGWEHLQALDQQIAWCDAQVATHVKHDSNAQRAMAVIGIGPLTASAAVATVGDARVFKNGRQFSAWLGNVPRQASSGGKTRLGRITKQGNTYLRTLLFQGARSAVTSAYRRSDRLSRWIVQLQARVGWYRTLVAVANKHARILWAILAKGERFDPSYVPTPPGARLAVAPQPPHVQIDE

SEQ ID NO: 71871 - protein, 411 aa, unidentified
MDSAFRFFVGIDWAWEEHTICIINREGKILKETVIPHSSAGIAQLRDLLGELEDAPASVAVAIETPRGSLVEALVEQQYAVFFLNPRQMDRFRDRHTMAGSKDDRFDALVLADSLRTDAVLFHRVRLDDAALLRLRELSRTEQEIHRDQRRTQNQLTALLNRYFPSLLKLCPGADEPWLWDVLEKTPLPQQAATWSKANLEKLLQKRRIRRFSAESLWQNLQTPPLPLAPGAADAASEHVCWLLPRLQILHQQSKQVAQRVEDLLEQMSKPSDPNKHRDAEILLSLPGLGRVTGATMLTEGGQALADQDYHALRSLAGTAPVTRRSGKSKFVLMRRSCNPRLRQGLYNYAMCSIKEDQRSKQLYAALRARGHSHARALRGVADRLLAVMIAMLRSGTLYDPNRRAAGASHS

SEQ ID NO: 71872 - protein, 405 aa, unidentified
MTCRRSSGARPGRPAAAAPEEDSNGTNGEYCSGTDIWDGPPFHPALSTMLISGKGKDQPMSIAILGIDLGKNSCSVVGVNTAGAVIVRRTMRRQTLIDYVAKLPSCVVAMEACCGAHHLGRLFTEQGHEIRLMSPEYVRPYIKAQKNDDRDAEGIAEAASRPTMRFVELKSEEQLDIQTLHRVRSRLVAERTNLLNQMRAILLERGVIFPAGRLKFERELDRMLFESNDALSPRMQHLIGGPYVRAEWKELDEKIGALNREFVQLARNDAAARRLTSIPGIGVLNATALIAAVGDASSFAKARDLGSWLGLVPRQYSTGGKPRLLGISKRGNTYLRTLLIHGARAALPSLSASNTPMGRWLTAMIERGVHRNAIVVALANKLARIAWATLRKKTNFERGYLAATA

SEQ ID NO: 71873 - protein, 355 aa, unidentified
MAHPTTTRPRITVGVDTHLDVHVAHACDQLGRRVATVQVPTTPAGYQDLLAWARGLGEVEAWGVEGTGSYGAALARFLHAEGQVVLEVNRPDRAARRRHGKSDPLDAQAAARAVQAGQVTVVPKAGDGQVEMIRSLRVGRQTAMRARTQTINALHALLVTAPAELREQLRGLSVTWLVRAAAELEPGPITSPLAAAMLALRILAGRYQALSAEITTLTTELDRLTRAAAPRLVALFGVGQDSAGALLVAAGDNPGRLRSDACFSMLCGASPIQASSGKTTRHRLNRGGDRQANAALYRIVLVRLCHDQQTKDYMARRLKQGKSKKEIIRCLKRYVAREVFAALNQMGQDALTAAA

SEQ ID NO: 71874 - protein, 389 aa, unidentified
MKIFVGIDIAKLNHFAAAISSDGEILIEPFKFTNDADGFQLLVSKLESFDKNSIIIGLESTAHYGDNLVRYLVAEFYQVCVLNPIKTCQMRKNNVRKTKTDKVDTFVIAKTLMMQDDLRFITFFDLDMMDLKALGRFRQKTIKQRTRLKIQLTTYVDQVFPEIQYFFKSGLHQHAVYALLKEAPSPKEIASMHMTHLANLLKVNSHGHFTKEQAKELRVLAQKSVGANDSAISIQITQTIQQIELLDSQLEKIEAEMTDIMRFNDSVIMTIPGIGYINGGMILGEIGDIHRFSNPNKLLAFAGLDPSVYQSGNFQAKTTRMSKRGSRVLRYALVNAAWNVVRNNATFEAYYNAKRAEGRSHYNALGHCAGKLVRVIWKMLTDEVEFNLE

SEQ ID NO: 71875 - protein, 458 aa, unidentified
MARRRERREGLSAVLEPDAAGADIGAEEIYVAVPPDRDEECVRRFATFTGDLHALADWLQRCRIRTVAMESTGVYWIPLFQLLEARGLQVYLVNAHYLKSVPGRKSDVSDCQWIQYLHSVGLLRASFRPPEEICALRTLWRHRSSLLQMAAEHTLHMQKALSLMNVQIHHVLSDITGLSGQAIVDAILQGQRDPVTLAQLCNRRVKSPREKVAKALAGDYRAEHLFTLKQSLNGYRYYQRLIAELDQEISRLMQKLPSVQEPSAPMPERTKHTAYQRYGSDPAFDLRGELYRIAGVDLTDVPGISAATAQVILTEIGPDVGRFRNASAFASWLGLCPEQRISGGELLSCRTRKVNNRVALALRMGAHSLSRAKGYFGEFFRRMRAKLGTAQAITATAHKIARVLYHILSTKQPYTETLFHQLDEQAQQRAELRLRKQAAQLGFQLIPNPNQGVEGVVP

SEQ ID NO: 71876 - protein, 359 aa, unidentified
MQKQNYKLDFKGEDIYCGIDAHLKSWTVSILVNGIITKTYSQEPKAKTLLNYLVTNYPSGDYHSAYEAGFCGFSSHRDLLKHGIKNIVVNPADIPTTDKEKKQKEDARDSRKIARSLNNNELIPIYVPSIDIDGLRVLVRYRKTLVKELNRYKSRVKSLLYYNGFTVPVEIEQGSTHWSKRYTSWLRSIKLEVVYSQITLDSIIETVEHLRTKLLEITRLFRQLEKQGEYSSIIGLLRTVPGIALITSMTIITELENIKRFGSLDKLCSYVGLVPRTNSSGEHDKTGKVTPRSNHLLRSMLVESAWVAIRYDSALMMRYGQLCQRMEPNKAIIKIAKKLLIRIKHVIKNNEPYKKGFVK

SEQ ID NO: 71877 - protein, 429 aa, unidentified
MEEVDDAELVVERVAALDLGKAGLEACVRVPHPQRPGRRMQELRGYATTTAQLLEMVAWLRQWRVQRVVMESTSTYWKGVYYLLEAEQLDCWLVNAREVKNVPGRAKTDRADAVWLAKVAERGMCRPSLVHPPEIRRLRDLTRYRRALVQDRTREQQRVEKLLEDAQIKISSVLSNLHGVSGRAMMDALIVGERDPRTLAQLAKAQARKKTGALEEALRGFFTDHHATILQMMLDNTDRISAQIAALDAHIEEAIDPFSNQAARLAEIPGVDAVAAAELIAEIGVDMTRFPSAAHLVSWAKFCPQTHQSAGKSKAKGRGKGNPWLAGTLGRIAFANSRSETFLGTRYRRLARRRGGQKAIVATGNSVLTVVYHLLLDPDASFIDLGPGYYESRINKHRRARDLAIQLQALTNQHIVIRDGKAVITDTAA

SEQ ID NO: 71878 - protein, 387 aa, unidentified
MPQPNDLSRSLVALDQNSTIIAVIEMSQSSWLVAGMLPGIERQPRKKLEPSPERLLALLQRWRDEAVRAGSTITRIALAFEAGRDGFWLARWLEARGVEAHVIHASSIAVSREHRRAKTDRLDTALLQRGFLGWLRGERGHCSMARVPTIAEEDAKRPNRERDCLVGERTRIVNRIKSTLARLGIRNFKPTLRKAAERLATVHTPEGTPLPPNTLAELQRDMARLGLVVSQIRQIEEARQKRLEQQHETGPHAMVRLLARIVGVGVETADMLVHEVLSRPMRDRRAVARYAGLTGSPDESGAQRREQGLARAGNARVRRGMIQLAWRFLMFQKESALALWYRARTTDSRRGTRKTMIVALARKLIIALWRFVTTGEPLEGVILRPAS

SEQ ID NO: 71879 - protein, 339 aa, unidentified
MKEVTTIGLDLAKNVFQVHGVDRAGAVVVRRALRRSQVLAWFAKLAPCLVGMEACATAHYWGRELQKRGHEVRLIPPAYARAYVRRNKNDPADAAAICEAVGRPSMRFVAIKTEPQQAVAGIHRVRELLMKQHTMLRNQLRGLMAEFGVVAAKGRRGLNELLAILCDPEDRCIPSPLRAGLIAIMETLQAVERKLEGIDRQMVAAGRADATCRHLVTAPGYGPLLSSAMAALVIDPGAFKRGCDFAASLGLVPRQDGTGGKVRLGPISKRGNGYLRRLLVNGATSLIKCQHARQDPWVAKLLASKPRKVVAVALANKLARIGWALMTRQEDFRSQPAAA

SEQ ID NO: 71880 - protein, 273 aa, unidentified
MDIRTVGIDLGKSVFHVVGVNAAGEVVVRKKFSREKLLQFTANLRVERIGMEACPGAHFLARALHAQGHDVRIMPAQYVKPYVMTNKNDYIDAEAIAEAVWRPKTRFVPIKTDDQLDMQSLHRAREGWVQRRTSLVNQIRGLLLERGITIRKGRRYAEEALPGILEDPGTNLSGPLRTLLAQLQGELKHLQHQIDDADVVIFKAASEHEACKRLMAIPGIGPVVATAIIAAIGYGGNFQKGRGFAAWLGLVPRQYSTGGKQTLLASGDTQKRP

SEQ ID NO: 71881 - protein, 315 aa, unidentified
MDALVKVIGIDVSKAKLDCWALPAQEAWGIDNDDGGIAALLTQLRTRAPELVVLEATGGYETQAATALAAAGWRVAVVNPRQVRRFAQALNRLAKTDRIDAQVLAEFGRAVNPQVRPLPDAQTQELAALVVRRNQLVQMRTQEKNRLPMTLPPLRPRVKEHVAFLDAAIARLEIDLTAKLRSSEVWCERRDLLLDVPGVEPILTCTLLAQLPELGQLNRQRIAALVGIAPFHDDSGKHQGRRTTWGGRREVRTVLYMATLAARIHNPVIRAFYQRLRGNGKTYKVAMVACMRKLLTILNSMIKHGHAWHYEIKIA

SEQ ID NO: 71882 - protein, 387 aa, unidentified
MARKRTLSTLDTSIAYEAVGLDLAKEDTAIAAFGPDHEGPYLIDRMPYDKLYELLADMAPTLVAMEPCSGAHQIAEQIQELGHEVMMISGRHVQAWVKDHCNGQKTDLNDAFAILNLAYDRWLTPIRGKTREECRLLALQASYRQLKGQRTKTMVHVKATLHAWGFPIRAGSFNQKALHELIDANREAFGDEVVETLHLMINRVHDLDHDIATVLKLLTEATQRDPRASLLRSIPGFGVLTTSRWCAVVGDIARFDPPKQTMAFIGLVPNNRITGHHTETSSGREARGQGKMSKRGDKMLRSLCILGAGALCLMVRNDRLPDCPFVASIKERLASPRPWFKVLVYVAAKLVRIATALLKYGETFSFEKAGISKAVLKQWELEQAKAA

SEQ ID NO: 71883 - protein, 368 aa, unidentified
MIILAIDLGKFNSMCCFYNTETRKYSYWNAATERGYMEMFLRGHHIDQVVMEACGPSGWLHDLCEELKLETLVCSTNEEAWRWKNVKRKTDKDDALKLARLHMLGQLTRVHVPKRSMREHRMLVKYRKTVDQRIGRVKNLIRSLFANQGLDIPRGARAWTFEGRKVINGHRRPLAECSLEELWRGELDLELTQLDSLTAQLAEVESRLEEIAKNDDRIRRVQTIPGVGRKTAEVIVTALDDVDRFDNARQVSAYLGLVPRQYQSGETDRNGRITKRGSRLLRTMLLECAWASLRYNPWAKAVYDRICGGQKTRKKKAAIALARKIGVMAWAMLKHGTDWDPKRLGIDTEPEPEPSAGAGRRKDAAGTA

SEQ ID NO: 71884 - protein, 410 aa, unidentified
MEMILGCCAGLDVHKETVQACVRKMGAGGKLEQDVRQWGTMTGDLAAMAEWLAAEGVTHVAMESTGVYWKPIFNILEERFEILLVNARQFRNVPGRKTDVKDCQWIAQLLQHGLLKGSFIPPRPQRELRDLTRQRAQIMDERSRISNRIQKVLEDANVKLGSVASNVVGVSGRLMLEAIIQGQDDPAKLANLAQRSLRSKIPQLEEALYGRLTEHHRWMLRLLMDQLSSNEALLARLDERIAECTRPLEPVLERLDEIPGVDVRVAQVLLAEIGPEMKPFPSDAHLASWAGICPGNNESAGKKRSGKTTKGSRWLRQALVQAAWAAAHKKDSYFQAHARNLMHRRGRKRGLVAVAHSLLIVIYHMLKQGTRYQDLGPQFLDRLRATQLVRFHLRRLQQLGLQVELKTIAA

SEQ ID NO: 71885 - protein, 312 aa, unidentified
MTRIICGVDVSSKKLDARIGREGRFACFDNNPEGVAALAGFCREHGVALVVMEATGGYEKKPFALLWSHGVKAALVNPRSVRRFAEAMGRLEKTDRIDSGMIAWFAEAKGIEPTPPAPETQGRLAALVVRLGQLTHLKTAQNNQRRLVEDPTVRKGFDALMLLITRQMRALERQIVELIDSDPLWKRLDQAFRSIKGVADRTVARIMAQLPEIGMLSGKAITKLVGLAPIARDSGNTKGKRSVRGGRSGVRSTLYMIVLGVCKFDADFAAFRDRLVAAGKLPKVVRAALAHKLLVRLNAKAREVRMSLAHSI

SEQ ID NO: 71886 - protein, 465 aa, unidentified
MKNYNLYVGIDVSKGKADAAILQVSDSRSVKPKFLRKKLSFKFVKSEVLSFFETVRKYSTNPECNHTYFALEVTGIYSSNIYNFIKENCNDDEEIHQLNTDFVNRWRESHNIPKSDPLDAQTISTIIGTDDDVKYVSDIVFENKNGYQDLKALVHRHFQIKKLYSQETNRLIAQCDCYFPELQYVFEPKSAAFLAVISSYPTTHDIINADRLEAFKVVYDATKHRCSMDKIDKLFEYCEDTLVPHVSDYIRTVIRNLVDNVLEIRTQLRLIEKQIRQLASIFPVYELLLSLTGCGPITAATIIAETGDISRFKNADHYVSYSGSSPRNKRSGKSVEIMGKISKKGSRYLRHALYMIAEFARRHNPVLGHLFERVKNGNKKRHKLAVIAVANRIARYVYSIMKNKSSFVISYESLMGLPEETRNTFFNSISLDFPKNTRKQIYQYYDENGEVHRFVYTSEIAESIA

SEQ ID NO: 71887 - protein, 337 aa, unidentified
MKLYCGIDLHSNNHYVSIIDQEDNRLKEKRLSNDLSKTLTLLEPYKNDLQGIAIESTFNWYWLVDGLMEAGFSTSLVNTSAVKQYEGLKHTDDQYDAFWLAHLMRLGILPTGYIYPKEQRNLRDLLRKRMQLVQCRTSQVISAQAQYWRSTGKRLKSQDIKQCHDDLLSDIVDQNLFLSIQSNLNVIQALNSQIETIEETILPQCKGLPEYKQLKTVFGIGDILSQTITLETGDIHGFNKVGNYTSYCRCVDSKKTSNGKKKGSGNKKSGNKYLAWAFMEASHYAIRFYEPAKMFYQRKSSKRNIIVARKALAHKLARASYYVMRDHVPFKPEQLFS

SEQ ID NO: 71888 - protein, 382 aa, unidentified
MGTRNATKTDAKPKTPRESSRRPGPSVQSTLGVTTPTRRRRKEIPVEQQQQYVGIDLHRRRSVIVRRNEAGETLDTVRIDNDPVALAAELGKAGEHPEVILEATYGWYWAADVIKECGGSVHLAHPLGNNWGHRRVKNDERDATDLVDLLRMGRLAEAWVAPPSLRELREYIRYRAKLVNLRSNLKAQVHAVLAKEGVNVPMSDLFGVAGQHLLDKVQLANAYRIRVESLRDLIEHLDLEIAMVEKQAAPIFAGDLGFHAVQAIPGVGPVLAAVFVAEIGDIERFKSARHLCSWAGLTPTHRESDEKVQRGHISKQGSRLVRWAAVEAVVRQRGDTPVRRHHHQVGERRGTRIGRVAAARKLLILVYYGLRDGEIRCLTETG

SEQ ID NO: 71889 - protein, 429 aa, unidentified
MQNESTPDARGPVFCGVDTHADSHWLYVLDWRGRKVLSRQFPADAAGYEALAGAIAAAGEPACIAMEGTSSYGAGLTRHLASLGMPVREALSPARMQRRRPGQGKCDEADAERAARAAMSGSRLGTPKSQDGWVDGVRCMLAARSGAVKARTSAINTARSLLTTAPEGLRSRFRGMGGPRLMEELPSVRAEGALGAALGALADLWAAARDAALDMERAIEASLEENCPALLAMYGCGPVSAAKLAVAAGDNPGRLRSEASFAAICGACPIPASSGKTVRHRLNRGGDRQANSALHEIARQRVMRDPETAEYAERARGRGKSDREVMRCLKRYVAREAYRALMRPHEIRRPEDASELVAARRAAKVSQVRAASILGTSEKYISMLERGQRELKPIRRAYEAWVEAGLPLDWDRQAFEAERKMDSKKHLAK

SEQ ID NO: 71890 - protein, 364 aa, unidentified
MKQKEKHNTIGLDLGERRHRFCVLDEAGEVVEQGSLSNERVALARLTQRYRGALVVMEAGTHSPWISRYLKELGSEVIVSNPRKVRAIYQHERKSDQRDAQMLARLGRMDRALLYPVRHCSEQAQQDLLRIKLRDSLVRARVGLINSVRFSLKSLGYTVRNSSSERFHKVVWETLPEAVRQMISPSVETLAELSARIKVLEREINLLAQSKYPQTLWLQQVPGVGALTALYFVLKIEDPQRFENVRDVGAYAGLCPRRDQSGGSDPQLRISKRGDAYLRRLLVSAAQYILGPFGPKSALRAYGLMLAADGGARARKRAVVAVARKLAVLLLSLWKNRSHYEAFPHWQTIEDKRSGTIAMHRVEA

SEQ ID NO: 71891 - protein, 365 aa, unidentified
MLLYGAIDLHSNSNQSAILGEDRKRLMKRKLANDPDLILAFWEPYKADLAGIVVESTYNWYWLVDLLQENGYGVHLANPAAIQKYRGLKHADDNHDAFWLAELLLLGILPEGYIYPKETRAVRDLLRKRQQLRELRTCLILSLQNMVTRNGGPKLSANDLKTLKEDRAQAYLQEFPELLLSGSANKVCIDALTQQMARIEAAVEQKLKLQEPYTKLLTLPGVARILACTIMLETGPIRRFATVGDYASYCRKVQSLWTSNEKVKGHGNKKNGNRYLAWAFSEASEKARIHHRASREFYQRKLRQKKSVSLAHNALAHKLARAAFYILRDNVPFQQEKMFGSPQVLLDKGPGADGEPLVKLVKPGD

SEQ ID NO: 71892 - protein, 415 aa, unidentified
MTDQKQWYAGVDWASENHHVFLTDNGGKKISERIFKHGGEGLAAMAAWLMTMSSATDPAQIQIAIEVPHGPVVETLMERGFRVHSINPKQMDRFRDRFTLAGAKDDSRDAEVMASSLRTDPRCYRLLAGADPAIIELREWSRMAQDLGTERNRLKNRMREQLWRYFPAMLELEGDLGAEWLLDLWEAAPTPAKAARIREKTIATLLKRNRIRRFDAAHVLAVLRKRPVQVAAGTTEAASAHIASLVTRIRLLNRELSQAHRQIDRLTACLIPDEEQEPGHRKQHDVEILASLPGVGRIVLATLLAEAFDALQRRDYAALRSLTGVAPVTKRSGKSCIVLRRQACHDRLANAMYHWARVAIQRDLKSRTKYAALRSRGHSHGRSLRSVADRLLNVACAMLKSGTTFSASTNVEIPA

SEQ ID NO: 71893 - protein, 342 aa, unidentified
MDYFAGLDVSVKDTSVCIVDDTGKIVREVKVASEPDALLQVLRNPAYCFKRIGLEAGPLSQWLFSALGEANLPVICVETRHMRAVLKAQINKTDRNDARGIAQMMRVGLYRPVHVKTLRSQKLRMLLTHRKLLQSKAIAIENDLRGTLRNFGLKVGIVGRTKFEARIEELVEGVPDLAALVEPLLIVRRVLREQMAVLHRRLLALVRDDEVCRRLMTIPGVGSVVALTYRATVDVPARFRRSKSVGAVFGLTCSRDQSGERDHPGAISRCGDEMMRVMLYEAAQSMLVRSRRWSWLKAWAMQIARRRGMKRAIVALARRLAVIMHRIWVDGTEFCWTREVTA

SEQ ID NO: 71894 - protein, 315 aa, unidentified
MAEPTTLFVGLDVHKESIAVAHAGADHSSEIVHVGQVGTREADLDKLLRRLHSHASRLVVAYEAGPCGCGLYRKLTEKGVSCLVVAPSLIPKKPGERVKTDRRDAAQLARLLRSGDLTSVCVPTVEDEAVRDLSRAREASIGVLKDAKLRLKSFLLRHGLNDSGRATWNDAHLRYLAKVVCPTPAQQIVFQESLRAVSEQTERVRRLEDELVEIAATWRLRPIVDAFQSMRGVQSHTAVTLAAELGDLTRFDNPRQLAAFVGLIPSEYSTGASRRLGPITKAGNGHARRAAEEAAGALSGQGRGAAAVWRNPRRR

SEQ ID NO: 71895 - protein, 411 aa, unidentified
MGLLHEALPASTLVVAIDPGKVSNRVWLSTGEVGQVVPPLSLPVLRPGLEQLHRLVVDHVGPSGPVFAIEASGGLHQAWLRELNQRFPGSVRLFAPSETTAARAQLGSRRFKTDDRDCAALTYLARQGQGRPVPDQEQDALTAAVRHRRGLIGEHKVAQQRLHDQLHALCPGLAAPDGHGRALPADSVIGQAVLDCAAAFAGRPPSIRSLRARARGRVLTSEAEFWVGRWRACLPPPPDASARAARLSRSVARWRAIAADIAAVDAEITALLAESAGQILTTLPGVATSRAAAFAAFSLPIARFPTAEHLYSATGLAPGSYRSATINRRTPISRQGLPEHRDALMNLAWGLSQHCGPFIDRAHELRARGLRPIPVRIALARHACRLAYTLLQTQQPFDEQRYRRARHQSER

SEQ ID NO: 71896 - protein, 504 aa, unidentified
MKCFAHRAERPVSTQNEENEDVAKGSSTYERITRGNRKQRKELQQRLHAEDPGLEVVHPRAAGIDIGNESHFVAVPPGRDAEPVREFGSWTADLHRMAAWLISCGIETVAMQSTGIYWFAVYDVLEKHGLQIFLVNASHTKNLPGRKSDVQESQWLMKLHTYGLLRNSFRPPEDIRPIRAVWRLRERHVQDAGRCVQHMQKALTSMNVQLANAISDISGVSGQAIIRSILAGERDPWKLAALRDRRIQASAEEVARSLEGNWLEEQLFELQQAVDEYDFRQKQLGECDRKLQGYLAALPTRPEPVAEAGNTPPSASDKKKKAKQTNKKNMPKSFDVAAELKRVTGVDAFRIDGISVMTIQTVVAELGTELQRWWPTEQHFASWLSLSPKRDVSGGKVIRHARDKSRNRVAGVLRLAAQTLLRSDSYLGARFRSLRARLGAPKATKAMARYLACIIYRVFTKGQAWVDQGAEHFEQNRKARDLARLQAQASASGFKLVPVTVQIS

SEQ ID NO: 71897 - protein, 316 aa, unidentified
MSNEHNNIFIGIDVSKATLDISISGKHFKINNNIKAISAFIKAEIDSKKMAPSLVCLESTGGYENVAMQAFHEASIAIHKAHPNKVYNFAKFSNHFAKTDKLDAKLLEKYAKYVYLEGEEKGDIPARQATAELQALSSVQSALNDNLHAAQCRLKLLKGKAAKYTEKQIIFIKKQLESIEADIKKVIDSDDDLSQKREILKSFKGVGEKTTNILLAELSELGTLNKKEIASLVGVAPKLQHSGIKSPGGHIFGGRFYVRKALYMAALVAMRYNEKMKVFYQQLVQAGKPKKVALTAIMRKIAVCLNSMLKNNTFYA

SEQ ID NO: 71898 - protein, 351 aa, unidentified
MQSKSQIRSIGIDLGKTTFHLVALGSRCQVVVRKKFSRSQLLVYTANLPSSLIGMEAGVGSHFLGRALREQGHEVRLMPAQFVRPFVKSNKNDYRDAEAIAEAVERENMRFVPIKTEDQIDLQALHRVRERLVSRRTSVINQIRAFLLERGISFAKGPARLRREIPEILENADEKLSTRMRRLLDFLWQEWKHLQLQIESLSEDLEKIANSDAACARLQQIPGVGPLVATAVVSAIGNGAAFHKGREFAAWLGLVPGQWSTGGKTKLLGISKRGNPYLRKMFIHGARAAVLRVKREGSYLGQWMGGLESRAARNVVIVATANKLARISWAVLSSGENYRPRPALAVASQTK

SEQ ID NO: 71899 - protein, 342 aa, unidentified
MDHYAGIDVSLECSSVCVVDASGKIVREGKVTSEPEALIAYFGSLRLSVVRIGLEAGPLSQWLYAAMKEAGLAVELLETRHVRKALETMPVKSDRNDARGIAQLIRLGWFRPVHCKSIGAQETRAVLTARKLVQSKLLDVENSVRGILRGFGLKVGHTTNRSFAGRVEDLVVHHASLHMIAAALLSVHAVLLRELKAFDKQVRSMARVDVKAKLLMSAPAVGPIVALTYASAIDDPGRFTSSRRVGAHFGLTPKKYQSGETDYTGRISKIGDATVRTALYEAAHIMLTKPIKGCTPLKSWAMRIARRSGMKKAKVALARKLAVILHRMLANATPFNAAMAAA

SEQ ID NO: 71900 - protein, 366 aa, unidentified
MRHDVPYPLMPISYNQEETEMHATTVAVDLAKSVFELAIANAQWRVVSRQRLTRTQFARVLAQTPPTHVVMEACGTAHYWGRVAQQHGHRVTLVPPAYVRPYVRRNKTDRADAEAILEAVRSGELPSVPVKRVEQQALVALHRVREQWMTTRTARINVLRGLLREQGLLLPAGPGAALRALPALLDEAATVLPRHLRQVLTSVHEEVRAIEARIADLERDLRALADADPVVKRLRTIPGIGLLTATALVGTVGRIHAFRRARQFASWLGLTPREHSSGLRRRLGGISKRGDVYLRCLLTHGARAVLVSAHRRRATGQPLTRLHHWAMTLHARRGYNKATIAVANKLGRLVWAVWHKDVPFVMPDAA

SEQ ID NO: 71901 - protein, 354 aa, unidentified
MPYANKVDFTGQTIYVGMDVHQKSWTVSIFMEHIEHKTFTQPPDVEVLVAYLRRHFPGARYQAVYEAGFCGFWIHDKLKLHGIPCLVVNPADIPTRDRERARKDDRSDSRKLARGLRSHELEGIYVPSRAMVEDRSLIRTRQAMVRKQTRCKNQIKSLLHFYGIPVPDIFRSWSRNFIRSLEALQLERESGNLAMKAHLSELIHLRQILAQLDRDILALSGTDEYRDRVQLLRSIPGISTLSAMVFLTELGELSRFTSLDKLCGYVGLTPDTHASGEKQGIGDLTRRCNPVLRSLLIECSWVAVRKDPALALAYHDFCKRTLKTKAIVKIARKVLNRIRFVLNNRCRYALSLAA

SEQ ID NO: 71902 - protein, 337 aa, unidentified
MKRYLGVDLHRTQFVVCTRWENGEQEIRQWRISELPKFVEQLRKDDQIAVEATGTTARFYDAVVKRVARVAVVNPHQFKVISESVKKTDRYDAQALALYLEKDLLPEVRMKPKQNRELMHLAETRDLLVKQRSALKGKINNLLAMQGIELKREALSSKIALERVLALPVSGMVQLELRVLVGQIRTLSESIAELDQRLEEEGQQLPGYENLTSIKGIGSLSATVLLTVIGKINDFADENKLAAYLGLVPRIANSNESEHSGRITKQGNKLARTALVQCGLVAKRYSPYLQRFYERIKQRRGGGKAKIALARKLVKIVYDTLKNQWVFEDFPSFTLAA

SEQ ID NO: 71903 - protein, 354 aa, unidentified
MRFYQPPADQPAHRFYCGVDLHARCMYLCILDATGQTVLHRDYPANAAAFLDAIAPYRDGLAVAVECMFAWYWLADLCHEHGIAFVLGHALYMKAIHQGKSKNDRLDAAKIAGLLRGGLLPQAYVYPKAMRATRDLLRRRSFLVRRRADLLAHLVNTNSQYNLPALNKKLVYPGNRGELDLPARFSEPSARKMVECDLALIDALDGQIHELERHLIRTAKVHDAQAYARLQSVPGIGKVLGLVLLYEIHDVGRFPEAGHFLSYARLVRPRQESAGKASGFGNKKIGNAHLRWALGEAACLYLRSSERAKRWQARQAKKHGPAKTLGILAAKLGRTVYHLLRTKQVFDEARFFAS

SEQ ID NO: 71904 - protein, 337 aa, unidentified
MSQITKKEIYKHYIALDWSKVNFALASIRDSGVKYKLQEHPSDLKLLKQCLKQLPGKKILTIEETTTAHWLYVELKDYVDKIFICEPFHNSLLKSGPKNDKIDALKLCTLLRNGSLKEVFHTTDELYHLRKLISIYDDFVNASVRMKNQRSSMFLSEGKDHKKEKILSGSSINKFITEKQNSNIENVEQIRRDFEAMFRKVQRENQTIQKLVKISGIATKLAVSILAVVIDANRFGSKYKYYAYSGLVKHLKDSGGRNYGKRNVRHSRVLKRCYKIAANAAICGNNDIREYYENLLQNNSSYHDARNQIARYIAKVSYAIMKYKTDYRPYQWRESKK

SEQ ID NO: 71905 - protein, 387 aa, unidentified
MTEFFDAHRPATAFDHDSTLVVAMELSGKSWQLGAVIPGVSRRPKTGVKARDMNEVMRVVDRWKAEAVRAGKTIARIVVAYEAGRDGFWIARELTERGIEAHVMQPASIPVERKGRRAKTDRIDLDMLLRTLLAWLRGEPRVCTMVRVPSVEEEDARRPGRERDKLVRERVGLENQIQSLLCLHGIGDFRPRLKKAAEKLEKLRARSGAALPAQTMAQLRRLMKRHSVASEQIAEIDAARVAEVDAPDPDRGMAMIRLLVAICGMGLETATRLVREVFSRPFRDRRGIAAFVGLTGTPFQSGGMEREQGISKSGNTRVRCLLLQLTWRWLRFQPDSALSRWFFGRVGEGKGRIRKVMAVALARKLLVALWRYLETGVIPEGVRLADA

SEQ ID NO: 71906 - protein, 416 aa, unidentified
MRRVIGIDIHRTFGEVVFWQEGRLRPAGRIDMTRTALEGFGKSLLASDEVVIEATANSMGVSRVLAPFVARVIIANPLQVKAIAQAHVKTDKIDAGTLASLQAAGYLPQIWTPDAETECKRRLVARRYQVVRHRTRLKNEVHSILHAHLIPKCPHADLFNGRGRAWLATQPLPDDERAAIDRHVRELDRLAEDLALLDREIAKDAIDDPAVKRLMTITGVNLTVAAGIVAAIGDISRFNSPQKLVSYFGLNPRVRQSGLGAAHHSRISKIGRGHARAMLVEAAWAAAKTPGPLHAFFVRIRARRGHQIAAVAVARKLTVLCWHLLTRGEDYLWARPALVANKIRAMQLQAGQPQQKGSRRGPAYAYNIKALRDREMLIAAQAERTYERFVAQWKPRRPKIRRAGASGRQDTSQAVR

SEQ ID NO: 71907 - protein, 350 aa, unidentified
MTTIAEALPVVTGGVDTHLDVHVAAVVTAVGGVLGTEQFPTTAAGYRQLLSWMRTFGQLDRVGVEGTGTYGVSLARHLRAEHVAVVEVMRPNRQVRRRRGKTDVVDAIAAARAVLSGEANATPKTHDGPVEALRTLKVLQRSATKARTQALNQLRALLVTAPDELRARLRNLTQRDLLATCGAFRVDTDDDSLAAVTRFGLRELAQRALFLAERLEQVKVRLKRITEQVAPALTDLKGVGPDVASTLLLAAGDNPERLVNERSFASLCGASPVQASSGKIHRHRLNRGGDRQANAALWRIALVRLNCDQRTKDYLAKRVTDGKSKTEAIRCLKRYITREVFAALPIPTAT

SEQ ID NO: 71908 - protein, 340 aa, unidentified
MKKLYGAFDLHSSNNYLGISDEKDRRVYKQRLPNQPDVILAELEPYREQLVGIVVESTFNWYWLVDLLMDNDYQVHLANPAGIQKYKGLKHSDDKHDAFWLAHLLRLEILPEGYIYPKEERPVRDLLRKRGHLVKLRTSLINSLQAIIHRNCGVKLNARKIKAIREDNVMPLLSGQEDLALSGMVSKEAIDYLGRQIRKVENVVLGKIKLKEEYIYLLTIPGIGKILALTIMLEVGPVSRFQKAGNLASYCRKVPTKWTSNNKKKGKGNKKNGNKYLAWAFSEAAEFARRYDDNARAFYNRKAAKKNFMVAHSALAHKLARAAYYVMRDQVAFDPQKLFA

SEQ ID NO: 71909 - protein, 332 aa, unidentified
MENFYFIGVDVSKKKLDFCVMFEGKVVHEEATANHQTAIMSLLRHLEEDYGITSDRMLVCAEHTGQYTFPLACACKSVECKLWLENAAEIKYSSGVQRGKNDKVDARRIAIYAGRFQDKVRYYERPTEDIERLKQLESERTLYVTDLAKYKGQMKDQKDYMPKALYERKMKRLQALMDDLEEAIQAITDEMDEVIASCPVLFRQRELLMSIDGVGRVVATNMIIATEAFTRFDDPRKFNCYAGVAPFSYSSGSSLHSKARVSHRADKVMKRLLHLAAVAVTHRIGGELKKYYERKVAEGKNKMSVINALRAKIVARMFAVIKRNEKYKPILS

SEQ ID NO: 71910 - protein, 404 aa, unidentified
MPTYYVGIDASKFKHTCCIIDEQGEILKNSFNFSNSKEGFDSLIEIFQSINQSKSSFQIVMEATGHYHECLFRYLVTNNYLVQIKNPVVILRFKQSEYLDKAKTDNLDALIIAQYASKHPFSPSMLKSYNIERIRRISRAKYFLFQDKERTVNHLHRYLDESFPELIPFLRKRGDIKRYQGRNFFDSKTTLWFLENFPSAKKFSTARSETAEKLKKMSRGAFSLIKFNELRNMAKNSIGVSFVETEKIIIQLVQELRKLQERNDELDKMLCPLIDETVPNILTIPGIGYRSAGLLVSEIGDASRFPTADKMIKFAGLDVGVYQSGTIEKRGSIRKRGSPLLRYALFQIAEKARIHCPEIAEFYSKKKSEGKHPICALTHTARKILRIVWALLKTGQNYSQSISD

SEQ ID NO: 71911 - protein, 323 aa, unidentified
MEQKLPTTPEAMKQTFGKIPRSLIALETGTHSPWVSRQLTELGHEVIVAHAQKVQLITKSNRKDDRHDARTLARLARIDPALLGPVRHRSVQAQLHLTVIRARAELVSARTALVNAARGLVKSYGQRLPKCGTYQVNEKLAEGLSAELREVLVPLFKEIESLNERVKEYDERMEKIAKEVYPEVSLLKQVKGVGTQIALTYVLTIEDPYRFPKSRQVGCFLGLRPGRRNSGESEPQKGISKEGDRYLRTMLVQGAHYILGPFGEDSDLRRWGRKLAERGGKNAKKRAVVAVARKLAVLLHRLWVGGEVYEPLRNSQKAMREVA

SEQ ID NO: 71912 - protein, 318 aa, unidentified
MKANTATVYVGVDVAKATLQVHQQGRQIELNNAPAGLTRFCNKLKALEGAHVICEATGGYERALVQALHKVKIPVSVVNPAQVRGAAQAQGQRAKTDRIDALMLTDYGQRFQPQPTPPVSKSQRQLAALTQWLKQLVDAQAVAKTQAEHHEDPFVRKQHGALLDHYQSQIEAVETQLKTLAHKDPVLAQRVECLDAIEGVGLRTAFMMLAHMPELGQISRQQVAALAGLAPWTRDSGTMKGMRCIGGGRPEVRLALYMSALSAARCNPVLRAFYQRLIAKGRLPKVALTAVMRKLLIYMNHQLKALDAQPPTDVTKKV

SEQ ID NO: 71913 - protein, 416 aa, unidentified
MKDWKDITHYAGFDWAKEHHEVLIVSAEGHIVADFEFEHSLEGWKSFVDKTAVWPNLAVAIETNQGAAVDQLLQRGYTLYPVHPVAAQSYRQRKAPSGTKTDHLDAWALADALRVDGQNWKPLQPLDPMTQQLRLLCRDEVSLIQQRTALVNQLQQALAEFHPAALAAFDDWTAPCTWEFILAFPTPQALVQAGRRRWEKFLHTHRLWRPETAAKRLELFAKADQFKASEPIVLAKSQLAVSLCKLLCTLGQQLKLYRKQIEKLFQEHPDHDLFGGLPGAKQSLAPRLLAAIGSDPDRYGSHEVLQSIAGTAPVSYQSGKLNKVQVRWACDKFMRHTIHLWANSFRRASAWGQAYYHQKRTQGMTHACALRCLGQRLLKILFRMIADKKPYDAELHARNQQKHGSWVLKLVDHPVA

SEQ ID NO: 71914 - protein, 355 aa, unidentified
MSQEKYIGMDVHQATVSAAVRDRNGNLLMECILETKADTLLEFVQGLHGTLSLAFEERTLAAWLHDLLKPHVNRVVVCDSRKAALLRDGNKNDRIDARNLSELLRTNQLKPVYHGEHGLRTLKELGRSYLTVSKEMTRTMNRIKSLYRSWAIPCAGTTVYAPRHRRQWLAKIAEPGARVRAEHLYEQLDHLQPIRVRARRELLQESNKHDAVKRLRQIPSIGQIRAALLVALLQTPHRFRSKRQIWAYSGFAIETHDSGEYRYVRGKLQRNRERITVRGLNRNHNPDLKNIFKGAAISASSRPGPLQDFYETRVAMGMRPTMARLTLARKIAAITLTLWKKGANFDPQQLSRQAA

SEQ ID NO: 71915 - protein, 357 aa, unidentified
MNSSKNISFTGSHFFVGFDAHLKNWKVTTRFNSIELKTFSMNPSPVELFNYLKKNYPGGIYHIVYEAGFCGFWALRKFRELDVDCIVVNPSDVPTSNKEKVNKNDPIDSRKLARELENKSLKGIYIPDIFHEELRHMMRLRFRIVQNQTRVKNRIKGLLHTQGITIPLNFTGNSRWSASFIQWLKEINLNTDAGQFTLSNLIQQLQQQREHNKNVLRQLRQQAKQKHIAPVINALLSVPGVGFITAMSLYTEIVDMKRFSNQQQLAAFVGLVPSTRSSDETIYNNGISFRRNKFLRPIMVEAAWTAVKQDPAMTLKYRELTKRMKPQNAIIRIARKLLQRIRHVWLNQEDYVYSLVA

SEQ ID NO: 71916 - protein, 406 aa, unidentified
MRSYFRVPKKSVVACVLLTREDGTVQRQVRSFGTMTVDLLALADWLTAAGVTHVALESTGVYWRPVFNLLEDEARTIVLVNAQHMAAVPGRKTDVRDSEWLADLLRHGLVRASFIPPAPIRELRELTRYRKTLVQERAQEVNRLQKLLEGANIKLAAVATDVLGLSGRDMLRALIGGEQDPEALAELARGKLRAKLPALRQALQGRVQPYHLILLTRILAHIDFLEGSLAQLQAEIDARLTSCAEAVTLLQTIPGVGPIAAATIVAEIGTDMSRFPSAKHLASWAGVCPGNKQSGGKRLSGKPTNGDPWLRGVLGEVAQAVTRTRNNYLNAQYHRLARRRGKYKAILAVAHSILVIAYHVLRDKQPYSDLGADYFDKLDAARIERHHVRRLEQLGFTVTLAPNHAA

SEQ ID NO: 71917 - protein, 370 aa, unidentified
MEGSPLRKVYVGLDVHSNFCVFVVQDEEGEVLGRGDVPTTPAGLQQLRDDHSLPPGTGVALETGTTAFHVARQLKALGLEPVVVDAHEVRLKAHRPTQKSDRRDAFELCEGLRRGIYRCIVHVPDETIGALRETLSRRRHFVRAAAAEIHAAKRLLRAVGLPRLAPRLNTEKEWNGLFSRLPEHTGIRRHLERHRALWKCGRQQVVEIEKDLKELQQPFEEKLKRLQAVPGVGPVVAMTVVAVFSDVERFPSAKHAASYIGLVPSTHQSGDRDAHGRITKRGSSELRTLLCEAAQHANRVTNPLNPYFNTLCARRGYKSAVVAIAHRLCRILFAMLRHETEFNIEKLGVEIGPFETKKVRLYRRKQTPAA

SEQ ID NO: 71918 - protein, 466 aa, unidentified
MTPHKDYCLDPRPPATPTLPQSPVLADALQVCHPHAAGIDIGEAEHWVAVPPGCDPQPVRRFGTFTVDLDALADWLIDCGVTTVAMESTGVYWIPLFELLEARGVQVLLIDPRQAKRAPGRPKTDRLDCKWLQRLHAYGLLAGAFRPEDQVCVLRSYLRHRQMLLTSAAHHIQHMHKALQQMNLKLPQVVSDLTGVTGMAILKAIIAGERDPVTLAKLRNPHCHHDEDDIAKALQGTWRAEHLFALQQAVALYDFYHQQLALCDQQIKSHLATFADKSEGKPLPPKARRHKKTNEPRFDARTPLYRLAGVDLTTIEGIEENTALIILSEIGTDMHRWPSVKHFCSWLGLCPQHQISGGKILSRRVRPGAHRVTVALRLAARSLHHSQSALGAFFRRMKARLGTPKAITATAHKLARLVYSLLQHGSAYVHQGLDAYEAQYRERKVTTMAKQAKALGYTLVPLPAQG

SEQ ID NO: 71919 - protein, 417 aa, unidentified
MPALKEQTLKKKGVAMHYLGIDVSKASHQCVILDAEGEALGKSFTIQSSKDDFASLVKKLSDLNIPQTDITAGLEATGNLWENLYVYLKERGFNIVLLNPFQTNKFHQAMLKKAKTDSIDALVIAGLLRSGCAAGSYIPDEEIQSLRDLIRLKDGYLKDTKNYKRKAYSLLNLVFPEFLNLIKDPFNISCTEILSKYQTASDFKSIRPKDLLKIARGHQGNNYDEAWADKVIQAAKDSIYSGKASKARGIVVKSLVLNIKNLKEQINELDNEIQNILKADDGSSNNDIDNLLTIPGVGPKTIAVFIAEVGDITRFASCKDFIGFVGLYPKIEQSGSSLNRAKLTTKGSRLLKHALYMASVASLIHNPYLKSVYNDKLSQGKCAKQALIVVSRKIACIMYSMLKNNTAYNPGRVAMAV

SEQ ID NO: 71920 - protein, 413 aa, unidentified
MEQIHERVAGLDVHRDSVSACARLPDLRGGAMVDKARFATTTAGLAELAEWLADREVTVVGMEATGVYWKAPYYALEGRFEVWLCNAQHVQNVPGRKTDLADAEWLADVVAHGMVRPSFVPPPPIRELRDLTRYRKRQVDVHAAEVQRLEMVLQDAGIKLTSVASEVLSMSGRHMVEALITGQQDPATLAQMAIGRMRNKLPELKEALTGHFGAHHAAVARQILDHIDFLDARIAAISEEVAVRILPFDAAMQRLIDVPGISQISAEVSIAETGGDMSRFPTPAHLASWAGLAPGNHESAGKRRRVGTRPGDRWLRRVLIEAARAAARTKGSYFGAQYRHIAQRRGPNKAAVAVAHSLLDLVWHLLSTSEQFEDLGADYFQKRHDPEREARRLVRQLERLGHRVSLTPAPSTA

SEQ ID NO: 71921 - protein, 320 aa, unidentified
MNSNQSEIQSAVGCDVSKDTVTLFDSNTGKTSTVENTATALKAALKPYAGCVDILAVCEATGGYEDTLLFVLERLAIPAHRADAARVKAFIRSCGTRAKTDPIDARHLAEYGLSHGRSLPRWQAPEPDDARMKLLVMRRADLVSMRTQEENRRQAPRNRSIAREIADHVTELTRRIEALDKEIDNLSQQNKRLRDRQAILRSVPGIGKVTAPVLLALLPELGFISRKQVASLAGCAPHPRDSGTHKGRRFATGGRRQLRPLLFTAAMAASHSKSELAASYRRLLDAGKSKMTALGAIMRRIVVIANARLKEYEDAHARLT

SEQ ID NO: 71922 - protein, 348 aa, unidentified
MHVQLPADRQVTVGVDTHADQHVGAALDPLGRLLGTQAVPSTAAGAAALLAWARRFGAVERVGIEGTGSYGAGLSRWLRARGVVVVEVARPKRPARRGRGKSDPVDAEAAARAVQAGTATARPKAGTGPIESIRALQAARRSALKEVAALDAHLGRLVAAAAPDLVALKGVGTDTAATLLVTAGDNPDRLRSEASFAHLCGVAPIPASSGKTVRHRLNRGGDRQANRALHLLAVRRLRWDPATVAYAARRRAEGLSKPEILRCLKRYIARQLYPLLAGHAALGPATLGQGGPRSGPPATPLSGGAAVTRQGRSVAEDPAAGGVDGRRGRSHRVPTPPAPAPRPPIHHP

SEQ ID NO: 71923 - protein, 405 aa, unidentified
MNAVGIDVSKGKSTVTIRKPGDVVLMSPCDIPHTQSAINDLIKQIKSLEGETKVCMEHTGRYYEPVATWLSDAGIFVSAVNPILIRDFGDDSLRTPKTDKADSKKIARYTLDRWAKLKQYGIMDKTRNQLKTMNRQFGFYMAQKTAMKNNLIALIDQAYPGANDFFDSPARNDGSQKWVDFIHTYWHVDCVRSKSLNAFTEHYQNWCKRKNYNFSAEKAAKIYQISSDLIAVFPKNDITKMLIWQAVALLNTASKTVESLRSKMNELASTLPEYPVVMDMNGVGATLGPQLIAEIGDVSRFTHREALTAFAGVDPGKNDSGKHIQNSVRTSKKGSPYLRKALFQIMDSLIKRSPVDDPVYAFMDKKRSEGKPYYVYMIAGANKFLRIYYGRVREYLSNLSNNETI

SEQ ID NO: 71924 - protein, 311 aa, unidentified
MYYIGIDVSKKDLSVFDGKDLKFINQEGLKSFKKYLKKKYSLSEIVIIFEPTGIYSQYLKEFCAENSIKAYIINPKRSHNFARSLGIRPKTDKIDARTLYQFHKLIDLKDIKIPEIDQQAKTLSSYLVSYEFAVKQRVALSNHLESLRDKKLIALIKKELKRAQELEDKIFNDIKVYVSKNQNLKEDYQRLLTISGVGEKTAIALLTLFKTYPGTNRAQITALVGLDPTRRESGTSVKGKVKISKNGKGIYRKVFYLPTICATVHNQKIRIFYQRLLTNHKVKKLAIIASMRKILLIAHAMYRDKTEYVAA

SEQ ID NO: 71925 - protein, 390 aa, unidentified
MEARTVNNLPPAATHDDAVRCLLAIELSKKSWIVAVNTPLSDKVSRHTLTPCDGKELLDLCERIRTRVARETKQRVEIVSCYEAGYDGFWLHRLLEAHGIRNYVIDPASLQVDRRARRAKTDRVDVERLLRSLMAYLRGEPKVWSVVRVPSVVEEDDRRLHRERDRLINERIQHSNRIKGLLAIHGIYECQPLRRDRMQQLERLRTADGQTLPPRLKAEILRELQRLVLVIGMIKTIEAERDTIASAKTEAEHTSAKKIQDLAKIKCIGPEFANSLVGEVFYRSFDNRKQLASYVGLTPAHFQSGAMSRDQGISKAGNAKARTVMIELAWLWLRHQPDSPLSIWFRDRVGKLKGRIRRITIVAVARRLLIALWRYLKTGLVPEGAILKVK

SEQ ID NO: 71926 - protein, 333 aa, unidentified
MPSAHAQARELKIMSVSSVVAGIDVAKAHVDVDVVGAEFAPQRFDNEADGHSAVASALKALGVGLVVMEATGGYETSLACALQGAGLAVAVVNPKQPRKFAEAMGYLAKTDRIDARVLAEFGQTLARRPDLGRFLRPMDDVDQQWLAALVTRRRQLVAMMTSERQRLQITPKKLHPSLEAIINAIKAQLDDVEGQMVKHVKDQFGPLDAILQSVTGIGPVASATLIAELPELGKLNRRQIASLVGVAPFAKDSGTTKGRRRVQGGRFDIRRVLYMATLTAAFRNPVFKAYYQRLIAAGKLPKVALVACMRKLLTTLNAMVKAGSKWDPEHRGA

SEQ ID NO: 71927 - protein, 320 aa, unidentified
MRNAVGLDISKLTFDASAMVGNAEYSAKFDNDSKGLNQFSDRLKSLGCQNLHICMEATGNYYEEVADYFAQYYSVYVVNPLKISKYAESRFKRTKTDKQDAKLIAQYCRSAKESELVKRQKPTDEQYRLLRMTAAYAQIKSECAAMKNRHHAAKDEEAAKAYAQIIKAMNEQLEVLKEKIKEQTEKPNCKEGVKRLETIPAIGRMTAAVLFHHLTSSKFETSNKFAAFAGLSPQQKESGTSVRGKGKLTKFGNRKLRAVLFMLTMVAYRIRAFPDFIKRLEEKKKPKKVIIAALMRKLAVIAYHVHKKGGDYDPSRYKSA

SEQ ID NO: 71928 - protein, 372 aa, unidentified
MKKLHRRPTRFKGTTVGIDLHKTFLQYSVLSIEGEETHADRAPSRPDALSGLLDRWCADDTSVQVCLEASGCFLWAYDLLVDRLGPAHVHVAAPSKVRVIADSMEKNDANDAWWLAYLLWESRLPGAFVAVGDLRELRIASRELRSVVDECGDLKRRMKSHLAQLGLGFSASAWASLKGRSQVRALVASVEPAHGVRGESIAHLWRRIEAMDEEVLHWRGRVDALSSAFDQIKVLRDSLAGVGPQTAAVVWSELGDPSRYRSAKSYAKATGLTPGYRESGGRRSSQKITRMGSAHVRWALTRAVLSCTRCTKDPGGRAVRHWLERAQKRKPKKAAIVAAARKLAEAIWRLFALGEAFDLTRAFGRPPAEVAA

SEQ ID NO: 71929 - protein, 341 aa, unidentified
MDKVSTIGLDIAKSVFQVHGVDAAGAVLIRKRISRAKVLEYFGELPPCLVGIEACPSAHHWGRELQGLGHTVRLIPPSYVKAYLKRGKNDANDAAAICEAVTRPSMRFVPIKTKEQQTALMLHRARQLLVRQRTMLSNALRGHLAELGIVSAKGRNGTAELLRIIADGRVSPAVCGILTVLARQYGAIGTEIASIDKSIMALHRGCEASRRLAEIPGIGPIGATALVAEIGDWKTFSSGRSVAAWIGLVPKQHTTGGKDRLGSITKQGNRYLRWLLVVGAMAVIRYARKYGTEKRPWLGRLMERRPTKVAAVALANKIARMAWAIMVRGERYKEPKLLLAA

SEQ ID NO: 71930 - protein, 335 aa, unidentified
MKKMNKRVCGIDVSYKTFDVEIMVNGKAVFKKDYTNDLKGQKALIKKLIKMKTSYVCIEATGNYHLDIALMIDKIKEVKLMVINPRIAHNYSKVLNQKAKTDSEDAHVLAHYAAHMEYFKWQAPDEILFSIRACGRRLSQITKQATQLKNQKHAYEVTKATPKFIITDVELSIYNLENQKTNLIENTLKIISENRKAQQMYDLITSIDGFSTKTAIKLIGELAVLDAQMKANELVAHAGLNPTIFTSGKSVNKTSRLSKAGNKYIREALYMSAMQMTYRYKNVAAYYEHMQIDNGLKKRQAICAIMRKMLMAIHGMIRDNVQFDENRFYKTPINK

SEQ ID NO: 71931 - protein, 391 aa, unidentified
MICVGIDVAKDKHDCCILDSEGTTLADCFTIPNNLDGFKRLLQTIKDCTQKSDKIKVGLEATGHYSYNILGFLLDNDLAVYVMNPLHTNLYRKSLSLRKTKTDRVDARTIATMLLSDVDLKSYTDTAYHNEELKSLTRYRFDKVRERAKLKQSVSRLVTILFPELEKLVPSLHGVSVYALFSEYPGAKQISEAHLTKLTNLLSIASKGHYGKEKAIQIREAAKSSIGSVMPAKSLELKHTIKLIKELTSEIDEIEDSIQQIMDELHPPILSIPGVGIQSAAMILAEIGDFSNFESPDKILAYAGCSPSTYQSGKLTNCYAHMEKRGSRYLRYALYNATKYVCHWNPVFAKYLAKKRAEGKHYNVALSHATKKLVRLIYALQKSGKAYLTAA

SEQ ID NO: 71932 - protein, 358 aa, unidentified
MAGKVTETAVVGGVDTHKDLHVAAVVDQNNKVLGTQFFSTTRQDYRQMLAWMTSFGALKRIGVECTGTYGSGLLRYLQNAGLDVLEVTAPDRMERRKRGKSDTIDAECAAHAAFSGIRTVTPKTRNGMIESLRVLKTCRKTAISARRVALQIIHSNIISAPDELREQLRNMTRMQLIRTLGSWRPDASEYRNVTNVYRISLKSLARRYLELHDEIADLDVMIAAIVDELAPELIKRNAIGYESASQLLITAGDNPQRLRSESGFAALCSVSPVPVSSGKTNRYRLNRGGERAANSALHIIAIGRLRTDDKTKEYVARRVAEGHTKMEAIRCLKRYISREVYTLLRNQNRQINSIPITA

SEQ ID NO: 71933 - protein, 387 aa, unidentified
MYYIGIDISKFKHDCAVIDDSGEIVTPSWSFTNDAEGFSQLKLLLNSLDTETRIGLESTGHYGMNLKLFLESNNFSFMEFNPLLINRFVKSKSLRKTKSDSIDCMMIAHYLMTVEYKPYPSSFYHTEKLKSLTRFRDSLIRFRSRQLVELTNILDKVFPEFKPFFGSRFSVTALYILSNYSSPEKIANMNSKSYEALRKLSRGRFSTVDFAKLKQLAKNTIGTTEDYLLLQMQIVLDIYRQLDSKVDETEVSIKECVSDMNPPMLSVPGIGIESAAVILAEFGDFSKFKNASQMLSFAGLEPGYFQSGTSETTGKMVKHGSSYLRYALMNCAQTVVNYEPTFAMFYSKKRAEGKPHRVALSHVVKKLLRVIYTLQTKNIAYDADFVR

SEQ ID NO: 71934 - protein, 387 aa, unidentified
MARKRTLSTLDTSIAYEAVGLDLAKTDVALAAFDSDHKEPYLIDRIPYDKLYELLADMAPTLVAMEPCSGAHQIAEQIQELGHEVMMISGRHVQAWVKDHCNGQKTDLNDAFAILNLAYDRWLTPIRGKTREECRLLALQASYRQLKGQRTKTMVHVKATLHAWGFPIRAGSFNQKVLHELIDANREAFGDEVAETLHLMINRVRDLDHDIATVLKLLTEATKRDPRASLLRSIPGFGVLTTSRWCAVVGDIARFDSPKQTMAFIGLVPNNRITGHHTETSSGREARGQGKMSKRGDKMLRSLCILGAGALCLMVRNDRLPDCPFVASIKERLASPRPWFKVLVYVAAKLVRIATALLKYGETFSFEKAGISKAVLKQWELEQAKAA

SEQ ID NO: 71935 - protein, 373 aa, unidentified
MPKYSTAFGMDVHLRSTTVCALDADTGEAVTRRFPGNPWGEIAGWMDGFPGPSLAAYESGYLGFAPQRELAGLGVECVVAAVSKIPRSAADSASKNDRNDAARMAKAILAHDISPAWVPSPEVEGIRDLAGAYDGATARLATAKQRLLAFLARRGFVYGGTTPAGNPRKYWTYDFLRWLDKVRPEDDGGVRTLAALRNEVEAAAEARADLLSEYRAAVDASPIAAEVAALQSIKGCAFALAAAFSAEVGDFTRFRSGRQVTAYFGLAPSQRSSGDSVRLGGISGAGNALVRKLAVEGSWCYAAARHQPKLMPRDTGAPLEIRMHGRKGSERLLRRREEMLARGMPAAKANAATAAELVRWLWALGMMCREGAE

SEQ ID NO: 71936 - protein, 331 aa, unidentified
MTYIGIDVSKATFVVAYSSEKNSKTRTFKNTVKGIHAFVQTLSSKEDHCIMEATGNYSSLLVYLLNEAGVTTSLENPLKIKNFARVMLSTIKTDEVDARIIALYGERMQPRPYKLPSDAILTLKQKRTVIRQLKKQLIATRNLKGSMEVLPFFDPSCKKSVTQTITFLEKQIKTLEEDLSVLAHKEYKKQMDLLTSIKGIGVTLAAALIMATGGFTYFDNAKQLTRYLGLSPNYQQSGTSVNFKGHINRNGDISLRSQLYVAAFASLRCNKECRACYDRLRSNGKPGKVAVIAVANKLVRQAFTVVTHEKPYVDGYVSTLGSAETSSSVEG

SEQ ID NO: 71937 - protein, 371 aa, unidentified
MKSILSVGMDVHKNSFSLCAYDGYTGEIVSESTFASDVKLVIKFIETLKSRYENDVEIKCGYEAGCLGYSLYKSLTARGVDCVILAPTTMQVSAKNKMVKNDRMDALNIAKNLTSGSYKAVYVPDEEDVEIKEYIRMIHDFKKELKRVKQEICAFVLRHGYQYDGKSKWTIRYMNWIRELEMSEIQRETLNEYIAEMENLNDKINRFMNRIDEMYQSERYHEKVSKLRCFKGIDTFAAMTIQVETADFERFPNAKAYASYTGLTTGEHSSGDKNNRIGITKQGNTVIRKTLVECAQSLVKGNVYAKKSQGLKSRQKGMDVNIIAYADKATERLKKKYQKLIERNVPRNKAIVAVARELACFIWGMETGNIH

SEQ ID NO: 71938 - protein, 361 aa, unidentified
MDKITRVGVDLAKRVYQVNAVDRAERCVLARPMSPQRFLLWAATLPAGCVVAMESCSGAHHLARRLRLMGLDARLISAHFIAPFRVQGASGKNDANDAAAICEAAARVRTRCVPVKTPEQQGWQGIHRLREGYKEERTACINRIRGLLAEFGLVFPQSPDALLRVLSEVLEDASNELPGMLRLGLQRAQGHWWVLDDDIAWCDQQVRRHVRQDPVANRAAQLHGVGELTASALVAAVGDMHQFDSARQFSAWLGLVPSQNSSGGKQRLGRITKRGDDYLRTLLIQGAKSALLAARKRSDRISQWLVQLRERVGWQKALVAMANKNARILWAVLTREIDYDPEHVPPTPQCKQLTPKAPMLA

SEQ ID NO: 71939 - protein, 350 aa, unidentified
MIIGVDYHPSFQAIAFFVEETGECGERELNHSDGEAERFYRDLQQRGIRVRVGMEATGYSRWFERLLAELGFEVWMGDPAEIKAKRVKKQKYDREDARLLLRLMRENNFPQIWVPSPENRDLRQLLWHRHRLVQMRTRIMNQLQALAMNEGYRWKKKLFSTQGRALLEKLALGPWASRRRQELLELLDRMNTTIEELTAAVEREARKRPEAMRLMTHPGVGPLTALAYVLIIGTPTRFERGKQIGTYVGMIPCEDSSAHKQRLGHISKQGSSLLRFLLVEAAQAAARIHPDWRRRYVHLAMRRHKSIAKVAMGRRMAIKLYWMWRTGCEYSQSVKCGSYVGQLGTGHGVK

SEQ ID NO: 71940 - protein, 367 aa, unidentified
MKEVSTAGTKQSNKFSEQKMTIGLDLGDRSSWYCVLDEAGEVLLEQKLSTTPKAMEEVFGGMPRSRIALETGMHSPWVSRVLSGLGHEVIVAHARNVRLIGESRKKDDRLDARTLARLARIDPQLLSPVKHRSARAQADLTVIRARAGLVRARTALVNTARGLAKSYGERLRGCNVRNMNPEKAEGLSPELQTALEPLLAGIESLSERIREYNERIEGLAQERYPQVALLKQVKGVGTLIALTFLLTLEDAHRFRKSRDVGCYLGLQPGRRNSGQSEPQMHISKEGDPYLRTLLVQGAQHILGPFGADSDLRRWGLKLAERGGRNGKKRAIIATARKLAVLLHRLWVGGEVYEPLRNSNQRAMPAAA

SEQ ID NO: 71941 - protein, 477 aa, unidentified
MPAGQQVEVEVDEHEEIVGRVAAIDVAKASGMVCTRVPHATKAGRRVTRVWQVPSTTNQILELAEQLAGEGIERVVVESTSDYWRPFVYVLEARGLVVWLVNARDVKHLPGRPKTDKLDAVWLCKLNERGMLRPSFVPPAQIRRLRDDTRLRADLTADRTRHKQRLEKLLEDALIKLGTVATDIFGVSGRAMLEALIAGQRDPKVLAELARGRLRVKHAALVQALTGRFDDHHAELARMLLDQIDTLGGQIDQLTARIEQMITAIPAAQPPAPATGPGGDAAATLHAGMESAESVPDHPNSDGVDPETGELLAAPLPVVDRLDEVAGIGHHAAQVIIAEVGLDMGQFPTPAHLVSWARLSPRTIQSGTRHRAGATGKANPYLKSVLGEAATAAAKTDTFLGERYRRLVRRIGKRKALVAVARSILVIVWHLLADPTARFHDLGADYHASRIDRDRKTRNLVHQLQALGHKVTLQPAA

SEQ ID NO: 71942 - protein, 370 aa, unidentified
MHQSSTLYIGLDVHKESIAVAYVAQEHHAEVVSLGNIGTRQCDIDQLIRKMQSKSKHLIFVYEAGPCGYWLYRYLTKKGHVCWVVAPSLIPKKPGDRVKTNRRDAIKLARLMRSGDLTPVYVPQVEDEAIRDLCRAREDTIRALKAAKFQLKAFLLRHDIRYTGRATWSPAHLRWLSEVVCPTPAQQIVFQEYIRAVTDHTERLTRLEQALTDQVQTWRLAPVVDALQALRGVQCTVAVTTVAELGDLTRFDNPRQLMHYLGFTPSEYSTGERRQQGGITKTGNSHARRALVEGAWAYRYPAKISRHLQLRLEKVPKAIQDISWKAQVRLCKRYRQLSARGKNPNQVVVAIARELSAFMWAIAQEVPLTP

SEQ ID NO: 71943 - protein, 438 aa, unidentified
MSNKVIFNLDKLFISVGIDVSADFSWMSIALPNQQFVGKPYKILHNSMNSLTTAVSKIKEAEELYSLESRIFLESTGIYHYPLFCYLRDKGFNCSVINPIITKNSTNINIRKVHNDRFDSKKAALVGLKPDLKVSLMPSDLVLNCRNLSREYYDLMDNRSAYVNKLQGELRMAFPQYLGIFSKVTTHTSLTLLETYTSPSAFIAADKQEIIDTIKSTARFGLAYAQNKYNAIIKAANEAKEFGYIIDSNIKRIRLYISFIRKYDEEINSILQAMHELVNANEDTDFVKQIHLIETFKGAGFLSAVSLMGEIGDFSAFSKPKQLFAYFGLDPAVKQSGKFEGSKIQMSKRGSAIARRVIHTLTLQSISTSRTGEAKNPVLRDYYLKKCESKPKLVAMGAVSHKVCNMIFAILRDNKPFEIVTPQEHIKQYNAAKCDIAA

SEQ ID NO: 71944 - protein, 347 aa, unidentified
MPVVGLDLGDRYSHYCMLSNGGEWMEEGRIQSTVTALEKHFGGEPQMRIALETGTHSPWVSRLLKSYGHEVIVANPRKIPTLTGSESKNDRNDAEQLARMAAFDPKLLHPIEHRSLERQQDLNLIHTRSVLVRARTMLVNSARGLVKSAGGRLPSCSSEVFPEKVSVAVPRELKAACEPLLKQITQMNRTLAGMDKQIAGLAKKYPEIALLRTAPGVGPVVAACYVLTLGHPETMETNRQAGAYLGLRPRQQQSGDCDPQCGITKTGNSYLRSLLVQSAQYILGRFGPDSELRCWGLKLAACGGKRGKKRAIVAVARKLAVLLLSMWRNGKKFEPFPQSATQLAKAV

SEQ ID NO: 71945 - protein, 334 aa, unidentified
MKQVNQVGVDVDSEKLVCAIQRAGHRLPLALFANTAAGHRKFIHWATKGGCPARVCLEATGIYSLEFALALHRARNVEVMVVNPRAIKDFFRACMQRAKTDAVDAGGILDYLERMPFTAWQPPAPEILELQAINRRIVQLNTELTREKNRRHAAEFAGAGADTIANDIEVNIRHLERRLERMHDSGLQLIRGVPVLATKLAHLISAKGIAETSAMRLLGELLVLPDDLAAPQWVAHAGLDPRPYDSGTSVHRPRRISKVGNRHLRAALYMPALVAIQHDPNVRAFYNKLIANGKKPLQAIVAVMRKLLHAIWGMLKHDQDFDGNKFFKIATKNA

SEQ ID NO: 71946 - protein, 370 aa, unidentified
MKSIVYIGADVHKKSYSLCAIDGDTGEILGETKISPDVKLIEKFINNARKKAQKDADVLVGYEAGCLGYSLYWQLKEKGIACDILAPSTMHRSAKNKVVKNDKRDAQMIATNLANKSYKSVYVPNDHDVEVKEYIRMMNDFKGESKKVKQHINAFVLRLGYRYEGKSRWIPSHIKWLKELKLDPMYREILDEYLSQLELLETKIGRFQHKLEELSQEEPYKEKIGELRCLKSIDTTAAMTLHAEISDFNRFPTANAFSSYCGLTPGEDSSGDKNKRLSITKQGNAVVRETLVECAQVLVRGTVGKKGKKVISKQKGQDVKVIDYADKAVIRLQKKYHRMILKGINRNIAITAIARELSCFVWGIETGHIN

SEQ ID NO: 71947 - protein, 408 aa, unidentified
MEILFPRCAGLDVHKKTVVACVLVREGRETRKALHTFGTTTAELLALQTWLTEHQVTHVAMEATASYWKPVFNVLESSFTTWLVNPAPIQAVPGRKTDAQEAEGIAELLQHGLLKPRCIPDRAQRELRELTRYRKSLIEERAREINRIQQGLEGANIKLGSVLSDVLGESGSRILAALAAGETDPDQLAALAHPRVQATPEALRQALAGLIGAHQPCLLRQQLRHVHQLNAQIAELDAEVENRLAPFEATRALLETIPGIGRRTAETILAEIGPTVTAFRSPAALAKWVGVAPGHDESAGKRLAGRTVPGNRTLRAALVEAAQAAGRTKATYLGAQYRRAARTKGAKRAAVIVAHTLVVDLWYLLHRQTPYADLGVDYFDRRDREHAARQAVKRLEALGYRVALTPVS

SEQ ID NO: 71948 - protein, 346 aa, unidentified
MLYAGLDLSRKRLDFCLLDSEGATVEVGAAPPDADGLLGLTQRLDRHREPIHAAIESMNGARFVHDRLELAGWEVEIADAQKVKGLAPLACKTDRIDAWVLAELARRDLVPAIWLPDPMVRAERERGRWRLHLVRHRSSLKQRVHAVLLTHGKPCPVSDLFGVRGRQLLAQLGLPEPWQATVEASLRLIDELEREIGDCERELRRLGADHRYVPLLLTVPGIGWVLAYTIAAEIGDIGRFPSPRKLAGYTGLCPRVYQSGERDLRGPLAKQGPKYLRWALVEAATHACTAAIYRDRYQQTKARIGKQRGAKVAQIDLARRLSEAIWHMLSRDEPFAPKGATDPLAA

SEQ ID NO: 71949 - protein, 341 aa, unidentified
MFYVGLDIHTKHISICVLNQDGKVHRRDQVRQVDQLVRVLEGLPDRFEVCFEASTGYGRFFELLSVRACRVVVAHPGLLRLIFRSKHKNDRRDAEKLAKLLYLGEVPAVHVPTADVRAWRELITFRQRLVQKRTRAKNGVRALLRCLGITAPPRPGIWTAKGLAWLKQLEFSQPLQALKRDLLVQEIEAFSQQLARVERGLAAYSRDNLSVWQLRSIPGVGLRTAEAVVAFIDDPHRFAHSKKVGAYFGLVPSQDQSGETNRLGHITREGCTAVRHLLVEAVWQALRRSATVRAYYERIQRNDPDRKKIAVVATAHYLVRVMWALLKNGTLWKEPEAQVAA

SEQ ID NO: 71950 - protein, 331 aa, unidentified
MAQDRLVVVGIDVAKDKVDACIRSLSQRQAFPSTPEGRRALIRWLRRHKVGKAAMEASGGYEREWAKALREAGIEGLVVDPKRVRNFARSAGRLAKNDPIDAEMIAWFAETFIEARGQAYDAARERLAQIVSARQALIDVQTSLQNRKEHSTPDVVQKMQGRLLKRIAAEIAKLEAAIAALIKTTPRFAELAEIIESVPGLARGTSAGLIGAMPELGQIGNKVAAALLGAAPYDDDSGKRRGVRHIQGGRRKVRNLFYMASMGAATRHNPVLKAFYDRLIARGKEPKVALTACMRKLIVILNVMIARGEKWDARRYEVSDSARLPPSACTA

SEQ ID NO: 71951 - protein, 401 aa, unidentified
MRKVYVGIDIGSKQCSAAAINSRGKLIEAETFRTSEMNLISFVKGKNGEVNVLIEEGELAGWVMRTLLPYASSVEVSDPKRNAWIAKAANKSDRVDAAKLAELLRLGSYSVIYHPEEEDIAAFKVVVKHYDEASKRMARVKCQIKAGLRSQGIMTSGTLIYGKTGREKALVQIEDPHVRRAIERDYDLLDYLARDKADARRQVSMMSKRFPVIERLMRMPGIGIILASRFVAIVGNPYRFNKRTIASFSRLGIVKRSSDGSPLGPEHIDKSGNGKMKDISRKAFESAIGTKRPNGIKDFYLRSLSRTKNETSARMNTQRKILAIMLAVWRDGTEYSDELVTGKRAFARAPALEGCLSDCSLASILRAVRLRPHQMRTGWPGKPPASTYPDCPQGGRGSPVG

SEQ ID NO: 71952 - protein, 414 aa, unidentified
MDIIHTHCAGLDVHKKVVVAAIIVPGKEKGLYKETRSFETMTGELLALSDWLMSQGVTYVAMESTGEYWKPIFNILENNFEVLLVNAQHISKVPGRKTDVSDAEWIADLLRHGLLSPSFIPPLGQRELRELTRYRSTFVKEKATLVNRVQKVLESANIKLSSVASNVIGVSGRAILEAIVADQTTPEQMAELSKGRLREKRTQLTQALEGRVKPHHRFVLTELLTQIDSLDETIAHFNQEIEQYCRPFEEAVVLLDTIPGIARETAEIIVSEIGMDMSRFPSAAHLSSWAGVAPGNNESAGKRRSGRTTQGNKPLGVALNQAAHAAAHTRNTYLSAQYHRLAGRRGNKRAIMAVAHSILVIAYHMIKNNVPYEDLGADYFDKRRPETTSKRLVRRLEQLGYHVSLQPSPTPTLV

SEQ ID NO: 71953 - protein, 331 aa, unidentified
MSYTNFIGIDISKLKFDIRIHSNQIASVFDNNNTGFKKMVNWVLKNVDCDKEEILFALEHTGLYSLPISVFLSENKFHFILLPGLEIKRSLGIQRGKNDKIDAKRIAEYAYQKKDKIVPSQLPFKNILQIRRLLKLRERLVKYRAGFLKDKSENKIFLNAKENKLLFEIVDKSIIELNKKIDKIEKEIDIIVESDTLISKQFYLITSIKGVGKQTALFVIAYTNCFSNFDNWRKFASYCGTAPFPYSSGTSIKGRNKVSPLANKKIKSLLNQCARSSIICNPEMKLYYKTRKEKGDNGMSIMNIIRNKMISRIFAVINRGTPYVDTYKFAA

SEQ ID NO: 71954 - protein, 332 aa, unidentified
MKLKKEIIGIDVSKLTLDVFILSLKHHFVVSNNPLGFSKLLQVIWEKLPNKKESLFFCFEDTGKYSLSLCIFLNGEKLSYAMVPALDIKRSMGMVRGKSDKKDASVIALYAWRKRDEIKPTVFPAGSIVRIKQLLSLRNKLVKHKKAYQTGMSDVHDYFKDGDSQFYLDVNKRVIKSLCSEITSIEKEIETQIKSDPEVQNNYKILKTVPGIGKIIAFYMIAYTHNFTKFENARKFCCYCGIAPFENTSGTSLKGRTKVNHLANKMIKALLNMGALSVIQNYPEFKSYYNQRVEKGHNKMSTVNIIRNKIVFRAFSVIKRGSPYINLHKFAA

SEQ ID NO: 71955 - protein, 355 aa, unidentified
MHNNNNYFNGSSQDFFVGLDVHKKNWTVCIRNSGLFLRKFSMNPSPEQLYNYLKRNYPDGTYYSVYEAGYCGYWIDRELKKFGINNIIVSPSDIPTSSRDKYEKTDPRDARNLAMHLQNRTIKGIYIPDDFHLHLRSLSRLRCQLIKQQTRLKNQIKAYLYFYGIRLPDNSVMLHWTGKFIEHLRHLEFSHPSGKLQLEIYITSLLEVRKQILNTVILLRKTLKENHLNEPILMLCSIPGIGFTTAAALYTELIDIKRFSSFDKLVSFVGLSPSKRSSAETEKILGISFHYNKYLRSLLVESSWIAVRKDPSLTSLFAKYTRRMSKQEAIIRIAKKLLSRIRYVWLNNKDYQEQQ

SEQ ID NO: 71956 - protein, 343 aa, unidentified
MEYYAGIDVSLKESSVCVVDATGKLVREVKVGSEPECLVGYFDQLDFPVERIGLEAGPLSQWLHAALVAAGHEVVLLETRHVKAALSAMTVKTDRKDARGIAQPLRMGWYRPVHAKLSPAQDTRALLVGRKLLQSKLLYVELSIRGILRGYGLKVGEVSRGRFEARIRELIAGHAILSMVIDAMLTARAALWSEFTKLHREMLRIARADRVCQRLMSAPGVGALVALTYRSAVDDPARFEKSSTVGAYFGLTPKKYQSGETDRDGGVSKVGDAMVRTALFESAHIMLTRATRFSSLKRWALDVARRRGMKRAKVALARKLGVVLHRMWMDATDFRWSANPMAA

SEQ ID NO: 71957 - protein, 360 aa, unidentified
MTGTMTWAAMDVHARSTYAASMDVITGELTRQRFDTGAVEPVVAWLAGLPGPVRCCYEAGPTGFGLYRAGVAAGLDCQVIAPSKTPRPSGDRNKSDRRDTDLLLRQLMGGALTAVAVPSATLEAARDLARAREQVRVDLMRCRHRISKLLLRHGRVWDRSTWTKAHREWLGSQTFQHQNTELAFIDNLAACDGLTARKQVLDERLSGVALDPEFWPLVRPLRAFRGIDTLSALVITLEVSDFTRFARAVQLGSWLGLVPSREQSGESDRNGSITKTGSKYARRILVEASWHYARPPRIGKTLYQRQDGLPDHVLQIARRAQTRLYRVHRRMRERKKPGNVITVACARELACFIWAAATAP

SEQ ID NO: 71958 - protein, 339 aa, unidentified
MKQILFYIGLDVHENMTAYAVRSYKGSIILSGECATRYEDLHKRLELYLCSCRIGLESCTSYYHIYWSFKKKGYDILVANTLRIRQLVAKDDRLDAERLSDMLRLGSFPTSYVPDEILMRLRSLVNLRQNFVEESTSFQNQIKSTLAKHGLQIHERTNFSKRWCEQLQRYIAEHPELPELYHTYEHYQMLEHKITTLTAEILTFGKKYWSKEMALLDSIPGIAEILSSYFVAEICPISRFFNEKKLRRYAGVIPCFKESGGKCYGSNLPKTSSRSLLRWALVQASWAAVKGKNNLARYYQKKKKTRPKTKAIMAVASSLSDIIFKVLSTGKPYVKQSCS

SEQ ID NO: 71959 - protein, 388 aa, unidentified
MNVGADKSEPLTAIHTDLGAIFVSLELSRSSWLITSLSPGGGEKMSKHSVPGGDFAGLMERFAQLQEKARLRTGQSFRIIVVQEAGLDGFWIHRALQNEGIESHVVDAASIATSRRRRRAKTDKIDGETLVRALLAYKRGEPRVCAMVKAPTPGEEDRRHLCRERKALTAERVRHVNRIKGLLFSQGISGYQPLRRDRRQRLEELQTGDGRAFPQHLKALVNRELDRLELLLKQIKTVEAARDALLAVGQTGKPAPAAMLLDIRGIGPEFAAILWSEGLFRHFENRRQIAAYAGLAPTPWQSGAVDREQGVSKSGNPRLRTTLIQLAWLWLRNQPRSALSVWFHERVSRNGGRLRKTTIVALARKLLVALWKYVTAGVVIEGVTMKVA

SEQ ID NO: 71960 - protein, 329 aa, unidentified
MKRNSKYVGLDVHQAMTAATVRTEGGRVIARSVMETSERSIMEFFGGLRGTVHVAFEEGTQAQWLYDLLIARVDRVIVCDVRGEKRSGNKGDRIDADHLSDRLLRGGLRAVYHGSRDRADLKELTRAYRNLVEDSTRVMLRLKALFRARAIRTTGSGVYDPTKRAVWVAQLAGQGARLRAQTLYAQLDVLRAQRKKTKAAMVTEAKRDPAWGVLETIPYFGPVRIAMLLATIGTPWRFRTKRNLWAYAGLAVVTVSSSDYEMFDGRSRRRSRRPLTRGLNRNHNRVLKGVFKGAARAPPRQSRDALARCRTSITECSSAACARNSPASR

SEQ ID NO: 71961 - protein, 348 aa, unidentified
MQISTIGIDLAKNVFQVHGVDAAEKLVLKKQLRRSQVLEFFSKLSPCLVGLEACATSHQWARELKKLGHDVRLMPASYVKAYVKRGKNDAADAAAICEAVTRPSMHFVPIKSSEQQSALMLHRTRDLLICQRTQLINAMRAHLAELGLVARKGREGLQQLIRTVAEADDERLPSDACFACQAIIAQLQAVQIQITRLDKRIHQAHRVNPASKRLEAIPGFGVIVSTAVVATMTDPKAFKTGREFAAWIGLVPRQNSTGGKDRLGSISKQGDRYLRRLLIVGALSVVKSARARPDKYPWIMTLLGRRPAKVVAVALANKMARIAWAVLAKGETYRASAHTTSGAVAVST

SEQ ID NO: 71962 - protein, 394 aa, unidentified
MKLVGIDVGKNSHHFCVMDKETGEFNVAPSSFSNNKEGFDFLINSLKPYSKKSILIGMEDTGHYHVALLKFLLSNGYTVALINPKTTDLTRKMEGGITKNDKLDTITICDVLDTPERKKQYRITKVDRFDLYEQRQLTRHHHNLKEELNVYCNRLQKSIDLVFPEFNTLFGSKYGVVYMNLLKTFGSAEAIASTDIRTIRKCFQIEGRGNRISLTPEKLKECAKNSIGISSEVETIQIKHLVSQIMLIKEQIAEIDKKIEEFSIKNNSPILSIPGISHFSGTSILAELGDIGNYSKPSQIIKFAGVAPYHYESSQYNAQHTGITKKGSKYLRKTLYQIILPVIKYNPAFKKYYLLKISQGKGHRCAQGHCIRKLLRIIYHLLETGQSFDPALLR

SEQ ID NO: 71963 - protein, 411 aa, unidentified
MRLFVGDDWAEDHHDVELMDEAGRVLARKRLPEGVAGMARLHALIGQQLGDDGDDAEVVIGTETDRGPWVAALVAAGYTVYGVNPLQASRYRERHGVSGAKSDTGDAHMLADMVRTDSHQLRVVAGDSPDAGAVKVAARMHKTLIWERTRQVQRLRYQLLGYFPGALEAFDDLDAPDALELLGKAPDPARAARLTRAQVSAALKRARRRDIPGKATAILAALRSEQLGQPPAVAAAYAVTVRALIALITVLNEQVKVLEEQVGAHFGRHPDAEIYLSQPGIGLVLGARVLGEFGDDPGRYASGKARKNYAATSPITRASGKKKVVAARFIRNQRLTDALMAQALSALTASPGARALYDAERARGTEHNPALRKLANRLVGILHGCLKTRTPYNEATAWPQQENIHQSDLAA

SEQ ID NO: 71964 - protein, 419 aa, unidentified
MSCLTGPAGADPSDRKGSTIMTNQQQNLGGVDSHRDTIHVAVITEVGQPVADREFPTTTAGYRRAVAWLIEHGPLQAVGIEGTSSYGVGIATAVTAAGIRVIEVNRTRPAERRKQGKSDQLDAYRAARSVLSGEASTDPKRASIEPLRGLNVARRSAVKAQQAAARQIGARLVNAPAHLRDRYRDLPEAKVVAALANTRPDQLHDIDDADILFVLRSLARRHRDLGEEITSLQDRMQARATTANPALLAIKGVGPVVGAQLLITAGDNPDRLRTSASFAALCGTAPIPVSSGRTDRHRLSRGGDRNANAALHHIVKNRMSNDERTRDYRDTHLAKGWTTKAVYRALKRAVAREVFSALAGHCAMPDYTDLRPARRAKNITLTAVATALNVWPARVGKLELGRRRDDDFANRYRAWLNAA

SEQ ID NO: 71965 - protein, 345 aa, unidentified
MWIIGCDFHPSFQQVAIFDQSTGEVSQRRLGHVEEARQFYASLSGPVRVGVEACGHTQWFEQWLRQLGHELWIGDAARIRGLCWRQQKTDRRDAAHLLELLLSERFPRIWVPTVGERDVRQLLIHRHQRVRMRTQVKNQLHALALNQGLQKKYKLWTQTGREQLQALSLLPYAAQRRQQLLSTLDGLEVEIAALDQQVKQEAQGRAEAVRLMSHPGVGPQTALAFVLTIGEVSRFRRARQVASYLGLIPREHSSGGKQRLGHLSKQGNAFLRFLLVEAGQSAVKGDAELQRCYRRLTHRCGRSKAKVAMARKLALRLYWMLRRSCTYAQLQAVGGAGEPESFRGA

SEQ ID NO: 71966 - protein, 378 aa, unidentified
MPSENTVHIAIELSFSSWLVAARLTGAKKSRLHRIEGGDTGALLALIAELRSRALTELGGAAEVACCFEAGRDGFWLHRLLTAHGILVYVLEPTSILVNRRSRRAKTDRLDAEGMLRVLAAWLGGDRQVCSMVRVPTPEEEDGKRPHRERERLVQEKLRIENRIEALLFTQGIRARPSLRSWERELTELRTGDGRTLPPLLRAELDRLRRRLVLILEMIRELEAERAAALAAAPDEAMAQKITSLQRVRGIGANFSAVLVREVLYRSFANRRQLASYVGVAPMPFQSGGMDRDRSISRAGNPRARTTLIQLAWLWLRYQPGSALATWFRERVGTLQGRTRRIAIVALARKLLIALWRYVEAGVLPAGVEIRTGTVPAA

SEQ ID NO: 71967 - protein, 403 aa, unidentified
MNNVVGIDVSKGKSMVSVLRPFGEVVAKPFSIGHTGSELKELADYLKSLDGETRVVMEHTGRYYEPVARFLHDEGVFVSAVNPKLIKDYGNNTLRKVKTDKADSRKIARYGIDNWAELRQHTPMDTIRMQLKTLNRQQSLYTKTKTMMKNNLIALLDQTYPGVNALFDSPVREDGSQKWVDFATTFWHVDCVRNMSLTAFAERYRKWCKRHGYNFSQSKAVEVHAGAQDLIAMLPRDALTKTMVRQAIDALNAISASMERLKAEMQALAAQLPEYPVVMAMHGVGDSLGPQLVAELGDVTRFTHRNAITAFAGVDPGADQSGTHEAKSTRVSKSGAPELRRALFLVMDCLLKTQPQDDPVYRFMDKKRAEGKPYLVYMTAGANKFLRIYYGRVKEYLASLEGN

SEQ ID NO: 71968 - protein, 343 aa, unidentified
MEQVSTIGLDIAKSVFQVHGVDEAGAVVIAKRLRRSQVIAFFRKLAPCLIGMEACASSHHWARELGALGHEVRIMPAGYVKPYVKRSKNDAADAAAICEAVTRPTMRFVAVKSREQQSLLMVHRSRSLLIRQRTMLVNAIRAHLGELGIVAPVGRRGLKVLLAVICDPQDERLPCLARSCLENLAAALMTVEQEIASAEQQILVWHRSNEASRQLASIPGIGPVVATALIASVADPSIFRSGREMAAWIGLVPKQNSTGGKERMGRISKQGDKYLRWLLVTGAMSVIRHGRKTNFENNPWLTSLMHRKPTKVAAVALANKIARTAWVVLANGEAYRHPASIEG

SEQ ID NO: 71969 - protein, 332 aa, unidentified
MSNVTTVGIDLAKNVFSLHGVDAEGAVVLRRSVSRAKLLELIVQVPPCLIGMEACSGAHEWARRFALLGHTVRLMAPKFVAPYRKSGKNDGNDAEAICEAVSRPSMRFVPVKSLEQQADLCLHRTRQGFVEERTATINRLRGLLAEFGHVIPQRAVEVRRQVPPLLEQLPARAARCVADLLEHVRELERKIAAYEREIETHARHSALAQRAQARQGVGPITASAIVASVGDAAEFTSGRQFAAWLGLVPRQYSTGGKTRLGHITRRGDGYLRMLLVMGARSVLQRASRERDPLSRWALAVRERRGYHRACVAIAAKNARVVWALLTQARAAV

SEQ ID NO: 71970 - protein, 486 aa, unidentified
MAKRKKSTFERLHSGSLNRQQRRELERRFHAAEPDLEIVHPHAAGIDIGNASHFVAVSPSRDAQPVQEFGSWTADLKRMARWLKQCGITTVAMQSTGVYWIAVYEVLEKEGFEVYLVNARGTKNLPGRKSDVQECQWLRKLHTYGLLRKSYRPAEDIRRVRTLWRLRDRLVKDAGRAVQHMQKALTTMNIQLANAISDISGVTGMAIVRAIVAGERDPHKLAQLRDARIQASEEEIAHSLQGNWQPDVLFELKQVVEAYDFHQKQITGCDEELQRYLAELPSREPVGADEGSPVSEAKARTKYQRRKRSAQRKTRDNRPNFDLGAELQRLLGVDLRIIDGIDLMTAQTLYSELGPDLSAWPTEKHFTSWLELSPRRDVSGGHVIRQEKRQVRNRVANALRNAAQSLFRSDSYLGARYRHLRARLGGLKAVKAMARYLACLIYRLLTKGPAWVDRGAAYYEQQREQRELKALHRKAAAKGMKLIPLA

SEQ ID NO: 71971 - protein, 348 aa, unidentified
MATVTLIGLDIGKHSFHLIGHDPRGNPILKKQFNRCSLILFLAKQTPCRIVMEACCGAHWLARKLTGFGHTVQLIAPQYIRPFVSGNKNDFIDAQAICEAATRPTMRYVAAKSAQQQALSALHRLREARIAERVQTNNQIHALLLEFGIALPVGVRGITQLPMVLMDTSNDLPVKARQILQRQLEHYRQLKAEVEELDREIAAEARQDDVALRLMTIPGIGPITASQLSADAGNAKGYGNARDFAASLGLVPRQHSTGGKSRLLGISKRGDKSLRRLLVQCARVIMQNASRWKSAMAEWTVTLMQRRHSNIVACALANKLARVVWAVLAKGGEYRAQPRALIEMQTAG

SEQ ID NO: 71972 - protein, 360 aa, unidentified
MKKRLSKKANWFKENSFTDEDELYVGVDVHKEQYHVAIWHNGHIGCVYSMLSDNTKLLRDLQKIRSSLKNVVYEAGPTGYSLVRLLRSASLPAEVVAASKTPRMTDSGAKTDRLDCQQLAEYAAKGLLTFVWVPTKQQEADRQVVRLRDQLMSKRKRVMQQIKSFLLQHGIAWPGGGWSKTVLKRLRQLNIGAELRFSLDQYLDEYEFFSQKMTVTKAKLCQVFSSERHSAAIAVFKSHPGVGDITAWEFRAEMFNITRFSQPKQVSKYIGFCPRISQSGNTCRHGPITKTGRRELRAILIQAAWAWHRKDPYARKIYNRLLRNTGNGKKAIVGLAKRIAIHLWRMLRDGCLYDIKVAKV

SEQ ID NO: 71973 - protein, 388 aa, unidentified
MLNVKHQSQDSIQTDLRAIFVSLELSRSTWLITSLSPGAGNKISKHSVDGGDIGGLLKRFADFIAKARAKTQKICPLIVIQEAGLDGFWIHRRLQSEGIESYVVDPASIATNRRRRRAKTDKLDGEALLRALMAFKRGEPRVCAMIQAPTPEEEDRRRISRERKTLINERIKHVNRIKGLLFSQGISNYNPLQAKRRDRLHDLRTGDGRLLPEYLMHQIERELDRLELLLKQISAVEVERDAIMSTDQENSPDPSPGAILLSLRGVGAESASSIWLEGLFRNFENRRQIAAYAGLAPTPWQSGTINREQGISKAGNPRLRTVMIQLAWLWLKHQPQSGIALWFKERVSSERGRIRRVMIVGVARKLLIALWQFVTKGVIPEGAELRVS

SEQ ID NO: 71974 - protein, 356 aa, unidentified
MSRDIKYIGMDVHKEAIVIAVLNGSGKLVMESVVETKASSILQFMDGLQGELHVTWEEGTWAAWLYDLLKPHAHQVLVCNPRRNALLKEGSKSDKVDARKLADLLRTGMLRPVYHGEHGLRTLRELARGYQTISKDLNRVMNRVKALYRSWSIPCAGTQVYAPRYREQWLGKIEHAGVRRRAELLYQQLDGLQSLRRTLRPELLAESRKHKAAKLLRQIPCIGPIRAARLLALMQTPHRFRSKRQLWTYSGLGIETRDSAQYRFVRGQLQRAKKPQQIRGLNQNHNHEMKEIFKGAATRASCGVGPLRDFYVALLDKGMKPEMARLTLARKIAAIALTLWKKEERFDAEQLKPQAA

SEQ ID NO: 71975 - protein, 410 aa, unidentified
MEVLYPVCCALDVHQASVTACLRAPGDGPQRRQQVRTFGTTTPELLRLAGWLTAAGCTHVAMESTGIYWRPVYNILEGSFELSVVNAQHVKMVPGRKTDVRDSEWLAQLLELGLLRRSFVPPAAQRELRDVVRYRKRLIEERAREANRVQKVLETANIKLASVVTTVLGVSARAMLKALIAGEQAPEQLADLAQRRLRRKRAALGEALTGRVTAHHRFLLDHLLRHIEFLDGAIAACDRQVETLTAPHAEALTQLDTIPGVARRTAEVIAAELGCDMTRFPTAGHAASWTGLCPGNHESAGKRLSGRTRHANRTLRQALVESARGAVRKRDSYLAAQYRRLVKRRGDKKAIVAVAHSILVIAYHVLRDGQPYRELGGDYFERLNADRLTRYHTKRLAALGYTVTLTKDAA

SEQ ID NO: 71976 - protein, 372 aa, unidentified
MDERIKFFVGLDVHGDSIAMSVCEAGREPGRFVSTLTPDVQALLKTLSKYGAARQVSVVYEAGPTGYGLYRALSDRGYRCEIIAPSLTPRRPGERIKTDRRDSLRLAELSRAGELKAIWVPDQAHEALRNLWRAREDAVNLRLQARQQLKAFLLRQGRRYPGKTSWNKTHQRWIAEQHFDHPADYIALAEYQLAVQAAQDRVQRLTTALEHAIEGWRQEPTVAALRALRGIDTVSAIGLVCEIGDIARFGSARQLMGYLGLVPSEHSSGNSVRRGSITKTGNAHARRLLTEAAWNYRFPARMSQALRDRSATLSPSIRTHAWKAQVRLCSRFAHLSARGVQANKVCVAVARELTGFIWAIARQSLPDNTHHQ

SEQ ID NO: 71977 - protein, 344 aa, unidentified
MNVTRVGLDLAKNVFQVHGVDRQERSVAKRKLSRGQVRVYFEKLSPCLIGMEACASAHYWAREFGRMGHRVKLIAPQFVKPYVKSQKNDANDAEAICEAVGRPNMRFVTVKTVAQQDIQAIHRIRSELIRQRTAKANQIRGLLAEYGIAVPIGIGALRRALPELQEDAENGLSGVFRRLLTGLREDLGNFDARVAALDQEIEIAARAEPMAERLQSIPGIGPIGATALVAAVGDARQFARGRDMAACLGLTPGQHSSGGKEQLLGISKRGDSYLRTLLIHGARAVLKTAGRKTDPRSCWVMNIAARRHKNVAAVALANKNARIAWALLTRGGGYDAMHGMAART

SEQ ID NO: 71978 - protein, 352 aa, unidentified
MSQTANTAIAVIGIDIGKNSFHVVGHDKRGAIVLRQKWSRGQMEARFANMPPCLIGMEACVGAHHLSRRLRALGHDARLMPAKYVRPYSKGQKNDFRDAEAIAEAVQRPTMKFVATKTADQLDLQALHRVRERLVSQRTGIINQIRAFLLERGIAVRQGQRFLRVELPRILATPPEVLSPRMVRIIEDLAGDWRRLDDRIEGLSAEIEDLARKDSGCERLMTVPGIGPIISSAMVAAIGTGDAFSKGRDFAAWLGLVPKQISTGDRTILGKISKRGNRYLRVLFVQAAWVVLIKPKSWERHGLKAWIEAARKRLHRNVLAIALANKLARIAWSVLARGRNFEARSATTAQPV

SEQ ID NO: 71979 - protein, 373 aa, unidentified
MSDGPSGAGGTAREIVCARVAKTVTERDPRVVFADPGQSHGSREPGFARKGQSMDSVANGIVAGLDISKEHLDLGFWPAQAPVSYSYDKDGLAELIGRLLEAKVSLVVLEATGGLEIRVAAELSAGGVPVAVVNPRQVRDFARGVGKLAKNDRIDAVVLARFGQAVKPPARPLPSEEQRRLGELVSRRRQLVEMHTAELNRMGRASSKPVLQSHKDLLKAIERQLADLDQQIRDAIKESPAWMAKAELYDSVPGIGEQTACALVAELPELGTLNRGQITALAGLAPYDNDSGARRGKRSIRGGRAAVRAILYMATLAATRWNPVIQAYYYKLKEAGKLHKVAMVACMRKLLTILNVMAATNSMWIGGKVSKTT

SEQ ID NO: 71980 - protein, 462 aa, unidentified
MQDSQKRKRSSGNPREIEGLPVIRRRIAGIDIGSERHWVCAPTIEESGREVADFGATTPELIRMAKWLKERNVESVAMESTGVYWIAPHEVLEAEGLEVMLVDTRQLARVPGRDKKTDPVDCEWIQRLHSCGLLMGSFRPQEAVCMLRTLVRDKGNLVAEAGDWLRRMQKSLDQMNVRVHRAVADLQGTTGMAIVQAIVEGERDPRKLAKLRDHRCHKSEAAIAEQLTGHWREDHLFSLRQALKMYHSILERISDYEQELLKKLAAMEREECRGQEAPKVNNPQKAHAIRRRGEEPMRHALYRMSGVDLTGIDAIGVATVEVVLTEYGPDMSRFPTEKQFVSHVTLAPHRPTSGGKPVKKKKRNSASTRVAAALRMAALSLRHSDTALGAYYRNIARRKKGDVAVFATARKLATLIYRLLRWGQPYVDEGAQAYERRYQQTRIRGLMTRAKELGYQLTPTTA

SEQ ID NO: 71981 - protein, 454 aa, unidentified
MEKRKSNPKKQASDSLQFTLLNENCAAVDVGSMMMMISYTDSDGTTKLLEVEAYTENLTKAVETLRQAGVNKVAMESTGVYWAVLAMLLERAGIEVTLANAKHYKNVAAQKTDVKDSKWLHQLHAHGLLRGSHIAPELFRELRSYLHERDILQQQKSDTLNRIQRTLTLMNIKIQHLVSDIEGANALKLLRGIADGLSDPKQLLGLMDTTLFKAGEEDLLKSLDGIYKEQFVTILKNQLKSYDFFKQQMLDYETNIEEVLKKLVVPDKDGNRDLVPTKKGLVRKNQYRINLKAYLQKITGVDLTAIAGLNEINLLQIIAVVGIDMSKWKNSGYFTSWLGLSPDPKISGGKVIGQGRKFTNNKATQAFRLAAQSMWQNKGSLGQLYRKLSAQKGSAKAIKAVARKLAVIFYTMMKNKTEFDNSKMEVDHNKQQARRIATLKKEAAKYGLVVQKAA

SEQ ID NO: 71982 - protein, 341 aa, unidentified
MEVSIIGIDIAKNVFQFHGSTKTGATVFRRKIRRSGVLHFLAEQPRCLVAMEACASSHYWGREIEQLGHTVKLIPPQYVRPFVKRQKNDMADAEAIAEAATRPEMRFVAVKSAEQQARSMLLKTRELFLSQRTQTINMLRGHLAEYGIVVPQGPSHLRKLEAQMLDEHETDLPLTMRNMCIRLFDHLRLLDWQIDDLTSRIEASAKQDATARRLMTIPGIGPMCAMAVVTLAPPRESFRKGRDFAAWVGLTPKQHSTGGKTRLGRTSKMGQRDIRRLLILGAMSVIQSVERKGGAAEGSWLNRMLKRKPRLLVAVALANKLARMAWALMKKDEVYRVQLAA

SEQ ID NO: 71983 - protein, 377 aa, unidentified
MSNVRFIGLDVHAETIAVAAAEPTGEVRSLGVIPNRIEPIRKLVKKLGPVTRLRVCYEAGPTGYVVYWQLTALGVKCEVVAPTLVPVKAGDRVKTDRRDALKLARSYRAGDLTPVWVPDAAHEALRDLVRAREAAKKDQLRARHRLGKFLLRHGRRPPTVMKAWTQAHLAWVKSAVHFDQAAQEATLLDYIHEVNHVAARIGRLEAAIDAAVHTAPARMRAVIEALQALRGIALVTAVTIAAEVGELSRFAKPRQLMGYSGAVASEDSSGQRTRRGGITKAGNAHLRRVIVEAAWAYRYRPAVGAALRKRQATVSAEVKEIAWKAQHRLHGRYRALTARGKCRQQVVTAIGRELLGFIWAIGVHVESQTADGNPIAA

SEQ ID NO: 71984 - protein, 385 aa, unidentified
MRTVCGLDVHKDSIFMCIMDEQGKKREKKFGVSTREVKSLSMTLKSHHVSEVCMESTGIYWKPVWHLLENDFRLYLVNPQFIKQLPGRKSDVKDAEWIATVLLKNLVRNSFVPDNMIQQLRLYGRRVNELNKDIVRCEQRVDMILQSCNIRISNHVSNINGKSYKKVVHAIIEGERSADELVKLIHGRTVNKHGRESVRDSLEGNIGQADVDLLRQYMEVLRMYQAQKETCLAEMIKLCEKHYHRAFSLLLSMPGIKEQTAAIIISEIGADMSLFVTAAALISWAGLRPRNDESAGKIKSRKITHGNKYLRKALMEAAWGASRTRGSIFYDKFWRLRQRGKNQNKCTVAIARHLLGIIWSLLSRDEYFDNGYRLDVNLRRAGEPA

SEQ ID NO: 71985 - protein, 341 aa, unidentified
MHRAQITFDWVDRDSGEARRGRIAPATRAGVRAWLGELPSAEGGFAVEGCTGWRFVVEELQAAGFLAHLAEPAETSSLRGPKRRAKTDRSDARLLRELLEQDRLPSSWIPPAWILDLRTTVRLRKTLVDQRTAWQQRIHAALFHHGLPRPTQELLSRATRGWLEQVTLPPASRQALAVALRQIDGLDAELAPIDQWLRTLARRQPGCQALMTRHYGIGAITAPTILAELGDARRFVGGDQVVRATGLDITVYASDGKRSPGHLSRQGPEVLRWALFEAAKAAARPSSPDYPYYQQVKARQGGNRATLAVARKLARRVRHTLVSLGDAALAPVQDLPVAEAA

SEQ ID NO: 71986 - protein, 347 aa, unidentified
MNGDYAGRQVVGMDLHRRRSVLVRMTEDGRKLGTARIANSPAALRAELARAGENPRVVLEATYGWYWAADTLAAAGAEVHLAHPLGVKAFSYRRVKSDARDAADLADLLRMGRLPEAWITPPEVRDLRELTRYRHKLVGLRTSCKDQVHAVLAKLGIPVTCSDLFGAWGSAWLDDLRLPQPYAGKVTSLRQLTGELSTEITMLNEVISDLLAGHPGYLVIRQLPGIGPVLAAVIIAEIGDVTRFRRPGQLASWAGLTPRHHESDTTIIRGHVTKQGSRLLRWALIEAIQRTPAGFGPRDAKDAIIARRGAGARNIAKVAAARRLLTLIYYGLRDGQIRCLPEPARAA

SEQ ID NO: 71987 - protein, 365 aa, unidentified
MKKISRATTGKEKPEITVGLDLGDRFSHYCMLNEEGEAIESGRIQSTEAALRRHFEAEPRMRIALECGTHSPWISRLLEQWGHQVIVANARKIRAITASESKNDKNDAEKLARFALCDPRLLSPIRHRSAQRQQDLNLLQARSTLVRARTMIVNALRGLVKSSGGRLPACSTQGFEARVAASIPPALAEPARPLLNQIAALNLSIGEMDRGIEQLGSRYAEITLLRTVPGVGPLIAAAYVLTLDRPDTIQHSRQAGAFLGLRPRQSQSGDSDPQHRISKTGNVYLRSLLVQAAHYVLGRFGPDSQLRRWGLKLAASGGKRGKKRAVVAVARKLAVILHRIWQTGNPWQAFPQGTPTNAGKEICMA

SEQ ID NO: 71988 - protein, 381 aa, unidentified
MKQDNKTKQNRGNQISAEAPQGTFDLGLRRWRVQREGLTVGVDVGDKISHYCVLDEEAEVVERGKLKTTPAALQPWLEALPAGTRVVLETGTHSSWISRLIERAGQEALVAQPRKIPQIYRSKRKNDRRDAEKLARTGRLDPNSMGPIRHRSVEQQADLAVIQARDALVQVRTQLINTVRGLVKGTGERLIGCSARSFAPKAEEQIPQRLRTALLPLMSQITSLSEQIERYDAEVDQLAQKKYPETELLRQVSGVGPVTSLAFVLTVADRWRFRHSRDVGPFLGLVPAQDESGESSPQLGISKAGNTYLRRLLVGSANYILGPFGPDCELRRWGMKLSERGGKNARQRAKVAVARRLAVLLHKLWVSGEVYEPLPEKRAAA

SEQ ID NO: 71989 - protein, 335 aa, unidentified
MKNYLFYVGIDISKSKLDVVILEKQSPNVSNHFIVENNLKGIKEILRNLIKQKIDLTSVLFCCENTGVYTFPLSSHLSDEKLDYWIVPAIEIKRSKGISRGKNDKADAKDIALYSIRNIDKLKLSRLPETAIQQLKLLYTEREKVMKSFKIFEATKENIDFIPKQVYKSISGINNKTVKFLKTTLKAIEKEMKMIIANEIELKKQFELIKSVPGVGDKTAIYMLIATRAFTAFDNARKFACYAGTAPFEYSSGSSIKGRTKVNHMADKKMKSILQMCALVAVKHDPQLKEYYERKKGEGKNAMLVLNNVKCKIIGRVFSVINRQTPYINTYKFAS

SEQ ID NO: 71990 - protein, 370 aa, unidentified
MKKRITFVGLDTHKNSIEAALADDGRNTEVRLYGTIGGDLASLDKMIRKLQTTGVELRFVYEAGPCGYEIYRHLRAHGFHCDVVAPSMVPKRSGDRIKTDRRDARNLARLYRAGELTAIYVPREDDEAMRDLVRGRQDAIHAQRKARQQLGGFLLRHGFRYPGKCVWTLAHRRWMAEIKMPHPSQQVILEDYVHSVEECTQRVHRLTEQILQLMPDWRMHPLVTALQALRGVAPVVAATAVAEIGPMGRFERPRQLMAYLGLVPSESSSGGSTRRGGITKTGNGHARRALIEAAQAYSHPARISRVILKRQEAVPEPIRQIAWKAQLRLCARFRKLIARGKSRNRVVTAIARELSGFMWAIAKHVPVPQD

SEQ ID NO: 71991 - protein, 424 aa, unidentified
MQELEQVEEQDSEQLIERVAALDIGKATLVCCVRVPGENGKRVQQVSEHSTMTRSLGLLADRLVELGVTRVVMEATSDYWKPPFYLLEAHGLRVWLVNAKDVKHLPGRPKTDRLDAVWLCKVAERQMIRPSFVPPPPIRRLRDLTRYRVSLVSERTREKNRVEKLLEDAQIKLSAVVSDLFGVSGRAMLAALIAGERDPRALSELARGSMRGKISILTEALTGQVTGHHVFLLERMLRRIDALGADIAELEERIEAEVAPFADAVSRLDEIPGVGVTAAQIIIAEIGLDMSRFPTPAHLASWAKFAPGVKESAGRSKGNGSTGHGDPYLARVLGEAAVGASRTNTFLGERYRRIARRRGKKKAIVAIGRSILVIVWHLLAEEQAHFHDLGADFYDKRRGTEAVKRNHVRQLEALGYNVTLQPAA

SEQ ID NO: 71992 - protein, 353 aa, unidentified
MTNTQYIGMDVHKESISIAVRNDVGKIVMECVIETKANVILDFIHGLRGELQITFEEGTWATWLYDLLKPQVTKLVVCDPRKNSRQGNKNDRIDARELSDRLYMNKLSSVYHGSAGIRTLKELARSYLTISKDLARVMTRVKAIYRSWGIPCAGKQVYAPRHRAEWLAKITEVGVFRRAEFYYQQLDALRSLRHQVRRELLAESKTHKASKLLCQIPSIGPIRAALLIALIQTPHRFRTKRPLWKYSGFAIETHSSADYRKVQGQLERTKKQVSVRGLNRDCNHDLKNLLKSAATIASVKPGPFQEFYAALVAKGMRPEMARLTLARKIATIVWIVWKKGVSFDAQYLKPQTA

SEQ ID NO: 71993 - protein, 369 aa, unidentified
MKKNSTQTQSPKRATARQQGPITIGMDLGDKTSCYCVLNAAGEVVKEGKVATTRKGLAQAFGAMRRCRIAMEVGTHSPWVSRWLSQMGHEVIVANARQVKLISASSRKDDRLDAQTLARLARVDPQLLRPIRHRSAEAQMHLMTIRVRAALVELRTALINQARGMAKAVGERMPSCGSGQVSVERMEGLPEPLRTVLRPLLEQAESLTAQIQACEVKIEQIAREQYPETALLRQVSGVGTLIALTFVLTVEDRDRFPKSRDVGCYVGLRPKRSESGESQPQLRITKEGDVYLRKMLVQGAHCILGWRGPDTDLRRWGLKLAERGGKNAKKRAVVAVARKLGILLHRLWVTGEAYEPLRNSAGQPRKRAA

SEQ ID NO: 71994 - protein, 418 aa, unidentified
MWFVGIDWSHQQLDYELRDAAGRVLSSGDVRSTTEGLAELFSKLDRHAPPEQISIAFEAVNLAWVQALSDRGYTLYPLNPKMVKAFRETLSAAGDKSDAIDRSVLARLLATMHTQFKPWRPDAPEIVALRIACQDRLRLIEERTAKVNELQAILKAFYPAVLGLFGKLSSRVALQFLRQFPTQQQMHSLTPKRLASWLRRQHYTAIGRLEEMQAVLGRASFEVPAHLQQAKAPRIGYLAASLLALDDEIKRHERIIEQAFDALPEARLYRSLPGAGPALAPALAACFGRDPQRFASVDSARAFLGTAPVTWQSGRWRVVAFRRACWKFGRRTLHVFAGTSLADCAWAKALYRQQRALGHRHHESLRAVAHTWVKIILAMRKTGEPYDESRFLDSRRHNPVTSTPADPEIAVLARGSLT

SEQ ID NO: 71995 - protein, 357 aa, unidentified
MSTILKQCLGIDVSKHTLSLSFGVLTEDLTKHFTPHADVTNDDDGFKEIGSWLRERVDEKVELIIVMEATGVYHQGIAHYLYGLGHQVSIMQSGRVKRYAQSLDQRSKTDALDSRMLSMLGLERNLRLWQPPSAELQLLKALSRERSNLLKSRTIETNRHEAMLSGSYSNAAFTKRHLKRMALINGQIQDIEEEMRKLVAGSETLQTGINNLESIPGVSFIAAATVVGETLGFDSINNTKQLTSYAGYDIVQRESGSFRGKTRISKRGNAHIRAVLHMPSMTCVRCNPTLKQFYERLKPTKEKPIVALVAVQRKLLILMYTLWKNEQNYDPEYEKKKQQRLKALAAQDNGMVSQPIS

SEQ ID NO: 71996 - protein, 375 aa, unidentified
MKKNSSGCKSPKARMKATRATNVTVGMDLGDKTSRYCMLDENGEVLREASVATTKKAMTQVFATMKPCRVAIEVGTHSPWVSRLLKSCGHEVIVANARQVQLISKSSRKNDRMDAQTLARLARVDPRLLRPIQHRSEQAQGHLRVIRVRAALVEARTMLVNAARGLTKATGERLPSCDADQMGVELMESLPTGLQNSLRPLLEEVGSLTEKIQALDQQVEQIARTDYPETDLLQQVSGVGPLIALTFVLTVEDRERFQKSRDVGCYLGLRPRQSDSGESEPQLRITKEGDPYLRKLLVQGAHCIIRRRGPDTDLKRWGLKLSARGGKNAKKRAVVAVARKLAILLHRLWVTGEVYEPLRNSQSGPPVNKSRKAAA

SEQ ID NO: 71997 - protein, 424 aa, unidentified
MEIIKNKVCGADIHKQFLVATILSKDGTQISERFGMMLDDILKFKEWVIANNCEQVAVESTGVYWVPIYTALEDKIEVIVANPYQIKHTPGRKTDKVDSEWIAELCLKGMIEPSRIFPKEDRELRTLTRARENLVNNRTQMKNRIHQILEYSCIKISSVLTDIFGKSGRYLLDGLLEGKTIDEILIGTKSKTIRKKEQQLRGAIKNSLDSAQILVIRYYLEQMEETQKKIDNLDTEITNRIKSRKEDLEIAMSIPGIAFTSASSILAEIGNYRDFENGSKLAAWCGLVPSIYESANKRITGSITKQGSKHVRRMLVQVAHAISRTRNSSLKSFFLRIKAKKGTKVAVVALARKVLCILHHLLVNREMYEETVNLKPKPLKFDRTSSPIQITEQDMIDSLVKAGYIIEKKDKGGGSGGGYSTPLS

SEQ ID NO: 71998 - protein, 343 aa, unidentified
MQTVTTIGLDIAKSVFQVHGVDAEGNVVIRRQLKRRYVLAFFEKLPPCLVGIEACASAHHWSRELRALGHTVRLMPSAYVKPYVKRHKNDATDAEAICEAVARPNMRFVPTKTEEQQSCLTLHRTRHLFIRQQTSVINAIRAHLAEFRIVAPIGRNGVEQLLGVVADAGDKRLPEIARACVGALGAQLQTLKTQILQFDRMITAWHRSSEVSRRLDDIPGVGPALATALVASVADPQAFRSGRDFSAWIGLVPKQNSSGGKDKLGSISKRGDRYLRSLFTTGALAVIRYAKIHGTKHRPWLTALLARRPTKVAAIALANKIARMAWAMMATGERYKEPVALAA

SEQ ID NO: 71999 - protein, 283 aa, unidentified
MELHTIGIDLGKTVFHLVGVNLRGEVVVRKKFSRKQLLHFTANLRVKLIGMEACGGAHFLGRALQEQGHEVRLMPAQYVKPYVKTNKSDYIDAEAIAEAVGRPRMRFVPIKTDDQLDLQSLHRVRERWVARRTAVINQIRGLLLERGITLRKGRCHVDAALPGILEDASAKLSGALRVLLAQLRLELAHLETRINEADAVINKTAGENEACRRLVAIPGIGPVTATAIVAAIGNGAAFRKGREFAAWLGVISRLTEVENRSCHSVYAVFESSKPVQKLLAKRW

SEQ ID NO: 72000 - protein, 387 aa, unidentified
MQKPHDDSKACLTAFVQDSTLTVVIEMSLGSWLVAGMVPGVNRQPRKKIAPNPEVLLQLLYRWRDEAIKAGKEITRIAVAYETGRDGFWLARWLRARGIDAHVIHATSVAVSREHRRAKTDRIDTAMLQRGFLGWLRGERGHCSMAIVPTVAEEDGRCPHRERETLVKQRTSTVNRMKSILIQFGVRDFNPVLRKAPEKLESVRTPEGIPLPSNAVAALQRQMERFRVIKEQIKAIERTRLQRLQRDPAEKFNAMVFLLVRIIGLGIETAEQLVHEILSRNLRDRKAVARYAGLTGSPDESGSKRREKGLSRSGNGRVRNILIQLSWRLLKFQPESDLVRWFKTRTANAQGSRKPMIVALARKLIIALWRYVNTGLVPEGFQLRPAA

SEQ ID NO: 72001 - protein, 329 aa, unidentified
MTTNPPQIVFNHIVAFEVSKEKLVVHTLPDDEQWTIDNKPQAIRRLIKAEIKRNRKKQLGQMLVICEATGGYERHVLDGALEMGLSVHRAHGTRVRHFGHYRGLLAKTDPIDAHLIAQYGLKTENIRLYSPPPPDTAALRALHARRTEIQQMLIAETSRLDHAQHKSVLKSLKAHIASLKAALAAIEADIAQLVEGSEMLRKKVALMQTVIGIGPISAMVVLAYLPDIGQLTKGQAARLAGLAPINNDSGKKRGARHVEAGRTAIRRALYMAAGVAMRANPILKAFSDRLRGKGYPFKYVVTAVMRKLIVILNAVLRDGESWKGAQMVA

SEQ ID NO: 72002 - protein, 344 aa, unidentified
MTISILGIDIGKNSCSVVGVDDKGSVIVRRTMRRQTLIEFVGKMPACIVAMEACCGAHHLGRLFAARGHEVRLMSPEYVRPYIKAQKNDDRDAEGIAEAASRPTMRFVDLKSEEQLDIQSLHRVRSRLVAQRTTLINQVRAILLERDLIFAAGRRKLEVALDAVPGDHEVNLSPRMHQLIVELRNEWKVLDTKIAALNAEFVSLARHNLAMRRLTTIPGIGVLNATALVAAIGDASSFKNARDLGAWLGLVPRQFTTGGKPRLLGITKRGNNYLRTFLVHGARAAMPVLSQSDTPVGQWLRALVSRGIHRNVAIVALANKLARIAWAILRKEQPYEGTFGVAPA

SEQ ID NO: 72003 - protein, 346 aa, unidentified
MRFYQQQHRFYCGVDLHARSMHVCIVDQEGQTKVHKNIDAHPDRFLPLIRPYRAGLVVAAECMFAWYWLADLCAQEQIPFVLGHALYMKAIHGGKAKNDKIDSQKIALLLKGGMLPVAYAYPKAMRATRDLLRRRTKLVRTRAEALAHIQNTVSQYNLPPLAKKLTFAANREGVAEQFADESVRQMVQTDLSLIGHIDEQLKTVELYLVRHAKIDDPQAYHLLQTIPGVGKVLALILVYEMHAAGRFGDQRHFVSYCRLVRPCHESAGKKSAGKGHKIGNAHLRWAFGEAACLMLREVPAAQTYVARLEKQHGKAKAISILAARIARTAWLMLKRKEAFDATKFLK

SEQ ID NO: 72004 - protein, 404 aa, unidentified
MLFVGDDWAEDHHDVCLMNDTGDRLASQRLPEGLAGISRLHALIAEHAEDPAQVVIGIETDRGLWVDALTAAGYQVFAINPLAVARYRDRHHVSGAKSDASDAKLLADLVRTDRHNHRRIAGDSPDAEAIKVLARAHQNLIWARTRHSNALRSALREYYPAALETFENLADRDALAILGRAPTPADAKRLSVSKIRAALKAAGRQRNLDTRALEIQEKLRTPQLAAPAAVTAAFGASTRAAVGIIAELNRQIADLEAELATHFEAHPDADIYRSLPGLGVILGARVLGEFGDDPNRYTDAKSRRNYAGTSPLTIASGKKRAVLARHVRNRRLYDAVDQWAFCAITHSPGARAYYDQRRAAGDLHHQALRALGNRLVGILHGCLRHQTHYDEHKAWAHRQAAAAA

SEQ ID NO: 72005 - protein, 349 aa, unidentified
MIARSDAACFVGIDLHKDTLTACVLRGRDREVSYVKLACKCRDQIRSFFASLPQPSAVAIETVGFYRWLWTELEPLAGQLVLCDARGARALAGRRIKTDREDALNVALLLADGRLPLAWAPPENVQLLRNWTRHRNGLTRQHAKVLHHVKSTLNRLNFPGPVRLDAAALQRYLLAGVERFSTDDLTMLWQHQRRLVEIEQDRAQSERRISELMRASEFARIREILESVPGVGLVTAATVIAEIGDFSRFPDSKAIGRYAGLAPTVYASGNSSRLGHISKTGAPDLRWVLQQAAWTAIRCDAGFKKTWLRIAKTAGKKAAAVAVARKILVLTWTLVRKDEPYKSRDPLAA

SEQ ID NO: 72006 - protein, 343 aa, unidentified
MEKKRYLGIDLHRDCFTCCIRLETGRTYLSRWQLDELGKFVRKLRPSDEVAVEVTGNTRLFYQAVAPHVQRVVVVDANQFRVIAHSVKKTDPNDARNLALYLEKDLLPEVRMKDPQRAQIASLTQTRDTMVKLRTALKNKVNNLVSAQGINLSKESLASEKGLAAVLKFHFDPLVDLELKVIVEQIRSLNRSIAELEETIAREGQKLEGHSNLTSIKGIGKLSGSILLSIIGDVNDFAEEGKLAAYFGIVPRISHSNETEHSGRITKRGTKLGRTTLVQCALIAQRYSPYLKSYYEKIKRRRGTGKAIIALARKFLGIIYRTLKFKWTFADFPNFVLAEETTG

SEQ ID NO: 72007 - protein, 340 aa, unidentified
MEQQISVLGVDIAKQVFHLVGMDAHGTILVRKRLYRAQVMAFIAQLPPTLIGMEACGGAHYWARRFREHGHEVKLMAPQFVKPYVKANKNDLRDAEAIAEAVTRPTMRFVAVKSMAQQDLQALHRVRERLMKARTALINETRGLLHEYGIIVPQGAAAFRTHVLAKLATEDAKLTPQSLGLFRQLLEELDALEARMATYDAQLAQVAQTHPVCQRLMTIPGLGELTATALVAAVSDAAQFKNGRQFAAWLGLVPRQHSTGGKSRLLGISKHGDRYLRKLLVHGARSCLRWIDRQHDRRSQWVRSVMERRGWNRATVALANKNARVAWVLMGTEQVYRAIA

SEQ ID NO: 72008 - protein, 343 aa, unidentified
MDISVLGIDLGKNVCSVVGLDASGAVVMRRKVRRETLIALAEKLPPCVVGMEACCGAHHLGRVFAAHGHDVRLMSPEYVRPYIKAQKNDDRDAEGIAEAATRPTMRFVELKSQDQLDMQTLHRSRDRLVGERTALINQLRAILLERGMVAPQGKRKLEQFLAVLMDEQGGAGLSSRMIVLLADARTQWAEIDRRIAAFDAEFVRWVKENEEARRLMTIPGIGAIVASALVAAVGQAESFERGRDLAAWLGLVPRQFTTGGKPKLLGISKRGNKYLRRQLIHGARAALPYVAERDTPLGRWAKGLDSRAAGNLPLERPSSRSAMMVWTDCPRRPAPASRCRRKR

SEQ ID NO: 72009 - protein, 351 aa, unidentified
MSQILNAVIVVMGIDIGKNSFHVVGLDQRGAIVLRQKWSRGQVNARFANMPPCLIGMEACVGAHHLSRELKAFGHDARLMPARYVRPYSKGQKNDFRDAEAIAEAVQRPTMKFVATKTADQLDLQALHRVRERLVSQRTGIINQIRAFLLERGVAVRQGLRFLRAELPRLLATPPDVLSPRMVRVIEDLAGDWRRLDERVESLSSEIETVARQDAGCGRLMSVPGIGPIISSAMVAAIGTGDVFSKGRDFAAWLGLVPKQISTGDRTILGKILKRGNRYLRVLFVQAAWVVLIKPKSWERHGLKHWIEAAKKRLHRNVLAIALANKLARIAWSVLAHGRSFEARPATASAA

SEQ ID NO: 72010 - protein, 423 aa, unidentified
MMKLKYSICCGLDVHKNVIVATIVTTNKDGISEYLQKSFSTINSDIQRFHNWLIENNCYHVCMESTGKYWIPIFNYLENDIDVCLTHPKYVKAIKGKKTDKKDSKWIADLYKFDLVRCSFIPPKDFRQLRELSRYRFKLVCMKSSEKNRIQNCMTISNVGIASVLSDPFGKTATEIISYLLKHTADSMDEKAVRKLIKKGAKSKSDEIIEAIKGYTIETDQAKKLELARGHLEYLDDMITQTEVELYVRIKPYYEFVEFVSTMPGMTELSSTIVLAETGVDMDIFDDAKHLCSWCGLSPANNESAGKKKSVRIAKAGDYLKPMMVQCALAAIKSKKQPYFAIKYGRIKKRRGHKKAIIAIARMMMVCIYHMVSEKKPFTPTDYEELMDPQNHVESVVLNENNVFAYLESLGYDSSKLVKRNDN

SEQ ID NO: 72011 - protein, 425 aa, unidentified
MMNTSNTYPLHPKMTRTYAAVDSHKDSHTIVILNCFHEKLGEITIGSAPSEFSKFLKRIKKYLQPNTTWAFGFEDTSAFGRSFVKFLVEKGYLVKHVEASKVATERGQVLHKTDSFDAECACRVLINQFDNLPNANPLDKYWVITNLVTRRNALVKINVMVKNSLHRVIADHYPHYKKFFSCVTRDSALAFYEAYPSPHHLDHVTVETLSNFLHAASKGRLSNSKAEIILKHVQRDNVLKLEYQDSQDFTVRSLVRQVRTNLTELKAADKEIEKLLKEFNYPLTTITGIDNLTAAKIIAEIGDIARFKNAKALAKYSGISPVTYSSGMTNLQRANARGNRKLNEIFFKIALTSITPIGKNNVLLNPICYEYFQKKLSEGKTKNQAIKAVQRRLVNIVFSVMKHQRPYNCPDIAYLHDYKNEVTAV

SEQ ID NO: 72012 - protein, 402 aa, unidentified
MTGPRTTTTSRCETRTHKVLIRCRLPEGVVGLTRLHEVIADHLGDDEEPASVLVGIDTDRGGWVQALIAAGYTVSALNLMQVARYRERVSTSGATSDPGDAHVLADILRKDREHHRIAAGDSDTAQVVTTRARTHHTMVWIRQRQANQLRSMLREFYPAAVEAFGDDLAGRDALAVLALAPTPAAGRALSTTRLQAVLHQAGRQRTIATRADRTRAALHREQLQLSAALTEAYGVSVRSLVEVLSAMVDQATALEAEVQRCFGRHPDAEIIASQPGLGVILGARVLAEFGDNPTRYATAKARRNYAGTSPITRTSGKSRVVLARYARNRHLADALHQQAFCALTTSPGARTYDDHHRAHAATHNQALRALPNRLAGILDGCLPHHTLYNETTAWGHRQPTAA

SEQ ID NO: 72013 - protein, 341 aa, unidentified
MDKELYFGVDVSKKTLDLAYYDGETIDWKNAHIKVSNDDAGFRKIGSWVAKVGKDFDTFLFCMEYTGLYSQNFRLWLESKEYIYGMVEPRKMHRFEPDLDDDQRSLDRIKTDELDAFRIAIYCEQNHKKILRNPSKLPSPVYFKLKRQLAERKQNTKQSVLYKQQLHDICAYDSDLSVERKKLLLKNMKENQKAIDKEIDCYMNEDVSISKNYDLLTSIPGIGHIIALEAIVLTENFTAISNPRKYACYIGIAPFKKESGTSVRKRTSVSKKGFSEAKADLSIAVLSAIKNNPSIRDYWIRKKKEKCGGIVLNAIKFKLVLRMFAVIKRGTPYVETDAYKN

SEQ ID NO: 72014 - protein, 356 aa, unidentified
MISNIKYIGLDVHKESISACVKNSVGKVVMESVIETKASMIVQFIDGLRGDLQVTFEEGTSAAWLYDLLKPHVTKLVVCDPRKNKSMREGNQNDKIDARRLAELLRLDHLTPVYHGEHGLRTLKELVRSYLTITKDLGRVMTRVKAIYRSWAIPCTGKQVYARRHRAEWLGKISEPGVRRRAEFYYLQLDALRVLRLEARRDLLAESKKHQAWKRLCEIPSIGPIRAAVLLGILQTPHRFRSKRPLWNYGGLAIEMHSSADHRSVDGQLQRSRKNVLVRGLNRNCNHDLKNLFKGAAAVHERRPAPFQEFYTTLVAKGMRPEMARLTLARKIATIVLIVWKKGVCFDANHLKPQTA

SEQ ID NO: 72015 - protein, 345 aa, unidentified
MKILALDLGKYKTVACEYEAESGRHRFATVLTTPKALHDLIVDREPQRVVIEICSIAGWVGDLVRSLGIELQVANTSDERWQWRKVKQKNDRRDALKAAQLSAVNQLCPVHVPELTMRQWRALIAYRSKLVQRRTKVKNHIRDLLLREGQLLPRGRTAWTQAGMATLTAMAQPFAVLDSEQLWRGELGIELAQLNELQQQIMTVHAKLDELAAADPRVQLLRTIPGVGPRLAEAIVTMFDDVTRFTTAGQVGAYIGMVPKQFDSGETARSGRITRHGNRLVRSLLVEIAWASLRHNPWARQTFQRISGGKKSRRKIAIVAVGRKLLVRCWVLRHQTPWHWRPGVA

SEQ ID NO: 72016 - protein, 434 aa, unidentified
MSNKVIFNLDDLFISVGIDVGADFSWMSIALPNQQFVGKPYKILHSSIDSLTTAVSKIKEAEELYSLESRIFLESTGIYHYPLFCYLRDKGFNCSVINPIITKNSTNINIRKVHNDRFDSKKAALVGLKPDLKVSLMPSDLALNCRNLCREYYDLMDNRGAYVNKLQGELRMAFPQYLGIFSKVTINTSLTLLETYTSPSAFLEADKQEIIDIIKSTARFGLTYAQNKYNAIIQAATDANQFGYIIDSNIKRIRLYISFIRKYDEEINNILESLHELVDANEDADFDLIETFKGAGFLSAVSIMGEIGDFSAFSKPKQLFVYFGLDPAVKQSGKFEGTKVQMSKRGSAIARRVIHTLTLQSISISRNGEAKNPVLREYYLKKCDSKPKLVAMGAVSHKVCNMIFAILRDNKSFEIITPQEHIKQYNASKCDMAA

SEQ ID NO: 72017 - protein, 341 aa, unidentified
MTMIGIDPHKATHTAVAVDDDENVVDEFTLETSSSQVERLTGWAEGFTKREWAVESANGLGYLIGQQLVAVGETVFDVPPVLASRVRLLGSGRSQKNDPNDARSIAIAALRSDRLRVVEPDDHVVVLRLLVKRHRDMARLRNKHCSRLHALLLELEAGGIGVKISVANASGLLDAITTGDETTRYRVLIGREVVDDIAQLDATLKASKKRISTAVAASSTSLTNIVGVGPIGAATIIGYTKDVTRFPTRGHYATYNATAPIEVSSAGNTRHRLNLRGNRILNHAIHIAAVTQLRHDTNGRTYYDKKIAEGKTPKEAIRALKRRISDAVYKNLIADVAKTTN

SEQ ID NO: 72018 - protein, 349 aa, unidentified
MFVGIDVHKHAHAAALIDERGGEVGALTVPNSPLGYRRLLDWLDERGAGQAIVGVESPGSYGRQLVRALAGAGLDVLHVPAWRTHRERHRQGPGKTDPGDALAIADVVRRKRHELGPALEPELVRALSMLELQRRRLVRDRTQAIQRLRSDWTQQDPVSEAAALRCNSQRELRRLKRIRFGESLTDRVAARCVRELARDIEDLNQRIATLDTEIAELLEAHENPLADLKGAGTNLAATVIAQAGDVRRFRDAAAFARYCGAAPIPCGSGQTSGRHRLHRGGNRQLNAALYRIAIVQARHHPEAKTYLARKAAEGKTPREARRALKRHLANVLYRRLHSWAATTPAMNPS

SEQ ID NO: 72019 - protein, 333 aa, unidentified
MKKIFVGIDISKNWIDVCVTLDGKQVSHQQFDNKLQGFKAMVRWVKTFCSQPDDWLLCMEHTGIYAQPLWYFLVEKEITYCVVPGQSINSGLEIRRGKSDRIDAEDIARFTYRYADELKPHRLPAQVLQRLKMLFAYRDRLVKAKVLISVPANEAKLFAASQSKEVRIDSSSLVQVLEARIKKVENLMLNVINSDDQTAKCYELIVSVPGFGLVTASYLLVITQCFTILTKSRKLSNFGGMAPHPHNSGKTIKGKERVSHMADKKLKTLLSRGASSLLQCNEGIQLYLNRMVSRGKHEYLVRNNIKNKMLHTVCAVVKRGTPYTENYVSPYKQ

SEQ ID NO: 72020 - protein, 473 aa, unidentified
MRPRSAIGIDPDAKGIRCSLVRIGEDKPKMNGFLVTQKGLEGFIRWVKRAGDVIIAIEGSNGQSKPIEQALRAEGIVFYSFKPSDVAGFRKAVLGQNKNNDKDAESVARYAMALETQGKLNGNKRVWFPDAELQGLTRSHEQKTNQLTAEVNRLWKLLRTASPDLYLALGGSNPDIEINGNMLQNQGILTLLSEKPDIVEWKTFSVMDFLEAMGGRLYTGRQKLIKELQKVAKTFRPILSSLSLMIEDSVTQILLLKKQLKRIHDMLEQITQDNKAISILRGYNGIATLTASTLIAEIVNIRRFVSNNGLACYAGLGMIDNSTGERSNMVHSSLFNHRLKDALMTAAKNFVHFNPGSHLAGYYRNLVKGGMSVTESRKRVARALVRVFFRVLYSIDENTNTGVTECDDAEREEKRESDMASGQVRSDKNHESNISLSPLKNHDTNCDGKVNNRLAQREGKEPERILKKSAKSS

SEQ ID NO: 72021 - protein, 348 aa, unidentified
MHFYKGAHTFYCGVDLHARTMFTHVLDHAGVTVFARDLPARPDAFLHAIGPYRPGLVVGCECMFAWYWLADLCEDQSIPFTLGHALYMKAIHGGKAKNDRIDAAKIAGLLKGGMFPMAYVYPRQKRATRDLLRRRCCFVKERSQLIAHIVNTNSQYNHPPLTAKLCYARNRTEGIAERFTDAATRVSIHADLKLIDHFDEQIDEIERVVLKTAKIDDPVTLGFLRTVPGIGKILSLVMLYEIDQVKRFPEVGNFLSYSRLVRPEHESAGKKKGSGNKKIGNAHLKWAFSEAACLMLRAWPDAKKWLARQERKRGKRKALSVLEARIGRTVYHLCRKQRPFDPKRFFSS

SEQ ID NO: 72022 - protein, 362 aa, unidentified
MTNTSIVALSHPFVVGVDTHARNHVYAILDATNGAMLDKQAFPTSAAGINRAIKWVARRTNADADTLWVVEGAASYGAILAGTVATHGFPVAEAPRMDAKSNRGVGKSDALDAQRMAMAVLPLPVEKLRRPRLNDGIRQGLRILVTARESISKDRTRSINALNALVRSNDVGTDARKKLTPAQIEEISRWREREEELALSIARAEAIRLTKHILNLEEQLKSNEKQLDELVKVSEAAPLLEEKGFKAVTAAKCLVAWSHEGRVRSEAAFACLAGVSPIPASSGNTVRHRLNRGGDRRLNSALHMAAITRMTYDAETCDYAEKRRTEGKTDKEIRRCIKRYLARRVFRILNATAQAQKVQEAA

SEQ ID NO: 72023 - protein, 358 aa, unidentified
MTSAGSTFVITGGVDTHKDTHTAAALDANGRLLGNKTFAASATGYAALLAWLGEFGTIHRVGIEGTGSYGSGLAGYLRQNHVQVVEVSRPNRQVRRRHGKSDPADAEAAARATLAGDAMGAPKSQDGSVEIIRLFRLQRRSAIHARTQTANQLHAVVSTSPEALRSTLRDLTLAALLVHASKMRPSKSIDLASATRVVLRGLALRWHQLDREVARLDEQLESLVTAIAPELVALRGVGVEVAGALLVAAGDNPERLEREASFAALCGVSPVDASSGKQHRHRLNRGGNRDANRALWVIALVRVRCDERTRTYVARRTQEGLSKPEIIRCLKRYIAREVFKLLQKRPVLPPGTVASKAA

SEQ ID NO: 72024 - protein, 394 aa, unidentified
MKLIGIDVGKNSHHFCIMDKETGELNITPTPFPNNKEGFDFLINSLKPYSKKSVLFGMEDTGHYHIALLKFLLNNGYTVALINPKTTDLTRKMEGGITKNDKLDTITICDVLDTPERKKQYRITKVNSFDLYEQKQLTRHHHNLKEELNVYCNRLQKSIDLVFPEFNTLFRSKYGVVYMNLLKTFGSAEVIASTDIRTIRKCFEIRGKGDRIPLTPEELKECAKNSVGISSEVEPIQIKHLVSQIMLIKEQIAEIDKKIEEFSIKNNSPILTIPGISHFSGTSILAELGDIGNYSKPSKIIKYAGVAPYHYESSQFNAQHTSITKKGSKYLRKTLYQIILPVINNNPVFKRYYQLKISQGKGHRCAQGHCIRKLLRIIYHLLDTGQAFEPALLR

SEQ ID NO: 72025 - protein, 339 aa, unidentified
MSLYAGLDLHSSNTYIGVLDPQFNRIFKKRVSNDLDLILETLEPFRVRLRGLVVESTYNWYWLVDGLMDAGYACVHLANPSAIKQYEGLKHSDDQHDAFFLAQLLILGILPQGYIYPKEARPVRDLVRKRLFLVQQKTANILSLQSLLARCCGQRVSSNQLRKVTGQDLKRWLKEEHLVLSAQANLDNIVFLKQQIGKLEAAIQKQVKLSEAFNCLLTVPGIGKILAMTIMLETGDIHRFANVGNFASYCRCVSTQRLSDGKSKGSGNRKNGNRYLSWAFTEAAQMARRFNSRFRSYYDRKAAQTNSILATRALSNKLARVCYYIMRDQVEFREESVSH

SEQ ID NO: 72026 - protein, 430 aa, unidentified
MSQAKKSVMVQVETTKEKERREAMISVGIDISKEKFTICALEQGSKIIWKPFDVSLNKRKVEEFLEKLEKLKEKVKITMEATGKYHLPILYELKDRGYFVAVINPLKMKQFCRALNFRKAKNDNIDAKQIAEYGLMYWKELEEYKIDEDNYMVLKELNRNYQHYMELRINQINFIDQTIHQTFPGIKKLIPHNSGDFSKDKLLDFLEKWWHKDLVLEKTEEEFIEEYKTWAKEKRYHPNANKAKAIYKLAEDSISTQPSHNSKIETNIREGINLIKQINQILNNILSQMIEISEPLEEYQEAKKFSGISEKLAVQIVAEFGDLSKFKNKKSLISFIGIDAPPYESGNFKADQRKISKRGNTILRKVGYQAMKCMMSAKDPENEIYKYMIKKEKEGKAKKVCKFAGLNKFLRIYYARVMESKAEKKELKAA

SEQ ID NO: 72027 - protein, 355 aa, unidentified
MDSIKYIGLDVHQSTISVAVLDADGKLVMQSVIATHATTILDFLHGLRGTLHVTFEEGTHSAWLYDLLVRRVAKLVVCNPRKNALLKAGNKSDTVDARKLAELLRAGLLSPVYHGQNSTAAVKHLGRSYAALTEDTTRVMGRLKALYRSQAIACAGKKPYGARHREEWLAKLSESGLQRRAERLYQQLDLLQELRREARHDLILECRKHSEAKLLRTIPWLGPIRAALLIGRVQTPHRFRSKRQFWAYCGLALETRSSADYGFVNGQLERKKKPVFIRGLNLNHNHDLKNLFKSAATTASGSNGPFRPFYENLLIKGMKPELARLTLARKMAAITLHVWKKGEPFDAQYLKSQAA

SEQ ID NO: 72028 - protein, 337 aa, unidentified
MELYAGIDLHSNNSVVVVLDANDREVYRKRLPNDLGMIVEALRSCGPINAVAVESTFNWYWLVDGLQDAGYATRLVNTAAVKQYDGLKHSGDFSDARQLAHLLRLGILPTGYIYPRNARAVRDLLRKRSQLVRQRTTQILSMQNLLARNLGVQASGNEIKRWQTANIEALALLPEQRLALQSNLAVMQCLDEQIGTLEGAILKQARLLPEFHALRTVSGIGEVLALTIALETGDISRFETPGDFASYARTVNSRHESNGKKKGEGNTKCGNKHLAWAFVEAAHFAVRYDAQIKRWYQKKASKTLPVVAIKAVAHKLARACYHVMKTGEPFETARAFS

SEQ ID NO: 72029 - protein, 429 aa, unidentified
MNYTQNEKIEQVTDTTLVIGIDIGSQIHYARAFDNRGLELTRKVFSFGNDIEGFNTFNQWAEDLKIEKNKTDVLIGCEPTGHYWFAFAKYVTEHKMTLVMVNPFSVKKIKELDDNSPKKTDAKDPKTIAKLVVDGRYSIPYMPEGIYAEIRDLVYSRDRIVKQHNISANRIQRWLAIHFPEYLGIYTRFDAASGLAVLEKAPLPKDVIALGVGGIKKLWHDKKMRGRGVTEVRAKTLVDAAHNSIGLDGGAGTRSELYMLLEEHRLWTSQIEAVEKAIEEAVLKVKYVEKLLAIKGVGIITIAGFVAEIGDIRRFKSPKQIQKYAGLELVENSSGKHKGRSRISKRGRRKLRRILYQVMIPLLASNREFRSVYDYYVTRVKNPLKCRQAMVAVSCKLIRVFYAVLTKGMDYDRFKMMSDIHRESDQKVA

SEQ ID NO: 72030 - protein, 356 aa, unidentified
MEKAYDGRQVVGMDLHRRRSVLVRMTEDGRRLGTARITNSPAELRKEIARAGKAPKVVLEATYGWYWAADTLAAAGAEVHLAHPLGVKAFSYRRVKNDERDSADLADLLRMGRLPEAWIAPHQVRELRELTRYRIKLVRLRTSCKDQVHGVLAKLGVPVTCSDIFGKAGAAWLDGLRLPQPYSGKVTSLRHLAGELTTEITMLSEVIASLLAGDRGYQVIQQLPGIGPVLAAVIVAEIGDVSRFKNAAQLCSWAGLTPRHRESDTKVARGHVTKQGSRLLRWALIEAIQRIPRDCVIGGVKDAIIARRGKEARNIAKVAAARRLLTLVFYGMRDGQIRCLSQPPAGPAATQAAQAA

SEQ ID NO: 72031 - protein, 360 aa, unidentified
MIVIGADTHKRNHTLVALDGHTAAIRGQVEIPASDAGSMAALRFAVGLDEERVWAIEDCRHVSARLEGALIAAGERVIRVPAEVTGQTRKSARVVGKSDPIDARSVALAVVRDGIDSFPVAFTDPAAMQIRVLADYRDQIIRERVRWINRLRWHLVTIAPELEAQLRPEALRGPRVCVRLTRQLARLAPSPQLRVARLMLKRISQIVGEERALVAELTALIQAHAPQLLEQGGCGPVTAAIIIGRTAGAQRFPTDGHFARHAGTAPIPASSGKTQRHRLHRGGDRQLNRAIHIIAISRAKTDPETRAYLMRKQAEGKTKLEAIRCLKRHLARRIWRLLYTAETAGPSVSINLANTEIHLT

SEQ ID NO: 72032 - protein, 347 aa, unidentified
MESILKQVLGIDVSQDELVVKLGRMRKDCITEVYASKNFVNNLSGFTSLVGWVNKLKNNNVSIRYVMEATGVYHELLAYYLDENAIEVSIVLPVKISNYMRSLDKKTITDSTSAEAITFFGLERDLAKWQRPTKVYKSLRQLTRERSQIIEMRTICKNQLHAEKSEAEPSESGVIRLNTHISLLELQEREVMSEIKALIKSDQEVREAAELLCSIPGVGILTAATVLGETNGFDLIRNKNQLVSYAGLDIIEKQSGTSIKGKPRISKKGNKYLRKSLHLPALSAIQHDKRFKGVFVRLVSRDGVKMKAAVAVQRKLLEMMFTIYKKKERYNPNYFIAKSESIVCEKN

SEQ ID NO: 72033 - protein, 329 aa, unidentified
MCVLCNRKEPMSQVVIGVDIAKQKFDAARLCENKYRHKKFDNNAQGFAAFLAWMTSFGDSPPWICMEATGAYSIPLAEFLVEQGYGVSVVNPAKIHAFAKSELSRAKTDHADAKLIARYGLSMTPEQWTPPPRAIRELQALLRRVEHLLEMRQMERNRLATADLAIVDSLNIVLDTLQKELDATRQRIKHLIDHDPELKQRRDLLESIPGIGPAASAYLLTALSTHYGFANAKQAVAYAGLAPRVQQSGAWVGKTRLSKTGDPALRKALYLPALVAWRHNPVIRTFCQRLKANGKNGKAIACAAMRKLIHIAFAILQSGHPFDLKLTLA

SEQ ID NO: 72034 - protein, 348 aa, unidentified
MAVYIGVDFHARQQTISYLTTEGGEIQQLVLGHEDPARVRAFYEQFGGQRVIVGFESSGYAAWFEELLEELGCEIWIGHATYIRQYAKRRQKNDRRDADLILELLVSGDFPRIHRYSRATRQMLQQLRYRQRLVKMRTMIVNMLLFMVGSRGHSFRSQLQSKRGQARLAQLPLPEPLAQQRDELLALLAQLDQKIKTIEGWLEQATAGDAAVQRLQTHPGIGLLTSICVRYTLEEVTRFATTRKVSAFAGFDPMEDRSDERRRMGAISKQGSRWLRFFLVEAGQVAMRRDADLARVYQRVSRRGGHGKAKVAVGRRLLVRAFIMLRDEIDYAEFQRRGVAARSSRGSA

SEQ ID NO: 72035 - protein, 338 aa, unidentified
MEQARTVTRASRARIHKEGTTMTEATPIYVGIDVSQERLDIATTIQDKIWSVRYDDDGLKKVRTHLRRLQPERIILEATGKLERSLVAALAADGLPVVVVNPRQVRDFARAMGILAKNDRLDARVLARFGQSTKPALRPLADDARQALAETVTRRRQLVEMITMERHRTARTTPEVRRQIERHIRWLEEQLEKVDDDLQQRLQQSPHWQESNDLLQSVPGIGPTTAAVLIAQLPELGTLTHKQIAALVGVAPFCRDSGTFHGRRAVWGGRSRLRAALYMATLVAVRHNATLRAFYQRLVAAGKAKKLALVAAMRKLLVILNAMLKHRTPWCQNLPATT

SEQ ID NO: 72036 - protein, 440 aa, unidentified
MMNLWGLDNPNSIYTEALLFMKFKQSDKQNQRIEKITTDHLIIGIDIAKFSHVARAVDFRGIERGHYLAFSNDHIGFKALFQWIQALMDQHHKTKVLIGVEPTGHYWLNLAFWLQERQLELVLVNPFHVKRNKENRDNSPTKNDVKDALVIADMVKNGYYSKVRMLPESYREIRQLVHAREFILKQSGAVKNQIHRWVDMHFPELGLVFKDVTCKTALATLALFPLPSDIRDLSPTFIVSQWKKKLKRASLSTAKALIESAKRSTGLPGCSMSSKVCVHLLLSQLDFFQQQLAELEEKLGAQIQLIPTTPSLRTFKGISDMTLATLYSEAGDLRQFQHGSQLLRLAGLHLSENSSGLRKGEVTITKRGRPGLRRILFLTVLHLVAANPEFKALHEHNKHVKKMKGMQSLMKLCGKLARILVALAKDNQTYLPEKVKTLAA

SEQ ID NO: 72037 - protein, 343 aa, unidentified
MQVTTIGLDLAKHWFQVHGVDASGAVAIRKKLRRSEVLGFFQSLPPCLVGMEACATAHYWARELTKLGHTVKIMPPAYVKAYVKRNKNDAADAEAICEAVGRPSMRFVPVKDAEQQSVLMLHRVRNLLVRQRTMLVNALRAHMAEFGIIAPQGLRHVELLTKQVAHEQERVPELARSILQLIVDQLRDTMARVREIETRLAQWHRQSKVSQSIATVPGVGIMGASAIAATVADPSLFRSGREFAAWLGMTPRQNSSGGKERLGRTSKRGDKYIRSLLIAGAVAVLRHARNRPTRDGAWVRAMMERKPTKVAAVALANKTARIVWAVMMRGDGYRAKQVLGQPA

SEQ ID NO: 72038 - protein, 329 aa, unidentified
MQTVLHNCCGLDVHKNMITACIIKTRNLLDNEHKSEQAEKQIREFKTFPNSLHQLKCWLEEEDCHHVAMESTGIYWCPVYEVLEKAFEGDIEIRVVNARHMRNVPGKKTDIKDAEWIAKLLRAGLLAGSFIPDEEIRELRRLTRYRKNIIHDITKQKNRIEKELQRVGFKLSSFLSDVFGVSGRNILKVLTEKGCLTTEDVEREAIHIAPKKRAEIASEINGYLSESTRDFIKMQLGHLDTLYVNLREIEISVAKTATLFREDIDRLDTIPGIATTAATAIIAEIGTDMSKFPTAEHLCSWAGLTPGDNVSAGKKKVLVSAMETHTSKV

SEQ ID NO: 72039 - protein, 371 aa, unidentified
MRIGMDTSKSVFQLHGVDAAERPVLRKKLRRSQVLEFFRALPPTRVGLEACGAAHHWARQIGALGHEAVLLPAQLVKPYIARNKNDAADADGVCEAMSRPRMRSVPVKTAEQQAALMLVGVRDQLVARRTQLSNSMRGYAAEFGLVAAKGLDKIEPLLARIAAADGLPDLAKEMFATLGADYAELGVRLSRLDERLQAWQRQDETSRRLMEIPGVGPIAAALLVMKVPNPRAFRSGRDFAAWLGLTPKDHSTAGKQRLGVITRAGDEALRRTLVVGATAVIQQMRRGRGRASPWLTGLIARKPPKLAAVALANKTARIAWKLMVSGERYDHGRPARARAERSAALTEGFALRSALAATAVRGDAAATVREP

SEQ ID NO: 72040 - protein, 458 aa, unidentified
MRIIGIDLGVTAKHRAIVADERSEFISPIIKFASRLADLEKLRSRALQGVDPDHPLVVVMEATNIVWYPVAAYFLRQGATVHVVNPRLSADLARFYKRHAKSDRLAAKVLARLPLVSPDSVYPLILSGADYLALQRSCKELDRLTTHASAIKNRLQAIDHLGWPELKQRVFSAPLEPPARWFREHFYNPQRVVEAGVEGVRRAWRIAEAYNNDEEWIESLVTLAQEVQLLYGQPNVYVDYVALAAEVNREQRRLAALEAEVNYVRLKIARPLYRRLHASRNLETLKGVGQEGAAVYVSFVGDPGRFATSRGFRGWSGMIPRSAQSGEHEGKGLRVSRAGPDLVKKYLYLNADVARCWDPQLAAIYYTQMVKYGKHHSQAVCACATHLLDRIRVILTEDRPYELRDVDGKPVTTEQARIIIAERYTVPKEVRQRNNKQARRQRAERQKERKEERRSRSR

SEQ ID NO: 72041 - protein, 418 aa, unidentified
MKKKSGCTAKVDRVGEPRQGNGHCRLQRDVKELMAELVSKLSQKLELPGEQASHGRDPQEGVPGPNRGRLTVGVDLCDRWSSYCILGLDGETLAEGQLGTTPEDFAEFFQSMAAARVVMEVGTHSAWASDVVASCGHEALVANPRQMEGPKRRKRKNDRIDAHKLARAGRMDPQSLFTIKHRSAEVRRDLVAVRARDAVVTMRRDVINTLRGLVKGMGARLPRCSSTSFSKKIGGALPAEVSETLEPLVGLVETLSVCIKAYDERIEKLARERYPQIDLLRQVKGVGPLTALTYVLTLEDPKRFAKSRDVGAYLGLVPKQEDSGDSQPQLRITKMGDMMLRRLLVGSAHYILGPFGPDTDLRRYGLRLSAQGGKNAKKRAVVAVARKLSVLLHRLWVSKEVYAPLRHALAPATEPEAA

SEQ ID NO: 72042 - protein, 410 aa, unidentified
MLFIGDDWAEAHHDVEIEDESGRVLARRRLPEGLAGITTLHELVAEHLDPTAEPDQVQVGIETDRGPWVQALLAAGYVVFAINPLQVARYRERHSPSGAKSDAADAHLLAEIMRLDRAHHRRIAGDSQIAEHVKIATRAHQSMIWSRVRQVNTLRSLLREYYPAALAAFGTDLAGRDALAVLTVAPNPDLGRRLSQSRIETLLRRAGRQRNLSSTAAKIRVALSSEQLAARPGVIGAYTASASALLAVLSTMAVQTEVLAGQVEQGFGQHPDAEIYRSQPGLGVILGARVLAEFGDDPGRYVDAKARKNYSGMSPITKASGTKRVVLARFARNRRLGDALFLQAFAALNNSPGARAFYDRQRARGATHYQALRALANRLVGILHGCLRSHTLYDEHLAWHSQPDKLSPAA

SEQ ID NO: 72043 - protein, 338 aa, unidentified
MPIYAGLDVSDKATHICVVDIDGKVVRRDVVASDPEVLAKWLSRHCPDLVRVVLETGPLSTFLYHGLAERGVVVECICARHAKGVLSARVNKSDVHDAEGLAQLARTGWFKRVHMKASATHIDRAALRIRVQLITARTAMANQLRGLLKLFGLRMGTARTSGRRTERLAAIYAQRPDLAPLFAPLIASMEAIEEQLRASGQLLVERAASDPVCTRLMSVPGVGPITAVTFTATVEDPRRFARGQDVGAYAGLVPRRNQSGERDTSGHISKAGDPMLRWSLYEAANVLLSRVKRPFALQQWGTKLAEAKGAKRARVAVARKLAALLHSLWLNETEFRWA

SEQ ID NO: 72044 - protein, 401 aa, unidentified
MDARPVIGVDVGKEAHYAVALDGAGKQLKRTSLPNRQREIDDLVAWAKDLAAVVVADQPHGAAALLIHACWEAEVQVGYLHGLAMARARDFYEGEAKTDPKDAFVIADVGRLHPGRVHWLSPGAEERAQLELLCGHDEDLRADVNRLVNRLRGLMATHWPGVEAVLGERLLNTSICELLTRYPDPGQFQRVGHARLVRFLQDRRARRPELLVDKILAAASEQHTVVAGSTTAARLVANLAQELRHQLNRRQALGKEIESCFFEQPQAEILISLPGMGPRLGARVLVEIGDITRFESPSKLAAYAGLGPTPRQSGSSINTSAPSRGGNHRLKNALFLAAFASLSHPPSRAYYDRKRAQNRDHNEAVRCLARRRVDVLHSMLVRGVPYTWTQPDPSAISGQAA

SEQ ID NO: 72045 - protein, 355 aa, unidentified
MTSSKYIGMDVHKESISIAVRNAAGKIVMESVIQTKASTILQFIEGLRGEVHVTFEEGTWSAWLYDLLKPHVTKLVVCDPRRNALLKEGNQNDRVDARKLAELLQNNQLRPVYHGDHGLRALQELVRSYLTITKDLSRVMTRVKAIYRSWAIPCSGTQVYSARHRAEWLEKIREPGVRRRAETYYQELDGLRSLRQEVRKELLAESKKHEVWKRLGGIPSIGPIRAALLLGIMQTGHRFRTKRQLWAYSGFGVEGHSSADHQVVKGQLQRKKKPIEIRGLNKNCNHHLKNVFKSAAVVASTKPGPLQEFYAALVAKGMRPEMARLTLARKIATIVLIVWKKGVCFDANHLKPQTA

SEQ ID NO: 72046 - protein, 347 aa, unidentified
MLTIGVDPHKQTHSGVAVDPLGVQVAQRTVAARREGFGQLVEWARRLDGVRVWVIEDVRHVSGGLERFLIDRGETVVRLPPRLMANARNDVRERGKSDPIDALAIARAALREGVDTLPTARLAGVELEIRLLGLHRERLVDSRTRLINELRWQLHDLWPDWELPKRVLIQQGWQTKIAQRLRRAPGTVQVQIARDMITRVRELTRTITQLYEQLAALVTQAAPQLLAEKGLGVLIAAKLIGEIAGIGRFTSDAQLARISGCAPIPVSSGRTDRHRLDPGGNRQLNHAFHMLALTKILHDPRTAVYLAKQRASGKSNREAIRSLKRHLVRRVYHLLRDPSQVPTSISC

SEQ ID NO: 72047 - protein, 314 aa, unidentified
MLSPECFVGVDVSKAALDVAVRPAGVVWQMGNDKAGICELVRRLGQLEPVCIVLEATGGYERAAARALFKAGFPVAVVNPRHPRAYARATGRLAKTDRIDAQVLSQFGEVVRPRLLTSDNTAREELSGLEARRQQLREMVTAEENRLRTAQPNVARGIREHLDWLKKKAKQLDKEIEERMHSRQEWSMTEEILRSVPGVGPVLSAAIIAGLPELGCADRRQIAALVGVAPLNRDSGTLRGRRCVWGGRAPLRSVLYMATLAATRHNPVIGAFYRRLCAAGKPRKVALVACMRKLLTILNAMLRNRTPWRTSPVG

SEQ ID NO: 72048 - protein, 352 aa, unidentified
MKKYRKVEEKGKEVFVGIDLHRVQWHVTVLRGEEEVFSGSIPGTWAALRKLLERYEGMQISTVYEAGYFGYWLHDKLRAYGAECIVTPPSLIPQEYGNRVKTDRRDSRKLAFFLAKGMLKRVWVPTEEEVGQRQVIRRRRQLVGDRVRVQNRIKAELRFVGLDVGEPRGRWTKTYVENLRRIKFANRWIRESFDRLLEEYEFLSAQIEQQTKLLKELALTEQYRERVAILQTVPGIGLIAAMEILLELQDVSRFRRGDQLAAYVGLTPSQYSSADKVRMGRITAVGKNALRGTIVEVAWRLIAKDQEMRARYERLKARAGAKRAIVAIARMTLLRTRRMLLDHQPYKMGLAA

SEQ ID NO: 72049 - protein, 429 aa, unidentified
MRTESTPGARGPVFCGVDTHADSHWLCVLDWRGRRVLSRRFPADAAGYEALAGAIAAAGEPACVAMEGTSSYGAGLTRHLASLGMPVREALSPARMQRRRPGQGKCDESDAERAARAAMSGSKLGTPKSQDGWVDGVRCMLAARSGAVKARTSAINTARSLLTTAPEGLRSRFRGMAGPRLMEELPSVRAEGALGAALGALADLWAAARDAALDMELAIEASLEENRPALLAMYGCGPVSAAKLAVAAGDNPGRLRSEASFAAICGACPIPASSGKTVRHRLNRGGDRQANSALHEIARQRVMRDPETAEYAERARARGKSDREVMRCLKRYVAREAYRALMRPHEIRRPEDASELVAARRAARVSQVRAASILGTSEKYISMLERGQRELKPIRRAYEAWVEAGLPLDWDRQAFEAERKMDSKKHLAK

SEQ ID NO: 72050 - protein, 343 aa, unidentified
MNKIATVGLDIAKQVFQVHGADAQGATLFNRKLRRSEVLSFFEKLPPCIVAMEACASSHYWAREISALGHQAKILPAQYVKPFVMRGKTDATDAAAITEAMKRPDIRSVPVKTAAQQAATMTLRTRSFFVRQRANAVNALRGYMAEFGLVADRGIANFGKLVASLPERTDARIPPSARMMLDEILAEIETLTARIQRIEEQIAAHAKEDEDIRRLTAVPGIGKLTASALQAYVPDPGSFKSARHFSAWLGLTPKQNSSGEKSRLGRISRMGNGELRSLLYIGAMGVLSAARRFGTRSAWLRRLMDRRPLRVVAVALANKTARVVWALLVKGGTYHAPAELAGN

SEQ ID NO: 72051 - protein, 344 aa, unidentified
MPCYAALDVSQETTAICIVDEVGRILAEKKVATCPDAIAAYLNRKAPNLVRVGLETGPLSVWLWNELAARRLPILCIDARHANAALKMRPVKTDRNDAAGLAQIMRTGWFKEVRIKSRSSYQVRSLLVAREMLVRIRVKIENEIRGLLRTFGVLFGKRVGGFTGRADEIIAGELDASPEMRLIAETLMKARTSILDQIKVLDRRLMAVAKANPTARLFMTVPGVGIITALSVASSFDDASRFRRSSSAGAYLGLTPRRYESGETSRNGRISKQGSLLTRKHLYEAATTLLTRNLRFSTLKAWGLKLARISGFKKARIAVARKMAVILHAMWKTSTPFRWSQAVA

SEQ ID NO: 72052 - protein, 343 aa, unidentified
MQAVTTVGLDIAKSVFQVHGVDATGQVVIRRRLKRRYVQAFFEKLPPCLVGIEACASSHHWSRELKALGHTVRLMPPAYVKPYVKRQKNDAADAEAICEAVTRANMRFVATKTPEQQSGLTLHRTRHLFIRQQTAVINVIRAHLAEFGIVAPVGRKGVEELLNVVTDSSDKRVPVVARMCLAALGAQLRRLKEQILEFDRMIMAWHRSHEASKRLDVIPGVGPILATALVASVADPKAFRSGRSFSAWIGLVPKQHSSGGKDRLGSISKQGDRYLRSLFMAGALAVIRYAKIHGAKHRPWLTALLARRPIKIAAIALANKIARTVWAMMARGEHYKEPVVLAA

SEQ ID NO: 72053 - protein, 484 aa, unidentified
MQGVQEIPDEEHEQVLERVCAIDVAKTSGMVCTRVPRQGSKPGARVSRVWEVSATTRAVMGLAAQLVDLGIQKVTVESTSDYWRIWFYLLEAAGLDVQLVNARDAKNVPGRPKTDKLDSVWDAKLTERGMLRPSFVPPAAIRQLRDYTRLRVDLTRDRTRHYQRLEKLLEDALIKVSGVASKMDARSVRDMIEALIAGERDPTVLARLARGRMKAKYHALVEALTGRFDDHHGELARILLDQIDSLTRQIDQLTTRIDELICELPEAAASEPGDPTHQGTSVVVDRLTGELLAPEAAADPTDEGTTPVARQPNQRLGDRAALSAIERLDEIPGIDVCGAQIILAEVGLDMTRFPTADQLASWAKVTPRTIQSGARSRGGKTGKGNPYLKGLLGEAAAAAAKTQTFLGERYRRLVKRRGKLKALVAVARSILVIIWHLLADPATRFQDLGPDYYSNRIDKNKKIRNHVRHLEALGYTVTLNPAAA

SEQ ID NO: 72054 - protein, 416 aa, unidentified
MVSRGSGWKLLFVGDDWAEDHHDVCLQDAAGRVLAARRLPGGVAGITRLHELVAGHQDGDDPSQVVVAIETDRGPWVRALVAAGYRVYAVNPKQAARHREVVAVSGKKDDAFDAAALADMGRTRRHQLREVAADSDEAEAVKVAARAHQKLVRERTRQALRMRSALREYFPAALDAYAPLTLTGPDTLELLAKAPGPAAAARLTIAQISAALKRARRHDVAGKARQIRAALREQHLGQPEIVTEAYAAGVRASAAVITVLNEQVKVMEAMVESLFRRHPDAGIYLSQPGIGVITGARMPGEFGDAPGRYADVKARRNYAATSPLTIASGKKKTVHARFIHNDHLVNAMHDQAFAAISASPGARAYYDELRSREIDHTDALRRVANRQAGILHGCLKTGTGYDEHTAWGHRSQPAAA

SEQ ID NO: 72055 - protein, 350 aa, unidentified
MLYIGLDVHSKWMTVKGFNSETGELIEIKKQSNDAESLRETFGSFAGPLYGVMESGTNSWAVYRILEPFFEKLIVVDPATVWGKVVRRGAKTDGRDALTLAVKMQRSELEPLYVPDEQTQDKRALGRAKINASRHVTKTVNEIGSLLRSWGIVVGSSLLSVEGQKIIEDAKSRLPEYSLKVLEMWLRMLKEAQDAEAELESMIKTEAAKDEKCRLLMSIPGVGALTAFVVIAEIGDIHRFRSAEQLVSYCGLSPTISQSSDSIHYGKLNKFANKFLKYVLVLRAQGMARSKQNIPMRQTYWRVVIKGKNHAKIAVARQFARVIFSMLKNKTSWDGSKITDRRISQSQAAA

SEQ ID NO: 72056 - protein, 337 aa, unidentified
MNITVIGLDLAKNVFQVHGMDGSGRMQLRRQLKRPQVREFFANVPPALVGMEACGGAHHWAREIAKLGHTVKVMNPRYVKPFVKTNKNDRTDAEAIAEAASRHNVPAVAVKETWQQDLQSLHRVRSALMRDRVAVDNQIRGLLTEYGLVVAKGTKALRRAVPQILEDAQSGLSGLMREVLAEQYERSRMLERQLAEYDRKLTLAAREHESCSALMEVPGIGVLGATALVAQVNDARRMNNGRELAAREGLVPLHSGSAGKERLGRISKRGDGYVRTLFIHGARSVLNHAPRKTDRLSRWATEVMRRRGRNVAAVALANKMARIAWVVLARGQRYQTQ

SEQ ID NO: 72057 - protein, 373 aa, unidentified
MNHHSGAYVGIDTSKLRNAVAVAEEGRGGDVLYLGEIDTTEAATRKLVTKLAAKYRQLTFCYEAGPTGYGLYRLIRKLGHDCIVAAPSLIPKKPGDRVKTNRRDAVGLAKVLRAGELTAVWVPDERHEAMRDLSRAREAARKDLKGKRQQVSSFMLRLGRHFPGKKTWGPAHMNWLMLQKLEHREQRIVIEELLGAVRQESERVERLEQAIRDAVPEWSLAEVVTALQAMRGIDLVSAVTVLAEIGDLSRFQNPRELMGYLGLVPSESSTGDTVNRGGITKAGNGRARRILVESAWSYRYPPRVSREKQMKVAAAPGAVREIAWKAQMRLCGRFRSLTRKGKRPTIVATAIARELAAFIWAINREVMAHATAS

SEQ ID NO: 72058 - protein, 410 aa, unidentified
MDLLRREVPASSLVVAIDPGKAFNRVWLTTGEQGLIGEPVSLPVLRDGIEELQRLIVSSGVPGAPVIGLEATGALHRAWATEIEQRWPGSLRLFAPSETTAARAQLGSRRFKTDDRDCAALVWLLRQGAGRPAEPDKLEALLGTVRHRSQLVDARRVLRQRLHDQLNALCPGLSAPPGHGRAVKLESPTGQAVLACAAAFAGRAPSKRSLLARAPGRMTNATAEFWCQRWKQLLAPPGDAELRAERLAQDLRRFSQLRADIALSDTQLAGLLAETDGQVLTSLPGVATVRAAEFSAYTLPIERWPTPEHLYSATGLSPASYESSTITRRGRISRQGLAEHRNALMGIAWGLSQSSEAFRTRDAELRARGFRPIQARVALARNACRLAWRLLQSQHPYDEERYARTRRRGR

SEQ ID NO: 72059 - protein, 403 aa, unidentified
MIFVGIDWAEAHHDVCVLDEVGVVQAKGRVPDGVEGVARLHAMVADHAEDAAEVLVGIETDRGLLVGALVAAGYRVYAVNPFAVSRYRDRHGTSGAKSDPGDAKVLANLVRTDRHNHREVAGDSELAEAVKVLARAHQSLIWTRQRQVSALRGALREFYPAALRALPELGTVEACSILGMAPTPERGRRLTLAKVRRSLAASGRTRNLDRRAAEILEALLAPQLEAPPILSEAYGSVVGSLVVVIDGLLHQIARLETELAERFERHPDAEILRSLPGLGLVLGARVLAEFGDDPARYADPKARKNYAGTSPITRASGKRMVVLARVAHNRRLADACYLWAFASLNASPGARRYYDARRTAGKTHHQALRALANRLVGIFHGCLQHRQLHREEVAWPTGLDAVA

SEQ ID NO: 72060 - protein, 398 aa, unidentified
MLYSRNNLTLLYLFEFEQNVRNLAWLGIQNIQPGDKTKGDFSLFHFKLISMKKIVKQVAGIDVAQKELVVCLGRMYDDWTPELHASKTFLNTAKGIASFVEWAEKLTDASMPIRFVMEATGVYHESLAYYLDDHGLEVSIITPNKISNYARTLDVKTVTDKTASEAITLFGLERNLEKWKRPNSLFKRLRQLTRERDQLVQLRTIAKNQLHAELVEAEPNSSSVARMKKQIAFFNKQELEISSEIVELSKQDEKVSGAIKIICSLPGVGMLTAVTVLAETNGFELIRNKRQLTSYAGLDVKEKQSGTSVKGKPRISKQGNKYLRKAMHLPALTAIRLDERHKAIFARLVSRHGIKMKAVVVVERKLLEMIYTLYKTNKQYDKEYLKKTEVNFKEEVTV

SEQ ID NO: 72061 - protein, 343 aa, unidentified
MEQITTVGIDLAKNIFQVHAIDAAGRVVLQKAFRRPQLAAFFQKLPACLIGLEACSSAHHWGRLLTQFGHQVRLIPPAYVKPYVRRQKNDVADAAAICEAVTRPSMRFVPIKTEEQQAALMLHRARSLLMSQRTALICALRGHMAELGLTAPREVRNLRPLLEVLIDETDDSLPALARAALRPLADQLATIGNRIAELDHQLLAWHRANPVSQRLATIPGVGPVTASALAASIADPAMFASGREFSAFLGLVPKQSSSGGKVKLGGISKMGDRYLRHLLVSGAAALLSHAKTRRGPLDVWAKALVEKNKPIKLVAVALANKMARIAWALMIRGETFRLPAHAA

SEQ ID NO: 72062 - protein, 348 aa, unidentified
MKIIGCDFHPSYQQIVVWDQVSGEVVEKALSHERKEEVRAFYAGLQGPVRVGIEASGQSQWFEQMLGELGHEVRIGDAAKIRAATDRKQKTDRRDAELLVKLLEEGRFPQIWVPTPAERDVRQLLLHRHKLVRMRTQVKNQLQALALNQGQRKGKLWSVSGRKQLEALPLLPWASRRRAELLGLLDQLEKSLEELDRATTEQANTRREVRRLMTHPGVGPVTALAFVLTLGPPQRFRRGKQVASYFGLIPSEYSSGEGKQRLGHISKQGSSFVRGLLVEAAQSAVRHEPQLRREYQRLAQRRCRALAKVAMARKLAVRLYWMLREEVDYAQLIQGSRAGQPESFRGRG

SEQ ID NO: 72063 - protein, 426 aa, unidentified
MNLTQNDRLNQVTADTLVVGVDIGSQDHFARAFDYRGFEFTKRAFRFSNTGLGFLSFVRWLYELQNKTDTKKVIVGCEPTGCYWLTFQKFLNDHKIQLVTVNPYSVKKCKELDDNSPEKSDLKDPKTIAGLVKDGRFSTSYLPSGVYAEIREASVCRDMIMKQHVRLANQIQGWLQKYFPEYLECYKEWDSTSGLMLLKYAPLPQDIIKLGAGGINQIWRNAKVRAAGMKRAKTLVEAAQDSVGLEGGEAARLEIWILVNDYTSKVEQLTRLDEYLKEKVMEVPNVEKLLAIKGVGLSTVIGFVAEVGDIGRFTDPRQVQKLAGLEITKISSGKRKGQPGISKRGRRKLRRTMYESARSLINWNPAFLDVFLYYRNRERRPLGSMQAKIAVACKAIRVFFVIMRTGCDFDEERFRKDILRPEIEAA

SEQ ID NO: 72064 - protein, 376 aa, unidentified
MGWSGRAPAPPAIEAGKGRPDKEHTMPATAQTAVAVIGIDIGKNSFHIVGLDSRGAIVLRQKWSRGQVEARLANMSPCLIGMEACVGAHHLSRKLKALGHDARLMPAKYVRPYSKGQKNDFRDAEAIAEAVQRPTMKFVATKTAEQLDLQALHRVRERLVSQRTGVVNQIRAFLLERGVAVRQGLRFLRAELPRLLATPPDVLSPRMVRVIESLAEDWHRLDERIDHLSDEITALARQDAGCERLVSVPGIGPIISSAMVAAIGNGDAFSKGRDFAAWLGLVPKQISTGDRTILGKISKRGNRYLRVLFVQAAWVVLIKPQSWERHGLKPWIEAAKKRLHRNVLAIALANKLARIAWSVLARGRSFEARPAMASAA

SEQ ID NO: 72065 - protein, 343 aa, unidentified
MTKITTIGLDLAKNVFQLHGVDGSGAVVLKRQLRRAEVEKFFAKLPPCLVGMEACGSAHHWARVIGRYGHEVRLMPPAYVKPYVKRNKNDGRDAEGVCEAVGRPTMRFVAVKSVEQQATLAVHSTRALLVRQRTMAANALRAALSELGIVAAQGYEGLRKLIARLEEPNEDIPEVMRAALLVLAKHWQVLDADERVLEQQIAKQARCNQDARRLMEVPSVGPIIASTVLAKVPDAKLFRSGRDFAAWIGLTGKDHGTGGKHRPGRISKQGDRVLRTLLISGASAHLRQQKTRGVTDPWLCDLLARRPYKVAMVAFAAKTARIIWAMLVKGEPYCDRASASAAA

SEQ ID NO: 72066 - protein, 481 aa, unidentified
MKPHPLEKTKKATNHSTHSHWNQMNRKERREMIRKIQSDDLRLEVVHPDAAGIDIGNESHYAAVPPGRDSLQVRRFGCTTDELKAMANWLQLCGIRTVAMQSTGVYWIAVFDILEAAGLEVYLVNARDTKNLPGRKSDVQESQWLMKLHTYGLLRNSFRPSQQIRTMRTYWRQRNDLVRAAASHIQRMQKALTQMNIQLANVLSDISGVTGQAIIKAILAGEREPHKLAALRDCRVRASEEQIAQYLEGNWQEDLLFVLQQEQEAYEFCQQQMAACDRQLEQYLQQSEDRSQGASLPEEIRKGRLQKKGHKPQFDLRAELFRITGTNLTQIDGIDVLTAMTILSEAGWDMSKWETEDHFVSWLRLCPDNRISGNKIIGKGRLPTNNRANVALRMAATTLRTSNSYLGAQFRRFRTKLGSPIAIKAMAAKLARLVYRMLRYGMKYVDQGVKFYEAQHRQLQIRQLKWRAAKLGFQVVEAPAA

SEQ ID NO: 72067 - protein, 342 aa, unidentified
MIVKGTTKAVISYLEAIKQKHREELLFVCGYEAGPTGYGLCRGLQQAGFGCVVMAPTTMANPEGKRRVKTDRIDARAIARILAYKSYRQVYLPSEAMEALKEYTRARDAKKRMYKKAKQELLSFLLRNGSTYPESGKYWTEKFFTWIKTVQFSEKWMQEAFSEYLAEVYSLKAKIALMDAKIREIAELEIIKDGVDKLVCFGGIDVTTAVETVVEINDFTRFATAAQFVSYIGLCPGQDSSGKSKIMLPLTKAGNRRVRALFCESAKAIKRTNPYGEKSKRIQMRQKNASAEIVAYADKATKRIRTKMKQLEWRGKNYNVASAAGARELACFVWGMMNGRIA

SEQ ID NO: 72068 - protein, 416 aa, unidentified
MASDKNTPVLSVVHGICCGLDVHKREISACVVETHDDGTVENHLEQFGTFTDELVRLRDWLCELECPIVAMESTGVYWRPVHKVLEGYVGVVLVNARHVKNVPGRKTDIEDSRWLAGLLRHGLVRGSFIPPKEVRQWRELVRLRRTYVESLGDFKRRIHKLFECANVKIDSVVSDLFGLTGRNLMKLLVSGQPITLEQVKACARGQLISKVEELYRSIQGFFESHHRFQLSCLLKTVDTLQEQISSLQIRLRALTTGHDELVERLDEIPGIDQLSARAILAEIGPTLEAFPTAQQLCSWAGVCPGNNESAGKRHSGKSPVKKHPLKTILVDVAWAAIKKKGSYYQAKYYRLKARRGAKKAIIAIAHRILKAIYAIIKLGSRYRELGEHYLDRQTQARRLAKLKMEARQLGYKLVAA

SEQ ID NO: 72069 - protein, 357 aa, unidentified
MPRSTTHPRIAVAGIDIGKNTFHVVGHDKSGAIVLRQKWSRGQVESRFANMPACLIGMEACVGAHHLARKLTALGHTARLMPARYVRAYAKGQKNDFNDGAAIAEAVQRPTMKFVAVKSVDQLDLQALHRVRERLVSQRTGIINQIRAFLLERGVAVRQGIRFLRAELPNVLATRSDVLSPRMLRIIEGLAGDWRSLDARIDELTEEIKTIAATDVDCRRTMSVPGIGPIISSATVAAIGKGDVFSKGRDFAAWLGIVPRQISTGDRTILGRISKRGNRYLRVLFVQAAWVVLAKPQMWERYGLLAWIAAAKRRMHPNVLAIALANKLARITWAVLAKGRNFEMTRKSKSNAAPQPA

SEQ ID NO: 72070 - protein, 340 aa, unidentified
MNEITTVGLDLAKHVFQVHGVDAEGTTVLRKQLRRGQVLAFFSRLPRCLVGMEACATAHYWARELRALGHEVRLMPAQYVKAYVKRNKNDAADAEAICEAVVRPTMRFVPAKTAEQQAAVLLHRGRERLVRQRTMLVNALRGHLAEFGVIAPQGLRNVGRLIAIIRDEEDARLPGLARQVLQVLAVQIEQLEAAIAALEKQLMGWHKSNPVSQRLATIPGIGPIIATAIAAMVAEPSGFRSGREFAAWLGLVPRQNSTGGKNRLGGISKRGNQYLRRLLINGASANLLRSKATNADPWVIGLRRRRPSLVVAVALANKTARIAWAVMHRQENYQRMATAA

SEQ ID NO: 72071 - protein, 345 aa, unidentified
MLIIGCDYHPSMQQIAWWDSQSGERGERRLEHPSGEAESFYRELKQRAMAVRVGIEACGHTLWFERLLAELQMELWIGNPAKIAVQRVRKQKTDRGDAQHLLQLLREDRFPKLWIPSPENRDLRQLLWHRHRLVQMRTRVKNQLQAMALNQGVQRHSRLWSKAGRAQLESFALAPWMARRRQDLLQLFDQLTPQIAELSQAIEQEAERRPEVRRLMTHPGVGPITALAFVLVLGTPQRFRCGKQVGSYLGLIPCEDSSGGKQRLGHLSKQGNTLLRYLLVEAAQAAVRCDREWRRRFVHLAMRRQRNIAIAAMARKLAVSLYWLWRNAEDSPAAPPSGSHVGQLD

SEQ ID NO: 72072 - protein, 343 aa, unidentified
MKQYAGIDVSLEASSVCVVDADGWIVREAKVSSEPDALISWFAGHGEAIERIGLEAGPLSQWLYAGMREAGLPVELLETRHVRDAFKAMPVTTDRNDARGIAQLMRLGWFRPVHCKSLPAQELRAVLTARKLVQGKRHDIEMSLRGILRGFGLKVGPTTPRSFEGRVRQLVEGHPTLLAIADALLLARATLAEQLGKLQKRLVSLASDDTRTRLLMSTPGVGVLVALTYVAAIDDPARFRSSKAAGAHFGLTPKKYQSGETDITGRISKIGDASVRTALYEAANVILTRPVKGSTLKSWAMRVAKRAGMRKAKVALARKLAVVLHRMLADGTQFAADKAAAAI

SEQ ID NO: 72073 - protein, 355 aa, unidentified
MDSKKYIGMDVHKESISIAVMNGAGKIVMECVIETKASMILQFIDGLRGDLQVTFEEGTSAAWLYDLLRPRVTKLLVCDPRKNASMREGNQSDKIDARRLAELLRLNHLNPVYHGEHGLRSLKELVRSYLTITKDLGRVMSRVKAIYRSWAIPCSGKQVYAPRHRAEWLGKINEPGVRRRAEFYYQQLDALRTVRQQVRRDLLAESKKHQTWKLLCQIPSIGPIRSAVLLGILQTPHRFRTKRQLWTYSGFGIETQSSADHRSVDGQLQRVKKQSSIRGLNRNCNHDLKNLFKGAAIVASSKPGPFQEFYTALLTKGIRPEMARLTLARKIATIVLMVWKRGACFDARHLKPQTA

SEQ ID NO: 72074 - protein, 375 aa, unidentified
MIATTRPEMSVSEPTLYVAFELGKKDWKLAMTSGFGVAPLLRNVTSGDWRGVERALAQGRARLGLPATAAVVSCYEAGRDGFWIHRALEARGVRNRVVDSASIEVNRRARRAKTDRLDALKLVQMLVRVCYGEKNVWSEVHVPSAAAEAARQVSRERTALVHDQTRLINQMRGWLATWGAPLPPRRASGWWTTVRDWAGAPLPVEVQARLARAEARLAVLAGQTVQLEGQQQAAVTAAAPASAVRQLVQLKGIATTSASVLLDEGLVWRAFRNRRQIGGLLGFTPTPYDSGESKREQGISRAGNNRLQTISIQLAWNWVRWQPLSALTQWYREHFGTGKRARRIGIVAVARKLVIALWRYVTTGVVPAGAILKAA

SEQ ID NO: 72075 - protein, 328 aa, unidentified
MHFIGNDVSKLTLDLAYFDQRNEAWSRDCKLDNNPKGWSTLIQWAEKQTQASREDICIVMEATGVYHLKAAAYLSRQGLNVIIANPQQASQYAKSQNRQNKSDKLDARSLQEYGSQLKKYHLFIPDAPEISQLKALLSRMHQLDKDLRRERNRLEKCAFQEAGSIAQTSIEQSIKFNLSEQQRIQKQIDQLIKQNPVLRHNQKLLCSIKGIGKLTSQWLLPLLSTQRFNNARETAAFLGLVPCHKSSGTSLNTRGRLSGRGDANLRARLFMPAVCAITHDPAMKAFYQQLVAKGKPSKVALTAVMRKLVHVCYGVIKHQTPYIENYAA

SEQ ID NO: 72076 - protein, 349 aa, unidentified
MLAELVDAVVGVDTHRDTHQVEIALPNGAPIAVTTISNDTTGYAELLAWIVDHAPGPRLAVSIEGTRSYGVGLARAAAAAGLVVLECEQPHRKARRGRGKSDPIDAHLAVLAALRLDADRLPTPRADGDREALRILLGARQELTTASTAQTNRLRALLLGGDDTDRTLARGPLTDPRLASLSRRRPPREASREQAVRHAEIRRLALALREAARAVKANRAQLQTIVNDVVPGLLERRGIGPVSAAQAIVSFSHPGRCRNDAAFAALGGASPLPASSGRTVRHRLNRGGDRALNRALHTIAATRMRSCPTTQAYVTRRTAEGKTIREIEDVPKFVGLRWRPIDRQAAFTV

SEQ ID NO: 72077 - protein, 387 aa, unidentified
MARKRTLSTLDTSIAYEAVGLDLAKEDVALAAFDSDHKEPYLIDRIPYDKLYELLADMAPTLVAMEPCSGAHQIAEQIQELGHEVMMISGRHVQAWVKDHCNGQKTDLNDAFAILNLAYDRWLTPIRGKTREECRLLALQASYRQLKGQRTKTMVHVKATLHAWGFPIRAGSFNQKVLHELIDANREAFGDEVVETLHLMINRVRDLDHDIATVLKLLTEATKRDPRASLLRSIPGFGVLTTSRWCAVVGDIARFDTPKQTMAFIGLVPNNRITGHHTETSSGREARGQGKMSKRGDKMLRSLCILGAGALCLMVRNDRLPDCPFVASIKERLASPRPWFKVLVYVAAKLVRIATALLKYGETFSFEKAGISKAVLKQWELEQAKAA

SEQ ID NO: 72078 - protein, 477 aa, unidentified
MRPTCRGRLTVVCFNPSTKLTRVRPAELIVARSKELSTRRKFVSYFAPLVGRGSDEERLLREVGTGMQVVHERCCGLDVHKKTVVTCILITLANGEVQRHIRTFSTMTAGLLALSDWLESLAVTVIAMESTGMYWRPVFNLLEEGRSVILVNAQHMKAIPGRKTDIKDSEWLADLLRHGLLKASFIPPAPIRELRDLTRYRKSLVQERAREVNRVHKVLETANVKLSSVATDVLGKSGRDMLSALIEGTTDAQILADLARGKLRKQLPQLQQALDGRVQAHHRLLLKHILAHIIFLEETLEQLQQEIEQHLGPLEEAMTLLMSIPGIAALAAAAILAEVGDDMTRFPSAKHLASWAGVCPGNKQSGGKRLSGKTTQGNATLRAMLAEVVWVISHMKDTYLSAQYHRLARRLGKKKAVVAVSHSLLVIIYHVLSTKQPYSDLGADYFEQRDSTRLTQRSVRQLEALGYTVTLVPKEVA

SEQ ID NO: 72079 - protein, 360 aa, unidentified
MTSTAPASLPQVTIGVDTHKHLHVAHAADELGRPLGSYTMPTTSIGYGDFLAWAQGLGELEVVGIEGVGHYGAGLGRALRAAGLRVTEVGRPNRQRRARHGKTDSVDAAGAAAMVLAGEDLGDPKTADGITEMLRVLRIARVSAVRARAKAFNALKDLIVTAPAELREQLAGQHKLHLIGACAGLVTSEIPSTPAEAMSIALKSLAERCRQLDAETKTLDTQIEVLTAHACPALRQVYGVGPDTAATLLVALGDNPERIGSDAAFAKLCGVSPIEASSGKTVRHRLNRGGNRDANRALHVVCVVRLRRHQPTRDYLARRIGEGRTKPEIMRCLKRYIAREIYHAVLLTRQEIPSQTIATT

SEQ ID NO: 72080 - protein, 446 aa, unidentified
MKKSSRMSVIHPHAAGVDIGAEFHVVAVPPDADAAPVRTFQRFTGDLHRMSGWLKTCHITTIAMESTGVYWLPAFEIPEAAGFNVILVNARDAKNVPGRKTDVNDAQWLQKLHSFGLLRASFRPEHDISVLRSYLRQRERLTEYRAAHIQHMQKALMQMNVQLHHAVSDITGVTGLSIVRAIVSGERDPSVLIQYRDVRCKKTPEVLQQALTGNWQPEHLFALEQSVAFFDFYQEKIRECDDQIETSLLQLSTGTEEPEGVLPSARHRTKQPNQLSFDVRPLLWKITGADLTQIHGFGPYLALKFVAECGTDMNRWPDASHFTSWLCLSPGNKISGGKVLSSKTRRSSSRIAAALRLAATTIGRSDTALGAFYRRLSSRIGKAKAVTATARKLAILFYNALKYSQKYVDPGADYYEERYRNRVLDGLKRRAKSLGYSLQQDPELCV

SEQ ID NO: 72081 - protein, 340 aa, unidentified
MKDQEDVSDVVRTKKRTAMRYIGIDVSKATFVVAYSSDTGGEIRTFNNTTAGIRQFIGTLPKDGSIHCVMEATGNYSALLLYMLNVAGITVSMENPLKVKNFAKAMLSTIKTDKSDARLITLYGEKMNPRPFKVQGEAILRLRQKRTVIRQLTKQITAMSNLRGSLACLPVPDKGATHTVDETIKFLEKKRDRLQSELTDLVEVEFSRQLALLTTIKGIGITLATALIITTGGFTYFQNAKQVSRYLGICPTYEQSGTSVNIKGHINRNGDAYTRGLLYIAAWPASRFNAQCKETYTRLRQNGKSGKLAMIAVANKLVRQAFAVVAHDKEYVDGFVSNRP

SEQ ID NO: 72082 - protein, 475 aa, unidentified
MNIKGTKKKNQVVTANIFEQQELLKKAEVIKENLTASTWRELETNGKFDKNKKLSFISDDMLILGCDVGSETHYVRAIDTRGRELSKSAYSFNNDYEGFQSAKEWAVKIAAEHDKGQIVLGLEPTGHYWFCLATWMIANGISVVQVNPYAVKQTKEVEDNSQLKDDRKDPKLIANLVKDGNFGMPYLPEKIYAELRRLSMFRDQLNEDRIRTINRMHREMKIYFPEYKDALGKVDGAFSLELLKEAPFPDELTALGEEGIRQIWHAAKLRGRGYSRAREILQYAKASVGIKDGSIASKVAVKWFVQKIMELDVELAVIENQINQKCQEIPHTGNVLEISGIGENTLSGILAEMGDISRFDDVKEIQKLSGLGLVACSSGKHKGETKISHRGRKRLRYWLFQAAKSAVAHAEEFKELHMYYTTRADNPLKKMQSLIVIACKLLRIIYTILNTGTKYAPKKMLMDIRRPENKEAIVA

SEQ ID NO: 72083 - protein, 465 aa, unidentified
MRTDTKLWRSRKAKQELARRLQSENPGLEVVQPHAAGIDVGNSAHYAAVRPDRDSQPVRRFECFTADLYRLADWLQNCGVKTVALQSTGVYWIPLYDILEERGFQVYLVNARHTKNLPGRKSDVQESQWLLKLHTYGLLNNSFQPPSKIRILRTYWRQRLQHVTGAATCVQRMQKALTQMNIQLANVISDLSGVTGQLIVRAIVAGERDPWKLAELSHPRIQASREEIAKSLEGNWRQELIFVLQQEIQMYDTYQQRVAECDQELQKHLSAFADTVSPPVKEELPPKKKKKQNKNNPHFHLAAELQRISGVDLTRIDGVDVMVAQTLVSEVGLDMSRWKTEAHFASWLGLCPDNRISGDKVLSRGTRHVLNRAATALRLGASTLLKSQTYLGAQYRRLRSRLGAPKAITAMAHRLARLVYRMLKYGQHYVDKGAEYYERRNRQQQIEFVRKKAAQLGLKVTPAHA

SEQ ID NO: 72084 - protein, 342 aa, unidentified
MEQYVALDVSLKEISVCIIDSKGEVVFEGKTGAEPAMLVELIRSKAPQVKRVGLETGATSPWLFHTLASAGLPVVCMDARHAHAALSTRPTKSDRSDARGLADMLRMGWYREVHAKSVTSHERRTVLGARHQLVTMRSELDAQIRGILKTFGLILGTGNKDTLIQRAEKLVAGHPVLSGLVAKLADVRRHVTSQIAAIDRDIRHLVHTEPTLKRLISVPGVGPITALAFLSAVDDPSRFKHARDVGPYLGLTPTRYQSGETDRQGRISKCGDTFTRTCLYEAAHVLLTRVHRFSPLKAWGMRLAKRIGGRKARIAVARKIAVILHCIWTDGTEFWWTREKSA

SEQ ID NO: 72085 - protein, 307 aa, unidentified
MFIGIDVAKDRLDVHLRPAGEALTFARDSEGIEALAARLLDLKPVLIVLEATGGFETVVAAGLAAAGLPLAVVNPRQIRDFARATGRLAKTDPLDAAVIAHFAEAVRPPVRPLASADAQVLGELVARRRQLMGMMTAERNRRRQLTAKRLIKGIDRILAALQAELSELERDIGDAVRGTPAWREKEDLLISVPAIGHKIARTLLAELPELGTLGRREVAALVGVAPFNRDSGKWRGRRTIAGGRAVVRSALYMSVLVSIRRKLPLFATYQRLRAAGKPAKVAIVACMRKLATILNAVLRDRTPWQTA

SEQ ID NO: 72086 - protein, 373 aa, unidentified
MVYQHYWVGLDAGHLETAVCLIDAEGGILFEAICETKSGPIRDILRRFGVEAAQCLTIEAGNGTQMVRELRSYGFPVQVVDVRKSSKFLAIRRQKTDVHDARGLAELGRLARSMGSQVFVKPMEHQNIRTLINVRRTMLKNRARTDALIQSIFRLYGGNVKLLNGRGALAAEVNDQVRKMRQHELEIGVNLQPLVEIAEALREQISILDRQMRDIASNNPTCRNFQTIPGVGAVIALSFYSAIGDPYRFERSRDVGAYLGLTPTLYQSGATSRRGRISRHGNKLTRMHLITAATVLLCRIEIESRLRTWGLELAQRVGFLKARVAVARKLAVIMLGMWKSGSPFRPDGTSSLFLQQEEAGLDPVLISGTQISL

SEQ ID NO: 72087 - protein, 341 aa, unidentified
MRTTYVGMDIHKNFIQAAALDEQGNIIKEQKFKTDEKEIQRFVKSLKAKKIRAAIEATCTWYHVYEILDALDVETTLVNMRRTKTIAESKIKTDKLDAKTIAHCLRTGFIATAYIPPKTIMEQRNLLRHRMSLRKEIIRYKNKIHAILLRNGIHYPDYSDLFGMRGMKFLQHLTLPDSEQYSLTSYLNIVKTLLHEKTQTSKNIEVLCKNNKQAMLLTSIPGISYYSAMIILTEIGEVQRFPSPKKLCSYAGLVPRTIQSGNHVYQGRILKECNHNLKWILDQCTHIHIRHCPNSSITRLYHRIETKKGAGKATVAASRKLLTCIWHMLMKDEMFKYSNDD

SEQ ID NO: 72088 - protein, 380 aa, unidentified
MRIVPTAPSLFECVGEGCLRPPQSREGPTALILDCGDLTKHPYFVGLDVHKQIIAYCVKKVDGQLVTEGTIKATRTALAEWVKSLPQPWVGGMEATMFSHWIYVALQPHAAELYMGHAARMKAISAGKKKSDKLDSRTIADLLRCNVFPKCFVIAPELGRLRQQLRFRQLVVKQQVAFMNKTAGLLMETGIEYERRRLHGKRYFSELMATTHWVNQELKPLLKFSRQQIESLAGMDKRLIRMLEKHPQLRARVAALRTIEGVGPILALSWALETGTPERFPSIKDAQSYCGLTSAFWESAGQQKRRPLSKQRNQHLQTVLIEVANLAPLYNEKLKALYQKEKAAGADSNQATLEVARKLVAYLLAVDRAFWRSAQLKRAA

SEQ ID NO: 72089 - protein, 382 aa, unidentified
MKKEASVEPLEPDRHRCAKVEVSINHLRDRGTTMTNVTTYGLDLAKQVFQVHWVDADTGEIHRKRLARSEVTAFFGQAHHGVVAMEACGSAHHWGRLLHELGHEVKLIAAQFVRPFVKTNKTDVADAQAIWEAVQRPEMRFVAMKSESQQAVLSLHRLRAQWVKIRTMQTNQLRGLLSEFGVVVPLGWRALLKTAAARLADDASPVPELLRNELLEQFAAVRDATRKIDRLEQRIESWHRAEGECQRIAAVPGVGPLTASAVVASVANARQFRSGREFAAYLGLVPRQSGTGGRVRLLGISKRGDEYLRTLFIHGARSVLISHSRQHRDRPLDRWLEALLARRPSNVVVVALANKMARTIWALLAHARTFDPSWGRSAIASN

SEQ ID NO: 72090 - protein, 418 aa, unidentified
MFKIFRKNCCGLDVHKTWIYACIGITDANSRTEYFQARFSSFSKGLQELSHWLDKYNCKQVCMESAGKFWIPVFNILEKTCLVTLAHPKYTKPQKGNKTDRKDAKWICDLFMCDMIKPSFIPPPAIRHLRDLVRYRGKLTNMLTGEKNRAQNCLTVSNLKLDDVFADVFGKSARSITEYILAHPGEPFDVAQFVDRRCKSPLSEIQAAVDGAVSPEQAVKLRQCLDHIDQLRLLRQRLEQEILRICEPFADILQLLRTVPGLGNDPMTAIAVLSEIGGDMSVFPTAKNLCSWAGCCPRNDQSGAKVKSTRISRAGSYLKPLLVQVANALIHSRKHPEFAERYRRIKARRGHKKAIIAVCKMLLTAIWNILSKLVPYSPAGFLSTSHDLPPSKSLTVAQGLSLLRRRGFILTDDPLSAP

SEQ ID NO: 72091 - protein, 441 aa, unidentified
MEKLRVNAGGIDIGAKKIFVSVEGDQVQSFDTFTEDFYQARDYLLSKGITTVAMEATGVYWIILYEILEAAKIDVWLVDGRQTKQVPGRKTDVKDCQWIQQLHTYGLLNRCFVPDEQVKEIRSYYRMREDHIRTASMHINHMQKALTEMNIRLKEVLSQIHGTSGLNIIKAILDGERDSKKLLKLCHKTIRDKKGDLVVKALEGHYTEAGLFALLQAYQGYLFYQDQISECDKRIQQVMEESNLYHQDKGAKEEIDSIKGRKPIRHNKPQIDNLGGHLIKIFAGKDATNLPGITDYTWLQLYAETGSDLKKWITEKHFTSWLGLAPGQHSSGKMKKTRNKKYRPKAGQIFRQIAQSLIESKKIALGAFGRRLKAKRGPGIAVKSTARKLAVLYWRLMVKGLDYTEKGIKLYEEKINLQKEKWLLKTANEMGYQLTAYQNVR

SEQ ID NO: 72092 - protein, 339 aa, unidentified
MIVIKQNVGVDISKESFMASFVVLFSNQEISHKGIKKFENTKSGIASFRKWIKHLSTEGIEIHITLESTGVYHELLAHMLNNKDNIILHIELPNKVKKYNESLDIKAKTDKIDSKNLGRLGIERTLKQWKLSPEIFLRLKVLTREKLQLIKERTMIKNQLHAYTYSAKKTNTSVTRSKNRIKYIEKQIESIEKEIKKEVSKDENLSKKIKKIQTVPGLGFFTIVSVIAETEGFANVKSIKQLTSYSGYDVVIKESGKWKGKSRISKKGNSNIRYYLHMPSLSAIQHSQTYKRVYERIMEKKEHKMIGIVAVQRKLLGLIYTLWKNDTEYIENYQNENVA

SEQ ID NO: 72093 - protein, 398 aa, unidentified
MSKTPLEIRVGTDVGCHGHNVAIGLSSGELLDEFDVSHNPEGFQLFFSRIEKQQLKYDCPVSVAMEGFNGYARPLDTLIRARGYRLFNVNNLKLARFKEIFPGAAKTDKIDARKCLELFQLGDFLPLAKDALQEVAATPLENEILKRLTRRRRRLVSERARLLNNMQCDLQAVCPGLLEITGEAGNLWFLRFLTSTDSLIKLARLRRATLLKIAGVGAKYATTIQSWQKRAHFSHEAELVGEMIQDDAFRILELMDQICAIETKMKDVACRSMIAKKISTIPGFALVAKSELAGEIGTIDRFKDDAALALYLGMAALDNSSGKIKGTKTPRHVNTRAKAVMMIAVDRHRKCVPESRNFYEKKRAEGKKHNQAVRALGRHLCRVIFKMLKQEKDYEIRK

SEQ ID NO: 72094 - protein, 409 aa, unidentified
MGVYCGIDWAEGHHDIAVVDDTGALLAKRRISDDPAGLAVLLQVLADCGDTSAEPVPVAIETARGLLVATLRASGRPVYAINPFSASRYRDRHSASGHKSDHGDAMVLANVLRTDRAAHRPLPDDSELAQAITVLARAQQDAVWDRQQLGNRLRSLLKDYFPAALVAFHGRRSGLAEPEARLVLTAAASPTQAARLTRPQLRRLLVRAGRQRYVEFEVARLREAFRVDALHHPDLVEQAMSRHALALLGQLDAACQAVEALTAVTEEHFERHPHAEIITSFPGLSTVSGARLLAEIGDDPSRFIDPAALKAYAGAAPVTRASGRSRAVLHRRVKNQRLASVGYQWAFATLIPSPGARAHYDRRRARGDRHNAALRNLHNRLLGCLHHCLHERQPYNEQHAFAGVQPAAA

SEQ ID NO: 72095 - protein, 462 aa, unidentified
MTNSQFKARKTSKRNQRVKTAKLPRSLGKLNLNAAGIDIGATEHYVAVPQGRDKDIVRSFGTFTADLQTLADWLDECNIQKVAMESTGVYWIPVFEILEHRGFEVKLVEPGKLKSVPGRKTDVLDCQWIQQLHTYGLLQGSFVPVESICILRSYMRQRGMLVDCAGKHVLHMQKALMQMNIQLHHVISDITGATGLRIIDAIIGGERDPQKLSKLRDPRCKKDEHTIALALEGHWRDDHLFVLKQALELYRFYHSLLGALDQKLESYIKTFEDQSDGRVLPSSPKPKAGSNAPSFDMCNHLYKMSGVDLTTIDGISGHSALQLISEIGIDISLWPTEKHFASWLCLCPGNKKTGGRLITGKSRVSANRAAAVLRMAAQSLSRADCALGAFYRRMKSKLGAPKAITAAAHKIAKIVYNMLKYGRQYVDVGVEYYEKEYRQRVLKNLARRASQFNLCLVPAENK

SEQ ID NO: 72096 - protein, 340 aa, unidentified
MEGLYAGSDLHGNSNFLGIIDAQGKRVFKKKMPNELALIRETLQPFQGELLGIAVESTYNWYWLVDGLMEEGYRVHLANPSAIQQYSGMKHSDDRHDAFWLAEMLRLGILPEGYIYPKEERPVRDLLRKRGHLVRLRTSLIISLQNILSRNLGRKVNVNDVKAVKEDRISVLLEMDEDLALAGRVSKEAIDHLTRQIHKIEWVVQKRIVLKEPYRYLLTLPGVGKILSLTIMLETGPISRFETVGDYVSYCRKVPSQWMSNGKWKGAGNRKNGNKYLAWAYSEASEFARQLYPEPRAYYNRKMQKTNAACAHSALAHKLARAAYYIMKDHVPFRPEKLFG

SEQ ID NO: 72097 - protein, 496 aa, unidentified
MNNCAAKNLRSVHNGAGRIAPGGSRSLASGPKRTSLSSPARSGATAPMSERTIAPEAPCIRTTRAVARCERPKRKTVKTWTEITHYAGFDWARDHHDVVVVDPQGNITSEFRIAHTLVGWQQFREKIQGYGAVAVAIETSQGAAIDQLLQSNVTVYPVHPLSAKRYRERKAPSGNKTDHLDAWALADALRVDGQGWSTLQPLDPLTQTLRLFCRDEMALIEHRTALVNQLQQALSEYYPAALEAFDDWTRPSCWEFIIHFPTPHQLVKAGKRRREQFLHVHRLWRPETVNKRLEIFARAEQFCGSEPVTAAKSFLALSLAKLLCTLEHQLQEYRKQIQALFEQHPDHDLFGSLPGAADKLAPRLLGELGGDPDRFESVAVLQMLAGTAPVSFQSGQIHKVRIRYQCQKVLRYVVHLWANSCRKSCSWAQVYYRQKRAEGKSHACALRCLGQRLLKILHAMIRTRTRYNAELHARNQQAHGSWVLKLVTKQAPLGSE

SEQ ID NO: 72098 - protein, 406 aa, unidentified
MQGPVITVDVSKGSCHYQPYVSNGHPMRKPKVLHDTVEGFQSLSDLIDTMKDRYECETIPVIFEATGVYHHCLQKYLDDHQIPYYIISPLMSASYRKTTPNSNKTDDLDCSHIAKAYYGECNLFPYDKPSKSFHNLRELNRYYECELNHLRMRKNTFRKYLDIVYPRLDKCFKGHSSLYDEIPMEVIKQYPHPSLLLKHKEETIVKKIEKKTSHNALFIQNIVHEMYECSMHCYSGADVTDVESMILPELVDDLQSQKERCDEILKQLVSEAQKTPYFTSIVSIVGIGDNLAARIIAELGDMSRFSCRRAITAYAGLNPKIRQSGDMDGIHLAISKKGNKHLRCLMYLAVSCNYRLKKGDVLYEFNQKKRQQSFSPLKPKAATIATAHKLLLIICALCTNGTVYHS

SEQ ID NO: 72099 - protein, 317 aa, unidentified
MKTVPFEQVILRGCGIDVHKDMVVATISGEGLKTETRSYKTFSSSLTELKEWLLSSGITHVAMESTGVYWKPVYKILECPDMKVWIVNARHIKYVPGHKTDKKDSAWICKLLLAGLLKPSYIPEREQRELRDLTLYRNKLIQHVSSEKNRIVRILEDCNIKLSSVVCSLDGVVANKQIDMLIDKGHVTMDDITCIYHKKLEASPELLYQACEGFIEPHHIYMLQTIRKDMEQTKAIIADLTCRIKEVLSPYENVMELLQKIPGLSRKTVEDLIAEIGVDMEAFPTEKHLASWAGVCPGNNESAGKKKVVEPPMATNS

SEQ ID NO: 72100 - protein, 346 aa, unidentified
MYYIGMDCHITTLDFAVVNEAGQLIKTKSVATGVHSFIEFVKTVPQPRMIYMEEGTLAAWVFETCVRYKEKLVVTDPTKNRWIGSSGQKNDPLDALKLAQLARGGYIKEIHHSVGQRQRFRELMEAYYYTVKDTTRIKNKIKAKFRQNGIRCTGATVYLEKYREEWKGKLPQETTPLLILEGLWRQLEQSEQNEKDILTAAKVQAKQYPEIRYFEAIPGIGFISAATISAILETPHRFANKRKVWMYAGLGLTKKSSGGKIYSEKLTTNYNHLLKYTTKQAAEVAIRATDNPFRRKYLDMTLIHGIASHRAKLTIARDILATIWAMWRKGEKYNPQIRETAIYKQG

SEQ ID NO: 72101 - protein, 419 aa, unidentified
MLKIVHPICCGIDVHKKFLVAAIAITDSNNVTTYVKRRFSTFNSDLIKLRDWLLSYNCFEVCMESTGKYWIPIFNVLEKSCHVVIANPKYLRAIKGQKTDDKDATWIADLFKFDIVPSSFVPPKDIRMLRELVRYRSKLIGHRSSEKNRLQNAPTVSNIALASVVSDSFGKSASSIIEYILTCDTFDPEYCKSLLHKSLYKKADEVIQSIIGYELRVDQSVKMKVCRKHYDFINLCVSELDKAISQLAKPYQDLIDISVTLPGITEKSATYIIAEIGTDMTVFKSDKHLCSWAGLTPQNNESAGKKKSVHVSRAGVYLKPLLIQCANAAIRDKKNPYFRLKYERIKKRRGHKRAIVAIARMILTCLYHMLLKREPFNPSDADYTNMPEKLYQKHKQQYIKKAIKLLEKEGCTIIPPKIT

SEQ ID NO: 72102 - protein, 330 aa, unidentified
MDVSKLSFDVSLIAVLKGQKQPIVVSKFDNDSVGLKCFKAWLDEHNVTFDANSILVIENTGIYHRQIWNFCSTHLLPIYIGNAADLKWSFGIARGKNDKVDSMRLCDYAYKNHEDIKPTASLNKVLITLKDLLSNRSKLLKLKNAIKQTLGELKGSNDKATQSLMENLNKAALDGLKKSIKQIDAELLKIVNQDESILVNYKRMLSVPGIGKITATFIICCTNNFAIKVTGKQLANYAGVVPFDNTSGTSIKGKSRVHFMANKALKSLLTMGALSAIQTYPEFTDYYDRKITEGKKHLQVLNAIKNKMLLRVASVINQQKDYVNNYKKAC

SEQ ID NO: 72103 - protein, 433 aa, unidentified
MLKTVYPNCAGLDVHKKFVTVCRLTVNADGLRHAELREFSTMADDLEALATWLAEGRATHVAMESTGVYWQPIHNVLESRFEVFLVNAQSIKRMPGRKTDMKDAEWIATLMQHGLLQRSLIPDKARRELRDLTRYRQSLSEEHTRFANRLQKVLEGTNLKLASVATDIQGVSAQAILRAMLDGQTDVKVLAELAKGRLRNKRAELERALKGKITPHQRFMLTDLLLHLDFLDERLMTVEAEIDANLVQLPAFQEAVRLLDTIPGVNRLTAVTIVAEIGVDMSRFPSDRHLAAWAGMAPGNNETGGKQRSGKTRQGNRYLRRILVLAAHGAARSKNTYLKSLYYRLKSRRGAGKAAMAVGRTILQMTYHMIRRGEAYQEMGGDYFDQFDKVRTAKRLIKRLEAMGFIVEVTERPGLEPASEVAQSARSPVPLAV

SEQ ID NO: 72104 - protein, 425 aa, unidentified
MATDSQTTDVPFHQQFTCFLGFDWAYDHHDVVALDGPGRILLDLRLEDTAEGWAHLRRQLLERVGPDLGRTAVAVETCNGPAVERLLGLGCAVFPINPKAAERYRERKAPMGAKSDRLDAWSFADALRTDGHGWRRLVSDDPLTQELRILCRDEIALIQQRTALVCQLKQALHEYYPAALEAFEDWVNDGAWAFVAAFPTPSALVQAGKRRWEKFLHAHKLYRPETYLRRLAVFARANAFTAGAGITAGKSRLALALVAQLQVLQKQLGLYRKAIEALFDRHPDRDIFGSLPGAAEKLAPRLLAELGDNRQRFDDAQGLQCYAGSAPVTKASGRRRVVFFRTGCNKVLRSTVHLWADQSRKKCLWAQVYYEHKREEGKSHACALRCLAQRWLKIVWKMWQSRSVYDPDLHMRNQVKHGSWVVQPA

SEQ ID NO: 72105 - protein, 344 aa, unidentified
MTYSNVIAIDLAKHVFQVCKASHDGTVIYNRTCSRQKLKELLVKEKTALVAMESCGGTHYWARFAREQGHEVKAIAARIVKPFRQGQKTDANDAIAISVAARQPHIHSSRLLSIADQCQQSIVRARDLLINQKVKTSNHIRSLMLELGIAITKGDKALKQAIPEILEDAENDLTTGFRMTLNVMYKHFQILLDEIETVSRQLNQEVAQDEICQRLKALEGVGPICAIQLKIALDPAHYTKGREASACIGLTPVQHSSGGKQKLGSISKRSTHNALRSALFQGALAVVVNVEKREARTHKDAWLKALIARGGKKLAAIALANKTVRTAFAMIKHNQEYQPQLLVA

SEQ ID NO: 72106 - protein, 420 aa, unidentified
MLRIIHHHCAGMDVHKKFIAVTIATTDFKGVTQYQKSRFSTFNSDLKSCKAWLLKNNCTEVCMESTGKYWIPIFNILEDSCHVVVANPKYVKAIKGQKTDDKDATWIADLYKFDIVPSSYIPAKEIRMLRELCRYRSKLVGTRTSEKNRLQNSLTVSNIALASVLTDTFGKSSSAIIDYLLYGDGFDPEHCKSLLKNKAKNKADEVVKSIIGYEITHDQSIKMQVCRKHVDYINESISTLEESIVTIALPFRELIDLAVALPGITEKSATYIIAEIGNDMTVFHSSKHLCSWAGLTPQNNESAGKKKSVRISRAGVYLKPLLVQCANAAIKDLKNPYFKFKYDCIKKRRGHKRALIAIARMMLTCLYQMFLKKEAFNPSDTNYSDIPEKLYETHKQQYIKNAIKLLEKEGCTITLPSSAA

SEQ ID NO: 72107 - protein, 408 aa, unidentified
MPQPNDLSRSLVALDQDSTIIAVVEMSQSSWLVAGVLPGVERQPRKKLEPSAERLLCLLHRWRDEAVRAGKKITRIALAFEAGRDGVWLARWLSARGVEAHVIHPSSVAVSREHRRAKTDRLDTEMLKRGFLGWLRGERGHCSMSRVPTIAEEDAKRPNRERECLVGERTRIINRMKATLARLGIRNFKPTLRKAAERLATLRTPESTPLPPNVSAELQRDMARLGFVVSQIREIEEARQKRLEQEPETGPHAMVRLVARVVGVGIETADMLVHEVLSRPMRDRKAVARYAGLTGSPDESGAKRREQGLARAGNARVRRGMIQLAWRFLRFQKQSACHDRRDIGGRHPASGRLKGFREKHLLTYSALALAFRADCRLTIRGGGNRQQTWHRCLRGEWARRPELRRRCA

SEQ ID NO: 72108 - protein, 373 aa, unidentified
MPRYSTAFGMDVHLRSTTVCALDAETGEAVTRRFRGNPWGEVAEWMSGFPGPSLAAYESGYLGFAPQRELSGLGVDCVVAAVSKVPRSAADFSSKNDRNDAARMAKAILSHDISPVWVPSPEIEGLRDLAGAHDAATARLAAAKQRLLAFLARRGYAYGGTTPAGNPRRYWTYDFLRWLDKVRPADDGGIRALAALRSEVEAAAETRDALLAEYRAAVAAGPLSAEVEALQSIKGCGFALAAAFASEVGDFSRFRSGRQVTSYFGLAPKQRSSADSVRLGGISGAGNALVRRLAVEGSWSYVQASHQPKLMPKGSGVPLEVRMHGRKGSERLLRRREEMLARGMPQAKANAATAAELVRWLWALGAMCREATE

SEQ ID NO: 72109 - protein, 343 aa, unidentified
MGEVSTIGLDIAKSVFQIHGVDVDGAVVVRKRISRAKLLEFFAALPACLVGIEACPTAHYWSRQLGVLGHTVRLLPPSYVKAYVKRSKNDANDAAAICEAVTRPSMRFVATKSEEQQSSLMLHRSRQLLVCQRTMLSNAIRGHMAELGIISAKGRNGTAELLKIIADEQDDRIPVAARFSLEVLARQYAAVRAEIAAIEKRIHAWHRSSEESRRLEEIPGVGPIIATALVAEVGDWKVFSSGRSLAAWIGLVPRQHSTGGKERLGRISKQGNRHLRWLLVAGAMAVIRYARQHGTKRPWLARLMDRRPIKIAAVALANKIARMAWAMMVRGERFKEPKLLPAA

SEQ ID NO: 72110 - protein, 482 aa, unidentified
MKKRNIYQSQSQELLSLFEAAGSSAKVMCIPVDYAKKDHLVMFCNGHGDILRKPFSVKNSPEGIKYLIDQVTRSCRRCGIKKEHVFLGGEDANSFAENFVSTLRVKGWLVAGVNAHDAKKQRVNLQASTDRIDLMGIATMLLNCRANCCPAQSGIYRNLRTLVRHRRKLVVMLTEVKNRTHGIVDRLFPGFLNESKSGIVPFTQSSLYLMENRFSPKQIRRRRRQKLIEILKRFGTSKAQETALKLQQYAAKVLHTPDEYVDTLQVSLAQHVKHIRCLQEGIAQLKKEIAVNLAQTQGAFLTSVRGIGIVLAAGVCAEIGNPYKQRPLNNVISYSGIIPRVKQTGGVDGKTYTGHVAKRCNRILKDYVVKSAYHLGLHGPQDLMTDYKRRDASGQHADFGMGRRYLRMAISLMRTSQVYLPPNLRKDDYTLEERAGYYLTSWPYLKEKWKKVGALEAAFAENRPLGLWRQIVQELYDITLKL

SEQ ID NO: 72111 - protein, 343 aa, unidentified
MDHFAGLDVSVKDTSICIVDDTGRITREVKVASEPGALLAVLMNASHRFKRIGLEAGPLSQWLFSALAEAGLPVICVETRHMRAVLKAQINKTDRNDARGIAQMMRVGLYRPVHVKTLRSQKLRMLLTHRKLLQSKAIAVENDLRATLRNFGLKVGMVGTARFEARIKELVENVADLVVLVEPLLVVRRVVREQIGILHRRLLAIVRDDEVCRRLMTVPGVGPVVALTYRATVDVPARFRKSKSVGAVFGLTCSRDQSGERDRPGAISRCGDEMMRAMLYEAAQAMLLRSAKWSWLKAWAIQIARRRGMKRAIVALARRLAVILHRIWVDGTEFRWTRETAVA

SEQ ID NO: 72112 - protein, 356 aa, unidentified
MQTQFTKKIDFTGKQLFIGLDVHKNSWSVTILVDGTEHRTFTQPPDPESLFSYLQRMFPGGEYNSAYEAGFCGYAIHRRLNELGINNIVINAADIPTSQKDKLQKRDPVDSRKIARSLEKGSLHGIHIFDREQEELRTLNRTRFYLMRDLRRSKTRIKSFLQYYGEPIPVEFDNNQWTLKFVSWLKQIKMQTMSGQDAFSNLISSYEYHRSQLLTLSRQIRQRIREYDRELYTLLKSVSGIGPLTASALITELGDINRFTNIDQLGSYVGLIPRIRESGETTHTGGITFRCNSFLRTLLIESSWQAIRMDPAMMQYYHAHLINNKGHKVVIKVARKLLNRIRYVMKNRQPYITGVA

SEQ ID NO: 72113 - protein, 392 aa, unidentified
MPAVMIGVDPHKRSNTVLVLDASENVLATERFSNDREGHRALKTFARTWKTRTWAVEGAHGCGLGLAQRLAAEGETVLNVPAKLSARVRALGGGSGRKTDDTDAYAVAVAGLRGRGLELVQPDDTAMVFKLLSDRRQQLVEQRIATVNRLHQLIQELLPGGASKRLTAKKARELLSTVRPRQTVAKTRKALALEQLADLEHLDVKLKQMQTRIAEALKEHSSHVEDVFGLGAVTTAVILGEVGDVRRFPSKHHFASYTGTAPLDASSGDTARHRLNRGGNRRLNFALHVAATVQISNHHPEGYAYYMRKRAAGKSPLEAMRCLKRRLSDVVFRALLEDLADREAASPAGHSGATLQSSASDPTPTVSPSDKSLTGLATTDATPRQRRSTVPA

SEQ ID NO: 72114 - protein, 352 aa, unidentified
MQRFIGLDAHGQSCTLCVMGPSGRRLGHYVVETNGKALVQQVRSIAAERHVCMEEGTQSEWLYEILQPHVTRVVVTQPLRRAGNKSDEIDGWALADLLRRDAVQRSIFKSPQTFTALRQAARGYVTVQQDLVRAKCRLNALYRARGLLPSSEIYDPQQRKTWVHKLPPTHQRLANLLGEQLDGLTQTHQAALSWLLEEANCISVTRRLATAPGIGPIRAALLVAIVVTPGRFRTTRQFWSYSGLAIVTRSSSDYVRQGARWVRKPVAQTRGLNRNRQPLLKAIFKGAATTVIRQMPNHPLHQDYQRMIGEAAIKPNLARLTIARRIAAATMAMWKHQEDYDPSKQRRAPLSQ

SEQ ID NO: 72115 - protein, 466 aa, unidentified
MGKSSTSEDEKTVGGRDRVRKGLEPKHPDAAGIDVGSRVHYVAVPPDRDEQPVRRFGCTTPELHEMAKWLRACDIRTVVVESTGVYWIPVVQVLEEYTLEVLLVDARHVRNVPGRKTDVQDCQWLQELHTYGLLSPAFRPSQEILPLRSYWRHRAELVGYGAQQIQRMHKALEQMNVQVQKIVSDLSGQTGMRIIRAIVQGERNPVRLAQLRHASVKHDEETYVKALTGTYRTEHVFALRHAVELYDTFQEKIAECDREIASYMQSLQGPNEGETIGTKPPKKRGRFRRKNQPHFDLREELYRFTGVDLTQIDGIDAMTAQTVICEQGIDMSRFPTEKHFTSHLGLCPNNRISGGKVLRSRTRKVQSRAAKALRVAAQSLHRSRTAIGAFYRRLRARLGAPKAITATARKIAIQIYRMLKYGKDYIDQGEQAYQEQYKERLTKNLAKQARKLGLQLLNAQTGQLLS

SEQ ID NO: 72116 - protein, 344 aa, unidentified
MDHFAGLDVSVKETSICIVDDTGRIVREVKVVSEPEALLKVLGNPAYRFKRIGLEAGPLSQWLFSALVDAGLPVVCVETRHMRAVLKAQINKTDRNDARGIAQMMRVGLYRPVHVKTLRSQKLRMLLTHRKLLQSKAIAIENDLRGTLRNFGLKVGMVGKVRFEARIQELVENQPDLAVLIEPLLIVRRTLREQIVILHRRLLAIVRDDEVCRRLMTIPGVGPVVSLTYRATVDVPARFRKSKSVGAVFGLTSARYQSGEVDWSGEISRCGDEMMRSMLYEAAQSMMHSKKWSWLKAWAMQIARRRGMKKAIVALARRLAVIMHRIWIDGTEFRWTREQAAAAA

SEQ ID NO: 72117 - protein, 413 aa, unidentified
MDVLYPCCAGLDVHKKSVVACILRSDPAGVPTREVRTFGTMLDDLEGLRDWLVAARCTHAVMEATGVYWKPVYNVLEEALSPVVVNAEHVKRVPGRKTDVSDAEWLATLLRHGLVRPSFIPERSQREVRELTRLRTALIQDRARAVNRLQKTLEGANIKLASVLTDVTGASGQRILDALLRGESDPEQMADLAHWRVLQSKRDALERALGGRLSHTLRFVVAQELQQIRLLDEQITACDDQVAEELHPFDVEIGRLDGIPGVGRRTAETLIAEWGTDLSRFPTPGHLAAWAGMCPANKASGGKRAPAHTRKGNPWSRRALTEAGWAAGRTKDSYLGVQYRRFAARKGRKHAVVVVGHSILVIAYFLLTRGVDYQDLGIAHLDTRDRDAARQRAVRRLETLGYSVQLTSLQAAA

SEQ ID NO: 72118 - protein, 321 aa, unidentified
MSSYYKKEVQIMINNEDIIHCGIDVSKKNLDAFVGNKVKRYDNTIKGVKQLIKDVGNVHYIFESTGGYERLAAWYLLDNSHIVSVVNPKRVRDHARSKGLLAKTDSIDARVITSYADQNELRLTQKPSPEQLKLTALVGRRHQLSEIIKQENNRLELTFDKCCIKSIRKIVRTLEKEQEKVEADILTIIKESYEFSEKAKVIQSICGLGYTCAITLLAYFPEIGTVSRREAAALAGLAPYNKDSGNFKGIRKIFGGRSKLRAALYMGAMSAKTYNPILREVYNRLVDENHRPGKVALVAVMRKLVIAANSAVKNSDFMLAN

SEQ ID NO: 72119 - protein, 335 aa, unidentified
MWHVGMDWHSRQADMTVRDSHGQKMFSRHVRGGLAPVLDELRKIKEPFSVTYEASTGYGHLFDELSKLAHTVKVAHPGHLRLIFRSKRKSDRVDSDKLSKLDYLGEVPQVHVPSHEVRVLRATIKCRSRMVLERTGTKCRIRAFLRSRALDAPRGLWTRAGVEWLRGLEFADDLEALLRDELVEKLGYQDSLIKRVTKALEKRGRANPAVGLLMTIPGVGPRTAEAVVAWIDKPARFSSVRDVAAYFGLVPCLDQSAGAARYGHITKEGPAVARRLLVEAAHQGARRSPRIKAYFERICGDDPGRKKIAIVATAHYLVRVMAAMLRTGEVWRDEQ

SEQ ID NO: 72120 - protein, 408 aa, unidentified
MNPLFVGIDVSSKNNVAYLMKPDGSKHSSFSVQNNLGGAKLLSERIVSALGSMQLERVVIGLEATSIYGDSLVYALREDGRLGRFQRKIHVLNPKQVRKFKEAYSDLPKNDWVDAFVIADHLRFGRINREVYMADYRYKALQTLTRARFDVIQNLTREKQRFANYLFLKCSGMAQDKDIQNTSATTIALMERFETVDDLANADLEELTSFITETGRGRFADPNATAKAVQAAAMASYRLPKTVNDTVNQAMAVSIASMRALKGQVKVLDKAIEQQFEIIPNTLTSIPGIGKVYSAGIIAEIGDIHRFDSQASVAKYAGLVWLKNQSGEFEAEHSQMIKSGNRYLRYYLLEAANSVRRCDSEFRRYYDLKFKEVNKYQHKRALALTARKLVRLVFRLLKDNRLYIPPEG

SEQ ID NO: 72121 - protein, 359 aa, unidentified
MEKCNLTKLQLFVKSFHDHPFYVGVDVHKRSYHVAIRRADGRVFTFVTEASSESLLGKLQRLNICIAAITYEAGPTGFGLARAIRKFGIVPLVAAPSRIPRAILAGAKTDRLDCIRLADYASKELIKSIAIPTETEEAERSLVRRRHKLLDRIRGCKQRIKSFLLQYSISEPDSLKGWSQSAIRDLEQLEMRPEARMTLQSLIRELIFFEEEKRVMERCLDELSDRKEHVQAIKHMRSVPGVGRIVSATFRFELFNPERFRSPVEVASYLGLAPMVHHSGEKRPAGHLRPVGQKRLRSLLIEAAWLWRAKDPYAARLYKRLLGRMGISQKAIAAIARKLAIILWRLSVEQRKYYCPVEA

SEQ ID NO: 72122 - protein, 340 aa, unidentified
MDTHKDIHVAALITSTGIPLGHEVFPADSVGYRRLTAWVRSHGPVNHAGVECTGSYGAGLTRHLRDEGITVTEVNQPDKAARRRHGKSDPVDAEAAARAVLSGRATAIPKSADGPAEDLRAYKIAKDSAVKARTQTINQLKAVLVTAPSELRERLSPLSNPRLIAACADLKDSPSSGAIVYTLRLLARRIQNLTAEVRDLTGRMTATLRSHTPKLLEIQGVGPDSAAALLVAAGDNPERFSSEASFAALCGVSPVERSSGKTHRRRLNRGGDRQANAALYRITQSRLRWDPRTQAYLERRTRDGRSRREIIRCLKRYIAREIYRHLQSTVALNTAGLAAI

SEQ ID NO: 72123 - protein, 320 aa, unidentified
MSEQPVVVGIDVAKLHVDVAVLGAPAAAGRFDNDGEGHMALIEALSPLAPALVVMEATGGYEAPLACSLQAAGLAVAVVNPRQARDFARSFGQLAKTDRIDAAGLAEFAAALLVRPDLGRYLKPLATAEQQDLVALVNRRRQLLTMLGMEEQRLAAARPAVRRSIQTLIRAIRKQLDEVDGTMARHVTKHFTELGELLRSASGIGPVASATLIADLPELGHLSRRQVCALVGVAPFACESGSMRGRRRIRGGRFELRRTLYMATLAAITHNPVIRAHYRRLLDAGKLKKVALVACMRKLLTILNAMVRTHTPFQTDYRKA

SEQ ID NO: 72124 - protein, 351 aa, unidentified
MTMVGGLDVHRQQITFDYVDDDGLVRWGQIRPATRKTLRGWLAEHCPDGDAEFALEGCTGWRYIAEELATAGVGVHLGDPAEIAVARGPKKRAKTDRADARLLRTLLLQGRFPESWIPPAHVLEIRTLGRLYCTLMDQRRTWQQRIHAQLFHQGCPPIKALLSAAGRQALASAELSPIGRQYVDTALRRIDELTAEIKPLRTQLINFARHQAGCQTLQSRHYGIGWLCAAILWAEIGDARRFCSSDKLVRFAGLDVTVYSSDGKCSPGHLSRQGSPELRWAAFEAAKSAARRSSPDYGYYHKLAAKRDGHNGKNPTLAVERKILRRCYHTLRELGDAALALPVPQRKEAAA

SEQ ID NO: 72125 - protein, 411 aa, unidentified
MHNRQNYLYVGVDLHKEHHTAVIINCWQEKLGEIQFENKPSAFSKFLLEVETYVSAGVSVVFGLEDVGGYGRALAKYLVDHEQVVKEVNPALSFLEQKSHVTTQKSDSWDAECVARILINKLNQLPDAKPNDLFWSIQQLVSRRNALVKAQSALKNQLHIQLNHHYPSYKKFFSELDGKTALAFWQQYPSPSCLEGVNIKQLTAFLLDVSNNTCSVKKASDILKLVKEDGQTMKEYQEMRNFLVRSIVREIEFKKKEMKYIERELKQLVNLLDYQLETMPGIELVTASALIAEIGDVRRFPNANKLARFAGIAPVYFGSGGKGKVHKSKQGNRALHALFYNLAVQQVQVAKGRKLPRNPVFHAYYQKKLKEGKTKGQALVCIMRRLVNIVYGMMKYKTAYELPVVEEKEVV

SEQ ID NO: 72126 - protein, 416 aa, unidentified
MKLFIGLDVSSQKLDTCFLTDSKEILFEGSLSNNLIGASEIKQRILDYQETFGFCQIVIGMESTSVYSFHPAMFFYLDEDLKLLPVEVTVENPYRIKQYSRMFDQDKTDKIDAQIIADYLRVDLHTLSPIKEEVYVGLQRLTRSRYQLVTQMVEAKQHFLENLTYKCNTLSKELANEDNKTSIFGASIMNLLTEGITLDEFSEMPLETAVELLQKLGKGRFKNPEQLVKSIQKAVRSSYRLGKVTKNSIDLVLGIIANEIKFLKKQIKEIEKAITALLETIPEAQCLLSVPGLGAVYTAGLIAEIGQIERFDDQSKLAKYAGLTWTKNQSGNSQSENTPLNRSGNRYFRYYLIEATNRVRSTLPEFKEYYQKKRNEVPKHKHKRALVLTGRKFVRLIDALLRNGQFYQPAKVVIEK

SEQ ID NO: 72127 - protein, 340 aa, unidentified
MSLVLQSILPYPDSCLGTSPHQQGWDTKMAELSFGGIDVSKDRLDVLLLPEGLCFSVCNNAPGWAELIVRLRPLAVSAIGLEPSGGYERGIIRALLAAGLSVRRINPNKLRQFARARGVLAKNDRLDARLIAEYVAIMPTRVLQRDDAIERLAEIVTMRRQLCDEHVAAMHQATHLEDAMLRRISKRRLLRIEADILLLDKRLAELVAADPRLAHRYQLLISMPGVGPTLAYTLLATLPELGQIDRKQIAALVGLAPYDFDSGKLKGHRCIYGGRMPVRNVLYMAALSASRYNPALKAFSNRLAAAGKKSKVIIVAVMRKMIITLNAMLRDNTEWHPAAA

SEQ ID NO: 72128 - protein, 359 aa, unidentified
MREQRNKISFRGQKIYVGIDVHLKSWSVTVLSETSVLKKFSQHPSPEALYGFLTRSYPGAEYHSVYEAGFCGFWIHERLTALGIDNIVVNPADVPTKSSEKLRKTDTVDSGKLARSLRANELKGIYTPDSVSLEMRSLIRLKNSITKDTTRQKNRLKSQLRYLGIEIPQEFLTPFSNWSKRFFAWLKEIETLTPSGRQALDIHIRHLEELRRQKLEMTRALRTLAKTDRFREPLRLIMSVPGFGQATGMAFLSEICDITRFRNAEQLAAYIGMIPMCHSSGEKDGTGDITIRKHAVMRCNLIEAAWVAVRQDPAMNLFYTEQCKRMPKSKAIVKVARKLVNRLFFVLKHQTEYVNSVVS

SEQ ID NO: 72129 - protein, 286 aa, unidentified
MKTTYFIGLDAHKDSIAIAHALGGSRAQAVYHGTCGGSITAIEAALRKLAKKLGVAFRDLKVCYEAGPTGFVIARRLVRLGLDCVVMAPTKTTRKPNEKVKTDKRDAIKIAREFRNGDIVEVRVPPSADQAIRDVARARTDASDDLTRAKQRLKSFLLCNGHRYSGSATWSGPHMNYLRGLSLADPAQQVVLEEYLLAIEHCRLRLDRLVQKMIELLAAWEWKPVIDALMAFKGFKEVAAMTIVAELGDLRRFTNPRSLMSFLGLVPGEHSSGTKRHQGAITKCGN

SEQ ID NO: 72130 - protein, 366 aa, unidentified
MKKSSTVAKRGNEIFRKPKLTIGLDLGDRTSHYCILDEAGNVILERSLPTTPKGIHQTFSKMPRSRIALETGTHSPWVSRQLTQLGHEVIVAHARNVRLIGESSRKDDQLDARTLARLARIDPGLLGPVRHRSAKAQIHLTAIRARAALVSTRTALVNAARGLTKSYGERLRKCGTRQMNREIAQGLSQELRDALEPLLEEIESLNERIAEYDRRIEQIAKEGYPEVALLQQVKGVGTLIALTYVLTLDDPHRFRRSRDAGCFLGLRPGRRNSGRSEPQLHISKEGDRYLRTLMVQGAHYILGPFGQDSDLRRWGLKLAERGGKNAKKRAVIAVARKLAVLLHKLWVSGEVYEPLRNNHQVVSAVA

SEQ ID NO: 72131 - protein, 359 aa, unidentified
MKIVGCDFHPAWQQVAFFDPESGEIAELKLLNGDGEAERFYRELEAPALIGIEACGNSQWFIELAERLGHVVWVGDAAQIRASYVRRQKTDRRDAGHILKLLMESRFPRLWTPTAEQRDLRQLLIHRHKLVEIRTRIKNGLQHLALNRGVQKGSRLWSVRGRAYMEKLPLAGWTARRREDLLRLLAELDRHVDELDAAVKRTADEHPQARLLMTQPGVGPITSLAFVLTIGDVSRFRHSNQVASYLGLIPREHSSGGRQRLGAITKQGNGFMRQLLVESVQSVNRLDEGFRRQYQARCHHKARGVAKVAAARKLAVRLYWMLRQNVGYPEIALIESSPAVPLAGKRHAEKLSGRSRTQQ

SEQ ID NO: 72132 - protein, 372 aa, unidentified
MGDYSVAYVGVDTAKLRHAVAIAEEGRTGELRFLGEIENTEAATTKLVKKLASRYRSLTFCYEAGPTGYELYRLIKGLGHDCIVAAPSLIPRKAGDRVKTNRRDALSLAKLLRAGDLTAVWVPDPRHEAMRDLTRAREAAVEDLTSKRQQVLSLLLRIGRHYHGKRNWTRMHMNWLASQKLEHAEQRIAFEETLLAIREAQERVVRLERAIRNALPEWSLADLVTALMAMRGLDLVSASAFLAEMGDLSRFPTARELMGYLGLVPSEQSTGEKVRRGGITKAGNRRARRILIESSWSYRHPPRLGKEKLARTAGVSREVREIAWKAQHRLSGRYRTLTRNGKKPTVVITAIARELSGFIWAINRAVRPAMTG

SEQ ID NO: 72133 - protein, 370 aa, unidentified
MLDTTTFVGLDVHARSIKAVSLDVMTGEVRCATFGYDAGAVAEWVRSVDPKARCVYESGVTGFDLQKRLSGLGVDCVVGAVSKMIKPSADRRRKNDRNDAEFLARMLSVGNVVEVWVPDDECEAARDLTRALEDARDDLSRSKQRLSKFLLRHGLAFDERTPTGRRKGNWTRAHWSWIESIRFAEGADNDVLAYYVDAVRRAAEEKARLEGLVEAEARKPRWRRRVDSLRCLKGVDTASAADLVFEAGEFSRFGNARSFAAWVGLTPSEHSSGESDRRGAITKAGNKHLRKTLVEAAWHYLTCSGRPKDLAKGQAPDRVARRHAAKGVRRLVERREALLARGVHGNKANVATARELACWVWAVGLMAEEA

SEQ ID NO: 72134 - protein, 357 aa, unidentified
MQSHYKVGCDAHKRYSMFAVRDQYGALIKESRVNHERGAIQAFLSQFPQGTPVALESVGNWYWIVDEIEAAGCLPKMAHPAKAKVMMGNVHKTDKLDAAGLATLEHLGSLPTVWIAPGEIRDERELPRTRMAFAKVRAAIKNRVHSTLAKYALSLDAASDLFAPKWRGELLQLMRQLPEETHRCVQQELELLDTVQAQIDRLEQRIGERTQLTPSMRLLKSLPGVGDILAIVIDRELGTIGRFSSNVHFASYSGVVPRVSSSGGKYRYGRMVKQANNYLKWAFIEAANAVVRQRHHPRWGQKHVCLLYERTRRRKGHAVAVGAVARHLAEATFWVLTKSEAYQEPRKVSHKQGQARA

SEQ ID NO: 72135 - protein, 367 aa, unidentified
MSRLYMSMEISNKSWKLYFSAGGKKKRRRDLLADEYVKLPDLIQEAKSKLGLAPEAKVVSCHEAGLQGFWIHRFLEKCGVESLVLDPSSIEINRRRRRAKTDRLDVTKLMQMLLRHYGGETGMWSVVNPPSVEAEDVRRMYRELGRIQKELTQHHNRILSLLRLHGPITIPINTRFKKKLKTLTTWEGEPFPENTLIEIHHQYARWELACKQAKETTQHMNQMVEKGETEAARQIKVLQNLRGIGFKGSWGLTCEMFAWRAFKNRKQVGSYLGMTGTPYDSGSSMREQGISKAGNARVRALMNELAWLWLRHQPDSELTKWFLQRTFRASKRVRRVMIVALARKLAVALWRYVEFDQVPAGAIVKTV

SEQ ID NO: 72136 - protein, 349 aa, unidentified
MIRNAPRDAAVYGVDLGKNVFHVVGLDDCGAVIQRVKLRRETLLAFFERAPRTVVGMEACPGSQWLGRKLQAMGHQVRIVPAQFVKPYVKSQKNDTIDAEAIAEAVTRPTMRFTQVRTTEQVDLQALHRIRDQLVSSRTRSINQARAFCLEYGVAIRQGAGVFRLDLPRVLADETNDLTPAMRRMLAELFEDLARIDQRIDQVTREIEGLAARDDRARRLMTIPGIGPLAATALLAAIGDGRQFRRSRDLAAWLGLVPREYSTGGKTTLLGISKRGNRYVRRLLIHGARSCVAHLDRTRDRLGSWLDGLQARMHVNKVTVALAAKIARLTWAIVTKPGALYVRRDPAVA

SEQ ID NO: 72137 - protein, 547 aa, unidentified
MDCCVGKFQVHTFTFPDYGVSKMYHVRRSGRKQPKAKPRSKQSLQKPNGVISPRVKKVGGEHFAIVCVDPAKHRSEWMMADYFGNLLIECQTVEHQSVFFKVAVEMIRQAQQQHDIQDTIVVVERTGNYHLPPKRAFASAGFDTRVVHPFATKQYRMPANPGIKTDENDLYAQHRAAVAGFGLCELELEPPFRDLQLRARHRRNLVEKAANLACQIREHLHLGMPGYAGLFDRLFETPTALVIAARCDSPAKLIQLGRNRLSRYLSKSKVRHQLRTIDKVLAWAAQAADDPIQDGPMHHAIWTDLHELYQHIQRQIVALEQELAGDVVQTPYVRLMAIPGINVVSAAELAAEMGPISGYANANAITGRAGLFPSRYQSDQTDNDRGPLIRQANRRLRCVLMRIADNLACHCAYYRGQAEVDKARGVDKRASRVKIAKRFSRLALACVAGDEPMRHPCFQKPDSILDKLRRFHHAHQTPMDVLLTDLEAAVEQLPYNTCNHEAEIVADVLEQHTRRRRGAGLIGDVLPAVLARLNIRTTEANKNRDRS

SEQ ID NO: 72138 - protein, 355 aa, unidentified
MQSNKISFKGQNIYVGIDVHLKTWHVTTLTESGYKYSFAQHSDARELFDRLNRKYPGAHFKSAYETGFCGFSVHYALAELGFEDIVVHASDVPTTGKEKATKTDAVDSEKIARSLKRGELTGIYIKEKDYMDDTNLMRLRQRFIKDLSRQKHRTKHLLYTQGVTYPERFSRNGTHWSRNFMKWLREEVVLLSEEKRTLMLLCNQVEHIRKDILAVTREIRRLSTTDKYRENFSLLSSVPGFGLITSMSMLTELDNNPGRFPNERKFVSMLGLIPTCHDSGEKKVGGEKINRGNKQLGPLIVEASWVAIHRDYQLGCYYSNCCQRMKPQKAIVKVARKLACKAYAVMKTKKAYVLS

SEQ ID NO: 72139 - protein, 412 aa, unidentified
MKDLLEISCGLDVHKEKIVACILTGPLGKPTHSEIREFTTLIPDMVALRDWIVSQNCRHVAMESTGIYWMPIYEILEDAFSGDITLLVVNARHMKNVPGKKTDMRDSEWISTLLRAGLLNGSFIPEKRIREFRDLNRYRKSVIRDITSQKNRVEKFLQSSGFRLSSFISDIFGASGRNIILHLMEHGQIDRDALDSCLKTKTRNRIDEILMSVNGTLSEHQKSFLKILMKHYDSLKEHLNEIEKGLEEDMAPFALQVEQLSSIYGISTTASCAIIAEIGIDMEPFKTAEHICSWAGLCPGNNESAGKRKSASVTKGNPYIKSMLCEIAWVIAGKRNTYLSAWYWRIKQKKGAKKAIVALARKLLVIIYTMLKQGTLFDESCFEARRKNCEQKQLSRYIRELEKHGYHVEVQA

SEQ ID NO: 72140 - protein, 368 aa, unidentified
MFYLGIDQHARQITISLRDESGDVVQARQVSTQPEKVHAFFQQLTRERLTAGESFVAVLEVCGFNDWLIGMLHEYRCHKVILIQPEERKLRKTDRRDAAALSALLWVNRDRLLQGKPVRGLRQVDIASDTDQENRRLTTLRKDASQARTRLVNRIRHILRRHNLQWQMPTKKFPTKSGLAWLKQLALPEIDRLEMNHLLADLEQIQGRRKELEQVIAQRCGVSAEAVLLSSMPGVGYFTAIALACRVGRVGRFPRAHSLANYWGLTPGCRNSGESNQRLGSITKAGSSMARWLLAEVTIKVLRRDARLREWFKRLKRRRGASIARVAVMRKLATVIWHMLSKRMTYAACRAAGEAGTKARQEQGCGRE

SEQ ID NO: 72141 - protein, 442 aa, unidentified
MARKPSKQHLTLVHPDCAGIDIGSREHFVAVDDRHDNPVRTFTTFTDDLHKLADWLESLNIKVVAMESTGVYWIPIYEILDARGFDVRLVNARATRQITGRKSDVMDCQWILRLMSYGLLRNAFRPDDLTCVVRSLFRQRNHRICDQAKTLNRIQKALAEMNIQLANVISDISGVTGMKILRAIKEGERDPHVLASLSDPRIKAGQETIARSLLGNWRDEHLHALKQELAIYDFLEELIAECDEAIVKAISRLPTLNDSPPEPKKPLRSPHRTATQQTGLHQALFKVMGVDLTAIPTIGIDTALVIASEIGADLSRFPTLQNFCSWLGLAPPTRISGGKALSGAGPKIHNRAGQALKQAASNARNDKGFIGASHRARLTRMDTSCAIKATAHQLARLIYSMLTKKQAYVEQGLAEFEARSQDRQLRALQRKARKLGLQLVAA

SEQ ID NO: 72142 - protein, 456 aa, unidentified
MSHCTANKKAASAFVRRNSIPTTGAVAKALFNSAIGIDVHHDILVCAYQYCNRESDEITTEVCSFGTTASELAKFTDWCRNRHPEQILMESTGVLWFSPYEALESVGFTNRQLSLINARDFKAIVGRKSDKQDAERLALYARIGNVRSSFVPAKCFREMRTVSRLLSKTTDEQSRARSRYLKTLNFIGCRASSIFSDVRGKAATAILEVLAEGTREQLIDAIKIHGRRLRKSAAEILDALDFAVSPAMAMQLRIQKQHMEALSQTCEELYALLKVMQANYQPWINRLMTVPGIKERAARVIFAEVTNDLSSFPDAAHLASWVGVCPGTMESAGKRYSGRAAKGNRYLRRILVECSQAIGLMRKGALYSLFQAFKERKGTRRAVVAMAHHLVKIIYCLFTKGGNFEAQSTDALTKVRKQKYLSAVANIKKQNFEILTSGSLVDKATGAITTVDPMII

SEQ ID NO: 72143 - protein, 331 aa, unidentified
MTNASSAQASMTLPTLFVGVDMAQKSFVWAIHGQPQTHCASTDDSGFEQLLKALEGQRVGLLVLQATGGLERALATYLLQHGLPVALVNPRAAREFARSMGHLAKTDAIDALALAHYAQTLAARADQSGVRYAPASEQVQQLQALVMRRAQLLNMRTAEKNRLGGSIRVLRQSILEVIRTLEQQIARIDKDIDGHVRQHFQEQAKRLEAIKGVGSTTSATMLASMPELGAIKAGSAAKLAGLAPLNQDSGKARGKRHVWGGRAIVRSTLHMAMLSAVRYNPVIRAFYERLIAAGKPKKVALVACSHKLLRILNAMARTGEPWNEALHVKNA

SEQ ID NO: 72144 - protein, 351 aa, unidentified
MLIIGVDYHPSFQQVSFLDQETGECGDRRLNHSDGEAERFYKELKERGVSVRVGLEATGYSRWFERLLAELGFEVWIGDAAEIKRQRGRKQKTDREDGRLLLKLLLENRFPGIWVPDPENRDLRQLLWHRHRLVQMRTRIMNQLQAVAMNEGYRWKKKLFSEKGRALLEKLPLAPWASRRRKELLELLDQLDPKITELTAALEREAQQRPEVVRLMTHPGVGPVTGLAYVLVIGTPDRFPCGKKIGSYTGLIPSEDSSAGQQRLGHISKQGNALLRYLLGEAAQAAARCNPDWRRRYVHLMMRRQKRIAKVAMARKLAVRLYWMWRNKWQYAQLVEFGSNAGKLGTGHGVQ

SEQ ID NO: 72145 - protein, 384 aa, unidentified
MKSFEGPYDAYVGFDVGKLAHRACCVLTGGSVAFNVGVANDEAAIDRVLAEAAAHGRALAVVDQRRNIGTTVVRRARAAGVEVAYLPGIAASRASSLFPGDAKTDERDAEVIARTAMGVPQALRPVPEEGALEGARRLEAQRCDLLRDRTHCVNRLRALLLESNPAFERELDCEAAWALSLMSRVGGPWQVLDAGRRRYAALTRDAPRGAADRLWAALKAASRPTEAQVRAEATLVRMLASRIAEDTALIAELAAEVGGDETYRCLLTVPGVGPRTAAQLVLSVDISDFEDHDHLASYCGLVPRNRQSGTSLNSVSSSRQGNKQLKNLLIFSCSCLARGSGYYREYYERCRDRGMPHKAAIKAVARKRLKVIYAVMRDVRPYVA

SEQ ID NO: 72146 - protein, 352 aa, unidentified
MSERYAPKRFIKPNQLSLMKKRYFMGIDVAKATFDFCLFSSNGSRLWKGHFSNNSTGIEEYLSQLQARPLKLKQIHFGPEATGVYGKALVGALHQAGLAVSVLNPAQVRFFALSVLRRTKNDTLDAEIIARFCLERKPPATRPLRSIEEQLKVLVHERDSRVAEQGRERNRAKQDPFQLELPKLVSRQRQKRLTQLKKEISQLNNAIFELIEADQSLGRQSQLLCSIPGIAQLTAAKLLAEFAGKEFASARQLAAYAGLSPAERRSGGTFYGQTHLSKIGNAFLRKALYMPAAVARRWCAALKPWVALLERRKLHDLAIRGAIMRKLLHIAFGVLKHQQPFNPALVFIPKTV

SEQ ID NO: 72147 - protein, 402 aa, unidentified
MNAVGIDVSKGKSMVAIMRPFGEIVSTPFEIKHTASDIHSLVELINSVEGESRIVMEHTGRYYEVLAHQLSEANLFVSAINPKLIKDFDNDSLRKVKSDKADAVKIARYALDKWQNLKQYNVMDELRNQLKTMNRQFGFYMKHKTAMKNNLIGILDQTYPGVNTYFDSPARSDGSQKWVDFASTYWHVDCIRKMSINAFIDHYENWCKRKKYNFSKSKAEEIYGKAKELVPVLPKDDITKLIIKQAVDQLNSASITVESLRTLMNETASKLPEYPVVMAMKGVGTSLGPQLMAEIGDVSRFTHKGAITAFAGVDPGVNESGSYEQKSVPTSKRGSSDLRKTLFQVMDVLIKTHPQDDPVYQFLDKKRAQKKPYYVYMTAGANKFLRIYYGRVKEYLASLPES

SEQ ID NO: 72148 - protein, 314 aa, unidentified
MAETAGIFVGIDVSKTWLDIAVHEATETWRAGNDDEGIANLVKRLKQLKPALVVLEATGGYEMQLVAELAHASLPIVVTNPRKVRAFARSTGKLAKTDKLDAKLLAHFAAAIRPAVRSLPSEEEEQLTGLLVRRRQLVDMLTVEKNRLHTVRPALRDDIKEHIAWLQAKLSKMDEEIDQFIKKSTLWKEKDAILRSTPGVGRVTSCTLLAMLPELGTLNRQEIAALVGVAPVNKDSGRKQGKRRVYGGRATVRSVLYMAALSAKRCNPRIKEFYEGLLRRGKEKKVALTACMRKLIVILNAMMRLNQPWRTEVT

SEQ ID NO: 72149 - protein, 385 aa, unidentified
MEELDHPVRRVCPVTVLPCVWSGPIPSTSTSGHGVNAWLCWQTWSSSPVGVDPHKDTHTAAVVQAVSGAMLEQTTVPATPAGYQQLLRLADRQDGRRVWAIEGTGGYGAGLTRFLHAHAEQVVELDRPKRTARRHGAKSDPLDAIRAAREALGRDQLARPRAAGHRAALSVRLAARRSAVQAATDAQRQLHALVVAAPEALRSRLRDLTTPRLVSTCGRLRLRADTDPETAATVASLRALARRIQLLDAEITEHTLAITALVQAWHPELLTPTGVGPIVAAVVLCAWSHPGRCPSEAAFAMLGGAAPIPASSGQWVRVRLNRSGDRHLNQALHVVVLTRLRYDPATRAYAQRRRAEGKTNREIRRCLVRYVARQLYRLLEAQPAL

SEQ ID NO: 72150 - protein, 347 aa, unidentified
MLYAGLDLSRQRLDVHLLDEDGRTVEVTAVRPDADALRTLVARMDRHGQPVSAAIESMNGARFVHDTLELAGWDVEIADALKVKGLAPLAAKTDRIDAWVLAELGRRELVPAIWLPDPANRAERERARFRLHLVRHRTALKNRIHATLIAFGHPVPVSDLFGVKGRELLARLAIPEPWATTLATSLRFVDELDAEIAACERDLRALGAGHPYVPLLMTVPGIAWVLGYTIAAEIGDIGRFASPKKLTGYTGLCPFVRQSGGRDDRGPLAKNGPKYLRWALIEAATHAARNPVYQERYEHTRKRLGKQRGSKVARVELARELSTAIWHMLTKNEPFAPGRPPVVPLVA

SEQ ID NO: 72151 - protein, 420 aa, unidentified
MDVFVERCAGIDIGKHEVVACVRTPAPGGRSRRKQTRTFASFTGALEEMAEWFLAMGVTEVAMEATGPYWKPVWYVLEDRPFEQLLLVNAQQVKILPGRKSDVLDAEWLAELLEHGLLRGSFVPPPAIRDLRDLTRYRKRLIQAHTSECQRIQKTLEDAGIKLDSVASDVLGVSGRAMLAALVAGERDPEVLAELAKGRLRRKLPALRQALRGRFGEHHALLIGLCLEHTAHLEAAIARLDERVDTLLANHTGEAGLPFARARDRLDTITGVGKRAAETIIAEIGADMTRFPTAAHLASWAGVAPGNNITGGKRGSGKTTKGDVWLLDILVQCAWAAARTRDTYLSAQFWRLARRIGKKKAAIAVAHSILVICWHLLTNDCDYDDLGGDYFTRRNTDRQRDRLIQQLHTLGYRVTLDKAA

SEQ ID NO: 72152 - protein, 322 aa, unidentified
MSNNSKIVLGIDVAKLKLDVALLLAEKTLTKQFANSSAGFKLLQAWLSALHLQEVHVCLEATGTYGDGVARFLFEQGHRVAVVNPFRIKGYAKSKLARNKTDTADARLIADFCLTQEPAQWFPPSPEVEHLQALTRRIEVLEEMRQMEQNRFDVSPKQTRASINRIIKTFEREINQLQSQIKDHLANHPHLKEQSDLLQTIPGIGEKTAHLLLSEVEFERYSSARQVAAQAGVTPRKSQSGTSLNSTNLSKLGNRRIRKGLYFPAIVAARHNKIIKEFAGRLEKNGKTSMQIVCASMRKLLHIAFGVLKHKSPFDSNLAFSG

SEQ ID NO: 72153 - protein, 398 aa, unidentified
MTKEDFIYVGIDLHKETHTAVMIDCYNQKLGEITFPNRPADFPKLVTKVKKCNTDGKEVVYGLENAYGYGRALAVWLIDKGYLVKDVNTAISHQQAKHRGAMYRKSDSDDAKAIALATLNMLDKLPDACPNDAYWSLGQLVHRRDNIMKQRTRLVNQLHEQLCIAYPSYKQFFNDISRPTALYFWEHYPSRKYLKGKSVEDLRAELVPVSHNKCSTKTCEKILDAVASDKVKNNAYQDARDMVTLSIVSDLQHYGSQLTEVDKMLEQMYKMLGCTLTTISGVNVITAVKILAEIGDFSNFESPDKILAYAGCSPSTYQSGKLTNCYAHMEKRGSRYLRYALYNATKYVCHWNPVFAEYLAKKRAEGKHYNVALSHATKKLVRLIYALQKSGKAYLVAA

SEQ ID NO: 72154 - protein, 393 aa, unidentified
MRTKTKVTQIGWDSHRKFSKVTARDESHRVIWRQRVDHSDREAIREQLHAWPEGTPVILESTFGWGWISDELLEAGLDPHLANSRKVAAWRDARGLAKSDRVDADLLSELWSQPSRWWEVWLAPSEVREQREWLRYRMSLVAIQTGLKNRTHAILHRHGIVNEHADLFGAQGRRFLSFLAGPGDMRLPESARVMLKGYLQLLDHLRRQIARVTQEFRRQLVRTPEGQRLMTLPGIGQILAYTIVAEVGRIERFADGRHLAAYSLLAPRANDSARENEAEAPKGRHVGHAGRRTLKWAWIEASHGAVRRGGRFREIYDRRTNGGTRDRNRGYIAVAHELCRVAYAMWSKETDYREDRPARPGATILRTELSSGNGPARPPYGRCRRKRQLQTSK

SEQ ID NO: 72155 - protein, 342 aa, unidentified
MFYIGADVSEKSSYIYVTDRGGKKIEGLEIPTDKDGYRQYFKKWVGKQVKVAVEAGGHSRWIHDTLKKLGISVYIVNPNKVKLIAKNKKKTDKVDAEFLAKLLRIDELPERVYVAEGQSRELRDLLGSRHQLVTSTTCIMNHLRGMLRQEGVKLKAKAFNDESTFSRLLTNKSVPKHLHPIITSYETIIDGLRKQRRALDDVIAEYGNKDIELLQSVPGIGEVASKTTYAAISTIKRFKRAKQLTSYCGLVPSVFSSGERANYGHITREGRSEVRHVVVQSVWAILRSTNSESKPLRKWYERLARRRGPKTAVVALARKLIEIIFYVLRDQRPYNAQLLHVH

SEQ ID NO: 72156 - protein, 347 aa, unidentified
MRFYTQQHQFYCGIDLHARTMYLCILNRDGEILLHRNMSAGPDPFLKAIAPYREDVVVCVECIFTWYWLADLCAREGIAFVLGHALYMKAIHGGKAKNDKIDAQKIAVLLRGGMLPQAYVYPAEMRATRDLLRRRLHLTRKRAELLAHIQNTNSQYNLPEIGKKLAYKANREGVVERFSDPAVQKSVEVDLALIGYYDQLLSDVELTIVQTAKEHNAQTLYRLQSVPGIGKILSLVLLYEIHDISRFPRVQDFVSYCRLVKCAQESAGKRYGTSGAKIGNAYLKWAFSEAAVLFLRHNPVGQKYLTRLEKKHGKGKALTVLAHKLARAVYYILRRDTVFDMDQFLHG

SEQ ID NO: 72157 - protein, 368 aa, unidentified
MDELITGFVGLDAHAESTAIGFAEAGRAAPRFIGTVGATRGELTKALGRLGEPGSLLIVYEAGPCGYGLARELGALGYRCEVVAPSKIPKKAGERIKTDRRDALKLASLARAGELTAVTIPDERDEAIRDLSRARVDAVRARLKARQQLQALLLRHGRRYTGKTAWTAAHERHLASICFRHAAQTIAFTEYRQAVSECDTRVKRLSEALAHEVESWRMQPVVGAIMTLRGLDLVAASTVVAELGDLKRFARPRELMGYLGLVPSEHTTGAKRRLGTITKTGNGHVRRVLVEAAWNYRFPARVSRALQIRQERQPAVIRQIAWRAQLRLSHRYRRLKARGLQHNKVCVAIARELAGFIWDIGRHVGPNA

SEQ ID NO: 72158 - protein, 351 aa, unidentified
MNATTVGVDLAKNRFELAVADGEFRIQRRERLTRAQFARFFGNHPCSVIVMEACGSAHHWARTLLSQGHQVRLLPAQYVRAYVKRNKTDAADAGALIEAARCSEIRPVPVKSIDQQTIQQLHRLRAQCMGTRTARINFLRATLREFGIAVPLGARRGITTVREVLADAGNDLPNLLRPFIHDALTEIAMLEERSVRIEHELARLTHEDAIVRALMNIPGIGLLTASALRAAIVDIQRFASGRHLSSWLGLTAREYSSGEKRRLGRISKRGDVYLRTLLIHGARALLNAALSAARRGRTLDQLRSWALLTERRCGYNKATVALANKLARIVWATWKYQRPFDGNWPTRTASA

SEQ ID NO: 72159 - protein, 397 aa, unidentified
MIRVGVDVGCKTHQVGIAGPSGTILEEFSIPHTQEGFGEFFRRVEHYRRKFRLPVAVAMEGYNGHARPLDRMIVEKGYRLYNVNNLKLARFREIFPGPAKTDSLDVRKILELFHLKDHLPLAKDVLQEVPEVPKENEKLKRLTRRRRQLVHEKVRVMKRMQADLQAVCPELLGLSRKVDNLWFLRFISCRDDVEELAQLTLEEIRGIPGIGVKYAGIIRGWQRRAEFSPEVEYVGPMIVADAKRILELLSEIAALKEAIEKLCEESELARRLRSIPGFGTISAAELAGEIGTLERFPSEASLALYLGMCPLDKQSGQTHGTRSPRQVNRRAKAAMMVAVAHHIREVPESRAYYEKKRAEGKRHNQAVRALGRHLVRVMWSMLKRGRDYELREVLCAV

SEQ ID NO: 72160 - protein, 425 aa, unidentified
MKVVYPVCCGIDVHKRFLIATIITTKAGELTPHYQKKRFSTFNNQILALKDWLLECHCYDVCMESTGKYWVPVSNLLEDVIHVTIANPKWVRAVKGNKDDKKDSQWIAELFRIGLVKGSFIPTKDIRVLREFSRYCTRLVSHRSSEKNRLQNAFTVGNVAMDSVVSDMFGVSSKKVRDYLISTEVFDPNHVITLLHGRMKPRSQELIASIEGYSFTDEQILRIQMIEEHKTYLDHSIEFLDHMLDQMIAPYELAIQLLASIPGIGRQSAIQIISEIGVDMTQFSSSKRLNCWAGLSPNSDKSAGKKKSVRISRAGVYLKPALVQCAHAAVKATEKSSYYHVKYEQIYKRRGKKRAIIAIARMMLTAIYHMLSTGEVWNPTDLYKIDMPDNLVQKQKDKAIKQATKLLIVEGLLPEDFVKKEPLLN

SEQ ID NO: 72161 - protein, 412 aa, unidentified
MKQIRDRVGGLDVHRDTVVACARVVQPDRSVEITKRAFSTTSKGLSELAEWLGETGVSTVAMEATGVYWRPVYYALEGLFGELWLCNAAHVKNVPGRKTDLSDAEWLADVAAHGMVRPSFVPPPAIRELRELTRYRKTQVDARVKELQRLEKTLQDAGIKLTSVASSVWSLSSREMIEAMIAGERDPKVLAEMAKSRLRAKLPELEEAFSGHFGSHHAVVCRQVLDHIDFLDRSIATLTAQITERLAPFEQAVTLLCSITGVQRTTAEVMIAEIGVDMGRFPTAGHLCAWAGVAPASYESAGKSRPAGTRHGAPWLRRALIEAARAAARTKGSYFSAQYSRIARRRGPNKAAVAVAHSILAVAWHLLSTGALYEDPGAAYFDRHHDPDREAQRLQRRIEALGYEVTLSGKAA

SEQ ID NO: 72162 - protein, 359 aa, unidentified
MIAEECVYSTWTHFQLQRKVDEMTRHIGIDLHRNCFTACTRAENGRGYVREWRMEDLDRFVRSLRQTDELAVETTGNTRLFCEKVAEHVAKVVVVNSAQFKLISHSVKKTDANDAELLSRYLSQGLLPEVRMKDKTHAQLASLTQTRDKLVKLRTILKNKINNMLSAHGINLQREALSSDRQLQSVLELPFAPMETIELKVLVGQIRSLNESIHTLEDAIQKEGEKLTGHKNLTSIKGIGPTSASILLSVIGDVDDFADEGKLASYFGIVPRVHNSNETERSGRITKRGSKLGRTALVQCSLVAKRYSRYLSDYYERIKSRRGGGKAIIALARKFLGIIYQTLKNNWIFEDFPNFVLAK

SEQ ID NO: 72163 - protein, 367 aa, unidentified
MKKSSTIAAKPSKKILQQRLTIGLDLGDRNRWYCVLDESGQIQREQRVRTNATALREVFSEMAHSRIALEIGTHSPWISRLLSELGHEVMVANARRVRLIGESRNKDDGLDAQTLARLARIDPQLLYPVKHRSAQAQADLMMIRARAGLVRARTGLVNMARGLAKSYGERLRGCNVRNLNPEKAEGLSPELQRALEPLLACIESVSEQIAEYNERIEKLAQDSYPQVALLKQVKGVGTLIALTFLLTLEDPHRFRKSRDVGCYLGLQPGRRNSGQSEPQMHISKEGDPYLRTLLVQGAQHILGPFGVDCDLRRWGLKLAERGGRSGKKRAIVATARKLAVLLHHLWVSGEVYEPLHNSNPRAMPAAA

SEQ ID NO: 72164 - protein, 328 aa, unidentified
MSKERFEVGVDVGQSEVWASLGSGKPRKFKHDESGVKQLYRWAKEKSGELLLHFCMEATGVYSQSLAVRLLGCGRCEVSIVNPAQIAAFAKAQMRRSKTDQIDAQVIWAFAQAQQPRCWQPEREAIQELAALVTQADALQKTQRSWKNRQHAHQYRPALPSMVRQTSAVVEETLKQQLEEVQNEIYRLCQADAELKRDVELLCTIPGIAKLTATRLLAYGKSALTERSPKELTAHAGLAPRHRQSGTSLHGRSRLSKQGDARIRCMLYMPTVVATDHNPIIKYHYQRHLTNHKPKMVAIMACMKKLLLMAQAILISQQPFNPNLIPLT

SEQ ID NO: 72165 - protein, 351 aa, unidentified
MTNNAKTEMVATIGIDLGKNTFQICGMNACGVVVLRHKFSRRKLGQQLANLPPCLIGMEACAGAHHIGRHLATLGHDVRLIPAQYVKPFLKGHKNDYRDAEAIAEAVQRPTMRFVPLKSADQIDLQALHRVRSRLVGQRTAVINQIRGFLLEHGITVRQGPAGLRQALPTILAQRSDVLAPRIVHLIEDLVEDWRRLDTRVEDVTREIVQLARQDENCKRLQGVPGVGPLTASAVVAAIGNGAAFAKGRDFSSWLGLVPKQISTGGRTILGSISRRGNRYLRTLFVQGARSVLLATKNLSKHELGRWLEAATPRLHRNVLAIALANKLARIAWSVLHSGRGYELNYKNHVA

SEQ ID NO: 72166 - protein, 349 aa, unidentified
MSQTAQTAVAVIGIDIGKNSFHIVGHDERGAIVLRQKWSRGQVEARFANLPPCLIGMEACVGAHHLSRKLNGLGHDARLMPAKYVRPYSKGQKNDFRDAEAIAEAVQRPTMKFVATKTADQLDLQALHRVRERLVSQRTGIINQIRAFLLERGIAVRQGHRFLRAELPRILATPPDVLSPRMARVIEDLAGDWRRLDERIESLSSEIEAVARQDAGCERLMSVPGIGPIISSAMVAAIGAGDAFTKGRDFAAWLGLVPRQMSTGDRTILGKISKRGNRYLRVLFVQAAWAVLIKPKSWERHGLKPWIEAAKKRLHHNVLAIALANKLARIAWSVLAHGRNFEVSKIQAA

SEQ ID NO: 72167 - protein, 343 aa, unidentified
MQIHSVGIDLGKTTFHLVALGSAGKVLVRKKFSRKQLLAYTANMPASLIGMEACAGAHFLGRALRAQGHDVRLIAAKFVKPFVKSNKNDFVDAEAIAEAVERKNMRFVPIKTDDQLDLQGIHRVRDRLISRRTAVINQIRAFLLERGMVFAQRPANLKAVMADILENAEADLTPQMRNLVDMLWDEWKLVEQQIEKLNLELEGISAADAGCTRIRQIPGIGPIVATAIVAAIGNGAAFRKGRDFAAWLGIVPRQHSTGGKTKLLGISKRGNVYLRKVLIHGARAAVLRIKRDRAPIGAWLDALDARAPKNVVVVAMANKLARIAWAVLSSGQDYRPTANAIAA

SEQ ID NO: 72168 - protein, 317 aa, unidentified
MSIYHNFIGIDIGKFSFIVACYGKNNVKEYENTSSGISAFFKEFKRELPKALVILEATGGYEMEVLLSLCDKGMAVHRANTRKVKSFIRSFGHAAKTDALDAKALALYGCERHKILDVFVPPSPHLLTLYTLVQRRHDLRKILVAEKNRSKGPKAGPIQDSCAIVIQTVEKQMELILKKIEELIEQDPVLQERQKVLMTIPGVGKIVSQELLSLMPELGTLNRKQAACLSGLAPRANDSGKLKGYRSTGHGRQGVKPMLFLAAMAARNSHSPLKEFYNNLINRGKKKMVALTALMRKIIVIANARLKKLPEEKLVTT

SEQ ID NO: 72169 - protein, 375 aa, unidentified
MLRFRLMIKRGLNETATSIRKVKRNMKYYAGLDVSVKETSVCIVDESGNVCREKKVISHPDDLVAVLSDPAFNFERIGLEAGPLSQWLFEGLAKARFAVLCIETRHTKAFLKAQQPNKSDRNDARGIAHMMRVGLFKDVHVKTLTSQKRRALLTARKLLQEKAIAMENDMRGLLRNFGLKVGTIRAFKFDQRIRELVEAAPDLTEIIEPLLAARQKLREEFAKLDRKVRGEARVDPVCRQLMTVPGVGPIVALAYTSTIDIPSRFRHSRAVGAVLGLTPVLNQSGESRRIGHVSLCGDAMLRGLLYEAAQVLLIRVKKWSWLKAWAMNVAKRHGAKKAIVALARRLAVVLHRMWVDGSEFRWTRETRPTTTGATA

SEQ ID NO: 72170 - protein, 344 aa, unidentified
MPSIAGGFDIHRKQLTFDYLDTVSGEVTRGQITPAGRGHLRAWLARLENPQDAAFAAEACTGWRYVAEELQRAGVQAHLAEPADTAAARGRKKRAKTGRADARLLRDLLAEGRLPECWIPPEHIVECRALLECYHDLRAEHTGWVQRIHATLFHQGAPAFHGLGLADGPGQLTALAREHLSPAGQAQIGTCLRMLAAAGAELTAVRHRLLAAAAHLRGAKVLTQSLHGVGPVTGLALTCWLGGAGRFSSARKAVRFAGLDITVYSTGGKRSAGHLSRQGPPVLRWCAYEAGKTHAHTTAPDHPCYAAVKDRAGGKRAALAEARKIVRQACHILTELGDDAFTIM

SEQ ID NO: 72171 - protein, 520 aa, unidentified
MVRVRDVLLAAHFFDDTWLPSDLVRTAVRLPKRLLRVFSSPYSHWIDNMVLPHTRQISSAEAHLAEQYKLVAMPVKHPHAAGIDVGDSSHWVCVDHTPDKPDSVREFPAHTRGLQELSAWLKECQITTVALEASGVYGHVLFLQLIEDGFEVVMTGPHFTRQIKGRPKTDKRDCQWIQRLHSLGFLPSIFQPDEPTQTLRDLVRQRANHVRLSAQHVQRMQKALQLMNLKLTHVLGDITGVTGLKIIRSIINGQRDPVELAKLRDRRCKHDEEEIAEALTGRYRAEHVLELQLCFTMWQHYQEVITTLDKAIDAHLQTMKRHDLPPLPKKARVRGRKPHDPKFDVRTTLYYLLGLDLTAIEGIDEIHALTLISELGTDFSKWPTVQHFTSWLGLCPNWKQTGGKVKSSRTRKGKGRAAHALCLAAWGLIRSKSYLGAYLRRMRVRLGAPKAITATAHKLARIIYALVRYGVAYQKKSEDDFAEQHRQRMEKNLERRAKEMGYELKKIEDSPSEIPDQLPA

SEQ ID NO: 72172 - protein, 352 aa, unidentified
MTLVGCDLHSRKQQVAVLDTDTGEVLEQELLHEGDAVERFYGALPRPVTVGIEATGYALWFHALMQKLGHTLLVGEAAKIRAMVVRKTKTDRRDAQHLLDLLKHDRFPTVWMPDPATRDLRGLIAHRVRFVRMRTMVKNGLHAIALNQRIALGPALWTKRGLAQLQALALLPHTAHRREDSLELLTWLTTRIDQLDAQIAAAAAADARAQRLLTHPGVGPLTALITVLVLGPAARFPTSKHVVSYVGLAPAISASADKYHLGKITKQGNALLRWILGQAAPLAARADDELKRGYFAVLHRRGRPKAKVALARKLLVRLYIMLRDQIDYDEFRRRGRARRSQPDRHPVAAPAM

SEQ ID NO: 72173 - protein, 322 aa, unidentified
MKIWCGIDWAEHHHDIAVVDEAGTLLVKRRIGDDLDGFGQLIGVLTDLAGAQHLEVPVAMETANGLLAASLLEAGYSLFAINPLAVSRYRDRYSPSRAKSDAADAYVLANILRTDPAAHRPVPADSEQAKAIRVLARAQQDAVWERQQAQAKLRSLLREYYPAFLAAFPDLADRDARAALAIAPSPAAAARLRRPSLRAALARNGRQRNLDHQVERILTELRVEHMRQPARVEAAMSAQALAHLRSLDAAVANAAALEASTAAEFATHDDAAIITSMPGLGPVLAARVLAELGDDHSRFADAKSLKAFAGTAPVTRASGLIG

SEQ ID NO: 72174 - protein, 433 aa, unidentified
MQDVHDEPLFAERVAGLDIAKAEVEVTIRVPSDTTAGRRQQETRTFGTTRRELESLGDWLTCWGVTKIGMEATSDYWKPVFFLLESRGFDCQLYNAAQVKALPGRPKTDRADSIWLAKIVERGMISSSFVPPEPIRRLRTHTRYRRHLTQTRTAEKQRVEKLLEDGHLKLSSVISDIHGVSGRDMLEAIAAGQHDPKALAQLARGTMRGKIRRLEEALDCSFFTGEHAAVLAMMLAAIDGCTAQIEALTARIEELIEPYLPQVEQLDEVHGIGTICAQDVIAEIGVDMTVFPTAGHLVSWARWSPQVKQSAGKRKGSNATGRGNPCLSAALGEAAISAGRTQSFLGAKYRRLARRMPKKKALVATGNSMLTIVHALLSDPDARYTDLGADYYEQRMHARRQARNHVRSLERLGYKVTVQAINPETGELLPAAS

SEQ ID NO: 72175 - protein, 313 aa, unidentified
MVEHPVFVGIDVAKASLDVAVHPTTERWTLAYTEREVAGLLSRLAALAPALVVLEATGGLEGPLVGALAAAGLPVVVVNPRQVRDFAKATGLLAKTDALDAAVLAHFAAAVRPTPRALPDAATQALAALVTRRRQLVAMLTAERNRLSSAPRALRAEIQAHIRWLQRRLGRLDEDLHQAIRTSPAWRAQDDLLQSVPGVGPVLARTLLASLPELGHLDRKAIAALVGVAPLNRDSGTFRGRRRVWGGRAAVRAVLYMGTLVAVRHNPVLRAFYQRLRAAGKLPKVALTACMRKLLTILNAMLKQQTRWNPSYA

SEQ ID NO: 72176 - protein, 339 aa, unidentified
MHVTTVGLDLAKNVFQVHGVDDLGEVLFNRALRRSQVLAFFERLDPCLVGIEACSTGHYWARELSKLGHEVRLIPPVYVKPYVKRGKSDAADAAAICEAVTRPTMRFVEVKTPDQQAILALHRTRDLVVRQRTQTINMLRGLLAEFGVVFPQGVGHAVQFAKHMLDGDCPDLPDVAGDVIAKLCEQLLFLHGKIAGFTREMMNVARREERVALLQTIPGVGPITASAIVATVGTGRQFSNGREFAAWLGLTPLNRSSGGKERLGRISKMGDQYIRRLLVVGMMSRMRQIIQNPERYDPWFADILARKPGKVAAVAMANKTARMVWAVMTRNEPYRVRTT

SEQ ID NO: 72177 - protein, 429 aa, unidentified
MSFRPIAGIDVGKFFSEMAILSPSNEVIARMKIHHDSTTDVERAVELLKKTEKDFDSRPFIVMESTGHYHKILFHSLCKAGLEVSVINPIQTDSIKNIGIRKVKNDKVDARKIALLYRFQELNTTNIPDEDIECLRSLCRQYYKLNDELTAYKNRLTGIVDQLMLNFKDVFSNIFSKAAIAVLEEYPTPSAILKANRNKLISLIQKNSRKSLKWSTAKYELLVSKAREFAPLSVHNSSNIAMLGVYLSMIRTLEDNLAKVLKAIHLLIAEDMAKDMPTLALTLELLQSLPGIGLLTAATILAEIGDFSAFSKPGKLVAYFGIDPSVMQSGEFTGTRNKMSKRGSRLLRRVLFTTALANIRTKRNKEACNPVLLEFYKQKCQSKPKKVALGAVMRKIIIYIFAVLRDRKPYQLRSPHEHAQMLAAKHTAA

SEQ ID NO: 72178 - protein, 568 aa, unidentified
MTPRFHPSAPAPDSDFATKPRPDPPPNPDQQAAGEYRQRKARTLAKMQDKQRVRVNAMPVLRAHAAGIDAGQSRHWVCIGFTDDPDNDHQLVREYQTHTDSLRQLVGWLKENQVTSAAVESTSFYAEVLVEMLEQAGIEVFLVDPSYTKQLQGRPKTDKRDAQWIFRLHSVGLLGSAFRPQEQTRVLRNYLRHRARVVRQAVRHIHHMQMALELMNLKLRCVLDDITGSTGLKIIKAILSGVRDPHRLAALRHTQCKHSAKEMVQALDGNYKDEHLFTLKLAYESWEFHQRQLDSIDQEVAKQLEKMKRDGALPALPRRKNNPKKANSARFDVRTALYYVVGIDLTEMEGIDELTALTIVSEIGTELSKFKTVGHFCSWLGLCPNPNESGKQKRPSRTRPGVNRTAQALRMGASSLHSSHSALGAYLRRMKSRMGAPAAVTATAHKLARLVYYALKHGMPYVRKTQEEYEAQIREQRIKSLQKKARQLGFTLIENPVRTGGDTPVPVVVTEKEEPAQEPEREKVKEPEPAQKLEKKPSKGAGTKKKAEVAGAAQAKKKTKKAAAATRP

SEQ ID NO: 72179 - protein, 418 aa, unidentified
MVHVHGALAQQLSARTRGVPLGELVAVPVDVGKSTAAAMACDFAGQVIVAPFEFALNRAGVAELAARVDARLPAAVRLVRVGVEAAGHYHRPLLADGVLPADWQVVELNPAWVTAQRRVNGSRGIKTDGVDLAAICDLLLAGRGNLVHAPVDALVELTAWVAHRRRRVAVRSALKNQLLGQVDRCFPGLGACLSSLLDTKAGRLVIAEFSDPARLARLGVARFRAFAARRDVRVTGAVAQRLVEAARQALPTAEAAVARDVLAADLALLGDLDAQVVAADAQIGAVLPATRYQVLTTVPGWGPLRAAAYGAAVGDPDRWPSARQIYRAAGLTPAQYESAGRRRDGGISREGSVELRRALLDLGVGLWHSEPVARGYAVRLRERGKPGGIIATAMARIAGRLAYAMVRDQTAYDPTLRS

SEQ ID NO: 72180 - protein, 315 aa, unidentified
MERLLYVGINVAKAHLDGAVLPTGEQWRTPNDEVGIADVVTRLRDPLPTLVVLDATGGLEFPVVAALAAAGVPVAVVNPRQVRDFAKATGKLAKTDSLDAQVLAHFAQAVRPEPRPLPDAQAQALEALLVRRRQVVAMLTAEKNRLSRAHAPVRQRVQAHITYLEQELGHLDADLGNALHSSPLWREQDTLLQSVPGVGPVLSLTLLAALPELGTLDRRRISSLVGVAPLNRDSGTRRGKRTVWGGRATVRAVLYMGALVASRWNPVLRTFYRRLCAAGKPKKVALTACMRKLLTILNAILKHRTPWQPNHVLNS

SEQ ID NO: 72181 - protein, 330 aa, unidentified
MDKIEACGVEVSAKELVVALGDQRGGTRLRRFANDARGHRALLSVLRRVGKVRVVLEGTGLYGLDVALALSAEESLELMVANPRAVRHFAQAMMQRSKNDQLDAVVLREFAARMPFRRWTRPTENALELWAIARRVQALTAQRAAEKNRQHAAGVSAAVPAAVRREISNSLRFLERSIARLQKEAQKRITAEAQLVRRYELLRSIPGVGEVSALQLLAELVLLPEDRDVRQWVAYAGLDPREHSSGTSVRKRVHISKVGNRHLRRALYMPALVASRHQPHLREFYERLQKRGKSKLQALLAVARKLLHAIYGMFRSSRPFEGALLFPPTC

SEQ ID NO: 72182 - protein, 328 aa, unidentified
MTMNPVLSAFNHVVAFEVAKDSLVIHVLPTDKQSVATNKPKAIRKALMAEMRRNAEASLGPLLVVCEATGGYERHVLAICVELGVAVHKAHGARVRHFARYLGLLAKTDPIDARVLALYGLKTQDLRLYIPLSPEVLALRDLKTRRDQLQEMLFAETSRLEHARHASVSRNLKAHIASLGKALVALEAEIAAHVKACETLARKARLMRTLKGVGPATVAAILAYMPELGDLKKGEAACIAGLAPINKDSGALQAPRHIEAGRAAVRKTITMTAVVAIRHNPVMRLFADKLRRKGKPSKVVITAVMRKLIVTLNAILRSGEPWSHAKIA

SEQ ID NO: 72183 - protein, 340 aa, unidentified
MKKVSTIGLDLAKNVFQAHGADASGAVIFRKKLRRAQVLEFFATQPACTVAMEACGGSHFWGREIGNCGHRVRLIPPAYVKPFVKRQKNDAADAEAICEAAQRPTMRFVAVKSEAAQGAAVVFRTRDMLVRQRTQIINALRGHLAEFGLIVAQGPAHVAKLIMAVQDPKQPLPEAARPILCVLVDMLNLLDQRIKLLDIAIARRAKEDEVARRLMSIPGVGPVIATAVAALAPPAETFKRGRDFAAWLGLTPLQHSTGGKQSLGATSKMGERTLRRLLIIGASSVVRWAARKGAPAGSWLASMIARKPAMLVRVALANKMARVIWALMAKGGTYRAPVVA

SEQ ID NO: 72184 - protein, 416 aa, unidentified
MKIVRPICCGMDVHKNIIVATIGITNKKTRITEYIQETFSTLNPDLLNLKQWLINYKCFDACMESTGKYWIPIFNILEDEINIYLTHPKYVKAIKGKKTDKKDSKWICDLFKHDLIKFSFIPPKEIRALREISRYRYKLVGMRSSERNRYQNCMTVSNIGIGSVFSDPFGKSAQAIMKEVLESDIIEDEKILKCVHGSCKNKDKILDSIKHCNIETDQRFKMNESMTHMEELQVHIDNCEIEMMKRAAPMFDQFMHITQLPGISTLSAILIISEIGVDMKQFESDKQLTCWAGLAPANNESANKKKSVRISKAGQYLKPLLVQCALGAIKDKEGYFGIKYSRIKKRRGHKKAIIAIARMMLVSIYHMILTGETFNPSDYESFRNPKPPIKQQDLTEESAIEFLKKSGFDVSKLTKP

SEQ ID NO: 72185 - protein, 459 aa, unidentified
MSRRPKKTKRAGQGGAVPSLRCIAPHAAGIDVGAIEILVAVPQDRDPSPVRSFETFTEDLHRLKSWLQPCGLTTVAMESTGVYWIPLFQILERAGMEGCLVNAQPVKPVPGRKRDVIDCRWRQSLHSVGLLRASFRPEERICGIRSLLRHRDSLVQMAAAHVQPMQKALTQMNLQLHHVLSDITGQSGLAILDAILAGERNPAVLAQLRHARVQASEEVITKSRVGDYQREHLFTLRQSLQAYRYYQSLITTCDQEIAEPRQNLDSRTPPDASPLPPERYPHRPRKNEFRFALRSERYRIYGTDLPAIPSINALTGYTVLAEVGTDWSKFRNGDAFASWTCLCPQNKKSGGKILSAHTRRSANRVNRALRLAAQTLERSTSYLGAYYRKMRARHGAPAAITAAAHKLARIIFHLVTTGQAYDESLFAAEDQRQRKRMENKLKRSAHQLGYQLIPLGQTA

SEQ ID NO: 72186 - protein, 337 aa, unidentified
MELYCGLDLHSRNTYIGILATDFKRVFKKRVSNNLNLILETLEPFRDQFKGIVVESTFNWYWLVDGLMEAGYDCVHLANPSAIKQYEGLKHSDDQHDAFFVAQLLILGILPQGYIYPKEDRPVRDLARKRMFLVKHKTAHILSLQSLIARCCGQRISTNQIRNLKSADLRQLLREQYLFLSAQANLNTIAFLIQQIKALEKAIKKKVKLDKAFEQLMTVPGIGFILAMTIMLEVGDISRFAKVGNFASYCRCVSSQRLSDGKAKGSGNRKNGNRYLSWAFVEAAQLGRRYSQRFGRYYDRKAAQTNTIVATKALSNKLARICYYIMRDQVPFREELF

SEQ ID NO: 72187 - protein, 342 aa, unidentified
MKELKQVVGIDVAQKELVVTIGRLLEDLSVDLFSYKVFKNNDKGFLSLVEWVTKLVENPQEVHYIMEATGVYHQKIAYFLDTNQLKVSIVLPNKISNYFRTLEVKTITDKTCSQVIARFGLERKLDLWKRPKTVYKNLQQLTRERDQIVAERVIVKNQLHAEKIEAEPNLMTLKRINERIKLLNKQENEIKNDISKILKNSAELRKEIDRMMTIPGVGELTAVIILAETNGFELIRNKKQLTSYAGLDVKEKQSGTSIKGKPKISKKGNRSIRKAMHFPSLVAVKWDENFKELYARLVSKHGIKMKALVSIQRKLLEMSYVLYKNQTIYDKEHKNSVQTQMP

SEQ ID NO: 72188 - protein, 388 aa, unidentified
MQVAADRTDASTAIQTDLPAIFASLELSRSTWLITSLSPGAGEKMSKHSIRAGDVAGLLMRLAQLKEKARGRTGRDFPIIAIQEAGLDGFWIHRVLQSEGIESHVVDAASILTSRRRRRAKTDGIDGETLVRTLLAYKRGEPRVCAMVKAPTPEEEDRRRICRERKTLVGERVEHVNRIKGLLFAQGVSDYEPLKRNRRARLEELKTGDGRPLPAHLKAQISRELDRLELVLPQLKAVEAERDALLKPVSEGCPTPVAMLAQLKGMGPEFTAILWSEGLFRSFSNRRQLAAYAGLAPTPWQSGSVAHEQGVSKAGNPRLRTTMIQLAWLWLRHQPTSALSVWFQERVQSNGGKMRKTTIVALARKLLVALWKYSTSGVVIEGAVMKTI

SEQ ID NO: 72189 - protein, 346 aa, unidentified
MQNDTLVAVDIAKEVFEVGISDRPGRVARRRRLARYEFLEFFAQLPPATVVMEACGSAHFWARRIEELGYVVVLLPPQYVRPYVVRNKTDRTDVNGLLEAFRNEQIRPVPIKTVTQQVFGTLHRLRSGWLADRTRAINSLRGLLRELGFFIPEGRKHVLPDAWEIIQDPKRGLPDALKPSLSALCQEILSHSTRIEEIEAQLEALAKQVPVVARLRSVPGIGLLTATALYAFIGDVSRFPSGRHMASFLGLTPSEYSSGLRRRLGRISKRGDTYLRMMLIHGARSILWHAKRTKNRDRLRAWALRLECKLGHNKAAVALANKLARITWAVWKHDRSFEPMPELQAA

SEQ ID NO: 72190 - protein, 428 aa, unidentified
MNCNTQNAKIASITEKTLIVGIDVGSGTHYARAFDWRNYEYSRKPLEFSNTEAGFQTLKSWMEELAGKHGKTAVIPGMEPTGHYWFALGKFLQDNGMKPVHVNPHHVKKSKELDDNNPNKNDRKDPKTIAALVNEGRFSYPYIPTGIYAEIRSLSNLRFQTQEELTRIKNRLARWFAIYFPEYKDVYGDLTAVSGRMVLKAAPLPGDIIRLGAEGVNQIWRDAKLRGAGMKRAKTLVTAAGHSVGSREAPEAARMELGNLLKDMDVYASRQEGLLRSIEEKLKEVPYIDKLLAVKGIGMVTVSGFIAEVGDIGRFDNPKQLQKLAGYAIVSNESGKHSGESRISYRGRKRLRYVLYEAAISLTGKNAEFREIHEYYRTRKENPLKKMQSVVAVACKALRIFYAILTKGVDYDPRKLLGDIRRPQAQEA

SEQ ID NO: 72191 - protein, 417 aa, unidentified
METVVEKCAALDVHQASVVACLMVGAAGRPVRKEIRTFRTMTSELLALKSWLQNEGCTHIAMESTGVYWMPVYNVLEGAFELIVGNATHIKNVPGRKTDVKDSEWLANLCRHGLIRKSFVPPPALRELRDLTRYRRKLTESHTAEGNRLHRLLETANIKLSSVVSDLLGVSGRLMLRAILKGESAPAQMADLAKRKLRSKIADLTLALEGRVTEHHRFLLQMQLDRVEQVERDLEKLDARIDEKLAPYKKQLEQLKTIPGVDWICAATIIAELGVDMSVFPTAEHAAAWTGVAPGNNESAGKRKGQPTRKGNVHLTTALVQAAVCASRKKGSYLKEKYWRLKARRGPKRAAIAVAHKILVGAYNMLRTASDWKDLGEPYLDRLAPNAVKAQLVRRLEQLGYQVTLEPLQPPAIPTSA

SEQ ID NO: 72192 - protein, 398 aa, unidentified
MSLDHSFAGPTAIRVQFGAIFVSLELSRSTWLVTSLSPGRERMSKHGVKAGDIAGLLGHFAGLKRKAMTRTGEDYPIVVIQEAGLDGFWIHRVLQGEGIKSHVVDAASIAAPRRRRRPKSDKIDGEGLLRVLLASKRGEPRVCAMVVAPSPEEEDRRRVCRERQALICERIAHVNRIKGLLFSQGISDYAPLRRDRRPRLEALRTGDGRALPLHLKAQIVRELDRLELLLDQIKAVEAERDAVLVEVRQSAANAVTICESNALHPIAMLLALKGVGTEFTNTIWSEGLRRRFANRRQVAAYAGLAATPWRSGSIVREQGVSKAGNPRLRTAMIQLAWLWLRHQPQSALTRWFNARGQRGHKGWRKSAIVALARKLLVALWKYVTQGVVIEGAVMKGAA

SEQ ID NO: 72193 - protein, 276 aa, unidentified
MDHIGIDVHKRESQICTLAEGGELVERRIRTEPERFAAVLGNRPRARIVIEASTDSEWVARCLEALGHEVIVADPNFAPMYATRTRKVKTDRRDARALADACVLGAYRRAHRLSDVQRHVRGRLLVRDALVRTRTRYISAIRALLRQQGYRVSSGSAEAFPARVRALALPGPLLSLIAPLLAVMRHLNRQLAYSGETIERVAAYDERVQRLRSVPSVGPVTAAAFVATIDDVQRFQHAHHLEAYLGLVPRECSSGDTQRPGPITKAGSGRTRWLLI

SEQ ID NO: 72194 - protein, 344 aa, unidentified
MGRHYVGLDVSLETTSVCVLDEKGGVLWRGKVASTPEAIAAAVRAHAPEVERIGLETGPLCTWHWHALREAGLPVVCLDARHAKAALSLQLNKTDANDAYGLAQIVRTGWYREVAVKRLDDHRVRALLSSRAQLVDMRRDLGTKTRGLLKTFGRVVGKVGERGYEARVRELAAGQAGLEEAVSALLAVRERLEQQIRALDERILELAGRSDACRRLTTIPGVGTLTALSFVAAVGDPARFSKSATVGAYFGLTPRRYQSGETDRDGKISRCGDVLTRTYLFEAAGVLLSRVARWSALKAWGTRLAKRVGGKKARVALARKLAVLMHRVWADGTEFRWSKEAATA

SEQ ID NO: 72195 - protein, 311 aa, unidentified
MTAAPQWIGIDVSKKMLDVYSQNLGAFRVANSAQGLDTLIAKLAKITVAGVVMEATGGYEQAAHQALMFHGINASIVNPARVRAFATGTGQLAKTDKIDAQILVHYAAFKKPAPTPLASTARAKLKEILAYRAQIVAEITARTAQLRHFESQDIVERATAAITSLKADRKSLDAEIEALIKADADCETAYRIVTSVPGAGLIVAATLICELPELGSLNRRQIASLAGLAPFPRESGQRKGYRAIRGGRAEVRTALFNAARVGIRFNPKLKVFAERLVAKSKPYKVIIVAAMRKLLTILNAMLKANEMWRLT

SEQ ID NO: 72196 - protein, 350 aa, unidentified
MLIIGCDYHPGVQQIAFMDTETGEFGERRLEHGGGEAEKFYRDLQRRGISVRVGMEATGHARWFERLLEELHFELWIGDPLEIRARRVRKQKTDRHDAQLLLKLLLEDRFPRIWVASWENRDLRQLLWHRHRLVQMRTRIMNQLQAVALNEGVRQKKRLLGQAGRTQLESFVLAPWASRRRHELLELLDRLNPSIRELNAAVEQEATKRPEVRRLMTHPGVGSLTALAFVLIVGTPQRFACGKQIASYVGLVPTEESSGGRRRLGHISKQGNSLLRFLLVEAAQATVRSDPDWRRKFMHLAMRRERGIAKVAMARKLAVRLYWMWRKEWDYEQVKRFGSHAGQPGNPLGV

SEQ ID NO: 72197 - protein, 408 aa, unidentified
METSESSRRQLAGLPLIRGNVAGIDLGSERHWVCAPTLDGRGREIADFGATTPELVRMAEWLKARQVESVAMESTGVYWIAPHEVLEGQSFKVLLVDTRQLARVPGRDKKTDPTDCEWIQRLHACGLLRGSFRPEEAVCMLRTLVRDKANLVAESGDWVRRMQKSLDQMNVRVHRAVSDIDGVTGMAILRAIAGGERDGQKLAKLRDPRCRKSEQEIAEQLSGHWREDHLFSSQQALKMYDAVQERIAAYEKEILRKLGEMERDELQGQTASPLPNANKAQAIRKRGQEAKRQALFRMSGVDVTQIDAIGVETVEVVLSEYGSDLSRFPSEKQFVSHTTLAPHVPTSAGKPVKKKKRNSASTRVAAALRMAALSLRHSQTALGAYYRKIAQRKGGDIAVFATARNWPL

SEQ ID NO: 72198 - protein, 363 aa, unidentified
MINPPSVIGGVDTHKYTHHAAVIDDQGRLLGDQGFPATAAGYGELLTWIRSHGRVQAIGVESTGSYGATLTRLLTGAGERVIEVNRPNRQARRADGKSDRLDAEQIARSVLGLTATATPKAKSGSVEVIRTLRVTRSSAVKARTQAFNTLHGIVIGAPSSLRDELVKLSKRTLVNRCSGLRPETESLTELVDHPDRFLLASIKLTLRNLARRWKDLDAEVKALSCQIKALVELAAPELVELFGVSFELAGQFLVTSGDNPQRIRSEAAFAKLCGVAPQPASSGRTTGRHRLSRGGDRNANSALYIVTIVRMRHHEATREYLARRTAEGLSKREIIRCLKRYVAREVYAALPRSSVETVPSLAA

SEQ ID NO: 72199 - protein, 398 aa, unidentified
MMMSIDQFAAHVGLDWADKKHDVCIQFKNGERRFEVIQHTPESLDTWLNTLHKQVNGRIAVALELKKGPIVYALQKYPFITVFPVHALSLARYRQAFSPSGAKDDPQDAELALDLMLRYPEKIKPIEPSTGELRLLQQLVEQRRLLVEDKRRFVNRLINTLKQYYPQPLEWFSHRDSGLFLDLIARWPSLQLLKRARANTIRRFLNSKGGPAVKHTESRIEHIRNALPLTTDQYVIEANMLLAVTQVKQIKLVVESIKVYDVRIDELFKTLPDADIFKSLPGIGPCMGPRMLAALGDNRNRFNSAEEIQNYAGIAPVTERSGQKSWVHWRWQCSKFVRQTFVEWAAKTVHTSYWAGIYYQGQRSKGKSHQSAVRALAFKWIRIIYRCWKTKCCYDEAK

SEQ ID NO: 72200 - protein, 357 aa, unidentified
MTSSDVKYIGLDVHKEAISIAVLNGAGKLVMESIVETKASTLLDFLHGLRGELHVTLEEGTWAAWLYDVLKPHVREVVVCNPRRNALLKEGSKSDKVDARKLAELLRSGMLRAVYHGENGLRTLRELARSYEVVSKDLRRVMNRVKALYRGWGIPCTGMQVYTRRHRESWLNKILEPGVRRRAELFYQQLDGLQTLRRTVRGEFLAESRKHQAVKILRQIPFIGPMRAAQLVALMQTPHRFRSKRQLWTYSGLAVETHDSAQYRYVDGQLQRSKKPQQVRGLNQNHNHAMKEIFKGAALSAALRAGPFQDFYERLLSKGMKPELARVTLARKIAAITLTLWKKGECFDAGYVKRQAA

SEQ ID NO: 72201 - protein, 358 aa, unidentified
MKILGCDLHARQQSIAMLDTETGEFSEKTLSHEGNVVREFYASLAGPVMVGIEATGSMQWFLELLEELQIECRVGHPAKIRAAETRKQKHDRRDAHLILDLLVMKDRFPQIWMPSSEQRDLRTLLRDRDQWVKMRARLQHTLQAIALNHALRQGPGLWSGAGQSALQALPLPPYNRQRRDELLRLYRQLQRRIQELDKEVDVQAGRRPQARRLLTHPGVGPLTALATDVFLGDPSRFATANQVASYIGMIPCEHTSGKRQRLGAMSKQGNAMLRYLWTEATIHAVQKDAELKRFYRRKLIQKGMGKAKIAAARKLGIRLWIMMRDQIDYEEFCRRGMLRQTGKAHAGMPDYNSGPAQQ

SEQ ID NO: 72202 - protein, 461 aa, unidentified
MRKARKVAGRRGKKLVDVTANLEILHPHAAGIDVGNAQHYAAVPVGRDPQPVQTFGSFTADLHRLGQWLRSCKIETVALQATGVYWMALYEVLESYGLQVYVVNAKHTKTLPGRKTDVLECQWLQKLHSFGLLNNSFLPPEAIRVLRTYLRQRENLVAGAGTCIQQMQKVLTQMNVQLANVLSDLSGRSGMEILKAILSGERDPYRLAALADPRVQASRKEIAQSLEGHWREDLLFVLRQVHDLYFFHLDNIAECDRRIEAHLQTLESKLDLATQPLPQPTSLPRRKHIPQTNLQEELYRIAGVDLTRIDGIQVQTAQIVLSESGVDMTHWQDEHHFASWLGLCPNHRITGGKVIRRGTKKVLNRAATALRLAAQALHHSHSYLGAKYRRLRAKLGAPKAITAMAHQLARLIYRLLRFGTDYHDKGMEHYQRQYRQNQMNWLKKQAAQLNMQLIPNTGVAR

SEQ ID NO: 72203 - protein, 394 aa, unidentified
MQTIGIDVGKRQHIAAICHEGEREARKAVLRFASDRAGFTELERWLERHGPVERAVLESSGHYHLNLAAALQRRGVPVAVINPLESKYFGKRRLQRTKSDPADARTLALLAMVDQPEVRDVLAGAELREAARFAMALVDEQGRICQKITRLVELGFPELERAYDDPTCTSALAVLRQAPTAPAAARKRTATLAAAARPGGGRRIGATKAGQIHELALDTIAAPELAPQIAFQMRLLIAQYDLLESQIKEAEAHLGTLLDGELVRRLRTIPGVGPAIVATLIAEIADIRRFSEFDKLVAYVGVHPAEKSSGAKGVNPETSWRMSKAGNAYLRTALYRMAIVGITHNPIIRAHYARKRAQGKSKMNAVGHCMKKALAIVWGVWRSGEDFAAPPSTP

SEQ ID NO: 72204 - protein, 427 aa, unidentified
MARAIGLDVHLEFCEVAIAEDRAVRSAGRVETKPDALELFAQSLGPDDRVALEVTGNAWEIARIVEPHVARVVVVSPADTGIRQARAKTDRLDARTLARLLWSGELDAVWMPDRVTWVMRRRLSRRGQLVWTRSRAKNEIHAVLMRCLVGRPPFADLFGVKGRRWLAELELPVEERETVDAGMRQVEFLDTEIAAVERLIARDALASEEIKRLMTVPGVNVIVAASFVAAIGDIGRFHNPRKLVGYLGLDPRVRQSGSGPASHGHISKQGSVRARHALVESCWSAVRQPGPLHAFYQRVRARRGHSVAIVACARKLACLFWVLLTREEDYAYAQPSLTRKKLRLLELAAGAQRYSPAGDGVWHANEAVRAAERELAHQAEIAYQRTVRDYHATQATKTGAGATPGRASSGRQSGKHRGRATVPDPAL

SEQ ID NO: 72205 - protein, 418 aa, unidentified
MSQNLNTLYIGIDVSKESNYVYITNFNQSFKKSFNTLNNIHGAEMIETKLLEILDGKEYTDIVCVLESTGIYSAHIATYLSNSFALLRYRILVYCINPKISRNYRASFSDMDKTDPKDSYILADIARVGRTKDLHPFKGSQKLALQRLTRHRVHLAELLTKEKTYALTNIYLKFSEFGKSDYTFTANKWSNTALSVLEEYSSPEEIINTSLEDLVDFIITVSKNKFANPSNVAKLIKKAARASYRLDQVAYEPINHAISSSLILIRTYDAEIKKVNKSINDLLKGFNLPEYLSLRSIPGIGPVFAAGILSEIGSVHQFKGEESIAKYAGITWRKNQSGNFEADDTKMTKTGNQYLRYYLIEAANSVKNYIPTYSTYYHKKFNEVTNHQHKRALALTARKLIRLIYGLMSKGQLFNKNY

SEQ ID NO: 72206 - protein, 403 aa, unidentified
MYAVGIDVSKGRSTVAVLEPLGKTVAKPFEVRHTKSGMNDLVNYLNTLDGECRVVLEHTGRYYEPMIRWLSGAGLFVSAVNPKLIKDFDNNSLRRVKTDKADAKKISRFALDKWYMLRQYTAMDNIRAQLKIMNRQMSFYQKQQTAYKNNLIALMDETYPGANKFFTSPKRPDGSEKWVDFIEKFWHVDCVCNISLKSFTEKYQKWCKKRGYIFQPDKPAEIYNASQELIPILAKDDMTKLFVQQAVTQLNAISKAVEELRQQMNSLASKLPEYPVVMSMFGVGTTLGPQLIAEIGDIHKFSKRSQLTAFAGVDPGVNESGDYAQKSVHTSKHGSPYLRRTLFLIMEVLIQKHPEDDPVYRFMAKKRDEGKPYYVYMTAGANKFLRIYFGKVKEYLSNLPLEE

SEQ ID NO: 72207 - protein, 370 aa, unidentified
MLDTTIFVGLDVHARSIKAVSLDVMTGEVRCATFGYDAGAVAEWVRSVDPKAKCVYESGVTGFDLQKRLSGLGVDCVVGAVSKMIKPSADRRRKNDRNDAEFLARMLSVGNVVEVWVPDDECEAARDLTRALEDARDDLSRSKQRLSKFLLRHGLVFDERTPTGRRKGNWTRAHWSWIESIRFAEGADNEALAYYVDAVRRAAEDKARLEGLVEAETRKPRWRKRVDSLRCLKGVDTATAADLVFEAGEFSRFRNARSFAAWVGLTPSEHSSGESDRRGAITKAGNKHLRKALVEAAWHYLTCSARPKEPAGGQAPDPGARRHAAKGVRRLVERRGALLARGVHNNKANVATARELACWVWAVGLMAEEA

SEQ ID NO: 72208 - protein, 437 aa, unidentified
MRVLYEHVAGIDVHKDMIKVAIRSPGEKPWTRKTEILEFRTFYGVLQEMARLLRRRGVTHVVMEASGVYTDPVYYALCEQDFAEVAVVNPAHARALRGHKTDAADCRRPAELFECGLLRGSYIPPAELREVRDLTRYRMKTVQARTSEIQRLGKALESAGIKLGSVASDITGKSATAMIDSLIDGERRGAVLADLAIGRMRTAGKLADLSMALTGRFTEHHALLCRLHRDRIAGLDAAVADLDDQIAGRAGRWQRELDLLKTVPGFGDVVAQTWLAEIGPAPHRHFASHEKLASWVTLCPGNNISARKRKHGRTGDAGTYIKPMLIQAAWNAIRPKGRLQARYSRLVRRFGGEKNPGAKKKAITAIAHTLLKIAYQVLKSEVPYQDLGADFYTRRESPDQQRAYLERRLRKLYPGCAITITISPPEAVLTSTVSNAP

SEQ ID NO: 72209 - protein, 340 aa, unidentified
MNHYVGIDVSLEASSLCVVDANGKIVREGKVASEPDALIAWLRGLKLELTRIGLEAGPLSQWLYAAMRQAGFAAELLETRHVHTALETMPVKSDRNDARGIAQLMRLGWFRPVHCKSMAAQETRALLTARKLLQTKLHDLELSLRGILRGFGLKVGPTTPVHFEGRIRELVAGHPSLEVIADGLLAARVALRRGFDRFEKQVRDAARRDTRARLLMSIPGVGAIVSLSFAAAMDDPARFKSSKQVGAYFGLTPTKYQSGETDIDGRISKIGDASVRASLYESANIILTKPLKGCTALKSWAMKVARRSGMKKAKVALARKLAVIMHRMLADGTSFRHAAV

SEQ ID NO: 72210 - protein, 352 aa, unidentified
MNITTAAADLAKDLITVCAQDSSGRTVERRDLRREAFLPWLRRLPPGCLIGMEACSAAHHWAREMAAMGLVPRIMAAEFVQPFRKSRAGKNDRNDAEAIAIAMREANMRFVAIKSVEQQARLSNHRIREGWKEERTALGNRVRGLLAEFGISIPKSRVALGRTLAEAVHDERLPESVRTIVRSAREHLATLEARIGECDLAIGLACRNDPAARRLQELCGVGPTIADAAIATIGDARAFRNGRQFAAWLGLTPRQFSSGGVARLGSITRRGDAYMRTLLVQGARSALNSAIKCPPEKATRLQLWIVQLRARVGYHKTLVAIANKYARVIWALLARDESYNPEAWKRLSPETN

SEQ ID NO: 72211 - protein, 346 aa, unidentified
MLVIGCDFHPGWQQVCWVDTMTGETEEKKLVHGSGEAERFYRQLSGPALIGMESTGNHQWFLEMVTAAGHELWVGDAAKIRASDVRQQKNDRRDAALLLKLLLDGRFPRIWVPSSEQKDLRQLLIHRHKLVRVRAQVKNELQHLALNQGVQRKQRLWSAAGQKVLNELALRPWGSRRREDLLKLLAMLDQQIAPLDLAVEQAAQENSQAKLLQSQPGVGPVTSLAFVLTMGDVSRFPRGKQVASYLGLIPREYSSGGHQRLGSISKQGNRFMRMLLVEAAQIAVRYDPGMRNEYLHRCHSKAKGVAKVAAARKLAIRLYWMLRTQKPYPEIVRIESSSRVALVGES

SEQ ID NO: 72212 - protein, 370 aa, unidentified
MTQSTTLYVGLDVHKDSIAVAYVAQEHGAEVTYLGTIGTRQGDIDQLIRKMQSKAIHLVFVYEAGPCGYWLYRYLTQKGHVCWVVAPSLIPKKAGDRVKTDRRDAIQLARLMRSGDLTPVYVPRVDDEAIRDLTRAREDTIRDLKAAKFRLKAFLLRHDIRYTGRATWSPAHLRWLSEVVCPTPAQQIVFQEYVRAVNEHTERLQRLEQELHEQVTSWRLQPVVAALQALRGVQFTVAVTTLAELGDLTRFETPRQLMKFLGLIPSEYSSGERRRQGSITKAGNTHARRALVEGAWAYQYPAKVSRHLQLRLETQPKAIQDISWKAQVRLCKRYRKLMARGKHANQVVVAIARELVGFMWAIAKHVAVTP

SEQ ID NO: 72213 - protein, 454 aa, unidentified
MSCHLMACLSWSPSSLPGRVIGTREQPLRGPNNEEPTVDPAPAAMSACRGDQVFCGWDWGSTRHGVCVIDAEGVIVRRWLVQHTDDDLARLFEELDDVVDAKALPIAIERGEGLVVGLMADAGHPVLMVEPAAFKAARPRWGSAGAKSDLGDAFMLADYARTDGHRLRRIEPVCQATRELGALVRARASLVEARTAASNQLWAVLAEHWPGAGVLFQKLISPIALAFLTDYPTPQSAALLGEGRMSLFCKRHAYRGAKTPVELLGRLRAAPASADPIAPAVLTVIVWSSVAQIRMLNTEIAQLERELRTALSTHPKAGLLETLPRVGRVSLAQLIAEIGPLLDRCDNPEQVAAMCGAAPVTRASGKTRTVGFRYAANKPARVAITGFADNSRHQSAWAGDAYRRARARGARHPHAVRIVARGWIRVIWACWHTGTVYDPSRHRREQLLTTPDLT

SEQ ID NO: 72214 - protein, 343 aa, unidentified
MQIRSVGIDLGKTTFHLVALDDNGKVLLKRKFTQKQLITFTANLQTSLIGMEACSGAHFLGRALRAQGHDVKLIPAQFVKPFVKSNKNDFLDAEAIAEAVDRQNMRFVPIKTDDQLDLQALHRVRDRLIARRTSVINQLRAFLLERGLVFAKSPAKLRERMPEILENADEDLTPRMRNLLALLWNEWKDLELQIEEMNDEVERIASSDAACMRLRQIPGIGPLIATAIVAAIGNGAAFHKGREFAAWLGIVPRQYSTGGKARLYGISKRGNNYLRKILIHGARAVVLRSKRDRIAMGAWMTALEARAPRNVLIVATANKLARIAWAVLSTGQDYRAVQDPVPA

SEQ ID NO: 72215 - protein, 419 aa, unidentified
MKRIKTGKRKIVNEKTLLVTVDLAKTTDMGYWRCPNGMDIKPFEFLNNRQGFDKFWDRISQAKIANHLEKIVVGFESTGAYGEPLAHYLMKKGVQLVQVNPLHTKRLKELQGNSPGKTDRKDPKVIADIVELGHALTVVIPEGISAELRRLTHARERALQRRTAFYNQIQDLVFILFPEFLRVMKDIKTKTTQYLLRHYPTPSDIVKCGREVLVSIVRQISCRRLGRDRAEALYEAAWQSVGIQEGQRGILFEIQEILFGIETCDRFVGKLEQEMSDLLEQIPYSRSILSIKGIGKVTAAGLIGEVGDFSKFRTLSEILKLAGLDLFEISSGQHKGACHISKRGRSVLRKLLYFAAINMIRQGGVMYETYQRYLQRGMMKGKALIAIARKILRIIFALVRDHSQYMDNYSETKPLKLAA

SEQ ID NO: 72216 - protein, 448 aa, unidentified
MHTEHYHKNYIMAKVINLHAAGIDIAANIHYVAVDSEKCKNPVRSFKAFTHDLHKLAKWLVSLGIETVAMESTGSYWFQLYVILLDYDIEVFLVNAAHVKNVPGRKTDVIDAQWLQELHASGYLNACFQPDNLTRELRTYVRLRKQIIREMAKETQHKQKAMINMNIKLHDVISDINGKTGTSIVNAILKGERDPKRLALFHNKRLKCSKKTLIKSLEGNWMNEQLFCLKMADNKYCELEKHLIDIDNQSEKIIRLLAQDNVKKKTVKKRITKKNQPKFNIEQHLYNVHGVDVMNIYGFKQTTALTVLSETSANLKEKFPTVKQFLSWTNLVPNNKISGGKILSSKVRKRKNHAGQAFREAANGLWNAKNPFGDYLRAKKAKSGAGQAIVATAKKIATIYYKMVTEKVEFDPYIIDGNRQAYLQKRARLLSKSLEKINTHLSLMYNVT

SEQ ID NO: 72217 - protein, 375 aa, unidentified
MVYSEYPNQETKRREFFTFNFSFFKTISMRKIVKQVAAIDVDQKSLVTTLGRMYDDWSPELYAHKTFANTQKGFEAFLAWVKNNKMNEVPVRFVMEATGVYHEGLAYFLDDHAEEVTIVLPNKISNYMRTLEIKTITDKTASEAIARFGLERKLELWKRPKDIYKKLRQLSRERDQLVVERTMVKNQLHAEKAEAEPNKSSIIRIKARIKMLEKQEQEIRAELSTLVASNDEVKQIVVLLCSLTGVGILTAATVLGETNGFELIRNRRQLASYAGFDVKEKQSGTSVKGKPRISKKGNKYLRKAMHLPALCAIKHDERYKAIFARIVSKHGIKMKAAVAVQRKLLEMMFTLYKTNTKYDKEYLINKAAHTTTLSI

SEQ ID NO: 72218 - protein, 319 aa, unidentified
MNITPCFVGIDVAKHTLEIARTASKESNESWTVPNNPEGFRAIVTRLRRWKPALIVMEATGRLEVPLALTLGAERFPLAIINPRQVRDFAKALGILAKTDRIDAQVLAQFAKTVQPEPRPLPEAAARELAQRLARRRQIVEMIVTEKNRLDQADPDIRPEIQRHIDWLGKELDQINHDLEQKIKASPLWRNNDQLLRSVPGVGPTTSHTLLIGLPELGLLNRQQIAALVGVAPRNRDSGNFRGKRTTWGGRAQIRSVLYMATLAATTFNPVIREFYQRLVREGKAKKVALTACMRKLLTILNAIIKDQLPWRKTLIQNI

SEQ ID NO: 72219 - protein, 345 aa, unidentified
MTSVATIGLDIAKSVFQVHGVDAAGQVVVRQRLARRRVPAFFEKLAPCLVGMEACSSSHYWARELMARGHQVRLMPAQYVKPYVKRGKNDAADAEAICEAVTRPTMRFVPVKTPEQQSVMMLHRVRLMLNRQRTQLSNSIRAHLSEFGIVAPIGRRGLDQLLGVVADEKDTRVAADARVCLQMLAVQLAVVKDQILENDRRVLASARSTELGRRLMDIPGVGPLLASALPATISDPAAFKTGRDLAAWIGLVPKQNSSGGKERLGSISKAGNRYLRQMLVVGAMAVIRYAERHGTRRPWLVQLMQRRTTKVAAVALANKTARIIWALMTSGERYREPAATDAMAA

SEQ ID NO: 72220 - protein, 424 aa, unidentified
MKNTAAMKRKQVPEGYLVIGVDPHKKRHAAVAITQDFTTQAKFKVDNTGEGLDRMLDRARAEMAKSCCRGVMFAIETGGHYWRNIAYYLDERGIPFRFINQYTLKRRREGKDLNRRKNDYRDSEVAAQLLCTGEFVESVIPQGVYAELRTSHNTYQRLVKERTRITNLVKGLLDALFPEFILVFKDPCGLTALSVLSTSPIPRVIAGMTEDEFIAMIETHHNGRRLMRKKLRALHYSAQTSIGIDAGARSVSSEIAFLVDKLELIKRQIRVMEMTLITLVDETEEGKYLLSIRGLNYIAVAGLLAELGCFKLYRSAKQMIKMAGSNPTESESAGKKRSKTPMSKQGRPLLRYCAWTAVIPMLRFNEDFRAWAKQRRERPAHANPLNGREIVGAALNKLLRLAFALVRNQTFYHDARPALIPVAV

SEQ ID NO: 72221 - protein, 410 aa, unidentified
MELLHRRCCGLDVHKETVVACLRLVSDGKVTTEVRTFQTTTADLLRLSEWLAANECTHVAMEATGVYWKPVWHILDDGDFKLVLANAAHVKNVPGRKTDVNDAMWLAELLAHGLIRASFVPDAQTQEMRNLLRTRKQLVREQSSHVLRVQKTLEDANIKLDSVLTDLMGKSGRAIIEALIAGETNPVKLAGLADRRVKASPEEFREALRGRVTKHHRFLLRLHLNQIDALDAAMATLDAQVEANLGPFRTAVELIGSIPGIKNLGAHVIVSEIGIDMSRFPSAAHLISWACICPRNDESAGKRRSNRVRKGGTWLKTTLVQCAWAAVKKKDSYLQAQFYRIKARRGPKKAIMAVVASILTAIYHMLKDGTMYKDLGRNHFDRRSTDQQKKRLIKRLADLGYAVEIKPLAA

SEQ ID NO: 72222 - protein, 402 aa, unidentified
MISVGIDVSKGKSTVCILRPNEDYVCKPFELLHCKEDLELLDALLKKLDGEVKIVMEATGIYNLPILTFLIEKSYFVSVINPCVMKKYARNNNFRNVKTDKQDSVTIAKYGIEKWFKLQKYECSGMEYEELKLLGRRYRHYMEMHVVALQELTHMLDYVMPGIKDMFTSRTESNNRDKLCDFVERFWHYDLITSMNCEDFVVAYLDWAKQKKYHQNKSKAKQVYELASNGIPTLPSNIPSTKMLVLEAICNLRTIDDSLNTILTRMNEIAKSLPEYSTVQAMGRVGDVLSVKLIAEIGDVRRFHSAKALVAYAGIDPPPYESGQFVGTKRKITKRGSSTLRKVGYELMRVLKAHGEPQDAVVYNYILKKEKEGKSKKQAKIAGLNKFLHIYYARVMEVYQQV

SEQ ID NO: 72223 - protein, 367 aa, unidentified
MQNDTRIAVDLAKAVFEVAVSDRPGRVARRERLPRSRFLAFFAQQPAAIVVMEACGSAHYWGRRIEQLGHRVTLLPPHQVRPYVRRNKTDRTDAKGILEASRNDDIHPVPVKTVAQQTLTSLHRLRSGWMAERTARLNTLRGLLRELGVFIPVGARQVVPAVWILIEDADSDLPDPLRPLLAEACREIRDIEARIKQVERQLEAMAQQLPVVAHLLTIPGVGLLTATALFAFIGNIHRFPSGRHLASWLGLTPREHSSGLKRRLGGISKRGDGYLRTLLIHGARSVLLHARKEQPDHLRDWAHKLEQTHVHNKAAVAVANKMARIIWAVWSRLQERAGPQGRLSATTRYRIGANERSSHPGLQRQVA

SEQ ID NO: 72224 - protein, 481 aa, unidentified
MFQKVWITVKNKKYPQRKKNRGEFRSRLPERSQTEGFPVLQPQVAGIDLGSESHWVCAPTADSAELEIAEFGATTPELERMAAWLQQRKVVSVAMESTGVYWVPPHEVLERHGLEVVLVNTRELARVPGRKKTDRIDSKWIQRLHSCGLLQGSFRPPEQICLLRTLVRERGVLVAERADWVRRMQKSLDQMNVRVHRAVSDVEGKTGMGIIRAIVAGQRDARQLAQLRDPRCQKSEEEIAEQLSGHWREDHLFSLAQALKLHDAIEERVQAYEEEILRKLAEMERAECQGKSAPPLANQNKAKMVEKRGEEPLRQALYRMSGVDLTGIDAIGVGAVQTVLSEYGSDLSRFATEKQFVSHVTLAPKQAISGGKAIRKKKKKDSASSRVAAVLRLAATSIRNSQTALGAYYRQIARRIGADVAVFATARKLATLIYRMLRWGQPYVDEGAAAYEKRYREARLSRLKDSAADLGYQLTPKTATP

SEQ ID NO: 72225 - protein, 351 aa, unidentified
MPNAMTDSKPSLMSVVGGVDTHADSHTVAVLDQLGRRLGCAVFPASRAGYGALVDWLAGYGRISAVGVEGTGSYGAGLTRWLSARQIAVVEVNRPNRADRRRRGKSDPVDAEQAAAAVLANTATAVPKARTGLVELIRLIHGTRAGAVKARTAARNTFINTVRTSPDAVREALQPLTRARQLKAATGYRPAGDGPLATVKRCLRRLAVRITELTSEIIAADADLDRLTRQLAPDMRSRLGFGPETTAQLLITVGDNRDRIGSEAALAGLCGVSPVQASSGRSRYYRLNRGGDRQANRALHMIILCRLRHHQPTRAYLAGHSIDGKATPHLRRVLKRYLVREVYQLLGDLKT

SEQ ID NO: 72226 - protein, 376 aa, unidentified
MSGKTKIYVGMDVHKDSVVAVLPEAAPEPTVVKRLPNDPRKLQRFFDRVARDGTVQACYEASGAGYVLQRALTEWGHACEVVAPSLIPKRPGERRKHDRRDATDMTRLYRAGELVTIRIPTAAEERGRDLVRCRETFQREILKSRHYVLKFLARRGFVYREGENWTGKHFTWLRRLLGGEHLEAEDRAVFAEYLSLLDYKLQRREELDRRIEELALEPGYREAVGRLCAFKGIRTHAAMVLVSEIGDFRRFERPGQLMAYLGLVPCEHSSGERQRLGAITKAGNSRCRHVLVQAAWSYRHPPRLGGPLRRRQEGQPPDAIAHSWKAQHRLHKRFRRLEYRKNSRIAAVAVARELVGFVWAVMQDLEESRERAALAA

SEQ ID NO: 72227 - protein, 422 aa, unidentified
MLAESHDEEQIIARVAALDIGKAELVCCVRVPASAGGKRRLQEVTTYSTMTTSLTELANRLVEMRVERVVMEATSSYWKPVFYLLEAHGLDPWLVNARDVKHLPGRPKTDVLDAVWLCKVAERQMLRPSFVPPWPIRRLRDLTRYRTDLVAARTAEKNRVEKLLEDACIKLSVVASDIFGVSGPAMLAALVAGERDPKVLAQLARARMRGKIDRLEQAFDGHFADHHRFLLSRMLSRIEGLDADIAAVDAQIEAQLAPFAEAAARLDEIPGIGPVAAAAIIAEIGVDMSRFPTAGHLCSWAKFAPGVNSSAGKTKGSASSGHGNPYLARVLGEAAVCTTKTDTFLAARYRRIARRRGQPRAVVAVGRSILVVIWHVLHDPESRYQDLGSDHYARHVDPTAKKRNHIRQLEALGYTVTLTPAA

SEQ ID NO: 72228 - protein, 338 aa, unidentified
MSLYAGIDLHSNNSVLAVMDEGGKPLLQCRRRNELSHILADLELYRSELAGVAVESTYNWYWLVDGLMEHGYDVRLVNTAAVPQYDGLKHGNDHTDALHLAQLLRLGLLPEGYIYPREQRATRDLLRRRFMLVRQAVQLMLAIQSSFSRSTGKQLSANALKRIAASELEALFPDPTTRYGVLLQYRLWLTLQEQITHLEQWVRQDLAYPGDLARLRSVPGIGPILGMTIALETGPIERFASVGDYASYCRMVESVRLSNGKRKGRGNRKCGNRYLCWAYMEAANYATRFNPIIRRWYERKKTNKHRVVAIKAVAHKLARACYHLLRDSTEFDPKRAFG

SEQ ID NO: 72229 - protein, 429 aa, unidentified
MKSNTQNAKIEVITEKILVFGIDVGSETHYARAFDYRGIEYSKKPFKFSNTENGFVTFKEWIQDIKEKHEKDRVVPGMEPTGHYWFNLGKFLQDNEMKPVLVNPHHVKKSKELDDNNPTKNDRKDPKVIAGLVREGRYMIPYLPDGVYADLRTASNIRFQLQAELTRIQNRISRWFNIYFPEYKTVYGKPDAKSGMLILKKAPLPEDIMTLDIDGVNQIWRDAKMRAVGKARAKTLIEAAEHSVGNKEGAVSARMEIRMLLEDYESRNIRLQEVMTLIEELVKRIPMAEKLLAIKGVGIRTVSGFLAEVGDISRFNPKELQKLAGLALVENSFGKHKGKTTISRRGRKRLRYLLFEVAMSLVAKNPEFRELHNYYTIRRLNPLKKMQSLMAIAAKLIRVFYAMLTKGVDYDPKKMVGDIRRPAAYIQTA

SEQ ID NO: 72230 - protein, 371 aa, unidentified
MADIDGVAGIDAHKHTFTVAVLDGRGGRCGIESFPTAPDGLTDMLALLDSFGFAIGRIGVEGSAGLGRHVAAFLVAAGYDVREVQANRTAERRRRRRRHKTDREDAEAIARETLADAGLPPAGKRRRPDPCWDELVAVRSRRKSLINQRVRLLNEAEAVLTSLPLTIRAVLPPTSRVRPRLRALDRGAASSIQGTAADRVNLAWLVEAAGDIARLDARVTELDHKIPALLVRLGCTLTQEYGIAAVGAMELLVEVGDPTRFATEAQFARWCGAAPVAVSSGEGDQAPTHHRLDLAGNRQVNSVLHLMHVTQVRSYPPARDYIAKKRAEHKTKREARRAHKRHLANVVIRRMWADHTQRFETVADQATPAAA

SEQ ID NO: 72231 - protein, 375 aa, unidentified
MNNNNTLYVGLDVHKESITVAYAINSEPVELMGKIGTSPTDIQNLCKRLRSKSSQVSIVYEAGPCGYGLYRRLVKSGFDCMVCAPSLIPKKPGERVKTDRRDAIRLVRSLRAGDLSAVYVPGIEDEAFRDLARAWASARDDLRHARQRLKSFLLVHGVHYVGRADWGPAHRRWLSKYSFESPWRQLAFDEHRRTIEDRQAQCERLESALKEAVTEWRLYPVVEALQAMRGIQFITAVGLISELGDLTHFEHPRQLMSWFGITPSEYSSGGSRHQGSITKAGNSYARKLLVEAAWSYRHPARISPAIQKRQENLPRPVIDRAWDAQLRLCKRYRKLQAKGKNVNITIVAVARELAGFIWDMGRIAMSVAQQPQCHK

SEQ ID NO: 72232 - protein, 350 aa, unidentified
MIIIGADYHPGFQQIAFVDTDTGEFRERRLQHREEAERFYRELAAQGMQVRVGMEASGHARWFERLLSELHFELWIGDAAEIRTKRVRKQKTDRQDAQLILQLMLEDRFPKIWVPSWENRDLRQLLWHRHRMVQARTRIMNQLQAVALNEGLRCKKRLWRDAGREQLESFALAPWASRRRRDLLELLDRLTPTIAELTQAIEQEVEKCPAAQRLQTHPGVGALTALSFVLIIGQADRFQCGKQIASYLGLVPLEDSSGQRRRLGHITKQGNSLLRFLLVEAAQVTVRSDPEWRSKYFHLALRRGRKIAKVAMARRLAVRLYWMWRKGWDYEQWKKFGSHAGQPGNRDGVL

SEQ ID NO: 72233 - protein, 353 aa, unidentified
MIIIGVDFHPEFQQIASVDTETGEFQEKRLAHREDAETFYRALAGQKVRVGMEASGHARWFERLLAELQFELWIGDAAEIQSKRVRKQKTDRQDAQLILRLMLKDDFPRIWVPSWENRDLRQLLWHRHRMVQMRTRIMNQLQALALNEGLRCRKRLWREHGRQQLESFRLAPWASRRRCDLLELLDRLNPTIAELSQAIEQEAEKYPEAQRLMTHPGVGPLTALAFVLIIGKAERFQCGKQIASYLGLVPLEKSSGNRRRLGHITKQGSSMVRFLLVEAAQVTVRSLPEWRRKYAHLMMRRGRKIAKVAMARRLAVALYWMWRKGWNYEPSKSSVRTRASSEQAMVCSKTPSN

SEQ ID NO: 72234 - protein, 371 aa, unidentified
MEHTRFIGLDIHKERISVAVAQSGRSGAVEYLGEIINEPGAISKLCDRLRRSGKPLAFCYEAGPCGYGVHRQLKSLGHRCDVVAPSLIPTKPGDRVKTNRRDATMLARLHRAGELTPVWVPDADHEAMRDLIRLRSVVRQIVTRARQHLQGFLLRHGRKHGGGTAWRMAYRRWLSTLAFEHPAQQIAFQDYVDAVMDAEQRLKRVEEQIFSLLPDWTLRPVVDGLQAMRGIALINAVVLVAEVGDFTRFSNPRQLMAYFGLVPGERSSGETVRRGGITKTGNTHARRALVEGAWAYRMKARIGRHKVDRIEALPKVVRDIGWKAQVRLCARYRRLSARGKTANVVNVAIAREMVGFIWSIACTIQSTPKAA

SEQ ID NO: 72235 - protein, 337 aa, unidentified
MSVYVGIDVHRKRSQVAVVAEDGTVQLNKNVVNGSEPFLRLIGDLPAGTPVAFEAAFGWSWLAELLEDYGFDAHLVHPLRCKAIASARLKNDKVDAAILAQLLRADLLPEAWIAPPAVRQLRALLRHRTGLVRLRTQQQNRIHAVVADFGYDRSGSYLSGPGRGWLAGLELPAASREIVTDCLAVIDGLAPLTDRIDGELRQHAKADPRVKVLTTLPGVGQFTALVILAEIGDITRFGSARKLASWAGLTPTVRGSDLTVRHGHISKQGSAWLRWVLNQAAQTAKRSPEFAGTYATIAQRRGKKIATIAISRKLLTRAWHLLSQLEPAEASTPPRRP

SEQ ID NO: 72236 - protein, 403 aa, unidentified
MNAVGIDVSKGKSTVCVMRPFGEIVASPFEVLHTADELGKLANLLKNLNGETKVIMECTGNYHLPIANALRSAKLTICAVHAQLIYDFGNNSIRKVKTDNADSIKIANYGLANWLDLSEYIPEDDIRQMLKTYSRQYNKYNKIKIMLKNNLISLLDRTFPGINESFTSPPRKTDGHEKWIDFAAYFWHCECVSKLSLNAFTEKYRKWCKREGYNFSSSKAESIHSLSRSLVNVIPKNETTRLLITQAILQLNHIAETLAVVAKEMIQLATSLPEFPVATGFFGVGEILGSQIIAEIGNVRRFQRKQSLVCFAGLEPEGEQSGKRKKDGEISKKGSPHLRKALFQVMSCVLQQSPSDDVVYQFLDRKRANGKHYYNYMSAGAAKFLRIYYARVTEYLQSLENVA

SEQ ID NO: 72237 - protein, 385 aa, unidentified
MQGSRMRGPGPSLMLISEARAGNAVGIDPHKRTLTAIVVDARGGIVAGEHFKVSGDGHRALEAWARSFGPVIRWGVENAAGWGRHTAIYLAGRGHDVRDVCPNRTPRQDRGRQRGKSDTLDGERIARETLAHPLLPRAFKNASGQAAPDERRELLCLWHNQRRSLLKSRQHLLNEAEFLLADLPLALRDQLPDTKTVRPRLAALARRNRRRRWDAATALRLRMLDDHHAQIARLDAAERDATHQLAVLVAVTETTLGELCGLATRSVAELLIEVGDPRRFTEAGFARFNASAPLVASTAEGPGEPVRHRFNRGGNRRVNAILHRMAVTQLRCEPRAQAIYANSRARGHTKREARRILKRHLSDVIYRTMMRDLKRRDARDALLAA

SEQ ID NO: 72238 - protein, 376 aa, unidentified
MGHHSEAFIGIDTSKLKNAIAIAEGGRDGEVRYLGEIDTTDAATRQLIRKLAAKYAKLTFCYEAGPTGYGLYRLITSLGHECSVVAPSLIPRKAGDHVKTNRRDAQSLARNLRAGELTAVWVPDERHEAMRDLSRARESAVDDLKSKRQQILSLLLRLGLHYPGKKTWGKSHRNWLASQTIGQREQRIVIEELFGAERQAQDRVGRLEQAIRAAVPDWSLAEVVTALMSVRGIDLVAAVTILAELGDLSRFASPRELMAYLGLVPSEHSTGDNIKRGGITKAGNRRARRILVEASWSYRYPPRIGRDKQAKVDAAPEPVRAIAWKAQTRLSSRFRMLSKKGKRPTVVATAIARELCGFIWAIHRAVTSPGLTTASY

SEQ ID NO: 72239 - protein, 314 aa, unidentified
MAKQAVVVGIDIAKGWFDVAVLETGETFRLGNDKAGWAELIKRLRRFSVKAIGLEPSGGYERNLCTALHQAGLMVRNVNPHKLRNYARACSVLAKTDGIDALMIARYTAQLPTQPLRVDPLTRQLADLVLARRQLSDEKVRLGNQLEQLADGIVRRMFLARLKRIEIDMLVIDKHLTELVASDPELARKDKLIQSLCGAGPVLSHTLLALAPELGSANRRQIAALAGLAPYAFDSGVFRGRRAIWGGRSEVRRVLYMAALTASRANPTLRLFAQRLTAAGKAAKVVLIAVARKILTILGAMLRTNQPWTQPIAG

SEQ ID NO: 72240 - protein, 416 aa, unidentified
MNDEPISIPILRYIAIDAHKHYVMVGGMNALQEMVLPTRRVEMENYPKWAKANLRPGDAVVIEATTNTWTLYDVTLPCVSKVVVAHPLEVKQIANARVKTDKHDVNCLARLLVADLVPEVWVPPLEVRELRTLIAHRRRLVKMRTMTHNRLHSVVHRNNLVPPEGGFFADKNRSWWESLSLSPVEKIQTSQNLAMLDRLESLIAEVDQELARLSATSPWSEQAPYLLQLPGFGLINAMTILSAIGDITRFPTSKKLVGYAGLGGSVHDSGQSHFTGPITKQGRKELRWALVEAAWVAIEHHPFWKQEFHKLNHHMKTTKAIVAIARRLLVAIWHVMSERVADRKADPNMVAFKLMKWSWQLNDLQRGGLTTRQFVRYQLMQLKLGENLTHIRRTDPRSIASVEEILALKPELRPTE

SEQ ID NO: 72241 - protein, 401 aa, unidentified
MEVLYPVCAGIDVHRDTLVVTVLRATGGRHAAETRTFGTVTAELRIMAAWLDEQEAPIVAMESTGVYWKPVYRALRTLGPGRTVWLVNPAHAKAVPGRKTDVKDSVWIAKLLMHGLLSPSFIPDVALLELRDLTRYRKKRVGEQASERNRVVKMLETSNIRLAAVLSDPLGKAGRAVVEMLIAGDKTPEQIADSTRGRPGRPVRASREDIARAVDGVVSETTRFLLRQMLAHIDQVQAAVDEIDARIGELLQPMREQCALLVGLPGVDSVSAAGLLAEIGPDMSVFPSANHLTSWGGLAPGSHESAGKRKAVSTRSGSHWLRVFLVQAAWGATRTKGSFWKRTFERWRARLGPQQALVAIARKMLVAIFHMLRDQVPYRELGADYVGTEPPSAGRTDSSIN

SEQ ID NO: 72242 - protein, 362 aa, unidentified
MFTFFSHSFMPAASCSAAPLKYVVGIDIAKDTFVACFGRIEASQRLHFSKEVTFANSATGFADLLAWTSKQHAPAVPLWFVVEATGVYYEELAYFLADKAQALSVLLPNKVKHFAQSTEQKSKTDQLDARLLCRLGLERVLPTWQPPTPALRQLRALARERQSLTQQPTRLKTQRHAYQHSYQPDTRTLARLTARQQLLEQQLQAVDQDVAALLKAEPELARKLAQLTSIPGIGPTTAIAVVAETNGFVLVENERQLASYAGLDVVQRQSGLSAGATRISRRGNVRLRTALYLPAVGSLRFNPQQMAFYTRLRARQPNGKPGVIAVMRKLLLLCYSLWKNDCSYDPHYHPAHCLEKEVAPTS

SEQ ID NO: 72243 - protein, 360 aa, unidentified
MERVIERCCGLDVHKKTVVAGVRVPGGTGGRDQHVRTFGTTTAELLALRDWLEAYGVTHVAMESTGVYWKPIFYVLEDAFTCVLANAAQIAQVPGRKTDVRDCVWIAQLLEHGLVRGSFVPPVPIRELRDLTRYRKALIHEHTREANRLQKGLEDAGIKLASVASDVLGVSGRAMLDALLRGTTDPDVLADLARGTLRQKLPALRQALAGRFRPHHAFLVSQLLAHLDYLDEVIETLSTHIAEVIAPFAEEVSRLDTIPGVNRRTAEVLIAEIGVDMGVFPTAAHLASWAGLCPGNNESAGKHKSGKTRKGNRWLRGALIKPSWPPAPDRRRAPSRLGIGALCGIAAIRRLSSPWRTRCS

SEQ ID NO: 72244 - protein, 449 aa, unidentified
MISAIVERGAGIDLGKRFLKTCVMVGPLSEEPRWEIRRIENTMSELEVMREWFKAEGVTHVVMESTGPYWVPVFNMLEKEFMVVLANPVEVKNRKGHKTDAKDCWWLAHLLRHGMVRPSFIPPQPTRELRELRRRRKKLVEAAAQERNRVQKQLEYGNVKLGNELSDVFGLSGQRMLKALVDGGHTPEQIAALAQGTLQRKTAAIAEAVRGARLSEIQKEIIRSSMRHLIFLEMEIAQIDEQTNQQMQASGQDTARQRLQTIPGIGPEAAANLLAETGVDMSQFPDPGHLSSWGGVCPGNNESAGKHKSRHTTHGNPWFRRTLTECAWAASRSKGTIFQAKYQRLQGRIGHQGALVAVAHELVEAIYWVLARNQDYRSPVPPPLDEVQRQRLIRHHTRRLRRLGGWLPAEKLEPLKEWYVSHCVPMVESPPARPRGRKKSGVESHGRQP

SEQ ID NO: 72245 - protein, 354 aa, unidentified
MNSTQVCEKRKIAVTIGIDLAKDHCDVVAYNADNKICFTKANMAYPQLMEWLANREPAVVLMEACKGSMVHARNIADLGHDVRLVKGADVKALRNVAQKNDIRDADFIARLFYVPGTKYVFVKNQRQQSLQFLQNEYKSLQELRIRVGNQIHAGLEEFGCPARKSKTFIQTRLMDHLEKNAELIPEDVMASFQRRREMWLSLFEQEEEAQKRMEEIAKTDDDARRIMSVPGVGAQTAVRLLVHIGGDIGRFKNSGQFAASIGLVPKQNSTGGNTTLNGITKCGPKRLRSNLVQCGQVILMHGDKLKGNLGDWVRKLRDSGKKRGVIACAIASKIARIVYRLMKDKVDYTPVPSR

SEQ ID NO: 72246 - protein, 425 aa, unidentified
MSASKSVSSPVDPAGFAYVVGIDVGSERLLYTICHPDKRPLVKATEVGNDRTGFGQLDAALVALRVEPTRILIGLEATSRYNENLYQFLTEQGYTVCLLHPRQTHQFAQQRGLRAKTDRLDAATIARLLTSGEARVGYVPDELIATYRELERLHSQLTEESARYQNEIHALLSVVFPEFTQVFADPCGATALGVLTRYPGAAAITAAGVEAVMATLRELAPRRYGRPTAVAVVRLAEHSVASGVATAARALALKVLCDQLAHTQANLAQLEQELDRLLDSDAGASTLQSVPEFGRQTITVLRAELGDVSRFRRIDQAVAYVGLDLEVRQSGKWQGQVKLSKRGSGRVRRVLYLAALRSLTRKDSPFAAYYHRLVARGLKGCEALMAVMRKMLLVACHLLRSNQPYDPAKVCAVPGPAPHTLSPGA

SEQ ID NO: 72247 - protein, 462 aa, unidentified
MPRRKLKTTTRPRQARLVYREDAPTLQVQNPHAAGIDVHTDNHVVCVGPGLVQTFGAYTADLQAIADYLRQAGVTTVALESTGVYWIPLFEHLQALGFECYLIEPGQLRGCGARPKTDVLDCQWMQRLHTYGLLKASFRPPESVRALRAYHRQRQMVIRHAAAHVQHMQKALEQMNVKLTEVLSDITGVTGLRIIRAILAGERDPHTLAGLASPICAKSRDEFALALQGLWQPEHLFELRQAHDLFQTYQRLVDECDRQIKAELAGQPDRAGDKPGPGPRPRRSRKKNDLRFEATGPLFRALGVDLTEIEGIDVGTALVVLAEIGVDVSRFPTEKHFAAWLGLCPNTARSNRREKRQSPRQGASRLKQALRMCAQSVGRTQTPLGMFYRRIKSRIGGMGACTATAHKLARLVYRLLKYGRAYVKQGMDEYAAKMHTNAERILRKKAAALGYELTPRAAGATT

SEQ ID NO: 72248 - protein, 413 aa, unidentified
MPNIEIGVDSMVKENFIYVGIDLHKETHTAVMIDCYNQKLGEITFPNRPAAFPKLVTKVKKCNTDGKEVVYGLENAYGYGRALAVWLIDKGYLVKDVNTAISHRQAKHRGAMYRKSDSDDAKAIALATLNMLDKLPDACPNDAYWSLGQLVHRRDNIMKQRTRLVNQLHEQLCIAYPSYKQFFNDISRPTALYFWEHYPSRKYLKGKSVEDLRAELVPVSHNKCSTKTCEKILDAVASDKVKNNAYQDARDMVTLSIVSDLQHYDSQLTEVDKMLEQMYKMLGCTLTTIPGVNVITAVKILAEIGDIKRFSNANKLAQFAGIAPLHLSSSGKGKDVATKQGNRRLQATIYFLAIQMVQISSKGTPRNPVVRAYYEKRKAEGKTSQQALICISRRLISVIYGMLKNGTEYRIRL

SEQ ID NO: 72249 - protein, 350 aa, unidentified
MWIIGCDLHTRYQQVAALDTETGELVERRLEHAGEEVRAFYAARPKPTIVGIEATGHAQWFERLLGEFGHQLWVGDAAEIRAAAVRQQKTDVRDAALLLQLLVEKRFPRIWQPSADNREKRRLLLHRVKLAQMRTTVRNQLQALAMSQGLCRGRRMWSRKGQSELEALSLGVWSHQQRQDLRALDDTLSARIEAMNRALIEQAHDHPAAARLMQQPGVGPMTALAFVLTLGPAHRFRRSKQVVSYLGLNPREYSSGGRQRLGAISKQGNTLLRWLLVEAAQTAARLDPELHRQYLRLKHRRGARIAKVAVARKLAVKLYWMLRTFQHAAQPVSPQSSPCTDLVPQLGSNS

SEQ ID NO: 72250 - protein, 443 aa, unidentified
MSPNDAKAERQLYAAWIGLDWADQKHFWSMFTADGKRTHGQLDNTPEAIEVWAAELAQQFGGRPVAVALEQARGAVIAMLSKYAHLVLFPVHPTTLANYRKAFSPSGAKSDPTDGDLILDLLVKHPERLRPLQPDTVETRGLQFLTEERRKLVDQHTSETQRLINWLKQVFPQILRWFDDPAAPLVGELLLRWPTLQQLQKASSKTLLKFFHEHNCRSEERIKQRLDQIGQAVPAVTDPALLQTGTLCIHNSVGILKHMRNGIANFDRQIAEIYRAHPDRAIVESFPGAGPALEPRLIAAVGSRRDRFDSANSLACFTGIAPVKQSSGGACWIHWRRACPKFIRQTFHEWAACSIRCCDWARVYYEQQRAKGKGHHAAVRALAYKWIRIFFRCWRDRVPYSEERYLKNLRPAAVVSQSASQLQFEWKPCAGFSKLVEVLEVSS

SEQ ID NO: 72251 - protein, 403 aa, unidentified
MNAVGIDVSKGKSMVTILRPFGEIVSSPFEIKHTSSDIHSLIKLIHSIEGESRVVMEHTGRYYEALAHQLSAADLFVSAVNPKLVKDFNNDSLRKIKSDKADSVKIARYALDKWQSLEPYSITDELRAQLKVMNRQFHFYVKQKTAMKNNLIGLIDQTYPNANTYFNSPTRSDGSQKWVDFVSTYWHVDCIRKMSLNTFVEHYQNWCKRKKYAFNKSKAEEIYTKTKELVPVFPKNEITKHIIRQAIDQLNSTSVTVETIRTLMNETASKLPEYSIVMQFKGIGPSLGPQLMAEIGDVARFTHKGALTAFAGVDPGVNESGSYAQKSVPTSKRGSSNLRKTLFQVMDVLIKTMPQDDPVYQFMDRKRTQGKPYYVYMTAGANKFLRIYYGRVKEYLSVLPDPS

SEQ ID NO: 72252 - protein, 342 aa, unidentified
MKKGSIIGLDLAKRSFQAHGAGADGGVAFRKKLSREKVLAFLAEQPRCVVAMEACGSAHHWGRAIGDLGHEVRLIAPAYVKPFVKRQKNDAADAEAISEAASRPTMRFVTVKTQEQQARAMLFRTRDLLVRQRTQLINALRGHLSEHGVVAPQGPTNVKVLSQAIENETTSIPLLVIELARVYLEQIDHLSKRIAVLEKTVAQEAARGAMTRRLQTMPGVGPITAMAIETFAPPMSVFKRGRDFGAWLGLVPRQHSTGGKQVLGKTSKMGQRDIRRLLISGAIAVIRWACRKGAPEGTWLHRMLARKPRLLVAIALANKMARSIWAMMTKDEDYRVPVAVNA

SEQ ID NO: 72253 - protein, 355 aa, unidentified
MDNLRYIGLDVHRDTISAAVLDHDGKLIMQSVVPTRASAILDFLHGIRGTLHVTFEEGIHSAWLYDLLQPRVARVLVCDPRKTRLLKSGNKGDLIDARKLAELLRNDALSPVYHGELSSLEVQRRTRSYTMLTEDTTRIMSRVKAVFRGQAVPYHGKSIYRPDRRESYLAQLPTEGLRQRVELLYQELDAVHRLRLRAKREMLAECRKHPAMKWLQSVPFLGKVRTAVLIGRVQTPHRFRTKRQFWSYCGLALETHDSAQYHVLHGQVERKPRFVQVRGLNWNHNHDLKDVFKSAATMAAVREGVFRDYYCGLLAKGIRPEMARLTLARKIAAITLKIWKEGGMFNAEQVKPQAA

SEQ ID NO: 72254 - protein, 372 aa, unidentified
MGHHTEAFVGIDTSKSSDEIAIADGGRGGEVRYLGDFPATEAAIRKLVAKLAAKYRDLMFCYEAGPTGYGLYRLLKSLGHECLVVAPSLVPKKAGDRVKTNRRDAVSLAKLLRAGELTAVWVPDERHEAMRDLSRARQAVKKDLQGKRQQISSLMLRLGRIYPGKTTWGPAHMKWLMAQKLEHREQRIAFEELLEGVRQESERVERLENAIREAVPEWSLAEVVAALQAVRGIDLIAAVGVLAEIGDLSRFQNPRELMGYLGLVPSENSTGDKVKRGGITKAGNGRARRILVESAWSYRYPPRVSRDKQPKVEAAPRRVREIAWKAQTRLCGRFRSLERKGKRRTVIATAIARELSAFIWAINRELMAHRQA

SEQ ID NO: 72255 - protein, 330 aa, unidentified
MSGFVGIDVAAKTVDVVVRIDGKANKVEQFSQTPDGHAAVVHKLQKLSPELIVMEATGIYYLDLAVTLARANLPVSVINPKSFHHFAHLKLNGNKTDAVDAALLAEFAQCMSPRLWNAPQDELLGLRDIGRQLNRLTGSRTQAKNRLHALMSKGMTLPMLIEDEQEGIEQLERRIKRLTQAALALIAGNATLAAQFSHITAAKGIGETSAIAILAELCVLPSTMKAPQISRYAGLDVRHTQSGSSVNKPARLSKAGNVYLRAALYMPAMSAVRHDVRAKAFYEVLTGRGKKKIQAQCAVMRKYLTGIWACMQTQTAFDSTLLFSEQHIKN

SEQ ID NO: 72256 - protein, 338 aa, unidentified
MKTDQTAQTYALFVGVDIAATTATASILRPGAQAQRSFTIDQTPEGYTSLLHKLQATGHASCHVLVVMEATGSYWISLATRLVHEGFAVSVINPAQAHHFAKALLKRAKTDAIDAQTLAQLAMVLQPEPWTPPPQIYYALQQRLAQRDDLLNLRQQVRNQLHALVQHPEVIPEVRARMDRLLATFEAQLAEVESEIAAALTQDSAWAAAAERLQSIKGVGWVTAAWTLVTTLNFTSCDTVDALTAYAGLAPMPRQSGSSVWHRPAIGHTGNGRLRTAFYMATLSAVQHNPIIKAFYARLRAAGKPEKVARCAAARKLLHISWAVVTKDRRFDPNYAQG

SEQ ID NO: 72257 - protein, 345 aa, unidentified
MTNNIQFSSVCGIDIAKSVMQVYKVTSDGVVSNKAVKRADFLNEFRNIPASLIGMEACGGSQHWARELQSLGHTVRLMPPKLVKPYVTGLKNDKNDARGIYTALVMGVREVPVKSAAIRDLALLQTMRTKRQREKVAKINHIRGILTEYGLVMGKSVNAFLAKAASLIVELKERADVSPVIVSELIALFQEVKEAIAKIKELETNIESIAKTLKQYELFQSAPGVGSITAATMLVLLCNPAVFKNGREFAAYIGLAPQSTGSGGKNIVTHIPKKYECNNEVRALLVQCAHAICRGKHKSDWVSSILARKPKKVVIIAVANKLARQLWIMAKKGEKFERRFILAAV

SEQ ID NO: 72258 - protein, 382 aa, unidentified
MRFYPTQHPFYCGIDLHARTMYVCLLDQAGATLLHRNMTATPEALLKTIAPSRDQIVLAAAWMFPWYWLADLCAEHGIPFVLGHALSMKAIHGGKAKNDTIDAHTIAVLLRGGMLPQASVYPAERRATRDLLRRRMPLARQRGELLAHVQNTTSPYNLPAIGKKIASKANRDGVAERFADPAVPKSIAIDLARIGDDDELLRDVERTLVKTAKHHDANTLYLRQTVPGIGKILSLVLLYESHDIARFPRVQDFASYCRLVTCAKESAGKRSGTSGTTIGNAHLKGAFSEAAVFFLRDNPAGQTLLTRLEKKPSTGTAFTILAHKLARAVYYMLTRQTAFDLDTFLQGYGRGAGELKASLDSHGMNLIRHARHAVKNCVCERL

SEQ ID NO: 72259 - protein, 356 aa, unidentified
MTSIPHPVAPQLTFGVDTHLEVHVAHANDQLGRPVATLQIPTTPAGYQQLLRWAHELGEPVAWGVEGTGSYGAALARFLTVNGQVVVEVNRPDRQARRLKGKSDPLDARAAAKAVQAGEVTVLPKAGTGQVEMIRCLRVARATAMRARTQTINALKGLLVTAPTELREQLRGRSVTRLVQAAAALEPGPLTSPLAAAALALGSLARRHQALSAEIDSLTSQLERLVATAAPELVARFGIGHDSAGALLVAAGDNPDRLRSEAAFSMLCGASPIPASSGKTIRHRLNRGGDRQANAALHRIVIVRLRYHQPTRDYMTTRLGQGKTKKEIIRCLKRYVAREVFAALHQMSQDLPTLAA

SEQ ID NO: 72260 - protein, 368 aa, unidentified
MKKYTLEAALAAGAKELKNQKGAKAKRIVMAADMHLRSYQAARKIDNGAIGAVGNFGSQAELLLYVEKQMSQAEEVVVLYEAGPLGYGLYRALKARGVRCYVCAPDSSEQKRKRRKNNAIDTRTLTSNLFNYLNGNERALQLVRVPTEEQEQARLASRQHDQLVEERKRLGAKGNALLLSQGYGSWKNWWRPKVFSRLSQLVAGWLKEMLQTWIDLLQALDEKIRRAKAALAKRCSGPRPKGAGATSLVQLQSEVLDWGLYPNRRKIGCLAGMVPSEWSTGDTQWRGSITKVGVPTIRRIITEMVWRMILFQPQYKAVQKWQEVLRGTNRALKKKAVVAIGRQLMVDLWRLQTGRISAQELNLVMIGA

SEQ ID NO: 72261 - protein, 350 aa, unidentified
MTDASRWVGIDLHRRRSHIAIVDEHGELTESRRIANDRDTFLELLGDPGDGETHVALEATYGWEWLAELLEEAGYDLHLAHPLRTRAIAAARVKTDAIDARTLAQLLRAGMLPEAYVAPRELRDLRELLRHRATLTRMRSAVKNRVHAILAKHGVLHQHSDLFGKGGRLFLAALQLRDAPRRRLDSLMALIDDFDREIADTTREIDQRAREDDRVDVLCQIRGVGRYTALLIIAEIGDVTRFPTARHLCSWAGLAPTVRSSDGKARLGHISRQGSPALRWALVEAAQKITTGSGPLRDKFERIAKRRGRKIAKVAIARDILTLSYYGLRDGEIRCLARRSRANAKEQLAA

SEQ ID NO: 72262 - protein, 291 aa, unidentified
MNYTQNEKIMSITESTLVIGIDIAKQFQYARAFDYRGIELSKVKPFENTAAGFKTFQEWLELVAKENKKDNIIVGLEPTGHYWFTLGNFLKELGIKLVLVNPFNVKRSKELDDNSQTKNDLKDPKTIAKLVIEGRYSQPYIPEGIYSELRIAMGMRESLSKNLNIIKRFTHPSQIQKLAGLNLIENSSGKHKGKTTISKRGRATISKRGRARLRAILFRVIMPLVSKNNEFKMLHEYYTNRKENPLKKKQSLILLCCKLIRIFFTIITKKVEYNPQKLMKDTGFNLQLKVA

SEQ ID NO: 72263 - protein, 310 aa, unidentified
MKDTIGIDISKPVLDAFRLATGEHRQFPNDKPGCKALMRWIGQEPVRVVFEPTGPYHRILEQSLTRAGTAIVKVNPRYARRFAEATGELAKTDRIDAALLARMAVVLDLEARPARSEIHHDLRELSVARQALIKDRIAARNREQVAQNALVRRQIKARLVQIEKQIGEIEQAMAAIVGADETLQRRREILASIPGIGPITAMAIIVEMPELGEMDGKQAASLAGLAPITRESGGWKGRSRIQGGRASLRCGLYMPALVALRINPDLRRKYQALKEAGKPSKVAIAAIMRKLIVLANALIRDNRKWSPNAT

SEQ ID NO: 72264 - protein, 411 aa, unidentified
MGLTCGIDWAEGHHDVAVVDEAGNVLAERRIGVGAAGFADLLGVLAECGDSPDQSIPVGIESSSLLLVSALLAGGRKVYAINPLAVSRYRDRHRASRAKSDARDAIVLANILRTDAHAHRPIPSDSDGVKALRVLTRAQQDAVWDRVGLTNRIRGVLRRYFPAAVAAFERGGKHRLDSPACRVILRAAPTPSAADKLSLARLQALLRRAGRTRGIDAEARRLQTYLRRTELRQPLAVEGAMGIQLQALVDQLDAICRAVDVLTAAAEQLFLSHRSAVIVTSMPGAGSVIGARLLAEIGDDSKRFADARALKAYAGAAPVTRASGKSHHVGYRRAKSDRIAAAGYIWVRAALVHDLACRSYYQARRRTGDRHVGAQRNLFNKLLGKLYHCLQTNQRYDSATAFPNHHLPTAA

SEQ ID NO: 72265 - protein, 364 aa, unidentified
MSDGICFAGLDVRARKTAAAAVVLGSGEVFRAQLGGSSQAAVEWLQTLPGRQVRAVYEAGPTGFGLARAARVAGIEMMVCAPGAIPRQPGDRIKTDTRDALKLARLLAAGQLRPVTVPEPELEALRDLVRCREDLRGDLMACRHRISKLLLRRGMIWEGPGSAWSTRHLAWLGRVRFDDPVVELVFGEQLAGHEVLLARRDRLERAIELQAADGPWAPTVGRLRCLRGISTLTAVGLVAEIGDFTAFDHPRRLASFLGLVPSESSTGTRRRQGAITKAGSSHARRLLIEAAWHYRRPPRVSLELRRRQTGQPPAAIEAAWRAQMRLHRRWVDLDARRGKKRTTVAVAVARELACFVWEIARQGD

SEQ ID NO: 72266 - protein, 381 aa, unidentified
MRIVCGLDVHKDSVFACILNDKGDKFECKYGVLTPDLEELHQLLLTHDVKEVTMESTSIYWHPIWRILDDIEELKLVNPYFIKQLPGRKSDVRDAAWIAECTMKDLIRGSFVPSTIVQRMRQYNRRIFDLNKEIVYKLTKLDTVLQHCNIRISNYVSSTDSKSYKDVVRLLSEGITDANHLACVIHGRTVNRVGKDTIVDSLTGVISDVDIDLIRQYLEEIELAQSHKQACQEKLTQMCKTEFPQEFENLQTIPGVKERSATSILSEIGADMKMFVTAYALVSWCGLKPRNEESAGKIKSRRITHGNKYIRKTMIECAWGASKTQNCFFSKFSYTQTVIRKKNAMKVKVAIARKMLIAIWHVLSDSKPYIDYKKPDTTGNS

SEQ ID NO: 72267 - protein, 390 aa, unidentified
MILVGIDVAKDKHDCCITNTDGEMLFDIFTITNNSESFDILYERIRSVAPDLSKVKVGLEATGHYNYNILSYLLDKHLTAYVINPLHTNFYRKGLSLRKTKTDRIDSRTIALMLLTDLSLKPYSVSSYHRENLKSLTRYRFSRVQERSRQKSSISRLVTILFPELSQLVPCIHISSIYTMLEELPGASYVASVHLTRLTNILSKASKGRFGREMAITFREAARTSIGAKIPAKSLELRHTIADVRAIESEIREVETEIQKLMDEETTTITSVPGIGTQMGAIILAEIGDFSRFDSPDKILAFAGMSPSTYQSGKMISSYAHMEKRGSRYLRFALFNVTKHVCNYDPGFAAYLAKKRAEGKHYNVAISHAAKRLVRILYAMETNGTLYEAA

SEQ ID NO: 72268 - protein, 350 aa, unidentified
MAIPAPVYHLYVGIDIAADTFTAAWLPASGTPSGPLTREQTPTGLVALQQRLAATGCPPATTLVVMEATGNYWVAPAVARHAAGYVVSVINPLQAHHFAKAQLRRAKTDNLDAQDLARLAAQLCPAPWTPPPTVYHEVRQRLVARDALLTMRQQARNQRHALLQWPVVVVGVRRHLDELIADFDARLTTLEAEIAAALQESAWAESLACVLSAPGNGLVTAAWLLVGTLNFALATGPAAATAYVGLAPMPRESGRSVRGRPAIGHAGNARLRTALYMATLSAARYNPAIKAFYERLRAVGKPMKVARCAAARKLLHLAWALVTKHQRFDPTKQQQQHASPADPTATQEAA

SEQ ID NO: 72269 - protein, 395 aa, unidentified
MFIVGIDIAKRSHEAIIIAEDGQVVRKAFSFRNNCTGYNLLLEQVRRLTLVKSQIVFAMESTAHYWLALYARLLKDGYAVMVLNPIQSHSLRELYIRKAKTDARDSLIIADLVRFGRCKASNVPQDKILALRELCRSRAYLVDMAADLKRKLIALLDRIFPEYESLFDSVFSKASIAVLSKYSTPPKVKNANLRKLTDILMESSNGHFGEWKAHQLKEAACSSFGIDDSGGVYSTLLGMFLEQILSLTAQADSLEKQISVFFQEFNNPLTSIPGVGTVLAATILSEIGDITRFSSADKLLAYAGLDPSVKQSGEFKSNQNRMSKRGSPYLRRAIWLASTVAVHRDPMFQTYYEKKISKGLHYMNVIGHVSRKMTAVIFAVLRDGQPYQPILQSAG

SEQ ID NO: 72270 - protein, 354 aa, unidentified
MKELLKQSLGIDCAMDEHVASFSVMTGEFEIVHRATLTFKNTKSGFEKLNKWIQHQHPIQSLVIVMEATGVYHEQLACFLTDRNYYVSVILPNKAKYFAKTLDLKTVNDKIASQSLAIMGLEKKLSKWEKPSELLNKIRQLTRERDQIVNERTQIKCQLHAEKSGAWANASSIKRMNQRIKILDKQEAEIKNEIAELVKKDAELVRKIKLVSTIKGVGLLTAATVIAETNGFRTVRNKKQLVSYAGLDVMQHTSGISINKKSKISKHGNKYLRKCLHLPALSAIKSSKNQKELFVRLVSRHGIKMKAAVAVQRKLLVLIYTIWKTETPYDPNYEVKKSRNELGQPRRATLKELA

SEQ ID NO: 72271 - protein, 347 aa, unidentified
MNYIGVDCHISSLDFAVVNEKGTTTKRARVNTGVKEFMEFVKSIPKPRKIFIEEGELATWLLEASLKYGETLVITDPKINKWIGKSGKKDDSIDAEKLAQLARGKYIKEIYHSINNRRRFKELVFAYHDTVKSQTRIKNKIKAAFRREGIGCSGVTVYSEKYRKEWRKKLPRNKVVHLIIDELWNQLDQIQDAKERLKRNIRIHGKQYPEIKRFRNVPGIGLINASTISAIIETPHRFANKKKLWMYAGMGLAERKSGEKVYSRRLTWEYNRLLKNAVKQSTEAAIYAKDNPFRRQYLRLTIEKGIPSYKAKLTVARSLLAALYGMWKKGEAYDFQIDIKRDKKNKK

SEQ ID NO: 72272 - protein, 365 aa, unidentified
MTSMTSPTGPVTVIGGVDTHSQTHHAAVIDQVGRQLGDREFPTTPAGYRALLTWLRGHGQLERVGVEGTGSYGAALARYLRSVGAGVVEVDRPDRKARRAKGKSDPLDAYAAARAALSGTATGTPKTRDGRVEAIRVLRVARSGAVKARTQGTNQLKALLLTAPAELREQLRRLSTTTLIATCARLRPSSELTDPEQATKTALRRLARRHQRLSEEIDEADTELRTLVTAAAPRLLALPSVGIEVAGQLLTSAGDNPDRLRSEAAFAHLCGVAPVPVSSGRTHRHRLNRGGDRAANNALYIVVLGRLRYDSRTRVYADRRTKEGLSKPEIIRCLKRYVAREVFAILTAPAVEDPVATTPAMSTAA

SEQ ID NO: 72273 - protein, 372 aa, unidentified
MGDYSVAYIGFDTAKLRHAVAVAEEGRTGEVRFLGEIENTEAATIKLVKKLAGRYRTLQFCYEAGPTGYELYRLIKRLGHDCLVAAPSLIPRKAGDRVKTNRRDALGLARLLRAGDLTAVWVPDPRHEAMRDLTRAREAAVEDLISKRQQVLSLLLRIGRHYPGKRNWTRMHMNWLASQKLEHGEQRIAFEEMLLAIREAQERVARLEQAIRNALPEWSLADLVTALMAMRGLDLVSASAFLAEMGDLSRFASARELMAYLGLVPSEQSTGEKVRRGGITKAGNRRARRILIESSWSYRHPPRLGKEKLARTAGVPREAREIAWKAQHRLNGRYRTLIRKGKKPTVVVTAIARELSGFIWAINRVVRPAVTG

SEQ ID NO: 72274 - protein, 344 aa, unidentified
MDHIGIDVHKNQSQVCIFKGSGERIEQRILTDRVRFAEVFGGRPGARILLEASTESEWVARCLEELGHEVIVADPNFAPMYATRSRRVKTDRRDARTLAEACQLGAYRPAHRTSDAQRLVRADLAVREALVRTRSRYISVVRSLLRREGLRVRGGEAKTFGRRVGELEVPRSLSSAIEPLLVVLEQANQQIDHADRELARRVEGDPDLRRLTTLPGVGPVTATTFKATVDDVERFRGAGQVAAYLGLVPRERSSGERQQRGRITKAGNSRARSLLVEAAWLILRSKRNDTIALRTWAERVAARRGRRVAAVALARRLSRILYAMWRDDTGYAPEKIRRPAAQAT

SEQ ID NO: 72275 - protein, 375 aa, unidentified
MKEKVRFLGLDVHAETIVVAVAERDGEVRSLGTIANRAESIRKLVKKLGPVEQLKACYEAGPTGYVLYWQLAELGVACEVIAPTLVPMKAGDRVKTDRRDAERLARSHRSGDLTAVWVPDEGSEALRDLVRAREAAKADQLRARHRLSKFLLRTGRRPETKIKLWTGVHMTWVRQLRFEHPAQESTRLDYLHEVEHMAERVLRLEQAITDAIKLSTPEMQEVIRGLQALRGIAEISAVTIVSELGTLSRFENARQLMGYSGAVPSENSSGKRVQRGSITKAGNAHLRRIAIEAAWSYRLRPGIGPRLRKRQENVPEEIKEIAWKAQIRLTKRYARLAAAGKDQRKIVTAVGRELLGFIWAIGIKAESAAMQKMAA

SEQ ID NO: 72276 - protein, 400 aa, unidentified
MTAVWAGIDSGKRAHHCVVIDTTGRLLLSRRVANDESALLELITSVLALAGGGQVVWATDLNAGGAALLIALLTERRQPVLYIPGRIVHHAAATYRGDGKTDAKDARIIADQARMRTDLQPVRSADQISTDLRLLTSRRTDLVYDRVRAINRLRALMLEYFPALEAAFDYSKKAPLILVSGYQTPEAIRRIGVTRLAAWLKKRGCRGSANVARKAVDAANAQRTMLCTEPVAAQLVAQLAEQITAIDVEIARLDDQINERFGQHPDAPILLSMPGFGPVLGATFLANTGGDLNAFETVDRLASVAGLAPAPRDSGRISGNHHRPKRFNRRLMRTCYLAALSSLKNSPASRAFYERKRTEGKSHKQALIALARRRINTLWAMLRDRTTYLEPAAPALATAA

SEQ ID NO: 72277 - protein, 346 aa, unidentified
MLYAGLDLSRKRLEFRLLDQEGATVEAGAAPPDADGLRGLAERVRRYGQPVEAAIESMTGARFVHDQLELHGWQVEIADAARVKGFAPLACKTDRIDAWVLAELSRLELVPAIWLPDPQVRAARERARFRLHLARQRAGLKQRVHAILMTHGTPCPVSDLFGRRGRELLARLELPEPWQTSVATSLRLLDQLEAEIADSESELQRLGADHPYLPLLLSVPGIGWVLGYTIAAEIGEISRFPSPPKLVSYSGLCPRVYQSGDRDRRGPLTKTGPKYLRWALVEATTHACKHPAYRDRYQRTKQRLGKQRGPKVAQIELARDLATAIWHMLTRNQPFAPASAPAPLAA

SEQ ID NO: 72278 - protein, 343 aa, unidentified
MDEISMIGLDLAKHVFQVHGVDASGGVVLRRQLRRSAVEKFFAQLPPCTVGMEACGGAHHWARVIGRYGHQVRLMPPAYVKPYVKRNKNDGRDAEAICEAAGRPTMRFVAVKSVEQQAVLAVHATRALLVRQRTMIANSLRAALSELGIVAAQGIKGLRELMAKLETANEEIPEMMRGALLVLARQWQALDADERALERHIVQAARTDREARRLMEVPGVGPIIASTVLAKVPDAKVFRTGRDFAAWVGLTGRDHGTGGKHRPGRISKQGDRMLRALLISGASAYLRHQRRRGVSDPWLRDLLARRPYKVVMVALAAKTARILWAMLVKGEPYRDRASASAAA

SEQ ID NO: 72279 - protein, 369 aa, unidentified
MVEQREAFVGIDVAKLRNAVAVADGGRMGEVRYLGEFDADEASMRRLVKRLAAKHESITFCYEAGPTGYGLHRLIKSMGLECTVVAPSLIPRRPGDQVKTNRRDAIGLARLLRAGELTAVWVPDESHEAMRDLVRGRSAAVETQRVHRQHITSFMLKHGRIFPRKKAWSMRYLRWLQEQRFDHPAHQIALQEMVDALRLASERIKRIEAAIEEFLPGWSLEPLVRSLQALRGVDLIVAVTFAAEVGDVTRFENPRQLMSYLGLVPSERSTGASVRRGGITKAGNSRVRHMLVESAWTYRHPPRIGVKKLYIHERVSPVVREIAWKAQSRLTARYRRLAATGKRTTVVCTAVARELAGFMWSVGRVVQPV

SEQ ID NO: 72280 - protein, 483 aa, unidentified
MGRRLVGIDLGIASAHTVRVLDGEGQQVCRRRCASTVEEFARVESAALAGAEAGTRLEVVIEPTGPAWLPVAVFFTGRGHTVYRVSSAKAADLRRFLSRHAKSNGIDADTLARLPLVALQGLAPVELPGVEAAALDRRVRATDRLTRAATEHKVRIKDLARQLMPATALTGDLGVADLAVLERFADPRVLLRAGPARLTAVIVKASHGHQGAERAAAWRAAATEAVELYRAYPAMPFTDLAAEVASEVRLLRATQAELAGHAQAREEAYRWADPGQLARSLPGLAAVGGPALAAIMGRADRFPSARHFKSFTGLAPRASETGETDRKGQPMSKAGPALLRTTLVRAADHARKQDPQLARIYYTQVVERGAEHTKALCVVAAALAERAWTVMRRRMPYVVCDTDGTPVNPERAKTIIAERWTVSTEVRARRRSRKHQPPKTKAGKAPQQVLAGHERSDARGVDKRGDLPHRGSSRRPTTTRKAP

SEQ ID NO: 72281 - protein, 458 aa, unidentified
MSRKRIPKRRNAVVPILNPDAAGIDIGASEIYVAVPADRDPEPVRMFLTFTADLRSLADWLQQCRVRTVAMESTGVYWIPLMQLLEDRGLEVYLVNARHVKNVPGRRTDVSDCQWLQYLHSVGLLRASFRPAQEVCAVRSLLRHRDSLIEMATCHVQHMQKALDQMNLQIHHVISDITGTTGLAIIDAILSGERDAEKLAQLRDPRIRATSETIAKSLVGDYRREHLFTLRQAVALYREYQRKIVDCEAEMQQLMKNLGAKADPSSLPAPKESVKRCKVMNPARALALREEAYRILGVDLTTIPGISVLHVQTILAELGPDFSKFRSAAAFSSWMGVCPDNDISGGKVLWSGTRRVKNRIALTLRLAAQSLQHSQSALGEFYRRMRAKLGAPKAITAAAHKLARIVYHLLTTRQSYDDSIFTKAEERYRRRAEFRLKAQARFLGFTLTPATISGKEVP

SEQ ID NO: 72282 - protein, 371 aa, unidentified
MEQSNKTLYVGLDVHKDSIAVAYAPEDRGAEVVSLGAIGTRQCDIDKLIRRLESKGAALVFVYEAGPCGYGLYRYLTGKGFACHVVAPSLIPRKAGDRVKTDRRDAMTLARLMRSGDLSAIYVPGVEDEALRDLSRGRDDAMQDLKRGKRRLKSFLLRQDIRYEGRATWNAAHLRWLSEVVCATPPQQIVFQEYLRAVSEQHERRQRMEHELHEAVQGWRLYPMVQAIQALRGLELTSAVIVMTELGDITRFDNPRQLMSYLGLTPSEYSSGERRRQGGITKAGNSHARRALVEGAWAYRYPAKVSRHLQLRLETLPAEVQAISWKAQVRLCKRYRQLTARGKHVNQVVVAIAREMAAFAWAIAKLVPLAT

SEQ ID NO: 72283 - protein, 349 aa, unidentified
MWNVGLDYHVRMSSLHILDAHGKKVNALTVQGPWTELVAVLGRLADQARAVGEKLAICYEASCGYGHLFEQFSRVAARVVVAHPGQLRLIFKSKRKNNPVDAAKLALLLLLDQVPPVWVPSQDVRAWRRLIEHRRRTVDKRTRCKNQLRALLRTHGIALPPGKKLWALKQRAWLRSVALPTPVDALQRDILLEELDHQDRQVLRVTQELDRLARHHPGVMLLRTIPGVGPRTAEAVVAYIDQPGRFRRRKCIGAYLGLVPCQDASAGVNRLGHITREGPGTVRKLLIEAAWQGVRRSPRVRAFYDRIVGGKDDRRKIALVATAHWLARVMLAMLCHGEAWRPEAPAAAA

SEQ ID NO: 72284 - protein, 388 aa, unidentified
MSQSFDASKSLTAFEQDSTLVAVIEMSQSKWLVAAVVPGIARQPLKKLDADAGALLKLLQRWREEARKAGREVKRIVCAYEAGRDGFWLARWLQAQAIETYVIHAASIAVSREHRRAKTDRIDTELLMRSFLGWLRGEKRHCSMVAIPTMAEEDARRPSRERESLVGEQTRIVNRIKAVLALFGIGGFNPKLRKAAQKLETLRTADGTPLPENAHAELRRDLERLRLARDQIHIIESERLRRLALAPAAGPHAMVRLIARVFGVGIETADMLVNEALARNLRDRRAVARYAGLTGAPDESGKRRREKGLARAGNGRVRRGMIQLAWRFLIFQKESRLVRWFRARTADGRSTTRKTMIVALARKLLIALWRLVTTGEMTEGLKLRPAGT

SEQ ID NO: 72285 - protein, 369 aa, unidentified
MAKSITFIGLDVHKDTIAVALAEAGLRGEVREHGKIPNAAAALKALAMKLASAGRELRFCYEAGPCGYGIQRQLAGMRHDCTVVAPSLIPRKPGERIKTDRRDAMNLAKLHRAGELTPVWVPDQAHEAIRDLVRARQAAVRTLRQARQQLSGFLLRHGYHYHRPAWTQLHRRWLASLRFEQAVHHIVLEDCIAAVEAATARRDRLEAHIEAALPEWALAPVVQALQALRGVGLVAAATLLAELGDITRFTNPRQLMAYLGLVPSEHSSGRTRRQGGITKAGNGAARRMLIEAAWSYRFPARISREQLLRQERLAKPIRDIAWKAQERLCRRYRKLARAGKLPTVITAAIARELAGFIWAIARQPQSTTP

SEQ ID NO: 72286 - protein, 355 aa, unidentified
MNSEKYIGLDVHQATISVAVMDSTGKVVMESILETKAATILEFFAGLRGTLSVTFEEGTWAAWLYDLLQPHVAKLVVCNPRKTALLKDGNKNDRIDARKLAELLRLDSLKPVYHGETGVGMLRELARSYLTLVKDLTRVMNRLKAMYRSWAIPCAGRDVYYPRHRAEWLGKIREAGVRRRAERLYQQLDMLQHLRQQARRELLAESRKHAITAKLRQIPSLGPIRSALAVALIQTPHRFRTKRQLWAYSGLALETRTSGEHCYVRGQLRRSKKQVSIRGLNKDHNHDLKGLFKAAATRASVQPGPFQDFYQRSLAKGIKPTMVRLTLARKIAAITLTLWKKGENFDAERLKSQAA

SEQ ID NO: 72287 - protein, 463 aa, unidentified
MQKNCDKNSKPDKEVGIEGLPVIRPNVAGIDLGSETHWVCAPNVDRTGLEEETFGATTPELERMAEWLKARKIESVAMESTGVYWIAPHEVLERHGLEIVLVNTRELARVPGRKKTDRVDCRWTQRLHSCGLLKGSFRPNEPVCMLRTLVRDKGNLVAEAGDWLRRMQKSLDQMNVRVHRAVSDIDGVTGMRIVRAIVAGERDAHELAKLRDRRCGKSEEEIVEQLSGHWREDHLFSLRQALKMYDAIQERIADYEREILRKLAEMERAECHGQEPPKLKNPQKAKAIQKRGEEPLRQALYRLSGVDLTGIDAIGVETVQVVLSEYGPDLSRFPSEKQFVSHVTLAPRQALSGGKPVKKKKRGSASTRVAAALRMAALSLRHSQTALGAYYRQISRRIGGDVAVFATARKLATLIYRLLRWGQPYVDVGAAAWENRYRQARIQRLAATAKDLGYQLTPNPTKA

SEQ ID NO: 72288 - protein, 340 aa, unidentified
MRLFAGLDVSLETTAICVIDQDGKIVQEAVASTDAEAIADVLERYRADLERVGLEAAPMSEWLMRGLKMRGHQAVQMETRQVHLALASAVKTDRKDARGIANLLRMGWFKPVHVKTASARERRVLLAARDCLVRRLKDLDNSVRGLLRCFGLRPPRALRGRWSAVVGELIKGHRTLTDAISPILAARDGIAEQLDRIDRRVRDEAKNDEVCRRLMTVPGVGAIVALTYVAAIDCPERFRSSKTVGACLGLTPRRYQSGETDRAGAITKMGDPAARVALFEAAHVIMTRVQRWFPLKAWAMRVAARRGAKRAKVALARKLAVILHRIWIAGTEFQSRPASA

SEQ ID NO: 72289 - protein, 432 aa, unidentified
MKTYILRPFHPVEPQRTRSRNPRAWRPKVQQSRGPALFIGLDVHSDSIAVCLAPSDSTELRPYGVIGGSHDDVLKLAKKLSAAHSGLPLQFCYEAGPHGYPLCRCLRAHGYHCIIVAPSKVPRKPGDRVKTDRRDAEQLARLYRAGELSAIYVPDPQDEAMRDLIRGRYQVSRQQHRARQQLKMFLLRHNIRYTGKTSWNAAHLRYLAQIKMPFPVQQILFQEMLNAVSEAASRLERLDQEIERAVPGWRWYPVVQALMSLRGMALLHAATTLAELGDLNRFSHPSQLMSYLGLVPCEDTTGEDRRQGGITKMGNGPARRALVEAAWSYRCPPRITPHLLKRQEGLPKTFTEISWKAQRRLHHRFVHLTRVGRKKSQVAVTAVARELSGFVWAIARLVQPLPPKHAPLSNSAPTSLAAVSSRGSSPRGIRRR

SEQ ID NO: 72290 - protein, 325 aa, unidentified
MRQPQSQVKPQTQVGLDVSSQTLDAHIRVDGKAFSVPNTDVGLDQLCEVLSVYDVSMILMESTGGYEDNAACYLQLQGYDVVVINPRHARRFAQSMGRLAKTDRIDAAVLAHMALMIDSGPDRERYIKPVNDEQRKQLSRMSSRRRQVVDLITVEKQRLTHADDYSRESINTIILLLNAQLKRIESDISHYVKKNFSELADRLLSIPGVGSQVVTVLIADLAELGHVNRRRISALLGVAPFNHDSGNFKGQRRIRDGRQSVRNVLYMGVISATRFNPVIKAFYDRLVNRGKPKKVALIACMHKLVNIINAMMRTGKPFDMSLHGV

SEQ ID NO: 72291 - protein, 344 aa, unidentified
MDNDTLVAVDLAKSVFEVLVSLRPGKVHKGQRLQRDQVLPFFAQQPAATVIMEACSSAHYWARAIQKLGHKVVLLPAQHVRPYVLRNKTDRTDTKGMLEAYRNDAIRPVPVKSVAQQTLASLHRIRSGRVSDRTAIINRLRGTLREYGLVIPVGAEKVVSYARAYLADADSGIPDARSDLLGELCDEIRMLQTRVREVERKLEILGAETVAVQHLMTVPGIGLLIATSLVAFVGDSHRFPSGRHFASYLGLTPREYSSGSKRHLGRITKRGDVYIRMLLIHGARSVLAHAHRAAQPDRLRSWALELEKKVGANKAAVALANRIARIAWAVWTHDRDFETRTLVA

SEQ ID NO: 72292 - protein, 359 aa, unidentified
MDTIVAHTHPFVIGVDTHARTHTYAVLTAAGQYLGTETFPNTAAGRSRAINWAGRRSGGVTDALWVIEGAGSYGAQLARNVADTGYRVVEAARMGRTGRRGIGKSDPLDARRIAAAVLSLPVNQLRTPRQDEGVRAAAQILLTARDGLAAERTRAVNALTALLRIIDLGIDARRPLGARKIAEVARWRTREEALAATTARTEAIRLAKRILELDTELGQNMTRISDLVAASPAAELLEKTGIGPVTAARTLVAWSHPGRVKSEAAFAAIAGVNPIPASSGNTTRHRLNRGGDRQLNRALNIIAMVRMVHDPGTHDYVERRRAEGKTDREIRRILKRYLARSIYRHLNTVSATKLRVDEI

SEQ ID NO: 72293 - protein, 367 aa, unidentified
MKKVSTAVAKQGRNISRQRLTIGLDLGDRNSWYCVLDEAGTIQLEQRVRTTAKALQEVFGAMPRSRIALEIGTHSPWISRLLSELGHEVIVANARKVRLIGESRKKDDRLDAQTLARLARIDPELLYPVKHRSAQAQADLMMIRARAGLVRARTGLVNTARGLAKSYGERLRGCNVRNMDPEKAEGLSPELQRALEPLLATIEELSERIVEYNDRIEALAQASYPQVALLKQIKGVGTLIALTFLLTLEDPHRFGKSRDVGGYLGLQPGRRKSGESEPQLHISKEGDPYLRTLLVQGAQHILGPFGIDCDLRRWGLKLAERGGRNGKKRAIVATARKLAVLLHHLWVSGEVYEPLHNSSRLTVAAAA

SEQ ID NO: 72294 - protein, 367 aa, unidentified
MMGWMAPLRHRGAKLVLLENHQEREPSMSEITTIGLDLAKHVFQVHGVDAQGTTVLRKRLRRGQVLAFFSRIPRCVVGLEACATAHYWARELGVLGHEVRLLPAQYVKPYIKRNKHDAADAEAICEAVGRPTMRFVPVKTAEQQATQLLHRGREQLVRQRTMLVNALRAHLAEFGMVAAQGLRNVGELIAIVRDDGDRRLPAVARQVLQVLANQIEQIEAAVTALERQLLAWHKTNPVSQRLASIPGIGPIIATAIATTVTDPNVFRSGREFAAWLGLVPRQNSTGGKTRLGGITKRGNRYLRRLLINGASANLLRSKATKADPWVIGLRRRRPPLVVAVALANKTARIAWAVMLRQREYQPRAVAA

SEQ ID NO: 72295 - protein, 371 aa, unidentified
MNSLIHIGIDVHKDTYSLCSYSFQTNQAFGQTKIGSDNKLVIKYVEKLMKRHPEVEVLCGYEAGPTGFGLYRDLHKANIPCVVMAPTSLPKAVGNRVKTDRLDALELAKHLAYGTYSAVRVPTSEDEAVKDFTRLRNTRQQALKRAKQNLLSFLLRRQRRYTEGSTYWTKTHHRWLKQQKFTDPLDQETYNEYLQELYDQEEKVERYDARIEELSRLDAYRERVEKLRCFKGIDTHTALSLVCEIGDFSRFATAAQFSAYLGLVPSENSSGQRERRGGITKGGNTRLRTLLIEAANGAIRGNLYGAKSKKLKARQAGNTAQVIAYADRAQRRLHRTYSKLVLNSVPRNKAIVAVARELSCFIWGMMNDRID

SEQ ID NO: 72296 - protein, 345 aa, unidentified
MQTVTTIGLDIAKSVFQVHGVDAQGKVIVRRQLKRRCVLAFFQKLPPCLIGIEACASSHYWSRELQALGHTVRLMPPAYVKPYVKRQKNDCADAEAICEAVTRASMRFVATKTVEQQSCLMLHRTRHLFIRQQTAVINAIRAHFAEFGIVAPVGRTGVEELLKVASNGNDKRLPAVARVCIAALGAQLQMLKARILEFDRLIMAWHRSNQVSKRLDELPGVGPALATALVGSIADPKAFRSGRDFSAWIGLVPKQHSSGGRERLGGISKQGDRYLRSLFVAGALAVIRYAKKRGSKHRPWLAALLARKPTKVAAIALANKIARMAWAMMAKGERYKQPVALAAAW

SEQ ID NO: 72297 - protein, 373 aa, unidentified
MTRKTNTNLNIRVVGVDLHSDNFYATYDTIDGSVKTEIFPYTKESINRFLAVMKANHVKKAFIESTGSYYYPFASILEANGIETYVFNAFKTKNPDIDKRDDSDSAWLYALGKTGQVKASRLVSPNILPLREATRLRFHIADMIAASKKRIEGMLWRFGFLARNVSRRLEGKKFRGALKKALLGRVDRRFREDSLIVSIVERARSGLVGLDIILNELETLEYLMRRRDVVDEKIRKLAEPFMDKIEILMSMPGIRFTLAVAIFSEMGSIDRFPSGRHLASYAGLRPTLKQSGRKRRYGRTSKKSNSRLRRYMFLVAKSAMRSHDPIARRFVDRLRRRGKHFNVIAVALARKMLCIAWILLVRGVSWRNIRRIR

SEQ ID NO: 72298 - protein, 326 aa, unidentified
MDILGIDLAKKTFDVTLLTPAGTRYHHTFPNTPSGFRALWCWLTAHKVTSLRACMEATNVYWEALAQYLVEQDATVHVVNPARIKGYAQSQMLRNKTDKQDSATIAAFCAAHDLAAWVPPTAAQRKLRALVRHRDDLIASRIQQTNRLEDTTDPDVRASLSTVVATIASQLTTIQQQITAHLHAHAELREQHDLMDAVPGIGPVTAQKLVGEFYDLASYASAKAVGADAGLTPANYESGTSVRRRPRLSKMGKASIRAALYMPAITVMSRNREFKQFAARLAARGKSYGVILGAVMRKLLHIIYGVVKHKAPYDPQKVLGPAVAAT

SEQ ID NO: 72299 - protein, 359 aa, unidentified
MAANLSKIDYSNKTIYIGLDVHSSKWYSTIICEDKITQIAFDANPEQLANYLETHYPDATFKAAYEAGCFGFWAQNKLEALGVETIVINPADIPTSDKDKVQKNDKNDSRKIALALRNSMLESIFIPTRTQQEHRELSRRRDDLVSKCTRVKNQIKSDLKFYGIKYSEDFDKSTTHWSKKFVEWLGKIKFETTTGVNVMKSRINELNWLEEEIKLISKQLDELMQTDEYKEAYRIVRSVPGIGKIHAATFILEIMDIENRFKRADQYHSYVGLVPSEHSSGDSRHIGHLSRRCNRYLRKIFVEASWIAIKKDVALNKYFEELKNRGMKSTLAIVKVARKLANRLRCILKKKEEYKLGIA

SEQ ID NO: 72300 - protein, 319 aa, unidentified
MMDTVNSFVGIDVSKHSLDVHVLETGVSFRSSSSPEGRQKLIAQLPQPQSCLVVLEATGGYERLLVCDLAQAGHLVAVVNPGQIRAYANALGVKAKSDKVDARVIARFGQAVKPRPKAQGHERQAELDELVARRRQLLELRTAEFNRRGTSMTRAVKQSLQRSINAVNKDLEKIDRAILELVASHDDWQDRLRQLTSVPGVGTVTGVTLVAELPELGQLNRKEIAALVGVAPFDRDSGQWRGQRRIWGGRTTVRTALYMAALAAKKFNPDMREFANRLHARGKKGKVVLVACMRKLLTILNTMVRDNTMWSPRLAAAEI

SEQ ID NO: 72301 - protein, 381 aa, unidentified
MRQVCGLDVHKDSVFACIVNEKGVVFQEKFGVLTPELEQLAAALQEHDVDEVCMESTSVYWMPVWRVLERYVMDLKLVNPYFIKQLPGKKSDMKDAEWIATCLLKDLIRGSYVPADIIQQLRQYDRRISDLNVECVRKLGKLDAALQRCNIRISNYVATTDGKSYKEVVRLISEGVRDPAELLKVIHGRITNRVGKNVIIASLTGVISDTDIDVIRQLREEVDLAQRHKDECQSKMDAICQQYFPEQLKKLQTIPGVKGRSATAIIAEVGSDVSSFQDAAHLVSWCGLKPRNEESAGKIKARSITHGNRYLRKTLIECSWGASKTQGCYLNKFSYYQTVVRRKNKMKVQVAIARKILIAVWYVLHDNVAYRDYTPDIAPAT

SEQ ID NO: 72302 - protein, 340 aa, unidentified
MNIKRIGLDLAKNIFQIHAVDHHEHVVLRKTLRRDRMTAFFSQLSPCLIGIEACGAAHYWARELTRMGHTVHIIPPQRVKPYLKGQKNDANDAEAICEAISRPGMRFVAMKTERQQTLQAEHRVRARLIRARTALSNEIRGLLGEFGLVLPVGIRQLRKALPEILSQQELWDDRFIRLLSELAEELQMLDERVARHDRRLEQSARDDVRIKRLLAIEGMGPVVASALVAAVGDGRQFKSGREMAAYLGLVPRQHSSGGKARLGSVSKRGDSYLRTLIIHGARAVLNACPNKTDRRSQWLQALSERRNRNIATVALANKNARIAWALLSREEDYHGLQAAG

SEQ ID NO: 72303 - protein, 397 aa, unidentified
MIAVGIDVSKSKSTVAVIDSNGVVLASPYTIAHTQPELHALAKYLKELKEPVTILMEYTGHYHYPVLKQLQSEGFPVCLINPYQMKKYGDTEIHKAKTDKKDALRIATYALEKSYKLVPYSSMEQKYEDLKFLSRQYEQRISFVAKLKVQLLDLLDQTMPGITKQLSLTSRNPEKCALLLFIKRFKSFDEIQRMGKTRFLSSYETMTKKTSDRYAAQKGLAIYELAKDSITTRGDDPYIWLSQTQCVDLLSAAQNAADEIILKMQNIAQTIPEYAVLRAMHGVGDRLGPIILAEIGDIRRFHSGKALNSYAGNDAPPYQSGQFESRNRHISKRGSSALRKACYEVMQALKLTKPQDDPVYLFMLKKEREGKPYNVAKMAGVNKFLRIYYAKAMELYR

SEQ ID NO: 72304 - protein, 370 aa, unidentified
MENRNMFVGLDVHKETIDVSIAEGDRRGEVRHYGVIASDLEPLDKVVRALRAPDRTLHFVYEAGPCGFGIYRHLTGRGEDCVVVSPSMIPKRSGDRVKTDRRDSQMLARLHRAGELRAIYVPDDTDEAMRDLVRAREDAVGVGTQAKYRLKAFLLRQGRRYPGREGWTLPYRRWLTDLSFPSAAQHIALQEYRDAIAETEQRIDRLTEQLRQLAPTWRWAPVVAALQALRGVSFLTAVALVAELGDLTRFRHPRELMAYLGLVPSEHSSGPTVRRGAITKAGNPHVRRLLAEAAWAYQGIPRIGRQHAYRQEALSKVVCDIAWKAQLRLTTRFRRLVARGKAKPKVATAIARELSGFVWAIAREVSPTPR

SEQ ID NO: 72305 - protein, 343 aa, unidentified
MDHYAGIDVSLESSSVCVVDASGRIVREAKVASEPEALIAWFGGLGISLARIGLEAGPLSQWLYASMREAGLAVELLETRHVRDAFKAMPVKTDRKDARGIAQLMRLGWFRPVHCKSLPAQELRAVLTARKLVQGKRHDLEMSLRGILRGFGLKVGPTTPRSFEGRVRELVDGHTTLVAVADALLIARAALGEQLGKLQKRLVSLAREDTRARLLMSTPGVGVIVALTYVAGIDDPGRFRSSKAVGAHFGLTPKKYQSGETDVTGRISKIGDASVRTALYEAASVILTRPVKGSSLKSWAMRLAMRAGMRKAKVALARKLAVVLHRMLADGTEFVAGKAAAVA

SEQ ID NO: 72306 - protein, 347 aa, unidentified
MTYNRQHRFYCGVDLHARTLFTHVLDHKGKTAFEQDLPADPDVFLQAIKPYRKDLVVGVECMFAWYWLADLCEDHGIPFALGHALAMRHIHQGKSKSDKIDAGKLAAMLRGGLFPLAYAYPRAKRQTRDLLRRRSFFVRQRAQLIAHVVNTNTQFNLPPLSKKLTYAANRTPELLERFTDPSTRLMVSADLAMVDSHDGQIAGLERHLVKHAKVDDPVTFGLLRTIPGIGPILGLTLLYEIDDIRRFPEAGNFLSYSRLVRCEHSSAGKVKGSGPKKVGNAHLKWAFSEAACLMIRSVPAVKGWMQRQQKKRGKRKALSVLEAKLGRTVYHLWRKQVPFDVKRFLKG

SEQ ID NO: 72307 - protein, 352 aa, unidentified
MKKIFIGIDFAKEKFDAAIIEACGLKEFGDRQHGTFPNDKKGYRQFIKWVKSTSGNAVEEEWLFCGEDTGSCSIGLSKWLYGKGLDIWIENAYSIRHSSAIQRVKTDKADASMIAEYAWRHQDKAMLYEPLSESLAQLREVFLYRHKLVQQRVAIEVRQKDKEASQDGSKALSFIKRKSKRLMDEIDKVIKECDDMIDQIIAEDPELAENYAIVTSIKGVARQNGACLLIYTNNFKRFDMDARKIACYYGVAPFGKESGSSVHSPAHTSHFANKLIKALLGQAAQIARIYNPEIKEYYERLRTKGKKHSVAINNVKNKLLRIIVALVKKRTFYDPESYKFYRDRLNAQFVPS

SEQ ID NO: 72308 - protein, 343 aa, unidentified
MDITTVGLDVAKHVFQVHGIDKHGEVVVRKQLRRKEVVAYFTKLPACEIGMEAGSSSHYWARRLQGLGHTVKLMAPQFVRPYVKTNKNDARDAEAICEAVTRPSMRFVPIKTAEQQAILALHRARQGFVKARTAQANQLRSLLAEFGIVLRQGIHVLLREVPAIVSDDENGLLESVRDLFTRLLGHVKELDRHVTEVEQQILQWHKSNEQSRKLEKVPGIGPITASALVATIGDATAFHHGRQLAAWVGLVPRQYSTGGKIRLHGISKRGDVYLRTWLIHGARSVLRVAARHTDPTTRWLKDVQARRNANIAAVALANKHVRVVWALLAHDRDYTPEYASTSS

SEQ ID NO: 72309 - protein, 450 aa, unidentified
MSRPQVIDDEDHEQVHERVAAVDVAKDSGMVCTRTPHPSRPGARQSAVWTVKARMNAIRKLGRQLKKDGIEMVTLESTSDYWRIWFYVLEACGLAVQLVNAAQARNLPGRPKTDKLDAQWLARLTEMGLLRASFVPPAAIRDLRDYTRARTRLTQERTRCFQRLEKLLEGALIKVSSVASKLTTLSAQDMIKAMIAGERDPQVLAALARTRMKARHDDLVEALDGMFDDHHGELAGLLLDQIAFCDAQITKLTTRIAESAAAIPAAWGVDAGGTTGPGAGTGPDAAVLNAVARLAEIPGISENLARSIIAETGLDMSRFPTAAHLVSWAGLCPSARQSGPRTRTGKKGQGDTWLRGYLGQAANGAARTTTTFLGERYGRIARRRGKAKAKVATARSILIIVWQLLSDPAARFTDLGAGYYAARTDTDRKLRNHIRQIQALGFTVTLTAAP

SEQ ID NO: 72310 - protein, 321 aa, unidentified
MSVSYVGVDVSKATLDAFVEVNGKPRHHQFVNAEHGYKDMLAWFRRWNVKDAHVCMEATGSYWEKFATYLFNSGLPVSVVNPSCIKRFAQSELKRTKTDKVDAGVISRFARAMTPGPWTPSPPEVQLLQALSRRLHGLIKMRRQELNRQEAESEKVVKRSIATVAKTIEAEMEKVRKKIKELLEVHAELRRKHQLLLSIPAVGEETAHLILAEVPNLDLFTEAKQLVAFAGLAPREIRSGTSVRGRTSLSKTGNSRLRRGLYMAAVVAMKWNPIVAAFSNRLLERGKPPMKVVGASMRKLLHIIFGVLKSGKPFSAKLGLT

SEQ ID NO: 72311 - protein, 424 aa, unidentified
MKVTYKTCCGVDVHKSFLVATIITTTGGIEPSYQKKRYSTFNNSILEFKQWLLDNDCHDLCMESTGKYWIPVFNLLEDEINVTIANPKWVKAVKGNKDDTKDSKWIGDLFRLGLVKGSYIPCKKIRILREFTRYRYKIVSCRSSEKNRYQNALTVCNVALDSVVSDIFGKSSTSIIDYLLEQSGNSINHEEIASKLLKSLKSKEDAVIESIEGYQMTDSQKYRMHLVRAHMDYITAEINDVDREIEKLISSDPDFENAIQFLMTIPGVKRDSAITVISEIGIDMTQFSSSKRLCCWAGLTPGSNESGGKKKSVRVTRAGVYLKPALVQCAHAAVKSEKSPYYKKKYESLMKRRGKKRAIVAIARMILTAIYQMLSTGESWNPSDLNKIGIPEALLEKQKAKAIKQAMKLLQREGLYPPPEPIAS

SEQ ID NO: 72312 - protein, 372 aa, unidentified
MNNQSINIDGQPGHRLQNQDNASPEVSTIKMGLDVHQASVVVVAQWDHSTPKSPQRLSADALVGWIKRLKTQGHRVISVYEASGFGFTLHRRLEAVGIESYVTTAQILDSRLSGVKTDGRDAHELCLRLDRYVQGNRRSLTMVHVPTPEHEQQRSVGRQRQQLVHQRVMLEITGRSLLATQGIFTSGSWWHPRRWDQLQPQLPGWLQSRMETLRPVLSLLQHQIDQLSAQLEATVDRSTLPKAVGQLSAAIINREVGDWNRFRNRRQISSYTGLCPREFSSGNQRRQGPITKHGNPRLRRALVEMTWRLVRYQPGYHAVKKWQLKMREAATTQRSRRKKIIVAIARQLAVDLWRLNTGQTTPEKLGLTLASL

SEQ ID NO: 72313 - protein, 350 aa, unidentified
MNATTVAVDLAKNVFELALADERWKIIERARLTRAQFERWFDNRKVDRVVMEACGSAHHWARTLRARGIEVRLLPAQYVRAYVKRDKTDAADAQALLEAARANDIRPVAVKSIEQQALQALHRTRSGWMSTRTRRINTLRGFCREFGLVVPEGAAAGLACIARYLADDRSGLPELLRPSMRLILDEIRLMEARIGQLEQALSQIAKHSPDCQVLQSVPGIGLLTSTAMVAAVADPRSFDSGRRYSSFLGLTPREYSSGNTRYLGRISKRGDRYIRMLLTHGARSVLRAATVAHRAGRPIDRLKSWALAVQARTNHNKAACALANKLARIAWAVWVKQEKYQSASIKALSV

SEQ ID NO: 72314 - protein, 420 aa, unidentified
MLEQTQDQQEVIERIAALDIGKATLVCCARVPGKGARRAQEVTTYSTMTRSLQTMADRLLELGVTRVVMEATSDYWKPAFYLLEAHGFEVWLCNAKDVKHLPGRPKTDVLDAVWLSKIAERQMIRPSFVPPPPIRRLRDLTRYRVALVSDRTGEKNRVEKLLEDAQIKLSVVASDIFGVSGRDMMDQMIAGQRDPKVLAQLARRRMRSKIGQLEEAFVGHFTDHHAFLLKRMLARIDALSADITAMEVRIEEQIAPFAEAVERLDEIPGVGRTAAHVIIAEIGLDMSRFPTAGHLASWAKFAPGVKESAGRKKGTGATGHGDPYLARVLGEAAVSAGKTDTFLGERYRRIARRRGKKKAIVAVGRSILVIVWHLLSDPDAQFHDLGADFYDNRLGPERIKRNHVRQLEALGYTVTLEPAA

SEQ ID NO: 72315 - protein, 344 aa, unidentified
MQNMYYIGLDVHKRTISYCVKDGSGTIHAEGTIPATRFDLDRWMKTLPQPWTAAMEATVFTGWIYDHLQPDAAGLKVAHPLMLRAIAAAKKKNDRIDASKICDCLRCDFLPECYMASTAIRERRRTLRYRNLLVRQMVQMKNKISGLLMEAGVSYNKQKLHKAGYFRELLATNPDIDEGLRSLLRLCRETVVRLGKTESALVRSLERDRLLVDRVERLMTIPAVGPITALAWALEVGDVQRFSSIKKAISYCGLCGAEQSSGNTVQRTPLSKQRNKHLQTTLIEAAKMAPRYSPDLAMLYDKEKQKGNANRATLAVARKLVAYLLAVDRGQRNFQVVETNCIAA

SEQ ID NO: 72316 - protein, 412 aa, unidentified
MEMLYPHCAGLDVHKNTVVACVRHCGPKGAVRQSIRTFSTMTRDLLALSDWLAREGVTQVAMESTGVYWKPVFNILEGRFSVMLVNAQHIKQVPGRKTDVADCEWIAQLLQHGLLKASFVPPAPQRELRELTRQRTRLVQQQAAVVNRVQKVLEDANIKLGSVASDVLGVSGRAMLEALIAGEESPKKLANLARRRLREKLPLLRQALRGHVTEHHRFLLRLLLDQLDQLEALIARLSARIEEKLAPFSAEIERLTTIPGVKQRTAEAVLAEVGSDMRIFPSADHLASWAGMCPGNHESAGKRRSGRTRQGNRWLRQALTQAAWAASHTKNTYLAAQYRRLSGRRGKKRALVAVGHTLLGVIYHLLTKQTVYADLGADHFDRLHPERLTRYLVQRLEHLGHKVILQPAGDAA

SEQ ID NO: 72317 - protein, 403 aa, unidentified
MKHVIAFDVSMGKSYMVIYNAQKQCVFESEIKHSKPDFKKLQEKIHKLTDETGESPEIVFEATGIYSRQLERFMQNNQYTYCLLNPLEAKIQCDSLRIHKTDRSDAHRLALTHFTVTRRVSTGTDNLFYQLKSLSRLYSELDDELSIIRGRMHKVIQLTFPELERIFTSKSDLFLNFVQLFPHPDCVLGLSKTIIKNRIRANTNKKISNITAEKKAIQILEIAKICYPAVSQNDVLCDQLKLYARRYQELLHQKESCISKMVYVAEQRAEYDIIRSLPGIGPNTAVRLMAEIGDITRFNNNKQLNAFAGIDIRRFQSGKTFFKDKINKRGNKHLRKLLFLIIQNMIKQRRYGQNHIVEYYDKLKTQPYNKCHKVASIACVNKLLKLLFYLITHNMHYDYRLAA

SEQ ID NO: 72318 - protein, 401 aa, unidentified
MQDTQQRDAVDVFVGVDVGKGHHHAVALDRNGKRLYNKALPNDEAKLRALIAELKTHGQLLFVVDQPSTIGALPVAVARAEGVLVAYLPGLAMRRIADLHAGEAKTDARDAAIIAEAARSMPHTLRSLRLADEQLAELTMLCGFDDDLADQVTQTSNRIRGLLTQIHPALERVLGPRLDHPAVLDLLERYPSPAALAATSEKTLANRLTKLAPRMGKGLASEIVQALSEQAVTVPGTQAATIVMPRLAQQLAALRKQRDEVAAEVERLVLAHPLWPVLTSMPGVGVRTAARLLTEVAHKAFASAAHLAAYAGLAPVTRRSGSSIRGEHPSRRGNKVLKRALFLSAFAALRDPVSRAYYARKIQQGKRHNQALIALARRRCDVLFAMLRDGTIYQPKSAPNA

SEQ ID NO: 72319 - protein, 343 aa, unidentified
MQVSTIGLDLAKNVFQAHGVSAEGKVVLTKQLRRGQVLSTFAKLPPCLVGMEACAGAHYWARELRKLGHDVRLMPARDVKAYVKRDKTDAADAAAICEAVSRPSMRFVALKTPEQQGRLMQHRVRDLLLRQRTQTINALRAHMAELGLVAATGRQGLGLLLAILADAKDERLPQDARASLKLLASQITALQAQIDSLDKRLHAQHRQCPASRRLETIPGIGVIGATALAATITDPKAFKSGRDLAAFIGLVPRNNSSGGKQRLGPISKQGDRYLRRILVVGAHSILKQARTRPDKHPWLARLMARKPGKLAAVALANKTARIAWAVLARGESYRAPTAPAAAG

SEQ ID NO: 72320 - protein, 314 aa, unidentified
MAAIYVGIDVSKDRLDIHLRPGGETLSVNRSASGIIELTDTLATHSVALVILEATGGYETAVANGLAAAGLPVAVINPAQIRHYARALGRHAKTDRLDAEVIACFGEATKPPARPLADEATQLLAELIARRRQVLAMLVAERQRLSRGGTPRVVQSLKRVVRALEKELADIEGEIDLAVRGSPGWAAAEDLLVSVPGVGPDTARTLLAELPELGPLDRRQIAALVGLAPFVRQSGQWRGKSMIAGGRASVRTALFIAAQVAKRFNPVLASFYARLIAAGKPKMVATIAVAHKLLIMLNAILRERKPWIVVPVSA

SEQ ID NO: 72321 - protein, 412 aa, unidentified
MLFVGDDWAEDHHDIEIVDEHGKVLARRRLPEGLEGVTRLHGLIAEKMPAEWVNLDPAEAAGRVKIGIETDRGSWVAALTSAGYEVFAINPLSVARYRERHSTSGAKSDTADAHLLAEIVRLDRAHHRPVAGDSEEGEAIKLTARTHQSLIWDRTRHVLRLRSTLREYFPVALLAFEDLDAPDALELLGRAPDPDQAARLSLTVITAALKRARRRRAEDRAQELRTVLRAQELRQPPVLQSAYAAVVASEVAIIGALNVQIDRLGAVVAEHFGRHRDAEIYASLPGLGAVLGARVLGEFGDSPDQYTDAKARKNYAGTSPITRASGTKKVVLARYARNRRLGDALQQWAFCSMRGSPGAKAYYQQLRARKIGHQAALRQLANRLVSILHGCLKTHTTYDENTAWAHILAATA

SEQ ID NO: 72322 - protein, 337 aa, unidentified
MIIIGCDFHPSFQQIAMLDTETGATEEHKLMHTSGEAESFYRKLASPAVVGIETVGNDQWFVQLLQKLGHEVRVGDAAQIRASYVRKQKTDRRDAKHILQLLVEGRFPRIWIPDAGMRDHRQLLMHRHKLVQIRTRVKNELQHLMLNQGMQKKQKLWSTEGRAALASLPLEPWTDRRRKDLLNLLAMLDAQLESLDDAVTRVAKEYPGVPLLMSQPGVGAVTALAFVLTLGDVHRFPRGKQVASYLGLVPREHSSGGKQRMGGISKQGNRLLRFLLVEAANIAVRFDPALRKEYLHRCHQKHFTVAKVATARKLAVRMYWMLRTQTPYPQVLSSRVA

SEQ ID NO: 72323 - protein, 372 aa, unidentified
MENIIYIGMDVHKESFSLCALHGTTGEIVGEARCASNVSLVKKFVEKLKIKYGEDIKIKAGYEAGCLGYSLHNLLEQNGIDCDILAPTTMYSSSKNKMVKNDRFDAKMIALNLANGTYKEVYVPEEEDVAVKEYIRMLGDFKTALKKMKQQIKAFLLRHGYVYEGKSSWTIAYMKWLKNLDLQGLFKETLDEYLLQYDVLVDKIERFSLRLEELSHSERYEEPVGKLRCLKGIDTTSAMTVHVEIADFTRFPTAKAFMAYVGLTPSESSSGERINRSSITKQGNSTVKSTLVECANALVKGTIGLKSKRVKARQKGQRSEVIAYADQAVERLQRKYHRMIYQGKPRNVAVTAIARELGCFIWGLEPGKIHRK

SEQ ID NO: 72324 - protein, 340 aa, unidentified
MKHTVVGIDIAKRVFQLHWIDTETGEIVSLQLKREKFLEHFANRQACLIGMEACGGAQHWARELIKQGHEVKLLSGKLVKSFVMGNKGDVADAKAIWTAVQQPGIKPIAIKTEQQQAILALHRMRQGLVKMRTMQINALRGLLTEYGEVMPQGKAGLRKGIAAALERTAERLPSIVIEALREQWQRITELDNQIVEIERKLQVWLKTDKAAKAIAAIPGVGLLTATAAVATMGDANAFKSGREFAAWVGLVPKQTGTGGKTRLLGISKRGDTYLRTLLIHGARSVLMNARQPGAWVDELGKRRPSNVVVVALANKIARTIWAMLAHDRAYQGDWVSIKPA

SEQ ID NO: 72325 - protein, 385 aa, unidentified
MSQFSGSRQAALDYNSTIIGAVELSEKKWVLAVQLPGVGRHSRHVLEACGDGLASFVERLKARCAAAGHRIARVILTHEAGRDGFWLARFLARRGIEVHVIQPSSLPVDRRARRAKTDIIDVEMLLRTLMAWLRGEPRVCSMAPIPSEADEEARRAYREREDLTGERRSIVNKIDGILATLGVKGYKALRRDRREQLTALRQPDGDPIPQKARARIERLLDRLDLVLKLIEHVESARDAVLKKDAPADEAERMIRSLTDLRSIGPDFATLLVREAFVRQFRNRRALGGYVGLGGTPFSSGGSEREQGIGKDGNRRLRAAMVELAWMWLRWQPDSALSTWFRARVGAMGGRIRKIMIVALARKLLVALWRYVKDGVIPDGAKMKAA

SEQ ID NO: 72326 - protein, 388 aa, unidentified
MNYFGIDISKYKHDCFIITDLGEVINEGFSFDNSAEGFAILQLKLQNCKLGGVRIGFESTGNYAINLKNFLDKLGFEYMEINPFLIKEFIKSKSLRKTKTDKLDAKAIAEYLLSNDYRAAQSSSYSSSELKRLTRFRSDLVKQKSRYLIALTNVLDCAFPEFKPLFGNRFTKTSLYILTHYSSPETIANMNSRSYDNLRKISRGKFSLDKFAQLKNLAKNTVGVFNKCHGIEIETLLDLMAQLESKIDSVEAEITQMIEFLNPPTLSIKGVGAISAAVIVSEFGDFSRFDNSDKMLSFAGLEPGYFQSGTSEHNGRMVKRGSSHLRNALIICARAIRLHNETFATYFHKKIGEGKQFNVAISHVAKKLVRLIYALETKGVMFDPELCK

SEQ ID NO: 72327 - protein, 491 aa, unidentified
MSERRLVGIDLGITSEHTVLVLREDRTEVCRRRCHPTRESLEKIERAALAGVTSADLRLEVVMEPTGPVWLPVAIFFESRGHTVYRVSSAKAADLRRFLSRHAKSNSIDAGTLAMLPLIDAGSLHPLELPDRARAGLYRQVRACRRLTVTITKHKQRLKDLVRHLLPVSPLNNDLGQSDLAVLKRTGGDPHALLKMGVGRLSKLILEASRGQLGRARAEAWLRSARLALELLGQHPALAYEELAFEVKTEVRLLQVTETELSAQEVRREQLYREVDPQQLARSLPGLSTVGGPVLVAFMGRPQRFARGPQFRSFTGLAARASETGQSDRKGQPMSKAGPNQLRATLVLAADTARQQDPQLARIYHVQMTERGANHIKALCVVAAHLAERALAVMKRGTPYQIRDIDGRPLSQAQAKALVDAHWTVPEEVRRQRRSRKKKQGKAPQQVLSGQVKASARGAATRRPSPAPMVTSAFASSKASRSVTEGTLVPT

SEQ ID NO: 72328 - protein, 339 aa, unidentified
MSIVGAFDVHRRQLTFEYLDTVTGEIKGGRVAPADREHLRAWLARFTGCEDVHFALEGCTGWRYVAEELLAAGITPHLAEPADTAALRGKKRHAKTDKADARHLRTHLLAGDLPECWIPPAHVLEARALVRLYKDLLDERGAWRQRIAATVFHQGAPPAAGMPTAEGRATGMGLSAAGQQAVEAGQRQIGRLDAELDLLRRQLAMLSRRQPGCAALRAAHYGIGAVISVAIWAELGDVRRFANSDAVVRHTGLDITVYSSDTKRSAGHLSRQGPPLLRWALYEAAICAARRTAPDHGYYTAVRARRDAGRATLSMARKLARRCYHTLRELGEDALAPAA

SEQ ID NO: 72329 - protein, 351 aa, unidentified
MFYVGLDIHDKRIAICVLGETGQVVRRAQVRSIDEMMRVLEALPDRFEVCYEASCGYGHYHDLLSPIAARVTVAHPGRLRLIFRSKDKNDRKDAERLAKLLYLGEAPAVHVPSADVRTWRELITCRSRVIAKRTRAKNSLRTLLRCAGVVPPGRPALWTKKGLEWLRRLDLPTASQQLRRDLLLEEIEALTRQAVRIEEHLNQQAKHSSAVLRLRSIPGVGVRTAEAVAAFIDDPHRFRDAKAVGRYLGLVPSQDQSGDRNRLGHITREGPAVVRQLLAEATWQALRRSPTVRAYFERVRRDDPQRKKIALVATAHYLVRVMWALLKRGTDWEEGLALADEPEVAPSVAVI

SEQ ID NO: 72330 - protein, 474 aa, unidentified
MGKGSGNGMTRGDRRPERAAGAAAGLLPRDGAVIGIDLAEDKQALAVVDHDVRVLARKTVKVKAFRLGEALDWAVAAAKVKGFAHVAVACEPTGPRWMQVQRLCAERGLPLVCIQPLVSHIAREQQDYTPHKTDESDCVLIARLATELHCYVPEELDETWAHLRHLGRRRAQLITAATASVQRIQDFLSVAWPTVTGACAGPFGSVTWLAALQVVTARCGGDPARLAAAGLEEFTAAVRGAVPGWGGKKGWGKIIGRVFAALTDTEGVVAWSRRGLLRRVADELGDLQRTRAQLRAVEADMVAVLGELGLSRLGDIPGLTAVGAAAILAETGDPRRYDSSSSLVKHAGLSPSENASGVFSGQAHISRRGRPGLRLTVWRAVWPMLQLNPVMAAKYAAMTQAAGTAAAQAGAGSRQATAAAAAARARRARARVACAASLLRWIYFIVVHDTSWDPAAASGPAACQHAARPPAEAA

SEQ ID NO: 72331 - protein, 416 aa, unidentified
MSHHVSWFAGIDLGDHKHHVHLTDAAGAVLGRTSFSHGGRGIAQLLSWLVDKTGADPGSIGVALEVPHGAVVDGLLDRGFATFAVNPKQADRGRELLVLSGAKDDPRDAEGLAVMLRLVPQVFRHLQPKHPVLVRLRDRSRLRADLVKQRTRLSQKIRAQLLRYFPAMWQLAGSLSGLWGGLFLTLWERAPTPERARRLHRGTVAKVLARCKIRKRTAEEVVGVLRQPVPVVAPGVTDGAVETVGMLVEQLRLVNEQVKAMDRGIAELLEELPAALGEADDGADSLTRLLSMKGAGPIVAAGLFGEAGDLLVGGTFEQTRAYLGAAPITRKSGGKETHHKRRAFNRHGQNALYHFGMAAIAADPGFQRQKEDLKARGHNHARILRTLGDRLLRIFHAMQRDKTLYDPERTLRKVAA

SEQ ID NO: 72332 - protein, 338 aa, unidentified
MKLYGAIDLHSTNSMTVVINEQDQVVYQKRLPNDLAQIAQQLSSYRRSLQGIVVESTYNWYWLVDGLMEKGYRVHLANTAAIQQYNGLKYTDDDSDARWLAHLLRLGILPEGYIYPKQERAVRDLLRKRGQLVHQRTANLLSMQSLISRTTGNSISAKYIKALNIERVDGVLPNPDHVLALKANLAVMNSADAQIEILEKAVQDRVKLRPQFRFLKTVPGIGPILALTIMLETGEIERFASVGNYASYCRCVGSKKISNGKRKGSGNTKNGNKYLAWAFVEAANFAIRFNSRIKSFYQKKKSKSNAIVAIKAVAHKLCRACYYIIKDQVAFDITKAFA

SEQ ID NO: 72333 - protein, 323 aa, unidentified
MNLLALGIDIAKLKFNVCLIREDGRLRHKVFANTAAGFSQLSAWLTANNVPQVHACLEATGTYGEALATYLADSGHRVSVVNPAAIKSYAGCQLSRTKTDKLDGELIARFCLTQQPPLWTPLAPEIRTLQALVRRLDSLQEMHTMEVNRLSSGVSVPAVETSIQSLIKSLEGEIKRTEKLIKEHINSHPTLKSDRDLLLSIPGIGAATTARLLAEINFHHHDTARSVAAFTGLVPRLRQSGTSVRGRARLSKVGSPRIRHALYFPAVTAIRCNPQIKAWAKALRERGKCEMQIIGAVMRKLIHHAYGVLKSGRPYDPLYAQNA

SEQ ID NO: 72334 - protein, 384 aa, unidentified
MKVVCGLDVHKDSVFCCILCANGEKIQHKFGVLTEELVTLRDLMVSEGVEECAMESTSIYWIPIWRVLEGSVKLHLVNPYFIKQLPGKKSDVNDAEWIATCLSKELIASSFVPDDKIQRLRQYDRRIFDLNASISRNLVKLDQCIQRCNIRISNYISTTDSKGYRSIVKLISQGVTDAEVLVKELHGRTINRHGRETLVKALTGVVSETDIDIIKQLVEEIELQQRHKDEAQKKMTALCMEWFPQEVENLQTIPGVKERSATSIIAEIGTDMTHFQTPKKLVSWVGLRPRNEESAGKIKARGITHGNRFVRKTMIECSWGAARMKDSFFAEFSYRQCIERRKNKMKVQVAIARKILVAVWYVLSQGTQYIKPTDHYTAAHMTAV

SEQ ID NO: 72335 - protein, 417 aa, unidentified
MEEGEKARLCRYVALDIHKYFSVVAGVDRDGKEILPACRVEHLDLENWLAKHLQQTDRVVIESTTNAWHVYDLLEPLVAEVLVANPIKVKQIACARVKTDIKDTFILARLLAANLVPTVWVPPQHVRELRQLISHRRKLAGMHTQVVNRMHSVAHRHHLNHLKGKDFQPKNTEWQKDESLSGLEKMQLELDMETREHLENQILRMTRELGRMSHEEPWASNMLYLMQVPGCGVVTGMTILAAIGDITRFETPKALASYSGLVPGLEQSGVKLRGKGITKEGRRELRWVMVEVAWRAVKADPHWKKYFEELQRRMHKNQAIVAIARHLLTMVWYVLTRHEPYSHYSPERIAYKYLTWAWALDKEQRQGMTRPQFARHYLMRLGIGDELERVALNPKFPYRLASTEEVLALRPELLPPE

SEQ ID NO: 72336 - protein, 316 aa, unidentified
MSNNNAGFKKIGSWVAKVSKGFDIVLFCMEYTGLYTQNFRLWLEEKHYIYRMVEPRKMHRFEPDLDDGLRSLDRIKTDELDSFRIAIYCEQNHRKILRNPSKLPPPVYFKLKRLLAERKQTVKQSVLYKQQLHDICAYDTDLSVERKNGQLKTLNDALKGIDNEIDMYIKEDADISKNFSLLTSIPGIGRVVALETIVLTENFMAIDNPRKYACYIGVAPFKKESGTSVRKGSSVSKKGFKQAKADLSIACLVCMQHIPNIRDYWERKRKEKCSGIVFNAIKFKMILRMFAVIKRGTPYVETDNYRNGKNKQPGVN

SEQ ID NO: 72337 - protein, 322 aa, unidentified
MAMLSFGGIDVSKDRLDVMILPEERRSSVSNDASGWAKLVEQLRGSSIAAIGIEASGGYERGVIRALLAAGIPLRQVGPFKLRQFARASGVLAKNDPIDARMIASFVGIMPTRPAQRQARAAERLTEMLAIRRQLSAEKIAVENASRLLEDVMLQRLSRRRIGRLSADIDILDKWMLEIVATDDALVHRYRLLCSMPGVGPLLACTLIALLPELGCMSRKQIAALVGVAPYAFESGTIKGRRCIWGGRAHVRQVLYMAAMSASNWNPVLKNFHHRLKAAGKLPKVVIVAVMRKMITTLNAMVRDDVAWADRLSGRHSVATAR

SEQ ID NO: 72338 - protein, 390 aa, unidentified
MLHDHSSDEPAAIRTQFGAIFVSLELSRSTWLVTSLSPGNGEKMSKHTVTVGDMAGLLARFSELKRKAMTRTGKSYPIIVIQEAGLDGFWIHRALQGEGIESHVVDAASIATSRRRRRAKTDKIDGEGLLRALLAYKRGEPRVCAMVIAPSPEAEDRRRICRERKTLIGERVTHVNRIKGLLFSQGVSAYVPLRRDRRARLEELRTGDGRAVPAHLKAQISRELDRLELLLAQIKAIEAERDALLAPADKAASVEAAAPQPVAMLLALKGLGPDFTSVLWSEGLSRQFSNRRQIASYAGLAPTPWRSGSIAHEQGVSKAGNPRLRTTMIQLAWLWVRHQPQSALTLWFHEQSKRGRKTAIVALARKLLVALWKYVTAGVVIEGAVMKVAT

SEQ ID NO: 72339 - protein, 311 aa, unidentified
MTRIERFVGVDVSKARLDVHVQPGGEEFAVDNDEAGVAGLVERLATEEACLVVLEATGGLQERAAAGLAASGLYVAVVNPRQVRDFARAMGRLAKTDRLDAAVIAAFAQAVKPEPRPLPDAERQSLIDLVARRRQLVEMRAAEKIRRGQLAAALRPRLDEHLAFLDAAIQELDRDTSQALRNSSAWRANDDLLASVPGVGPVARATLAAKLPELGQLNRRQIAALVGVAPLNRDSGQMRGKRAICGGRADIRNVLYMATVAAIRCNPAIQAFHQKLKAAGKPPKVAITACMRKLLTILNAIIKAQTPWSPA

SEQ ID NO: 72340 - protein, 355 aa, unidentified
MRQEKYIGMDVHQATISVAVMDVEGKLLMECVLETKASTIVEFIEGLRGPLYLTFEEGTSAAWLHDLLQPHVSRLVVCDPRKAALLKDGNKSDRMDARKLAELLRTNQLKPVYHGEHGMRSLQELGRSYLTITQDTTRVMNRIKALYRSWAIPCSGSTVYAPRHRQAWLAKIVKPGVRVRAEHLYQQLDSLQPLRLEARRQLLRESHKHAAVKLLRQIPSIGPIRAALLVALLQTPHRFRSKRQLWAYSGFAVATHDSGEYRYVRGKLQRNRERITVRGLNDNHNKDLKSLFKSAAISASTRPGPLRDFYTTRVESGMRPTMARLTLARKIASITLTLWKKGASFDPEQLQRQAA

SEQ ID NO: 72341 - protein, 333 aa, unidentified
MKLYAGFDLHSNNNYLGIIDEDGSRVFKKKLPNDPETVCRVLDPYQKDIAGIVVESTYNWYWLVDMLMDKGYVTHLANPAAIKKYTGLKHMDDQDDALWLAEMLKLGILPEGYIYPKETRATRDLLRKRGHLVRLRTSLIISLKHIISRNYGIRMNVNDIKKLEDDPVGRLFKDNEELKMAGSVSKETIDFLTHKIWTIETAVIRKAKLDESHQYLLTVPGIGKILSLTVMLETGPISRFHQVGNYTSYCRKVSSRWTSNGKIKGKGNIKNGNKYLAWAFSEAAELARRHDTQSRSYYDRKLSKSNRMVAHNALAHKLARASYYVMRDQVPMT

SEQ ID NO: 72342 - protein, 347 aa, unidentified
MKYFIGLDAHSSTSTFAVLNETGDCILRKTVDTSEKNLWNVIESINGERILTFEESTISQWLYISLKEKVDRLLVCNPTYVAKKSGAKTDFRDAIHLANELRCGHLKEVFHDNSHWAQLRTSVSGYLDIVQEIVRFKNRLKSVFRAEGLKTDENNFYKNKDRCIELKNDSARFVATNLFSQVEFLENEKIKYLDWFKNNQKKYRPIRNLMTIPGISIVRANVIAAIVCQPERFRNKHQFWGYCMLVRHIQISAGKIYGNKRVHGRRELRDVFIGAAESAMRTETTLRDYHDALRAKGISAKDAKVALARKISSLSLHLLKNNDTYNDDYEEYLKERKRLRLLVGQKR

SEQ ID NO: 72343 - protein, 327 aa, unidentified
MRQHKSLTQQVKTAVAFDVCKAFLDMHIQADGKALRIPNTHEGFDQIAVTLADYDVSLILMESTGGFEDAAACHFQSLGYDVAVINPRHARRFAQAMGKAAKTDRLDAAILADFASVLDSRSDRSRYIKPPTDEERKYLSQMVARRRQVVDLLSTEKQRLTHADNYGKDSIGKMINFAESQLKEINHDISRYVKKNFSDLSKLLSEIPGIGAQSVGILVGDVPELGKIDNRRLSAVIGVAPFNHDSGKMRGKRCISGGRKSVRNVLYMAVLTATRFNPVIKAFYNRLINKGKPTKVAFIACMHKMLRIMNAMVRDGSSYNPDLHTAI

SEQ ID NO: 72344 - protein, 428 aa, unidentified
MAKLKIVYPVCCGADVHRDFLVACIASTDAAGITTYDSKRFSTYSGDLRKLSTWLTDHNCRDICMESTGKYWFPVHNILEPLGFNVVVSHPKFVKAIKGKKTDKKDAMWIADLFKHDLVRGSFIPPPDIRQLRDLCRYWVKLSAYVTGEKNRAQNCLTVSNFKLDDVFSSVFGKSATAITDQLLLHLGEPFDVAPFVDKRCKTPVDVIQTAVDGAFSPEQATKLQIIRRHMSNLDELKDSLERLIFKLAEPYKSEIALLLTVPGIHEPMTAIRIIAEIGADMSVFESAKHLCSWAGLAPQNNESAGKKKTTRIGKAGAYIKPLLVQVALAASRTKSATEISGKYQSLKKRRGGKKARIAIARRILTAIYHMFSKSEAYNAALYQKSEKVPEKRMVTTEQAIAILCSQGIIVKEEHIFPPQVVKALVMV

SEQ ID NO: 72345 - protein, 337 aa, unidentified
MANKAAAFAQLEHWVSKHRKADSLPLRYVMESTGVYHEAVAWHLFQQDQLVCILLPNKAKHYLKSLGYKSKNDKIDAQGLARMGLEQQLTLWKPLSKNIYSLRLLTRQHQRFQEWKTQCRNQQHALDYSAIGDAFITKQNTKLLLVYDQQLEALEKAIQELIEDDAVLKEQVERLTAIKGLALLSVAVLIAETNGFEGFANRRQLVSYAGYDVIENQSGNRSGKTRISKKGNSRIRRILHLPAFNAVRFGEPACQSLYERVYQKTNTKMKAYVAVQKKLLLLAYALWRHQTKYDPMHSVQAETKALLSRKPDQNDKKIVPTSGTTQDQSTVAELSFG

SEQ ID NO: 72346 - protein, 326 aa, unidentified
MTQLPSQPVSPLFAGIDVAKEKLDLARSDSGELLTVSNDDRGIRQIVKLLAPLAPRCIVVESTGGLERPLLEALLDASLPVALVNPGRVRYFAIGCGILAKSDPIDAGVLMKFARLAEPRLAQKRSENQSELDALITCRRQLTSTRAQQSNCKLTTRSKSAIASIEAILAALDKQIDTLDKKIRQLIDSDDDFKHLDRQLRSVPGVGPVLSSTLIAELPELGKTDRREIGALVGVAPFDHDSGKFKGKRSIRGGRVQVRCVLYMATLAAIRFNPILRSFAQRLAKAGKQSKVIIVACMRKLLSLLNGMLRENLLWSELQVVKTLDT

SEQ ID NO: 72347 - protein, 405 aa, unidentified
MPYILALDVSMGHSYSVLYKDDTCLFEDEIEHTQRGFHALLEEIQHLPERPLIVFEATGIYSRPVEKFFQDHHFSYCLLNPLEAKKQMEENTLRSWKTDKSDAHRLAQTHLKNQRQPKEVQSNFYLEMRDLAHFYQEIEKKITRLRMDLHNCLQLTFPELEQFFSNRLTPYALTLIRLFPHPDFVLASTRTKIKNKLINETRKKISANRAEQKADQIIHYAQCAYPAVEKDSIHCQKTIYYAELLQDLLEQKEALATQMIKKAEGSPCFLLYQTFPGIGALTAALLLGELGDITRFKTHKQLNAFVGIDIRRYHSGKYTGQDRINKRGNPKARKIIFFTIRNMIRQQRAAPNHIVDYYYKLKKQPIPKKDKVATVACMNKLLKCMHAMVRAHTEYDYAYAVSVDH

SEQ ID NO: 72348 - protein, 377 aa, unidentified
MKSKAYLGLDVHKNSIVVAIAKADGSEPFSYGKWGGSNLSAERGLVKLLKSLGLTKEEVSIVYEAGPSGFVLARRLLQLGYECIIVGPSEVPSKAGERVKTDKRDARKLARFHRAGELTAIHIPEARDEAVRDLCRARSDASQALARSKQQLGMFLLRNGFRYEGKTNWTQAHMNYLRQLRMPHPAQQLVVEEYIMEVDAGVARVDRIEQHMKDLLPSWERQPYVRALMAFRGFQEVAAMTEISELGDLSRFSHPRQLMGYLGLVSNEHSSGEKRRQGGITKTGNGHARWMLIECASHYSHTPRVSPNLSARQAGQSQEVKAIAWRAQNRLNYRFKKLSARSLHRNKVVVAVARELCGFIWELHQQVTKEITAKVAA

SEQ ID NO: 72349 - protein, 370 aa, unidentified
MRVDRKNGKRKGCKMNSIVAGIDLGDRESLATVLSPIGDVADRFSFPMNEEGYAYFASRVPKNARIAFESTIMAYPILRAFRTHGYSDITVAHPKTLAWIVKSKKKNDKADSLKIAKLHMAGMLPESHLLDRDQQIARDLLVQRVKLGVEIGRLKNSLIGYLKREGVYDSLPKTGDNFSVKRRQVIHALRFDDKRDLILDTMMDRLEFLEGQCIPLEDSVRENARVSDDVRLLMSITGVDYYLASLLSSFIGDVERFPSDDHLASFFGIIPTSRDSADVKRRGRMTKDGSSIVRWALSVMVDTVMLHNEPIREYYQSVKKRTDSGKLAHVATMRKLTRMLYHMLKTKQHWKWENPLLTERKMAKLESGWR

SEQ ID NO: 72350 - protein, 396 aa, unidentified
MYAVGVDVSKGKSTISIITTDGEVIERPFEISHDQDGFNTLLSKVEKYNKDEIRFLMEATGHYHLPLLNALIEQEYFVCVENALIIKKYCDMDLRKVKNDSKDSLKLAQYCSEKWFKLKRFQPSDEIREQLQFLSRQYTQYIKIKTDLKIQLTNLIDKTFPGIKKIVDDENRYELLLDIYEKYSYPNLVLEKPKKEFIDEIEIMSKKYGHKVGKTIGENIYEKAPTILTSCPYNESLQLSINSCILLLRSTLKVTNDIITKMDELASGLTEFETVSNMKGVGKKTRARLIAEIGDITKYKNANCLIACCGIDTPPYQSGTFNATNRHITKRGNKYLRKVGYEIVKLIKSSRPQKDNSVYLFILKKESEGKHKTAAKIAGLNKFLRIYYARVKELYN

SEQ ID NO: 72351 - protein, 341 aa, unidentified
MSIVGAFDVHRRQLTFEYLDTVSGELKRGRVVPADREHLRAWLARFAGHDDVHFALEGCTGWRYVAEELAAAQVTAHLAEPADTAALRGRKRHAKTDKADARHLRVHLLAGDLPECWIPPEHVLEARATVRLYKDLVDERGAWHQRIAATFFHQGVPAGVSAAKPAGRAAAAEADLSPAGRQAVEAALRQVDRLTAELDPLRRQLDMYSRRQPGCAALRRAHFGIGAVTSVAIWAELGDVRRFTSSDHVVRHTGLDITVHSSDIKRPPGKLSRQGPPLLRWALYEAAKSASRPAAPDYGYYTATRERRDGGLATLSVARKLARRCYHTLRELGEEALAPAA

SEQ ID NO: 72352 - protein, 430 aa, unidentified
MEIVYPRSCGVDVHKSFIVAVICISESVKPKYIKKRFSTFNNQLIQFRDWLVENNCQNVCMESTGKYYIPVYNALEGHISNVVVANPKWVKAIKGEKDDNKDAKWIADLFKFGIVRSSYIPEKDIRVLREFTRYQYKLVNMRSSEKNRFQNALTTGNCKLDIVFSDIFGKSASAIVDTILSNDPYTSEDILSKVHAGCKASHEDILSAVEGIQLNQFQKSRIKIVQKHMEYLDSLLDEIQHHINLMVANYEEYIQILCTIPGINRKSAITIISEIGTDMSQWSSHRKLAAWAGLAPGCNESAGKKKSVKVSKAGVYLKPCLVQVAHAAVKDKECEYYADKFNKISKRRGKKRAIIAIARKILIAVYHLLKTGEVFNPTDMTDVETTKKQRIEYVKNNLRNAFNQLSRTGLSEAEILQLIRKESKNSPQIE

SEQ ID NO: 72353 - protein, 349 aa, unidentified
MDTTSRPPTPMPPPPPPPPPPPGAAAPAGIVVGIDVCKERLDLARSDTGDRVVTFANDAAGIAAVVRLLLAAPAPVAAVVIESTGGLERPLVEALLEAGLPVALVHPGRVRHFAKGLGVESKTDRIDARVLVRFGQLAAPRLAERRSRNEAELRDLLACRRQLTVTRTQQSNRRGATASRAALKAIDAVIKALDRQIASLDEQVRALVDADDDFRDLARRLRSVPGVGPTLAATLLANLRELGGADRRRVCALAGVAPFPDDSGNVRGRRSIRGGRADVRCVLYMATLAAMRFNPVIRAFAQRLRAAGKLGKVTVVACMRKLLTLLNAMARDGLSWDQLDVVKNLAPTP

SEQ ID NO: 72354 - protein, 344 aa, unidentified
MRLFIGLDVSLAKTAVCAITEHGKIVKEAQVASDPEAVAGYVLALGGTVATIGLEAGPLSQWLHRGLTDVGLDVVLMETRQVKGALKAMPIKTDRRDAEGIARLLHLGWFRPVHCKSISAQEVRALLGARKAIQQGMIALELSLRGLLRNFGLKVGAISRGRFDVRIRELAEGNAMLEAATAPMLRARASLRHELAGLERQVRLLAQEDPICRLLMTMPGIGAVVGLTFRSAVDDPTRFSSSKKVGPWVGLTPSRNQSGERDVSGGITRAGDANLRRALCQAATVMMNRGRSSWLRSWAAQVAKRRGTKRAMVALARRIGSILHRMWSDGTVFQSDVPPAAMSA

SEQ ID NO: 72355 - protein, 416 aa, unidentified
MSEATEYAFYVGVDWATQAHQVVVLDRQRRVVMERVIEHTGVALIEWADGLVALAGGDPAQVAVAIEVPHGPVVETVLERGLHVYALNPKQLDRFRDRYTVAGAKDDRRDAFVAAAALMTDRPAFRRLSPTDPQLVRLRELARAEAELTQELARLANRLREQLLRYYPQALTLCPAADEPWLWALLEEAPTPAAARRLTAVRLTRLLRRHRIRRLTADAVLAQLQTTAVPVAPGTSEAISEHLAWVLPRLSLLETQRRECARRVEKLLTALSAPDPGQPGEHRDAAILRSLPGLGRTGTATMLAEASGLLATRAYHPLRAHTGIAPVTDRSGKRVAVHMRYACNARLRNAMYHWGRVSVQCDPHSRQHYTQLRQRGHSHARALRGVVDRLLRVLMAMLKTRTLYDPAQRRPLEKVA

SEQ ID NO: 72356 - protein, 410 aa, unidentified
MDAIVERVGGVDVGQATVVATVLVGAAHERAKKETRTFRTVTRELLELREWFLAKGVTHVAMEGTGIYWRPVYELLEDAFEMILGNAQHIKNVPGRKTDVKDSEWLAELARHGLIAKSFVPAKPLRQLRELLRYRRKLMESRTAERNRLLKLLETANIKLASVVTDVFGVSGRLMLAALIEGAATPAAMAALAKGVLRKKAVELQQALEGRLEEHHRFLLQLPLRRLDQADADLATLDAHIDEALTPYQEQCQTLQQIPGVSRVVAAVIVAELGTDMTVFRSAQHAAAWAGVCPGNNESAGKRKRAGVRKGNVHLRTALVEAAVAASHKKGSYLRDKFYRLRARRGTKRAAMAIGHKILIAAYHMLATGMPYRDLGVTYLDAVEKRRTTRNLVRRLERLGYEVTLGTKAA

SEQ ID NO: 72357 - protein, 472 aa, unidentified
MRRIQSDDLSLEVVHPDAAGIDIGNESHYVAVPPTRDTESVRRFGCTTAELRAMAGWLKQCGIRTVAMQSTGVYWIAVYDILEQAGLEVYLVNARETKNLPGRKSDVQESQWLMKLHTYGLLRNSFRPSQEIRTMRTYWRQRNDLVRAAGRHIQRIQKALTQMNLQLANVLSDLSGVTGQAIIKAILAGERDPHKLAAFRNWRVKATQEQIARSLEGNWQEDLLFVLKQELDGYEFCQQQMAECDRRLKQYLQQREDRSQGASLPEEKRKERLKKKKGNAPQFDLRTELFRMTGTDLTQIDGIDVMTATTILSEAGWDMSKWQTEHHFVSWLRLCPDNKVSGDKIIGKGRLPTNNRITNTLKMAASSLRTSDTYVGAQFRRLRTKLGAPVAIKAMAAKLARLVYRMLRYGMQYVDQGAAFYEAQHRQLQIKQPQVESQQAGIPDHPSSGGLKPELQEFPGSPLPSIFPAQAR

SEQ ID NO: 72358 - protein, 367 aa, unidentified
MGEASTFVGLDVHKNTVSVALLRPGQPPLEWSLVNDTGGVCRLIRKLEREAEGTLRCCYEAGPTGFVLHRQLTRAGIDCRVIAPSLIPVKPGARIKTDRRDARKLAELLRAGLLTEVKPPTEDEEAVRDLTRARDDAQRDLTRARNRLSKFLLRRGCVYAVGRKPTWSGKYRAWLRALTFPRRADQVIFEDYLLAVEQVEARLEALGEEIETVAQQDPWRERVQALRCFHGIDTVTAVAIVAEIHDPRRFAHPRHLMSYLGLVPSEHTSGMRERRGGITGTGNRHVRRLLVEAAWHYRHKPLVSRTLRLRRAGQSPKAIALADRALRRLTLRQRRMLHQGKHPNLVNIAVARELTGFIWNVLHPATA

SEQ ID NO: 72359 - protein, 387 aa, unidentified
MSATAPGVAQAAIDVSLAAIFVSLELSRSTWLVTSLSPGDGEKMSKRSVGSGDVPGLLEHVAKLRAKAQARTGRTFPVIAIYEAGLDGFWLRRVLEREGIECHVVDAASVLTSRRRRKAKTDRIDGEALLRTLLAYKRGEPRVCAMVRAPSPEEEDRRRLCRERRTLVAERIAHVNRIKGLLFAQGIADYEPLRRNRRQRLEELTTGDGRSLPAHLKAQIGRELDRLELTLQQLRVVEAERDALLESEGDAAPAPVAALAGLRGIGPEFAAVLWLECFFRSFSNRRQVAAYAGLAPTPWQSGSVAHEQGVSRSGNPRLRSTMIQLAWLWLRHQPTSALSLWFKERVEQNGGRGKKAAVVALARKLLVALWQFVSAGVVIRGAVMKAA

SEQ ID NO: 72360 - protein, 340 aa, unidentified
MSTIHILGIDIGKSTFHLVGHDSSGRGVCRKKLSRPKIIQFLAKAESTTVAMESCGGSHWLARKCKEFGHKALLIPPQYVRPYVKTNKNDFIDADAIAEAAMRPSMRFVSVKTEASQVISVIQRIRSSYLKDRTACMSRIGSMLLEFGMAFPKSHSKMKKLFQWLAEHGEPIPPMLLLELRDHHDYYLKLNQLILTQDKKLKDIVLNDELAQLLKTIPGVGDLTASRCLSDISNAGDFKNGRHLAAWIGLVPRQHSTGGQTKLLGISKRGNKGLRELFIHGARAVLVRPEKAVASFGNWIVELLSRKPYNVVVVALANKLARIAWSILSTKQAFEVRVQA

SEQ ID NO: 72361 - protein, 336 aa, unidentified
MEHVAIDLGGRESQVCVRGSDGHVVDETRMPTRSLVEWLNDRAPSKVIMETCSESFEIADRAIARGHDVRIVPSTLVKSLGVGARRTKNDRRDAQVLSEASCRIDLPSVHIPSPTARKRKVLCTTRDALVASRTQLVNCVRGWLRQSAQSLSRGYPVTFPRRVREKIGAAVPACIERLLVSIETLSAQILAADKELEQEVDGDTLCKRLMTVPGVGTITALRFAATIDRIDRFEDAHSLQSYLGLVPGEHSSGERIRRLGITKAGATATRVVLIQAAWSVRRYRKDHPMGRWAAEIEKRRGKHVAAVALARKLAGILYAIWRDGTTYNPFRGARAA

SEQ ID NO: 72362 - protein, 419 aa, unidentified
MAFKIFRKNCCGLDVHKTWIYGCIGITDTNGRTEYKRARFSSFSKGLRDLAGWLAKYGCTEVCMESTGKYWIPVFNILEKSCLVTLAHPKYTKPQRGNKTDRKDAKWICDLFMCDMIKPSFIPSLDIRQLRDLMRYRMKLTNMLTSEKNRALNCLTVSNLKLDDVFSDVFGKSSRSIISYILEHPGETFDVTPFVDRRCKHPIEEIQAAVDGAISREQAAKLKECLQHMDEISAHKKNVEKEILRLAEPYSIQLALIRTAPGISGDPMTAIAILSEIGADMSVFPSAKNLVSWAGCCPRNDQSNGKVKSTRISRAGAYLKPILVQIANAVIKSDKYPECKERYRRLKARRGHKKAIIAICRMLLTAIWNILSKLEPYSAAGYIADKLTEHSVVITQAQGLALLRKRGYIFKDDLAADSG

SEQ ID NO: 72363 - protein, 408 aa, unidentified
MEIIHKRCAGLDVHKETVVGCVRVRERGDVRHEVRHFVTTTAGLLELGEWLRAAGCTPVAMEATGVYWKPVWHILEGEFELILANPLHIRTVPGRKTDVNDATWIADLLAHGLIRSSMVPPGPIQELRDLTRTRRQLIREVVQHKQRIQKVLEDANVKLASVVSDMFGQSGRQMLKALIAGQTDAQKLAALGSERLSASRATLAGALHGKVTAHHRFLLKQHLQMIEQLEQPVSEFEAQIEAALQPFRAAVERLITIPGVSATAASVIIAEIGVDMSRFATVAHLRSWAGLCPQLKESAGKVMSRRLRYGAPWLKTVLVQCAWAAIRNKSNYLHAQFLRLRARRGPKKAILAVAASILTAAYYVLRCQVPYRDLGALYFARLDQDRTAQRLARRIKELGYEVEIRTAA

SEQ ID NO: 72364 - protein, 449 aa, unidentified
MSRPQVIDDEQHEQVHERVAAIDVAKDSGMVCTRTPHPSRPGARRSTVWTVKARMNAVRALGRQLHKDGIEIVTLESTSDYWRIWFFILEACGLAVQLVNAAQARNLPGRPKTDKLDAQWLARLTEMGLLRASFVPPKAIRDLRDYTRARTRLIQERTRCWQRLEKLLEGALVKVSSVASKLTTVSAQDMIKAMIAGERDPEVLAGLARTRMRAKRDDLVQALDGMFDDHHGELAGMLLDQIAFLDGRIAQLSARAAELTAAMPEAWGINADGTTGPDAGAAPGAPVLPAVARLAEIPGISDDLARAIIAETGLDMSRFPTAAHLVSRAGLCPSARQSGPRIRAGKKGQGNGYLRGSLGQAATGAARTATFLGERYHRIARRRGKAKAQVAVARSILVIIWHLLAGPAARYTDLGASYYQTRTDTDRKLRNHIRQIQALGFEVTLTKTL

SEQ ID NO: 72365 - protein, 401 aa, unidentified
MKRLSGGIDVGSESHHITILDEEDNVLYNKKVAHKLNEFAESIKLFKQIEKKEKGEISFALEGKNGYSAPFDRILLNQGFTLYNVDNFKLKRFREAFAGEWRDDQRDSLMLSKMLKLKEHINSPREKVFIKIEKPSLVTESLKLLSRHQQTLINEKVRLINRLGKKLLEVCPRILELGKLKNKKIIAILARYPDFSKYKRITLKSLLKVKGIGEKGAFFLLKRLNHIEYMPGLTDIYKTIILSYAQRILELQKEIEDIDKKLDEIGEKSKEVKHLKTIPGVATKLASRLIGEIGDINRFPSEKQLAIYCGIACVDNNSGKVTKARAVYKANKICKQTLITMAGGSIRLSFQCKAYYLKKRAEGKSHNHALRCLSRQLIKVIYKMLTEDRDYMVRKELRKVA

SEQ ID NO: 72366 - protein, 523 aa, unidentified
MATKTHSTTRRRNRKPYRIGKPRGSIRARVQAVGPQRFGIVSVDCAKARSKWMLANFYDDVIIPPTVVEHHRAGLDAAIAAVQQAATEHDLADMLVAVERTGRYHGPVRRAFAAAGFETRIVHPFTTKQYRKAADPGVKTDDNDLAAIHRAAVTGYALSEQTLGESWQRLRLLVRHRRDLVRKVSALCCQIKDHLDAAMPGYASGFAKFWATPAPLAVALAFGSPAAIVTAGVGGMAKRLRDRQIRFQHRTFRRIVDWANNAAQPQPDGPWHVEIAKALNEDREHKRQEILDLERRIAAILAPTPYVLLLSIPGINVVGAAEFAGEAGPIRHYANARCITGRAGLFPSRHQSDEVDHPNGPLVKCANHRLRFAILQAADCLATSNRHFRHLASTWRCSGADPRLIRVRVASRFCRIAFAMVAGRQIFAHPAMRDRHYIVDKLLKFHIEHKTPMSQILADLKGVAAQIPQREHAAEAIPIQRQLSAAPKRRGGVKRLGEILPHVLASLGVGQIEYTPSGKHDPT

SEQ ID NO: 72367 - protein, 430 aa, unidentified
MKSNTQNAKIEAITEKTLVLGIDVGSETHYARAFDYRGIEYSKKPFKFSNTEAGFVTFKEWILDLKERHEKDKVVPGMEPTGHYWFNLGKFLQDNEMKPVLVNPHHVKKSKELDDNNPTKNDRKDPKVIAGLVREGRYMIPYLPDGVYADLRTASNIRFQLQAELTRIQNRISRWFNIYFPEYKTVYGKPDAKSGILILKAAPLPEDILTLGIDGVNQIWRDAKLRAVGKARAKTLIEAAEHSVGSKEGAVSARMEIRMLLEDYESRNMRLQEVMVLIEELVKGIPMAEKLLEIKGVGIRTVSGFLAEVGDISRFNNPKELQKLAGLALVENSSGKHKGETTISRRGRKRLRYLLFEVAMSLVAKNPEFRELHNYYTTRRLNPLKKMQSLMAIAAKLIRVFYAMLTKGVDYDPKKMVSDIKRPAVYLQAA

SEQ ID NO: 72368 - protein, 355 aa, unidentified
MGGLKHQKEKRSMDHFAGLDVSVKETSVCIVDDTGKIVREVKVASEPDALLAVLANPAYHFKRIGLEAGPLSQWLYSALAEAGLPVICVETRHMRALLKAQINKTDRNDARGMAQMMRAGLYRLVHVKTLRSQKLRMLLTHRKLLQSKAIAIDNDLRGTLRNFGLKVGVVGAMKFEARIKELIENFPDLVVMVEPLLVVRRVLREQLDILHRRLLAIVRDDDVCRRLMTVPGVGPVVALTYRATVDVPARFKNSKVVGAVFGLTPAKYQSGEIDRSGAISRCGDDMMRVMLYEAAQSMLFNSKKWSWLKAWAMKIARHRGMKKAIVALARRLAVVMHRIWVDGTEFRWTREVATA

SEQ ID NO: 72369 - protein, 432 aa, unidentified
MSKRRAYRAVAVKNVSLENVLQSGPEGAVTVGMDVGKDEIFVVLRWVDATFERPWKVRNPLEVKLLVRILTELNRRRCLTVGMESTGTYGDSLRQALTDAKLSVHRVSGKATHDYAEIFDGVPSQHDGKDAAMIAELVAFGKSSPWPFEHKEANDAEMAYWVDWLDGQQQIEMLWLGRLESLLARHWPEATTLLKLSSATLLQTLARYGGPGGLAEDDGAARRLAGWGGPKLTAKKIEKVIRSATETVGVRQNAQDVRRIQEYATLALEAYRQTQKAKRALERLAKGNEVIQRQAEAVGVATACVLWVALGDPKNYPFAAAYRKAMGFNLKVRSSGKHKGKLKITKRGPSVVRRWLYFAAMRMVQRPEVKPWHEAKKARTSDKATPSLVAVARKLALAMHVVGARGERFDPGRLFPGCPLPRGSSSARGEAA

SEQ ID NO: 72370 - protein, 362 aa, unidentified
MHNHRTLVGLDVHAKATIAAGLELDTGELRFRRINGPPRSAVNYLEELPGPVMATYEAGPVGYGLAREAAARRIEVRVCAPGSIPRKPGERIKTDRRDAERLVRSLLAGELSFVRVPTVEEEQFRDLARCREAARADLMRARHRLSKFLLRREIEFPGPGASWSVTHWQWLRSIELADHPSRSVLNDYLAAVLALEQRRDGLDAQIEIAAPRSPWALTIANLRCLRGINTVTAYGLCCEVGAFHRFEHPATLTAYLGIVPSEHSSGEQVKRGPITKAGSPHARRPLVEAAHHYRHKPAIYKDLARRQRGQDPRACEIGWRCQQRLHRQWQRLRLERGKPGNVVVIALARELANFVWEVGQLK

SEQ ID NO: 72371 - protein, 316 aa, unidentified
MKKIIRNAGGVVSCTDQTLTVGLDLGDRWSHYWIENGDGEMVESGKTKTTCEALGVHFPAGQRLRIALETGTHSNWVRTHLESLGHEVIVANARELRGITASDRKSDPHDARKLAMYARIDPRILSPIQHRSLEAQHDLAVIRARAALVRVRTTLINTARGLAKASGYRLPTTTSERLVARSRATLPTVLVASVGPLLEQIEQLMIQIQKMDIQIKSLAEHRYPETARLEQVPAVGPITALTYLLTIEDPSRFQKSRDVGGFLGLCPRRSQSGQRDPQLGISKAGNVYLRSLLVQCAQAPSYSRHVEALVSQEHPS

SEQ ID NO: 72372 - protein, 382 aa, unidentified
MRALQTSGAFDTARRSADTAQRKGGTAAVEHYIGCDTHQRYSVFVTMDEKGKAGAPVRVDHNGDRQELRKFLKTLPAGAAVAVEAGGSWYWFVDTLEEFGLRPHLANPLEAKKQMPGRMKTDKLDARGLATLLRVGTLPEVWIPTAKLRDLRGLLRTRLAMRRHACLMKNRIHATIRRYGLRQDAYADLFSGKARVQLSIYIAALPAQTRFATTQEWEMLNEIEERIDRLEEQIKQSIGKIGWVRLLKTLPGVGEILGATIYLEIGEVGRFPSAAHLAAYAGLVPSVHSSGGKTHYGPTSSQANHYLKWAFTEAANCTVMHRDKYAKQHVGQLYQRLKERKCHGKAATAVARHLAESSWWILTKKQEYRAPHAAAMPSSNNG

SEQ ID NO: 72373 - protein, 398 aa, unidentified
MTESSDYESVQVFIGVDVGKDTHHAVAVNRSGNRLFDKALPNDENKLRSLISDLKQHGQILLVVDQPATIGALPVAVARSEGILVGYLPGLAMRRIADLHAGEAKTDARDAAIIAEAARTLPHALRTLKLADEQIAELSMLCGFDDDLAAQTTQASNRIRGLLTQIHPALERVLGPRLDHPAVLDLLQQYPSPEKLASLGEKKLATQLCKLAPRLGKRLAADITQALTEQTVVVPGTNAAVVVLPRLALQLITLRKQRDEVALEVEQRVLAHPLYPVLTSMPGVGVRTAARLLTEVACRAFASAAHLAAYAGLAPVTRRSGSSIRGEHPSRRGNKTLKRALFLSAFAALRDPISRAYYTRKMSQGKRHNQALIALARRRCDALFAMMRDGTFYTPTAS

SEQ ID NO: 72374 - protein, 341 aa, unidentified
MKYVGVDLHKQSITVCVMVKEGDQRKVEQRRTLKCAETASIRNFFEQLGGFRVVVEATSHYEWFLLLVEDLADRCVLAHPKKLRVIAESKHKSDKIDARILAEFLLLDMLPEAHRPTPRVRQHRVLVRHRQAVQSQITSVKCKLRHKAAFYNSDMAELFTARGLEHLAKIAMSDADRFECEALREQLLFLQKQLRAAEKQLTSFAQTAPVAERESRAVLATMPTVGTVTVDVVLSETADVRRFRNAKKIVAYAGFDPGFRESAGRGKELHIAKDGSGLLRWALIETAWRLVRKSARWRRLFMKLQGSTGHKKKAIVGVARRVLCVMYAMLRDGKASRPEAV

SEQ ID NO: 72375 - protein, 488 aa, unidentified
MSRRKPVTPQVSAAQGNSAKTKVLPKQVPRPTDEDPVVLTVLNPHAAGIDVHSDMHMVCVPADRLASLGVDTEDGLPANVRRFGANSCDLQAIAAWLGACGVTTVALESTGVYWIPLFELLEARGFEVYLVEPGQLAHCGARPKTDVLDVQWLQRLHTYGLLRPSFRPSESIIALRSYHRQRQMHIRYAASHVQHMQKALEQMNVKLAEVLADITGLTGRRIIEAILQGERDPQQLAALRNVQCHNDQNAIAHALEGTWRPEHLFALRQAYDLYRFQHQQIAECECMIQGELAKLPNRAGDKPFQPKPRKGGRKQNDLTFAAGEPLFRALGVDLTEIEGIDVRTALVILAELGVDVSRFPTEKHFASWLGVCPRQYESNKSKKKREPRRGKNRIAMALRMAAQGLSKTKSPLAQFYRRIKSRIGGKGAITATAHKLACLVYRMLKYGKEYVQQSMEQYEAKLKEQLERSLRRKAAALGYQLVAKSVPA

SEQ ID NO: 72376 - protein, 321 aa, unidentified
MNKYSEIYGVDISKDVFDVVNSTGAYIQYTNGSKGFERLSKKLPKGSLVVMEATGYYHYRLAQYLYEQGHCVSVVNPLSVKRFIQMKLSKVKTDKSDARAICEYACVNEVPLYTAKNKDQAECLQLLRLMDTYLKHSTAIKNKIHGEKVLGMPSKAVYRSLVRSLKSLQKEIGALELRLMSLVKENQQTQLSLLKSIPGMGAKTAMVLLVLTDGFAKFENAAQLCCYAGITPTIRESGSSVRGRARISKVGNKKLRNLLFLCAFSACKYNKACREIYERITAKGKSKKLALIAVSNKLLKQSFAITKSGLPYDENYVSRLT

SEQ ID NO: 72377 - protein, 363 aa, unidentified
MTVQYVGMDVDKQKIVLARLDAGRDTRAVEHVIANTPRAVKKYFTPLLGGGEVHATYEAGCFGFGLYRQLTAMGVTVVLAAPGLIPRKPADRIKTDRRDAHSLALALRAGQLTGIYVPTVQDESVRDYLRMYESLRGDLRICKQRVLQFLLRRGISYDGGGPWTLKHKHWLSALQFSQARDRQTLDMYLSQMQELQAKCAEAAAEVESIAAQDCYRQQTKKLTAFKGIKTLIALSFVTDIGDFRRFSNARQFMAYLGLVPSERSSGNKRRQGGITKAGNSHLRRLLVEAAWHYRSYHPSSRDLIERRRGVDPSLLSYANRAGRRLNRKYLHMLLRGKRSQVAVTAISRELAGFLWGAMTDQVA

SEQ ID NO: 72378 - protein, 416 aa, unidentified
MLKIVYKNCAGIDVHKKHITVRIAKTDDNNITTYQLKNFPTFTEDLVKCREWLVLNDTLDVCMESTGKYWIPVWNILEEICRCVLAHPKYVKSIPGQKDDNRDSVRIADLFKFGLVEPSFIPPKDIRQLRDLMRYRNKLVNVKSGEKNRFQNSLTVSNVQIANVVTDVFGKTSQSILKLMLEKPNLTLEDITPLLGKNLKSSPEDILKSVDGIFDESQSSKMAVVLNHYDSIINCIEQLEEQILKLAIKYQAELNLLLSIPGISEISAIFIIAEIGTDMNAFHSVKHLISWAGLSPRLNESAKKKKSVRINKAGAYIKPILVQCALCAIKDKSCPYIKARYESIKRRRGHKKAIIAIARLLLVSAHHILNKKEPFNLEQFDDLLKKNFKTNKISKSKPNEMISFLESLGYSISQNT

SEQ ID NO: 72379 - protein, 373 aa, unidentified
MPKYSTAFGMDVHLRSTTVCALDADTGEAVTRRFPGNPWGEIAGWMDGFPGPSLAAYESGYLGFAPQRELAGLGVECVVAAVSKIPRSAADSASKNDRNDAARMAKAILAHDISPVWVPSPEVEGIRDLAGAYDGATARLATAKQRLLAFLARRGFVYGGTTPAGNPRKYWTYDFLRWLDKVRPEDDGGVRALDALRNEVEAAAEARADLLSEYRAAVDASPIAAEVAALQSIKGCAFALAAAFSAEVGDFTRFRSGRQVTSYFGLAPKQRSSGDSVRLGGISGAGNALVRKLAVEGSWCYAAARHQPKLMPRDTGVPLEIRVHGRKGSERLLRRREEMLERGMPQAKANAATAAELVRWLWALGMMCREAGE

SEQ ID NO: 72380 - protein, 323 aa, unidentified
MSKHSTVCAGIDTGKHQLEVALSGCSERLPVDNTAAGHAALSAWLRRHRVKRVGIEASGGYEQDVVAQLRRDGFVVIVLQPAQVRAYARFLLQRAKNDKIDAALIAACTAAIKTIHAPPDPRLAPFAERMTLIDQITDQIAGCKNYRESSRPPQIRQFWKEEITRCNKLLRAELQALAAAIRQHGDLAERLALIESVDGVGLKTAVAILVRMPEIGRLGRGQAAALAGLAPYDDDSGARFGMRHIAGGRERLRGSLYNAALAATFHWNPQLMALYRRLTAAGKPHKVALIACARKLLIFVNTVVERGTPWVRTVSPLAHVKAA

SEQ ID NO: 72381 - protein, 416 aa, unidentified
MKKGQNTRGYQRYMALDIHRDYIMVGAQNEKQDWVLTPRRVSLEKFPEWAKKNIRPGDIVVLETTTNVWTTYDIVAPLASRVLVANAAEVGEIANARVKTDKEDIKRLLKLLIGGIVPEVWVPPLAVRELRAFISYRSRLVTTSAAIRNRLQSLLHKHNLLLSEAGLLDQAWWEAQKNISALEKMQIRQELALLQEIEKLKAAVDEELQRQSTRSIWGKQVLQLMQLPGVGFVVAMTVLSAIGDISRFEHAKQLVGYAGLGAGVHDSGKTHKDKKITKKGRRELRWAMVEAAWRAVRMSPFWKAEYEKHLHRMRKPNQVIVVVARKLLIAIWHVLSKEETDIHASEEELAYKMLLLSWSLNEDVRMGLTYKQFAKYALMKLGVETDITRFVRKDVPRRLAAREEVLARMTELGLTA

SEQ ID NO: 72382 - protein, 384 aa, unidentified
MATATPCIDQQTACTPTLFLAFELGENKWKLGFTTGAAQRPRERQVAAGEFATVLEEIRRAKQRFGLPDNTRVVSCYEAGRDGFWLHRCLVRHGIENSVVDSASIEVNRRYRRAKTDRLDVHKLLTMLLRYAAGERKVWSVVRVPSVEDEDRRQLHRELLTAKRDRTRVSNRMKGLLAGYGVRMALHGDVEAQLEQVHQEDGSLLPPALRARLKRAWQQVCFLTAQITALEGERRAALRTRQEPVMEKVRQLSTLRGIGVNSAWLFVMEFFAWRDLQTPKEVGALAGLTPTPYQSGESRRELGITKAGNGYMRTMAVEIAWGWIRFQPESLLTQWYQTRFGQGSARLRKIGIVALARKLLIALWRFLKTGELPVGAVLKAAVSG

SEQ ID NO: 72383 - protein, 414 aa, unidentified
MESVYRWMAGIDVHKKMLAVVIRRQTGEQAEYQKRKFGTTRAEIQHGEAWLRTHGVREVVMESTAQYWRPVWYGLEPHFRLYLTHPLKTRARRGRKSDFRDAQRLADRWSSGDLEESFIPGAEQRSWRWLTRTRVQLRKKLGVIYSHVEGLLEQGGIKLSAVVSDLFGVTGWAMLEHIVRGVTNVELLVGEARGALRQKDTELREALAGQLEPVYRLLLQQHMDPVRLLRRQIEEINHALAEAMQEHLPALHRLSKIPGVDLYAAQELLSEIGPKAAAFPSAEQFASWVGVCPGSQESAGVNYSGRSAKGNRYLRRLLCQIAWAAIHTKDTFFAGLFARLKPRVAGKGAAWAVAHRISKIVWLLLHQEVEYRKQGSAPPNERTLVRKFKRILKEFGQLGLDVRALLDQQLPASA

SEQ ID NO: 72384 - protein, 323 aa, unidentified
MNETTVTIFVGIDVSKARLDVAVGEKGASWSERNDAEGIGRLTQRLVELQPALVVIESTGGLERPTLVELARAGVSVALVNPKRVREFAKAIGLAAKTDKLDARLLARFARDAKPQVTQLPSAAEQHLSALLARRKQLLDMLTAEHNRLETTPLALKEMILEHIAWLENHLKAIEKDIDTFNRQDPERKEKQDLMRTVKGIGPVTASTLSADLPELGKLNKKEIAALVGVAPFNNDSGNWRGRRRIKGGRASVRHVLYMASVAASRSNSLIRAFYLSLLQRGKQKKVALVACMHKLLTILNAMIRDHQPFREPALLPISLFLS

SEQ ID NO: 72385 - protein, 340 aa, unidentified
MDTIGLDLHKRESQLCVLTEAGEIVERRIVTSRERLTAVLGSQPSARILVEASTESEWVARHLESLGHEVIVADPNFAPMYATRCRGVKTDRRDARTLAEACRLGAYRPVHRASAPQRHVRAQLAVRDALIRTRTRYVSVVKALVRRDGLRLPPGNPVHTDAKLAALPLPVPLARELAPLRALFEPLNNEITAADERLAAVAAADPVVERLRTAPGIGPVTAVAFVATLDDVTRFASAHHVAAYLGLTPREYSSGEQQHRGRISKTGNARMRYLLVEAAWRMLRTADPAAAVLRAWADGIAQRRGRSVAAVALARRLAGILYAMWRDGKDYQAPPPAAAP

SEQ ID NO: 72386 - protein, 407 aa, unidentified
MELVALYKRVVALDVHQAQVTACALIEQPDGTIHIEHRQFGAFKRDRRALAEWVASLRPDEVVMESTGIYWKSPYAALEAVGIRAKVVNARHVKNVPGRKTDIGDAQWLATLARAGLLRGSFVPPAKLRELRLISRQRQKLVSQLAAEKNRLHKALTDGGIRLSVVVSDIHGQSARAMIKAIIAGQPPHEVLQFASTRLKASREELFDALQGELTASHRFVLGELMDHIEELEARIARFDAQLLAELQSERNMLALLQTIPGIDLMGAAMLLVEIGTDMEVFGSAERLASWVGICPGNNESAGKRKSGRVRKGNPYVRRLLCEFAHAASRTTSVFKSKFQLLVVRRGYKRAIIAIAHKILRTIFFILARREHYRDSATDYEALSVQRNAPRWIKALIKFGFITPANA

SEQ ID NO: 72387 - protein, 380 aa, unidentified
MRRKQRKHIRGKRGEQFLQIVRGIDRARILCVSLDISKYFHLVMMHNAYGEIVTPSFEIDIFRSGFEHLCQVIDETAARIGAEVVLIGMEPTGHYFENIARHLHARYEHVYLINSLAVKENRAQKMMHYQKTDEGDAAAIGDLLCRGEGTPYRPNKGIYLEMQHIDRVRVAKLKMRSALKNQIIGHLDRIFPGLIITNKEAQKRRRPLFTTDFWSGQMAQNLVRICTDPRRLSQMSTQELIDAFHAQGYRMGPHWATKIIAFAQQTLHPDPEIIAVRSQLLQRDLALLEQIEGCIAKLEDRLLVLLAQTPGYIWSRLKGISSIQAASLMAAMGDPSYYDYAAQVFRRSGLVSGRNDSGTRQKKGKGKRVTRSVMSTCAGR

SEQ ID NO: 72388 - protein, 376 aa, unidentified
MRLQEYGRNPDKRKEYVHHPDLLLGGVDVRKAKHQACMGTQSTMRCRKFEFTHTREGFQRFEQTLRNHLVNTRGQRLLIALEPSDSSWQALYERLQGCGYEVCLVHCQAVRNNRKTMQAGTSKTDATDAYSVFALLQQGKCFLPVARTPELKAAYRVMQRHMALKKRGRQLRNQLRAALHLALPELNPLIKDLTQPTALRFLQTTPTPATVRHNGRTGFREQWQRRRRCGQWRSDTFNTIYDLAPASIGRTDPYHLDAFEITALAQDLADALAKHQMYLDKVLERLAHRPAFQLLLTLPRIGRPTAAAILTAIGDIGTYTNGTQLVKLAGLAIRLFERGSSMRQLPPISHVGSAYLRYWLYHYAKRLVAHEPHCRA

SEQ ID NO: 72389 - protein, 377 aa, unidentified
MDTIYIGVDFHARQQTICYLKNETGELVICELRHQDKQAVRAFYAQYQGQVIVGLEASGYSPWFERLLEELGCEVWLGHATEIRRRARWRQKNDRRDAELILDLMLHNEFPRLHRPSVQSREVLRMLRYRQKLVKLRTMSKNSLQSLALQSGLAKGSQLFTQAGQQELGAAVMSPVMQWQREHWLDLLKPLNKQLLETMVWFKAQSQGEVEITRLRTHPGIGLLTSLCILHSLQPVSRFRNSRKVAAFAGFDPVERSSAERKCFLGISKAGSRVLRYLLVEAAHTAIRKDEDLKRFYKRLAEHRGRPKAKVAAARKLLIRAYIMLRDEIDYAEFRRRAVAARLARRGHRPNVPEVLIGQPASADQGASSLSEKRSRK

SEQ ID NO: 72390 - protein, 359 aa, unidentified
MCQSGGVETPLREASVLEASTIGLDIAKNVFHAHGADERGAMVFSRKLTRAKLLEFFAGQSACVVALEACGGAHHWARQLQEMGHEVRLIPPAYVKPFVKRNKNDAIDAEAICEAAQRPGMRFVAVKSEEQQAAGLVFRTRDLAVRQRTQLINAIRGHLAEYGWVAPTGRAHMAMLADLLEEEEMTSTLPEAARPMFKLMVDMLAELDRQIAVLDREIARRAKEDEAARRLMTIPGIGPVAATAILALAPPIETFRKGRDFAAWLGLAPRQHSTGGKQRLGSISKMGERTIRRLLIIGGSSMVRQATRFGAPAGSWLERMLARKPRMLVSVARANKMARMVWALLTKKEDYRAPAAVAA

SEQ ID NO: 72391 - protein, 343 aa, unidentified
MQSISTIGLDIAKSVFQVHGVDAAGQAILRRQLRRRHVLAFFQKLSPCLVGIEACASSHHWSRELQALGHTVRLMPPAYVKPYVKRQKNDTTDAEAICEAVTRPNMRFVPTKTVEQQSCLMLHRTRHLFIRQQTAVINSIRAHLAEFGIVAPVGRRGVEQLLEVVADTADRRLPEVARACLAALGSQLRALKAQILEFDRRIMVWHRSNATSMRLDAIPGVGPALATALVASIAEPGAFRSGRDFSAWVGLVPKQNSSGGKDKLGSISKQGDRYLRSLFTAGALAVIRYAKIHGTRHRPWLTGLLARRPTKVVAIALANKLARMAWAMMVRNERYKEPAALAA

SEQ ID NO: 72392 - protein, 317 aa, unidentified
MCKFIGIDISKQTFDVSFLEKGKWQHQVLENKTLGFKKLAKILNPEVWVVMEASGSYYLPLAEYLAGIGIKVSVVNPLVIKRFSQTNLYRAKTDKKDAQTIAEYAEKYELKQWRPESENAKKLRQLYTRIEMLRKQIHQNRRQLEAFSASGFLDNILRNEIKSSIKFLENKIKKLENEMNRISLEEYSETMENLQSIPGVGKQTAMMMCLITNNFEKFDHYKQLIAFVGFSPRIYQSGTSVKGRGHICKMGKSQIRKLLYLCSWSAKRWNKTCKEMYERLKEKGKPERVIKIAIANNLIKQIFAIGKSKEKYQPNFC

SEQ ID NO: 72393 - protein, 366 aa, unidentified
MQPEAGREAKKMKDVGVDIGKWRCRAAVMDPEGTVIDEFAFNNDAEGIRDLASRLTTEDRVVMESTGSVWTNLYDALDERKVPVVLANPLKTRAIASARIKTDKVDARILAHLLRGDLVAECYVSPRELREIRALVRHRASLVRARTTVKNGVHAIVDQHGLRCEYSDLFGKRSLEWLRSLDLGALDRLMLDNHLGQVESLNGQIRRVDEEIRRRASLDEDVRLLLSLTGVDIYMALLIRSEVGCIDRFPDYKRLVSWAGLAPSIHQSGTVEYSGGITRQGSRMLRWAMVECVQAAVRYDPRFRGLYERLSRRRGAGCAVVAVAHEMARIMYFMLSRNESYRDADGGLVERKLKNMSKRAYDGLRN

SEQ ID NO: 72394 - protein, 383 aa, unidentified
MRHGGILIEANDSEGEAMKKHTTINQSLSADVVACTTVAVDLAKRVFQLAGEDALGRVLFEDRIKSREAFQAFLHKLPASVTVLMETGPGAQAWGRLLQTQGNPVRILPAQLVANHRSGPKNDRNDALAILRAGRDIKISAVPLKSAAALAMQALHRARQGYVRRRTAVGNQMRGLLLEHGVALAQGETAISQLVPRILEDATQPLPDLLRELIAELLSEWSQLGERVNVLTGRLETAAKEDETAKRLMTVRGVGPIIATALLAKQTQPERFANARLFAAYFGLVPSQHSTGEKVRLGKMSKHGDAYLRSLTIQGAHAVLKQLRPDSQQPDDQRLQRWISRLGRKEAAVRLANRNLRILWVLLQNDQTYRRQPGAAPEAAMSH

SEQ ID NO: 72395 - protein, 344 aa, unidentified
MKITTIGIDLAKNVFQVHGVDERGRAVLKKQLKRDQMAVFFAKLPACLIGMEACGSSHHWARELQGFGHTVRLMAPQFIKPYVKTNKNDVADAEAVCEAVARPNMRFVPVKSVEQQAVLSLHRVRQSFVKARTAQANQIRSLLGEFGLVMPKGITNVRKRVPEVLENATDKRPAALPHLVGRLLDHLKELDRQVGQLEAQIKAWHRSSELSQKLEKIPGIGPLGASALVASIADARSFDNGRQVSAWIGLVPRQHSSGGKPTLLGISKRGDVYLRTLLIHGARSAIVAAQRRAAVNPWLAGLLHRRNPNVAAVALANKNARTVWALLAHDREFRPDYVPTPAAV

SEQ ID NO: 72396 - protein, 339 aa, unidentified
MKLYTGFDLHSSNNYLAIVDEKGKRVYKKKLQNEPDCILTTLKPHKDNITGIAVESTFNWYWLVDLLMEEGYKVHLANPAGIQKYKGLKYSDDEHDAFWLAEMLRLGILPEGYIYPKEKRPIRDLLRKRGHLVRLRTSLILSLQNIISRNNGFKLKANEIKALKTDRVAAYLSSNEDLALAGKVSKETIDFLTRKIKSIETVVEKQMHLENPYSNLLTIHGVGKTLGLTIMLESGPIERFKKAGNYVSYCRKVSSKWLSNQKKKGKGNAKSGNKYLAWAYSEAAECARRSYPDARAYYNRKMQKTNFMIAHNALSHKLAKAAYYIMKDGVSFMPEKIFT

SEQ ID NO: 72397 - protein, 371 aa, unidentified
MSTTSMTPQPMVIAIDPHKASWTAAVVDASLQPVATIRVPVSHEGYRALRRFANRWPDPTWAIEGASGLGAPLTTRLRTDGINVVDVPAKLAARVRMLSTGHGRKNDDADAVSVAIAARTAPRLNSAAADATITALRAIVEHRDDLVKTRTQTVNRLHVVLTHLIPAGASRNLTAERAAELLRGIRPRDAAGKTLRTLAADLVTEVRQLDRRITKAAADIQAAVTESGTTLTDLCGIGALTAGKILGRVGTIDRFRSAAAFATYTGTAPIDVSSRDVVRHRLSRAGDRQLNLCLHVMALTQIRQDTPGKTYYLRKRTDGKGHKEAMRCLKRRLSDVVYRQLRRDADRPGAGPGGHSGAALSSSAASSNPAH

SEQ ID NO: 72398 - protein, 343 aa, unidentified
MLYVGLDVHKEFCQACVIDERGRALSNERFPSTHESLDVFLAGIKHAKFVLESTGIWEYIYEGIEDRGFEVVLAHPLRVRAIAEARIKTDKVDAETLAQLLRADLIPRSWVPSRDIRDLRQLVRQRTYLARQSTSFKNRISAELLRRGVRRPPELKTSFTKKDIERMRSLNIPTVTSSLDCLERIQAQIEEMNQQLLVEFKRRPDAQLIATVPGIGYYGALLIHAEIDDINRFPDPEHLAAYAGLVPTVSQSASTVHYGGISKEGSAYLRWILIEAVHVHRHIHPESRLSRFHSKLEKRRGKNKATTATARKLAHVIYWMLKTREPYHGQGFNPVTKPARTSA

SEQ ID NO: 72399 - protein, 339 aa, unidentified
MRLYAGLDVHSSNTRVGIVDEAGHRVYDCRVANDVGEILEHLSPMQAELEGVVVESTYNWYWLVDALMDEGYGVHLANPSAMKMYEGRKHTDDRHDAFWLADLLRLGVLPEGYIYPRQDRPIRDLLRKRSHLVKLRTSLILSLHGIVARNCGVRLKGGVIKVLKEDRVSPYLEYNEDLHLAGRVTKEMIDCFTGKIGEIERYILPRVKMRDEYQGLLTIPGVGKVLGLTIMLETGPASRFASAGHYASYARKVPTVRLSNSKVKGRGNRKNGNRYLAWAFSEAAALARSYSPRARRYYERRRQKTNPAAAHNALGSKLAKAAWHIMKDQVVFMPEKVFV

SEQ ID NO: 72400 - protein, 409 aa, unidentified
MPKFWCGIDWSESLNDVAVIDESGELVAHTRVEATPEGVKEILALLRGLRTSHTHSRKQVPVAIETPHGLLVAALRAKDQPVIVLHAGTVARYRGRISPARKKSDRTDAALLANIVRTDGAWHRPMPRTSQEAMAVTVLARAQRKAVHTRQYHRNQLRSLLRDFYPAALEAWQDLPHGIVRAEARALLALAPTPGKARELRKRHIADTIAAAGRTRLVDDHAERLRAVFQHHHLRHPPHIEEAMGQQVQAALALLNQACASAEYLTEAATTAFHAHPHAEIYASFPGCGSLIGARLLGEIGDDPDRFTVRGLRAYAGAAPLTWESSSSRVVTHRRMANSHLKEIGHIWAFATLTRSPGCRAHYDRRREQGDRYAAALRNLYGRLLSCLHFCLKNSTTYRDETAFPGGCE

SEQ ID NO: 72401 - protein, 318 aa, unidentified
MKKAFFCGVDVSKDKIDVCFLTSITSEKAKFETLPNNYDLIKVYFNSFKNDEILVVFEATSNYHLALQKALSDLNIRYNVTNPYKTSLFLKHLSAIKSDVNDSYGLAVYARTFKSEISPDKYNAEYLQIKSYNSTLNLLQKLNTQLKNFKQSQKLVKNSVVDEVIENLIKEIAKLQSMLQKLAFDLVKKTIPETEEIIKSNKGFGIDLALNLFPQLHFNRDKSEKQFVSFLGLSPRIFQSGSSVYKSQKINKMGSSNIRRILFMSALCAIRFNEKFKARYDRLIANGKKKMVAIVAVMCAIVRYLKSLFPFHAEIKAI

SEQ ID NO: 72402 - protein, 318 aa, unidentified
MDNSYIGIDVAKDSMEVTEHEGKEVWSFANDEAGLVKLVRRMRRLSPCLVVLEATGGYESTIAVELQSKGFPVAVVNPRQIRDFARSVGILAKTDIMDARVIARFAAQIKPATRVLPTEETQKLGAILMRRQQVITMLTAEKNRLHQASSAVKKRVQVHVTWLEQELADINKELRRMVQSDAEWKEKDEIMQSVPGVGPNLSTTLLADFPEMGKLNRKQIAALGGVAPFNRDSGKMRGKRSIWGGRDIVRAAAYMSVFVAIRCNPMLRSFFQRLIAAGKPRKVAMVACMRKLLCILNAMIKNHTTWNSHVPQLVGPCH

SEQ ID NO: 72403 - protein, 402 aa, unidentified
MNFFVGLDWASQAHAVCVLDVAGQVCWQGSVEHSAEGLAELRRRLARFGPPASLPIAIERPSGLVVDTLMDAGHPVVPIHPNALKASRPRYSAAGSKSDPGDAFILGDLLRTDGHRFRPLQPLSDATRALRALVRSRDDLVAARVALANQLRALLDCFWPGAAAIFADVDSPIALAFLSRYPTPHSAERLGEKRLTRFLVQHAYCGRRPVPELLTRLRAAPIAQTGELEAEASGEVVHALIAVLLPLVTQIQQLSAAIAAALPQHPDGPLLQSLPRSGSVNAAQILAELGDDRTRFSTDEQLAAEGGVAPVTHESGKHRAVSFRWACNKRLRQALTTFADNSRHASPWAAAIYAAARRRGCHHPHAIRVLARAWVRVLWRCWQDHRPYDVMLHCAAQRAAAA

SEQ ID NO: 72404 - protein, 395 aa, unidentified
MNKKVHYLGLDVHKETIAVSIAPQDSTEVRRYGIIGGTLEAVDKLIKKLGGENIELRVVYEAGPCGFVLCRHLRSRGIHCDLVSPSLIPKKASDRVKTDRRDADQLARLYRAGELTAIHVPDQADEAVRDLIRARFAAVCDQRQARNRLKGFLLRLGFRYTGKSSWNDAHKRYLSGLVMPQPAQQIVFQECIHAIDDAGERLERLTQAVEDALPGWKWEPVVRALMSLRGVQVLTAMTLVAEVGDFSRFAEAGSLMHFFGLTPSEHTSSDKRVQGGITKCGNAHCRRVLTEAAWQYRLKPKVSEAMQKRQEHQSKPVRLLAWKAQERLHKRFRQLSVRKKSVVVATAIARELVGFVWAIACQVKPAEQAAAPEIIRTCRGKVYRLDPEKKFEKTK

SEQ ID NO: 72405 - protein, 350 aa, unidentified
MLIIGCDYHPGFQQIAFVDTETGECGERRLAHREEAEQFYRKLSERSLRVRVGMEASGHARWFERLVSDLQFELWIGDAAEIRTKRVRKQKTDRQDAQLLLRLMMEDRFPQIWVPDAANRDMRQLLWHRHRLVQMRTRVMNQLHVVALNEGLRRKKALWRPAGRKELESIALAPWATRRRQDLLDLLDQLTPKIQELTRALEEEVEKRPVARRLRTHPGVGPLTALAFELVIGTPERFHCGKQIASYVGLVPSEESSGDRRRLGHISKQGNSLLRFLLVEAAQVTVRSHLQWRSKFFHLAMRRGRKIAKIAMARKLAVHLYWMWRRGWDYGQFAKLGSHAGAPGNRHGVL

SEQ ID NO: 72406 - protein, 339 aa, unidentified
MFYVGLDVSVARTSVCIMDALGQIVREQSVASTPEAIAGAIRAAGTNVERVGLEAGINSGWIARGLLDAKLPVIVIDATHAAAALKTGFRNKTDKNDARGIADLMRVNKFRAVWVKSPGAQRDRAMLTVREQLRRQSLDTRNTIWSILQVEGLKPPKLTNPAFDALVARSLEDKQLAPLLRPLVAVVEHVDRQVAELDKLIAARAKASAVCKLLMKVPGVGPLVAMTYTAGVDDPARFGNSRSVGAHFGLTPRRFQSGEMDWSGGISRAGDASVRRALYQAANVLIHHSGGWCALKSWAVRLAKRRGLGKAKVALARKLAVVLHRIWLTGKDYRLTAAV

SEQ ID NO: 72407 - protein, 404 aa, unidentified
MKHHTPSTVVKPSVATASAAFIGIDYHKRYSVYHVLDPEGRDLAKGRIEHHSPQDFVALVKRWPRPRVVFEACMNWHWLHEILEQAMPEEDLVLANPYKTRIIAEAQVKTDKVDARILAQLLRADFVSSVHIPCKATRQRKEVLRQRCFFVRQRTMLRNRIHRLLGGQHDLKLPQVSDLFGRKGMSFLEKLELPEPSGMLLKQQVEMLKSLQLRIKEDEAALAEMMSMTPEQELLLSIPGMGPILAAVVVSEIDDISRFVSAQKLSGYAGLCPSTSSSGGKTYNGKLMRHCNKWLRWAFVEAAWVSVGCSPYFGGLYKRKRAQGKKANTAVLCVARRMCRIAWQILTQQRPYATLPPPQKLQDQPAREAPASAGSVKEVSRRVRVAKGHGKTAKSISPAAPLLY

SEQ ID NO: 72408 - protein, 367 aa, unidentified
MKKVSTAAAKASKRISSQKLTVGLDLGDRSSWYCVLDEAGGVLLEQRVSTSPKAVREVFGGMAGSRIALETGTHSPWVSRVLSAVGHEVIVAHARKVRLIGESRKKDDRLDAKTLARLARIDPQLLCPVKHRSAKAQADLTVIRARAGLVRARTALVNTARGLAKSYGERLRGCNPRNMNPKKSEELSPELQTALQPLLAELESLSEQIREYNERIEELAQESYPQVALLKQVKGVGTLIGLTFLLTLEDPHRFRKSRDVGCYLGLQPGRRNSGQSEPQMHISKEGDPYLRTLLVQGAQHILGPFGVDCDLRRWGLKLAERGGKSGKKRAIIATARKLAVLLHHLWVSGEAYEPLHNSQQSAMPAAA

SEQ ID NO: 72409 - protein, 404 aa, unidentified
MYYVGIDVHQKSSSVEILDCNGKLFKRREVRGRWPVLIEELAKVPKPFAVCYEASCGYGYLHEQFSKLAQQVKVAHAGGLTWIYRSKRKHDRIDARKLAKLLFLDEVPSVHVPPKEVRLWRQAVEFRQKVLRSRVAAKNQARALLRERGVESPRNLFSGKGLAWLKDLKLEDLGDALRRDLIVEQIEESDEKIKRVVKHLDSLSNNHAGVALLRTIPGIGPRTAEALAAYVDDAKRFSNLRNVGAYFGLVPCQDSSADKNRLGHITRDGPPTMRKLLCEAAWTAVRESPTVRAYYERVMRQDPDRKKIAIVATAHYLVRVAVSMLKTGECWRESVKEDPGNVKEDSSPKPDRGGGETPSGPQGFSPPPVASPASDEATSPPSPLRFPIFPPEGEEEASPEQGVS

SEQ ID NO: 72410 - protein, 397 aa, unidentified
MVCVGIDVAKDKHDCCILDSDGTIRADCITIPNNMDGFKQLLQTIRDCTKKSDKIKVGLEATGHYSYNILGFLLDNDLAVYVMNPLHTNLYRKSLSLRKTKTDRVDARTIATMLLSDVDLKSYTDTAYHNEELKSLTRYRFDKVRERAKLKQSVSRLVTILFPELEKLVPSLHIASVYALLSEYPGAKQISEIHLTKLTNLLATASKGRYGKDKAIQIRDAARTSIGSVMPAKFLELKHTIKLIRELTSEIDEIEVSIQKIMDELNPPILSIPGVGIQSAAMILAEIGDFSNFESPDKILAYAGCSPSTYQSGKLTNCYAHMEKRGSRYLRYALYNATKYVCHWNPVFAEYLAKKRAEGKHYNVALSHATKKLVRLIYALQKSGKSISCSCLILSRA

SEQ ID NO: 72411 - protein, 349 aa, unidentified
MMVIGVDTHKRSYSFAALDAGTGELRSSETVTATSAGHRQLLGWAGELGEERVWAIEDCRHVSGKLERFLLARGERAVRVPPHLMAGRRRGLRQAGKSDPIDALAVARAALEEGVQTLPGATLDGPAREIKLLLDHREDLIGERTRIQNRLRWLLHDRWPELEIPKASLDHISRLDDLQRRLADCEPDADVRVMHSQINRLRELTRETKALEQELSVLVATQQPRLLAVPGIATLTAARLIAEIAGIERFKSSAKLARLAGIAPIPASSGNSNRVRLHRGGNRQLNAAVYRVAITQMRMHPPATAYIARKLSEGKSKREAIRCLKRHLIRTIYNEMTLTANELNTPALT

SEQ ID NO: 72412 - protein, 386 aa, unidentified
MRPFEVRHTSSDLKRLTAKLKQLGGDIRVVMEHTGNYWRPVALTLKKAGFFVSVVNAMLIHDFSDNSIRKLKTDRADALKIANYALTFWDELPPFNDEEEIRLLLKTQSRMCERITTTATALRNGLIDLTDQTFAGINQAFDRAAKSAEGHEKWVDFFQHYWHRDCVCKFSLEAFTESYRRWCRQKNYKFRTDTAHKVYALAKECVATLPKCESTKVLITQACKSLNAVCEAKLVSQHEMQRLASLLPEYDIVMGMEGAGPITGPALIAEIGDVRRFKNKKALVAFAGVDAPPFQSGTFEAKSRHVSKRGSPHLRRTLFIISSVILQLSHEDNPVFCFMDKKRSEGKHFYVYMVAGAAKFLRIYYATVTGHFKASEHIDSLPQIAG

SEQ ID NO: 72413 - protein, 343 aa, unidentified
MQVIIGIDPHKATHTAVAVNGSEDEISRLKIRASRDQVAKLLTWAAPFPARTWAIEGAEGLGFLLAQQLVTAGETVVDVPATLAARTRVLGTGRSNKNDPNDAMSVAVTALRTRDLRRVQSVGNSEVLRLLSKRNTDIGRQRSRVVSRLHALLVELAPGGIAREINVSGAEAFLAKITPSSVVEQIRCDLARELIDDICRLDVQLKESHKRIAIAVRASSTTLTDLFGVGPMTAAVVIGNVGDVRRFRNRDHFAAYTGTAPVEFSSGGRIVHRLSRRGNRTLNAAIHMAAVTQLRHKRSDGRVYFDRKVAEGKTKREALRSLKRHVSNAVYRQLIVDANRIAR

SEQ ID NO: 72414 - protein, 350 aa, unidentified
MEKRMKQSVGIDCGLKELVVAFGVMDENFDTRILSNTQFANDDEGFKKLLQWSKKLDSREQAVEYVIEATGVYHEKIALYLHEGGCKIIVLLPNKAKAFSKTLSVKTVNDKVSAQMLSQFGLEKKMDAWQPPQKVFNELKQLTRERDQLMDEQTQIKNQFHAVTSGAWVNQRTVKRMNQRLKMIKKQVQEIEQEIKTVIEKKDILKEKIKKIRTIPGAGLLTVATVLAETNGFHLIRNKKQLVSYAGLDVVERVSGISIKGKTRISRKGNKHLRKCLHYPALTAIRHNDAMKSLFVRLVSKHGIKMKAAVAVQRKMLELMYILWKKDEAFDANYQHKNKKEQPLLTALSN

SEQ ID NO: 72415 - protein, 412 aa, unidentified
MDVFCGIDWAEDHHDIALTDRDGRLLARRRISDDAAGLASLLALLAEHGDTAEDLVPVAIETPRGLLVACLRATGRKVYPINPMAVARYRDRHSIAGRKSDHGDSFVLASVLRTDLHAHRPLPADSELAQVIAVLARAQQDAVWDRTTAHNKLRSHLREYYPGFLAAFAGARDGILRPEARTILAAAPTPADAARLTLAQLRALLKKAGRSRGIDAEATRLRDAFRAGQMRQLPLVEQAMGRQAVALLGQLDAACAAADDLERAAVESFNLHPDAGIITSFPGLGPLTGARVLAEIGDDRSRFQDAKGLKAYAGAAPITRASGKSRSVTHRKVKNNRLAAAGYTWAFSALTASPGARRHYDRRREDGDRHAAAQRNLFGRMLGCLHHCLATGQHYDEATAFPDPRKNLSQAA

SEQ ID NO: 72416 - protein, 443 aa, unidentified
MDQAWPLINPNAAGVDLGSREHWVAVPADRAQQNVRDFGTFTSDLESLADWLKQCGITSVAMEATGVYWIPLFQLLERRGFEVLLVNARHIKNVSGRKSDVLDCQWIQRLHTYGLLGGSFRPADPYCVVRSYLRYRDELVTARSTQTQHMQKALQQMNVQLNQVLSDVNGLSGLTIIEAILKGERNPLQLAALAHRRVKSTPSQIAKALIGDYRAEHLFQLQTAFDLYHTYEAKIATCDEELARELAKLPDRVDVKVKPLPAKTGPKKMDENLRLGLYLKLGVDLTAIEGFGPLVALTVLSEAGPDLGGFKTEKHFTSWLGLCPDNRISGGKVLSCRTRRVVNRLSDVLRLAATTLERSQTALGAYHRRMKAKLGAAEGITATAHKLARILYRLLTHGEAYVRQGMADYETKHRERKLKSLQKVAESIGFELIQKQTVAEVVS

SEQ ID NO: 72417 - protein, 452 aa, unidentified
MRLLNNKQGLRRSQFAKELKGADLEKVLLVPIDVSKTLQKSMILNYFGEVIESPFSFMVNRTGIKLLIGKIDNARNILQADRVFVGIEATGHYYEDIVRILIDAGYSVHIINPASTHEERKQHLTYTKTDDIDLYLIAEALIGYKATNAKLSTDVYKQLQNLTRARRSEINKRSRIKMEIRTIHDQIWREYQGFSILENNKVKTRKIFSDFWGKASLYLLNHFPHASQILELGELGLHRLSKEHNLKIRKSTIDKLLYAASESVSKPIEQLSSELFLLKQKLKDYEWHTQTIKSYELEIERIFVETIGLLLLTVPGIGLITAAEIYCEMGDLSQFTSANQLIKKAGTNPVIKQSGPEEGYYGRISKQGNANLRRAIYNAGRTLSVHNEVLKPFYTRLKEKGKKAGQIYIAMGNKFIKIAFAMLKNRKPFECNDPSFNYKQEVSKKLTLPLSA

SEQ ID NO: 72418 - protein, 344 aa, unidentified
MSVTTIGLDLAKSIFQVHGVDAQGRAVLKRRIRRRDLLAFFEELPSCLVGMEACSSAHHWARELVALGHDVRLIPPQYAKPYVKRNKTDAADAEAICEAVGRPNMRFVPIKSKESQGLLTLHRVRSLLVRQRTAAVNSARGLLSEFGIVAAKGICRVAVLRREMEAADEQVLPREARAALDALFEHLDALTLKLEAVDREILAWHKASEASQRLATAPGVGPLTATALIAAVGDASQFPSARHFAAWLGLTPRMSASGNRAHIGRISKGGDRYLRTLLIHGARAMVGTSFRRGVKPRPWLQALIARRPVNVASVAVAHKTARALWAMIRREEAYRAPTVFEAAA

SEQ ID NO: 72419 - protein, 359 aa, unidentified
MQVQSNKIDFNGQNIYVGVDVHLKSWKVTIMTEKLKHKTFSQPPSPLVLYRYLAKTFPGGTYHSAYEAGFSGYWIHNKLKEFGLNSMVVNPADIPTTEKEKVQKDDARDSNKIARSLRNGDLMPIHVPSLKTLEDRGLVRTRTMLVKDMTRYKNRIKAFLYFHGIEIPEVFASTETHWSNRFLKWLESVDLSTPSGKTSLNALVTQSKNLRESILLTTKQIRELAKTDIYEKRVQLLRSIPGIGILTAMIILTEIETIDRFATFDQLCGFIGLVPSTKTSGEHENIGDITSRGHNSMRTAIIESAWVAARLDPALNKSYHDYCKRMESNKAIIRIARKLTSRIRFVLKNNQNYVCSVVK

SEQ ID NO: 72420 - protein, 407 aa, unidentified
MIIIGIDPHKHTYTAVAVDQREQPVGQRTVLAGPQATAGLLAWAGRWPERRWAVESARGLGYHLAQQLVVAGEQVIDVHAKLATRVRLLDRGHGRKTDQADARSVALVALRTPTLALVGAEDDLPAVVRLLADRRDELNQERRRVTNRLHRLLRDLVAGGAPTPLSVEVASRLLGRTRPTTAADQQRNALAHELLADLRRLDRQLATNRTRCQELLAVRPSRLLDVFGISTVLAVKLIGQSGDMTRFLRPDHYASYTGTAPVDTSSGANLRQRVNRGGNRALNTAIHLVARTQISRPGPGRTYSNANSPKARPPTRPSGPSNARSSKSSIDGRLPSSRSPSQWPGTARSSASAGRPLISTTSRSWPRPWGRRLARGSASPARPQTAPQLTTQRTPAPHEQRQVDGLV

SEQ ID NO: 72421 - protein, 406 aa, unidentified
MSMNAVGIDVSKRKSTVAILRPGGEVVASPFDVPHLSGCFQPLIQHIRALNGQTRIVMECTGRYYEPVARQLSQAGFFVCAVNPQIIHGFQGQDNPLRRVKTDKADSIKIARYTLDNWANLKQYTLMDELRTQLKTMNRQFDFYMKHKTAMKNNLIGLIDLAYPGANTYFDSPAREDGSQKWVDFLDTYWHVDCVRKMSCNAFTLHYQKWCCRKKYNFSRLKAEEIYETAKELIPVLPKDDFTKRIIKQAIQQLNAASQTVEQLRILMNETAAKLPEYPIVMAMKGVGPSLGPQLMAEIGDVARFTHKGAITAFAGVDPGVNDSGDYSQKSVHVSKHGSPALRKTLYQVMDVLIKTKPDDPVYLFMDKKRAQGKPYYVYMTADANKFLRIYYGRVKEYLASLPASE

SEQ ID NO: 72422 - protein, 289 aa, unidentified
MRIIGCDLHARQQTLAMLETTTGEEVDLTLMHEGNEVREFYSQLPHPVLVGIEATGSMQWFLNLMEELGIECRVGHPATIRAAEPRKQKHDRRDAELILRLLAENRFPAIWLPTKELLDLRALLLHRHQWVRIRTRIQNALQAIALANGLRRGPALWSSDGQAKIAFLPLPPHTAYRRTALQGMYRKMEEEIKNLTQQVAEQAGQRYRAQLLMTHPGVGPVTALATDIFLGDPGRFVDGKALASYVGLIPGERSSGRRRRLGKVTKQGSPLLRFLWGEAVVRPYAAIRN

SEQ ID NO: 72423 - protein, 320 aa, unidentified
MKQAMYVGVDVSKKQLDVAIRPLGKIFAVGNHRRGIAQLVRRLKKLEPVCIAIDATGGLEKELAYALAAENLPVAIVNPRQVSNFAKSTGQRAKTDAIDAAVLAHFAEVMKPQVRRLPDAASRELSALVTRHRQLVEMMTAESNRRDLASKSVRKLINSLLRSLKDQLAVVDREIRKAISASETWRHKAELLRSVPGVGKVTTATVLAGLPELGELDRRQIAALVGVAPFNRESGTWKGKRMIAGGRGWIRSVLYMSTVVAVRRNPVLKEFYERLRARGKPAKQALTACMRKLLVILNAMVRRQTHWSVPVSFPTLSVHT

SEQ ID NO: 72424 - protein, 400 aa, unidentified
MISVGIDVSKGKSTVCILKPYGEIVSKPFNITHTHKDLSELSSMLFRLNDEVKIVMEATGIYHLPILTYLQEKGFFVSVINSYLMKSYRNESLRKAKTDKIDSRIIANYGIDHWFKMKEFQTSGEIYEELKLLGQQYRHYMKLHLLSLAELTHLLDLTMPGIKNLLASWNETNRKDKRSDFVERFWHYDVITSMSEQEFTEKYILWAKEKKYVPSQEKAKVIYTLAQESIPTLPSETSSVKMLVTEAVRVLKEVDATLGLILSRMQEIAKTLPEYSVVREMGGVGNTLAPKLIAEIGDVRRFRNGKALVAFAGIDPPPYESGQFVGCNRKISKRGSASLRKAGYETMRSLKMRSRPEDPVYRYVVKKESEGKSKKSAKIAGLNKFLRIYYARVTELYKNI

SEQ ID NO: 72425 - protein, 377 aa, unidentified
MKEKVRFLGLDVHAETIAVAVAEQDGEVRSLGTIANREESIRKLVKKLGPVEQLRACYEAGPTGYVLYWQLTQLGVECAVVVVAPTLVPVKVGDRVKTDRRDAAKLARSHRSDDLTAVWVPDEGSEALRDLVRAREAAKQDQLRARHRLSKFLLRTGRRPAMGLKAWTERYLAWVQQIQFSQPAQEFTLLDYLHEVQHMDERVQRLEQAITEAVKLASSQVQEVIRGLQALRGVAHLSAVTIAAELGNISRFESARKLMGYSGAVPSEDSSGKRQRRGNITKTGNAHLRRIAVESAWSYRFRPAIGPRLRQRQEGVPEEIKEIAWKAQIRLHKRYLKLMAAGKDKQKIITAVGRELLGFVWAIGIKAETAGKLQMAA

SEQ ID NO: 72426 - protein, 448 aa, unidentified
MPAVHAKPTQRKHAAGIDIGATSIYVAVPVDRDPQPVRSFQTFTEDLHRLADWLQRCRIKTVAMESTGVFLVPLFQILEQRGFEVCLVNARHVKNVPGRKTDVADCQWLQYLHSVGLLQASFRPAQQVCALRSLLRHRDSLVQTASTYAQRIQKALDQMNLQLHHVISDITGVSGVTILDAIVDGERDPLKLANLRDYRIKATTETVAKSLVGDYRPEHLFTLRQSLEAWRYHRKLIAECDDEIQRHLVQFASKADPKQNPLPRPRKVSSSKVYSSAPDYDLRTEHYRILGVDLTEVPGINTLLVHTLLAEVGPDLSKFRSAAAFASWLGLCPDNRISGGKILSVRTRHVQNRAALALRIAAHTLHHNQSVLGHYYRRMRAKLGAPKAITATAHKLARILYHLLTTGQPYQESIFEERETQHQQRTLFSLHARARALGYQLIPLAPTT

SEQ ID NO: 72427 - protein, 348 aa, unidentified
MSTIQIGVDLAKTVFEVAISEAPGVVASRRRLSRAAFPHFLAAQPPAEVLLEACGSAHHWGREAQRAGHRVTLLHPADVARYRDGNKTDRADAKALLEAVRNQELTPVPVKSIEQQAVVALHRIRQGYLRTRTARINALRGHLRELGHAIPLGARRVTMEARAALNDEAVPDFLRQALYDLIAEIRTLEEQAESVRTSLTSLAHAMPDAQRLLTVPGVGVLTATAMVALVGDIHRFRSGRHFASWLGLTPREHSSGSSRRLGAITRRGNSYLRMLLIHGARSALRAGAVSDRPDDLRSWAGEVALRHCHNVAAVALANKIARICWRTWRDGRDFERREPRKEGRSSNC

SEQ ID NO: 72428 - protein, 418 aa, unidentified
MKKSETFKLKSISSDTLLATVDMGMDSFTGYARCPDRSEIKTSDYANNHGGFQAYWEILVRTMEIKGLKQIVLGFESTGPYARPLMHFFEGKRVRLVQVNPFHTKKLKELTGNSPNKTDQKDPKVIADIIELGHSLSVVIPKGAAAELRQLSEARERANKRLTALFNQLHSLVFFSFPGFLQVIKDIKTKSALHLLKHYGNPQDLLALGPDSLIQVIKQTSRGRFGPEKARALFEAATIWLSSGGGCDSVDLEIKEMVRAIENERSFVAQLESRMPQYLKQIPYSSLLLSMKGVGLITVAGIIGEVSDFTHFKTQKEILKLAGIDLYEISSGKHKGQRRISKRGRPLLRKLLFFAAMNTIRKGGTMHQTYQKHLTKGMPRIKALIAIARKLLCIMLALVRTQSVFSVNRKTGFTAAAV

SEQ ID NO: 72429 - protein, 366 aa, unidentified
MARKRILSTLDTSIAYEAVGLDLAKTDVALAAFDSDHQEPYFIDRIPYDKLYELLANMAPTLVAMEPCSGAHQIAEQIQALGHEVMMISGRHVQAWVKDHCNGQKTDLNDAFAILNLAYDRWLTPIRGKTREECRLLALQASYRQLKGQRTKTMVHVKATLHAWGFPIRTGSFNQKALRELIDANREAFGGEMAETLHLMIDRVRGLDHDIATVLKLLTEATKRDPRASLLRSIPGFGVLTTSRWCAVMGDIARFDSPKQTMAFIGLVPNNRITGHHTETSSGREARGQGRMSKRGDKMLRSLCILGAASLCLLVRKDRLQDCPFVASIKERLASPRPWFKVLVFSFVNSLMYPGFEIPLHRACAI

SEQ ID NO: 72430 - protein, 405 aa, unidentified
MPYILALDVSMGHSYSVLYKDDTCLFEDEIEHTQRGFHALLEEIQHLPERPLIVFEATGIYSRPVEKFFQDHHFSYCLLNPLEAKKQMEESTLRSWKTDKSDAHRLAQTHLKNQRQPKEVQNNFYLEMRDLARFYQEIEKKITRLRMDLHNCLQLTFPELEQFFSNRLTPYALTLIRLFPHPDFVLASTRTKIKNKLINETRKKISANRAEQKADQIIHYAQCAYPAVEKDSIHCQKTIYYAELLQDLLEQKEALATQMIKKAEGSPCFLLYQTFPGIGALTAALLLGELGDITRFKTHKQLNAFVGIDIRRYHSGKYTGQDRINKRGNPKARKIIFFTIRNMIRQQRAAPNHIVDYYYKLKKQPIPKKDKVATVACMNKLLKCMHAMVRAHTEYDYAYAVSVDH

SEQ ID NO: 72431 - protein, 320 aa, unidentified
MKAVVGIDVAKDKFDVTLMDGAGQKQHKEFRNNATGFKKLDKWVKQRTTGVVHICMESTSVYWEDVAEYLHQAGYEVSVVNPARIKGYALSQMRRSKTDPIDAAVIADFCRTQVPKQWTPPSAEQRKLRALVRHLQALKKSRTQQRNRLATCRDPEVAASLETILKAIETEMAQIEKRIEAFFDDHPELKQKRQLLQSIKGIGQKTATHLLAEMYDLADYDNAKAAAADAGITASHFSSGATVRRRSKMSRMGKASVRGCLYFPALTAIQHNPLVKLLAQRLEAKGKPKKVIQVAAMRKLMHLAYGVLKNQQPFDPAYAA

SEQ ID NO: 72432 - protein, 363 aa, unidentified
MRISVGVDLHKTQFTVAARGAETLHGQYATTKEGYAAFLEQLGRLRKRGAEVRLAVESTGNARYFKRQMAQEGYPVVVINSLKFKVINESVKKTDRHDAATIAEFLEKDMLPEAWLCDEQTEALRRLLKTRSVLVRARVTIQNQIHGMLVSIGMEDKKAGLHSKRGRQEMLDALKSAGYGLEVHALMETIDMLSERVKMLEQEIAKKVRGDRDVQLLRTIPGCGLLTASTIRAYTDDIRRFVSYKQYAAYAGLVPWVQRSNETVHYGRITKRGPEALRTAFVQLVLGMVRNRRKTGSYRLMHDYTAMKGSKSTGKAIIATARKLAKIVWSMLMEGKAFDPSSMRDRRIWEKADAMRTSIAQSA

SEQ ID NO: 72433 - protein, 345 aa, unidentified
MTIVETRPITGGVDTHLDVHVAAALDANGGVLGVESFPTTTAGFADLRAWLSSFGPLGRVGVEGTGAYGAGLARALRAAGLSVIEVDRPNRQARRRDGKTDTLDAVEAARAALSGRARGIAKTADGNVEAIRVLLVAYRSGRDVRIKCLNQLRPLGFCAPDDLRERFRDVTVAALTGDAAGLRPNPNGDVVTYATKLAMHTLGRRVVDIDADCARLNSELAALVRATAPSLLALHGVGTHTAALLLVAAGDNAQRIRSEAAFAHLCGVAPIHASSGKTVRHRLNRGGNRQANHALWRIVFTRMGSDPRTRAYVERRSLEGRSKPEIMRVLKRYVAREVYRHLPGV

SEQ ID NO: 72434 - protein, 464 aa, unidentified
MTDKKPWRNRKERKEWARRLQSEDPGLEVVHPHAAGIDVGNGMHYVAVRPDRDPQPVRRFECFTADLNRLADWLQQCGAKTVAMQSTGVYWIPLYEILEERGIQVFLVNARHTKNLPGRKSDVQESQWLLKLHTYGLLNNSFQPPSEIRVLRTYWRQRGEHVRGAATCVQRMQKSLTQMNVQLANVISDVSGLTGQTIVRSIVAGEHDPRKLAELSDPRIHASREEVAKSLEGNWRPELIFVLQQEVAMYDTYQQRIAECDQRLQEHLASFANIIPLQPTEEEPKRKKTKPAKNAPRFELRSELQRVTGVDLTRIDGIDVMVAQTLISEVGLDMSRWKTEAHFSSWLGLCPDNRTSGDKVLARGTRRVINRAATALRMAAVTLMRSRTYLGAQYRRLRTKLGAPKAITAMAHRLARLVYRMLKYGQQYVDKGAEYYEHRYRRQQIEFLRKKAAKLGLKITLAQT

SEQ ID NO: 72435 - protein, 345 aa, unidentified
MNVTAVGIDLAKNVFQVHAVDARGKVVLRKQLRRAQVAGFFSNMPPCLIGMEACASAHHWGRTFERFGHTVRLMASQFVKPYVKTNKNDVADAEAICEAVGRHSMRFVPIKSVEQQAILSVHRVRQGFVKARTAQANQIRGLLGEFGLVIPQGIGNVAKRVPELLEDASNELPVPFRHLIERLTQHLKELDRQVKEFEKEIIEWHRSSELSRKLEAIPGIGPLAASALVASIADAHSFDNGRQVSAWLGLVPRQSSTGGKPTLLGMSKRGDAYLRTLLIHGARSAILAAKNKVDNTQGWLTNLLKRRHPNIAAVALANKNVRTVWALLAHGREFQADYKSTRMAA

SEQ ID NO: 72436 - protein, 323 aa, unidentified
MRTFHLGIDVAKAKLDCALRRPDGKLRSKVVANNLGGFKALIEWLGKQGAGAVTLHVCLEATGVYWEAVAEVLAAQGMTVSVVNPAQIKAFGASRMVRTKTDKVDAQLIAGFCFERHPEPWQAPSPNEQALRAMVLRLEALQTMRTQESNRLEVAREAVKPGIAEHIEWLDKQIDALAKTIRDHINDDPDLKDKQALLDSIPGVGERTIATLLAFYANVERFGNARQAVAFAGLDPRQHESGSSVKGKPRLSKVGHAFLRKALYMPAMVTLYQTAWGKRFRERLAAAGKPPKLIIGAMMRKLVHVAFGVLKSGKMFNPALHGC

SEQ ID NO: 72437 - protein, 438 aa, unidentified
MQEVEDEPLFCERAAGIDIGKAEVMVTIRVPSETRKGGRQQETRKFGTMRRELLALADWLRCWGVERAGMESTSDYWKPVFFLLERAGFDCLLYQASQVKALPGRPKTDKLDSGWLARITEQGSLAGSFVPPEEIRRLRTHTRYRRRLIQARTAEKERCEKLLEDAHLKLSSVISDIHGVSGRAMLRAIIAGERSPKVLAEMARGVMRRKITRLEEALDCSFFTAEHAFILAMMLDNIGHYTAQIAVLEEKIAGLCEPYERQIAQLDGIPGFGITAAQDLIAETGIDMSAFPTAGHLASWARQAPRVSESAGKRKGKNATGRGNPYIGGTLGETAASAGRTQTFLGAKYRRLCKHMPKKKAQGAIMRSQLVIAHALLSDPEAGYCDLGTGYYEQRAGTRRQARSHVRSLERLGYKVTIEPLTPEADPETGELITRTAS

SEQ ID NO: 72438 - protein, 346 aa, unidentified
MNYIGMDCHITTLDFAVVDEVGRLVKAVRVTTGVKGFMEFVKSVPQPRTVYMEEGTLASWALETCVCFREKLVITDPKKNHWISSSGQKDDAVDAEKLARLARGGYIKEISHPVGQRRRFRELMIAYHDTVRNTTRIKNKIKARFRQNGIRCTGNTVYSQSAREVWRNKLPQDPSVLLILDSHWSQLDQSEQIEKKLVATARAHAKHYPEIKLFEGVPGIGFIHAATISAMLETPHRFADKRKVWMYAGLGLVKRSSGEKIYSEKLSQDYNRLLKYTMKQSVEVAIAVQDNPFRRKYLDMTLLRGIAPHRAKLTIARDMLATLWAMWRKGEKYNPEVRGKTTYKQG

SEQ ID NO: 72439 - protein, 407 aa, unidentified
MRITCGIDWAEAHHDVALVDEVGTVVARARVGTDVAGFAAIVELIAEHDGSPTGTPVAIETDKNLLVVALAGAGFTVYPINPRAVARYRERHGQAGGKSDPGDAAVLANVLRTDRHMHRSLPLISEQALAIKALARQHQEAIWAMNQTISRLRSVLLEFYPQAIKAFPHLKHHAATTVLAAASSPGAGQKLTRRRVEALFHRCGRRNDTQLVDQILANLKMPALRQPDRVEVALALTVEGLVATVAAMRASVEQLEAELGREFETHPLAPVLRSAPGLGAILAARVLAEVGDDPDRFTTANGLRAFAGTAPVTRASGRSHYVKARKVRNKRLGDACHWWAFAALTWSPGARAHYDRRRAAGEHHNAALRNLANKLIARMWWCIANDQPWDDHAAWPAFHSTEKPAAA

SEQ ID NO: 72440 - protein, 521 aa, unidentified
MPKRYRRRNRRRPMLVHKAAGTIHPRVQAVGPEHFGVISIDCAKARSKWMLCDFYGNVLENPAVVAHDRPQLKAAVTRVQQVIGEHHLKDILVAVERTGRYHRPIQQAFTLAGFDTRTVHPFATKQFRQPADPGLKTDDRDLAAIHRCAVNGFALAEAPEEESWRTLKLLVRYRRDLVRKSSALCCQIREHLEAALPGYAACFEKLWTTSGPLQLLRHVTSVQALRQASEAKLKRVLDHHGFRCQERILKRIVAWAKDAADSDLAAESHRQIAVALDDDRMRKAQEIQALERMISSRLARTPYILLLSIVGVNVVSAAEFAGEMGPMHHYPNSRCITGRAGLYPSRYQSDEVDRPNGPLVRCANRSLRAAILGVADNLLRCNRHFRIRAAAWKEAGKDPRGIHVRVGMRFCRMAYQMVGGQQVCRHPAMKDHSWVLQKLLDFHRLHATPAEQLLEDLQAAIEQLPLKTHRDEAMSLTETLDKIQAGRRRGPQPIGEVLVQVLAQLGAKRVQLRKSGVKGPR

SEQ ID NO: 72441 - protein, 355 aa, unidentified
MTSTKYIGMDVHKESISIAVMNAAGKIGMECVIETKASMILQFIAGLRGDLQVTFEEGTSAGWLYDLLRPHVAKLVVCDPRKNASMREGSQNDKIDARRLAELLRLNHLSPVYHGEHGLRSLKELVRSYLTITKDLVRVMTRVKAIYRSWAIPCTGKQVYAPRHRAEWLGKITEPGVRRRAEFYYQQLDALRAVRQQVRRELLAEGQKHQAWKRLCQIPAIGPIRSAVLLGILQTPHRFRTKRQLWTYSGFGIETQSSADHRSVKGQLERAKKQSSIRGLNRNCNHDLKNLFKGAAIVAASKPGPFQEFYTALLSKGLRPEMARLTLARKIATIVLLVWKRGACFDAQHLKPQTA

SEQ ID NO: 72442 - protein, 506 aa, unidentified
MKVQASKPTFTIGYYLIGQYGSNICRQDIGRKRPYRSLLRQRYWAWSFTSKLITMAKVAKRKQTSKGLRLEVVNPNAAGIDISPKEMQVCVPSDRDGECNRTFGVYTEDLHYIAEWLKACCIDTVAMESTGIYWLPVFRILKESGFEVILVNASDVKNFSGRKTDASDAEWLMMLHSYGLLKPCFQPENIARTMRNLVRHRDNLIRSASREVLHLQKAMEQMNLKLDNVFSDILGKSGQSVIKAILNGERDPKVLADLADPRCRTSKEEIEKSLQATWDEEHLFEMRQSDSLYQFYQQLIAECDAKINEIAMQYSATVDAPKTELLRSEKYNAKKNRIGFDVEKVAFELWGVNVMRIPGMSRGALLRLVGELGADFTTKFVDVKHFVSWANLVPNNKISGGALLSSKVPKKKNPVGMIFRQTANTLKAAKNPLGDYFRHMRAKGGYLQAMVATGKKLASIFYCMVQRKVEYNEKVYCNHRKQELQNKVAYLHKRLQRMESELANCG

SEQ ID NO: 72443 - protein, 381 aa, unidentified
METLHSHCAGLDVHQKEIVVCTYIGNSETELTKEIRTFPTLTKHLFEMLQWLEELHITHLAMESTGIYWKPVFNILEDYFDITLANAQRIKNVPGRKTDVADAEWIAKLLRYGLIEKSFVPPSDIRELRDLTRLRKKMIGNMTAEKNRIQKTLECSNIKLGSIISDVFGVSGRKLLTRLVEQGYVNSHEVEENIHGSMMPKASQITESLFGTLNPHQIFLIRQSWNHILFLEESIQQIEEKIVQLLSIYQEQVELLLTIPGVKKHAAASIIAEVGVEMRQFPSAQHLASWAGLSPGNHESAGKKKNSRTTKGNPHIQSMLCEVAWAISRTRHTWLSGKYWSLAARRGKKKALIAIAHKVIKIIYHILDQRSGFIEYSKVLS

SEQ ID NO: 72444 - protein, 471 aa, unidentified
MIYSVGIDLHQGQHRARCLDDRAQSCDGFSFQTTPEGLAVLEERVFRDGANPTIVLEPAGLPWKMVAVYLRSRHPDCRLVKAKTQKVAALRRYLRGPVKSDRLDALTLAKMPFIDPEKLVDIYLPPAEIHALQRLTRQRKRIESDISGRKIRISAIVDGYLPGVRRAFNDAWASPVRAFLRSQLNPYAVAREGEEALHTFLSKACPRSKWSRAETHLVFLACHSVADVCELSRSAGTVNEEFFTDLQDEIARELRLMESEEAESESLARRIMELYRKLHPSDNLTSIPGVGEHTAPIFLSAVGDPARFHSQSAFANWEGVVPGARQSSDVEAKGLRMTKAGPSIMRMGLYQAGDIGRRWDPQLAAVYYREMVYHGKNHRQAMGAVMSHLGARVFTVLKEDRPYELRDTEGSLISKDDARRLILDKYQVPEEIRRERRRRNPKASNTVGVPRKDREMATYRTNEAAKAPQPV

SEQ ID NO: 72445 - protein, 314 aa, unidentified
MAKRTVIVGIDIAKGWFDVAMLQSGESLRLNNDPDGWAELIKRLRCFKVVAIGLEPSGGYERGLGAALHKAGLMVRNVNPHKLRSYARAWSVLGKTDSLDALMIARYTAALPTQPLRVDPLTRQLADLVLARRQLSDDKVRLGNQLEQLGDGLVRRLMLARLRCIERDILVIDKHLKDLVANDPELARKDKLIQSLCGAGPVLSHTLLALAPELGSANRRQLAALAGLAPYPFESGVLRGHRSIWGGRTEMRRVLYMAALTASRANPTLRAFAQRLTAAGKAAKVVLVAVARKILTILGAMLRTNHSWSPANPD

SEQ ID NO: 72446 - protein, 386 aa, unidentified
MICVGIDVGKNIHYACVMNDRQKVLREPFAVPNDAAGFAKLFTAIHKHSKDKVVVGLEATSFYGENLITFLAGHDYKIALINPIQTNAIRRGNIRNAKNDKIDSRGVCKFLATNEYRLLQPGELQMMELRGLCRFRQTLRKTTCRLKTQLTSYLDLSFPEFHLAFSSVHGKGAYAALMEYPTARTMAKANVVKLSGVLQKASRGRLGRARADDLKRLAKQSIASDSRDMSLQIQMTIPQIRLVEEQVKAVEKQIEAIYDKVGSIIRTVPGIGTITGAIILSEIGDIKRFSNPGQLIAFAGLDPIVNQSGNYNARFTRMSKRGSSLLRYALVRSAWHVSLRNETFKKYYQEKLTQKGGHYRTLGHVAGKLCRVLFKMLKDDMAFNLP

SEQ ID NO: 72447 - protein, 385 aa, unidentified
MRDKTIVPREYDVFGGLDVDKNSIAATFSGHQGFIRSLSMPYKVEDLLNHVRNHFADQKVAFAYEAGPTGYGLYDGLAAQGYTCLIAAPSMIPRAPGQRVKTNRLDSKALSESLRGGQLKSIHVPSPIYRELRHLTQLRDTMMSEAVGMKQRIKSLLLFEGIAFPPAPAGSQWSFIVKAKLRKLSCSNTVRFKLDQLLDSLEFAEKQIFKSTKEIRRFCQTDPELAQCIEYMMTVSGVGWIVASQLLARIGDWRELENIRQLGGFLGLVPMEHSTGDKTDRGPITHTGDGRLRSKLIQAAWSAIRKDGELREFFRSVCQRHPRKVASRVAIVAVARKLSVRLSVVLMKQRPYEVREKVHSAPLTQEETSPQGTTRRLAEPGEKNS

SEQ ID NO: 72448 - protein, 351 aa, unidentified
MGEVIKLGIDVHIEKYVVVMKIDGSAPQRAKRFTPEQFMVWAEELTEKCEQLHSCYEAGPFGYTLHRRLTKMGVTNHVIRPINWDEHGKNVKTDARDATQMVLCLDGYLRGNHRSFSTVRIPSETEEQHRSTTRQRQSLIKERKRLAAKARGHVMYYGGRLQGEWWKPRRWLGLSEQLEPHLLELLSALRTIIVVVEEQIVRLEKCLEEMTEVALPKGMGSVIFQQMEREVCDWSRFETRKQVGGYTGLCPSEDTSDKRRFQGSITKHGNPRLRHMLIECVWLLIHWNPDYRGIVKWRDRLLEAKLTKASKKKIVVAIARQFAVDWWRIRTGRITPDQLGLTMKALPATSA

SEQ ID NO: 72449 - protein, 329 aa, unidentified
MKVQHIIGADLSKKSIDLVCHLLKSHVQIENTITGFKGLMQWFKQQKLNASETMIVMEHTGLYSYCFEKFLHQHQIPFCKVNALTIKRSMGLVRGKTDKLDAARIAAYGYEKKDKLTIDVPASDSLRRLQMLHSTRERLVRHRASLICSIKEYKCIGISDKDVIMQTQLQLIKNFDKQIEKLMIEIETIIENQKALKQNFRLLQSIRGVGKVVALVTIIKTHNFTRFANARKFACFCGTAPFPHDSGTSIKKRTRVSHLADKQMKSLLDLSAKSAIQYDKELREYYLKRTEGGKSKMSTINVVRNKILYRMFAVIKRQTPFLENYLQAA

SEQ ID NO: 72450 - protein, 317 aa, unidentified
MNQQLNEVVCFGVDVASTHLDIAVHGVQQVQRIPNDERSINRWLKTVARSSRLAVEATGSYHQLLARLAHEHGLQVFVLNPRDVKRYAQGLGQRGKTDRLDALVIARFIHREHQELRVWQPPTKEAQRLDDLLRTRALLQKQYAAQKQSLVHRPELEQVIEDVLQSMQAALTRLETLIAQAARNLPEGRAGLRCIMSIPGVGVLTGAALLQLFTRAKDASCDAVVALTGLDPRPMDSGSRKGIRRLSKRGNAEMRRLLYNAAMSGARTLTWRGVYERERAKGLPATGALIALARRLVRVAFSLFKSHSMFDQTRVCA

SEQ ID NO: 72451 - protein, 314 aa, unidentified
MTYDYVIGMDVGKYFHHACVLDTHGNQILSKRVNQHEQPLRKLFSQYAGKGTNTSAAVYQPNNIGRLTVAVAQDIGINVLYLPGLAMRQLSRIHAGNSKTDVCHAYIIGYAGRNLPKSLRSVDRIEEAFIQPKALNRKWILRLLAKYGGPTKIKRLGKTRFNTFARKHRARNPEPITDTMFITITEQSVQIAGAEYAELGVAMSVKEALLKLESRKEIEAQVIELSQEIPQTQLLLSMPGIGPRTATHLLMTVGDMSDFPTAGLLASYAGLSPRTNQSGTSIMSNSLNRAGNKKLKNTLWQSSFASTRFHERSR

SEQ ID NO: 72452 - protein, 339 aa, unidentified
MWYSGIDQHKRDSVITTYGPDGPRVKQARVANTPLVMAQYFAEFPGPHQAVVESTGGWYWLADVLAPLGVELVLAHATRLKAISAAKVKTDQVDSDVLALLLRADLIPVAHMIRPEQRGPRDLMRARLRLVEKCVSAQNSIDRLLEKFNVPTVADLEACYQLQASCHTAQLQLLTEQITTVERALYPHLIPNADVQRLLWIPGLGKVNAFTIYTEIDGITRFPSPGQFFSYSRLVPGADNSGGRTRHRSGSKAGNRYLKLAFSHAGIRAVQYNPEIRAFFQAKARRKPIRIARTLVALELARIVYHVLTTQEDFNGRFKNQPLSHRKHAQWPRRASPPA

SEQ ID NO: 72453 - protein, 403 aa, unidentified
MNAVGIDVSKKKSTVAIFQPGEKVILQPRDFRHPQSDINSLIQIIKDLDGETRVCMEHTGRYYEPVATWLSDADIFVSAVNPILIREYGDDSLHAPKTDKADARKIARYALDRWAKLKQYGHMNETRNQLKTMNRQFGFYMDQKTAMKNNLIALLDQTYPGANAFFDSPARSDGSQKWVDFVYTYWHVDCVRGKSLKAFTEHYMNWCKRKGYNFSAAKSEEIYNSSADLIAVFPKNVNTKMLIRQAVELLNATSRTVESLREEMDRTAATLPEYPVVMAMNGVGPTLGPQLMAEIGDVTRFKKRGALTAFAGVDPGKNESGQYTQKSVPTSKKGSPHLRKTLFQIMESLIKRSPEDDPVYAFMDKKRAEGKPYYVYMTAGANKFLRIYYGRVNEYLSNVSESE

SEQ ID NO: 72454 - protein, 363 aa, unidentified
MSNYSKKTSDKYIGFDIDSKKVASCVVQAGFSERYRTISSDIASMRRFLEKQRSDGSRVHVVFEISGMAGYIYDSLIDCVDSITVANPLKMTWIYRTAKKNDRIDARKMAVLLSIGEIPEVHMPSSEVRQWRQMIRHRRNLVNKVTSVKNGIRALLKSRGYSRPLHGGSLWKKVNRLWVRGLAEGSWLWSVQLVGLIEELEMLEGQVNRATETLDGYLSKHAGGGLLMSIPGVGPRTAEAVLAYTDDVGRFANSKGFCSYFGLTPKLDESGGSRRIGHISKEGPSVVRWVLVESSWKVVRYSPAMKRFYERVLAGQKGRKKIAIVAVARKLLSIMRAMMVTGELYNERLVDGTEAYVEVRRAG

SEQ ID NO: 72455 - protein, 343 aa, unidentified
MGDVITIGLDIAKSVFQIHGVDADGAVVIRKRVSRAKVLEFFAAVPRCLVGIEACPSAHYWSRKLEVLGHTVRLMPPSYVKAYLKRSKNDANDAAAICEAVTRPSMRFVSTKSEQQQSGLMLHHSRRLLVRQRTMLSNAIRGHMAELGIISAKGRNGTAELLEVIANAKDNCIPAAARFSLEVLARQYIAIATEIGVLEKRIHAWHRSCEESRRLEEIPGVGPIVATALIAEVGDWKAFASGRSLAAWIGLVPKQHSTGGKERLGGISKQGNRYLRWLLVAGAMAVIRYARRHGTKRLWLTRIMERRPIKVAAVALANKIARMAWAIIVRGERFREPRLLLAA

SEQ ID NO: 72456 - protein, 409 aa, unidentified
MNKVDIAPFEVFCGIDVGKTSNHIVALDRHGDKPLINRKVPQEEAEIRAALEEAVDFGLALVIVDQFGAFGRLVVGVARSMDIPVAHMPPRRFRQVAETYGEDKFDEKDAFILADASRTTPRNIEFVGNRAESMAEIKVLSSRRDDIVEERTRCYNRLHDFIHQVSPPLEELFSKRKLHNDLEIRLIARYGGPIGFRQAGRARASTWAAELKYHCVDGPKKVEQVFDVLDRQTVMLPGAAVIEEQIRSIASRIIELLAEEKRLNLMIEQRAKMIPEVDLLQSIPGVGPVYAALIAVEIGDIGRFRDSNHLASYAGVAPRKEESGTSVHKRRKRKGGNRRLKNALMQSSQRSVQCDPLARAYYERKRAEGKKHLQALRALARHRVTVIFAMLNEGTFYEPPVEVDENGRG

SEQ ID NO: 72457 - protein, 336 aa, unidentified
MNEITTVGIDLAKHVFAVHAVARDGRVVLRRIVSRSKLLETVAQLPRSLIGLEACSGAHEWARRFQSLGHTVRLMAPAFVSPYRKSGKNDGNDAEAICEAVSRPNMRFVSIKSVEQQALLTLHRVRQGFVAERTAVVNRIRGLLAEFGIVLPQRIESVRRGVHESTAGLPDIACRVIRDLQIHLQGLDERIDSYDRELKHLARADENARRVQTIPGIGPITASAIVASVGSAKEFRNGRQFAAWLGLTPRQSSSGGKTRLGHISKRGDAYLRTLLILGARSVLQNVARHGDRLSRWVRTIRDRCGYHKALVAIAAKNARILWVVLAKGESFRAQPV

SEQ ID NO: 72458 - protein, 413 aa, unidentified
MSLFVGIDVSSSDFKVRILDERGNEPVKKLRALNDQPGCEQVTRYLSEACAKENEDRLVIGLEATSVYSWPLQMFLAEDPCLAPLQPQIYSFNPKVVANFKKAYVDLPKNDWIDAWVIAERLRFGRLPEGSQVDFRYLPLQRLTRFRCHMIEMISREKNYFLTNLFLKFSTLAQGTVFSNTFGATSESLTLEFFSPEEVAARPLDELIDFLMEKGKSHFEDPEAKARELKEAARKAHRLRGSLLQPINLILATSIETIHTLEKQVKKIDKAIEAEIRHFSNTLITVPGIGPVLSAGIIAEIGDIRRFPNEGALAKFIGLTWRSHQSGDFTADDTPLTRTGNTYLRSYIIQAANLVRQKEPEYKAFYQRKFSESKTHHHRRALVLTARKLVRMVDALLRSNQIYMPHGNRGNAN

SEQ ID NO: 72459 - protein, 361 aa, unidentified
MRRVQINELEFKGQNIYVGIDVHLKSWSVTVLSEHSVLKKFSQDSDAKALHKYLTSNYPGANYHSVYEAGFCGFWIHRRLVEYGINNIVVNPADVPTMSKEKLRKTDSVDSSKLARELRSGTLSGIYVPDDATLEMRSLIRLRSSIVKDTTREKNRIKSLLRFHGIDIPAEFTKHSTGNWSKRFLKWLGEVKHTTEYGKKTLDLHIDQLVRLRGMLLQETRTIRKISRSVPFSETIRLLTSVPGIGITTAITLLVEIDDIGRFGSSDHLASFIGLIPMCHSSGEKDGSGDITIRKHAALRCHVIEAAWVAIRKDPAMTMVYEGYRKRMNVQKAIVKIARKLVNRIFFVLKRKQEYVPCVVK

SEQ ID NO: 72460 - protein, 469 aa, unidentified
MDLLKLPIYTFYCEFLDMEERFMKKVFIGIDVGKFKNSISIIDTEGNPIIKKGLSIENDYYGFARLEEQIDLIINNYGVTYDDCIAGVESTGHYWFNLRDYLKDIGIETVMIKTDSVKHRRALEEGQKGKNDTLDARVIASCLRNGNYVYIRENERELRALQKLTRMRNDISDELVALKNKIHRCIDICNPVFFKIFENLNSKTGVALIKLYPSPQDIINVELDNIKKELGEIVDKPNMRMVSLYKEECEIWSRLIKEPSHAEKVEMTAYIDKFLLQNKSKEHLDKQIKEIAKNIIPLYSEFQKIKGIPLIQLISVLSEIGDIRNFKNTRAILAFLGLSLKGNASGKYIGERKINKAGSRIVRKHLFNIMDTLIKHNEYFRIAYCYYKSYNHKNPTKKRSMQIAVMCKFVRVMYGMLKYNTSFDYKEMLKGYYFGDCNMKVFKEEFEGEKGTKKIENYKLAYSIFINYS

SEQ ID NO: 72461 - protein, 353 aa, unidentified
MKYVGLDWAYRTAQWCALDPGGEIAGEGRFAADRDGLARLVLELGDEVTACLEMMSGALWARDELVACGWQVQVADARKVKTVAPLAAKTDKVDARLLAELSRRQLVPALWLPSLDDRELRERLRRRMHLVRLRTSAKGRIFGLQTQWGIRISLRRLRRADGMTLLERAGMPAVWRHSISECLALIDFLDARIVPLDAELRPFAQADPRAVLLDTIPGVAELLALTIAVEIGEISRFAGPQKLVSYGRLAPRVRQSGEGRPHTGPLNKSGSRLLGWAAVEAAQQAWRESNPWHQLYLDVSRRSRNHNSAKAAVARKILIAAWHMLSRNEPFNPAARRTGATSVPASSRLALAA

SEQ ID NO: 72462 - protein, 400 aa, unidentified
MKTVLSVDVAKNKSMIMLMNNDGEILIDTKEIKHNLGEFEKVKEEIEEINPENLTVFMESTGTYHLPVERYFKENGFNTLVINSLTTKNNFDTIRKTKTDKKDCYRLAKLFFVNEVEYHEISKKDLYANLKAMTRQYFYLTQVNIRCKNRYKRLINICFPEFEGFFARNRIYEDTALNFIKAFPHAYIVREKRIDALYNNLRKVDARHDYYYKRLARQLKDTAMNSFPGVDKDHADVKNLSDMASILQENNKLIDEIRKNMIELAKQSPYFEIVNSFYGIGEVLAAELLGELGDITRFDNHKQLIAFCGLDPAIVQSGKSINVHGAISKRGDKYARWILFNISQMVVKLGHQYPSHPVYNYYLIKKAEGKHYYESLTACSTKILRMLYSMCKNNKRFLEE

SEQ ID NO: 72463 - protein, 340 aa, unidentified
MSLYGGIDLHANNSVIVLLNEQDEVIYRKRLPNTLPTILEQLAPYHTEVKGLVVESTYNWYWLVDGLMEAEYRVHLANPAAMQQYSGLKYTDDDSDARWLAHLLRLGVLPAGYIYPKAERAVRDLLRKRAHLVRQHTANVLSVQNILARNTGVRFSGKRIHELTKRELTTLLAEETQVLAVTSSLVVLDCLRHQIKMLEQSVHKRLHHTPSYEQVLTVPGIGPILAQTITLETGAISRFPTVGNYASYCRCVDSTKLSNGKRKGTGNVKNGNPYLAWAYMEAAQFAMRFQPEAQRFYQRKLAKSRHNTVLARKAVAHKLARACYYLMRDLVPFEATKAFG

SEQ ID NO: 72464 - protein, 346 aa, unidentified
MEIIRVGVDLAKSVFQLHGVDGHEKPVWRRSLRRGQWMQELQRCVSPGAEIGMEACAGAHHWGRRLEALGYRVKLIAPQFVKPYVKSNKSDRNDAEAICEAMSRPSMRFVELKSVEQQDIQAAHRVRAELIKQRTAKVNQIRGLAGEYGLVASPQVSYLRKAVPQWLEDASNGLSDRFRRLLAGLAEDLRGLDRRIEELDREIASLARESPVAQRLLTLRGVGPMIATALIAALGSGKAFSRGREFAVAVGLTPKHHGTGGKERILGISKRGDAYLRQLLVHGARAAVRTAPGKDDNLSRWIQGLLVHKHSNVVTVALANKTARMAWALVRHDVDYDPALAASTSR

SEQ ID NO: 72465 - protein, 412 aa, unidentified
MDVIHERCAGLDVHKLTVVACVVTPGPRGRPHKEVRTFGTTSEALLQLADWLRERGVPAAALEATGIYWRPVWNVLEAAGVDLLLANPQHIKAVPGRKTDVKDSEWLADLLRHGLLRGSFVPPRPQRELRDLVRYRTALLQERTAEVNRLHKTLEAANVKLGAVASDILGKSGRDILAALVAGVTDPTALAELARGKLRAKLPQLERALAGRFGPHLRFLVAQQLAHVDALEETIGRVSAEIAARLQPHAATLERLDAIPGVGRRTAEVLLAEVGPDVARFPDAAHLASWAGLCPGTHASAGKRRSGRTRKGNPWLRTALVEAGQAAGRTKHTYLGARYRRLIARRGKQRAALALGHAILTIAYALLRRPAATYRDLGEHYVDERARQALERRLVQRLEGLGYRVALEPRTA

SEQ ID NO: 72466 - protein, 407 aa, unidentified
MTRYYLGVDWADTEHAVWVGNEAGEEVMARSVEHTPAGLGEFGRWLYERQAEGIELWAAIEKPEGRVVDFLLDHGVVVDPVNPKALDRARDRFRMSGAKSDGFDARVLAEFLRTDHPHLTPLMPSSARAQELKLLTRDYQRLVRQQTRLVNQLTATLKEYDPRPLECFEELTSAVAREFLRSYPTPEALATLTPKAWQRWARAQHVSQARTVELWEALRAPQLSVPAHVVRAKARLVRVLVDELETVVRAVNEYRKAVDDFFTAMSEAEWARSLPAGQSGTTVPTLWAELGDAPGRWQGLRHLQAQAGAVPVTERSGKHQFVHFRFACNTHLRYAVHLLAFLSLRQSEWARAYYQRYRARGHTHHQAVRALGAKWLKIIFVMWDRQVPYNENDHLAMIARQQLRQVA

SEQ ID NO: 72467 - protein, 341 aa, unidentified
MSEAFIIGIDLAKRVFQIHGADAAGKVLYRRKLSRPQFNKFLNEHPSCIFAMEACASAHHWGREALAAGHEVRLVPARYVKPFVKRHKSDVVDAEAITEAAMRPSMRFVPVKAPEQQAQAMLFRTRELFVRQRTQLINSLRGYLAEFGIVLRLRIRNADILKREVEEQAHKLPDEAKRLAERLLAQIETISAEVEGLDHSIKMHAKTSEETRLMQTMPGVGPMSVIAISAFCPPAKNFRTGRDFAAWLGLVPRQHSTGGKERLGRITKMGQKDVRRLLIIGAMSVINSIERWKRCAEPWSARMLETRPRMVVAVALANRMARRLWAMLMTGQIYRIRGAVA

SEQ ID NO: 72468 - protein, 346 aa, unidentified
MTIVEERTAITGGAGTHSEVHVAAALDPVGGLLGTRSFPATASGYAGLLGWLGKFGDVALVGVEGTGSYGAGLARYLAARGVRVVEVDRADRQDRHRNGKSDPLDAVSAARAALSGRAAGMPKGRDGAVEAVRTLMVAKRSARHERTQATSQARALILTGPGELRARFAGKRAAALAEAVAALRPRPGDAAEYAVRVALRELGRRVEFPGAQTGRLDDLIVPLVTARAPGLLSLYGVGPDTAALLLIAAGDRPERLRSEAAWAQMCAVAPIPASSGKTSRHRLNRGGNREASHALWRIVITRMSAHPATRAYVRRRTAEGLSKKEIIRCLKRYVAREVYPYLRPGA

SEQ ID NO: 72469 - protein, 402 aa, unidentified
MNAVGIDVSKGKSMVVIMRPFGEVVASPYEVTHTGSELSELANTLRSLNGETKVIMECTGSYYLPVAYALHEAGLFVSAVHAKLIHGFGNNTIRKVKTDKADAIKIANYGLSHWLELPRYLPEEDIRLMLKTFSRQYDKYSKLKTMLKNNFISLTDQTFPGVNTLFTSPPRKSDGHEKWMDFAFKFWHCECVCTLTQKAFTERYRKWCQREGYHFSEEKAKDIYISSLGHFSVMPKNDTTKLLITQTVSQLNAVSENLAVIAAEMKRLAEQLYEYPVVMEFYGVGGILGPQLMAEIGDVIRFRSKGSLVCFAGLEAPPYQSGTFESANRHISKRGSPHLRKTLFLVMDCILKGKPADDPIYQFLDRKRAEGKHYYSYMTAGCAKFLRIYYARVNELIDKQGD

SEQ ID NO: 72470 - protein, 347 aa, unidentified
MKIIGCDFHPSYQQIAMLDTETGELLEFRLEHEKGEARRFYERLQGPVRVGMEAVGNSQWFEQMLAALGHELWIGDAGEIRRLEVRRQKTDRRDAQHILDLLLDGRFPRLWVPSAEIRDVRQLLRHRQKLVEWRTQVKNQLQHLALNQGVQRKRKLWSKEGRAVLEQLPLQGWTARRRAELLGMLDRLEEQIKELDTAVRAEAERRPEVRLLMTHPGVGPVVGLAYALTIGPVGRFSRGKKVASYLGLIPREHSSGGRQRLGAISKQGNTMMRTLLVEAAQNAARFDEQLRRDYRQLAARKHKALAKVMVARKLAVRLYWMLREQRPYVPPSVARMQGGSSHSVVEG

SEQ ID NO: 72471 - protein, 375 aa, unidentified
MKEKLRFLGLDVHAETIAVAVADPEGEVRSLGTIPNRAESIRKLIRKLGPTAKLRACYEAGPTGYVVYWQLAELGVACEVVAPTLVPVKAGDRVKTDRRDAEKLARCYRSGDLTAVWVPDEGSEALRDLVRAREAAKQDQTRARHRLSKFLLRSGQRPPSGVRPWTRPYLIWVAQLRFTQIAQESTRQDYLHEVEHMRERVARLEQAITEAVKLASPSLQQVINDLQALRGIADISAVTIAAELGQVSRFDSARQLMGYCGAVPSEDSSGKRTRRGGITKTGNAHLRRIVVEAAWSYRRPPGIWYGLRRRQESISEEAKEIAWKAQHRLHKRYIRLGAAGKDQRKIVTAVARELLGFIWAIGTKAETISRQQLAA

SEQ ID NO: 72472 - protein, 333 aa, unidentified
MQYYAGLDIHKKNCQAIICTEKGNIVKKGKIPTDPEKIQEFFQEFKELTIAIEACNTWEHIFETLESQGHQVALAHPMKTRFIAESRVKTDKVDAEILMHLLRTGFLPTSYIPKKEIRDLRNLVRQRIFLGRYTTRIKNKIYAELLRQGIKYKKGPTLFKGIGIKWLHNLKIPSVKTYLNLYESAKKEIKKLEKEFKKQGKQYKETQLLTTIPGIGTYSALIILSEIGDINRFSNEEKLFSYAGVTPSVHQTGQNTYHGHITKQGSKHLRWILTETVRIHLIWTARHMVETKISQFYQRLCKKKPRNVAATAAARKLLQIIYHMLKNKNEFRG

SEQ ID NO: 72473 - protein, 408 aa, unidentified
MESCFHYFAGIDWGSEKHRVCLMDREGRTLEERWIEHSGSSLAELTGWLRQRTAESPAALAAAIEVPRGAIVETLLEQGFTVFSINPKQLDRFRDRYSPAGAKDDRRDALVLADSLRTDRHCFRAVRIDEPAMIRLRELSRLEDELGEELNRAVNRLREQLHRFFPQLLQVCASADEPWLWALFEAAPSAARATRLSQSKIAGILREHRIRRLDAAQVQAALKGKPLTLAPGAAEAAAEHALLLLPRLRLLDQQRVDLARRIDAILKELASAPEGRTEHRDAAILLSLPGLGRKVAATMLSEASQAIAERDYHALRCYSGVAPITRQSGKKKAVVMRQGCNERLRNALYHWARTSVVWNPVSKNTYAQMRSRGHSHGRALRGMADRWLKVLVCMLRNNTLYDLQRRPA

SEQ ID NO: 72474 - protein, 429 aa, unidentified
MMDEDRNWFVGVDWASETHLVCVLDAQGNKSGERSFRHGGGGLAEMAAWILGLTKTAAEAVHVAIEVPHGPVVESLMERGFVVHAINPKQLDRFRDRFSPAGAKDDSRDGHVLADALRTDPHCLRRLAPVDPTVIELREWSRMAEDLTQERTRLANRMREQLWRYYPQFLELADDIAHPWLLELWALVPTPKKAQRVREATVAKLLKRHRIRRIDAVGVLDRLRERPIVVAAGTAEATTAHIKTVAQRLALVNRQLRQAHHRLDRLTERLGAETEPGHDAEQRDVTILASLPGIGRIVLATLLAEAFDPLQRRDYHALRCLGGVAPVTKRSGKSKIVIRRLAAHRRLGDALYHWARVAIQHDPVSRAKYAALRQRGHGHARALRSVADRLLAVACTMLQNKSLFDPNHPRHNNVAPSSRGYSPAAVTLD

SEQ ID NO: 72475 - protein, 399 aa, unidentified
MKESKKKKEVLKYSVGIDISKDDFHVCVSGIDSEQRVTVRGTRSFKNMSSGHAQCLSWAKKFNKEQVPMVFTMEATGVYYEELAWHLHLEKEHVSVVVPNKAKKYLQSIAKSKNDRIDSIGIAQMGAEKQLKQWIPLTDSIYELRTLTRHRESCSKQRTATLNRIHALEHGRVKIKPVLKSLKSSLKHFDKQLEEMDKLIKGLILSDPLLAKQCLKITKVKGIGITTFAIAVAETNGFAAIENHRQLVSYAGYDVVENQSGNHVGRTRISKKGNSRIRAAMYFPALQAVLNEEPPMVNLFERVYGRTGIKMKAYVAVQKKMLELIYFLWIKDEEYDPNRNRTSGNDEPKLLFSQQPVEPVTLEKEVVPMKTETTQDRLPCNESPEVLFSQGQIYKKKLL

SEQ ID NO: 72476 - protein, 399 aa, unidentified
MFVGIDWATDAHEVCAVDASGKVRHRATVEHSQDGLDQLVRYLGRWAAGSELLVGIERPEGRLVDRILEAGYPILLVPTFAMKDLRRRYAIGGAKSDRGDCYVLADVARTDGHRLRRLEPLSAQTRALRAVVRTREDLVCQRKGLANQLRATLEAYWPGAAAIFADVDSDICLAFLERYPTPESAARLSQTRLASFLTKAGYSGRRPPAQLLARLTAAPAGVVGLEAEARADTVRAMVRVLRALLVSIKDLDRSVVAHLDEHPDAKIFTSLPRSGQINAAQMLAEWGDCRQAYPQPDSAAMLGGLCPVTHASGKHRDVSFRWACNKRLRQAMTTFANNSRRASPWAAEVYRQAIARGCDHPHAVRILARAWTRVMWRCWQDHTPYDPALHRAARRLKAA

SEQ ID NO: 72477 - protein, 344 aa, unidentified
MKFIQFIGIDVSKKTLDASIFVAGEVINKFPHIQVRNDKQGFKDLFRWAKEQGVKTKDTLFGLEFTGYYSDALEQFLTKKQISYAMLPTTVVKHYQRGTHDKNDKIDSAKIADYLFRFNGTECIKLRVLPSKALQKLKELKSERKFLVQNRVGCECRLQVAKSKSEEKHMQKLIDLYKEEIEQVEKEMLDVVAQDPDIYTTYRLLNSIPGIGFVNAINTIANTQNFTAFETARQYAKYVGVAPSEHSSGTSVQWRRRPSPHADLQAKADLSMAALHAIELSREMRQLYERKLGNKPKDKDMQKKALNAVKFKLIREMFSVAKQARNFELRGLDKAQAEAHSTEE

SEQ ID NO: 72478 - protein, 361 aa, unidentified
MSGTMTWVGFDVHARSTHGAAIDTMTGELSRLRFGPGIEGPLAWLAELPGPVRACYEAGPTGFGLYRAATAAGIGMQVIAPGKTPRGPSDRVKTDRKDAELLARLLLAGSLTRVVVPPPEVEAARELTRSHDACRRDLMNARHRVSKMLLRHGRVYPKSTTWTAEHRRWLSAQQFPEPTSDLVFADLIASVDGLTSRKAAIALSLSEVATDERWWPTVSRLRTFRGIDTLTALSLHLELGGDWKRFERAPTLSAWLGLTPSLSQSGESSKQGAITKTGSTLARRLLVESAWHYSRQPRLGATLANRQAGQPDHILAISNRAQQRLFKVNRAMKARGKPHNVVVVACARELAGFLWAAVTAD

SEQ ID NO: 72479 - protein, 391 aa, unidentified
MIFVGIDVAKDTHYAAVSDDSGAVLVKPFAFQNNAEGFCLLLKKLSEFDRSKLLIGLESTGIYSENLICFLYESGFRLAVINPIQTATLRKTAIRKTKTDKVDTMLIIKSLMVNSYRLYSQRDADSLKLKTLCRFRQNLKKSKARLKIQLAGYVNLVFPEFGKFFKSGIHIAASYALLKKYSSPKEIAALRTSTLCTLLSKASHGRFGKDTAEALKSLAISSVGVKNPYISIQIAQTIAQIELLEQQINDLNSAIEEAMESINSVLMTVPGIGAVNAACILGEIGDIKRFSKPCKLLAYAGLDPTVRQSGQFTAKSTRMSKRGSALLRFALINSAWQLTLNDTTFKAYYDLKRSQGLNHYGALGHVAHKLTRVIFKLLTSDTPFIPAKLVA

SEQ ID NO: 72480 - protein, 457 aa, unidentified
MARRSKSKKSGRPSKLNIIHAQAAGIDVGSTFHVVAVPPDLSSEPVQAFQSFTGDLYRLANWLVEIGVTTVAMESTGIYWIPVFDILEAHGLEVLLVNARHVKNVPGRKTDVSDAQWLQQLHSYGLLRGSFQPTQEWAALRAYLRQRERLIEYAASHIQHMQKALMQMNVQLHHVISDITGVSGMKMMRAIVAGQHDPAELATYRDARCQASEETIREALTGHYRPEHVFELRQALELYDSYQARIDACDQEIEATLVFLQDDTISMETLPAARYKKTRKVNEPKFAVREALFGVLGVDLSQIHGFGAYTVLKLVGECGRDMSQWPTVKHFTSWLTLAPSNKISGGKVLSRKTRRSANRAAAVFRLSAVNVGRTNTALGAFYRLLASRVGKAKAVTATARKLAELFYNTLRYGMAYEDPGASSYEERYRERVLKGLRRRAKEFGYELTEMGTAEGVA

SEQ ID NO: 72481 - protein, 347 aa, unidentified
MVVIGVDPHKRTHTAVAVDQVGRKLGQVTVTADEAGLLRLWAWAQRFGDRRWAVEDGRGVAGRLVRTLVGMGAAVVWVPPKLMAQCRASARSRGKSDPIDALAIARAALREPDLPAARLDQVALDLRLLTDRRESLVAARTAAISRLRWHLHDLAPGLDAGMRVLTGRRRQLTLVDAVAALPASVRRDIALDVLADITRLTEQIKLIEQRITELVTPIAPTLMAIVGINVLGAAKLIGEVAGITRFRSPAAFAMHTGVAPIPVWSSNKPQYRLNRGGNRQLNTCLHRIALIQLIHHPPAKTFRDNWTANHPTATKKAAIRALKRHLADVIYRALQTDHQHQPATAAA

SEQ ID NO: 72482 - protein, 328 aa, unidentified
MKRTTKYVALDVHQATTVASVRKDSGRVIARSVLPTDGGAIVEFVRGMRGAVHVTFEEGTQAQWLHDLLAPLVDRVVVCDRRGAPRHGNKGDHVDADQLAELLRRGGLRAVYHGSAHRAGLKELTRTYQNLVEDSTRVMLRLKALFRRRRAVSGRRALRRARCPAAAAAQGQGRHGHRGAAGSGLAGAADHPVLGPVRVALLLATMQTPWRFRTKRNLWAYAGLAVVTRSSADYALVAGQPVRRRRAPMTRGLNRNHNRVLKDVFKGAATAATARPGPLQDVYHNVIARGTREELARLTLTRKLAALTLRLWKKGERYDPTKLTTAAR

SEQ ID NO: 72483 - protein, 342 aa, unidentified
MKYIGLDCHKKFDHATMIDTETGEVKAKRLAHVKEDFAEFIGERSDTRLVMESCWNWCKTYELVKDLVEEVTLAHPLKVRAIASAKIKTDAIDSRTLVKLLMADLVPEAHLRKAGNRIKQRIIRHRAFLIAMRTRLKCRIHDLVDSQLLSRDAVQAKPVNIFSKKGMKWLCSLVFNTEEDRKMLESYLKLLEAINHEIASSNEMVEEIYDKDKDAQLLATIPGIGVTLATLISTEIDGIERFKSSSRLCSYAGLVPSTRSSGGKTYHGRITSEGNRWLRWGLIEAVVPASYADAEIRRQLSDLRRIKSGNVAKTIMARRLLKIVYHVLKEHRAYVPDYPGRL

SEQ ID NO: 72484 - protein, 391 aa, unidentified
MKSSHHIDTPAAGDKDGTLYVAFELSKSKWLIGIVLSGESKMSRHLVAGGDTAAVWQLISKKRAQGEKKLGRPVRVVSCYEAGFDGFWLDRWLAEQGIENRVLDPSSIELPRRARRAKTDRLDLERLMRVLIRHEGGEPRVCSVVRPPSPEQEDARRLSRERDRLVGERTAHGNRIKGLLHGQGVRDVEPRRKDFREQLARACTGDGRALPPRLVAEIVREHDRLMLIAGQLAEVEGLMKAEREAAAPDSRARQVNQLIELKAIGAVGGETLANEVFWRDFRNRRQVGAYFGLVGTPYDSGESSREQGIAKSGNSRARTLAIELAWGWLRYQPDSALSRWFKERVGDQKGLVKRIAIVALARKLMVALWRYLTQGVVPENAIVRAAAPAGR

SEQ ID NO: 72485 - protein, 390 aa, unidentified
MKKNTTAKKNSRARMTADRKQVRQMAAKQRLTIGLDLGDLTSCYCILGEAGEIVSEGQLPTSKAGLDSLFAKMPSSRVALEVGTHSPWVSRHLAGLGHEVIVANPHKLKLITQSVRKNDRIDAQTLARLARVDPQLLSPIRHRGEQAQADLAVIRARAKLMEARTELINCARGLAKPMGERLKKCDADQVSEPLADGLSEALQNVIRPLLKGIEAISQQLAVYDQKIAAIAKRYPEIELLTPVYGVGTLIALTYVLTLEDAQRFGHSRDVGPFLGLRPKQRDSGQSQPELGITKAGDGLLRSLLVQAAHCILRKGAPESDLRDWGIGHLGNGGKNAKRRTLVAVARRLAVLLHTLWANGVVYDPLYNRKAAEAAKAKAAAKARTKGKAAA

SEQ ID NO: 72486 - protein, 339 aa, unidentified
MPSTTVGVDIAKNVIQLHYIDAETGEIINKPIKRAAFLEQFANRAPCLIGMEACGGSQHWARKLMAMGHEVKLMPAKFVKAFVMGNKNDAADARAIWMAVQQPGKSVAVKTETQQAVLALHRMRQQLVKFRTMQINSLRGLLTEYGEVMAKGRAALDKAVPGVLERLVDRLPAILIDTLREQWNGLTQLDKQIVVIERRLQAWMKEDEACRAIAAIPGVGLLTATAAVATMGNAKAFKSGREFASWLGLVPAQTGSGGKVQLLGISRRGDIYLRTLLIHGARSVLFLTKDPGPWLEQMRKRRPLNVTVVAQANKMARTIWAILAHERPYNKSHVSVKPA

SEQ ID NO: 72487 - protein, 323 aa, unidentified
MQGKVQLEARSAAPVYVGIDVCKDHLDVYLHPLGQGVRLANSKDGIRRLKRQLAGRVVALVVMEATGKHHRLTHRSLSQSGIAVAVVNPLRSRLFAEAIGTRAKTDRVDAKMLAILGDALGPQAIPPASEALEALQELVHARNAATAERTALINRRAASKTAFLKAEINRRLKSFDRHIERLAAEIGKRITAEPALARRQEILLSMPGVGAGVAANLLVDLAELGSLDRHAAASLAGLAPFADDSGDVTGKRHIKGGRASPRRALYWAALSAARHNPDLSAFYKRLVINGKKPKVALTAVMRKLVILANTLIKEDRLWINHAT

SEQ ID NO: 72488 - protein, 317 aa, unidentified
MNTLNNQNEINVGVDTGKTQLDIYIRPLDIYFTVENNDGGIKHAIKTLKKHPITRVTIEATGRLEHPFIMACAQANIPFVVANPVNIKRFAGAIGQKAKTDKLDAQLIAHFGEAIKPPLSSLKPEQMRLMSDLLSRRRQLMDMQTMEKNRSQIMPKTISSLIKPILTALKNQIEKVDLKLQKLIKECDEYKVKNDIIQSVPGVGNVVAFNLLSDMPELGCVNNKEAASLVGVAPFNRESGAYQGKRMIRGGRPKIRTEMYMAMMSAIQCNPKFKAIYHRLVAAGKPKKVAIIACIRKLIVIINSMVRDGVMWDPKMV

SEQ ID NO: 72489 - protein, 346 aa, unidentified
MLYAGLDLSRKRLDFHLLDPDGATIEVGAAPPDADGLRGLSERLARHGDAIRAAIESMNGARFVHDRLELAGWQVEIADAQKVKGLAPLACKTDRIDAWVLAELCRRDLVPAIWLPDPLVRAERERARWRLHMVRHRSSLKQRVHAVLLTHGKPCPVSDLFGVRGRRLLARLGLPEPWQGTIEASLRLIDELDREIGECERELRRLGADHRYVPLLCTVPGISWVLAYTIAAELGDISRFPTPRKLAGYTGLCPRVYQSGERDLRGPLAKQGPRYLRWALVEAATHACTAPHYRDRYQQTKARIGKQRGAKVAQVDLARRLSEAIWHMLTSEQPFAPKGATDPLAA

SEQ ID NO: 72490 - protein, 357 aa, unidentified
MSVYVGIDVHRKRSQVAVVTGDGKVELNRNVVNGSEPMLRLVGDLPRGTPVAFEAAYGWGWLVQLLEDYGFEPHLVHPLRCKAIASARLKNDKVDAAILAQLLRADLLPEGWIAPPPVRQLRALLRHRASLVRLGTQLRNRIHAVAADHGYDRTGSYWTGPGRGWLAEIGLPPASREIITDCLAVIDGLAPLIERLDAELHQHARADTRVKVLTTLPGVGEFTALVILAEIGDITRFPSARKLAAWAGLTPTVRGSDRTVRHGHISKQGSAWLRWVLNQAAQTAKRSPEFSATYTAIAKRRGKKIATIAISRKLLTRAYHLLASTQDRPCHPTPRAAGPAHPACNGRPAPGKLAVTA

SEQ ID NO: 72491 - protein, 262 aa, unidentified
MNHYAGIDVSLECSSVCVVDASGKILREARVASEPEALIAWFRQSGFEFERIGLEAGPLSQWLFAGMKAAGLAVELLETRHVRKAFEAMPVKSDRNDARGIAQLMRLGWFRPVHCKSISAQETRSLLTARKLVQSKLLDVENSLRGILRGFGLKVGKTTGQTFAGRIEELVHGHPHLQMIAKALLAVRAVLRTEFAAFEKQTRRMVRSDMQARLLTSVPAVGPIVALTYASAIDDPTRFKSSKQAGAHFGLTPKKHQSGETD

SEQ ID NO: 72492 - protein, 365 aa, unidentified
MQKISTMHTSGKNIFQGQPTIGLDLGDRSSAYCVLNEAGEIVLEHKLATTPEAMKQVFGSMPRCRIAMETGTHSPWVSRLLTALGHEVIVAHAQKVRLITKSRRKDDRLDARTLARLTRIDPELLSPVKHRSAQAQLHLTEIRARAVLVSARTALVNAARGLVKSYGERLRKCGTEQFRWETASGLSAGLREALEPLLREVESLNERIHEYDRRIEQMAKRTYPETALLKQVKGVGELIATTYVLTIEDPHRFRKSRDAGCFVGLQPGRRNSGESEPQMHISKEGDEYLRTLLVQGAHYILGPFGEDSDLRRWGRKLSARGGKTAKKRAVVAVARKLAVLLHRLWVSGEVYEPLRNGQKAISTAA

SEQ ID NO: 72493 - protein, 348 aa, unidentified
MQILKQVLGVDVSQKELEVSLGRLNEDLSIEIYSHRVFRNKETGFEALKKWFLKNTGEEVPVRIVMEATGVYHQKFAHFMVDNDFDTSIVLPNKISNYMRTLDIKTITDKTCSEAIARFGLERKLENWEKTDETYRNLQQLTRERDQIVEERTVAKNRLHAEESEAFPNPGSVKRIKKLITFFNKQEQEIKKEITVILDKNPTVKAEVNRICTIPGMGELTAVIILAETNGFELIRSKKQLTSYAGMDIKEKQSGTSVKGKAKLSKKGNRHIRKALHLPSLSSVKYNTVHKEFYARLVGRHGIKMKALVAVQRKMLELSYILWKNKTEYKADYEEEKRAVIITDSLGN

SEQ ID NO: 72494 - protein, 391 aa, unidentified
MTILVGIDVAKDKHDCFFMNSEGEVLAKPFTIFNNKEGFDFLYEKIQSVSSSDNIKVGLEATGHYSYNIIGFLLNKGLATFILNPLHTNLYRKSLSLRKTKTDKIDSKTIAMMLLSDVSLKSYSDISYHNEDLKSLTRYRFSKVEERAKLKTSLSRLAQILFPELEKLVPTLHMTSIYQLLEEFPSASAIASVHLTRLNNLLSKASKGHYDRETAIKIRDAAKNSIGSNMPAKSLELKHTIKLIRALTIDIGEIEAEISKMMDKIASPITTIPGIGRNIGAMIISEIGDFSRFSSPDKILAYAGFSPSIYQSGKLDNCYAHMEKRGSRYLRYALFHAAKLVCHWDKTFADYLAKKRAEGKHYYVAISHAVKKLVRVIFHIEKTKQAFLKAS

SEQ ID NO: 72495 - protein, 273 aa, unidentified
MKKAEYVIGIDVGDESLSVAVTRGADGAGLVECSVSNDSEGFEELGGWLSKHQATVNNAAFCLEATGVYGERLCYYLCSRGFRVAVEPPLKVKRAFAQSAHKNDTVDARQIAEYGHRFFDELSWWTPPAAILEQMKVLLSAREQFTSQKIANVNALKALERKTVTTRIAIQAYEHAIARLAENIKEIDQEIKRLVKNDDSFHRLITTLTSTPGIGMLLAANLVVMTNGFTRTANHKQLASYTGISPIEHTSGSSVYRRPRSRRPGRPGTTRRR

SEQ ID NO: 72496 - protein, 348 aa, unidentified
MTEALFAGMDLHSNNVLVGIEDETGRRIKHQKLECDLPAIDRFLKPYKSRLKSLAVESTYNWYWLVDGLRALSYPIKLANPAQIQQYNGLKHADDKSDAYFLAELQRLNILPTGYIYDPVLRPVRDLLRRRLSLVQQRTALVLSFKSLYTRTTGQDLKLGRVKSMTAEEAKGLYEHPANCLIAKVQKEQIENLDQSIHRIEKGVLLSARALPCYEKLLTIPGIGRILGMTITMETGEISRFQTPGDFASYCRTVKSQRTSNDKKKGDNNRKCGNKYLAWAFVEAANFSRRYDETCRRWFDRKAAKTNKVVATKALACKLAKAAWHVVSQNENYSPDRMFPESANMPKQ

SEQ ID NO: 72497 - protein, 411 aa, unidentified
MERIVERPGALDVHRASVTACVRVWRERTLEEHVAEFQTTVQGLLALRDWLEALGVKQVAMEATGVYWKPVWAVLEDRLELMLVNARHVKQVPGRKTDVKDAQWLCQLLEAGLLRGSLVPPKPIRTLRNLTRYRKTQINDRQREAARLHKILEDTGIKLGCVATDIMGKSGRDMLDALVQGTTDPVVLADLARGQLRKKTPALREALEGRFDTEHALIVGQILAHMDFLDEAIERLSGAIEEQISPFASQRDLLMTIPGVKQRTAEVLIAEIGVDMNAFPTPKHLASWAGMCPGNDESAGKRRSGKTRKGSKWLRATLTESALAATRTKNSYLAAQYQRLRGRRGHSKAVTAVGHSILTAAWHMLQTGELYRDLGADYYTRQNPDRVTKRLIRQLEALGHHVTVQPREVAA

SEQ ID NO: 72498 - protein, 424 aa, unidentified
MKVTYQTCCGVDVHKSFLVATIVKTTGGIEPSYQKKRFSTFNNSILEFKQWLLDNHCHDVCMESTGKYWVPVFNLLEDKINVVIANPKWVKAVKGNKDDTKDSKWIGDLFRLGLVKGSYIPCKKVRILREYTRYRYKLVSCRSSEKNRYQNALTVCNVALDSIVSDIFGKSSTSIIDYLLEQSGTSINHEEIASKLLRSLKSKEDAVIESVEGYQMTDAPKYRVRLVRAHMDYITAEINDVDKMIENMISSNPDFENAVQFLCTIPGVKRDSAITIISEIGTDMSQFSSSKRLCCWAGLTPGSNESAGKKKSVRITRAGVYLKPALVQCAHAAVKSDKSPYYKKKYESLVKRRGKKRAIIAIARMILTAIYQMLSTGEQWNPSDLYKIDMPVALVEKQKAKAIKQAKKLLQREGILPPDEPLAS

SEQ ID NO: 72499 - protein, 369 aa, unidentified
MQNIMFIGLDVHKATISVAIAQGDRRGEVRHWGTIPNRADHVRKLADKLGSDGRQLHFCYEAGPCGYGLHRQLTELGHDCVVIAPSLIPVKAGDRVKTDRRDALMLAKLHRAGELTAVWVPDTAHEAMRDLVRARATSVRVTGKARQHLQGFLLRHGRTYPGKKGWTKAYRRWLTTVRFEHPAQQIVLQDYIHAVTDAEARIERLTNQIAVLLPSWSLAPVVEAIQAMRGVAFIVAVTVVAEVGDFNRFDNPRQLMAYLGLTPSEHSSGASVRRGGITKAGSSLARRALVEGAWSYRMQARVSRKLLDRIEGLPPAVRDIAWKGQLRMCQRYRHLMAAGKPKVVATTAIAREMAGFVWAIARTVTPAST

SEQ ID NO: 72500 - protein, 344 aa, unidentified
MSKLDMCGIEISAKELVVRLRQQGNLGPCRSFPNTPEGHQSIGACLRRAGGVVRVCMESTGLYGLDLALALSAAEGIEVMVANPRAVRHFAYALMKRSKNDPIDAGVLAEFAARMPFRPWARPSPAALALHALARRLRELVEMQAAEKNRLHAARLSQAIPAAVRRDLQRSLRTQERAVARLTRAARQLMAQDPQLTERFALLDSVPGIAETSAVQLLGELCVLAPDLEARQWVASAGLDPRQFDSGSSVHKKPRISKAGNKHLRHSLYMPALVAVQFDPHLRAFYQHLLAKGKLKMQALVAVMRKILHALNAMFKNHQPYDGSKLFSLQPTPGQEVNSVSVGA

SEQ ID NO: 72501 - protein, 405 aa, unidentified
MSELEKDLVFAGVDTHKDTHTLCLLDHMGRAIGTFRFAADAKGYDALAGKIGGPATCVGVGIEGTGSYGAGLTRRLLELGYCVYEVMVPGRARRKPGRPKSDPADAEAAARQVLARANLSKPKDQSGWTEELRQPMIARDRLVQATSAMINAAKSLIVTAPEDLRRSLEGLSRKNLRSALSTLDPAAGGIILALGSLGKAWDLQDREADAIEERMKRVLEANAPALLTIYGCGTVSAAALAVAGGGNPERLRSEAALASLCGVAPLLASSGKTERHRLNRGGDRRANRALYQIAVTRMSYDQRTKDYVGKRKRDGKSKKEAIRCLKRCNAREVFRALRNPLEIKGPSWKDLRPARQALGITLVEAGKALNVGFQRVSYAETGRLMNVRFLEEYDAWLKSQAKRES

SEQ ID NO: 72502 - protein, 410 aa, unidentified
MDLYCGIDWATAHHDVAVVDADGRVVARGRVGNDAAGFAQLLTLLAEAGDSAEHPIPVAIETDRGLWMAALRETGRAIYPINPLAASRYRARYAVSGAKSDATDAVLLANIIRTDPDAHRPLPADTELAQAIRVLARAQQDAVWARQQIGNQIRDLLKDFYPAALAAFADLTSGGLARADARTILAAAPTPAQAAKLTPARLRRLLVKAGRRRDLDRDVERLRMVFTDTYLHQPPMVENAMGIQLAALLRQFEAACAAADELAEAAIAHFEQHPDAAIITSFPGLGNLAGARVLAEIGDDRARFADARGLKAFAGSAPITRASGKKTVVTHRHIKNRRLAAVGAIWALASLRGSPGARRHFDARRAAGDWNRQAQRHLFNKFLGQLHYCLQTGQLYNEHRAFPPPLPVAA

SEQ ID NO: 72503 - protein, 359 aa, unidentified
MDRQDETMPSIVGGVDTHKDLHVAAVVDDLDRVLDTQSFATTRQGYRMMLAWMRSFGELRRIGIESTGSYGAGLLRYMQSADVEVLEVTTPDRQDRRKRGKNDDLDAANAAHAAFAGQRTVTPKGRNGMVESLRVLKACRKSAVNARRIALQMIQNTIIAAPDRLRDQLRSMTRMQLIRTLAAWRPDLTAYRDLEAAYRISLKSLARRYLELHDEIADFDVMIAAIVQELAPELIARNSIGHNSAAQLLLTAGDNPERLKSEASFAALCGVSPVPASSGKTTRHRLNRGGDRAANSALHIIAIGRLRTDGRTKTYVARRVAEGHSKLEAIRALKRYIAREVFSIIMRRQKDINATRIAA

SEQ ID NO: 72504 - protein, 343 aa, unidentified
MTHPPQLVLGIDTHKDVHVAVVLDRLGRYLAAASFGTTDAANTELVAWTQSYGQVTTAGVEGTGSYGYRLAQHLTDQGINVVEVNRPDRARRRRKGKTDPVDAEAAARAVLAGDAHAVPKDRNGAVGELRALVVARRSAIKARTQATNQLRALLVDGDDELRSRLGPLRKAHLARACTQLAPSAGLRLALSSLGRRWLALAEEITGLDAAITNRVRRTAPRLLERHSVGVQTAAQLLITAGDNPDRLHSEAAFAAICGASPVQASSGKTTRHRLNRGGDRAANSALWTIANNRLMHDPRSRAYAAKRTALGNSRKEILRCVKRALARELYPLILDALALPRLP

SEQ ID NO: 72505 - protein, 417 aa, unidentified
MKSAPSTLPEEPPNGLTCGIDWARDDHAVAVVDARGREVHRCTVEHSAAGLRALLGLLGKRGVGEVAIERPDGPVVETLLEAGITVVVISPNQVKNLRGRYGSAGNKDDRFDAFVLADTLRTDRARLRPLVPDQPATVALRRACRARKDLVSHRVGLANQLREHLKRVYPGAVGLFADLDSPVSLAFLARFDCQDRADWLSPRRMAAWLASTGYCGRADPAVLHARLAAAPRGATGEHGAAEAHVTRALLAVLVTLTEQIKALNAQISEQLALHADQHVFTSLPRSGRVRAARLLAEIGDCRARFPTPESLAGLAGVAPSTRQSGKIRTVGFRWACDKQLRDAVTDFAGDTRRASPWAAKLYDDAIARGHDHPHAVRILARAWLFVIWHCWQDGVAYDPARHKALQRILAEQKPKAA

SEQ ID NO: 72506 - protein, 412 aa, unidentified
MRRVIGLDIHRTFAEAVAWEDGRLLRLGRLDMTRTALEGFGKSLRPSDEVVVEATGNAMAVVRVLSPFVARVIVANPLQVKAIAHAHVKTDKIDAGVLASLHAAGFLPEVWTPDPETERLRRLVARRNQVVRHRTRIKNEVHSILHAHLIPRCPHADLFNRRGRDWLSRQPLPVDEKATIDRHVRELDRLAEDLDVLDREVAQGAIGNPSIERLITITGVNLTVAAGLVAAIGDIRRFTSPQKLVSYVGLNPRVRQSGLGLAQHGRISKVGRSHARAMLVEAAWAAAKAPGPLHAFFVRIRARRGHQVAAVAVARKLAVLCWHLLTKETDYLWARPALVAIKKRSMELQAGQPARKGNQRGPAYTYNVKALRNREMLVATQAERAYEHFVGQWRPRGPGKGVRERLNPARHE

SEQ ID NO: 72507 - protein, 321 aa, unidentified
MNYQNLVGVDTHKDSLACYCNGKFKEFKTNKEGFVNAFKWANSSNWAIEGAYCFGQAFSNFLIKNGCEVYEINPLLTKSWRTALKVASPKNDYGDAKVISIFANMENMNKVSFETIKLKEKLTARKTLIKQKTQVTNHLKMLFYTRGEELPFKAFDTKKALKWMLEQDDIIIKSNGKILESVLEAIGLLEKEIENEMPEVARALTKLEGISTITACIIYAETKGKLTSKSQFASYCGLAPVDCSSGQTTRRRNNKGGNRVLNSIFYSLSIAQKRYNEKAKAYYEKKLSEGKTPRHARKCLARQLANIVFKTLKDATEQGKP

SEQ ID NO: 72508 - protein, 339 aa, unidentified
MRVSTIGLDLAKNIFQVHGVTDQGEVAFNRPLRRAQVLAFFERIEPCLVGIEACSSGHYWARELSKLGHEVRLIPPIYVKPYVKRGKSDAVDAEAICEAVTRPTMRFVEIKSEDQQALLSLHRTRDLAVRQRTQLVNMLRGLLAEFGITIPRGLGKALGYAKDVTEGAQPDIPEIARDVVRVLCRQVMALHNWIGWYETRLKIEARANPQVRLLQTIPGVGPITASAIAATVGSGHQFRSGREFAAWLGLTPKNRSSGGKERLGGISKMGDRYLRQLLVVGMTSRVRQVRNHPERGDPWLRDLLDRKPARLATVAMANKTARVVWAVLTKNRPYAQPAA

SEQ ID NO: 72509 - protein, 310 aa, unidentified
MAPALVFGLDVSKATLELASVPAGHTGQFPNDPAGHAALAAYCQAHGATLLVLEPTGGYETAVAGVLGAAGVPVAIVNARQVRQFAQATGQLAKTDRIDAAILARFGATLAPTPRPLPDADTQLLAALVQRRRQLLEMRLAEQQRRSHAPAPLHPRLEAHIAWLEAELKALDRDLGDAIAASPIWQARDAQLRQVPGVGPALSRTLLAELPELGRISRREIAALVGVAPFARDSGTQRGARLVWGGRQQVRRVMYMAALSATRTNPVIKAYYDGLVARGKPKKVALVAAMRKLLVILNAMVAQERAWAPA

SEQ ID NO: 72510 - protein, 347 aa, unidentified
MKVTRIGIDLAKSVFQVYGVDERERKVVSRQIKRGQLLAFFESLQACLIGMEACSSAHFWAHQLQRMGHTVRLIAPQFVKPYVKGNKNDANDAEAICEAVGRPNMRFVPIKTVEQLNIQALHRVRSLTVRQRTAKVNEIRGLLSEYGIVVSRGVSKLRGQLPLILEDADNGLTGEFRWLLRALQEDLTHLDERIKLMDQRMALLASENAQAKKLLELRGVGPTTATALLAALGDGRQFRRGRCASAWVGIVPGQHSSGGKERLLGISKRGDPYLRTLLIHGARSVVNSCKDKTDPLSVWVQELCRRRNKNIAAVALANKTMRLAWVILSQDTRYDPNHKRTKAAAAG

SEQ ID NO: 72511 - protein, 338 aa, unidentified
MKAYAGIDLHSTNNYIGIINDNDQRLFKKRLPNDLDAVLSALEPFQQDLHGIVVESTYNWYWLVDGLQDHGYTIHLANPSAIKQYEGLKHTDDKWDSFWLAHLLRLDILPEGYVYPKEERPVRDLLRRRTMLVRQRVTHILSLQSMITRNLGINMSGNAIKKLTGDDAEELFKDPCLVLAATNNISVMKFLKEKIRLIEQTVLSRVKLRKEFAPLLTLPGIGKILSLTIMLEVDNINRFPKVGNYSSYSRCVKSERISNGKKKGAGNTKNGNKYLSWAYVEAAHHAIRSYPYVKSFYQRKKAQTNGIVAIKALSNKLCRASYYVMRDQVSFDKEKLFR

SEQ ID NO: 72512 - protein, 389 aa, unidentified
MKIYVGIDIAKLNHFAAAISSDGEIIIEPFKFTNDADGFQLLVSKLESFDKNSLIIGLESTAHYGDNLVRYLVAEFYQVCVLNPIKTCQMRKNNIRKTKTDKVDTFVIAKTLMMQDDLRFVSFYDLDMMDLKALGRFRQKTIKQRTRLKIQLTTYVDQVFPEIQYFFKSGLHQHAVYALLKEAPSPKEIASMHMTHLANLLKVNSHGHFTKEQAKELRVLAQKSVGANDSAISIQITQTIQQIELLDSQLEKIEAEMTDIMKFNDSVIMTIPGIGYINGGMILGEIGDIHRFSNPNKLLAFAGLDPSVYQSGNYQAKTTRMSKRGSRVLRYALVNAAWNVVRNNATFKAYYDAKRAEGRSHYNALGHCSGKLVRVIWKMLTDNVEFNLK

SEQ ID NO: 72513 - protein, 358 aa, unidentified
MRTIVVEKDRIIVGVDTHKWEHVAVAIDGLGRQLAEMAIPATAAGYKDLVEWARALGDARVFGIEGTGSYGSGVASFLRRHGEDIIEVSRPPRKGERRLSGKSDVIDAEHAARAVLSGKASAIPKVGDGAIETIRLVKIARDGAVRIQTQAMVTLKSVLVTAPDELRQELEPLSDFKLVTACAGLEGAFDAGDSSSAVRHLLQVLSRRWLQLHDEVKRHGKVLEKLTAASAPKLVAAFGIGPDIAAEMLVTAGSNAGRIRSESAFAKLCGACPVPASSGTTKRHRLNRGGNRQANAALYRAVVVRMRWHEPTRTYMQRRIAEGLTKREVIRCLKRFVAREVYRLLPGPSVAVSPAKAA

SEQ ID NO: 72514 - protein, 392 aa, unidentified
MVCVGIDVAKNKHDCFILSSEGEVLADVFTIANNRDGFETLLQRIRSCTTPNDNIKVGLEATGHFSCNILGFLLDNGLPTFVLNPLHTNLYRKSHSLRKTKTDRIDARTIAAMLMSDVDLKSYTDTAYHNEELKSLTRYRFDKVKERAKLKTSVSRLVNILFPELESIVSSLHTASVYALLSEFPGAEQIADAHLTHLKTILSGASNGRFGRQKALEIRDAARRSIGSVMPAKSLELRHTIRLIHELDREIDEIEAQISALMETISSPITSIPGIGIRMGAMILAEIGDFSRFESPDKILAFAGLSPSTYQSGNMNAIGAYAHMEKRGSRYLRYALFNAAKYVCQWEPSFAAYLSKKLAEGKHYNVAVSHAAKKLVRLIFALQTSGQMYLPA

SEQ ID NO: 72515 - protein, 422 aa, unidentified
MLGVGIDWAESYHDVALGQPGIGVISQFRIDHGPAGVARLVARCLDLEPDPAEVRVVLETRHGLLVEALVDAGFTVLPVNPDLVARRRGPAKKKDDAGDARICCLLALDAYLDLRQLIPHGELGAELRAIARDDERAARDERRIGNRLRADLLAVFPAAIDIAGGDLGSAVFLHMLERWPSARQLAAVSRDEVEALARSARHGWPRRFADQVTSALAEPRLTVRPELARAKAGSIRLAAAQLLAIRAQRREWHKRMGELLLGAPRSGRDQTPKDPDPGKAFPGGEIYLSMPGLGDRLAARIAGEIGEHFQQFATPSALQCYAGRAPVTRRSGRSEFTIARRLAYNRHLGEAVQQWAFCSLTQSAWARDFYDAKIAAGDRHHAALRKLANRWLEVLWHCLDKHTRYDEATHAANRTRALRPAA

SEQ ID NO: 72516 - protein, 533 aa, unidentified
MLLFIGDDWAEDHHDVELQDETGRRLERVRLPEGMAGISRLHAMVGRHAGDAEDVQVVVGIETDRGMWVQALVAAGYQVYPVNPLQAARFRERLGVSGAKSDPGDAHTLADVVRTERHQLRPIAGDSDTAAAVKVAARAHKSLIWERTRHLARLRHALLDFFPAALAAFDDLDAPDVLELLGKASDPDAAARLSRAQVRAALKRARRRDVDAKTERILAVLRAPQLRQPAPVTAAYAASVRAQVAILTALNTQIQAMQAQVDAHFGQHPDVEIYRSQPGLGVILGARVLAEFGDDPDRYAEAKARKNYAGTSPITRQSGKMRLIRARYVHNDRLVDALNHQAFAALRVSPGARAYYDRQRARGVSHHAALRQLANRPTPATTRPPPGPGRPPAPDNRPRDGRSDHIRTPPATARSTPRAERYVHIVSGLATHCCHGDSRWPYTSTRQGKEASLGTIPKKINNLVLDNQTHGMSTATTPGRSGFGCGPGGEHSLGFFQRWLVVGLGSIFRGDDDATQLDRHVLERGFGLGQVPA

SEQ ID NO: 72517 - protein, 370 aa, unidentified
MGNRSMFVGLDVHKETIDVSIADGARQGEVRHYGVIATDLEPLDKVVRALRAPNRRLHFVYEAGPCGFGIYRHLTRRGEDCVVVSPSMIPKRSGDRVKTDRRDSQMLARLHRAGELRPIYVPDDADEAMRDLVRAREDAVGVGTQAKYRLKAFLLRQGRRYPGREGWTLPYRRWLSDLSFPGAAQHIALQEYRDAIAETEQRIDRLTEQLRQLAPTWRWAPVVAALQALRGVSFLTAVALVAELGDLTRFRHPRELMAYLGLVPSEHSSGPSVRRGAITKAGNPHVRRLLAESAWAYQGIPRIGRQHAYRQEALPKVVCDIAWKAQLRLTTRFRRLVARGKAKPKVATAIARELSGFIWAIAREVSPTPQ

SEQ ID NO: 72518 - protein, 479 aa, unidentified
MIKSVGIDLAGTGEHKVRCLDEEAQLCDGFSFETTPDGLAKLEERIFRDGANPIVVFEPTGLAWLVVAAYIRARHPDCRLVRTQGRNVAALRKYLRRSSKSDKIDAITLAKMPFINQERLNEVYLPPAKMNAILRLARQRRRLESNIATRKTRIISIVDGYLPGVRPAFSKLWSPQAKEFLRTHLNPLIVAREGEKALYRFLTGAKSRGKEDVEESHRVYLACKMAASIYEKSRSTGAIDDDFFAALQEEIGREIRLMEIEEAESESITQRLKELYQELHPSNNLCTIPGVGEQTSPVFLAVIGDPARFHSQSAFANYNGVVPDSKQSAGTEAKGLRMTKAGPAIMKWALYQAGQIGRRYDPQLAWLYYREIVHSGKNHKQAMGAVMSHIGARILAVLRENKPYELRDIQGRPVTWEEARRLILSNYHVPEEIKQERRRRKNIGKPPAKSRRKTREMVSHSTREAAEAPQPVVATTSPG

SEQ ID NO: 72519 - protein, 385 aa, unidentified
MWYVGLDWADTHHDVEVLDEAGKRMGARRFAHSHAGLHELQAFLLGIAPEVEQLACIVETNHGLLITFLLEAGIPVYPVNPKTANQLRKAAGAKTDQIDAHLLAKIGRLELAELRRLEPDSPIVQELKTLTRDQDALIQTQTRLVNQLTACLKEYYPAALHLFAKLQQRSALVFLQAYPTPQAAQAASVEAITATLRTGKHTNPRQVAPKIVEELHRPQLVASEVIVRAKARLLLSLVKQLLVVIEEIASYDKAIHTLFLTHKDQELWSSLPGAGKRLAPRRLPEWGEDRSRYADASSVQTLAGTAPVPFQSGNYAKAHKRFACVKPLRNALHQFAWQSTRQEAWALAYYQRKRAEGKTHSVAVRALANVWVRIVRHVGAYGIPA

SEQ ID NO: 72520 - protein, 434 aa, unidentified
MKKIRNNTAGIDIGAKNIFVGLESKEVKCFETFTEDLNNLAIYLLSNKITSVAMEATGVYWVILYDILETHGIDVWLVDGRSTKQVPGRKTDVKDCQWIQQLHSYGLLNRCFIASELVQELRGYQRLREDHIRSSAMHINHMQKALILMNIRLKEVISQIHGVSGMRIVRSILKGERDAEKLAVLCDSRILNKKRNQVLKSLNGHYNSSGLFALRQAVECYDFYQKQISKCDKELSKVLTKMSWGKKQGKSNIKRKPIRHHKPDVEDLGLHLLKIFNQKDATVLPGITDYNWMQLLSETGTDLKRWKTEKQFTSWLGLAPKQHNSGKMRRNYKAKGTPKAGLIFKQAAVSILSSKNIALGSFGRKIKFKKGGNVAIKAVARKLAVLYWKLFVKGLDYVEKGIKAYEEKILINKQKAVKRMAKELGFTISLNTVS

SEQ ID NO: 72521 - protein, 520 aa, unidentified
MVSTRSRRSSSRRRPPTSLGKPRGVLHPRVQQVGPEHFGIVCFDCAKVRSKFLLADFYGRLLLPPTVVAHTRPALDAAVTQIRQAFEQHQLRDGLVAIERTGRYHRLAQRTFAAAGFETRILHPFVTKQYRQPVDPGNKTDDADLAAIHRATVTGCALLEASRDEAWTTLQLLIRHRRDLVCKGAALNCQIRDHLEAALPGYAACFDKLWESPIPWHLLRHYPTAGQLRDAGLASLCQSLRQAGIRFQQRTVQAVVDWAEQAAPGDVAASQHLRIALALYDDRQRKTQEIQALEGDIAGRLVHTPYVLLLSFPGINVVSAADFAGEMGPIEHYANARSITGRAGLRPSRYQSDQVDKANGPLVRNCNRSLRAAILGIADNLIVCNHHFQALATQWAAQGKDPRHTRVKIGLRFSRIAFQMVAGRQVFRHPSIQGRHYILDKLTAFHRVHDTVMVEVLGDLQAALGHLPPREYAAEAKPLSEELKRIQDGHRRGPQVLGDILPIVLARLGVGVVQSPESGE

SEQ ID NO: 72522 - protein, 396 aa, unidentified
MWRCRTTPGAGWSRLGFPEGVAGIARLHELIAGFTGEDTSADQVWVGIETDRGPWVAALVAAGYRVFAVNPRQVARYRERHGTSGAKSDAGDAHALADMVRTDAHQLRPLAGDSPLVEGIKVVARGHQSMIWERHRHMLRLRSSLREYFPAALEAFDDLTAADALDLLGAAPDPQRAARLSRSRIAGALKRARRRDVEAKAERIQTLLRADHLTQPPELVAAYAATTAATVAVIIAFTTQITTLQGQVEASFGRHPDAEIYRSQPGLGEILGARVLGEFGDDPDRYQGARARKNYAGSAPITRASGKKTVVLARFVRNQRLAGPLQWQAFCALRASPGARAYYDQLRARGAGHQAALRQLSNRLVGILHGCLKTRTLYNEHTAWGHHQPQDQQNAA

SEQ ID NO: 72523 - protein, 334 aa, unidentified
MSHTMVAIDDVGAEIASVTVAATPKGHLRLVKWAARWEQRRWAIEDCRALSRRLEADLLTVGELVVRVPPKLMAGVRRSAHTRGKSDPIDALAVARAALREPDLPVARLDGPSREVRLLVDYRESLVKDRTAAQNRLRWRLHELEPGYDPPPGSLNRYKTLDHIDQLLAAHRSMVAVLAHREVTRIRELTREANQLQRDISQRVTQLVPSLLNIPGCGALSAGKPRGEAADISRFKSRDAYAMWAGVAPIPVWSANTERFRLNRGGNRQTNAALHRIAITQLLIHPDAQAFIKRRLETGSTKREALRLLKRKLANVVYRTLLTDTQQPALAAAA

SEQ ID NO: 72524 - protein, 397 aa, unidentified
MYIVGIDIAKRKHEAAVIDGEGTVIIKPFSFTNNCSGYNRLLAMLAKAKLPLDEVSFAMEATGHYWLALFTRLQKEGFRVQVINPVQTNSIRSFYIRQAKTDPRDALLIAEVIRFGHFSESTLHPENIYELRELCRGRHAIVSMQADIKRKVVALLDQVFPEYETAFTNLFGDTSMAILQACPTPKELSEMPLEEFCHLIEVPSRKRFRTEKAQELQALARNSFGFAMAGGVFSTMIRLYAKHLDFLKQQVREIDRKIAEIMDTLDTPITTITGIGPTLGAYILSEIGDISRFSSAAKLTAYAGIDPTMRQSGEYNGVRNRMSKRGSPYLRHAIWLAASSAVLHDPALKLYFQKKRDEGKPYMASVGHACRKMVSIIYAVMRDNKAYTPYIPNEISA

SEQ ID NO: 72525 - protein, 376 aa, unidentified
MSKVLFVGLDVHADTIAVAVAENGGEVRSLGAIPNRLESVRKLVHKLGPVQHLRACYEAGPTGYVLYWQLTQLGVACEVIAPSLVPTKAGDRVKTDRRDAEKLARCHRAGELTAVWVPDGAHEALRDLVRAREAAKKDQLKARHRLGKFLLRHGRRPEGIKAWTKQHREWIKSHVRFEQAALEATLADYVEEVDHAAERIVKLEKAIDEAVRQAPPEIRAVIEALQALRGVAQTTAASIVSELGSLSRFPSPRKLMGYSGLVAREHSSGNRVQRGGITKTGNGHLRRVLVEAAWAYQHRPNVIGFLARRQKSLAISEEAKKIAWKAQQRLHKRYKAMDARGKNKNQIVTAIGRELLGFIWAIAVETQKQHRLAKTA

SEQ ID NO: 72526 - protein, 419 aa, unidentified
MTRKRSKVCGIDVHKAFVVATTLDRDDNSETKRYKQNFGSLIELRDWILSSKCESVAFESTADYWRPLYMVLEPHITITVANAYHIKHIPGKKTDVIDSRWIAELELNGLITPSRICTGEHYDLRTLTRYRETLVNTRTVYKNKVHHQLDLCGIKLCDYMKDIFGKTGYPILKGTVERKSKEEIKESLPKKSRNKAERFFSAIPSDIPEHILFVLDSALTMIDNLTEQIKKVEERIKFLLNQRKRELRILMSIPGVGFIGAATLLAEIGNAHDFPNSDKLAKWAGLTPSVYQSANTNYTGPITKQGSPHLRRILIECAHAAVRSSGRLKNCFNRHFPGKGYKKAIVAVARKILRIAWHLLVNDEEFVDEDAKSKDVWIPKMPSVMQKIGIEKVIELLSRGAEMIIQEEGREVMRLKLDT

SEQ ID NO: 72527 - protein, 338 aa, unidentified
MTYYAGIDVSLESASVCVIDAAGKTIREGKVASEPEALTDWLMSVGVRLERVGLEAGPLSQWLHAGLRQGGIAAELLETRHVRRAFEIMPVKTDRKDARGIADLMRMGWFRPVHCKSLDAQETRAMLTARKLVQKQVFEVESSLRGILRGFGLKVGKTTPTKFEGRVKELVAGNPSLERITDSLLATRAVLRREFNGFERQVRGMARNDTRARLLMSTPGVGTIVALTYAAAIDDPARFTSSKTVGAHFGLTPKRYQSGQTDYTGRISKLGDASVRAALYEAAHVILTKPLKGCTALKSWAMRIAKRAGMSKAKVALARKLAVIMHRMLANGTTFKAA

SEQ ID NO: 72528 - protein, 427 aa, unidentified
MPYKIAGIDVHKRMLVVVVSDVEVHDEYQFERRQLSSNPAQLRLLAAWLLEQQVEEVVMESTAQYWKPVWGALERHWQPACQQREDARPTSGRLHLAQAQSNRARHGRKNDFADAERLVKRLLANELTLSFVPAVEQRLWRTVMRTKYQLRCNQVQVQNRLEALLEEAHIKLSSLVSDLLGTSGRRMLNALANGETDPAALAALAHYTLRATPEQLCDALDASRDLHPLYRRLIKTALENWERIETQITELEREMAALLDPYQDQVERLAEIPGLGVDSAQQVIAEVGATAATFPSAGELASWVGACPGEDESAGVNHSRRSPKGNRPMRRILNQAANAAVKLKGSIFALLYRRYVTRLGHNQTIGIIVHRLCRLVWKILHEGVRHEEHGPAVSQKSKRDRAARMIRELRNLGYRIEPGTSQAFSPA

SEQ ID NO: 72529 - protein, 317 aa, unidentified
MSHIISIDVSKATLDCAYLRDLDQNKAKRKSCQNEVGHFESLISWAEAFSGVPRQSLAFVIEPTNVYHEQLVQFLHSKGATVYLVNPGRVRKFAEGIGILSKNDVIDADLLARYGLMAKKLIVFEPAPQEVNDLRSLLNRLEKAGKSLTFHRLEQQSIIRSIKRHEAEIVTFKNAARDCVNASPWLQRGVELLSTVPRVGEKTAWLMMVILSSRHFRSAAEVASFLGLNPIEKRSGKSEYRKPRLSKSGSSHYRQALYFPAMVASRKNPDVQALYERLVEAGKPKMCALGAAMRKLVHICYGVYKNQQPYQPQVSAS

SEQ ID NO: 72530 - protein, 406 aa, unidentified
MFYLGIDVALNIHRLVALDDNGERVSSGISFQNNTADFEKVLTKLKELSINPDNSISGLEATGNNWENLYCFLTGKGFKTILLNPHQTNKFREALRKKAKTDDIDAFVIAGLLRSNEFASSYVPEDKIQTLRELTKLRYEFIKDHKNYQRQVLALLNLIFPEYRQTALKNPFAIASIAIFKAFSTAKHLASTKPKHIEKIVRSIKGNNFNIKEIENLISIAKTSVYSGRCQESRALTLNILLTQVENFDKSIQQLEEQVNLILSPASNDDASSFPGSNLLTIPGVGPKTLAAILSCVGESGQAFSDGVKLIGHIGFFPQIYESGETRRANKLSNKGPAYLRHALYMASVACIKHNLQLRNLYHTKVSQGKKPKQALICVAKKLAHICLSMLHSGQDYNPARVFSCA

SEQ ID NO: 72531 - protein, 404 aa, unidentified
MRAICGIDWASQWHDVRIADAETGEPIVQRRFAHDEAGVCALVGVLREHGVERVAIERPDGLLVGRLLGAGLAVVAIHPNQVKAARDRFRAAAGKSDEFDSFVLCELARTDAHRFAALAPSGDETLALRALVRAREDLVAARVGLANQLRAQLDAFWPGATQIFADVDSPIALAFLERYPAPTDARGLGPKRLQAFLARHAYSGRRPADELLERLRSAPTAVCGEFETDARRAAVLGLVAALRPIVAQISELTSQIRGAIRTHPDGPIFLSAFRDPKSVVTAAGLLCEIGDNRARYPHRDALAADAGQAPVAIESGKRKTAAFRWACDKRLRNHVAVLADTSRHHHPWARDIYQRARARGCDHPHACRILGRAWTRILWRCWQDHTPYDPTKHRNPNRPLNTRG

SEQ ID NO: 72532 - protein, 310 aa, unidentified
MNETCVYMGVDISKDSLDLWGSSGRPGKYVNNKTGCRTLVCRLKKIERVHVTCEATGGYERMLVDALQAAGIDVSLVNPRQVRDFARAQGRLAKTDRLDAQVLAEYGEAMRPKVTPPRSKAHRQIEEVVQRRRQLVDMLQMERCRLRQTADPAMRKSIKGLVRILETQIKNAERRMRQLMEDVPALKQAVTRLCEIKGIGMISALSLLAFMPELGSLNRAQAAALAGVAPFNRDSGTFRGRRIIWGGRAAVRATLYMVALVASRRNPLFSEFYQQLRKRGKQAKVALVAVMRKMIIYINSIMKEELPAFS

SEQ ID NO: 72533 - protein, 379 aa, unidentified
MPSEKTVYVAIELSLTSWLVAERAPGIEKPRLHRLEGGDAAALLKTIGDLRSKASAKLGCAIDVVCCFEAGRDGFWLHRLLAAHGIAAYVLEPASILVNRRARRAKTDRLDAEGMLRVLATWLAGDRQVCSMVRVPTPDEEDAKRPHREREHLVQDRLRIENRIEALLFAQGIRGRPSLRSWERDVAALRTGDGRALPPLLRTELHRLRRRLVLVLELIRELETDRAHAFEEAQVGDTMVGKIAALQRIRGIGENFAAVLAREVFYRSFGNRRQLASYVGITPMPYQSGGMDRDRSISRAGNPRARTTMIQLAWLWLRYQPDSALATWFRERVGTLQGRTRRIAIVAMARKLLIALWRYVETGVVPDGIALRAESAATA

SEQ ID NO: 72534 - protein, 588 aa, unidentified
MHFYIGQNIRQNGSETKVSSKKRIDFTNNDEGTVIQLHKECGVGIDCHSKFLQISVIVKAGQEFKKYQHTFPTDPKSIDAARKWVIDTIEKNSVPPITVKADTLSYSIESTSTYHLPVVQRWGGIPEIVNPKLAGSSHRKTDVLDATMLARQNIDGLWKTSFVPPRDVWVLRSLISQKESFEKAATKISNQINSHLLKFGITVGRDGSVTGDNEVRKCVMDLLSDNPSEEVLKLYPLGIPDEAKALIRELYELHDENAKKEEEYRKLAIEKVCSMEWETKDGVLSGKDMMQLLQTVPGVGPNSALNWLANIITPRRFANARAICAYCSLDPSVKISAQHVTSTVKRGGNKAIHKSLCFAASGLMSKRAEPFGIWGFKLYQATGKWKKGTNAVARRMAMALYYVQSSGQPFDYNKFTFMEMPEVIDMSIIDLVAINPEFHRYIAGFNAANIKSTQDMADRYHNGSLHRINGLAGKNLQSLVKEFINNQDLYTERFNEYSSKRELIYSIVNENNQTIKDFVSENPQFSRYYNALDRAGITHVSHLINMYYSGTLKDYPRLGINFELLVEQFIDNIIKERKERNTHENIPC

SEQ ID NO: 72535 - protein, 342 aa, unidentified
MSVTIGIDPHKSTHTAVAVDRDEQPIARLTLPASRHQTDRLLAWAEPLDAERVWAIESAAGLGRLLAQQLVGAGERVIDVPPTLAARVRLLSSSKTSKNDPNDALSTAIAGMRHCGLRRVERDNHTAILRLLADRHHDLTGLRTQAACRLHVMFRELTAGGAPLRISAAQARQLLDAIEPGDLVAVERRRIAAEHLADIERIDGEINTVKERIADAVIASGTTLTELHGVGPVIAAIVLGQVRDITRFRTRAQFANYNGTAPIEASSANTNRHRLNMRGNRALNHAIHIIAVTQVGHDTPGRAYYLRKQAEGKSRKEALRALKRRISDAVWRQLQIDTRATS

SEQ ID NO: 72536 - protein, 292 aa, unidentified
MKLSDVVVGLDVHLKNTQVTVMKMNGEIVKRERVSTTKAELRRSLEPAPKGSKVALESVGFCWPWIDFLDELEFEVLLANPVKAKYRAEDVKTDRVDSKLLADLTRMNWLPTCYVPPSELRVLRNLLRHRAYRTKLSTGVKNKTKSEFRKRDVDLDVNLGTVKGRKAAFELGVFEVNQNIELLEVMDRQTKEIEAMLERKYGDVKPVLLLMSIPGIGFISALTLYAEICDIKRFSNAEKLAHYAGVVPSVHQSGEHSFNGRETRGDAWLKWILIEVAWCHVRYCPESHLAGV

SEQ ID NO: 72537 - protein, 340 aa, unidentified
MTIVMGLDQHRAQITTEWLDIETGEIGRARVAPAHREGVRRFLGRFAGEELEVALEATTGWRFVVEELRRVGAGVHLAEPAQTSALRGNKKRPKSDRADAKHLRELLMIGRLPESWIPPDHLLDLRSTVRLRHTLVDQRGEWQQRIRAVLYHHGLPHRRELDLLTSEGRAWLEGVGVPDAAREQITVAVTMIDALDTQITPLDKQLRSYARRQLGCRALMGHYGIGELTSVAILAELGDCRRFSSSRQAVRYAGMDITVYQSDQHRSPGHLSRQGPPALRWAIYEAAQVARRQGSPDRGYYDQAAERLGSNRACLAIARKLLLRSYHTLRELGEEALQPA

SEQ ID NO: 72538 - protein, 358 aa, unidentified
MEIVGCDLHARQQTIAMMDTETGEFTEKTIFHEGNAVREFYAALEGPVVVGLEATGAMQWFLELLEGLGIEHRVGHPAKIRAQETRKQKHDRRDASLLLTLLREDRFPEIWMPSTEQRDLRTLLRDRDQWVRMRSRVQHTLQAIALNHALRQGRALWSAAGQSALQALLLPPYAAQRRNELLGLYGQLQKRIQELDKEVESQARQRSQSRRLMTHPGVGPVTALATEVFLGDPSRFSTGNQVASYIGMIPCERTSGKRQRLGKLTKEGNKLLRYLWTEATLHAVENDAELKRFYRRKLIQKGMGKARIAAARKLGIRLWIMLRDQIDYQEFCRRGQLLRQKGKAHAGMPDFQHGPAMQ

SEQ ID NO: 72539 - protein, 477 aa, unidentified
MPKSSRTAKDKKQKVAPVAGTTNNRKTKKKGRRPSASKDPTAGLQVTNPNAGAVDIGCAEHWAAVPPGRAEQTLRQFGCFTADLEAMANWFVKCRVDTVILEATGNYWIVLYDLLEDRGLKPIVVNPRYAKNMSGKKGDIPDCQWMQRLHTYGLFANSFRPKEQLRILRSYLRQREVLTCAASQQIQHMQHALTEMNVQLANVIRDISGETGLRIIDAILAGQHDSQELACLKDPRIRATRQELAKALQGHWKEEQLFALEQARLSYQHYQEQILQCDERIEKQMKVLESRLPGATEQQKTYEIKSTAKTPVLELRSELHRIIGVDLLKIPGVGPLTAQIVLSEIGTDMSHWPTEKHFASWLGLCPDHRISGGRILARSTRPVVNRARNALRIAVYSLERSKTGIGAKYRRLKSKLGAPKAIVAMAHHLARLIYRMIKFGQDYVEKGMDAYNTKYKEQRIHWLRKQARELGIQLMAA

SEQ ID NO: 72540 - protein, 279 aa, unidentified
MVQYERIAIDTSKAVFTVHAVDQQERPVLRTNLRRAQLIPFFKRLPATAIAIEACSGAHHWAHELTALGHQGRLIPPQYVKPYVKRGKNDRNGAVAICEAAGRPGMHFVPAKSVSQRTQGMVLKVRETLIGQRTALVNTVRGHAAEFGIIAGTGSGNIVPLLSAIEQEASIPLEAKEMFVLLGQQIDEIDARIKDVDAKLNAAHKANEISQPLVTIPGVGPIIALTLAVEIDPAMFQSGRHLAAWADLTPKERSTGGKQRMGDRAREGGGISRAGNSPA

SEQ ID NO: 72541 - protein, 475 aa, unidentified
MNDTVKKGKNQVKTATILDQHVQKMKMEAILAELKASTWRELETVGKFKKNEKLSFINDAMLILGCDIGSETHYVRAIDTRGRELSQSAIAFDNTRAGFEGLKQWALKQAAKYDKKQIVLGLEPTGHYWFNLAVWLVSEGISVVQVNPYAVKQTKELEDNSQLKDDRKDPKLIANLVKDGNYGMPYLPEGVYATLRRLSLFRDQLKEDRIRTLNRLHRELTIYFPEYKTALSKVDGLFSLTLLKEAPFPEDLLQLGEDGIKALWQTAKLKGGGYQRAKAIISSAKESVGLKDGTNASKQAVKWFVETIMALDKQLDALENELHAACKQIPNAENILQIRGMGETILSGILSEIGDISRFDDVKALQKLSGLALVANSSGKHKGKTKISRRGRKRLRYWLFQGAKSVVVHSPAFKSLHTYYTTRANNPLKKMQSLIVIACKLLRVIYTLLKKSYLYDPEKMMADIKRTTSDTAIAA

SEQ ID NO: 72542 - protein, 341 aa, unidentified
MDAGYDGRQIVGIDLHRRRSVIVRMAADTGERLGTVRIDNDSMALVAEIAKAGEHPEVVLEATYGWYWAVDVLRGEGAQVHLAHPLGVKGFAYRRVKNDERDAADLADLLRMGRLPEAWIAPPATRELRELVRHRAKLVALRSGLKAQIHAVLAKEGLREPMSDLFGAAGQSLLNEVRLGAAYAARVVSLRRLIDAFTFEIDTVGRRVTAQLAADPGYRAVQALDGVGPVLAAVFVAEIGDVTRFSGPAQLGAWAGMTPRHRESDTKVHRGRITKQGNRLVRWAAVEAVQRVHRGGIGAARARIGERRGANIAKVAAGRKLLTLVYYGLRDGHLRCLSRPA

SEQ ID NO: 72543 - protein, 329 aa, unidentified
MKKLFIGIDVSKDVFDFCLLDQEHKVISSKNVEENTSTGINNFCDLLQNYEEYSIWICMEHTGRYGSLLCSEFSKRNLTYSLLNPLEIKYSIGLTRGKNDAIDAYRIASYAVTNAHKLKPFNLPVESLQKLKVIISVRDAFVKISVQLKNQLKSLEVLHKSLSVKEEIKMIKAAIKRHEKDILKAEMQMIEIVESNQELLENYTKISTVIGVGKITAIKCIVETENFSKFKDGRKFSCHCGLAPFENRSGSSIRGKTKTSKLRNKELKAVLFKAASSAIQHDKQLKGYYNRKVNEGKHKLSVLNAVANKIVLRIFAVVNRNEPFIKLCA

SEQ ID NO: 72544 - protein, 345 aa, unidentified
MTQYKRIAIDTSKAVFTIHGIDQQDRPVLRTNLRRPQLIPFFKKLPATHIAIEACSSSHHWAHELTTLGHDVRLIPPQYVKPYVKRGKNDRNDAEAICEAAGRPGMHFVPAKSVKQRAEGMVLKVRETLIGQRVALVNTVRGHAAEFGIIAGKGKGKVVPLLSAIEQEASIPPEAKEMFVLLGQRIDEIDARIKDVDAKLSAAHKANEISQRLVTIPGVGPIIALTLAVEIDPAMFESGRHLAAWAGLTPKERSTGGKQRMGGISRAGNERLRVLLVSGATAVINAATKPGSKQMTEWLRALLQRKPRKLAAVALANKMARAAWAMMKSGETYRRQSTASGAVAA

SEQ ID NO: 72545 - protein, 422 aa, unidentified
MGQGADAEEWSERAAFVGFDWAGDHHDVLVVDRLGKVVEDFRFEDTAAGWKRFEEKLSRYADPAIAIETCTGAEVERLLEAGYAVYPVNPKAAKRYRERKVPCGTKTDRVDAWSLADALRLDGHAWRALKPDDPLTIELRSLCRDEMSLIEQRTAFICQLKAALGEYYPVVLQAFDDWTLPAAWAFVEAFPTSEALAQAGKRRWEKFLHTHKLYRPETCRKRLEMFAHAQEFCGSPATTNAKSMLAVALAGQLRVLQNHLDKFRARIQELFAKHPDHDLFGSLPGAGKKLAPRLLAELGDDRDRFDSCQALQCYAGTAPVSYQSGQVKKVYFRRACHKVLRHTVHLWANLSRTECPWAEAYYQKKRADGQTHACALRCLGQRWLKILWKMWQTQTPYDAEFHQRNQIRHGSWVLGLTPSSTT

SEQ ID NO: 72546 - protein, 390 aa, unidentified
MFVIGIDVSKYKHDCIVLNDAGDVVIKQFTVANDRSGFNQLLSVINELDPSQEKRIGFESTGHYQGNLETFLENAGLPFMELNALLVHRFRGAGTLRGTKTDKADALLIARYLLQTDFKPYPPKAYHIHELDRLTKRRFDLVKQRTLYLEKITDWLDRCFPELKPFFGENLKSATAMFVLSEYGSPSRVASMNQASFERLRRISKGRFSSAKFAELKSLAKGTVGTCYEVDEWELRSLLSVYGALQSEIDSAESLIGSALSKIDSKIPTIRGLGPVSCASIVAEIGDMGRFSSASKLLAYAGLDPRVYQSGTMEAQGRMNKKGSVVLRRVLMNAAEYLLCCSSVFYDYYRKKRGEGKPHRVAVSHCARKLVRIIYKVETEKIDFDPNMVR

SEQ ID NO: 72547 - protein, 484 aa, unidentified
MARATRRQGGGQQRKRRPRRASRAQLEQLNLNAAGIDVGAESHWVAVPPDRDEQPVQEFGAFTADLYALAEWLRQCQIDTVVMESTGVYWIPLFEVLEERGFDVQLVDPHSVRQVPGRKTDVQDCQWLQELPTYGLLRGAFRPEDEVCGLRSYLRQRGMLVEMASRAVQHMQKALEQMNLKLTEVVNDITGKTGMTIIRAILKGERDSQLLATHRDQRCKHDQATIAKALEGHWRAEHLFSLQQAVDQYDFIQQQLRTCDQQIEACLQTFVAHAEVKSPRPRPARKRRARQRHTPDFEVHAYLESMTGVDLTQIDGIDSLSALKIISEIGLDMTRWPTGKHFASWLGLCPGNKMSGGKRHRVRSKPTANRAATAFRVAAQGLVNSHSALGAYYRRMRARLGAPKAITAPAHKLARLVYSMLRYGSDYVDAGQQAYEKQYRDRVLTNLQRKARVFGYQLVQAEGIENGQATATLSGQNIHAASRW

SEQ ID NO: 72548 - protein, 435 aa, unidentified
MNCIDDSRLQQFHQMKKEIRGSEQYLIVGIDAAKEKHNAFFGTAQGMTLVKNVVFDNTIEGFEKLDAFVERVMVQYSLLKVVFGIEPTANYHKPLAEHLIKCGRMVVLVSGAAVKNNRQLLDGRWDKHDVKDAANVADLIAQGKCLFYEYPLMTLRNVRILNALKRRLKKQEHSTSVCIRNHLVAQYFPELDRHYGPAETLAVVRECLDPSAIAGMEYDAFCRTVSPGKMTLAKSLRTGAIWRAAVDSIGCTMGEAASYEAQVMVDRLKQLRQAIKAVDDKLEDACLEFPEYTYLLSIPGFGPDVSAKVLGAIGDPHRFTSGKQVLKIAGLDLCANRSGKTSKSATPVISKQGKADLRYALYQAALIASLKNKDFIAYHTNKLKGRAKEKGIGTKMRVKLATKLLIIAWTLMKKKECFDPKYLQREDPAARKAAA

SEQ ID NO: 72549 - protein, 341 aa, unidentified
MDHPKVVVGLDVGAETFAAAALRHAGEAGEIKGAIANTPEGFDELALWMKAQRITQEKTAVCMEATGVYGEALCYYLISKGYRVAVESPLKVKRAFAQSAHKNDMEDARQIAEYGHRFYDELQWWNPPSEVMEEVQMLLSAREQFVTQRIANINALKTMQRKVVKTATGMKAYEQAIKQLSENIHEIEREMKRLMKEDDSFHRLIKTMTSTPGIGLVLAASLAVTTNGFLRTCNYKRLASYAGISPIEHTSGISVYRKPRSRCFGPPRLRKLLYLAAMSVSTHNPEFKRYYLRKVAEGKPKRLVLNNISNKLLKVVCALVRTESQYIPNYKSVNPMILKSA

SEQ ID NO: 72550 - protein, 343 aa, unidentified
MIGLDTAKSMFQVHAVDEAGKAEIKRKLRRSELISFFEKQAACTVVMEACGAAHHWARMLTGLGHTVKLIAPEAVKPFVKQGKKNDAADAAAICEAASRPDVTFVPAKSLEQQGILALHSARSLLVKQQTMLANAMRGLAAEFGLTVPLGTDKLEELMALVEADEAVPKGARQAVRGLLDHRQVLAKSTKDFEAAIVAHARQDETARRLATVPGIGPITASLIAATVADIGVFQSARHFAAWLGLVPRQHSTGGKTRLGRITKTGNREIRRLLVLGATSMVHRAAGWNSAAGAWTRGILERRPVRLVTVALANKMARIAWALMTRKEVYHAKGYVAAAAEAVA

SEQ ID NO: 72551 - protein, 334 aa, unidentified
MENIALIGIDLGKNSFHIHCQDRRGKAVYRKKFTRPKLIEFLATCPATTIAMEACGGSHFMARKLEELGHSPKLISPQFVRPFVKSNKNDFVDAEAICEAASRPSMRFVQPRTESQQAMRALHRVRESLVQDKVKTTNQMHAFLLEFGISVPRGAAVISRLSTILEDNSLPLYLSQLLLKLQQHYHYLVEQIKDLESQLKRKLDEDEIGQRLLSIPCVGTLTASTISTEIGDGKQYASSRDFAAATGLVPRQYSTGGRTTLLGISKRGNKKIRTLLVQCARVFIQKLEHQSGKLADWVRDLLCRKSNFVVTCALANKLARIAWALTARQQTYVA

SEQ ID NO: 72552 - protein, 342 aa, unidentified
MLIIGCDYHPSVQQIAWVDTETGDCGERRLRHDGGEAEQFYRELKKKGVSVQVGMEATGHSRWFERLLGELNYELWIGDAAQIRAKQVRKQKTDRRDAQHLLQLMLENNFPRIWVPTPENRDVRQLILHRHRLVGMRTRVMNQLQAIAMNEGVRRKRGLWSKKGRAQLESLRLPPWTSRRRQELLELLDRLDPSIEQLSQAIEQEAERVPEVRRLQTHPGVGPITALAFVLVLGTPDRFHCGKQVASYLGLIPCEDSSADRWRLGHITKQGNALLRFLLGQAAQSVAQAEQQWRHQYAHLAMRRHPAIAKVAMARKLAVRLFWMWRREWDYQQLKKFGSHVG

SEQ ID NO: 72553 - protein, 371 aa, unidentified
MGESSKTLFVGLDIHKDTIAVAYAAEDRGTEVVSLGMIGTRQYNLDKLIRRLEAKGAALMFADEAGSCGYWRYRYLTRRGLSCAVVAPSLIPRKPGDRVKTDRRDAVTLARLLRSGDLSSIYVPTVDDEAIRDLSRAREDAVRDLKRHKVRLKAFLLRQDIRYEGRANWNAAHLRWLARVVCPTPAQQIVFQEYVHAVSEQTERLGRFETELQTAVTTWRLSPVVEAVQALRGLNLTGAVTLIAEVGDLTRFETPRKLMSYLGLTPSEYSSGDHRHQGGITKAGNGHARRALVEGAWAYRYPAKVSRHLQLRLEKVPTEARAIAWKAQLRLCKRYRLLSARGKHVNQVVVAIAREMAAFAWAIARIVPIAA

SEQ ID NO: 72554 - protein, 349 aa, unidentified
MLADELDYVVGVDTHRDQHVLAVVAAPTGALIAQRSVAANARGYAEAVGFAERHAPGARVWAVEGAGHYGAGLTRCLSARGEVVHESGRSSRAERRLRGKDDPLDATRAARSALASNQPASPRSGQRQEALRVLLLTRRSAVDVRRVALVQLRSVIVTAPDDLRNELRRLPLGELLRRCSRFRRSSSRTPDQLATILALRSLAQRFQTATHEADVLEREILAHVRALAPDLLAEPGIGPIVAAQLIVTWSHHGRVSSEAAFARLAGVAPLPASSGLTTRHRLSRGGDRQLNRALHTVILHRRQHDQATKDYIARRVAEGKTTRDAVRLLKRYLARHLYRVMQNTTPLTT

SEQ ID NO: 72555 - protein, 384 aa, unidentified
MPDVSSRAPAVVRVRAALDVHKRTIVCASQPDDPRAGELRVQEIPNSERAVRALVRRLGGPEGLVLCYEAGPCGFDLFRLLSAIGVACDIVAPALTPVAPGARVKTDRRDAKRLLVLHRAGALKFVAVPTPAQEGLRDLVRCRDDLVGARRAARHRVAKQLLRHGHIFCDGKTSWTKQHIAWVRRQRLADPLAQSALEHMLAHLDSLDAQIAALDHQLDEIAGREPWSDPVRWLSCFRGITTVTALGLLAELGDLRRFASARELMSFLGLTPSEYSSGEQRHRGHITKTGPRHARRLLIEAAWHYQHPPRLSQRIAAVHPHVPPDVAQRAFSAQVRLHHRHRSLTGRGKRSTVANVAVARELAGFIWAAMTRQPLGEQEVTTTA

SEQ ID NO: 72556 - protein, 422 aa, unidentified
MSYCPVAGIDVSKQFSDMCILSPDNKIFAQEKIYHDETSINRANALLQKAERLFFSKPVIVMESTSHYHLILFQFFSEHGYDVIVVNPLQSNSMKDFSIRKRKTDRVDAFKLAMMYRTKTLRPSQIPQTATRALRQLCRHRAELLNDVSSYKNRLTALLDQTFPGYDKVFSDVGGVTSCAVLVHFPTPTILLVEEESELVEVIAAASKSGYSFAKKKAGLLISAAQKAQTLGIHSCADETLIVCTIQMLRTLSESVLQIETAIDNLMAQIKEMRNNVSLLQSIPGIGSHSAALLLGEIGDISLFKKPKQLAAYFGLDPTERQSGSFRGTKNKLSKRGSPYARAALHMGVVNSICKRGKDSAANPVLLSYYEKKCKNKPAKVAQAASMHKLVFIVFAILRDQKPFELKTPEQHAVEQGFVKAA

SEQ ID NO: 72557 - protein, 349 aa, unidentified
MTMVGGLDVHRKQITFDYVDGDGLVRWGEIRPATRKTLRGWLGEHCPTGDAEFALEGCTGWRYVVEELVAAGVVAHLGDPAEIAGLRGPKKRAKTDRADARLLRTQLLQGRFPESWIPPAHVLEVRTLGRLYCALMEERRGWQQRIHAQLFHQGCPPITALLSSAGRETLGGAELSAAGRQYVDTALRRIDELGTEIEPLRAQLVNFARHQQGCQALQARHFGIGWLCAAIIWAEIGDARRFNSSDKLVRFAGMDITVYSSDAKRAPGHLSWQGCPELRWAVFEAAKCAARRGSPDYAYYHQLAAKHDGHNGKNPTLAVERKLLRRCYHTLRELGDAALSAPTSHREAA

SEQ ID NO: 72558 - protein, 413 aa, unidentified
MRRVIGIDVHRTFGEVVIWEDGILRHAGRVDMTRTAVEGLGKSLRPTDEVVIEATANSMAVSRVLTPFVARVIIANPLQVKAIAQAHVKTDRIDAGTLASLQAAGYLPQIWTPDAVTERKRRLAARRYQVVRHRTRIKNEVHSILHAHLIPKCPHADLFSTRGRSWLARQPLPDDERAAVDRHVRELDRLAEDLTVLDREIAQAAIEDPAVKRLITITGVNLTVATGIVAAIGDISRFNSPQKLVSYFGLNPRVRQSGLGAVHYGRISKVGRSHARAMLVEAAWAAAKAPGPLHAFFVRIRARRGHQIAAVAVARKLTVLCWHLLTKGEDYLWARPALVANKTRAMELQAGHPQQKGSRRGPAYAYNVKALRDQEMLVATQAERGYERFVAQWEPRRPKDAARGRASNRQGRK

SEQ ID NO: 72559 - protein, 345 aa, unidentified
MHSTTLAVDLAKSVFAIAVSSRPGRIDRQLRLTRARFLEFFARHEPAVVVLEACGSAHHWSRQLAAFGHTPILLPAQYVRPYVRRNKTDDADAAALLEAYRNEQIRPVAVKSIEQQALVALHRLRSAWMATRTARLNALRGILRELGVAIPVGARQVLPRLASLLADGNGPVPVTLHAPLLEVAAEIRDLERRIRDLDRQLVRQARALPAVQRLLTVPGVGLLTATALFALVGDLRRFRSGRHFASFLGLTPRERSSGHRRHLGAISKRGDAYLRTLLIHGARAVLWAAKARKQPDRLRAWALALERTAGHNKAAVALANKLARIAWAVSTRERDFENYPLPVAA

SEQ ID NO: 72560 - protein, 405 aa, unidentified
MQNVYECCCGIDVHKKLIVACLRNGKKAELRKFDTLTRSIKELANWLLENNCQMVAMESTGAYWKPIYNILELLNLDVIVVNAHHMKTVPGRKTDVKDAEWIADLLKHGLLKASFIPNREQRELREIVRYRKSLIEERSRELNRLEKTLEGANIKLSSFVSDLHGVSSRKLIEQSLVGEINQENIGDLIHASMKSKKSDLILAMDGVVSPIQKHLIKAILDHIDDMTRRIKDLDDIINDHMKGYDDAIKKIDELSGIGKRSAEVIVSEIGIDMSRFPSDAHLSSWSGLCPGNNESAGKRKSGKTNKGSKHLKSILVQCAKSAQKDKDSFFHAQYQRIVVRRGANRATVAVAHSMLIAIYHILKDNIPFKDLGSNYYTKFNVGAKAKYYIRKLQELGVSIPVSSTI

SEQ ID NO: 72561 - protein, 412 aa, unidentified
MKDLLEISCGLDVHKEKIVACILTGPLGKPTRSEIREFSTLIPDMIALRNWIVSKNCHHVAMESTGIYWMPIYEILEDAFSGDITLLVVNARHMKNVPGKKTDMRDSEWISTLLRAGLLNGSFIPEKRIREFRDLNRYRKSVIRDITSQKNRIEKFLQSSGFRLSSFISDIFGASGRNIILHLIEHGQIDKTALDSCLKTKTRNRIDEILMSVNGTLSEHQKAFLRILMTHYDSLKKHLAEIETSLEEDMAPFALQVEQLNSIYGISTTASCAIIAEIGIDMKPFKTAEHICSWAGLCPGNNESAGKRKSTSVTKGNPYIKSMLCEIAWVIAGKRNTYLSAWYWRIKQKKGAKKAIVALARKLLVIIYTMLKQGTVFDESCFETRRKNCEQKQLSRYIRELEKHGYHVEAQS

SEQ ID NO: 72562 - protein, 417 aa, unidentified
MSVKSVAVLSRSFDSAALSDCLWMSSVVLAFVEVWLMEKTARRRLGKRQERVSRYWNGPPLVPQIGLSSLAGGFNMEISTIGIDLSKTTFHLIGHSPRGEIVLRRKLSRKQLLIYTANKQPMLIGMEACGGAHYLARALRDQGHDARLMPAQYVKPYVKTNKNDYLDAEAIAEAVQRPTMRFVPIKTDEQLDLQALHRVRDRWVARRTAVMNQIRGFLLERGITMRKGPSHLTTALQIIFRDGDSSFSGRLLHLIIELKHEWDELERKVAEATAELARIAKQDDGCHRLMEVPGFGPIVSTALVAAIGNGISFRKGRDLAAWLGLVPRQHSTGGKTRLLGISKRGNEYLRRMMLHGARSVVMQMERNPSALGEWLTGLSARSHRNVTVVALANKIARIAWAILSKGTHYFAPALVAA

SEQ ID NO: 72563 - protein, 310 aa, unidentified
MEEKVFVGVDVSKDSLDVAIGAQKEIITFANDQKGVDSLVKKLKRIDAQLIVFESTGGYELLATSCLAEAGLAVVIVNPRQVRSFAKATGILAKTDAIDARVIARFAEAVKPEVRPLKDHQTSELTALVTRRRQIIEMIVAERNRLKLANKRNKKDIKDHIQWLQKRLDKIETDIGKMIQSSPIWRCKDDILQSVPGIGPITSATLICDLPELGVLSPKKIAMLAGLAPLNCDSGKYKGRRRIWGGRGSVRSILYMATLAAIRCNPAIKEFYQRLLAAGKCHKVAATACMRKLLIIVNAMLRDQTLWQQN

SEQ ID NO: 72564 - protein, 381 aa, unidentified
MSRQPAAPAAVLSALMKKQITGKNIEQGSGEAKCNRVLKLGLDMHYRQVTVAMQEEAGAIKAVGRMDHDGFGNWVEKKLKAGWEIYSCYEAGASGYWLHRDLEQMGVKNLVVAPKAMGQDKAQKTDRRDSAELVDQLDRYLGGNRKALSPVAIPSIEQEQKRALIRYHRQIMADRSRYEARGKGLLCAQGIEVQGKWWQPQAWKELKTHGRFQTWMQTQLQGWRSKLLSAEQEQQKLRKQIEALAPALLPKGVGAYSAVALEYELKGLARFKTARALSSYTGLCPGIHSSDGRGKEGSINRCGNAAVRWNLVEMVWRLLKWQPHYQVVGQLGAALVRSKRARKRLVVKAARQLAIDLWRLETGRVSAQELGLVMQPTSKAK

SEQ ID NO: 72565 - protein, 358 aa, unidentified
MQRNKKTFKGQNIYIGIDVHKKNWQVAVITESGYTERLSTAADAKALFKFLKSHYPDGNYRAVYESGFSGFATHYALTELGVSCVVAHAADIPSSQYELTMKSDRIDAEKLARALRAGLIRGIYVRPKDNLDDRGVLRIRKTIQIQVGGYKTRIKHLLHSNGVELPERFSRSGTHWSRAFIAWLREDVRLLSDTRRSLDLLLLQVETLRANLLEATRRVRALSMTDRYREDCALLMGIPGIGLTVAMTILTEVCDIGRFGNERQFASYLGLVPTSHSSGERVSHGEMTFRGNKHIGPLLVEASWVLIVRDRELGRMYTEYRWRMAGQKAIIKIARKLSNIIFAVLKTRKAYEPYRRDA

SEQ ID NO: 72566 - protein, 409 aa, unidentified
MLDRRTVGLAIPCQVASSQSLTPFHQAGNRIAEIMKRRSSDDKVVAPTNTEPSKERPMDTSKYIGMDVHMATTVIAVANSIGKVVSETILETKATTILDFLKSQRGTVHVTFEEGTQAAWLHDLIRPHVAEVVVCNPREIPAQDNKADKSDAKRLAELLRTHGLKAVYHGEHGTQALKELTRSYGAILSDSTRVKNRLKGIFRGRGISCTGTSVYSKKGRDQWLKKLDDSAVRSRISKLFKELDCLTELRNEAEKELLAEARKHPATKILRSIPGIGPLRAAVILGFTITPHRFRTKNQFWKYCGLAVMSEITGEYALIDGRVVRSRKKPLVRGLNINYNHALKEAFKGAATTAAMGVWRSHFDAMVANGTRPSLVLLTLARKIASITLAVWKKGELYDSNKLKFVHAV

SEQ ID NO: 72567 - protein, 331 aa, unidentified
MKQIYGIDLSKEKFNVSFIDLKGFLKGMEVNNNYSGICKFLAKIQKDAILCIEYTGIYGDLLVFLANCFNISICAIPGYEIKHSLGMQKGKSDPIDASKIREYGERFSDKLKETVFYSEQLHELRELHSLRDMLVKQRKMLQTHGKEKNRAPYCSVKVKLVSQEILRTLDKQIREVENQIQEVINADPELAENSRLIQSIKGIGAVTANELIIKTHNFKKINTARKAASFAGVCPFPNSSGKMVKKSKVSPMSDKKLKTLLFLCASSAIQNNKDMKHYYERKIAEGKPGYLALNNVANKLLRTVYAIIESKQMWDPLHICLDPREGEKKAA

SEQ ID NO: 72568 - protein, 345 aa, unidentified
MKQYAGIDVSLEASYVCVVDAEGKIVREAKVLSEPDALISWFAEHPVAMERIGLEAGPLSQWLYASMSRAGLAVELLETRHVRAAFKTMPVKTDKKDARGIAQLMRLGWFRPVHCKSVPAQEVRAMLTARKLVQGKLHDMEMSLRGILRGFGLKVGATTPKTYPARIRTLVDGHPALEMIATALLKAREVLAEELRGFERRVRAMARQDERAHRLMTTPGVGVVVALTFVAAVDDPQRFRSSRAVGPHFGLTPKKYQSGETDYTGRISKVGDAGVRTALYEAANVILMRPVKGSDLKTWALSVAKRAGLRKAKVALARKLAVVLHRMLRDQTSFVTHKAAPLAAA

SEQ ID NO: 72569 - protein, 402 aa, unidentified
MMVIGVDTHKRSHALCAVDEGTGRVRGNREIKADEPGHQAAVRWARGLDSERVWAIEDCRQVSRRLEQALLAAGERVIRVAPNMMGASRRSQRERGKSDEIDAQSVARAVVKDGAESFPAAYLDERAMEIRLLFDHREDLVRERTRMQNRLRWHLLELCPDLEAQLKRGALSQLRALERLERRLRQLAPCVRLRIAREEPAHIPALTRQADELERELLELIRAYRPALLDEQGCGALTAALLIGRTAGAERFRSDACFGRQSGSAPIPCSSGQQTQHRLDRGGDRQLNRALHTIAITRAQRDPATKEYLARKQAEGKTKKGALRCLKRYLARRFHRPLSEPPLPAQRTITGEQLEPGPGARAFDASRDTSRSLEPSAIPKRPAPKPEAQRINAAPNPMICVA

SEQ ID NO: 72570 - protein, 332 aa, unidentified
MKFIKQSVSADIAKDKFDACFSQLTSEHRVVVKATRKFANTLKGFAEFAQWVSKWEDSQVELVVIMEAIGVYYENLAWTLHQAGRKVVVVLPNRAKQYTQSLGHKSKNDRLDARALAHMGAERDMEPWQPMSQQLFLLRKLTREHEQVQQMCTEVISRLHAESHSMLQGKSTVRRLRKTLQLYEAQLQAIQLEIAETIQADPLLSDKIKKITTIKGVGLLTAATIVAETSGFALFTSQKQLTSYAGYDVVENQSGKRSGKEKISKQGNSHIRRILHMPALNAVSLNVPVCRALYERLTGKGKKKMVAYVAVQKKLLILIYTLWMRAGSRITI

SEQ ID NO: 72571 - protein, 336 aa, unidentified
MDQQCHYVGLDVSLETTSICVIDDAGAIIWRGKCRSDPDTITAIVRQHAPGAVRVGLETGQLSNWLTLSLRRRGVPVVCLQINKTDANDAFGLAQVVRTGWYREVAVKSMDAHTLRMLLVARSRLVSQRQATANTIRGLLKTFGLVVARGSKGLFPVRVREQIAGNPALIAIIEPLLAVWHAIRDQVAMLDRQMLARARNDQVARRLMTIPGVGVVIALAYTAVIDDPARFRRSVSVGAYLGLTPRRYQSGEVDTTGHISKCGDSLLRGYLYEAAAVLLCRDARASILKSWGLGLAKRIGMRRAKVAVARKLAVIMHRIWSDHGEYRWTAIPPTAA

SEQ ID NO: 72572 - protein, 348 aa, unidentified
MTLTTIGLDVAKLVFQVHGVDENSRAALKRKLHRHEVVTFFEELPRCTVFLEACGASHYWARLLTALGHEVKLIAPEAVKPFAKKGKKNDAVDAAALCVAGSRPEIQFVPIKSVAQQAVLALHTARSLLVKQQTMLANAIRGLASEFGLVVPQGLHRLEELMVQVTAEASFPAVGRQALIVLHAQLQAAAERIVMLEEQIVVHARQNASARRLATIPGIGPITASLIAATMGDNITAFTSARHFAAWLGLVPRQHSTGGKPRLGRITKAGNTEIRRLLVLGATSMVRRAETWNSAAGIWLRSVLARRPVRLTTVALANKMARIAWALLTRNDVYRAQGRSKVAAGAAA

SEQ ID NO: 72573 - protein, 376 aa, unidentified
MRNVRFVGLDVHAETIAVAVAEPGGEVRSLGVIPNRCESVRRLIGRLGKPSGLRVCYEAGPTGYVLYWQLTELGVHCDVVAPTLVPVKSGDRVKTDRRDAEKLARCYRGGDLTAVWVPDAAHEALRDLVRARLAAKRDQLRARHRLSKFLLRQGRRAAEGVKVWTVKYLLWVKQQRFEQAAQEATLLDYLHEVEHAAERIVRLERAIDLAVESVPKSLQAVIAGLQCLRGVSKVSAVTLISELGQLSRFAHPRQLMGYAGIVSREHSSGERLRRGSISKAGNAHLRRIVIEAAWSYRHRPSVGPALAARQSGQADTLKAIAWRAQHRLHSRYRALLAKSKCTQKVITALGRELLGFIWAIGCEIERAHPSPLRKAA

SEQ ID NO: 72574 - protein, 347 aa, unidentified
MKITTSGIDVAKSVLQIHCIDEHGKVVMRRQLRRSQLLLFFGRLEPCLIGMEACATSHYWARKLIAFGHTVRLMAPQFVKPYRKNDKNDGNDAEAICEAVQRPSMRFVPVKSPEQQADLAVHRVRRRLMCGRTALINQLRGLLAEYGLVLPQGANQVRSKLPALLDDCSESLPPLAIELFRDLYEELVQLEQRIDAYDRRIERLYRANPVCQRLGQQEGIGALTATAFVATVAHAAQFKNGRQCAAWLGLVPKQDSTGGKARLLGISKRGDVYLRTLLVHGARSAMRHTPKRNDPKSRWVEQLRKRRGENIAAVALAAKHARILWALMVRGQSVGQPPDHQLEQSAA

SEQ ID NO: 72575 - protein, 347 aa, unidentified
MRFIIGCDFHPSFQQVAIFDNQTQQIRGLRLAHPEEAERFYRSLPGRARVGLEAGGHSQWFQRLLAELDHQLWMGDPARIRASYLRKQKTDERDALHLLELLRQDRFPRVWMPSPEERDLRQLLVHRHSRVRMRTQVKNQLQALMLNQAVQRRHKLWTAAGRAEMERVPLLPYAAARRAALLAMLDQLDREVAALDEQVAAVAAARPDTVRLMTHPGVGSVTALATVLTLGPVSRFRRAKHLASYVGLVPSEHSSGGKQRLGHISKQGSPFLRFVLVQAAQLAVRQDAQMKRQYVRRSLRRHRAIAKVAAARTLLVRMYWMLRWECDYPALLARMQACPSHSVARSA

SEQ ID NO: 72576 - protein, 325 aa, unidentified
MTAPLLAVLGIDIAKNKFDVALFRNGKYKTKSFDNKPSGFVSLATWLKQHDATAVHACMEATSTYADGLARYLFDVGHTVSVVNPARIKAFGESELLRTKNDKTDAKLIARFCESQKPAAWQPDPPEVEHLRLLGRRRDVLISMRTQEVNRLGGSDDAVNESIQKVVTFLDQQIEQITKSIKDHIKNNPDLKKKRDLLKSIPGVGDITIEVILSEVNGFEGFDTIEQVVAYMGLSPKEKSSGTSVKGKSSICKIGNARLRKVLYMPALSAIQHNPFVKALYTRLIAKSKNGMIIACACMKKLVHIIYGVIKTGKPFDPAYNVKTA

SEQ ID NO: 72577 - protein, 345 aa, unidentified
MEIRTIGIDLGKTVFHLVGVNARGEVVVRKKCSRTQLLRFTSNLPACLIGMEACGGSHFLGRALKEQGHDARLMPAQYVKPYVKTNKNDYIDAEACAEAVTRPRMRFVPIKSDDQLDLQSLHRVRERWMVRRTAVINQIRGMLLERGITIAKGRRHIEESLPGILEDADNKLSGALRVLLSELRREMQYLHGQIEECNKLIERIAGELEQCKHLLTVPGIGPVTATATVAAIGNGAAFKRGRGFAAWIGAVPGEHSTGGKQKLTGISRRGNKYLRKLFVQGAHTVLLQRSKQEPGLSMWLAKLVSRKRPQVATVALANKMARIAWAVLSKGEAYRPPLAAQTVAA

SEQ ID NO: 72578 - protein, 310 aa, unidentified
MTVCVGVDVAKGHLDWVLGAQGEVKRVPNSKASVGRLVRKLRTIEFDRVVLESTGQYERLLFESLQDEGIPAVRLNPLRVRRFGEGMGVLAKNDAIDARMLALFGEKAEPEVRPRRTTRERLLCDLAARRRQIIGLITSEKNRLEHAAPCVIAEVRGLVRILENRIEKLDHKIDGVISEDEKQKGDFERLQTVPGVGPKIARALLIDLPELGTLDRRRISSLVGLAPYAKDSGKRIGSRRIHGGRAAPRTALYLAAMVGSRFNPELKVMYERLRAAGKPPKLAFVALARKLLTILNAIVRDQSEWKSMSA

SEQ ID NO: 72579 - protein, 425 aa, unidentified
MMKLKYSICCGLDVHKNVIVATIVTTNKDGISEYLQKSFSTINSDIQRFHNWLIENNCYHVCMESTGKYWVPVFNLLEDKINVVIANPKWVKAVKGNKDDTKDSKWIGDLFRLGLVKGSYIPCKKVRILREYTRYRYKLVSCRSSEKNRYQNALTVCNVALDSIVSDIFGKSSTSIIDYLLEQSGTSINHEEIASKLLRSLKSKEDAVIESVEGYQMTDAQKYRMRLVRAHMDYITAEINDVDKMIENMISSNPDFENAVQFLCTIPSVKRDSAITIISEIGTDMSQFSSSKRLCCWAGLTPGSNESAGKKKSVRITRAGVYLKPALVQCAHAAVKSDKSPYYKKKYESLVKRRGKKRAIIAIARMILTAIYQMLSTGEQWNPSDLYKIDMPVALVEKQKAKAIKQAKKLLQREGLLPPDEPLAS

SEQ ID NO: 72580 - protein, 348 aa, unidentified
MTTTMALGIDLGDKTSHACLVDDVGVPVLRERIRTSPDAMRAFFAPFAAATNKPVVVMESGTHSRWVSELVTELGLEVVVANPSHVRLIYGSKTKTDRFDAEALARLARVDVTLLHPVTHRSRQAQADLVLLQTRDAIVRTRKVLISHMRSVVKASGHRLPDADADGFARKVADLLPDELRPALVHALAVIEAMTTQLKLVERAIERVAAVSYPETKRLTQVPGIGPITSLAFVLSIEDPQRFSDARDVGAWLGLVPRKDQSGGRDPHLRITKAGNSFLRRLLVNCAQYIAGPFGPDSNLRRFAERMGPRGTPRRKKAIVAVARKLSVLLLTLWRSGAEYHPLHGVAA

SEQ ID NO: 72581 - protein, 409 aa, unidentified
MLFAGIDWASAEHAAAVHDDAGRALASFMVAHSEEGLDKLVGRLRAFGEPGELTVAIERPDGRLVDRLLEAGHPLVAVSPNAIKAWREGEVVSGAKSDPGDAAVIAEYLRLRFHLLKPLRPFSDHTRALRAAVRARGDLVAQRTAAHNQLEATLDAFWPGAKEVFSDVTCKIALAFLQRYPTPASAERLGDKQMAAFCKKHGYTGRRSPAELVERLRRAPVGIAAGAETAARKVAVLGYVAVIASLNAAIKDLDKEVATRLGEHPDGEIFTSLPRSGSISAAQMLAEWGDCRQAYAGPEAVAALAGMSPVTKKSGKHKAVHFRWACNKRFRTAVHIFADNSRHGSDWAAGIYARARARGADHPHAVRILARAWIRVIYRCWIDGVPYDPAKHKAAVALTTNSDVTSQAA

SEQ ID NO: 72582 - protein, 314 aa, unidentified
MSKSLYFIGIDVSKDHLDVAIRPSDQQMQFGNDDEGIDKVIEALNPVSPTLIVLEATGSYHRLVLSRLIAAGLPAIAINPRQARDFARAIGRLAKSDAIDADVLAAFGEKIRPELRAVADEATQQLEAICTRRRQLVGMLTAEKNRFHSSPSSMRSLIKKHIQWLEKHIAELEKDLDDQIRSSPAWRDKDDLLRSCKGIGPTTSHTMLACLPELGQLNRHQIAALVGVAPFNRDTGLYRGRRHIQAGRTDVRCVLYMATLAAIRSNAVIRRFHQRLIAAGKLKKVAITACMRKLLTILNAMLRSNKHWNIDFVC

SEQ ID NO: 72583 - protein, 344 aa, unidentified
MEIRSIGIDLGKTTFHLVALDRRGEVLVRRKFTQKQLLTYTANLQPCLIGLEACSRAHFLGRALREQGHDVRLIPAQFVKPFVKSNKNDFVDAEAIAEAVERKNMRFVPIKTDDQLDLQAIHRVRDRLIARRTAVINQLRAFLLERGMVFAKTPAKLRMAMPEILENAENDLTPQMRNLLELLWEEWKMVEQQIGVLSQELERIADTDAGCSRIQQIPGIGPIVATAIVAAIGNGAAFRKGREFAAWLGLVPRQYSTGGKARLLGISKRGNPYLRKILVHGARAAVLRIKRDQAPIGAWMDALERRAHRNVLIVAFANKLARIAWAVLSTGEPYRPCTSAAISD

SEQ ID NO: 72584 - protein, 406 aa, unidentified
MQGPVITVDVSKGSCHYQPYVSNGHPMRKPKVLHDTVEGFQSLSDLIDTMKDRYECETIPVIFEATGVYHHCLQKYLDDHQIPYYIISPLMSASYRKTTPNSNKTDDLDCSHIAKAYYGECNLFPYDKPSKSFHNLRELNRYYECELNHLRMRKNTFRKYLDIVYSRLDKCFKGHSSLYDEIPMEVIKQYPHPSLLLKHKEETIVKKIEKKTSHNALFIQNIVHEMYECSMHCYSGADVTDVESMILPELVDDLQSQKERCDEILKQLVSEAQKTPYFTSIVSIVGIGDNLAARIIAELGDMSRFSCRRAITAYAGLNPKIRQSGDMDGIHLAISKKGNKHLRCLMYLAVSCNYRLKKGDVLYEFNQKKRQQSFSLLKPKAATIATAHKLLLIICALCTNGTVYRS

SEQ ID NO: 72585 - protein, 401 aa, unidentified
MGSLWAGVDVGKTHHHVCVVDDDGTVVMSEKIPNDQQSISGIAGRLGKRRKPLRWAVDLRGGPASLLLAVLFDRGADVCHVSGTVTSRMAEAFHGERKTDAHDAYVIAQTLRMRGDLPTLTLADGVQQQLKLLVSRRLDLVADRVRITARIQDLLTMISPALEKALNLRSRGALRLLAQWQTPGGLRRAGEARILAYLRQHGVRAAKALTAKVLTAARTQTVAVAGEATAASIVAQMAADLEAVSERITAIEESIAVAVAEHELGEIVTSLPGIGSTLAAEFLAHAGTLTTYPSPAALAAYAGLAPISRDSGRRQGHQVRPHRYHRGLRRVFSMSSFTALTHCPRSRAYYDKKRAEGKTHRQATAALSRQRLNVLWACIRDKAPYQPKQPRSAELASCELA

SEQ ID NO: 72586 - protein, 368 aa, unidentified
MKKVSTIVAKPSKKIWQRRLNIGLDLGDRNSWYCVLDESGQIQREQRVRTNATALREVFGEMARSRIALEIGTQSPWISRLLSELGHEVMVANARKVRLIGESRKKDDRLDAQTLARLARIDPQLLYPVKHRSAQAQADLMMIRARAGLVRARTGLVNTARGLAKSYGERLRGCNVRNMNPEKAEGLSPELQTGLEPLLACIESVSEQIREYNERMEKLAQDSYPQVGLRKQVKGVGTLIALTFLLTLEDPHRFRKSRDVGSYLGLQPGRRNSGQSEPQMHISKEGDPYLRTLLVQGAQHILGPFGGDCDLRRWGGLKLAERGGRSGKKRAIVATARKLAVLLHHLWVSGEVYEPLHNSQRRPLTIAA

SEQ ID NO: 72587 - protein, 409 aa, unidentified
MAISKNLFTIAPLEYDIFFGLDVDKKSAAITILDHEQKLKSLTVPNNAEMLINYTKKHFSGKRVAFAYEAGPTGYGLYDRLTQAGYTCLVVTPSMVPTPAGSRVKTNRIDSMRLATSLRGGQLNGIRVPSRKYRDLRHLTQLYKTTTMQSRNYKCRIKAMLLMEGISFPNTSKSDHWSNATIKRLETMDCAPTIRFKLDVLLGNLRFYREQLLKVKSALRSFCNNDPDLADSVRLLLSLPGIGWIITTVLLARIGDWRNLKNVRELAGFIGLTPCEKSTGEDVNKGNITRSGDSYLRNILIEGAWSAINKDPELAEFYQRVYERHPRDRAARKAIVAVARKLTTRIYAVLTQRRVYTSRYGEYNISEKTSNKKKRLNAPKDDSALRRTRKYVLKRGEIFSPVLTGSTAR

SEQ ID NO: 72588 - protein, 354 aa, unidentified
MMIIGCDYHPAFQQIAFVDSDTGELQERRLQHPEEAEQFYRDLAAQGVKVRVGMEASGQARWFERLLAELNFELWIGDATEIARKRERKQKTDRQDAQHILRLLLKDDFPQIWVPSWENRDLRQLLWHRHRMVQARTRIMNQLQAVALNEGLRCKKRLWREAGREQLESFPLAPQASRRRRDLLELLDRLSPTITELTQTIEQEAEKCPEAQRLMTHPGVGALTALAFVLIIGRAERFQCGKQIGSYLGLVPLEESSGNRRRLGHITKQGNALLRFLLVEAAQVSARSIPEWRNKYFHLAMRRGRKIAKVAMARKLAVHLFWMWRKGWDYEQVRKFGSHAGQPGNRDGVQSNTE

SEQ ID NO: 72589 - protein, 354 aa, unidentified
MTIIGVDFHPEFQQIASVDTDTGEFQEKRLAHCEEAEKFYRALAASGQKVRVGMEASGHGRWFERLLAELQIELWIGDAAEIRTKRVRKQKTDRQDAQLILRLLLEDRFPQIWVPSWENRDLRQLLWHRHRMVQARTRIMNQLQAVALNEGVRCKKRLWRERGRQQLESFRLAPWASRRRRDLLELLDRLNPTIAELSQAIEQEVEKCPPAQRLMTHPGVGPLTALAFVLIIGEADRFQCGKQVASYLGLVPLEDSSGNRRRLGHITKQGSSMLRFLLVEAAQVTARSLPEWRSKYLHLMMRRGRKTAKVAMARRLAVRLYWMMRQQWGYEQWVKFGSHAGQPGNRDGVQSDTE

SEQ ID NO: 72590 - protein, 399 aa, unidentified
MNRNRTVAGLDVHKDSIYLCIMGHDEAIIFEKTYGVLTPDLRQMCNDMVARGVTEAAMESTAVYWVPVWNELCDSMELKLVNPYFIKQLPGRKSDVKDAQWIAECLLKNLIKGSFVPEPIVQDMRKLNRRIFDLQEDTTYYSNKLDAALHRCGFRLSNYVAKITGKSYRKAVEAIASGVTAPNELIKCVHGRIINKHGRETILASMTGSFSTTDITVIRQYWELLDTYARHAEECQSQLTTLCETYFPTEYRRLQTIPGVKERAATAIIAETGVDMKMFATAAALVGWCGLKPRNDVSNGRYKSRKITHGNKYLRHILIEISWTASRTRNCFFSNFSYIQVTQKHKSKMEIQVAIARKILVAVWHMLSKKEDFIDLYLKRLEEQRMMEEKIRQLESKMA

SEQ ID NO: 72591 - protein, 340 aa, unidentified
MGQVATIGLDIAKSVFQVHGVDAEGGVVIRQKLTRARLLKFFEKLSPCLVGIEACGTAHHWARELIGLGHDVRLMPPSYVKPYVKRQKNDMADAEAICEAVTRPTMRFVPVKSPEQQSVMVLHRTRSILIRQRTQISNAIRSHMAEFGMAAAIGRQGLQSLIEVVDNPADERVPPEARGCLAMLGVQLRLVNEQVLETDRLIRTNARSTEVGRRLMEIPGVGPLLASALVGTIADPRAFKTGRNLAAWIGLVPKQNSSGGKERLGGITKQGDRYLRQMLVVGALAVVRYAVRNGTRRPWLVQLLARRTPKVAAVALANKTARMVWAIMTSGERYREPLAA

SEQ ID NO: 72592 - protein, 349 aa, unidentified
MSEKPNSSVAVIGIDIGKNSFHIVGHDERGAIVLRQKWSRGQVEARFANLPPCLIGMEACVGAHHLSRKLNGLGHDARLMPAKYVRPYSKGQKNDFRDAEAIAEAVQRPTMKFVATKTADQLDLQALHRVRERLVSQRTGIINQIRAFLLERGIAVRQGQRFLRAELPRILATPPDVLSPGMARLIEDLAGDWRRLDERIEGLSAQIDVLARADSGCERLMSIPGIGPIISSAMVAAIGAGDAFTKGRDFAAWLGLVPRQMSTGDRTILGKISKRGNRYLRVLFVQAAWVVLIKPKSWERHGLKPWIEAAKKRLHHNVLAIALANKLARIAWSVLARGRGFEASKLQVA

SEQ ID NO: 72593 - protein, 360 aa, unidentified
MHATTVAVDLAKSVFQIVVADDQWRIIDTQRLTRSQFERWFVNRSVGLVVMEACGSAHHWARWLGNLGIAVRLLPAQYVRAYVRRNKTDATDAAALLEAARASDIRPVRVKSVEQQALQGLHRIRSLWMGTRTSRINALRGFCREFGITIPQGARTGIETMGRILADPQSAVPELIRHTASQLLEEIRLLEARIAQVERLLSQAARQSPACTLLLSVPGIGLLTATALVAATSGDVTHFQDARHFSSWFGLTPREYSSGSSRYLGRISKKGDRYLRMLLTHGARSVLRAAKVAQGAGKELQGVRRWALDVQGRSNHNKATCALANKLARICYATLRDHKPFDEAARLNRKERRQSFAMPD

SEQ ID NO: 72594 - protein, 322 aa, unidentified
MAMLSFCGIDVSKDRLDVMVLPEQQCSSVRNDVVGWSELIERLRGFSIAAIGLEASGGYERGVMRALLAAGMSVRQINPFKLRQFAKASGVLAKNDRLDARMIASFVAIMPTHPAQRRSPAAEQLAEMVTVRRQLSDEKIAAENASRMLENAMLQRLSRHRIARLAADIAAIDERLVEIVVSDAALAHRYRLLTSMPGVGAVLACSLIAFLPELGQLSRTKIAALVGVAPYDFDSGKLKGMRCIWGGRASVRSVLYMAALSASNWNPTLKAFHDRLAATGKKPKVVIVAVMRKMITVLNAMVRDGIVWVDRQNGRHSVPTAR

SEQ ID NO: 72595 - protein, 342 aa, unidentified
MDHYVGIDVSLEASSICVVDSNGKIIREGKVASEPGALIEWLRNLKLQLTRIGLEAGPLSQWLYAAMRQAGLAVELLETRHVRNALETMPVKTDRNDARGIAQLMRLGWFRPVHCKSIGAQETRALLTARKLVQVKLHDLEMSLRGILRGFGLKVGPTTPVRFEGRIRELVAGHPSLEAIAESLLAVRVTLRREFERFEKQLRTMARCDTRVRLLTSVPGVGAIVSLTFVAAIDDPTRFKSSKEVGAYFGLTPTKYQSGETDIDGHISKIGDAGVRAALYEAAHIILTKPLKGCTALKSWGMKLAKRGGMKKAKVAMARKLAVIMHRMLADGASFRHLAAAV

SEQ ID NO: 72596 - protein, 399 aa, unidentified
MSNRRAQVWAGVDAGKGHHWAAVVDETGATLWSKKIDNDESAILAALGEILDLADEVHWAVDISGTSSALLLALLAAHGQRAVYVPGRTVNRMSGAYRGEAKTDARDAYVIAETARHRGDFAAIDVPAQLAADLALLTAHRSDLVADLVRMINLRDVLTGVFPALEQAFDYSSHKGALVLLTGYQTPAAIRRRGRARLTAWLANRSVRSADEVAATALEAAQAQQAALPGEDVAAQIVADLAGQILALDERMKRIDKQIRETFRRHPQAGIIESLPGMGPILGAEFVVAAGDLSAYADAGHLASAAGLVPVPRGSGRRTGNLHRPKRYSRRLRRVFYMSAQTSIIREGPNRDFYLKKRGEGCRHVQAVIALARRRASVLWALLRDGRVFTSAPPVTQAA

SEQ ID NO: 72597 - protein, 419 aa, unidentified
MAKVHYIAQEAVLVAIDISKKRNDVLIQIPGSTRRRRLTVLNQRAEHDRFIDQLKSFERPVLAGFEATGNYHRALAWRLVDAGIETRLISSMALARQREAIHNGWDKNDPKDAQVILHMLATGVSQTYQDPLAAGLADIQELSKTHEAVSRAKTQTIHRILTHYLPLYFPEIERFLNSSRRDWFFALLEKFPTPASITALSPEDFSMAVWDIVGKKTSKARLINDIYETAKESIGLPIPIDSKAIAMFRMVLAEARSLNRQRDAIEAEAEALLGGTRDYEALKQIPGIGPIISLTILAEAGDLRRFGHHRQFLKFCGLDLSTHQSGTFRGQTKLSKFGNARLRKALWMAGQVAIRQKENSFRDKYTRYIAKDRDNADLKRKALSAVTAKMARTAHAVIKSGKAYRPFYEGPVPGGRTSL

SEQ ID NO: 72598 - protein, 421 aa, unidentified
MARKSKDNKILSVIHPICCGLDVHKAKISACLITTNESGKEDYEIREYGTFTDELIQLREWLLDNNCLIVAMESTGVYWRPVHNIIEGYLEVILVNARHVKNVPGRKTDIEDSRWLAGLLRVGLVRGSFIPEKAVRQWRELGRSRKKYSQSLGDYKRRVHKVFETANIKIDTVVSDLFGVTGRNLIELLCAEESAINVEKIEQCAKGSLRSKVAELYRSIQGFFEEHHRFLLMSLMRMIAIIEMEMVFISERMKAVMGSYDEMITRLDVVPGINEVSAQYVLSELGPSLTDFATSGSLASWSGLCPGNNESAGKRKSGKSPVRKHIFKAIMVEIAWAAVKTKGTYYRDKYYRLRSRLGPKKAIVAIAHRILKAIFAIIKHGEDYKELGEDYLAKKNSKSKVSILRKQAKKLGYELVPVAAT

SEQ ID NO: 72599 - protein, 382 aa, unidentified
MENPRPHEPAFTRSAREVAQGRGAEASLIQIVRADMAKTATEVQVFAGVDVSARELSVAMRSATMDREEVQSFSNNAAGHQALLGHLLRGKGRARVCLEASGNYSLDLALTLHANRRAEVSVVNPRRARRFAESLGERNKTDPVDAHVLCQYAVRMPWEPWVPPSALALRLRGLTRAIEALGVTQTQEKNRQHSLRASRALPTFVIRELQRHLEYLQLRITRLRREALRLIARDPELDRRFRLMLTTPGIAETSALQILGELAALPATLDARQWVAFAGLDPVRFSSGTTVDKKPRISRGGSRHLRRALYMPALVAIRHEPHLRAFFQRLVAHGKAPLQAIVAVMRKLLHAFFAMFRSDHSYDGSRLCLVEVASNPVAMCAA

SEQ ID NO: 72600 - protein, 351 aa, unidentified
MIVIGVDPHKQSHSAGAVEAGSGELVGERTVRARGVGHEQLLAWARSFGEERLWALEDCRHVSVALERFLLGRGERVVRVPPKLMAGARRSSRARGKSDTIDALAVARACLREPSLPVARLAGVEREIRLLCDHREDLVGERTRIQQRLRWHLHELDPELELPVGCLDRYVWLDRLAHRIAEREQTIQLRICAELVARCRELTERANELERELGRIMRAQAAPLLALPGCGVLTAAKLIGETAGAGRFADEARLAMHAGAAPLPASSGNKHRHRLNRSGNRQLNCALHRIAVSQGQHHPPARDYLTRKQNEGKNRKEALRCLKRHLADVVFRTMVADAVGVRGLSSEALTT

SEQ ID NO: 72601 - protein, 415 aa, unidentified
MKHDNYAALVALDWADKTHAFARQSVGAERIEQGSIEATPEALHAWLTALGKTHGGQPVALAVEAGRNCLLHALLEYPWLTIYPVHPATSARFRTAFTPSGAKDDGPDAVMILTLLRMHRAQLTPLILETAPTRALAALVAARRSAVDQRTGTANQLASVLKGYFPQALRLAGDDLTKPLALAFLRRFPELAAVQKARPATLAAFYRQHGSRSAERIAERLARAARARPLITDRAVIAPALLLVAMLVDLLEVHARHIALLETRIAETFAAHPRAELFAALPGAGPALAPRLLVALGDQIERYPNAASLQKYAGVAPVREKSGQKQWTHWRWAAPKFLRQRLVEWAGQTVVRSVWAHAYYHRQRRAGKAHHAILRALAFKWIRILWRCWKDEVPHDETRYLATLAKRGSPLIAAA

SEQ ID NO: 72602 - protein, 453 aa, unidentified
MPRKKLHKKNQRVAPPIMNPDAAGIDIGATEIYVAVPADRDPEPIRMFATFTQDLNRLADWLQQCGIRTVAMESTGVYWVPLIQILEVRGLESYLVNAKHVKNVPGRRTDVSDCQWLQYLHSVGLLRASFRPAPEVCALRSLLRHRNSLVEMATTHVQHVQKALDQMNLQIHHVISDITGTTGLAIIDAILAGNRDPYALAALRDPRIRANNDTIAKSLVGDYRPEHLFTLRQSVDLYREYQQRIAACEEEMQRFMKGMESSATSSASLPVAKDSVRKCKVMLPAKALALREQAYRILGVDLTAIPAISVLHVQAILAELGDGISKFRSAGAFSSWMGLCPDNDISGGRVLWTGTRKVKNRVAVTLRMAAQSLQKSESALGAFYRRMRTRLGAPKAVTAAAHKLARIIYHMLKTREPYDESVFARAEIKYRQRAENRLRAMAQTLGYTIAPAK

SEQ ID NO: 72603 - protein, 498 aa, unidentified
MVYAGIDVGKGWLDLALLNLDGQEGEAGKDRAKEQQLLGKKSKESKKSDVIEHYRFNNNPPGRESLVKLLLTRRPRQVVLEASGIYHLPLLALLLEADVAAFLANPYQVAAFRRAWGARNKTDSQDAVLLARFAKAYEGRLERRLPPPAKLAYLKRLLVYREQLIKRATMIKGSIEAAIWVVEAANWGTEAANRGTEAAGQTTEVTSWKAEEAVGQERNRETGQGQVAEQGGEQEAERDGGAEQDRDASQILSWLKEDLQRVRERLSEVAQEINRLLSLLPEAAVLQEQKGVGPQVAAAVLAFLPPALWGSPKRAASFSGLIPEQQHSGSSLHRSRLSKKGPALLRKKLYLAALVAVKHDPEMQAFYLRLLSRGKKRKQALLAVAHKLLRRLTGRLKAYYREQGQRQGDDQRQGRGQKQSQGRKRGHKQNCERGCQENYKESCEPRHGPSDEQNNERNNEPSNEHGELSNEQGYDDRQAHRLVTKQVLEVVEVDGVAG

SEQ ID NO: 72604 - protein, 417 aa, unidentified
MNSNEFDGTVAGCKGGIILISIGIDVSKGKSKVCAINHFGEMLISPYDVYHTKSSLEILVQQIRFLNDECKVILEATGHYHYPMVAYLKENGIPVVIANPLLMKKFNDVTIRKGKSDKLDSIKIARFGLQYWISLRESIKENNIYEDLSLLSRQYLHYTRMLVTSKLSLLTILDQTMPSINEVFRLNAEISGKDKLRDFIEEFWHFDNITKMSEKKFILAFEKWTKKKGYRFSETKAKEVYALAMDGIPTLSSSTAATKQAVLESARVLKEIENTLTVILSQMRTLANGLKEYHILTSMPGIGDKLAVIFIAEIGDIRKFHSGKSLIGYAGIDSPPFESGKFEGTHRHISKRGNKHLRRTGYLIMKSIKSHHPMSDPVYEFMLKKEMEGKAKKVAMIAGFNKFLRIYYAQVKEAYQS

SEQ ID NO: 72605 - protein, 406 aa, unidentified
MLFVGDDWAEDHHDVEIQDETGRRLAKARLPEGISGIARLHGLVGGFLPEDGDPAEVKIGIETDRGPWVAALIASGYQVYAINPLQSARARQGQDVSGAKSDAGDAHVLADLVRTHSHQLRTVAGDSAQAGAVKVLTRMHQSLIWDRTRQVLRLRSSLREFFPAALEAYDDLDSPDVLELLTKAPEPSRAARLTRAQISAALKRARRHDRDTKTTAIMAALRTEHLTQPPVVAAAYGATVRALAALITTSNEQITALEGPVEACFGRHPDAEIYLSQPGLGSVLGARVLAEFGDDPTRYAGARARKNDAGTSPITRASGKKKVVLARYVRNKRLSNALHQQAFSALSGSPGARAYYDELRDRDISYNAALRQLGNRLVGILHGCLKTHTRYDEATAWNQHIQQAAA

SEQ ID NO: 72606 - protein, 378 aa, unidentified
MKRILKIGMDVHSTNYTLCAMEPVIGAEDRVFANVQVAPDYKNIILFIENLKQKLGLNDTYDIECGYEAGCLGYSLYNQLTAAGVKCVILAPTTMLTEQGQRIKTDSRDAHLIAQCLSYGGYHPVYIPTEQDDSVKEYLRMRDDHKKALKKIKQQIGMFCIRHGYYYEGTKWTIAHLKWLKKLELTPMYQETLNEYLTSYDEQTAKIERFDARIEEIASQAEYAEKVKKLGCFLGIKTHTALSLIVETGDFTRFAKGNVYAAYLGLAPGEHSSAVKVNRLGITKAGNSHLRLLLVEAAGGICKGAIGHKSKALRQRQQGNSAEVIAYADKANARLRSKYYRLIRHGKKRNVAVAAVARELACFVWGMMIDNINVIEAA

SEQ ID NO: 72607 - protein, 449 aa, unidentified
MREPQEIEDEEHEQTWERVAAIDVAKASGMVCTRVAHPSRPGRRLTKVWEVPATTGAISELAGQLAGLGVQKVTVESTSDYWRPFVYLLQAGGLSVQLVNAREVKNVPGRPKTDRLDAVWLAKLTERGMLRPSFVPPAEIRRLRDYTRLRADLTQERARHYQRLEKLLEDALIKVSSVASKLDGLSVRDMLEALIAGERDPAVLAGLARGKLKAKHGALVEALAGRFDDHHAELARMLLDQIDALGGQIGTLTVRIEELLAAIPAADGVDADGTTGPGAGSGPDAVVLPAVARLDEVSGIGPGTAQVIIAEIGLDMGVFRTPGHLVSWAKLSPRTLQSGATRRAGKTGKGNPYLKGVLGEAAAAAAKTDTFLGERYRRLVKRRGKLKALVAIARSILVIVWHLLADPTARYHDLGAGYYASRIDKDKKARNHIRQLQALGFAVTLTPAA

SEQ ID NO: 72608 - protein, 359 aa, unidentified
MASMPSQLDPVSRVVVGGVDTHKDLHVAAVVDTEAVVLGTESFSTTRAGYRAMVRWMRSFGDLRKVGVEGTGSYGAGITRHLTEAGIEVLEVDRPDRSDRRRRGKSDTLDAQAAALAALVGRRTSTPKRKDGLVESLRVLRLTRATAIRSRTKALQLLRMHVVSAPEELRDQVRNLTRMQLLRTCAGWRPDTVGFRDPVVATRIALKSLARRILELNDEVADLDELINPLVAELAPQLLARPCIGVEIAGQILVTLGDNPGRIRSEAGFAMLCGVAPLPASSGKTQRHRLNRGGDRQANRALHMAAISRMRIDAKTKAYVARKTAEGHSKLEIIRCIKRYLAREIYHLMREPTTPPRAT

SEQ ID NO: 72609 - protein, 372 aa, unidentified
MEERIKFHVGLDVHKDSITVAAAELGRAPGRLVGKVAHDLGKLLKVLAKIGPTEDLHIVYEAGPTGFGLQRALVAKGYICEIIAPSQIPRRPGDRVKTDGRDSIQLAEASRAGQLSAVWIPDPEDEAIRDLSRAREDAVNSRVQARHQLKGFLLRHDIRYIGKTSWSLAYYRWLTTLNFGASAAQTAFTEYALAVKAADDRVERLTKALVASITGWRFESVVGALQALRGVAAITAIGLLAEIGDLSRFSHPRKLMGYLGLVPSERSSGERTSRGSITKTGNAHARRLLTEAAWNYRFKARIGREAQARQETLSEPIRTTAWKAQLRLTQRFAALRERGVQINKACVAVARELAGFIWAIGLQAQQEKAQKT

SEQ ID NO: 72610 - protein, 335 aa, unidentified
MEQNIVKQNIGIDIAKDDFKVCFSVINQKMQIKVRGSRTFANSFKGFKEFAEWLNRKREMSDNLYFTMEATGVYYENLAYFLWQRDDFIVRVVLPNKVKSYARSLDFKSKTDKIDADILARFGLERELKTWQPISPNLLELKQLTRERDMLVRNRTAASNRLHAAEHQGKPNKKIIVRTKTQISLFDEQVKEIEKEIKTLVNQDDKLRKKFEYLKSIPGVSLLTSAVIVAETNGFETFTSIKQLTSYAGLDVKIAESGTWKGKSCISKQGNSHIRKALYMPSLSRIMCDKAAKRFYENLVNRKGYSMIALVAVQRKMLGLMFSLWKNEQMYSVID

SEQ ID NO: 72611 - protein, 413 aa, unidentified
MINLSLFVGIDVSSSDFKVRILDDHGNEPVKRLRVLNDQPGCEQVARYLSEACAKENQNRLVIGLEATSVYSWPLQMFLAEDASLAPMQPQIYSFNPKVVANFKKSYVDLPKNDWIDAWVIADRLRFGRLPEGSQVDFRYLPLQRLTRFRCHLIEMISREKNYFLTNLFLKFSTLAQGAVFSNTFGATSESLTIEFLSPEEVAARPLDELIDFLMEKGKSHFEDPQAKARELKEAARKAHRLRGSLLQPINLILATSIETIHALEKQVKKIDKAIEAEIKHFQNTLITIPGIGPVLSAGIIAEIGDIRRFPNESALAKFAGLTWRTYQSGDFTADDTPLTRTGNSYLRSYLIQAANSVRQKEPEYKTFYARKYAESKTHHHRRALVLTARKLVRMVDALLRSNQIYVPQGARR

SEQ ID NO: 72612 - protein, 323 aa, unidentified
MQGKVTLAPNAPLDIHVGIDVCKAWLDIYLHPVGLRFRLANDDGGLKRLKRELGGFRVVRIVMEATAKYHRLASRSLHDSGFCVAVVNPARARFYASALGTLAKTDAIDARVLALFGEAIDPRATTPRPQALEDLQELVGARQSAVADRTALANQLGAAATAFLRAEMKRRIGALERHIERLETQIAKLIEADPAVARRVEILESIPGVGRATATAMAVGLAEMGACANKKIALLAGLAPVACDSGDSVGQRHIKGGRGHVRSAIYMAAVTAARCNRDLKTFHDRLVANGKKAKVALTAVMRKLVSLANTLITENRLWTPTRP

SEQ ID NO: 72613 - protein, 373 aa, unidentified
MNSRITYVAMDTHKKQHRVAIAYPNDEVIVEFSVKNTPTEIRKMVRKIKRNTPGEVKFCYEAGVCGFTLQRRIEALGCKCSVIAPSLTPRKPGERRKTDRRDAKKLLSLFMSDMLTEVYPPDEHQEAARELTRCREAAQENLKRIRHQLQKMLVRHGYVFRDGQHGTQKHLRWLGAVKFNQPLLQEVFDSYFTEMRHCLQRVQTLDRELEKLAQSEDYRDVVGILRCFYGIETLTAISIIAEVFDFGRLASARAFMSYLGLTPSESSSGEKEHKGPITKTGNKRARRLLTEAAWHHRHAYGVSNVLRKRREGQPQWAIDIADRAGLRLRRRYSRLVHRGKLPCKAVTAVARELAGFIWSALIEYEARKERKVA

SEQ ID NO: 72614 - protein, 340 aa, unidentified
MNITTLGIDLAKTSFSLVGMDQHGKVVLRKTLKRTQLMPFIAQCPPCLIGMEACSGAHYWGREFSKLGHKVGIMACKFIAPFRKGGKNDNNDAEAICEAVTRSTIWFVPVKTADQQAALCVHRVRQGLIAERTALINQLRGLLSEFGLVLPKGRYPAQREIPLLLEDADNGLPLLARQIITNLWDRIKITSEHILSYDRELAKQARHNPVAKRLLTIPGVGEQVASGVVASVPDPSLFKNSRQFAAWLGLVPRQFTTGGNIRLGRITKQGDRYLRMCLVHGARAVIANLKDKQDKISCWARELIIRRGYLRAVVALAARNARLIWTLMVKQEDYKSMSVT

SEQ ID NO: 72615 - protein, 432 aa, unidentified
MKFNQSNKQNQRISRISETTLVIGTDIAKHNHVARAFNYRGIELGKRCLFQNDENGLLNLLAWAESIKQEHGLTDVLLGVEPTGHYWFPLFHFLKQHGIEVVLVNPHHVKKSKELDDNSPTKNDIKDAKVVAKLVIDGRYTQPQLPEGVYADLRVLMNQRDRLCGDLNRVKGRIHNWLDRFFPEYTQVFKDWEGKASLITLQNFPLPQDVIAAGETTIAAIWKKNGVTRAVGPKRAELLYRKARKSIGLTEGATAARHELAMYMEQYVMLCRQIEQLMELVAGLVEQIPGAAHMMSMPCIGLITVAGFLAEVGDLSGYDHSQQIVRHAGLSLRENSSGLRKGETTISKRGRCRLRALLFRAALTMVAKNPEFRALHLYFTTRRENPLKKKQSMIAICNKLIRVLFELGRKQKNYDASKVLGPHREAQLQAAA

SEQ ID NO: 72616 - protein, 319 aa, unidentified
MAKHSIICAGIDTGKYKLEVALEGGAERLSVDNAAAGHAALAAWLKRHRVERVGIEATGGYESAVVAHLRRAGLVIVVLQPVQVKAYASFLLQRAKTDKIDAVLIAACTAAMQTIHAPPDPRLAPLAEHLTVIEQLVEDAARLKTRRASPRGESRIAEFWAAEIARTEALGRKELAALLAAIRRHADLAARLALIGSVAGVGEKTAVAILLRMPEIGRVTREQAAALAGLAPYDRESGEHKGEKRIEGGRTRLRKALYAAALPAAFRWNAALVALYRRIVAKGTPHKAALIACARKLLVTVNAVVARGTPWTKERPLPA

SEQ ID NO: 72617 - protein, 387 aa, unidentified
MPQANDLSRSLFALDQDSTLIAVIEMGQASWLIAGIVPGVHRHPLKKLATEQELLLKTLLRWKEEAETAGRTIGRIAVAFEAGRDGFWLARWLRARQIEAYVIHPSSVPVPREHRRAKTDRLDTELLKRAFLGWLRGEPDHCSMAAIPTLEEEDAKRPGRERESLVGERTRIINRMKGALARLGIRNFKPMLRKAPQLLETLHTPEGAALPPNTLADLQRDMARLSFVKQQIAEIEAARIERLQQTPGERRHAMIHLLTRVVGVGVETADMLVQEVFSRTLRDRKAVARYAGLTGAPDESGQKRRERGLAKAGNARVRRGMLQLAWGFLRHQKDSPLAAWYRARTADARGGTRKTMIVALARKLLIALWRLATTGEAREGLALRPAT

SEQ ID NO: 72618 - protein, 346 aa, unidentified
MNQIIRIGMDTSKHIFQLHGVDAAEQPVLRKRLRRKQVLAFFAKLPPTVIGIEACGASHYWARELGRLGHEVRLIAPQHVKPYVTRNKNDGRDAEGTCEAMSRPTMRFVPVKTAEQQAALMLAGIREQLIARRTQLSNTIRGYAAEFGVTAAKGLDKIEPLLAQIAQDENLPALARELFATEGREYARLQAELKAIDARLMAWHRANACSRRLAQIPGVGPIGATALVMKTPDPRAFSSGRHFAAWLGLTPKDHSTAGKTRLGKITRAGDEVLRRLLVAGATAVIQQVRNGRGRPSPWLLALLKRKPPKLAAVALANKIARIAWKLMTTGESYDGARMPGASAVAA

SEQ ID NO: 72619 - protein, 439 aa, unidentified
MKKRKERVCGADVHKDLIVATITGDEIPPIQENFGTTKSELERFRNWLVANKCEQVAFEATGVYWIPIYDALSSTIDTIVANPLQIKTIPNDKSDLKDSKRIATLCLNNQIKRSRVFSDEDRDFRTLTRARSGYVKTRTQFRNRIHKYLSSRGIKLSSSMDDIFCKSGTYIIKGLAEDKPIEEILKGIPSGKIRKKQDLIREALANDLGETNRMLVKDSLEILDGIESKIEKTSHEILKKVQQKSKNLAIVMSIPGISFVSGSVILSEIGDYRDFQTPEQLAKWCGLNPGESESAGKKRKCGITKRGSKHIRVVLVQAAQTIANMKNARLSRFYKRLSKKKEHNVAIIAVARKLICLIHHLLTNQELYQETDCMKRGKSRDKSCQETPFQEEHMTDKIAAIVDAFYGMSDTNRKKALMRVLGEISGSKPDRERSFEGGG

SEQ ID NO: 72620 - protein, 354 aa, unidentified
MQNDRQSSETVILGVDTHLDIHVGAVISQAGKLLGTHIIQTNQAGYLELLDWARSFGSLERAGIEGTGTYGAALTRYLIKNSIYVVEVNRPDRSKRRLEGKSDPLDAENAARTVLSGSSKAIPKMQSGACEALRIISVARRSAVKACTQAINQLRALLVSAPQDVRDKLWKSKPHECVTACINSEVSEHSPLRIALCSTLRSLAKRWMALTEELNELDESLDKLTRKYASNLRSQFGVGPETAATLLAVAGDNPERLKNEAALASLCGVNPLPASSGKTVRHRLNRGGSREANNALWTIALVRMRSDPRTRIYVDRRTGEGLSTKEILRCLKRYIVRELYPLILSDLAYANRRS

SEQ ID NO: 72621 - protein, 354 aa, unidentified
MNTTQVFEKRKIAVAIGIDLAKDHCDVVAYNADNKICFTKSNWAYPQLMEWLANAQPAVVLMESCKGSMVRARDIADLGHDSRLVKGADVKALRNVCQKNDIRDADYIARLLYVPGTKFVFVKNQRQQSLQFLQNEYKSIQELRIQVGNQIHAGLEEFGCPGSKSKKFIQSRMMAHLEKNAELIPDEVMASFLRRREMWLNLFEQEEEAKKRMEEIAKTDDDAQRIMTVPGVGAQTAVGMLVHIGGDIGRFKNSGQFAASIGLVPKQNSTGGNITLNGITKCGPKRLRANLVQCGQVILMHADKLKGNFGDWVRKLRDSGKKRGVIVCAIAAKIARIVYRLMKDKVDYTPVPSR

SEQ ID NO: 72622 - protein, 424 aa, unidentified
MKVTYPTCCGVDVHKSFLVATIIKTNGGIEPSYQKKRFSTFNNSILDFKSWLLENECHDICMESTGKYWVPVFNLLEDQINVTIANPKWVKAVKGNKDDTKDSKWIGDLFRLGLVKGSYIPCKSIRILREYTRYRYKLVSCRSSEKNRYQNALTVCNIALDSVVSDIFGKSSSSIIDYLLEQSGTTINHEEIASKLLKSLKSKEDAVIESIEGYQMTDAQKYRMRLIRAHMDYITAEINDIDKQIESLISSDPDYDKAIRFLTTIPGVKRDSAITIISEIGIDMSQFCNSKRLCCWAGLTLGNNESAGKKKSVRITCAGVYLKPALVQCAHAAVKSDKSPYYKTKYESLVKRRGKKRAVIAIARMILIAIYRMLSTGEVWNPSDLYKIDMPAPLAEKQKAKAIKQAKKLLQKEGLLPPDEPLAS

SEQ ID NO: 72623 - protein, 345 aa, unidentified
MKKVMAGIDLHSNNLVIGLMDMDGKRVAHQKVECRLSEVVKFLAPYKKRLEQVAVESTYNWYWLVDGLQALRYPVVLANPAGMEQYSGIKHADDTNDAFFLAELLRLKILPTGYIYDPHLRPVRDLLRRRLTLVHQRTALMLSFKSLYTRTTGQEMTLSRLKELKIKEAQDLYDHPANQLIAGMQIKHIEQLTESIEKVEKVVLDCARELPCYSKLTTLPGVGKILGMTITMEVGDIKRFAEPGNFASYCRTVEAKRMSNQKKKGQNNSKCGNKYLAWAFVEAANFARRYDEGCRKWFDRKAAKTSNLIATKALACKLAKAAWHAMAEGTDYDSQRMFGQAASTK

SEQ ID NO: 72624 - protein, 424 aa, unidentified
MYYTQNQKIEQVSQDAMVVGVDIGSKWQYARAFDHRGLEIAHVFKFSNDRSGFELFLDWMRNLASEKGFKKIIVGMEPTGHYWFPLRDFLAKEGIELVLVNPLHVKQSKELDDNNQTKNDRKDPLVIARLVCEGRYSFPYIPEGIYADLRIYWANRERYGKQQIAVKNRILRWFSIYFPEYTTVFGDVFCKSSRMLLLQACLPAEMVTLGAEGINQIWRDQKLRAVGMKRATTLFAAAQRSIGQQTGVAAAREELEELLEEWDFFARKIEHVTEKMTDILDQISEAKQLQSIPGVGLLTVAGFLAEVGDVRRFTSPKQLLKLAGLALRESSSGKHKGRTTISKRGRSRLRKTIFNAAISVIHRNGAFKKLHTYYTTRQENPLKKKQSVVAVGCKLVRIFYALFMSDKPYDGEKMLSDIHRPEAA

SEQ ID NO: 72625 - protein, 343 aa, unidentified
MKLHAVGIDLGKTVFHLVGLDSTGRVVIRKKCSRKQLLAFSANLEVKLIGMESCSGSHFLGRALRDQGHEVRLMPAQYVKPYVQTNKSDFLDAEAIAEAVQRPRMRFVPIKTEEQLDLQALHRVRERWVMRRTSVVNQIRSLLLERGLTLPKGRRYVDQMLPRILEDATLRLSDSLCVLLAQLKLELGQVTARVDEVDRVIQKTAKENEDCQRLTEIPGVGPVTATALVAGVGNASEFRKGRNLSAWMGIVPGEYSTGGKQKLLGISKRGNKYLRTLFIQGARSVLQQRHKQAPGLSEWLAQLLARAHQNVVIVALANKLVRMAWAVLCKKERYRAPVLAVTT

SEQ ID NO: 72626 - protein, 402 aa, unidentified
MNAVGIDVSKGKSMVAIMRPFGEIVSTPFEIKHTASDIHSLVELINSVEGESRIVMEHTGRYYEVLAHQLSEANLFVSAINPKLIKDFDNDSLRKVKSDKADAVKIARYALDKWQNLKQYNVMDELRNQLKTMNRQFGFYMKHKTAMKNNLIGILDQTYPGVNTYFDSPARSDGSQKWVDFASTYWHVDCVRKVSLNAFIDHYQNWCKRKKYNFSQSKAEEIYGKAKELVPVLPKDAITKLIIKQAVDQLNSASTTVESLRTLMNETASKLPEYPVVMAMKGVGTSLGPQLMAEIGDVSRFTHKSAITAFAGVDPGVNESGSYEQKSVPTSKRGSSDLRKTLFQVMDVLIKTHPQDDPVYQFLDKKRAQGKPYYVYMTAGANKFLRIYYGRVKEYLSSLPES

SEQ ID NO: 72627 - protein, 315 aa, unidentified
METKTQKTEVVEFEQIVERGCGMDVHKETVVATVSGRGIKQETRTYSTFTSSLKELKEWLRSLGMTHIAMESTGVYWKPVFNVLEEDIEIILVNARHIKNVPGHKTDKKDSKWITKLLLSGLLKGSFIPPKEIRELRDLFRYKRKLTGQISSEKNRLQKILEDANIKISSVVSNTFGVSSTKIIEAMIKGENDIEELVKLCHGRLNSKKEELKEALVGKLTEHHKFMLRTIKKSIANIEDIVAEVEKQIDEQTKEYQVEMELLQTIPGVGKDSAIGIIAEIGVDMNVFPNEQHLASWAGMSPGNNESAGKKKVQE

SEQ ID NO: 72628 - protein, 342 aa, unidentified
MEISTIGIDLSKTTFHLIGLSPRGDIVLRKKLSRKQLLTFTATRTPLLIGMEACAGAHYLARALRDQGHDARLMPAQYVKPYVKTNKNDYLDAEAIAEAVQRPTMRFVPIKNDEQLDLQALHRVRDRWVARRTAVMNQIRGFLLERGIAIRKGPSYLASQLQIIFSDGNSSFSGRLLHLIRELNHEWDELERKIEEASAELARIAKQDDGCHRLMEVPGFGPIVSTALVAAIGNGISFRKGRDLAAWLGLVPRQHSTGGKTRLLGISKLGNEYLRRMMLHGARSVVMQMERKPSALGEWLTSLSARRHRNVTVVTLANKMARIAWAILSKGTHYSAPAFAAA

SEQ ID NO: 72629 - protein, 352 aa, unidentified
MLTEAVDAIVGIDTHRDSHEVEIADVTGKPIAMMRIGNDSGGFAQLLGAIAELAPGPRVAVLIEGSRSYGIGLARTLTAAGLLVIECGQPARRQRRGKGKSDAIDAHLAVLAGLRMDTTRIPALRADGDREALRILLGARLEITVASTGQASRLRALLLAGDDTDRQAARAALTHTALQDLAQRAACAAGRDHAVRQAEIRRLALALLQARRHLKENLAQLLAIVEDIAPGVTKRYGIGPVSAAQAIVSFSHPGRCRSEAAFAALGGTSPIPASSGRTIRHRLNRGGDRALNRAIHTIAVTRIRSCPKTRDYVARRTAEGKTGPEIRRCIKRYIARELYRHLTRSMTPPAAP

SEQ ID NO: 72630 - protein, 358 aa, unidentified
MEQKRFVGIDLGKRTFEIKFITSNGSVTGTNGKTCPSGRKELYKKLLPTDRIAIEVCSLGMVMAKEIIQQVGAEVVLLNPSQIALIYRSVKKNDKEDALKLARLVQKFTNEELPKVELPTEHEENLRQILTELRQLKNDRTKEINRVHAIFVECGITEIKKSNLATHKNRSECIRILKGIFLSQAERSLRKLELIEAQILEVEELLDKEIDGDKSIETLITVPGVGKQLASSFVAFLGDGSRYPNVSSIGAATGLVPRLDMSSTSLRLGHITKKGNSNLRSLLILAAWSHVRAKNGGALKEKFLYMTIAQSKSKKVAIVAIARKIAELMYSLLKNNTQYEKRAPVSIKKLATEALCSS

SEQ ID NO: 72631 - protein, 371 aa, unidentified
MVTAALDLGDSKSLATILSPDGDVVDSFSMSMSDDGYSSFASKVPKDARIAFEATSMAYPVSRRLTALGYSDITVAHSKELAWIVKSKKKNDRIDSLKIARLHMAHMLPESHLLSREEQVKRDLLIQRVTLGKEIGKMKLKLIAYLKREDVYLSLPESSDSFSRERRQAIRSMRFGGDGDDDGRGLVVGTMMDRLEFLERQCAPLEEKVRTIVKDSEDIRRLMSIKGVDFYLASLASSYVGDVNRFPDDDHLASFLGIIPESWDSANVKRRGHMSKEGPSTARWAFSVMTDTVMRYNPRLKTYYLSVKKRKNSGSLAHVATMRKLVRMIDHMLRYKENWRWEDEASTAKKLANLDRGAEAKTTTTTTTGGD

SEQ ID NO: 72632 - protein, 327 aa, unidentified
MIAYLGIDVSKDTLDVFLVREDGKTENSQIANNSKGFKTLHNFLTKRVKTTLHACMEATGHYGDAIATFLYEAGYTVSVINPLQIKSYGDSQLRRIKTDASDAALIADFCRTQQPPAWTPPPPELQELQALVRHLSALKDMRQQELNRTKSGISSPIVKDALVTHIAFLDDQIAQLLAKIRKHVKSFPGLREQRALLTSIPGIGDLTAFRILAELPRWESFSTPNQVAAFAGLAPRLHQSGSSVRGRTHISKRGSARLRTALFMPAIVAQTHNPVMAAFAHRLLAAGKSKMAVVVAVMRKLLLLAFAVLKSGRPFDPHYATRLEFAS

SEQ ID NO: 72633 - protein, 397 aa, unidentified
MIAVGIDISKAKSTVAVIDSDGTVLASPFTMAHTQPEMEAFVTYLKGLGEPTTILMEYTGHYHYPVLKKLQDEGFPVCIVNPYQMKKYGDVEIHKAKTDKKDALRIAAYALEKSYKLVPYSSMEQKYEDLKFLSRQYSQRITYVAKLKVQLIALLDQTLPGITRILPLNSRNPEKCALLLFIKRFKSFDEIQRIGKARFLASYDVLAKKASERSASSKGLSIYELAVDSITTRGEDPYIWLSQNQCVDLLSATQNAADEIISQMRNIAETIPEYKVLRAMHGVGDRLGPIILAEIGDVHRFHSGKALNSYAGNDAPPYQSGQFESRNRHISKRGSSTLRKACYEVMQALKLTKPQDDPVYLFMLKKEQEGKPFNVAKMAGVNKFLRIYYARAMELYK

SEQ ID NO: 72634 - protein, 405 aa, unidentified
MEIIIEKGCGLDVHKETVVACIMGTGIKKEIRTYTTVANDLLRLKEWIQEAGITHVAMESTGVYWKPVFNILEDHFEVILVNARHVKNVPGRKTDVQDSEWLCRLLRSGLVSGSFIPPRDIRELRDLTRHKRKLIQAMVAEKQRVEKVLEDANIKLSSIVSDTFGASGKRIVEELIKGELQAEEMAELSKGRLRQKREELKEALVGELREHHKFMIKVSLKHIRAMEKILSDIERKIQEKIGRHYKEEYALLQTIPGVKGEASTLIAEMGVDMERFPSEEHLSSWAGMSPGNNESGGKKKPGSTTYGNKCLKTMLTEFAWVASKTKGTYLRSKYHSLVGRRGKKKALVALGHKILIMCYHILKYRCAYKELGVDYLDKRRKDKIARSYIKRLNHLGYEVTLREAA

SEQ ID NO: 72635 - protein, 345 aa, unidentified
MNKISVIGLDLAKNVFQVHGVDSAGEVVVRKQLKRSQVRRFFTNVEPCLVGMEACGGAHYWTRELAGLGHTIRMMAPVFVKPYLKTNKNDRNDAEAICEAVQRPSMRFVQPKTPEQQAVLHLHRTRRLLVRQRVALSNHLRGILSEYGIVLPQGAKVLSGRLPALLEDAENDLPMLTRDLLAECKEEYDQLMERIERLEGRIKAWHVTHDVSQRLASIPGIGVLTASALAATVGEGQDFSNGRQLAAYLGLVPRQASSGGKVRLLGISKRGDGYLRGLLIQGARNVIYHIRRRQRAGQPGGNAWVEQLLQRSHPNAVAVALANKMARIAWVLLVRNQTWCPARTL

SEQ ID NO: 72636 - protein, 424 aa, unidentified
MSSDLEIAAFIGLDWADQQHVIRLRVAGSAPVESQLLDQKPETLRSWIGQLRQRFGGRPVAIALEQSRGSLLYALMNVDFLLLYPVNPQNLAQFRKAFYPSGAKDDPQDALLLLEMLEKHRDRLRVWVPDDADTRCLRLLAENRRKLVNRRTALTNQLTSLLKESFPQALDWAGPLDSVRACDFLEPWPSLQLLQKTSTSRLRKFYRDHTRLDSDALHLRLDQIRQAQPLTRDSAVLAAAELMIPALVRQLRCLIESIQQFDQQLKDRFLQHDDYTLFHSFPGAGPALGPRLLSAFGSNRNRFECAAEVQMLSGIAPVTERSGKSHWVHWRLACPKFLRQSFHEFAAQSILFSTWARAFYDQLRSRGTSHHAAVRTLAFKWIRILFRCWKNRTPYQEQIYLASLRRHGSPLCAALSPPTPGANL

SEQ ID NO: 72637 - protein, 370 aa, unidentified
MQTVNRSGILFVGIDVHKDTHTAVGLSPFGEKVFEMTIGNETEDFISLVEKTKVEAEKSGLVPSFGLEDVHSWGERLSSFLVEEGLQVRAVAPILVDHCRQKTTHPEKNDSLDAQGVAEVMIQRIDSLPLYKLTEEGQKAKQIRELSLEREWLVKERARLKNQLHILLHRIHNTGYRAKFKDPFSKKALHYWMRGAPQETEIILEQRMKRAVRRLLDLREEIQEIEEELTALMKDNRQTLSTASGCGVVIAAEIIGEIGDINRFHSPGALAKYAGCAPREHSSGKTIRWRKTRSGNRRLNRSFHRMALSQISRSGNDAARTYFKRKVSEGKTKAQALVCLRRQLVNVVWMMLKHKTEYRYPQEKVVDFFS

SEQ ID NO: 72638 - protein, 439 aa, unidentified
MTNRIPEMVLAIDFSLDRLDVSLRGDDREWLWAHQAYANNWLGWQQLKQDLLFELEQANPVRLAVAGESTGPYWWHAFYHFSHNDDLRPFSPKLALCNPAHVKNYRKALPEQDKTDPDDTRLIDRFYRAANIKHPYQFHDRYLHLRTFTRAYRRVTQTLASEKAYLLSIIYLWASDYQHKEEKPFSNLFGVTGQYILNEFADIQAVADIPLAELTALLVRCSGNSFTDPQSNARKLHDVARNSYPIPAHLATALHRVIQHTLAHIRFLSDNQKAYRQLIQQELDTLPEAQLALDFKGLGPILVAGCLSEIQNTARFVTGTKFDRRLKLNRPRTYRDGQASVAKLAGLWWPRHDSGRAQGSQPFLARERNPHLRYWFVQAAHTLQRYQPDYRRFYWKKYHEAHKHHHKRAIVLTARKAVRLIFALLHKGRQACLEEGVLT

SEQ ID NO: 72639 - protein, 428 aa, unidentified
MNEDELSRLKEFRQLKKQIQGSENHLVVGIDVAKDRHHAFLGTATGKTLVKKVIFENSASGFSELLARVEAVRAQSGLSGVVFGLEPTSNYHKPLGRYLISKGCHVVLVGGKAVKNNRELLDERWDKHDTKDAANIADLVSRGKCFYYDRPSGQIEELRELHSLRARLKKEEHSLNLRIRNNLLAKHFPEPDSFYTASERETLAIVRWCLNPQQIAGMPFDEFFKRVAPNARGIGQKLRLQKIHRLAHESIGCPVDSAVQLQAGLLVEKIKQVREQIVQVEQVIQQLCVQFPSYEHLLSIPGFGPYVASKVLATIADPRRFDTAKQVIRTAGYDLCADRSGKSSDQSVPVISKKGNSQLRYALYQAALIASSRHRFFMAYFARMLQGRERERGIRTKMRVKLAAKMLVIAWTLMKRGELFNPEYLKVQ

SEQ ID NO: 72640 - protein, 402 aa, unidentified
MNCVGIDVSKGKSMIAVMRPFGEVVISPFEVQHTASELSELAKLLKSLDGETRVVMESTGNYHTPVAWLLHDAGLYVSVVNAMLVHDYGNNSLRRAKTDKKDAVKLANYGLDHWLTLPRYVPEEDTRLLLKNCYRQYQQYSKVQTMLKNNLISLLDAVFPEVNRLFNSSPRADGSEKWVDFVSTFWHCQCVSTLSLKSFSARYLKWCRKHGYYFSQEKAFEIHSKAQSCISVMPRNETTKLLVQQAIAQLKATAAALAALKQEMQSLAASLPEYPVVMEMFGVGSTLGPQLMAEIGDVRRFHSKKALVAFAGIDAPPCQSGQMDIHSRSISKRGSAALRRTLFLVMGIYLQSAPLDEPVYQFMDKKRSEGKPYKVYMMASANKFLRIYYASVTAYLNTLARI

SEQ ID NO: 72641 - protein, 429 aa, unidentified
MRTESTPGARGPVFCGVDTHADSHWLCVLDWRGRRVLSRRFPADAAGYEALAGAIAAAGEPACVAMEGTSSYGAGLTRHLASLGMPVREALSPARMQRRRPGQGKCDESDAERAARAAMSGSKLGTPKSQDGWVDGVRCMLAARSGAVKARTSAINTARSLLTTAPEGLRSRFRGMGGPRLMEELPSVRAEGALGAALGALADLWAAARDAALDMERAIEASLEENCPALLAMYGCGPVSAAKLAVAAGDNPGRLRSEASFAAICGACPIPASSGKTVRHRLNRGGDRQANSALHEIARQRVMRDPETAEYAERARARGKSDREVMRCLKRYVAREAYRALMRPHEIRRPADASELVAARRAAKVSQVRAASILGTSEKYISMLERGQRELKPIRRAYEAWVEAGLPLDWDRQAFEAERKMDSKKHLAK

SEQ ID NO: 72642 - protein, 340 aa, unidentified
MGQVATIGLDIAKSVFQVHGVDADGGVVIRQKLTRARLLRFFEKLAPCLVGIEACGTAHHWARELIGLGHDVRLMPPSYVKPYVKRQKNDMADAEAICEAVTRPTMRFVPVKSPEQQGVMVLHRTRSILIRQRIQISNAIRSHMAEFGMAAAVGRQGLQALIAIVEDSSDDRVPAEAQGCLGMLAAQLRLVNEQILDTDRLIRTNARSTEVGRRLMEIPGVGPLLASALVGTIADPRAFKTGRNLAAWIGLVPKQNSSGGKERLGGITKQGDRYLRQMLVVGALAVVRYAVRNGTRRPWLVQLLARRTPKVAAVALANKTARMVWAIMTSGERYREPLAA

SEQ ID NO: 72643 - protein, 424 aa, unidentified
MIEAVLERCAGIDVGKKYVVCCLMMGAADAKATEQIRQYNTTVAELEQMRDWLLEHQCTHVAMESTGPYWKPVFNLLEKHFTVILANAQQVKSLPGKKTDRKDGRRLAHFLRHNLIEASFIPPLAIRQLRDLTRRRRKLLGHGASERNRVQKVLEDANVKLGNVLSDVFGASGQLMLEALLAKQSTPEQIAELARGSLRKKVPAIVTALQEHRMTDHHRFLIRQSLDHMAFLEGQVALLDEEILRQLKPFEQQFQNLQTIPGIKATAAASILAEVGVDMKQFPTAHHLASWAGICPGNNETAGKQKSTHVRKGDPWLRGILTESAWAASRKKGSSFAARFQRLAPHRGQKRALVALGHNLLIVVYQILLTGQRYQELGSTYWEQRDQQARIRHHLRCLRALGAFLPETDSVSDSYSAAIELDPS

SEQ ID NO: 72644 - protein, 479 aa, unidentified
MIDHRRLVGIDLGIASDHTVRVLDGGGGEICRRRARPTVESLAAVEAAALAGVTAETRLEVVIEPTGPAWLPIAVFFTARGHRVFRVSSAKAADLRRFLSRHAKSNSIDADTLARLPLLAPDTLHPLELPATAEAAALDRRVRACDRLTQQGALHQRRIKDLVRQLMPATPLTGELTKTDLAVLGRWPDPRALLAAGRARLLTVITQASHGHQGVDRAEQWRQAAMAAVELYAEHPAMARTDLAAEVATEVRLLAAVRAELAGHAAARAEAYRFTDPARLAATLPGLAEVGAPTVTAIVGRAARFRTGRQFRSFTGLAPRASETGETDRKGQPMSKAGNRLLRTTLIRAADNARRQDPQLAKIYWVQMVERGADHLKACCVVAAHLAERLHAVLVRAMPYVVCDTDGTPVDPATAKQLIAEHWTVPREVRARRRSRKTTSTTRAGKVPQHVLTGHDRSETQRADRRGDLPRPASCSRPA

SEQ ID NO: 72645 - protein, 318 aa, unidentified
MKKAFFCGVDVSKDKIDVCFLTSIMSEKAKFETLPNNYELIKVYFDSFKNDEILVVFEATSNYHLALQKALSDLSIRYCVTNPYKSSLFLKHLSTIKTDTSDSYGLAVYARTFKSEIAPDKYNAEYLEIKSYNSTLNLLQKINTQLKNFKSSQKTLNNKVIDDVIANLIKEIAKLQAMLQKLAFDLVKKAIPETEEIIKENKGFGIDLALNLFPQLHFNRDKSEKQFISFIGLSPRIFQSGSSVHKNQKINKMGNSNIRRILFMTALCAIRFNAKFKARYERLLANGKKKMTAIVAVMCAIVRYLKSLFPFNPEIKAI

SEQ ID NO: 72646 - protein, 392 aa, unidentified
MSQHRHFDASRSLTALEQDSTIIAVIEMSQTKWLVAALIPGVERQPLKKFDAHEETLLNLLHRWRSEAGQAGRNIKRIVVAYEAGRDGFWLARWLRARDVEVYVIHPTSIAVSREHRRAKTDRLDTELLMRVFLGWLRGETRHCSMVAIPTIEEEDARRPNRERRNLVTEQTRIINQMKAIFTRFGIRSLRPTMRKVAEKLEDLRTAEGTPLPQNTLAELRRHLARLRVVRDQIRAVEQERLRKLAVAAAAEKKSPHAMVRLIARVLGVGVETADMLVNEIFSRHWRDRKAVARYAGLTGSPDESGSRRRERGLARAGNVRVRSGMIQLAWRFVRFQKTSALVQWFAARTIDGRASTRKTMIVALARKLLIALWRLVTSGELPQGVVLRPAS

SEQ ID NO: 72647 - protein, 331 aa, unidentified
MKSGTDCNNEGADVFYVGIDVSKDTLAVNAGEAFTQTIVNQRREVHRMVRTIRRCVGKERKVLFVFEDTGCYSLPLLLELDRLGECAHVANAARVRYFAMSEGVRAKTDPVDASVIRNYGYEKRPLPTPIPSDDMLRLKELFRARSLLVKIATMARNLREATANPFCRDVLREIVLLVERRIGKLDGAMAGTIDANPSMRRLSEALGEIKGVGGVTVAAVIAGVPEIGRLGRRRAASVLGLAPFARESGRWKGRTCTGGGRSDVRSALFMPALSAARTNPVLKEFYGRLVAAGKPPRLAQTAVMRKLIVYMDHVAAKVLAQQPRQEIASEE

SEQ ID NO: 72648 - protein, 360 aa, unidentified
MPQPIHHDQDDNTASEVILGVDTHKDLHAAAVINPLGVLLSSEMFPTTAAGYQALLAWAGRFGTVRRAGVECTGSYGAALARHLQAAGVEVIEVNQPDKATRRRRGKTDTLDAEAAARAVLSGRASGSAKAGDGPVEMLRMFKLAKSSAVKARTQTINQLKAVLVAADPMLRETLSGLSNLLLIRRCTQLDLDTPCDTTSAAAYTLRLLARRIQALTSEIRELEQQITAAVTRHTPQLLTRCGIGPDNAAALLIAAGDNPDRLRSEASFAALCGVSPLEASSGRTSRRRLNRGGDRQANSALYRIALSRLRWDARTRDYLARRITEGKTRREAIRCLKRYIAREIYQILTTPPEPQPSAA

SEQ ID NO: 72649 - protein, 355 aa, unidentified
MNKYSVGIDISKNDFHTCFSGIDSNQQVKALRSGTFKNNKKGFVELAKWIKDTAREKIVPVVIIMEATGVYFENCALYLFKSGFNVSVILPNKAKKYIAALGIKTKNDKADAKALSRMGAEQALQLWQPMDDYFYELRALTRLYQTLQENITATKNQLEAAELSMYPSKRIIRSLKKLISETEKQLLVIQDTIYKHLASNESVAAKINNIAEIKGVAALTIAVLAAETNGFLLFENAAQLVSYAGYDVVESQSGLHVGKTKISKKGNSRIRRALHMPALNVVRYKVKKFQIFFERNLQRHGIKMKSYVAVQKKLLITIYALWKKSEKFDPEYDLKNTTRDGEVEQSSRSNFAEVG

SEQ ID NO: 72650 - protein, 350 aa, unidentified
MNIYFGCDAHKRYSMFASMNERGQTGRPVRVEHTRMMFRRYLESLPAGSPIAIESVGNWYWMIEEMERAGHEPRLANAGKAKLMMGQINKTDKLDATGLATLLRNGTLPSVWIPPRDLRDERELPRMRMSLVSVRTMLKNRIHATLAKYAIEIDEVSDVFGVKGRELLKNRLEELPPYTRQSVETQLELLDEVEAHIDQAEKEIREVVKTTPAMKLLMTIPGVGPILAVVIALEIGDIARFPSPEHLASYAGTVPRVRSSGGKTSFGKVRPDVNRHLKWALIEAANMIVLHQRHWPDAHLTQLYLRLRERKGHAKAVVAVARHLAGAVFWTLTKNEAYKEPQRSISSSQE

SEQ ID NO: 72651 - protein, 353 aa, unidentified
MENLTGHFKNKTIFIGLDLHKKTWNLTARCEGLQLKYWTMPASKEKLIKSIHQFFPGAKYYLAYEAGCFGYWLYDYLTENGVKTIITPPNMIPREDSPRVKNNRIDSKKLATYLENGLLKQVAVPDKDIRLHRTVIRTRRQILTDKKRIQSQIRSTLLFYGIEFTFPVGRWSYHIIENLYRLKFSDAYFEQSFKRMLDRLVQARHELAEQTALVKKIALLAQYKEQMTILQTIPGVGILTAIEIVLELHDMQRFASGDKVACYIGLTPKEASTGEADKTRRGHITHVGNAYLRSLFVELAWRAVRQDGVLLDKFARIQKYRGKKIAIVAVARTLAVRTRYVLVNREPYGCGVA

SEQ ID NO: 72652 - protein, 369 aa, unidentified
MYGTTVALNPTYFIGMDLHSNNVVVCVLQNAANQAGQLIKKVIKRKKIALSTELKELHHFLQPYCSTQHQATVESTYNWYNIADLFERNGWHLKLADPTTVKNNKTKFSDDISDAEFLADQMRLGALKATDIIPKQDRAFRDLVRLRVDLVQDRARYRTVLKNFFNNHRYMKISTGRLDRLAEQYCDGNATELVGIFKDENTCLKAGHYLMAMHHLSLQIQQLEEQIKAQELKNYLTCHRYLPRLYSMKGCGFILGSIIATEIIDINRFRTDKDFVSYCRLSPAVRLSNEKKKGDGNRKNGNAYLSWAMTELANLMVLFNPVIKKKYDRQFKKSHLRAKAIRSIAAKLARCIWHMLKKDKDFQIDLAFK

SEQ ID NO: 72653 - protein, 356 aa, unidentified
MKQTVRPDFSGQNIYVGMDVHKKSWTVSIFSEHHEHKTFTQPPNAQSLVGYLKRTFPGATYHAVYEAGFCGYWIHDSLHQQGVDSMVVNPADVPTTDKQRRGKNDKIDSRKLGKNLRSHDLQPIYIPGSMQREDRSLLRTRYGMVRKQTRCKNQIASLLAFYGVFLPPEMETKRWSRRFISWLESVQFEHTSGTIALKTLIEELLHLRKLIAGLTRQITVLSRTYDYAEAVWLLKTIPGISTLTAMILLTEIGDISRFKNLDTLASYAGLIPDTKSSGEEEHITNITMRRNPMLRAILVESSWIVVRKDPALILAFNKLCRRMKKNNAIIHIARKLLNRIRFVLNNRQPYVVAIVE

SEQ ID NO: 72654 - protein, 410 aa, unidentified
MSRTNDFSVLIGLDWASSKHDVCIQYADGTRELAVVKHSAEAIEQWITELHQQHPGQIAIALELSKGPIVYALQKYSFVTLFPINPTMLCRYRRALSPSGAKNDPTDASIALELLVRYPDKITPLKMADDKIRKLAFLVEERRRLVDEKKRYVNRLINALKQYYPQPLEWFTHRDSQLFVEFITRWPSLDRIKRAKPDTISRFLTSRGSFAKLVSPRLEAIKSATPLTYDSVVIESNKMLAITLANQILPIITAIKTFEQEIEAIYHEMPDAALYESLPGVGKCLGPRLLVAFGEDRNRFGSAQEVQKYAGIAPVTERSGKTAWVHWRWGCSKFIRQTFTEWSAKSVLYSYWAQLYYEQQKKKGNSHHQAVRSLAFKWIRILYRCWKTKTPYNETQYLKVLKERNSPLLG

SEQ ID NO: 72655 - protein, 438 aa, unidentified
MSNKVIFNLDELFISVGIDVGADFSWMSIALPNQQFVGKPYKILHNSIDSLTTAVSKIKEAEELYSLESRIFLESTGIYHYPLFCYLRDKGFNCSVINPIITKNSTNINIRKVHNDRFDSKKAALVGLKPDLKVSLMPSDLALNCRNLCREYYDLMDNRSAYVNKLQGELRMAFPQYLGIFSKVTINTSLTLLETYTSPSAFLKADKQEIIDIIKSTARFRLTYAQNKYNAIIQAATDANQFGYIIDSNIKRIRLYISFIRKYDEEINSILESLHELVDANEDSDFVKQIHLIETFKGAGFLSAVSIMGEIGDFSAFSKPKQLFAYFGLDPAVKQSGKFEGTKVQMSKRGSAIARRVIHTLTLQSISISRNREAKNPVLREYYLKKCDSKPKLVAMGAVSHKVCNMIFAILRDNKPFKIIAPQEHIKQYNSAKCDIAA

SEQ ID NO: 72656 - protein, 339 aa, unidentified
MGLYCGIDLHSNNGVYAVTDGEDRLLFRRRLPNDLAVVLRTLEPFREQLEAVAVESTYNWYWLVDGLQAHGYPMRLANPAKMEQYEGLKQTDDNTDASFLAHLLRLGILPQGYIYPAEDRPVRDLLRRRMLLVHQRTALILSLQGMFCREIGSTPSWRKIVQEDAEALCQRFGSQQELGFIATEQVEVIRFLARKIRLFEKRALEKATLRTSYEKLLTMPGVGKVLGLTIMFETGQISRFAKVGNYTSYCRGVSAKRLSNGKKKGENNRKSGNAYLAWAFVEAAHHAMRVCPQALKFYERKKAKTNGAVATKALASKWSKAAYYILRRQEAFDLKRVFG

SEQ ID NO: 72657 - protein, 344 aa, unidentified
MEEIIRIGVDTSKSVFQLHGVNAAEQPVLRKKLSRRETVKFFEKAPPTTVALEACGGSHHWARLLSSFGHEVKLIAPQLAKPYVKRGKNDAADAEALCEAMSRPTMRFVPVKTADQQAALMLVGVRERLIRNRTQLANAIRGFAMEFGIVAATGMCRIEPLLERIAADQSLPELARELFAMHGVEYRDLLAETKAVEEKLTALHRSDECSRRLAEIPGVGLVGASLLMMKTPDPKMFKSGRDFAAWIGLTPKDHSTAGKARLGVITRAGDEMLRSVLVVGATALLQHIRAGRSRHPSRWLIELLQRKKPKLVAVALANKIARIAWKLMVSGETYRRPEGETQAV

SEQ ID NO: 72658 - protein, 485 aa, unidentified
MSKKKVSGKPGPKKASSNRRSQKPRAWQVVHPRAAGIDVGAAEHYVAVPPDCTQAPGQNVRQFRAFSEDLDALVEWLKACRVDTAAMEATGVYWIGLFQKLESAGIHVILADARALKHVPGRKSDVQDCQWIQQLHSYGLLRAAFQPDDPIARLRVLVRHRANLVSSGGEHLQHIQKAMVQMNIHLHRVVSHINGETGLRILRAIVAGERDPEELVLLRDKQITVSTVAEMKAALVGHWREECLLVLKQSLQAWDFYQERIQECDLEIEKLLQTMPAAAPAPEPPKEKKADPLASDAPKKKRPQSRKRNDPQRDLRPELARICGLDLCAAHGLGLLTVLVILSEIGLDMSKWRSAKAFSSWLGLCPNNKISGGRVLSSRTRKVPHRAAAAFRMAALGLAESDCWLGIFHRRKRSHLGPAAANTATAHKLAVVVYHLLKNKEAYVERDAEKYQARLYQNQVKYVKKKAKALGMKLVPINPEETLAE

SEQ ID NO: 72659 - protein, 385 aa, unidentified
MTQFARPTPAAADYDSTIIGALELSEKKWVLAVQLPGVKRHSRHVVEARGDELAAFVERLKARCAVAGHNIKRVILTHEAGRDGFWLARFLVRRGVEVHVMQPSSLPVDRRARRAKTDVIDVEMLLRTLMAWLRGEPRVCSMVPIPNEADEEARRAHREREELTGERRSIVNKIDGILATLGVKGFRALRRDRRDQLTSLRQPDGEPVPQMARARIERLLDRLELVLKLIDEVEATRDAVLKKVAPADDAERMIRSLANLRSIGPDFATLLVREAFVREFRNRRAVGGYVGLGGTPFSSGGSEREQGIGKDGNRRLRAAMVELAWMWLRWQPDSALSNWFRARLGQPGSRIKKIMIVALARKLLVALWRYVKDGVIPEGAKMKTA

SEQ ID NO: 72660 - protein, 429 aa, unidentified
MHKDPKAISFDYLVGGGQQCRWYLEAERLGGFQINTIFERELCTASQQNGPLMSQNGMDLPCSRPASEHACVGQHKEDHAMPKSNTAVVTIGIDPGKNTLHLVGLDARGGIVLREKVARAKIVSRLANVPPCLIGIEVGMGTHYVTRELLALGHDVRQVPPVYAKPFRQTHKNDFRDALAIAEAVQRPTTRCVPPKTDEQLDLQALHRVRYRLVGQRTAIINQIRCFLLEHGLTVRQRLHWLRHALPDILAQRTDVLSPRMVRILEDLAQDWRRLDDRIEAVSGEIEALSKTTEPCRHLMTIPGIGPIISSAVVAAIGNGTAFTRGRDFAAWLGLVPKQISTGDRTILGRITKRGNRYLRMLFMQAARVVLLRPRNWMKNGYGPWLAAAAQRLHHNVLATALANKLARIAWSVLVQHRVYEARLSPAAV

SEQ ID NO: 72661 - protein, 405 aa, unidentified
MAVMIGVDPHKGSHTAVAIGADEKPLGRLRVRASAAQGELVAWADAWPERTWAVEGAGGLGHLLAQQLVAAGERVLDVQPKLAARVRLLQAGDTNKNDPNDALSVAIAALRSRARREVAADDYTAVLKVWSKRHRDLSRARNQVACRLHAVLCELVPGGFSKEISAGQAARVLEQVTPSGAIAQARCDLAGQFLDDLRNLDAQLRGTKKKLAAAVRASGTTLTEIFGIGPVIAGTVIGDAGDVSRFATRDHFAAYNGTAPIEVSSGGRKTYRLSLRGNRRINHAIHMAAITQIRNRHSDGRAYYDRKIAEGKTHKEALRSLKRRISNAIYARLQADARTAIAEASATGPGGQPGNDSDSSAAGLHPGHRLFGQATPGPATSLRPATRRKPARPSKPGPQTTRRSP

SEQ ID NO: 72662 - protein, 409 aa, unidentified
MNTGTITAVGIDVSKHKSTVAARRPGGEVVLLPFDVEHTAEGLKKLITKLRELDGEIRIVMEHTGMYWRPIAMTLKEAGFYVSVVNAILIHNFSDNSIRKVKTDRADAMKIANYGLTFWSDLQEYAGEDENRQLLKIQSRLYERTATTAGMLRNGLISLLDQTFPGANKLFRDESRNSKGHVKWIDFVLRFWHKECVAALSLATFTDTFQKWCKRTGYKFSASDAERIHAIARNAVATLPKNDSTKLLITQATNSLNAIYDSLQAIRTEMDRLASMLPEYELVMGMEGIGKVTGPQLMAEVGDVRRFSHKGALVAYAGVDASPYQSGSFDSKSRHVSKRGSPHLRRVLFVIMSMTLIRANTANPVFCFMDKKRAEGKHFYVYTVAGSAKFLRIYYAKVKEYLNALEETA

SEQ ID NO: 72663 - protein, 387 aa, unidentified
MKTTAYCGFDWASETHYYVLKNARKEVLSEGTVPHTTEGFEAFLESLGQCRQGGRVALIVEANRGVPMNALLDVSWLDLYPVNPMKTRKLNELQGSVRQKSDASDCHLLCDYLIANESELSGSYVERDSLIRQMQEWIGMETDLVSNCRQLKQRIMSHLDTFMPDLKRMLPNLDKKVYVRYLFEFDPLTPVDCSEVESFLRRHGCRNAETIEAFAAGHVALRALGEDAEVHRAQADVLRAWAELLWQLQCSLEDCRKRINALFVQLPQAAIYSSLPGLGETLAPRMACLFGSRPSERFACKEQAVAYFGQSPVTEQSGKGLKVGRRRNCHRYARNTCFLWAMAVNKMPNCHCIGSGPSWTSEGARVMPGRHAIASWGVKCSGYFTDA

SEQ ID NO: 72664 - protein, 359 aa, unidentified
MPVRIEPLSSFITAPGFLTRGGVVALDQSGAVAFKARCTRATVLSTLLRLDVEAIAMEACAGAHDRARRLAEQGRCVRLLVAADVRALVRGQKNDYNDAQAIAEAALPPTVRTVGVKTIEQQDIQMLHRMRSRLVQQRTALINQARATLLECGVAVSRGRKTMASKRPELPAREDLGLTQARRDMLGQCLRGWREAEQQAQHIDAQPAAVARADERCRRLLAVPGVGPLTATALVAAVGNASEFGCGRDLAAWLGLVPRQHSTSGLPRLLGISKRGNTDLRWLFCHGGRSVRAHLEREQHAGGPWITGPETRMHPNKATVAVAAKRVRVSWVILRRGVTYQPGGEVEVFEPSSCGAHVV

SEQ ID NO: 72665 - protein, 464 aa, unidentified
MKRHRRQPPKPRVSSSVLEHLNPHAAGIDCGSAEHFVAVPADRDLTPIRSFPTFTSDLQRLADWLTACRVTHVAMEATGVYWIPIFEILEARGFTVALVNARHVKHVQGRKSDVSDCEWLRDLHILGLLRGSFRPADEIVALRAYLRHRATLIESTGALIQRMQKALVQMNVQLPLVVSDITGVTGLRILRDIVAGQRDPQSLAQHRDYRCHASEAEIVAALTGNYRPEHVFVLQQNLELFDRYQGQLAACDTAIEGHLQRLTAPVTAPTAPLPPARRRQKPHANEPRFEIRTPLHHLTGVDLSQLDGIGPYNALRLLSEIGTDMTRWATDKHFTSWLTLAPQNKISGGRLLSSRTQPSANRAAAILRLAAMNLGRTQTALGAFYRRLAFRVGKAKAITATARKLAILVYRTLKDGLVYADPGADAYDAQHRTHVVRRLRQRAANLGFVLVNSSTGEVVEGTVS

SEQ ID NO: 72666 - protein, 385 aa, unidentified
MNRELCLKTDSSPYLDTLAFLNGDLYKKLTFLLLRFLGDVQYPFPLQIAKHKDMENFYFIGVDVSKKKLDFCVLLNGTIVLEEVVNNNIPSIRRFLETFLVDFKTSIDNLLVCAEHTGQYTFPLSIACQSLSCGLWLENPARIKYSSGFSRGKNDKVDAHRIARYASRFSDNARYYQRPREEIERLKQLRNEQDLYKSDLAKYKGQLSEQREFMLDRVYQEKAQRLERLIEELEKLIKDIDLLVETIIRSCRVLWRQRELLLSVEGVGPSVSLCLIIETEAFTRFDDPRKFACHAGVAPFRYTSGSSQHSRNKVSQRANKQIKTLLHMAALSITGRKSGELKAYYERKVKEGKNKMTVINAIRAKLIARMFAVIKKDQFYTPVYS

SEQ ID NO: 72667 - protein, 366 aa, unidentified
MGWMAPLRHLSAKLLSDRISSEWEPSMGKVTTIGLDLAKHVFQVHGVDAEGATVLRKQLRRAQVLAFFSRLPPCLVGLEACATAHYWARELRALGHEVRLMPAQYVKAYIKRNKHDAADAEAICEAVQRPTMRFVPVKTADQQAAVLLHRGRERLVRQRTGLVNALRGHLAEFGVIAPQGLRNVSKLIAIVRDEGDARLPHLARQVLQVLAAQIEQLEAAVAAIEKQLMAWHKSNPVSQRLASVPGIGPIIATAIAATVVEPSGFRSGREFAAWLGLVPRQNSTGGKHRLGGISKRGNQYLRRLLINGASANLLRSKATNADPWVIGLRQRRPSLVVAVALANKTARIAWAVMHRHENYQRVAAAA

SEQ ID NO: 72668 - protein, 389 aa, unidentified
MQTVADRPEAPSAIRNDLGAIFVSLELSRSTWLITSLSPGGGEKMSKHSVRGGDVTELLERFAQLMAKAQARTGQRFPIVVIQEAGLDGFWIHRVLRKEGIESHVVDPASIATSRRRRRAKTDRIDGEALVRALLAFKRGEPRVCAMVKAPTPEEEDRRRLCRERKVLIAERVKHVNRIKGLLFCQGTTGYEPLRRDRRKRLEELETGDGRALPDHLKAQLGRELARLELLLEQIKAVEAERDALLAAQRAAAPAPAAMLLDIKGIGPEFAAILWSEGFFRHFDNRRQVASYAGLAPTPWQSGKVDREQGVSKAGNPRLRTTLIQLAWLWLRHQPQSALAQWFKERVGRNGGRFKKTTIVALARKLLVALWKYVNAGVVIEGAIVKAAS

SEQ ID NO: 72669 - protein, 322 aa, unidentified
MSLPSPLCVGIDVSKATLDIAASSKIAQFSVANDTDGFDLIIAELRKHAVALVLMEATGGLEAAVACTLQAEGFEIAVVNPRQARDFARAMGYLAKTDRIDARALAQMAEVINRHPERERFIRALPDAERQVLNAMVVRRRQLIAMLVAERNRLYPAHPQSRKSISIIIKALEDELVRIDEDMNNHIHNHFKDLSDRLSSIKGVGAMTVAALLAEVPELGQLSRREISALVGVAPVNRDSGTMRGRRTIFGGRAGVRTALYMAALVATRFNPVIKTFYLRLIAVGKPKKVALVACMRKLLTILNAMLRKNEDWNEAYHLVTP

SEQ ID NO: 72670 - protein, 316 aa, unidentified
MDGIIGVDVSKKYLDAFCARSSEHKRFAVEDELSDFVKWVQERTPSLVVMEASGGYERLAWSLLAAAGVSVSLVNPRQVRDFARAMGVLAKTDRLDARVLADFGARMKPQVTRVPSTQERELEQYLSRYRQLVQFRTAEKNRLQQAPNKLVKEQIESSLKFLAKQKASVEAAMAAVVSGVPSVSEAVATLRSVPGVGVLTATAMVVDLPELGTLTRKQISALAGVAPRAHDSGQHRGTRRIAGGRAALRATLYMAALVASRCNPVMKDFYRRLREKGKPAKVALTAIMRRMLVQMNAMLRDKKSWISPVSNEMTAG

SEQ ID NO: 72671 - protein, 338 aa, unidentified
MKLYAGIDLHSNNSVVSVIDEQDRVMFEKRLPNELERIIVALMAFKEALVGIVVESTFNWYWLVDGLMQAGFRVHLANTAAIQTYEGLKYSGDEHDARWLAHLFRLGILREGYIYPREARAVRDLMRRRMQLVRTRTTQLLAMQTVLMRSQGHSMSANDLKRIEVEELDVLIHDACLASGLRANLEVVHTLNAQIARLEREVLGQVKLAAQFEPLLSIAGIGKILALTIMLETGEIARFAKVGQFASYARCVESQRLSNGKKKGEGNSKCGNAYLAWAFVEAAHFAVRYNTRVRRFYERKAARTNKIVAIKATAHKLARAAYHVMRERVPFDEARAFG

SEQ ID NO: 72672 - protein, 400 aa, unidentified
MSKTSFSGFLGVDISKDKFDAHCIDINGEKRFYLSCPMDRAGFEKLVSHLEALSMPQESLLIGMESTACYHMNLFSFLLAGGYTAVIINPLLISNFVKMQLRKTKTDKKDALVIAQFLLMHGDTLAQTSISPHISDLRDLSRQRESLLSQMTALKCDMKRILTMTFPELEKLTGVFTKSILKLVSRFPSAHAIVQSDPAEINQLLVDHSMGRNSAKTTQAIIQAARSSVGTTSPSRELILKQKADVLIHLEGHLKELTALMIELCRSDRGDDIDIMTSLRGIGEKTATNFLVEMGGDIQKFKDHKKLIAMAGIDPAIYQSGKHDGHGRITKRGNRHLRRVIWLMTIRVIQFNDCFRQHYNKRRQDGLPFKKAVLATAHKLLRVIYAMLTQRTSFCYVANS

SEQ ID NO: 72673 - protein, 342 aa, unidentified
MQITTIGLDIAKNVFQVHGIDAAENVVVRKQLRRGQVIAFFKALAPCLVGMEACATSHHWARELTKLGHQVRLMPAKDVKAYVKRNKNDAADAEAICEAVRRPTMRFVAIKSAEQQGQLMQHRARDLLIRQRTQLINALRAHLAELGFAAAQGRAGVKELLTLIAEEGDQSLPVDARASLMVLAAQLQAVQTMIGSIEKRIVKQHRSNKQSKRLQTIPGVGVIGASTITAVVPDATVFRSGRDFAAWIGLVPREDSTGGKRKLGPISKRGDRYLRRILVVGAHSVLRRAKQSPEKFPWLTQLLARRPFKVVAVALANKMARIAWALLAKGGTYRAPALAAAA

SEQ ID NO: 72674 - protein, 347 aa, unidentified
MTMLAGLDVGGKRTAVCVVDEAGKIVWQGMVDTHPEMIAAALQRFRGKLSKVGLESGPFTPHLHRSLAAMGFPMVCMDARRTADAIKARRIKTDKNDAQALAEMLRTGWFTAVHVKTIDSHRIKTLLGARDQLVKIKRSLGNQVRGLLRPFGIRLPSRAGTKKFAEAAHQATQNDAIMHASIKALLEALVSIDAQVGKLDAELKELAGRSEVAWRLMSVPGVGPVTALAFIAAIEDVKRFPRTRDIGAYLGLTAKRYQSGDTDVRLGISKQGDSMARHYLYEAANVLLTTVKKRFALRSWGLKLLKTHGAKKARVAVARRLAVLLGRMWKDGTHFDALADQAIPAAA

SEQ ID NO: 72675 - protein, 414 aa, unidentified
MHDNLFVGVDTHKNSHTAAVLSDYFDIEATITFANSYQGFDRFAQKLNKIANDRSLLFGLEDSQGLGSSFAEFLINKDFLVVDVNPVYTDRGRKHTIHRDKSDDRDAILIAKTLIRERGNLHPVRINKNSLALRELVRHRQILVDESTRLKNRLHVLLFNQHGQVCSIFSSLFSKVSLAFFARYPSPLMLESICPDSLADFLKANSKGRYSEKKAEAILSSLNNSIDNNLTDTRAYIIKKHIERLVQITEELSQMKDMLSCLVEKSSYGSLTSIPGVDVITAAKIISSVVDIDRFSSSAKLAKFAGIAPREKSTGKKQKFQKSKHGKKYLRSTIYFMSLAHISKTRNGRDKNPVSRAYYLKKIAEGKTKKEAITCLCRRLIDLIFAVMRDRSIYNFSKSEFTKQHNVILNTIVA

SEQ ID NO: 72676 - protein, 378 aa, unidentified
MPSETTVYVAVELSVSSWLVAARSAGAEKSRLHRIQGGDTTTLLALITKLRSRASTKLGRVVDVACCFEAGRDGFWLHRLLTAHGIAAYVLEPTSILVNRRARRAKTDRLDAEGMLRVLATWLAGDRQVCSMVRVPTPEEEDAKRPHREREHLVQERLRIENRIEALLFTQGIRKRPSLRSWVRDVAELRTGDGRELPCLLRIELERLRRRLVLALELIHEVEADRAEALAATADDKTTQKIAALQRLRGVGPNFAAVLVREVLYRSFANRRQLASYVGIAPMPYQSGGMDRDRSISRAGNPRARTTLIQLAWLWLRYQPGSALATWFRERVGMLQGRTRRISIVAMARKLLIALWRYVETGVMPEGVEIRAEADATA

SEQ ID NO: 72677 - protein, 421 aa, unidentified
MRGARAKRVKTVREGTLVATVDIGLASNTGYCTTLDGRDAKPFKFDNTKEGFEKFWYLTMASKNRFGCDEVVVGYESTGPYAEPLVHYLAHKQVKIVQVNPMHTKKMKEVNDNSPLKTDDKDPRVIADIIRLGRALTLVVPEGDAAYLRRLNNARERHVGEQTALLNQLQQLVFLIFPEFQTVLKNMKGKTAQYLLKRYTTPERIGALSKEALGEEMRKRSMGQFGVQEAELLIGLARETVGIKEGLDGIFMDIRHILLQLEAEGRFISEIEAEMGATLERIPFSGRLLSIKGLGIVSVAGLIGEVGDFSKFSTQSEILKLAGLDLYEISSGKRKGQRRISKRGRGLLRKILFYAAIQMIRKNGIMHDYYARLTGRGMERMRALIAVARKLLRIIHALVRDNSDYVEQNKVGDRRMIEMAA

SEQ ID NO: 72678 - protein, 359 aa, unidentified
MGEITTVGIDLAKEVFAVCMLDARGAVLERKVLRRAAFERWAAALAACTVAMEACGSAHYWGRFFAARGHTARLIAAEFVGAFRQGGKNDGNDALAIAIAARQPTMRFVPIKTVEQQTILSWHRARAGFNEERTALINRLRGLLAEFGIAIALSSDRLLKALPSLSTDERVPTPVRALLLEAREQFAALHARIERCDVEIAAHVRDNDSARRVREVLGVGVLTASAFAATVPDPTLFRHGRQLGAWLGLTPRQASSGGKTRLGDSSRRGDAYLRGLLVQGARSALQVALKTPPQKATHLQHWIAALYARKGYHKTLIAIANKHARILWAMLVRDQHFDPNAWRRHPRAATTMALSMARA

SEQ ID NO: 72679 - protein, 409 aa, unidentified
MRYYLGVDWADQTHAVWVVDERGTKVALRTVPHTAEGLSAWGRELDEWRAQGIELWAAIERPEGRVVDFLLDHGVVVYPVNPKALDRARDRFRQSEAKSDPFDARVLADFLRTDHLHLRALQPSSEAAQELKLLTDDYQRQIRQQTRLVNQLTTTLKAYYPRGLEVAELTTALARAFLQAYPTPATLTALTERQWQRWARAHRLSETRTQELWVVLQRPQLPVPPHVVRAKARLMQSLVAQLMVVMEGVGAYRAAIEDFFARLPAAQWIRTLPIGDHGITAPTLWARLGDAPGRWESFRHLQAQAGTVPVTIRSGKQQVVRFRFACDKSLRYVIDHVAFLSLRWSEWARAYYDEQRARGHSYRQALRALSAKWLKIIFVMWERQVPYDEQYHLAMMTRQQLRQRQTKVA

SEQ ID NO: 72680 - protein, 374 aa, unidentified
MRSVALDLGGKITFCEVASGEVVGRKTVKAFDHLEDVLGPRTPKARVAIEACREVWHIADRLEAWGHDVLIVDTTRVRQLGVGHHGRKTDRNDAEVLARAVEQGRIPLAHRLSPHRQALRMYLGVRRGLVETRAGYVTMVRSVARSYGVKIPGCETEDFVGVVKATALGEEVRSIVEPLLTMLAVLEPQLRATDAKLARLCQEEPAVLRLGTTPGVSVVIAAQYVSVIDDPTRFRNAHQVESYLGLVPSEHTSVHRKLGSITKQGNSYLRALLVQGAWCILRSKAKDPLVLWAKAVQQRRGKRIAAVAVARRLTGILWAVWRKGTVYDAEHLARVGQRGIEEQQQSLEQQKAALARAERKARHSLSWKGELATT

SEQ ID NO: 72681 - protein, 381 aa, unidentified
MKLTQVNDTRGDELVMAVGLETAGGSWKLALQDGRRGKPALHTCKEQQAQARLEAAVQRIEQTKGKWGLPTGTRVVIVYEAGQEGFWIARALRALGYEVSVTDPASVAVSRQHRRAKTDRLDAIRLVNALRSWLRGERDVMRMVHLPPEEAEAQRHGTRERGQLQKEIHGHCDRIEKLLRTVGCWQKVAEGFGAERLEQLRCYDATPLPLPLRRRLERECARLALLRAQLSALEQSLFAELPAPLQARVRQLQELKAVGWVGALRLVLELFWRDFRNRREVGSCVGLVPQPYDTGNSHRDQGISKHGNARVRALAIQLAWMWLRYQPQSELSQWFKRRTQGSGANKRQRRIAIVAVARRLMISLWRYLEDAVVPAGALRKG

SEQ ID NO: 72682 - protein, 339 aa, unidentified
MELYAGIDLHSNNSVVTVLDGADRTVYAKRLPNDLGTIMAALRSCEGTLRGVAVESTYNWYWLVDGLQDAGVTVHLVNTTAVKQYDGLKHSGDFSDARHLAHLLRLGILPVGHIYPRAQRAVRDLLRKRSQLVRQRTAQILSVQNLLARNLGARASSREEVKSWQAESIDAMELLEEQKQALRATLAVMRCIDAQISALERSILAKVKMRAEYHALRTVTGIGNVLALTIALETGDIERFAGAGNFASYARTVKSTRESNGKKKGQGNPKCGNKYLAWAFIEAAHFAVRYDATIKRWYQKKCASSLSVVALKAVAHKLARACYYVMKDGRSFDATRAFG

SEQ ID NO: 72683 - protein, 357 aa, unidentified
MAYIGVDLHSDKFTVAFRDKMNKDTLKSYYIDKNEIDNFKKGLKKDDYIFLEASTPTFAFTDLLQDTVKKTIVIDPFKFRAIADSRKKTDKIDARQLARMGKYHIEGDKKFLPEVYVVEKSIRKLRSLFTTYRLLNKEITMIRNRIHSLFKQNLKPYSKKHIFDEIMTGLEPIDLDEEYKVQVEILFEVLSKLQEKKAKIKEQILLTGKPFIKDIDILVSISGISVFVALGLISDYATIERFKNAKQFSKYLRSTPKSEESNKKVKTGKTQKNGRKVSIELMLQSINHFRRESLFIDKFYRRLKKGKGGCKARIAVVRKMFVAIYFMLKEREYYRYMNKKLHDKKILEYKMFLAKSK

SEQ ID NO: 72684 - protein, 347 aa, unidentified
MTLYCGVDFHSRRQTICYCNTADGEVKIKDLHHYEDDVCAFYKQFKDEHVIVGYETSGYARWFEQMLFELGYEVWVGDAAEISRLGKRRQKNDRRDAEHILDLMFRGEFPKLYRASEKSQEILRLLRHRQKLVKHSVMIKNSLRRILIETGLIFKAPLSSQRAKQKFRELQLPMLLANERDRWLELLIEIEKQIAELEQKLKAEAQSDERVQRLLTHPGVGLLTSLCIVHTLGEVSRFPTTRKVAAYAGLEPMEHSSGEKRCYGAISKAGNRLLRHLLGEAAHIATRTDDELKQFFRRLKTRCGVAKAIIAIARKLLIRCFIMLRDEIDYAEFRRRGIEARSARVYT

SEQ ID NO: 72685 - protein, 368 aa, unidentified
MSETITSFVGLDVHKDSTAIGEAEAGRENPRFIGTVGPDLGQLLKALKSLGKPETMLVVYEAGPCGYGLARQLRSRGYSCEVVAAGKIARRPGERITTDRRDALTLARLARSGDLVKVIVPDEGDEAMRDLSRAREDGVRARLKARQQLKALLLRHGHRYGGKSSWTLAHERYLAAVSFAHPAQDIAFAEYRQAVREGHERVERLTEALRTQAEHWRLKPLVAGLATLRGIDFVAAVTLTAEIGDFGRFAHPTELMGFLGLVPSEYSTGDTRRQGDITKTGNSHARRVLVEAAWNYRFPARLSRVLQIRQEGQPKAVREIAWRAQLRLAHRYRRLSSRKLHPNKICVAIARELAGFLWDIARQVKLAT

SEQ ID NO: 72686 - protein, 438 aa, unidentified
MMKVSTQTTHSPKEGALTMKFKQSDQQNQRIERITCHHLIIGIDIAKFTHVARATDYRGIERGTYLAFSNDLEGYEQLFQWMQAIRLQFNKTEVIFGVEPTGHYWFNLALWLQEKQLELVLVNPFQVKRNKENRDNSPTKNDVKDALVIADMVKNGYYSDVYLHTETYRALRQLVTTRNYISKQASSVVNQIYRWTDMYFPEFQQVFKDITSKTALATLAEFPHPSDLRSLSVQDIIAGWKKRLKRAGSHTAAVALLHAAQRTVAIPGVVEEAKLSLAILLQQLQLYNDQMNQLKEQIHRILQTIPTAKILQSIKGINDITLAALYSEAGDLSRFAHGNQLLRLAGLHLSENSSGTYRGQVKITKRGRPALRKLLFIAVFQMVSVNPEFRVLHQYNKRVKNMTGMKSILKLCGKLARMLVAMSKSHSDYDVYKVNPAA

SEQ ID NO: 72687 - protein, 430 aa, unidentified
MKSNTQNAKIEAITEKTLVLGIDVGSETHYARAFDYRGIEYSKKPFKFSNTEAGFVTFKEWILDIKERHEKDKVVPGMEPTGHYWFNLGKFLQDNEMKPVLVNPHHVKKSKELDDNNPTKNDRKDPKVIAGLVREGRYMIPYLPDGVYADLRTASNIRFQLQAELTRIQNRISRWFNIYFPEYKTVYGKPDAKSGILILKAAPLPEDILTLGIDGVNQIWRDAKLRAVGKARAKTLIEAAGHSVGSKEGAVSARMEIRMLLEDYESRNMRLQEVMVLIEELVKGIPMAEKLLEIKGVGIRTVSGFLAEVGDISRFNNPKELQKLAGLALVENSSGKHKGGTTISRRGRKRLRYLLFEAAMSLVAKNPEFRELHNYYTTRRRNPLKKMQSLMAVATKLIRVFYAMLTKGVDYDPKKMVSDIRRPEAYLQAA

SEQ ID NO: 72688 - protein, 414 aa, unidentified
MKAWNEITHYAGFDWARDHHDIIIVDRAGLIVADIQIEHTAEGWQRLRKQFAALGPNVAACVETSQGAVVEQLLDSGATVYPISPASAKNYRGRKVPSGNKTDRVDAWSLADALRVDGHGWRALGKEDPLIAELRLLCRDEVALIEERTALINQLQSALQEYYPAALEAFDDWTLPSAWVFVEAFPTPQGLQAAGKRKWEKFLHTHLLARPRTYQKRMEIFARAGEFTSGESLTRAKSRLALARARMLRLLQSQIDAYRTEIEKLFAKHPDHDLFGSLPGAGPKIAPRLLGEIGSDRARFEDPTGLQCMAGTAPVSYQSGQIHKVYLRRHCNKMLRHAVHLWANLSRQSSAWAAVYYDQLREKGKSHACALRCLGQRWLKILWKMWQDGTRYDCELHARNQLKHGSWVLKIQTA

SEQ ID NO: 72689 - protein, 437 aa, unidentified
MGFPGTSQDCRHHIRFAKEVIKMPDPLFVGIDVSSKDNVVCCLSNNDEKRPLSRFTVLNNRPGILELKQRINQLVQKHSFDEILFGLEHTGCYSTHAAMYLQHHLDFGCKDVNVYLFNPSLIKEFKKAHFLDAPKNDRVDAWYIASKLMAGHLPHPFTWSEPLMALQRLTRARYHLMQALVRESNFLMTNLYLKCSDYTLVFDNKLSATSLAVMEEFQSAEALAEASLDELTQFLIQHGKNRFDDPQAVAKELQKAARSSYRLPKAMADSVNLAMASSIRVIRTLQEQLKSLKKAIEDHLDTIPQTLDSVPGIGPIFASGILAEIGDINQFENHKQLAKFAGLAWTQHQSGNFTANNTRLIRSGNRFLRYYLIEAADSVRMHDPVFAQYYALKKAEPKQYAHKRALALTARKLVRLVFYLLKTNQLYQPGGRNRHDS

SEQ ID NO: 72690 - protein, 378 aa, unidentified
MPNTIRNDIGAIFVSLELSRSKWLITSLSPGGGERMSKHTVPGGDICALLARFSELQRKALARTGTLFPVIVVQEAGLDGFWIHRLLEKEGIESHVVDAASIAVARRRRRAKTDGIDGETLLRTLLAYKRNEPRVCAMVKAPTIEEEDRRRLCRERKTLMNERVVHVNRIKGLLFSQGVSGYEPLRRDRRRRLDELKTGDGRPLPPHLKAHVVRELERLELLLEQIKAVEGERDALLAPQEATTPEMAMLLAIKGVGLEFAAVLWSECLFRQFANRRQIAAYAGLAPTPWQSGSVDHEQGVSKAGNPRLRTTLIQLAWLWLRHQPHSALAEWFHERVRRNGGRLKKATIVALARKLLVALWKYVTAGIVIEGAVMKTA

SEQ ID NO: 72691 - protein, 316 aa, unidentified
MKPASLKIGVDVSSKELVIASFNDEQGVTHIGNTEASIKRWLAKLPAGSTVGMEATGIYHRLLAKLAFAAGHTVFVLNPKEVAHYLRSLRARGKTDVLDARGIARFVANETDQLHPYVPSTASQEAVSTLVGRRAQLVKARAGLRMSMDRDFATDSTYIALIKKFKEMIAQIDAQLRSLVAQDTALEARRKTLASIAGVGPLISAVLATRLNRTRYANSDALVAAIGYDPRPRESGQYTGKRQLSKRGNPEERRLLYLAGVSGSRTPAWRPVFDKLIAKGLSKTAAHCIIARKILRVAFAIWQSNEPFNPAMLGKA

SEQ ID NO: 72692 - protein, 409 aa, unidentified
MKLFVGIDVSSEKLDVCFLDSSDTTLKEVTLPNNLNGASSIKESVLTFHHSFNYEKIVIGMESTSIYSFHPATFLSEDTDLKSLGCVEVVVQNPKSIHRYKGLFEEDKTDRIDAFRIADFLRIERFNKTVLKEERYIALQRLTRSRYQLVHQLTECKQHFLENLYYKCNTLSKELDTSVFGATMLDLLSDSLSLDEIAQMELEDLALLLQEKGRGRFSDPQKIAKMIKKAIRDSYRLAQVVQESVDMVLATYARLIQTLKKQIKDLEKSIVALFEVVSEVQCLKSIPGIGIVYAAGIVAEIGQIERFENEAQLAKYCGLYWKKNQSGNFESERTPMTRTGNQYLRYYMVEAANSIRRHEESYRLYYHKKYDEVPKFKHKRALVLTARKFVRLVDTLLRNRQLYTPERSV

SEQ ID NO: 72693 - protein, 346 aa, unidentified
MEHYVGLDVSLKLTSICIVDRTGKVEREGVVASDPEAIATFIKLHAPHLVRIGLETGATSTWLWTELNKIGLPVICIDARHAKAVLKMQINKSDRNDAAGIARIMQCGWYKEVCVKDLDSHATKALLVSRALLVKIKRDIENQIRGLLKNLGLVIGRAKMNMFAVRAAQLAEDRSELFAAVDPLLKAREAVEQQILDLDRKVLRLARNNAQVRRFMSAPGIGPVTALCFLATIDDPARFKRSRSVGAYAGLTTRRYASGEIDWTGRISKCGDKMLRSYLYEAANVLLTRVAKWSALKAWGIRLAKRSGLRKAKVAVARKLAVILHRMWIDGTEFKWSSKDAADQPA

SEQ ID NO: 72694 - protein, 321 aa, unidentified
MANKKQQIEFEQVIERGCGIDVHKKVIVATVRGVGIKEETQTFNSFTESIEKMRDWLISKKITHVAMESTGVYWKPIYNILEIDFTILLVNARHIKNVPGRKTDKKDSKWIAKLLLSGLLRGSFIPPKPTRELRDLTRYKRKMIEQISSEKNRIQKILEDANIKISSVVSNTNGATATKIINAMIAGEEDIEELLKFRHRSIRSSIDEMKSALKGKLTEHHKFMLQTIKESIVEKERLIAKLNNKIEEHLKKHELELDSKLLQTIPGVGKEGVAYLLAEIGSNMDQYPDEKHLASWAGMSPGSNESAGKKKVVESRMETNI

SEQ ID NO: 72695 - protein, 363 aa, unidentified
MHSINNTELSSLEETRCQFNGSKADIKLGIDVHQDFYVVVKQVGGSNPKPPQRFAKAAFLHWAAKLKSQAREVYAVYEACGFGFSLQRKLSALSIKCYVVCPQKLDEQNRRVKTDGLDAKALCLKLDRFVQGNRDALALVRVPTEQEEQQRAIHRQREQLVKARKQLEAQGRSLMVNHGLEPVQNWWRPRTFGALDVPQWMRELLCNSQPILVALQQKIAALTVQLQSAASSDPPRGLGKMTSVIIDREIGDWNRFNNRRQIASYTGLCPGEYSSGNTRLQSCVTKHGNPRLRAALVELAWRLVRFQPNYKPIVKWRQILAKGALATGAARKKAIVAVARQLAVDLWRIKTDRLRPEELGLIN

SEQ ID NO: 72696 - protein, 415 aa, unidentified
MNTERRWYAGVDWASASHHVYLTDDAGTKLGERIFQHSGEGLAEMAAWIIGTAGETHAGQIHVAIEVPHGPVVEALIERGFNVYAINPKQLDRFRDRFTMAGAKDDSRDAETMASALRTDPRCFRPLAAMNPVVIELREWSRIAEDLGAERIRLTNRMREQFWRYFPAFLELETDLAAPWLLELWEAVPTPEKAKRVREATIARLLKKNRIRRHAAGDVLTMLRAEPMTVADGTITAARAHIVSLIARIRLLNRQIDEAHRHLDRLTADLASAQETEPGQVKQHDAEILASLPGVGRIVLATLLAEAWDALQRRDHAALRSLTGVAPVTKRSGKSMAVTRRKACHRRLSNAVYHWARVAVQHDRASRAKYAVLRGRGHSHGRALRSVADRLLNVACAMLKTGTMFNASLVAQNAH

SEQ ID NO: 72697 - protein, 412 aa, unidentified
MDQAAKTRASGVVMIENYDSVDVFVGVDVGKGEHHAVALNRVGKVIFDKALPNDEAKMRAVLQRLKQQGTVLVVVDQPATIGALPIAVAQAEGVLVGYLPGLAMRRIADLHAGEAKTDARDAAIIAQAARTLPHALRSIQLADESVAELSMLCGFDDDILGQMTATSNRIRGLLTQIHPALERVVGPHLDHPAMLDLLQHYPSPAAMKQAGTTRMANRLLKLAPRMGSRLAEEITQALSEQTVVVVGTNAAATVLPRLAEQLAALRRQRSEIAVVVEKLVEAHPLSPVLTSMPGVGVRTAARLLTEVAGKHFETAGHLAAYAGLAPVTRRSGSSIRGEHPSRRGNKILKRAMFLSAFAALRDPISRTYYDRKIAQGKRHNQALIALARRRCDVMFAMLRDGTLYESDYAVAA

SEQ ID NO: 72698 - protein, 338 aa, unidentified
MRVTTVGIDLAKNVFHLCGMNSRGRVIWRRRESRGSLLRFLRSLEPCQVFMESCGGSHYWAREIRAIGHEPKLISGQFVKPFVKSNKNDVADAEAICEAGSRPTMRFVPIKTPEQQDIQAMHRIREQLVKFRTGLINQGRGLLMEHGVTVAKGRHGFQRQIPLILENGNLTDLFRELLRGLYEHVQSLNEKIAAIETKLKRVCKDSEAAQRLLEIPGVGPLSATALIAAVGNGSDFKNGRHMAAWLGMVPRQSTTGGKPRLLGISKRGDHYIRKLLIHGARSVLISPNDLGRRQSWARELKARTCANKAAVALANKNARIMWALLNREERYRHMAESA

SEQ ID NO: 72699 - protein, 355 aa, unidentified
MGYYVGLDVSQQQTAICIVNDAGERIKEGKANTNPLAIAIWITGQINPKEIAHVGLEAGAMAAWLYAGLIKLDFPMVCLETFQTHQFLKSHRNKTDKNDARGLAQLLRMGQDYFKTVIIRSEEHQAIRLLLNAREHLVTQKIGLENNITGCLKPFGVLVRRGHVSAKSFRSRMLPTLQELEARNITIQNYVLPLLDAHDSVCTQLKDLTQQAHQLAKENPICRRLMTAPGVGPIVALSYMTAVDQPERFRSGEDVGAYFGLTVKQYQSGETDVRGPISKRGNHMTRRHLVQAATTLLIGRKWSVIKAWGMKISKRSGFCKARVAVARKLSIILHRMWVNEENFRWTSAEETILAA

SEQ ID NO: 72700 - protein, 468 aa, unidentified
MSRKHKKAKRAGQGGAVPSLSCIEPNAAGIDVGATEIFVAVPQDRDPGPVRSFETFTEDLHRLKSWLQHCGITTVAMESTGVYWIPLFQILERAGLEVCLVNAQHVKHVPGRKSDVIDCQWLQYLHSVGLLRASFRPEERICAIRSLLRHRDSLVQMAAAHVQHMQKALTQMNLQLHHVLSDITGQSGLAILDAILAGERNPTVLAQLRHARVQASQEVITKSLVGDYQREHLFTLRQSLQAYRYYQSLITTCDQEIAEQLQNLDSRTPPDASPLPPEPYPHRPRKNEFRFDMRSELYRIYGTDLTAIPSINALTGYTVLAEVGTDWSKFRNGDAFASWTCLCPQNKKSGGKILSAHTRRSANRVNRALRLAAQTLERSTSYLGTYYRKMRARHGAPAAITAAAHKLARIIFHLVTTGQAYDESLFAAEERSPPDKLMTKVFLPQKSSVSANDWKTNSNVVPSSSATN

SEQ ID NO: 72701 - protein, 359 aa, unidentified
MKTQRNEISFKGQSIYVGIDVHLKSWSVAVLSQTSVMKKFRMDPNPEGLKTYLSNNFPEADYYSVYEAGFCGFWIHDRLTSLGINNIVVNPSDVPTTGGERLRKTDAVDSVKLARSLRANELKGIYTPDVASLEIRSLIRLKNSITKDMTRQKNRIKSTLRYLGVEIPKEYTEPFSNWSKRFILWLREVQMNTSSGRDALNLQIEQYEALRKQKLMMTRKLRALGRSDRFKNDLDLIMSVPGIGMTTGMALLAEICDVRRFTDGAHLAAYIGMTPMCHSSGEKDGTGDITLRKNAIMRCNLVEAAWVAIRQDAAMNLFYTECCRRMVASKAIVKVARKLVNRIYYVLKRRKKYVNNVVS

SEQ ID NO: 72702 - protein, 348 aa, unidentified
MEHIGIDVHKNQSQICILTSEGELIEKRIVTDRKRFATVFEFRSRDRILIEASTESEWVARCLEELGHEVIVADPNYLPMYGHRSRRIKTDRRDARALAEACRHGIYRVAHRTSDERRHLRGLLAAREALVRTRSRYISLIRALLRREGLRVRSGSAERFIERLGDIEVPALIGQEIEPLLAVMDHLDTQIALADRQLTTLASQEGEIRRLCTVPGIGPVTATSFVATLDTAERFRGAHQVEAYLGLVPRERSSGEKQHKGRITKSGNNRTRYLLVEAAWVLLSRVKQAQAQPLQVWAERIAARRGKRVAVVALARRLAGILYAMMRDGTEFAAGQFVTAADRKRATA

SEQ ID NO: 72703 - protein, 357 aa, unidentified
MESQEVKYVGVDCGKKSIEVVRINSENSLERRQFSTTESGINNLLQWLTLNDIVGLEAGSQSFRIAKSILNKGVQVIVLNPGNLATIYQSLKKTDKEDSLKIARLIQRHPIEELPTVPIPNDEEEDNRRLCSEHENWTKQLTQGKNRLHSLFTQAGLTQITKKHLRTKANREISSSLTSKSIPKRSGKNIKSFRFSGTKSKTHRKRNSRSSQKNKAYVQTIMSMPGIGMITSLAIMSYMGDCKRFSSAKQAAYYAGLVPRVDISGDTVRYGRIINRGCHSIRRVIVQAAWSLVRCQHGGKVKEFYQRLYLKKGAKKSIIATSRKMIEVLYVMIRTGKLFDSMPENILNRKLTQYGLM

SEQ ID NO: 72704 - protein, 312 aa, unidentified
MSNKISFDQVIEIGCAADVHKNNIVATIRWGSEKYETKEFGCYTSSLTKLRDWCKKHGVTHFAMESTGVYWKPVYNILAEEGGMEIILVNARHVKNVPGHKTDKKDSIWLSKLLISGLLKGSFIPPTPIRELRDLVRYKKKVIEQRSSEKNRVIRILEDTNVKLSSVLSDVHGAVGQKIINDILNGITDAKLLSRHYHGKMHKSRKEFRLALEGRITAHHKFMLQTIKRSIEQKDELIKTIEAQIDDQIKAYQEDVDNLQTIDGVGRDSAITIISEIGNDMSQFPSEKHLSSWSGMSPGNHESGGKKKTPGQ

SEQ ID NO: 72705 - protein, 320 aa, unidentified
MNQKPLYIGIDVAKAQLDVAVRPTGQHSQVPYTEESVQELVSRLADLRPTLVVLEASGGLELPLVAALAAASLPVVVVNPRQVRDFARATGRLAKTDSIDAHVLAHFAEAVRPAPRPIADADAQALSALVSRRHQLISMLVAEKNRLGTALPSVRPHIQTHIDWLKQALKDMDDHLGHTLRQSPFWREKEDLLRSVPGVGRQLTLVLLADLPELGSLDRKRIAALVGVAPFNRDSGTLRGRRAVWGGRSRIRAMLYMGTLVATRHNAIIRTFYEHLLAAGKPKKVALTACMRKLLTILNAVMKHHTPWRSAEVQLVAPYS

SEQ ID NO: 72706 - protein, 341 aa, unidentified
MKNLFIGVDFSKEKVDVAIIFADGLTETAPRVFNEFKTTVSGYKQLVKWVEQNSCGIDSSLWLFCGENTGDYSKGLCNFLYGKGYDMWLENAKSIKDASGLRRLKSDRADASMIAEYAMRNYDKAIMYEPLSESLAQLRELFLYRQMVVRHRCSFQVRRGEKRLTMEKSPVKTMISQSGRHIVSELNKEVEKIDKRIAELIKSDEELTEVFTIVTSVPGIGTQNAVCLMVYTDNFRRFNYDSRKISCYYGIAPFGKDSGTSVHSDPHVHYMANRQIKAMLTQAALAAVNFNPVMARYYMRLVERGKKKQVALNNVKNKLVHLVTAMVRNRQTFTPEYKISA

SEQ ID NO: 72707 - protein, 416 aa, unidentified
MKIVRPICCGMDVHKNIIVATIGITNKKTRITEYIQETFSTLNSDLLNLKQWLINHKCFDACMESTGKYWIPIFNILEDEINIYLTHPKYVKAIKGKKTDKKDSKWICDLFKHDLIKFSFIPPKEIRALREISRYRYKLVGMRSSERNRYQNCMTVSNIGIGSVFSDPFGKSAQAIMKEVLESDIIEDEKILKCIHRSCKNKDKILDSIKHCNIETDQRFKMNESMTHMEELQVHIDNCEIEMMKRAAPMFDQFMHITQLPGISTLSAILIISEIGVDMKQFESDKQLTCWAGLAPANNESANKKKSVRISKAGQYLKPLLVQCALGAIKDKEGYFGIKYSRIKKRRGHKKAIIAIARMMLVSIYHMILTGETFNPSDYESFRNPKPPIKQQVLTEESAIEFLKKSGFDVSKLAKP

SEQ ID NO: 72708 - protein, 358 aa, unidentified
MGLHDRGDLGPASVTVAHANRSGGFRPNAIRRVDQTDMLLEGAMADKLFLGVDVAAEWIDVAIYGRAAVDRLANTAEVIAAYLARFEPDQVGLVAFEPTGGYERVLRRELAGAGLAFARVHPNALVGFRRARRQKAKTDRIDARLLVDYAANELARRGLAPLVEGDERLREMTSRRRQLVDLLQAERARARLAETDVVRQGLDAVETALLAVLDQLETAISAHIESQPELAATAGRLRSLTGVGPVTVSTLMGELPELGRLSGKEIASLVGLAPQTCESGKTHRRAVTGHGRPGVRRVLFNAARSAIRWNPVMKAFYETLVHTNKRPGKVALTAVMRKMLVTLNAIARDQQPWLHAKP

SEQ ID NO: 72709 - protein, 435 aa, unidentified
MEKIRTNVGGIDIGAKKVFTSIEGHPVVSHFTFTEDFLRLRDFLLENHVESVAMEATGVYWVILYEILEEAGIDVWLVDGRQTKQVPGRKTDVKDCQWIQELHSYGLLNRCLVVEADIKELRSYLRLREDHIESSSKHINQMQKALTLMNIRLKEVLDQIHGASGMAIIEAILNGERDKQVLVRLCHNSVLKNKKELVLKALEGRYTEAGLFTLRQAYDGYKFYLQQISECDQKANVVINRIGHFGDGQELKKKRKAIRHHRPTVENLGSNLLNIFDSKDATLIAGITDYTWMQLLAETGPDLTKWPSEKYFTSWLALSPGQHNSGKMRRNARRKGKPKAGQIFRIIAQGLINSKDVAIGSFGRRLRGRKGPKVAIKAMARKVAVLYWRVMVKGIDYAEKGIKQYEEQLILNKMRTFSRLAKELNINTADYMSVT

SEQ ID NO: 72710 - protein, 344 aa, unidentified
MTYYAGLDVSLRTVNICVIDEQGERVAETKLASDVQETVAYLDELELEIVSVGLEAGTLAQYLTYGLQAAGFEVVCMEARQVKAALSAMRNKTDKHDARGIAQLLLSGWYRRVHVKSMQSHHIRMLLSSRKAVLSKCIDLENEIRGLFKIFGIKLPARLGHGAFDAAVRDIIEIDETLSHALLPMLDARLMLYRTFRELDNRTRKLAHRDPVCERLMSAPGVGFITALTFKSGVDDPSRFKRSRTVAAHFGLTPRRFQSGEMDIEGHISKCGDADVRCALYTAANAMLTRSSRWSSLKAWGMKLAKTRGHRKAVIAVARKLAVILHRLWIDDAQFCWGNEGVRS

SEQ ID NO: 72711 - protein, 404 aa, unidentified
MFYIGIDWSKDHHNMCIMSESGAVVSEIEYKQSLEGFQRMEGECQKLGVSPRQCIVAIETTYNLMVDFLVERGCIVYIIPPQATKGYRNRKHSSNAHTDTSDAFLLASIMRTDRDSHRRLMPNSPLTQQILAQVRLIELLRCSIQRQENQLGAVLLRIYPQALGLFDKLGSQISLHFLAAYPTAQEATDLSLEDFREFCTAHHYTRPSYIPIRYAHLIDPAPAANNAVIQAYQGHVSTLAEVLLPQVERRIKAQIRLTKLFDQHPDAFIFDSLPGAGKLLAPALLAKFGDHRGRFPNRADVQALAGTCPTTERSGRRKTVRFRRGCDKEFRRISQQYARSSTPESGWANAYCGEIRSHHPSNSHAYRCLANRWLAIIWKIWQTRQAYDEGYHLRQRAARRRPRS

SEQ ID NO: 72712 - protein, 345 aa, unidentified
MKHVIAFDVSMGKSYMVIYNALKKCVFEGEIKHTRPDFERLKGMINELIQAYNEQPHIVFESTGVYSRQLERFMAENTFVYCVLNPLEAKLQCDSLRIHKTDKSDAHQLALTHFSAERIEKVGTDDLFQQLKSLSRFYSELDDELTVTRGRMHKVIQLTFPELEKLFTSKSGLFLNVVQLFPHPDLVQGLSRTVIKNRIRANTNKKISTTMAEKKAMQLMEAADQSYPAVSLKDVLCEQLRSYARRYQELLLLKNQCIEDMVRLVEDRKEYKILLSIPGIGPNTAVSMLAEIGDISRFKNNKQLNAYTGIDIRRYQSGKTFFKDKINKRGNNVLATIILWSTTTN

SEQ ID NO: 72713 - protein, 341 aa, unidentified
MLIIGCDYHPSVQQIAWVDTDTGECGERRLTHCTEAEQFYRELKSKGAGVRVGMEATGHCRWFERLLGELNYELWVGDAAQIRAKQVRKQKNDRRDAAHLLKLMLEDNFPRIWVPTPENRDVRQLVLHRHRLVGMRTRVMNQLQAIAMNEGVRRKRGLWSEKGRTQLEALSLPPWTSRRRQELLELLDRFDPSIDQLSQAIEQEAERVPEVQRLQTHPGVGSITALAFVLVLGTPDRFGCGKQVASYLGLIPCEDSSAERWRLGHITKQGNALLRYLLGQAAQTLARCDEKWRGQYVHIAMRRNRAIAKVAMARKLAVRLYWMWRRGWDYQQWKKFGSHAG

SEQ ID NO: 72714 - protein, 368 aa, unidentified
MTQVTTYVGMDAHKKDLFIAMLIGDELKPVTWQLANEPQAVRRLVRKLEREAPGPVRVFYEAGPCGYALQRQLTTSRVSCDVVAPALIPRKPGERVKTNRRDARKLAELGRAGLLTAVQPPTPEDEAVRDLARARDDAREDLQRCRHRLGKLLLRRGLHYSGRNWTRAHRQWIDSLTWAHAAERAVVDDYLLAIDHTEARLLELDARLGEIAEREPYREPVGWLRCFRGIDTLTAMLILAELHDFRRFASAPALMAYLGLVPGEDSSGEKHRRGRITRTGNALVRRLLVETAWHYQHRPGVGVALMRRRKGQPGRVIAIADKAQQRLCRRFRKLAAEHKPAPKIAVAIARELAGFLWAALQPAPVAVK

SEQ ID NO: 72715 - protein, 344 aa, unidentified
MSEYAGQQFVGIDLHRRRSVIVRTTGSGEVLESVRILNDVESLDRVIERAGEDPEVVLEATYGWYWAVDALQEAGARVHLAHPLGVKAFEYRRVKNDFRDAADLADLLRMGRLPEAWIAPPATRELRELVRHRAKLVALRSHCKAEIHAVLAKCGIQVSMSDLFGVAGTALLDRLQLAAPYAARIASLRRLMDDLDFEIEVFTNAAQGRLDADPGYLAVQQIPGIGPILGAVFVAEVGDVTRFTTAPQLACWAGLTPKHHESDTHVRRGRITKQGSRLVRWAAVESVKRVGPHTRIGALRDRVAERRGGNIGAVAAARQQIEYVFYALRDGHVRALQHPARDSA

SEQ ID NO: 72716 - protein, 346 aa, unidentified
MFADAWDYVLGVDTHRDAHALAVVAAPVGTVELETTIAASGRGYREALRLAERQAPGRRVWAIEGTGCWGAGLCRFLQAAGERVLEVDRPRREGRSPAKSDPLDAIRAARTALALERLPEPRSAGKREELRALVVAREGALTAKRAGLCQLRALIVTAPEPLRNELRRLSRARLIARLRGLRPDRNTSQPRGLLLALRSVASRVSELTREERELRSEIRTLVTELAPTLLDEPGIGPASAAQILLAWSHPGRLHSEAAFARLAGAAPIPASSGQTIRYRLDRGGDRQLNRALHTIIVSRRKTHPETIAYIDRRTSEGKTVREAIRCLKRYLARSLYRQLEATPMST

SEQ ID NO: 72717 - protein, 357 aa, unidentified
MPSSDAKYIGLDVHKEAIAIAVLNRVGKVVMESIVETKASTLLDFLHGLRGELHVTLEEGTWAAWLYEVLKPHVAELVVCNPRRNALLKEGSKSDKIDARKLAELLRSGMLRAVYHGENGLRALRELVRSYEAVSKDVRRVMNRLKALYRGWGIPCKGIQVYGRRHRQQWLEKLRESGVRRRAELFYQQLDALQDLRHTVRGELLVESRKYPAVKILRRIPFIGPLRAAELVALMQTPQRFRSKRQLWTYSGLAVVTHDSAQFRYVDGQLQRAKKPQQVRGLNRNHNHAMKEILKSAAESASRRAGPCRDFYEGLLAKGIKPELARLTLARKIAAIILTLWKKGESFDAKHVKPQAA

SEQ ID NO: 72718 - protein, 358 aa, unidentified
MSMLAGQVDAVIGVDTHRDKHTVAVVDPTGGVIATVELATDAFGYRRMLAFAVEHGPGRRVWAIEGTGSYGSGLSTFLLEKGEWVAEIDRPARRARRNGAKTDEIDAVRAAREALSRDHLAQPRRRGDREAMRVLLTTREGTVIARTKAICQLKALIVGAPEQLRDQLRRGTTDAQLDRCARLRTTPTQSTEHRCTVRALRICARQALFLEAQAADLESELEELVTVAAPQLLALTGVGVVTGAQILISWSHAGRIRSEAAFAALAGVAPIPASSGQTVRYRLNRSGDRQLNRALHTIVLSRLSHDEATKIYAARRIAEGKTPREIKRCLKRALARHVYRALEAAARADTATPAAAAA

SEQ ID NO: 72719 - protein, 351 aa, unidentified
MHKQSFQAAVIDDTGSCLEEFRLRNNREGIEQLIERAGCYGSFQAVVESSANYWTKLFDILEENHIPIKLSNPYKTKAIAEAKVKTDRIDSKMLAQLLRADLVAECYVPNKENREKRALIRERASLTKIRTEHRNKIHDLLAKYEYTHRFSDLFGKQGVEWLKTLKLSQYDQIILDANLRLLESLDAEIETLSIEIAKLAIDQTDNNQQNQIRLLLGLKGIDYYGAMILLSEIGDIKRFPSPEKLVSWAGLAPRTHQSGETSYNGHITKKGSSRVRWILGQAAQTARLYDLKFKTFYDRIAAKKGHSKALVATMRKMLVVIWTILTRNEPYSGEDQELTERKIKRLIRISS

SEQ ID NO: 72720 - protein, 396 aa, unidentified
MHTQLHVAIDIGSQLHRVAIGRDDGGLIDEFDCAHTPAGLSDFFARVRKHENLQSAEVCVAMEGYGGYARPLDSQILAQGWRLYAVNNLKFVRFKEIFPAPAKTDAIDARRMLQLMQLRERIPMACAVLQEVAPVDQLHQQLKALTRRRKQLVSERMRISQRMQVELQGTAPGLLTITGQADNLWFLNFLTCRTDLSKLKTVRRDTLLKLEGVGVGYARKIAEWQKTAIFAPSIAWIGPMIHADAMRILSLREAIGQLEVQIAALTAQSGIAQRLLSMPGMGSVCASELAGEIGNIKRFENEASLAVYLGVAPLDRSSGKRISAKLPRQINPRARDALVTAIAHHIQAVPTSKAFYDRKRVEGKTHMQALRALARHMVRIIFSMLVSDRDYRLPNV

SEQ ID NO: 72721 - protein, 385 aa, unidentified
MKKQSFIPTDYDVFAGLDVDKRSISVTFTDHQGFIRSLRTAYGAQPLVNHVRKHFPDKKVVFAYEAGPTGYGLYDGLVANTFRCLIASPSMIPRAPGQRVKTNRLDSVGLSENLRGGQLKSIHVPSLIYRELRHLSQLRDSMMSEMVRMKQRIKSLLLFEGIEYPAAPAGSQWSFLVKDKLRKLPCSSTVRFKLDRLLDSLEFDEKQIVKTTQQIRRFCRNDPELCRCIEYVMSVSGIGWIVASQAMARIGDWRELQDVRQLGAFLGLVPTERSTGDTVHRGSITHSGDPRLRSKLIQASWSAIRQDGELREFFRKVCRARAGEGAKKIAITAVARKLTVLISVVLMEQRPYEVRQTVCSTPLTQEETVPQGTPRRQAEPGEKNS

SEQ ID NO: 72722 - protein, 355 aa, unidentified
MDQKKYIGLDVHQASISVAVRNAAGKLISESIIETKAASILEFIRGIRGSVWITFEEGTSAAWLYDLLKPHVTKVLVCNPRKNALLKAGNKNDRVDARKLSDLLRADLLTPVYHGENGVRTLRELCRSYLTVTKDLTRVMNRVKALYRSWAIPCAGDKVYSPRRRNAWLEKLSEAGVRRRAEQLYQQLDALSKIRRGVRAELLAESQKHPAHLLLRQIPLLGPIRVALLIGLMQTPHRFRTKRQLWAYCGLALQTRASGEYRFSGGELQASKKAPALRGLNVNHNHDLKNLFKSAAMHLSTSTGPLGDFYRNLLAKGMKPSMARLTLARKIAAIVLAIWKKGAGFHPEELKQQAA

SEQ ID NO: 72723 - protein, 323 aa, unidentified
MSSFVGVDMAKNTFDVATPLDNGKHRTKGKLSNDAKGFAEFESWLRKHATADALIVIEATGNYHEALADFLFQKGYRLHIANPATTAAHAKSELSRNKTDKTDAKLISDFAMQKHRKLRLWVPEPQSRRRLRALVRRLEDLNEIRQMEKNRLEVASPNVVTSIESVIAHVLEEIAKTEKAIKQHIDDDPDLRGKSELMTSIDGLGEKTAALILAELGDPLDYEGPKKLSAFAGLSPRQDRSGGYVGPTRISRTGSSRLRGGLYMPAIVGIQHNVVLREFAKRLKANGKAPRQIICAVMRKMLHLVYGVLKSNKPFEPEIALAH

SEQ ID NO: 72724 - protein, 391 aa, unidentified
MIYVGIDVAKDKHDCFITNSDGEILFKVFTITNNLYGFNDLYQRIESVMEDVTKVKVGLEATGHYSYNLLGYLINKGLPTYVINPLHTNLYRKSLSLRQTKTDKVDARTIASMLMSDVNLKSYSDTSYHNEELKSLTRYRFDKVKERAELKSSISRLVCILFPELEKLVPTLHMASVYAMLSEFPGAKHIANAHLTKLTNLLSESSKGHYGKETAITFRDVARNSIGSNMPAKSLELKHTIKLIQEISSEIDEIENEIKLIMDEINSPTLSIPGINYRMGAMIIAEIGDFNRFDSPDKILAYAGFAPSTYQSGQLDGAYAHMEKRGSRYLRYALYNAAKYVCHWDPTFAEYLAKKRAEGNHYNVALSHAVKKLVRVIYHLEKTNQKYIKAA

SEQ ID NO: 72725 - protein, 350 aa, unidentified
MNVTTYGLDLAKRVFQVHWVEPDTGELKRKVLARADVAAFFARRAPGIVAMESCGSAHYWGRVLSGLGHQVRLIAAQFVRPFVKTNKTDAADAEAIWEAAQRPGMRFVALKSEEQQAVLSLHRMRAQLVKIRAMQAYQVRSLLYEFGIVAPKGFRGLAAMAGPVLADATSSGVPELLRTELLRQLEGLRTLSSRIEELERRIGGWQRRDAECERLTAIPGVGRLTATAVAATVADARSFRSGREFAAFLGLVPRQCGTGGRVKLLGISKRGDPYLRTLLIHGARSVVLAQTRAGRMTDPWLRDILSRRPKNVAIVALANKMARTIWALLAHGRSFDRNWGRTAAAVAPEH

SEQ ID NO: 72726 - protein, 405 aa, unidentified
MLFVGDDWAEDHHDVELQDQAGRRLGRARLPEGVVGIARLHELVAGHLGADEPGEVVVGIETDRGPWVRALVAAGYRVFPVNPRQVARYRERHHTSGAKSDAGDAHALADMVRTDRHQLRAAAGDSDQAEAIKLLARAHQTLTWERQRHVLRLRAALQEFFPAAVAAFPDLAAADALALLAAAPDPASAARLPRPQVVAALTRAGRRGVPAKAEKVQQALRAEQLAQPKAVVAAYAATVRATVAVVATLNAEIEALGEQVQAQFGKHPDAAIYRSQPGLGGVLGARVLGEFGDDPGRYRDARARRNYAGTSPVTKQSGKRTVVLARFARNDRLADPLHQQAFCALTASPGARAYYDQLRGRGAGHHAALRQLANRLVGILHGCLKARTRYDEATAWSHRTADAAA

SEQ ID NO: 72727 - protein, 350 aa, unidentified
MSRQSMPSMIATIGIDLGKNTFHLVGVDKRGAIVLQQKVTRHQLGRRLSNIPRCLIGMEACCGTHFIARQVTALGHDVRLIPAQYVKPFLKGHKNDYRDAEAIAEAVQRPTMRFVSIKTPEQMDLLALHRVRSRLVRQRTGTANQIRGFLLERGITVRKGLMPLRKALPEILSSKSDVLSPRMINLIGDLVQDWRRLDERIAHVSTEIEALAKRDENCQRLMSVPGVGPIVSSAVVAAIGNGTGFKQGRDFAAWLGLIPKQESTGDRTILGKISKRGNKYVRTLFVQAAHVVLERRPRTAKQGLWPWIEQASKRLHRNMLAIALANKLARIAWAVLARGRAYQPRITAHA

SEQ ID NO: 72728 - protein, 340 aa, unidentified
MKITTVGIDLAKSVFSMHGIDEHGKAALKRTVSRGKVMEVMAGIGPCLVGVEACSGAHHWARELGKLGHQVRIMAPRFVAPYRKSGKNDGNDAEAICEAVGRPSMRFVAVKSAEQQALLVVHRVRNGLTAERTALINQLRGLLSEFGIVIAKGRYQARHQLPVVLDDPDNGIPVLARQVLLEVNERIRELDARILAYDRRIEALARESEAAQRLMAVPGIGPVTATAIVATVGPATAFKNGRQFAAWLGLVPRQYSTGGKVRLGRITKQGNVYLRTLLIHGTRAVLARVHERTDRASSWVRSLIERRGYKRAAVALAAKNARTIWAMLAKGQPYCPAATV

SEQ ID NO: 72729 - protein, 397 aa, unidentified
MEVLYARCCGLDVHQRVVVACLSLVEAGLRRKEIRTFGTTTRELISMRNWLIEAGCTHVAMESTGVYWRPIYQRLFGFFELVVANAQHLKAVPGRKTDVKDAEWIADLLQHGLLSPSLVPPQDQQELRQLTRLRLSLTQERSQLVNRIHKLLQEGGIKLTSVLSDVMGVSGRAILEALATGESDPERLASRAHKSVQHKHEALVEALVGDLREHHRFLLRELLTLTQAVDRSIQHVEEEIEQRLRPFEALLERLCQITGVSRHILHVLLAEVGIDMKRFPDAAHLSSWAGVCPGNNESAGKRRTGRTRPGNHYVKVALVQAAHAAAHTQTYLGEQYRRLQHRRGAKRAALAVAHSILVIFYHMMVTGQPYQEKGVEFFQQMDRHQVPDRLIQRLPAA

SEQ ID NO: 72730 - protein, 438 aa, unidentified
MSNKVIFNLDELFISVGIDVGADFSWMSIALPNQQFVGKPYKILHNSIDSLTTAVSKIKEAEELYSLESRIFLESTGIYHYPLFCYLRDKGFNCSVINPIITKNSTNINIRKVHNDRFDSKKAALVGLKPDLKISLMPSDLALNCRNLCREYYDLMDNRSAYVNKLHGELRMAFPQYLGIFSKVTINTSLTLLETYTSPSAFLKADKQEIIDIIKFTARFGLTYAQNKYNAIIQAATDANQFGYIIDSNIKRIRLYISFIRKYDEEINSILESLHELVDANEDSDFVKQIHLIETFKGAGFLSAVSIMGEIGDFSAFSKPKQLFAYFGLDPAVKQSGKFEGTKVQMSKRGSAIARRVIHTLTLQSISISRNREAKNPVLLEYYLKKCDSKPKLVAMGAVSHKVCNMIFAILRDNKPFKIIAPQEHIKQYNSAKCDIAA

SEQ ID NO: 72731 - protein, 408 aa, unidentified
MEIIYPRCCGLDVHKRSVAACVRRLEADGRLDQETRTFGTMTRDILEMADWLAAAGVTHVAMEATGVYWKPIYNLLEDRFTLLLVNAHHVKHVPGRKTDVKDCQWLAQLLQAGLLQPSFIPPRPQREFRELTRHRSQLVAEKARVANRLQQILEDANIKLGTVATDILGASGRDMLRSLIAGEQDPEKLADLARRQLRSKIPELRRALEGKVRGHHRFLLGQLLAHVEHLEGQIETLSRRIEEVSRPFSLAREALVCLPGIEQRTAENVLAEIGADMSVFPSEHHLSSWAGVCPGSNESAGKRKSGKTTKGNRWLRSALVQAAWAATRKKDSYFQAQYRRLAARRGKKRAILAVAHSLLTVIYHMLKTGSNYQELGGDYFDKLNKNRLVPYLVRRFKDLGFRVTLEAA

SEQ ID NO: 72732 - protein, 344 aa, unidentified
MTHYAALDVSLRSVAICIIDNDGKIRLETSVPSEVEDITAVLDSFDGDIVSVGFEAGVLTQYLTYGLQSTGYEVICMEARQVKAALSAMRNKTDKNDARGIAQVLRSGWYSRVHVKSMRSHEIRALLSSRRAVLAKCTDLEQEVRGLFKVFGIKLPPRLGHGAFDKMVRPTIEADPALAHALVPLLEARLALYKSFRELDNRVRRMALDDAVCRRLMTAPGVGFVTSLTFKAAVDDPTRFKRSRTVPAHFGLTPRRFQSGDMDISGRISRAGDPQVRATLYNAAHALMTRSSKYSSLKVWGMQLAKKRGHRRAVVAVARKLAVILHRMWIDETSFHWSSEGSTA

SEQ ID NO: 72733 - protein, 483 aa, unidentified
MSKPKKHSKKLGQEKTAAGQSKLGGKRKGMCLGDRPILEPNAAGIDIGAREIFVAVPPDRDEHPVRVFSTFTEDLEKMAQWLVDCGVTTVAMESTGVYWIPLYDVVEKHGVKPCLVDARGMKNVPGRRTDWHECQWIQFLHSVGLLRAAFRPEGNVCAVRSLMRHRSDLVQMTNQHIQHMHKALTQMNLQIHHVISDITGVTGLAVLDAIGAGERDPQKLAKLRDPRIQATEETILKSLVGNWRPEHLFTLKQSRQMYGHYQEQISACDKEIEKLLVAFQPRVDPQQKPLPPDRKKKQRARQKKATPKTGFDLRTESYKLFGVDLTQIPGLMTMVLTLFSEVGRDMSRWKTAGQFVSWLALCPDNDITGGRVAWRGTRKVHNRAGELFRMAAYSLHHEQSPLGHYLRRMKSKLGPTGATTATAHKIAIIFYTMVKKQVEYDETLWAERDAQREKRFEAKLKRQAQQLGYKLVPIEEKPSRVTG

SEQ ID NO: 72734 - protein, 334 aa, unidentified
MKKRYFMGIDIAKATFDFCLLSSHGVVLWRGRFSNDPGGIKRFLAELAAHGWKPSLIYFALESSGVYGKALIAALHQAALAVSVLNPAQVKYFAFSVLRRTKNDRVDAEIIARFCLERKPLATRPLRPVEEQLKLLVHERDSRVGEQTRERSRAKNDPFQIELPSLISRQRQQRLKQLDKEITQLDEAINELIAGDEYLKTQSQLLCSIPGIAETTAAKLLSELAGKEFQSARQLAAYAGLTPSEFTSGVSSYGKTHLSKIGNAFLRKALYLPAAVARRWCKPLRPWITLLEQRKLSDLAIRGAIMRKLLHIAFGVLRHQKPFDPSLVFMPKTV

SEQ ID NO: 72735 - protein, 430 aa, unidentified
MGLIVPTAMHPEQDDQPLPYDWFVGIDWGSEKHQVCVLDRDRRRVGERVVDHDGASLAQLAAWLWALSAGQPQRVAVAIEVPRGAIVEGLVERGFHVFAINPKQLARFRDRHTMSGAKDDRRDAFVLADSVRTDQPSFRRIQLDEPQLLLLRELSRAEETLLEEFRRSANRLRDQLHRFYPQMLELCSAADEPWLWDLIDLAPTPAHATLLSEEQVQRLLKTHRIRRVKAKEVLTCLQGSALPVAPGAAEAAQAHCAFLLPCLRVLAEQLKACSQQVSALLSTLAEEPGKGEGPSDVAIVLSLPGVGRKITAWLFAEAAQPLAERDYQVLRTHSGVAPVTKQSGKRRVVVMRRGCNPRLRHALYHMARVSMQRDAHFSNVYMVLRAKGQRHGQALRNIGDRLLRILMAMLRNRTCYDASRIRRELVVQMG

SEQ ID NO: 72736 - protein, 412 aa, unidentified
MDNHHVLFERVVCSGCGLDVHKDNVVATIKGMGIKEETRTFSTFTSSLRELSQWLKANGITHIAMESTGVYWKPVHNILDSDFEIILVNARHIKHVPGHKTDRKDSAWIAKLLLSGLLKGSFILPRRGRELRDLYRYKRKLIGQRVSECNRVQKVLEDANIKIGSVLSDVFGASGRAMIDAIIEGQGDPKVLAELAKGSLRRKKEQLILALEGNVTDHHRFMLTISRTAIANINALIARVDQQIETYLAAYEEQYRLLQTIPGVQHETTTAIIAEMGTDMSAFPNQHHLASWAGLCPGNNESAGKKKSERITHGNRSLKTALVEAAWVAVQNKDTYLKRRYRGLAARRGKKKALVAIAHKILTAAYFILKDKVPYQEPDNAAWLEKRKQALIRSYLKRLHELGASAPSQIVK

SEQ ID NO: 72737 - protein, 465 aa, unidentified
MKHNHRRHAAQTRRTSPSILERLQVDVAGIDCGAAEHFVSVPPDRDPAPVQAFPTFTADLQRLADWLLACGITSVAMEATGVYWIPVYDILEARGLTVLLVNARHVKHVPGRKSDVQDCEWLRELHSVGLLRGSFRPTAAILALRALLRHRDTLVKSAGTYVQRMQKALIEMNLLLPRVVSDITGRTGLLILRALVAGERDPHVLAQHRDPRCTATATEIAAALTGHYRDEHVFVLTQNLELFDMCQTQLAACDTAIEAQLATLTATTAPPPTPLPRPRVTRRHGNEPAFDLRTPLHHLTGADLTQIDGIAPYTALKLLSEIGTDMSRWPTEKQFTAWLTLAPQNKISGGRRLSSRTQPSANRAAAMLRMAALSVVRGQTALGAFYRRLAVRIGKPKAITATARKIAILVYRTLRGTLTYQDPGAPTYNARQRHRLLRRLRTQAETLGFTLLNRETGEVLEGTVS

SEQ ID NO: 72738 - protein, 366 aa, unidentified
MKKISTMQVFGNEVFREQKLTIGLDLGDRWSFYCILDEAGKIILEQKLPTTPEAMKQTFGKIPRSLIALETGTHSPWVSRLLTELGHEVLVAHAQKVELITKSNRKDDRHDARTLARLARIDPELLGPVRHRSAKAQIHLTVIRARAELVSARTALVNAARGLAKSFGQRLPKCGTQQVSGKLAEGLSAELREVLEPLLREVESLNERIQEYDERMEKIAEEVYPEASLLKQVKGVGTQIALTYVLTIEDPYRFPKSRAVGCFLGLRPGRRNSGESEPQKKISKEGDRYLRTMMVQGAHYILGPFGEDSDLRRWGMKLAERGGKNAKKRAVVAVARKLAVLLHRLWVSGEVYEPLRNSQKAMRAVA

SEQ ID NO: 72739 - protein, 401 aa, unidentified
MSKFFAGLDWASQVHAVCVIDEHGTVKTRFEVTHDAVGLRELCRRLAAFGAIAVAIERPSGTLDTLIEAGFTVVPIHPNAVKASRPRYRSHGAKSDTSDAYLLADLLRTDGHRFKPLTPHSDEIRALRALVRGRDDLIATRVQLANQLRSLLESFWPGAATVFADVDSPIGLAFIDRYPTPASAKGLGLKRMAAFCAQHGYSGHRSAEELVCRLRDAPAATCGALETQAKGELARALAHSLVAIVEHIRRLTNRIEHAVAALDDGRILMSFPRAGRICAAQILAELGSDRQRFSSDQHLAAEAGVAPLTYQSGKCRAVTFRWACNHRLRAALTCLADNSRHASTWAAHVYAKARGRGCDHPHAVRILARAWVRVIWRAWLDRKPYDPSQHRATQRLQLAGG

SEQ ID NO: 72740 - protein, 420 aa, unidentified
MTVYLERGYKRRELCGPKQYLNLLLRSVLMIYVGIDVAKDKHDCFITNSDGKVLFPVFTIQNNRDGFDVLFSRIQSSSSDVSNIKVGLEATGHYSYNLLGYLIDKGLHTFVINPLHTNLYRKSLSLRKTKTDKVDARTIALMLMSDVNLKSYSDTSYHNEELKSLTRYRFRKVQERAQLRQSVSRLVTILFPELEKLVPSLHIASIYALLSEFPSAGTIASCHLTHLTKRLENASKGRYSREKAIEIRNAARASIGSNMPAKSLELKHTLRLIGELDSEISEIESEIKRIMDEIHSPILTIPGIGYRMGAMILAEIGDFSRFDSPDKILAYAGASPSTYQSGQMESSYSHMEKRGSRYLRFALINATKYVCQWDETFGAYLQKKISEGKHYNVAITHAAKKLVRLIYAMEKSGKPYIKTA

SEQ ID NO: 72741 - protein, 386 aa, unidentified
MQKLNDLSRSLTALEPDITLIAVIEMSLSSWLVGGIVPGLERQPLKKLAADESALLKLLHRWREEAEQAGHRIARVVIAFEAGRDGFWLARWLRVRGIEAHVIHAASVAVSREHRRAKSDRLDTELLKRAFLGWLRGERDHCKMVAIPSIKDEDAKRPNRERESLVGEQNRIVNRMKATLIRLGIRGFNPKLKKAAERLEGLRTPEGEPIPSNTFAELRRDMERRRFVSNQIRQIEDARLERLEQAPSDEPHAMVRLLARVIGVGIETADMLVQEVLSRDMRDRRAVARYAGLTGSPDESGRKRREKGLARSGNARVRRGMIQLAWRFLTYQKESALARWYRARTQNALGARKPMIVALVRKLLISLWRFVRQGVVPDGVVLRPAQ

SEQ ID NO: 72742 - protein, 355 aa, unidentified
MKTKVNDFSGMNIYAGIDVHKKSWSVTILADEHEHKTFNQPPSAETLYKYLNKHFPGANYYSAYEAGFSGYGHHRKMCELGIQNIVVNAADIPTSGKEKAGKTDQVDSRKIAKGLRSRDLQGIHVFNEADQDLRSFARMRHNMQKDLRKAKQRIKVFLNFNTITVPLHLDDENWSKTYEAWLQDEVRFPTENARTAFDFMLSNYHYQKQQVRQISKELRAYFRKYYKQDYFLLRTIPGIGSLSSIAIISELGDINRFANINKLSSYVGLLPLTSNSGETERVGGMSYRCNNYLRTILVEASWQAIRKDPAMMLYYKKHAAKGNGKRAIVKVAAKLLNRIRYVLKNKQEYVLGVVE

SEQ ID NO: 72743 - protein, 344 aa, unidentified
MSVYVGIDVHRKRSQVAVIDAKGEVLANRNVPNGVEPILKVIGGLPPGTPAALEAAFGTGWLVELLEDYGFDPHLVHPLRCKAIASARLKNDKVDAAILGQLLRADLLPEAWIAPPPVRQLRALLRHRVQLVRLRTLLRNRIHAVLADHGHDRPAGCWSGPGRAWMASLQLPAVSREVVDDDLALIDALETVTGRLDWEIHQRARSGPRVKVLTQLPGVGPFTALVILAEVGDVSRFGSARKLASWAGLTPTVRGSDRVAHYGHISKQGSVWLRWALCEAAQTAKRSPQFAAGYQAIATRRGKKIATTAVARKLLTRAWHLLTDAEHAAATQPAAASAPQAGTR

SEQ ID NO: 72744 - protein, 349 aa, unidentified
MKIIGCDFHPGYQQIAMWDKATGETLEKALSHERKEEVRTFYAGLTGPVRVGIEASGHSQWFERMLAELGHEVWIGDAAKIRASCERKQKTDRRDAELLVKLLDEDRFPRIWVPTPAERDARQLLLHRHKLVRVRTQVKNQLQALAMNQGVQRKWKLWSEAGRKQLEALSLLPWASRRRAELLVLLDQLEASIGELDRAAAEQANTRPAARRLMTHPGVGPITALAFALTMGPADRFRRGKQVASYLGLIPTEHSSGGRGQRLGHISKQGNPFLRGLLVEAAQSAVRHEPEMRRAYQRLAQRKCRALAKVAMARKLAVRLYWMLREEVDYAQLLQGSHAGQPESSRGRS

SEQ ID NO: 72745 - protein, 433 aa, unidentified
MQDVEDEPLFAERVAGIDIAKAGVEVTIRVPSDSRAGGRQQETRSFGTTRRELMALADWLRSWGVTKAGMEATGDYWKPVYFVLESQGLDCELYHAAQVRALPGRPKTDRADSVWLARITERGSLPSSFVPPEPIRRLRTHTRYRRHLTQARTAEKQRVEKLLEDGHLKLSSVISDIHGVSGRAMLEAITAGERSPKVLAQLARGTMRGKIARLEEALDCSFLTEEHAAVLKMMLSLIDSYTAQIDELTAKIEVLAEPYLHQIEQLDAVHGTGKISAQDVIAEIGVDMTVFPTASHLVSWAKWCPQVAQSGGKRKGSNASGRGNPYLSAALGEISISAGRTQSFLGAKYRRLVKRMPKKKALVATGNSVLTIFHALLSDPAATYQDLGPGYYEQRMNTRRQARNHVRGLERLGYHVTIQAINPDTGELLPATA

SEQ ID NO: 72746 - protein, 456 aa, unidentified
MVAVMIGIDPHKASHTAVAINAAEEPLGQLLVRACDAQADRLLAWAQAWPERAWAVEGAGGVGHLLAQQLLGAGERVLDVPPKLSARVRLLEAGDTNKNDSNDARSVAIAALRSRGAGEVRRDDHAAVLKVWPKRHRDLGRARTQVACRLHAVLCELVPGGVSKAITAGQAAHLLESITPADAVKAARCELAAEFTEDLHRIDAQIRDTRKKLAAVVRAAGTSLTGLFGVGPVIAAAVIGDVRTVSRFPSRDHFAACNGTAPIEVSSGPRKVYRLSRRGNRRLNHAIHMAAVTQIRNPGSEGRAYYDKKLAEGKTPKEALRALKRQVSDAIFACLQADARRAGDPGGQPGNHSASRAAGSHPEHPLFGQATPGPGHHPTTEASTPGRAGRSSIAATSPSAKPQVQVERPQRSEDERPGGAARRRPYSATRKARDHRPSVKVQPPTSRAAKKLDPTS

SEQ ID NO: 72747 - protein, 400 aa, unidentified
MRVVFGIDVTKASSEVAILVNGEKVHNYTMSNDAIGFARLLGDLRTVHKPEIIFEATGVYSRRLQTFLDDNGYAYTRLNPLEAKKQLDSLRVRKTDQIDAEKLAQSQFVLNRKPTYVQEEVYQNLRDLSRFYQNLTEDIVRAKNRLHKVLQVTFPELENILSTPSGEQYWNLVIAFPCKDCVLELSNDELSKSIRLSTSKRISDKRVAYLAEKLIALANQSYCAVKKTSPILEEVRYYTKELLRLSEQRQAVLDEMVELAQPLPEYDILLSIPGIAETTATSIIGELGDIRRFQSANQINAFIGIDLRHYESGNFLAKEHITKRGNPYARKILFKCIHNIASANHTNPCHIADFYKKRKRQSQTTSTKLHTIASIHRLIRTMYYLIMHNKFYDYASTQNR

SEQ ID NO: 72748 - protein, 361 aa, unidentified
MAQAKTCVGLDVHVAATRAAVLDLETGELRRQRLSGRSDEIAAFVADLPGPVRVTYEAGPTGFTLARKLAAAGVDCLVCAPGLIPRAATDRIKTDERDAERLARLLVAGELHAVALPSIEEESLRDLVRAREDLRGDLMRARHRMAKLLLRHEVRFDGPERNWTQAHLRWLRRQSFAEAGTRRAFEDYLGAVEALALRRGQLEADIAELLPSSPYAVTAKRLMCLRGIDTLTAAGLCAEIGDFARFRHPAQVMSYLGVVPSEHSSGAQRRQGPITKSGSQHARRLLVEAAWHYRRKPGVGPELRRRQADADPALVAQSWKVQRRLHHVWCSMEARGKRRTIIAVAAARELAGFCWAVATAG

SEQ ID NO: 72749 - protein, 323 aa, unidentified
MQSMYYIGLDVHKRTISYCVKEVSGRIYAEGSVPATRLDLNRWMKTLPQPWTVAMEATVFSGWIYDHLRPHAAALKVAHPLMLRAIAAAKKKNDRIDAGKICDCLRCDFLPECYMASTAIRERRRTLRYRNLLVRQMVQMKNKIAVLLMEAGVSYNKQRLHKAGYFRELVASNPDIDEGLCSLLRVCREMVVRLERTESALVRSLERDALLRDRVERLMTIPAVGPITALTWALEVGEVQRFSSIKKAVSYCGLCGEEKSSANSVQRTPLSKQRNKHLQTTLIEAAKMAPRYSAGLALLYDKERRKGNANQATWRWPGSWWLT

SEQ ID NO: 72750 - protein, 415 aa, unidentified
MFKIVYPVCCGIDVHKSFVVACIAATNDKGLTTYKRHRFSTFTGDLRLLSEWLAQNRCKDVCLESTGKYWHPVFNVLEQTCNVILAHPKYVRAIRGKKTDKRDAKWIADLFKHGLVVPSFIPPFKERQLRDLMRYRVKLTNFSTGEKNRAQNCFTVSNIKLDDVFSDVFGKSASAITEQLLLSQSGNFDVSPFIDGRCKAPVDKVQAAIDGFMCNEQIEKLKVIRSHMSSIEECKARLESVILSLSEQFQAQINLVLTVPGIQLFSAIAIISEIGVDMSVFPSAKHLNSWAGLVPQNNESAGKKKTTRITHAGSFLKPLLVQCALTVCQSDKHPEIKNRYLALKKRRGHKKAIIAICRMMLTAIYHILKKSEVYNPNLYKKETSVPANRALTLEQAISFAKRRGFIIIDPDGVVA

SEQ ID NO: 72751 - protein, 342 aa, unidentified
MEHTTIAVDLAKSVFQVAVSHQPGRVDEERRLSRDRFLDFFAQRPPATVLLEACGSAHYWARQLQPFGHSVRLLAPHDVRPYVRRNKTDRTDAKGLLEANRNEESHPVPVKSVAHQAIASLHCLRSTWLATRTARLNTIRGLLREFGVFIPVGAHHVVPRVRVLLTEPTSVPLLLHTTLTAACDEIDGLEANMLAVERQFAALASEMADVTLLQTVPGVGLITATALVALVTDIRRFRSGRHFASFLGLTPKEESTGSRRRLGAISKQGDVYLRMLLTHGARSFLWHAKAAKQPTSLQRWAGQTEQRRGHNVAAVAVANKLARIVWAVWAHERPFAADHGVA

SEQ ID NO: 72752 - protein, 400 aa, unidentified
MQCTDHPCHSQSTVRRYDRALFMGVELSKSIWLVAMSAPGSDKISKYRVAAGDIAALWSLLSRLKAQAERHQGGPVRIVSIYEAGLDGFWVHRMLEAHDVESHVVDAASIAVDRRSRRAKTDRIDVEKLLRTLMGWARGERRICSMVRPPSVTEEDERRLTRERGTLVTERVRHVNRIKGLLATQGVLDFEPVRRDRRKRLDELCRWDGQPLPPRLKAELHRELDRLELVMSQLTRLEVERDKALHANRPMSEQVAKEATVEAPSSGGAGAQLLRLRGIGPEFASVLSLEALYRSFANRREVAAYSGLAPSPWKSGGIDVEQGISKAGNARLRKTMIQVAWLWLRHQPGSDLSRWFHQRVGDRRGKIRRITIVAVARKLLVALWRYVTQGLVPMGAELKA

SEQ ID NO: 72753 - protein, 339 aa, unidentified
MKLYTGIDLHSNNNYLAIIDDNDNRVFKRKLPNHPETILATLAPFREQVEGVVVESTFNWYWLVDLLREAGYRVHLANPAAIQKYKGLKHSDDNHDAFWLAHMLRLGILPAGYIYPKDDRPVRDLLRKRGHLVQLRTALINSLQGIISRNCGCSLNTNRIKAVKEDFITPLLAGQSDLQLSGAVSKDCIDFLTGKIKEIERSIKSSMMEKTSFLALQTIPGVGNILALTILLETGDISRFSKVGSFSSYCRKVPSQWTSNSKNKGKRNTKNGNKYLAWAFSEAAELSKRYSDYAKAFYNRKAARTNRMVAHAALAHKLARASYYIMRDGVEFDEKKLFA

SEQ ID NO: 72754 - protein, 379 aa, unidentified
MDSNYAVYCGIDVGKGEHHAVGLTAAGKKIYDKALPNDEAKLRAVFDRLASHGSVLVVVDQPNTIGALPVTVARVGGHEVGYLPGLAMRRIADLYPGQAKTDARDAFIIADTARTMPHTLRRVDTGDEALAELEVLVGFDDDLAGGATRVSNRIRGLLTSIHPALERVLGPRITHPAVLEILSRCGGPAGIRQAGKRKLTAIAVKHAPRMGARLATDILAALDEQAVVVPGTAAAETVLPKLADSLKETLLQRKAVAADVERALDDHPLSPVLTSMPGIGVRTAARILIEVGDGSAFPSAAHLAAYAGIAPVTRKSGSSIRGEHPTRSGNKKLKRALFLSAFAALHDPTPRSHAHHVYIGLETGKVIALLVTEIVLLGV

SEQ ID NO: 72755 - protein, 428 aa, unidentified
MAEVIIGVDPHKLSATIEIVDRQERLVATGRFNTDQRGYTAMRSYARTFPHRLWAVEGANGTGRPLAQRLVEDGERVVDVPAKLAARVRLFDTGHNRKTDALDAHSIAVVAVRTRGLRVVHRDGELEALRMLSDRRDELSRLRVQTVNRLQRLLGELIPGKRKRDLSATQAKRMLASVRPRDVAGRTRRRMAVEELTDLVAVDAKLKALNAELKAAVLARGSHLMDIHGIGPAGAARILADVGDVARFPTRARFASWTGTAPLDASSGQQVRHRLSRAGNRRMNHVLHIAATVQLRNATEGRAYFDRKVADGKTSMKALRALKRRLSDVVYRQLLADAMSLQTPDVEAGPGGHRGATEVSSATDLPPHIGTSDQPLPGPAHPTLPPPGHRDQPHPVPAAATPRRRAGAVKVQRPTGRTTLTATSGGAP

SEQ ID NO: 72756 - protein, 334 aa, unidentified
MQNMNPQGGVANRDQRPNAGIDVAKQHLDACWLDVEHRTSNDARGWDELIAKFKCDGVDLVVIEATGGYERGLVCALQSAGIPVARVNPRQSRDFAKSMGVLAKTDRVDARTLRDFADVLARHKDRHKYITPMIEAERIALDELVTRRKQLVDMRVAETNRLEQARGKHAVRSIKKVIRLLDQQIAEIDHDADDHLNRHFNEQRKILDSVKGVGPVTILTLIAALPELGRLQRRHIAKLVGIAPLADDSGERKGVRRIWGGRSEVRAVTYMATLSAIRYNPAIRAFYERLVAAGKPKKVALVACMRKLLTILNAMLRDGTVWDASRHCPVIEEA

SEQ ID NO: 72757 - protein, 387 aa, unidentified
MDHLIKYTIGVDISKDKFDVCMLSIDVKLRSKIKGTRKFGNTLSGFKEFLLWLTKHSKTDTAVEILMEATGVYHERLAIWLTEQGQQIFVVLPNKSSKYMQALGLKTKNDGVDARGLAMMCIGHRFEQWKPIGRYNYELRLLTRHYQSTQEIKTVFQNQLHALSHSGYTSKEVGKQLKKSIDLFDKQVKSLKKEIVRHIDSNKEVKRKVEHICLIKGVDVLSVATIIAETNGFELFTNQSQLVSYAGYDVVENQSGNRVGRTKISKKGNGRIRRILHMPALNVVRFDETPFKRLYQRVYDRSKIKMKGYVAVQKKLLIVMYTLWKNDLPYSGEHEEKMISGNDEQKDLFPFFSERESKKIVPQLSSTTQDELQYNESLKVLFPLLQN

SEQ ID NO: 72758 - protein, 397 aa, unidentified
MNTPICGLDVASTSAAACIQAADGTVLHQLNLPATRAGEDQLLALLPAGTVVFTESTGRHHLPWARRLTAAAHPVYVLNALLAKRLIGVTNALRHNKTDKIDARQLADIGRRDGDALQTYRFKENPDQLRLRTLCAVRIRQRQVLTDALKSAADLLQSMLPEVPELTLAQMHGLAQLFLRIDSLARLQRMRLVSLQTYAHGKAEKLHAALHQPMSAAAVFDALLPALQGQLRLIESLREQQQALLAVIRTAVKTGCRAEEVRLVETIPGYGEKTAAAIVACVPDDLRSWGPKQKVARKLQAYFGCDPKLRESGRWKGKVRMSKRGIEMARTALFQAAICGMLHDPDMKAVFDRKKAEGKHYLVAVSHIMRLQLRRLVAVLYDQKPFVRLSLAAAIAT

SEQ ID NO: 72759 - protein, 424 aa, unidentified
MRVTYQTCCGVDVHKSFLVATIVKTTGGIEPSYQKKRFSTFNNSILEFKQWLLDNDCHDVCMESTGKYWVPVFNLLEDDINVVIANPKWVKAVKGNKDDTKDSKWIGDLFRLGLVKGSYIPCKKIRILREYTRYRYKLVSCRSSEKNRYQNALTVCNVALDSVVSDIFGKSSTSIIDYLLEQSGTSINHEEIASKLLRSLKSKENAVIESVEGYQMTDAQKYRMRLVRAHMDYITAAINDVDKQIENIISSNPDFENAIQFLCTIPGVKRDSAITIISEIGTDMSQFSSSKRLCCWAGLTPGSNESAGKKKSVRITRAGVYLKPALVQCAHAAVKSDKSPYYKKKYESLVKRRGKKRAIIAIARMILTAIYQMLSTGEQWNPSDLYKIDMPAPLLEKQKAKAIKQAKKLLQKEGLLPPGEPLAS

SEQ ID NO: 72760 - protein, 294 aa, unidentified
MNFYTQPHTHYCGIDLHARALYVCILAQHGTKLVHKNLPTTPAAFLRVSAPYRAELVVGVEGMFTWYGLADLWAKEGIAFVLGPALSMKAIHGGKAKNDKIAAHKIAVLLRGGMLPQAYVYPAEMRATRDLLRRRCPLVRKRAELLAPIQNTNSPYNLPEIGKKLAYKANREGVAEHFPEPSVRKTIAVEVSRIAHYDQWLGEVELYLTRTAKAHDVQTFSRLQSVPGLGQMLALVLLYELQDRARCPRVQDFVPSCRWVKCAKESGGKRLGTSGKKIGTVPLRWAVAEAAVLC

SEQ ID NO: 72761 - protein, 351 aa, unidentified
MAAKKRSLIGGVDTHRDTHHAAIIDSTGGLLSDAEFPATAAGYADLLAWMGSFGWVTAVGVEGTGSYGAGLARYLTNKNIAVVEVDRPDRRARRNQGKSDPIDAIAAARATLAGTAMGTPKTRTGPVEAIRALRVARRGAIKARTAALNQMRGLVAAAPEPLRAHLTRVSAAVLVSRCAALTCDSTKLHEPAHATAAALIGLARRVTALTEEITALDRQVTPIVAKAAPRTMALFGVGPDVAAQLLTTAGDNPDRLHSEAALAHLCGAAPIPASSGRVRRHRLHRGGDRGANHALHTIALCRMRYDQRTRAYVHRRITEGLSKQEILRCLKRYIVRDVYTALRADFAALTP

SEQ ID NO: 72762 - protein, 368 aa, unidentified
MDEPITGFVGLDAHAESTAIAVAEAGRAAPRFIGTVGPTVAELTKALRRLGEPAGLLVVYEAGPCGFGLARELVAHGYRCEVVASSRIPRRPGERVKTDRRDALKLAGLARAGELVAVTIPDERDEAVRDLSRARVDAVRARLKARQQLKALLLRHGRRYTGKTSWSAAHERYLARITFDHPAQDIAFAEYRQATAEGEARVQRLTQCLGQEVERWRMQPVVSAVMTLRGLDLVAATTIVAELGDLKRFAHPRELMGYLGLVPSEHTSGGKRRLGAITKTGNGHVRRVLIEAAWNYRFPARLSHKLQVRQEGQPQVIRDIAWRAQLRLSHRYRRLKTRGLQHNKICVALARELAAFVWDIGRHVAPHA

SEQ ID NO: 72763 - protein, 336 aa, unidentified
MRFIGVDLHTTQITVCYLKAEDEFEIRKYQLCEIDKFISSLQEGDEVAVEATGNTRWFYQQVRASVSQVVLVNPRQFEVVKNSVKKTDKNDAINLAKFLRADLLPEVRVKAAAAEKVQSLVNTRTKLVRLKTSLINKIHALYVANGRKLKKTSLASEKGLDKVLLEEWNTIERIELGIIIEQIRSLKAGIKKLDKAIEEEARQLEGYQSLVSMTGIGSLSAGTLLAVIGEVKDFASADKLASYFGIVPRVSNSNELVNHGRITKRGSKTGRTTLVQCSLAAIKKSEYLKNYYEQVKARRGHGKAKIALARKYLGIIYNTLTNGWVFRDFNNFELAE

SEQ ID NO: 72764 - protein, 338 aa, unidentified
MELYGGIDLHSNNSYVVLQDPQYRRQYSRRLPNRIETILAALAPFREQVVGIAVESTFNWYWLVDGLMEAGYQTHLANTSAIKQYEGLKYVDDQHDAGWLARLLQLGILPTGYIYPREERPLRDLLRRRTFLMRQHTANLLSLQNFYRRYTGSKLSANALKRRPAEKFEAALEDPHLGLAMRTGMAVGKTLQTQIARIEKSVLQQAKLRPEFEPVKTVPGIGDILGLTIMYEVGEIGRFAAVGNFASYCRCVQARRLSNGKKKGRGNPKNGNPYLSWAFTEAAQGARRFEPLARRFYDRKSAESGPVLATRALAHKIARASFYLLRDQVPFEATKLFG

SEQ ID NO: 72765 - protein, 430 aa, unidentified
MPYRIAGIDVHKKVLAVVVSDVEVDGEHRFERRMFGSNPEQLRSLAAWLLEQEVEEVVMESTAQYWKPVWEALERYWKPIREKREGAGRRSGTLHLALAQSNRGRRGRKRDFPDAERLVRRLVARELTLSFVPDAEQRLWRTVTRRKYQLTRDHVRQQNQLESLLEEAHIKLSSLVSDLLGASARRMLKALAEGETNPTALATLADERLRATPEQLCDALGACTDLKPVYRRLLKMALEQLQFLEQQIGQLDQEIASLLSQHQDAVERLAEVPGLGVDSAQQIIAEVGPTAATFPSEKCLSSWVGACPGDDESAGVNYSHRSPKGNRHMRRVLNQTANAAARAKGSIFEIVYRRSVPRSGHNQAIGAIAHRQCRLIWLILHQGVRYEERGPAVTKQSKQRRTARMLRQLRSLGYRIEPPNPQHPSPAQVR

SEQ ID NO: 72766 - protein, 334 aa, unidentified
MWYVGIDLHRETVVMAAVNDAGEVTKSVSVRCEDTASIVDVVKALAPFRAVIEASATYRWLYDLLQPYGTILLAHPFRLRVMVQRRAKTDKLDAQLLVNLLRINQIPLAYVPPEPYEQLRELTRRRARLGRELAEAKIHLRALLARQNRQASYRMPFGVRGLAWFRGQDFGWIENLARDELLMRLRHFGRQATILDQHIEQMAASFPQTEVLTDIHGIGIYSALLIVAEIGEPERFHRAKQVGAYAGLTARVHQSGGHCYRGSISRQGSTWLRWILVEAAMKVIREDTALRNFYTRVRKRSSAKIARVAVARKLAEICWKRLRCWQREHANPAA

SEQ ID NO: 72767 - protein, 347 aa, unidentified
MTLYCGVDFHSRRQTICYCNTADGEVKVEALHHYEDDVRAFYEQFKNEQVIVGYETSGYARWFETMLFELGIEVWVGDAAEISRLGKRRQKNDRRDAEHILDLMLKGEFPKLYRMSEKSQEIVRIMRHRQKLVKHSVMIKNSLRRILIETGLIFKAALSSQKAKQKFRELKLPPLLANERDRWLELLIEIEKQIAGLEQKLKAEAQSDKRVQRLLTHPGVGLLTALCIVHTLGEVSRFPTTRKVAAYAGLEPMEHSSGEKHRYGAISKAGNRLLRFLLGEAAHIATRTDDDLKQFFRKLKVRCGTAKAIVAIARKLLIRCFIMLRDEIDYAEFRQRGIEARSARVYT

SEQ ID NO: 72768 - protein, 376 aa, unidentified
MNEFTSNFVGLDVHKGSIAVALARAGREEPHYLGEIGNRGAAVRKLVRRLSPDGEVLNFCYEAGPCGYGLYRELTALGHRCEVVAPSLIPRKAGERFKTDRRDALSLARLHRAGELTPVWVPGREQEAMRDLTRAREDMKALELKARQRLGAFLLRHGRVYAGKSRWTQAHFRWLEAVRFELPVQQIVLQEYIDMVKETQRRVAALELQMGEALKSWSLRAVVEALMALRGVSLITAMTILAELGDLTRFDSPRQLMGYLGLVPSEHSTGQRRRQGGITRTGNGHVRRVLVEAAWSYRFPARKSRCIERRAEQTAKEIQAIAWQAQKRLCGRYRSLMRAGKEKKQITTAVARELAGFIWAIACEVMGNAHASRALV

SEQ ID NO: 72769 - protein, 370 aa, unidentified
MTQSSTLYVGMEVHKESIAVAYVANAYQAEVIYLGAIGPRQCDIDMLIRKLPSKSHHLVFVYDAGPCGDWLSCYLTKKGHICWVVAPSLIPKKAGARVNTDRRDAIPLARLRRAGDLTPVDVPPVADDAIRDRSRAREDALRELKTAKHRLKAFLLRHDLRSTGRAPWGPAPRRGLGEVVGPTPAPHIVCQAYVRAVTEHSERRGRLEQALQAQVHTWRLRPVVDALQARRGVQFPVAVTIVAELGDLSRVDKPSQLMSSLGLTPSASSTGAHRRPGAMTKTGHAHARRALIEGAWAYRDPANVRRHLQWRLDQRPKPLQDISWKAQVRRCTRSRHLMARGTHPHRVGVAIARDLSALMWAMAQQVPVTS

SEQ ID NO: 72770 - protein, 371 aa, unidentified
MSHYREAFVGIDVAKLKNAIAVAEFGRDGEIRYFGEVEASDVSMRRVIQRIADKFDRVHFCYEAGPTGYGLYRLIKSLGHECIVVAPSLIPRKPGDRVKTNRRDALALARLLRAGELTAVWVPDEGHEAMRDLVRARTAAVETLRVHRQQISAFMLKHGRIYPRKKGWTMRYLIWLQEQRFDHPAHQIALQEMVDAVRVSRERVDRLEKVIEEFVPNWSLAPIVQALQALRGVDLVVAVTFATEIGDVSRFESPRQLMGYLGLVPGERSTGETTKRSGITKAGNSRVRTLLVESAWTYRFPPRIGSKKLYKLEKVPPSVREIAWKAQSRLSARYRLLTSRGKKSTVVCTAIARELAGFMWAVSKEALQPRL

SEQ ID NO: 72771 - protein, 472 aa, unidentified
MSYRNIGIDLGVTAQHKVHVRDDQGQKVRSDLSIDTAKQAFDQTASHALYGAEPDTKLRWICEPTGMSWFPLACYVKPRGYELVRVKTQMSCDLRKFYNKHNHSDSLDAKALAQLPVVNQDALEDLLLPDKHTFALDRRNRQYKKLTQQIAGIKTRIRDLFNWLQPGLIKVFSDPYGTRARAYYRHFGNPFKVKELGLEKLTKFLADNGRQQMDRQLAQQVWQIALQACELYELADEYVDFDELQDEITVELDVLESLETTRLTVKKAIERLYDKVHPSKNIETIPGVGEKMGAALVAKIGDPHRFSSHTKLKGFTGIVPRLDDSGESSKKGLPISHEGPSDFRRDIYLVADVARQWDVEAAKIYYDCMMEKGHCHTQAVCAVASHWLGRILRVLKDGRPYEQRDLQGNAITKKDAKKYIKAHLTVPEEVRQRTRNKKRIYDKFMAKRNRGLKKNRRKNSLTHFNNISFDLN

SEQ ID NO: 72772 - protein, 387 aa, unidentified
MPQLNDLSRSLVALDQNSTIIAVIEMSQSSWLVGGVLPGIERQPCKKLEPSAERLLGLLHRWRDEAVRAGSNITRIALAFEAGRDGFWLARWLQAHGVEAHVIHPSSVAVSREHRRAKTDRLDTELLKRSFLGWLRGERGHCSMARVPTMLEEDAKRPNRERECLVGERTRIVNRMKGTLARLGIRTFKPTLRKAAERLATLHTPEGSPLPPNVSAELQHDMARLSLLISQIKEIENARQERLEQEPETGPHAMVRLLARVVGVGIETADMLVHEVLSRRMRDRKAVARYAGLTGSPDESGTKRREQGLARAGNARVRRGMIQLAWRFLLFQKESALALWYRARTADSRLGTRKTMIVALARKLLIALWRLVTTGETLEGVILRPAG

SEQ ID NO: 72773 - protein, 302 aa, unidentified
MDHLFVGLDVAKAQLDVHVRPTGETFTIPHDETGLTALLDRLRTLAPTLITLEATGGYEATVAAILASAGLPVAVVNPRQIRDFARATGLLAKTDTLDARVIAHFAEAVRPAVRLLPTEQAQRLGELVARRRQLVEMLGAEVNRRRLTRDRGLQRRIDTHIAWLERALRDLETDLHDTIRSSPAWRETENLLTSVPGVGPITALTLIAELPELGRLDRRRIAALVGLAPFNRDSGTLRGRRMIRGGRGSVRRVLYMATLTAIRHNPRIRTFYQRLRTTGHPGKVAVIATSASAPPGIPARSP

SEQ ID NO: 72774 - protein, 345 aa, unidentified
MEITTIGLDLAKNVFQVHGINGAGEVVVRKTLRRAQMMQYFTRLVPCLVGIEACGTSHYWAREIGKLGHEVRLMPPAYVKPYVKRGKTDASDAEAICEAVTRPTMRYVAIKSPEQQAALAMHRTRDLFVKQRTQLVNMIRSLLAEFGIEIRRGIEQALTLAKRIAADDMPDIPPLAAKVIADLAGQILDLQERLREIERELLAWHRSSDIARRLATIPGVGTICATAFAASVSDPHQFRSGRQFAAWLGLTPLQHSSGGKERLGRISKMGDKYLRRLLVVGMTSLVRRAKYKPEAVDCWLAGLLSRKPARVVTVALANKAARVIWAIMARGGIYRAPQPAGAAVS

SEQ ID NO: 72775 - protein, 361 aa, unidentified
MGDGSWVGLDVHATSVVACLIDEATGEFRALRVPHRTPELVDWLGSLPAPVRVAYEAGPTGFGLARACQAAGLSCLVAAPSLIARSPAARGRKRDAGDAEQLARLLARGELSPVRVPEPIDEAARDLVRAREDARADLMRARHRLSKLLLRHGVVYEAGRAWTGAHDAWLRRQRLEHAGARAAFEDYYEAVLQARLRRDRLDAQIAQMAAEPRFAAQVGRLGCLRGVSTLTAFALCVEIGDWRRLSGAVIGAYLGLVPSESQSGARHTRGPITKAGNRHARRLLVEAAWHHRRPARPSREIERRRAGQRPQVRARAEAAGQRLHRRWAHLEGRRGLRSTIVATAVARELAGWCWSLAVMDD

SEQ ID NO: 72776 - protein, 349 aa, unidentified
MLADELDYVVGVDTHLEEHVLAVVAAATGAVLARQVLRANKRGYQAALRFAGEAAHGARAWAVEGTGSYGAGLARYLAGRGETVLESSRSPRTERRLRGKDDALDAARTARAALASEALALPRNGERREALRLLLVARRSAVDVRREALGQLRGVIVTAPDRLREELRVLPTGRLLERCSRLRHSSTAGADELATRLVLRSLARRIDAATAEAAELEREILAHVRALAPALLDEPGIGPIVAAQLLVAWSHRGRLRSEAAFARLAGVAPLPASSGQTVRHRLSRGGDRQLNRALHTVVLHRRQHDPATKDYIARRIAEGKSRRDASRLLKRYLARHLYRLLQNQEPLLA

SEQ ID NO: 72777 - protein, 310 aa, unidentified
MDRIIVGIDVSKDRLDVVVRPSGETFVVGRNAVGLEKLVARLRELSPHIVALEATGGFETVVAAALGSAGLPVAVVNPAQVRAFAKALGQRAKTDPIDAGVVAHFAEATNLEPRPLPDEQTRLLADLVGRRRQIVAMIGAERQREQRLTVPRISKSIARLIKALEKELASLDADIDDAVKGSPAWRAKEELLTSVPSVGPVIARTLVAELPELGQLGHKQITALVGLAPFTRQSGKWRGKSFIGGGRTAVRAALFMGAMVAKKHNPILKAFFDRLVAAGKPKMVALIAVARKLLTILNAIVRDNRPWQTA

SEQ ID NO: 72778 - protein, 474 aa, unidentified
MNVKGNRRKKQEAKLSIIDQQTLLRKAEEIKSDLKASTWHELETNGKFDKNDKLTFISEDMLILGCDIGSETHYARAIDTRGRELSKSAFSFSNTEAGFKSVLDWALKLAAKNEKHQIVMGLEPTGHYWFCVATWMVNNGVSVVQVNPYAVKQTKEVEDNSQLKDDTKDPKLIANLVKDGNFGMPYLPEKLYADIRRLSMFRDQLTEDRIRNLNRLHRELKIYFPEYKDALGKTDGMFCLELLKKAPFPKDLIQLGFDGIKAVWLNAKLRGRGYAKAESILDYAKKSVGIKDGAGASRQAVKWYANKIQELDVQIEEIQRQLNKRCGEIPHAENIKEISGIGESTLTGILAEIGDISRFDDVKEVQKLSGLGLVACSSGKHKGETKISYRGRKRLRYWLFQAAKSAVVHANEYRQLHAYYTTRADNPLKKMQSLIVIACKLLRVIYVILTKGTKYDPEKMLGDIKRTEKQLTAA

SEQ ID NO: 72779 - protein, 332 aa, unidentified
MNLVSTLGIDLAKSTFSLHGVNSNGEMVLRRTLSRAKLSELVAQLPPCLIGMEACSGAHEWARRFAACGHTVKLMAAKFVTPYRKSGKNDGNDAEAICEAVARPNMRFVPVKSLEQQSDLSLHRVRQGFVEERTATLNRLRGLLAEFGHVLPLRAVEVHRRVPLLLGKLPTRVATCARDLLEHAARLQAKTLEYEHEIRTHVRSNALACRAQARMGIGPITASALVATVGNGRDFKNGRQFAAWLGLVPRQYSTGGKTRLGHITKRGDPYLRTLLVMGARAVLQRALSLTDPFSRWALAVRERRGYHRACIAIAAKNARVAWALLVRESVTG

SEQ ID NO: 72780 - protein, 441 aa, unidentified
MPDTAVTTPEPAWAAFVALDWGSQKHAWILQPAAGGKQNEGFVDNTPEAIAVWAADLHRRFDGQPVAVALEQKRGSVVNLLLPYAHLVLFPVPASMSASYRKTFVPSGAKDDPGDAGWILDLLLRHRDRLRRLEPDDANTRLLLLLVEDRRQLVDDKTRLKLRLQDCLQQYFPQLVLWFDVDTPLVAGRLQRWPDLQHLQRCHDGTLRTFFRQHHCHAHLTEERIDAIRAAVPATNDPAVLEAGSTKARHLTESIATLREQITQLERRRDELVASHPDSPIFASFPGAGRATVPRLIAAFGTRRERYQSAFEVECDSGIAPVHIRSGKIDRVSVRHACQDFTRQTFHEFAGQTLPQCDWAKAYYQAHCHKPEQHHAVVRALAFKWIRILFRCWKDRTPYDEELYLKSLRRRSGLLGSGLASATCVGWVTVAGFSKLSEKSS

SEQ ID NO: 72781 - protein, 389 aa, unidentified
MLLDHPSDGPTAIRTQFGALFVSLELSRSTWLLTSLSPGKGEKMSKYSITAGDVAELMKLFAELKRKAAIRTGQTYPIITIQEAGLDGFWLHRVLQQEGIESHVVDPASIATSRRRRRPKTDRLDGETLLRALLAYKRGEPRVCAMVVAPSPEEEDRRRLCRERQTLIAERITHVNRIKGLLFAQGVCGYAPLRRDRWARLEALRTGDGRGLPSQLKTQISRELNRLELLLEQIKAVEAEQDALLAAARKPAGETAAPDPVTMLLALKAMGPNFAAVLWSEAFYRHFANRRQLAAYAGLAPTPWRSGSIEREQGVSKAGNPRLRTMMIQLAWLWLRHQPQSALAQWFKAHSQRGRKTAIVALARKLLVALWKYVTSGVVIDGAVMKSAA

SEQ ID NO: 72782 - protein, 419 aa, unidentified
MSFKIFKFNCCGLDVHKTWIYACIGITDSNNRTEYKQARFSSFSKGLHQLCVWLAKYNCNDVCMESTGKYWIPVFNILEQHKIRVTLSHPKYTKPMKGNKTDRKDAKWICDLYMCGMVKPSFIPPADIRELRDLVRYRFKLTCMITGEKNRAQNCLTVSNLKLDDVFSDVFGKSSRSITEQILQHPGEKFDVSPFVDSRCKTPIEEIQAAVDGNISKEQDVKLRQCLDHIDELQKHISEVEQEILRLSDKYEAALNLIRTVPGFDKNPMTAIQVLSEIGGDMPVFLTAKHLVSWAGCCPRNDKSDRKIKSTRISCTGSYFKPVLVQIANALIKSKKHFEFTTRYKRIKTRRGHKKAIIARCRMILTAIWHILTDLKPYTSDGFLESRPVKKEKVLTTSQALNLLRQRGYLIKDEPSPVS

SEQ ID NO: 72783 - protein, 349 aa, unidentified
MRFYTHRHKYYCGIDLHTSVMYVCITDETGTILVHKNLRTNPDAFTRIIEPYREDLAVAVECVFVWYWIADLCMQLGVTFVLGHALYMKAIHGGKVKNDRIDSEKIAQLLRSGMLPEAYAYPEEMRATRDLLRRRMYLVRRQAELQGHIQNTRHQYNLPTFEKRIDRAVNREGIANHFDDPMVAASIQIDSNLLDSLHQQILYVEQMIAQQARDHDPVGLQFLRTIPGIGKILALTILYEIGDINRFPQVGKFISYSRLVKCAHESAGKRVSGRNNKIGNAHLKWAFSEAACLFLRESDQAKAWHQKLVSRYGKGKALSIIAQRLGRTAYFVLKRRTPFDRVKFFASLS

SEQ ID NO: 72784 - protein, 353 aa, unidentified
MEDIKYIAFDVHQVTTVISVLNAAGREVKTAILPTQPQPLIAFLEGLRGTLYLTFEEGTYAAWLYDLLADRVKKLIVCDPRRNALLKEGNKTDANDANKLAELLRLGSLQAVYHGSRSMRPLQELAHGYEALRDDTTRVMNRIKALYRGRGIDCAGRGVYTKGQRASWLERLPAGATRLRAELLHTELDQVRTLRRKARVALLAQSRQHTVAARLRQIPGMGPLRVALVMAHLQTPHRFRSRKQLWAYIGLGLVQRGSSEYRMKEGRAVRRPHALQLRGLNPNHRPELKELFKSAALTALRRPGPFKNYYDARVAQGVDPAILRVTVARKLAALLLHLWKKGGHYRVEGSQQA

SEQ ID NO: 72785 - protein, 320 aa, unidentified
MAKRTTICAGIDTGKRKLDVALDCSSEQLQVENTAEGYKTLLEWLGRHKVKRVGIEASGGYEQAVVAELRRKRLVVVVFQPAQVRAYAKYRGQRAKNDRIDAALIAACTAAVNELHPAPDARFSALAVHLTLIEQIGEDIARCKNRLESCRDVRIQKLWKEDITRLVKRKRAEFKALVEAIREHRDLAERLDLIYSVGGAGLPTAVAILVRMPEIGQLSREQAAALAGLAPYDDDSGEHTGARHIEGGRKRLRRALYAAALAGSFRWNPQLMALYKRLIAAGKGHKRALVACARKLLIFINAVVTRGTPWQADAPAAQAA

SEQ ID NO: 72786 - protein, 361 aa, unidentified
MESEFTKNRTGRQLDFTGDAIYVGIDVHKKQWNVSIMGEYKEHKTFVQPPDAVVLGNYLRDHFPNATYYSVYEAGFSGFWAHEALTQEGIINKVVNASDVPTTDKEKRQKSDTVDSRKLCRCLRDDSLTGIYVPSRQQQEDRNAVRLRKKLVRDIARCKNRIKGLLNYYGISVPDDMGEGYWPKRFIKWLSELNFDQDSGKFTMSIILGELISIQKLKKELDRQLVLMAKQKYEDQVKLLRSIPGIGLIGSLTFLTELGNVKRFKSFDQLCSYVGLVPNVYSSGETEHVGHMTKRKNIYLQPLLIQCAWQAVGKDPALMKAYQDWCKVMKANKAIIRIARKLLSRIRFVLVNQKEYTLRTL

SEQ ID NO: 72787 - protein, 349 aa, unidentified
MTTTLFPRITIGLDLGDSRSTFCVLDYAGQVIERGTAPTTRAALREVCGRYPRARVVVEVGTHSPWVSRLLGELGHDVVVANARKVKAISAVTRKSDRVDAETLARLGRADRALLAPITHRGAAAQVDLAQLRARDAVVRARTLLINHVQGALKTLGEAMPKAVTSRAFARKVSAGLPAALRPALERALEAIAALTTAIAGYDRELRTIAPAKYPETALLRQVAGVGPLTALCYVLTLEDPRRFPTSRSVGAYVGLVPRRAQSGGRDPQLRITKAGDAVLRRLLVTAAHYILGPFGPPCDLRRWGESLMQRGGTNAKKRAVVAVARKLASVLHRLWVTGAVYEPVRTIA

SEQ ID NO: 72788 - protein, 365 aa, unidentified
MRYHGVDLHKKYATISVRNEAGTEEKFVRAQADIKSYVASLSSEDAVVLEASAGALFWAEKIQKQGARCVVIDAYRFRIIRDSWQKTDRRDAANLSLALWLSSRSGEMKLPEVWQPDPVVRELRRLFGLYELLNKQVRQLKNEIHGVLLDSGVRDRGLGDRIVDNPAKAEKILEKVELSAASVVCIRTSLTLLVSLQEKKEALRAEIYRAGKPFEPQVKLLLSIRGVTPLLALAFLSEVGDVRRFRSARRLHSYLGVVPTVRSSGGVTHNGAINRSSRHLSRTLFTQSVRHFVDSSPLLEHFYRDLVDRKGYGRARIALLRKVFSVMRRMLLAGELYRWTEPKLYEGKLKDYVKKTKKEENQEVA

SEQ ID NO: 72789 - protein, 368 aa, unidentified
MGRKSSKLFVGMDVHKESIDIAVAEEGGEARHHGRIGGDLDALGRAVRKLESLGQPLVFVYEAGPCGYGIYRMLKLRGHECWVVSPSNTPRRVRDRIKTDRRDSLKLAGLARAGELTPIYVPDQADEAMRDLVRTREDAVAMQRQGRHRLSALLLRNDIRYAGKTAWTAGHRRWISRLSLPSAPQRIAFEEYVQAVEEATERVGRLTQAIEQALIAWRWQPVVAALQACRGIQLIHAARIVAELGDLARFSHPRELMAYLGLIPSEDSSGDRRRQGAITKAGNSSARRAMVEAAWAYQHPAAVSPVIARRQTGLPKAAIEIAWKAQLRLCARFRRLQARGLNRNKIAVAIARELAGFVWAIGQQVKPS

SEQ ID NO: 72790 - protein, 484 aa, unidentified
MAKRKMSTFERLSRGEMNRRQRRDLGRKVAAGDPGLTIENPNAGGIDVGNESHYVAVPPDRDPNPVQEFGCWTEALRRMAEWLKACRIDTVAMQATGVYWIALYDVLEQHGIRVVLVNAQHTKNVPGRKTDVQESQWLMKLHTYGLVRDSFRLPEQIESVRTIWRLRDRHVKEAGRAVQHMQKALTKMNIQLANVISDIHGVSGQAIIGAILKGERDPYQLADLKDYRVKASREEVARSLEGNWREDVLFELQQAVNGYHFVHQQMQECDRKLERYLASLPTRILDVPAQPEGAPAATPKKKKKAKKPRGNEPQLDLKVELSRICGVDLTSIDGINVMTAQTIVSEIGTDMSGFKDEDHFASWLGLTPSKDISAGKTVRRGKKKVNNRVAVALRTAATTLLESDSYLGARYRHLRRQLPTFASAVKAMAHYLALLVYRMFTKGEAWVDRGAAQFERRRTERELISLNSRARANGFKLIPIAEAS

SEQ ID NO: 72791 - protein, 435 aa, unidentified
MQNNAVVPFVSSRTAVISCDVHRDEVFWTSNVPGWEETSRWENRTPALCAGLERVREAGRAAGFGRFVVVAEPTGVYHRLLFQVARRLGVETALVNTESVAKMRQIEFNDSGKTDRRDPRVIARVYAIRAIRDRFLPEPFARLRSWGKVYAEGEKMRAQAKAAIQTQLRGLFPDFPMKKDFLFGASGRALEKLYGLNPWRIRGAGASRFASRMKAAVPGLRRRSIERLWEGAGDSIQVGSSAEASVAEKQLAQLWRDLDWAERRCAEVGAELKRLYEQARELDPRLPAAWPGVVSQLALARLLGELGPLSDFKGWRELLRYVGLNLRERQSGQFVGQIRITRKGRPLARRILNQIALPLVKRNRLFGPYYHAKKRTMAGDQAITAVTRKILKMLWGWYQAGQSFDFNRVFACESQAQPKNRWQPRPIKGCPAVPR

SEQ ID NO: 72792 - protein, 354 aa, unidentified
MMIIGCDYHPSFQQIACVDTETGELKEQRLGHREGAEEFYRALAARGEQVRVGMEASGHARWFERLLGELQFELWMGDATEIGRKRGRKQKTDRQDAQHILGLLLKDDFPPIWVPSWENRDLRQLLWHRHRMVQARTRMMNQLQAVALNEGLLWKKRLWRERGRQQLEAIPLAPWASRRRHDLLELLDRLNPTITQLSQAIEQEAEKHPAAQRLMTHPGVGALTALAFVLIIGDAKRFQCGKQVASYLGLVPLEDSSGNRRRLGHITKQGSSILRFLLVEAAQATVRSLPEWRSKYLHLMMRRGRKTAKVAMARKLAVRLYWMMRQGWDYQQWSKFGSHAGQLGTGDGVQSNIE

SEQ ID NO: 72793 - protein, 346 aa, unidentified
MHIASVGIDLGKTNFHLVALGEHNKVLLRKKFSRPQLLAYTANLRASLIGLEACAGAHFVGTVLREQGHEVRLIPAQFVKPYRKSNKNDFLDAEAIAEAVTKQNMRFVQLKTQEQLDWQAMHRVRDRLVQRRTALINEIRGFLLERGITFAAQPIHLRKNLPGVIEDAEQNLSPRLRWLLDRMWQEWKQIEAEVQEISDEIERISDGDVRCRQLRQIPGFGPIVSTAIVAAVGNGAAFRRGRDFAAWVGVVPRQYSTGGKQKLYGISKRGNIYLRRMLIHGARSVLFRVKYDTGGFGQWVQRLAQRAPRNKVVVAIANKLARIAWAVLSSGQDYRHQPLQQQRAAA

SEQ ID NO: 72794 - protein, 343 aa, unidentified
MQTITTIGLDIAKSVFQVHGVDAGGQGVIRRQLKRRHVLPFFQKLPPCLVGIEACASSHHWSRELKAFGHTVRLIPPAYVKPYVKRQKNDAADAEAICEAVTRANMRFVETKSPEQQSGMVLHRTRHLCMRQQISVINAIRAHLAEFGIVAAVGRNDVEELLDIVADPSDKRVPDIARSCLAILGVQLHSLKEQILEFDRMIRAWQRSSEMSMRLDECPGVGPVLATALVATVADPNAFRSGRNFSAWIGLVPKQHSSGGKNRLGSISKQGDRYLRGLFVIGALAVIRYAKIHGTRHRPWLTALLARKPAKVAAVALANKIARMVWAMMARGERYKEPVALAR

SEQ ID NO: 72795 - protein, 413 aa, unidentified
MRRWWVGVDWSESLQDCAIVDDHGAVVTHLRIEETADGVAQLLTAIRNLNPRSHRFSRRQVPVVIEDGARLLVAELRRVRQPVIVIPPAVMARYRGRLATAVSKADRTDAALLANIVRMNPGRHRALAETSDEAAAVAVLARAQQDSVARATEAMLRMRSHLRMYYPAAIDAWAGMDRGLRRREARALLAVAPTPRAAAGLSKYRIAETLAAAGRTRMLDDQAAGLRELFAAPRLRQRPATEDAMGQRMLVHLAELDAACLQAERLRETITETFARHPHAPIYRSFPACGPIVAARLFAEIGDDPGRFTARGLRAYAGTAPLTWASGGSHKVTHRRICNRQLKTAVHQWAFGTLTRSPGCRARYDARRDGGDGYAAALRHVGNRLLNGLHYCLQSGDLYHEERMFPPSSSTVS

SEQ ID NO: 72796 - protein, 316 aa, unidentified
MLLYKHFFGIDIGKFNFVVSIHGSKATTEYENSSIGISKFIEDNQQLLSDSLCVVETTGGYELEFVYTLVAANYKVHRADTRKVKNFNRSFGNAAKTDILDAKLLAKYGCERADQLELFVPGSKNDIELFQLVQRRNDLKSMLVAEKNRLKSPSGELVKDTITDIIAVLNEHIKNIVDKINTIIESDHELKRKKEILKTIAGIGDIVAFELLILLPELGKLSRRKIASLGGVAPIANESGKYNGYRRTGHGRVGVKPILFLAAMAARRSKTHLKEFYEKLITKGKKKMVALTALMRKILVIANARLKTLYQINPIS

SEQ ID NO: 72797 - protein, 412 aa, unidentified
MTATNQFAAHVGLDWADKKHDVCVQFKNGERVFHVIEHTAEALDVWLTELHQKVKGRIAIALELKKGPVVYALQKYPFITVFPVHALSLARYRQAFSPSGAKDDPQDAELALELMLRYPQKIKAIEPDNADIRLLQQLVEQRRQLIEDKRRFVNRLINTLKQYYPQPLEWFSHRGSLLLCELIMRWPSLQQLKRARHDTIRNFLNAKGGRAMALTEQRVVSIDNSIPLTTDPSVIEANALMATALATQIKVVSEIIKTYDERIETLFDSLPDAGLFKSLPGMGPCMGPRMLAALGDNRDRFNSAEEIQNYAGIAPVTERSGQKSWVHWRWQCAKFVRQTFVEWTAKTVNSSYWARLYYLGQREKGKSHQSAIRALAFKWIRIIYRCWKTRTHYDEAKYLLALEARRSPLLKP

SEQ ID NO: 72798 - protein, 343 aa, unidentified
MKVTTIGLDLAKNVIQVHGTDERGKAVLKKQLKRERVALFFAKLPPCLVGMEACGGAHYWARKLEKLGHQVKLMAPQFVRPYVKTNKHDAADAEAVCEAVSRPNMRFVPIKNGEQQAVLALHRARGGFVKARTAQANQIRGLLGEYGIVLPRGIGHITQRLPAILEDGENELPGVFRQLLARLADHLRHLDRQVDELEQQIQLWHGENDASRRLAQIPGIGALTASALVATIGDAKQFKNARQLAAWLGLVPRQHSSGGKPMLLGISKRGDAYLRTLLIHGARSVVRVTERKSGEAQRWLTQLIDRRPPNVATVALANKNARIVWALLVKGQDYQFDYTPSAA

SEQ ID NO: 72799 - protein, 409 aa, unidentified
MESGYRLMVGIDWATEAHQVCVLNSQGRLLEQRRVEHRSEAIAAMIDRLIGLAGGDPTSIAVAIEVPRGPVVEALVERGLHVFAINPKQLDRFRDRHTVAGAKDDRRDAFVLADSLRTDLSAFRRVHLDDAWTIQIRELTRIEENLNTEINRLANQLRDLLLRFYPQLLRLCPAADQPWLWALLKLAPTPAKAQRLRRSSIQRLLHQYRIRKWTADQVRTELKTAPLSVAPGVTEATSAHIALLLPRMELLMAQYKLSSKAVQTALNERVSAQEEGREHRDVEILLSLPGVGRVVAATMLAEASQLLAQRNYHALRTLGGVAPVTRQSGKRLAVRRRYGCNHRLNNAFYHWARVSSQCDPRAKHHYQTLRQIGHSHGRALRGVADRLLALLFAMLRDQTLYDQTRTHAA

SEQ ID NO: 72800 - protein, 334 aa, unidentified
MTIQLLAIDLGKQSFHLHGIDADGVVVSRKVSRGKLMPTIAGLEPQMIAMEACASAHHWGRELQAAGRQVRLINPRFVKPFVKGSKNDAADAEGIFEAATRPTMRFVPVKNMAQQDLQSLHRIRERLVSQRTSLINHTRGLLAEYGIVLPQGPWRFARQAPVAIAEADLSDLARELFAELLDQLCDVNARLDRLDGRILAICRANAACRRLARLPGVGPIIATALIASVDDGRHFRNGRELAAWIGLVPRQYTTGGKPRLGGIGRRANHYLRRQMIHGARAVISRLAQHDDARSRWLKALLDRRGFNRTIVALANKTARIAWALLARGEEYAAA

SEQ ID NO: 72801 - protein, 344 aa, unidentified
MSTIKVLGIDLGKSSFHLIGRDHRDQNILRKKFSRAKVIEFIAQLPPCLIAFEACGGAHWLARQCLKHGHRVRLLPPQFVRPYVKGNKNDFIDADAIAEACGRPGMHFVPVKSEEAQMLAVCHRLREGFVSERTRLMCRIGAILLEFGLALPRGHATMKHLFQWLATKKDELPPALIQELQVAHDHYKQLNERITEQDRKIQASVKQDERCQLLKSIPGVGDMIASQLVMTVGSGQQFRQGREMAAWLGLVPRQYSTGGKPKLLGISKRGNKKLRCLMIHGARSVLSRLSDGNRPFDAWLRKLRANKPFNVAVVALANKLARIAWAVLSSAKPFDAKELQPGLQ

SEQ ID NO: 72802 - protein, 245 aa, unidentified
MSKRALDVHVLPEGEALHVPRDSKGLDDLVSWLRARQPRIIAVEATGGFERVVAVELDAAGLPVAVVNPARIRDFASAVGARAKTDRIDAAVIARFAEATQPVVRPLPDERTRELADLVTRRRQIVEMLGAERARERRAPNRRVARSCQRLIKALERELADADNEIDGALRASAEWRAKQELLQSVPGVGPAVSSTLIAELPELGNLDRRSIAALCGLAPWTRQSGQWRGKSFIGGGDRACSWRR

SEQ ID NO: 72803 - protein, 459 aa, unidentified
MNRKQRREMMRKIQSEDLRLEVIHPDAAGIDIGNESHYAAVPPGRDSQPVRRFGCTTTELKTMAAWLRHCGICTVAMQSTGVYWVAVFDILEETGFEVFLVNARDTKNLPGRKSDVQESQWLMKLHTYGLLRNSFRPSQEIRVMRTYWRQRNDLVQSASRHILRIQKALTQMNLQLANVLTDISGATGQAIIKAILAGERNPHKLAEFRDPRVKASEEQIAQSLEGNWQPDLLFLLKQEQDGYEFCQRQIAECDRQLAQYLQQREDRSQGAPLPEEKRKGRLKKKRGNKPRFDLRKGLFRMTGTDLTRIDGIDVMTATTVISEAGYDMSKWKTENHFVSWLRLCPDNRISGGKVIGKGRLPTNNPISIALKMAATTLRQSKTYLGAQFRRLRTRLGAPIAIKAMAAKLARLVYRMLRYGMKYVDQGAAFYEAQHRQVQIKQLKWKAAKLGFQIVQAPAA

SEQ ID NO: 72804 - protein, 339 aa, unidentified
MELYAGLDLHSRNTYIGIMDKAFNRVFKKRVPNHLEHILQTLDPFRDQIKGFVVESTYNWYWLVDGLMDAGYSSAHLANPSAIKQYEGLKHSDDQHDAFFLAQLLILGILPQGYIYPKKDRPVRDLARKRMFLVQHKTAHILSLQSLIQRHCAMKVRANDMRHWTVKELEAWLKEEYLVLSAKASLDSINFLKQNIQRLEKAIRKKVKLQQAFHYLKTVPGIGDILALTIMLEVGDINRFSKVGNFTSYCRCVPSHRLSDGKSKGHGNRKNGNRYLSWAFTEAVQLGRRHNERFRAYYNRKVAQANTSLATKALGNKLARICYYIMRDQVPFREELFCQ

SEQ ID NO: 72805 - protein, 405 aa, unidentified
MKLYIGIDWSSKKHDVCMMNEKGGVLELFEIENNQEGYWRLEERRKKYGVDIDNSSIGIETNYNLVIDFFIDQGYRNIYVIPPHLTHGNRSRFAVSKGHNDASDAKLIAEILRTDQGRLLPWQPDLPITRQIRAQINLIRFLTTEMVRFQNRFRDTLNMYYPQATKLFSDLDAKINLRFVMAYPNPESARSLSVEAFTKFCKENRYSRPKRIPEIYARLFADYPKPNPDTVLTYQSEALLFAKTLLILKEFREREEKTLKHLFVQHPDHHIFASLPGVGEFLAPALLAKFGDHRDRFPTPQVLQAVAGTAPVTSSSGKSKKIYFRKACDHEFRWIVQTWAAHSIEKSVWAAAYFAHAFPSSKSYNHACRCLANRWLNILWRLWMDRTPYDEVLHLKRRAKFTTNR

SEQ ID NO: 72806 - protein, 414 aa, unidentified
MGLKIVYPICCGIDVHKTFVVACIASTDKGVTTYKRHRFSTYTKGLKELSQWLCEHNCKDVCMESTGKYWIPVFNVLEHSCTITLAHPKYVRAIQGKKTDKKDAKWIADLFKHDLVPGSFMPPLAIRQLRDLMRYRFKLTNFTSSEKNRFQNSLTVSNIQLGNVVSDTFGKSSMNIIDKLLEDPTDTNFEIEPLIHGSMDHKIPELKLAIDGFITPEQSGKLAVIKRHYENLNVRKSDLEKLILSLAEPYTEEINLILTVPSFKNTFSAIAVVSEIGVNMDVFPTAKHLCSWAGLTPTNNESAGKKKSVRVSRAGVYIKPLLVQCATAVVKSDKHPEIRNRYLRLKKRRGHKRAIIAIARMLLTAIYHILKKKEPYNPDLYQKADVLPVSREITVEQALSLAKSQGFRIKETVT

SEQ ID NO: 72807 - protein, 375 aa, unidentified
MEHHSEAFVALDTAKLRNAVAIADAGRNGEIRYLGEIDNTEAETRKLVAKLASKHARLTFCYEAGPTGYGLYRLIKSIGHDCIVVAPSLIPSKPGDRVKTNRRDAVNLVKLLRAGELTAVWVPDERHEAMRDLVRARDAAVKDYRIKRQNVSSLLLRLGRHYPGKKTWGRAHINWLTGLKLEHREQRIAFEEMLLAVRQVRERIERLEQAMREAVADWTLAPVIEAVQAMRGIDMVGAIAFLAELGDLSRFENPRQLMAYLGLTPSERSTGESVKRGGITKAGNTRARRLLIEAAWSYRFPPRVSKDMQIRIGAAPRTAREIAWKAQMRLCGRFRTLTRKGKRPTIVVTAIARELSAFIWAINREIVGSHATANQ

SEQ ID NO: 72808 - protein, 382 aa, unidentified
MLKIVYRICCGMDVHKSFVVACIASTNEQGVTTYKSKRFSTFTKDLRWCAAWLAENGCKDVCMESTGKYWIPIYNILEPTCNIVLAHPKYVKAIRGKKTDKRDAKWIADIFKHDLVAGSFIPPADIRQLRDLMCYRWKLTNFTTGEKNRAQNCLTVSNLKLDDVFSDVFGKAASAITTRLLENSSEKITDVSGFRTKGMKATNEQLLAAVDGEMCVQQAEKLRIIRSHMDSLAFCKANLDSLILATAEKYLPKLNLVMTVPGIQSLAAIGIISEIGTDMSVFPSSKHLCSWAGLTPQNNESAGKKKTTRIGRAAGQLVLFVLLDRETVRLALFQPGEHIVHRVHKVVIVLLDLHAGNHVYKGIHVFILVRALEDDIGDKGAV

SEQ ID NO: 72809 - protein, 333 aa, unidentified
MFDHYVAVDWALSNMAIAKMTKVSNKITVVDVPSNLKEFKLYLAKLKGSIILTFEETTTSRWLYTELHDCVDRILVCDPYRNKLLSEGAKTDKIDAEKLVKLLKADFLKEVFHTNNDFIEIRKIVSAYEDLIKAGVRLKNQRSALFRAKNKNHKLETTLDNFAEKFVLEGIDKNIKSYEKEKLRYLSEFKRLKKKHKEIKLISEIPGIGEITAVQVVSRVVDASRFKKRNHFLSYCGLIRHSRISGGKTYGKKTPRFCRMMKGIIKIATTSTMKGNNEFFHKYNYLIMEKNYSARDARTSVARQIATVVYAVLKNKSKYDPFKNRKINYVTTI

SEQ ID NO: 72810 - protein, 358 aa, unidentified
MKIIGCDLHARQQTIAMLDSDTGELEEKTLEHQGETVRKFYSALSGSILVGIEATGSMQWFLELMEELGIECRVGHPAKIRKAETRKQKHDRRDARLLLTLLAENRFPTIWMPSTEQRDLRTLLRHRHQWVRMRSRVQHTLQSMALNHGLRRGRALWSQAGQDELRALPLAPHASERRKALMTLYPRLQESIDELDRQVSEQTQQRTDARRLMTHPGVGPVTALATEVFLGDPMRFSDGKALASYIGMIPSEHSSGRRQRLGAMSKQGNALLRYLWCEAAMHAVERDPELKRFYRRKLVQKGLGKARVAAARKLGIRLWIMMRDQIDYEEFCRRGKARQESGRVRAGMPAINSGPAQQ

SEQ ID NO: 72811 - protein, 400 aa, unidentified
MDIAQQLHVARAVNFRGIVVGDPITFENNEEGFVKLLNWIQDLKRLKNLDAAIVGMEPTGHYWINLSKWLYNQNIEVVTVNPHLVKRNKENRDNTQSKSDKKDALVIADMVKNGYYSFIRPSSESFEKLRVLMSNRDVVVKRLVMSINQINRWVDVVFPELRQVFNDVSCKGAIATLRLFPTPDEISSMDSLDIQRGWKSLMKRQPGPKKAQLLINLAKTSIGTGQALDAYKFHLEQLLEEYDLAVKQLERVEQQVKEVLTKIPYAKKLLTIKGISEISLAGILGESGDLSGFSHGNSLLRHAGLHLAEASSGKWKGQIVISKRGRSRLRRFLYLATMSLVMNNPEFKAVHSHNVKVKKIKKMKSIMKLIGKLARIFVGIARRNESYCPNKIQVLIPLSA

SEQ ID NO: 72812 - protein, 473 aa, unidentified
MGKGNGMTRRDRRRNGRREQLRGMLPRDGAVIGIDLADEKQALAVIDHDVRVLARKTVRVKAFRLGEALDWAAGQARAKGFTSVTVACEPTGPRWLQVQRLCAERGLRLVCVQPLVSHIARQQQDYTAHKTDEADCVMIARLAAELHCYIPEELDEVWADLRHLGRRRTALITSETASVQRIRDFLSVAWPTVTETCAKPFESMTWLAALQAVTSRCGGQPGKLAVIGLEAFTALVRDALPGWGGQRICGPICKAVFAALTSTEGVVWAHRRGLLRRVAAELGDLRRARAQRQETEAAMIAALGDLGLARLGDIPGLTATGAAAILAETGDPKRYDTSSSVVKHAGLSPSENASGAFDGEAHISRRGRPGLRLTVWRAVWAVLIHNPVMAAKYAAMTQATDQAAAEARAGGSGHATSAAEAARRRRAKARVACAAALLRWIYSMVVHGTCWDPGVAAGRKDTLAAPSCRPEAA

SEQ ID NO: 72813 - protein, 382 aa, unidentified
MQPINTVNPTIYLAIELSASTWLIAARLPGSEKPHLHRIEGGDTAALFALISSLRARVARRLDAAIGVVCCFEAGRDGFWLHRLLTAHGVANYVLEPTSILINRRARRAKTDRLDAIGMLRVLAAYLRGDRQSCSMVRVPTPEDEDAKRIHRERENLVQEKLRIENRIEALLFTQGIRKRPSLRSWERDLAVLRTGDGREMPRHLRAELDRLRRRLVTILELIREVEAERDEVVTTNPEHQTSRKIVALCRIRGLGENFAGVLTREVFYRSFDNRRQIASYVGITPMPYQSGSMDRDQRISRAGNPRARTTMIQLAWLWLRYQPGSELAEWFRKRVGTLAGRTRRIAIVAMARKLLIALWRYVETGVLPAGAEIRPESVAAA

SEQ ID NO: 72814 - protein, 387 aa, unidentified
MPQSNDLSRSLAALDQDSTLIAVIEMSQSTWLVAGIVPGINRQPLKKLAADEAALLQLLYRWRDEATKAGRRIDRIAVAYEAGRDGFWLARWLRGRGIEAQVIHPTSVAVSREHRRAKTDRLDTELLKRAFLGWLRGERGHCSMAKIPTSEEEDAKRPNRERENLVGERTRIVNRMKSTLARLGLRNFKPTLRKAAERLDSLRTAEGVPLPPNTLAELRRDMARLRFVMDQIREIEAARLTRLEQHPELASHAMVRLLARVIGIGIETADMLVHEILSRNLRDRKAVARYAGLTGSPDESGARRREKGLARAGNARVRRGMIQLAWRFLMFQKNSALAQWYRRQTADSRGTSRKTMIVALARKLLVALWQLVTTGEMPEGVVLRAAA

SEQ ID NO: 72815 - protein, 353 aa, unidentified
MDKYIGLDMDCKKTVGYTIIPGKKESSATLGPDIESIRRYFRQERQGGYRIHAAFEISGQAGFLYDQLLEDVDSLHVVNPTKMTWIYRTAKKNDRIDARKMAVLLSIGELPEVYMPSKEVRQWRQTILHRQKIVQKVGQVKNRIRAALKSEGHRKPAHVGSWWKRANLTWMQQLCEESVRCDSLWRLHVRNLLDELALLQSQRDRVTAYLDTYLDKQSAAKLLMSIPGVGPRTAEAVLAYTDDINRFGNYKKYCAYFGVTPKLDESGSFRRLGHISKQGPAVVRWLLCESGWKVVRYCPGLRAFYERVMAGQQSRKKIAIIALTRKLLCIMRAMLMTGELFNEKLVQEVLKAA

SEQ ID NO: 72816 - protein, 324 aa, unidentified
MIDAILGIDVSKNTLDVSISSCTKVRTKSFANSSDGWHHLLDWLITQKIQRVHACLESTGRYSLGIACALYEAGHVVSIINPAQIRDFVRTKLGRNKTDGIDASRIREYCELFKPSPWAPPSDAHRRLGELQTIRSGIIAGLTEWKNRKNSGIVDAEAQALADATISHFTSQLGAVDKAIALTIDNDSDLRSKRDLLLSISGVGDTLAGVVLAELPGPDVLRSSGEVVAYAGLNPRQHQSGTSVDRATRISKIGNVVLRAALYMPALSAMRYNPAIMALVTRLKSRGRLKPKQIVVAAMRKLLVLCFGVLKTGKPFDPAIAMGC

SEQ ID NO: 72817 - protein, 419 aa, unidentified
MESENMDYAAWIGLDWGSQKHAICLKPADSEAMEHYTLEQKPEALHGWFMNLIARFGSRKLAIAIEQTRGAVIHFLLGLACVHIFTIHPKSLKNYRDAIHPSGSKDDPTDAELLLQFLTLHQHRLKPWIPDKPEVRLLLRLVEFRRKMVGKRVRLTNELTQLLREYFPAALDCAGDLDKVMACDFLSKWPTLEKLQKSQPENIRKFYQEHGSRSRSVIEGRLKQIRSALPLTTDAPVIEPSVFLVQSIAPQLCSVIDAIAQFDRRIKEVFERHPDAQIFSSFPGAGAALAPRLLAAMGSDRSRFGSSLEVAAYAGIAPVTERSGKSKWVHRRFACAHFVKQSFHEFAGQSILFCDWARCYYDQKKKEGKSHHSAIRALAYRWIRIVYRCWKDRVPYDEGKYVKALRQRKPDWVQSLGES

SEQ ID NO: 72818 - protein, 338 aa, unidentified
MGKITTIGLDLAKNVFHVVCCDARGKVVRKRMLKRGQVLKYFANLEPCLVGMETCAGAHYWGRELESLGFEVKLIAARYVKAYVRGNKNDYNDALAIAEAVVRAEMRFVPVKAPEHQDIQALHRLRQGCVATRTALCNQIRGLCGEYGLVAPKGVAVLRRRLPEWLEDADNGLSELFRRLLCESLARLHELDAHIAFYTREVERLSADNEACQRLQTIPGFGPIVASVFHSQVGHGEAYRRGRDASAALGLVPRQHSSGGKDILLGISKRGDRYLRSLLVHGARAVVSRAQHKDDRLSLWVNTIRAKRGYNKAVVALANKMARMGWAVLAHKNVYQAR

SEQ ID NO: 72819 - protein, 458 aa, unidentified
MVDKKIPQSKIRLLTFGWLVKILFNREVSKMNYNTQNAKIASITEKTLIVGIDVGSETHYARAFDWRNYEYTKKPLEFSNTEAGFQTFKAWMEDIAEKHGKTAVIPGMEPTGHYWFALGKFLQDNGMKPVHVNPHHVKKSKELDDNNPNKNDRKDPKTIAALVNEGRFSYPYMPVGIYAEIRSLSNLRFQTQEELTRIKNRLARWFAIYFPEYKDVYGDLKAVSGRMVLKEAPLPEDIRKLGVEGVNRIWRDAKLRGAGMKRAKTLVTAAEHSVGSKEAPEAARMELKNLLDDMDVYTARQEGLLRNIEEKLKEIPYIDNLLAIKGIGMVTVSGFIAEVGDIGRFDNPKQLQKLAGYAIVANDSGKHNGESRISYRGRKRLRYVLYEAAISLVGKNAEFREIHEYYRTRKENPLKKMQSVVAVACKILRIFYAILTKGVEYDPKKLLGDIKRPQVQAA

SEQ ID NO: 72820 - protein, 374 aa, unidentified
MILKYSVGLDISAKEIHSCISSIDSEQTVKVIRSKKFANSLHGHKELATWMDTCCVLEEIPLVVTMEATGIYHESCALYLYENNYRVCIVLPNKAKKYIQAIGIKSKNDPIDARGLSQMGAEQNLELWKPMGKYFYQLRELTRQHQSIQELLTSVQNQLSAASRGMYLNEFVIQQLEQTVHLLKDQRNSLEKEISNHFQRNVEVAKKVENICSIKGVSILTVAVILAETNGFALFRNKRQLVSFAGYDVMESQSGSRVGRTKISKKGNGRIRRILHMPAFNVVRFEQTAFVKLYQRTLNKHNIKMKSYVAVQKKLLTTIYTLWKKNESYDNQYYTRNMGQKETASNNLEKNYKNSANNIVGTTQGSHTIIPVTV

SEQ ID NO: 72821 - protein, 311 aa, unidentified
MNNTIGIDISKDTLDAHRLADGQHKQFLNGKTGHAQLVKWIGKQSDPLIIFEATGAYHRQLERVLCTHIIPFVKVNPKQARRFAQASGKLAKTDRVDCEMLAKMGAALQLMPKPFTAENLYDLRELLSARRALIKDRTAAKARKATVINALIKQQLEKRLRQIKNDIAKIDALMLDVAREDQYMSERLDILFSIPGIGVITALMILVDMPEIGALNNKQVASLAGLAPMSQSSGKWIGKARIQGGRPNLRNAIFMPALVAIRHNADLKTKYDRLVTAGKEKKVAITAVMRKLLVFANALLRDNRKWAEKAA

SEQ ID NO: 72822 - protein, 395 aa, unidentified
MFIVGIDVAKRSHEVCMITSDGQTVQRPFSIRNNCTGYNLMLEKIRKHTNIKSQIVFAMESTAHYWLALFTRLRKDGYHVILLNPIQTSAMRDMFIRKIKTDAKDSFIIAELIRFGRYAESNVAQDRLLALKELCRNRFYLVDMAGDLKRKLIALIDRVFPEYEAQFDTIFCKSSVALLKKYPTPQRLSNAHLDKLTELLWNSSNGHFGEWKARELKELARNSFGVEDCDGAYSTLILLMLDQIQSLSGKADALEKEISRLFQSFDTTVTTIPGVGPIIGAVILSEIGDISRFSSANKLAAYIGVDPSVNQSGEFQAAHAHMSKRGSPYLRRCIWMASQVAVQRDPMFRAYYEKKAAEGLKYMTIIGHVTRKMTAVVFAILRDHKVYEPILPTAA

SEQ ID NO: 72823 - protein, 417 aa, unidentified
MAMKIVRFNCCGMDVHKNLVVATIGITDSKTNITEYFQRSFSTLNSDLYRLKDWLKSHHCSDVCMESTGKYWIPIFNVLEDEINVHLTHPKYVKAIKGKKTDKKDSKWICDLFKHDLIKFSFIPPKEIRELREIARYRYKLVCMRSSERNRYQNCMTVSNIGLASVISDPFGKTASNIMKEVMKSNVIDDDKILKLVHRNCKNKDKILDSLHGYHIESDQRFKMEKSLDHMEYLDQLIDSCEVELIKRAYPFRRSFQHITQIKGISVLSAILIISEIGIDMSQFGSDKQLVSWAGLSPANNESAGKKKSVRISKAGQYLKPLLVQCALSAIKDKASYFGRKYSNIKKRRGHKKAIIAIARMMLVSIYHMILTGEEFQPTDYESLMNPKSNIDQSLTVEKALNFLKQSGIDISSIPVN

SEQ ID NO: 72824 - protein, 481 aa, unidentified
MSSQQITPDFLVGIDLALKGKHVAKVMLPGSEGLGKPIRFGHTYDEYERMYHQVMDRVPEGARALWGCEVTAAAWRPISAFLSNRAEQLTILKPVKVADLRRFMQRHLKTDEVDAQVIGNAMWLDLRQGRQPSAPHSPQDQARRGLARRIDHLKKNVGSAKQRLLAILQQTMAPSLATKPYDWCAQSMLAVLHHFADLRTVAALSPSAFIRSACCAGKGGPRTSQNALRALHEAARDALRVYGQHGLDWDTQAILLQEAIQTIWDTQKRIQLLQAQLDKGVQQVATPQQRQSGQTVPGIGAQTLELLIAFLGAPDKWRNIQSIKQFAGLVPIVDNTGQSEPNGRMSKLGEPLLRKAVYQVGNAARQFDAQFAAYYYNQMVHQAKGHTAACIATGIRVINALRAVLRDQRTFQHYHPETGKPITKEQSQVLARTTYRVPEEIRKARRKAKHKRTADTDPGQLMKDMPKALPKMAAEPVPALS

SEQ ID NO: 72825 - protein, 366 aa, unidentified
MRKPSTSALHRKGKLQDEQLTIGLDLGDRSSFYCVLNGAGEVMVEERVTTNPEAMKKTFGKMPRSRIALETGTHSPWVSRVLSELGHEAIVAHARNVRLIGESRRKDDRMDAQALARLARIDPQLLSPIQHRSAQAQADLSVIRARYALVRTRTALICAARGLTKSFGERIRSRYIRGFKPAIGDTLSPQLRVALAPLLSALETITARIREYDAQIEKLAEESYPDVALLKQVKGVGTLIALTYILTLEDPRRFRKSRDAGCYVGLQPGRRNSGQSEPQLHITREGDSYLRMVLVQGAQHILGPFGEDSDLRRWGLKLAERGGKSGKKRAIVAVARKLAVLLHHLWISCEEYEPLHNTRKRRLAAA

SEQ ID NO: 72826 - protein, 457 aa, unidentified
MKHHKLHKLQQHRHFTHDRFLVGIDPAKACHQAQILNPEGLPVGSSFSFKQAFSGFHHQLWKHLKARLPDLAHLPRHQLSQHLVFAVEASCNLWANLVDYLHDQGCRVVLVSPLSTCHARPSKSGDFSRTDPKDAYLIADLAREGRFHFHALYSPDQEAMHRLSITYDKLRKSLQQNDARLRALIELVFPELLKILTLCSRTAHHLLGSYLFPEDFLSLDLDRESASLMTLSRNQHGRETLIKIQDRARQTIGVVMTDQEQRAQRLSAKAWLHLIETLETQINEVSDELVRLSKRTPYHAPLTSLKGLSDLLAALFIAELRDPAQVTHIKQIERLAGLNLYVHDSGTYKGRRRISHIGNSRLRWVLYRMASEMSKYVPEVRCKYLRRRIKGHTNRSKNLVATIPNMLALVMTLLREERPYQERSDTLAEMHRLEAELEDKKPPKHPRRARRTKQAVA

SEQ ID NO: 72827 - protein, 376 aa, unidentified
MLDQAHNHSAPTIYAAIELSKKSWVVAILRPERDQPSIHRIKGGALPELISKLRAAAYNGERLFVCYEAGYDGFWLARSLESEGIACRVLDPASLQVNRRARRVKTDRIDVLMLVRAIVAVDRGDRHVCSIVRVPTVEEEDARRSHRERQRLVRERTAHINRIKGLLFGQGVRGVEPARKRTRIDLSELRTGEGLPLPVRLRAELEREYARFDLVEQQLRTVEAERDTVDAQDPTVERKRGMLIQLRGVGSASAAILAREIFGRPFANRRQLGSYLGLTPSAYDSGSTTRCQGISKSGNSFARRVMIEVAWLWRKYQPESALAKWYERRAAGQSPRIRRIMLIALARKLIVALWRYVEIGLVPEGAVFCAANVAAA

SEQ ID NO: 72828 - protein, 350 aa, unidentified
MRTEHFIALDTHCTTTDMAVVTGRGRLTKRLQCTTAIPPLVEAVTGIRRPRYVTFEEGPLADWLFRHLAPHAEEVFVCEPRRNHLIAKDSDKDDPIDAEKLAQLYRGGYLKRVHHPESLRRAVFKQHVATYHDVVRQRVGAANRVMARLRRHGLFVQEDSFAHDVEGREKLLRRLPASRMLRDDVQCLWAIYDSFIYQEEVLRERLTRHATRVEPIRRFVRLPGVSWIRGATFYVFVDTPWRFPGKSALWKYLGIGLERKHSGQGPARLRVAPQCNRPLKGMILGAAMTAIRIGDNPFADQYDHWMKGGLTARNARRNVARSLAATLWGMWKNQTEYRPEWVGQGGRSHS

SEQ ID NO: 72829 - protein, 315 aa, unidentified
MTKLVVGIDIGKDKLDVAITSETSVRVWGNDEEGRAALSDWIEGQPVELVVVEASGGYEAAIVSELVQRGVAVAVVNPTRTRAFARAEGLLAKTDKIDAGSIARFGAVMQPKPQARREQNQLELNQMVARRRQLVAMSTAEKNRVQTAAPAIQAHIATHIAWLQADIEALEQQISQAIAAHPEWAETARRVETVPGIGSITAATLVADLPELGQLNRQEIAALVGVAPFNHDSGKRRGQRRIFGGRTSVRSVLYMATLSATKHNPVIKCFYQHLLKQGKVKKVALTACMRKLLVILNTMVKSGQDWNPPKTSSTI

SEQ ID NO: 72830 - protein, 444 aa, unidentified
MQYQKVLQMLNCTPYLSVGLDVGADFTWMSIMLPNGTLAGKPFKIAHSDPQSRELAVTKIKEAQEMYSLKSRCFLESTGIYHIPLLCFLRDKGFDCSVINPIITKNSTNMNVRKLHNDKFDSKKAAKVGLDASLKTSIVPDEEIIGLRNMVRDYYYYKDMQSAIVLKLNAELRVSFPAYLQVFSKVTALTSLKLLEMYPLAADMLAAPKDEVIKTIRETARFGEKYALAKYDALHAAAEDAAVFGRALPSSALRIKLYIGTYREYQKHLDSILEELHKAVDGLQGKPVYGQICLIQSLRGVGFLSAVVLIAEMGSFDLFPSPRKLFAYFGLDPGVNDSGKFKGDRVHMSKRGSSLARRVLHMVAVNNLKVGKGTKAPVNPVIYDYYIHKCTSKKKMVAVGAVMHKICNIIFAMLRDNKPFEIITPEEHCKRYAAGHPESVAATV

SEQ ID NO: 72831 - protein, 355 aa, unidentified
MDNRKYIGMDVHKEAIAIAVLNAAGKLVMESIIETKANTIVEFLKGLRGELHLTFEEGTWASWLYDLLQPQVKRVVVCNPRRNALLKEGSKSDRVDARKLAELLYTKMLRPVYHRDNGMRAVKELARSYVTISKDQARVMTRVKALYRSWGIACSGKQIYTVRHRASWLGKIKEPSVRRRAEFYYQQLDGLRSVRRQVRRELLLESGKHKASKLLRQIPSIGPIRAALLLALVQTPHRFRTKRQLWTYSGFGIETHDSAEYRYVAGQLERSKKPQQVRGLNRNYNHDLKNLFKSAATNAVAKSGPLQEFYLALVKRGIRPEMARLTVARKIAAITLAIWKKGVSFDAEHLKQQTA

SEQ ID NO: 72832 - protein, 334 aa, unidentified
MENIALISIDLGKNSFHIHCQDRRGKAVYRKKFTRPKLIEFLATCPATTIAMEACGGSHFMARKLEELGHSPKLISPQFVRPFVKSNKNDFVDAEAICEAASRPSMRFVQPRTESQQAMRALHRVRESLVQDKVKTTNQMHAFLLEFGISVPRGAAVISRLSTILEDNSLPLYLSQLLLKLQQHYHYLVEQIKDLESQLKRKLDEDEVGQRLLSIPCVGTLTASTISTEIGDGKQYASSRDFAAATGLVPRQYSTGGRTTLLGISKRGNKKIRTLLVQCARVFIQKLEHQSGKLADWVRDLLCRKSNFVVTCALANKLARIAWALTARQQTYVA

SEQ ID NO: 72833 - protein, 341 aa, unidentified
MFQTSNTAIAVIGIDIGKNSFHVVGHNARGAIVLRQKWSRGQVEARLANVPPCLIGMEACVGAHNLSRNLVSLGHDARLMPAKYVRPYSKGQKNDFNDAEAIAEAVQRPTMKFVATKTAEQLDLQALHRVRERLVSQRTGVTNQIRAFMLERGIAVRQGIGFLRLELPTILATRTDALSPHMLRVIEELAGDWRWLDQRIDGLSGEIEALARLDQACSRLMTVPGIGPIISSAMVAAIGTGDVFSKGRDFGAWLGLVPKQISTGDRKILGKISRRGNRYLRVLFVQAARVVLARIKHLERYGLKSWIEAAKRRLHPNVLAIALANKLARIAWGTRLRADED

SEQ ID NO: 72834 - protein, 415 aa, unidentified
MEGLPPLHRRVAGIDVHRMLHVVTVLIEQPDGSISRHSREFGGFKRDCRALAQWLSELQVQLVVMESTGIYWKSVYAHLENAGITAWVVNAHFIKHVPGRKTDMLDSEWLAVLARFGLVRASFIPPKDLRELRLVSRYRRKLSAMCASQINRLHKMLDDAGIKLGAVVSDIHGVSARAMVRGLIEGQSQAVLLGHARGALKRKTEALAASLEGDLSERHLFVLRHLSDSIDALQRQLADIGAYLSAAMQPYAWAHGLLQTIPGIDEVAAALILIEIGEDMARFGSPERLACWAALSPGNHESAGKRKSGRTRHGNNTIRFILCECANAARMTKSTLASKYRSLMVRKSHKKAIVAVAHKMIRLIYILLSRHQPYLDQAIDYAAMSAKKNAPRWIKQLKAIGKWPAPSAAAAHATA

SEQ ID NO: 72835 - protein, 366 aa, unidentified
MKMSIGVDLHKSQFTVYWKPEGKEGWYVKYPTNERGYRGFEHQVLETKEAGYRVSIAVETTGNAHYFRNRAEALGVKVVVVNSLKFKVVNESVKKTDRHDASTLAEFLEKEMLPEARLCSRESEELRRLLKVRKRLVETIVMVKNQIHGILMGYGIESVRGELQSKKERQRVKSVLAAHQLTDAAVEPLFEIIDKLTEEVKKLEKLIEEKAEGDSMIELLCTIPGAGLITASTIRAYIDDIKRFESPKHLAAYAGLVPWVQISNNTEHYGRITKRGPKELRTALVQVFLGMVRAKKRTQGYRILYRYERMKKEKGSGKSIIASARLLTEVIWYMLTKQEPFSPLRMKDPKLFQKSMEMHAAAFSAA

SEQ ID NO: 72836 - protein, 339 aa, unidentified
MNITTIGIDLAKTSFSLAGSNKHGKIVLRKTVNRGKLLSVIAQCPPCLIGLEACSGAHYWAREFEKFGHQVRIIAVKFIEPYRKGSKNDNNDAEAICEAVRRPNIWYVPVKSADQQAALCVHRVRQGVVRERTAWVNRLRGLLSEFGIVIPKGRYAVQSAIPAILGDQDNGLPELARQMIHDLWLSIQQANEQVLSYDRALSRLAREDETAKRLLTIPGVGEQIATGVVASVPDPRLFKNSRQFAAWLGLVPRQYTTGGKIRLGRITKRGDKYLRMCLVHGARAVVAKLGDKQDHVSCWVRDLIERRGYLRAVVALAARNARLIWTLMMKREDYRAITD

SEQ ID NO: 72837 - protein, 343 aa, unidentified
MQIHSIGIDLGKTTFHLVALGAAGKVLVKKKFTQRQLLTYTANMQTSLIGLEACSGAHFLGRALRKQGHDVRLIAAQFVKPFVKSNKNDFVDAEAIAEAVERKNMRFVPIKTDDQLDLQAIHRVRDRLISRRTAVINQLRAFLLERGMVFAQTPAKLKAAMADILENAEADLTPQMRNLIDMLWREWKIVEQQIQELTTQLERISAADAACTRIRQIPGIGPIVATAIVAAIGNGAAFRKGRDFAAWLGVVPRQYSTGGKTKLLGISKRGNVYLRKVLIHGARAAVLRIKRDRAPIGAWLDRLDARAPKNVVVVAMANKLARTAWAVLSSGEDYRPLASISAA

SEQ ID NO: 72838 - protein, 368 aa, unidentified
MSTSIITYERSTLVNSEKYIGLDVHQATISVAVMDSMGKLIMESILETKAATILEFVAGLRGTLSVTFEEGTWAAWLYDLLKPHVDELVVCNPRKNALLKDGNKSDRIDARKLADRLRLNDLKPVYHGETGVRMLRELARSYLNLVKDQTRVMNRLKAMYRSWAIPCAGRDVYYARHRAEWLGKIREAGVRRRAEHLYQQLDMLQHLRQQARRELLAESRQHPITAKLRQIPALGPIRSALAVALMRTPHRFRTRRQLWAYSGLALETRTSGEYRCVEGQIRRSKKQISIRGLNKDHNHDLKGLFKGAATRASVQPGPFQDFYQRSLAKGIKPTMVRLTLARKIAAITLTLWKKGENFDAEKLKSQAA

SEQ ID NO: 72839 - protein, 428 aa, unidentified
MAYRIAGIDVHKKMLAVVVSDVEVAGEYQFERRRFGSSPEQLRSLAAWFAEREVEEVVMESTAQYWRPVWEALERYWQPHRRMRADARAGSSTLYLAQAQSNRGARGRKKDFPDAERLVKRLVAQELILSFVPDVEQRLWRTVMRRKYQVTCNRVQLQNRLECLLEEAHIKLSSLVSDLLGASARRMLQALADGETNAAALAELASRRLRATPEQLADALGACADLHPVYRRLLKLTLDELRVMEDHMAQLEHEMAHLLSAHQTAVQRLAEVPGLGVDSAQQIIAEVGAGAATFPSAKNLASWVGACPGDEESAEVNYSHRSPKGNRQMRRVLNQAANAAVKTKGSIFELVYRRLVPRLGHAQAIGAIAHRLCRLIWKILHQGVSYEERGPAVTKHRAQRRAAKMIRELRSLGYRVEQICAPASSPAC

SEQ ID NO: 72840 - protein, 421 aa, unidentified
MENTAARKRKQVPEGYLIIGVDPHKKRHAAVAITQDFTTRDKFKFDNTREGLETMLRRARTEMVKSGCRGVMFAIETGGHYWRNIAYYLDERGIPFRFINQYTLKRRREGKDLNRRKNDYRDSEVAAQLLCTGEFVESVIPQGVYAELRTSHNAYQRLVKERTRIINLVKGLLDALFPEFTHVFKDPCGLTALSVLSTCAIPGVIAGMMENEFVAAIEAKHQGRLMRKKLRALHQMARASIGIAAGARSVSSEIAFLVEKHELIRRHICIIERTLVSLVDETEEGKYLLSIRGLNYIAVAGLLAELGCFKLYRSAKQMIKMAGSNPTESESAGKKRSKTPMSKQGRPVLRYCAWTSVIPMLRFNPDFRAWAKQRRERPAYANPLNGREIVGAALNRLLRLSFALVKNQTYYRSPQLVQVTS

SEQ ID NO: 72841 - protein, 400 aa, unidentified
MDKDRIVAGLDVHKDTIYLCVMDNTEAVIFAKVYGTLTPDLELMCSDMVSHGVTEAAMESTSTYWVPVWNALCESMSLKLVNPYFIKQLPGRKSDVKDAQWIAECLLKNLIRGSFVPDKTVQDMRKYNRRIFDLNEDLTYNSNKQDAALQRCGFRLSNYVSRVNGKSYQKCVRAIITGITDPEELVKLIHGKTLRKYGRNIIKDAVTGDFHQADICLLKQYAELIGVIERQIEECRNALIAMCQEHFPKQFKRLQSIPGEKERAASAIIAETGADMKPFEKATNLVGWCGLKPRNDISNNKVKSNRTTHGNRFLRQILIEISWVASRTRNCFFSNFSYVQCTQRHKNKMKIQVAIARKLLVVVWHMLTKDEDFIDVYLKRLEKQAEWQNDIQALESLLVG

SEQ ID NO: 72842 - protein, 354 aa, unidentified
MNVTHDGGLVAGVDTHRDTHTAAICDSSGRELAQLQVPADPGGYDAVLAWARQAAAGRELRWAIEGTRHYGLGLARHLAAVGEQVEEIDASKHAGKRRKGKSDAIDAVRAARELLARPHPAQMRADGDREALRLMMCDRDNAVGSAKTARTVLASVIVTAPAGLREQLRHIPRDRRVTVCAALACPDDADRQTRVLYQTLARLGERITSLAKTAADLEKQITGIIEDMAPGLVAAEAGLGALTAAQLMLSFSHTGRIRSEAAFAMLSGTAPVPVSSGNTSRHRLNRLGDRQLNRAFQVIAVARMRSDPRTKAYVRDRIAEGKTQQEARRCIKRYLARHFYRVLTHQPGLAPRTT

SEQ ID NO: 72843 - protein, 370 aa, unidentified
MKKNIRNSKSPTRSTTTKLRKSDRVTIGVDLGDKTSRYCALNGAGEVLAEGAFPTTKKGVAQMFAAMAHCRIAIEVGTHSPWVSRELKRFGHEAIVANARQVKLISQSSRKNDKLDAQMLARLARMDPGLLRPIRHRSEEAQKDLLTIRIRSALLEARTGLVNAARGLTKATGERLPSCDADQMSVEKLEELPADLRDLLKPLLEEVESLTEKIKECDGKIEQIARDRYPETKLLRQVSGVGPLIALTFILTIEDKERFEKSRDVGCYVGLRPKQSESGERQPELRITKEGDVYLRKLLVQGAHGVMAERAPDTDLKRWGTKLAGRGGKNAKKRALVAVARKLAILLHHLWVTAEVYEPLRNSQAMAKAA

SEQ ID NO: 72844 - protein, 322 aa, unidentified
MTGNICGVDVASESLEARIGQQGAAASFPNTSEGIVALGAFCQAHQVELVAMEATGGYEQQAFAQLSERGLPVAILNPRAVRQFAQSMGLLEKTDGIDAGMIAWYAEVKRSRPVCLAPKNQQHLRALVTRLRQLTDIRTAQRNQQRLVTDGAVQASFKKLLAVVARQIRDLEQRIARLIEQDPLWRELNLAFRTIKGVADRTVARLMAEMPEIGMLSNKTISKLAGVAPLANDSGKHQGKRFVRGGRTSVRHILFIVASVVGRHEPDFIDFQLRLRAAGKPPKVVRIALAHKLLVRLNAKARQVRQALQPSLVPSSLGLESE

SEQ ID NO: 72845 - protein, 369 aa, unidentified
MPHVTSIGLDFHARSVAAAAFNPFTGEVVHRDFGTDAAEIAEWALGFEEPRACYESGPTGFHMARELRALGLDCAVAAVSKMQRPAADARRKNDRRDAEFIARMLATHNIVEVPLPDAAVEAARDLDRALDDATAEYRRARQRLNMFLIRLGHVWDERNADGARKGSWTRAHWRWISGIRLEGPQRDVLEYYVTAARCAESDRRQLEKEVLALARTDRWRPAVEALSCIKGIDTLTAFRLAAEAGSFTRFRTAPAFASWCGLIPSERSSGETERRGGITKTGNRLARTALVESAWHYLTCTPRPKAPAPGADVPAAIRARADDCTARLCRRREALAAAGKSPCKANAAVARELACWVWEIGCRAEGTLG

SEQ ID NO: 72846 - protein, 386 aa, unidentified
MQKLNDLSRSLAPLKPDGTLIAVIEMSQSSWLVAGIVPGVERQPLKKLAADEIALLKLLHRWREEAEKAGRKIERTAVAFEAGRDGFWLARWLRTRSIEAHVIHASSVAVSREHRRAKTDRLDTELLKRAFLGWLRGERDHCKMVAIPTTKDEDAKRPNRERESLVGEQTRIVNRMKATLIRLGIRGFNPKLKKAAGRLEDLRTPEDEPIPPNTMAELRRDMDRRRLVRDQIRQIEEARLDRLKQAPDDGPHAMLRLLARVIGVGIETADMLVQEVLARNMRDRRAIARYAGLTGSPDESGTKRREKGLARSGNARVRRGMIQLAWRFLIFQKNSTLAQWFRARTENARGTRKLMIVALARKLLIALWRLVREGVVPDGVVLRPTQ

SEQ ID NO: 72847 - protein, 372 aa, unidentified
MSASVIYVGMDVHKDSIVVAVAREGREPAENWKTLPNDGVKLRKALKSLTKNGEVLRVCYEAGPTGFGLYRKLREAGIDCIVVAPSLVPGKAGDRVKTDRRDASKLAHFLRSGDLTEVHVPDQAVEAIRDLERARDDAKCAERAARHQLSKFLLRNDRRYEAGRAWTVRHMNWVRTQKFAYPAQQRVLEDYVKAVEDLAERVERLTKHMQQLVESTVLAPLVKALQAFRGISLVSAVTIAAEVDDLKRFPTPQRFMSYVGLVPSEDSTGQRRKQGRITRCGNAHLRRIVVEAAWHYRHFPKMSKELRRRNQGVAEGVRQIAWKAQKRLNERMFHLLQAGKNAQKAVIAMARELAGFIWAVGQEKLLLEPKSK

SEQ ID NO: 72848 - protein, 410 aa, unidentified
MSQEVAVVFLGVDWAEEHHDVCLLDERGQVLGRARVANSLEGVSRIHALVADHAEEPEAVVVGIETDRGLLVQALVAAGYQIYAINPLAVDRYRDRHSVSGAKSDAADAKVLADLVRTDRSNHRPVAGDSQQVEAVKLLARAHQALVHTRQRQVNQLRSALHEFYPAALEAFKDDLGGRDAVAILEYAPTPSRGRSVSQAKLISALRKAGRERNLKARAVELQGILQQPHLEQPATLVAAYELIVRSAVRMIRELNAQTTELEDELTKSFELHPDAELYLSLPGLGFVLGARVIGEFGDDPNRYLDAKGRRAYSGLAPITKASGTRHVVLARNARNRHLADACYLWAFASLNASTGAHRYYRALRARGKSHPQALRALGSRWVSILHGCLRHRTLYSEDVAWPVQVAAAA

SEQ ID NO: 72849 - protein, 357 aa, unidentified
MESQEVKYVGVDCGKKSIEVVRINSENSLERRQFSTTESGINNLLQWLTLNDIVGLEAGSQSFRIAKSILNKGVQVIVLNPGNLATIYQSLKKTDKEDSLKIARLIQRFPIEELPVVPIPNDEEEDNRRLCTEQENWTRQLTQSKNRLHSLFTQAGLTHITKKHLRTKANREISVALLPSRYQKEAERILKVLDLVEQNLKLIEKEIQEALKKNKAYVQTIMSMPGIGMITSLAIMSYMGDCKRFSSAKQAAYYAGLVPRVDISGDTVRYGRIINRGCHSIRRVIVQAAWSLVRCQHGGKVKEFYQRLYLKKGAKKSIIATSRKMIEVLYAMIRTGKLFDSMPENILNRKLTQYGLM

SEQ ID NO: 72850 - protein, 406 aa, unidentified
MELVALYKRVIGLDVHQAQITACALIEELDGTTRIEQRQFGAFKRDRRALAEWAASLCPDEVVLESTGIYWKSPYAALEAAGIRAKVVNARHVKNVPGRKTDVGDAQWLATLARAGLLRGSFVPPAKWRELRLIARQRQKLVGQLASEKNRLHKVLTDSGVRLGVVVSDLHGQSARAMVKAIIAGQPPQEVLRLASRRLKASREEIFDALQGELSASHRFVLDELMRHIEEIEARIARFDARLLDALQEERNTLALLQTLPGVDLIGAAMLLVEIGTDMEAFGSADRLASWVGICPGNHESAGKRKSGRIRKGNLYVRRLLCEFAHAASRTQSVFKSKFQSLLVRRGYKRAIVALGHKILRTIFFMLKRHEYYRDSATDYEALSVRRNAPRWIKALTKFGFLPASA

SEQ ID NO: 72851 - protein, 353 aa, unidentified
MKIIGCDFHPSWQQVAWLDAETGETGECKLVNGDGEAERFYRALAEPALVGVEACGNSQWFLEMLQRLGHEAWIGDAAQIRASYVRKQKTDKRDAAHILRLLVEGRFPRIWVPSAGQRDVRQLLIHRHKLVEIRTRVKNGLQHLAMNRGMQKKSTLWSVAGQKALRELPLQGWAGRRRQDLLALLKSLDQQIGELDQAVEEEAQRDKMAQLLRTQPGVGPITALAFVVTMGDVTRFRRGKQVASYLGLIPRERSSGGRQRLGAISKQGNRFVRTLLVEAVHNVTRLDESFRKTYQQRCHRMAKGVAKVAAARKLAVRLYWMLRTNTAYPEIVRIENSPPVPLVSPSRRTRSKP

SEQ ID NO: 72852 - protein, 289 aa, unidentified
MRFYRGTHRYYCGVDLHARTMYLCLTDHQGTVLLHERIDCTPDAFFRAVEPYTDDLVVCAECIFCWYWLADLCAEHGITFILAHALYLKAIHGAKTKNDRVDFEKLVVLLRGGAIPQAYVYPPAMRATRDLLRRRLFFTRKRSELLSHVRNTFHQYNLPAPKGTLLPRKSRVNLPTRFQDPMVRKSVEADLELCATYDGIIRDLEKTVDRQAMSHDAHGLHLLQTTPGIGRILGLTILYEIHTIHRFPRVQHFSSYARLVKAPRESAGKRLGTSGAKIGNAHLKSVVSG

SEQ ID NO: 72853 - protein, 386 aa, unidentified
MPQLNDLSRSLAVLEQDSTLIAVIEMSQLSWLVAGIVPGIERQPLKKLTTDQEGLLQLLHRWRKEAVQAGSTIKRIVVAFEAGRDGFWLARWLRAHQIEAHVIHPSSVPVSREHRRAKTDRLDTELLKRAFLGWLRGEPNHCSMAAIPTIDDEDARRPSRERESLVKECTRIVNRMRANLARLGIRGFRPTLAHAADRLEALRTPEGAAVPPNTLAELQRDMAHLRFVKQQIKEIETARAERLERASGKRRNAMVRLLARVVGVGIETADMLVHEVFSRKLRDRKAVARYAGLTGAPDESGQKRRERGLAKAGNARVRRGMIQLAWGHLLHQRDSMLAEWYRARTADARGGTRKTMIVALARKLLIALWRLVTTGEAPTGLMLRPM

SEQ ID NO: 72854 - protein, 435 aa, unidentified
MSTLGVDLAVRAAHVATLSNDRGEVIWSRRRFTSHSHDLAALSAAVGPASELTVVMEPTRSAWVVVAAHFRATGAKVVMIAPEQSADLRSYYKKHTKNDRLDSLVLSRVPLLHPEGLREVSGLGPAEPLRRAVRRRVDIVDQRGACHQRIDAMLDLLGPAYHEALGSRGTKTSAVVLERYGNPKTLRRLGLSRLTDLVRKTSGGHLDAEYAARLLQAATQAITLWKGGGLDFDELAWDLAQEVRLINQLDVEIERLDARIAELYQLADPKGIVRSAPGVGPVLSAGIAGRLGDATRFANLAAVRSFSGIVPGVNQSGFTETRPGITKQGDPGLRRDLFLAAELARHQDPQLAAKYHRLIMERRLHHYSAICHLATTLVTRIAACMRSGQLYVVRDVDGTPVNSEEARAIIAKRYSIPPAARRRSRIPDAVSEPTR

SEQ ID NO: 72855 - protein, 389 aa, unidentified
MIYVGIDVAKDKHDCCILGSEADKLFPVFTIPNNKAGFDELYEKMFSVTDDKTKIKVGLEATGHYSLNLLGSLIDKGLPTCVINPLHTNLYRKGLSLRKTKTDKVDARSIAMMLMTNKTLKPYSDISYHNEELKSLTRYRFDKVQERAKLKSSVARLVNILFPKLEKLVPSLHMASVYSLLSKLPGASYITECHLTHLKNLLETASKGHYGRDMAITLRNTARDSIGSVIPAKSMELKHTIHLIKVMTEEIDEIEDSIKSIMDTCNSPIMTIPGISYRMGAIILAEIGDFTRFNYADQILAFAGLSPSTYQSGQLDSSYSHMEKRGSRYLRYALFNAAKFVCKWDENFGAYLSKKIGEGKHYNVAIGHATKKLVRTIYRMELTGEAYRR

SEQ ID NO: 72856 - protein, 405 aa, unidentified
MNAVGIDVSKGKSTVTIRKPGDVVLMSPCDIPHTQSAINDLIKQIKSLEGETKVCMEHTGRYYEPVATWLSDAGIFVSAVNPILIRDFGDDSLRTPKTDKADSKKIAHYTLDRWAKLKQYGIMDKTRNQLKTMNRQFGFYMAQKTAMKNNLIALIDQTYPGANDFFDSPARNDGSQKWVDFIHTYWHVDCVRSKSLNAFTEHYQNWCKRKNYNFSAEKAAKIYQISSDLIAVFPKDDITKMLIWQAVALLNTASKTVESLRSKMNELASTLPEYPVVMDMNGVGATLGPQLIAEIGDVSRFTHREALTAFAGVDPGKNDSGKHIQNSVQTSKKGSPYLRKALFQIMDSLIKRSPVDDPVYAFMDKKRSEGKPYYVYMTAGANKFLRIYYGRVREYLSNLSNNETI

SEQ ID NO: 72857 - protein, 381 aa, unidentified
MYYIGIDISKFKHDCAVIDDSGEIVTPSWSFTNDAEGFSQLKLLLNSLDTETGIGLESTGHYGMNLKLFLESNNFSFMEFNPLLINRFVKSKSLRKTKSDSIDCMMIAHYLMTVEYKPYPSSFYHTEKLKSLTRFRDSLIRFRSRQLVELTNILDKVFPEFKPFFGSRFSVTALYILSNYSSPEKIANMNSKSYEALRKLSRGRFSTVDFAKLKQLAKNTIGTTEDYLLLQMQIVLDIYRQLDSKVDETEVSIKECVSDMNPPMLSVPGIGIESAAVILAEFGDFSKFKNASQMLSFAGLEPGYFQSGTSETTGKMVKHGSSYLRYALMNCAQTVVNYEPTFAMFSSKKRAEGKPHRVALLKSCYVSSTHCKLKTLHMMPI

SEQ ID NO: 72858 - protein, 385 aa, unidentified
MSTTQAVPQAKNTAMQSELYMSFELGDKSWKLTVSDGQRGPSRYSVRAGDTEAVLDCVRRAKERCRLSPQAAVHSCYEAGRDGWWLHRWLTQQGIDNVVVDAASIEVNRRVRRPKTDRLDGDKLLTMLRRHHTGEHVWSVLREPTPDQEDARRAHRELARLTQERVAHMNRIRSLLVLHNLRPQVVIGGRDWANWWANHRGLVPPMLCNEIERECIRLALVKQQTRVLESARRDELAEGKHPLVAQLARLRAIGPKGAWVLVKEVFGWRRFANRREVAGCLGLTPTPYDSGDSQIEQGIRKAGNRRARTMLVELAWRWLRLQPNSVLTQWFNRRFTGNGKPMRRVSIVALARRLAIALWRYLEHGAIPAGALLRPATPCWARNTF

SEQ ID NO: 72859 - protein, 364 aa, unidentified
MKDLFLRFIGIDLGKRSMEVHIIDSNEKHSTWNCQTDTSGRLRLLSKLKPTDIIAMEACPLAFILYTMIKESLGSKVFVLNPLGLAMIYKSTKKTDREDAAKLAWVIQRLPEEELPIVIVPSKDEQNLRYLVAEQVELTQNRTREINRLHALFTQDGITTIKKKDLVNSKSRERKYSLLSASIKERALRYEKIIYVLEENLENVETQILKEVSVHERTPFLLSIPGVGPNLIAAYLGYLGTGERFTANTITAYAGLLPRLDYSGESNKYGPITKRGCPILRRAIVQAAWALVRSKNGGCLQNKYFELKTRKGYSKALVAIARKLLKTMWLLSTRKTMYLNLDPAKYRAKLDKYEVRWAGVLAVA

SEQ ID NO: 72860 - protein, 341 aa, unidentified
MDKELYFGVDVSKKTLDLAYYDGETIDWKNAHIKVSNDDAGFKKIGSWVAKVGKDFDTFLLCMEYTGLYNQNFRLWLESKEYIYGMVEPRKMHRFEPDLDDDQRSLDRIKTDELDAFRIAIYCEQNHKKILRNPSKLPSPVYFKLKRLLAERKQNTKQSTLYKQQLHDICAYDTDLSVERKKLLLKNMQENQKAIDKEIDSYMNEDTSIRKNYNLLTSIPGIGRIIALETIVLTENFTAISNPRKYACYIGIAPFKKESGTSVRKKTGVSKKGFSEAKADLSIAVLSAIRNNPSIRDYWIRKRKEKCGGIVLNAVKFKLVLRMFAVIKRGTPYVETDAYKN

SEQ ID NO: 72861 - protein, 341 aa, unidentified
MDYYAGIDVSLECSSVCVVDASGKIIREAKVASEPQALIDWFHALGFELVRIGLEAGPLSQWLHTAMKRESLTVELLETRHVRDAFKAMTVKSDRNDARNIAQLMRLGWFRPVHCKSLAAQEVRAMLTARKLVQSKLLDVENSLRGILRGFGLKVGKTTKTNFTSRIEELVKAHPNLKVIAKALLRAHAVLLAEFNAFEKRVRKLSALDAKARLLMSTPAVGSIVSLTFASAIDDPTRFTSSKKAGPLFGLTPKKYQSGETDYSGRISKTGDASVREALYEAAHVMLTKPLKGCSKLKSWAMQIAKRAGLRKAKVALARKLAVIMLCMLKNNMPFNPARAA

SEQ ID NO: 72862 - protein, 350 aa, unidentified
MEHTTIAVDLAKSVFQVAVSERPGHVDHERRLSVERLLPFFAQQPPATVVLEACGSAHHWARQLQPFGHEVRLLPAHDVARYVRRNKTDRTDAKALLEASRNAEIHAVPVKTIAVQAVASLHRLRSTWVATRTARLNTIRGLLREFGHFIPVGASKVVPHVRALLAEPTSAVPDSLRPLLERACDEIGTVETDIHAVERQLASIAGEMAAVPLLQTIPGIGVLTATALVALVGDIHRFPSGRHFASFLGLTPKEHSSALRRRLGGISKQGDVYLRTLLVHAARSILWRAKLAAQPAAYQRWARSAQARRGHNVAAVAVANKLARTVWAVWSTHRPFTAESQNTSDTPVVG

SEQ ID NO: 72863 - protein, 354 aa, unidentified
MDQHSTPVYAGIDTHADTHHLAVIDAHGRPLEDHQIPATGPGYRRSLTLLGRWPDVAAVGVECTGSYGAAITRTLLSAGYRVVEVNRPNRFDRRARGKTDTFDAYSAAEAVLAGRASAAPKGADGLVEALRVLRTTRSSALRERTATINQIKALLVAGPERVRAKYRGLSNLKLIAALAASRPPAAPVTAQEATAYALRTLARRHQLLTDQIQDLTTHLRRLLEAHAPALMDVYGAGPDTVAQLLITAGDHPERLRSEAHFAALTGASPIPASSGKTNRHRLNRGGDRQANSALYHIVIVRMRYDQTTKDYVARRTAEGRTKAEIIRCLKRYLARRLYPLIRQTLRADQLVLTA

SEQ ID NO: 72864 - protein, 402 aa, unidentified
MNSVGIDISKGRSTVAVMRPFGEVVISPFEVRHTDSELSELARQLKSLNGETRVVMEATGNYHAPVAKLLHDAGLYVSVINAKLVHGYGNNDLRRVKTDRKDAVKLANYGLDRWLTLPRYVPEEDTRLLLKNCYRQYRQYSKVQTVLKNNLISLLDTVFPNVNRLFSSPARADGSEKWVDFVAEFWHCGCICERSEKAFVSKYQKWCKKHGYNFGEEKACAIYAEASGHIGVTPKSETTKLLVEQAVAQLRATSTALAALKHEMQSLASMLPEYPVVMDMFGVGPTLGPQLIAEIGDVRRFYSKKALVAYAGLDAPPNDSGDVTGRHKSMSKIGASSLRRTLFLVMTVYLQNAPLDEPVYQFMDRKRAEGKPYRVYMMASANKFLRIYYATVKAYLELLERT

SEQ ID NO: 72865 - protein, 336 aa, unidentified
MSENSMPKIATISKSEENAAQENQPELFLGIDVSKGWIDACLLPSKQTEHVDTDEKSLEAWAKTLPENITLVVMEATGGLEIPVFAALAARQIPVAVVNPFPTRNFAKSLNLRKKTDKIDAYVLALFAERMRPEARPFPSEQQQELDDILARRGQLTGMIASEKNRKQQARNTKVLARIEAHIAWLDAEVADCDKKISGLIAANPAWNNLDKLLQTMPGVGPGAAHALICHLPELGHAGRRALASLTGVAPFEHQSGLWRGKSFCSGGRATLRSFLFMAARSASRWNPPIRDFYERLRSRGKADKVAIVACVRKMLNILNTMVKTGQEWQSVQKNA

SEQ ID NO: 72866 - protein, 409 aa, unidentified
MLFAGDDWAEDHHDVELMDSSGRTLARARVPEGAAGMARLHAMIGEHLGQDGEAEEVRIGIETDRGLWVAALAAAGYTVYGINPLQAARYRERHGVSGAKSDTADAHMLADMVRTDSHQLRPVAGDSARAQAVKVVARTHKTLIWERTRHVQRLRHQLRDYFPAALEAFEDLDAADTLELLARAPDPALAARLSTAQISAALNRARRRHIAAKAAAIRAALRSPQLGQPPAVTAACAAAVRALAAVITTLNEQIKIIEGQVDAHFSQHPDAEIIVSQPGLGPILGARVLAEFGDDPHRYTTPKARKNYAATSPITRQSGKRKTVMARYVHNDRLRDALDGQAFAALTASPGARAYYDRQRARGLGHRAALRQLANRLVGILHGCLKTRTLYDEQTAWPQHASQEIKTAA

SEQ ID NO: 72867 - protein, 451 aa, unidentified
MTLLYRRCAGMDVHKKSLSVCVRIRTARDQCQTETAVFRTFTHDLEQMAEWLKQRQVRHVAMESTGVYWKPIWNVLESSKWKFSLVLVNPQQVRALPGKKTDREDSERIARYLQEGLLRSSFVPPQPTRDLRELTRRRTHLEGDRNRVINRIGRLLETANVKLGSVLSNIVGKSGRAILDAIASGETKPENLADHIVGRVKCTREEFVLALEGRYTDHFRWLLRQLLQELTTLDRRVMEVDLRIGRLAAEHTNLIARLCTLPGVDLITAYTLIAEIGTDMSRFPDAKHLASWAGLCPGNSESAGKRFSGRTRKGDRYLRRMLVQNAWAVAHMNDCALTALFLRVAARAGMKKAAMAVAHRILILAYYIIRDGSRYQEQGGDIYDRRDPERTAKRLTRRLQRIGFEVTLKPHSRPIHPESLPGQACERCNHWGIPCIHARPRIGNALKRPSD

SEQ ID NO: 72868 - protein, 345 aa, unidentified
MSEVYADRQFVGMDLHRRRSVVVRMSETGEHLETVRILNDRDSLAEVISRAGESPEVVLEATYGWYWAVDALAELGATVHLAHPLGVKAFSYRRVKNDQRDAFDLADLLRMGRLPHAWIAPPATRELRELVRHRAKLVAMRSQCKAHVHAVLAKGGIWVPMSDLFGVEGNLLLDNVTMPAPYRERIASLRRFIEGFDAEIDLFTALAQRRLTHDAGYTAIQQIPGIGPVLAAVFVAEIGDVHRFAGPAQLTCWAGLTPSHHESDTTVRRGRITKQGSRLVRWAAIESVKMLPQTSRIGAIRERVAHRRGNRNIGAVAAARRQLELVFYALRDHHVRALHRSPQAV

SEQ ID NO: 72869 - protein, 339 aa, unidentified
MNVVIGVDPHKASHTAVAIDEAEDELSSVKVRATRRQVDQLVSWAEPFEKRIWAIESAGGLGYLLAQQLVARGEEVLDVPATLASRIRVLATGRSNKNDPNDALSVAIAAFRAPNLRSVEVADHAEVLRLLAKRNGDLGSHRTRVVCRLHALLAELAPGGIAKELYVSDAERLMAKITPETPAEQVRYDLALELLDDVRRLDAQTKESHRRIRVAVKASGTSVTEIFGVGPIIAAQLIGYTGDVRRFANRDAFASYNGTAPIELSSGGRVVHRLSQRGNRQLNHAVHMAAICQIRQVASEGRAYFERKVAEGKTKKEAVRSLKRQVSNAVYRQLILDAR

SEQ ID NO: 72870 - protein, 345 aa, unidentified
MKYIGIDYHKQYFVATMMNEQGEVIRRDKASTDRASIRRYFQNADPCEETKAVMEACYGWEYFYDEASDLVDELIMAHPLKTRLIAEARIKTDTIDSETLAHLLRADLIPQAYAPDSETRGRKNLLRYRSSLTAMKVRIKNIIHSVLTRNHIEDTGFTSLSDKFGKQGLSYLRSVTLKGEDAAIVNNYLDLLEETERKIKAAEKQIRAVCREDKICTLLQSIPGIGPILAVTIRYEIDDIGRFMSAGKLSSYAGLVPSTYSSGNRTYQGKITKQGNKWLRWAMIEAAQKAPSNDLWLRGFYQRISKHGKKIARVAVARKLLEIIYRVWKEENPYYKKGTVALPFV

SEQ ID NO: 72871 - protein, 346 aa, unidentified
MKHSVGLDVSVKETAICIVDEAGKVVREGKVATEPQAIIAFLSSAGVEYARIGLEAGPLSQWLVNGLSEAGLPVICVETRHMKAVLKAQQVNKSDRNDARGIAQMMRVGLYKPVHVKTLASQQARMLLTSRKLLRDKLQDMENELRGTLRNFGLKVGVVSPGHFEARIKELVAGQPPLEMIVVPLLTVRRVVREQLAKLDKMVLDQVRDDKLCRRLMTVPGVGPIVALTFRATVDQAQRFARSKTVGAHFGLAPRRFQSGERDYDGGVSKCGDAMMRTALYEAAQVLLTRTRTWSWLKAWGMQVARRRGAKKAIVALARRLAIVMHRMWVDGTEFRWRKEADTAAT

SEQ ID NO: 72872 - protein, 293 aa, unidentified
MEQITTVGIDLAKNVFSLHGVDAAGRTVFRRTVRRDRLVETVASLSPCLIGMEACSGAHEWGRRFERHGHTVKLMAPKFVAPYRKSEKNDGNDAEAVCEAVTRPSMRFVPVKSVEQQALLTLHRVRYGFVVERTAIINRLRGLLSEFGVVLALRSVTVRRQAAQAAEALPDLARRAIADLLEQLRHLDERIDSYDAEIHTQARLSAPARRLMQIRGIGPTTALAIVATVGDARAFKNGRQFAAWIGLVPGQYSTGGRSRLGHISKRGDAYLRNLLVQGARSVLQTAPVHQDRL

SEQ ID NO: 72873 - protein, 481 aa, unidentified
MSKQEKHSNQLGEERTAAGSGKRGRKRKGMCLEDRPIREANAAGIDIGAREIFVAVPPDRDEHPVRVFSTFTEDLEKMAQWLVSCGITTVAMESTGVYWIPPYDVLEQHGVKPCLVDARGMKNVPGRRTDWHECQWIQFLHSVGLLRAAFRPEGDVCAVRSMMRHRTELVEMTSQHIQHMHKALTQMNVQIQHVISDLTGVTGLAIVDAILAGQRDPVALAKLRDPHIKASEETIRKSLVGNWRPEHLFTLQQSRKSYQHYQEQIRSCDEEIEKFLMAFVPWVDPAERPLPPDRKRKQRGRKKKNVNSKTGFDLRTESYKLFGVDLTQIPGLMAMVLTLFSEVGRDMSRWPTAGQFVSWLALCPDNDISGGRVLWRGMRRVHNRAGDLFRMAAYSLHHDQTPLGDYLRRMKSKLGPAGATTATAHKIAIIFYTMVKKQVEYDATLWAQRDAQREKRFEAKLKRQAQQLGYKLVPIEEKPAA

SEQ ID NO: 72874 - protein, 338 aa, unidentified
MTITTVGIDLAKNVFELCGLDADGEVVFRRRVRRETLLKAVGELPACIIGVEACTGAFYWQRRFEELGHEVRIIAAQHVKPFARRQKNDRNDAEAIAVAIRQPRMRFVPKKTIEQQDIQTLHRARRRLVNHRTALVCQMRGILLDRGIAFGQSITRARRMIPEIIADRSNELSDMCRDIIASLLAFMHEIDARIREFDRRIDQVFRENRACQRIAKIRGVGPKTATAVIASVGTGRDFDNGRHMAAWLGLVPRQHSSGNRRVLMGISKRGDRHLRTLLVHGARAVVRTAAGKTDRFSLWVNDLKERRGTNRAIIAVANKNARVIWALLNSGEEYRPAV

SEQ ID NO: 72875 - protein, 343 aa, unidentified
MQAITTIGLDIAKSVFQVHGVDADGQVVIRRQLKRRYVLAFFQKLSPCLVGIEACASSHHWSRELKALGHTVRLMPPAYVKPYVKRQKNDMADAEAICEAVTRANMRFVPTKTPEQQSCLMLHRTRHLLIRQQTAVINSIRAHLAEFGIVAPVGRRGVEELLHVVADPADKRVPDIARECLAALGAHLRRLKDQILEFDRMIMAWHRSNETSKRLDAIPGVGPMLATALVAGVADPKAFRSGRNFSAWIGLVPKQHSSGGKDRLGSISKQGDRYLRGLFVAGALAVIRYAKIHGTKHRPWLTALLARKPTKVAAIALANKLARMAWAMMAKGERYKTPVALAA

SEQ ID NO: 72876 - protein, 313 aa, unidentified
MLIIGCDYHPGFQQIACVETTTGELQERRLGHSQEAEAFYRELKACGARVRVGMEASGQSRWFERLLAELQFELWIGDAAQIRAKRVRKQKTDRQDAQHILTLLMENRFPQIWVPSWENRDLRQLLWHRHRMVQTRTRLMNQLQAVALNEGLRRKKGLWREAGRKQLESFRLAPWASRRRRDLLEMVDRLSPMIAELTQAVEQEAAKYPAAQRLATHPGVGPLTALAFVLIIGQAERFRCGNQVASYVGLVPAEDSSGERQRLGHISKQGNTLLRFLLVEAAQIFPSGAAARKKNRQGGDGAAAGRSSLLDVA

SEQ ID NO: 72877 - protein, 401 aa, unidentified
MKRLSGGIDVGSESHHIIILDEEDNVLYNKKVSHKLNEFAENINLFKQIEKKEGGKISFALEGKNGYSAPFDRILLDEGFTLYNVDNLKLKRFREAFAGEWKDDQRDALMLSKMLKLKDHLNSEREKVFIKIEKPSPVTESLKLLSLHQQTLIDEKIRLINRLGKKLLEVSPQILKLGKLKNKKMIAILAKYPDFSKYKRITLKSLLKIEGIGKKQAPLLLKRLNNLEYIPGLTDIYKTIILSFAKRILELQKEIKDIDKSLDELGNPSREVKHLKTIPGVAIKLASRLIGEIGDINRFPTEKQLAIYCGVACVNNNSGKITKAKAVYKANKKCKQTLITLAGCSIHFNPQSKTYYLKKRKEGKSHNHTLRCLARQLIKVIYRMLTEDRDYIIKKELKKAA

SEQ ID NO: 72878 - protein, 351 aa, unidentified
MIIIGVDYHPSDQYIAFVDTETGECGERRLNHSDQEAEKFYRELAQRGVSVRVGMEATGYSRWFERLLTELGIEVWIGDAAEIKTRRVRKQKTDRNDAQLLLKLLLDNNFPKIWVPRPENRDLRQLLWHRHRLVQMRTRIMNQLQALAMNEGQRRKKKLWSEAGRAQLEKLPLAPWASRRRQDLLELLDRMNPPIQELTGAAEQEAKKRCEVLRLMTHPGVGPLTALAFVLIIGTPERFQCGKQIGSYVGLIPEEDSSAGHQRLGHITKQGSSLLRFLWGEAVQAAARCDADWRRRYMHLAVRRQRNIAKVAMARRLAVRLYWMWRNGWEYAEWVKFGSHAGQLGTGHGVK

SEQ ID NO: 72879 - protein, 433 aa, unidentified
MSKFFNNPVVGIDVSADFSYAAILAPNGDVYKKSFRINHDVKGFTHLVNEIKKVEEEFNMKTGLFMESTGVYHLSLFHYLKNNFDNTFVINPLVTKCNKNVAIRKVKNDKKDALSIANIGKFQNIKLSQPNDLDNFLLKNLIREYYKLRDSCSTYKKKLSADLRVIFPNYNTVFSDSTSNTSLELLSNYPTPKSVMDAPKQDVMTILLEKSKKSVTWSEKIYSKLITIAEEAKIIGVPLRGLAIKISSSLAVIKAFKSQIDNLLNEINTLIESSEFPESIKENIKLINSIPGIGHLTAITLIAEIGDINGFIKPKHLVAFFGIDSSVNQSGKFQGTQCKISKRGTRIGRRALYAVALASIRRSRTGIPINKVLLEYYQVNLKGKKAKVALVAIMHKILNYIFAVLRNQSPFEQRDPKLHKQIFLENKCLNTAA

SEQ ID NO: 72880 - protein, 409 aa, unidentified
MQVVYPCCAGLDVHKKSVYACVLSFGKDGRKRQQVRSFSTMTQDLLGLGDWLKEAGVTHVAMEATGVYWRPVWAILEGQFELLLVNPHHIKAVPGRKTDVRDCEWIADLLQHGLLRASFVPPSEIQDLRDLTRYRAELVQSQNRVANRIQKLLEQANVKLGSVASNVLGLSGRQMMEAMIAGEEDPNRLADLAQKALRKKIPELRVALNGKVRDHHRFMLKEYLDEWTALGERIGRMEIEIRRRIVPFERAVTLWQSIPGIDWVTAANLVAEIGVNMEQFPSAQHLASWAGLCPGNNESAGKRMSGQTRQGNKWLRRTLCQASWAVTRKKDCYLSAQFRRIAARRGMKRAVMAVAHSMLVIAYTMLKRDQTYKELGGAYLEQINKDQLQRYYMKRLQRLGLTVTVQPAA

SEQ ID NO: 72881 - protein, 388 aa, unidentified
MIYCGIDVAKRKHAVSLLDEKGAQVKPVFMIENTRDGFDRLNLELEAVADSPLTVGLEATGHYWLALYEELSQRGHTLIVLNPLQVAAYRRSGVRKVKNDRHDALWIADFIRIANLPATSQNIPVILQMRELSRFRYRLSEQIGDCKRKILTILDRVFPEYEQLFSSVFLKSSRQVLKTAVSAQEFADYDLSELSFLLHKASRGRFGEAQAERMQTAARQSVGIGFLTNAVRVEMGCLLDQIDLLEEQRTQVDQVIEQLMQQIPQHITSIPGIGPVTGAAILSEIGDIQRFEAPEKLVAYAGLDATVYQTGQFEASEAHISKRGSPYLRHALWQAAMMAAQYDPDLMAFYQTKRQQGKHHNVVIGAVCRKLIARIFIVLKEQRPYIIR

SEQ ID NO: 72882 - protein, 325 aa, unidentified
MNELALGLDVAKSTIEVCLLRAGEKRGERFSIENSIAGGQKLINWLPGVRPEDVRVCLEPTGKYSRVIAAFLHKSGFKVSQVNSYAVLHHGRSKNLRNKTDRIDAYLLADYCLKENPPVWEPPSPSQTELAEIQARMDEVEDMLMQEKNRLAAGGASAVVQKDIQEHIAQLLVRKAALEGAATDLVETDAMLSANLKIVKSIIGIGEKSAIALLSAVRYDRFQKPRSVGCFAGLTPRRYESGKSVHKPECISRRGSNQLRKRLYFPAMVAMQCNPQMRAFAERLRTQGKAPKVIICAVMRKLLVLTATLVRKQVFYDPTFGLANT

SEQ ID NO: 72883 - protein, 421 aa, unidentified
MIQAVLQCCAGIDVGKKFVIVCVMTGPADGEATEQSRKYGTNTADLENLRGWLRACGCTHVVMESTGSYWKPIFNVLEMTPGMQVVLANSKLVKNLRGHKTDPSDSRWLAHLLRHGMIRPSFIPPLAVRELREFTRRRKQLVRAGTQERNRVLKVLEDANIKIGNVLSDVFGLSGQLMLQALVEGQATAEQVAQLAQKTARRKIPKIQAAIEGHRMTDIQRTLIRFSMAHLAFLEEQIVELDQQIVRHIEQAQLQRAYALLQTIPGVKKLAAAAIVAELGTKMDVFGTGPRCSSWAGLCPGNNESAGKRKRAPVLRGNPWLRTTLIECAWAASGKKQSAFEMRYQRLAPRIGHKRAIVAVAHSLVLTVFDVLSRDQPYTGFGADTMPATRVQRLIRHHSKRAATLRRWLVRISKDNHSRAT

SEQ ID NO: 72884 - protein, 344 aa, unidentified
MGKIGTSPTDIQNLCKRLRSKSSQVSIVYEAGPCGYGLYRRLVKSGFDCMVCAPSLIPKKPGERVKTDRRDAIRLVRSLRAGDLSAVYVPGIEDEAFRDLARAWASARDDLRHARQRLKSFLLVHGVHYVGRADWGPAHRRRLSKYSFESPWRQLAFDEHRRTIEDRQAQCERLESALKEAVTEWRLYPVVEALQAMRGIQFITAVGLISELGDLTRFEHPRQLMSWFGITPSEYSSGGSRHQGSITKAGNSYARKLLVEAAWSYRHPARISPAIQKRQENLPRPVIDRAWDAQLRLCKRYRKLQAKGKNVNITIVAVARELAGFIWDMGRIAMSVAQQPQCHK

SEQ ID NO: 72885 - protein, 386 aa, unidentified
MPKPNDLSRSLTAFEQNSTLIAVIEMSLSSWLVSGIVPGIKRHPLKKLDTEKEALLKLLHRWRDEAVKAGCKITRITVAFEAGRDGFWLARWLRTQGIEAYVIHPNSVAVSREHRRAKTDRLDTELLKRAFLGWLRGEPDHCSMAAIPTLAEEDARRPNRERENLVGQRTRIINRMKACLVRFGIRNFKPTLRKASEQLEALNTPEGTPLPPNTLAEKRRDMARLRFVIDQIKEIEAARLKQLKQAPKEGSQAMVLLLARVIGVGIETADMLVHEILSRNLRDQRVVARYAGLTGAPDESGKKRKEKGLAKAGNARVRRGMIQLAWRFLQFQKDSALAQWYRTVTKDARGAIRKTMIVALARKLLIALWRMVTTGQMPENVALRAA

SEQ ID NO: 72886 - protein, 343 aa, unidentified
MEITIKWRFIVGIDISKHTLDISLFDRQTGDRNMLQVPNTQEGFHNLAEWMEDHEVTQSQTILISEHTGRYGEHLLRWSTRTGWPHAVVKTTALEKVSWEHHRKTDEFDASQLAEYGARFNDRLQLAEAPKPTQAQLKRLQAERRKMVDRRAALKSKLGEAEFHDADMSQLTKMWNQQVELLTQHIEQLEYTMDELIRQDPILCRRHQTLRTAPGIGPVIARFWLCMFAGKDQLNPRKISSRFGFAPHGRSSGSSVKSPDRSTGYGNSELRRLMHQAARSVANHKPHYHQYYEKKINEGKHELVAINNIINKLIRLYCAMWNNRAEYDPKHIQKMIKKYKKSA

SEQ ID NO: 72887 - protein, 466 aa, unidentified
MENNYILYVGMDVSKGKADAAILKVSDRRSVKPKFLRKKLSFKFVKSEVASFLETVRSYSDVNCTSICFALEVTGIYSTNVYDYIKANLYENESIKFLNTDFVNQWRIAHNIAKSDPLDAQTISTIIGTDSDVQFVNDNVFENKNGYQDLKALVHRHYQIKKIYSQEINRLIAQCDCLFPELQYVFEPKSAAFITVLSSYPTTHDIINASRVEVFDVVYEATKHRCSMDKVDKLFELCQDTLVPNDISSYGKSIILDLVENIKNIKGQLKSIERYIKDIASLNPAYKLLLTITGCGPITAATVIAETGDIKRFKNADCFVSYSGTSPRNKRSGTSVETMGKISKKGSRYLRHAIYMIAEFARRHNPVLKHQFERIKNGNKKRHKLANIAIANKIARYIYSIMKNESSFVIFHEHIMKLPEETQNTFFNSISLDFPKNTRKQIYQYSDINGELHRFVYIKTDEMIPA

SEQ ID NO: 72888 - protein, 428 aa, unidentified
MNCNTQNAKIASITEKTLIVGIDVGSETHYARAFDWRNYEYTKKPLEFSNTETGFQTFKAWVEELAERHGKTAVIPGMEPTGHYWFALGKFLQDNGMKPVHVNPHHVKKSKELDDNNPNKNDRKDPKTIAALVNEGRFSYPYMPVGIYAEIRSLSNLRFQTQEELTRIKNRLARWFSIYFPEYKDVYGDLKAVSGRMVLKVAPLPEDILKLGAEGVNQIWRDRKLRGAGMKRAKALLSAAEHSVGSKEAPEAARMELENLLSDMDVHASRMEELLRRIEEKLKEIPYLDNLLAIKGIGMVTVSGFIAEVGDIGRFDNPKQLQKLAGYAVVANDSGKHNGESRISYRGRKRLRYVLYEAAISLVGKNAEFREIHEYYRTRKENPLKKMQSVVAVACKALRIFYAVLTKGIQYDPERLLGDIRRPQVQTA

SEQ ID NO: 72889 - protein, 538 aa, unidentified
MSRTCTRRSSARRPDADTASARPAPGAAMDPADATPQPTLPVNGLASPGITPIGVGIDTSRYGHYATFLRPDLQPAAADLAFVESAQGYAQLRQRLGGIAAKYGQVHFHFRVDVAGRYADNLLAFLWALPEPKTVSCGDPQRNKNYRAALFGHKKSDPVESAAAARYALTEKPQPMPVVSPQIRLLGHLASRLEAQARQVTRLVNQLHNLLARAFPELALVVADISAGWVLELLDRYPTAAKLARARRSALERIPYLPDQHIPHLLESARISVASLSGPVAEELVRAQVRQVREAHVRQKSLEKMLAKAYRQLPEPNQLDTIIGFGEVTAAILTAKIVDPQRFVEPGKLVSYVGIFPVEAASGIDREGKPRAPKRMVMCPRGNDLVRRYLYMAALSAAQHNPAVRPLYQRARAKHPNHPGIAVGHAMRKLLHLALAVWKTGKAFNPEHYPWDQAAHLEGSAQPEPATAAATSTQAAGHNPETVPESSVVTAACATANVAAQPVVGNFTSAEADSASAPADGPALPPADAASPWIDFDH

SEQ ID NO: 72890 - protein, 334 aa, unidentified
MDKITTVGIDLAKRVFALHGVDGTGRVVLKKTVRREQLVELVAKLPPCLIGMEACSGAHAWARQFEQFGHTVRLMAPVFVAPYRKSGKNDGNDAEAICEAVSRPSMRFVPVKSAEQQALLALHRVRQGFIEERTALINRLRAVLTEFGVVLPNRTQWVRRAAIAAAEPLPVLARQAVEDLRAHLVQLDERIGTYDRQIETQARASEAAQRLMQVRGIGPLTAVAIVATVGNARDFKSGRQFAAWLGLVPRQNSSGGKSRLGHISRRGDGYLRMLLVQGARSVLHTAARHTDHLSRWGLSLQARRGYHKALVAIAAKNARIAWALLSKNQTMRTA

SEQ ID NO: 72891 - protein, 416 aa, unidentified
MTFKVVRFICGGMDVHKNLIVATIGTTDRQTLITEYIQQSFSTFYSDLIRLKEWFISHDCYDVCMESTGKYWIPIYNVLETELNICLTHPKYVKTIKGKKTDKRDSKWICDLYKCDLVKHSFIPKKEIREMREIARYRCKLVYMRSSERNRYQNCLTVSNISLASAVSDPFGKTATNIMKELMQSEVIEDDKILKLIHKNCKDKDKILDSLQGYHIESDQRFKMDTVMNHIEYLDKQIQACEAELIKRAYPLRDYFQHITHIKGISALSAILIVSEIGTDMNQFESDKQLVNWAGLSPANNESANKKKSVRISKAGQYLKPLLVQCALSSIKDKNSYFGIKYCRIKKRRGHKKAIIAIARMMLVCIYHMILTGEEFNPCDYESLTNPKPKKEPIMTVESALQFLKDSNFDFSSIQL

SEQ ID NO: 72892 - protein, 526 aa, unidentified
MASSNKHSKLRACDEGRYTSDGLKNVTLDDGTRVITSPSNDIKRPVCGAVDVHKSVLMAAACVTDGESLSAVFYVRQFTASNSDIRLMAEWFASYGVQDVCMESTGKYWIPVYDILEHNGLKPILTHPKYVKQAKGKKTDFRDAIHIANLFRMDLVVASFIPPADIRDLRELCRYRLKLTYIRTSEKNRFQNSMTISKVRLDSVFTDPFGKSASDIMSYLIHTDPDEVSDEKILSFVRHGVKASTEEILDSIHGYEFIGAQRDKLEVIQTHMDDLNKCIDMIDEKLSYYRLKYSKVIRHLVTMIGISEESALYILGEIGADMSVWRNSDSLASWAGLSPANNSSAGKKKTTKIGKGGHYLKPLMVQCALAAIKSTKKHPYFYYKYLTLKKRRGHKKAIIAIARKMLVAIYHMIRDDKDFAPIDYEQVVTRKQSQKELNLTNIIEFLGEHGVDPETIRTVETQCSQASQAGEGAKTDKPKKSPQKKQPKSKTAATPTEQKPAKRRGRPPKSPQTKSQSSTQPAPATA

SEQ ID NO: 72893 - protein, 339 aa, unidentified
MNYVGADLHKKSITFCVMDQDRKVLSRKTLYCVEPHQITAYLESFRPFEIVVEATASYLWFVDLIQPLARRVVLANPIKLRIIAESTKKTDRLDAQILAEFLARDMIPEAHQSTPRQRQHRALIRQRHYLRGRTTSVKNKIRRILSDYNADRKDLFSAQRGLTYIQQVPLSDADRFVIDQLWAEYLYHDRQIGELRARIKAFAAQAPAREKEAREVLKTIPYVGPVTIEVVVSELGDVQRFPNAKAASAYSGLVPRVRQTGGKKSKELSITKQGSGMLRWALVESAWRLVGHSQRWAQVYQRIKKHSGAKRAIVAVARKLMCVIYAMLKTMTPYKVITP

SEQ ID NO: 72894 - protein, 392 aa, unidentified
MVCVGIDVAKDKHDCFILSSEGDVLADVFTIDNNLDGFETLLQRIHSCTRPTDSIKVGLEATGHYSYNILGFLLDKGLATYVINPLHTNLYRKSLSLRQTKTDRIDARTIASMLMSDVDLKSYTDTAYHNEELKSLTRYRFDKVRERAQLKQSVSRLVNILFPELETLVPTLHMASVYAMLSEFPGAKQIACVHLTHFKTVLSDASRGRYDRDKAVEIREAARRSIGSSMPAKSLELQHTIRLIYELDKEIDEIEAAIKKIVDEMAPPILTIPGISYRMGAMILAEIGDFSRFDSPDKLLAYAGLSPSTYESGKLKATGSYAHMEKRGSRYLRYALFNATKYVCYWEPSFAAYLAKKRAEGKHYNVAISHAAKKLVRLIFALQKSGKAFLPA

SEQ ID NO: 72895 - protein, 460 aa, unidentified
MALDHHFDEPTAIRTNLDAIFVSLELSRSTWLITSVSPGGGEKMSKRGVSAGNVAALLTRLSELKQKAFARTGKSFHVVAIQEAGLDGFWIHRVLQSEGVESHVVDPASIATSRRRRRAKTDKIDGEALVRALLAYKRGEPRVCAMVRAPTPEEEDRRRLCRERKTLTNERVQHVNRIKGLLFSQGISDYQPLRRNRHQRLDELKTGDARPLPPHVKAQISRELDRLELLLEQIKAVEIERDALISAVKPEEMNADAVRSPPAMLTKLNGIGPEFAAVLWSEGLYRSFANRRQVAAYAGLAPTPWQSGSVRHEQGVSKAGNSRLRTTMLQLAWLWLRHQPQSALTLWFHERVKRNSGRLRKTTIVALARKLLVVQIVDRASDSTIGRVLKKHPQAPYEEVLGDSAGGQRRLRRGNGGGAGGLPAAARPQAPAHLSRRDVEAADFRDARPDPHEAGEPRPL

SEQ ID NO: 72896 - protein, 351 aa, unidentified
MEKIIRIGMDTSKHVFQLHGVTAAEEPLLRKALRRKEMIAFFTALPPTEVAIEACGASHHWARLLGSLGHEVKLIPPQYSKPYVKRGKNDAADAEALCEAMSRPTMRFVPVKSAEQQAGLMLMKVRDRLIRNRTQLANAIRGHAAEFGLTAAKGMAHIVPLLERIATDETLPLLARELFALQQGELARLEVEIATLDARLKAWHHADECSRRLVEIPAVGPIIAALLTMKTPAPELFRSGRDFAAWIGLTPRDHSTAGKARLGVITRAGGEALRSALVVGATALLQHVRAGRSPHASPWLLDLLKRKPPKLAAIALANKTARIAWKLMVTGERYQPRSAPRSMVAPIAIAA

SEQ ID NO: 72897 - protein, 419 aa, unidentified
MKVLHRRCAGLDVHKAEVVACARVLAGRKVVHEVRRFGTTTRELMALAAWLKSLEVTHVAMEATGVYWKPVWHILEADFTLILANAQHVRVVLEARLRHDVPGRKSDVNDATWIADLLAHGLISSSFVPPQPIRELRDLTRTRQQAVGEAVRHQHRIEKILQDANIKLSSVLSDPMGVSGRRMLAAMAAGETDAGKIAELGSPRLQCGRGALIEALSGRVSEHHRYLIGWHLRLLDEIEAKIAELDQRIEAQIAPFRAAIERLTGIPGIKQVAASAIIAEIGADMSIFPTAGHLLSWARIVPRLDESAGKKRSRRVKKGGAWLKPVLVQCARAAARKRDSYYGAQYRRLKARIGDQKAIIAVAASILTAIYHMLRDGTEHADLGAAYLSRREGDSKAIAHQLARRIRALGYQVDLREAA

SEQ ID NO: 72898 - protein, 453 aa, unidentified
MAARNARVSHKPGKSRAALTITHPNAAGIDIGSASHFVAVPPDRDEEPVREFPSFTVDLNAIADWLAACGVDTVAMESTGVYWIPLFELLESRGFTVLLVNARHVKNVSGRKSDVLDCQWLQQLMTYGLLSGAFRPAEQVCVLRSLWRQRAMLLKSQARDVQHMQKALTQMNIQLTNVISDVVGETGQKILRAIVAGERDGQVLGALKNARIQASVEEIAKSLQGNWRAEHLFALKQALGAFDFIGTQLTECDQEIEAQLQRLQTHDGEPAKGKKRGRARNAPKFDLRTQLFKMCGVDLTRIDGIDVTTALAVISETGADMSRFPTVGHFASWMGLCPGTKITGGKVMSGKTKRCANRAAQALRLAAAALRTSRSALGAYFRRMCSRMDKPKAVTAAAHKLARLIYTMLTKGEEYTDQGQEYYEERYRERVLRQLSQRANKLGMQLVAVAQPA

SEQ ID NO: 72899 - protein, 338 aa, unidentified
MKVVTIGLDLAKHIFQVHGADAEGRPLLRRRLRRSQVARFFANVPPCVVGMEACCGAHYWSRVIGRFGHTVRLIAPQFVKPYVKSNKNDANDAEAICEAVSRPQMRFVPAKSVEQQDIQSLHRVRSRLVSSRTQLANQIRGLLTEYGIVLPQHVSQLRRGLPLILEDATNELTAFSRRLFASLYDELLSLEEKIQAIDEQIWAVYQASEPCQRIAAVEGIGPLIATALVAAMSDGKTFTNGRQFAAWLGLVPRQYSSGGKARLLGISKRGDPYLRTLLIHGARSVVYRASQKTDRRSLWIADKQRRLGTSKACVAVANKNARIVWSLIARGEVYRRAA

SEQ ID NO: 72900 - protein, 361 aa, unidentified
MRSPRIWVGLDVGADESMACGTDDGGSVLFEQRLPTSAAALHALLKPDKRRIGLIGLESGPFGIVLTRSLRKLGYPVAMFEARQASKFLAIRRNKTDGNDARGLADIARLGRDSVSEVRVKSPENQRLRSILTTRQSLVRLRLQTEATMRSLLRLNGGRLVGSTSAAVFRKNVTDELNRLRKTEKVDLTEDIEPLFALSLAMRTYLTALDEKLARKAEQDPICRRFLAIPGIGPISALCFLSSIDDPARFRRNADVGAYLGLVPVVRQSGQSVTRLRISKAGDAMTRGLLSTAALHHLRVGKTSLANWGAGLSERLGKRGVQTALARRLAVTMLAMWKSGEPFDPDRGAFQAQIAQEDTVA

SEQ ID NO: 72901 - protein, 343 aa, unidentified
MSLSMIGLDTAKSVFQIHGVNETGKAELKRKVRRSELIAFFEKQESCTVVMEACGAAHHWARILSGLGHTVKLLVPEAVKPFVKKGKKNDAADAAAICEAAARPNAQFVPAKTVEQQGILALHTARALLVKQQTMLANAIRGLATEFGHVVPKGLHNLELLVALVDADAAMPEQARQAIAELHQRCGELAKGIQSCEAEIVKHARNDPTARRLATIPGIGPITASLIAATVVDISLFKTARQFAAWLGLVPRQNSTGGKTRLGRITKTGNREIRKLLVLGATSMVGRAEGWHSAVGGWLRNILQRRPARLVTVALANKMARIAWAVMTRNEVYRPQGGVAAKA

SEQ ID NO: 72902 - protein, 372 aa, unidentified
MSKVRFVGLDVHAETIAVAVAEPGGEVRALGLIPNRPESIRKLMTKLGPAEHLRVCYEAGPTGYVLYWQLTGLGVHCDVVAPTLVPVKAGDRVKTDRRDAQKLARSYRAGDLTPVWVPDTAHEALRDVVRAREAAKKDQLRARHRLSKFLLRHGRRPATAMKPWTQAHLTWVKTVHFEHAAQEATLLDYLHEVEHLGDRIARLERAIDEAVKTSPAPMRAVIDALQALRGIAVITAATIVTEVGELSRFASPRQLMGYSGAVATEDSSGARTRRGGITKTGNAHLRRVVIEAAWAYRGRPAVGPALRKRQASVSQDVKEIAWKAQHRLHARYRTLTARGKCKQQVVTAVGRELLGFIWAIGRVVEGRQAVAA

SEQ ID NO: 72903 - protein, 427 aa, unidentified
MKHDNVTKYAEFCQFRREIRGSTEHVIVGIDVAKDRHHAFFGTAMGRTLLKRLLFDNTAAGFAKLLERVDQLKARYGLSKAAFALEPTGNYHKPLAHWLLEQGQLLVLVSHHAIAENRQTLDGRWDKNDTKDSANVADLVSQGKCQFFEKPAADLLELRTLLSLRKRLKKQEHSIRMQIRNGLVARHFPELDRHWGSCLTENLAIVRWCLDPRTIAAMAFNDFLRLVTTRDRGLRQLKRLRTIHELAASSIGCPVNEATVFEAQTLVERFYDLRERIEQTEAQIESICRRFAAYRWLRTIPGFGPYVCSQVLAKIGDPHRFKGRKQLIRLAGFDLNAKRSGKRSRTAVPVISKRGNSDLRYALYQAALIASIQDTGFRALYTGYLKGREKERGIRTKMRVKLAAKMLVIAWTIMRTETGFDPSMLGV

SEQ ID NO: 72904 - protein, 368 aa, unidentified
MKKNITVTGKQTTRTFAEKKYTVGLDLGDRWSWYCVLDEGGEVVFESKLSTTAKALREVFGGMPHSRVALETGMHSPWISRLLKELGHEVIVAQARKVRLIGESRKKDDRLDARTLARLARIDPELLGPIQHRSARAQADLIMIRARAGLVRSRTALINAARGLTKSYGERLRGCNPRNMDAEKRQGLSAELQKALEPLLRAIESLSQQILAYNERIEQMARESYPEVARLRQVKGVGTLIALTYVLTLEDPQRFTKSRDAGCYVGLQPARRNSGSSTPQLHISKEGDPYLRTLLVQGAQHILGPFGDDSDLRRWGLKLAERGGKNGKKRAVIGVARKLAVLLHRLWVSGEAYEPLRNQRTMALPTAA

SEQ ID NO: 72905 - protein, 371 aa, unidentified
MKKSSMFIGLDVHKNSIEIAIAEADRDGEVRSYGGIDGTLDALDKVIRKLVSKGCNLHFVYEAGPCGYDVYRHLTAQGFDCVVVAPSKIPRQSGNRIKNDRRDAQMLARLHRAGELTAVYVPFVEDEAMRDLTRAREDAKAVEKKAKQRILAFLLRHGHRYSGKSSWSRAHFRWISILKMPHPAQQIVLQESLDALAECTRRVDRLTEQIQTLSPQWRLFPVTQALQSMRGVSLIVATTTIAEIGDLTRFGRPAELMSYLGLVPSEHSSGQKTRRGSITKTGNGHVRRVLVEAAWAYRLPARVSRKLLIRQEGLSQEVCAISWKAQLRLCARYKRFTANGKSHQLVVTAIARELCAFMWAIAHEVQGPVKM

SEQ ID NO: 72906 - protein, 313 aa, unidentified
MKKTICGVDVSKARLDVCIEPGRRFASFDNDAAGIAELGRFCREHAVTLVVMEASGGYERRAFVELWETGISCALTNPRNVRRYAEAMGILEKTDRIDSSIIARFADAKSLAPTPLPSQAQQRLKALVARLRQVTDDLTVQKQRRASLLDNPEMLASLDEVIALLKRQSRSLEGEIASMIDDDPLWAKLAETWREVKGVAGRTVARLHAEIPEIGTLSNKAIAKLVGLAPIANDSGKRKGKRPTRGGRAGVRSILFLVAATAARYDRSLAEFRDRLLMAGKEKMVIRIALARKLLVRLNAKARDARAQYANAT

SEQ ID NO: 72907 - protein, 403 aa, unidentified
MNPSAPMQKATCGLDIASTSACASVHDSEGKILHELELPATRQGEDRLLALLPAGTAVFMESTGRYHLTWARRLTQAGIVVHVVNALLAKRLMGAANALRQNKTDRIDAWELARMGRLHGADLTTYRFQEDAPRVGLRTLCHVRVQQRRLLTDTLKSAAGLLGTMLPEANFLSLAENRKLAALFCKIDSLARLKGLRSATLHHYVCSKAELLGAVLRQPLSAPALFDALWPALQAQLRLIESLRNQQLALLAQIRQAIVAAHRERDVELALTVPGYGTKCASTLVACMPVDLRSWGSKPKVARKLQAYFGCDPKRRESGNWKGKVCMSKRGIELARTALFQAATCAMLHDPEMKAFFDRKKAEGKFYLVCVSHVMRIQLRRLVAVLYDQKPFVRHSAPFQLAT

SEQ ID NO: 72908 - protein, 301 aa, unidentified
MFVGIDVSKDHLDVCTDPARPTSRRFNTPGDVESLAMELQQATLVIVEATGGYENILVTVLLEHGIPVARVNPRQVRDFAKSYNILSKTDRMDATILSRFAKERQTDLHRLSLDTERDAFKALVRCRQALIEQQTQVKNMAHQADATVKTSLARVLTALKTEIDTLDQLIGQALSQYDESAVLIAVKGVGPVLTSTLISQLPELGKLNHKQIASLVGVAPFNCDSGRYRGKRRVWGGRADIRHVLYMAANIARRYDAKMKAFFETLLAKGKPFKVALVACMRKLLVILNAKMRDHYLAQAT

SEQ ID NO: 72909 - protein, 348 aa, unidentified
MKIIGCDFHPGYQQIAMVDDVTGEMLERRLEHEKGEARRFYQGLQGEVVRVGMEAVGNAQWFERMLEELGQELWIGDAAQIRRLVVRRQKTDRRDARHILQLLSDERFPRLWVPSVAIRDARQLLRHRQKLVEMRTQVKNQLQHLALNQGVQRKRQLWSREGRAVLEGLPLEGWTARRRNDLLAMLDRLQAQVEELDRAVRQEAEQRPEVRLLMTHPGVGPVVGLAYALTLGPVSRFPRGKQVASYLGLIPSEHSSGGRQKLGSISKQGNTMMRTLLVEAAQNAARFDEELRREYRRLAARKHKALAKVMVARKLAVRMYWMLRENQPYTPHPVARMQGSPSHSVVAG

SEQ ID NO: 72910 - protein, 342 aa, unidentified
MDRTLYALDLAKQVFQVYWVEDRSRSREKRLKRAQVLEFFARVAPARVAMEACGSAHYWGRELQKLGHEVMLIHPTYVRAFVKTNKTDAADARAIWTAARQPDMRAVPVKTVEQQTVLALHRVREGRRDMRTALMNQLRGLLAEYGVVLRRGREAGLTELRSRLAELEAKLPATMVTLLREQCEWLRQLDQAVGELEGRIRASHAGDERYAALTSIPGIGPLGASAYLAQVGNGRQFRSGRQASASVGIVPRQYGTGGAVRLGPISKRGDPYLRTLLIHGARSVIAKSKHHSPWLKQLLARRPKNVAAVALANKNVRIAWALLTRGGRYDPDHQPRALAGAH

SEQ ID NO: 72911 - protein, 328 aa, unidentified
MRKDKEYVGVDVSKERLDMVVYSTGETHSFGNHDADIAKATIWLKQVIPAIIVMEATGGMEVPLYVALQEADLPVAVVNPRHIRDFARSMGVLAKTDKVDAKVLARYAATIQPETRPGPDEKARQLKALVTRRRQLGEMIVAETNRARAIRDKAVKQRIQVHIDWLKQELANIDRSISRMIKEDPVWHAKGKLLQSVPGVGPVLSATIIADLPELGILSPKKIAALVGVAPFNRDSGKRRGERSIWGGRCKVRQSLYMAALSAVRFNPTIQTFYNRLVASGKEKKVAITACMRKLVTILNAMLKHNSYWSCHHATFTDTCIPSAKTVA

SEQ ID NO: 72912 - protein, 371 aa, unidentified
MKTNSTACGVTASVSGTTQQPGDNLAAPESVCAVVGIDLGDRHSKYCVLDVEGTSIGDGIVATTPAALRLLFSGKGRMRIAVEVGTHSPWVSRLLEELGHEVIVANPRKLRLITESDAKNDHADAALLARLAYAGPDLLSPVEHRSASVQNDLAVTARARMVTTVRGIVKSTGARLKVCSTGAFASKALNDCPEPLRLALLPLLRLIQQMTAEIRLYDRIVTQKAQEAYPETAAILTIPGVGALTALTLVLLLNNDKRRVSRSRDLGSYFGLCPRQRDSGQHVSQLGITKAGDNLMRKLAVQCAHFMLGRFGKDSALRRWGLSLALRGGKNAKKRAVVAVARKLVILMHRLWSTQETFDATRGLRAEPQAA

SEQ ID NO: 72913 - protein, 389 aa, unidentified
MYTDPTRTSQATTSPTIVPTLYVAVELGGSSWKLAATTGLGQPPRLRTLPARALPRALDELARAKARFHLDPAAPVVSCYEAGRDGFWLHHALPAHAVRNHVVDSSSIEGNRRQRRAKTDRLDARKLVSMLLRYAEGDRHTWHVVRAPSSEAEDQRQLHRELKTAQRERLAAVTRVESLLVTQGLTLRLSGRETVAEVRAAVAALRRWDATPVPPALQTRLVREWGQVVALTAQLRALARERAELLRTGDAPALAAVRQLMRLKGVGVATAWIYVMELFAWRTFRNRRELGALTGLAPTPDQSGTGRQRELGMGKAGNRWVRAVAVEGAWCWLRHQPQSELSQWFERRFARGGSRQRRIGIVAVARKLLTALEHYLRTGTPPAGAAVRA

SEQ ID NO: 72914 - protein, 323 aa, unidentified
MNKDIKYFGLDISHLVFDVTDSEGNYYQFKNNGLGFKKFAKLLNSKSHCVMEATGYYHYQLAYYLLESGIKVSVENPLSVKRFIQMKLSKIKTDKSDSRLICEYAEQVDLKLWKGNSKDEMECLQLTRALSVYTKQSTMLKNKIHGEAVLGSPSKAVVTSLKRSLRQLTKEMEYLEDKLLVLVKQSHQDLLTRLKSIPGIGIKTAIMLVVLTGGFERFSSASELCSYAGLTPVIRQSGSSVKGRPRISKIGNQKLRNLLFMCSFNACKYNKACRDLYERIVAKGKSKKLALIAVCNKLLKQAFAIAKSGLIYDATYKSTLVKN

SEQ ID NO: 72915 - protein, 398 aa, unidentified
MSRMWAGIDSGKGHHHCLALDPSGKTLLSRRVANDEPELLRLIGDVLALTGGEQVTWAIDMTGGEPALLLALLINHGQEVLYVPGRLVNRASDGYRGEGKTDARDAYVIADQARMRRDLRPIRPGDEIAIELKLLTGRRGDLVEDRTRVVNRLRGTLLSMFPALERALDLTNTGPLKLLAGYQTPGSIRRTGSARLTKWLANRKVRNARSLAETAVEAAERQHTAVPGEKTIARLVHTLAEEVMALNGQISEVDKLIEGRFREHELADIVQSVPGIGAVLGAEFLASVGGSLAGFDSPDALAAFAGVAPAPRDSGKVSGNLHRPNNYHRRLQRVFYTSALVSVQFDPNSRKFYDRKRAEGKKHVQAVLALARRRVNVLWALIRDRRCYEVTPAAITAA

SEQ ID NO: 72916 - protein, 353 aa, unidentified
MTKMADEGCRVTVGIDTHAEVHVAAALDERGRLLGVESFPTTAKGHDRLERWARAFGVIEAVGIEGTGAWGAGVSRYFAAAGYRVVEVDRPDRKTRRQRGKSDPIDAEAAARAVQSGTAAGTPKTRSGRVEAIRALRVARRSGMKARSQAAHQLHCLVSTAPDQLRDQLRTLRLAELVEAAARFRPGDPADPLQATKIALRAIARRYQRLDAEINDLDALLDPLVAATAPNLVALNGVGTDVAGQLLVTAGDNPDRLRSQAAFSHLCGASPIPASSGRTTRHRLNRGGDRAANAALYRIVLCRLRWDDRTRAYVERRTKEGLTKPEIIRCLKRYIAREVYNHLPRQNPALDSP

SEQ ID NO: 72917 - protein, 341 aa, unidentified
MQVTTIGLDIAKNVFQVHGIDAQEKVVVRKQLRRGQVIRFFEELSPCLIGLEACATSHYWARELTKLGHEVRLMPAKDVKAYIKRNKNDAADAEAICEAVRRPTMRFVQVKSVEQQAQLMQHRARDLLMHQRTQLINAMRSHLAELGIIAPQGREGIKELLAIVAKDADTHLPNDARASLIVLAAQLQALQTTIGAIEKRIMVQHRANKDSRRLQTIPGIGPIGASAIATTVTNPKVFRSGRDFAAWIGLVPRQMSTGGKAKLGPISKQGDRYLRRILVLGAVSTLRRAKLNPERYPWVTQLLARRPFKVVAVALANKMARIAWALLISGKTCRSARFAAA

SEQ ID NO: 72918 - protein, 416 aa, unidentified
MDVVHPRCCGLDVHKQTVVACVLLSGPTGGPPRREVRTFGTMTDDLLMLADWLAAEGITHVAMEATGSYWKPIWNVLEGAFDLLLANAQHIKAVPGRKTDVKDAEWIADLLRYGLLRPSFVPDRAQRELRELTRYRTSLVQERAAEASRLQKTLEGANLKLGDVASNVLGRSARAMLEQLVAGQTDAVALAQLARGRLREKIPQLERALAGRVAPHQRFLLAQQLAHLAYLDAAIERVSAEVAERLRPLGATLERLDTIPGVGRRTAEILLAEIGPDMGRFPTAGHLASWAGMCPGHDESAGKRRSGKTRQGSPWLRQALVEAAQAAGRTRGTYLSAQYHRLAARRGKKKAVIAVGHTILVTAYYLLAREQAYEDLGPDYFERRDRAAVERRSIRRLEALGYRVTLEPLAPAPSAA

SEQ ID NO: 72919 - protein, 409 aa, unidentified
MLFVGDDWAEDHHDIEIEDEAGRRLARKRLPEGLGGIAQLHALIAAHLPAGWADLPAGEAGCQVKVGIETERGRWVQALVAAGYEVFALNPMSVARYRERHSTSGAKSDAADAHLLAEIVRVDRAHHRPVAGDSPQADAVKLAARAHQSLVWDRSRHVLRLRAALREFFPAALEAFADLDAPDTLELLGAAPDPDAAAALSQPRIAAALRRANRRSAAARATQIRSVLRAPQLRQPAAVQAAYAAIVSAQVTLIRALNSQIDELAEMVAAQFGQHQDADIYASQPGLGIILGSRILAEFGDDPHRFASAKARKNYAGTAPITRASGKRKVILARYARNRRLADALHQWAFCAMRGSPGAKAYYHALRARGTGHQAALRQLANRLVGILHGCLKTRTAYNEHTAWSHQQQ

SEQ ID NO: 72920 - protein, 325 aa, unidentified
MQNQTIIGIDVSAATLDICVTGKQQQSVVINNESASIRKFFNSYKDECLLIGMENTGRYNWALYDVLKDLHHQVYVVSPLHLKKSMGLVRGKNDKIDAIRIASFISKNHADIPQWKPSSPAIQKLKILLTERNSRIKSRRQLLKQQYDYAKMRHLGLDKPLQKLNVQQLTLIDAQIAHIERDMEILIKADEQMNQQAKLIRSVPGVGKVLCWMMLVKTENFTTITEPRKMACYSGVVPFDNQSGTSIRGKQRVSSYADKAIKAVLHLAAMSAIRLKNELRDYYLRKVAEGKNKMSALNAVRNKIVHRIFAVIKNQTPYKTNLVIS

SEQ ID NO: 72921 - protein, 325 aa, unidentified
MIGIDVSKATLAVCVRLADSGIELDHEFPNTATGHHKLHAWLKKHGEQTGWVCMESTGPYHLNVAQFLHQHRYRVSVVNPKRIKAYGESRLSRGKTDKADARLIAEFGEKETLPVWQPPAQERVALKDLQDRLDELEESLRQHRQRREHCQNPSVLASLEREEAFIKQEIEALKREQGHLCDKTPCLREEIELLCTIPGVGELTATRLVARIDISLFDHAASFAAFFGVTPREHSSGTSVHKKARMSKLGSKRLRTALYFPAMQATRYNAQVQALYDRLVAKGHPKKSALGAAMRKLAQQIYGVWSSRRPYDATHGLPSLESFTA

SEQ ID NO: 72922 - protein, 317 aa, unidentified
MACVVGVDVAKARLDVCVHEGEAWQVANDPQGIAALVARLAALPVTLVVAEATGGWEGAMVAAMHAAGVAVAVLNPRQVRDFARSTGQLAKTDRLDARVLAHFASAVRPAAQPAPDPATQVLRAVLGRRTEVVAMLAGERMRLYTAAPAVVAHINAHCRWLEGARDALDAELTAAIAASAAWRAQREVLTSVPGVGPVLATTLMTCLLELGRVSGKETAALVGVAPLACDSGTRRGRRAVWGGRGEVRRVRYMATLRATRWNPVIQDYYARLRAGGKAFKVAMVACMRKLPTILNAMLKQGTPWRTATTSPGACAGR

SEQ ID NO: 72923 - protein, 347 aa, unidentified
MKKFVGVDLHKQRIVVCVVNQARQVLTSARFTHAESNKLAAWLKALGSFDLVLEATASYEWFVKLVEPLAGRVLLAHPRKMRIIAESTRKSDKVDARVLAEFLALDMIPPAHRPTPRQRAHRKLVRRRVYVRARQTSIKNRIRHVAAEYNADRKELFTSEGLKYLRGLKLDPVDRWLVQRLLRELKLYRDELKAVDRQLAAFARTAPAAEAGHRALLNSIPAVGPVTRETFLAEVAGPERFGSQKKLTSYVGLAPDSASRPASATTWASRTAARRFCGWVLHQAAWQLVRRLVALATDLRAAGPARGKKKAITAIARRLLCLMLAVIRSGRPYQERPPATPATPAVA

SEQ ID NO: 72924 - protein, 343 aa, unidentified
MKLSRVGIDLAKNVYQLHGVGRSGKTVWKRRLKRHQWFKVLLDTAGPECEIGMEACAGAHHWGRQLQSRGYTVKLIPPQFVKPYVKSNKSDAKDAEAICEAMGRPNMRFVTVKRVEQQDIQATHRVRAELMTQRTAKANQIRGLVAEYGLVAPKHLSSLRAAIPCWLEDAENGLTGDFRALLQGVWTDLLLLDDRVGEMDQKIKQLADNNEDCVRLQQLRGVGPMTSTAMIATVGDARQYPKSRQMAAAIGITPKQHSSGDRDRLLGISKRGDVYLRTLMIHGARAVVARAKHKDDRLSRWVTNIANKKHPNVAAVALANKTARMAWAMLRHGTDYDPDFAIR

SEQ ID NO: 72925 - protein, 346 aa, unidentified
MTHSGIDLGRRMSQICILKQDGEVIERRVRTERDRFAAAFKAHPGARILIEAGTESEWVARCLEELGHQVIVADPNYAPMYGQRHRRVKTDRRDARALAEACRLGAYRPAHRTSEAQRHVRWQIAVRETLVRTRARSIVLIGSLLRQAGLHLPGGGAETFLNRLNGLSLPEPLQQAIAPLLPVLERLNQQVATTDRTLEELARNDPQVRRLDTAPGIGPVTAATFVAILDRADRFVGPHQLEAYLGLVPREYSSGERQVRGRITKGGNTRLRCLLIEAAWSIVNYPKPETAALRQWTLRIAGRRGMPRAVVALARRLAGVLFAMMRDETVYDSSRLTSRSRPARVA

SEQ ID NO: 72926 - protein, 356 aa, unidentified
MTKALMAGIDLHSNNVVIGIVDQAGGRVKHQKLACDLEQIKQFLRPFKSRLKSVAVESTYNWYWLVDGLRELGYPVVLANPAKMEQYGGIKHADDKNDAYFLAELQRLNILPTGYIYDPQLRPVRDLLRRRVGLVHQRTALLLSFKSLYTRMTGQELKLSRLKGMAMAEAQTLYEHPANQLIATVQKEHIQQLDESVARIERVVLQSARALPCYRRLNTLPGVGRILGMTISLEVGEIGRFKGAGNFASYCRAVAARRTSNEKNKGANNRKCGNKYLSWAFVEAANFAKRYDEPCRRWFDRKAAQTNTIVATKALACKLAKAAWHVMAHQVDYDGQKVFGRAADSQTKGLAPANRN

SEQ ID NO: 72927 - protein, 418 aa, unidentified
MKVVYPICCGVDVHKTFFVATIITTKVITPHYSKKRFSTFNNSILQFKQWLIDNNCFDMCMESTGKYYVPVLNLLEDIIRVTIANPKWVRAVKGNKDDVKDSKWIGDLFRLGLVPGSYIPDKPIRILREYTRYRSKLVSCQSSEKNRFQNALTVCNVALDAVVSDMFGKSATSITDYLISCDSFDPDYCSSLLHTSLKKKADIVIESIEGYQMTKEQKERMVMVRSHLKFVHQSIATLDEKLDKMVVPYENAITLLCTIPGVDRTSAITIISEIGTDMSQFASSKRLCCWAGLTPGNNESAGKKKSVRITRAGVYLKPALVQVAHAAVKSNKSSYYKTKYECISKRRGKKRATIAIARMILTAIYHMFVTGEVFNPSDLYKIDMPQEMQEKQKEKAVKQAIKLLTSLGIMQVPDTTVA

SEQ ID NO: 72928 - protein, 425 aa, unidentified
MGEGMVAGIDWASEVHVACVLDGHGAVASRFSFTHDGPGIAAMAGRLRAADVAGVAIERGDGPVVEALMEAGLAVFVVPSRQIKGLRSRYGSAGNKDDRFDAYVLADTLRSDGHRWKPLRPDTDPTRALRAACRSRKDLVETRVQVLGQLRANLELAFPGAIGLFTKLYSTISLAFLQRFPTAAKAAWLSPKRLASWLRSMGYTGGVSARILHDRLAAAAPGLAGAEGEARGQITLALVTVIGTLNTQIAALDAEIGRLFAAHPDQHIFASLPRSGTIRAANLLAEIGDCRQRFPTDDALAALAGACPSTRQSGKRTPGRVPLVLQQETPCRGDGLRQRQPHGRPLGRRHLRRRDRPRLPALARHPDPGPRVAAHHLALLAGRHRLRPSPPPQPPLDIGHSYSGASRTLLARLRLRPSSFAVLQA

SEQ ID NO: 72929 - protein, 414 aa, unidentified
MSDVIYERCAGIDVHKKMIVVALRIGIKVQIRQFGTLTHELKEMTSWLMENECQMAAMESSGSYWKPLYNIFELEGLPAMVVNAHHMKAVPGRKTDVKDAEWIAKLLSQGLLRASFIPDREQREMRELTRFRKNQMEERARNLNRLQKMLEGANIKLSGFVSEIDGKSATKFLELIIGNPDFTAQDVKSRMHGSLKASAEELFLSLEGIITPLQRELFGHVMKIIREQTTQIEYTDSLIQSHTKEVYSEAAKALTSIPGIGMVSAQQIVAEIGYDMRRFPTAAHLCNWAGICPGNNESAEKRKNGKTNYANKTLKSTLTQCAQSAKKSKKSFFCAQYQRIVVRRGKNRATVAVAHSMLIAIYHVLKGAAFIDLGAEYYMKFNKEKKINSYVKQLAKLGVIIPDDDLRSYMQGVA

SEQ ID NO: 72930 - protein, 341 aa, unidentified
MKNKSFIGIDISKNVIDASIFCKGAPIKDFPHAVFNNSHKGFGEMCTWLKKNHVVLSNSLFGMEFTGSYSMELEKFLNARKYQFCMLSTHVVKHYPMGPKDKNDKIDSAKIADFLYRYDGTECVKPYKMPDKTMQRFKALMNERKFLVEQRTCFMNRRQLCTTKEGAQLYDSYIKQLSHDIENIELKVQNLLETDNSLSTTYKNLLTIPGIGFVNAMNVIVITRNFTAFDTARQYASYIGVAPHFHTSGTSVRWRPRPSARCDGQAKADLSMAASVAVQYDAELQSFYNHKLGDKQDSDTKRKALNAVKFKLVLRMFAIGKQNREWEPLDSKSSNEKLAIS

SEQ ID NO: 72931 - protein, 425 aa, unidentified
MNYKQNEKINQVKESTLVVGIDIGSTTQYARAFDWRGIELGKVFTFSNSREGFEAFKAWMQHLQDKYRKSDVIVGIEPTGHYWFDLGAYLEDEGILLVMVNPYAVKQTKELDDNSQSKNDRKDPKVIAKLVTEGRYSAPYTPDGVYADLRIMVANRKRLIREMTQIKNRFARWFAIYFPEYTDVFGDYEAQSSMLLLKKVCTPEAIVELGAEKINQIWRDAKLRAVGMKRATTLCETAKRSIGLKKGSSAARYEMKLLLEDYEYKKAQLDAVMEEIEKLCRKIPESEQMLAIKGIGVITVAGFLAEVGDVRRFESPRQIQKLAGLSLRENSSGKHKGQTTISKRGRSKLRGVLFNAAIPLIAKNPEFKSLHEYYTTRANNPLKKKQSVIAISCKLIRVFYAILAKGVTYDAQKLISDIHRQPQVA

SEQ ID NO: 72932 - protein, 311 aa, unidentified
MKNSIGIDISKAHIDVCHSISGETARFANTPTGLRAFGRWSAATGQPDLLVYEATGPYHRALERTFAGRLPLVKVNPLQARRFAQACGTRAKTDRVDARMLAAMGTALDLTPDQPVARDQRELKELQIARNALVKDSTRLKNRLKTQQLAFNRRQTKARLKQVQRQLKQLDGELNRRVRAAGHRARALDILRSIPSIGQVAAITILIECPEIGTLQRKQIASLAGLAPMTRQSGKWRGQAFIQGGRKFLRDSLYMPALVATRFNPDLAAKYNEMVNAGKPRKVALAAIMRRLIELANALVKDNRKWQPAID

SEQ ID NO: 72933 - protein, 354 aa, unidentified
MPQPNDLSRSLAALEQDSTLIVVIEMSHLSSLVARIVPCIERHPAKKLEPDEVALLQLLRRWSDEATKAGHVIARTVVAFEAGRDGFWLARWLRARGVEAHVIHPTSVAVSREHRRAKTDRLDTELLKRAFLGWLRGERDHCSMAAIPTLEEEDAKRPNRERESLVGERSRIVNRMKGTLARLGIRGFKPTLRTAPEQLERLHTPEDTLLPPNTLAELRRGMARLRFVADQIREIEETRLERLEQQPEEGAHAMVRLLARVIGVGIETADMLVHEVLSRNLRDRRAVARYAGLTGSPDESGIRRREKGLARSGNARVRRGMIQLAWRFLIFQKARWRNGSGLGPRMPALARARQ

SEQ ID NO: 72934 - protein, 348 aa, unidentified
MAIAMIGLDTAKNLFQVHGVDEGGRAVLRRKLHRSELVGFFEQQPRCTVFLEACGAGHHWGRLLSGFGHEVKLIAPEAVRPFVKKGRKNDAADAAALCVAGTRPETRFVPIKSVEQQAVLALHAARSLLVKQQTMLANALRGLAGEFGVTVPRGLHKLEELAALVSAEESIPAAGRQAMAELHAHGRAVAERLATLEERIVRHVRRDATARRLATIPGIGPITASLIAATVGDHVGAFRSARHFAAWLGLVPRQHSTGGRTRLGGITKAGNAEIRRLLVLGATSMVWRATCWDSKAGLWVRGVLARRPVRLVTVALANKLARIAWALMTRGEVYQAQGRAPAAAATVA

SEQ ID NO: 72935 - protein, 409 aa, unidentified
MVVQAVPVTLSTVVVAVDVGKTEFAFSVTDATRTLLLKPRTGCPMTGPSLAQVVADIARLLPIDAVVKVGIEAAGHYHRPLLMTGAWPGTWEVLELNPGHVTEQRRVLGKRTIKTDVIDLQAMTELLLAGRGQPVRDRSLVFGELTAWSAHRVGRVALRTATKNQLLGHLDRTFPGLTLALPNVLATKVGRLVATEFPDPARLAALGSSRFIRFGATRGLQIRRPVADRLVQAARDALPTTDAAVARAVLAADLALLDDLDAQVDQATEQLARLLPRSPFAPLLTVPGWGAVRAGNYGGALGDPARFDNHRQIYRTAGLNPIQYESAGRRRDSVISREGSVELRRALIDLGVGLWLSEPAAKVYGAQLRDRGKKGLVIACAMANRANRIAFALVRDQSTYDPSRWIREG

SEQ ID NO: 72936 - protein, 460 aa, unidentified
MIRRLVGVDLGIASAHTVRVLAEDGREVCRRRCEPTVDSLARVEAAALAGTPAGTVLEVVMEPTGPAWLPVAVFFTARGHLVFRVSSAKAADLRRFLSRHAKSNGIDADTLARLPLVDPAGLHPLELPGAEAAALDRRVRVTDRLTVLAARHKTRIKDLTRQLLPCSPLTGELGVADLAVLERWADPRALLAAGPARLTALIVKASHGKLGAERAQQWRAAATAAVELYADHPAIAFTDLAAEVGTEVRLLRATQAELAGHAQERETAYRYTDLGGLARSLPGVAEVGGPVLVAGMGRPGRFGSGAAFKSYTGLAPRASETGNTDRKGQPMSKAGSSLLRTTLIRAADNARRQDPQLARIYYTQMVERGAEHLKAVCVVAGALAERAWAVMNRQMPYVICDIDGTPVTPEQAKRIIARDFTVPDEVRRRRRSSKTPGRTAQQPTTSSKGGRPLSKPHTAA

SEQ ID NO: 72937 - protein, 340 aa, unidentified
MTDTTTLAATTLAATTLAATTLAATSTLTAGIDVSKATLDLAIHGQKNITHVPNTPAGWTLLASQLATAGVGRVGLEATGGYERGVMEHLRAQGLAVTRLQPFQVKAFGMLHLRRAKTDRIDAALIAACTHVLGEPGTMAPDGRLEALADHLAFIEQVEEDIARFKTRLEHVTDKRLRRAVEANIKRETTRRLAEIKRLLAELRRHADLSRRLDLALSVPSVAERTAPALIIRMPELGQVSREQAAALAGLAPFTRQSGKWQGQTHIGGGRVRLRRSLYAAAFPGAHHWNKALMDMHARLRARGMAHTSIIVACARKLLIQVNAVVARGTPWEARTATPA

SEQ ID NO: 72938 - protein, 360 aa, unidentified
MKIVGCDFHPSWQQVAVFDPETGEIAELKLSNGDGEAERFYRELEAPALIGIEACGNSQWFIELAERLGHVVWVGDAAQIRASYVRKQKTDRRDAGHILKLLMESRFPRLWTPTAAQRDLRQLLIHRHKLVEIRTRVKNGLQHLALNRGFPKQSSRLCGVRGRAYMEKLPLTGWTARRREDLLKLLAELDKHLGELDEAVQRAAGEHPQARLLMTQPGVGPITSLAFVLTIGDVSRFKHSNQVASYLGLIPREHSSGGKQRLGSISKQGNRFMRQLLVESVQTVNRLDEGFRKQYAARCHHKAKGVAKVAAARKLAVRLYWMLRQNVGYPEIARIESSPRVALRGESHLATVNGRSRIQQ

SEQ ID NO: 72939 - protein, 319 aa, unidentified
MTDPATFVGIDVSKDTLDVHVRPQGHAFAVPNGPQGLADLVARLAGARPALVALEATGGLGHACAAALAAAGHPVAVVNPRQARDFAKATGRLAKTDAIDAEGLALFAERVRPEPRPLPGEQAREFEALLQRRRQLLEMRAAERNRLGAAAAAPVRASLQAHIDWLSKQLEKVDKELGAAVEASPVWRAKDELLRGIPGIGPAVSRTLLAALPELGALTRQQIAALAGLAPVSRDSGRRKGQRSIGGGRAEVRSLLYMAALSAARYNPALRGFSERLRRAGKAAKVRLVAVARKLLTIANAVLRDGRRWDAALCGTERG

SEQ ID NO: 72940 - protein, 402 aa, unidentified
MTYDFVIGMDVGKYFHHACVLDPQGRQIPSKRINQHEGSLRKLFGKFLTNDAEVLVVVDQPNNIGRLTVAVAQAMGADVRYLPGLAMRQLSRIHVGNSKTDVRDAYVIAHAGLNLPDALRSVDRVEEVFVQLKVLNGIDEDLARAYTRLINQMRSALVGTYPAFEHVLRGQMIHRKWILHLLAKYGGPTKIRRVGKARLAAFARGHRARNPEPVIDAMLAVIHGQTVSIAGAEYAELGVAMSAKDALAKLEHRKKIEAQVLGLIQDIPQTEILLSMPGIGPRSAAQILMTVGDMSDFPDAAHLASYAGLSPQKNQSGTSIMSNSPNRAGNKKLKNALWQSSFASIRFHERSRQFYERKRNEGKRHNAAVVALARRRLNVLFAMMRSGELYRDIPTAQEAAAA

SEQ ID NO: 72941 - protein, 344 aa, unidentified
MTQYKRIAVDTSKSVFTIHCIDAEDQAVLRTNLRRGQMSSFFKKLPPTEIALEACGGSHHWARELNALGHQARLIPPHYVKPYVKRGKNDRNDAEAICEAAGRPGMHFVPVKTLAQQAQGMVLKVRETLVDQRTRLANTFRGHATEFGMIAAKGMSNIGALQIAIEQEAAIPPEAKEMFVLLNQELSELDEKIEQVDKKLTAAHKANPVSKLLATAPGIGPVTALTLAIEIAPGVFQSGRHLAAWAGLTPKEHSTGGKQRMGGISRAGNKRLRVLLVSGATAVIQAAMKPGSKQMTGWLRALLLRKPRKVAALALANKMARVAWAMMTTGEAYRRPAAAPAVPA

SEQ ID NO: 72942 - protein, 347 aa, unidentified
MRKVAYLSMDVHARNSVMGDMDGNGNFRGNRSFITCENNIINALKTIKAKKKYLVMEAGPLSYWAAQVANDHVTEVIISDPRENALIYNSSKKRDKVDTQKLCRLLRLGEFKAVYRPENDQRAIFKAAVQHYLDLRDQLIALKQKIKAMYRQWGVINVFTDSAYSGAGRDKFLKQVKHRPIYLQLQRLYALSDATAAIKQEAQKSLQSLGRNYPEIKEFEKIPGMGSIGAHTFDAYIQTPHRFAKRSRLWKYCRLGVSDRSSDGKPLGYKRLDKSGIGELKALSYRAFISAMKGDNEVKRFYLNSLQRTHDRKHARLNTQRKILSMMLSIWKKGTPYRAELFLDPSI

SEQ ID NO: 72943 - protein, 315 aa, unidentified
MLIHYIDIAKRNFVIAVSSLSKTKTETNNPKGIAHTIEYLKKHKVALVVTESTGGLEIPAAKAIRRAGIAVIIANPRQTHQFAQSQPLTKTDAKDAKMPAFFAQMKAQKEDSQTMPYQPPTEAEEVLEALVNRRNQSADMRTAEKNRLHQVHETQVGSVKQLIAHFDRLIDESDKQIDNHTHTHFDGKDQVAEQIKGIGSITTATLMAMLPELRRLSHKRIASLVGIAPHPRESGETKFKSRCFGGRSAVRKALHMATVAATRFEPLIRDFYQRLLSEGKPYKAAVTACMRKLLTISNARMRDYFAENDTAENGI

SEQ ID NO: 72944 - protein, 311 aa, unidentified
MINGTIGVDVSKDHLDAFRVSDGASRRFANDRVGHTALVKWLGGPGLRVVYEPTGPYHRVFERRLADAGFALVKVNPRQALRFAEATGKLAKTDRLDAAMLAKMGALLDLEARPVPSPALNDLKDLRMAREALVKNRTAAKNRSKTLTLAILKRHNAEQLRQIERQIAAIDKEITAIIAADLELARRFDILISVPGVSAITAFALIVDMPELGTLENGQAASLAGLAPVARQSGNWTGRAFIRGGRANVRQALYMPALVAMRFNPDLKANYNRLVAAGKPPKKAITAIMRKLIVLANALLRDQRKWSPSLP

SEQ ID NO: 72945 - protein, 324 aa, unidentified
MDLFVGLDVSVRTTSVCVIDAFGKILKEGKVETEPDAISALLHSVGSHYKRVGLEAGPLSQWLYSGLAAAGYPVICVETRHMKAALSAQINKTDRNDARGIAQMMRVGLYKPVHVKTIRSQEIRMLLTARKFVQTKLIDAENNLRGLLRNFGLKVGMVTRLKFEQRILELLEQSPHLRLIIEPLLEVRRVLREQYQRLHKAMEQMAEADDVCQLLMTAPGVGPMVALSYRAGVDEPSRFGRSRSVPAHFGLTPSRYQSGEVDQGKGISKCGDAVIRWVLVEAAGALLRISKRSSPLQEWGLEVAKRRGMTKAIVAVARRLAVAC

SEQ ID NO: 72946 - protein, 316 aa, unidentified
MEAPVAGIDVSKDKLVVYFQGKYYEFQNNKQGFEGVKQVLPKGCKVAIESTGVYHINLAKYLGKEYDVRIINPLVLKKFKDIRGKKSDKNDAKKLAELVISMGSEFTTSEAKELTSQWDFITRSIVRVKTRLRRDLILLGYKDSLSKKNLNEVLRGEDNIVLSEVRFLLDELERLEVRKREIEEELEDLVPKDSLIFTIPGIGRTLGCIILARVGDVKRFGDKKRFVAYCGLDPLVESSGKSVVSRGISRRGDAVLRRAFYLAALTAIKVNPIIKRFYEEHKGNLKGKKLITACARKLAVITWAVLYYNKPFDASE

SEQ ID NO: 72947 - protein, 386 aa, unidentified
MIYIGIDVAKNSHFASAVNSDGEVLVNPFSFENSRKGFNLFLSKIKNFQINDCLIGLESTGHYGDNLICFLFPKGFKIGLINPIQTDSLRSSNIRKTKNDKIDTFLIAKCIQLGNYSLLQEREINIIKLRTLCRFRFDIIKSQTTLKTQLTGCLDLLFPELSNFFKGNLHIKTSYTLLSKYSSPKQISSARINTLTKILCSASKGRYSYDEAVKLKNLAKESIGIDNPALEVQVQCIINQLALLKEQISSLDKKIKEIMDSINSTILTIPGISYTLGATILSEIGDIHRFSNPTKLLAYAGLDPSVRQSGNFNAMTTRISKRGSRHLRYAIHRASSLIIWNNDVFYEYYTTKRSKGKSHNNAIGHVSNKLVRVIFKLLTENIPFNS

SEQ ID NO: 72948 - protein, 340 aa, unidentified
MGEVTTIGLDLAKHVFQVHGVDADGTTVLRKQLRRGQVLAFFSRQPSCLVGLEACATTHYWARELGALGHEVRLMPAQYVKAYVKRNKNDAADAAAICEAVRRPTMRFVPAKTADQQAAVLLHRGRERLVRQRTALVNALRAHLAEFGMIAPQGLHNVSKLIAVIRDEGDTRLPVVARQVLEVLAVQIEQLDAGIAALEQQLTAWHKSNPVSQRLATIPGIGPIIATAIAATVVEPTAFRSGREFAAWLGLVPRQNSTGGKTRLGRISKRGNRYLRRLMINGASANLLRSKATNADPWVIGLRRRRPSLVVAVALANKTARIAWAVMHRKENYQRMAAAA

SEQ ID NO: 72949 - protein, 419 aa, unidentified
MAFKIFRKNCCGLDVHKTWIYACIGITDPNGRTEYKQARFSSFSKGLQDLASWLAKYDCREVCMESAGKYWIPVFNILEQSCWVTLAHPKYTKPQKGNKTDRKDAKWICDLFMCDMIKPSFIPPPDIRQLRDLMRYRMKLTNMLTGEKNRALNCLTVSNLKLDDVFTDVFGKSSRSIINFILDHPGEKFDVAPFVDRRCRHPIEEIQAAVDGAVSREQAVKLRECLVHIDEIQTHKKSIEEEIHQLAEPYSYQLSLLRTIPGFSADPMTAITVIAEIGAEMSVFPSAKHLASWAGCCPRNDQSNFKVKSTRISRAGSFLKPLLVQVANAVIHSDKHPEFKKRYRSLKTRRGHKKATIAICRMFLTAIWNILSKLEPYSPDGFLTEKVTKHSVVITRSQGLALLRMRGYIFKDELEPKPD

SEQ ID NO: 72950 - protein, 377 aa, unidentified
MSAARYDEYRSDPVLFLALELSAGIWKVGTTVGMGQKPREQNVDAGDLEALWEEIGKAKVRFGLPAEARVISCFEAGRDGFWLHWWLEAQGIESVVIDPASVHVDRRKKRAKTDRLDLGKLIRSLIRWSGGEPKVWSVVQVPSVKDEDDRQLHRELQTLKGEQTRHTNRIRSMLICQGVKIPAKRGFVELLRSCQVWDGSQLPKHLVCRLEREYRRLEMVREQILVLERERRKALREARDEKVEKVRQLMRLRGIAYNSSWVFVMEFFGWRQFKNRRQVGSLAGLTPTPNDSGEMDRELGIDKAGHPRIRTMAIEIAWCWLRFQPQSELSLWFQRRFGNGGKRARRIGIVALARRLLVALWRFVDQGVVPAGAVLRK

SEQ ID NO: 72951 - protein, 485 aa, unidentified
MATQTSVYERLAGGNRKQRKDLQRRLHSDDPGLGVVHANAAGIDIGNESHFVSVPAGRDAEPVREFGSWTADLERMAAWLKSCGIETVAMQSTGVYWFAVYDVLEKNGVKVFLVNASHTKNLPGRKSDVQESQWLMKLHTYGLLRNSFRPPEEIRPIRAVWRLRDRHVEEAARSIQHMQKSLTSMNVQLANAISDVGGLSGQAIIRAILAGKRDARELARLCDRRIKASEEEVARSLEGNWQEDQLFELQQAVDEYDFRQKQITECDRKLQAYLAVLPSRPAPHADTGTVMPPPATPGKKKRAKKIGGGNAPQSFDLGAELKRITGVDAIRIEGVNLMTIQTVVAELGTELGNWWPTEQHFASWLGLSPKRDVSGGKVIRHTHGKNPNRVAGILRMAAISLLRSDSYLGARYRSLRTRLGAPKAIKAMARYLACIIYRLFTKGQVWVDRGVEQFEQQRQTRDLARLQAQANSRGFRLVSTADQIA

SEQ ID NO: 72952 - protein, 415 aa, unidentified
MEDLGLRALYRRVAGIDVHRMLHVVTVLLEQPDGSMQRQTRQFGGFRRDCRELAAWLAELRIELVVMESTGIYWKSVYAHLENAGVNAWVVNAHRVKHVPGRKTDVADSEWLAVLARFGMVKASFIPPKDLRELRLVSRYRRKLNAMRASELNRLHKVLDDGGIKLGGVVSDIDGVSARAMVKALIAGQPIEHMLGLARGKLKQKREELGASLEGDLSARHLFVLGHIEAHIETLQRELAEIDNYMLNALQPYAWAHELLQTIPGIDEIAAALILIEIGDDMARFGRAQSLACWAALSPGNDESAGKRKSARTGHGNSVIRCILCECANAARMTKSTLAAKYRSLMVRKSHKKAIIAVAHKMIRLIYLMLSRRQPYIDQGINYAAMSAKKNAPRWIKQLKCIGRWPSPKPAAPSV

SEQ ID NO: 72953 - protein, 341 aa, unidentified
MRQYVGLDVSQRETAVCVVNENGQAIFEGKAKSHPGDLSKLLRKHAPLAERIGFETGAMASWLWHELRRVELPVVCIDARHAHAALSVRLNKSDQNDARGLAELVRVGWYREVKIKSEESQKVRAILVARFRLVSMRRDIENQVRSLIKECGLLFPRAIGQQFRNLVRELLNAGHQLLAVIEPLLSIHEHICQQQSKFDDEVRRLAKSDETTRRLMTVPGVGVITALTFRHTIDDPSRFRSASTVGAYLGLTPRRNQSGETDTTGKISRWGDRLLRTYLYEAATVLLYRTKKWSSLKAWGMKLAKRVGMKKAKVAIARKIAVILHCIWVDGTSFDWSHAPA

SEQ ID NO: 72954 - protein, 425 aa, unidentified
MKPQEHQLAAYVGIDWADQQHQVCLQVDEHSPRSTQPLDQTPEAITAWVLKLKEQFPGGLVGVCLEQSRGPLIYALSQFPWLVLYPINPKSLARYREALYPSQSKDDPSDAQLLCQFLQFHQPQLHAWHAEDATTRRLRLLLENRKTLVDDRTRFANRLTDCLKRYYPQALHWAGPLTQPLAWDFLLKWPTLAQVQRAQKKTVLAFYYAHHVRRGDQLTERYQEMQQAIALLQDAAIVEPTVSLVQALCRQLHALQRAIREHEGEIAARFATHADHDLFAALPGAGPVIAPRLVVAFGTDRERWQEASELQKLSGIAPVMQRSGNSCWVHWRWPAPAFLRQTFHEYALHSLGSSPWAAAYYRLAREKGKSHHAAVRALAFKWIRILYRCWKERTPYDEARYLNELKRRGAPLIRHLQPKPQTQAA

SEQ ID NO: 72955 - protein, 381 aa, unidentified
MDTAARDQQCSSEPVLFMAMELSASKWKLGFTVGLGQKPRERTIDAGDLEGLREAVVRAKRRFRLAEDARVVSCYEAGRDGFWIDRFLRASGIENVVIDPASVEGNRRRKKRKTDRLDLGKLLRSLIRWHGGEGKVWSVVQPPSEEAEDARQFHRELEVLKGERTRHVARIKSLLVSQGIQVTRVGADFVTELEAAKMWDGSPVPPQLRDRLVRELARLQVLRQQICELEGQRREAIRKVKDRRMEQVRHLMRLRGVGENGAWLLVMELFGWREFRNRGEVGSIAGLTPTPWASGEEDREQGIDKAGNRRVRAMMIELAWCWLRYQPRSELSMWFEQRFGGGSKRSRRIGIVALARRLLVALWHFLRDGWVPKGAVLTAPG

SEQ ID NO: 72956 - protein, 397 aa, unidentified
MRQSTTQGLHVSVDTGCYQHHAAVGLSNGKYLGSFEFPHTKLGFAEFFSKIDRYKKHSNGKVCVAMEGYNGHARPLDRMVQIRGYRLFNINNVKLARFKEIFPGAAKTDPIDARKGLELFQLQQTLPLAKTVVEEVSPVGEVEQQLKRLSRRRRRLVDERTRYINTLQADLRAVSPGLIEITADVGNVWFLNFLASAKDFRQMKQRKESRLLKIKQVGKRYVAAILAWQENALFSDDIAFVWPLVHQDVLRIIELRKMVKTIDKQLICLMEQSTLARHLLSIKGFGDTSCAELAGEIGCIERFEKEASLALYLGMAALDNSSGTYQGSKRSKQVNQRAKMAMMNALDKHRRWVEQSSSYYRKKRNEGKKHNQALRSLGRHVVRVIFKMLKEDRDYYL

SEQ ID NO: 72957 - protein, 417 aa, unidentified
MLKIVFPICCGIDVHKTFLVATIASTDRSSVTTYQTKRFSTFTKDLENLSKWLLDNQCTDVCMESTGKYWIPVYNVLELTCEVILAHPKYVKSLRGKKTDRKDSVWIADLFKHGLVKASFIPEKAIRDLREVMRYRTKLVSMKSSEKNRYQNALTVSNVQLASVVSDTFGKSAQALINQLLQQPKDTSFDVLPFLHGSLKKKAEQISESLNGSIDDIQAQKIRSCTSHMAELDSHIEDLQVAADLLASPFTAALRIIESVPGIGHLSALTILSEIGTDMSKFLSAKHLCSWAGLTPCNDQSAGKKKSTRISRAGCYIKPILVQCALAAIKDKSFPYYGQRYKVLKHRRGHKKAIISIARMMLSVIYTLLSRGELFSKELYEESLKNPMVILSQEEQFQRLAKKFGYVVVKVHEPVPV

SEQ ID NO: 72958 - protein, 365 aa, unidentified
MEAKKVEPRYVGLDFGKKTYEMAIVGKGGKVTLSNGKTFASDRQKLYKKLRATDKVALEAGNMAFIVAKEIQAAVAGCKVYVLNAGQLAIIYASMKKTDKEDALKLAHILQDFNEERLPVVTVPNEKTIEYRKLIASHRRASQSRNREINLLHALFVSQGITTVVRKDLASKEKRQEAIKVLTGLEREEAEHLLELIDIREKRISALEKQRFQASCGDEDVERLQSVPGVGPLTALAFVAHVDAQLFENAGQVSNYLGLVPRVYMSGETVRYGRITKRGNGYLRALLVQASWALIRSNAGGKLKERYAYMTQEKSTSKKKTIVAIARRLSEMLYVMLRDKTWYAKRPFIHSKENVERLTQLALSA

SEQ ID NO: 72959 - protein, 317 aa, unidentified
MEQNHTNTKIAGIDVGKRRLDVAVHGLAEGMFVANDEAGVSELIAWLKAREVGRVGLEATGGYERGVRSALEAAGFEVVVHQPLEVRLFAKLKRLRAKNDRLDAMLIAAATAQVETVRAARDELLVELGERLTAYEQITDQAAELKTFLESVTLKDIAASVRRQIRSLETLKAKLLADILARLKARSDLLARLRLLLSLPGVGPVVAATLVVRMPELGAMSRGQPAALLGVAPFDRDSGQWKGLRFIGGGRGRPRRMIYLAALQARRCSPPLKAFADQLLARGKPAKLVIVAVMRKLIEAANLVLGRGQPWLKQRPA

SEQ ID NO: 72960 - protein, 347 aa, unidentified
MLYAGLDLSRQRLDVHVLDEDGRTVEVTAATPEVFGLRELVARISRHGQEVSATIESMNGARFVHDQLELAGWDVEIADAVKVKGLAPLAAKTDKIDAWVLAELGRRDLVPAIWLPDPTVRAERERARFRLHLVRHRTALKNRIHATLIAFGHPVPVSDLFGTKGRELLAGLAVPEPWATTLARSLRIVDELEAEIERCTADLQAAGADHPYVPLLMSVPGIAWVLWYTIAAELGDIWRFASPKKLAGYTGLCPIVRQSGRRDDRGPLAKNGPKYLRWALIEAATHAARHPAYRERYEHTKKRLGRQRGSKVARVELARELSTAIWHMLSKNEPFAPGRPPARPLVA

SEQ ID NO: 72961 - protein, 451 aa, unidentified
MLIQGSSDPPRLVRVGIDAAIVAQHEVCIRATDAQGQVRTDRFRVQPTLAGLRSLSNRLSEMPGVVAVAEPTSMTWLGLSVALQEAGCDLSLLGARHAARLRGAISGKHKSDVIDADVLARAGEVFDLQPLRPVEPAQLALRRACVRRGAAVLDGNRHLRRLISLARWGFPDVWNGFRGSLPTAVAVLNRWPHLAQLAAARRSTLTAMVALHTRGVADVPDRVEAIRSSAAAWAAFWEGHLDLDALAFDVTEHLTDMADAKARTERATGQAQRYWRQLYGDDELLLSMPGMGPVTASVIRGFLADGTGFGSGKAAASYVGLNPSTWSSGTVSQPSRAITKEGPAVLRLAFFQAANAARRQDPQLAGFYHQLMTEHGHCHTQACVAVARKLVERTWTVLSRGTPYQIRDLDGQPISRLEAKKIIKQQCTVPEQVRAKARAHSAATNRAKLTR

SEQ ID NO: 72962 - protein, 456 aa, unidentified
MAGSKSTRGRSSGQLGTINPNAAGLDVGSTFHVVAVPADRDEQPVRTFRTFSGDLHRLADWLEETGITTVAMESTSVYWIPVFEILEARGFEVLLVNARDVKHVPGRKTDVQDAQWLQQLHQHGLLRGSFRPRDGVVRLRAYLRHRERLVEYAASHIQHMQKALMQMNVQLHHVVSDITGVTEMRIIRAIVGGNQAPERLAEFRDVRCAASESTIRAALTGNYRAEHIFALRHALELYDVHQAKIVECDAEIEQVLRALNEARTMPTEPLPAVRHAQAKNEPEFDARPALYTLLGADLTQIHGFGAYTVLRLVAECGDDMRKWPTAQHFTSWLCLAPRNKISGGRLLSSKTRRSSNRAATLLRIAAVNVGRTQTALGAFYRRLAARTGKAKAVTATARKLAILFYKALRFGMAYVDPGASYYEERYRQRVIEHLQRRARHFGFALVAESAVIGGVS

SEQ ID NO: 72963 - protein, 398 aa, unidentified
MLYLGIDQHKAQITVNLRNEPGNVVLQRQVSTDHAKIDDFFTKLKKQAVKTKGFMAILEVCGFNHWLIKKLEDYGCKEIVLMQPEKTSNKKTDRRDANALCELLWNNRKRLHNNERPNGIRRVVWPTPEDAEVRQLASLRQHLVHQRSKCIIKIRGCLRKHNLEQDCPAKCYKTKKAKEWLKTLELPSADRLEVNVHLAVWKTLDIELLKIESELAKRSEADKNVLLLVSIPGINHLGAKALLSRIGDIARFPTPDSLANYFGVTPGCHSSGDKKQHTPITKAGSSLARNILNTAVNHVVRKDTAMKDWHKNIKKRKGSKTARVAVMRRLATIVWHILKRQTTYQFRYDPITMVRAKSKSIKKSRSGFRRHNSGVQGIVKEEKRNPSPGKHPTRGKVP

SEQ ID NO: 72964 - protein, 347 aa, unidentified
MKRIAVDLAKSVYQVAESVRSGHVVQHKRLNREAFRRYIQEQAEPVEWVMEACGTAHYWGRVAQALGHRVKLIHPRYVRPYRRRNKTDRNDCDAMLEASRCKDIHPVPVKTQEQQLLQQLHGMRETWKKSRTQRINLLRGILREAGIEAPTATAAFIRAAHELVERPEIAPLSHQLHIVLAEINLHEQCMVECEQQLKRWHADDEVVRKLDEVSGIGLLTASALKTAVGKPERFTNGRQLSAWLGMTPREFSSGDRRKLGHISRQGNVYVRTLLIHGSRAALLAAQRCKARTPEKLTQLQRWTVETAARIGHNKAAVALANKLVRICWAVWCNERRFSGDWQSVKPA

SEQ ID NO: 72965 - protein, 375 aa, unidentified
MAKNTRFVGLDVHAKTIAVAVAEGRNQVRSLGTIANRAEAVRRLVGKLGKLTEVKVCYEAGPTGYALYWQLTQVGVQCEVIAPSLVPMKSGDRIKTDRRDAERLARSYQAGDLTAVWVPDSKHEALRDLVRAREAAKEDQLRAKHRLGKYLLRYGLRPADDGRPWTAAWWQWVRALKLPHPEQNTTLLELILEVDHQGQRIDRFDAAIDQAVDAAPEQLKAIVDALQALRGVAKVTAVTLATEFGCFSRFEKAGQVMSYTGMVPSEHSSGPKTRRGAITKTGNSHLRRVLVESAWHYRHQPKLCKRQKELLTALSPKVAAIAWSAQQRLHRRYWALQNKSKPSAKIVTALARELAGFVWAIGVETEHALKTARAA

SEQ ID NO: 72966 - protein, 362 aa, unidentified
MFRPHTLYIRIRIVRKVSEPAFAMKDQDVTDVIRRKQQTAMRYIGIDVSKATFVVAYSSDKGGEIRTFNNTTTGIKQFIGALPKDGSIHCVMEATGNYSAMLLYLLNVAGIAVSMENPLKIKNFARAMLSTVKTDKIDARLIALYGEKMNPQPFKIQGEAILRLRQKRTVIRQLTKQITAMSNLRGSLACLPVPDKGATHTVDETIEFLEKRRDRLQSELTDLVEVEFSRQLALLTTIKGIGITLATALIITTGGFTYFQNAKRVSRYLGICPTYEQSGTSVNIRGHINRNGDAYTRGLLYVAAWTASRFNTKCGETYTRLRQNGKPGKLAMIAVANKLVRQAFAVVTHDKEYVDGFVSNRP

SEQ ID NO: 72967 - protein, 343 aa, unidentified
MQTVTTIGLDIAKSVFQVHGTDATGQVVIRRQLKRRFVLSFFEKLPPCLVGIEACASSHYWSRELQALGHTVRLMPPAYVKPYVKRQKNDTTDAEAICEAVTRPNMRFVPTKTVEQQSCLMLHRARHLFIRQQTAVINSIRAYLAEFGIVAPVGRRGVEHLLEVVADPSDRRLPEVARACLVALGSQLRALKAQILEFDRRIMAWHRANATSKRLDAIPGVGPALATALVASIADPKAFRSGRDFSAWVGLVPKQNSSGGKDKLGSISKQGDRYLRSLFTAGALAVIRYAKIHGTQHRPWLTALLARRPTKVAAIALANKLARMAWAMMARNEGYHEPIALAA

SEQ ID NO: 72968 - protein, 346 aa, unidentified
MLYAGLDLSRQRLDVHVLDEEGRTVDVLAVHPDADALRTLANRVLCHGQEVSAAIESMTGSRFVHDTLERFGWDVMIADAVKAKGVAPLAAKTDKIDAHVLAELARRDLVPEIWLPTPGVRADRERARFRLHLVHHRSALKCRIHATLMTFGHSVPVADLFGTSGRRLLAGFELPEPWATTLATSLAMVDELDERIDECGRELIRLGADHPYIPLLLTVPGVGPLLAYTIASEIGDIHRFASPKKLTGYTGLCPLVRQSGNRDFRGPLAKNGPKYLRWALVEAATHAARDPHYRDRYERNKRRLGRQRGAKVARIDIARQLAEGIWHVLTKNEPFAPASPAILLVA

SEQ ID NO: 72969 - protein, 487 aa, unidentified
MKSIFKKRNKQVETLFESAGASNKVMCVAFDYAKAEHKCVICDGMGHQLHKSFNVINNREGLEFLMDKIGGLCRKHVIKLEHVFFGGEDCGSYIFNFIHALIDRGFLVVGINPRQAKVERENSVASNDLIDTIGVAGTMIKMRGRTIGKANEDVHSLKRLERLRNALLKAHSASAHRIYQVTDQLLPDFLNQDKSGLIPFCRASLWLMDDKFGIERMRTRQKSSMIKKLRELNVGDPEGYTVKLKALAEESLPPPKEMIPALQRSLAEEKQLYLLMDKSLHNLDIDIAKQFARTPGAMLTTLQGIGLRWAPALFVELGDPLRRRNVHSMAALGGIVPRSKQTGGDGKQPVVGHRNRKCCTSLKKTLMSGAVSISQYGLQEMRVDYKHDLEIGRDARTRMAQKLLRVSLHIIDVGNFFIPPSLMQECTTQQMADYYKMMWPKVLVKWRDKGAILEATAPGAPLREWRDMAQDLYKIKLSLKSPQTGRK

SEQ ID NO: 72970 - protein, 418 aa, unidentified
MRAVGRSVGLDVHRDFCEVAIAEDGAVRSAGRVETTPEALELFARSLGADDRVALEVTGGAWEIARLLEPHVERVVVVSPDDTGIRQARAKTDRLDARSLARLLAAGELDAVWMPDDACRVLRRRLARREQLVRSRTRAKNEIHAVLIRRLEGRPPVSDLFGVKGRRWLRELELPVEEAETLESALRHVEFLDQEIAAVERLIAREALRSPDARRLMTVPGVNVICAASFLAAIGDVRRFRSARRLVAYLGLDPRVRQSGTEPARSGRISKRGSASARWALVEAASSVVRQPGPLRAFYERIRARRGHGKAVVAAARKLTVLFWCLLARGEDYAHQQPSLTAKKLRLLEIRAGVPPLKGERTGTWATHERMRQAERELAQQAEASYTRMVSDWQAARPQKATQAAPAKEGASVTAGRA

SEQ ID NO: 72971 - protein, 383 aa, unidentified
MKSVCGLDVHKDSVYLCILSEFGELIEKVFGVLTYQLEEMRDLMLHHHVIEVSMESTSVYWIPIWRVLSPHFKLNLANPYFIKQLPGRKSDVKDAQWIAECTMKELIRGSFVPPETIQQLRQYDRRIFDLNEEIVRKLSKLDAVLQRCNIRLSNYVSNVDSKSYKAVVRAISQGITAPEELVKLIHGRIINHHGIDVITASLKGVVSLAEIDMISQLRDELDMAEAHKEKCQARMLEICEREFPEELRRLQTIPGIKERTATSLIAEIGTDMNKFETANHLASWSGLKPRNDESNKKIKSRSITHGNVYLRKTIIECAWAASRTKDCFFSRFSYHQTQVRKKNKMKVLVAVARKMLIAVWHVLHDNINYIDFTTDRKTSQTRG

SEQ ID NO: 72972 - protein, 344 aa, unidentified
MLIIGCDFHSGFQQIAIFDNQTGEIREKKLLHPGQAAEYYRSQLEPVRVGMESGAPCQWFRRLLGECGHELWVGDAAKIRAAEPRKQKTDRRDAELILNLMRFERFPRIWVPSEEERDVRQLLMDRHHRMRMQTKVKNQLQSLALNQGLQKGKKLWSEAGREQLRELPMMEHAARRRDDLRQRVAELDGQITALDVLVRQQAEGRDDARRLMTHPGVGPQTALGMVLTLGEVSRFASSKQVASYLGLIPGEYSSGNKQRLGHISKQGSSLMRFLLVQAAQTAVRGDEPLRRAYARLAAKKCRAVAKVMVARRLAVRLYWMLRNDWTYAELARHAGQPESFCGEQ

SEQ ID NO: 72973 - protein, 444 aa, unidentified
MKALPVLDPKAAAIDVGSERLHVSIAGEEPKVFGTFTGDLEALRDWFKQEEVRTVAMEATGVYWLYLYEVLEAAALKTVVVNGRHVQNVPGRKTDMADCQWLATLHAHGLLRGGFVPPADIRQLQDYQRLRADHIIGAASQVQKMQQALERMNIKFHDVISDLTGVSGLKVVRAILKGERRPGELLALCDEQIQKKKSAAVKESLRGCWKKEQLFALRQALELWETYQQKIADCDREIESLLQQLAGPQGPQGGNAIVGPVKLAPAKMLGKNAPVIERCQELLARICGGRDATQIPGLGEYLVAQLISEVGVDMTRWQTEKHFTSWLGLAGGRKQSGKRKGAVKAHRNRAGRMFCAAARSLAQTVEKAQGGFYRSLRGRVGGLAANVALARKLAQLFYRLLRYGADYVEKGLKVYEAKVLETEARLLRKLAKKQGFTLVPSSLN

SEQ ID NO: 72974 - protein, 340 aa, unidentified
MNLTTLGIDLAKTSFSLVGMDQHGKVVLRKTLSRAKLLPFIAQCPTCLIGMEACSGAHYWAREFTKLGHKVGIIASKFIVPFRKGGKNDNNDAEAICEAVGRANIWFVPIKTAEQQAQLCVHRVRQGLVSERTALINQLRGLLSEFGIVMPKGRYPAQREIPLILEDANNGLPMLARQMISNLWDRIKIANEQVLFYDRELHKQAHHHPVAKRLLTIPGVGEQVASAVVASVPDPSLFKDSRQFAAWFGLVPRQHTTGGNVRLGRITKQGDRYLRMCLVHGARSVLANLKDKQDKISCWARELIARRGYLRAVVAMAARNARLIWTLMVKQEDYKVIAAN

SEQ ID NO: 72975 - protein, 411 aa, unidentified
METLYPRCAGIDVHKKTVVVCVRCADGPGKPRQEVRTFGTTTADLLALSDWLAECGVTHAAMESTGVYWKPVFHLLEGHVQVILVNAQHVKQVPGRKTDVKDCQWIAELLQHGLLKASFVPPPPVRDLRDLTRQRAQLVGEKTAVANRIQKVLEDANVKLASVASDVLGASGRDMLEALCAGETDPAKLADLARRRLREKIPQLRQALAGRVTDHHRFLLRMHLDHLTHLEGLIGRLGARVEEVLAPFAEAARRLATIPGVSQRVAEVVLAEIGTDMGQFPSAAHLASWAGLCPGNHESAGKRKTGRTTKGDRWLRAALVQAAWAASHTKGTYLQAQYHHLARRRGRKRALVAVAHTLPGIIYRLLKDGTTYRELGPDHLDRQDPERLAQRLVKRLERLGHKVTLEPRPAA

SEQ ID NO: 72976 - protein, 341 aa, unidentified
MLYVGLDLSRKRLDWQALDPEGAVGAVPPDRDGLVRLADRLDERPVLAVIESMTGARFVHDQLELAGWDVRIADAVKARGIAPLACKTDRIDCWVLAELARRELVPEVWLPDPAVRAERERARFRLHLVKHRSSLKNRVHAILFQHGVPNGHSDLFGVSGRRLLERLALPEPWASTVQASLALIDTLDEQISGCERELRALGADHPYIPLLITCPGIGWVLAYTIASEIGEITRFATPRKLVGYTGLCPRVDQSGERDRRGPLRKNGPSYLRWALVEAAHTACRHPAYAPVRERMRERHGQKRGSKIAAIEIGRRLSEAIWHMLTNSQPFAPAGAAASLAT

SEQ ID NO: 72977 - protein, 382 aa, unidentified
MEKTQTKQCKNVTESRDVTGTNFASFVGVDLHKTTVTLRAVDSSESIISSLTIDTKCVNKIEDWINTLPKPRWMAVETVSFVEWFIDRYRNCVERIDIADATELANRRGKRRKNDRNDSLDIAVRLVRGNCPLGYIADEPLMQLRKLGRHWKQLSKTLSRAKHCMQSIFQAANIRGPKLEGATAQKWLLARGDLLKDVQREAFANFIDIISLIERQRESLRRKIIQANRSKEFSAVITVLKSIPGIADIWACIIAAEVGPFERFPNADALEFWAGITPDNKESAGRTQSGRITKAGSATLRWALCKAAVTLCKSDTAQETVRQRLIKRIGKAKANVAMGRRLLRIIYAMMRNGTLYECVKPTNHLKNANKARAKKRKQQEAA

SEQ ID NO: 72978 - protein, 427 aa, unidentified
MSVAQNEKIRQVTETTMVIGVDIARDTHWARAFDWRGLELSKAVKFENSAEGFHYFLCWASELAAEQKKGRIMVGLEPTGHYWFTLAAYLQGGSMKLVLVNPYHVKCSKELDDGHPSKSDKKDPKTIAKLVLEGRYVLPYIPQGLYAELRVAMNCRWRVQKELTSVQNQIQRWLKIYFPKHKTVFGEFEGIGSMALLHAAPLPSDLVALGVDGINQIWRQMKLRCVGLKRAQRAFEAAQNSVGCTTGIEAARMELQILLEDYDAKLQQYERIMKVVESLCRQIPEVEELLKIKGIGLITVAGIFAEVGDLRRFSSPRQLQKLAGLAITENSSGKHKGQTEISRRGRAHLRAILFRAVMPLVARNEEFQKLHHYLTTRAENPLKKMQSIIAICCKLLRVFYAVATKGCAYSAEKMLADIRRNQPLKAA

SEQ ID NO: 72979 - protein, 399 aa, unidentified
MIENYDSVDVFVGVDVGKGEHHAVALNRAGKVIFDKALPNDENKMRAVLQKLKQHGIVLVVVDQPATIGALPIAVAQAESVLVGYLPGLAMRRIADLHAGEAKTDARDAAIIAQAARTLPHALRSIQLADESVAELSMLCGFDDDILGQMTATSNRIRGLLTQIHPALERVIGPHLDHPAMLDLLQHYPSPASMKAAGTTRMASRLLKLAPRMGRRLAEEITQALSEQTVVVVGTNAAATVLPRLAEQLAALRRQRTEIAVVVEKLVEDHPLSPVLTSMPGVGVRTAARLLTEVAGKHFESAGHLASYAGLAPVTRRSGSSIRGEHPSRRGNKILKRTLFLSAFASLRDPISRTYYDRKIAQGKRHNQALIALARRRCDVLYAMLRDGTLYQAEHQLAA

SEQ ID NO: 72980 - protein, 417 aa, unidentified
MQHYVGLDVSVKETSVCIVDKAGKVIREVKVATKPAEILAVLTEEALAIERIGLEAGPLSQWLYGALAEAGLPVICVETRHMKAALSAQINKSDRNDARGIAQMMRVGLYRPVHVKTLASQKRRMLLTSRQLLQAKALDIENDLRGTLRNFGLKVGMVGTVKFEARIRELVADHPDLAAIVEPLLIARRVLREQLGVLHRQLLEIVRQDEVCRRLMTTPGVGPVVALTFRATVDVPSRFNNSKAVGAALGLTPRRQQSGEIDRMGGISKCGDAMMREMLFEAALVLMTQPQVVVAQGLGHEDCPASWDEARNRRCGATAGGHHASHVGGWNRVSLEQKRSCGGMTGSVRWWVRIAAARMFARCARSPSSPAPAARRCAALGLDRSARPSKQATVPSMHTCDAHHVVSQLCTIAIGEN

SEQ ID NO: 72981 - protein, 343 aa, unidentified
MQTITTIGLDIAKSVFQVHGVDGAGQVVIRRQLKRRSVLAFFQKLPPCLVGIEACASAHHWSRELQALGHKVRLIPPAYVKPYVKRQKNDAADAEAICEAVTRANMRFVPTKTPEQQSGLVLHRARHLFIRQQTSVINAIRAHLAEFGIVAPVGRRGVEELLNVVADPNDKRVPEMARACLLAFGAQLRRIKEQILEFDRLIRDWHRSNEMSMRLDEAPGVGPVLATALVAAVADPKSFRSGRNFSAWIGIVPKQHSSGGKNRLGNISKQGDRYLRGLFVAGALAVIRYAKIHGTKHRPWLTALLARRPTKVAAIALANKIARMVWAMMARGERYKEPVALAR

SEQ ID NO: 72982 - protein, 420 aa, unidentified
MKRERDTRVWEEGKRYIGLDVHKHYITVGGMNAQQEIVLRPRDVEMERFQRWAESNLRKTDEVVLEATTNTWDVYDTIVPLAKRVVVAHPAEVKQIANSRVKTDNQDVIRLVRLLIADIVPEVWVPPVAVRELRAMISYRWRLVKMSTAIQNRMHSLLHRHNIQAPQGKVDTGENREWWERLKLSELETLRLKQEIKTLRLIRENIVEVERELGRLSNGERWGDQAVYLMQLPGVGIIVTMTILSAIGDIRRFESPKKLVGYAGLGAGVHDSGQKHQGKGITKFGRKELRWALVEAAWQAVRSNPKWRAEYDALCKPKHQNQAIVAIAHKLLVIIWYLLNRQEVYKKSTEEDLAYKMLTWAWHMDKSALNGMNNQQFAKYGLLRLGKGVELTRIVRGGVPRRIASKEEVLAMKPKLHLKQ

SEQ ID NO: 72983 - protein, 358 aa, unidentified
MKRKLKFCVGIDVSQKNLDVCLGYIDDEQDLQFVTHRKFKNNLKAIQELVKWIRKHADANIKMVVVMEATGVYHEDCAYHLHANNFEISIELPNKISNYVRSLNQKTKTDKKDAQVICRFGLERKITAWQPPKKIYRLLCEITRERSQLTLERSMLKNKLHAEKAQHFPNQKTIDRLLERLTMYNKQLNEIDQELKKIVKTDKELQNDIRRSETIVGIGFLTAVTIHAETQGFALIKNKKQLSSYAGYDVRQKQSGTSINGKDRISKKGNRHIRAAMHFPALTAVQHHEHSKNFCHRIIKKSGIKMKGYVAVQRSMLELVFILHKNKVDFDKNYNSKKAAENNPHCSLADIKNIALSL

SEQ ID NO: 72984 - protein, 419 aa, unidentified
MTSDFEWYAGIDWASEQHRVCLLDGGGRPAGEREFAHGGDGLAELCAWLIAMSGSEPQKIAVAIETPHGPVVEMLIEHGFAVHSINPKQLDRFRDRFTVAGAKDDSRDAHVLGHSLKTDAHGFRRLKVDDPVIVELREWSRLGDDLKQERNRLANRLRQQLWRYYPQMLELAGDDIAADWLLALWDEAPTPASAAEISTQAIASLLEAHRIRRFDAAEVLRILRQRPLTVAPGTIAAASAHIRILAERLRLVNRQVKEANRKLDRLCRKLEQAGESEAENRPEQRDVAILRSLPGVGRINLAALLAEASEPLKRRDYHALRLMSGVAPVTRRSGKVCLVIRRLACNARLERALYHWARVASQRDPISQKRYAALRRRGHSHGRALRTVGDRLLALACTLLRRQVLFDPDYHCKEVAAAA

SEQ ID NO: 72985 - protein, 449 aa, unidentified
MSNYAGVDWAADKHDVRVADEAGEERLAATFAHDERGLRALCRALLRLKVELVAIERPDGLLVERLLDAGLRVLPMHPNQVAASRARFRAAGGKSDRFDAFVLCELARTDSHRFRVLEPDSDETKALRALTRAREDLVGMRTALVNQLRAELERFWPGPIGLFSKLDNSISLAFLERYPSPADARGLGERRLAGFLARQRYSGGQKPAALLAKLSGAPEGRVGEAEMAARRQIVLGLVAMLKTLADELNTLERQLEDAVRAHPDGAIFLSLFKDPASFVTAAELLAEIGDCRARYPTRDALCGDAGQAAVAIESGKRKTASFRWGCNKRLRGASCTLADTTRHWHPWAQDLYASARARGHDHPRALRTVGRAWCRVVWRCWQDGVPYDPARHRALQQHCTVTIPTSSGSLPDLGATQRMLGDTVTRRAAQRAERAALDGKPTSAISLGG

SEQ ID NO: 72986 - protein, 389 aa, unidentified
MIFVGIDVAKDKHDCFIMNSESEVLFNAFTVSNNKTGFEELYQKIKSCSVNLSNIKVGLEATGHYSYNILGYLIDKGLPTFVINPLHTNLYRKSLSLRKTKTDKVDARTIAMMLMSDVDLKSYSDILYHNEELKSLTRYRFDKIQKRAQLKQSVSRLVNILFPELEKLVPSIHITSVYKLLSEYPGASYVASAHLTKLTNLLKQASKGRYDKEKAIIIRDAAKNSIGSVMSAKSIELKHTINLIQELSLQIDEVETEIKSIMDSIDSPILTIPGISYRMGAVIIAEIGDFNKFDSPDKILAYAGLSPSTYQSGQLLSSHSKMEKRGSRYLRYALFNAAKFVCHWDSTFKAYLNKKRAEGKHYNVAISHSAKKLVRVIFHLVKFKETYKS

SEQ ID NO: 72987 - protein, 395 aa, unidentified
MMYLGIDIGKNNHEAGIITEGGKKVGKSLRFSNDREGFTALLDLIGRSVPAGGDLSIGMEATGHYWIPLYSFLHEKGFKVRVINPIQSDSLRNFHIRQAKTDSIDCFLIAETLRFGGFTETRLADEDIMSLQKLARFRESLKDKCGDCKRQVIAVLDQVFPEYDTLFTDMFGESSKAFLKTCGTPEQTLEVDVKSLAALLSKASRGRHGTEKAGEIKDLAANSVGVTLCADTFAFRIRLLIEQIEFTEKRIEKIDKLLARLLKKLNSVIMTIPGVGPVTGAIIPGETGDVNRFDNPKKLVAFAGIDPTVRQSGNYSGTNNRLSKRGSPYLRRAIWMSAVVAARFDPVFKAFYEKKRSEGKAYGTAIGAVARKLIYTIFAILKENKPYEVRLNPPG

SEQ ID NO: 72988 - protein, 416 aa, unidentified
MKGTEDTSLVNNRYIALDIHKEYVLAGGQNAKQEWVLPPRSISMAKFREWARANLHEGDAVVIETTTNVWDIYDIVAPLTTRTVVAHAGAVRQIAEARVKTDKEDVKRLIRLLIAGIVPEVWVPPLEVRELRGMISYRNRLVKMGTMVRNRLQSLLHRHNILLPKGMLLDATWWQEQKLSTMERVQIQQELAMLEEIDQHKTEVDAELGRHCLREPWGQQAVRLLQLPGFGVVMTMIVLSAIGDIHRFESAKHLVGYAGLGAGVHDSGQEHIEKRITKSGRKELRWALVEAAWQAIRISPYWKDQYEKYLRRMRRPNQAIVVIARKLLVAVWQVLTKEEADVHASEEDLAYKMLVLAWDLDETVRLGLTYKQFAKYALMKLGVETDITRFVRRNVPRRIAPREEVLARMEELGLTM

SEQ ID NO: 72989 - protein, 342 aa, unidentified
MLYVGIDIAKNKHDVTALNVPGKTVLKPLTFSNNKAGFELLDLSLRQLNQDCLIALEDTGHYAFNLLNFLHEQGYKVYTYNPLLIKEFAKSLSLRKTKTDKKDAHGIALKLLSDPNREQFQHDNRQVDLKILARHIHRLKKNSLIGKYNTLVVLISSFLSWIKSLESIQNIPTNLLTRYPNPQKRLEAGFDKLIEIKRLTASKIQDILSIAPRSIGTTSPAREFEIIEIIKHYKRLIDKAETCVNDLMAEFNSVITTVTGIGGRLGAVILAEIRNIHAFDNPAQLQAFAGLDSSIYQSGQIDLAGRMIKRGSPHLRWALIQAAKACARFSPAFKAYLKTKLE

SEQ ID NO: 72990 - protein, 442 aa, unidentified
MLPIIYKRVAGLDVHKKTVVATRMRITEEDRAEWETKTFGTTTPELLELHDWLLEWPPSHIAMESTGDFWKPVYNVLEGTFELLVVNAKHVKHVPGRKTDAKDSEWLAELMMHGLLKASFVPPEPQRVVRDMTRYRTTLVQERARVVNRVQKLLEGANIKLSSVATDIMGVSARAMLVEIAAGQTDAALMADLACARMRNKIPELEKALTGRVKAHHRFLLAKQLAHIDFLDEQIEEISAEIGRQMEAMSGPARPGAGAGGGEESLEGQEAVPPLTWDEAVALLDTIPGVNQRTAEVILSEIGLDMSQFPTDKHLASWAGLAPGNNQSGGKRYSGRRTKGNRSLSSIMTEAAQAAARSKDSFLSARYHRLAARRGKKRAIGAIAHSMIVSVWHLLAYHQPYQELGGDYFDERKKETKINYLIRRLEKLTGGAVRVEIQSAAA

SEQ ID NO: 72991 - protein, 306 aa, unidentified
MSNKVILNQSLGIDIAKDSFSYCFCFLNSDLSKDFELGEDLPNEEKGFKTLEKMIKKSGVTKDSLTIVMEATGVYHEAIAYYLHDKGYRVSIMQSGRVKKYAQSLDQRSKTDALDSKMLSMLGCERKLTPWEPPSETMEVLRFLSRERATIIKERSIEKNRHHAMTAARFEHEKAIGRFDKRMKLLNIQIAEIEKELQELVSSDSVLKQKIAYLTSIPGVSFVSSITVIAETFGFSLISNSKQLVSYCGYDVVLRESGNYQGKTRISKKGNKHIRAVLHMPSMAAVRVNPTLKLFYERLKPKKANL

SEQ ID NO: 72992 - protein, 359 aa, unidentified
MQCVGIDIAKNTFTACLCMYEFDMGCSTNPVVFNNNKTGFNQFVKWSRKEALKGYPLRYLMEPTGVYYEPLAFHLDKLGLDVCVVLPNKAREFAKYEGILTKTDDMDAYTLGMLGCLDKRLKPWMPPSPIYRELRQMTRFVADINKIRTELQNHLEALAHSEITEKSIVRHYNRLIDEIDKQLAANQKAIREKIKQEPGLSERIDHIVTIKGVGFMTVVTILAETNGFALITNRKQLTRYAGLDVPAHQSGPVDPKRHISKQGNVHIRTALYFPAIVSTQYNPQMKDFYGHLCARKPQSKMIGVTAVMRKLLLLIYSLWKSGERYDPERGEPAYRKKKKEAETHEGQPHGIDVGTLTKE

SEQ ID NO: 72993 - protein, 332 aa, unidentified
MERDGEEHCRVVGGVDTHKDLHVAAVVDERDRVLASRCFPTTRHGYKQMLAWMRSFGLLQRVGVEATGTYGAGLLRYLQHAGVEVLEVTTPDPHDRRKRGKTDDLDAQNAAHAAFAGRRTVTPKSRDGMIESLRVLKACRKTAVAARRVALQMIHNTIVSAPDELREALRTMTRMQLVRTLAAWRPDLTDYRNVVSAYRITLKSLARRYLELHDEIADLDTMITALVEELAPALVARNSVGHGSAAQLLLTAGDNPERLRSEAGFAALCGVSPVPASSGKTTRHRLNRGVTGPPTARCTSSPSAGSGRMHGPKPTWPSASPKATPSSRRSGA

SEQ ID NO: 72994 - protein, 338 aa, unidentified
METYAGIDLHSSNNFIGIIDSNDKRLYGKRHCNRLEEVLKALEPFKQSLKAVVIESTFNWYWMVDGLQDNGYEVHLANPSAIKQYEGLKHTDDPWDSYWLAHMYRLNLLAEGYIYPKEHRALRDLLRRRLLFVRQRTAQILSLQSMVSRNLGYKISNNQIKKLSALDVAELFDCPDLVLMATNSWATIEFLKHIIRGIEKRVMSQAKLRKEFAKLLTIPGIGKILALTIMLEVGDVGRFATVGDYSSYCRCVESKRISNGKKKGENNKKNGNKYLAWAYVEAANFAKRYCPKAHSFYQSKKARSKNVVAIKALSNKLSRASYYIMRDQVVFDEDKLFS

SEQ ID NO: 72995 - protein, 341 aa, unidentified
MKKFIRIGVDLAKNYFQVHALENENGGTVTRKLKRSKMHEFFAQIEPCLIGMEACGSAHYWARELKAMGHEVLLMPPAYTKPYVKRGKNDAVDADAICEAMSRPGMRFVPIKSPEQQAMLMLHKTRELLVKQRTMSVNALRGHLSEFGIVAAKGIGRVDELLDLAESDTTLPNAAKAGVKVLAQALEGLDKTIDDLEDEIASVDAQNEMVRLLDKVPGIGKLIASVITASVPDPSAFKSGRDFAAWLGLTPRQNSSGGKQTLGGITKQGNRYIRKLLVLGATSLLNVVGKRKGALRDWIIGLLAKKPARLVTVALANKLARILWAMMKTGECFRSETFAKA

SEQ ID NO: 72996 - protein, 352 aa, unidentified
MNTTSAGADLAKDLITVCAQDRSGRTVERRDLRRDAFRSWLARLPRGCVVGMEACSSAHYWAREMNTLGLEPRIMAAEFVQPFRKSRAGKNDRNDAEAIAVAAREANMRFVAVKSVDQQARLARHRVREGWKEERTALGNRIRGLLAEFGVTIPKSPAALGKALAEAVHDARVPEPVRELVRMAREHLAVLHDRIAQCDRAIGLACRADPAAKRLQALCGVGPTSADAVIATVGSAREFRNGRQFAAWMGLTPRQFSSGGKTRLGSITRRGDACLRTLLVQGARSTLKQAMRCSPERASRLQHWIVQLHARVGYQKTLVAIANKNARVVWALLAREETYNPEAWKAYAPSQE

SEQ ID NO: 72997 - protein, 381 aa, unidentified
MTTAATHHAQSNTTEAMLFVAFELSEKTWKLGFTTGHGQKPRERTVTARHHEHVLDEIAQAKRRLGLPATAPVVSCYEAGREGFWLHRFLQAHGITNQVVDSSAIEVNRRRRRAKSDGLDVRKLLSMLMRYAQGERHVWQVVKVPAVEAEDQRPLHRDLETLKQERASTMTRIEGLLSSQGLRVTSLTKLPEQLEALRLWDGSPIPPGLRRRVLRVYAHYTFLSEQIAAVEAERRALLQTSQEASIEKVRQLMHLRGIGINGAWLLVMEFFGWRAFKNRREVGGLAGFTPTPYQSGESAREQGITKAGNRHVRWMTTELAWSWLRFQPDSALSVWFRTRFGGGGKRLRRIGMVAVARKLLIALWRFLETGVLPEGAGLKEG

SEQ ID NO: 72998 - protein, 354 aa, unidentified
MSQTPNTAIAVIGIDIGKNSFHVVGHDARGAIVLRQKWSRGQVEARLANIPPCLIGMEACVGAHHLSRKLASLGHDARLMPAKYVRPYSKGQKNDFNDAEAIAEAVQRPTMKFVATKTAEQLDLQALHRVRERLVSQRTGIINQIRAFMLERGIAVRQGIGFLRTELPTILAMRTDALSPRMLRVIEELAGDWRRLDQRIDGLSGEIEALARQDQACSRLMTVPGIGPIISSAMVAAIGTGDVFSKGRDFGAWLGLVPKQISTGDRTILGKISRRGNRYLRVLFVQAAWVVLVRIKDWERYGLKSWIEAAKRRLHHNVLAIALANKLARIAWAVLAKGRAFELTRTDDAGVRSA

SEQ ID NO: 72999 - protein, 457 aa, unidentified
MEKEGFLGIDVSKGYADFLLLDKESNVLEEGFQLPDNKTGHQKLKEIIAGWQQKGLEDLYCGVESTGGYENNWYWYLKTVFKKSKVWICRINPRGVKSVGDASLKRTITDAVSAENIASYLIKFPKKLDYSNNALEVNNGFKEGRQHMTYIRMLQKQKVQLNNQLEKLLYQYFAEILVYCRHGSPIWLLSMLTKYPAAAVVLKAGTAKLSAIKGISKQKAIAIVGKAKNNIQDVSPQMGRIIMATAKEILHKEILIKEEKQYLAKLYQESEEVILLSSIPGIGIDSAVTIALEIEDVKRFETAKKMACFFGVHPTFKQSGDGTWGNHMSKKGAEKSRAVLYLASLSAARFNPILKQVYARFRAKGMKHRQAAGVVMHKLLRIIYGILKNKVKFSAEIDEQNQQKATEKQHNKEQKDKADKKVKQQKKHRFQVVSTEAPISRRAEQKIRKQIASQASN

SEQ ID NO: 73000 - protein, 318 aa, unidentified
MEKDFIGIDVSKEVLDVASYVGGRKWQFCNDDAGIDQLVKTLKESAVALVVVEATGGYEAASAYALHRAEIPCAVVNPREVRDFARATKKLAKTDAIDAQVLAHFAAVIKPEPRPISDEKGVELEAILARRRQIVDMLTAEKNRLHAARKPVREEILEHIAYLEKSLSGVESNLSKRIQESPAQKINDRLLRSVPGVGPTLSTTLLVDLPELGTLSGKQIAALVGVAPLNRDSGAFRGKRRVWGGRGQVRATLYMATLTAARYNPVIRQFYTRLCEMGKAKKVALVACMRKLLTILNSMLKHSVPWRYNQPILVSCNP

SEQ ID NO: 73001 - protein, 374 aa, unidentified
MTDHSEAFVAFDASKLRNAVAIAEGGRSGEVRFFGEIDNTGTATAKLVRQLAAKYDRLTFCYEAGPTGYGLYRQIKSLGHECIVVAPSLIPKRPGDRVKTNRRDALSLAKLLRAGELTAVWVPDPHHEAIRDLIRARGAAVEDLRSQRQQVSSFLLRRGLHYPGKKTWTKTHMGWLARQRLEHVEQRIALEEMLLAVRQAQERIERLEQAISAAVPEWSLAEVVTALMALRGMDLISATTFLAEIGDLSRFQTPRQLMAYLGLVPSEDSTGDTIKRGPITKTGNRRARRTLVECSWSYQHPPRVGKEKQARVAAAPRAVREIAWKAQCRLCARYRALTRKGKLKTVAITAVARELAAFIWAIGREVAQARAVAG

SEQ ID NO: 73002 - protein, 392 aa, unidentified
MIYVGIDVAKDKHDCFITNSNGEVLYKPFTISNNREGFDTLFQRIESVSDDFTKVKVGLEATGHYSYNLLGFLLDKGLPTYVINPLHTNLYRKSLSLRKTKTDKVDSRTIATMIMSDMNLKSYSDISYHNEELKSLTRYRFDKVKERAKLKTSVSRLVNILFPELEELVPSLHLSSVYALLSEFPGAAQIAASHLTKLSNLLSQASKGHYGKETAILFRETARSSIGSVMPAKSLELKHTIKLIQELTAEIDEIEAAIKQIMDEEIHSPILTIPGISYRMGAMILAEIGDFNRFDSADQILAYAGMSPSTYQSGQLNNCYSHMEKRGSRYLRYALYNATKYVCQWDESFSAYLAKKRSEGKHYNVALSHATKKLVRLIFAMEKSGRTYQPAA

SEQ ID NO: 73003 - protein, 340 aa, unidentified
MGEYIGLDVSLKETAVSIRREGKRVWRGKCASDPQLLAALIRKHAPEVVRVVFETGPLSVWFFHALSAEGLPAICIDARHAKAALDMAANKTDANDADGLAHLAEVGFYKEVRVKSFDSMLARTLVAARTRLVRIGTELSNQIRGLMKTFGLVVPPASGSKFERQVEALLAGNADLDRIIRPLLEAWHAVRLRAAELGRKLLADARRSDACQLLMSIPGVGVVTATSFITAIEDPTNFKRSRSVGAWVGLTTRRYQSGEIDYDGHISRRGDSHLRGLLYEAATVLLVRSRSECDLRKWGLQLRERLGFKRAAVAVARKLAVIMHAMLVTGEPFQETRTSA

SEQ ID NO: 73004 - protein, 348 aa, unidentified
MSKRSHSLQSTLSDPIIASVFCGVDVSAATLAVAVQQDEHPLEQREFANTSSGHKALIACLHKRKARARVSLEATGIYSLDLALALNAAAQIEVAVLNPKVVNRFAQTLRRSKTDTADAQVLAEYSRRMPFTAWRPPNRNGLALRTISRHLNALTVEHTREHNRLHAAQGSTATPACVVQDLKRSLASLKRRIVKLRGAALDLVRSDELLRSRFELMITIPGIARISALQLLGELASLSEEMTVRQWVAHSGLDPAHEESGTSVHRPSHISRAGSRHLRRALYMPALVAVQRDPHLKAFYELLQHRHKAKMQALVAVARKLLHAIYGVFRSQTPYDGNKLFPALSPAS

SEQ ID NO: 73005 - protein, 414 aa, unidentified
MDVVYTQCAGLDVHKKTVVAAILVLDGQGGLHKETRTFGTMTADLLALSDWLMGHGVTHAAMESTGEYWKPLFNILESNFEVVLVNAQHVKAVPGRKTDINDAEWLADLLRHGLLRASFIPPVGQRELRETTRHRSNFVRERATLVNRVQKVLESANIKLASVASDVMGVSGRAMLAALIEGHASPAEMADLAKGRLREKREQLVKALEGRVKPHHRFILAELLCQIDNLEEAVSHFDEQIQLLCVPFEAAIALLDTIPGVARQTAEIIVSEIGIDMSRFPSAAHLAAWAGVAPGNNESAGKRRSGKTRKGNHALGVALNQAAHGASHTKGTYLSAQYHRLAGRRGKKRAIMAVAHSILVMAYHLIKRQEPYRELGGDYFDQRRPEATAKRLVKRLEQLGYSVSIEQQPASVAA

SEQ ID NO: 73006 - protein, 414 aa, unidentified
MDVVHSHCAGLDVHKKTVVAAIIVTKASGGLRKDIRTFGTTTADLLELSDWLTLYSVTHVAMESTGEYWKPVFNILEESFQVLLVNAQHVARAEGRKTDVKDAEWIAELLRYGLLTPSFIPPVGQRDLRELTRYRTTFVRERATLINRLQKLLESANIKLASVASDVMGVSARAMLEAIIEGSASPEEMALLARGRMRDKRESLVKALHGRVKDHHRFVLMELLCQIDSLDETIARFDEQVKTYCAPFEEAVAAWDSIPGVSRRAAETIVSELGIDMDRFPEADHCAAWAGVAPGNNESAGKRRSGKTRRGNKALRAVLVQAAHAAAHTKDTYLSAQYHRLAGRRGKKRAIMAVAHSILVIGYHLVKRKELYRELGANYFDQIRPEVTAHRLLKRLERLGYQVTIQQQTQAAAA

SEQ ID NO: 73007 - protein, 330 aa, unidentified
MISYIGVDIAKRTFTAAVKTKKGTHTKGFRNEPEGYKQMLRWVEKLAGKSKHCFIMEATSTYYLPCALFLNSWGKKVAVVNPRYVHDFANAMGYKNKTDLSDAQVLAHFGEVKQSAYWQPPTKKIVQLRGLVKRREELVGMLVQERNRIQTPMLTEAQQKSLKKIITVLKQERDEIERELKKMVNADQKLRKTVDLLTSIKGVGFIVAVTLISIVGDIKLFKNKRAFHSYLGVSPRQYSSGTSVHWSQMSKQGLPAARRCLFMASRVGARYEPIFQEYVESLIKRGKSYKRAIAALMRKLAGIIYAVWSNETPFSAETYRKIQARFQSSS

SEQ ID NO: 73008 - protein, 349 aa, unidentified
MMYFVGLDVSVKQTSVCVVDEAGLVVSEHRVITEPDEIAKLLASLEGDYGRVGLEAGPLSQWLVNGLAEAGLPVICVETRHMKSLLKAQQVNKSDRHDARGIAQMIRVGLFKPVHVKTLASQEKRMLLTSRKLLQRKLLDIECDLRGTLRNFGLKVGAIGRGGFEARIRELVDGFPRLSAIVEPLLVVRRVMRQEFARLHKMLLELVRHDPVCRRLMTAPGVGAVVALTYQATVDQPQRFLHSKSVGAHVGLVPKRHQSGEADYDGGISKCGDTMLRTMLYEAAQTILTQTRHWSWLKAWGLRVAQRRGIRRAIVAVARRLAVILHRMWIDGTDFRWSRMDASAAARAG

SEQ ID NO: 73009 - protein, 348 aa, unidentified
MRFYNGQHRHYCGIDLHVKTMYVCILDAAGQVLVHRNVKSTPEAFLEAVAPYRDDLVVAVECMFTWYWLADLCAAEGIAFVLGHALAMKAIHGGKAKNDKIDSHKIASLLRGGLLPQAYVYPAAMRSTRDLLRRRLHLVRKRGELLGHIQNTRAQYNLPEFKRRLAYPANHDGVSEHFTDPSVRKSVEVDLALIEQYDGLINDLEMTLVRDAKRHDADAFHRLRSVPGIGKILAMTILYEIHDVTRFARVQEFASYARLVTCQKESGGKKLGTSGAKMGNVHLKWAFSEAAVLFLCHNAEGKKLLAQIQKKHGKGKALSILAHKIGRAVYYMLARGTVFSMEKFLHAS

SEQ ID NO: 73010 - protein, 345 aa, unidentified
MEVVNARCAGLDVHKATVVAGVRVPGPQPSARRGETKTFATTTRGLRDLTNWLLTHGVTAVAMESTGVYWRPVYEALEGSVQLVVVNARHVKMVPGRKTDVKDSEWLAQLLECGLLRGSFVPPRAVRDLRDLTRLRKALIRERGHHVNRIAKTLELAHLKLSCVVTDLMGKTGRAILHALSAGIDDPERLAACAQGLLRKKQAALREALVGRLTPHYAFLLQQHLSLIDGLDAHIATLDTRIEAAMAPFAEAAALVQTMPGVAARAAQAILAETGVDMDLFPTPAHFASWARLCPGNHESAGKRQSTTTGKGATWLRATLQETAWAAVRSKKSTAYRVDSERPHG

SEQ ID NO: 73011 - protein, 340 aa, unidentified
MRRYIRIGVDIAKNSFQVHALESEDCSATKRKLSRSGIVKFLAEVEPCAIGMEACGSAHYWARRFRAMGHEVKLTPPIYVKPYVKRGKNDAADAAAICEAMSRPNMRFVAVKSEDQQATLMAHKTRELLIKQRTMSVNALRGHLAEFGVIAAKGISHVEELVERAAAADLPAMVQATLGVLLAQLRSLDAAIDELERAIVADHRRDPVSRLAASVPGVGALAASAILASAPDPHAFKSGRDFAAWLGATPKQNSTGGKEKLGSITKQGNRYIRRLLVLGAISVLRAAPKRKGALCDWLAALRARKPAKVVAVALANKLARIVWAIITTGEAFRTSIYAKA

SEQ ID NO: 73012 - protein, 315 aa, unidentified
MAMPVSVTKPIVGVDVAKDELVIYHAETDRLEAIPNTKAAIKKWLKELPAPVDVAIEATNIYHQEFADLAYAQGCVIYMIGGYELSHYRKGVKVRAKTDALDARLLARYLNNEGHQLHPWTPPSPLYCRLISLFRRRAALVQARVSLKQSWSNEPLLKTAFEHQIKAMQRLEILLEKTIQTQLEAAGLSAQLKRCMKVEGIGLLSGARLLTSFQRGDFRNADAFIAFLGLDLRISDSGKKKGRRCLSKRGDPEARRLMHNAAMSARRTAAWKGFYEALRARGLSTTEALVALARKLARVVFALLKNQSEYLPKGI

SEQ ID NO: 73013 - protein, 444 aa, unidentified
MKTKLSVEVVNPHAAGIDIGSKSHFVSIGQQPDQVKEFGVYSAEHLKMIHWLKESGIKTIAIESTGSYWQTLFNALQVAGFEVILINGREIKNVKGKKTDVLDCMWIQKLHTIGLLRGNFLPDEYTRQLRTYYHHRQSLVEQSAKYTLKMQQSLRLMNIRLDVAIRDITGKTGMSIINAILQGERDANKLAGLADIRVKKSPSEIAASLQGEWKKDLLFTLKECHEMYRFYREKIKVADIQIEVLLNDGLTNKKPGLSFRKVKKKKAHKNDLRFDLRSIAYQIFGVDLYRINGISHGTVLCLLSTIGEGIHKFPGSKHFVSWMRLAPNNKITGGKLISSKTPKGRNKLSLALRQAANAIGNTKEHPLKKFFNRVAYRKGRGAAITATARKLAAIIYHMLTNKEEFNPDYLDHHQDHERQKKIISIKKMLAKVSLSEQERNYIFS

SEQ ID NO: 73014 - protein, 350 aa, unidentified
MERYKEFREKQVFFVGIDVHKKTYHVTGVWEDGREEFSKSMPADKEILVKYLDRWRLSRIFAVYEAGYFGYALHDYLIEHGIECKVTPPSLVPGEYGNRVKTDRRDSRKLALYCAKGFLKGVYVPTVEERSHRQVIRTRRQLVNDRIRKQNQIKSFLTQYGIPLPDVVGKWSKQYMEKLNCLRLHDRWLQKSFMELIRAYEFVDGQIEEQTNLLKELSKEERYRERVAILRSIPGIGIIGAMEMLLELQDVERFSTADQLAAYVGLTPSQFSSGDHVHMGRITRIGKHQLRALLIEAAWILVRKDVKANETYKRIRARAGSKRAIVAIARHLLIVGRRLLMNNTMYTRFA

SEQ ID NO: 73015 - protein, 367 aa, unidentified
MLYLGIDQHKRQLTVNLRSEDGTVILKRQVSTQWEKVRAFFADLAEKARPDGGFLAILEVCGMNPWLLGMLKEYGCREIVVTQPTERSKQKTDRRDAGVLSHLLWVHRQQFLDGKHPLGLRRVQPPTPQEADDRQITALRARLTKKRTAVLNGIHKILRKHNLEQDCPTKVFQTQKVHRWLSEIALPALDRLEMNLLLPQWEMFDRQLEVVEARIAERAAADEQAKLLQSMPGMGHYSALAIASRIGDIGRFKRPDSLANYFGLTPGCRNSGEATQRLGSITKQGSKIVRYLLGQAVIKVLRFDGAMRAWFKRIKKRRGSKIARVAVMRRMVTIIWHMLKRKQKYHYDSPIKKHREFEAFDGKSPVA

SEQ ID NO: 73016 - protein, 355 aa, unidentified
MNDAKYIGMDVHTATISAAVRDSAGNLVMEATLETKAETIIEFVHGLRGSLHVSFEEGTWAAWLYDLLKPHVTEVLVCDSRKNALLRVGNKNDREDARKLSELLFLNKLHPVYHGETGIRTLKELARSYLTITRDLTRVMNRLKAIYRGWGIACAGQQVYAPRYRAEWLAKITEAGVRRRAEIYYQQFDDLAALRQEVRRELLAESRKHPAMRLLRQIPAIGPIRAALLIALMQTPHRFRTKRQLWAYCGLALRTYDSGEYRFVGGQLKRSKKAVTIRGLNKNHNHDLKNIFKGAATRAAATAGPLQNFYEARIANGMKPPMARLTLARKIAAITLLVWKKGVCFDAEQLKQQAA

SEQ ID NO: 73017 - protein, 352 aa, unidentified
MKQDSENAAVSTIGVDLGDKYSQLCALDGAGEIVEEGRIATSASAFTRRFKTLEPCRIVIETGTHANWVHDLLVGLGHEVVVANARKVRPISANERKCDELDARMLARLGRSDARLLQPVEVRPAQIRLDLCRIRARDALVTARTMLVNSARGLAKSMGARLPSSSTNSLHRKELDPTVELALKPLMKALEGLTSRIKECDKALGELSGKRYPQTARLQQIKGVGPITSLYFVLAVADPCRFKDPRAIGSYFGIVPRRDQSGGRDPQLRITKCGDPLGRRLLVQCAQYILGPFGADSDLRRFGLRLAAQGGMRAKKRAIVATARKLAVLLFALLRKGEVYEPLRNSTKGQAA

SEQ ID NO: 73018 - protein, 378 aa, unidentified
MPSSVNFWVGLDVHKDSVTAAVFRNRDPEPLRVDRLPYDLHKFRRYFQRLQKEGNACACYEASGAGYVLQRALIEWDVECHLAAPSLIPRRPGEHRKTDRRDAIKIARDFRDGRLVLINVPTEEDERVRDLVRCRECFQREILKSRHYILKFMRRRGFVFRDGENWTVRHMNWIRQVLAPGTLTDEDHVVLSEYLALLEYKLQRRDELDGRIEVLALTPRYKPVVDRICCFRGFKTQAAMVIATELGDLRRFENPRQLMAYVGLVPSEHSSGDRRRLGAITKAGNARVRHVLIQAAWCYRKRPTVGASLRKRQQGQDPDVIRHAWKCQHRLYTLFHRLAANKPRQVAATAVAREMVGFLWAVLHEMDASRLQEVSAAA

SEQ ID NO: 73019 - protein, 375 aa, unidentified
MSAKLRFVGLDVHAETIAIAVAELDGEVRSLGTIPNRAESIRKMIKKLGPTERLRACYEAGPTGYVVYWQLAELGVPCEVVAPTLVPIKAGDRVKTDRRDAEKLARCYRSGDLTAVWIPDEGSEALRDLVRAREAAKQDQMRARHRLSKFLLRSGQRPPSGVRPWTRPYLIWVAQLRFAQIAQEATRQDYLHEVEHMRERVARLEQAISEAVRLASPALQQVINDLQALRGIGDISAVTIAAELGQVSRFDSARQLMGYCGAVPSEDSSGKRTRRGGITKTGNAHLRRIVVEAAWSYRRPPCIWYGLRRRQESISEEVKEIAWKAQHRLHKRYRTLGAAGKDHRKIVTAVARELLGFIWAIGTRAETITRQQSAA

SEQ ID NO: 73020 - protein, 355 aa, unidentified
MDHFAGLDVSVKETSVCIVDDTGKIIREVKVTSEPEALLAVLKGPAYCFKRIGLEAGPLSQWLFSALAEAGLPVICVETRRMQAVLKAQINKTDRNDARGIAQMMRVGLYRPVHVKTLRSQKLRMLLTHRKLLQSKAIAIENDVRATLRNFGLKVGMAGKVKFEMRIKELVQNQPDLGVLVEPLLIVRRVLREQTVILHRRLLAIVRGDDVCQLLMTIPGVGPVVALTYRATVDVPARFRKSKAVGAVFGLTCSKYQSGEIDRTGRISRCGDEMMRTMLYEAAQSMLLRSTKWSWLKAWAMQIARRRGMKKAIVALARRLAVIMHRIWVKPPPQHETRTGSNPIGENFELHRAVE

SEQ ID NO: 73021 - protein, 445 aa, unidentified
MNLEIVNPKAAGIDVGSRSHFVAKGQQTDDVKEFGVCASDHEELILWLKKYGIKTIAMESTGSYWQNLFSALQGAGFEVLLANGKFTKNIKGKKTDVQDCQWIQKLHSLGLLSGSFLPDETTEHLRTLCRHRSNLMDMAASTSKKMQKYLRLMNLRLDIVVKDICGLTGLQIIEAICQGESDSKILASFRHGNCRKTESEISKALQSNGRKDYLFALQQEYQIYNELQAKIIQCEYKIKEQLENTLKDQRQTEKLKTTDKIHKRINKNAPKSIDLNQVAFKYFGGIDLMDIEGLSHSTILTMMSEVGPGGLLKFPTGNHFASWLRLAPNNKISGGKILSSRIPKGSNRIKTALRLAANCIGNMKEANLHNFFMRICIRKGRTAAITATARKLAIIIWNMVVKKIPYNPPNQYEFLDQKRKRKILEMRKLILKLDIKPTEIGFVTS

SEQ ID NO: 73022 - protein, 359 aa, unidentified
MNKNSMYFIGLDLGDKYSYIAILDKEGELIEETRLPTTKTSFHQRFSMLSPCRVAMEVGTHSRWASHLLTGLGHDVLVANARKLRAIYHNPRKDDRADAETLARLARLDPELLSPIHHRSPQAQADLDVLRSRDVIVRSRTLLVNHTCSIVKSSGARLPSCSANCFASKAAPAVPETLRPALSPILETIASLTQQIREYDIQVEQLCQDLYPETKLLRKVSGVGPITALAYVLTLEDPKRFLKSRDVGPAIGLVPRRDQSGDRDPQLRITKTGDAFLRRLLVSSAQYILGPFGPDCDLRHWGLKLAERGGKNAKKRAVVAVARKLAVLLHHLWKTAEVYDPFYQSQKEEAGSAALPKVA

SEQ ID NO: 73023 - protein, 360 aa, unidentified
MGYATILGLDLGKFKSVCCVTDVAARAHAFETIQTTPQVLRDWLAKHVSSAADPAGVLLVIETCDTAGWVHDLATSLGMTCIVVHTIGDERWRWRKVKRKTDRDDALKLARLALLGELPPAVHMPGPAQRQKRRLIVHRRSVVSRRTRSRNAIRSIYSQQGLPLARGNKQWTKAGVAQLAEDARDIADCDDLDLWRGRLSAELELMASADAQLKALDKKLDALADERTALLQGIKGVGPRLAEAVVLHLDDPHRFKTGEQVASFAGLVPKQLQSGQTLRLGHITGRGPALLRSLLVESAWVVWRHNAWAQALVEKVSRGGRGRRKLAIVALARKLLIILWAMLKTNKPFRAPGVPAAATT

SEQ ID NO: 73024 - protein, 368 aa, unidentified
MQELITGFVGLDAHAESTAIAVAEVGRAAPRFVGSVGARLSELTKALARLGEPQRLNVVYEAGPCGYALARELIRLGYRCEVIAPSKIPRRPGERIKTDRRDALNLAGLARAGELVSIRIPDERDEAIRDLSRARVDAVRARHKARQQLKALMLRHGRRYSGKTSWSAAHERYLSGVSFAHPAQDIAFTEYRQAAAEGEARVRRLSESLSREVEHWRMHSLVSAVMTLRGLDLVAAATVVAELGDLRRFAHPRELMGYLGLVPAEHTTGSKRRLGAITKTGNPHVRRVLVEAAWNYRYPARISPALQVRQERQPPEIRAIAWRAQLRLNHRYRRLKARGLQHNKICVALARELAAFVWDIGRHVTPSP

SEQ ID NO: 73025 - protein, 421 aa, unidentified
MKVTYQTCCGVDVHKSFLVATIVKTTGGIEPSYQKKRFSTFNNSILEFKQWLLDNHCHDVCMESTGKYWVPVFNLLEDKINVVIANPKWVKAVKGNKDDTKDSKWIGDLFRLGLVKGSYIPCKKVRILREYTRYRYKLVSCRSSEKNRYQNALTVCNVALDSIVSDIFGKSSTSIIDYLLEQSGTSINHEEIASKLLRSLKSKEDAVIESVEGYQMTDAQKYRMRLVRAHMDYITAEINDVDKMIENMISSNPDFENAVQFLCTIPGVKRDSAITIISETGTDMSQFSSSKRLCCWAGLTPGSNESAGKKKSVRITRAGVYLKPALVQCAHAAVKSDKSPYYKKKYESLVKRRGKKRAIIAIARMILTAIYQMLSTGEQWNPSDLYKIDIPVALVEKKRQKLSSRLRSCCNGKDYFLLMNH

SEQ ID NO: 73026 - protein, 444 aa, unidentified
MAMRKRDDEVFPNAAGIDVGASSHWVAVPRHLAEAAVCEPVREIGAMTDDLNALADWLLALGVDTVALESTGVYWIPLYEVLEQRGLKVWLVDARQMKYVPGRKSDVQDCQWLQKLMSLGLLRAAWRPDGEVCVVRAVARQREVLITEQASWVQRMQKSLVQMNIQLTEVLTDVMGMTGQAIIRAIVAGERDPLVLARHRHSRVKASAQEITKALTGNWREEHLFVLRQALAMYDDIARHLVECDAKLQALLDLRSQARVDLGKAPKVGSKSRVEFDVRQALANWAGVDLTRINGLGVTVVMKLLSEIGPDVSRFASVKHFCSWLGLCPGTKISGGKVLSSGTKRSANRARQALKMAAMNLSHSDSALGAFYRRLCGRMDKPRANTATAHKLARMVYFMLTRGEAFVDQGQQRYEEQQRERSIAALKRRAAALGFRINPLEAAA

SEQ ID NO: 73027 - protein, 381 aa, unidentified
MSVRRILAKTIDTDLEYEAIGIDLAKNCVSAALLTTDGEVVCIDRLDYSELEKSAQALSPTTFAMEPCTEMNYLVQKLEAWGHRCLVIGGKNVQNYVENHYSGQKTDLNDAQALAFLAQDKQLRTIKAKDIEQQKYASLTTLREQYIKQYRQTIVSLKGICQAWGLNISKGISGKARLKDLIENHAAFPEELKESLVDMVTHAQTAQKALNKITKTLEELAKSDKVCQLIQTIPGLGSICSCRLRATVGDIKRFKSPKDFPAYYGLVPRSIATGHNERKGKITHRGDRTMRSLMVQAAGSLVNMATKGKLKSKQLTKWILKKQKEKMPWGKLVCAVAAKLLRIVRAVLISNKPYNSKIAGVAKCSLPKVLIPELMHQAIQS

SEQ ID NO: 73028 - protein, 447 aa, unidentified
MAPRKRAATQAAISLTHPNAAGIDIGSASHFVAVPPDRDDEPVREFASFTADLSRLADWLDACNVDTVAMESTGVYWIPLYELLELRGFTVLLVNARHVKNVSGRKSDVLDCQWLQQLMSYGLLHGAFRPAEQVCVLRSLTRQRAMILRSQGRFVQHMQKALTQMNIQLANVISDVAGETGQKILRAIVAGERDGLALARLKNSRIRASEDEIAQSLQGSWRAEHLFALKQALDAFDFCGTQLAECDAQIQAQLQALHVREDEPAQGKKRGRARNAPKFDLRTQLFQMCGVDLTRIDGIDVTTALVVLSEVGADMSKFPSDKHFASWLGLCPGTKITGGKVMSGKTKRCANRAAQALRLAAAALRSSQSALGAYYRRMCARMDKPKAVTAAAHKLARLIYAMLTKGEEYTDRGQDYFEERYRQRVLHNLAQRAKAIGMQLVPAESPV

SEQ ID NO: 73029 - protein, 342 aa, unidentified
MKITTVGVDLAKTVFQVHGVDEQGKPVIRKRLNRNKVLVFFARLEPCLVGMEACAGAHYWARELMVQGHTVKLMAPQFVKPYVKANKTDAADAEAICEAVARPNMRFVPIKNADQQAVLSLHRARAGFVKARTAQANQIRGLLGEYGIALPQGISHVARCIPDIVEDGERELPEMFRRLLQRLRSYLLELDIQVEELETQINAWHRSNEDSRRLAEIPGIGPLTASALVASIGDAKSFNNGRQLAAWLGLVPRQHSSGGKALLLGISKRGDTYLRALMIHGARSVVRVAERKRSSTDKWTTEMGTRRHTNVVAVARANKNARVVWALLAHQRTYDPAYQQAA

SEQ ID NO: 73030 - protein, 427 aa, unidentified
MPYRIAGIDVHKRMLTIVVCDVEVRGEYEFERRQYGSTPSQLRSLAAWLVERQVEEVVMESTAQYWKPVWATLERYWKPLQQGRAGARPMSGMLHLAQAQSNRGPRGRKNDFADPERLVKRLVAGELILSFVPSAEQRLWRTVMRTQHQLRCNQVQLQNRLEALLEEAHLKLSSLVSDLLGLSGRRMLTAIAEGETDPAVVAAQADYRLRATPEQLCDALGACGELHPVYRRLLKTALEDWQRIETLINQLGQEMATLLAAHQEQVQRLAEVPGLGIDSGQQIIAEVGASAATFPSAKALSSWMGACPGEEQSAGVNHSRRSPKGNRHLRRILNQAAHAAVKLKGSVFAILYRRYVVRFGHNQTIAVIAHRLCRLIWKILHQGVRYEERGPAVSQKSKQRRTARMIRQLRDLGYSVEMLKAAAAVTV

SEQ ID NO: 73031 - protein, 465 aa, unidentified
MKKGFAKNKLPDYDRCVLHETHKNHNKGEFKQMKKINRTNQRLEEITINTLIVGVDVAKSKQWARFVDYRGVEVEKAIYFSNDRNGFEFIVAKINELCNSKILKTPFTEVMIGMEPTGHYWKPLANYLMKQGLRVVGVNPYHTKKAKELDDNSPTASDKKDAITIARLVKDGRYFDPYMPQDIYAELRVLTNTRISIKKRSNAVKNTITAVLDEYFPEIVNVFKYPLKGKASRQVLKSCPFPAFILALGEDGVLAEIKKAVKKTVGLKKVQQLIETAKDSIGVDYGLESAKLRMNCLIAELDMIEANLNEVEASMEKMLDSTGYADKVLGIKGIGVVSAAMFFGEVGDPLRFDSDRQISRYAGYNLTEDSSGKNKSGTCISKRGRKQLRSILYKMAFTMVGQNVEMKELYNYLTTRKDNPLKKKQALVVVSKKIITVIYSLLKKQDTYKPELVIGAVRREMLLAA

SEQ ID NO: 73032 - protein, 416 aa, unidentified
MNKIFVGLDVSSKSFSMACINEEGKVILKTKSFRNSPQGASSALSSLLSIIPEGTPCEISIGTESTSFYDFHLANFFSSCQELQNHKVSVRRVNPLRINRFRKALHEIHKTDKSDPIIIAEFLRMGKNLPPPHNPSDPYAPLRSLTRFRVHLVNAIVREVNFLLSNLFLYLSEFASQKPLKVSSKTSLALIEELSPEEIAEKSVEEIVELLTKNGKGRFREPERIAETIKYLTRESFRIRAELARSVHFVLINSIRNIRAFKESLKEVSRAIREEMKAFPNTLGTVPGIGEILSAGIIAEIGDIGRFERDDQIAKLAGLVWGRFQSGGFEGEERRMIKSANKYLRYYICEAANSVRRNVVQFSNYYWKKYKESRSNHHKRALVLTARKFIRLVFNLLKEGKIFRPEGSSAEETNES

SEQ ID NO: 73033 - protein, 437 aa, unidentified
MDPSKQQLIAGKHIVGIDPAKKKHQAVILTPDGLQLGKSFCFDVSYEGYSNTLWKKVTFLVPNCNPENIVFAIETSCNLWMTLAFYLKAEGYTVVMVSPLTTHLSRPMAKHDFSRTDPKDALLVASNAHHGNFDLYQEYSSSTNAMHRLGITYDKLRKELAQNRARLRAALEHLFPEFLTILEPDTQTAHYLLKRYLFPQEFIAMDREREAKAITAISRHQHGMNTLLQLQHLAQRSIGVVKTLEECPAERLTVNCWLALIETLTAQIETIFSALVGLAQQLPEYDFLRSLKGVSHLSAALFLAEVRDIHRFRHYKQIQKNAGLNLRLSQSGQYVGARHIAHIGNRRLQWLLYCMAEETAKWIPEVRIKFLRRQLKSSKYRKNIIASTSSLLKLIMVLVKEQRPYQMRSETLDQMRALELQVAQRKEERQKQKKHAA

SEQ ID NO: 73034 - protein, 355 aa, unidentified
MNDEKYIGLDVHQATIVVAVMDSTGKLVMESILETEAATILQFFAGLRGTLSVTFEEGTWSAWLYDLLNPHVDKLVVCNPRKNALLKDGNKSDRIDARKLAELLRGNQLKPVYHGETGVRMLRELSRSYLTIVKDLSRVMNRLKAVYRSWAIPCAGRDVYYRRHRAQWLAKIREAGVRRRAERLYEQLDMLQHLRQQARRELLAESRKHAITAKLRQIPYLGPIRSALAVALIQTPHRFRSKRQLWAYSGLALETRISAEYRMVEGQVRRSKKLLSIRGLNKDHNHDLKGLFKGAATMASVRPGPFQDLYQAALAKGIKPTMARLTLARKIAAITLTLWKKGENFDAEKLKSQAA

SEQ ID NO: 73035 - protein, 397 aa, unidentified
MLSTNLQNSIDFNGQKFYVGLDVHKKSWAVTIRSLGIQIAHFTQPPSADTLFGYLQRNFPGGCYHSAYEAGFCGTGFHEQLCKLGINNILAHAADIPSTDKQKKNKTDLHDSQSIARYLEKGDLHGIHVLSREQQELRSVFRLREGKVKDMTRANNRLKSSMMYFGIALPEPISKKEYLSLRALAWLNNYEMASPAGRITLQQYIEELKYQRKQLYQITKLLRGQIQAIQAKSFEYLLSVPGIGGVTGMGLLAEIADFNRFDDPDEYCSMLGLCPWEDSSGDNIKTKGLQPRCNRHLRPLIIEAAWTAIRKSPTLFHYYSKHAGKDSKKAIVKVARKLALIARGVVIKQQPYQEDYLRKRKEEQTALKKTSNKRFSSGITEQHINKQPGNVFASWPG

SEQ ID NO: 73036 - protein, 423 aa, unidentified
MNHATLSIGADVHLDEIAFHTVNKADGHEVIDPFRVTNNLPGAQAAATTIAQTAARLGCARIEIGWEATGMLWIPFHRYLCHCPQLQSFELQLVCFNPQLVTNFKDGLVLRRPKNDKLSASAIAARLRFGELPLSHVPGDFWQGLRRLTRYRFHLSRNLSREKMRFQSYAFLKCSDWKRIKAFSDVFGATSITLLTEFTVAEMKEMTHDQLVDLVSRRGHGRFEDPTGTARKVREALRSSYPIDPQTDEMVTAALATGWDHIRFIKRSMERLDKHIAHYIDPVPNPIITVKGLGAVITAGLLAEIADIGRFAEHKHLAQYVGLTWEKRSSGNFVSQNTRLTKVGNKYLRYYLILGADKLRLFNLEYKAFYWRKYSEVSKYQHKRALVLTARKLVRLVHALLTKNVPYVRPQALAHVQQEGTLQ

SEQ ID NO: 73037 - protein, 347 aa, unidentified
MRFYTKTHKHYCGIDLHARTMYVCILDQEGQVLLHRNLPCDPERFLRTIAPYRDDLVVAVECIFTWYWLADLCAQEGIAFVLGHALYMKAIHGAKAKNDKIDSKKTAALLRGGLIPQAYVYPPEMRATRDLLRRRLHFVRHRGQLLAHIQNTHHQYNLPAPGKRIAYRSNREGIGEGFEDVSVQTSLAADLALIDHYDVVIRDLELTALRQARGHDLDSYERLKTIPGIGKVLALTILYEIHDMGRFPRVQEFASYSRLVKCQKSSVGKVLGTSGNKIGNAHLKWAFSEAAVLLLGKCPEGKKLLARIERKHGKGKALSILAHRIGRAAYFMLARKRAFDLERFVRS

SEQ ID NO: 73038 - protein, 351 aa, unidentified
MSRKTDAVVITTIGIDTGKNTLHLIGLDDQGTIVLREKLGRGRIRSRLANVPPCLIGIEAGMATHYVARELIALGHDVRQVPPAYARPFRHAHKNDFRDAYAIAAAVQRPSTRFVPVKTDDQLDLQALHRVRSRLVSERTAVINQIRSFLLERGISVRQGLRFLRQQLPQILAKRIDVLSPRMIRIVEDLGTDWRRLDERIDSVTEEIEQLAHGSERCRQLMTVPGIGPIIASAMVAAIGNGTAFAKGRDFAAWLGLVPKQMSTGDRTILGRISKRGNRYLRMLFMQGARVILLRPTNWAKHGFGPWLMGAAKRLHHNVLATALANKLARIAWTVLAQQRNYETRAIADMV

SEQ ID NO: 73039 - protein, 353 aa, unidentified
MELDKYIGIDVHSSTLVVNARDALGKVVFQGTVPTDREAILQCVGGLRGRLHVTFEEGTHAQWLYDVLRKRADDVVVCDPRENRLIQDGSKGDGIDAGKLSHLLRMGAVKAVYHGQHGTATLKELTRHYDGLVEDSVRVMNRIKAIYRSRAITTEGTRVYQPTKRDAFLAQLTEPGAGRRAEGLCQQLDMLLKLRRGAEKAMVTEARRHGIYRHLRSIPQLGPIRIAQLIAIVDTPHRFQNKATFWNYCGFAVVTHSSADHRFIDGELVRSRKAIATRGLNKDHNPRMKRIFKSAAAKARARGPFADYYSGLIARGLKPEVATIALARKIAAVTLAVWKKGEAFDPKKLKKTT

SEQ ID NO: 73040 - protein, 421 aa, unidentified
MQEEASGFAAFVGIDWADRKHDICLQVLGADAVEASVLEHRPKAIEEWAHRLRERFAGQRIAVCIELSHGPIVSALLEHDIFVIFPVNPSTLAKYRRAFTPSRAKDDPTDAAIALELLRRHPEKLKPLRHESLNMRALRRLVEARRDLVQDRVRITNRLTFTLKAYFPQVLDWFRDKETEVFAAFLERWPSLPDVQRARRETIVDFFHAHSVRRASVIDRRVDAIKSERPLTSDAAVIEPARLLVEALLPQLRAVSAGVTRLDDEIARRCRQLPDYFLFADLPGAGRVFSARLLAAFGEQRERFTDASAFQKFTGIAPVTERSGNKHWVHWRWACPTFLRQTLVEWVASSVPHSFWARAFYESHRAKGASHNATIRALAFKWIRILFRCWVDRTPYNESRYLAALQKRQSPLLKFAAQPPS

SEQ ID NO: 73041 - protein, 367 aa, unidentified
MSKAETGRLCVGVDLHKTQFTICALNEDGEYLLEKQYPTKEEGYSEFAREMHRFEEQGCSIELAVETTGNARFFKNRMESEFFAVKVVNTNRFKVITMSTKKTDANDAATLAYYLMKDMLPEAHLCSQTSEEIRRLLKTRSVLVQSMVKIKNQIHGMMLGYGIETKAAQLQSKRKRQELINDLEDHNFSAYTAPSLKVMLKILDDLSAEIKGIEKLLEEMVASNEDVALLMTVPGIGINTATVIAAYTAELERFDGNYKKFASYVGIIPSVHNSNETTHYGRITKHGPQELRTAFVQAALGMIRLTNVSSEWRIIKEYQRRKGDKGSGRAIIALARKITRIVFVMLSKREGFNPTLMRYEQEIQQTA

SEQ ID NO: 73042 - protein, 356 aa, unidentified
MPMLAERVDGVIGVDTHCDTLTAAAVTNLGGVLAHTTTSADAAGYQRLLGFADHHLPGRRCWAVEGTGSFGAGLAGFLHQHGERVVEVGRPKRPASRSGAKSDTLDAVRAAREALGQDHLATPRRRGQREALRVLLTTRRCATRARVAAIGQLKALIVGAPEELRAELRGRSTANQVQHCASLRTRPVRSLEHQATVRALRATAQRIQLLQAEADQLQAELAVLVDAVAPWLLEVPGVGPLSAAQVLVSWSHAGRFRSEAAFAALAGVNPIPASSGQVTRYRLNRGGDRQLNRALHTILLVRLRTDPDTRAYVARRTAEGKSRRDAKRCLRRLIARQLFRLLERYDRPGVEILRAA

SEQ ID NO: 73043 - protein, 433 aa, unidentified
MEEVTDEPLYRDRVCGIDIGKAGMVATIRVPSDGSPARRMAETRSFGTTKKEVLALADWLRCWQVPAVVMEATSDYWKGPFYRLEAEGFECVLADARQVKNLPGRPKRDPSDSRWLAACFERGAVTACFVATPEFRLIRLHTRYRRDLTAERTREKQRAEKLLESAAIKLSSVLSDLHGVSGRDIMDHLIAGERDLAVLAQLARRRARAKIAELEEALEGAEFFTAEHAALLGTMLERIDRIDAEIGRLTEAIDRLLAPYEEQVQQAESMPGWARRSAQDALAETGVDMTRFPTAAHLVSWGGRAPKDHQSGVRKGRAKAKKGNKYLGAALGETAVAAGRTRTREGARYRRIARRRGTAKAQVALGNTQLKVLHKLLSTPGTRHQDLGPDYYERQRDTRRQIAHHIGKLGALGFEVTLARLPDPDPEGQAPPA

SEQ ID NO: 73044 - protein, 457 aa, unidentified
MESYYMGIDVSKGYADFVILDAKKDVVEPNFQLDDTFSSHCRLFEILKRFFDHHSGSVLFAAVESTGGYENNWLHSLGGFQGTLDIRSARLNPLGVRANSKASLRRVITDKISARDVAEYLIAHPEKVTYQQEDSLAGLRRQWGFVRLLVKQKTQILNQFESLLYTANPELIAYCQAGVPAWLLKLLKQYPTATKLAKARATSVARIPYVTAGRAKELIDQAKKSVASATDETTGSLIAVMTEQIIRMEETIRIQTQQMAKQCAIPEVALLKTIPGISDASAIGLMLEIQSVKRFASVKKLAAHFGLHPAFKISGDGTSSVRMSKQGRKEPRKILFMAAMVALTTNPHIRKIYEEHTEKGMKKMAAIGLCMHKILRIIYGMLKNNQAYDSLVDQKNRESRTARQATHTAKNENRRYEMFDQQAPISRRQSNKRKEWKQSQSDNITQCGIGVPIPSAA

SEQ ID NO: 73045 - protein, 412 aa, unidentified
MEAIIERVAGLDVHQGSVVACVVIGAAGRRPTKEVRSFGAMRQDLAALRAWLLELGVTHVGMEGTGVYWQPVHAALEGAFTLIVGNASHMRNVPGRKTDVRDAEWIAELVRHGLVRPSFVPPPAVRVLRDLVRHRKALVGTLAAERNRTLKLLESAGIKLAGVMSSVFGVSGMLMLRALVEGTAAPGAMADLAKRRLRRKLDRLALALDGPLAEHQRLLLGMHIRRLEEIGRDIAEVEAAIGAAMRPFASQRALLVTIPGVDALTAAAIIAEIGVDMAAFGTARRLAAWAGLCPANHESAGRQKRRGTRKGDPHLKATLVTAAVCAARTRGGTYLRDKFHRLRARMGAKKAAVAIAHKILVAVFHMLQRAVAFADLGADYLDRLDKHRMARRLVRRLDALGYDVMLRPKAAA

SEQ ID NO: 73046 - protein, 366 aa, unidentified
MKKTSTVRVNKNTIFKGHKLTIGLDLGDRWSCYCVLDEAGEIILEQKVTMTPEAMKQTFSKIPQGLIALETGTHSPWVSRLLTKLGYKVIVAHAQRVQLITKSNRKDDRHDARTLARLARIDPELLGPVRHRSAQAQIHLTVIRARAELVSARTALVNAARGLVKSYGQRLPKCGTQQVSRELGAGLHAELREVLEPLLKEVESLNERIQEYEVRMEKIAKESYPHVELLKQVKGVGTQIALTYVLTLDDPHRFPKSREVGCFLGLCPGRRDSGESQPQMNISKEGDRYLRTMLVQGAHYILGPFGEDSDLRRWGLKLAARGGKNAKKRAVVAVARKLAVLLHRLWVSGEVYEPLRNSQKAMRAAA

SEQ ID NO: 73047 - protein, 406 aa, unidentified
MRVVGLDVSRTVAEIAYLENSEVKAGGRIELVHGVLSRWAATQLRVTDHVVLEATGNTTAVVNAVRPHVARVVVANPFQVRLIADARVKTDKIDAAVLAQLYASGFLPEVWIPDDATQTLRRQVARRAQIVRQRVRLKNEVHSVLHTYLIPRCPAADLFGRKGRAWLADQPLPLEERLSVEQRLRELDRLGDDLKAIDRVLGEAVLHSRAVQQLLTITGVNAIVAIGLWAAIGDITRFRSPEKLVSYFGLNPSVYQSGLQPARHGHISKRGRSHARAMLVEAAWAASKAPGPLRAFFHRIRAKRGLQIAAVATARKLAIVAWHVLTKDEPYAQHRPSLLAIKRRALELQAGLPARRGGHKGPAAAYSIKQLRDRERATVEREERAYAQRVANWQQRPPARRRSARA

SEQ ID NO: 73048 - protein, 322 aa, unidentified
MKYIGIDVSKATFVVAYSSDKGGEIRTFNNTTTGIKQFIGALPKDGSIHCVMEATGNYSALLLYMLNVAGITVSMENPLKIKNFARAMLSTVKTDKIDARLIALYGEKMNPQPFKIQGEAILRLRQKRTVIRQLTKQITAMSNLRGSLACLPVPDKGATHTVDETIEFLEKRRDRLQSELTDLVEVEFSRQLALLTTIKGIGITLATALIITTGGFTYFQNAKQVSRYLGICPTYEQSGTSVNIRGHINRNGDAYTRGLLYVAAWTASRFNTKCGETYTRLRQNGKPGKLAMIAVANKLVRQAFAVVTHDKEYVDGFVSNRP

SEQ ID NO: 73049 - protein, 355 aa, unidentified
MAIVAHTHPFVVGVDTHARNHVLAILAATGEVIDTGQFPTTAAGMARAIAWAARRTGADPATLWVIEGVASYGAGLATLIERSGYQVVEAARMDARANRGIGKSDPLDAHRIAAAVLPLDTRELRRPRMAEGVRAALRVLVAARDHMTAERTATVNALIALLRVVDLGIDARKPLTGTQIATVARWRARDEELGAATARTEAIRLAKRVLELDEQVAANTARMTQLVQTSQAAPLLDKTGVGPVTAAICLTAWSHHGRVRSEAAFATLAGVNPIPASSGNTVRHRLNRGGDRRLNRALHIAVLSRMTHDPETRAYVERRRAEGRTTKEIRRCLKRYLARQIYRLLNATDTATTPA

SEQ ID NO: 73050 - protein, 347 aa, unidentified
MELLHRRCCGLDVHKETVVACLRLVSDGKVTTEVRTFQTTTADLLRLSEWLAANECTHVAMEATGVYWKPVWHILDDGDFKLVLANAAHVKNVPGRKTDVNDAMWLAELLAHGLIRASFVPDAQTQEMRNLLRTRKQLVREQSSHVLRVQKTLEDANIKLDSVLTDLMGKSGRAMIEALIAGETNPAKLASLADRRVKASPEEFRDALRGRVTKHHRFLLRLHLNQIDALDAAMATLDAQVEANLGPFRTAVELIMSIPGFKNLGAHVIVSEIGIDMSRFPSAAHLISWACICPRNDESAGKRRSNRVRKGGTWLKTMLVQCGWAAVKKKGSYLQAQFWSLRQPPSQ

SEQ ID NO: 73051 - protein, 342 aa, unidentified
MLHAGIDLHKKTSVVTVVDDDGAEVVAGYRLENEEDEIREFFASFDGELDVVLEAGPSWQWMCDLLDDMEIDNVLCHPLKVKAIASARIKTDRIDSGILAQLLRMDFLPESYKPDLDTRHLRELLRYRASLVRLRTSTKNRVHALLARLNIRHGFSDLFGKAGSSFLRELQLAPVYRRALDGNLSLLEALGSLIKDAEEGLTPFYQQSADARLLSTIPGVGPILALTIASEIGDIGRFQRSKQLASFAGLVPSTSQSGAHSHHGHVTKQGSPWLRWALVEAVIHGVARPGPLKSHYLKLKAKKGNKIARVACARKLATYIYHMLKENKDFTEVTAYLKSDLG

SEQ ID NO: 73052 - protein, 428 aa, unidentified
MAEDTTLTSQTWLVAIDIGKAFHAVLVEGGDGTRQQFRMANHVEDYDRLVVFLRGLPGPARIALEPTGDFHRTLAHRLLREGFSVVSVSSVAGARYREALFNSWDKNDPKDAHVILQLLKHGLVQHYHDPLLAGDHDLQELAKTYHQIVLARKRLADSLLNHYLPLYFPEMGRYWESTRVEWFVAFLEQFPTPAAVQALPKEAFVRAAWSVVGRKVNKQAKLEELYELAQRSIALPVAVDSVAIETFRLQLAQLRRLAELRQTLEARAHALLKDRADFQRLCSLPGVAAILALVILAEGGDLRRFPHHRQFLKYCGLDLAKCQSGQFRGRARLSKRGNARLRMAFWMAAQRAVRMNENSFRDKYERYTRHDSGNPDVRRKALTAVAAKMARVAYAVVKHDQPYHGYHEHALPSGSIPLKRAVGARATP

SEQ ID NO: 73053 - protein, 344 aa, unidentified
MEPMYYIGLDVHKRKISYCVKDSSGKVFAEGSLPATRLDLDLWMKTLPQPWSAAMEATMFTGWIYDHLKPHAAALKVAHPLMLRAIAAAKKKNDRLDASKICDCLRCDFLPECYMASTEIRERRRTLRYRNLLVRQMVQMKNKISGLLMEAGVSYNKQRLHRAGYFRELLATNSDIDEGLCSLLRLCRETVVRLQKTESAMVLSLERDSLLMDRVERLMTIPAVGPITALTWALEVGDAQRFSSIKKAISYCGLCGAEKSSGNTVQRTPLSKQRNKHLQSTLIEAAKMAPRYSPNLAMLYDKEKQKGNANRATLAVARKLVAYLMAIDRGQRNFQAVETNCIAA

SEQ ID NO: 73054 - protein, 334 aa, unidentified
MTSIAHTRQVTVTGIICGVDISSSSLEARIGQQGAAASFPNHAEGIAALAGFCREQGVELVAMEATGGYEQQSFAQLSQTGLPVAILNPRAVRQFAQSMGRLEKTDRIDAGMIAWYAEVKPSPPVCLAPQSQQHLRALVTRLRQLTDIRTAQLNQQRLVTDRSVQASFKKLLALVARQIRDLEQAIAKLIEQDPLWRELNQAFRTIKGVADRTVARMMAEMPEIGTLSNKTISKLAGVAPMARDSGQYQGKRMVRGGRASVREILFIVASVVGRYEPDFIAFQQRLRAAGKPLKVVRIALAHKLLVRLNAKAREVRRHSAALEPASSALLLEKI

SEQ ID NO: 73055 - protein, 312 aa, unidentified
MTNIICGVDVASEWLDARIGRDGATARFANTAEGIEALAGFCRRRDGVLVVMEATGGYEKRPFALLWGQGVPSAIVNPRSVRRFAEAMGLFEKTDRIDAGVIAWYAETKRIKPCEPAGETQEHLKALVTRLRQLTDLKTAQTNQRRLVSDPTVLRGFEEMLGLIAQQIRILEAEIAQLIDGDPLWGKLDEDFRTIKGVADRTVARLMAELPEIGLLSAKAISKLVGLAPLAQDTGKRVGKRSIRGGRSTVRSILFVVAEIVRRYDADFAAFHKRLTEAGKAKKAVRTALAHKLLVRLNAKARDVRRQLECPA

SEQ ID NO: 73056 - protein, 348 aa, unidentified
MIVIGIDPHKSTHTAVAVEGTGRKLAEKTVAARSAGHLELVRWASRFPERRFALEDVRHLSRRLSSDLLLAGETVVHVPPRLMAGARRSSRERGKSDPIDALAVARAALREDLPAAVLDGPEREVRLLVDHRDDLVAERTRMQNRLRWHLHELDPGNEPVARGLDRTVVLDALRERLADAPGTVGRIARELVVRIRELTAAINGLEREIAGLAASLSPILLELAGCGSLGAAKLVGETAGIARFRSAAAFARHNGTAPLPVWSGNTERHRLSRTGNRQLNLVLHRIAITQIRLGGVGRAYFTKRLAAGDTKTEAIRALRRKISDEVYRRMREDEQHRATPRARLAAAA

SEQ ID NO: 73057 - protein, 343 aa, unidentified
MELQAIGIDLGKTVFHLVGLDARGNVVVRKRCSRTQLLAYTANVRVQLIGMEACSGAHFLGRALRAQGHEVRLMPAQYVKPYIKTNKSDYIDAEAIAEAVQRPTMRFVPIKTEEQLDLQAVHRVRERWVMRRTAVVNQIRGLLLERGLTLPKGRSHVDHALPEILTDPALTLSGSFRVLLGQLQLELEQLTARIEQMDAVIRKTCRENEACQRLTAIPGVGPVTATALVAAIGHGAGFRRGKDLAAWVGMVPREYSTGGKQKLLGISKRGNSYLRRLFVQGARVVLQYRAKQAPGLSVWLSQLMARAHQNVVVVALANKLLRMAWAVLCKGETYRVPVLATAA

SEQ ID NO: 73058 - protein, 317 aa, unidentified
MPQPDLFVGIDVAKNELVVRLHPLGEEWRFANDKAGLKALERRLKAFAARYHLLIGFEATGGYERKLAALLDRLGLTAYLLDPARVRNFARAERQLAKTDPLDAAVIARCLAALHPELTPYRHDPQAARLAEHVRMRDLAVAQRIQLGNQLETLDDPAMRRLVKAQVGKLKALALRIEKAIAALIAASPDLATRERLMRSAPGIGPIVAACLLAHMPELGALSSRQAAALVGVAPFDRQSGATRKPGRCAGGRPAVRRCLYLAALAIARSKKGPLAQTCQRLRDNGKPAKVALVATMRKLIITLNAMLKSQQTYRPA

SEQ ID NO: 73059 - protein, 331 aa, unidentified
MYNYIGIDVSKQSLKISDETKEYDVPNEKGLKTLKKLFRKNYGKDWKETRLIYEPTGPYSNYLREFVFKHKIRIYEMNPKKSANFAKALGNRSKTDDIDAKMLYKFHVLLKEEDFRIPEIDKVAEQLGAYVSSYRIIQKTRTMLSNHLQSREYENGIDPKLKESIKKEMEKLKQIEEALEKKMEAFGRDNPEIKEDFENLLSIKGIGVISATALLYLFRKYPDANRNEITALAGLDPVKRQSGSSINGGRKISKAGDSSLRKILYVSCLSSIRYNDRIRVFYEHLITNHKKPKVALIACMRKILLIAHQIYVKKSEYKPLYIDNKSLCSSY

SEQ ID NO: 73060 - protein, 321 aa, unidentified
MERTIIGIDVAKKKFDVALLLGEKTLSSAFKNTPEGFTMFQRWLERHEVERVHACMEATGTYGEDLATYLHSAGHMVSVVNPAKIKGFAQSELARTKTDKADAALIARFCRAMRPEPWQPPTPEVKELQSLVRRLESLNDMLNQERNRLAITRGIARESIERTIAHIETEIETTKRLIREHIDKDPDLRNKRDLLETIPGIGPATSAMVLAEFGDVTRFQDARHMASFCGLTPRHRHSGSSVRGRSMLSKTGAARIRKALFMPALSAITYNPVIRAFRERLAMNGKSRMLIVGAIMRKLVHIIYGVLKNGRPFDPSIAAAA

SEQ ID NO: 73061 - protein, 355 aa, unidentified
MSSEKYIGLDVHQATICVAVMDAKGKVVMESILETKATTILEFFAGLRGTLSVTFEEGTWAAWLYDLLKPHVANLVVCNPRKNALLKHGNKSDKIDARKLANLLRLNDLEPVYHGETGVRMLRELARSYLTIVKDVSRVMSRLKAIYRSWAIPCAGRDVYYTRHRGEWLGKIPEAGCRRRAEQLYQQLDMLQPLRQQARRELLAESRKHTITAKLRQIPSLGPIRSALAVALIQTPHRFRTKRQLWTYSGLGLETRDSGEYHYVEGQVRRRKKQVFIRGLNKDHNHDLKGLFKAAATRASVRPGPFQDFYQRSLAKGIQPTMARLTLARKIAAITLTLWKKGENFDAEKLKAQAA

SEQ ID NO: 73062 - protein, 406 aa, unidentified
MTTKLMSGIDLHSNNLFCGIVDLDGKRVFEKRLPCELPHVLTALKPFKENLQTIAVESTFNWYWLIDGLQDAGYNVVLAHPTKMVQYNGIKHTDDKSDAFFLADLLRLNILPTGYICLRKWRSVRDMLRRRAALVQKRTSLILSLKSMHRRTLGQELSQSRVKAFVPETAAQAFDDPSDQLVARVQTRLLNEFADAVEELEKEVYKKAADLPFFPVLETMPGVGKILSMTIALETVDPTRFEGPGNYASYCRCVASSRISNGKKKGENNQKCGNKYLSWAFVEAANLSKRYDDQCRQYFDCKAAQTSNIVATKTLACKLAKAAWHMMSKNANYDPSRIFPSRPAVIKMTEQAATKKTHDAKAAPIGGGLASPLRVATGDDASKGSKARRRRSPAPANKTARSTQKK

SEQ ID NO: 73063 - protein, 352 aa, unidentified
MSTSKITEVILGVDTHLDIHVGVLINVNGQLLGTLAVETQVSGYLKLLAWAKSFGLFQRAGVEGTGTYGAGSAQVLRDDDIAVFEVNRPDRTKRRLEGKSDPTDAESAARSVLSGSATAVAKTRSGAAEAMREISVVRRSAVKAKTQAINQIRSLLVSAPQEIREQLWDTKPAECVGNCLHLGSLGSAPFLAVLATSLRLLARRWTALAAELKELDDMLESLTQQYAHRLRNQFGVGPQSAAILISVAGDNPERLKSESALAALCGVSPLPASSGKTVRHRLNRGGDRSANNALWTIAMVRMRSDSRTRAYVARRTAEGLSSKEIQRCLKRYIIRDLYPLILADLTESRHVG

SEQ ID NO: 73064 - protein, 436 aa, unidentified
MQILYSRCCGIDVHKDSVTVCVLVYSDTPEPEVRKKEFATYFKALLNLKMWLLSQRVTHVAMESTGVYWKPVWQALESNFELILANPYQVKNIPGKKTDARDSQWLAELLAHGLIKPSFVPPAETRELRDLARYRVKLVEECNRTHNRIHKVLEDACIKLDTVATDILGASGRSMIRAIIDGKTNPDWLADKAQTALRGKLPQLRLAMRGRITEHHRMMLRELMEDLEFTEGKIQRLDQTIAGRIDVEKLTRLCTIPGVSAITAWTLLAELGSDMSVFRGPKNAASWAGLCPGNNTSGGKRLSNRTRKGNRWLRRALCQSAWAATRKKNCYIAAFFYRKAGKHGIRKAIVATAHRLLVIAFCILRDGSEYRELGGDYFDLLHPERTRNRLLRRLQRLGFDVALQPRTDIPIASPTRRKAGRPCKCSERAIPCKHKT

SEQ ID NO: 73065 - protein, 385 aa, unidentified
MPDVSSNAPAMVRMRAALDVHKRSIVCASQPDDPRAGELRVQEIPNTERAIRGLVRRLGGPEGLVVCYEAGPCGYDPYRLFTAIGVACDIVAPALIPRAPGARVKTDRRDAKRLLVLHRAGALKFVYPPTPAQEGLRDLVRCRDDLVCARRAARHRVVKQLLRYGHIYREGKKGWTKRHIAWVRRQRLDDPLAQAALEHMLAHLDSVDAQIAALDHQLDEIAAREPWSDPVRWLCCFRGITTLTALALLAEIGDFRRFATARELMSFLGLTASEYSSGDQRHRGHITKTGPRHARRLLIEAAWHYQHPPRRPLRTGALAEPVPSAVDARAWQAQIRLHHRYRHLTDHRKRSTVAVAAVARELAGFIWAAMTHQPVRTDQQLTATA

SEQ ID NO: 73066 - protein, 409 aa, unidentified
MKLYVGIDVSSTDLYTCIMDQEGNTCAQFKTDNHLLGATFLRDQILRWANERQPSEILIGMEATSVYSWHPAMFFHQQEELKSWNVKVFTINPKLIRKFKEAYTDLDKTDGIDAWIIADRLRFGRLKVTAVMQEQFIALQRLTRMRYHLVHQLTREKQYFLQHLFYKCSSFTQEVDSSVFGHAILELLLESFSLDEISQMDVQQLADFLRQKGRNRFADPACIAKSIQKAARSSYRLSKCVEDSIDLLLGLSIQSIRSLQAQIKELDKAITRHLEGIPNTLQTIPGIGPVYAAGILAEIGQIERFDNQAALAKYAGLTWSKHQSGRFQAEETSLIRSGNRYLRYYLVEAANSVQRHDATFLAYYRKKYEEVPKHQHKRALVLTARKLVRVIDALLRNGQIYTPRKGEDR

SEQ ID NO: 73067 - protein, 422 aa, unidentified
MLARSQDEEQIIARVAALDIGKAELVCCVRVSAEGDSKKRLQEVSTHSTMTRSLTELANHLVDLRIERVVMEATSDYWKPVFYLVEAHGLEPWLVNARDVKHLPGRPKTDVLDSVWLCKVAERQMLRPSFVPPAPVRRLRDLTRYRVDLVGARTAEKNRVEKLLEDACIKLSIVASDIFGVSGREMMAALIAGERNPSVLAQMARSSMRRKISELEEAFTGHFDDHHAFLLARMLARIDGIDADIAAVDEQIEALLAPFTAAAERLDEIPGIGRVAAAIILAEIGDDMTRFPTAGHLCSWAKFSPGINSSAGKTKGNGSTGHGNRYLARVLGEAAVGVGRTDTFLGERYRRIARRRGKNRAIVAVGRSILVIIWHLLQDPDTRFHDLGSDYFSRRTNPDTRKHNHVRQLEALGYTVTLKPAA

SEQ ID NO: 73068 - protein, 343 aa, unidentified
MQTITAIGLDIAKSVFQVHGVDADGQVVVRRQLKRRYVLAFFQKLPPCLVGIEACASAHHWSRELQALGHTAKLMPPAYVKPYVKRHKNDAADAEAICEAVARANMRFVATKTPEQQSCLTLHRARHLLMRQQTSVINAIRSHLAEFGIVAPVGRNGVEQLLGVVADSNDRRLPEIARACVAALGAQLRVLKVQILEFDRMIRAWHRSSEASMRLDQVPGVGPVLATALVASVADPKAFRSGRDFSAWIGLVPKQNSSGGKERLGNISKRGDRYLRSLFTTGALAVIRYAKIHGTKHRPWLTSLLARRPTKVAAIALANKLARMAWAMMAKGERYKEPAALAA

SEQ ID NO: 73069 - protein, 403 aa, unidentified
MNSVGIDISKGRSTIAVMRPFGEVVISPFEVRHTGSELSKLARQLKSLDGETRVVMEATGNYHASVAKLLHNAGLYVSVINAKLVHGYGNNELRRVKTDRKDAVKLANYGLDRWLTLPRYIPEEDTRLLLKNCYRQYRQYSKVQTVLKNNLISLLDTVFPNANRLFSSPIRGDGSEKWVDFVAEFWHCRCVSEKSERAFTSKYLRWCRKHGYNFREAKAHTIYAEASGHIGVMPKSETTKLLVKQAVSQLRATSTALAALKQEMQSLASVLPEYPVVMDRFDVGPTLGPQLIAEIGDVRRFYSKKALVAYAGLDAPPNDSGDVTGRHKSMSKIGASSLRRTLFLVMSVYLQTAPLDEPVYQFMDRKRAEGKPYRVYMMASANKFLRIYYATVKAYLESLEHTA

SEQ ID NO: 73070 - protein, 336 aa, unidentified
MDNIEACGVEVSARELVVARKGKSGVQLTRFANTAAGHRQLLRTLTRGGQRVRVVLEATGLYALDLALLLSAQEQVQLMVANPRAVRHFAQAMMQRSKNDQLDAVVLLEFAERMPFTPWVRPQENTLTLWAIARRLQALTRLCTAEKNRAHAMGLSAAIPATVRRDIIRSLQFHQRAMKKLRQQALQCIAADAQLQQRYKLLRSVPGLGEISAVQTLAELLLLPADRDVRQWVAYAGLDPREYSSGTSVRKYTRISKVGNAHLRRALYMPALVASRVEPHMRGFYEHLLARGKSKRQALVAVARKLLHAIYGMFRSQQPYDGTRVYLPSCLAEKPS

SEQ ID NO: 73071 - protein, 338 aa, unidentified
MYYIGMDVHKKVTMICILDDHGKVVREIKVSGSLLVLMKRLKIIKGELSGTIKICFEACGCCGWLHDQLVALGMQVQVAHPGKLRMIFRSKRKNDRIDAQKLAKLLYLGEVPLAYVPTIDIRQWRGLIEYRHGLVVRRGSCKRRLRALLYSHGVETPRGLWTIKGRTWLKGLELPDYSALQRDLLLTELRELEGQILIVEKTLRKKADQVPGVGLLMTIPGVGIRTSEAVVAYIAQPDRFRRNKSVGCYFGLVPCEDTSVKTRLGHITKDGPATVRWLLTEASWQAVRRDPSVKAYYEKICRDDLKRKRIALVATAHHLLRVMHAMLRTGEVWRPAAA

SEQ ID NO: 73072 - protein, 371 aa, unidentified
MESIIYVGMDVHKDTYSLCSFDAKRNLLFSQTQMKSTTANVVRYLKKVSEMNNGALTVCGYEAGPTGFGLCRELQKLGFACVIIAPSSIAKTARDKAVKTDKSDAQMLSKTLAFHSYKEVVLPSENIEAIKEIVRMRCSVSKTCRRAKQNLLSFLLGHGFSYSDGKYWTVKFSSWLKTIHFESEYLTYCFEEYLSEVTRQIQRLDLLDKKLKELEDDKEICDGVKKLKCICGIDTVTAVSLVAETGDFNRFSAAKHFASYTGLCPGRHSSGLSDKSTGITKQGNNYLRRLLIEAAKSVKRSAPHGHKSKRILLRQEGASPEVINYADKAASRIRMKMYHLERRGLHCNKAAAAGARELACFAWGMVTGHIA

SEQ ID NO: 73073 - protein, 344 aa, unidentified
MAKMPIAVLGVDLGKNSCSVAGLDVNGAVVLRRRMTREGLVAFASKLPTCTVAMEACCGAHFLGRTFASQGHTVRLMSPEYVQPYVKSQKTDDRDAEAIAEAATRPTMPLVTLKSEAQLDLQVLHRARERLVTARTRLTNQLRAVLLERGVILPKRRATLRHRLHELMAGELPISPRVLRLLQDLREEWESLDERIGAYDDELAALTRENPQARQLATIPGIGVINATALLAAVGDGSAFAKGRDLAAWLGLTPRQHSTGGKTKLLGISKRGNKYLRTQLIHGARAALVHFAKTSTRIGAWIRQLLSRAHPNVVVVALAAKMARIVWAVLRHGRAFEYQAHSMS

SEQ ID NO: 73074 - protein, 400 aa, unidentified
MDPVIGLDVAKGESQVQAFLQRKETYKQSFKFTHDLPGLQSFHSFYKELEKVSGQPPAIIFESTGHYHEPVLHFLENNDIVYYLVNPVISFEARKTNLRQVKTDKADAYHLGELYYKEDLEIYQKKTEKALNLRLLTRQHSALTDSYVQIKLQFQVALDQVFPEYHTVFSDLYGKLSLNTLLNYPTALDVHKVTDAKLAEEMRQFGARRSHEWFLDKAQQLKLAAKRNPFQSQISQGQLISLRMYIQMLFQYQEHLSKLLKEINTLSKSFEEYRLIQSVPGIGDKIAATILSEIGDINQFENPKKVVAYAGLDPSVFESGKFKASINRITKRGSSRLRQTLYTAVQCGLAKGRNKKLRAFYERKRNEGKPHKVAIIACANKLVHWLYAMLKRQEVFVDLV

SEQ ID NO: 73075 - protein, 346 aa, unidentified
MKILALDLGKYKTVGCDYEGESGVHQFKKSYTTPAALQKLVQEVKPDRVVIEVCSIAGWVCDLLRPMGVEVQVANTSDDAWRWRKVKQKDDRRDALKIARLSAVNQLREVYIPQIEVRQWRALITYRQQLVRRRTKIKNHIRDLLLREGQILVRGSKCWNKLNLELLSSLAQPLAEVSMAELWRGELHEELQQLQLLQARIATVEEKLNGMGAADERVQLLRTIPGVGPRLAEAIVALLDQPQRFRKASQVSGYIGMVPKALDSGETERRGRITRQGSRLVRSLLVEVAWAGLRHSAWVRQTYQRLSGGKKARKKIAIVAVGRKLLVRCWAMLRDKRAWDWQPQIT

SEQ ID NO: 73076 - protein, 403 aa, unidentified
MRSVLSIDVANGKSEVLLITEYGEVLIEPYEVKHCLSEFNLLKEKIDSFNLNDLTIFMESTSTYHLPIQRFFTKNNYNVQVINPILGKNNTRNLRKTKTDIEDCYNLADLFFKNTVKIHTKTMNDIYSSMIELSRQEKHLTESLVRSKNRFKQIIANAFPEYLKCFTASDIYGETSLNFIKEFPHADIIKSKRIDALTNNIYKSTKRYLPYSKCLNKAKKIKELANNSYPGIDVNSCEVKNLINIIEIISYSDAKLSEVKQDIIKLAKQTPYFNIINSIYGVGETSTAQIIAELGDINRFENIKQLNAFCGLDPTIIQSGKSINYNGPISKRGNRNARKILFITCCSIIRSSVLHNVDNDLLLYYRKKQAENKHFKECIIACSTKLLRTIFAMCKNNSLYAQK

SEQ ID NO: 73077 - protein, 338 aa, unidentified
MNIVFLGIDLAKNVFQLCGLNLAGKPVYTKRTGRKELLQTLANIPTCLIGVEASTGAFYWQREFEKLGHKVKVISPQYVKPFVRGQKNDGNDAQAIAVALMQPTMQFVPPKSPEQQDIQALHRARQRIVNHRTATVCQIRGLLLDRGIPIGSAVSRVRRAIPLILEDAENGLSSRMRRTIAELYELFNDLGRRIHFFDKEIETVFRQSEACQRIARVKGIGPKTATAVVAAIGKGTEFKNGRHFAAWLGLVPRQHSSGDRQVLMNMTKKGDKHLRTLFIHGARAVVRVATNNDDGHMNQWVNQLKGRRGFNKTTVAVANKNARIIRSMLRNETEYQVV

SEQ ID NO: 73078 - protein, 344 aa, unidentified
MEIRRVGVDLAKNVFQLHGTDGKGKAVWKRQLSRDKWLVTLFSQVKPGAEVGMEACAGAHHWARILRAAGYHVKIIPPQFVKPFIKGNKNDANDAQAICEAMVRPNMHPVDIKTVEQQDIQAIHRVREEIKTHRTAKANQIRGLVAEYGLVAPKQLSSLRTAIPVWLEDASNGLTMVFRQLLHGLWDDLRALDKRMSELDKQIAIVAQENPVARRLQQLRGIGPLIATALVGTVGHGKQYRKGRDMAAAIGLTPRQHSSGGKHRLLGISKRGDAYLRCLLVHGARSAMRTAKDKDDRLSRWIRHLQERRHANVAAVAMANKLARIAWAIMSKEVDYDPEFASAT

SEQ ID NO: 73079 - protein, 377 aa, unidentified
MKKELYLGLDVHKDCILRAVAEEARRGEVRDTGAISNDLHAVEKWIGRLRKVHGKEVILRACYEAGPCGFGLARRLRQLGVECEVVAPSMTPTRTGDRVKTDKRDARKLARLLRAGELTPVYIPEATDEAIRDLCRARTDAVDDRRRSRHRLKGFLLRHGYHYQGKTSWSAAHERYLRELVLPHPAMKVILEEYLSSIKAASERIARCEAAMRALLDKWRLRPAVEALMAMKGFQTVAAMIVVSELGEVHRFTHPRQVMAYLGLVPSEKSSSDRRRQGHITKCGNAHARWLLVECAQHYAAPPKVSKELSRRQQNQPPVVRLLSWKAQNRLHQRYRRLMARRLQRNKVIVAVARELCGFIWELLRTQECITRPRHQE

SEQ ID NO: 73080 - protein, 338 aa, unidentified
MTCYSGIDLHSTNSVVVVSDEADRVLYQRRLPNDLGTILAALQPHRAQLAGVVVESTYNWYWLVDGLQAAGYSVHLANPAAMKRYEGIKHSGDETDAAYLAHLLRLGILPTGYICPPQERAVRDLARKRSQLVRSRTAHVLAVENGFARETGARLSSNVIKRLEAAALGEFGLGEDVTCSLAANVAVIQALTAEIGKLEARLRQRVRLRPQFRVLFTAPGIGEVLATTIMLETGPIERFAAVGNFASYARCVDSKHLSNGKKKGQGNVRNGNRHLAWAFIEAANFARRYCPEARRFHDRKRTQTNGIVATKALAHKLARACYHMLKDGQPFDVKRCFA

SEQ ID NO: 73081 - protein, 343 aa, unidentified
MDHFAGLDVSVKETTVCIVDDTGRIVREVKVASEPEALLQVLANPAYRFKRIGLEAGPLSQWLFSALAEAELPVICVETRHMRAVLKAQVNKTDRNDARGIAQMMRAGLFRPVHVKTLRSQKLRMLLTHRKLLQSKAIAIDNDLRGTLRNFGLKVGMVGAARFEARIKELVENFPDLGVLVEPLLIVRRVLREQLGILHRRLLAVVRDDDVCRRLMTVPGVGPVVALTYRATVDVAARFRKSKSVGAVFGLTCSKYQSGEIDRSGAISRCGDEMMRTMLYEAAQSMLFHSTRWSWLKAWAMKIARHRGMKKAIVALARRLAVILHRIWVDGTEFRWTREAAAA

SEQ ID NO: 73082 - protein, 353 aa, unidentified
MERGYYVGMDIHKKYSQVVVMNEKGEVLAEGRLGHDVGRKELREMEAIAGQSKVAIEATASWGWLAEELEGMGMEVHLAHPGGVRLIAESRLKTDKVDARVLAHLLRTGFLPEAYLCPREVREKREMMRYRLGMVRMRTAAKNRIHAQLARLGIEVGQTDLFGKGGREFLRGLELPKMERDHLDGWLEIVEHLDRLIKKATERIERSLAEDPRAEFLTSIPGIGKLLAHTILAEIGEVQRFHSERAFSSYAGLVPTTRQSGKVTRFGGLVKGCNNYLRWALVEAAQVASRCDIQFRARYLRLKKSKGSAVAIAAIAHKMAKIVYTVVKENRPYHRFQHEPLRVGPLPRMVANG

SEQ ID NO: 73083 - protein, 348 aa, unidentified
MSISMIAIDTAKSVFQLHAVDAAGKVQQRRKLRRGELIPFFEGLPRCAVVLEACGAAHHWARVLGGLGHEVKLIAPEAVRPFVKRGKKNDAADAAAVCAAASRPDARFVPVKSPEQRGVLALHSARALLVKQQTTLANAMRGPATEFGLVVPKGMGRLEELAALAEEDATFPEQARGVFAGLLGQCRATAERIAALETEIAAHARGDDTARRLATAPGIGPITASLVAATVGGNIGAFRSARHFAAWLGLVPRQRSTGGRTRLGRITKAGDREIRTLLVLGATSMVHRAAQWNSAAGAWTRGLLERRPVRLATVALANKMARIAWAPMTRKEVHRATGRAAAASAATA

SEQ ID NO: 73084 - protein, 334 aa, unidentified
MNFVGIDLHKHYSHFAVLDQNGRVVARARVPTEREALVRFISGLEGSTKAALEASRSWYWVYDLLEGMVEELKLVAPHRMRVIAESTVKTDKVDARVIAELLRVNYLPTCYVPPAEIRELREIVRQRAFVVELRTAVKNRIHSLLDKLGVEHPFDNLFSGRGLDFLKSLQLGGMYQQELEECLGLLEVFTRLEKQSSKLIRRLAEESPDCRLLMTIPGIGFHHAFLIMAEVGEISRFASAEKYASYCGLVPTVRISEKMMRYGHLKRQCNSWLRWAYIEAAHIACRKSIRFSALYSRVVRKRGVQKAIGAVARKLATISYTLLITRNEYVDRLQ

SEQ ID NO: 73085 - protein, 318 aa, unidentified
MNEIAEHTHFVGIDVSMDWLDVHVLPGNLRCRVANGSRGIWSLIGKLSDYDEPLVVMEASGGFEARALETISSAGIAVAMINPRQVRSFARALGILAKTDRIDAFAIARYAEAVRPEPRMAAHRELGEIKALMTRRRQLSDMLTEEKDRRCRVTSGLVRRRLLVSMRNLKKEIELIDREIDRLVVADEVMREREALLRSTPGVGKIVARTLIAFVPELGALSRRQIASLVGVAPFNRDSGTMKGRRTIWGGRANARAVLYMGALVAARRNSILSAFYDQLIARGKRPKVALVACMRKLLTILNAMMRNGTPWEEPVRT

SEQ ID NO: 73086 - protein, 358 aa, unidentified
MASIPPVSRTVIGGVDTHKDLHVAAVIDTDDHVLGTEAFSTTRAGYRAMLRWMRTFGDVRRIGIEGTGSYGAGLLRHLQLAGIEILEVNRPDRSDRRRRGKDDTLDAENAAHAALAGHRTITPKTRDGMVESLRVLRVARSTAVKARRVALQMLRCQIISAPEELRDQVRNLTRMQLIRTCAAWRPDETAFRDPTSATRIAIKSLARRYLELNDEVADLDSMIEPLVHELAPTLLERTGFGIENTAQLLVTCGDNPERVTDEARFAKLCGVAPLPASSGKVQRHRLNRGGDRQANSAIHMAVVCRLHYDENTKKYVERRTNEGKSKMEIIRCLKRYVAREAYYAIKQDSTPNRTVQRG

SEQ ID NO: 73087 - protein, 472 aa, unidentified
MGKGIGNGTTRGDRKRNARRERLRGLLPRDGAVIGIDLAEDKQAIAVIDHDVRVLARKTVRVKAFRLGEVLDWAVGQARAKGFANVTVACEPTGPRWMQVQRLCAERGLPLVCIQPLVSHIAREQQDYTTHKTDESDCVMIGRLAVELHCYLPEELDETWAHLRHLGRRRAQLITASTASMQRIQDFLSVAWPVVTETCVQPLLSKTWLAALQVVTSRCGADPGNLAALGCEAFTALIRSAVAGWGGKKAWGTICGRIFAALTDTEGVVVSSRRGLLRRVADELADLQRTRAQLRRVEEDMVAVLDELGLSRLAGIPALSAVGAAAILAETGDPRRYDSSSSLVKHAGMSPSDNASGAFSGDARISRRGRPGLRLTVWRAVWPMLQFNPVMAARYQAMTQAAGDTAAGTSSRQAGAAAAAARTRRAKARVACAASLLRWIYSMVVHGTSWDAAVAAGDAACQHAPRCPAEAA

SEQ ID NO: 73088 - protein, 348 aa, unidentified
MAHFVGLDVSVKETSVCVVDDAGKVIMEQKVPTEPADIIALLTSLGVSFSRIGIEAGPLSQWLVNALTAAELPVICVETRHMKALLTAQQINKTDRNDARGIAQMMRVGLFKPVHVKTLVAQEQRMLLTSRKLLQRKLLDLESDLRGTLRNFGLKVGVVSGGRYEARIRELVEGFPRLAAIVEPLLNVRRVMRQQLAVLHKMLLDTVRGDPVCRLLMTAPGVGAVVALTYRATVDQPQRFVHSRAVGAHVGLTPKRYQSGETDYDGGVSKCGDALLRTMLYEAAQVLLTHGSKWSWLKAWGVRVAQRRGMRRAIVAVARRLAVVLHRMWVDGSEFRWRKESAAVPSVA

SEQ ID NO: 73089 - protein, 461 aa, unidentified
MRRKGKRTKGMEEAHPFAGMSQVNLNAAGVDIGAVEIVVCVSGENNTQIVKAFGNYTVDLQAIGRWLKEHKIKTVAMESTGVYWIPLFEVLESMGFKCLLISSRSLRRVPGRKSDIEDAQWIQTLHSYGLLESSFRPPADLVGLRTMLRHRAQLLEHRAPHIQHMQKALLQMNVQLSQVLSDVMGETGQAIIRMIVKGERSPQLLAAFRDPGCKKSEEEIGKALTGTWRDEHLFVLKQSLELYDFYTQQLEVCDQEIDRQYALIRPDWETGELPPIPKKKQKTHSKNAPDSAREIRLHLKRINGVDLSVVDGFGVSLAQTVTMEVGTDVREKFPTEKNFCSWLGLAPKHEISGGKVLKNKTLKTKNRAGQAFRMAAQSVKKSDSVFGVMYKRFRSRQGPAQATVSTAHAIARVVYRMLKYQVEYETISVNEYEKKYEEQQVKYLKKKVAKLGYQLVPIVPA

SEQ ID NO: 73090 - protein, 346 aa, unidentified
MPIVGGLDIHRKQITFDYLDTETGQVRRGQVSPADRVHLRAWLARFAGREDVAFAVEACTGWRYVADELAAAGVAVHLAEPADTAFARGRKRHAKTDKTDSRHLRQLLAEGRLPECWIPPGRILECRALLETYHDLRAEHTAWAQRIHAVLFHQGAPALGEGTLRTEQGRAALRAAAADCLSPAGQLQVATALEMTDALEARLHELGHQLLDAARHLAGAKVLAARLYGVGPVTALALTCWLAGAGRFSSSRQAVRFAGLDVTVWSSDRKGPPGRLSRQGPPVLRWAVYEAGKTHARASAPDHRYYAQVKDRQGGKRAALSEARKILRQACHILAELGDDALAPAA

SEQ ID NO: 73091 - protein, 433 aa, unidentified
MKVKYEDRLKQKVIAITTDTLVVGVDIAKNYQWARFVDFRGIEHDRALKFKNSKGGFETILARIREICKKENFAKAVVGMEPTGHYWKAFANWLEKQEGITVVLVNPYATKQAKELDDNSQTKSDKKDALTIAKLVKDGRYFELYLPHDVYAELRGLSTARTGLNKRKSALKNTITAVMDEFFPEYAEVFKCPLSGKASRHILKNCPFPKFILALGEGGVTDEIRKAVRKTVGRKKAVQLVKAAKDSIGVDYGEEPARLKLRLMLEELELLEKQTEELEGQMSAALQETDYAEFLLSIKGIGIVTLATCLGELGDPTRFDDPRQMSRMAGYNLVEDSSGKNKSGTKISKRGRKNLRSVLYQMALTMVATNDEMKQLYHYLKTREKAPLRKMQALIVVSKKILTLIHTLAKKKESYDPEKVFGHVRREQLKAAA

SEQ ID NO: 73092 - protein, 343 aa, unidentified
MQAMTTIGLDIAKSVFQVHGVDAEGKVLIRRQLKRRYVLAFFEKLPPCLVGIEACASSHHWSRQLKALGHTVRLMPPAYVKPYVKRQKNDAADAEAICEAVTRANMRFVETKTPEQQSCLMLHRTRQLFIRQQTSVINAIRAHLAEFGIVAPVGRKGVEQLLAVVADASDRRVPELARACVAALGAQLRGLKAQILEFDRRILAWHRSNETSRRLDAIPGIGPALATALVASVVDPKAFRSGRNFSAWIGLVPKQHSSGGKDRLGSISKQGDRYLRSLFTAGALAVIRYAKLHGTEHRPWLTALLARRPTKVAAIALANKIARMAWAMMARGERYKEPVALAA

SEQ ID NO: 73093 - protein, 464 aa, unidentified
MSKGNGSGMTRGDRRRNARRERLRGLLPRDGVVVGIDLGEEKQAIAVVDHDLRVVARKTVRVRAFRLGEALHWAVGQARARGFADVAVACEPTGSRWLQVQRLCAERGVPLVCIQPLVSHIAREQQDYTRHKSDESDCVLIARLACELHCYVPEVQDETWAHLRHLGRRRAQLVTEATASVQRTADFLSVAWPVAAEACADPFGSLTWLAAVQVVTSRCGADPGRLAGAGAGEFAVLVRAAVGGWGGQRPDGRVLRAVFAALADSEGAVAWSRRGLFRRIAGELEDLARTRAQLRAVHAEMTAVLDELGLSRLGDIPGLTAAGAAVILAEAGDPRRYDTSSSLARHAGLSPAGNASGASEGQARISRRGRPGLRLAAWRAVWPMLVHNPVLAAKYAAMTAAAGQPGPGTGPWTAAEAAARARRARARVACAASLLRWIWCLTVHDTSWDPAIAAGTAGMPARAA

SEQ ID NO: 73094 - protein, 340 aa, unidentified
MSIVKAGFDIHRAQITFDALELESGEVTTGRIAATPEAVEGWVARFPGAEVHVAFEACTGWFFVARALERGGAVPHMAEIAETRALQGRKRRAKTDRADARWLRRLLCEGRLPEAWIPPDHICWLRIETRLHKTLSDEATAWRQRIQATLFQLGLPRLPDGLDGDQARDWLAPLALPPAAGERIEVCLRMIEVGQVLQQPIAARLGGISRRQAGCRALRRLFGIGPITAPTILAELGDVTRLRRSRQAVRCSGLDVGVSRSDRRSRLGKLNKQGSPQLRWALYEAAQAASHKRSPDHADYLRLRERGLSHTRASLTIARKLARRSYHILRELGEEALEPA

SEQ ID NO: 73095 - protein, 417 aa, unidentified
MEEGEKSSSCRYIALDIHKYYSVIGGVDRGGKEVMEMCRVEHADLEDWLGKHLLPSDRAVIESTTNAWHVYDLLEPLVAEALVANPIKVKQIACARVKTDKKDTLILARLLAANLVPTVWVPPKHVRELRQFVSHRRRLANMHTQVVNRMHSVAHRHHLNHPKGKDFQPKNTLWQQDRSLSRMEKMQLELDMATREHLEKQSEQMTRELAHMSHAEPWASDMLYLMQVPGCGVVTGMTILAAIGDITRFETPKALASYSGLTPGLEQSGVKLRGKSITKEGRRELRWAMVEVAWRAVRSDPHWKKYFEGLKKRMHTNQAIVAIARHLLTVVWSVLTNHEPYRHFSPERIAYKYLIWAWALHADERQGMTRPQFARYYLMRLGIGDELKRVALNPEFPYKLASKEEVLALRPELRPPE

SEQ ID NO: 73096 - protein, 309 aa, unidentified
MEYVGIDVSKDTFHADFGVGKIEIFSNDDAGVSRFLGRMSSVGLAPAEAVVGMEATGACRLLVAEDRAASAGWQARVINPLLVSRMGRASLRHVKTDARDAALVRAAAARGMGYAPGREAMALRGVVQQRASLVAVRAKVRRPMHVRGASLGDPGPDCYAPVEEALTAQIRALDRAAAKVDAGTQGLLRSIPGAGPACSAALAAKVGGVRSFPSPGKPCAFIGLDCRVHDSGTSMKGKGYMTKRGDGTLRHLPFLAADVSRRHVPELGAYYDRKRAGGEHHFVAPCATERKLVHLIWAVWTRGTPCEKR

SEQ ID NO: 73097 - protein, 477 aa, unidentified
MKDNRRSPAPRQAAATKHRSWSPLLKRIQPDAAGVDCGATSHYVAVAEDREPQPVRAFSTFTADLHRLADWLVQCGITTVAMESTGVYWIPLYEVLEERGLEVVLVNARQLHNVRGRKSDVQDCQWLQELHSVGLLQASFRPAGEIVALRSYMRHRQSLVEAAATCIRRMQKALTQMNLKLHHLLSDLTGVTGMAIVRDILAGVRDPQALAAHRDGRCKASEQDIAAALTGHYRPEHLFALRQNFAAFEFHQRQIAQCDQAIEAQLASLAESRPPASRELPAARPRVKLSKNEPRGELRAPLHRITGGADLSQIDGIGPYGALQLIAEIGTDMSRWRSEKHFSAWLTLAPNNKISGGRLLSSKTQPSANRAAVVLRRCAMSLTRSATALGAYYRRLAYRLGQPKAITATARKLAILVYRVLGGEMVYRDPGATAYDQLHRKRLINGLRRRAQEFGLSLINLETGEVLDHALVPQSVS

SEQ ID NO: 73098 - protein, 346 aa, unidentified
MTYYAGLDVSLKEISICIIDDDGAIVAQGTAPADPEGVAGWFKNRSLAPKRIVHESGQLSIWLQRGMVQLGLPAICIDARKAHKSLSARLNKSDSADAEGLAQLARMNWFTPVHIRSEESDLLRVLVGGQERMIRLRKDLEGHIRGVLKAFGIRMTGIGQAQQRQGFRDQLAAAGETDPVLRTIADGFIAAHITLCKATADFDAALRAKSKSNPIARRLMTIPGVGPIVSLSFAALVDDPNRFSKTSDVGAFLGLTPRRHQSSEMDWSGRVSKCGDAAMRGLLFEAASCVIRQVKRFSALKSWAVRLAGRRGFRKAAVATARKIAVLMLTLWKSGTDYQWTQEATA

SEQ ID NO: 73099 - protein, 392 aa, unidentified
MVISVGIDVSKDKHDCFIQSSEGEVLVDVFTIPNNMDGFNILLEKIQRCATSQDKIKVGLEATGHYSYNLLGFLLDNGLATYVLNPLHTNLYRKSLSLRKTKTDRVDARTIASMLLSDVGLKPYTDTAYHNEELKSLTRYRFDKVKERAKLKSSVSRLVCILFPELEKLVPSLHLASVYALLEEFPGAKQVASAHLTRLKALLETASKGRYKRDMALEIRDAARNSIGSRMPAKSLELQHTIRLIRELDNEIAEIEGQIQAIMDELHSPITTIPGLGFRMAAMILAEVGDFTRFDSPDKLLAYAGMSPSTYQSGQLKNCYPHMEKRGSRYLRYALYNATKYVCHWDPAFADYLAKKRAEGKHYNVALSHAAKKLVRLIFAMERSQKPYFPTS

SEQ ID NO: 73100 - protein, 453 aa, unidentified
MSQRNRSAPLNPGKSRSALTITHPNAAGIDIGSASHFVAVPPDRDDEPVREFSSFTTDLHALADWLKTCGVDTVAMESTGVYWIPLFELLESRGFTVLLVNARHVKNVSGRKSDVLDCQWLQQLMTYGLLSGAFRPSAEVCILRSLWRQRGMLLRGQGRQVQHMQKALTQMNIQLANVISDVVGVTGQLILRAIVAGERDGLILAAMKNGRIHASLDEIAKSLRGNWRAEHLFALKQALDMFDFIGAQLAECDREIEQQLKSLQIHDGEPAKGKRRGNTRNAPKFDLRAQLFRMCGVDLTRIDGIDVTTALAVISETGADMSRFPTAGHFASWLALCPGTRITGGKVMSGKTKRTANRVAQALRLAAAALRSSQSALGAYFRRMCARMDKPKAITATAHKLARLIYTMLTKGEEYTDQGQDYYEERYRERVLRQLAKRAERMGMKLVVSENAV

SEQ ID NO: 73101 - protein, 425 aa, unidentified
MHTKQYSKQQEKRKRIGNQTLIIGMDIGSEFNAACFMDKEGKVLGRYPTVYNSRKGFDYFQAMVTKTKREHKFTDVLIGMEPTGHYWRKIAFFAKGKGYEVRFVRTTAVKHQRELDESSSAKNDSKDAYTIGNIVREGKYIDTVIEDNVFRQLRTLAHARERILRYIVGSTHGLQAVLNDYFPELRKLFWSMKAKGLWALLETYPFPEDVRNAGLSAVTALLAKGTGKKRHVPEQAAQVYRAAEESVGLTTIGKADRARLTMYLDEIKRSDARRKLLEREMKELLKEIPLAQYILSLPGMGKVSCAVFLGELGNPDYFNNPRQIIKYAGYDPKENDSGSRVGKKIISKKGRWLLRKCLFFMVLRLVHRSSFFKAHYEHKKKGFDRPLEKTEALCAVILKLIRVLFALMRDRRMFTEEMSRCEQAA

SEQ ID NO: 73102 - protein, 402 aa, unidentified
MTDAPNRYIGLDIHKEYFVAVGVNEKLEAIFGPQRVSNYLLDDWILRCLTPEDAVVLEMSTNTYQFYDALLPHVHSVMAVHSPNVAMVTNVRVKTDNKAALALAQLHAAGLLTGVWIPPYPVRDLRSLIARREKMVRLSTMAKNRLHSMLHRHHLVTPEKPFAPEQRTWWESLPLSANEQFLVRSDLDTLDFAQKQVGQIEECLKQESAEDARIPLLIQLPGVAMLTAITILAAIGDITRFPTAKKLVGYAGLGTRVHHSGMTHSNGRITKAGRKDLRCAMVNAANHAVEHHVHWKKELERLTPHLGRSKAIVAIARKLLVAVWHVLSKQVADRFADPRDVASSFIRYAYRIGVRNLPNQQPALSFTRDQLDRLGVGRDLKEIPWGSIRFKLPPSKLLLEKE

SEQ ID NO: 73103 - protein, 450 aa, unidentified
MPTKRGKVAQLPLIEPNAAGIDVGATEVFVAVPADRDPEPIRSFATFTPELEKLADWLELCRVRTVAMESTGVFWIPLFQILEKRGLEVCLVNARHLKNVPGRKTDVEDCQWIQHLHSVGLLRGSFRPNEEICAIRSLWRHRDNLIQLATVHLQHMQKALDQMNVQIHHVISDLSGTTGLAIVEGILAGERDPHRLAELRDWRIKASEETIIKSLVGDYREEHLYVLRQSLECYRTYQGLIQELDVEVKRRMTQLPAKVDPAVKPPAEARNPRKTPRRTEPLDLRMELYRAFGVDLTQIPGINPLTAQVLLTEVGPDLARFPTAAAFCSWLRLCPEPRISGGQVLSSKTRPTKNRAALALRLAAQALHRSQTYLGDYFRRMKARLGAPKAITAVAHKLARIIYHMISRQREYDTTVFHEQERRATDRKRNRLRMQAREMGFQLVPLRVVP

SEQ ID NO: 73104 - protein, 355 aa, unidentified
MDKSKYIGMDVHKETISIAVLDSSGKLVMESVIETKGITIVQFIRGLRGELRVTLEEGTWAAWLYDLLKPYVHEVLVCDPRKNALLKAGNKNDQIDARKLAELLYLDRLTAVYHGEHGVRALKELSRSYVTISGDASRVMTRLKAVYRSWAIPCAGKQVYAPRYRAEWLGKIREPGVRRRAEFYYQQLDELRALRQQVRRELLAESAKHQASKLLCQIPSIGPIRAAQLIAILQTPNRFRTKRQLWAYGGLAIETHSSADHRYVDGQLRASKRPVSLRGLNRNHNHELKNIFKGAAIIAATKAGPFQEFYAALVTKGIRPEMARLTLARKIAAITLIVWKKGVSFDAQHLKPQTA

SEQ ID NO: 73105 - protein, 366 aa, unidentified
MQEISTMQASGSDNFKGPQVTIGLDLGDRTSNYCVLNATGDILLEDKLPTTSQAMKQLFGRMLRSRIAMETSTHSPWVSRLLKELGHEVIVAHAQKVGLIVKSRKKDDRIDARTLARLARIDPQLLSPVQHRSAQAQIHLTEIRARAELVRARTALVNSARGLAKSYGERLRKCGTQQVGRELAMGLSAELRAALEPLLREIESLNEHIKEYDRRIEKMAKDTYPEVKLLQQVKGVGDLIALAYVLTIEDPHRFKKSRDAGCFVGLQPGRRNSGESEPQMHITKEGDRYLRTLLVQGAHYILGPFGEDSDLRRWGKKLAERGGKKAKRRAVVAVARKLAVLLHRLWVSGEMYEPLRNSKKAMSTAA

SEQ ID NO: 73106 - protein, 409 aa, unidentified
MNKVDIAPFEVFCGIDVGKTSNHIVALDRHGDKPLINRKVPQEEAEIRAALEEAVDFGLALVIVDQFGAFGRLVVGVAKSMDIPVAHMSPRRFRQVAETYGEDKFDEKDAFILADASRTTPRNIEFVGNRAESMAEIKVLSSRRDDIVEERTRCYNRLHDFIHQVSPPLEELFSKRKLHNDLEIRLIARYGGPIGFRQAGRARASTWAAELKYHCVDGPKKVEQVFDVLDRQTVMLPGAAVIEEQIRSIASRIIELLAEEKRLNLMIDQRAKMIPEVDLLQSIPGVGPVYAALIAVEIGDIGRFRDSNHLASYAGVAPRKEESGTSVHKRRKRKGGNRRLKNALMQSSQRSVQCDPLARAYYGRKRAEGKKHLQALRALARHRVTVIFAMLNEGTFYEPPVEVDENGRG

SEQ ID NO: 73107 - protein, 464 aa, unidentified
MSKAKISSREERVTPVALPVLRPLVAGIDLGSSQHWVCGPAHDDGKANVRVFGTTTAQLHDLADWLVKEGVQSVAMESTYVYWIPVYEVLASRGLQVVLVNARQLHNVPGRKTDFLDCQWIQVLHSCGLLRGSFRPAEAITQMRAMQRQMANLVAEQTRCVQWMQKALDQMNVQVHRAVTDITGTTGMSIIRAIVAGERDPKQLAKYRDQRCRKSVEDIEMHLVGTWREEHLFNLASALRMYDAFGQEIAAYETHLIKALEALQPPERRDQAVPPHPNRAKEKAIRKRNEQELRTGLWRFAGVDLTRIDGISSGSARVVLTELGPDLAGFPSESNFVSWLRLCPRVPISGGKPIKKRRNGLGANRIAGVLRMAATSLRGSKSALGAFYRRHSRHNGADVAVFATARELAKLIYRMLRFGQDYVDVGERAYESRFELRRVASLKEAAKSLGFALIPASPVEAAQG

SEQ ID NO: 73108 - protein, 347 aa, unidentified
MHHIAIDLGSRKSQICVRDATGQIAEERSIATVKLKEWLKEQELGRVIVETCAESFGIATEAKKFGHEVRIVPATLVRQLGVGERRLKNDKKDARKLSEVSTRIELPSVHLPSGWSQQVRELCTMREALVEARTKLVNTARSFARMKVCELKSGAAETIPQRMREAFSDGLPAAVERVLLAIEALNEQLKHADREVQKAAKASADCVRLMTAPGIGSVTALRFAAVVDEVGRFASAHQLESYLGLVPSETSTGERQQRHGRITKAGAKKVRWALVQAVWSAKAHCKGDPLVRWGDRVALRRGKKIATLAMARKLAGVLYAMLRDGKDYDPAQLTRQAWVQLDAHHAA

SEQ ID NO: 73109 - protein, 338 aa, unidentified
MHITTLGIDLAKQVFQLHGVDARGHAVLSRRVKRSQLVEVIASLPPCVIGMEACGSAHHWGRAFEQLGHTVKLMSPQYVKPYVKTNKNDARDAEAICEAVSRPTMRCVTIKTVDQADLQAVHRARSLLIKTRTAFINQIRGLLAEYGLVIAQSPEKVRPALVRFLDDAQTGLTAFARETFSELYEQLVALEQRIAKVNQRLERLFRTHPICRKLAAVPGIGPLTATALLAAVSRPHVFQNGRHLAAWLGLVPRQFSSGGHARLGGLSKRGNRYLHTLLIHGARAVVQRAAHKTDTRARWLWALKCRKGTNVAAVALANKNARVIWALLAHDEVYRPSA

SEQ ID NO: 73110 - protein, 288 aa, unidentified
MNKMIIGIDVSKNDLDVAFWQNDKSFFLGKYPNNQIGFQTIFKDVETKRQKYNADTVLAVMEPTGGYEQHFAYFAFSKCWEVSLPNPGNVRNWIKGIAKRAKTDKQDAMMLAHFGVVQQPLLWKPLPEEVAELESMLDRLDDLNEILRSQQNRLESQQNRQICHQLSQKSIQDNIIYLQKQIEILDDAIKNHIDTHTHLKEQVKNLKTVPGVGNKISPHLLVAMHRFGVLTDGNGTNKAIAAYYGLDPQPHESGKSVYKRPSISRQGDRHIRHLLYMGVLGGIRGNNP

SEQ ID NO: 73111 - protein, 397 aa, unidentified
MYIVGIDIAKRKHEAAVIDGDGAVIIKPFSFTNNCSGYNRLLAMLAKAKLPLDEVSFAMEATGHYWLALFTRLQKEGFRVQVINPVQTNSIRSFYIRQAKTDPRDALLIAEVIRFGHFSESTLHPENIYELRELCRGRHAIVSMQADVKRKVVALLDQVFPEYETAFTNMFGDTSMAILQTCPTPKELSEMPLEELCHLIEVSSHKRFRMAKARELQELARNSFGFAMAGDVFSTMIRLYAKHLIFLKQQVQEMDRKIAEIMDTLDTPITTITGIGPTLGAYILSEIGDISRFSSAAKLAAYAGIDPTMRQSGEYNGVRNRMSKRGSPYLRHAIWLAASSAVLHDPALKLYFQKKRDEGKPYMASVGHACRKMVSIIYAVMRDNKAYTPCIPNEISA

SEQ ID NO: 73112 - protein, 324 aa, unidentified
MKKDTPYFGIDISKDFFDVMSQKGVHYQFKNTPKGFRDFLKILTKKSHCVMEATGYYHYQLAYFLVGNNILVSVENPLSVKRFIQMKLSKIKTDKRDAKMICEYAQCVALKLWKGESEAQQECLQIIRMLSVYGKQRTALKNKIHGEDTLGNTNTLVVKSIKRSLKSIKKETDLLEKQLLEIVKKSHQDLLTRLESIPGLGRKTSLMLIVLTDGFDRFETASALCCYSGLTPTIRQSGSSIKGRPRISKMGNPKLRNLLFMCSFTACKYNKNCKALYNRIVAKEKSKKLALIAVCNKLLKQAFAVAKSGLPYDENYRSTLAKNN

SEQ ID NO: 73113 - protein, 349 aa, unidentified
MTRYVGVDVGKKNCSVAVMDQQGLILEEYTFPNNHQGIATMASKLSIDDRVVMESIGSVGANLYNHLENNHIQVTLANPLKTKAIAWAKTKTDQIDARMLAHLLRANLVAESYVPPKELREVRALVRHRLSTVKTRTMVKNKIHALIDKNGLKPEHVNTFRKSGREWLRTVQLESSLDRLMLNNHLDHLDSLDHQIQTIDQEILSRATRDQYVKLLLSMTGINIYTALLLRSEIGDITRFPDSKKLVSWAGLAPSLHQSGSIEYHGHITKQGSRILRWIMVETARSAVNHDERLRTFYERVKHRRGDQKAIIATANKMLKIIWTILTRNEPYQSRNENLYQEKLNRVPE

SEQ ID NO: 73114 - protein, 337 aa, unidentified
MKTNLIGLDIAKSIFHLVMVNEFGKLQKKKVLKRRNLLAYISQLEPCIIVMEACGSAHHWARAFQYFGHEVKLIAPQYVKPFVQGNKNDYNDALAIAEAAQRPNMRFVPIKNIEQHDIQIVHRLRERLVKNRTALVNQTRGLLAEYGLIINKGVAAVRSELPIILEDAENGLTMMAREFFADLYDELLAIESKLKNCEHKIKQINEHHDICQRLNEITGIGPITATALFAAAGSAKEFNNGRHFSAWIGLVPKQHSTGGKANLLGISKRGNSYLRTLLIHGARALLKNSSKKDDKLSVWVTKLKERSCYNKACVALANKLARIAWVIMAKNETFKLA

SEQ ID NO: 73115 - protein, 356 aa, unidentified
MVVTVGIDVHKDTHCAVAVDAAGRQLGRDRTFRAIDAGHRQLLRWVLTEFGREVEFAVEDCRQFSNRLERSLLAAAQTVIRVPPKLMALTRQNTRTRGKSDPLDAVNIARAAVREPGVPRAEHPHASRDVKLLVDHREDLVGSGTAIQNRLRWLLHELDPRIDPEPRQLDSMRELDRVRDRVAALPVTTETATVIRIALEQFGDIRQLTVRARELEKELVLLVQQQAPQLLDLPGCGVLTAAKLIGETANPCRFRSEACFAMHAGVAPIPASSGRTQRHRLARGGNRQLNAALHRIAVTQARLDCPGRDYYQRRKTKHQDSTIEVLRVMKRKIARIVYQLLNTPTTTAAACQPVAA

SEQ ID NO: 73116 - protein, 373 aa, unidentified
MDEDRTVCVGLDTHKAKIAVAVAEPGRTGEVRFGGEIANRPEAVRQLLERLADKHGELRVCYEAGPCGYGLYRQIAALGHDCTVVAPSLVPRRPGDRVKTNRRDALTLARLLRAGELTAVWVPDPTHEAMRDLVRARTAAMEVVRRARQQLQGFLLRHGRVFTGRKAWSPAHRRWLAGLRFAHPAQQVVLQEQLDAIDEAERRRDRLGQQIRELVPDWPMAPIVAALQAMRGVAFLSAVVLAAEVGDFRRFANPRQLMAWLGLVPSERSSGPKVERGGITKAGNGRARRVLVEGAWSHRFPARVTGPIRARLEGVPDAVRAIAWKAQLRLCARYRRLVAAGKNANLVTTAIAREMAAFAWAIACQVQPEGAAA

SEQ ID NO: 73117 - protein, 387 aa, unidentified
MFLVGIDVAKHSHEACVLDASGHMVGQPLKFSSSRGGADKLVSILRELDDSTTIALEASGHYWQGLYHHLVAEGFPVVVANPLQTDAYRSTGVRKVKNDRRDAFVIADFLRIGRVQANYIPGEVVVQLRELTRCRMGLEDQIGDAKRRILTVLDRVFPEYPGIFSDVFIASSRALLKEAVSAADFAAFDLAELTRLLHSASRGRLGEEKARRLHEKAADSLGLAFLSATARVKISFLLEQVDLFERQVKEVEIAITRLMEQEPQQLTTIKGIGPVLAATLLAEIGDIHRFTSLESLVAYAGIDPGVFESGEFTGRKQHISKRGSPYLRRALWLAAHSTRRWNTDLDAYFQRKITEGKPYKVAMIALCRKLLARVYVVLKENRPYQVR

SEQ ID NO: 73118 - protein, 295 aa, unidentified
MNIVFLGTDLAKNIFQLCGSNQAGKPVYSKRTGRKKLLQMVANIPACQIGVEASTGAFYWQREFEKLGHKVKVISPQYVKPFVRGQKNDGNDAQAVAVALMQPTMQFVPPKSPEQQDIQALHRARRIVNHRTATVGQIRGLLLDRGITIGAAVSRVRRAVPLILEDAENELSARMRRTIAELYDLFNDLGCRIHFFDKEIETVFRQSEACQRIAKVKGIGPKMATAVVAAIGKGTEFKNGRHFAAWLGLVPRQHSSGDRQVLMNMTKKVTSICGPCLFMMPVLSSGLPRIIMMAI

SEQ ID NO: 73119 - protein, 322 aa, unidentified
MTQSTVYSRFVGIDVASKKIDIYDSSSKKFSTLENSVESLMQFATALAKSELPTLVVMEATGGYERCLVECLQALDIPCAVVNPLQIRNFAKGCGLIEKTDQLNAQIIARFAEVVKPKTLEKPTKEAKMLRALVHRRNQILSQIAAEHNRSIQAFDDETAALCKQAIEFYKKQQADVEKRITQVIKDCPVLSSKAELLLSVPGVGVVTVGILLAELPELGTLNRGQVSKLVGVAPIACDSGQKEGKRSTFAGRSMVRKVLYMAALVATKYNDSLKQFYQRLLAKGKPKKVALVAVMRKLLVTLNVIARSKQKWCEPSLALKP

SEQ ID NO: 73120 - protein, 354 aa, unidentified
MNNITFSNLHFYTGVDTHLKNWRVTIQNSGIELKTFSMNPSPDELYRYLTKHYPGGSYHIVYEAGFCGFWPQRKFHELGLDCIVVNPADVPSSNKEKVVKTDPSDSRKLARELEKGSLRSIYIPDVYSEQLRSLMRLRFRLSQNQTRIKNRIKMLLYNYGIIIPREHLTNSRWSGYFIHWLKSVKLSSSAGEFTFNNLLMQLEQAREHLKNVLKQLREESKLENISSVISSLTSVPGIAFITAMSLYTEIIDIRRFKRFDELCSFVGLVPSVYSSGETEFTRGISFRHNKFLRPLLIEAAWTAVRKDPALTLRFNELLKQMPKQKAIIRIAKKLLRRIRHVWLYQDSYVKALVA

SEQ ID NO: 73121 - protein, 366 aa, unidentified
MRKPSTTALRRKGKLQDGQLTIGLDLGDRSSFYCVLNGAGEVVLEAKVATNPEAMKKTFEKMPPSRIALETGTHSPWVSRLLTDLGYEAIVAHSRNVRLIGESRRKDDRLDAQALAKLARIDPQLLSPIQHRSAQAQADLSVIRARYALVRARTALVCSARGLTKSFGERIGGRNPKGFSSATSEALSPQLQVALAPLLSALETISARIREYDAQIEQLAEESYPEVALLKQVKGVGTLIALTYVLTLEDPRRFRKSRDAGCYVGLQPGRRNSGQSEPQLHITREGDSYLRMVLVQGAQHILGPFGEDSDLRRWGLKLAERGGKRGKRRAIIAVARKLAVLLHHLWISCEAYEPLHNARKRRLAAA

SEQ ID NO: 73122 - protein, 412 aa, unidentified
MLFIGDDWAEGHHDVVVQDEAGKTLARRRLPEGVDGLARFHEVVASCVGEDGEPDAAQVVVVIETDRGPWVNALAAAGYRVFPVNPKQAARHKETVAVSGKKDDFFDAAGLADMGRTRRHQIRELAADSDVAEAVKIAARAHQKLIWERTRHVLRMRSALREYFPAALEAYADLTLTGADALELLGRAPEPASAARLTVTQITAALRRARRRGDLVQRARDIQAALRVPRLAQPAVIAEAYGASVQAGAAVITTLNEQIKIMEAKVSELFHRHPDAGIYLSQPGIGDITGARMLGEFGDAPGRYASAKARKNYAGTSPLTIQSGKKKTVHARYIRNRHLIDALHTQAFAALTASPGARAYYDQLRAREIGHEAALRRVAGRLTGVLHGCVTTGREYDEATAWSHRGAPAQAA

SEQ ID NO: 73123 - protein, 340 aa, unidentified
MDILDLLGLDIGKSTFHLIGHDAKGKEVLRKKFNRNRLLEFAARLKPCTIAMESCGGSHWLARKLLSFGHQVKLIAPQHVKPYVTGNKNDYIDAEAICEAASRPKTRYVAIKTVEQQVLSTQHRLREALVGHRTQTINRIHGFLLEFGIELPATKAAMNQVHQILDDPAAELPQQLKSFIEHLLEEMKRLNDEIKAIDRSIREQMDTDDAGTRLMSIPGIGPIIASALLADVGDASNFHSSRDFAASLGLVPRQYSTGDQTVLLNISKRGDKYLRKLMIQGSRAVLVHIDKRTDALGTWCRDLLIRKHPNKVACALANKLARIVWAVLAHGVSYNAQSMA

SEQ ID NO: 73124 - protein, 370 aa, unidentified
MSQSSTLFIGMDVHKDIIAVAYVAQEHGAEVTYLGTIGTRQCDIDQLVRKMQSKAKHLIFVYEAGPCGYWLYRYLTKKGYDCWVVAPSLIPKKAGDRVKTDRRDAMQLARLARSGDLTVVYVPKVDDEAIRDLTRAREDALSDCKDAKFRLKAFLLRHDIRYTGRANWGPAHLRWLSEVVCPTPAQQIVFQEYVRAVTEHTERLQRLDQELQEHVQTWRLHSVVEALQALRGVQFTVAVTMVAEIGDLTRFDTPRELMKFLGLIPSEYSSGERRHQGSITKAGNTHARRALVEGAWAYRYPAKVSRHLQLRLEKQPKIIQDISWKAQVRLCKRYRQLVARGKHANIVTVAIARELAGFMWAIAKQLPVAA

SEQ ID NO: 73125 - protein, 389 aa, unidentified
MHCIGIDLAKRKHSAAVVGGDGERLVRGFEFANDAEGFASLLEKLASVGAGCDESGVCLEATGHYGRNLIAFLEAHGYEVFEVNPLLASNWRKATSVRKVKNDAVDAEALALWLLAGNPTRRRRSKSESGDIRSLARSRTSLSRIVGDCKRRAHAILDVVFPEFHGFFADDFGKSASAVLRKWGSAEALAKARVDSVEKAMRSGGGRRFTRADAERLKELARSSVGQESAPLSFQLRQLLDQIEFAKSQMEELDAELERLVGDSPITTVPGVGTVCGAGILGEIGDVSRFEDASKMLAFAGCDPSVFESGEFVGTQARMSKRGSPFLRWYLWLAADRARMFDPALRAYYEKKRAEGKCHKVAVSAVVRKLCNIIFAVLRDDKPYTCPVK

SEQ ID NO: 73126 - protein, 419 aa, unidentified
MEVIVERCAGLDVHRDNVVATVRVPGSGRRQWDKQTQTFKSTLAGLAELAGWLADAGVTLVGMEATGVYWKTVFQALEDRFECWLLNAHHLRNVPGRKTDVKDSEWICQLVQHGLVRPSFVPPPEIRRLRDLTRLRTAQGNERSRTIQRLEKVLQDAGIKLSSVASTTYSKSARAMLEALLSGVTDPKQLAELSKGKMRAKIPELKDALQSRFTIEHHGIMVAQLLAHIDTLDAALQNLSERIEFVLAPHAQTIELLCTIPGVQAQAAQVLIAECGLDMSVFPTVGHFASWAGACPGHHESAGRRRSGRTRPGPAWLTSQLTECARAAVRTKDTYLAAHYAQLRGRRGEQKAIGAIRHDLLVAYFHIVRDQVPYRDLGPDWQRKRYSVEHRARRLQRQLEALGYAVTLDQLDQPAEQAA

SEQ ID NO: 73127 - protein, 483 aa, unidentified
MTSNEAEQKLEILRPDAAGIDCGAQEHYVAVPVDRVSAGQPTVRCFSAFTEGLDAAVDWLKECRVTTVAMESTGVYWIPLHQKLEAAGIEVYLVNARHVRCVPGRKTDVKDSQWLRQLHRFGLLNASFRPEDITCRLRSLHRHRDNLVSSSSSEIQHMQKALQQMNLHLHHVVSDITGLTGLRIIDAILSGQRDPQELVKLRDKRIFKSTPQQMQAALVGDYRAEHLFVLSQSLQAYRFHQARIEECDRQTEPLLEKLAQQVEAASAQLKPFKDAQQEETLPVSRNEPKTGTGASSPLNKAKRKHKPIANEPKIELAGLLERICGIDLTQVVGLNVLSVLLIVSEIGIDMSKWRSAKAFCSWLGLCPGNKISGGKVLDSRTRQVVNRVADALRLAAQSAGRTETCLGIFYRRKKAHLGAPKATTATARKLACLIYHLLKYKEPYQRHDPAMYQLRLQKSALLKLQNQATTLGYKLVPIAPVPV

SEQ ID NO: 73128 - protein, 403 aa, unidentified
MDLLKTVFGIDVSSRKSNVCIMVNGQKVNDYAISNDMVGFNDLKQVTKPQIIFEATGVYSRRLQAFLDMHELRYVMMNPLEAKRKTKDDLHQNKTDKLDALYLAKLQSEHPQRLAYIQNKEYQELMANNRIYEQASHDLITNKNRLHKAVQLTFPEIEHLLANPRGKNYWSIALRFPHPDIVLETKEADIIDFLKGLSGIGKKRANDITQSLIRLAKVACPAVKKNSAHVRGLKMAINNILSAEEECQTALQEMAKLAPKRDLEILTSIPGIGENTALRIISELGDIRRFNNPSQLNAFVGVDPQVYESGNLTAHLSISKRGTAIGRKVLYLAINQIQSAKKAGKPCHIADYYEKRKRSSETASHKKAAIASIHKLLRTIFALIKNDQLYSYDVAKHNQRLLS

SEQ ID NO: 73129 - protein, 312 aa, unidentified
MKNDTIGVDVSKDHLDAHRLADGAARRFANDRRGHKALIKWLAQTPRYRVVFEPTGPYHRAVERALGVAAVPFVKVNPRQARRFAEATGKLAKTDRLDAAILARMGASLELQARPARSEILLELKELYVAREALVKDRTAARNRGKVLTLSLLKRQNAQRLEQIDRQIATVEAAILQIIEADASLADRFAILTSIPGVSTITAFALLIAMPELGALEAGQAANLAGLAPIARQSGRWTGRSFIRGGRADVRQALYMPALVAARFNPDMKAKYAHLIQTGKPAKVALTAIMRKLVVLANALLKANRPWTPKTA

SEQ ID NO: 73130 - protein, 390 aa, unidentified
MNTIIGIDVSQKSSSFHLLAAGGKGTDGSFSMNHSGFAALLQKTEGLENPRFVMESTGRYHITLANWLLHHGQSAFIVNPVLVKQFSRAHTLRRTKTDTVDARVIAQFAAQDTKALAHPGREMDDERLSVARRREQIAEDIARAKTQLKADLTVAFPEILELNVFTAGMLDLLVHLPSAQAVWQASDTELAGFFTGTRGRSLTFGPERVRGLAVDSIGVASYGPLVSDSAKNLLSLLARQKLLTQRLIDLVSRTQADDLAIITSIDGIGQVTAAHFLAEIGSIGRFERYQNLIAFCGTDPGIYQSGNSLVSGRITKHGNASLRKYVYLMAEGTLLHNPFFRAYYDKKRAEGFAHRKAMVALMNKLLKTLFALLTKREMFMVPEHSISHSL

SEQ ID NO: 73131 - protein, 385 aa, unidentified
MPQLKDDLSRSLVALDQDRTLIAVVELSLATWLVGGAVPGIQREPLKKLPPDPEGLFKLLHRWRDEAAKAGHKLARIVVAFEAGRDGFWLARWLQVRGIEAYVIHPTSVAVSREQRRAKTDRLDIGLLKRSLLGWLRGEKNHCTMVAIPTLEEEDAKRPTREREQLVGKRTGIVNRMKATLIRLGIRGFNVKLRKAPEQLVSLRTPEGHPIPTNTLAELRREMAHLRFIDDQIRQIEDERLKQLKQAPQQPLNTRVLQLQRIIGVGTETADMLTHEVLSRDLRDHRAVARYAGLTGSPDESGSRRREKGLAKAGNARVRRGMIQLAWRFLLHQKDSAMTKWYQASVASGKKRKTMVVALARKLLIALWRFVTTGDIPQGVTLRSA

SEQ ID NO: 73132 - protein, 341 aa, unidentified
MSEVSIIGIDLAKRVFQLHGTCANGAVIFRKKLTRVQLLAFMSKQPECTVAMEACATAHCWGREIEKLGHTVRLIAPNYVKPFVKRQKNDVADAEAIVEAVSRPTMRFVELKSEAQQARAMLFRTRQMFIGQRTQTINALRGHLAEHGVVAPKEAIHVKRLADAVEDETIGLLEDVRELAQVYLAQIEGLNVQVAALDQRMKGAAKEAEAARRAQTMPGVGPITALAIETFAPGLNCFRRGRDFAAWLGLVPKQNSTGGKPRLGKTSKMGQRDIRRLLISGAMAVLQAVERFGTPHNTWLIATLERKPRMLVAVALANKMARSLWAMVTKQEDYRTPAAMA

SEQ ID NO: 73133 - protein, 343 aa, unidentified
MQTITTIGLDIAKSVFQVHGVDATGEVIIRRQLKRRSVLAFFQKLPPCLVGIEACASSHHWSRELQALGHTVRLMPPAYVKPYVKRQKNDMADAEAICEAVTRANMRFVPTKTPEQQSCLMLHRTRHLFIRQQTAVINSIRAHLAEFGIVAPVGRKGVTELLHIVADPSDKRVSEVARACLAALGTQLLSLKQQIVEFDRMIMAWHRSNQTSKRLHYIPGVGPMLATALVASVADPRNFRSGRNFSAWIGLVPKQHSSGGKDRLGSISKQGDRYLRSLFVAGALAVIRYAKIHGTGHRPWLTALLGRRPTKVAAIALANKIARMAWAMMAKGERYRNPVALAR

SEQ ID NO: 73134 - protein, 385 aa, unidentified
MLTQGFQATAAANQDGTIYLAFELSKSRWLVARLLPGSSKISRFRLEGGDTAGLLQLLTEAREKAARLGFAKPRIVSCYEAGYDGFWLHRWLQAHGVDNRVLDPASIEVPRKARRAKTDKIDLAKLMRVQLAHERGEPQVCSIVHVPTVAQEDAKRVSRERASLLQERISHTNRIKGLLFAQGVRDTDPLARNFLARLDELVTPDGRRLSHHLLGELRREHARLSLVVSQIAKLEAEVRTAVQQAQPGTPEAKMALLVQLKSMGPTWATLLVNEVFYRDFHNRRQLGAYLGLTGTPYNSGQSVREQGISKAGNGRARNVALEFAWLWVRNQPNSALTRWFLNRVGEARGAVRRIAITALARKLMIALWRYLETGLVPIGAVLRTK

SEQ ID NO: 73135 - protein, 355 aa, unidentified
MNEAKYIGMDVHQATISVAVRDSCGNLVMEAILETKAETILQFIRGLRGSLYVTFEEGTWAAWLHDLLQPHVARVLASDPRKNALLKAGNKSDRIDARKLSELLYLNKLSPVYHGEQGIRTLKELARSYITITRDLTRVMSRLKAIYRSWGIPCAGQQVYAPRYRAEWLAKISEAGVRRRTELYYQQFDALAALRQGTRRELLAEARKHPAMRLLRQIPSIGPIRAALLIALIQTPNRFRTKRQLWAYCGLALRTYTSGEYRFVGGQLKRSKKVLAVRGLNINHNHDLKNIFKGAATRAAAVAGPFQDFYQACVARGMKPHLARLTLARKIAAITLLVWKKGVRFDAEHLKQQAA

SEQ ID NO: 73136 - protein, 317 aa, unidentified
MDKPPAATCFVGIDVSKGHVDVHVRPDVTAFSCTTDPDGLANLITRLAPLQPQLVAMEASGGYEAVIAAALTEAGLPVAIVNPRQVRKFAGAIGRLAKTDAIDAGVIAHFADAIRPAPKPMPDALMLRLRELLARRRQLVVMVNAEKQRLGKAADKLAQRSFKTILRSLEAERARIDRAIDTLIQQSPLFCAKQDLLKSVPGIGNIVARTLIVELPELGSVDRHQIAALAGVAPMNRDSGRYRGKRRIQGGRVEVRAPLFMACLTAIRHNPPLRSFYRRLRDAGKPARLAIVAVMRKLLTTLNAIIRDNTAWTHVHI

SEQ ID NO: 73137 - protein, 355 aa, unidentified
MTSTKYIGMDVHKESISIAVRNSAGKVVMECVIETKASMILQFIDGLRGDLQVTFEEGTSAAWLYDLLKPHVTKLVVCDPRKNKSMREGNQNDKIDACRLAELLRVDHLAPVYHGEHGLRTLKELVRSYLTIAKDLARVKSRVKAIYRSWAIPCTGKQVYARRHRAEWLGKISEPGVHRRAEFYYQQLDALRVLRQEARRDLLAESKKHKAWKRLCEIPSIGPIRAAVLLGILQTPHRFRTKRPLWNYGGLAIEMHSSADHRRVDGQLQRSRKNVLVRGLNRNCNHDLKNLFKGAAAVASSKPGPFQEFYAGLVAKGMRPEMARLTLARKIATIVLIVWKKGVCFDASHLKPQTA

SEQ ID NO: 73138 - protein, 444 aa, unidentified
MSPINTTLEPAYAAFVGIDWADRQHAWVLQSPGAPRVSGVLKQSAEDIELWAADLARKFYGQPVAIAVEQSRGALTYALCKYDHLVLYPVHPSTSHDFRKAMCPSGSKDDPKDAELLLDLLTRHRDHLRPLKPDSPATRKLLSLVEIRRGLVDQRTAAIQRITDKLKIYYRQVLGWFDRLDTPIVAAFLEQWPTVEQARKASENKLRKFFVAHHSRNPQKIEQRIDEIRNAKPAITDPAIVEPSVLLVQIELQVIAALREGIARLDAEIQTVFTAHPDSFIFSSFPGAGPALAPRLLAAFGTDRTRYTSASELQCQSGIAPVTEASGRKQIVHFRWKCPKFLRQTFHEYAAISVQFCDWARQFYDYQRNVLKNAHHAAVRALAYKWIRILYRCWKDCVPYDDSIYTNARRPPRATPSDSQPSGKPLKILLKTVDGFQRFAGIEA

SEQ ID NO: 73139 - protein, 413 aa, unidentified
MEVMYPRCAGLDVHKETVVACVRLAAGSDTSHVVRTFATTTAELIELSEWLEENGCTHVAMEATGVYWKPVWQVLADSSCFELILANAAQVKNVPGRKTDVNDATWLAELLAHGLVRASFVPEPAIQELRGLLRTRKQLVREKASHVQRVQKTLEEANIKLESVLSDVMGRSGRAIIQALIDGETDPAKLAALAHWKVRASTETLSEALRGRIKRNHRFLLRLHLQQIQALDAGIAEIDREVDDGLACFRDAVDRLSTIPGISQLSAQVIVSEIGTDMSRFATDAHLRSWAGLCPRNDESAGKRRSTRLRKGAPWLKSMLVQCAWAAIRSKGTYLHAQYVRLRGRRGPKKAICAVAASILTAAYHMLKDGTFYNDLGPTHFDRRRPETQARRLIKRLAELGFSVELKSMATAS

SEQ ID NO: 73140 - protein, 352 aa, unidentified
MIIGCDFHPSFQQIAYVEQETGEYEERRLSHRGEAEAFYRSLAGKAVRIGVEATGNDRWFHKLMSELGHELLVGDASAIHASAPREQRTDKRDARHILRLLMENRFPAIWQPSVGNQEQRQLLLHRCRLVRMRTRIKNQLDSIAKNEGLTGSRVWRAKRRQQIEALPLTGWYAERRKDLLALLDEMDKLIEPLDEAVRAAAEQNAEAQLLMTHPGVGPVVSLSYVLILGDWRRFPRGKQVGSYLGLIPAEASSGKHQQQMGHITKQGNTLLRWLLVEAATKAQSKDPSWHRQYVRLSMNKHHGVAKVAIAHKLAVRLYWMLRSGQNYRQIVERGSHAGQSDLAGGCGLRPIN

SEQ ID NO: 73141 - protein, 462 aa, unidentified
MAIDYAKAKHVALICDGNGDILKNPFTVLNSTEGVAFLLEEIAATARHRKIPKTQIILGGEDIPSYVDNFILALKKSGIFVARVNAAEAKLNRENSLASTDQLDLLGIAKTLLSRRARSAGDPLDEDENHYLRIRDLSRTRRHLVKQKTACGNRIHTLSDRLFPGYLSTSSGVLSPFSPPCLDLMKERFSAPQIASRKPESLAKFLRKYSVHHPDEKAAKLITLARNALPPEADRVFALQQSLAASVELYLCLDRNAKHLKLEAATALLQTPYAMLTSIGGVGLTLAAGLAGELGDPKRLGGIDSLCGYAGIVPRSNQTGGPDKPARQGGTSPKCNRVLKDWLVQASQKVALYGPDEWKQRHTRWQVGGQHAAFAGAKRLLRLTRTMTRQQIPWISAAARAQNATRETRARDAEVTFGILVHKWRTLPDWQELVFAPDRPLGFWRKLSMEIHGAQLPLRGDE

SEQ ID NO: 73142 - protein, 414 aa, unidentified
MERVYERCAALDVHKAQVTACVHVPDRQGKRAELRAEFSTMTAELLALRDWLKGLGVTHVAMEATGVYWKPVYYLLEDDFELLLVNAQHVKNVPGRKTDVQDAQWLCQLLEHGLVRSSYVPPKPIRELRDLTRYRKSLVWERAREANRLHKVLEDANIKLDCVASRPFGASGKAMLKELCEGNNDPVALADLAKGKLRAKLPALHQALEGRFRDHHALLVGHLLAHIEYLDQTIAELSEEIEERMRPFEHKRELLCTIPGVAERTAEVIIAELGPDMERFPTHRHAASWAAICPGHHESAGKRHSGRTRKGDSWLRTALIEAAQSAAGRTKDTYLNSQYLRVKRRRGHKKAIVAVAHSILVAAYYILRDQVTYEELGGDYFVRREDQDRLTRRLVRQLERLGQHVALEPALEAR

SEQ ID NO: 73143 - protein, 312 aa, unidentified
MDALNIGIDVSRDRLDVAANTSSMAPFHVPRDHDGLEDLIARLKPLGAARIAIEATGGFETVVAAALASAGLPVVIVNPAQVRAFAQALSKRAKTDPIDAAVIARFAEATRPALRPLPDAETQALGDLVARRRQIIAMIGAENQRLKRSSQRTAKSINRLLKALQKELTDIDQDIDDSIRRSPHWRAKVELMKSVPGIGDQIARTLIAELPELGTLDRRQIAALVGLAPWTRQSGQWRGRSFIGGGRAGVRTALYMGALVAAHHNPSLRAFRDRLVAHGKPKLVAIIAVARKLITILNAILRDNHPWREQNA

SEQ ID NO: 73144 - protein, 420 aa, unidentified
MDVIVERCAGLDVHRDKVVATVRVPGSGRRQWEKQTQTFNATLAGLAELALWLAEAGVTLVGMEATGVYWKTVFQALEDRFECWLLNAHHLRNVPGRKTDVKDSEWICQLVQHGLVRPSFVPPVEIRRLRDLTRLRRAQTNERTRTIQRLEKVLQDAGIKLTSVASHTYSKSARAMLEALLSGVTDPEQLAELSKGKMRAKIPQLREALESRFQVEHHGIMVAQLLAHIDTLDIALQNLSERIEFVLIPHAEIIELLCTIPGVQTHAAQVLIAECGLNMTLFPTVGHFASWAGVCPGHHQSAGRRGSGRTRPGPRWLTDQLTECAKAAVRTKNTYLAAHYAQLRGRRGEAKAIGAIRHDLLVAYFHIVRDRVPYRDLGPDWQRKRYSIEHRARRLQRQLEALGYAVTLDQVEPPPAEQAA

SEQ ID NO: 73145 - protein, 428 aa, unidentified
MHSTQNERINQITSSTLIIGVDIAKFKHVARAQDFRGVELGKPITFENNREGFELFMTWFQKISMEQGFQDAIVGMEPTGHYWLNLAHFLKEKQVKYGVVNPLHVKKSKELDDNSPTKNDIKDAKVIAQLVKDGRYAVPSLPKGIYAELREAMKIREHLTTDLCVVQARVHNWLDRYFPEFLTVFKDWECKSAIQMLSLYLLPHELVLVPDTTLLQHLREAAKRGLGLGRIKSLKAAASCSVGIREGSELAKMELKLLLSQYEWFQNKLEELGAKLDELLMQIPHVQLLLAIKGIGRDTIAGFLAEVGDITQYRHPKQITKLAGLNLKTNSSGTHTGQTKITKRGRKRLRALLFRVMMPLVAKNVAFRVLHEYYTKRQVNPLKKMQSLIALCNKLIRVFFGILTKGYEFSEEKMMQDIPRFTELPQVA

SEQ ID NO: 73146 - protein, 416 aa, unidentified
MSVALPQALFFTGIDWASAEHAVCVLDAAGKITARFTIKHSAEGIASLVRRLARYGDPAGLPVAIERPSGRLAGLLLEAGHPVVPVSPDAIKTWREGEVLSGAKSDAGDAAVIAGYLRLRYHRLAPAAPYCDETRALRAAVRTREDLVQMRVAATNQLSALLEAHWPGARAVFADVESPISLEFLTRYPTPAAARHLGHKRMAAFLVKHGYSGRRPAAQLLARLHGAPAGTAGRALTEALQDAVLAVVAVLRALNGAVKDLDRSVAAHLGEHPDGPVFTSLPRSGQINAAQMLAEWGDCRPAYDGPDCVAALAGVTPVTKQSGKYRGVEFRWACNKRFRRAVTTFAGNSRHASPWAAQIYAEARAAGKDHPHATRILARAWIRVIWPCWVNGVPYDPARHRAAAALAGQTPSQPAA

SEQ ID NO: 73147 - protein, 411 aa, unidentified
MCAGIDWATADHAVCVVDMAGRVIDRFSAAHDKTGIAAIITRLRKNKVTEVAIERGDGPLVDALLAAGITVVVITSRQVKNLRSRFGAAGAKDDRFDAFVLADTLRTDRARLRPLIPDTPATISLRMAVRARRHLVAHRVAAGNQLRAHLAVAFPAGLRLFHDLDSPISLAFLARFGSQDAAAELDEQTIGAWLATIAVRGRPAPASELHARLHAAPPGATGADGAAQAGVTAALTATLTALSAQIKALETQIAGQLAAHPDGHIFTSLPRPGTVRAARLLAEIGDCRSRFPDPESLAGLAGVAPVTRRSGTRIAHGFRWAVNRQLRDAICDFAADSRHASPWAAAIYDDARARGKDHPHAVRITARAWSYVIWRCWRDGVAYDPAKHNALQAILARQGAQAAGPGPQEDR

SEQ ID NO: 73148 - protein, 344 aa, unidentified
MMNVTTFVGLDVHARSIKAVALDAMTGEVRSATFGYDAAAVAEWTRSIDPAAKCVYESGVTGFDLQKKLAALGVDCVIGAVSKMMKPAADRRRKNDRNDAEFLARMLSVGNVVEVWVPDDECEAARDLVRALEDAREDLRRQKQRLSKFLLRHGLVFDERTPSGQRKGNWTGAHWSWMKSISFAEKADNDAFAFYVDAVRQAEEDKRRLEKLVADEASKPRWKKRIDSLRCLKGIDVMTAADIVFEAGELARFRNARSFAAWLGLTPSEHSSGEKVAQGGITKAGNKHLRRVMVEAAWHYLAASPHSKDLASGQAPDPAARRHASKGVRLFTYSAPTPFGPPTL

SEQ ID NO: 73149 - protein, 242 aa, unidentified
MSGACFVGMDVSQDTVDVAVHPGTAFQITNDEPGVAEAVKQLQAVHPTLIVLEATGGLEVPLAGALAAAGLPVVVINPRQVRDFARATGQLAKTDRLDAQVLAHFAEAIRPPIRPVPDEQTQALAALAARRRQLIEMLTAEKNRLRLAARPIQNRVQAHIAWLEKELESTNTDLTAMLHESPVWREKEEVLRSVPGVGPVLTTTLFANLPELGTLTRKEVAALAGVAPFPRDSGTLKGWRAI

SEQ ID NO: 73150 - protein, 394 aa, unidentified
MIYAGVDIAKTDHVIGAVDERGAEACRPMPFKNTEAGLERAVAWLEGLAESPSDVVVGMEATGHHWMACYSFLVARGYSVAVINPMQVRAVRKLRGLDKVKNDRVDAGLIAETLRIGRYDETRLATDEVASLRSLSRYLQSLRGMVAELKTQCICLMDAHFPEYAGIFSDMFGAGSRAVLSKSPLPFELARRRAGSLARDIAEASRRPGGSAGRAAEIKAAAKSSIGVRLGQEAASFQIKSLVRQIEFADSECDKVEAMVRALLDEVEPLVLTTPGVSYVTGAQIVSEIGDVSRFRNASALVSYAGLNSSVSQSGQFDSGGGPITKHGSPYLRRALWLAANRARQYDPGLRAFYDKKRAEGKPHRVAVTAVARKLCHIVFAVMRDQAPYDPERR

SEQ ID NO: 73151 - protein, 343 aa, unidentified
MQTVTTIGLDIAKSVFQVHGVDAGGHVVIRRQLKRRYVLAFFQKLPRCLVGIEACGSSHHWSRELQALGHTVRLMPPAYVKPYVKRHKNDAVDAEAICEAVTRVNMRFVATKTPEQQSCLTLHRTRHLFIRQQTSVINAIRAHLAEFGIVAPVGRHGVEQLLGVVADASDKRLPEVARACVAALGAQLQTLKAQILEFDRMIRAWHRCSEASRRLDDIPGVGPVLATALIASVGDPRAFRSGRDFSAWIGLVPRQNSSAGKDRLGSISKRGDRYLRSLFTTGALAVIRYAKIHGTKHRPWLTALLVRRPTKVAAIALANKIARMAWAMMAKGERYKEPAALAA

SEQ ID NO: 73152 - protein, 376 aa, unidentified
MTTLETEYSTNSALYLALDLSEAKWKLGFTNGLGQKPWIRTIDAGEVLLLEREIQRAKERFGLAADSRVLSCYEAGRDGFWLHRCLVASGIENVVVDAASIEINRRAKRTKTDRLDAGKLVRMLVRYASGEQKVWSVVHVPSLEAEDQRQIHREIATLKVDHTRHINRIHGLLAGQGIHVPIQADFLARMDELRLWDGAPLPAGLRARLEQEYACLQFVDEQIAAQEAQRRELLRTSTERYVEQVRQLMRLKGIGEQSAWRYVTEFFAWRAFRNRREVGALAGLAPTPYRSGDEQHELGISKAGNRLVRAMAIEIAWAWLQFQPESELSQWYRRRFGEGSKRIHKMGIVALARKLLIALWRYLEQGQLPAGAQLKA

SEQ ID NO: 73153 - protein, 311 aa, unidentified
MIPYTIGVDVAKDTLDAHRLPGGASRQFANDKRGHKALIAWIGSEAAQVVFEPTGPYHRAFERALTMAGLPFVKVNPRQARHFAEATGKLAKTDRIDAALLARMGALLQLEVREPRSEIVNDLKELRHAREALVKDRTAAKNRSKALTIPLLERQNAERLKQIERQIAAIEAEIEARIGADRTLARRFEILKSIPSISSLTAFALLIEMPELGSLDAKQAASLAGLAPMARQSGHWTGRAFIRGGRASVRRALYMPAIVAARFNPDLKAIYAKLSAAGKPAKVALTALMRKLVVLANALLKADREWAPKCP

SEQ ID NO: 73154 - protein, 427 aa, unidentified
MEEVTDEPLYRDRVCGIDIGKAGMAATIRVPSDANPARRAQETRSFGTTKREVLALADWLRSWQVPAVVMEATGDYWKPVFYRLEAEGFECVLADAKQVKHLPGRPKRDPSDSRWLAACFERGAITSCFVATPEFRIIREHTRYRRDLTAERTREKQRAEKLLESAAIKLSSVVTDLHGVTGRDIMDHLIAGERNPKVLAQLARARARRKISELEAALEGAEFFTPQLAALLARMLARVDQLNASIGELTAVVETLLEPYEEQLQQAESMPGWGRRSAQDAVAETGVDMTRFRTGGHLASWAGRTPLDNQSGSRSGRAKSKKGNRYLAAITGETAVAAGKTQTREGARYRRIARRRGKPKAGVALGNTQLKVYHALLSSPGTRYQDLGVDYYDNRASTRRQVRALQKRASELGYTLVPDLTGCPEIA

SEQ ID NO: 73155 - protein, 339 aa, unidentified
MRLYTGFDLHSTNTFVGIIDEEGERLWKKKLRNDPSLILETLQPFKKDIEGIVVESTYNWYWLVDLMMEEGYQVHLANPSRVQQYSGLKHGDDEDDAFWLAEMLRLKILPEGFIYPKEQRPLRDLLRKRGHLVRLRTSLIVSLQNILARNTGTKMKTNHIKVLKEDRVTPLLASDDDLSLAGSVSKDAIDSLTRQITAIEVALEKKINLQRPYDLLLSLPGVGRVLGLTIMLETGPINRFADVGNYVSYCRKVPAARFSNDKKKGTNNRKNGNKYLSWAYAEAGELARRFDPEARAYYDRKRKKTNAPIAHSALSNKLARAAYYIMRDGVPFMPEKAFG

SEQ ID NO: 73156 - protein, 346 aa, unidentified
MDQQQHYVGLDVSLETTSICVVDDKGTVVWRGKCATTPEAITEAVRTYAPAAVRVGLETGQLSNWLTLNLRRRGLPVVCLDARHAKAALSLQINKTDANDALGLAQIVRTGWYREVAVKSMDANTLRMLLVVRAQLVSQRQTIANTIRGLLKTFGLVIARGSGGLFGVRVREQIAGNDVLVAIVEPLLVVWQAIREQVQMLDRQILARARADAAARQLMTIPGVGVVVALAYTAVIDDPARFRRSASVGAYLGLTPRRYQSGEADTSGHISKCGDGLLRAYLFEAATVLLQRHSRASTLKTWGLALAKRIGMRRAKVAVARKLSVIMHRVWSDRSEFRCGDVPVAA

SEQ ID NO: 73157 - protein, 443 aa, unidentified
MTRRCFGLDVHRDFAQVAIWQDGLVRQAGQIAMTAEALRVFADSLAPTDEVALEATGNTNAIVRALRGRVARIVVGNPQKTRAIAEAKVKTDKVDAAILAQLLAADYLPAVWVADEATQARRRQVARRAHIVRQRTRLKNQVQAVLHRNLIARCPAADLFGHKGRAWLAEQPLPADERQAVSALLRQLDFHGEELRLIDRELARVALGCQDTKRLMTIPGVDVTVAMSITAAVGDFERFCSPNKLVSYLGLNPRVKQSGGQPASHGRITKQGRAHARGMLVEAAWVAVKTPGPLRAFYERVRARRGMQIAVVATARKLTVLCWHMIARGEDYAFARPSLTAKKLRALELQAGMPARRGQKGHAAGYSLKDVRARERQMAEHAERAYRQLVADWQAKAPQPRVGVAAANGARLSRPSDGATAARQASAPEPALRSGVDHARRRG

SEQ ID NO: 73158 - protein, 428 aa, unidentified
MKKHSFSKLAAITPETLIVGVDIAKNAHWARFTDYRGIPLGKALKVLNNKAGFENILTSIKSVCKQNDLPKVILGLEPTGHYWKPLANYLIKHEIKVVLINPYHTKRAKELDDNSPTKNDKKDALTIARLLRDGRFSQLYLPQDVFGELRVLSTTRVSLLKRQNAIKNTIRAVLDEYFPELITVFKHPLKGKACRQILKSCPFPSLILQLGRTKVLTQIKKAVKKTIGPKRVEQLFQAAQDSIGVTYGIPSARLKLTLLIQELELLEKQLDQVEQAMEQALTLTGYKEVILSIPGVGITTAASFLANTGDPLRFTHPRQISKLAGYNLIEDSSGEHQSKTIISKRGRKQLRNVLYQMARTLVAVNSQMKELYHYLKTRPRNPLKKKQALVVIAKKMITIIHSLLKKQNQYQPELVFNQFRLNQIKQVA

SEQ ID NO: 73159 - protein, 318 aa, unidentified
MNSPSVTVGIDISKQRLDLARFPQGDTLSVAYTDTGLAKMLTRLRGWSPQIILLEASGGYEYGVVAALVAAGLTPVLINPRQVRDFARSLGILAKTDKIDARVLAEFAFRVQPEPRPLPAAQQQELNHLLSRRRQLLEMIQMESNRRELSPFRRVRQSIDENLDSLRRQLADLERQIDDFFHQSPLWVQQDTLLRTVPGVGPQTVLSLQAWLPELGALNRHQIAALVGVAPFNRDSGVFRGRRMIRGGRSKVRQALFMATLSAMRYNPAIKVLYDRLTSQSGKSGKVALVACMRKLLTILNAMVKNQTPWHHMTPLTT

SEQ ID NO: 73160 - protein, 484 aa, unidentified
MTDAVQDLDWEEQQVKVRLGIDIACRAEHRAACADETGRIMWSGHRFWTRAEELQALWAKLPGDTDQVLVVMEPTRNAWVPLAAWFRRQGATVVLVPAEQSADLRAYYAKHTKTDRLDAELLARLPLLHPDGLHPETTNGPGDPLKRAVKLRAGLVRRRTSCMQRLDALLEILGPDWVAALGSDMTQTAFKFLAGWANPHQVKRLGRARLARWFQRQTRKAWGERRADAVVAAAEATLALWGPAGLDYEALAADIATEASLALELSRQITRLDERIFDHYCDADPDHILLSVPGVGKILAAQIRGRLGDPHRFTSLAAARSFSGLIPHQHASGLTDAVGGPTKHGDACLREALFLAADHARKTDPTLAARYQRLMCQTGRHHTSALCTIATVLCTRIVACLRNNTPYQLRDVDGSPITPAQGRAIVTARYQIPPEVRAARRMISNARSRHRRWDERIEQGVAKRSTMTPVPPASLPPAGSLDNH

SEQ ID NO: 73161 - protein, 339 aa, unidentified
MQVTTIGVDLAKNVFQVHGITTREEVVFNKPLRRAQFLPFFAKLEPCLIGMESCSSAHHWARELTALGHEVRLIPPMYVKPYVKRGKSDAIDAEAICEAVTRPTMRFVAIKTVEQQALLSLHRARDLLVRQRTQLINGLRGLVAEFGIYIPRGLARVIGFAEDIILGEVLDLPDIANEVIRNLAEQLMALHRRVRWYEERLKQVAKEDARVRLLRTIPGIGAVTASAIIASIGDGHQFRNGREFAAWLGLTPANKSSGGKEKLGRITKMGDQYLRSLLVVGMTSLVRQTRSHPERASKWLTSLLDRKPARVATVAMANKTARIVWAVLTSNEPYNPRTA

SEQ ID NO: 73162 - protein, 346 aa, unidentified
MEHYAGIDVSLELSSVCVVDAQGKIVRETKVASEPEALVAFFASLGFAVKRIGLEAGPLSAWLHAGLKRAGFDTVLLETRHVKAALSAMMVKTDRKDARGLAQLIRMGWFRPVHAKSMGSQEVRALLVARKQLLGRLIDVELSIRGILRGFGLKVGVVTRKGFEGRIRELVTGHITLERIAGAMLSARATLKVEYEKLHKIVLTIVREDAVCRRLMTVPSVGPLVAITYKSAMDDPNRIAKSKAAGALFGLTPKKYQSGEKDVTGGITRAGDEMVRTALYEAANVLLARITRFSKLKRWGMDVAKRRGSKRAKVALARKIAVILHRMWVDGTTYRWTNAHPTAVQV

SEQ ID NO: 73163 - protein, 429 aa, unidentified
MSYRIAGIDVHKKMLAVVVSDVEIESEYEFERRKFSSSPEQLRSLAAWLLEQEAEEVVMESTAQYWKPVWEALERYWKPLCEKREGARRKSGTLHLAQALSNRGRRGRKRDFPDAERLVKRLVARELTLSFVPDAEQRLWRTVTRKKYQLRCDRIRLQNQLESLLEEAHIKLSSLVSDLLGLSARRMLKAIAEGATNPVTLAALADERLRATPEQLCDALGACTELHAVYRRLLKMALEELRLIDEQIGRLDQEMASLLSEHQDAVQRLAEVPGLGVDSAQQIIAEVGPTAATFPSEKCLSSWVGACPGDDETAGVNYSHRSPKGNRHMRRLLNQAANAAARTKGSIFELAYRRSVPRLGHNQAIGAIAHRQCRLIWLILHQGVRYEERGPAVNKRSKQLRTWRMIRQLRNLGYRIEPPNPQPSQASAQ

SEQ ID NO: 73164 - protein, 343 aa, unidentified
MEHFAGLDVSVKDTSVCIVDDTGKIIREVKAASEPAALLAVLTNPTYHFKRIGLEAGPLSQWLFSALAEAELPVICVETRHMRAVLKAQINKTDRNDARGIAQMMRVGLYRPVHVKTLRSQKLRMLLTHRKLLQSKAIAIENDLRATLRNFGLKVGIAGKVKFEARIRELVDNQPDLAVLVEPLLVVRRVLREQIGILHRRLLAVVRDDEVCRRLMTVPGVGPVVALTYRATVDVPARFRKSKAVGAVFGLTCSKYQSGEIDRSGRISRCGDEMMRSMLYEAAQSMLFHSAKWSWLKAWAMKIARHRGMKKAIVALARRLAVIMHRIWVDGTEFRWTKEVVTA

SEQ ID NO: 73165 - protein, 362 aa, unidentified
MKSTTVAVDLAKSVFQLAVADASWKVIESHRLTRSQFERWFHNRDVSLVVMEACGSAHHWARHLTGLGIEVKLLPAKYVRAYVKRNKTDAADAAALLEALRASDIEPVRIKSIEQQALQGLHRTRSLWMSTRTSRINALRGFCREFGLVIPQGARTGVEAMARLLADPGSAIPELIRSSMKLLVEEIRLLEQRIAQLEKELTALAQQSPACKELLSVPGIGLLTATAMVAATGGEVSHYRDARHFASWFGLTPQEHSSGSTRHLGRISKRGDRYLRMLLTHGARAVLRAASVARLASKQIDGLKDWALKVQGRTNHNKAACALANKLARICYAVLKHHEPYGSQTRREESKKINRTAYAVAS

SEQ ID NO: 73166 - protein, 423 aa, unidentified
MAKKKVVEVLEAIYRCCAGLDVHSRTVSCCVRRLDEQGKLHAEVRTFGTMTRDLLALCDWLNAEGVTHVAMESTGVLWKPVYNILEGQFEILLVNAKHVKNVPGRKTDVKDCEWIAQLLQCGLLKSSFIPPLPQRELRDLTRTRTQVTNELASVANRIHKVLEDTNIKIGVVVSDLLGVSGRAMIAALIQGETDPVKMANLARRRLRQKIPVLEQALVGKVRGHHRFLLQTHLDHLTYLESLIERLNQRIEEAARPFEPAIAALIPIPGYDRASAQSVIAEIGPDMDRFPTDAHLNSWAKFCPGNNESAGKRRSGPTGHGNRWLGATLVQVGWGASRTKGSYFQAQYRRLAGRRGKKKAIVAVGHSILTVTYHILKDHTAYQDLGADHFDRISRDRIRRYHIKRLEDLGYTVQVTDNQDKQAA

SEQ ID NO: 73167 - protein, 335 aa, unidentified
MTCFVGLDVSMEETAFGVRSPEGRILGQGKTATDPDAIAGALARFGRPARLVLETGRMANWLHRQLVARDLPAVCVDARQAHAVLSQMPNKTDANDAAMLAELARTGFYRAVRVKSEAAQGMRALLKARDLVVRQRMDLDNTIRGLLASMGVRLPKGPRRWADRVALALGDNEALALALSPLLRLREHLARSLAELTRRLLAEAKGSELCRRLMGVPGVGAVTAYAFVATIDDPARFARSRSVGAYVGLTSRRYQSGEIDYTGRITRRGDGMLRTLLFEAASSLITRTGRGGALREWALRLRARVGHKKAGVALARKLGVVLHAMWVDGTEFRAA

SEQ ID NO: 73168 - protein, 318 aa, unidentified
MTVKFENHFVGIDVSKAQLDVELRPTGTSWTVRQTEEDIVGLVERLQTLEPELIVLEATGGLERNVVTALATAHLPVVVVNPRQVRDFARSLGILAKTDRIDAQVLAHFAEAIRPTPRPLPDASTRELEAFVARRRQLIIMLTAEKNRRHKVHASLTERLDNHIAWIKEELKNIDRDIDGMIRISPIWKVNDDLLRSVPGVGPVLSVTLLVNLPELGKLNRKQIAALVGVAPFNRDSGHHRGKRTTWGGRAHVRNTLYMSTLSAVRFNPALKSFYERLLDAGKAPKVALTACMRKLLTILNAIVRDQQPWQLEQPTSY

SEQ ID NO: 73169 - protein, 371 aa, unidentified
MTNEQSTIYVGIDVSKDKLAVAIADGGYRDEVLSLGTFENAPASVDKLLKRLTGRASPVSVCYEAGPTGYGLYRQVRAFGFECCVVAPSLIPVRAGERVKTDRLDAMRLARLLRAGELTPIWVPDKTHEAMRDLVRARESAAEDQRHKRQLVSAFMLRHGRVYHRTKPWTMRYRRWLQSQSFDHPAHQIALQEMLQAERNATERLDRLTGHIEALVPEWDLAPAVNALQALRGVALISAVTFMAEIGDVRRFETPVKLMAYLGLVPSEYSTGKTTRRGGITRAGYARVRHKLIEGAWTYRLQARPGARKLYILQEQPAEVQDIAWKAQSRLTARYRKLSQRGKKSTVVTTAIAREMAAFMWDIARRTMPAS

SEQ ID NO: 73170 - protein, 341 aa, unidentified
MRKNLYCGVDLHSNNAMYVITDEKDKQLLRKRLPNELPVVLKSLAPYRGRLKVVAVESTYNWYWLVDGLQEKEYPVVLAHPSEMDQYNGIKEADDLTDAAFIARLARLNVLPTGYIYPKEDRPVRDLLRRRMLLVQQRTGIVLSLQNMALRQTGQAVGWRALRKLSVEERAELLGDHDCLTFVAAEQVDLIERFNEKIRRFEKKVLEHVQLRPAYVCLQTLPGVGTILALTMMLETGDLGRFPTVGDYTSYCRCVRATHSSNGKKKAHHNGKNGNPYLAWAFVEAVHLALRTCPQAQSFYDKKRAQHNAALATKALAAKWSKAAYYMMKRQENFDVTRVFG

SEQ ID NO: 73171 - protein, 387 aa, unidentified
MGVIIGMDPHKRSATIEVVDERGQVLAVGRYGTDRAGYAEMLQARRKHPDRLWAVEGCNGIGRHLAHRLVHDGETVVDVPTKLSAQARVFATGNGRKTDPVDAHSVAMVALRTPNLLRVEVDDDLIVMGMLVDRRDELGRARTQTINRLHRLLLELFPGGAPQFLSSRKARVMIATIKPRDLVGKTRRRLAVELIVELEAIDKRIKAVKKELAVLVEARGSTLMGLTGIGPSGAARLLADVGDIHRFADRDRFASWNGTAPLDASSGDQKRHRLSRAGNRRINRTLHIMAVVQLRNPTEGRAYFDAKKAADKTSMEAMRALKRRLSNVVYAQMTADQKRREAASPGGHSGTTLQSSVTDLTPDVGSSDKPLPGPATNQPRTVLPAVS

SEQ ID NO: 73172 - protein, 366 aa, unidentified
MTKCTWVGLDVHLDSITAAILEDDAGEAEVVRLSGDLMQVRRLFRRLAKNGLVRACYEASGAGFVLHRTLARDGFSCDVIAPSLIPRKPGDRRKTDRLDAVMLAKLYRSGHLTPVHVPSEHQEALRRLLRLRYTYQCTAASTKHRISGILRTQGIVFREGKSTWTQIHRRWLTQLRDQLSGPLHTALGAELEHLEYLEMQRGSFDDEILRAAQSTPYRTAVEALCCLRGVKTLTAMTLVAEIDDVRRFRSPRALMAYFGLVPSERSSGERERRGPITKAGNIHARRLLVEAAWNNRHRCAADIVLKRRRQGQPAAVVAIAIKAQHRLSKKFWRLDQKKHRHVAITAVARELVGFVWAILCCVPAHA

SEQ ID NO: 73173 - protein, 337 aa, unidentified
MNPVTIGIDVGKNVFHLYGVDAHGKRCLRKKVTRRQLVELIAQLPCCLIGMEACSGTHFWAKRFQAAGHEVRLMSPQFVKPYVKSNKNDFLDAEAICEAVTRPNMRFVPIKSDEQLEIQQLHRARSLAVAQRTALANQLRGFLREYGIVLPQGIQRLREQLPFILEDAQLPITDRARSLLARLGHELRHADEHIHYFDRTLALLAQKAPAARRLQSIPGIGPLAATALIAAVGNAENFRSGRELAAWLGLVPRQHSTGGRTRLLGISKRGDTYLRTLLIHGARAALRFATRKSDARSRWAANLKARRGPNIASVALANKNARTAWALLAREEFYRTC

SEQ ID NO: 73174 - protein, 355 aa, unidentified
MNRVKYIGLDVHQATIVAAVLDDSGKLVMQSILETKATAILEFLHGLSGTLQVTFEEGTWSTWLHDLLLPHVAKLVVCNPRKNALLKDGSKSDKIDARKLAELLRADMLSPVYHRDSGVRQLKELARSYSALTKDTIRVMNRLKSLYRSRAIACAGRQVYAPRQRALWLERLSETGQHRRAEPLCQQLDALQALRQQARRDLLREARRHPAASQLRQVPCFGPVRVALFIAQVQTPFRFRSKRQFWTYCGLAVETHGSAEYRFVAGQLARSKRAVLVRGLNDHYNHELKNVLKGATTLACSRPGPFHDFYLALLDKGMKPAMARLTLTRKMAAVTLLLWKKGERFDAQQLKPQAA

SEQ ID NO: 73175 - protein, 375 aa, unidentified
MTIIATGIDLAKNVFAVHGVNDAGKVELRQPKVARAKLNALVAALPPSVIGMEACSGAHYWARLFQSHGHTVKLMAPKLVTPYRMSGKRGKNDAADAAAICEAMQRPNMRFVPVKSEDQQARLMVHRARQGFVTERTAVINRIRGMLSEFGIVMPLKAEVVRQQAREHLEDLPGFANLVIGDLLSEVAHLDERIKQYDLHIRTMARDCNAAQQLMQLMGIGETTATAIVAMVGNASEFTCGRQFAAWIGLVPGQYSSGGKARLGRITKAGDPYLRSLLVMGARAVLNAAALLDGDDLVQPGAGLCEDGVGQLAMRVRFGITRAPVERLSPWRRVWRGLACKHRAMSDQLADAPTRGYKTRFAMLTSGFGPRCVPR

SEQ ID NO: 73176 - protein, 412 aa, unidentified
MEVLVERCAGLDIGKKQVQASIRVPDGEGGRRKETRTYSTFTPSIETMAQWLADEGVTEVVMESTGPFWKPIWYVLEERGFDLKLVNSRHVRILPGRKTDVKDAEWLAELLEHGLLRGSFVPPPAIRKLRDLTRYRKRLIQTRADECQRIQKTLEDAGIKLSSVATDILGVSGTAMLKALVAGERNPEVLAELARGRMRSKVPELTQALRGRFSEHHALLIRISLDLIDHLDTAIATLDGQVEAAMAPFAEAAVRIDTVTGVGQRAAECIIAEIGADMSVFPTASHLASWAGCCPGNNITGGKRRSGKTNKGDQWLNDVLIQCAWAAAHSHDTYLSAQFWHLARRIGKKKAAVAVAHSILVIIWHLLTNHCDYQDLGGDYFVKRDAERQRDRAVNELMRLGYKVTLEEAYAA

SEQ ID NO: 73177 - protein, 441 aa, unidentified
MAMRKKDETVVFPNAAAIDVGAASHWVAVPHERDAEAVREFGAMTDDLHALADWLLACGIDTVALESTGVYWIPVYEVLERRGLTMWLVDARQMKYVPGRKSDVQDCQWLQKLMSLGLLRAAWRPGDEVCVLRAVVRQREVLLREQASWVQRMQKALLQMNIQLVEVLTDVMGLTGQAIIRDIVAGQRDPAVLARHRNYRVKASVAEVERALTGNWRDEHLFVLAQALSMYDSLAERLLECEAKMKALLAPLERHPIALEGASKPSGKNSPRFDLRATLARWAGVDLTRINGLAVTSVLTVLSEIGPDLSRFANVKHFCSWLGLCPATKISGGKVLSARTRRSTNRVRQTLKVAAMSLSRNNSALGAFYRRLCSRMDKPRANTALAHKLARMIYFMLTRGEAYVDQGQQQYEEQQRQRSIAALRRRAANLGFAITPATATP

SEQ ID NO: 73178 - protein, 409 aa, unidentified
MERLIERVCGLDVHKQTVAACVRVPGSTGTREQHVRTFGTTAPEILALRDWLEAHGITDVAMESTGVYWKPIYYVLEERFTCLLVNPTQVKQVPGRKTDVGDSVWIAQLLEHGLLRGSFVPPAPIRELRDLTRYRKVLIQDRTREVNRLQKFLEDAGIKLASVATDVLGVSGRAMLEALIRGTTDPDVLADLARGKLRKKLPALRQALVGRFRPHHAFLASQLLAHLDYLDETIATLGERVEELMAPYASELEHLDTIHGVAQRTAEVLIAELGVDMRQFPSDRHVASWAGLCPGNNESAGKHKSGKARRGNRWLRAALVEAALAAIRKPNSAFAARYRRIMGHRGHKKAVVAVAHSMLVTAYHVLARRTSYHELGADYFDRRHAERVRHRAIQTLERQGYRVTLERAA

SEQ ID NO: 73179 - protein, 343 aa, unidentified
MKMHTLGIDIAKNTYQLHGADPSGKAVMRKRLPRHKLAAFIANLPACTIVMESCGGANYWARVFQRSGHTVKLISPQFVKPFVKTNKNDANDAEAIVEAASRPSMNYVPLKQVEQQDIQSIHRIRTRVVKNRTALINEIRGLCLEYGIVVSPGAARVKSSLCTIIADSTNEFTPSSRESMQDLYEELVEIEARLKKLDTKVRQLCRQNENCKRILKVPGVGELTATAIVAAVPNPKEFRNGRHMSAWLGLVPKQSSSGDKQILLGISKRGDRYLRTLLIHGARSVLSHCKDSDNDYGRWVTRKKATLSHNKAAVALANKNARIIWSMLNTGEEFSYGVQTAAA

SEQ ID NO: 73180 - protein, 359 aa, unidentified
MTQLTKRTTKYVGLDVHQATTVATVREESGRVIARTIVPTDAADILTFVRGLRGTIHVAFEEGTQAQWLHDLVVPVVDRVIVCNRRGQAPRGNKADQADADELSDLLRCGRLCAVYHGSPEHATLKELARTYANLVEDATRVMSRLKALFRARGIKPSGRAVYEASRRAEWLGQLTDVGVHFRAAALYAELEVLQALRPTAKAAMVTEARKDPAWTVLQSIPFLGPVRVALILATLRTPWRFRTKRQLWSYAGLAVVTRTSAEFEVDGARAIRRRRRRVATRGLNRNHNPVVKDVFKGAALAAATRPGALQDWYHGLLTHGLREDLARVTLARKLAALTLRLWKTGDRYDPTKLTVQAR

SEQ ID NO: 73181 - protein, 420 aa, unidentified
MKPSPEAEFTAFIGIDWADSKHDICLQAADSAHREFDRFAHRVDRIEQWACAMRQRFGGRIAVALELSKGPLVYALQKYDFFVLFPINPSMLAKYREAFKPSRAKDDPTDAQLALELLLRHRDRLNPLQPQTAQMRMLLYLVEQRRRLVADKTRFTNRLGHALKQYFPQALDWFDQTDTPLFCDFLTRWPTLAQVKRARKASLEAFFQAHNVRFAKLVEERISAIKTATALTEDVAVITAYQLQALVLVDQLRVTLQAIARFDAQIATIAPTLPDYALFRALPGAGPSLAPRLLVAFGEQRERFAGADELQKYSGVAPVTERSGNKRWVHWRWQCPTFLRQTFVEWAAQTINKSFWAGAYYRRQRDQGSSHQTALRALAFKWLRIVYRCWQTRTPYDESTYLNALKRRGSPLLKAIGATT

SEQ ID NO: 73182 - protein, 371 aa, unidentified
MKKHSTFVGMDVHKNSISIALAHEGRQGEVRSYGRIDGSLYALDKVIRKLVSTGNRLHFVYEAGPCGYPIYRHLTAQGFDCMVVAPSRIPKKSGDRIKNDRRDAIQLARLHRAGELSAVYVPNDEDEAFRDLTRAREDAKSDEKKSKQRLSAFLLRHGYRYTGRTSWSKAHMRWLSGIKMPHRAQQIVFQEYINTLSQCQQRVQRLTEQIQQLLPQWRMFPVAQALQSLRGVSLIVAVTTVAEIGDLSRFQSPVELMNYIGLVPSENSSGEKTRRGSITKAGNGHVRRVWVEAAWAYQYRARVSRALLKRQEGLPEHIRDIAWKAQLRLCSRYRHLWARGKARQVIVTAIARELCGFMWAIANETQVPVAE

SEQ ID NO: 73183 - protein, 349 aa, unidentified
MQYVGIDFHKNYSFITEMDETGVIKRQVKLSNNRDTLTNYIDLLPTNTKIAIEATCNWYYFYELVEDHDLDISLAHPLKTKAIASARLMNDKVSSETLAHLLRADLLPTAYIPGQQTRDIREVLRMYAFLISQRTRFKNRVHAILLKNGLNCPYTNIFGKRSLRWLNDLALRDCYQNAIASYIRLAEALNAEINLLKQTIETLAYDHPYARILDTHPGISYYSGLLIAVEIGEIERFPNHGKLCSYAGLVPSMHASGGKVRMGSITKQGSKWLRWILVECALHAIKKSPHYQNLYTRVAYKHGKGTARVAVARSMLRAIYAMLKFNRPYKQRQLRPAPWGHNLIKGSEI

SEQ ID NO: 73184 - protein, 401 aa, unidentified
MKRLSGGIDVGSESHHITILDEEDQILYNQKVSHKLNEFTESIKQFKKIEKKEKGEISFALEGKNGYSAPFDQLLINQGFTLYNVDNLKLKRFREAFAGEWKDDKRDALMLSKMLKLKKHINSKREKVFIKIEKPSPLTESLKLLSRHQQTLIDEKVRLTNRLSKKLLEVCPQILELGKVKNKKIIAILAKYPDFSKYKRITLKSLLKIKGIGEIGAPFLLKRLNNISYMPGLTDIYKTIILSYAKRISELQEEIKDIDKKLDEIGNQNKEVNHLKTIPGVATKLASRLIGEIGDINRFPSEKQLAIYCGIACVNNDSGKVTKAKAVYKANKICKQALITMAGCSIRLSFQCRDYYLKKRAEGKSHNHTLRCLARQLIKVIYKMLIEDRDYIVREELKKVA

SEQ ID NO: 73185 - protein, 413 aa, unidentified
MEVTYKRCAGLDVHKKSVVASVRVWEGDELREETRSFGTMWEDLWQMADWLRAEAVTHVAMESTGVYWKPIFNVLEGDFEVWVVNAKHIKHVKGRKSDIKDAEWIAQLMQYGLLAPSFIPEAPQRELRELVRYRTHLIEERTREVNRVHKALEDANIKLSSVATDVMGVSGRQMLQAIIAGKDDPAALAQLAKGRMRSKIDELERALTGRVKDSHRVLLRLHLEHIDELNAKLEQLEEEIEKLLPPFDQDDLIDRLDTIPGVDRRVAQIIIAEIGVDMSRFPSADHLTSWAGLSPGQNESAGKNRSSRTLKANCYLRPALVQAAHAAGRTRNTYLGAKYGSLSGRRGKKRAAVAIARKILVIVHHIIREGTVYKELGDDYLDQRRRETVTHYAVRRLEKLGYKVTLEPLRAAA

SEQ ID NO: 73186 - protein, 370 aa, unidentified
MMMPHAVLSKKSWIVAVNTPLSDKISRHTLKPGDGKELLGLCERIRTRVARETKKRVEMVSCYEAGYDGFWLHRLLQTHDIRNHVIDPASLQVDRRARRAKTDRVDAERLLRSLMAYLRGEPKVWSVVRVPSVAEEDDRRLHRERGRLINERIQHVNRIKGLLAIHGIYDYQPLRRDRIQRLEQLHTADGRTLPPRLEAEILRELQRLEIVIGMIKTIEAKRDAIASANTETERGSAKKIQHLAKIKSIGPEFATTLVGEVFYRSFDNRKQVASYVGLTPAHFQSGAMSRDQGISKAGNAKARTVMIELAWLWLRHQPDSDLSAWFRDRVGKLKGRIRRITIVAVARKLLIALWRYLETGLVPKGAALKV

SEQ ID NO: 73187 - protein, 314 aa, unidentified
MDAQDNKVFVGIDVAKASLDACVWPEGRRLVATNDPAGVRRLIADLPAAESCLVVVEATGGYQRTVVAELLAAGYRTAVVNPRQVRDFARGLGLLAKTDRLDAEAIARFGQHASPRLVEPTSPEHQRLEELVARRRQLVELRAAETCRLETVSTRTVLKSVRTVIEQLGKLIRKIEKELADLVESDSQLQCRSCTLQTTPGVGAVTATTLVAELPELGRLSRGQISALVGVAPFNRDSGKFHGRRAIWGGRAQVRSVLYMATLTARRVNPVIRAFGERLQAAGKPFKVVMVACMRKLLVILNALLKNNSAWKAS

SEQ ID NO: 73188 - protein, 322 aa, unidentified
MDHNGGLLGIESFPADASGFEDLLGWLVDFGEVEQVGVEGTGSWGVGLARFLGDQDIEVVEVDRPNRQTRRREGKSDPTDAVSAARSALSGVATTTPKSRNGRVEQMRVLLVARRSARQQRIQTLNQLRHLVFTAPESIRVRFKDRYKTGLVTEAANMRPRKGSDPIVFTTNMVIRNLARRIRVFNSEIREIDRMLTELISETAPSLLDLHGIGTDTAASLLVAAGDNPNRLKSERSWAHLCGVAPIPASSGKVTRHRLNRGGDRQANAALYRIVLTRMSSDPQTRRYVTRRRDEGLNTAEIMRCLKRYVARQTFKHLPHMT

SEQ ID NO: 73189 - protein, 348 aa, unidentified
MTASYDYHIGVDYHKSYSHLVVQDSSGKTLRSGRVKNDRQSLGGFLERYRENSHAVVEATRNWMVMYDWLDDICDDVVLAHPWKVKAIADAKIKTDKIDATVLAHLLRADLVPEARELRIALRERMFYVRLRTMTKNRIVTVFDRYPEQTAQLKKLGDLFGKAGRVQLAQVNVSEIDRIQIDRGLDFIADIDVRIKQSEATIRTMTKANGNVKLLKTIPGIGEFFARLIDAEIDDLSRFRNPKKLAAYAGLVPSTYSSGGKTFHGKIIKQGDKWLRWAFVEAVGPAIASDAQLRAQYEHLKFRGTNKARVAIARKLLTIAFQILRDQRAYERRGDSPMESASTISRLS

SEQ ID NO: 73190 - protein, 371 aa, unidentified
MAEFSRTLYVGLDVHKDSITVAYVPEDRGAEVVSLGAIGTRQSDIDKLIRKLQSKGATLVFVYEAGPCGYWLYRYFRRHGLSCHVVAPSLIPRKPGDRVKTDRRDAVTLARLMRSGDLSAIYVPEIADEAIRDLSRGRDDAMRDLKATKHRLKAFLLRHDIRYEGRASWNAAHLRWLSEVVCATRAQQIVFQEYVRAVTEQHDRLQRLEAELHAEVKGWRLYPVVEAIQALRGVELTSAVILMAELGDLTRFDTPRQLMSYLGLTPSEYSSGDRRRQGGITKAGNTHARRALVEGAWAYRYPAKVSRHLQLRLEKLPAEVQAIGWKAQVRLCKRYRQLIARGKHANQVVVAIAREMAAFAWAIARAVPLAA

SEQ ID NO: 73191 - protein, 296 aa, unidentified
MTLYCGIDLHGNNSVVAVLDEQDRTLYEKRLPNDLATIVGVLRTYQSELAACVVESTYNWYWLVDGLMETGFEVRLAHTSAMPQYAGLKYSNDFSDARQLAHLLRLGILPTGYIYPKQERGLRDLLRRRLLLVRQRTLHHLSLQSLIARHSGQSLSSNQIKMLKTQQLTAYLSPPILLAGQITHQARCWLDKAIIRIEKELQKQVTPREDFQVLQSVPGIGPVLGTTIALETGTIERFASPGNYASYARCVKSERISNGKYKGQGNKKNGNKYLAWAFMEAAHYAAIWNPQINSHA

SEQ ID NO: 73192 - protein, 409 aa, unidentified
MQVLHPCCCGLDIHKKFIVACLFTTQADGSVQKELRTFTTMTQDLLALSDWLREAGGTHVAMESTSSYWRPVYNVLEGHFELLVGNAYHMKTVPGRKTDVKDAEWIAELLRHGLIRGSFIPAPAQRHLRDLTRYRTHLVEERARLTNRLQVVLEDANIKLAAVVTDVRGVSARAMLDALVAGETDPATLAELARGRLRSKRELLVQSLTGRFTAHHAFMITEHLSQLDYLEEAMERVSEEIERRVEAEQAAIELLDTVPGISVRSAEILIAEIGTDLTRFPSAKHLASWVGICPGNKESGGKRLNGKTRHGNPALRQVLIEITHVASKTKDTYLAAQYRRIAARRGKKRALVALGHTILVIVYHILTRQEPYRDLGATYFDLRDQQRVEHRLVHRLERLGYVVNLQRAA

SEQ ID NO: 73193 - protein, 318 aa, unidentified
MNTEQTYVGIDVSKERLDVVLRPSGEYLEASNDEQGIGSLVACLQEAPPALVVLEATGGLEQPTAAALALAGVPVAVVNPRQVRDFAKAVGRLAKTDRIDAAVLAHFAEAVRPKPRPLADEDARELHALVLRRRQIIDMITAEGNRARTAPKSVKRRIEAHLRWLRKDLERANEDLERAVRESPVWREKDDLLRSVPGVGPTLSATLLAELPELEHLDRRSLAALVGVAPLNRDSGTLRGIRTVWGGRSAVRKTLYMATLSATRSNPAIKSFYGRLVAAGKPKKVALTACMRKLLAIVGAVLRNRSPWDKGRLASRAT

SEQ ID NO: 73194 - protein, 337 aa, unidentified
MKHTVIGMDIAKRVFQLHAVNPETGEIERIKLARSDVLAFFAQRCPTLVAIEACGSAHWWGRQLTALGHPVRLIAPKSVRPFVVGNKTDAADARAIWTAVQQPGARFVAIKTEQQQAILSLHRMRAQLMKLRIMQTNALRGLLYEFGVVLPEGVRALTKAWPAAMVTVADQLPGMLIDSLREQWARVQTTEAEITAIERRLASALRENQCCQQIAAIPGVGLLTATAAVAVMGNANTFKSGREFAAWLGLVPRQTGTGGRIRQLGLSKRGDTYMRTLLIHGARAVIAKAHHSPWIEALLKRRPYSVAVAALANKLARTIWAVLAKGRPYDPAAFSGT

SEQ ID NO: 73195 - protein, 366 aa, unidentified
MKKNSTVTKNSNGIFKQPKRTIGLDLGDRSSHYCILDEAGKVILEHHLPTTPKAIQQVFRKIPRSRIALETGTHSPWVSRQLSQMGHEVIVAHARNVRLIGESSRKDDRLDARTLARLARIDPGLLGPVRHRSAKAQIHLTVIRARAALVGTRTALVNAARGLTKSYGERLRKCGTGQMNREVAKGLSQELREALDPLLREIESLNERIAEYDRRIEQIATEVHPEVARLKQVKGVGTLIALTYVLTLDDPQRFRRSRDAGCFLGLRPGRRNSGQSEPQLHISKEGDRYLRTLLVQGAHYILGPFGQDSDLRRWGLKLAERGGKNAKKRAVVAVARKLAVLLHKLWVSGEVYEPLRNSHKVMSAVA

SEQ ID NO: 73196 - protein, 467 aa, unidentified
MPKAHLQRVLKNDTTMDEEEISMQIVNPRAAGIDIGSRSHWVAIGQGEKDYREFGVFNEDLYAVTSWLKENRIKTAAMESTGTYWQSLYAVLVSEGFEVILCNGKFTKNIKGKKTDIQDCQWIQKLHSLGLLSSSFLPDEKTEHLRTLCRHRSGIQDNAASTSKKMQKYLRLLNLRLDVVVKDVCGQTGLKIIKAICSGETDSDKLSDLRHYNCRKSKDEISRALKTNGRKDYLFALGQELEMYEMLESKITQCDEEIGKLLHEIIDNDPDKKQHYIEEKPHKRVNKNDPKNIDLNLMSYQYFEGIDLMAIEGLSHLTALSLMSEVGLEGIRRFPTAKHFVSWLRLAPNNKISGGKVLSSKVPKGSSRLKIALRRAANAIGNLKESTPLSDFFKRINFRKGRVSAISATARKLAVIIWNMVVKCVPYNNPEGYLYLDQKRKLGIVKRINKQISRYGLSTEDLNLVKG

SEQ ID NO: 73197 - protein, 413 aa, unidentified
MNSVYRRSCGLDVHKDTIVVCVLPPVGVEGSGVRKTYGTFRNDLIRMRIGLKQLKVTEIAMESTGVYWRPVWNVLEDQGFHLLLVNPAQVKALAGRKSDGRDARRIAEYLQDGRLDGSFVPGAEVRDLRMMLRHRVDLLEQRNQVHNHIRDLFETASIKLSSVVSDLLGVTGRRIVEALIAGQDSPEILSWKVKGRLRKKAKLVKESLKGYFRDFHRTMLESHYQQYQFLTQSVATFEERIAKAMEPYRAQVELLISIPGIDHIVAWHILAELGIDLTAFPDAEHCCSWAGMVPGENESAGKHKSNRCRKGNKTLRRVLTQAAWAASHCKKGYLRAFFHRIKVRRGWAKAIVATGHKILTIAFQILKTKTAYIELGDDFFDRLNPAKATRKLVQRLEALGHQVQLSSTLPSSS

SEQ ID NO: 73198 - protein, 470 aa, unidentified
MPDVEIGLDWDEAGGQFAVVGERGVVLHNRKYPATPTGAEEVLALFREYADPDGTLPWLVMEGTRRPFVRVLQDAGVPAIACNPNAFGKRNQGRNDSKTDAKDAVKLVTESRLAPERFREQPEPSDGAWAITLFTRRAKNSVLKVTTLAGEARSLLAEFFPAALTAYSPLDLGQKPEACAVLTAFPTPTRAAAATLAEIEQAIRSTGKVRWVKPMAAKTHAAFQQERLQYAPGLEADYGEVLVGLLRELKAAMDNRVLLDEAVRVRVERHFVWDLLSPAPGAGMSVISRVLAEMGDDPARFEDKGGLAAFAGVAPKMHQSGEFTGTPGRRSVKGNRLHQAYWDWASSAMLWSPGAMEYYWAHRARGDKHPTAIRKVGRRLANGTWHCLRTGEVWNEATLWPGAPTLAEAKGNAQPIRDLVAARRKEAAKANSKTDLRISKRRKAELAAKTAKPLRAPVTHLPSLRPPVLR

SEQ ID NO: 73199 - protein, 415 aa, unidentified
MNDTYYTGFDVHKKSIQYCIKLADGTLVSEGRIPATRAALQQWVEGQKAPWRGALEATMFTAWIYDFLAPHARELKVAHPALLEAIAAGKHASDPLDARTICDLARANLIPGVWMAPPEIRALRTKLRYRNLVVRQSTQTMNRIAGTLMEHGVEYSKSKLHGKRYFQQLLGNLKEVPETVRTMLRYGRASLDAFQSTQRLLLRQLSADRSLAERVRLLRTIPGVGEVTALTWALEIGDPQRFPSAERAMSYCGLVAPLQESAGKRYRQPLSKKRNRHLQSMLIEAAHLAPRYYPELRRLYDQTKRKRHAGAAAVAVARKLVSYLLCVDKTRQPFQVRQQNPAPNSPAGKVASLPAPPIENASLARRSSPSRVRSAAAEAAAPRTAPGRRATPPAAMGGSGGKATRAARSSQTLVG

SEQ ID NO: 73200 - protein, 354 aa, unidentified
MKILALDLSKYKTVACDYEAETARHSFVTVLTTPKGLHDLIVECEPDRVVIEICSIAGWVCDLVRTLGIEIQVANTADERWRWRKIKRKSDRRDALKAAQLSAVNQLGPVHVPQLEVRQWRALIAYRQQLVQRRTRIRNHIRDLLQREGMILPRGRTAWTQVGMGNLQALVRPLTEVAVTELWRGELGVELAQLRELQQQIQTVEAKLDELGAADCRVQLLQTIPGVGPRLAEAVVTMFDDPARFRRSGEVSAYIGMVPKQFDSGEMERSGHITRQGNRLVRSLLVEVAWASLRHNPWARQTYQRLHGGQKSRKKIAIVAVGRKLLVRCWAMLRDQTPWHPELHTAVAPQLRGG

SEQ ID NO: 73201 - protein, 394 aa, unidentified
MTAAYTSNGTTQPVALHLAFELGWTSWKLAFTTGHAQKPRQRTIPARDLAALEQEIAKAKKRFKLDPDTPVFSCYEAGRDGFWLHRYLTTHGVGNVIVDSSSIEVNRRKRRTKSDRLDADKLVHMLLRYHAGERKLWSVVWVPGVADEDQRQLHRDLQELKDERTRHVNRMKGLLASQGLALTAVDGTFPEWLAAARLWDDTAVSADLQRRLVREYERWQFVHRQVLDLQKERRRRIRSDDTAHVDKVRRLLGLAGIGVNGAWLLVYEFFAWRTFRNRKQVGALVGLTGTAYQSGGSTCEQGISKAGNRRMRRMLVELGWCWLQWQPDSALSQWYTRRFGAGQGPARKIGIVALARKLLIALWKYLEKGEIPAEARVVDWRSKVSSTQRKQSAA

SEQ ID NO: 73202 - protein, 430 aa, unidentified
MEASITTPGAVAAYIGIDWADKKHAIALRSAAEPNKIEHQLIDQKPEALMDWIGQLEQRFGAQGKILVCLEQSRGALIYHLMGYEFFELYPVNPLQLARYRETFSPGGAKDDRPDAELLNELLFCHGDRLRALKPDSELGRKLSFFNQGRREAVDQRTRLSHVIKSQLKVYFPLALELLDQDTSTALAADLLLCWPTLEAIQKQNTQRLRKFFYGHNCRGEQRMLQRLELIQKAKALTKDPALIEPAALRVQMLARQLKHLLPDIVRYDNKIAQLFAAHPDRFLFENLPGAAEALVPRLLSAFGSDPERWQSALEIATLSGIAPVRRASGTKSGKKGERKASVHFRQACPKFLRQSFHEFAGCSIRYCSWAKAHYDHQRARGKGHHAGVRSVAFKWIRILFACWKNRIPYDPQRYLKALHHRGSPLADPC

SEQ ID NO: 73203 - protein, 343 aa, unidentified
MEISVLGVDLGKNVCSVVGLDASGAVVMRRKVRRETLIALAEKLPACIVGMEACCGAHHLGRVFSAHGHDVRLMSPEYVRPYVKAQKNDDRDAEGIAEAATRPTMRFVELKSQDQLDTQTLHRSRDRLVGERTALINQLRAILLERGFVAPQGKRKLEGFLALLMDEQGGAGLTPRIILLVADARKQWAELDRRIAAFDAEFVRWVKENDEARRLTTIPGIGAIVASALVAAVGRAESFDRGRDLAAWLGLVPRQFTTGGRPKLLGISKRGNKYLRKQLIHGARAALPYVAERDTPLGRWAKGLISRAHRNVAIVAFANKLARIAWAVLRRHERFAAIRTPVA

SEQ ID NO: 73204 - protein, 487 aa, unidentified
MHPRTTNKSTQTSDVRRFNFEPAGALALDNEYSGFAVLPAHYIAFAERKRARPWTSIYHFGRYDVKPLATQQFTAYVGIDWADTKHDVCLQAPGAEVREFDCVRHQMTDIDRWAQSLHQRFGGPIAVALELAKGPIVYALQKYDFFVLFPINPLTLAKYREAFTPSRAKDDPTDAELALDLLLRHPERFTPLQPQSVQMRTLLSLTEHRRELVGDKTRFTNRLTNTLKQYYPHALDWFDQRDTLLFCDFLTRWPTLAQVKRARRASLEAFFYAHNGRRAHLINARLDAIKAAIPLTEDAGVIAPCRLQVLVLVEQLRTTLQAIDRFDREIAELAPTLPDYGLFQDLPGAGPHLTPRLLVAFGEDRQRYQHADELQQYAGIAPVTERSGKKSWVHWRWQCPTFMRQTFVEWAGQTINKSFWAGAYYRQQRAKGTSYQAAVRSLAFKWIRILFRCWQTRTPYDESKYLNALRKRGSPLLKHLELDVQNP

SEQ ID NO: 73205 - protein, 427 aa, unidentified
MPHRIAGIEVHKRMLAVVVSDVEVADEYQFERRQFGSNPAQRRALAEWLLEQQVQEVVMESTAQYWPPVWGALEQYWKPPCQKSEGARPRSGSLPLAQAQSNRARRGRKRDFLDAERLVRRFVANELVLSFVPDPEQRLWRTLMRRKYQMTRNRVQLQNQLEALLEEAHLKLSSLVSDLLGASARRMLRALADGETNAVALAALADYRLQATPAQLQDALGACAGLDPTYRRLLSMALEELQLLEKQIGQLEQEMADRLRPHQDAVQRLAEVPGLGADSAQQILAEVGATAATFPSEGDLASWVGACPGDEESAGRSYSHRSPKGNRQMRRLLNQAANAAVKLKGSIFALLYRRYVTRLGHNVTIGIIAHRLCRLIWKILHQGIRYEERGPAASEQSKRQRARRMIRELRSLGYRVELPNPQPAVPA

SEQ ID NO: 73206 - protein, 412 aa, unidentified
MKDLLEISCGLDVHKEKIVACILTGPLGKPTRSEIREFSTLIPDMIALRNWIVSKNCHHVAMESTGIYWMPIYEILEDAFSGDITLLVVNARHMKNVPGKKTDMRDSEWISTLLRAGLLNGSFIPEKRIREFRDLNRYRKSVIRDITSQKNRIEKFLQSSGFRLSSFISDIFGASGRNIILHLIEHGQIDKTALDSCLKTKTRNRIDEILMSVNGTLSEHQKAFLRILMTHYDSLKKHLAEIETSLEEDMAPFTLQVEQLNSIYGISTTASCAIIAEIGIDMKPFKTAEHICSWAGLCPGNNESAGKRKSTSVTKGNPYIKSMLCEIAWVIAGKRNTYLSAWYWRIKQKKGAKKAIVALARKLLVIIYTMLKQGTVFDESCFETRRKHCEQKQLSRYIRELEKHGYHVEAQS

SEQ ID NO: 73207 - protein, 436 aa, unidentified
MRGCRCSMIMGFTKPIEHFNLQRKKVITMNTLYVGIDVSSKSNVVYLMLPNGDKHSNFSVANSHEGSTLLVKKIYSALTSHSLDTVLIGLEATSVYGDNLVYFLREDATLAPFNRKIHVLNPKQVKKFHDTYNDLPKNDYVDSFVIADCLRFGRINKEVYMGDYRYKALQNLTRARFFAVQNLVKEKQRFMNVLFKKYSTMTQEKVFSDTFSTTALAVYDEFESAEALANMDLHELTDFIMEKGKNRFPDPDAVAKAIQKAARSSYRLPKTVNDSVNQVLSISITSMKALESQIKEFDKAIKALMELLPNVLISIPGIGPVYSAGIMAEIGDINRFDNQASLAKYAGLAWKQHQSGGFEAEVTRLIPSGNRFLKYYLCEAAFSLVRCDKEYSDFYHLKYKEVNRCQHKRALALTARKFVRLVFRLLKDNRLYCPAK

SEQ ID NO: 73208 - protein, 475 aa, unidentified
MSALYVGGDVSKGYADFAILDEHGGVVEPAFRLDDTSAGHKRFVALLTALLRRAPGAQCYVGFESTGGYENNWLGMCERAAAMLPVRVARINPKPVRRHLDARMKRTVTDEVSAYNIAEYMIRYPENVLYDQDDPFYPLRRQWSYLRLLKKQVTQARNQLHGLLYGAHPQLLRYCRDGIPGWVLHVLARYPVAAQLARARVSTVARIPYVTPQRAEELIQDARNSVGAQQDEVTRATIEQLLAQIEFLATSVEQAKKRIERACNHPAVDLLQTFEGIGKLSAVGLMINIRDHRLFPDAKHLASYFGLHPVYRKSGDGTWGMHMSKEGRVEPREVLFMVAWAAIRCNPHIRHIYEQKLSEGMKPMAAVGLCMHKILRIVYGMLLNNTPYNPQIDRCYRKRHLRSAEPPHADATPGKALRFAPHDAKAPISRRQARQRRRAHGSQSSIATECGITVALPQHQNTHPRYRKEQLAKTT

SEQ ID NO: 73209 - protein, 402 aa, unidentified
MDKVTGLRVSVDVGCYQHSVAVGLADGTLLDEFELAHDPTGFDQFFERIERHCQQHGSAVSVAMEGYNGWARPLDTLVRTRGYRLFNINNLKLARFKEIFPAAAKTDRIDARRGLELFQLREQIPTARGVLQEVQGVPLENEKLKRLTRRRRTLVEERSRVIARLQADLQAVCPSLLAITKDADNLWFLNLLSHGQDLEKLARLREKTILGIPAIGRKFGARIIAWQQGARFGHDVDWVGPMIVEDACRILQLRRAIKAIEASCKELMATSRIATLIDTIPGFATICSSELAGEIGTLDRFERESSLAMYVGMANLSNDSGKVKSSKNPKHINSHAKGAMMAAVDKHRKLVPESKRYYDKKRAEGKKHNQAIRALGRHLCRVIFAMLNHDRPYEFREEKMSK

SEQ ID NO: 73210 - protein, 343 aa, unidentified
MKLIRIGVDLAKDVFQVHGVDRHEKVVWRRKLRRAEWLKVLVATAEPGCEIGMEACGGAHHWGRKLQGLGFKVKLMAPQFVKPYVKGNKNDANDAEAICEAMSRPGMHFVTVKSALQQDIQAVHRIRAGLVGQRTAKANQIRGLAAEYGLVAPKELGQLRIVLPCWLEDAQNGLSELFRQLLQGLWGDLKGLDERVSELDRLITLLSKSDPVAKRLQQLRGVGPVIATALVGAIGNGEQFARGRQMAAALGLTPRQHSSGGKERLLGISKRGDAYLRTLLIHGARSVIRTAKGKEDRLSRWVVSLAARSHPNVAAAALANKTARMAWAMIRNGTDYQPDLVTG

SEQ ID NO: 73211 - protein, 439 aa, unidentified
MSQKLPTLDPLASFVDVGSEHMHVSVGGNKPEVFGTVTSQLHALRDWLLEQGVHSVAMEATGVYWLTLYGVLESAGLEVRMVNGRQTRNLPGRKTDMADSQWGATLHMHGLLHAGFVPPADIRRLQDYLRLRASHVAAAAACVQLMQKAFDRMNIKLHDVISKLGGVSGMAVVRAIVAGERSPEALAALCDVQIRRKKERAVIEALRGTWADEHIFALDQALQSWDHYQKLIADCDRRIAAVLPPHDETQPPLPSSTKQTGVNAPEISRLREILAQMCGGRDLTKLPALSQYGVLQLIGEVGTDLSVWPTEKHFTSWAGLAPGSNDSGKRKKRVSRGRNRTGQLFCMMAQSLVRSKDIALGGFYRRLAARRGGLVATKALARKLTGWFWRVMVKGDDYVEKGIARYEEQVRKTKEHALKRLANELGRQLVPLPNSSQIT

SEQ ID NO: 73212 - protein, 350 aa, unidentified
MDKELYIGVDVSKQTLDLAYYDGESIDWKKAHIKVSNNNAGFKKIGLWVAKVSKGVDIVLFCMEYTGLYTQNFRLWLEEKHYIYRMVEPRKMHRFEPDLDDGLRSLDRIKTDELDSFRIAIYCEQNHRKILRNPSKLPPPVYFKLKRLLAERKQTVKQSVLYKQQLHDICAYDTDLSVERKNGQLKTLNDALKGIDNEIDMYIKEDADISKNFSLLTSIPGIGRVVALETIVLTENFMAIDNPRKYACYIGVAPFKKESGTSVRKGSSVSKKGFKQAKADLSIACLVCMQHIPNIRDYWERKRKEKCSGIVFNAIKFKMILRMFAVIKRGTPYVETDNYRNGKNKQPGVN

SEQ ID NO: 73213 - protein, 405 aa, unidentified
MWYAGIDWADQHHDAVVIDEAGKRVATTRVAHSAAGLDTLVTFLKGIGDVADHPDHLACIIETNRGVLITALLDAGLPVYPVNPKTVDRHRKPSGAKTDAIDAYLLARTGRSDLADLRRLTPDSPLIAELRVLTRDQDTLIQSQTRLVNQLTACLKAYYPVALDLFGKLQQPTTLAFLQAFPTLEQARTASVEQIAAVLKGAGHPHAAATAARIGQQMRQPQLAADPIVTRTKTRLMLTLVAQLQVLLPDIAAYDDEITRLFRLHSDSRAFASLPRAGTRLAPQLLAEWGDDRGRYTDAGSVQALAGTAPAPFQSGAYAKAHRRYACNKPLRNALQQFAWQSTQKEVWALTYYQRKRRAGKSHAMAVRALANQWVRLIDALWAKHETYDPATFLAAQQAHAPRAA

SEQ ID NO: 73214 - protein, 410 aa, unidentified
MEVLHPHCAGLDVHKETVVACVRHMVDGTIKREVRTFDTTTTSLLALADWLASEGCTVVAMEATGVYWKPVWHVLSDGDFELVLANAKQVKNVPGRKTDVNDATWLADLLAHGLIRASFVPDADTQVLRNLLRTRKQLVRERSSHVQRLQKTLEDANIKLDAVISDIIGMTGRVMLEALIAGETDPGKLAALAHPRIKAPPAQLREALRGRIMKHHRFLLRLHLQQIDAIASAIAEIDREVNERIEPFRTTVELLTTIPGISELGARIIAAEIGNDMSRFATAAHLISWAGLCPKNDESAGKRRSTRMRKGAPWLKTTLIQCSWAATRKKGSYIQAQFHRIRSRRGAKKAIGAVAASILTAIYHMLKNGTCYQDLGHDHFDHRTKTVQTKRLVARLQNLGYAVQITPLAA

SEQ ID NO: 73215 - protein, 367 aa, unidentified
MSAYYTIIGADVSDRATKICVMSKASDKPCVVNETTIPTTPDGFRAFLSTQDRSAPLVFETGTHCRWIARTAAEMGFRALVANPSRLRMITESNTKNDRNDARALARIALADVELLHPVRLRGDEHQRMVNLHEIRDQLVKERTAEILQIRNIAKSMGFRIPDCSSACFHNIDRRAWPRGLNDIVWPLMKSLESKATTIKAVEKQMKRAAESDAFRAQVERLMEIPNVGFLTATCFVAITGGDMDKFARPRDIGPWLGVTPRQDQSGDVDRHCRITKAGSAMLRWKLAECAQKTLQKNSADTDLKVKGLRICARGGRIAKGKAVTAVARGLAVLMVRLLKHPEARYVPLSDDKARELEQIRAAAPSA

SEQ ID NO: 73216 - protein, 372 aa, unidentified
MKENSVLFIGLDTSKLKISVAVADGGRNGEVRFFGDISSEPASVASMVAKLSKRGAKLHFCYEAGPTGYGLYRQIVELGHDCVVVAPSLVPRRAGDRVKANRRDAVSLARLHRAGELTAVWVPDEGHEAIRDLVRAREAANDALKQARQQLQSFLLRHGRIYTGRKPWTRAHKRWLACQAFDHPAHHILLAEYCQAIEDAGVRLDRLTMLVVETAASWSMAPVVAAYQAMRGVAFMTAVTFVVEIGDVRRFDNPRQLMAYLGLVPSESSTGERVKRGGITKAGNTRARRVLIEGAWTYRFPARVSSRIQARLEGLPKTVREIAWKGQVRLCARYRRLMAAGKPKVVAVTAIAREMAAFLWAIGQEVAPTAKI

SEQ ID NO: 73217 - protein, 316 aa, unidentified
MDHKQMVYGVDVSKAKLVVGEYNSGQRMPIDNAVEPIAQWLAQVPAGSVVAVEATGRYHELVAHMAQVAGMVVFVLNARELRHYARALGLRAKTDRVDALLIARYAMHEQPKLRPWQPPSPLLDMLSQLLKRRQVLVTAQQTLMQSLSGMSALKAERQALQASLKRMIANLELLIRVQIGKQPELATLYRRLITIVGVGPITAAQLVVVLMRFAFARVDSFIAYTGLDPRPDDSGKRRGRRRLSKHGPGLLRFLLFNAARAASRSKVFKPLYRQLLAQGLETTEAFVVLARKLARIAFALFKSGGVFEAQRHLKTA

SEQ ID NO: 73218 - protein, 391 aa, unidentified
MIFVGIDVAKDKHDCFILNSEGTVLADVFTIANNRIGFETLLSRIQSCSQGESKIKVGLEATGHYSYNLLGFLLDSGLATYVINPLHTNLYRKSLSLRRTKTDRIDARTIAMMLMSDVDLKSYSNTAYHNEELKSLTRYRFDKVKERAKLKSSVARLVNILFPELEKLVSSLHIAVVYALLSNYPGASYIANANTEELAETLCTASKGRYTKSKTAEIQVAAGVSIGSKMPAKSMELKHTIALIRELDKEISEVESAIDKITSQMDSPIFTIPGIGRHMGAMILAEVGDFSNFASADKLLAYAGLSPSTYQSGQLQNCYAHMEKRGSRYLRYALFNAAKYVCLWCPTFLAYLEKKRSEGKHYNVAISHAAKKLVRLIFAMQRSGKAFLADY

SEQ ID NO: 73219 - protein, 419 aa, unidentified
MVTEDVEWFAGIDWASQTHQVCLVDAGGKIVGEHGFAHGGAGLAELCSWLLTMTRAAPTAIAVAIEVPHGPIVEVLLERGFQVYAINPKQLDRFRDRFTVAGAKDDRRDAHVLGDSLRTDRHCFRRLSAENANVIELREWSRMSEDLQQERNRLANRVREQLWRYYPQALAISDDLAADWFLQLWAAAPTPATARRLRESTVEGILKRHRIRRITAAEVLASLRQKPLTVALGTAEAASAHIRTVAHRLRLVNRQIKQAHQRLDALSDRIAENEGDSDATGQKSEQRDVAILRSLPGVGRIVLATLLAEASEPLRRRDYHALRTLSGVAPVTRRSGKYCIVVRRQACHMRLRSAVYHWARVATQHDQRSRHRYAELRKRGHSHGRALRSVGDRLLAVACAMLTRRTPFDPDYPVKQMAA

SEQ ID NO: 73220 - protein, 358 aa, unidentified
MKYVGIDVHKKMCQVAVLDDEGELLDETRFMNTPEGIEEFAQRLSAYGDEVRAVVESTGNLWIQVHDRLEVHGYDVALSSPANSRLVSDSKVKTDRTDARALARLHRAGVLSTCFVPGEEERSRRELLRHRLRLVKNRTAVRNRIHSLLDKHGLRIPYKTPFSKKAVRWMRERSLGFMDDAILRSDLALLGALDEQIGYVEEKLAALSVDDARVRLLMTMTGIDYFAAMLVLAEIVTIDRFSSDKRFSSWMGLAPRVRQSGEKTWIGGVGGPGNRRMRWLMVQCAHSACRFDPRLRRLYDRHSRRKGEKSAVAAVAHEMARVMYFMLKRNEPYRGVNRRLWERKLKSLEKRALNGLRN

SEQ ID NO: 73221 - protein, 347 aa, unidentified
MRFYTQQHKHYCGIDLHAKAMYVCILDQSGTKLVHKNLPTTPEAFLRVIAPYREDVVVGVECMFTWYWLADLCQKEGIAFVLGHALYMKAIHGGKAKNDKIEAHKIAVLLRGGMFPVAYVYPAEMRATRDLLRRRCPLVPQRAELLAHIQNPNSQYNLPEIDKKLAYKANRDGVADHFPDPSVRKTIEVDVSRIDHYDKLLGEVELSMTRTAKTQDVQTFARLQSIPGVGQILALVLLYEIQDIPRFPRVQDFISYCRLVKCAKESNNKRLGTSGKKIGNVHLRWAFAEAAALFLRHNQPGKAYFTQLEHNHGKATALTVLAQKLARAVYYLLTRHQAVARQRFVAA

SEQ ID NO: 73222 - protein, 394 aa, unidentified
MKLVGIDIGKNSHHFCVMDKETGEFNVAPSSFSNNKEGFDFLINSLKPYSKKSILLGMEDTGHYHVALLKFLLSNGYTVALINPKTTDLTRKMEGGITKNDKLDTITICNVLDTPERKKQYRITKVDRFDLYEQRQLTRHHHNLKEELNVYCNRLQKSIDLVFPEFNTLFSSKYSIVYMNLLKTFGSAENIANTDIRTIRKCFEIEGRGNRISLTPERLKECARSSIGISSSAEVIQIKHLTAQIELIEEQLTEIDKKIEEFSIQNNSPILSIPGISHFSGTSILAELGDISNYSKPSQIIKFAGVAPLHYESSQFNAQHTAITKKGSKYLRKTLYQIILPVIRHNQVFYKYYQLKISQGKGHRCAQGHCVRKLLRIIYHLLKTNQQFDPQLLR

SEQ ID NO: 73223 - protein, 409 aa, unidentified
MLFAGIDWSEKFLDFHLRTAGGKVLAEGQVKPSVEGMADLFARLESHALASEIGIAIETAHGAWVQALLDRGYQVYPLNPKTVERFREALSANGVKTDKIDRKVLAMFLVTFHQENKPLRPDDPEIIQLRILCQDRLRLVEERSAKVNELGAILKCYYPAFPGFFGDLDSGIALDFLQQYPTQKQMRKLSERRLRNWLSRHRYSFPSRIDGMVSLLRQPVLPVAEHLQQAKKTLICYLARSIKTLNTEIAQRDKQINDHLDDLPESDWVRSLPGAGKVLAPALLACLGRDPQRFSSVGEARALMGTAPVTKASGKFRMVMFRRGCWKFARRTLQLFAEQSRHQCYWAQAFYEKQRNSGHKHHAALRALAHRWLKILLAMRQSGSLYNEDIFVNSQRRYLLKTPMSKTTK

SEQ ID NO: 73224 - protein, 348 aa, unidentified
MKKIVKQVLGIDVAQKELVVCLGRMFDDWVPELYGYKTFANTAKGYEAMTLWVKKQTEDGSPVRYVMEATGVYHESLAYFLEGKGYEVSIVLPNKISNYFRTLEVKTITDKTASEAIARFGLERKLDCWKRPKDIFKELKQLTRERDQIVEQRTMAKNQLHAEETQAQPNKKSVARVKTRIKLLNKQDAEIKEEIALLVKQEKEVGKSVEVICSIPGVGLLTAATVLAETNGFELIRNKRQLTSYAGLDIREKQSGTSVKGKPKISKRGNRHLRKAMYLPALAAIRHEERFKVVFTRLVSKHGIKMKAAVAVQRKLLELMYILYKTNSTYDKNFQKEEIDNEGRKKAA

SEQ ID NO: 73225 - protein, 415 aa, unidentified
MKKNNYRTKKVNDINWPQLREQFAGQSLVFAVDVAKEQQFALLSNPELSESVLLQWNQLEQTAELINELKQLNTPITVVMESTSTYGDAMRHQFRQAGFTIHQASAKRVHDAKEVYDGVPSLHDAKAAWLIARLYKEGFTKPWHELDDKERELNAYRREYELHQSQHERNQNRLEAFLSRHWPEVLPLLALDSVTLESLLIDYGSPEQIAANAGQAANDMRRWGKSCLSLEKIEAVIHSAATTLGQPCIEAERHYLQALAEELRHSRKQAKNAKQALEAVVKTEPGLKEMGLTIGRVTTAILIGLHLDPRHFGCARSYLKALGLNLKEKSSGQDHGKLTLTKRGSALARKYLYFAALRLIKSDPVLSAWYRSKVDPRAKSKTVIAFMRKLAKALWHIARGQRFDARKLVTAAVVN

SEQ ID NO: 73226 - protein, 334 aa, unidentified
MHYVGIDLHKRDLVTAVEDERGPVGQPRRFPCRDESAILAHLSGLRPFRAVIEASASYRWLYDRLSPLGEVILAHPLRLRASIARPAKTDKLDAALLARLLRMDQIPESYVPPKAYQELRELTRARGRLSRSATEAKNQLHHLLTARNIEAPYRKPFGVRGRRWMRALDLGVVGNLQRDELLGRLEHYAAEQAHLDEALAEMAKGFPQIEALSDIRGIGLYTALLVVAEIGEPERFSQPGQVSSYAGLAARVYQSGEQDYHGHITRQGSPWLRWALVQAAMKAIGKDRKLANFYERVRKRSSRHIARVAVARKLAEICWIRLRRWQRAQAAAGV

SEQ ID NO: 73227 - protein, 385 aa, unidentified
MSQFSGCPQVAINYDSTIIGALELSDKKWVMAVQLPGVSRHSRHVLDASGDGLVSFVERLKAKCAASGRKITRVILTHEAGRDGFWLARFLARRGIEVHVIQPSSLPVDRRARRAKTDIIDVEMLLRTLMAWLRGEPRVCSMVPIPSEADEEARRAHREREDLTGERRSIVNKIDAILATLSVKGYKALRRDRREQLNCARQPDGDPIPARAKARIERLLDRLDLVLRLIEGVEAERDAVLKKDAPADEAEGMIRSLTELRAIGPDFATLLVREAFVRPFRNRRALGGYVGLGGTPFSSGGSEREQGIGKDGNRRVRAAMVELAWMWLRWQPDSGLSAWFRARVGAMGGRIKKIMIVALARKLLVALWRYVKDGVIPEGAKMKAA

SEQ ID NO: 73228 - protein, 431 aa, unidentified
MLGGNQEKLMSQNQPEIQYAAFVSIDWADQKHVWSLQEANSSTREHGEVGHMPEAIEAWIAQMSQRFASRPIAVAVEQSRGALVFMLSKYEQLHIFPVPPAMTANLRKAFYSSGAKTDPADTDLLQDVLQMHREKLRRLSPDTEATRLIQNLVEERRKLVDEKTAQSNRLEAHLKIYFPQIPQWFGDVDSPLVCALLERWSTLEALQKARPDTLRSFFRKHHCRKEELIESRIKAIGEAMPALKDRAVVEAQLAVVKVLVQVIQVLHQGIEDFNRQIQEAAEAHPDFFIFESLPGAGAVMAPRLLAAFGSQRERYRNAAEVQTLSGIAPVTESSGKSSWIHFRFACSKFVRQSFHEWAALSITQSQWARAYYELQCRRGKRHHAAVRALAFKWIRIIFRCWKERVAYDENVYLAALAQHNSPLLAATKIAL

SEQ ID NO: 73229 - protein, 424 aa, unidentified
MKVTYQTCCGVDVHKSFLVATSVKTTGGIEPSYQKKRFSTFNSSILEFKQWLLDNDCHDVCMESTGKYWVPVFNLLEDEINVVIANPKWVKAVKGNKDDTKDSKWIGDLFRLGLVKGSYIPCKIVRILREYTRYRYKLVSCRSSEKNRYQNTLTVCNVALDSVVSDIFGKSSMSIIDYLLEQSGTSINHEEIASKLLRSLKSKEDAVIESVEGYQMTDAQKYRVRLVRAHMDYITAEINDVDKMIENMISSNPDFENAIQFLCTIPGVKRDSAITIISEIGTDMSQFGGSKRLCCWAGLTPGSNESAGKKKSVRITRAGVYLKPALVQCAHAAVKSDKSPYYKKKYESLVKRRGKKRAIIAIARMILTAIYQMLSTGEQWNPSDLYKIDMPVALVEKQKAKAIKQAKKLLQREGILPPDEPLAS

SEQ ID NO: 73230 - protein, 419 aa, unidentified
MRVHRNCCGLDVHKKIIAACLIREDGEGNSVAEKRLFGSMTRELHELAHWLCASQVTAVAMEATGVYWMPVWNVLEQYGLQLLLINPEHYKAVRGKKTDLKDGTRIAELLQDGRLEGSYVPPVAIRVLRDLTRYRTKLVQYQSAIANRIQRLLEQGNIKLASVASDALGVSPMAMLRALAQGETDAARMADMAKKQLRKKIPQLQLALEGCLLPHHRWLLSEMIEDLDHVGAQISRIEETIEQQMRPFQNAVDRWLTVPGVKHRLAWTLVAEVGPTVEAFPSAADLVSWAGVCPGNNQTAGKRKSGTTRAGNPFLRRALCEAAWAASKKKGTYLQAQFRRLAALRGPKRALVAVASSILTAGYYILQRATTYQELGPDYFDKRNTVRATHRLVKRLEALGHRVILEPHFSNNPIQASSS

SEQ ID NO: 73231 - protein, 344 aa, unidentified
MNDTTIAVDLAKNVFEIGVSHEPGKVSEQKRVNRAKLVSFFAKRPEATVLLEACGSSHYWARKIRSFGHTVVLLPPHLVKPYRRGSKTDRADTKALLEAYRNEEIRAVPIKSVNQHVLAALHRLRSGWLSARTARINAVRGILRELGHFIPKGAQFVLPAVTELIEDPESDLPEALRSHLEEACAEIRDLKSKCVDVEHELQALSQQLPEVQRLLTVPGIGLITATAIVGFVGDLRRFGSGRRFASYLGVVPKENSSGDVRRLGRITKRGDSYIRSLLTHGGRSVLRAAHVSKSPPDKLRAWALKIHRSRGHNKAAIAVANKLARIVWAVSAREENYRSAPVAA

SEQ ID NO: 73232 - protein, 349 aa, unidentified
MKHYIGLDVSLELTAVCVVNGDGEVIAEAKVPSEPDALVAHLQALKADITRVGLEAGPLSQWLHAGLVLAGFDAVLLETRHVKAALSAMTVKTDRRDARGIAQLLRMGWYRPVHVKTLPAQEVRAILVARKQLLGKLVDVELSLRGLLRNFGLKVGKVTRKEFEARIRDLAQGQPSLELIADAMLAARNVLRDQFTRLHNAILQIVRKDGVCTRLMSIPGVGALTALTFRTAIDDPTRIAKSRDVGPLFGLTPRRYQSGETDVTGRISKAGDGMVRTALYEAANSMLTRSQRMSALKAWSLDVARRRGHKRAVVALARKLAVVMHRMWLDGTTFRWSRSRTPDMNPAAA

SEQ ID NO: 73233 - protein, 415 aa, unidentified
MAKRKKRKQGKMDRTLPTLKPNAAGIDMGATEAVAAVPADRDSESVRTFPTFTQDLHALADWLQRCGIDSVVMESTGVYWIPLFQILEARGIEVCLVNAQHVRHVPGRKSDVLDCQWLQYLHSVGLLKGSFRPEQDVCAIRSLLRHREGLVQMASVHVQHMQKALDQMNLQIHHVISDITGVTGLAITDAIISGQRDAQELAKLRDRRIKAPFETVAKSLVGDYRAEHIFTLKQSQTAYRYYQQLIADCDREIQDRIETFQNTHADPPAPAESSNPSSGSTDSTFNLRSHLERIYGTDLTAIPGFECLRIRTIFSEIGMDLSSQFPSSENFCSWLNLSPKDGTSAGRRIRAPRIQNNNRAANAFRLAAQSLHNSRSYLGDFYRATSPLWRSDRDQKHRTQTGAHFLSPRHNQNFL

SEQ ID NO: 73234 - protein, 340 aa, unidentified
MQAIRFGIDLAKNVFQVHGVDAAGKVVVQRQLRRAQMEKFFAAQPPALIGMEACGSAHHWARTLSALGHEVKLMPPAYVKPYVPRNKNDARDADGCCEAVSRPKMSFVPIKTVEQQWARALHRTRDLLVRQRTQLANAIRGMLYEMGLIGAKGAAGIEALLQRIEAAEEAIPAALLICLVPLAGQWRALDGEIGKLDKQIMAQVRQQQAALRLTKIPSVGPIIAHATLAAIGDGRQFASARDFAAWLGLTRKSHDTGGRHKPTGHISRAGDRDLRRLLILGASSWLRQVRAKPDKGSPWICGLLARRPVKVAVVAQAAKTARIIWAMLQSGQQYRAPAAA

SEQ ID NO: 73235 - protein, 380 aa, unidentified
MTKKVYRRCCGMDVHKETIAVAIAECGRGQPEYYGEIANTPKRVAKLIDRLSARYGGEALLFVYEAGPCGYGLYRQLIASGHGCEVVAPSLIPQKAGDRRKTDRRDALGLARLSRAGELTAVWVPDKEQEAIRDLTRAREDMKGLETKARQKLGAFLLRHGKVYDQGRSRWTQAHFRWLETVKFDSPVQQMVLQEYIEAVKTAQRQVAGLERQMREALPNWSLAPVVEGLMALRGISLITAMTVLAELGDISRFDSPRQLMGYLGVVPSEHSSGQSRRQGAITKTGNGHVRRVLVEASWSYQYPARKTREIQSRAEKTSPAVQAIAWEAQKRLCGRYRHLMAAGKLKQQVTTAVARELAGFIWAIACEVMGKPHGSRATA

SEQ ID NO: 73236 - protein, 412 aa, unidentified
MEIQIQRGCGLDVHQATIVACLLIVLADGKVKKQMRRFGTTTRELLALGDWLQAEGCTHVAMESTGVYWKPVYAILEGTFEIIVANAQRVKNVPGRKTDVKDAEWIADLLLHGLLKPSFVPPKPIRELRDLTRYRRKLVESRSDERNRLQKVLETANIKLASVASDVFGVSGTLMLEALAEGQDTPAEMAELAKGRLRDKIPQLEPALEGRMEEHHRYLLKLQLRRMRDLNKDLAELEAHIREKLQPYQKELELLKEIPGVDWTLAAVIIAELGVDMKVFASASQLASWAGVCPGNHESAGKRRNVRVTQGNLHLKTALVEAAHASTRVKGTYLRDKYYRLKARRGAKRAAVTIAHKILTAVYHMLKEDVSYNDLGDLYLDKLNKQHLKRNLVRRLERLGFRATLEEQRPAA

SEQ ID NO: 73237 - protein, 419 aa, unidentified
MRIEHPICCVVDVHKNTIVATIAITDESNITQYLVDTFATLNADLVRFRTWLLDHKCFNVCMESTGKYWIPIFNILEEANINVLLTHPKYVRAIKGKKTDKKDSKWIADLFKFDMVRSSFIPPKDIRALRELARYRFKLVCMRSSERNRYQNCMTVSNIGLASVLTDPFGKSATDIMKYVLSSAVFDEEHCKTLIYKSAKKKTELILESIRGCRIESDQHFKMNEASAHMDYLDQAIIRTESELYVRIQPHYHFVEHLSSQLVGISQLSAALIISEIGVDMSVFETSKHLNSWAGLAPANTESAGKKKSVRISKAGQFLKPLLVQCALAAVKSTKEPYFANKYGRLVKRRGHKKAIIAIARMMLTCIYHMLQTGEAFNPSDYEELNSPVPKKQVLTDETAIAFLAAQGYDVSALTKIAV

SEQ ID NO: 73238 - protein, 429 aa, unidentified
MTIVQSTPERFVWVAIDVAKDRHEALIEAPGWRSRKRVRVQNAAEDFRSFAAFLHSFRFPVRIGFEPTSNYHRALAYFLHSEGFELQLISSLALARTREAMHNSWDKNDPKDAQVILHLLKGGLTQHYHDPIVHNLNDLQELSKTHHQVSLEKTRTQHRLLTHYLPLYFPEIARYHCSARSEWLWALLIEFPTPRSMTCLSKTEFIRRAWPLVGRKVAKERILTDIYLTAQTSIGLPAEEHSEAVAMLRVVLRQLLTLCQLRATIEDRAQVLLQNNTDYQRLRCIPGIGPITALTVLAEAGDLRRFSHHRQFLKFCGLDLATEQSGQFRGLTRLSKRGNARLRAVFWMAASVAVRMRENSFRAKFERYMRSDPGNVDRKRKAYVAVAAKVARVAFALIRSGADYRCFPEVAVPSGRTRSARAVEAIPTS

SEQ ID NO: 73239 - protein, 340 aa, unidentified
MKLFLFIDLHSTNNVTVVIDEQDRVVYQKRLPNDLALILNELSVYQAELQGIVVESTYNWYWLVDGLMEQGYKVHLANTAAIQQYNGLKYTDDNSDARWLAHLLRLGVLPEGYIYPRADRPVRDLLRKRSQMVRQRTTNLLSIQNLLTRNTGSSLSANRVKGLDVQQVDELLPDGDLALAVKANLSVMSSADEQIEILERTVTQRVKLRPQFRFLKTVPGIGEILALTIMLETGDIRRFASVGNFASYCRCVGSQKISNSKKKGKGNTKNGNKYLAWAFVEAAHFAVRFNSKIKSFDQRKKAKTKGVVAIKAVAHKLCRACYYIMRDRVAFDVTKAFGQK

SEQ ID NO: 73240 - protein, 412 aa, unidentified
MEVVYPCCCGLDVHKKSITACVLWAEAKGKSRKEKKRFGTFTHDLLQLADWLAQCGVTHVAMESTGVYWKPVWNVLAEQFEALLVNAQHIKAVPGRKTDQKDSEWIADLLQHGLLRGSFVPPRPTSELRDLTRYRVSLVQEINRIANRIQKVLEDANIKLASVATDALGASGRAILEAMLAGEQDAARLAEMAQGKLRNKIPELQLALEGRMTEHHRFLLRQLFDHLRFTESKRSEIEQEIDKRMLPFEDKVTRLCTIPGVDRVTAWGMLAEIGLNMDQFPSSGHLSSWACLCPGSFESAGKRLSGKMRKGNVSLRRCLSQAAWAISMMKNNYLSALYRRIAARRGAKRAVMAVAHALLVIAYHMLKRNEDYRELGADHFDRIDVNRIRRSLVNRLERLGHKVTLEPLAQTA

SEQ ID NO: 73241 - protein, 319 aa, unidentified
MFQIVVGVDIAKHKFDVARLETHKYKHKKFDNTPNGFAAFIDWLATFGDNKILICMEATGAYSIPLAEFLVQSGYPVAVVNPAKIKGFAKSELSRVKTDKADAKLIARYALEKQPSLWTPPPANIRELQALLRRVEDLLEMRQMEKNRLDTADASIAESIKTVLTQLEKELKATRKRIQRLIDQDPDLKRRRDLLETIPGIAEASSAHLLVALSEHYRFTNAKQAVAFAGLNPALNESGTWKGRTRISKMGDPLLRAKLYMPAVVAGQHNPIIRAFRLRLETNRKNGMAIVCASMRKLVHIAFAILKSGKPFDPNYLLA

SEQ ID NO: 73242 - protein, 397 aa, unidentified
MAPRIYVGVDIGKASHYAVGVDEDGEVVSRRAVENDEAGLGDLVRWAVEREAALVVDQPGGTAALLLGLCWGAGVAVGYLHGTAMARARDFYAGEGKTDPKDAFVLADVARAHPRRIVWLEPTDEARARLELLCGYDADLRADANRLTNRLRALLGTHWPALERGLGERLDTRPVLALLQKYPSGPALARAGAKRIAARLKAGRAQRPDLLAERLLDAARAQAATVPGADTAAALVGELAGQLDRIVARRQQLGTEIEHAFFARPEAAILSSLPGIGPRLGARIAVEIGDIRRFKTPAHLAAYAGLGPTPRQSGTSIRGNVPSRHGNHRLKNALFLAAFASLRHPPSRVYYDRKRAEGKRHNQAVLCLARRRVDVLHAMLSRRLPYQLPATPLAKSA

SEQ ID NO: 73243 - protein, 345 aa, unidentified
MKHFAGLDVSLEETAICVVDETGTMVREARVSSEPEALVAFFRGLGLVVERIGLEACSLSAWLHESLVAASLPAVCIETRRAKAAMGAMPNKTDRNDARGLAQIIRTGWYRAVHVKSPTCRSWRALLTARRLVLNKMRDLENGLRALLREAGLKLGTPARKEFAARVRELTAADPVLSVMTEPLLTIIAAMTRELAQLTKRVLDIVRDEPVCRRLMGVPGVGPLTALTFRATIDRPERFRRSRDVGAHLGLTPKRYQSGETDVQGGISRCGDELARTALYEAAHSLLIRSRKWSTLRAWGMQVAKRRGMAPARIAVARKLAAILHRMWADGTEFRWGEADAAVAT

SEQ ID NO: 73244 - protein, 390 aa, unidentified
MQVMHPVCCGIDVHQKSIVCCILDGPLTSNEPKKYQTSFGTTTKELKAALDWLLEHQVTHVFFESTGQYWIPLFNIFSDSDLELVLANPQHIKNVPGRKTDVKDAEWIAQLGRCGLINQSYIPSQEVLQLRYLTRYRISVKQRLTQIKNHIHVILQRGNIKITSYLADIFCKTGQALLTLFINGEVINEDNVESCIHGRIKASTRQLIEAMEGKLSTVDRFLIKECMEEYKLQKKISDELNKEINEYILEHFPEEYQLLLTIPGISDNCCATILAEIGPNVDAFKTDKNLASWAGMCPGSNESAGVKRSSHTTQGNKYLKQALVMSVLSVQRAKEETFSLFYQRISSRGSKMKAIIACGHKMLRIIYKILQSHQPYNSQKALGLRQQTNA

SEQ ID NO: 73245 - protein, 330 aa, unidentified
MKIFVGIDIAKLNHFAAAISSDGEILIEPFKFTNDADGFQLLVSKLESFDKNSIIIGLESTAHYGDNLVRYLVAEFYQVCVLNPIKTCQMRKNNVRKTKTDKVDTFVIAKTLMMQDDLRFITFFDLDMMDLKALGRFRQKTIKQRTRLKIQLTTYVDQVFPEIQYFFKSGLHQNAVYALLKEAPSPKEIASMHMTHLANLLKVNSHGHFTKEQAKELRILAQKSVGANDSAISIQITQTIQQIELLDSQLEKIEAEMTDIMKFNDSVIMTIPGIGYINGGMILGEIGDIHRFSNPNKLLAFAGLDPSVYQSGNFQAKTTRMSKRGSRVLR

SEQ ID NO: 73246 - protein, 357 aa, unidentified
MEKRLKQSLGIDVSKLTLSLSLGFLSDKLVKDFTFHSDVSNDISGYKVLLKWLKASVDSSVDILVVMEATGVYHQGIAHYLYEQGYAVCVMQSGRVKRYAQSLDQRSKTDALDSRMLSMLGLERSIRLWYPPSEELQELKGLSRERSSLLNDRTMENNRQGAITSSVYSNAKALKRHKIRLKLLNTQIEAVEQEMRLLISKNEVLERKLGFLMSIPGISFISAATVVGETLGFESIVNAKQLASYAGYDVVLRESGNFKGKTRISKKGNSHIRAALHMPSMTCVRCNPTLKQFYNRLKPKKAKPLVALIAVQRKLLILMFTLWKNEDVYDAEFEKKKQQKHKALAAQDNNLINQLVS

SEQ ID NO: 73247 - protein, 426 aa, unidentified
MNTQNSDTSQTPEFAAYVGLDWGDKNHALAWTAGSSKTAPQTGTLVNSPEVLHAWLQELGQRFEGRPVALAVETSRGPLIHLFGAYPWLAVYPIHPMTSARYRTAFKPSGAKDDLPDALLLLELVRDLRHKLRPLQMPDAATRQLAALVELRRDLVDRRTQALLQLIALLKSYFPQALELVGQDLTTGLALAFLRRWPDPMALKAARPATLKSFYYQHSVRSETLVTQRLALVQQLRPLTTDDAVLMPARLHLAALLEQLRTLAKHIDLVEQKSHTLFKEHSEAYLFRELPGAGKALQPRLLVAFGEDRSLYPDPGSLQKYGGLAPVVERSGRQAWVHWRWHAPRFLRQTFIEWAGQTVVYSAWAKEYYQHMKAKGKSHHVILRALAFKWVRILWKCWQTRTPYDEARYLKQLLARRSPHAIKLNP

SEQ ID NO: 73248 - protein, 320 aa, unidentified
MSASSVVVGIDVAKAHVDVAVLGVQFGARRFDNDADGHSALAATLQPLGVALVVMEATGGYEAALACALQAAGLPVAVVNPRQARDFAKSMGRLAKTDAIDARMLAEFASVLVRRDDLAKLLRPLTDLDQQVLAALVTRRRQLLTMLLSERQRLQLAIAAVRPGIEAMIEAIRKQLDDVEAQMVKHVQEHYIELDKLLRSAKGVGPVASATLIAELPELGKLNRREVAALVGVAPMANDSGNSKGRRRVVGGRFEMRRVLYMATLTAARHNPAIKAFYDRLKAAGKLPKVALVACMRKLVTMLNAMVKTNKPWDTSLHGA

SEQ ID NO: 73249 - protein, 370 aa, unidentified
MLDTTIFVGLDVHARSIKAVSLDVMTGEVRCATFGYDAGAVAEWVRSVDPRARCVYESGVTGFDLQKRLSGLGVDCVVGAVSKMIKPSADRRRKNDRNDAEFLARMLSVGNVVEVWVPDDECEAARDLTRALEDARDDLSRSKQRLSKFLLRHGLAFDERTPTGRRKGNWTRAHWSWIESIRFAERADNDVLAYYVDAVRRAAEEKARLEGLVEAETRKPRWRKRVDSLRCLKGVDTASAADLVFEAGEFSRFGNARSFAAWVGLTPSEHSSGESDRRGAITKAGNKHLRKTLVEAAWHYLTCSGRPKDLARGQAPDRGARRHAAKGVRRLVERREALLARGVHGNKANVATARELACWVWAVGLMAEEA

SEQ ID NO: 73250 - protein, 337 aa, unidentified
MDYFAGLDISMDETHICVVDRDGAVVYEGKSASTAGAIADKLSEAPSCRRIVFETGRMAPILFHGLSQLGLPAVCVESRQAYQALKSIATHKTDRNDARGLAHLARTGFFKPVHVKSLPAHAVRSLIIARKKLVGQRVTLENQIRGLAVVFGARLPRALTAAFIDQALKASEGIAGLSAAMRGLIAARTAVMSAVAAIDADMRRMTRASEACRRLMTIPGVGQLTALAFVAAIDDPSRIRRSRDVGAYLGLVPKRYQSGEVDYIGGISKCGDRRMRTLLYEAANVMLTRYNGQLKLKDWAFAIAKRSSMRKARIALARRLAIIMHAMLRDGTEFVAS

SEQ ID NO: 73251 - protein, 316 aa, unidentified
MATVDIVYPICCGMDIHKNFLVACIATTDERSNTKHQVRRFSTFTGDLRKLSDWLVSNNCRDVCMESTGKYWIPIFNVLEKTCNVCLTHPKFVKAIKGKKTDKRDAKWISELFKCDLVRASFIPPVDIRQLRDLCRYYVKLTYMNTSEKNRAQNCLTMCNLKLDAVFSDVFGASATRVREAFFEHNSTGFDIAPLLHKGCKASVEEVKAALEGELSNIQVEKLKFIQQHQECIRNLQDALESLILQLAAKYQPQIDLLLTVPGISEPLTAIRIMAEIGVDMSVFETAKKLCSWAGLAPQNNECADKKKTTRIGCAW

SEQ ID NO: 73252 - protein, 442 aa, unidentified
MKKFQALQSKREFIRNKTVVGIDPAKRGQAAALNPNGVLLSAPFKFDANYHGLHHTLWDKLKQRTEKFNTQNLVFAVETSCNLWQPLCFYLRGSGFSVLLVSPLTTKHSRPFISHDFSRTDPKDALLIASNARDGYFDFYQDFTPHNNAMHRLSITYDKLRRNYVQTRLRIRAFMEQLFPEFFQVLNLDTDTGKYLIKRYFLPGQYIQMDIEKESKVIVKISHQQHGRDTLNKLKELAGQSIGIPLKPEEIPAAQLTLNYWVAMLETVEEQMKAIMNELIRLAKETPYFKSMVSLKGISTKLTALFIAETRDLSRFTHYKQIEKYAGMNIRQSQSGQYVGARHISHIGNHRLRWIIYKMAEETCRYVPEVRLKYLKRQLKRKIYRKNIIACVPVLLKLILVLTRENRVYENRTGRLKELHKLEAAYEKTKKPGKNKKQKQAA

SEQ ID NO: 73253 - protein, 367 aa, unidentified
MKKISTVVAKQGRNNSQQELTIGLDLGDRNSWYCVLDEAGRIQLEQRVRTTAKALQEVFGTMPRSRVALEIGTHSPWISRLLKQLGHEVIVANARKVRLIGESRKKDDRLDAQTLARLARIDPELLYPVKHRSAQAQADLMMIRARAGLVRARTSLVNTARGLAKSYGERLRGCNVRDMDPEKAENLSPELQRALEPLLATIEELSERIVEYNDRIEALAQTSYPQVDLLKQIKGVGTLIALTFLLTLEDPHRFGKSRDVGGYLGLQPGRRNSGESEPQLHISKEGDPYLRTLLVQGAQHILGPFGIDCDLRRWGLKLAERGGGNAKKRAIIATARKLAVLLHHLWVSGEVYEPLHNSSRLTVAAAA

SEQ ID NO: 73254 - protein, 390 aa, unidentified
MYIVGIDIAKRFHEAAIIDSSGKIVVKRIRFANSHAGFLKLMDAVRKLDAPAEFGMEATGHYWLPLYAHLRQDGQTVHVINPLQSDALRSMFIRQTKNDTIDALIVAEVIRFGRYCETQVAPENIVALREICRQRFFIVDTASDFKRKIIALLDQTFPEYEKLFSDTFGKSSVELLANYTTPEEILAVDTQTLADLLSKASRGRFGLDKATEIQQSAKNSFGIVLASSSFALIIRQYLEQLKSLETSIVAFDEEIARIMATFDTKLETITGIGKTLAAVIFSEIGGDIKRFSSVPKLVAYAGLYPKSRQSGESKTDGRMSKRGSPYLRRAVWLAANVAAFKDPAISTFYQKKRSEGKDHLTAIGHVCHKILAIIFAVLRDNKSYVPASAS

SEQ ID NO: 73255 - protein, 433 aa, unidentified
MKVLYERVAGIDVHKDMIKVAIRSPGDKPWTRKTEILEYRTFYGVLQQMARELRKRGVTHVVMEASGVYTEPVYYALCEQDFIQVAVINPAHAKALRGHKTDAKDCARLAELFECGLLRGSYIPAPELKEVRDLTRYRMKTVQARTSEIQRLGKALESAGIKLGSVASSITGTSSTAMIEALIDGERRGPVLADLAIGRMRTAGKLADLSMALAGRFTEHHALLCRLHLDRIAGFDDAADGLDKQIAGKAARWQRETGLLTSVPGFGDVVAQAWLGEIGPAPHRHFSSHEKLASWVTLCPGNNISARKRKHGRTGDAGTYIKPMLVQAAWSAIRVRGRLQARYSRLVRRFGGDKNPAAKKKAITAIAHTLLKNAYQVLKSGTPYQDLGADFYTRRESPEQKQAWLQRQLQRLHPGCTITITISPPEAALPPAA

SEQ ID NO: 73256 - protein, 367 aa, unidentified
MEKSTKVFVGMDVHKESIDITLAEEGGEVRRLGQIGGDRGSLLKMVRRQQSRGGERVFVYEAGPCGFWIYRELAALGERCMVVSPALIPKRAGDHVKTDRRDSERLASLARAGELEAIHVPDIRDEAIRDLVRGRDDAVIAQRRVRQQLKALLLRNDIRYVGKTSWTGAHRRWLSELKLPEPAQQITFEEYVEATAVATGRIERLTRAIATEVITWRFAPVVAALQALRGIQFVHAVTLIAELGDLTRFASARQLMGYLGLVPRENSSGEHRRQGAITKAGNSYARRALVEAAWAYRHPARVTRIIATRQTGLPKVACDIAWRAQLRLSAKYRRMNVRHLNHNKIVVALARELSGFVWAIGQSVRPL

SEQ ID NO: 73257 - protein, 312 aa, unidentified
MTSEKYVGIDVSKRWLEVQVYGEVESQKLGNDPDSFRTLIERMKAVQPVRIVFEATGGYERSAVKALSEAGFIVAVVNPTRVRRFAEALGTLAKTDKIDAQVIAHFASVVQPPANGRQTPLEEQLAACVERRRQLLVELVAEKNRLSTCPACVRADIEEHIAWLEDHIADLETDIQMLILEKAEWRERAEIIDSVPGVGRVTATTLVAELPELGQINRQKIAALVGVAPFNKDSGPKKGKRRIFGGRSGIRRTLFMATLSASKHNPVIRAFYESLLKRGKEKKVALTACMRKLLVIINAMVRKGEAWKFSPA

SEQ ID NO: 73258 - protein, 349 aa, unidentified
MVMLGEVVELVIGVDTHKDTHTAAVVVAATGAMIQQVTVPAAPAGYRQLLKLAGQHQGQRVWAIEGTRFLQGHAEQVVELDRPKRAARRHGAKSDPLDATRAAREALGRDQLAQPRAAGHRAALQVRLTARRSAVQASTDAQRQLHALVVAAPDPLRGRLRSLTTHQLVIACGRLRLRAHWDIETTTFAASLRALGRRIQLFQAEIAEHTRAITALVRAWRPDLLGCCGVGPIVAAIVLCAWSHPGRCRTDAAFAMLGGAAPIPASSGQTVRVRLNRSGDRQLNQALHLIVLTRLRYDPATRVYAQRRRAEGKTNREIRRCLVRYVARQLYRILEANPGFDPTQERPTE

SEQ ID NO: 73259 - protein, 328 aa, unidentified
MKDFKTFVGIDVSKDTLAFSIYDGKEHITKEIKYTKAVITKELIKPFKDKKDLVLFVMEATGIYHNKLANLLYKEGLAVSVVNPFAIKSYAKSRLKRVKTDKSDSKLISEFAYIFSRDLTLYKPKDKEQKEIDDILKSIDDINLINTTLTNQIKALKEQDRYSKDIVKLKEELLKKNNQVKERLKKLLDKKLKDSFVKEYKLLKAIPGVGLMVSGSIISIFNSFKEFDSAKRACSFVGIAPAPYESGSSVKRRGSISKRGNPLIRKILYMATLSAIKHNKTVKEFYERLLQKGKTKMVALIAAMNKLLRIIFAVVKHKREFCENYVRA

SEQ ID NO: 73260 - protein, 339 aa, unidentified
MNEVTLIGIDLGKHSFHLHAQDATGRMVFRKKLSRQQLLRTLAKVPSCRVVMEACAGSHWLARQLAGMGHEPRLISPQLVRPFVAGNKNDFGDAQAICEAACRPSMRFVSPRNEAQQTVSALHRLRERLVRERTATVNQIHGFLLEFGISLPRGAALMSRLPTVLDHETLPPRLVGLVVRLRAQVHYLEEQLRQVEQDLKASLREDDKSRRLLEIPGIGPITASALAVELGDARQFANARQFAASIGLVPRQYSTGGKPTLLGISKRGDRNLRRLLVQCARAVMQHTASRTDALSLWVKTLSTRRHSNVVACALANKLARIAWAVLARGTHYQARALTT

SEQ ID NO: 73261 - protein, 359 aa, unidentified
MSSIPVYVGLDYHQDSVQVCVLDRKGNQLCNRGVENKAKTIEQVIRRYGTPRRIAIEACCGAADLAEELATQRKLPMRLAHPGYVNRMKRSPDKTDFGDGQLLADLVRVNYLPGVWLAPRSTRELRRLMRHRAQLVRRRKDTKLRVRGLLRENRLKCPDANAWTKAWHAWLLNHAELSESDRWIMEDHVAELRSLSVRIVAVEERIRTRTKDDPVVAQLMAQQGVGLVTAVTLRAEIGRFDRFDTGKQLSRFCGVTPRNASSGSRQADAGLIKAGNPELRTVLIELAHRLIRASAGRWGKLAAGMLARGKPKNVVVAAIANRWVRWLHHELRREEGAPPTSAQAQQKGAAPSLITVAST

SEQ ID NO: 73262 - protein, 346 aa, unidentified
MTIVEDACAVTGGVDTHADVHVAAALDSIGGLLGVREFSATAAGYSGLRDWLAGFGQVALVGIEGTGSYGAGLARYLAAAGIRVVEVDRPDRQDRHRAGKSDPLDAVSAARAAQSGRAAGAPKGRDGAVEAIRALMVAKRSAGHERTQAINQARSLIVTGPEELRARFARHTPARLMAELAALRPRPGDVPGYATRVALRELGRRARFLEAQISQLDELIVPLVTARAPGLLALHGVGPDTAARLLIAAGDHPGRLRSEAAWAHLCGAAPIPASSGKVTRWRLNRGGDRDANHALWRIVICRMKSHPATRAYVARRSKEGLSKKEIIRCLKRYVAREVYPYLRPAR

SEQ ID NO: 73263 - protein, 367 aa, unidentified
MKKVSTAVTKQGRNISRQTLTIGLDLGDRNSWYCVLDEAGTIQVEQRVRTTAKALQEVFGAMPRSRIALEIGRHSPWISRLLSELGHEVIVANARKVGLIGESRKKDDRLDAQTLARLARIDPELLYPVKHRSAQAQADLMMIRARAGLVRVRTGLVNTARGLAKSYGERWRGCNVRDMDPEKAENLSPELQRALEPLLATIEEVSERICEYNDRIEALAQASYPQVELLRQIKGVGTLIALTFLLTLEDPHRFGKSRDVGGYLGLQPGRRNSGESEPQLHISKEGDPYLRTLLVQGAQQILGPFGIDCDLRRRGLKLAERGGRNGTKRAIVATARKLAVLLHHLWVSGEVYEPLHNSSRMTVAAAA

SEQ ID NO: 73264 - protein, 368 aa, unidentified
MKQQTSATTETGNKIRKIVSFTGKTVFVGIDVHKEDWQVAVYHEGIVLGNHRMRADSQQLIEHLNKRYWGASFKCVYESCAWGFELHRELKAADIDCIVVHAADVPGSNKELLNKDDSNDALRLARHYAAGLIHGIYIPQEEVQKHRNLIRFRKKLVNDLNRSRNRLKSLLKYQGIIIPEQFDNAQWSNNFLEWIDHQAERDVLLRDTIWLMLEQIKQLRQLLLKAERKVRELMRDKKYNQQARLLMSIPGIGCITAMLFLLEIGNLRRFKSFDQLNSFVGLYPGTFSSGERNRDTGLSFRRHNQLRTHLVEASWQLIRRDPAMMESYQQLIKTMKGNEAIIRIARKLLRRMRAVLLNEKPYQMGLIA

SEQ ID NO: 73265 - protein, 337 aa, unidentified
MGLYCGIDLHSNNHVLTVIDEADRKVYERRLPNELAITKAALAPYRAELVAVAVESTFNWYWLVDGLMEAGYTVRLVNTAAVRQYEGLKHTDDEHDAFWLAHLMRLGILPTGYIYPKSERGLRDLARQRMRLVQHRSSLITSVQNQVWRSTAVRLRSDTIKGRGKQPWPEISDPDLASSIKAGREVIDTLTVQIERLEKLILKRVDPSPQFRMLKTVTGIGPILAMTIALEVGDIGRFAGVGEFASYCRCVDSQRLSNGKKKGEANRKCGNRYLAWAFMEAAHFAIRILPAAKRFYERKRRQRHALLAVKALAHKLARACFYVLRDQVPFAPERLFV

SEQ ID NO: 73266 - protein, 372 aa, unidentified
MSSYDFEIGLDLHKEFSMLALVNAHGECLHYDRVENNPEYLDHYFSGIEGTYRVTFESTRNWYWLADYFQERDIDFILSNPALNRAIAHVQAKTDRYDARTLAQLTRAGLIARCYVPEKAIRTLRELLYHRQRLLQIRTKLKNRIHVSLAKYNFRAPYQNIFGPHGLKWIESCELPATIKAIVTELVAIIGELNPRIEFYYNRIKDRVEQHPYYEILNTVHGIAVVHAGTIIARVAEINRFPTVEGFIRYAGLAVNTRQSANRTTYGHLSRQSDKYLRTAFVEAAHIVIRSDPGLRAFYEYLRAQKGHGCAICAVARKLARSVYWMLKNSTPYRVRRIQPQYIPKPNQPLKIKRLARPTRPETASFAALTGG

SEQ ID NO: 73267 - protein, 339 aa, unidentified
MTKATTIGLDLAKQVFQVHGADRSGRAVLRRKLRRNEVVRFFSEQPPCLVGIEASGSAHYWARVLSSLGHTVRLMAPQFVKPYVKSQKNDANDAEAICEAVTRPNMRFVPAKSVEQQDLQCLHRVRSRLVANRTQLINQIRGLLAEYGIVLPQHPGQVRSGLPAVLEDAGNQLTGFGRMLFQSLYEELAQLDEKIAAANKRIQIAFQNTPDCRRIAAVEGVGPLIATAIVAAISNGHAFKNGRQFSAWLGLVPRQNSSGGKSRLLGISKRGDPYLRTLLIHGARSVVYRAKAKTDQRSLWINDKQQRLGTTKACVAVANKNARIIWSLIAREQEYRHAA

SEQ ID NO: 73268 - protein, 412 aa, unidentified
MEVIHERCCGLDVHKRTVVACIRIPNAEGGAHKDIKTFSTMTFDLLILRDWLAASKVTHVAMESTGVYWKPVYNLLEDQFNVLLVNAHHIKAVPGRKTDVKDCEWIADLLAHGLIKGSFIPPEPIRDLRDLTRYRKSLIDERIREVNRLHKLLESANIKLASVATDVMGASGKDMLQALLGGSADPEILAELARGRLRKKIPALKQALEGRFRPHHRFMLETILAHIDFLDESIATVSEEVVDRLDPFVQAIKLLCTIPGVEMRTAQVIISEIGIDMSRFPSANHLASWAGLCPGNNESAGKRKSGKTRKGDQWLRRALVEVAWAASRTKENYLCSQYHRLVARRGKKKAIVAVAHSILVAIYHILANAVPYHDLGANYLDKLNETNIKRYHVKRLQELGFQVSITPLEQAA

SEQ ID NO: 73269 - protein, 354 aa, unidentified
MRFYQQPPDQQPHRFYCGVDLHARCMYLCILDATGQTVLHRDYPADRGAFLDAIAPYRDGLAVAVECMFAWYWLADLCAEHGIPFVLGHALYMKAIHQGKSKNDRLDAAKIAGLLRGGLLPQAYVYPKAMRATRDLLRRRSFLVRRRADLLAHLVNTNSQYNLPALNKKLVYPSNRGELNLPERFTEPSARKMVECDLTLIDALDAQIHELERHLVCTAKVHDAQAYARLQSIPGIGKVLGLVLLYEIHDVRRFPEAGHFLSYARLVRPRQESAGKASGFGNKKIGNAHLRWALGEAACLYLRASARAKRWQARQAKQHGPAKTLGILAAKLGRTVYHLLRTRQVFDEARFFAS

SEQ ID NO: 73270 - protein, 343 aa, unidentified
MQTITTIGLDIAKSVFQVHGVDAGGQVIIRRQLMRRQVVAFFQKLLPCLIGIEACASSHHWSRELQALGHTVRLMPPAYVKPYVKRQKNDMADAEAICEAVTRANMRFVPTKTPEQQSGLMLHRTRHMFIRQQTAVINSIRAHLAEFGIVAPVGRKGVTELLRIVADPNDKRMPEVARACLAAQGTQLLALKEQILEFDRMIPAWHRSNQTSKRLHYIPGVGPMLATALVASVADPRTFRSGRNFSAWIGLVPKQHSSGGKERLGGISKQGDRYLRSLFVAGALAVIRYAKIHGTGHRPWLTALLGRRPTKVAAIALANKIARMAWAVMAKGERYKQPAALAR

SEQ ID NO: 73271 - protein, 353 aa, unidentified
MAVMVLIPHRVGWHKTLYGGAAMYVGVDYHKKYSIATKMDSKGKILEQVRLRNDPQTLVRYAEGLPEGSKIALEATGSWYYFYELLENKCSDIYLAHPLKTRAIAEARIKTDKIDSTILAHLLRADLLPTSYIPSREIRDIRETLRYRASLVSLRTSIKNKVHAVLSKNGINIWYSDIFGKKSMKYLKGLELRACYKQGVDGYLRLVETLNTLIDEVTKTIEGIAKDNPQAKLLDTIPGISYYSALLIVSEVGDIGRFPSARRLCSYAGLVPSIHSTGGKTRYGSITKQGSRWLRWILIEVSKHFINSSERMRKIYLRVARTHGKNTARVAVAREMLKVIYYLLRDNRPFIKE

SEQ ID NO: 73272 - protein, 334 aa, unidentified
MLYAAIDIHKHAFQAAVLDPDTGDVVEERFSADRECLGRWAEQWKDRVEAVAIEATTGWRWVWRVLVSYGFEVRLAEPVQARALLGRRRSAKTDRLDARWLARLLAKEMLPASWIPPEEIQQLRDRTRLRKALAEDRRRWGQRLHAFLLHEGWPCAKARLLTPEGMRWAAALRLPAHGRLQVDSLLAIIGALEVQLDTVDAELRRFARADQRCQALQSIYGIGPILSCHLLAEIGEASRFRRAEQITRLAGLDPVVEESGETRRRGHLAKAGSPHLRWALVEAAVHASRQSAPDVAVYRATRERRDATVARLTVARKIGKRVYHTLRELELDAA

SEQ ID NO: 73273 - protein, 370 aa, unidentified
MKKHSTRPQSPRGAAARSKGPITIGLDLGDKTSRYCVVGDNGEVMSEGSVATTRKAMAQKFSGMGRCRIAMEVGTHSPWLSRMLTALGFEVIVANARQVQLISASSRKNDRMDAHMLARLARVDPELLRPIRHRSEQAQADLMTIRIRAALVEARTSLVNAARGFTKAMGERLPACDTDSLGVEKLEALPAALQPRLQPLLEQIEALTAQIKKLESNIEQIARIEYPETRLLTQVSGVGTLIALTFVLTLEDRERFQKSRDVGCYVGLRPKQSQSGQSQPQLRITKEGDRYLRTLLVQAAHLILNRRGPDTDLKRWGLKLAQRGGKNAKKRAIVAVARKLAVLLHRLWVCGEVYEPLRNSRPTPASKQAA

SEQ ID NO: 73274 - protein, 326 aa, unidentified
MKKKYFGVDVGSKELVLAYFPSGSSGKVRTYKNTVAGIKKLLKLVGKFENAHIILEATGTYSKRLVYGCLQADVPLSMLTPSQGKSIGLVLGKSNKTDAEDARSLARYGEMANPSVYVHPSENEEHNRQIIKYISYLNKEKTRISNKLHALSFEQYPNAYVVKELEEELIKREQQIKEAMEELENLQGDELQEAIEKAETVVGIGRKTALCLILLTGGLRDFETPKQLANFLGICPALYESGSSVRKRANISKKGNKMIRSLLYMCARSATQHNPSCKALYDRLRKKGKAHKLAMVAVGHKLVRQIFAVVKNNVDFDKQYKNEKFA

SEQ ID NO: 73275 - protein, 403 aa, unidentified
MNNVAGIDVSKGKSMVSVLRPFGEVVAKPFSVGHTGSELKELADYLKSLDGETRVVMEHTGRYYEPVARFLHEEGVFVSAVNPKLIKDYGNNTLRKVKTDKADSRKIARYGIDNWAELRQHTPMDTIRMQLKTLNRQQSLYTKTKTMMKNNLIALLDQTYPGVNALFDSPVREDGSQKWVDFATTFWHVDCVRNMSLTAFAERYRKWCKRHGYNFRQSKAVEVHTGAQDLIAMLPKDALTKTMVRQAIDALNAVSASLERLKAEMQALAAQLPEYPVVMAMHGVGDSLGPQLMAELGDVARFTHRNAITAFAGVDPGADQSGTHEAKSTRVSKSGPPELRRALFLVMDCLLKTQPQDDPVYRFMDKKRAEGKPYLVYMTAGANKFLRIYYGRVKEYLASLEGN

SEQ ID NO: 73276 - protein, 414 aa, unidentified
MEKERINIYHKRNTCFVGIDMHKDTHCAVVIDCWMNKLGEINFENRPSRYPAFVEDVRKICGTKEIVFGLEDTRGFGRNLAAYLVGRKFEVKHVNPAYTSAVRLANPIIYKDDSYDAYCVARVLRDMVDTLQDAKHEDIFWTIRQIVKRRDLIVKSNVMNKNQLHSQLAYSYPSYRKFFAIIDSKSALCFWENYPSPEYIWNTTPEEIYHTIKPVHQALKIQRIHEIISMIERDGDTRKDYQPERDFIVRNIVKDIRHNKELIAEIDGELRKLIPLTGYKLHTMPGIDLVTEAQIISEIGDINRFPDSDKLARFMGLAPVQFSSAGKGKDQRCRNGNRALNAIFHFLAIQMVAVSASGKPRHPVFREYFEQKVKEGKNKPQALVCVARRLVRIIYGMMKTRTEYRPFEKADDKN

SEQ ID NO: 73277 - protein, 341 aa, unidentified
MKVNTISIDLAKNVFQLMGFTAKNKSAFNKRLNRVQLKHFMQMQPPCRVVMEACYSSHYWGRTFESMGHTVDLIPAQHVTPFVRGNKNDSNDTLAIFEASARPFIRFVPIKTQAQQETLILHRLRERLLSARTAASNQLRGLLADFGIVFPQGKAAFIEKIQALSVDGSLSVKIKWLVNDVYKEYKTLALRIKDIEKQLKTDIEASPLGKILLSIPGIGYLNASAFIASIGSGQAFSSAREFAVWLGITPKQFASGNKSVMGGISKRGDQYLRKLLIHGARAIITRAGKKQDALSLWITQLSARKSFNCTAVATAHKLARIMWTLLQKQCHYTPQTVKDVA

SEQ ID NO: 73278 - protein, 358 aa, unidentified
MTMLAEKSDGIEEVPLLDAVVGGDTHRDTHQLEMLTGQGVLISTISIDNDADGYERAIAWIVEHAPGRRVLVGLEGTRSYGVGLSRALQAAGLDVVEVEQPKRGQRRRGKSDPIDAHLAALAVLRMPAGRKVLPRNDGDREAMRILLVARKEISTVRTGQINRLRALLLLGDDEDRALCRGAMSKAHLDQIARRRGRQHETTEQAVRRGEARRLAVAIRAADLELTANEKGLRALVKAFAPGLLDRKGVGPFSGAQAIVSFSHVGRCRNDAAFAALAGASPLLASSGRTNRHRLNRGGDRQLNRALHTIMLTRWRDCPRTRAYIERRQKQGLSDRDIRRCLKRYIARELFRALTVAGG

SEQ ID NO: 73279 - protein, 390 aa, unidentified
MLYIGVDISKYKHDCIVIDDAGVIVRNVFSFDNSRTGFDQFMAMYHSLDPTEIKKIGFEATGHYQDNFKVYLERSGIEFMQLNSLLVHKFKNSQTLRGVKTDKTDARLIANYLSSIEFKPYPKISYHTLALRSLCKRHFDLINERTKYLIRITNFLDRTFPEFKEFINGNIKSKTSMYILHNYGVPNKIMNINIQSYENLRKESHGHFSVAKFTELRELAKNTVGFSYETDLIEIKSLLRVYNTLQDEISLVENEITTILSKINSRIPTILGIGKVSAATMIAEIEDISRFNDPNKLLAFAGLDPRIYQSGTQEFKGRMNKKGSVVLRRVLMNCAKSILIYNPAFYTYYRKKMDEGKSHRVAISHVARKLVRIIYKLETEHIDFDLSIVK

SEQ ID NO: 73280 - protein, 421 aa, unidentified
MISFPKRQRAQGAAACAGVDAGKFSHTLVVRPHGQRDSRPLTFQTTRAGFDQAVEFIRRQSGGAPAHTILIGIEFAGNYGFTFAHYLAQLGFQVVSVLPAHTKRWKDVAHNQPLKTDAKDAATITDLLAQGHFVAFPFLQAAYAELRYLAAGRERLALLRRGALTQLRSLLQVVFPEFEALFPHLTKKTPLLLLEAYPAPQDLLAAPKRRVLKLLRTASRGHCGLATYDRLISAAHITLGLPGAQSSLRDEMSLTLERLAVFEHQIAALEVRMATALRSVPEAPCLASIPKLGPVTAAVFLGAIGDPHAYESAAQILRVAGLSLIERSSGILRGTKRLSKRGRPLLRQAAYMFAVRSITTGGLFRAEYDGLMARNGGQAMKALGAVMRSALRLMYSIARDRRTFTAEPPARARRGPVAECA

SEQ ID NO: 73281 - protein, 415 aa, unidentified
MDVQMKHACGLDVHQATVVACLLSVLGGGRVKKQIRTFGTTTRELQALREWLQGEGCTHVAMESTGVYWKPVYALLEGPFELIVANAQQIKNVPGRKTDVKDAEWIADLLLHGLLKASFVPPKPIRELRDLTRYRRKLGDSHSAECNRLLKVLETANIKLASVASDVFGVSGMQMLQALAEGKATPAEMAELAKGRLRGKILQLEPALEGRMEDHHRYLLKLQLRRLRDLDEDLAELDGRIQEKLQPYQKQLELLREIPGVDWTLAAVIIAELGVDMKVFASASRLACWAGLCPGNHESAGKRRNVRVTKGNVHLKTALVEAAQASTRAKGTYLRDKFFRLKARRGAKRAVVAIGHKILVAVYHMLSQEVSYNDLGDLYLDKLNKHHLTRNLVRRLERLGYCVTLKQQLVQQPAA

SEQ ID NO: 73282 - protein, 374 aa, unidentified
MNNIIRIGIDTSKSVFQLHGVDEAEKPVLRKKLRRRQLLEFLARLEPIKIGLEACGGAHHWAREIKKLGHEPLLLPPQYVKPYVQRNKNDDRDADAVCEAMSRPRMRFVPVKTVEQQAALMLVGTRDRLIRQRTQLTNAIRGYAAEFGLTAAKGLAKIEPLLARIAADETIPALAKELFVVHGKEYAQLKVQIAEIEAKLIAWHRDNELSQRLVEVPGIGPIAASLLAMKVPDPGAFRCARDFAAWLGLTPKDHSTAGKFRPGGITRAGDEALRSVLIVGATAVVQQIRKGRGHASPWLAQLVKRKPPKVAAVALANKTARITWKLMLSGEHYDRANQEPTTSREERALRYRGSAARSSLAPPIASLSVSQARG

SEQ ID NO: 73283 - protein, 315 aa, unidentified
MSEEEKKVFIGIDVSKDKLDVAVRPTETSMTFSNDEDGISFLVNFVKSLSPSLIVLEASGGLETAAVGALAIESLPVVVINPRQMRDFAKATGKLAKTDAIDARTIARFAELLQPEVRPLKDEEAQRLTAFNTRRRQIVEMITAEKNRLSSAPIWTRKDIKAHITWLEKCLKKVDNDLSNFLKKSPVWKEKNDILRSAPGVGPVTATTLLSNLPELGKLSRKKIAALVGVAPLNRDSGLFRGKRTTWGGRQNIRSVLYMSVVSAIRCNPVVKKFYQRLCDAGKPPKVAITACMRKLLIILNTMVKNRTPWSAVPM

SEQ ID NO: 73284 - protein, 431 aa, unidentified
MTDEPLYRDRVCGIDIGKAGLYATIRVPSDSNPARRASETRSFATTRRGVLALADWLRSWQVPAVVMEATGDYWKGPFYRLEAEGFECVLADAKQVKNLPGRPKRDPSDSSWLAQCFERGAVTACFVATPEFRVIRLHTRYRRDLIEERTREKNRTEKLLESAAIKISSVVTDLHGVTGRDIMDHLIAGERSPKVLAQLARRRARRKIAELEEALEGAEFFTGYHAGLLKTMLARIDQIDAEITRLSEVIEQLLAPWEEQLAQAESMPGWGRRSAQDVLAETGPDMTRFPTGGHLVSWAGRAPLDHQSGKHQGRSRHKKGNKYVAAATGETAISAGKTGTREGARYRKLARSRGKAKACVALGNTQLKVYHKLLSNPGMRYHDLGPDYYQRRAQTRRKIAYHVRELEELGLEVTLCRPGPAQDDPEPTRAA

SEQ ID NO: 73285 - protein, 336 aa, unidentified
MENSYRIAGIDVHKSMLAVVVSDVTGKGEWERRKFGATPSELRVLADWLRHREVREAVMESTAQYWKPVWQQLEGQCELYLAQAQSNRAPRGRKRDFGDAERLLRRHVAGELILSFVPDPEQRLWRTMTRSRHQLTRDRVRIHSQIESLLEDGRIKLAGWVSDLLGVSSRRILGALAAGETEVRKLSALADPGWRATAEQLEDALSGAAQLSALHRQILGLFLSRLALIESHLEILDRSIATALHRCQAAVQRLAEVPGLGIDSAHQLIAEIGPGAESFASPQELSSWVDVCPGREESAEVSKNNRSPKGNRTMRRVLALAANAAVKAKGSVFHNL

SEQ ID NO: 73286 - protein, 393 aa, unidentified
MLFVGIDVAKSHHDVAVLDDNGLVVLRHLRILNSRQGFATLHQSLIQLSADTNDDIRIAMEATGHYHLNLLLFLQANAYPTFAYNPFLIKEFARTLTLRKTKTDKADALTIAKKLATDLSSDRFKPNFNMQELKFLTHHRNRLTDSRSKLKTQYIRLLDILFPELACFIGKTNLHYQYVYDLLTKYPSPAKLSRAHTNALVKLLHNHGNRLDMAQQLKVLAKQSIGLSSPANALELVQTISVIRLYDEQINAIDQEIAQIMNSLDEAAIITSITGISNRLGSVILAEINHINNFQSPDQLLAFAGLEPSVYQSGQMNATGKIVKRGSTSLRWALCQAAEYASHWSPTLRQYRQKKLDEGKHYYVVMTHVAKKLVRIIYYLLKHHQYYDESKLI

SEQ ID NO: 73287 - protein, 316 aa, unidentified
MAGGLCIGIDVSKAALEVAMGSAGEVRAFANEDRAIGELAAELVALEPGLVVMEASGGYERLAAALLWEAGLPVVIANPRQIRQFGQGMGQQAKTDWLDARMIARWAEHRRPAVRALPDAQGRELREILIRRRQLSEMLVAERNRLGQVLSKPIRKELTASIGSLQRRLKQLDDELEQRIKKSDLWQRTRELIQSVPGVGKLTSFMLIAELPELGQSDRRHLASLVGVAPFARDSGQLRGKRMIGGGRGAVRSALYMAALTASRYNPVLRPFYQRLLARGTAKKAALVAVIRKLLGILNAIVRDRTPWRPPCPVKT

SEQ ID NO: 73288 - protein, 435 aa, unidentified
MEEVTDEPLYRDRVCGTGIGKAGVPATIRVPPDENPSRRMQETRAFGTARRQVLALADWLRCWQVPAVVMEATGDYWKPVSCRLEAEGFECVLADARQVKNLPGRPKRDTCDSRWLAQDFERGAVRSCFVATPEFRVIWLHTRYRRDLTGERTREKQRVEKLPEPAAIKLSGVLAGLHGVSGRDIMEHLIAGERDPRALAQLARRRARAKIPRLEEALDGAGFFTGHHAALLDAMLRRIDFLDADVDRVSAVIGELLAPREEQLQQAGSMPGWRRRAAQDVLAEAGPDMTRFPTPGHLASWAGRAPLDHQSGQRKGRGKRKKGNRYIGAVTGETSVSAGRTRTREGSRYRRIARRRGKQKAQAALGSTQLKVLHKLWSNPGMRYEDPGEDYYDRQASIRRKTRYHLTELEDLGWDVDLRPRAEPSPDHQDATPAT

SEQ ID NO: 73289 - protein, 354 aa, unidentified
MKRTTKYVALDVHQATTVASVREERGHVLARTILPTAGPAIVEFFRGMRGAVHVAFEEGTQAQWLHELVAPLVDRVVVCDQRGKPRHGNKGDQVDADQLSELLRRGGLRAVYHGSAPQAELKELTATYRNLVEDGTRVMLRLKALFRARAIPTRGTQVYQPRERARWLAQLADRGAQFRAGTLYAELDVLRALRPPAKSAMVAQARRDPAWPVLRAIPFLGPVRVALLLATMQTPWRFRTKRNLWAYAGLAVVTRSSDDYRLVAGQPVRRRRAPLTRGLNRNHNRLLKDVFKGAATAATARPGPLQDFYHGMLARGMREELARVTLTRKLAALTLRLWKKGERYEPAQLTIQAR

SEQ ID NO: 73290 - protein, 421 aa, unidentified
MLNMLYIGIDLSDKFFDSCITDSQGIVLSTKRFDLNHDGFCSFIKLIHEHEANEHEANEHEKDSHKCIVGLENPRSRLVDFLAGRGCTVMLTNPDAISSYRKSIKPSKAKSDKGDAKLIADYVREHHTSLRCIQIPDETMRELSILLEDRDRLVQQKVRFSNQLTSTLKEYFPQALDAFGSIDNKCTIKFLKTIDTYAQLKALSVKQLEQLLKECGVYRTDSKERFYQAIRKPVYHISQAVVKTKTRLKNTLVAHLDLLLRQIQEYETQIQNLMDDSSNGHIFISLPGADYILGAKLLVLYSIRDFADASEAQQLFGTAPYTAASGQSRFVGFRRGANKLGRNTFQQFARCSIKSSNWANKQYARRRNQGKGSHHAFRCLANTWVKITFAMWRSKTIYDENRHMASITNHIVNQPAFVNGD

SEQ ID NO: 73291 - protein, 338 aa, unidentified
MAELSFSVFVGIDVSYEKLDVAWRKDADWTMCQITNSWADAQLFAADLSKILPDCCCIIEHTGTYSSKISLALYQAGLKVSLITPAQSKAFAAMKHRTTKNDRSDARLLAEYGLFNTSELRFYAPPPEHQIQFRQLLEAVDQLEKMRQQVRNQQHAYQQLPPLHQQQILLNAYQNTVNQLDKQIEELQINIKQLHGHDEDLDQTRKLMTTIKGIGEKTANIILAKTQGIKRFDNPKQLAKFAGIAPTENSSGSSVRGRRGINRSGNAILRKALYCATWSALRGNKACKTLFDRLRSKGKPVKVALIAVANLLLRQIFAVVTTQKPFDNEFYLKNCAPL

SEQ ID NO: 73292 - protein, 351 aa, unidentified
MIIIGVDYHPSSQQIAFMDQETGECGERELHHSDGAAERFYRELKERGVSVRVGMEATGHARWFERLLAELGFELWIGDPAEIKTKRVRKQKTDREDARLMLKLLLENRFPRIWVPSPENRDLRQLLWHRHRLVQMRTRIMNQLQAVAMNEGYRWKKKLFGQQGRALLEKLSLAPWASRRRKELLELLDQLNPKIAELTAAVEREANKRPEVVRLMTHPGVGPITGVAYVLVIGTPDRFPCGKKIGSYTGLIPCEDSSAGRQRLGHISKQGNTLLRFLLVEAAQAAARCNADWRRRYMHLMMRREKRIAKVAMARKLAVRLYWMWRNNWQYSQLVEFGSNAGKLGIVHGMK

SEQ ID NO: 73293 - protein, 383 aa, unidentified
MQPINTVNPTILLAIELSASTWLVAARVPGAEKPHLHRIDGGDTAALLALISSLRARVARRLDAPQIGVVCCFEAGRDGFWLHRLLTAHGVASHVLEPTSILVNRRARRAKTDRLDAEGMLRVLAAYLRGDHQACSMVRVPTPEEEDAKRTHREREKLVQERLRIENRIEALLFTQGIRKRPSLRSWERDLAVLRTGDGREIPRHLRAELDRLRRRLVMTLELIREVEAERDQAAKTKPQDQACRKIAALCRIRGIGENFAAVLTREVFYRSFDNRRQIASYVGITPMPYQSGGMDRDRRISRAGNPRARTTMIQLAWLWLRYQPGSELAEWFRERVGTLAGRTRRIAIVAMARKLLIALWRYAETGVIPAGAEIRAETTVAA

SEQ ID NO: 73294 - protein, 365 aa, unidentified
MKIIYWIGIDDHADKWTIAQYRGDEERPSREFELVPDDKGYRRLLSYLKGLDGEVRIVYEAGPCGYDLHRRLIKAGYKCQVAAPALTPRKPGERVKTNRRDAAKLARYLRSNDLTFIAVPDPDRESLRDLIRSRQSVQKDVGRMRRQIIHLLLRYGHRYRDGQAWTQRFWTWMKKVQLEGTHSRFVLTEMIGELEHRISVLDRYDDQVELASQTAEYQPYLAALRTLRGINTLSAMIILSEMGDLRRFATAPKLMAAVGVVPSEYSTGDKTSRFSITKTGNAHLRRAVVEAAWQYQRRPLLGRTVKARRKDQPKAIVDIAEKCEKRLHARFQRLTSRNKKSTVAVVAVARELLGFIWAIGQIAHP

SEQ ID NO: 73295 - protein, 405 aa, unidentified
MGRVFVGHDWAEAHHDVFVEDGSGRKLAAARLPEGIEGVRRFHELVADHIEEAGEVLVATETDRGLFIGALVAAGYEVIAVNPLSTSRYRERLSTSGAKSDPADARVLAELARVDGHNHRRIAGDTDLAEAVKVVARAHQTMTWTRQRHTNQLRSALREFYPAALDAFDDLASNDALSVLAVAPTPALGRRLSRSKIAAALRRGGRQRRIDERAAEIQAALRAEHLEAPPVVAEAMGASVVALVAVTTELVAQIDRLEQQVADRFEQHPDAKIIRSLPGLGMILGARALGEFGDDPNRFNDAKSRKNYASTSPITRASGKHRVVLARYARNRRLADACYLWAFAALSASPGARAYYDQRRARGDTHNRALRALANRLVGILHGCLTHNTLYDEDLAWGHRIKSAA

SEQ ID NO: 73296 - protein, 409 aa, unidentified
METIYARVAGLDVHKDSVSACVRWVGGGGRVGQETRRFGTTTRQLLKLRDWLAQSQVTHVAMESTGVYWKPIYNILEGGFEVLLVNARHVKNVPGRKTDVKDSEWLAHLLQCGLLKASFIPPRPQREWRDLTRTRAQLVRQKASVANRIQKVLEDANVKLASVASDILGVSGRAMLEAMVKGQSAPGVLAQMARGRMREKIPQLEEALEGRLSEHHRFLLRSLLDQVAHMEEQIERFEQRIEELNAPFAQAVEAIAQMPGFDTTSAQAVISEIGTDMKAFASAENLSSWCGICPGSHESAGKRQSGRTRKGNVWLRATLTQAAWAATHTKGSYFRAQYRRLVGRRGKKRALVAVAHSQLVVIYHLLTTGRHYEDLGADYFGQRDIEKIARHHIKRLESLGYTVTKEDAA

SEQ ID NO: 73297 - protein, 371 aa, unidentified
MTSILYVGMDVHKESYTLCCYSFEEDELQYKQTIVPDYKMILKYLEQIRKRHTDEIKFICGYEAGCLGYTLYQQLTNHGVKCIILAPTTMGITNTNRIKTDKRDAGNIARCLAFRTYSEVFVPTTEDNEVKEYIRMRDDQKKALKIVKQQILAFVLRQGYRFDGSKSYWTIKHVAWLKSLDLGGVLQESLDEYLITYEYLTDKIERLDKRIEELAEGERYQDKVKKLRCLIGVKTYTALASIVEIGDFNRFAKAEQMASFLGLVPGEDSSGGKQKRGSITKAGNCHVRRLLVESAQSYTRGAIGHKSKDLKHRQNGNAPEVIAYADKANERLRRKFYRMTLKNGTNRNVAATAIARELACFMWGLMTDNIA

SEQ ID NO: 73298 - protein, 360 aa, unidentified
MAKARTLVGLDVHATKIVAAVLDADSGQLQSFTMGGETTKAAAFCAGLSRPVRAAYEAGPTGYGLARELAERGVQCVVAAPSKIPRASGDRVKTDRRDAEHLVRLLLAGKLHPVRVPGIEEEALRDLVRAREGVRVDLMRARHRLSKLLLRHGIRFDEGDAWTQRHRQWLEKIELPWPAAQTTLLDNRGAIDALAHRRDMLEREIISLLPASPWAVQAGRLRCLRGVDTLTAVGLCAEIGDFERFAHAEQLMSYVGLVPSENTTGQQRRLGAITKTGSVHARRLLVEAAWHYRPRPLVGKALTERQNGQPPEAVAIAWSAQQRLHRTWRRLEARAKRRTIIAVAAARELSGFCWAITQIE

SEQ ID NO: 73299 - protein, 345 aa, unidentified
MLHVGMDLSRHRLDVRVLEEEGATVAELAVAPTGVELRRLAARFVAEGPVRAVIESMNGARFVHDTLELAGWAVEIADAQKVKGLAPLACKTDRIDAWVLAELSRRDLVPAIWLPDPTVRAHRERARFRLHLVHHRVGLKNRIHASLIAFGHACPTTDLFGQSGRQRLAELEFPEPWASDIAACLELIDHLDIQIAGIEADLRREGADHPYVPLLLTVPGISWILAYTIAAEIGDITRFESPKKLCGYSGLCPRVYQSGETDRRGRLTKQGPKHLRWALVEAAVHAARHPVYVDHYQRTKVRLGRQRGAKVARVEIARKLTEAIWHMLTKGEPFAPAGPTQTLAA

SEQ ID NO: 73300 - protein, 405 aa, unidentified
MTSPRRVVVGVDTHLDTIHVAAITDTGQLLGDAEFRTNPTGYYVALRWAQSFGEVFIAGVEGTSSYGAGFTQALQDNAIHVVEVNRPDRAARRRQGKSDPLDAYSAARAVLAGHGLAVPKDPHTSALKALLIARRGAVKARSAAIQQIKDLLVTAPADLRERYRRYTTTLRLVQALARCQPNADPDPTTIAVLIACKAMAQRIEFLERQTDELTAEIDALTTALNPALRAAYGVGPDTAAQLLITAGTNSHRLRSEAAFAMLSGAAPIPASSGKTTRHRLSRGGDRAANNALHRIALVRMSHDPGTRDYVARQLVAGRTKKDILRLLKRAIAREVFKHLTTPCPIDDYTDLRPTRQAKNITLTNAAEHFGVWPNDISRLERGLKRDDTLAANYRHWLNTQLIDAA

SEQ ID NO: 73301 - protein, 359 aa, unidentified
MQTQRKELNFEGQSIFVGIDVHLSSWSVSVFTEKLHHKTFNQPPKAEVLSNYLKCNFPNASYLSAYEAGFCGLWVHYKLKELGIQNIVVNPADIPTTQKEKMRKSDAIDSNKLGRSLRNKELKEIYIPRPETLEDRSLVRVRSTIVKDMVRLKQRIKSMLYFYGIEYPDEFQKSNTHWSKKFLNWLKEIQLQYSTGTAALSLLISEAELQRNLLLEATKKLRILSKTEPYIKNMELITSVPGIGVVTGMLYLTEIEDISRFESTDKLAALVGIVPNCHSSGTTDKNGKITPRGHSFMRNALIESSWVAARIDPALSLAYYDYCKRMEPNKAIIRIGRKLLNRIYSVLKYQKIYEKGIIK

SEQ ID NO: 73302 - protein, 392 aa, unidentified
MVVSVGIDVSKDKHDCFIVSSEGEVMADAFIIPNTMDGFHYLLQRIRHCTAPQDKIKVGLEATGHYSYNLLGFLLDNGLTTYVLNPLRTNLYRKSLSLRKTKTDRVDARTIASMLLSDAGLKPYTDTAYHNEELKSLTRYRFDKVKERAKLKSSIARLVCILFPELEKLVPSLHIASVYALLEEFPGAKQVANTHLTRLKALLETASNGHYKRDMALEIRNAAKNSIASQMPAKSLELQHTIRLIRELDREIDEIEEQIQSIMDELHSPITTIPGLGFRMAAMILAEVGDFTRFDSPDKLLAYAGMSPSTYQSGQLKNCYPHMEKRGSRYLRYALYNATKYVCHWDPAFADYLAKKRAEGKHYNIAISHAAKKLVRLIFAMEKSRQPYCSAA

SEQ ID NO: 73303 - protein, 350 aa, unidentified
MSITKQSVGIDISKDTFTACGCSHRSDGNLIFSEVKSFKNEPIGFNQLLRWVKGFSATGTDVVFLMEATGVYYESLAHHLFKIKKKVVVVLPNTSKHYFASLNVKSKTDELDARVLSRFGVERIHRYWIAPSPVMLQLRNLTRYYLQLQEQKTALGNIKHSKESAHEVQKFIMQSNKRLIKQLDVQLISCKAEIERLIKSDVELSERITKLMTIKGVGMMTVATIVAETLGFEHFKSAKQVVSYAGYDVVQRESGTSIKGKTRISKKGNKYIRNALFFPALVATRFNPELKATYMRIISKKTSKMIGQVAIQRKLLVLIYTLWKTDSIYIMGYNEVASTKKAEATLDSYL

SEQ ID NO: 73304 - protein, 391 aa, unidentified
MRRLDPPARSMVAAREYDNAVFVALELSRSNWLIAINLPDSEKVSKYRVAAADTATLLSLLSRLKMQAEQRCGETVRVISIHEAGLDGFWVHRLLQANGIDSHVVDAASIAVERRKRRAKTDRIDVEKLLRTLMGWVRGERRICSMVRPPNPQQEDARRITRERETLIAERIKHVNRIKGLLATQGIFGFEPLRKHRRERMEELRCWDGQPLPPRLKAELLRELQRLELVLSQISAVEAERDLALKQAGTVETISAGNSAGALLVRLKGIGPEIASVLSSEAFFRCFGNRREVAAYAGLTPSPWQSGGIDVEQGISKAGNSRLRQTVIQLAWLWLGHQPGSALSHWYHERVGARRGKIRRIAIVAVARKLLVALWRFVAQGVIPAGAELKV

SEQ ID NO: 73305 - protein, 378 aa, unidentified
MQTTAARRDYSEEKVLFLALELSNSKWKLGSTVGVGSKARERTIAAGDLGGLHEEVSRAKRRFGLESSARVVSCYEAGRDGFWLDRHLRHAGIENIVVDPSSIEVNRRSRRAKTDRLDVGKLLRQLMRWWSGEPKVWGVARVPSVEAEDQRQLHRELEALKRERTRYTNRMTSLLVTQGIRLKVSRSFLARLSAVRLWDNSPVPAGLRSRLEREYVRWTLVQEQIAELEKQRRSALRTARDRGAQTARRLYRLRGIGENYAWLASMEAFAWRRFDNRRQVGGMAGLTPTPYSSGQIQRDQGIGKDGNRRLRAATVEIAWGWLRFQPDSELSKWFQERYGPGSRRSRRVGIVALARKLLIALWRYLETGVVPAGAVLKT

SEQ ID NO: 73306 - protein, 343 aa, unidentified
MKIIRVGVDLAKSVFQVHGVDRSEKVVWRKKLGRAEWLAALLEKIEPGCEIGMEACGGAHHWARQLQMRGYTVKLIAPQFVKPYVKSNKNDANDAEAICEAMSRPNMRFVAVKSVEQQDLQAIHRIRAELCSQRTAKGNQIRGLCAEYGLVAPREMIQLRAAVPCWIDELDNGLTIRFRRLLRGLWLDLLKLELRVKELDQEIEVAAATDPVATRLQQLRGVGPIIATAIVANVGNAKQFSSGRQMAASLGLTPRQNSSGGKERLLGITKRGDAHLRTLLIHGARAVLRTAASKDDRLSRWVAHIAQTRHHNIAAVALANKTARIAWAMMTKGTDYQPGLVAE

SEQ ID NO: 73307 - protein, 408 aa, unidentified
MNENTTSAPAALVAIDWSDQKHDIALLPAGAERAEYLQLAHRPQNLAEWICGLRQRFGGKKVAVAVEQKRGALIHALMGYEFFQLYLVNPATLASLRKAFKQSGAKSDLLDRDLLLELLQKHRDRLTRWEPDDVQTRHLALLVQDRREAVNECTRLGEQLLDTLKNYFPAMIDLAGPDLTTRLACDLILRWPDLTTLQRAKVQTLRRFFYAHNFRHSKMLEKRLDALQAALPLCEDVAIIGAGRLKAIRLARAILALLPAIKQYDRQIGDLFKAHDDAAIFSSLPGAGPALAPRLLVVFGSRRDRWRHSLDVATYSGIAPVIEQSGKRSIVHWRWACPKFVRQSVHEFARCSLRSCTWAKRFYQTQRARGKNHHGALRALAFKWIRILFRCWQDRCPYDPAKYTPANL

SEQ ID NO: 73308 - protein, 415 aa, unidentified
MVEVIVERCAGLDVHRDTVVATVRVPGSGKSRRRRSQETRTFGTTIGQLERLSDWLGECGVTRVGMESTGCYWKTVFYALEDRFDCWLVNAKHLRNVPGRKSDVIDSRWCCELVELGLVRPSFVPPPEIRRLRDLTRLRSTQVQERTRAIERLEKVLQDAGIKLTSVASGVYSVSARAMLEALLAGVTDPAVLAELAKGRMRKKIPQLQEALASRFDIGHHGVLVAGLLAHIDALDQAIGNIEARIGIATAPYAELIELLCTIPGVGVRIAEILIAECGVDMSVFPTVAHLASWAAICPGTNQSGRKRGSGKTRNGDTWLCTALTQAAHAAVHTKDTYLASHYWQLRGRRGDAKAIGAIRHDILTAYYHIVRDRVAYRELGPDWLTRRHSPEHRTRRLVKQLEALGHHVTLQPAA

SEQ ID NO: 73309 - protein, 347 aa, unidentified
MSQNLNSAVAVIGIDIGKNSFHIVGLDYRGAIVLRQKWSRGQIEARLANMPPCLIGMEACVGAHHLSRKLKAFGHDARLMPAKYVRPYSKGQKNDFRDAEAIAEAVQRPTMKFVATKTAEQLDLQALHRVRERLVSQRTGIINQIRAFLLERSVAVRQGLRFLRAELPRILAAPPDVLSPRMVRVIKDLAEDWRRLDERINQLSNPVLARQDTGCERLMSVPGIGPIISSAMVAAIGTGEAFAKGRDFAAWLGLVPKQMSTGDRTILGKISKRGNRYLRVLFVQAAWVVLIKPMSWERHGLKHWIEAARKRLHRNVLAIALANKLARIAWGVLAGGRAFEASKLQAA

SEQ ID NO: 73310 - protein, 320 aa, unidentified
MTIIAFDVSRRELVGVRADKNGIVKEDFVLQNNPEEIAMFVRSAKETHPTLVMGSEATAEYHREIASQACALNIPFRLINPILTKQYTRSTIRKRKTDKTDAAIIAKLIANGEGTLLTERSLDVLKPLNRTANSINVLRKTLSATLAHITMVCPKEAFIHEEIRTSVTMLERVVERIRTHVQKQTDPALKKLLMTIPGIGETIAATLITEIETVKRFKDATKLVAYAGLDPRVRQSGVSLNKNTKLTKRGSPYLRQSLYIAAYIAARHDPELKEYFEKKIKEGKRYKEATVATARKILYRVYAVWKRGTPYEKRNVIAPQ

SEQ ID NO: 73311 - protein, 355 aa, unidentified
MTFVGFDLHKRYITACALNAAGEIIAEIRQLSTALDAVVTWLGGLPGPVIVGLEATLYWEWLATRFAEHHHAVRVAHAFHVKLIWQARAKTDPIDARKLAELLRVDLFPAIWIPDLETRRRRQLLRGRAFLVRERTRLKNRIHGHLMSENLVPPGADLYGKGGRAWLAAAPLSPVLRAQTVRLLTLHDALSVEIQGLDGEVRRAARGNAIVKQLTTMPGVGVFSALFVQAEIGSIDRFHSSHALAAYAGLVPTTRSSGGKTAHGGLGKASNRWLKWILVEIVVTLKLAPGPVGTYYRHLLRAKGKPKAQAAAARKLCCYLYWMLKHGWTYDEWLQQHVHSQRSEVRPVQRMGAMA

SEQ ID NO: 73312 - protein, 366 aa, unidentified
MDSIARAARQIVGGVDTHLELHHAAIVDRHGEILGTRSFATTRAGYRAMLAWMRGHGELMRVGVEQSGSFGAGLTRHLALAGIPVLEVTGPDPAMRRAKGKDDTLDAIAAAKAALSGQRVSVAKDRGGQVEALRVLRVTRTTAVKFRRATLQTLRNTIVAAPDEVRDQLRNLTPKRLLRTCAAWRPDRLAFRDPATATKIACKSLATRLLELDDEIAELNALIEPLVAELAPGLLALEGVGTHNAGELLVAAGDNPDRLTSEAGFAMLCGASPIPASSGKTQRHRLNRGGNRQANSALHMIVVCRIRTDQRTRDYVERRLAEGKSKREIMRCLKRYVARETYRALTQPTPAAPTPDINTSPSQKMT

SEQ ID NO: 73313 - protein, 348 aa, unidentified
MENITRIGMDTSKSIFVLHGVDASDQVALRKKLRRKEVVEFFRKLRPTRIGIEACGASHYWARQLSALGHQVLLIAPQHVKPYVRRNKNDAADAEAICEAMSRPRTWFVPAKTAEQQAGLMLAGTREAFVRRRTQLSNTIRSYAAEFGLVSSRGLDKIEPLLARIAADNDLPTLAKEMFADLGEDYTLLQKRLDIIERKLRLWHRNDEQSRRLAEIPGVGVVGASLLAMKVPDPKAFRSGRDFAAWLGLTPKDHSTAGKQRLGVITRAGDETLRSVLVVGATALLRQVRMGRSHHSRWLADLLRRKPPKLVAVALANKTARIAWKLMVSGESYDRTRVGIAAREAAPA

SEQ ID NO: 73314 - protein, 387 aa, unidentified
MYFVGIDVSKFKHDCAIIDELGNVITPSWSFQNDYEGFSFLRELLDALDGKKKIGLEATGHYGQNLKLFLENNSFSFMEFNPLLINRFVRSKSLRKTKTDSIDALMIAQYLMTVEYKPYPPSFYTLEKLKSLTRFRDSLIRQRSRQLVELTNILDKVFPEFKPFFKGRFSATALYILSHYASPEKISNMNSKSYESLRRLSRGKFSMLDFVELKTLARNTVGSTSDYLLQEMEIIIDIYSQLQSKVEEVEQQINECVLGLDPPILTVPGIGALSAAVILSEFGDLSKFNSPSKLLSFAGLEPGYFQSGTSENTGKMVKHGSSHLRYAIMNCAQTIVNNEPTFAAYYAKKRAEGKDHRVALTHVAKKLLRVIYALQTKEISYNPDLIR

SEQ ID NO: 73315 - protein, 338 aa, unidentified
MKLYAGVDLHSNNSWVGIIDKKEKRIFTKKLPNELPEILKALKPYRRDLAGIVVESTFNWYWLVDGLMDNGYSVHLANPSAIRQYEGLKHSDDERDAFHLAHLLKLGILPEGYIYPKEERPVRDLLRKRLQLVRHRTSHILSFKNLISRNIGIQMSSNEIKGLREEDVEVMLDEKHLVLAGRANIATMCFLKERITEIEKAVLKRAKLRKEYLKLLTVAGIGKILALTIMLETGDITRFPEAGNYVSYCRCVGSRRVSNGKSKGEGNRKNGNKYLSWAYVEAANFAVRSYPYVRSYYQKKAAKTSAIVAIKAVSHKLSRAGYYVIRNQEVFDPRKAFG

SEQ ID NO: 73316 - protein, 315 aa, unidentified
MTQTPWFVGIAVSKAQLDIALRPEGRFAVPNDETGRARVIARLQALPVALIVLEATGGLELPLTGALVAAGLPVVVANPRQVRDFAKATGTLAKTDSLDAQILAHFADVIRPVPRPLPDAQMHALAALLARRRQLVEMLTAETNRLGSASSPIRKRVRAHIAWLERELAHTNTELSEAIRQSPVWRETDDLLQRVPGVGPVLTSTLLANLPELGTLTHKQIAALVGVAPLNRDSGTLRGKRTVWGGRAHVRATLYMAALVAARCNPVICRFYQRLCAAGKAKKVALTACMRKLLTILNAMVKHRTRWGPQEIVCS

SEQ ID NO: 73317 - protein, 405 aa, unidentified
MEAIYERCCGLDIHKASITACVITGGQKEIRTFGTMTDNLLQMTAFLKERGIQMTAMESTGSYWKPVFNIMEVEGIQAILVNAAHIKAVPGRKTDVKDAEWIADCLKHGLLRASFVKPRDQRELCELIRYRGSLIEERAREYNRMGKVLEGANIKLTSVASKMDTVSGMNMIRALVDGIVDPAVLASMAKGRMRSKTDDLKRALNGLVATHQQMILKTMLGHIDQLSISISELDTEIEKRMSQDVELIEALDEITGVGKISAQTILAEIGTDMSRFPTADHLASWACMCPGNNESAGNKKSGQTRKANSTLKKTLVQCGRAAGNSKDTYLSILYHRIAARRGAKRAAVAVGHSILVTCYHMIQNRTHYRDLGADFFQKRNKEALVKQNVKRLQALGFKVILEQIA

SEQ ID NO: 73318 - protein, 425 aa, unidentified
MLKLNYMSTLFVGIDVSSKTNAVYAMDFEENKYISSSFGNNQPGADKLVNMIAECMHKHKNLNTILIVLESTSVYSVHISNFLSTSEVLMPYRPYVFCVNPKAASNYRKSYIGMEKTDPTDAYLIADFGRVGRTKKLEPWRGGQFISLKRLTRHRMHLSECITREKTYMVSNLYLKFSEYALLRDGKHPFANKYGATAEAILTEYTTNEDIVNSSLEDLVSFINSKSKGRIADPEETAKILQAAARNSYRLDKCLYEPLTISIASSFNCISSFERELKAIDKAILQTVQGLNPDEYTVLNSIPGIGKVYSAGILAEMGSIKAFPNANALAKYCGIVWNDNDSGDFVAEDKHMSKAGNRYLRYYIIEATGSVIRHCPEYRAFYEKKYAETRTHQHKRALALTSRKFIRLLFGLLDKGQLYSPEKSR

SEQ ID NO: 73319 - protein, 415 aa, unidentified
MSKDQEFAALMSLDWADKGHRGCIGINDLEEVEDFKLEQKASAIQEWAGQLRLRFKGKKIAVAVEQKRGPLIYALMKYEMFVIFPLNTTAVKNYRKALRASGAKDDPSDARLQLLFLRNHLDQLRRIEPDSTMTRKLRMLVEGRRKMVDASTALSNQITALLKEYYPTALELIGQLKTPLACDLLSKWPCLQAIKSVKAEDLKDFYYKRNCRNKQAVELRVKLVSEALPLIDEKGIAATYSFVLRSLVTQLQVLLKQVKKYDCRIQKTFNHHRDASLYRSLPAAGPALEPRLAVVFGEDRNKFDNAAAIANLMGVSPVTISSGKYRFVAFRMSAPKFARQSLVEFAELSIRQSTWALAYYQKCRNEGKSHNAAVRALAYKWIRIIYRCWKNRLPYDESIYLAALKRKNVPWLQAS

SEQ ID NO: 73320 - protein, 375 aa, unidentified
MAPKRKYCDENSERVIEEVVLGVDTHLDAHVAVALDSLGRRLGELTVPTTKKGYENLVCWAEGFSQVRCAGVEGTSSYGAGLARHLRSAGIEVFEIERPKRRHLRRKGKSDSRDAESAARAVLAGETAGEAKSGDGHVEMIRVLRAARRSAVKARTQAANQLRGIRVTAPEALQLPLRGLSTKKLVAVAARFRPGGDPDTVEEATKFALRSMARRYRALSEEIAQLDAQLHRLVAQAAPELISLPAIGTDHAATLLVLAGDNPERLKNEASFASLCGVSPVEASSGKVVRHRLNRGGNRDANRALHLICVVRMRVDERTRRYVAKRTSEGKSKREIIRCLKRYVAREVYRVLVPSGAFADLPMDEGRVVTVTGLT

SEQ ID NO: 73321 - protein, 446 aa, unidentified
MSSSLPCVKPNAAGIDVGSKSHFVAVPANRDPEPVREFGFFTEDIQKLAQWLKECKIETVALEATGSFWIPLYDALIEQNIEVCLVNARHIKNVSGRKTDVQDCQWIQQLHSCGLLKPSFIPDQLTSKLRHFVRHRDALIRRAATELQLMQKALVEMNLQLQNVVSDIAGDTGMKIIRAICSGEQDPKKLSKYRDPRCKNSEETIEKSLKGHYKEEVVFCLQQALETYDHYQMQITHCNAEIEKRMKEFEDKSGGIPLNGRKREAKKNNIGFDLQGDLWRILGVNLMEIPSMNTQTALAFISEIGTSVEKWATAKHFASWLGLCPNNRVSGGKRLSGKTKAGSSHLRRALRLAAVALERSATALGAFYRRMKARLGAPKAIVAAAHKLAVLIYNLIKHGAKYQEKGPLYFEKEYKERTEKRLKRLAAQLGYDLTPKSQETVQTKMA

SEQ ID NO: 73322 - protein, 471 aa, unidentified
MESGYRRCCGIDVHKKSLSVCILPPVGNATMPLKEEKFGTFTRDLKRLRAWLLNCRVTEIVMESTGQYWRAVWNILEEAFPRQLMLVNPLYVKALKGRKTDRIDARWLAKRLEQGELIGSFIPPREIREWRDLTRLRVRWLQDLNRIKNRIGQLCECGNIKVSSVASDLFGTSGRRMLDSLVEGKRDAGWMADYAQGRLRQKKGQLESALQGTLTGHQRRLLERMLQQMRQLESEVKEITAEIEQRVAGEGELIQRLITIPGIDRITAWTVLAEIGTDMSVFGDAAHLASWAGLCPGNRESGGKRLGGRTRKGNMYVRRALCQSAWAASHTKDCYLSAFFRHIRSRKGEQKANMALAHQLLIIIFHVIEDGTVYSELGASYQDQRDKPKLARRLIERLGKLGFYVTLQPIETPPEPAPSIQEQAPPPQPRKRGRPCNCAERGIPCKHACPKTPLQPPTNTETTEPRADLTQ

SEQ ID NO: 73323 - protein, 354 aa, unidentified
MLSIGCDAHKRYSQFEVQDQHGHVHGQTRVNHQRGAIQEYLSGFPEGTPVALESVGNWYWIADEIEAAGCLPLLTHAAKAKVMMGHVNKTDKLDAAGLATLLRNGTLPAVWLPPGSVRDERELPRTRMALSGMRTAIKNRIHATLAKYALSPTGVTDLFSKKGCIWLEGALKALPSNTSKCVKQELELLDSFNSQIQALESRMRQQIQTTANMQLLKTLPGVGDILATVIEREIGSIDRFQLAEQLAGYSGTTPKVHASGGKIHYGPMRQEANHYLKWAFIEAGNVIALNHAKTSWQRKHVSQLYERIRKRKGHSVAIGAVARHLSEAAFWILKKQEPYQEPKSFQPRQGQARR

SEQ ID NO: 73324 - protein, 320 aa, unidentified
MSRVNMGVDVSKDFLDVAVREGQQTPRRFANDPVGIDQLVAWVREINPVRVIFESTGAYQKKAVMALLAEGLPAVVVNARQVRDFAKATGKLAKTDAIDAAVLAHFGEVVDTVVRPLPTPEIQEFQQIYDRRSQLVRILAAEKNHRHVCGTPQVMANINHHISYLKEQIHDLEESMNLFVESTEAFRAKDDVLQSIPGIGPQVSRTLLAHLPELGHGSRQTISALVGVAPYNKDSGKESHLRHIQGGRKKVRIGLYQAAIVAIRYCPVMKAFYIGLKARGKPSKVALVAVARKLLVLANALIRTMKPFEDRTTSVCPNTA

SEQ ID NO: 73325 - protein, 365 aa, unidentified
MVKNSTAFVGLDLGDKRSNVFILDPEGELIEETCIPTTEPAFRRKFASLPPCRVAMEAGTHSCWASHLLEQLGHEVLVANPRTLRLIYGSPRKADEADAEHLARLARLDPQLLSPIRHRGPEAQAHLTVIRSRDSLVRARTLLINHVRGSVKSSGARLLSCSADSFHHRVSPSIPAELQPALLPIIETIASLTAQIHAYNRQIAQLCQEHYPETRHLRQVSGVGPITALAYILTLDDPDRFRKSREVAPALGLVPKRDQSGSRDPQLRTLAPALQVQVSLRPATATCVACSSAAPNTFSGPSDPIVTCAAGVSSSPNAEARTPRGERLWRWPASWPSSFIASGSAARSTTPSSTLARIKHRRQPR

SEQ ID NO: 73326 - protein, 330 aa, unidentified
MKKWKFTLGVDVSKHTLDISCAELQQHIRINNGSEGFSHFLKWCRKLKIDLADCFLVLEYTGGYEYKLLQFCEAKAIVYARIPGLAIKNSMGITRGKNDKVDALRIAQYGEEKHKSLRASKPLNAAIIRLKELLSYRKRLIRENAGYKTSVAERVHIYGLNKKDVIVKSLQQKQEVNIKIIANVEAEMMRIVARDQLMNTNFSLITSIKGIGKVNALMTIAYTENFTSFINPRSYAVYVGVIPFDHSSGISIRGRKRVSHIANKELKQELNQAARSAIAWDKELNAYAVNKMKTKCYKIVLNNVKFKLILRMFAVVKKGELYVDYYKNVA

SEQ ID NO: 73327 - protein, 330 aa, unidentified
MSGFVGIDVAAKTFDMVIRIDGKANKVEQFSQTPDGHAAVVRKLQKLAPELVVMEATGIYYLDLAVALAKANLPVSVINPKSFHHFAALKLNGNKTDAVDAALLAEFAQCMSPRRWNVPQDELLGLRDIGRQLNRLTGSRTQAKNRLHALMSKSMTLPMLIEDEQDGIEQLERRIKRLTQAALTLIAGNDTLAAHFSRITAAKGIGDTSAIAILAELCVLPSTMKAPQISRYAGLDVRQTESGTSVKKPGRLSKAGNAYLRAALYMPAMSAVRHDVRAKAFYEALTGRGKKKIQAQCAVMRKYLTGIWACMQTQTAFDSTLLFSEQHIKN

SEQ ID NO: 73328 - protein, 356 aa, unidentified
MGEWEPPPGRPRLTPNSCQTLEVASARLGRSSDRVRNRSSRVSTTTECFVGIDVSKTTLDAHLRPEGTVRRFDNTPEGIVALSEWVASHAPTLVVLEATGGYENAVVAAVSLRGLPVSLVNPKRIRDFARAIGRLAKTDTLDAGVLAEFAERVRPPVRPLPDADTQKLQALLARRGQLIGMRTMESNRLAGVTERPIRRSIETILRALGKEIDRADRDLDAAIRSCPVWQMKDELLQSIPGIGPGVSRTLLAEMPELGTLSREQAAALAGVAPVNRDSGSWSGRRSITGGRSVVRSMLYLGSLGARQGNAVLGVFAERLQAAGKAPKVIRIAVARKLLIIANAVLRDKRPWQPKMS

SEQ ID NO: 73329 - protein, 315 aa, unidentified
MDERAGRIVGIDISKDRLDVHVLPEGEHFTLGRDEAGLKALTKRLAKQALQVVAMEATGGLEAPVAAELHAAGLPVRVVNPRQVRDVARGLGILAKTDAIDAAMIARFAEAAKLTGAPVPDAQAQHLGALVARRRQLIGMRTAERTRLQQTTDKRIRRSIERLLRSIEAELEGVDRDTDGAIKGSPLWCALAELLDEQPGLGNTTARVLVAELPELGRVSGKKITSLVGLAPYPRDSGVLRGKRAIWGGRASVRTALYMATLSAVRCDAVLKEFHQRRIARGKLPKVALVACMRKLLVHLNALVAKYYAKIEQTA

SEQ ID NO: 73330 - protein, 405 aa, unidentified
MPYFCGLDWGSVGHAVCVVDETGAVLLRFEVAHDAAGLAELRKKLDRLAPAGDIPIAIERPSGLIVDALVEAGHTVVPIHPNVVKACRPRYRAAGGKSDPGDAFMLADILRTDGHRFRPLAPCSDEIKALRALVRGRDELVAERIALANRLRSLLDSFWPGAAAIFADVDSPIALAFLQRYPTPESATRLGEKRVKAFLASNAYCGRRSPAELLARLRTAPTGLAAEAEAEAKGEMVGALAAVLERLVGEIAKLTSRIQNTVAELSDGQIVMSFPRTGRICAAQILAELGDVRQRFPSADHLAAEAGVCPVTHASGKSRGVVFRWACNHRLRRAVTCFADNSRHASPWAADIYKRARSRGCDHPHAIRILARAWIRVLWRAWNDGTLYDQKLHNAAASHNQALAA

SEQ ID NO: 73331 - protein, 347 aa, unidentified
MPTLADTVDVVIGVDPHKHNHTAAVVAADTGKHHASFTAASDPDGFAELVAFADEHPGTRCWVIEGYGSWGRGLATWLLASGEGVREIDSPIRPARRMGKKTDDLDAVRVAREAIGREYLATPRDTGDRDALAALLVARRSAVEMTGDTERQLVSLAAICPEPLAVRLRGKTTAQIVDTCIRWRPAGNTSITGVAEAMRSLARRIRALRAEAEGHQQRIKDLVKQWRPDLLELVGVGPIVAATVLVVWSHPGRIRSEAAFAMLAGVAPIPASSGMTNRHRLNRRGDRHLNCAIHIVALQRQRRDTATKAYFERRRSEGKTDREIRRCLKRYIARELYRVLESGLDKQ

SEQ ID NO: 73332 - protein, 411 aa, unidentified
MHNRQNYLYVGVDLHKEHHTAVIINCWQEKLGEIQFDNKPSAFSKFLLEVETYVSAGITVVFGLEDVGGYGRALAKYLVDHEQVVKEVNPALSFLERKSHVTTQKSDSWDAECVARILINKLNQLPDAKPNDLFWSIQQLVSTRNALVKAQSALKNQLHIQLNHHYPNYKKFFSELDGKTALAFWQQYPSPFCLEGANIKQLTAFLLDVSNNTCSVKKASDILKLVKEDGQTMKEYQETRDFLVRSIVRDIEFKKKEMKYIERELKRLVNLLDYQLETMPGIELVTASALIAEIGDVRRFPNANKLARFAGIAPVYFGSGGKGKTHKSKQGNRALHALFYNLAVQQVQVAKGSKLPRNPVFHPYYQKKLKEGKTKGQALVCIMRRLVNIVYGMMKYKTAYELPVVEEKEVV

SEQ ID NO: 73333 - protein, 412 aa, unidentified
MEDIAAYIGVDWGDKRHSVHMQTAGGVIEHCELEQKPDVVHDWVAQVKQRFQGAKVAIAIEQRKGAVIHALMMYDFLVLYPINPKALARYREAFRTSGAKDDPGDSQLLLDLLSKHRDQLRAWVPDTVEARTLQLLCEQRRKLVNHRVALTNRITSLLKQYFPQALDWVGDIASIQSCDFLMTWPNLRAVQRVRQDSLRKFYHRHNCRTAAVIDERMAQIAKAVPLTSDPAIIEPLSLSVQTYATQLRSLIQAIQVFDTRIAHVFAQHPDHDLFDSFPGAGAVCAPRLSAAFGTDRSRWQSATDLQSHSGIAPVTERSGKALWVHHRLACPKFVKQTFHEFADQSIRFSPWARAYYDQQRGRGNDHHAALRALAYKWIRILFRCWQDREPYDEATYTEALRRHGSSLVENFA

SEQ ID NO: 73334 - protein, 355 aa, unidentified
MKYYTSTTQYNCGIDLHARQMYVCVMDRQGKKLVHTNVKNNDFGFFLKLVEPYKHDLTVCCECMFGWYWLADACQAAGLTFVLAHALYVKAIHGGKNKNDRIDSEKLTHLLRSNLIPPSYVYPSEKRPLRALLRQRLFYVWRRAELLARIYSHQLAHNRTPAKQTRRVRDSWEEQLLAAEDNPLRQLALKNDLAMIKHFDHQISQLEEELQRQTKKVAAREYALLLTVPGIGESLGLTILHEVGDIERFPTVKDFLSYCRLVKGTVASAGKIKGLRGAKLGNPYLRWAFGEAAVIAKRDHFLIRPLAQRLEQQMGGNKFKANTVVAIKMARAVYFMLKNKTVFDPERLVAALAKK

SEQ ID NO: 73335 - protein, 383 aa, unidentified
MKSVCGLDVHKDSVYLCILSEFGELIEKVFGVLTYQLEEMRDLMLHHHVVEVSMESTSVYWIPIWRVLSPHFKLNLANPYFIKQLPGRKSDVKDAQWIAECTMKELIRGSFVPPETIQQLRQYDRRIFDLNEEIVRKLSKLDAVLQRCNIRLSNYVSNVDSKSYKAVVRAISQGITAPEELVKLIHGRIIKHHGMDVITASLKGVVSLAEIDMISQLRDELDMAEAHKEKCQARMLEICEREFPEELKRLQTIPGIKERAATSLIAEIGTDMNKFETANHLASWSGLKPRNDESNKKIKSRSITHGNVYLRKTIIECAWAASRTKDCFFSRFSYHQTQVRKKNKMKVLVAVARKMLIAVWHVLHDNTIYIDFTTDRKTSRTKG

SEQ ID NO: 73336 - protein, 360 aa, unidentified
MANATRFVGLDVHARESACALFDQASGEVQTRRISGRPAATLRWLGQLEQPFHAVYEAGPTGYGLARRARARGLRLDVCAPGHVRRHPTDRIKTDKRDALRLARLLAAGALHLVRVPEPEEEQLRDLVRCREDVRVDLMRTRHRLSKFCLRRELHYPGARNWTLAHRDWLRSLRLEDRACELCFEDYLHAHDVLLSRRDRLEAELGQLVADSPWAGLVDRLRCLRGIGTLSAVGLCAEVGDFRRFGHPKLLASYLGLVPSEDASGEQRRLGQITKAGSKHARRLLVEAAWHYRRPPRVSSELRRRQAGQDPATIDIAWRAQRRLYRRWQRLETERGKRGAIVAIAVARELSGFVWEIATS

SEQ ID NO: 73337 - protein, 334 aa, unidentified
MNSVAHTRQVTVTRTICGVDISSQSLDARIGREGAFAQFPNTTEGIAALRAFCQAHQAELVAMEATGGYEQLAFQQLSEQGLPVAILNPRAVRQFAQSMGSLEKTDRIDAGMIAWYAEVKKSPPACVAPESQQHLRALVTRLRQLTDIRTAQLNQQRLVTDRAVQASFKKLLAVLARQIRELEQRIAALLERDPLWRELDQAFRTIKGVADRTVARIMAEMPEIGTLSNKTVSKLAGVAPLANDSGKHQGKRAVRGGRASVREILFIVASVVGRYEPDFIAFQQRLRAAGKPPKVVRIALAHKLLIRLNAKAREVRHRRATLQPDRIALPVESR

SEQ ID NO: 73338 - protein, 359 aa, unidentified
MQTQSNKLDFSGQNIFVGFDVHLKDWKVTIMSETLVFKTFSQPPEPKALHSYLVDNFPGGNYYSAYEAGFCGYWIHNQLISLGIKSIVVNPADIPTTNKEKVQKEDKRDSRKIARSLKAGELIAIYVPSEKTLEDRAFLRTRKMLTKDLSRYKSRIKSFLYFHGIEFPPAFKNPQSHWSKQFIIWLESIPMVHNTGKQSLFALINESKHLRESLLGVTKQVRLLSRSEAYQEQVKLLQSVPGIGLITAMTLLTELENIERFNNIDQLCSLIGLVPSTNSSGEKEQIGDITPRGHKVLRSAIIESAWVAARIDPALLICYHNYCKRMEPNQAIIRIAKKLISRIRYVIKNKQPYVCSVVK

SEQ ID NO: 73339 - protein, 361 aa, unidentified
MTTIAEDDRRVIAGVDTHKDFHVVVVLDEQGRKLDTATFPATPRGYRELTRWVTDFGEVLAIGVEGTASWGAGLCRHLRERGLNVIEVNQPDRHRRRRKGKSDRLDAEWAARAVLAGDATARPKAGDGPVEALRQIRVARTGAMKARTAAANQLHSVCDTAPDAIRSRLRGLTTRRQVTIASRYRPGDPLTPSGAAKRALVTIARRWCGLDAEIRELDRAIKTILDTIAAPLLARQGLGYETVGALLCTAGDNPDRLGSEASLAALCGTSPVPIATGKSNRKRLNRAGDRNANSALWTVVMVRLRHRHPPTITYLERRIAEGHSKRDAIRCLKRFIVREIFADIQSITTAHPARQPLEIAA

SEQ ID NO: 73340 - protein, 312 aa, unidentified
MDECIFVGIDVAKDQIDVCLQPANIYRTFPNEKKGFDELQKLLAHQRITLAVLESTGGLEIPVAVSLGCAGIPIAIVNPRQVRDFAKASGRLAKTDRLDAAILAQFGAAIRPAAQPLRGDEHRALAATMTRRVQIIDMIVSEKTRLSSVPNSEMAKDIKSHIAWLEKRLRKIDEDLGKRVKQTALWRERDELFQSVPGVGTVVSHTLLAHLPELGTLDRRKIAALVGVAPLNWDSGRMRGRRVIWGGRAAVRKALYMAVVASMKWNPVIAAFYKRLRAVGKKPKVAIVACMRKLLTILNSIARSGKAWRSCA

SEQ ID NO: 73341 - protein, 371 aa, unidentified
MTSIRYVGLDVHAETIAVAVAEPGRTGEVRSVGTIPNRLEAIRKVVKKLGGPGKLRVCYEAGPCGYALYWQLTELGVSCEVVAPTLIPRKPGDRVKTDRRDAEKLARSYRSGDLTAVWVPDRAHEALRDLVRARAAAKRDRRRAVQRLSKFLLRQGRRPATKMKQGTAAYLAWATRCEFEYEAHREVLTDYVHEVEHATARGIRLDQAIDDAIAQAPAAMRDVIAALQALRGVAKLTAVTLTCEVGQLSRFEHPSQLMAYAGIVPSEHTSGACRRQGGITKTGNRHLRTAVVESGWAYRHRPAIGVTLKKRQQGLDREVVAIAWKAQQRLTRRYRALLARGKPSSKAVTAIARELLGFIWAIGVAVERKAA

SEQ ID NO: 73342 - protein, 390 aa, unidentified
MSKRKDRVCGADVHKDLIVATVASDDDGPPVQSSFGTTKSELERFRNWLLANKCEQVAFEATGVYWIPVYDALAKSIDVIVANPLQIKSLPNDKSDSKDSNRIAGYCLNGQIKRSRVFTEADRDLRMLTRARSGYVKTRTQLRNRVHKYLSSSGIKLSSCMDDIFCKSGRHIMNGLVEGKSTDEILDGIPSGKIRKKRDLIKATICEGLNGTNRMLVRDGLDLLDSLEAKIEATSHEILNKIQQRSKDLAIVMSIPGIGFVSGAVILAEIGDYHDFETPEKLAKWCGLNPGENESAGKKKKVGVTKRGSKYIRTVLVQAAQTIANMGKSRLSRFFQRLNAKKERNVAIIAVARKLICLIHHLLINQELYQEDDGGKKKSQSAKSSVTIPN

SEQ ID NO: 73343 - protein, 338 aa, unidentified
MKLYGGIDLHSNNSVFNLIDEDSNVILKKRVTNSLEVILLLLEPYRKALVGLVVESTYNWYWLVDGLMEAGFKVHLANTAAIQQYSGLKHGDDDSDAHWLATMLRLDILPEGYIYPKEQRMIRDLLRKRLQLVQQKTQNLLSIQGLYDRHLNKRLNSNKLKQLTPEQLSVDFPDLNVRMAINGNLAIQQCLTQQISSIEKSLKKQLKLKPEFVNLTSIDGIGLILGLTIMLETGEISRFQNVGNYASYCRCVNGARYSNGKKKSNTNTKNGNKYLAWAFIEAANFAIRYNDTIKGCYQRKLAKTHAVVAKKTVAHKLARACFYVLRDQVEFDVNKAFG

SEQ ID NO: 73344 - protein, 365 aa, unidentified
MSSINSEVVAGIDVHKAMLAVVIARPGQNATEYVSRKFGAGRWQLKELIDWLLELGVGRVAMESTAQYWKPVWYALEPFFQLVLAPPRSTAAPRGRKMDFADAKRIVRRLLADDLTISFVPEAEQRRWRLLTRARTAAMQQITRLRNQIEGLLEEGQIKISGLLSDLLGLSGWRMSQALAKGESNPEVLAKLAHEHVRASQEQLLEALDGRMESAHRLLLKQSLDQIDQLREQAEELDQEIARLFTPHQAAIKRLCAVPGISLTAAFQIVAEIGAQARTFAAPGKLASWAGLCPGREESAGVSVSNRCASGNRTLKRVLTQCAWAAVRNNKSQFYRLFQRWRAGLGPRKAIIAVAHRMFGRPALS

SEQ ID NO: 73345 - protein, 337 aa, unidentified
MDIVPVCVGLDYHQAAVQVCVVDEAGSVLVNRSCRNDWLAIQSLAEAHGQVKGVAIEACTGAADLAEELALHAGWSVDLAHPGYVRRMKQSPDKTDWSDARVLADLERVGYLPRVWLAPLEVRELRRVVRYRQQLVNERRNIKLRVSALLRDQRIDGPRARRWTQAWTAWLRETTAVSPQSRWILDRHLKHLAAVIGEIEEVEAHLAEMTADDVMVNHLLKYKGIGPVTAWTIRAEIGQFDRFRSGKQVSRFCGLSPCNASSGQRQADAGLIKAGNRQLRATLMEAAHRLMRQEPRWMALAQSLERRGKPRCLVVAAVGNRWVRWLYHQLQPAKLAA

SEQ ID NO: 73346 - protein, 317 aa, unidentified
MRKHNMICAGIDTSKRKLDVALDERSERLQVDNTPDGHRALSAWLRRHRAKRVGIEASGGYEQAIVSQLRRDRFLVIVFQPAQVRAYAKFHLQRAKNDKIDASLIAACAREVEKIHSPPDPRLAPFAEHLTLIEQITEDIARFKTRRASSRDPHSASHWDAEIARLNGVLRGELKRLVAAIRAHRDLAERLDLIVSVDGVGLRTAVAILVRMPEIGHVTREQAAALAGLAPYDDDSGDEVGVRHIEGGRERLRKSLYVAALPAAFRWNRQLTTIYKRLITAGKPHKLALIACARKLLIFVNTVVARATPWTTAPAAI

SEQ ID NO: 73347 - protein, 427 aa, unidentified
MKNSTRAKKLHQVSEHHLIIGVDIGSEKNYARAMNWRGEEYTKKAFFFPNNEKGFLLLIKWIEEIQARSGLTEVIIGCEPTGVYWLCFKQYLTKKGFKIVTVNTLHVHRSKELDDNSPSKDDKKDPRVIADLVREGRFFEPYDPQGDYAEIRSLFNVRESVVKNMARARNRMQAWLRRNFPEYLNCYSKYDSKGGLAVLEIASLPRDVYELGVDGILLLWKSKKMRGTGGRKKAEKLVEAAAANMWLDYCAAEKVAFLYILEDFRRNSERLEELDRKLEEQVRRLPNVDKLLSIRGVGMQTVVGFIAEVGDVNRFSDPKQLVKLAGLNAINNESCKKVGEHRISKRGRSALRRVMYEAAGSLIAWNSAFKALQVKYTTRTTNPLKRRQARVVVACKALRIFHAILRKGVDFDPSKVIHDPAAGMMPA

SEQ ID NO: 73348 - protein, 345 aa, unidentified
MELHTIGIDLGKTVFHLVGLDLHGEVVVRKKFSRIQLLRFTANVHVGLIGMEACGGSHFLGRALREQRHEVRLIPAQYVKPYVKTNKSDYIDAEAIAEAVARPTMRFVPVKTDDQLDMQSLHRVRERWVMRRTAVINQIRGLLLERGITLRKGRHHVHAALPLILEDADANLSGAVRLLLTQLKLDLDQLSVRIDEADAVIQKTAHENEACRRLVAIPGIGPVTATALIAAIGNGGAFHKGREFAAWMGVVPREHSTGGQQKLLGISKRGNSYLRRLFVQGARAVLLQRTKQSSGLSAWLAQLTSRTHRNVAAVALANKLARIAWAVLAKNEQYRPSVVPDVAAA

SEQ ID NO: 73349 - protein, 337 aa, unidentified
MRYMGLDVHKNNIAACVISAGGKVVKSLEVRADGRGLQSLHDCMGTAEYCVMMESSTYSYRTYRFFESLGVGAYVVHARSLKVITESDKKTDKKDAEAIGRYLRLWKNGDIELSMSFIPTPEQCGLKDICRYKEELSSKLGDEVRRIRSHMARNLEDLPHQYDNLSAKRSREYVRNTWPDDLTLTERLSHYAALLKESERVKKEILSMLVGDPDVELLITIPGIARQTAVQIMSMIIDIKRFEGPEKLCSYFGMVPRVRDSGEKEHHGRMTKTGDEMMRLIMERVTLVHILHCDSSLKEFYLRKEKEMGKKKALISASRKMLAMIWSVLTNGHPFRA

SEQ ID NO: 73350 - protein, 392 aa, unidentified
MYIVGIDMGKNHHEASIVSPKGKQIGRSLRFATTHKGADSLMSFIFKNIGNSPCVFGMEATGHYWYPIYSFLKAKGYTIYVINPIQSDSLRKMYIRQTKNDSIDSFLIAEVIRFGQFGTTSMADENILAMRQLCRYRDSVISSRTEIKLRIGTIMEQIFPEYEKQFSSLWVSTSMGILEKYLTPENIENAPIDELFEIIKDKSHNKLTMKKAISIREAAADTFGIKIAQDAFSFQLKQLIDRMNFLDKQIEALDCQILEYYEKFDCYLHTIPGIGMIAAATILAEIGDINRFKSSSALVAFAGIDPTVRQSGEFSSTHNHMSKRGSPYLRHAIFLVATTCSFHNSPLNAYYKKKREQGKHHLTATGAVARKLTTVIYAVLRDGKPYEPKSFC

SEQ ID NO: 73351 - protein, 331 aa, unidentified
MVKKQIMTDKLSCCGIDVSHLTLDVTYQNNLGELFYLQVGNNNAGFKKLIEHTGQNCHFVMEATGVYYIRLAFFLDSLGCKLSVVNAMSIKRYIQMHLERNKTDKKDSRWICHYAIDQRPPFWQMPDSAYFECKQIYNTIREYAEQVKRFNNQLHSLKLLPFPSKETLKSIEKMKSYLEKEIDHLEVKLQVLLKKWQPEQYKSINSIKGLGKRATALLIIFTQGFKHTTNHRQLISFAGLSPTEYSSGTSIKGSNRIYKKGGKPIRDVLYMCAMNAKQTNEACKQLFDRLKANGKTGKQALIAVMNKLLKQVFAVVKNNSLYQPNYCSTLH

SEQ ID NO: 73352 - protein, 358 aa, unidentified
MYKFMKKFFIGVDVSKDTVDVSFFDDDRMKSPEYLAQYSNSPKGFREMVKDLRMCCHGISSGQWLFCCETTGRYDHPLCHWLVDHGMVVWRESALQIKWSSGIQRGKNDKVDSLRIAEYAWRHQDKMQKFVKPSESLSNLKAAFTHRRRLVEKRTATRCQLKSMSSEKGLSASVARMIVRDLSREIERLSASIATMDESIQEIIRSDSELDRNYRHIISVKGVGPITAVALIVCSGNFKAITSAKKMACYCGVASFRSQSGTSINRKASVSNLSNRQIKSLLSMAARSASRSNPVFAEYFNRTLSRGKPVALVYNNLRNKIITVIYKLIERDCDFDVDYKRMHSTGQRANEPAIRETV

SEQ ID NO: 73353 - protein, 388 aa, unidentified
MDSRAERVSHMGMDIHKHFSRVTACDSSGKVVFRQRLEHADREALRAEFRRWPAATPVILEGTFGWGWMTDELLECGLAPHLTSGSKTKGWRQSQGKAKNNRLDADLLCELWLEPKRWWEVWLAPPPVRQQREWLRYRMGLVQTQSALKNRVQAVLHRHGILHPYTDLFGKKGREFLQQLMVPADPRVPESAKAVLQGTLQLLEDLRRPLAEVTRHLRRQVRPDSHAALWKTLPGIGWILAYTIQAEIGTLERFQDSRHLAAYSLLAPRDDDSGEEDSKKIPTNRHVGVIGRRTLKAAFLQASYSAVNASPRLKDLFNRITDDGQRNRMRGYMGVAHRLCHVGFSCVKNNRPYKETPPGRPGSESAKTCQMSHSGAGQPVVAMAAVSS

SEQ ID NO: 73354 - protein, 381 aa, unidentified
MTTTMTRSEESTPATGSLLMAFELSERTWKLGFSVGRGQRPRLRQIPAGALERLTEEIARAKSRWACGAARVLSCYEAGREGFWLHRWLVAQGITNVVVDSSSIEVNRRARRAKTDGLDLSGLLTLLERHARGEQRVWHVVRVPSVAEEDARHLHRDRETLQQERTRLINRLHGLLTTQGLRVPLHADFLERLARAELWDGTAVPVGLAQRLRRVWNQLAFLNAQLAEIDDERATLAAASTTGSGRWAAQLQQLQGIGAIGAWCLSTEIFGWRQIRNGRELGALVGMVPAPYQSGETSHDQGITRAGNRHVRRMMVQLAWSWLRYQPTSALSCWYRARFGQGRRLRRIGIVALARKLLIALWRYGQHGIVPAGVQLKTRVV

SEQ ID NO: 73355 - protein, 343 aa, unidentified
MEEVSIIGVDLAKNVFQLHGAAADGAVVFRKKLSRLQFARFMTDHPACDVAMEACPSAHHWARELTAHGHRVRLIAPHYVKPFIKRQKNDAADAEAIVEAAMRPTMRFVEPKTEAQQARAVAFRAREQIVKQRTEAINALRAHLYEFGHVAPEGVGYIPRLAKVVDDPGSGLPDLARDICRMVLEQIELLTSRLTAVSAKLAAASKAAAIPRQLQTMPGVGPITALAVETFAPPMDQFRRGRDFAAWLGLVPRQHSSGGKQRLGKTSKMGQRDIRRLLVTGAMAVVRWALRRGAPQNPWLERMLERKPPMVAAFALANKMARRIWAMLTRGEDYRDPVIASAA

SEQ ID NO: 73356 - protein, 421 aa, unidentified
MVLGGTLPSSIDSKGGFDLARYHVGVDVGKVRHHVCVRDLSNDTYCRAFSVSNDQEGLAQLVASLDTLSEDHDDFLIGVESCPYGLNVSYFLMAAGFNLVEVNTFRAGQFRKAQGKKAKTDRIDARCVAAILSLGDHKPLCIPEPISDNLRELTRFRSDLVDEKSMATIHLREALSILFPEFEKVFRQIDSAASLALLMTFPGPEHVIAAGEERVGEVLLAASPHRMGKGMAKRIMEAALRTVGVTQKQPALGVKISILAKRIAELQSTIRGLDGQITALYDALPSKPKGFPVGRATSLATIMSEIGDIRRFPTLKKFLSHLGWCPQTFQTGSYRMEHPRMSHAGNKYVRRLIWMLSVCAVQRVPRYREYFQHRVSEGKAKMHILVAVGRKLLSVLYSMLKTGAAYDPDWGENRRLAPARP

SEQ ID NO: 73357 - protein, 340 aa, unidentified
MINNFLGIDVSKERFDVSLSFISKKGKRETRKRKFKNDDTGFQGLLNFLQKHNVEEVKACMESTGCYSEALAEFLHNAGYFVSVVNPACIRFYAKSKLTRQKNDQTDAEIIADYCQRQEPSRWTPPSPEKKKLKHLYRCSNALKDELTLANNHLEKKERLPKEVANAWEDLAMNIEQKIETIKNSIRELLKQHKELLEDFQLLLTIPGIGEETAIAILAEIPGIKAFINARQLAAYAGTIPQNITSGSSVHAKPRLSKTGSRTLRKAMYFPAIAAKKHNPIIMASCERLKEKGKHAMAIVGAAMRKLLHIVFGVLSSKKAFDPDHIKNYRAKRLTEGLVL

SEQ ID NO: 73358 - protein, 347 aa, unidentified
MNFYKLPHKYYCGVDLHSRTMYLCIVGRDGGVLLHRDLPCDAARFLLAIAPFREDLVVAVECVYSWYWLADLCAREGISFVLGHALYMKAIHGAKAKSDRIDSEKIAVLLRGGLMPVAYAYPADMRATRDLMRRRLLFVRQRGSLLAHIQITHHQYNVDPPGKRITYRSNREGLGEGFADPSVRHTIAADLALADHYEVIIGELELAVLRQARVHDPSAFVLLNSVPGIGKVLALTILYEIHDISRFPSVRDFASYSRLVKCEHSSAGKRLGSGGNKIGNAHLKWAFSEAAVLFIAKSEQGRTVLKRLERKYGKPKALSVLAHKLGRAVYYMLARKQAFDPQRFLAA

SEQ ID NO: 73359 - protein, 467 aa, unidentified
MKHHQRRERTGKKARVSSSLLERIQPDAAGIDCGQNSHFVAVPSDRAPQPVREFRTFTAELHRLADWLTQCGVKTVAMESTGVYWIPLYEILEQRGFEVLLVNARDVHNVRGRKSDVKDCEWLRELHSVGLLRASFRPAAAIVPLRSYLRQRETLVQEAATRIQRMQKALTEMNLKLHTVLTDVTGQTGLKIVRSILSGERDPERLAAHRDHRCHASHAEIVAALTGNYRAEHLFALRQNFAAYEFLLQQITECDAAIEQQLSQLAAQQPPPATALPAPRRKTSSKHQPHFDIRSPLQRLTGGADLSQIDSIGPQAALHIVAEVGTDMRRWPTEKHFTSWLALAPNNKVSGGRLLSSHTPPSANRAAVILRRCAMSLARTSTALGAFYRRLAARVGKAKAITATARKLAVLVYRVLSGDLVYNDPGATAYHQLHRARELKSLHKRAKLLGFELVNLSTGEVLLQPVS

SEQ ID NO: 73360 - protein, 454 aa, unidentified
MSKSVKQRDEMMSLEVVHANAAGIDIGNATHYVAVPPDRDAEPVRTFECFTEDLRKMADWLAQCGIVTVAMQSTGVYWLPVYEILVQRGLEVFLVNARHTKNLPGRKSDVQECQWLMKLHTYGLLNNSFRPSEEICVLRTYWRQRDEHVKSASASIQRMQKVLTEMNVQIANVITDISGLTGMAILNAILGGERDRYKLAALADPHVQASKKEIAKSLEGNWRPELLFVLRQQMQTYITYQKRIEECDEALAAQLRTMEDQTEPGSKPQTPKAGKRAGGNAPQCNLRGELYRISGIDLTLIDGINVMIAQIIVAEVGLDMSKWPTEAHFASWLGLCPNNKVTGGKVYHRGTRHVENRAATAFRMAATSLWRSKTYLGAKFKRLRAHLGAPKAITAMAHTLARLVYRMLKYGQDYVDKGMEFYQQRYQKQQINWMQKKAKDLGLVITLTAAPAAK

SEQ ID NO: 73361 - protein, 346 aa, unidentified
MLYAGLDLSRKRLDVHVLRADGTTALVTAISPDGDAMRSLVRRVAAEGEPVRATIESMNGARFIHDRLEFLGWEVLIADAQRVRGLAPLAAKTDKIDARVLAELTRRALVPEIWLPTPEVRAERERARFRLHLVRHRSALKNRIHAILIAFGRACPMSDLFGVAGRELLDSLALPEPWQTNLVESLALVDDLTARIDALELELRRLGAEHPSMRLLMTVPGVGWVLAYTIASEIGDIDRFASPKKLAGYTGLCPLVRQSGGKDRRGPLAKNGPTYLRWALIEAATHAARDPRYRERYERTKQRLGRQRGAKIARVDLARQLAEAIWHVLTKNEPFHPAGPAMGLVA

SEQ ID NO: 73362 - protein, 465 aa, unidentified
MTVRSVGIDFHQGLHRVRCLDEQAQACDGFGFQTTPEGLLTLEERIFKDSSNPIIVFEPAGIPWLTVAAYLRSRHPDCRLVKAKMQKVAALRKYLKGPVKSDRIDALTLAKMPFIDPEQLEEVYLPSAEIHALQRLTRQRKRLQSDISGRKVRIEAIIDGYLPGVRKTFSAPWSIQFREFLRSRFNPFAIVRDGEKTFVSFLTKASYREKVSKTESQHIFQACQSIAAICKVSETVSAINEDFFVELQDEVTRELRLMEAEEAESELLEQRISEIYHKLHPSNNLCTIPGVGEHTAPIFLASIGDPTRFRNQSSFANWTGVVPRSRQSSNMEAKGLRMTKAGPSIMRLALFQSGDIGRRWDPQMAAIYYRQMVNHGKNHKQALGAVMSHLGARVWKVLLEDRPYELKDMQGKPITRQNARSLILTKYHVPEEVRKEKRRRMNKTGVVRETATNSICETAKAPQPA

SEQ ID NO: 73363 - protein, 441 aa, unidentified
MSLNDVIMIDWRGQMTRFATDEFAAFIGLDWADTKHDICLQVAGSDKREFQVLEHRPEVIDTWATDLLQRFQDRPIAIALELNKGPIVEALRKYDGLGLFHINPMMLARYREAFTPSRAKDDPTDAELQLDLLLRHRDKLKPLAPQSPEMRALSQLVEHRRRLVADRVRITNRLTSALKTYFPQVLQWFPNKETQLFCDFLSQWPTLKSAQLARRSTLARFFRQHHVHGEQRINERLEAMKSATALTSDEGIIRPQALLVQALVSQLRVTLEAIGSFDQAIAERAQQHPDFALFEALPGAGAALAPRLLVAFGEQRERYGSAAEVQTYAGIAPVMERSGKRSWVHWRCQCPKFLRQTFVEWAAESMQFSFWARAYYQQQRDKGASHQAAVRSLAFKWIRIVFRCWQTGTPYNESTYLAALQHQGSPLIPNLAQSSKKGENT

SEQ ID NO: 73364 - protein, 419 aa, unidentified
MLSPDRPDRRVSRVWELPATTNAIMRLADQLIELRIEKVTVESTSDYWRIWFYLLEARGLDVQLVNAREAKNLPGRPKTDKIDAVWSAKLTERGMLRPSFVPPKPIRTLRDYTRLRVDLTQERTRHWQRLEKLLEDALIKISSVASTLDTLSTRDMLEALIRGERNPWVLAGLARGRMKAKRAALVEALTGQFDEHHAELARMLLDQIDALTRQIDTLTTRIEELIGAIPEAGPPEQDLHDGEDRDANPGAGAAARPLPAVPRLAEIPGVGVTGAQAIIVEVGLDMTRFPTVEHLVSWAKLSPRIVQSGAKTSAGKTGKGNPYLKGVLGEAAAAAGRTDTFLGERYRRLVRRRGKLRAIVAVARSILVIVWHLLADPSARFSDLGADYYARRIDTDRRTRHLVQQLQALGHHVTLTTAA

SEQ ID NO: 73365 - protein, 341 aa, unidentified
MKFVGADLHKKTISFCVVEVVDRSTQVIQRVRLRCDEPDAIAKFLRQLGRFQVTVEATIGYDWFAALAEKHAERVVIAHAGKLRIIADSTRKTDKIDAQVLAEFLAHDMIPEAWRATPRVRQHRSLVRRRQKIQCRITSVKNTMRGLLTRYNEDRSDLFTKLGRLAAKKLPLLEEERWILQDLWSDLDQANDRLMQIDKRLARFEQTASSKEREARAVLRTMPGVGPITIDVVLAELGDWQRFRSGDAVVAFAGLAPGVRESDGRRKELHLTKAGSPLLRWVMIQLAHRVKRTSQRWQTVFERLSQRVGKKKATCAIARRLLLVIYAMLRDGKAYQFPAAA

SEQ ID NO: 73366 - protein, 312 aa, unidentified
MDKAPTFVGIDVSKRRLDIHSRPSGESSTIGYDDESVAALIERLVAVAPALIVLEATGGMEVRLAAALAAAGLPVAVVNPRQVRAFARAMGQLAKTDRLDAAVIARFAEAVRPPVRPLPDEATRHLGALVARRRQLLEMLVAERNRRHAADPALHERIDAHLRWLEEALAEIEQDLDKAVRESSIWPAQEELLRSVPGIGQVSARTLLAELPELGSLTRRQAAALVGVAPFSRDSGKMRGRRTVWGGRARLRACLYMAAVAAARGSNPVIAGFYKRLRLAGKPAKLALTACMRKMIVTLNAMLRTNTAWKQA

SEQ ID NO: 73367 - protein, 353 aa, unidentified
MEVYLIAVDFHCKYQKVAWLNPETGETGHKNLSHERKEEVKEFYQQFPKGSVVALEASGYSWWFERLIEGLGHQLRVGHPTYIARMRLRRQKNDQVDTDHILALLARKEFPEIWRGTVWQREQKMVIRHRVKLVRERTRWINRLRALASNFNLVIKRGNLSQASRAKIGQLEMGVELEALRDEMLDRIEALDEKVSRLDEKIKLWCEVDADARRVETIPGIGPITALYLVRVLGPIERFSRLKQVAAYLGLDTLEHSSNNLFVPRCYGSISRQGERVLRWLLVQCAQSAARHNPQLRRFYLRLLHRRGRSVAKVAVARKLLVYAAVMLRDQIDYEEFLRRGSVRDLPARNHGL

SEQ ID NO: 73368 - protein, 422 aa, unidentified
MLEETQDAEAIIERVAALDIGKAELMCCIRISADSTGGKRQQEVKPYSTMTRSLLRLADRLAELEVARVVMEATSDYWKPVFYLLEAHGFEVWLVNARDVKHLPGRPKTDTLDAIWLCKVAERQMIRPSFVPPPPIRRLRDLTRYRIDLVNARGAEKNRVEKLLEDACIKLSVVASDIFGVSGRDMMSALTAGERDPKVLAQLARSRMRTKITLLEEAFTGHFTDHHAFLLTRMLTRVDAINADIAAIDTRINEVIAPFASAVARLDDIPGIGPTAAAVIIAEIGIDMTRFPTPGHLVSWARFAPGVKESAGRKKGNAATGHGNRYLARVLGEAAVGAARTNTFLGERYRRIAKRRGKKRALVAVGRSILVIVWHLLADPDSTFHDLGPGFHNTRTATDRQRRNHVRQLEALGYTVSLEPAA

SEQ ID NO: 73369 - protein, 443 aa, unidentified
MATQELELGSELVERVAAIDIAKASGMVCTRVPHATRPERRVQEVRNVASTTEAIMELGEALVALGVTRVVMEATGVYWRPFFFLLESCGLECWLVNARDVKNVPGRPKTDKLDAIWLAKLAERGMLRASFVPERPIRRLRDLTRLRAALTQERTRHKHRVEKLLEDAHIKLSSVATNLFGLSARNMLDALVAGERSPERLADLAQGKLKSKHRALVTAFNGQFDEHHAYVLGTLLAAIDHVQSQIDNLTRHIETSLTELSGPQADLGTKRPAPLGGALTAVERLDEIPGIGAITAQIILAEIGLDMSVFPTPGHLVSWAKLSPRTIQSAGKNFPGGTGQGNPWLKGALGEAAMAAARTDTFLGARYKRLVKRRGHGKALVAVARSMLVIVWHLLDDPQARFHDLGADYHQRLTDKATRTRGLIRQLEALGHDVTISTRTTAD

SEQ ID NO: 73370 - protein, 449 aa, unidentified
MSKPILAVGIDPAKRVHRAIGVLFPDEVVFDCELPNALDAIQSLDLRLAELAATHAAELVYGLEDHRRYGRLLCEVLTERGRDVRVVNPLWTNRQRAFYGQDKDDAIDGRSIAAVVLRRRDQLPLANDFGPVAQAIREAERAIEDLGKKRTALVNRLHLQLNDVYTSAYETYFGKLKSPIALRFFRRFPIPQDLGGQDAVQLSKVILGLANGRVGPHKGRDRKKFLQAKAEGILKTSASLRQTPRTPALELKAELIRQLCDELLVNHDRVTRLERMLRKQLLPATGQTITTMPGIGTILAAAIIGETASVARFRSRAAYAVYNGTAPARHSTGGRERHKARRDCNHRLKRAFWLAARAAALHDPLAKAYFNQCKSRGLNYNECIKRIARRMSDIVYSLLKSGRDYDRTIVEQAIQKRQEQVANADDSRVKEALPIPDQKRLSRRSHGGN

SEQ ID NO: 73371 - protein, 596 aa, unidentified
MLPQPAPAPQPPRRVGVGIDTSRYGHYAAFLRDDLQPAAPELQFAESAAGYALLRQRLECIAQRHPPAHFVVRLDAAGQYAENLPHFLHRLATPPADPLAPAARLALTISCGDPQRNQNYRAAVFGPQKSDPVAARAAARFALTERPGRDRPLSLPLRTLRQVAGRLQAVVRQRTRLINQFHHLLALTFPELALQTRDLAAGWVLELVHRYPTAVCLAGASLADLLDVPYLPDAQAGPLLEHARASVASPGGAATEELVRDHVRQLRDAGARQKRLEKLLVSAYQTLPRDNHRATIPGIGDVTAAVLTAFVLDIDRFATPGQLVAYFGVLPIEASSGVDREGQARGPRRYVMSRRGNDLVRRYLWMAALSAVRYNPAVRALYARVVAKHPGRKAIAIGHAMRKLLHLAFALWKSGRPFDPGHYPWQAPGHVETRGQDKGTEEEAGGKGPAEGDQAAGHRPDTQPARQVVTAACADSVAGAVPFGEATAIDFAHRKRQLPIARALDQLGLSDRLRGRGPQRRCACPLHRGDARGRSFSVNLEENVFQCFDRQCGRKGDVIDLWAAAHGYALREAALDLVRTFGLEPTPRSGTEKRNG

SEQ ID NO: 73372 - protein, 345 aa, unidentified
MNITTVGIDLAKNVFQVHGVDGRGKAGMKKQLKRAQVLPFFANLPPCLIGMEACGSAHYWARKLEQLGHTVKLMAPQFVKPYVKTNKNDAADAEAICEAVSRPSMRFVPVKTGEQQAVLSLHRARQGFVKARTAQANQIRGLLAEYGIVMPVGIDSIAKRLPDILEDGENDLPGVFRQLLERLGGHLKELDRQVDELDAQIQLWHRENAASRKLAKIPGIGPLTASALVASIGDARSFENGRQLAAWLGLVPRQHSTGGKQTLLGISKRGDCYLRTLLIHGARAVIRVSERKVEQADSWLKRIVGRRNKNVATVALANKNARIVWALLAHDREFRSDYTPAVAGA

SEQ ID NO: 73373 - protein, 407 aa, unidentified
MYYLGIDISKKSFTVSVLDEEGGAISKALTFPCTGKGFEKLVDKISSLKLKKSEVIIGIEATGNLWENLYSFLGGYKVIILNPYQTKKYHQVLSKKAKTDKVDALVIAGLLRSKEALASYVPEEEVQVLRELVRLRHHLQKDKKNYLRKAYSLLNLVFPEYTDLIKSPFKKVSSMILKKYPTAVDMARARRTDLVKMARRIQSNNYSSELAEKLIQVAKESIYSGKASEVRGMALRIIIDEIQFLKNKIKEIENKIEEILSSDEPSSPQKRLLKISGVGPKTVAAFLGEVGGDVTRFSSANKLIGFIGWHPKISESGEKKNLHPKMSKKGPSALRASLYMAAVASLKHNPYLRSLYHRKISEGKESKQALICVSKKIISIMYSMLKYEADYDPQRIFFQLEKERILI

SEQ ID NO: 73374 - protein, 314 aa, unidentified
MKTQTEINVGVDTGKKQLDIYVRPLDDYFTVPNTKAGINEAIQRIKKHKPSRIIIEATGRLELPFACAVSKAKLPLVIANPLQVHQFALSTGQLAKTDKLDAKMIAHYGEALQPRLTTIKPENTRKISDLLIRRAELLEMRTMEKNRLSIMPKHLQADIKRHVVYLTKAMLKLEKQLDTLIEKTPEWDRLMKILLSVKGIGKVLAYTLISELPELGQLNRKQVAALVGVAPMNKESGAYKGQRKIRGGRHRIRTVLFMAMLSAVQSNHKFKLLYNQMVAAGKPKKVALVACMRRLMCILNTMVKNDTLWDEKLA

SEQ ID NO: 73375 - protein, 354 aa, unidentified
MKVTTIGLDLAKNVFQVHASDAHGAAVLRKQLRRAQLSEFFAQQPPCIVAMEACAGAHYWGRKLRTLGHEVRLMAPQYVKPYVKSQKNDAADAAAICEAATRGHMRFVALKTVDQQSVLALHTVRSGFVKQRTALSNQIRGMLAEFGVVLPQGLSKLAQQLPVVLADQGNELTGVVRELVQMLQTQLAHLDELVARLERQIRVWASQDQAAKRLQQIPGIGPITASALAASVGDARQFEDGRQMAAWMGLVPRQHSSGGKSVLLGITKRGDKYLRTLLIHGARAALKAYQRNPAKMPQQLAHLLQRKHPNVVCVALASRNARVAWAMLSRREDYKGGPSVNLPALPSSPGLAPI

SEQ ID NO: 73376 - protein, 434 aa, unidentified
MSASSTINLGGDVFMLRIVYPICCGIDVHKKFVVATVGTTNQSGVTEYQTKQFSTFTEDLLHLRDWLKSQSCVHVCMESTGKYWHPVFNVLENDCDVVVANPKYVKGIRGKKTDVKDSVWLCDLHKHGLVPGSFIPPLEIRQIRDLMRYRFKLTNFKSSEKNRVQNSLTVSNIMISSVVSDTFGVSSMKIIHHILDNPSDSDFDVSSMLHGSMKHKAETIEKSIHGNLTKPQADKMRVSLDHMDSIKKHIDDIESVILKLAQPYWSQVEIILSLPGIKDKFTAIAILGEIGIDMSVFLSHKHICSWAGLTPQNNESAGKKKSVRVSRAGVYIKPLLVQCANAAIKSKDFPYFKMRYNQIKKRRGHKKAIIAIAHKLLICIYHMLDKNEPFNDELYKMDPEPKPKKTYSPQITEDMAIRYLETLGYQIPDKRVKV

SEQ ID NO: 73377 - protein, 376 aa, unidentified
MTEKLRFLGLDVHAETIAVAICEPNGEVRSLGTIANREDSVRKFIKRLGAPEQLRACYEAGPTGFVLYWQLTQLGVECAVVAPSLVPKKPGDRVKTDRRDAMKLTHCHRNRDLTAVWVPDEASEALRDLVRQREAAKQDQLRAKHRLTKLLLRIGQRPPLGLKSWTERHMRWLEQVRYTQPAQEATRQDCMNEVEHMRARVKRLEEAILEVVKQAPQAMQEVIRGLQALRGIAHISAVTIAAELGNISSRFESARNLMGYSGAFPDEKSSGKRIRKGGITKAGNAHLRRIVVESAWCYRHLPRVGEKLRKRHEGLPAEIIEIAWKAQNRLHKRYKKLTMAGKDQTKVVTAVGRELLGFIWAIGVKAEQAYQQPIAA

SEQ ID NO: 73378 - protein, 340 aa, unidentified
MSIVGAFDVHRRQLTFDYLDTVTGEVQRGRVVPGDRDHLRRWLTRFAGCDDVHFALEGCTGWRYVTEELAAAGIIPHLAEPADTAALRGKKRHAKTDKTDSRHLRVHLLAGDLPECWIPPGHVLEARAIVRLYKDLVDERGAWHQRIAATLFHQGVPAASMATAQGRAAVAGMELPAAGRQAVETGLRQADRLTGELDPLRRQLDMISRRQPGCRALRATQFGVGPVTAVAIWAELGDVRRFGNSDDVIRHTGLDITVYSSDGKRAAGHLSRQGPQLLRWALYEAAKCAAKPAAPDYRYYTAARDRRTGGLATLSVARKLARRCYHTLRELGEEALQPAA

SEQ ID NO: 73379 - protein, 338 aa, unidentified
MIVVGLDVHKQALTAVAVDELGRAVAERTGAVDAEALVEWARSLEPERLWALEDCRHVTRGLEQALVAAGERLVRVPPRLTAPQRRRGRIRGKSDAIDAPAIARAALQEPDLDRPRAGEQRLRELKLLLDHRDDLVAERRRCQQRLRWHLHELDPSYAVPLGALDRGVWLERLGRWLARREQTTQVRIARQLLVRCRTTTREIVALERELETRAQTLAPRLLELPGCGPLSAAKLLCEIGPIERFASDARLARHAGVAPLEASSGRKRRHRLDRGGNRQLNCALHRIAITQGRVHPPARAYLERKQGEGKSRREAIRCLKRQLARTVYTTLKSESALT

SEQ ID NO: 73380 - protein, 413 aa, unidentified
MTTSPRIQSITSNVCLHMSIELAAASWKLGFADQFGRRPRVRSIEAGNFHQLRSEIASAKKKFGLEPDAAVISCYEAGRDGFWVHRCLVSIGIESHIVEPASIQVNRKKRRAKTDRIDAQRIVSALMRFKAGDQFACRMIRIPDTEVEDVRNINREMRTIKTERTAFTNRIKGLLCTQGVTQVVIDGSFPRRLKRMRTAEGKPLGEYLQARLLREFDRLALATSQIRALQMQQAKMMRTAAKEIEKSEAERTSPKCAVIAEFLARLSGIGPVTAWTLSSEIFSWRDIENRRQLAALAGLTPTPNASGDDEKEQGISKSGRGEFRVLLIEVAWGWLMHQPRSDLTKWYEKRFNDGTKRNRKIGIVALARKLLVAIGKFVRFGEIPAGAKLKDKHQFKYMPALKIPGTELNCLAA

SEQ ID NO: 73381 - protein, 418 aa, unidentified
MAMKIVRFNCCGMDVHKNLVVATIGITDSKTNITEYFQRSFSTLNSDLYRLKDWLKSHHCSDVCMESTGKYWIPIFNILEDEINVRLTHPKYVKAIKGKKTDKKDSKWICDLFKHDLIKFSFIPPREIRELREIARYRYKLVCMRSSERNRYQNCMTVSNVGLASVVSDPFGKTASNIMKEVMKSNVIDDDKILKLVHKNCKNKDKILDSLHGYRIESDQRFKMEKSLDHMEYLDQLIDSCEVELIKRAYPFRRSFQHITQIKGISVLSAILIISEIGIDMSQFGSDKQLVSWAGLSPANNESAGKKKSVRISKAGQYLKPLLVQCALSAIKDKTSYFGRKYSNIKKRRGHKKAIIAIARMMLVSIYHMILTGEEFQPCDYESFMDPKPNANPSLTVEKALNFLKQSGIDISSIPINL

SEQ ID NO: 73382 - protein, 322 aa, unidentified
MESQVSFPQVVSRGCGIDVHKKMLVATISGEGIQTETREYGTFTRSLTELKDWLLEKGVTHVAMESTGVYWKPVYNVLEPFGLTVWIVNARHVKNVPGHKTDKKDSRWLCKLLLAGLLKPSFIPPVEQRELRDLTRYRKKLIQDISSNKNRIIRILEDCNVKLSSVLSDTSGVTATKLIDKLCEGKKVTMADIDEVYHKKIGSTKEELLEACNGHITGHHIYLLGILQGNNAHLFSQIKDLDGRIKQVLAPYDDTLSLLRGIPGLNRKSVEDLVSEIGLDMSVFPDEKHLSSWVGVSPGNNESAGKKKADAPPSGTNRQRKS

SEQ ID NO: 73383 - protein, 450 aa, unidentified
MAPALVAIRPMVAGVDIGSREHWVAAPPRSDGSANVRVFGTTTPQLQQLVQWLSDEGVESVALESTSVYWIPLYELLESSGVEAVLINARQLHNVPGRKTDMADCQWLQLLHSCGLLRGSFRPQEYICRLRALRRQMANLVAERTRVVQWMHKALDQMNVQVHHAVTDITGKTGMLIIRAIVGGERSPMKLASLRDRRCRESEPEIAEHLTGTWREEHLFNLSSSLALYDTLQAQIVGYESRLSEEMQALESADRAQQQAPVHPNPRKHKAMRRRGEQTLRSQLWRIYGVDLTRIDGISTGTAQLILSEFGLDLQKFPTERHFVSWLRLCPRTAISGGKPLKKKRNVMGATRIAGALRMAAVTLVRSKSALGGAYRRKSRQKGATVAVFAMARTLAQLVYRAIRYGQEYVDIGQEAYEAQFADKRMYGLRQAARSLGYTLTPSTELTAAT

SEQ ID NO: 73384 - protein, 411 aa, unidentified
MYIVGIDIAKRTHVGAIIDDTGKRYGKAFKIDNSVEGFNILLGKIAEISQDISQFVFGMEATGHYWLNIYTWLCDRGFTVHIINPITSDAARRLEIRRTKTDPIDAFLIAEVIRMGKYTKTQLADDDMMSMRDLCRQRFYIVDMASDVKKKVICLLDRMFPEYQSLFSDIFGRTSRELLKEGASPEEILALDTTKLAEILRKASKGRFDKEKAEELQNQARNSFAVLLSSQTVSLLIKQMIEQIELLESQIDEIDKLIANLYSSFNVKLTKIPGIGTTLAAAIYSEIGDISRFEKPKQLVAYAGLDPELKQSGDKRGEGYHVSKRGSPYLRRALWLASSCVIQHDKSFAYAYQHKLSQGKNKMQALAFISHKLLNVFFTILKNGIDYVPVFPPDVDVSKLAQKALDSQSSN

SEQ ID NO: 73385 - protein, 320 aa, unidentified
MASRESLFIGIDVSKQTLDVAFGADPHAPLETIPYTDEGVQLLVTRLQRLQPTLIVLEATGGLERMVFAQLLQAGLPTARVQPRRVRALAHAEGRQAKTDRLDARLLARFAERVRPPHHQATDEQRASLRDLLVRREQLIQMRTAEINRLTAAAPNLRPGIQKHIDWLDQEIRALEQELDNEAERTDELRRKRELLESVPSIGAITALNLLLRLPELGTINRKEAAAFVGVAPYANQSGAQHKPRHISGGRRDVRSVLYMATLAATRCNPTIRAFYQRLCQAGKPRKVAIVAAMRKLLTILGAILRQQKPWDPAVHTSAP

SEQ ID NO: 73386 - protein, 424 aa, unidentified
MEEKELEKPIRAWIGIDWADEKHDVSLSDVATGKQEALTIRQSPEALQEWLGQLRSRYEGGYVAVVLEQGRGGLLNALMGCEFLVLYIINPKSLSSFREAFYGSGATSDPVDAELMRDMVRQNPSRFRAWRPDDVMTRSLRLLTEGRRNLVNQSTALTNQLTALLKGYYPQALAWVGTLDTAWACDFLQQWPTLQSLQASSRRQVRRFYEKHPRASLNLNEQLKQIQDARALTQDEAVLESSALMVQALVSQLRPLLASIAEFDRKIAMIFHKHPDRPIFESFPGAGAALAPRLTAAFGTDRDRFQAATEMQELAGIAPVTEKSGKKSFVHWRYACPKFMRQTFQEFADHSRRWCKWAKAHYELLRQRGKSHNAAVRALAYKWIRILFRCWKNRQPYQDEVYTKALLKHGSPLSSLLAQYVENP

SEQ ID NO: 73387 - protein, 444 aa, unidentified
MTNAMSVAKSEPEWAAYVAIDWADQKHFWRLAPVGLDKQEQGEIENTPEAVEVWAMSLHQRFGGRPIAVCLEQSRGSLVCLLAKYPHLVLFAVHAKTAADYRKTFCPSGAKSDAGDTASLLELLQLHRDKLHRLQPDTVETRLLQILVETRRQLVNEVTRAKNRLRACLKIYFPQIPAWFDELDTPLVGSLLKRWGTLMELKRAHPGTLRKFFHEQNCRVEKLIQERIDGIYRALPATEDAAIVEGESRKAQVLVQVIELLRGQIKEYDQRIAELVATHPDGSLFASLPGAGPVLVSRLLVAFGTRRERFASAGEVQCLSGIAPVTGRSGNSSWVHMRRACPKFLRQTFHEYASHSIQKSEWARVFYDTHCHDPKQHHATVRALAFKWIRILYRCWKDGRPYDEQIHLRDMHRRNSPLMAPFLQNTDLEWKLKNGFKKLSRKKA

SEQ ID NO: 73388 - protein, 294 aa, unidentified
MRWSPPPCEQYAGRVQFFRGSQSATLIGIDLGKHSFHVHCQDRQGNALLRKKFSRSQLTTFLATCPACTVVMESCAGAHYMARTVSQQGHRVKLIAPQFVRPFVKSNKNDFVDAEAICEAASRPSMRFVTPGTEDQQAMSALHRVRSSLIRERVITTSQMHAFLLEFGISLPRGSAVIKRLTAVLEENDIPPYLERLLTRLHTHCGYLSEQIKEIDNELKTHPDEDKTAQRLLTIPGVGPVTASLLATRLGDGKNYVSSRDFAASTGLVPRQYSTGGKPTLMGISKRGNKMSRS

SEQ ID NO: 73389 - protein, 417 aa, unidentified
MDPLLPVVLSCCCGIDVHKKSLTACLLTGGASGEVVQEVQTFTTVTAGLRALAAWLQQRGCRHVAVESTGVYWKPVFNVLQPAGLEVVLVNAQHVKNVPGRKTDVKDAEWLATLLRVGLLRGSFVPPPEQRDLRDLTRYRTQVIRQRAQECNRIQKLLEDANIKLASVASNILGASGRDMLRALSQGIDSPGTLADMARGRLRDKLPQLREALDGVLRPAQRWLLSEQLRKVTELDEAISRLDAQIMQLCLPFARALALLDQIPGINERLAQVIVAEIGLDMSRFPNPAQLAAWTGVCPGNHESAGKRQSGKARQGNRWLRAALVQAGWAAARAKGTSLQATFGRLKGRRGVKRACLAVAHRLLRIVHRVLRTGQPYQEEGPDYYRAPDRERLKEKLLARLRRLGYRVSVTVEEGAA

SEQ ID NO: 73390 - protein, 341 aa, unidentified
MKKFIRVGVDLAKNYFQIHALASEGAPAVTRKLKRSKMHEFFSQIEPCLVGMEACGSAHYWARELKGMGHEVLLMPPAYTKPYVKRGKNDAVDADAICEAMSRPGMRFVPIKSAEQQATLMLHKTRELLIKQRTMSVNALRGHLSEFGIVAAKGIGHVDELLDLAESDATLPAAAKTAMRVLAQALEGLDKAIDDLEKEISSAHAQNEVSRLLDQVPGIGKLIASVIAASVPDPSVFKSGRDFAAWLGLTPRQNSSGGKQTLGGITKQGNRYIRKMLVLGATSLLNALGKRKGALRDWIVGLLAKKPARLVTVALANKLARILWAMMKTGECFRTEMFAKA

SEQ ID NO: 73391 - protein, 410 aa, unidentified
MKKHNYRTKKVNEINWPELGQQLGGEAVTFAVDVAKAQQYALLTNDTQSLSIIVKWELLETKGLIHELKQLNCPVTVVMESTGTYGDAMRHQFRQAGFILYQASAKRVHDAKEIFDGVPSLHDAKAACLIAKLHKEGLTKPWNELDESGRELNAVRREYDMHQSQYERNQNRLEAYLSRHWPEVLGLFDLDSVTLEKLLITYGSPQAIAADAEQAAKDMKAWGRHFLSAEKIACVIDSAVGTIGQPCINAERRYLQALATEMQHSRCQRQAAKQLLEASVEADAGLKEMAALIGKLTTAILIGLHLDPRNFSSAHSFLKALGLNLTEKSSGQYHGQLKLSKRGSATARKYLYLAALRLIQKDPVIGEWYRAKADPKVKMKTVIACLRKLAKALWHVARGEHFDARKLVTI

SEQ ID NO: 73392 - protein, 321 aa, unidentified
MVLGIDVGKQKLSVAVFYNDKFKTKTIPNNPDGFETLWSWLSRFDRLPEHVCLEATGSYGEAIATFLHDQGLVVSVVNPTLIKGFAQSEGVRTKTDKVDARIIAKFCHSKQKTLPQWQPAPPEQRELRDLARRLEALKNMRVQEENRLNGTWGDTARKNLIEHIGYLDDQIAQLEKLIKDHIDRHPGLRRQSDLLKSIPGIADLTSACLLAEIQFDQFSTARQVAAYVGLTPSDRQSGTSVKGRPRLSKIGNHRLRKALYMPAMAAIRHNPVLSAFAHELKRKGKPGKVIIAAVMRKLLHIAFGILRSGRPFTPDYHPHFS

SEQ ID NO: 73393 - protein, 355 aa, unidentified
MKQEKYIGMDVHQATISVAVMDSSGKLIMECILETKAATILEFVDGLRGSLSVTFEEGTSAAWLHDLLKPHVSCLVVCDPRKNALLKDGSKSDRIDARKLAELLRGNQLHPVYHGEHGLRTLKELGRSYLTLTQDVSRVMTRIKALYRSWAIPCSGATVYAPWYRAEWLAKIPQPGVRLRAERLYQQLDLLQPVRQEARRDLLSESRKHPAVKLLRQIPAIGPIRAAMLVALLQTPHRFRTKRQLWAYSGFAIETHDSGEYRYVKGKLQRNREHITVRGLNGNHNHDLKNLFKGAALSASTRPGPLYDFYAALLEKGMRTTMARLTLARKIAAITLTIWKKGVSFDAKQLHRQAA

SEQ ID NO: 73394 - protein, 423 aa, unidentified
MKLTYPVCCGVDVHKTFLVATIITSDFVIPKYKQKRFSTFYRGLLSFKQWLLDNNCKDVCMESTGKYWVPVWNVLEDSIHVVIANPKWVSAVKGNKDDKKDSKWIGDLFRMGLVPGSYIPSKDIRILREFTRYRSKLVSMRSSEKNRFQNAFTVCNLTLDAVVSDMFGKSASNIENYLLDTDSVDPDHCVSLLHGSLKKKASDVAEAVQGFTMTPEQKARVRIVQGHFADIDRRITEIDDIITKLVSDYESVIFLLCTIPGIDRRLAITILSEIGTDMSQFGSSKRLCRWAGLTPGNSESAGKKKTVRISRAGVYLKPALVEAAHAAVKSSQSSSYFRTKYERILKRRGKKRATIAIARMILTCVFSMLHTGEVFNPCDLQKFDMPDELRKRQTLSSAKDAVRLLVSLGIVPEGSISLEKLVS

SEQ ID NO: 73395 - protein, 430 aa, unidentified
MEHLDGIRLQEFRQVRKEIRGSGKYLVVGIDVAKERHNAFFGTATGRTLHKGMVFDNNIEGFRKLLTLTEALKVQHDLTNVVIGLEPTANYHKPLGEHLIKCGHLVVLVSAAAVKNNRQLLDGRWDKHDTKDSANVADLICQGKCLYYEYPDQKVRDLRSLLSLKRRLKKEEHGLRVRIRNQLLAQYFPEMDRHFGPSVSLAVVSRYLDPSAIAGMEFDEFCRNVAPGKLNMSQQKRLQAIWQTAPESIGCRVGDAVPFEAQVMVSGLRQVRETIKAVEEKIEDICIQFPEYSCLLSIPGFGPDVSSKVLGAIGYPFRFASGKQVLKMAGFDLCAHRSGKTSNSATPVISKQGKADLRYALYQAALIASLSNKDFMTYYTNKLRGRQREKGIGTKMRVKLAAKLLVIAWTLMKKKETFDPKYLNQGDTQI

SEQ ID NO: 73396 - protein, 391 aa, unidentified
MPTAADLAEAPTAIQTNLAAIFVSLELSRSVWLITSLSPGSGEKMSKHSVPAGDVAALLARFAELKQKALARTGKSFPIVSIQEAGLDGFWLHRVLESEGIESHVVDPASIATSRRRRRAKTDRIDGEALLRALLAYKRGEPRVCVMVKAPTPEEEDRRRLSRERKVLVAERVEHVNRIKGLLFSQGVSGYEPLRRGRRTRLDELMTGDGRALPAHLKTQISRELDRLELLLDHIKAVEGERNALLGEQQAEASPTVAAGKMLLDFRGIGPEFAAILWLEAFYRHFDNRRQLAAYAGLAPTPWQSGSVDREQGVSKAGNPRLRETLIQLAWLWLRHQPKSALALWFKERVSRNAGRMKKVIIVALARKLLVALWKYVTAGVVIEGAVFNAA

SEQ ID NO: 73397 - protein, 348 aa, unidentified
MSQSYYIGLDVSARTINLCVVNADGQVAHERKLSSNPEEIAQHILSLPLPVVRVGLEAGMLSQHIYGHLAEAGIPIVCVETRHMKAALSAQLNKTDRHDARGIAQMMRVGLFKPVHVKTPTSQRLRTVLTARQLLRNKLQDVENEIRGLIRNFGYHLGKVTARDFEPRVRELIAGSDLHIVADTLLLARRSLREQFGRLDDLLVRLARDDTVSRRFMTVPGVGPLVALIFRATVDVPSRFTRSRTVGAHFGLTPRKHQSGEVDRTGRISRWGDAMTRSALYEAAQVLLTRVKRWSTLKAWAAQVSRRRGHKKAIVALARRIGVILHRMWVDGTEFDWGKRPEAAAPLT

SEQ ID NO: 73398 - protein, 337 aa, unidentified
MIVIGVDVHKRSLTAVAVDEVGRPLAEHTAVDGPGLLEWVVSLPGERLWALEDCRQLTRPLERELLAADERLVRVPPKLTAPERRAGRTRGKSDPIDALAVARAALREPRLDHPRPQETQLRELKLLVDHRDDLVDERRRAQQRLRWHLHELDPTLAIPAGALDRAVWLDRLTRRLARGEQTVLVQIARELVGRCRGLTRTILALDRDLQQRTSETAPGLLALPGCGAIGAAKLLAEIGPIERFDTDAQLARHAGVAPLEASSGKHRRHRLDRGGNRQLNCAFHRIAITQARMHPPARAYLERKQSEGKSRREALRCLKRQLARTVYTTLKNEPLLT

SEQ ID NO: 73399 - protein, 347 aa, unidentified
MTIVGGARPIVGGVDTHLDVHVAAAVDGLGGVLGVRSFATTSAGYHALSSWLGSFGTIERVGVEGTGTYGAGLARHLAVSGITVIEVDRPNRQERRRNGKSDELDAIEAARAVLSGRARGYAKGGDGNVEALRALLVAKRSARSVRIRTTGQLRHLVITAPDELRNQLGGLTTKSLITQAAALRPRVGGDPVRHGTKTAIVALARRVQTINDEIALLDRQLDALVRTTCPRLLEIYGVGVDTAAILLVAAGDNTRRIRSEAAWAHLCGVAPIPAGSGKTNQRRRLNPGGNRQANHALWRIVLTRLGQHEPRTVTYMQRRLAQGRTKPEIIRSLKRYIAREIYQQIFA

SEQ ID NO: 73400 - protein, 370 aa, unidentified
MLNTTTFVGLDVHARSIKAVALDVMTGETKSATFAYDAAAVAEWVGSLDPAAKCVYESGVTGFDLQKKLTALGVDCVVGAVSKMIKPSADRKRKNDRNDAGFLARMLSVGNVVEVWVPDDECEAARDLVRALDDARDDLKRCKQRLSKFLLRHGLVFSETTPSGQRRGNWTAAHWAWINAISFKEGADNEVLAYYIDAVRQKLEDKKRLEALVKDEASKARWRKRVDSIRCLKGIDTMSAADLVFEADEFSRFKNARSFGAWLGLTPSEHSSGESVRQGGITKAGNKHLRRVLVESAWHYLNATARSKDLVKGQIPDPAARRHAAKGVRRLVKRREGMLERGVHKNKANVATARELAAWVWAVGCIVEGA

SEQ ID NO: 73401 - protein, 328 aa, unidentified
MEKVVVGLDMHLKKTEGVVMAMDGTIVKRERFETSKENLRNFLRGLPPGTKVALESVGFCWPWIDFIESLGYEPLLANPIKVKSRAEDVKTDKADSELLAHLLRMDWLPTVYVPSKELRALRNLLRHRAFRRKIATAFKNRTWSELRKRDVQIDANLSTCRGRERAASSNLYEVAQNVEVIELIENQIKRIEMKLKIHYRKIKPVKLLQTIPGIGFLTALTLYAEICDIKRFSSPEKLAHYAGLVPKVRQSGEYRRMGRETKGNKWLKWILIEAAWSHIRFCPNGRLARIYRKAYERKKDKRKAIKIVARKLVNIIWAIWTYEREFRE

SEQ ID NO: 73402 - protein, 375 aa, unidentified
MKNFSTFIGMDVHKETIAVATAGKHGAPRYYGEIANTAEALTKLIKKVVPTGGRAVFCYEAGPCGYGVHRQITDMGHRCDVVAPSLIPKKPGDRVKTDRRDALTLVRLLRANELTAGWVPDNQQEAMRDLSRIREDLKSMERCARQRLSGFLLRNKKVYAGQSNWTQAHFRWLERIIFDSPIQQIVFQEYVDVVKHLQGRVASVQQEMVKALAGWSLGVVVEALMALRGVNLVTAMTIVAEIGDMSRFESPRQLMAYLGLVPSEDSSGKQQKRGGITKTGNGHVRRVLVESSWSYRMPARKTAHLRRKAGKASEAVQAIAWKAQKRLCSRYWHLTQKGKLKVQACTAVARELAGFIWAISREVMGNNNTPVVKVA

SEQ ID NO: 73403 - protein, 352 aa, unidentified
MKRYRRQQDKSKQVFVGIDLHRLRWHVTVRTEEVELFSGSIPGQWEALARLFSRYRGYQIQAVYEAGYFGFWLRDHLVRYGARCVVTPPSLLPQEYGNRVKTDRRDSRKLAHLLAKGLLKEVWVPSEEERYQRQVIRRRRQLIGDRVRTQNRIKAELRFFGIEIPEPTGKWSRAYLTNLHRLQFHDRWIQESFHRLLEQYDFLTEQIGKQTKVLQDLAQMPQYKERVAILRSVPGIGLIAAMELLLELQDVARFRRADQLAAYVGLTPSQFSSADRVRMGRITAIGKNELRGTLVEVAWRLIGKDRAMRKKYERIKVRSGSKRAIVAIARMTLLRTRRMLLDGTPYVLGRAA

SEQ ID NO: 73404 - protein, 334 aa, unidentified
MATRREHGTRPKGEDVERIVERCAGLDVHKSSVAACVRIAEASEGLHQEIREFATTTRGLLLLRDWLASFDVRLVGMEATGVYWKPIYYVLEDDFELWLLNARHLKNVPGRKTDVKDAEWICQLVEHGLVRPSFVPPKEIRELRNLSRYRKAQIEERTREVQRLEKVLQDAGIKLSSVATRVLGASGRAMLDALVGGTTDPEVLAELARGRLRSKLPALRDALEGSFSSHHALMVGKILAHIDYLDESIGELSVEIERVTAPFSEQVELLDTITGVNRRTAETLIAEIGVDMSQFPTHRHLAWWALGCAPATKSRRANDARARPVRARSGSGAR

SEQ ID NO: 73405 - protein, 336 aa, unidentified
MYVGLDVHKRFNQATVVDKDGVVLCECTVQNKDKQLDRFLQTLAPGTKLALEACSVWEPIYDFIESKGLDVCLIHPRKTRLIAESRSKTDRNDATMIAQLLRVNMVYRSYVPCKDVRKLRFLVRHRKSLRNQTKQVKNKVHAILAREGITHELSDLFGKRGMLILENIPLRSENRFAVNQLLDLLKVIRQEIAETDEYIALRSHGINEVELLKTVPGISTYSAAVIYSEIADIKRFPKWKKLCAYAGIVSSVYQSADTKRFGPITKEGSRMLRWILVQCVQHTVRKPNGVQKTYMRILKKKGHKKAIVASARKLLVYIYIMLTQGITFQALRVNSA

SEQ ID NO: 73406 - protein, 386 aa, unidentified
MQYPNDSRRCLTVLDQDSTLIAVIEMSLSSWLVAGIVPGIERQPLKKIEADEHALLKLLHRWHSEAVKAGSKIARIAVAFEAGRDGFWLARWLRAHGIEAHVIHASSVAVSREHRRAKTDRLDTEMLKRAFLGWLRGERDHCKVVAIPSLAEEDAKRPTRERESLVGECGRLVNRMKAAFVRLGIRGFNPKLKKAPERLGALRTPEGESIPPNTVSAMRRDMERLRLVREQIRQIELTRLERLQKAPEEGANAMVRLLARVMGLGIETADMLVQEVLARELRDRRAVARYSGLTGSPDESGRKHRQKGLARAGNARVRRGMIQLAWRFLMFQKNSALAQWFRQRTENAPRTRKTMIVALARKLLIALWRFVREGVVPEGIVLRPAS

SEQ ID NO: 73407 - protein, 454 aa, unidentified
MGKRGEKRERRSAILEPDAAGIDIGAEEIYVAVPPDRDEQATRRFSSFTCDLYALAEWLECCRIRTVAMESTGVYWIPLFQILEERGFKVYLVNAHSLKIVPGRKSDVSDCEWIQYLHSVGLLKASFRPTEDICAVRTLWRHRGSLLQMAAEHTQHIQKSLSLMNLQIHHVLSDITGASGLAILDAILAGNRDPLYLAHLCNIRVKSPRETVAQALVGDYRPEHLFTLKQSLDGYRYYQKLIAELDDEIARLMHTLPNATEHPSPIPKRTKRTAYQRMGNDPLFDLRSELYRIAGVDLTDIPGVSAIAAQVVLTEVGPDVSRFRNASAFASWLGLCPDKRISGGKVLSTKTRKVKNRVAIVLRLGAKSLSRAKDYFGAFFRRMRARLGTAQAITATAHKLARVVYHVLHSKEPYTETVFHRCDEQEKQRAEMRLRKHAAQLGFQLQPISTNPAA

SEQ ID NO: 73408 - protein, 471 aa, unidentified
MAADEGMADGAGVPGHGGEGAEVAEDSTQVVEYAAAIDVAKGSGMVCTRVSGSRPDRRRQAVWQAGATYREVIALMDHLRCQGIQRLVLESTSDYWRVWYYLAEAAGLEVWLVNARDVRHLPGRGKSDRLDCVWLCKLNERGMLRRSFVPPQPVRDLRALTRTRARLAQDQARHQARVEKILEDALLKISVVISDLFGASGRRFLDALAAGERSPAALAALGDPRLKATRKELEDALTGRFRDIHAFEISTHLRLIDAINEEIARLDEKIGQQLALIPGTAPACAACGLAGGGHAPGCADQDAEVLGLAERLDEITGVGAVNGAALIAELGTDPSQFPTPGHAAGWARLTPRSQQSGETAKPGRTGKGNRYIRGALGQAAMTAAKTDTRLGAMYRRIARKRGKQKAIVAVSRVICEIAWILICDPSARYAELGPDYYQPLSPARQTRAKIREIERLNPGKKVILADADTAA

SEQ ID NO: 73409 - protein, 342 aa, unidentified
MQETIYVGLDLGSSVCQQTVLGGDGVRRFSRSFATSEKSLRTAFDKLEGDVRVHMEAGELASWVQSILKPLVSQVVVSHPRSLAWIGKDSVKDDKVDAGKLAELLRLGRVHEVYCEEDAKRRIFKHLVTHHEQTSREQARQKSKIKARLRTLGLIRKGAGLFTNAGQTALLDAIEQPEIKRMITQLFAVLDRMIECEREARAAMIEYSRRFPEVRRLQTAPGVGAITACRFVGYIQTPRRFSNKRKLWRYSRLGITRRESNGKRLGHPRLDNAGVGSLKDVSRKVFEAARRCKGDNSFKRCFEQSLDNTKNAVHARLATQRKILATLRAMWIYNQPYRDNLG

SEQ ID NO: 73410 - protein, 417 aa, unidentified
MQPHTDYAALVAMDWGDTTHSFAWQKTDNAKLHRGTLPATPEALHDWLEQLHEACGGRPVALAIEAGRNGLLHALFEHASWLTIYPIHPATSARFRLAFAPSGAKDDAPDAETILALLRQHRDRLTPFAPDTPAARELTALVEQRRHAVDERTALVNQLISLLKRVYPQALTLAGEDLAAPLTLAFLRRFPSLCAAKKAGASRLRAFYRRHNVRSDERIEQRVAMVTSARPITRDEAILRPAALELARLLDLIEMLARHVTAYDEAIAKAFATHPKAEIFASLPGAGPVLAPRLLALFGEREERYPDAASLQKYAGVAPVRERSQGRLWVHWRWAAPKFLRQTLVEWAGQTVPRCTWAKEHYLRQKAAGKGHHAILRSLAFKWVRILWRCWKDNVPYDDARYLAALSNRRSPLANTA

SEQ ID NO: 73411 - protein, 343 aa, unidentified
MKLHVLGIDLGKTVFHLVGLDSTGRLVIRKRCSRRQLLAFTANLEVQLIGMEACSGAHFLGRALREQGHEVRLMPAQYVKPYVQTNKSDYLDAEAIAEAVQRPRMRFVPIKTEEQLDLQALHRVRERWVMRRTAVVNQIRSLLLERGLTLPKGRSHLDEQLPRILEDGELNLSDSFRVLLAQLKLELEQLAARIVEMDRVIQKTARENEACQRLTEIPGVGPVTATALIAAVGNGSTFKKGRNLSAWMGIVPGEYSTGGKQKLLGISKRGNKYLRRLFVQGARSVLQQRHKQTPGLSSWLAQLLGRTHQNVVVVALANKLVRMAWAVLCKNQRYRAPVLAVSA

SEQ ID NO: 73412 - protein, 413 aa, unidentified
MRNLLEVCCGLDVHKEILVACMLKGGIEEEPEPIIKEFSTLLSGLDEFKSWLIEHNCHDVAMESTGVYWFPIYNVLESIFYEDGPMNIIVANPHHMKNVPGKKTDIKDSQWIATLLRAGLLAPSYIPPKEIRELRDWTRYRDVLIKELVGHKNRIEKHLQQCGFKLSGILSDIFGMSGYELIRKLCEKGKLTALDVKGCLHGTLRAKSDEVQQAVAGRLSAHDRLFLTNLVKVMEHCRKEIEEAEWHITVYAQKYEPALQLLETIPALQRRASTIIVSELGVDFSMFPTAGHLCKWAGLCPGDNESAKKKKTMRITKGNPRIKSVMVQCAWAATRCKNFFLRDWFYRLRARRGTKKALIAVARKLLAMVWHILTTGEIYEETRYEKTKKNQEDRRKQRLKTEAAKLGFKLVPA

SEQ ID NO: 73413 - protein, 430 aa, unidentified
MSTETISNNPPPSPQGTATLFEVWIGLDWGDEKHAFALHDRSGRSDKGLFDHSAENLHQWLKDLEERYGGRPVALAIEASRGAVIHALLQYPWLTIYPVNPVTSARYRSAFTPSGAKDDLPDAVVLLDLVRVHSDKLRPLETQDPATVKLAGLVETRRGIVDRRTAVINQLTSLLKTYYPQALQLLGNLNTELAVAFLNRWPDLISLKAAKPGTIKRFYYQHQVRSTELVDERLALIAKAVALTTDEARVSVAILQLRQLLDQLEVFHKHIPLLNAEIKNAFASHPEAHLFRELPGAGLQLAPRLCAAFGTDRLIYPDPASLQKYAGIAPVREKSGNQLWTHWRWRAPAFLRQTFVEWAGQTVHYSPWAKVYYERMLKKGKKHAVILRALAFKWIRVLWKCWQDRKPYDEARYLKQLIHRKSPNAAPAGS

SEQ ID NO: 73414 - protein, 412 aa, unidentified
MSLSVPAASFFAGIDWAAETHAVCVLDSSGHVKAQFTIAHSAAGFASLIRQLARLGDPADTPVAIERPDGRLVDVLLDAGHPVVPVKPNAIKTWREGEVASGAKSDAGDALVIAEYLRLRQHKLRVAAPYSGQARALRTVVRTRGDLVEMRVAATNQLTALLDAHWPGAKAVFADVESPIALNFLSRYPTAASAGRLGEKQMAAFCARHGYSGRRPAAELVARLRAAPAGTTDQALTQAVSDAVLAMVTILRAIAGSLKDLTRSVTARLGEHPDGKIFTSLPRSGQINAAQVLAEWGDCREAYDSPDAVAALAGLTPVTKESGKHRAVHFRWACNTRFRVAVTTFADNSRHASPWAAAVYADAIARGHDHQHSIRVLARAWTRVIYRCWLDGTPYDPELHGNATKLSKPIAA

SEQ ID NO: 73415 - protein, 341 aa, unidentified
MTQFIGLDVSLKNTFISVREGGKRVWRGKCPSDPALIAEVIRKRAVNAERVVFETGPLSVWFYHALTTEGLPAICIDARHAKAALDMAPNKTDANDADGLAHLAEVGFYREVRVKSFDSMLVRTLVAARNQLVKMTTQLANQIRGLMKTFGLVVPKGAGRVFEDHVRNLLATNAGLEQIIRPLLDAWRGMRARAAELSKQLVASARASEQCRLLASIPGVGAVTASSFVAAIEDPENFKKSRSVGAWIGLTTRRYQSGEVDYDGHISRRGDNHLRGLLYEAATVILTRTRADSALRAWGLKLKEKIGFKRAAVAVARKLAVIMHAMLRTDELFESSNSAEA

SEQ ID NO: 73416 - protein, 343 aa, unidentified
MQVSTIGLDLAKNVFQAHGVSAEGKVVLTKQLRRGQVLSTFAKLPPCLVGMEACAGAHYWARELRKLGHDVRLMPARDVKAYVKRDKTDAADAAAICEAVSRPSMRFVALKTPEQQGRLMQHRVRDLLLRQRTQTINALRAHMAELGLVAATGRQGLGLLLAILADAKDERLPQDARASLKLLASQIAALQAQIDTLDKRLHAQHRQCPASRRLETIPGIGVIGATALAATITDPKAFKSGRDLAAFIGLVPRNNSSGGKQRLGPISKQGDRYLRRILVVGAHSILKQARTRPDKHPWLARLMARKPGKLAAVALANKTARIAWAVLARGESYRAPTAPAAAG

SEQ ID NO: 73417 - protein, 374 aa, unidentified
MNKHTIFIGLDVHKESIDIALADSGRDGEVRFYGTVGGDLEALHKAIRRIQSGVQGATLSFVYEAGPCGYEIFRSLTRKGFDCAVIAPSMIPRKSGDLIKNDRRDALNLARLHRAGELTSVHVPSVEDEAMRDLTRSREDAVKALRVSRQELLSFLLRHGFRFSGKTKWSTAHLNWLSGLKMPHRAQQIVLHEYLHAVEENRERVERITQQIKELIPEWELGSVVKAFQALRGVSDIVGATVVAELGSLTRFKNAKELMAYIGLVPKEHSSGNSIRRGGITKTGNGHVRRALVEAAHAYLHPARESRVIKGRLDGLPQEIREISWKAQVRLCGRFKKLLARGKNKNTVVTAIARELSAFMWAIAQQVSSGSPAL

SEQ ID NO: 73418 - protein, 344 aa, unidentified
MHTRYQQIAGLDRATGEMVSRRLEHENGEARTFYKSLAPGARVGIEATFPAHWFERLLAECGHELWVGDAARIRASEVRRQKTDVRDAELLLDLLLKDSFPRIWVPSVEERDLRQLLIHRNKVVRARTAVKNQLHAMAISQGVCRKRKLWSDRGRAELSGLTLLPWASRRRKELLLWLDQLDATVKELDQAVEEAAAGRAEVRLLRTHPGVGAVTGLAFVLTLGQVERFANSRKLVSYLGLNPLEHSSGGRQRLGAITKQGNSMLRWLLVEAGHTAARGDPELGRRYRRLKIRRASGTAKVAVARRLAVRLYWMLRQRIDYAQLVRMSGSPSSAVVPPPAESKV

SEQ ID NO: 73419 - protein, 445 aa, unidentified
MFIQSQDDSQCCYSLFIKVVILNEKLKYSICCGLDVHKNVIVATIVTTNKDGISEYLQKSFSTINSDIQRFHNWLIENNCYHVCMESTGKYWIPIFNYLENDIDVCLTHPKYVKAIKGKKTDKKDSKWIADLYKFDLVRCSFIPPKDFRQLRELSRYRFKLVCMKSSEKNRIQNCMTISNVGIASVLSDPFGKTATEIISYLLEHTADSMDEKAVRKLIKKGAKSKSDEIIEAIKGYTIETDQAKKLELARGHLEYLDDMITQTEVELYVRIKPYYEFVEFVSTMPGMTELSSTIVLAETGVDMDIFDDAKHLCSWCGLSPANNESAGKKKSVRIAKAGDYLKPMMVQCALAAIKSKKQPYFAIKYGRIKKRRGHKKAIIAIARMMMVCIYHMVSEKKPFTPTDYEELMDPQNHVESVVLNENNVFAYLESLGYDSSKLVKRNDN

SEQ ID NO: 73420 - protein, 353 aa, unidentified
MLADQADHVLGIDTHRDSHSAAILATDTAVVQGQITVAANERGYRRLLRFARESAPGRRAWAVEGTGSYGAGLTVFLQREGELVLEVDRPRRPARRDRAKSDELDAIRAAREALTREHLARPRQRGEREALRVLLATRDSAVRSKRAAITLMKGLLVSAAPALREGLRSLPTNEQLTRCARLRISPAQDSEQRATTIAIRASARRALALAEEAQELEREIKPIVARLAPCLLAEMGVGAIVAAQILCAYSHHGRIRSEAAFASLAGVAPIPASSGQTVRHRLNRSGDRQLNRALHTIVLCRMRDDARTRAYTARRQAEGRSTREIKRCLKRYTARRLYRLLQASPPNPANSET

SEQ ID NO: 73421 - protein, 423 aa, unidentified
MMKLKYSICCGLDVHKNVIVATIVTTNKDGISEYLQKSFSTINSDIQRFHNWLIENNCYHVCMESTGKYWIPIFNYLENDIDVCLTHPKYVKAIKGKKTDKKDSKWIADLYKFDLVRCSFIPPKDFRQLRELSRYRFKLVCMKSSEKNRIQNCMTISNVGIASVLSDPFGKTATEIISYLLEHTADSMDEKAVRKLIKKGAKSKSDEIIEAIKGYTIETDQAKKLELARGHLEYLDDMITQTEVELYVRIKPYYEFVEFVSTMPGMTELSSTIVLAETGVDMDIFDDAKHLCSWCGLSPANNESAGKKKSVRIAKAGDYLKPMMVQCALAAIKSKKQPYFAIKYGRIKKRRGHKKAIIAIARMMMVCIYHMVSEKKPFTPTDYEELTDPQNHVESVVLNENNVFAYLESLGYDSSKLVKRNDN

SEQ ID NO: 73422 - protein, 357 aa, unidentified
MYVGVDVHKKVCRAAMANDEGELVEEFSFTNSKKGIEDFMMKIEAFKERVLVAVESTANLWIRLYDSLEDRGVQVVLSNPSKTRLIAEARVKTDKVDARILAQLLRADMLPLCFVPDRRQRDRRQFIRHRIHLVKMRTEVKNRIHALLDKHGLKCPYPTLFSKKGVEWLRSLKLGFTDDAVLRSDQALLEALDEQIGFMDAKIASVAANDERVKLLMTMPGLDYFAASLLVAEICGIERFSSDKRLVAWAGLAPGVRQSGERTVHGRITKQGNRLVRWVMVQAAQTARLHDERFKEFYERYSRRKGPQKAVVAVAHEMLRIVYFMLKKNESYRGEKRDLSWRKLKRLERVALVGLQV

SEQ ID NO: 73423 - protein, 362 aa, unidentified
MHQQEVTHVNFKGQHVYAGIDVAQRSWRVQILVGDLFHKRFSQHPDPRALAEYLRHNFPGAEYHCVYEAGYCGFWIQKSFEQLGIDCMITNAADVPTSDKERRHKNDKVDAGKLARERRNGTLKAIYVPERAALEDRTLVRMRGRFVRKQTRCKNQIKALLAFYGYRQEEDQDGAEHYWSRAYVSWIDSIAMERPSGAQALKALLKELVFLREMVAQLTKQIRLLAHDDRYRETIERLRTIPGIGIVCAMTLMTELVTIERFKTLDHLASYTGLIPGEYSSGDTEKDTGITPRRNPAMRHMIIECAWIAKREDPALLLAFNELRKRMESREAIIRIARKLLNRVRFVLRHNEPYVTGVLKSA

SEQ ID NO: 73424 - protein, 433 aa, unidentified
MFEAEDEPLFADRAAGIDIAKAGIEVTIRVPSDTRRGGRQQETRPFRTTRKDLLALADWLRCWGVTKIGMESTGDYWKPVYFLLESEGLDCVLYHAAQVKALPGRPKTDKLDSVWLAKITERGALPGSFVPPEEIRRLRTHTRYRRHLTQARTAEKQRVEKLLEDAHLKLSSVISDIHGVSGRAMLEAIAAGERNATALAQLARGSMRGKIARLEEALDCAFVTEEHAAVLAMMLAAIDYYTARIEELTARIEVLCEPYLRQIEQLDAVPGTGVITAQDVIAEIGTDMAVFPTAAHLVSWAKWCPQVAQSGGKRKGANASGRGNRYLGAALGEAAVSAGRTHSFPGAKYRRLVKRMPKKKALVATGNSLLTIYHALLSDPAATYTDLGADYYEHRANSRRQVRNHIRAIERHGYKVAIEPIDPATAELEAAAS

SEQ ID NO: 73425 - protein, 356 aa, unidentified
MNKRSKLDFSGQPIYIGLDVHKKSWSVSIFTQSGEYKTFRQLPEAETLSQYLQHHFPGAQYRSVYEAGYCGFWIHDQLRDKGIQNIVANPADIPTRDKERKNKRDRVDCRKLARALRGDEIEGIYTPPRWKWEDRSLVRTRLSMGRKQTRCKNQIKSMLLFYGVGIPEQREMGHWSRRFIRWIEEIRMERASGDMALQSHVEELCHLRQLIAKLNRAIVALARTEQYRSWISLLKTVPGISTLTAMIVLTELHEITRLGSIDPLCSYVGLIPDTQGSGEKEHVGGVTQRRHSQLRGLLIEASWIAVRKDPVMMEAFQQYCKRMRKTQAIIRIARKLLNRIRYVLKNQAEYVTGVIE

SEQ ID NO: 73426 - protein, 387 aa, unidentified
MYFVGIDISKFKHDCAVIDELGDTVTPSWSFSNDWEGFSHLKALLDSLKGEKKIGLEATGHYGQNLKLFLESNGFTFMEFNPLLVSRFVRSKSLRNTKTDSIDALSIAHYVMTVEYKPYPPSFYHLDKLKSLTRFRDSLVRQRSHQLVELTNVLDKLFPEFKPFFKGKLSVTAMHILAHYQTPDRIANMNTRSYETLRKLSRGKFTLSDFVQLKALAKNTIGTKSEYLLDQMNILLELYSQLDSKVDELDAQIKECVRWIDPPCLSIPGIGELSAAVILSEFGDFSKFQNPSKMLAFAGLEPGYFQSGQSEFTGHMVKHGSSRLRYTLMNCCLPLITNEPVFAAYYAKKRAEGKSYRVALNHVAKKLLRIIYTLQTKNIRYDPTMIR

SEQ ID NO: 73427 - protein, 335 aa, unidentified
MRYVGLDVHYRSSTYCVLEENGRELQCETVRGHWPKLLDRLKTVEGPWRVCFEATCGYGYLDRELSRLAAQVVVAHPGQLRLIFRAKRKNDRIDARKLAKLLYLDEVPAAYVPSQDVQSWRELIEHRRRMMDHQTTCKNAIRSLLRAHGKIAPKGLWTKKGLAWFRQEEMPTVAARLKRDLLLDELNEAKRRVRTVTKALDEIGEHHPAVLVLRTIPGVGIRTAETVAAYMDNAKRFVRSSQVGAYFGLVPCQDASAGVNRLGHITRQGPATARKYLVEAAWQGVYRSPTIRAYFERIRHGRPERRKIALVATAHYLLRCMHAMLVRNQPWHEAA

SEQ ID NO: 73428 - protein, 312 aa, unidentified
MPASCGVGIDVAKDTLDVAWATESDARWRTTNDEAGWAALIDQLHARPPTVIVLEATGGYETGVASALSVAGLPVAVVNPRQVRHFAKALGRLEKTDTLDAGILCEFAVRIAPVPRPLANDELADLQALVTRRRQLVDMLTAERNRVPLARGAVRKNLRAHIAWLEKQVGHTDRDLRTRIEASPIWRVRDQLLQSVPGIGPTTAACLLAGLPELGTLSHRAISKLVGVAPLPDDSGTRVGYRRIQGGRADVRRALYMATVTAIVHNPTIAAAYRRWRAAGKRPKVALIAAMHKLLIHLNAILTDQTTWQPTR

SEQ ID NO: 73429 - protein, 320 aa, unidentified
MTTVYKRFIGVDVASRKLDLFDSVSTEHQMIDNTPEAINAWMKHLRRKRVKTIVVMEATGGYESNLVDALHEADIDCSVCNPAQVRSFAKGIGLIEKNDPIDARMIARFGEVVTPKLREKPSPEERKLKALVHRRDQILSQQSAERNRLAQARDEEVREVIQEALDFYKRQIAGIEKKIASVIDASGPMSERSSLLSSCPGVGTATVAMFLAELPELGSLNRGQIAKLVGVAPIVRDSGQKEGKRSTFAGRSLVRKVLYMAALVATRHNSIMKAFYQRLLAKGKPPKVAIVAVMRKLLVTLNVMVREGTPWREPTLDPAA

SEQ ID NO: 73430 - protein, 408 aa, unidentified
MQRFAGIDIGAERHVVAVVDEHGAVLLKPTPFGEQAAGYQRLAELLGSPDGCVVAMEATGHYWRNLFAYLVTAGFTVALLNPVRTRRFAEEELERTKTDAVDALGIARFAAQKRPPTCPLAEPALDELREVVRLRERLLQDFGDRVRQLHRALGLGFPEFTQHVKGLDSELATTILTHYPTAAALRKASIKRLAGLPYDGRHQVGEVVARTLIASARSSVGYHQSEPYRLQVRYACEDIGLLRRRLRELEGDIERRLEHHQVGKLLTTIDGIGPLTAACIIAELGDPARFGSIRALASYVGVIPRLRQSGKRKLTGRRLLPLGNARLRRALWMPTLSAIRVNPWLRAYYLRLRAAGKNPKVALIATMHKLLAAVFSVARRRQPFVASLLSPPAGEAAAGGAVTMLHAS

SEQ ID NO: 73431 - protein, 338 aa, unidentified
MAIVTLGIDLAKNVFALHGVDATGKAVLVRPSVPRSKLAEFVASLPPCLIGMEACSGAHHWARLFQAHGHTVRLMAPKFVAAYRLSGKRGKNDAADAAAICEAVTRPSMRFVPPKSLRQQSELMVHRARQGFVAQRTATINRIRGLLSEFGIVLPLKAATVRREAMRQLEDLPGWANTVIGDLLSEIHHLDERIAQYDHHIEQIAKESAPALQLMQLHGVGATTATALVAMIGRGHEFKSGRQLSAWLGLVPSQYSSGGKQRLGRITKAGDPYLRMLLILGARSVLQTAGDKTDAVSRWAVQLAARVGYWKAIVAIAAKNARMCWAVLQRGEDFKLPA

SEQ ID NO: 73432 - protein, 426 aa, unidentified
MNYTQNSKIAQVTEKTLVVGVDIGSETNFARAFNWRGQELSKKVFRFSNSLEGFQSFLAYLEHCKSNASAEQIIVGCEPTGHYWFNLARYLKTQHISLALVNPYHVKQIKELDDNSPKKTDLKDPKTIAKLVVDGRYSYPYLPEGIYADLREAVSSRDRIVKELNAATNRIKRWLKIYFPEYLTVYKIFSAESGLTVLEVAPLPKEVVKLGAEGVNRLWRDKKLRAVGMKRAQTLVEAAQNSIGLDGGECARMEMHLLLEDYRTKEAQLEKVTAVLEAETLKVPHAEKLLSIKGVGLITVAGFLSEVGDIRRFDSPKQIQKLAGLELKENSSGKHHGRSSISKRGRKRLRKILFQVMLPMIRNNAEFREVYEYFTTRQKNPLKGKQAIIAAGCKLIRVFYAILKRGVDYDPQKLRMDIIRPELEAA

SEQ ID NO: 73433 - protein, 372 aa, unidentified
MKHCTSKKPKLYCGIDLHTKKSYIYIINEQGTKVKSKEIDTEEQTFITFFESLIEENEIYSAIEISSLTFQYCNILKAIGISVYVVNTLKNAYISKSMKKTDKEDAKRLAISLWKEILPEPVYIPSEKEHSLRKLISHRADLVKSRTRLINRIRQRLREKEIKIPLRTLNKAKKIEPVLKSISYEIQPILHFEISHMFEQFKLLEKQIEQTEQLIHSQINKDVDFKEMYNLLLTVPGMGKITSAAFISRVGKNIKRFKNVRKLISYFGQCPKIRESGGKTIGNQGITKQGNGMLRGYLSQVAIAVLRSKSCNSIPLKKWYENIKRRKGWKKARVALSRKIAAICYGVLIHKRPYNPMLVTGENKCEKPLITT

SEQ ID NO: 73434 - protein, 343 aa, unidentified
MKIKTVTSWDAIALTLAIGVDVCKAYLDIVGLSGAHCWKRRIPNNASAISDFIEALLRGEFKGTLLCEATGHYHVLFAVMLCEAGLDIRVINPLMSSKHAKSSIRKTKTDAVDAQVLAVMVSTEPNLPPPLRLTRTQCAIRHTLGLIHNLEKHLQGMDRSLTSYQERLTQLDITMGASSKKTAEAVNHLKKCHEELLLEIETWLKKAQADKQEEVQRVSEISGITKRNAALFTYVLDPCVSSAKSWMAYVGLDVAIRESGAWRGRGRITKRGPALLRKRLIQAAWGAAMNSPQGRQYYDHLKAKGRKHKEALVIMARKLLSIIFSLVVSGKSFDPDKAFVIAT

SEQ ID NO: 73435 - protein, 341 aa, unidentified
MESVTLIGIDLGKHNFHVHGQDRQGKALLRKKFSRKQLIEFLANFHPCTIVMEACAGAHFMARQLARFGHEPKLISPQFVRPFVKSNKNDFIDAEAICEAASRPAMRFVTPKNESQQTLSALHRVRESLVRDRVKASNQIHAFLLEFGISLPVGHAAIERLPSVLAEEHLPARLMRVLERLQVHFKYLDEQIADIEKELNRQLAEDDLGQRLMTVPGIGPITASVLAAEVGDGKHYRCGRDFAASVGLVPRQYSTGGRNNLLGISKRGDKGLRRLLVQCARAYMQRLERQRGRLAEWVRSMLTRRHSNVVACALANKLARTAWAIAAHHTEFEMTEAVIAK

SEQ ID NO: 73436 - protein, 356 aa, unidentified
MQNDHQSSESVILGVDTHLDIHIGAVISQAGKQLGTHIIQTNQTGYLELLDWDRSFGILERAGIEGTGTYGAALTRYLIKNGIYVVEVNRPDRSKRRLEGKSDPLDAENAARTVLSGSSKAIPKMQSGACEALRIISVARRSAIKARTQAINQLRALLVSAPQDVRDKLWKSKPHECVTACINSEVSEYSPLRIALCSTLRSLAKRWMALTEELNKLDESLDKLTRKYASNLRSQFGVGPQTAATLLAVAGDNPERLKNEAALASFCGVNPLPASSGKTVRHRLNRGGSREANNALWTIALVRMRSDPRTRIYVDRRTGEGLSTKEILRCLKRYIVRELYPLILSDLAYANRPLLT

SEQ ID NO: 73437 - protein, 360 aa, unidentified
MVRRLQLRCGRMKASTGGFSHEGPRCGVDIGKTVFHLVGLSKEGHIVTKKRFSRKQLVTFTVNLPTCLIGIEACPGAHFLARVLLKQGHNVKLMPAEYVRPFVKSNKNDYVDAEAIAEAVQRPTMRFVPVKNEAQLDLQALHRVRDRWIGRRTAVINQLRGFLLEHGITVAVGPAHLRRQIPSILEDADNLLSPRMRTLLSELREEWEKLEEQIDTTTRELAQFAKQEEGCRRLLTIPGIGPLTATALTAAIGNGAAFRKGRDLAAWLGLVPREHSTGGKARLLGISKRGDPYLRRLFVHGGRAVLGQVKRERHQFGGWLDRLEARSPRNVAIVAMANKIARMAWAVLTSGQSYNAALTS

SEQ ID NO: 73438 - protein, 453 aa, unidentified
MEQPQEIEDEEYERTWERVAAIDVAKGSGVVCTRVPGEDRPGRRRTHVWTVKATKQAVIELADHLRGLQVQIVTLESTSDYWRIWWVVLEAAGLKVQLVNARHVKNVPGRAKTDKKDAVWLAKLTERGLLQPSFVPPPEIRRLREFTRLRTDLVRERTRYWARLEKLLERALIKISAVLSKLTTDTARAMIEALIDGQRNPKVLAELAIGKARSKRAELAEALDGDWQPHHGELARILLDQIDALTAQIDALTDRVSELIDQIPAAWGVDADGVTGPQAGAGPDAVILPAVARLDEITGCGIIAAHAIIAEIGLDMTVFGTSGRLVSWARRSPQTRQSGKKTTTGRAGKGNPYLNGMLGEIAASASRTDTFLGERYRRIARRRGKRKALAAIARSILVIIFHLLADRTARFTDLGPGWYDTQIDAQRKTRNLIRQLEALGHTVALTPAGAAAA

SEQ ID NO: 73439 - protein, 310 aa, unidentified
MKEMIFQQVIGVGCGLDVHKDTVVATIRSSSKDYETKEFSSFTSSLTELKDWCIQQGVTHIAMESTGVYWKPVFNVLEDERFEIILVNARHVKNIPGHKTDKKDSAWLSKLLLTGLLKGSFIPPTDIRELRDLVRYKKKKTQVIAAEKNRMIKILEDCNFKLSSVLSDVQGVSATKIITAITEGETDVEKLILFVHGKVKTDRETIKKALEGKVTEHHIFMLKMARESIEVNEALITKIDKQIEKAIENYQVEIDLLQTIDGVGKDSAVAIISEIGVDMSQFPNEHHLASWGGVSPGNNESGGKKKVQKQ

SEQ ID NO: 73440 - protein, 354 aa, unidentified
MNPIIGCDAHRRYSVFAVFDTSTLSVEQVRVNHQPGAIKEFLSDFPEGTPVALETVGNYYWIVDEIEQAGCVPQLAHAAKAKVIMGNVNKTDKLDAKGLATLVHLGSLPTVWLPPGEIRDERELHRTRMALSKVRTALKNRIHATLAKYALNTSEYADVFVGRGRAWLDRSLKALPPETGRCVDQELALLDSTMAQIAILEERILQRIQLTPHMQRLKTIPGVGSILAIVIAREIGTIDRFPSACHLAAYAGVVPKVHSSGGKTRYGRMRKQANNYLKWAFIEAANVVVSHRHHPSWRQKKVSQVYERICRRKGHATAVGAVARNLAESAFWILKKGEDYQDPALSRQDSPKLV

SEQ ID NO: 73441 - protein, 346 aa, unidentified
MEHYVGIDVSLELSSVCVVDGRGKIVKEAKVASEPEALVCFFKELGVPVNRIGLEAGPLSQWLHAGLTQAGFQTVLLETRHVKAALSAMTVKTDRKDACGLAQLLRMGWFRQVHAKSIGSQEIRALLVARKQLLGRLLDVELSIRGILRGFGLKVGQVTRKTFEARIRELVTGQATLERIAEAMLSARATLQAGYEKLHKAVLAIVREDTVCRRLMTMPGVGPVVAVTFKSAVDDPSRIAKSKAVGALFGLTPKKYQSGEKDVTGGITRTGDEMVRTALYEAANVLLSRITRFSKLKRWGMDVAKRRGSKRAKVALARKIGVILHRMWIDGTTYRWAEAKPIAAQG

SEQ ID NO: 73442 - protein, 429 aa, unidentified
MTRISAGVDVSKNRSTVCIMDQDGKFIMRPFLVWHSTEELDFLADTLKRLNGEVRVIMESTSVYQYPIALQLKERGLFISIVNAYEMKQFANIDFRGGKTDKKDSRTIASYGISYWDKLVEWQIPKDTYFNLDLLNRTYMNAKKHRQIILQELQHYIDCAMPGMDKELHSLNLSTKKDFMLDFVEKFWHRDEIVNMTEAEFTEVFTAWAKEKGYRPGKGKAAKIYAIAKSCIPYYPANPTVKTILQCIVDKLSGVNRTLVTIVTQMIEEAKKLPEYQIVREMPGVGDPLAARFFGSAGDIRRFKNSKALVAYAGIDSPPDESGDFSSTHRHITKKGSKVFRDTGYEIMMALRAQKRTWEKGRKNPEVYDYMLRKEAEEKPRKVAKIAALNKFLRIVYARIKELYDNMALAERAKAKTRSKTKAKTKATA

SEQ ID NO: 73443 - protein, 347 aa, unidentified
MTLYIGVDFHPHQQTVCLCNTEDGEIRQTSLRHQLEQVQDFYKQFSGAVVGIEATCSGQWFEKLMSDLGHELKVGNPSLIRARARSRHKSDERDAQLILDLLLKDEFPELWRRSPESQAVLEQLKFRDHLVKQRTQVCNRLQALAHSAGLPKRTIQTRAARRALMAVLLSETQSFQRERLFEMLDELSRRIHEVELLLETKARQDSQVQLLLTHQGIGSLSALAVVNTLGDVSRFSSSKQVAAFAGLDPLERSSAGKVRFGSISKAGSPLLRHLLGQAMHIAIRSDGELKAFYKRLATRRSKSIAKVATTQKLLVRLYIMLRDGISYQEFKRRGGAVGVPVLSQGLQ

SEQ ID NO: 73444 - protein, 425 aa, unidentified
MRYFGVDVHLEFCEIAVCEDGRVSQVGRIASTPAAIREFAVGLGSEDQVVLDASGSVMAIARILRESNVGRVVVSDAAQTRAISHARVKSDRFDAAMLARLLSSGMLSEVWVPDEATLALRRRVARRAALIRARTRIKNQVHGVVMRCLLGRPPVSDLFGRKGRVWLAEQQLPEEETETVQGCLRQIDFLNGEIAQLDRKIAEQALAWPGLGRLLTIPGVDIGTAAAVIAAVGDISRFQSAGQLVAYLGLDPKVRQSGSEAARYGHISKRGNAQARSMLVEAAWIAIRSPGPLRAFGERVRARRGAQVAAVAVARKLVVLCWQLLSKDEDYAFARPSLTRQKTRRLELTAGASRRPRRHDGPTVTPTVAQRAAERELQSQAELAYRRLVADWRAAAPKGGAGATPGRASSNRPSKGKAARQATSP

SEQ ID NO: 73445 - protein, 318 aa, unidentified
MRKIELNENQKTFIGIDVSKDSLEVFVDTSSRRTVCPNQSRDLKRLARDLKKLSPELIVMEATGGYETQAAIAFTEASLPFAIVFPRRVRQLALGLGIIAKTDEIDARVIAYYGRVAGIEPKPLESNELRELAALTTRRSQLVQMRLMEENRVDTAHPSMRKTIKEHISWLKRQIEKVNTDIDRCIEQSDAWSGTRDLLTSVPGVGSVLASTLISELPELGALSHKKIAALVGVAPFPRDTGKFSGKRFCKGGRNSVRRVLYMAVISATRFNPVIKTFYQRLCENGKRKKVALIACARKMLVILNAMLRNNVPWLSEA

SEQ ID NO: 73446 - protein, 340 aa, unidentified
MEHIAAVDLHSDNGYYGIIEPDGKRVYQKRLPNDLVTVLKELEPYRETLRCIVIESTYNWYWLGDGLREQGYRVKLANPAKFEKYNDLKYSDDKTDTFFLTEMERLNILPTGHLYPREERGIRDLLRRRMLLVQQKTSHILSFQSLISRQTGGSINSNDIKRLETEDVEKLLAGQERHVVFAGQSNIAVIGFLQERIRLLEKTVLASARLRTEYEKLQSIPGIGKILALVIMYETGAIGRFKAAGNYVSYCRCVKSNHLSNGKKKGAGNRKNGNKYLSWAYVEAANYSRRFCEEAKRYYQRKLARTNSVIATKALAAKLCRAAYFIMRDQVEFDVTRMFG

SEQ ID NO: 73447 - protein, 343 aa, unidentified
MKIIRVGVDLAKNVFHIHGVDRKGNPVWRRRLIREKWLKVLLAQIEPGCEIGMEACTGAHHWARLLQARGFTVKLIAPQFVKPYVKSNKNDAKDAEAICEAMSRPGMRYVGVKTVEQQDIQAMHRIRSGLIGQRTAKANQIRGLVAEYGLVAPQQLGRLRPAIPVWLEDAENGLTMQFRELLQGLWNDLLTLDERVGELDREISRIAQSDPVATRLQQLRGVGPMVATALVAAVGNARQYGKGRQMAASLGLTPRQHSTGGKDRLFGISKRGDAYLRSILIHGARAVVSQAKHKDDRLSRWVTAIAQRRHPNVAAVALANKTVRMAWVMIRKEKDYDPGFVVT

SEQ ID NO: 73448 - protein, 340 aa, unidentified
MAIVAGFDVHRAQITFDALDQETGELTRGRMRATPEAVREWAGRFAGEEVHVAVEACTGWLFVCEAFVEAGAVPHLAEPVETSALRGRRRRAKTDREDARWLRTLLCEDRLPEAWIPPAHVREWRTRARLRKTLVDERTSWLQRVQATLFHHGVAGAPDKLLSARGREFLDGLELPDAARERIEVALSMIEALDRQLAPIEKQLRQLARRQSGCRALMAHYGIGELTAPTILCELGDVTRLSAARKAVRCAGLDVGVHRSDRRSRAGKLTRQGSPQLRWALYESAQAACRPTSPDRADYLALKRRGLSHTRASLTIARKLARRCFHTLRELGPDALQPVT

SEQ ID NO: 73449 - protein, 480 aa, unidentified
MNVKTRRTKKQVNVENQAIKLLAKEELGRKIEVIKKELRSYTWRDLETNGKFAKNDKLSFITDDMLIAGCDIGSETHYIRAIDVRGRELSSGAFEFSNTSEGFANAKAWVLALAAKNDKKQIVLGLEPTGHYWFALAAWMISNGISVVQVNPYAVKQSKEIEDNSQLKDDRKDPKLIANLVKDGNYGMPYLPEKVYADMRRLSMFRDQLTEDRIRNINRLHRELKIYFPEYMDAFGKIDGAFTLEVLKVSAIPSDITALGAEGIKNIWYNVKLRGRGYSRANEIVSYAEKSVGLTDGTDAGREAVKWYAEQILKLDEQLAVVESTLHEKCREIPCAENILEIKGVGENILAGILAEMGDISRFDDVKEIQKLSGMGLVACSSGKHKGQTKISHRGRKRLRYWLFQAAKSAVSHADEFKQLHEYYTTRTNNPLKKMQSLVVIACKILRVIYTILKTGTTYDPQKLLKDIKRPTASQAPMAA

SEQ ID NO: 73450 - protein, 343 aa, unidentified
MHFIGLDVHKKTISYCVKDAAGRVYQEGKIGSTRRELDEWIRTMPQPRTIAMEATIFTGWIYDHLLPHAEKVKVAHPLMLRAIAAAKKKNDRIDAGKIADCLRCDFLPECHMASTEIRDRRRTLRYRSLVIKQMVQMKNRVSGLLMETGVSYNKQRLHKVGYFAELMTANEDVQESIRPLLKLSRDMIRRAHKLDYALVSSLERDPLLKERLRRLRTVPGVGPITALTWALEIGDFTRFSSIKQAISYCGLCGDEKSSADKVMRMPISKQRNKHIQRVLIEAAKLAPRESPELAVIRARELERGNPNRATLAVARKMVSYMLAVERRNQDFVPAEEFSRTAAA

SEQ ID NO: 73451 - protein, 337 aa, unidentified
MKFSGIDLHSNNSVVLISDEADRIVYQKRLPNDLAQIVAALEPHRDQLVGVVIESTYNWYWLVDGLMDAGYRVHLANPSGIRKYEGLKYSGDVTDAAYLAHLLRLGLLAEGYIYPREERGARDLARKRLQLVRYRTAQILSIEGILMRQTGARMKSESVKGLTAEQVEAFGFAPDVALAVEANRAVSQTLGQQIQALEQRLQERVRLRAEFKLLKTVPGIGETLATTIMLETGTIARFAQVGNFSSYCRCVDSLRESNGKKKGEGNTKNGNKYLAWAFVEAANFAVRYCPQAKRFYEHKKRKTNGIVAIKALAHKLARACYHMLREQKSFDVNRCFA

SEQ ID NO: 73452 - protein, 401 aa, unidentified
MQDTQQHGAVDVFVGVDVGKGQHHAVALDRNGKRLYNKALPNDEVKLRALIAELKTHGRLLFVVDQPSTIGALPVAVARAEGVFVAYLPGLAMRRIADLHAGEAKTDARDAAIIAEAARSMPHTLRSLRLADEQLAELTMLCGFDDDLAAQVTQTSNRIRGLLTQIHPALERVLGPRLDHPAVLDLLERYPSPAALAATSEKTLANRLTKLAPRMGKSLAAEIVQALHEQAVIVPGTQAATIVMPRLAQQLAALRKQRDEVAAEVERLVLAHPLWPVLTSMPGVGVRTAARLLTEVAHKAFASAAHLAAYAGLAPVTRRSGSSIRGEHPSRRGNKVLKRALFLSAFAALRDPVSRAYYARKIQQGKRHNQALIALARRRCDVLFAMLRDGTIYQPKSAPTA

SEQ ID NO: 73453 - protein, 369 aa, unidentified
MIVIGADTHKRSHTVAAVDAATGRLLGEQTTAARQRSFDALLIWARGHGGERVWAIEDCRHVSGALERFLLARGEAVVRVAPKLTAGARSSARELGKSDVIDAVAIARAALREGLDSLPVARLAGPELEVRLLVDHRERLIGQRTALINDLRWQLHDLWPETEIPPRALIRAHWQDRVAGRLARAEQSVRVRIARDELRRIRELTRAINDLERELATLTSALAPRLLAERGCGALTAAKLIGEIAGADRFATDAKLARTAGSAPIPASSGQTHRHRLDRGGNRQLNSALHRLAITKGRLDPETIAYLARKQAEGKTRREAIRCLKRHLARRVWHLLQPDPATTVPTRATRTRGRVTIHCNTPTGSLDLT

SEQ ID NO: 73454 - protein, 400 aa, unidentified
MLSIGIDVSKGKSTVCGMKPGGEIVYTPFEVQHTREGMSELVSLLHNSGEEVRAVLESTGSYHCPVVAALLENGIFVSVVNSLRMKRFCSQSIRKVKTDRIDAMQIALYGLAYWQELQPTRLPEDTYRELQLLARQYYQMTSMLIKAKVDFNALCDQVLPGMQELMSDHAGRHKLSDFVLRYHHTTHILEMGETRFRKDYCKWAEKKGYRNRERMAALIFATAQNGIPVLPDAPSTQIVITEAIRVLHTVEASRDAILTQMQALAKTLPEYSLVREMPCIGDTLAPRLIAEIGDVRRFHSKRALIAYAGIDAPPYQSGKFCANNRHISKRGNRYLRKTGYEVMQSYVMHKPANDPIFTFIEKKRGEGKSGKLAMVAGLNKFLRVYYGKVTELYRSLPAIE

SEQ ID NO: 73455 - protein, 387 aa, unidentified
MFYVGIDIAKNTHWASIISSDGEIVKEPFSFSNDNSGFQKFISNLDSLDKTKILIGLESTAHYGENIISYLFNLNYKIGLINPIQTAHLRKSNIRKTKNDKVDTYIIIKALTLGNYSLITSRDINNLKLKGLCRSRRNLVTMRSKSKIQLVSYLDQIFPELAQFFKGNIHLNVSYQLLKEYSSPKQISSLHLTKLSNILHDNSHGRYGKQDAIRLRELAKSSVGVDNPSLSLQIKHAILQIELYNEQIAEIEALYKSILDEMDSPILTIPGMSYNQAAVIVGCIGDINRFQHSCQLLAYAGLDPSVIQSGNFQARSTKMSKRGSGMLRYSLVYSAHNVVKNNKTFRDYYELKRSQGKSHYCALGHVAHKLVRVIFKLLKDNVTFNLD

SEQ ID NO: 73456 - protein, 559 aa, unidentified
MYHAEQFKLGKLWSLKTLVPLCPSQSLISVVVIQCLVASWSEKGQPEPRRRVYDVIANRAPLDLIPSEGEYGMARRKRSTLERLRSGKKLNRRERRGVERALQAEAPELEMVHPNAAGIDIGNESHFAAIQPERSEEPVREFGSWTADVQRMAEWLTSHGVKTVAMQSTGVYWIAAYEILEEAGLEVYLVNARGTKNLPGRKSDVQECEWLRKLHTYGLLRNSFQPPEGIRAVRTVWRLRERHVQEAGRAVQQMQKALTTMNVQLANVISDLSGMTGMAILRAILAGERDPRRLAKFRDRRVQATEEEIAHSLEGNWREDVLFELQQVVDSYDFLQRQITACDVQLEKYMAALPSREVSGAPLTASESGPPEAAPAQQKAQPKLQSRGSPSFNLAAELRRTTGVDLLAIEGINVGTAQVIVSELGCDLSAFPTEAHFTAWLGLAPLRDISGGKVIAQRSRRVKNRVANALRMGAESLSRSDSYLGARYRHLRARLGGLKAVKAMARYLACLVYRLMTRGQAWVDRGSAEYERRRRERELVALKHRAAKMGMRLVAPQAT

SEQ ID NO: 73457 - protein, 325 aa, unidentified
MTVIVGIDIAKDKFDVCLLNEAGKAQQATFANSKQGINQLHHWLKKQGAKQAQVCLEATGIYGDLVAETLYSRKYQVSVVNPARIKAYADSQMRRNKTDALDAALIADFCRTQQPTLWTPPPPELKQLRALIRHLDDLKQEKQRAANRLDVQTSAQAVIQHLEAQIELLAHQIQHTLHLIHDHIDHYPDLKQQRDLLDSIPGIGDLTASYLIAELGDISRFQDVGEVVAFVGLNPCQHQSGKRKATHGISRMGRAALRAALYMPAIVAKRCNPRLQAWATQLAQRGLTGKQVIVALMRKLIHLAYGILKSGRAFDPHFADLRLAA

SEQ ID NO: 73458 - protein, 372 aa, unidentified
MKKRSSSRQNPKPAAKAKRAQQSVTIGMDLGDRNSRYCLLSSQGEILREGQVATTKAEMIKTFSRLGRARIAIEVGTHSPWVTRLLQSLGHEVIVANPRQVKLITESSRKDDRLDAQTLARLARIDPQLLRPIQHRSEKAQTALMVIRVRAALLSARTSLVNAARGLAKSLGERLPKCDADQMGVPQSEALPSTVQGVLEPLLKEVESLTEKIKDSDQKIEQIAREDYPETALLQQVSGVGPLIALTFVLTVEDKGRFQKSRDIGCYLGLRPRRSDSGQSQPQLRITKEGDPYLRTMLVQGAHYIISRRGPDTDLKRWGLRLAERGGKRGKKKAVVAVARKLGILLHRLWVTGEVYEPLRNQNLRKERKQAA

SEQ ID NO: 73459 - protein, 351 aa, unidentified
MMATTSSEHPVLYSGIDLHKRSLVIHTLDADGTTTREAQLKSDRGAVLAYFGTLSGPHRAVVECVQSWYWLRDLLGPTGVDLRLAHAKYVKAISYAKVKTDRVDARMLAQLLRTGLVPEAHMIGAEHRETRDLLRSRLQLVTRAVRCRHAVGSLLEKYNVPTPEELPELARMQAALQEEQRTLIRTHVRRVEAVLKTRLLPTPDVQRLVWIPGIGKLSAYALVLEIDTISRFPTVRHFHSYCRLVPGADNSAGKVRHKRSRDGNRYLKQVFHTAAIRAAQYHPEIRQEYRRLSRRKGKIVARALIAKELASIVYWVLRKQEAFNGKFRGHVLTAKPAVWPRLASPESLTDV

SEQ ID NO: 73460 - protein, 319 aa, unidentified
MGELWVGIDVSKRRLDVAIRPDGGTVICDNDTAAIKKLAGMLALKSPRLIVMEATGGHEYAAAVILSKAGLPVAIANPRQVRAFARAKGKLAKTDPIDAETLAHFGEAMEPPVRAVRDQQLEEIGQLVTRHRQLIEMLVAERNRRLSCVGTAQRDVDATIRFLEGRLDKVDRQIKALIAEHPDWCSKAELLDSVPGVGPVLISSLVAELPELGTLNRKQIAALVGVAPFNNDSGQSRGRRRIWGGRSHLRAVLYMSAVSGVRFNATIRAFYKHLRERGKAPKVAMVACMRKLLIILNAILKTQQPWRSPAVEMPIALPA

SEQ ID NO: 73461 - protein, 475 aa, unidentified
MTSKTKIRPELQALPMFPNESVYIGVDIGKFKHVAGFVSPTLLQRHQRFESCPAFTFEQSREGFRAFVERIHAFGPLEHCFLLMEQTGHYHRALQQYLLELDLPVYVIHIQRREPGMIKTDKRDALGLANQLYNQLELGVQVTDKLQAVRRAIPPSEAAAQLRGLMRHRYELANEATQRKNKLTAICDELFPELTQIFKNPNLTIALELREKFSTPQAVATASLIALREVRKGSHPSEAQLVLLRQLAAKTIGTKDVARQRALVLEQGLLIKELRLMQEHMERLDAEVGQIVEHSREGQILLSIPPICPLYAAAILATIGHIGNFPSAGKLKSYFGWAPKRAQTGVSFDRTSLTKGGSREMKKIMYLVAWNAIKGESEWAKLYKRLVPRLCSYDERTQSYKGKGKVLGHVIGRLITLIYALLKQDDETLSHLVPGTKPPEPTLYDPKIHQQHRTGHYQPLEKRRPENRIVLVQPS

SEQ ID NO: 73462 - protein, 342 aa, unidentified
MYYIGLDVHKKTISYCVKDASGQVHQEGKVGATRRELDSWIKTLPQPRTMAMEATIFTGWIYDHLLPHAQQVKVAHPLMLRAIAAAKKKNDRIDAGKIADCLRCDFLPECHIASTQIRDRRRTLRYRHLLVRQMVQMKNRISGLLMETGVSYNKQRLHKVGYFRELLATNEDVHESIRPLLKVSRDTVVRLQKTEYALVSSLQRDPLLADRVKRLRTVPGVGPITALAWALEIGDVARFRSIRQAISYCGLCGEEKSSADKVMRTPLSKQRNKHIQRVLVEAAKLAPRQDHDLALVYETEKQKGNANRATLAVARKMVAYLLAVDREERDFVPAENYQRAAA

SEQ ID NO: 73463 - protein, 401 aa, unidentified
MLNLPSLQLRVGVDVGSRCHSVAVGLTDGSLLEEFEIPHTAAGFGDFFARIEGHAKRHPYPIAVAMEGYNGHVRPLDSLVKARGWRLFNVNNLKLARFKEIFPAAAKSDRIDSAKTLELFQLRDHLPMAGEVLQEVMATPEENNVLKRLSRRRRRLVNEQGRVASAMQADLQAVCPGLLEITRSAGNLWFVNFLTCRKGLRKLARIRRDSLLKVPGIGATYANTISAWQGCAYFAPDANLVGEMIQQDAARILELKRHIKALEVQMAQVAENSAIAGRLVSIPGFGAICSAELAGEIGTLERFRSEASLALYLGMATLDNSSGKSRRSKAPWHVNTRAKGAMMIAVDTHRKLVPQSQRYYEKKRVEGKRHNQAIRALGRHLCRVIFKIIAQDRSYRIDPLP

SEQ ID NO: 73464 - protein, 341 aa, unidentified
MDRISTIGLDLAKHVFQVHGADAEGHAVVRKQLRRGGVLRFFGSLEPCVVAMEACGSAHYWGREIGRLGHEVRLIAPAYVKPFVKRGKNDAADAEAICEAAQRPSMRFVPVKSAERQAAALVFRTRDLLVRQRTQAINALRSHLAEFGMIAPKGPAHIAALAARLGEPGEKLPIEARIMLEVLADTIAALDGRIAQLDREIARRAREDETARRLMTIPGVGPITATAMAALAPPPDTFRRGRDFGAWLGLTPLQQSTGGKQRLGRVSKMGERSLRRLLIIGASAVVSQAARRGAPAGSWLARMLATKPRMLVIVALANKMARTAWALMTKGEDYRAPAVAV

SEQ ID NO: 73465 - protein, 320 aa, unidentified
MRNAVGLDISKLTFDASAMVGNAEYSAKFDNDSKGLDQFSDRLKSLGCQNLHICMEATGSYYEEVADYFAQYYSVYVVNPLKISKYAESRFKRTKTDKQDAKLIAQYCRSAKESELVKRQKPTDEQYRLLRMTAAYAQIKSECAAMKNRHHAAKDEEAAKAYAEIIKAMNEQLEVLKEKIKEQTEKPNCKEGVKRLETIPAIGRMTAAVLFHHLTSSKFETSNKFAAFAGLSPQQKESGTSVRGKGKLTKFGNRKLRAVLFMPAMVAYRIRAFPDFIKRLEEKKKPKKVIIAALMRKLAVIAYHVHKKGGDYDPSRYKSA

SEQ ID NO: 73466 - protein, 324 aa, unidentified
MIDAILGIDVSKNTLDVSISRCTKVRTKSFANSSDGWHHLLDWLTTQKIRRVHACLESTGRYSLGIACALYEAGHVVSIINPAQIRDFVRTKLGRNKTDGIDASRIREYCELFKPSPWTPPSEAHRRLGELQTIRAGIIAGLTEWKNRKGSGMVDSVAQSLADVTISHFSSQLEAVDEAIAQTIDNDSGLRRKRDLLLSISGVGETLAGVVLAELPGPDVLHSSGEVVAYAGLNPRQHQSGTSVDRATRISKIGNAVLRAALYMPALSAMRYNPAIVALVTRLKSRGRLKPKQIVVAAMRKLLVLCFGVLKTGKPFDPAIAMGC

SEQ ID NO: 73467 - protein, 319 aa, unidentified
MSEQQEERFVGIDVSKAMLEVAIKPSGERWSVANEEAGVRELVRTLEKSAPTLIVVEATGGMQSLVVAELSAAGLPVAVVNPRQARDFAKATGRLAKTDAIDAGVLASFGQAIRPEVREIKDEQTQLLTALMGRRRQIVDMLTAEKNRLASAPKAVRKEIRRHIEWLEARLKAMDGQISDTIKENPAWHEKDLILRSTPGVGPVLSVSLLAGVPELGKLNRQKLAALVGVAPLNDDSGKHRGTRRVWGGRAQVRAVLYMAAVSASRSNPVISVFYQRLVAAGKKPKVALTACMRRLLCILNTMIKNGTRWRQEKVTASA

SEQ ID NO: 73468 - protein, 452 aa, unidentified
MRMRISPRAFRLSPSMMADQFRRAFTRDRFFKLRLHESSTTLPPPARGHQLLVRCYAGRSCHPSWINNLEGGPCVHDSNGPREPSYRKRGLSLRVFRVGREGVEDRLGDLARGEAAAPDASCERHAALAREDREGARRSARPGVVTCYEAGRDGFWLHRFLRAHGIENRIVDSASIEVNRRARRQKTDRLDAEKLLSMLLREALGEADLWSVVNVPGAEDEDARSLQREYRTLVKERTRSANRILGLLASQGLAPERIDARLPGWLATVRLWDGSALPPGARQRIEREFERWQFTHAQLLAIEKERRDRTQKPEEPGLDKVRRLFALKGIGLGAAWTYGLEFFSWRQFRSGKQVGALVGLTPTPYQSGDSDRELGISRAGNRWVRGLSIEIAWGWLRHQPRSALSLWYQQRFARGGPRARKVGIVALARKLLVALWRYVETGVLPEGAELKA

SEQ ID NO: 73469 - protein, 362 aa, unidentified
MYIGVDTHKKAHVLVAIDDQGQTGGTHKMANTPSGWAAALSWAQSLDATCIWGIENSGSLGKGFAQFLLIQGESDVHEIVPHRTAQYRKRGRSQDKTDAADALAMARLLRAETAFLPTVPRDDVSTELRLMSDHRDNLVAERTRLINQLHAQMLQIDPCDEEKSGALTSLAGVRSCRDLEVPHAEGVVRTRLLIVRQLVSQILQLAEAIETVETALKQRIQASETPLVQLCGVGTIIAAQLIGELGCSPRVHSAAALPALAGIAPVAVSSGGKHGHRLNRGGNRRLNKAFHMIALSQLRCEPLARTYYAKKRAEGKTARVALRCLKRRLVDVVYRLWCKGEGEQVDDVGTHRANPALCRSAA

SEQ ID NO: 73470 - protein, 386 aa, unidentified
MPHTATALQAFIDALVARADGDPSTVAIGIEMPRGAVVELCVERGFAVYAINPKQLDRFRDRFSPAGAKDDRRDALVIGDSLRTDPQAFRRARLDDPRVIQLREWSRVDEDLGDELTRLANQLRDLVYRVAPGRLALCPAADEPWLWAVLRQAPTPAAQRRLSPRRLERLLRDHRIRRIDPAQLHDVLQQPSVYTTPGVVEAVAAHMQLLLPRIELVALQRRDAEKQLEHWLEALDAPEPPTGDQREHSDVAIVRSMPGIGTRVAAKMLAEASQPLVDRAYHVLRTIMGVAPVTKQSGQRRTVSMRYGCNARLRQAGYHWARAGAQWDPPSRAYYTQLRARGHSHGRALRSVADRLLRVLVASLKHGQLFDPAHGQPTPAAAAVGV

SEQ ID NO: 73471 - protein, 354 aa, unidentified
MSKDKYVAMDVHKASVVVGIRDAGGKYITEAIVETKASTLVELVKGMSGPIHLAFEEGTQSAWLYDLFKPHVAELIVCDPRRNKLLEEGSKGDRIDVQKLSELFCKGMLKPVYHGDHGTRALKEMARNYESLVSDRTRVKNRLKAIYRGRGISYQGAEIYQTKQQKEWLAKLNERGVKRRAELLYQQLEGLDGLVQEARRGLLAESRKQKVSRGLRRISTLGSISVALLIATVDTPHRFRTKRQFWTYCGLAVVTRTSSDYYFDQGQLRRSRRPVVTRGLNQNYNRRLKRIFKQAALTASRRGPFKPYYERLLARGLSEELARVTVARKIAAVTLAVWKKGAQFDPEKILKPTT

SEQ ID NO: 73472 - protein, 360 aa, unidentified
MQEITRVGVDLAKRVIQVLAVNAAGLRVTGRALPREKFLPWCAQLPPGCLVAMEASSSAHHWARKLIKMGLDARIIAAHLVTPYRIQGRSGKNDANDAAAICEAASRPQMHFVPVKSVEQQSMLCIHRLREGFKTERVACINRIRGLLAEFGLVFPQKPEVLRQALPDVLEDASNELGGLARLALQRAQQQWEELDAHMQWCDQRIAAHLKTNEQVRQAQQLMGVGPVTASAVVATVGDFRQFKNGAQFGAWLGLTPRQNSSGGKNSLGKITKRGDMYLRMLLIQGAKSIVQTAQKRDDPISKWALHLREKSGWQKAVVALANKNARILWAVFVRGKAFDANHVSVKPTGAVAPIHAVLA

SEQ ID NO: 73473 - protein, 386 aa, unidentified
MQASTQGTPTADNCGTIFVAIELSQKKWLVTLHSPDRGRMSRHNLEGGDHAGLLALIAKVRARAAQKLGYEPRVVSCYEAGYDGFWLHRLLVAAMITSFVFDPSSIAVEQRSRRAKTDRIDGELLLRTLMAYLRGEPRVVRVVHVPTVEQEDARHAGRERDVLVKEQTAHTNRIKALLRLVGMAVGNPRRKDWLSWLERQRDWQGQPVPPHLMSEIKREHARLMTVREQLAAVEQSLEQSQIGDAAAAPTVLAKQCQLLRRLKGFGPAFAMSLASELFYKDFRNRREVASYCGLTPSPWQSGSIDREQGISKAGNRRVRQKVVELAWLWLRHQPESALSRWFCSRTLNAGKRARRIAIVALARKLVVALWRYLETGLVPEEAVMKA

SEQ ID NO: 73474 - protein, 365 aa, unidentified
MIVIGTDTHKQSHTAAALEEGTGRVIAEQTVRAKRRSFDDLLLWGRRLDTERVWAIEDCRHVSGALERFLLARGERVVRVAPKLTAGARSAARERGKSDAIDAVAIARAAIREGVDTLPAAQLAGPELDVRLLVDHRERLVAQRTRLSNDLRWNLHDLWPELEVPARGLSAVCWQERIGGRLARAEQTTRVRIARDELRRIRELTRTINELERELAALVADVAPQLLAERGCGVLIAAKLVGEIAGVQRFDSDAKLARIAGSAPVPASSGQSQRHRLDRGGNRQLNCALHRLAVTKGRLDPDTAAYLARRQAEGKSRREAMRCLKRHLARRVWHLLQPPAASTPTPQPPAVTIHCNTPFNRFSLT

SEQ ID NO: 73475 - protein, 342 aa, unidentified
MYYVGLDIHKKTISYCVKDASGCIHKEGKIDATRRELDGWMKTLPQPWTVAMEATIFTGWVYDHVLPHATEVKVAHPVMLRAIAAAKKKNDRIDAGKIADCLRCDFLPECHMATAEVRDRRRTLRYRHLLVRQMVQMKNRISGLLLETGVTHNKQRLHKVKYFRELLSGNDEVTESIRPLLQLSRDTIVRLQKTEYALISSLQRDPLLAERVQRLRTIPGVGPITALTWALEIGDVSRFRSVKQAISYCGLCGEEKSSADKVMRTPLSKQRNKHIQHVLVEAAKLAPRYSHELALVREKELQKGNPNRATLAVARKMVAYLLAVDREQRDFVPSEERSEAVA

SEQ ID NO: 73476 - protein, 339 aa, unidentified
MQVTTIGLDLAKNVFQVHGITKDEEVVFNRPLRRAQLLPFFSKIEPCLIGMEACSSAHHWARELTKFGHEVRLIPPIYVKPYVKRGKSDAIDAEAICEAVTRPTMRFVAIKTVEQQALLSLHRARSLLVRQRTQLINGLRGMVAEFGVYIAKGLARVVGFAEDILSGEVLDLPDIANEVIHNLCEHLMVLHTRIRWYEDRLKLVAKEDARVRLLRTIPGVGAVTASAIIASIGDGHQFSNGREFAAWLGLTPANKSSGGKEKLGCITKMGDQYLRSLLVVGMTSLVRQTKSHPERASKWLISLLERKPARLATVAMANKTARIVWAVLTRNEPYTPHTA

SEQ ID NO: 73477 - protein, 341 aa, unidentified
MKNLFIGVDFSKEKVDVAIIFADGLTETAARVFNEFKTTVSGYKQLVKWVEQNSYGIDSSLWLFCGENTGDYSKGLCNFLYGKGYDMWLENAKSIKDASGLRRLKSDRADASMIAEYAMRNYDKAIMYEPLSESLAQLRELFLYRQMVVRHRCSFQVRRGEKKLTMEKSPIKTMISQSGRHIVSELNKEVEKIDKRIAELIKSDEELTEVFTIVTSVPGIGMQNAVCLMVYTDNFRRFNYDSRKISCYYGIAPFGKDSGSSVHSDPHVHYMANRQIKAMLTQAALAAVKFNPIMASYYMRLVERGKKKQVALNNVKNKLVHLVTAMVRNRQLFTPEYKITA

SEQ ID NO: 73478 - protein, 371 aa, unidentified
MEHTRFIGLDIHKERISVAVAQSGRSGAVEYLGEIINEPGAISKLCDRLRRPGKPLAFCYEAGPCGYGVHRQITSLGHRCDVVAPSLIPTKAGDRVKTNRRDATMLARLHRAGELTPVWVPDADHEAMRDLIRLRSVVRQIVTRARQHLQGFLLRHGRKHGGGTAWRMAYRRWLSTLAFEHPAQQIAFQDYVDAVMDAERRLKRVEEQIFSLLPEWNLRPVVDGLQAMRGIALINAVVLVTEVGDFTRFSNPRQLMAYFGLVPGERSSGETVRRGAITKTGNAHARRALVEGAWAYRMKARIGRHKVDRIEALPKVVRDIGWKAQVRLCARYRRLSARGKTANVVNVAIAREMVGFIWSIACTIQSAPKAA

SEQ ID NO: 73479 - protein, 369 aa, unidentified
MNATTAIANGATIVGVDLAKSVFQLAVANHAWKVIEAHRLTRTQFERWFSNRRVELVVMEACGSAHHWARWLVSLGIAVKLLPPAYVRAYIKRNKTDAADARALLEAVRCAELHPVPVKSLEQQALQALHRTRSLWMATRTSRINALRGFCREFGIVIAQGSRLGVEQISRVLADPHSAVPQLIRSTLVLLIEEIRLLETRISQLERELTLLARQSSACTILLSIPGIGLLISTAMLAATTGNVQHFGDARHFASWFGLTPKEYSSGSNRHLGRISKRGDRYLRMLLTHGARAVLRAATVAQQAGRALDPLRRWALAVQTRSNHNKAVCALANKLARICYATLRDGTSYGEPAPRLNKKSDRAAFPLAA

SEQ ID NO: 73480 - protein, 390 aa, unidentified
MVFIGIDIASKKHDCCIMGEDSTVLTPVFTFENNAEGFDILLKNIRAHSRSIDEVKIGLESTGHYSTNLVAYLQARGFSLTVYNPLQVNLFRKAQTLRKTKTDKVDARCLALMLKSCDSPTFKPQAFETAELKTLVRHRTRLVSMRTRLKISVSRLVAILFPELPGAVSSIHQTTCHALLLEYPTAKAIADCHLTKLTNLLYERSKHRYGKDKAIEIKALASNSIGLNSVATGFELQQTLRLLANLRTEIDTLDKLIKAQMLKMDSPILTIPGISFTLGAVILTEIGNIHNFDNPAKLLAFAGLDPSAYQSGNFTATQTSMVKRGSAYLRWAVLQAALLVSHLDPVFKAYAQKKQSEGKHHFVVQSHVGRKLIRVIFHLLKSGTSFKSAV

SEQ ID NO: 73481 - protein, 411 aa, unidentified
MDVLYKTCCGIDVHKMKLVACLCKGHKQEIKEFSAKTKDIKAMTNWLEENQCEMVAMESTSVYWKPLVNIFEMRGLNYMIVNAKDFKAVPGRKTDVLDSAWLADLLRHGLLKSSFIPSREQRELREATRYRKAITEERARALNRLQKLLEGANIKIGSVLSTITGKTTMNLLDYVLNNDEMMDEKTAETLIISRISASVKEVTEAMEGIMTPFQKMIMKQVLTHLHELSERIEEMDIIIDTYMAEYWGAIKKLEQIPGVGKKSAEIILAEIGLDMNQFPTAGHLASWAGVAPGNNESAGKRKSGRTRKGNKILKSTLAQAAKSAAKNKNSFFHAQYQRIAIRRGKNRATLAVAHSILIAIYHLLKDDQEFIDLGSDYYYQFNTEKKINSYLKKLAALGYRVDEHSTISPVG

SEQ ID NO: 73482 - protein, 391 aa, unidentified
MIYVGIDVAKDKHDCFITNSNGEVLFNPFTIPNSMNGFHELLDKIKTTTSTLDDIKVGLEATGHYSYNILGFLLENKLVTFVINPLHTNLYRKSISLRKTKTDKVDAMTIAHMLMANLDLKPYSITSYHNQELKSFTRYRFEKVRQRAKLKTSVKRLITILFPELESLVTTVHMKSIYDMLYEFPSAKDLSNAHLTRLTNLIHSSSKGRYSKDKAIIFRDSARNSIGSFMPAKALELKHTIKLIRELDTEINEIEGFIKNIMDDLNSPILSIPGIGYRMGAMILAEIGDFHKFSSPDKILAYAGMSPSTYQSGQLTSSYSHMEKRGSKYLRFALFNATKFVCNWEESFARYLLKKRNEGKHYHVAISHATKKLVRLIYALEKSGNTYRKAA

SEQ ID NO: 73483 - protein, 405 aa, unidentified
MNSVGIDVSKGKSMIAVMRPFGEVVVTPYEVRHTASELRELAHSLKSLDGETRVVLEHTGRYYEPVAQTLCNAGIFVSAVNPLLIKEYGNNSIRKVKTDKADAMKIARYGLDNWAELREYTIMEKIREQLKILNRQYGLYVKNKTALKNNLIALLDQSFPGVNAFFDSPIRADGSQKWVDFAASFWHVDCVKSLGIKAFTERYRKWCKRHRYNFNASKAVAIYEEAKELVPTLPKNGSTKVLITEAIAQLNANSRTVEVLRAEMNRLAMQLPEYPIVMAMYGVGTTLGPQLMAEIGDVRRFAHRGSLTAFAGVDPMPNQSGNYERQSNPSSKRGSPYLRKSLFLVMNVLLQNAPTDDPVYQFLDKKQGEGKPYYVYMTAGANKFLRIYYGRVREYLSSLEDTTLS

SEQ ID NO: 73484 - protein, 404 aa, unidentified
MSIIAFDVSMGKSYMVIYNTSRCCVFEGEILHNKIHFEKLYQRIVALVQQDGHTPEIVFEATGVYSRQLERFMNDHGFPYCLLNPLESKLQTASMRMHKTDKSDAHRLAQTHFTSDRKNKIAQDDYYDQMRSLSRYYHELDQELKLVRSRIHTLLQLTFPEIETLFTGKSELFLNILQLFPHPDCVKQRSKTVIRNRLLANTSKKLAPKTAEKKAIQLLEIAEYSYPAVDEDDIRCEQLKYYAKRCLAILRQREEVIKQMADLSQERKDYQVLMSFPGIGTNTAVRLIAEIGDIHRFKTNKQLNAYAGIDIRRFQSGTILYKDKINRRGNKHLRKILYLTIQNMIKQRRFGDNHFVDYYDKLKTQPYNKRHKVASIACVNKLLKCLFHLITHNLHYDYQIAAGK

SEQ ID NO: 73485 - protein, 360 aa, unidentified
MKIVGVDLHAKQQSIAMLDNQTGELTERVIRHEGNAVREFYAALEGSVVVGLEATGSMQWFLELLDELGIQYRVGHPAKIRAAEPRKQKHDRRDARLILELLTANRFPDIWMPSIEQRDLRTRLRDRHQWVKMGARLQHTLQSIALNHALRKGISLWRAAGLETLQRLPLPPYTRQRRNQLLSLYAELQKRIQELDRQVEEQAQQRSQARRLLTHPGVGPLPALASEVFLGDPSRFTTAKQVASYIGMIPREYSSGQRQGLGTLTKQGNSLLRYLWTEAALHAVRKDPELKRFYRRKLIQKGMGKARIAAARKLGIRLWIMLRDQIEYEEFCRRGKLRQNGEAHAGMPNFNSGPATAVTG

SEQ ID NO: 73486 - protein, 314 aa, unidentified
MIIALRCVGIDVSKPMLDIFDDAIGVPERIANASQPIAQQVARWRNNDVFVVFEATGVYDRALADALRQAGIRYARVNPARARDFARASGRLAKTDAIDARMLAAFARAMTPAAEPPPEPARNILAFLAKRRDQLVHMRAQEKNRRSEAHDPAMAEHIAVHIDFLSREIEAIEARIKAFIKAEPQICEQARLLRSAPGIGPVACMQLIAQMPELGHAGPKQVAALAGLAPLNVDSGSHRGKRAIGGGRKRVRDALYMAALNAVRRDPNIKTFYQRLRTAGKPAKLALIAVARKLLTILNAMLRDQKIYAVPSTA

SEQ ID NO: 73487 - protein, 347 aa, unidentified
MVHVGLDLSRTRLDVHVMDESGAPLVVTTALPEAGGLAALAGRIGAEFGGPVYAAIESMNGARFVHDQLELAGWQVEIADAQKVKGLAPLACKTDKIDSWVLAELSRRDLVPAIWLPTPAVRVERERARWRLHLVRHRTALKNRIHATLLAFGHPCPVSDLFGTGGRELLARLALPEPWAGDTTAALQLIDELDHEVTECERVLRQVGADHRYVPLLMTTPGIGWVLGYTIAAEIGDIARFASPAKLAGYTGLCPRVYQSGGKDHRGPLAKNGPKYLRWALIEAAVHAARHPVYADRYRRTKTRLGRQRGPKVAQVDLARRLAEAIWHMLSTNKPFAPAGAALSLAS

SEQ ID NO: 73488 - protein, 433 aa, unidentified
MKVLYERVAGIDVHKEMVKVAIRSPGEKPWTRKTEVLEFRTFYGVLQAMARELRRRGVTHVVMEASGVYTEPVYYALCEQDFEQVAVINPAHAKALKGHKTDAKDCARLAELFECGLLRGSYIPPAELKEVRDLTRYRIKTVQARTSEIQRLAKALESAGIKLGSVASDITGVSATAMIESLIDGERRGAVLADLAKGRMRTAGKLADLSMALTGRFTEHHALLCRLHQDRIAGFDAAVADLDERVAGKAARWRREADLLTSVPGFGDVVAQAWLGEIGPAPHRHFATCEKLASWVTLCPANNISAKKRKHGRTGDAGTYIKPMLIQAAWAAIRVKGRLQARYNRLVRRFGGDKNPAAKKKAITAIAHTLLKIAYQVLKSGTPYHEPGADFYVRRESPAQRQAFLERQLQKLHPGCTITITISPPEAALTPGA

SEQ ID NO: 73489 - protein, 368 aa, unidentified
MMHTTTFVGLDVHARKIVAAALDTMTGEVHSATFGYDAAAVADWIRSVDPSAKCVYESGVTGFDLQKRLTGLGVDCAIGAVSKMIKPSADRRRKNDRNDAEFLARMLSVGNIVEVWIPDDECEAARDLVRALDDARDDLRRCKQRLSKFLLRHGLVFDETTPTGRRKGNWTAAHWAWIRSIEFSEKSDNDVLAYYIDAVRQAAEDKKRLERLVGAEASKPRWKKRVDSLRCLKGVDIMTAADIVFEAGEFARFGNARAFAAWLGLVPSEHSSGEKIVQGGITKAGNRHLRRVMVEAAWHYNHCSAHSKDLSAGQAPDPAAMRHAAKGVRRLVERRRGLLERGMQKNKANVATARELACWCWAVGCMAE

SEQ ID NO: 73490 - protein, 358 aa, unidentified
MVDKVTEAAVVGGVDTHKDLHVAAVVDQNNKVLGTQYFSTTRQGYRQMLAWMTSFGTLKRIGVECTGTYGSGLLRYFQNAGLEVLEVTAPDRMERRKRGKSDTIDAECAAHAAFSGIRTVTPKTRDGMIESLRVLKTCRKTAISARRVALQIIHSNIISAPDELREPLRNMTRMQLIRTLGSWRPDASEYRNVTNVYRISLKSLARRYLELHDEIADLDVMIAAIVDELAPELIKRNAIGYESASQLLITAGDNPQRLRSESGFAALCGVSPVPVSSGKTNRYRLNRGGDRAANSALHIIAIGRLRTDAKTKEYVARRVAEGHTKMEAIRCLKRYISREVYTLLRNQNRRINSIPITA

SEQ ID NO: 73491 - protein, 369 aa, unidentified
MKQPITYVGLDVHKDTIAVAVAEAGKRGEAREHGKIANTAAALRVLAVKLARGGGDLRFCYEAGPCGYGIQRQLSAAGHECVVVAPSLIPRKPGDRIKTDRRDAINLAKLHRAGELTSVWVPDQAHEAIRDLVRARLAAVRTLRQARQQLSGFLLRHGHHYNRPARTLMHRRWLAGLRFEQPVHHIVLEDCIAAVEAATARRDRLEGHIEVALPEWSLAPVVHALQALRGMALVAAATVVAELGDIARFANPRQLMAYLGLVPSEHSSGDTRRQGRITKAGNGAARRILIEAAWSYRFPARISREQLLRQEGLAEPIRDAAWKAQERLCRRYRKLARAGKPPTVVTAAIARELSGFVWAIAQLARPMNG

SEQ ID NO: 73492 - protein, 411 aa, unidentified
MTQAEYLVRVGIDWASESHQICILDKDGNRTEHPVPHTSAGLMALATELAALNPEDPGRVAVAIEVPRGPVVDTLLERGLHVFALNPKQLDRFRDRHTVAGAKDDRRDAFVLADSLRTDRPAFRRVQLDDPLIVELRELSRLDDDLREELSRLSNRLRAQLHRFCPEPLALCPAADEPWFWALLDRAFPPPRPKPLSIKAVTAVLKVHQIRRLTVDTVHAALQVPPLRVAPGTIEAACTHIALLLPRLRLVHDQRHRTVGARIEKLLAELAKEDGEGKHRDVTILRSLPGVGRLVAATVLAEASRPLAERDYQTLRAQAGSAPVTRQSGKKATVSMRLACNRRLRNAVYHWARVSVQVDPRCREHYDRLRQGGHAHARALRGVVDRSIGVLVAMLITRTLYDPERRYPKAA

SEQ ID NO: 73493 - protein, 454 aa, unidentified
MSEPSTQPNSPKNPLPPHPPEPAPPPAPTIVCWVGLDWADQKHCLVVRTAPAGSAKTHQVDQKPEKLDEFFLRLRAQHPQGRIAVALEQSRGPVLYALMKYDFLTLYPVNPRTLADYRRAFNLSGAKDDPLDADLLCELVCQHADRLRPLAVEDAATRQLRLLTEARRNFVDERTGLSNRLGASLKCFYPLALELVGEELASPMALDLLRRWPNLAKLQAAKPGVLRAFFYAHNSRSEDKITARLEAIQKARPLTQDPALLEPLQLQTQRLLAHLCSVQQTIEQYDERIGQVFATHSQAWLFDPLPGAGPVLAPRLAAVFGTIQANCQGSLDLLCFSGVAPVRKQSGTQQVVHFRYARPIFLHQSIVEFAKCSIGQCDWARLLYEHELKKGKSKWMAIRKLAFKWIRILWRCWQARQSYDETKYLRSLQRDGVEIYRSLYDALPPLQTTVVNNS

SEQ ID NO: 73494 - protein, 344 aa, unidentified
MKYFTGIDVSLRSVSICVVDEAGAVLSETKVAAEVDLIVDCLRRCSVEIKQVGFEAGTLTQYLTYGLQAAGFEVICLEARQVAATLAAMRNKTDRNDARGLAQILRSGWYRRVHVKSLESHQVRALLTSRKTILSKCVDLENELRGLLKIFGVRLAPRVGHGSFDQAVRTTVTADPLLARALVPLLDARTVLYKTYLKLDNAVKAIVRSDPICQRLMTVPGVGPVTSLTFKVGVDDPGRFRSSRTVAAHFGLTPRRYQSGETDNPGRISKAGDADVRRALYTAAHALMTRSEAWSTLKAWGLRLAKIRGHRRAVVAVARKLAVILHRMWLDGTGFRASRIEVAA

SEQ ID NO: 73495 - protein, 345 aa, unidentified
MKIVGCDLHTRYQQIAMLDAETGELVERRLEHESGEARAFYAGLAGRVRVGIEATGHTRWFERMLGELGHELWIGDAARIRAAMVRKQKTDARDAAHVLELLLSDRFPRIWRPSLEERDLRQLVWHRQKLVWMRNAVGNQLHALAMGEGVCRKKKLFTKKGRVELEGLKLGRWASHRRQELLRMLDQLDASRKELDQAVAEQAEQNPAAVLLMTHPGVGPVTSLAFVLTLGPVQRFERSKQVVSYLGLNPREHSSGGRQRLGTISKQGNPMMRSLLVEAGHTAARLDAELRQDYQRLKLRRGSGVAKVAIARKLAVRMYWMLRSPASYAQLVRMQGSPRGTLMGP

SEQ ID NO: 73496 - protein, 457 aa, unidentified
MMETKRRREQRSMLPVHPDAAAIDIGATVHVAAVGPARDPEPVRSFGTFTGDLHRLADWLAQCGIKTVVMESTGVYWIPIYEILEQRGFEVRVVNARDAKHVPGRKTDVSDAAWLQRLHEFGLLRGSFRPQGAIAALRAYLRQRERLLDYAAAHIQHMQKALTQMNLQIHHVISDITGATGMRIIRAVVAGERDPDTLASYRDIRCHSSAETVRQALIGNYREEHLFALAQAVELYEVYQAKVATCDEKIEGVLERLKQPGRAPAKPLRAARHKTRQPNAPAFDARGALYAVLGVDLTQIHGLGPYLALKLISECGTDLSAWPSAKHFTSWLSLAPGNKVSGGKILSSRTRPSGNSDAALLRLAATTVGRTETALGAFYRRLSARIGKAKAVTATARKIAVLFYNAVRHGMDYADPGASYYEERYRQRVLTNLKRRAKAFGYVLQPTEIKAVSMAVS

SEQ ID NO: 73497 - protein, 353 aa, unidentified
MNDTSSIAWLGLDAHSKNCVLGQLDDHGTEVKWWQFATQPQLLIKYVQAIPATDKRLMLEESNLARWLSQLLKPHVQQLVVCDARRNRLISQDHHKHDKRDAFALARLLRLNEFKPVWQPAEDQRVLFKRIAKSYENAVQRQTRLKLQLKSLFQHWGLFPAGATVFARSGRVAWLKQLPHDPLRAQALLLYELLDQALAGQAQFRRLMCQTGRQFPEVQRLSTTPGVGVVGSHLFVAYLQDPKRFAKFSRLSRYCRLGIRDRTSDDKPLGHEQLDRQGIGTLKAISYRAYLQAAKRRTGPVWDFYQASLRHTGSTTHARLNTQRKILLTLWTLWLTGREFDPKQFFRAQPIDV

SEQ ID NO: 73498 - protein, 496 aa, unidentified
MGCCALEGGDAVSAIPIRNLMNCAAQPFRWRQQEELEMNPKRSKSRHGHKMPLVHPNAAAIDVGATMHMAAVRADRTPEPVRSFGTFTADLHRLVDWFTQCGVETVVMESTSVYWIPVFELLDARGFTVCLVNARDAKHVPGRKTDVSDAQWLQRLHSYGLLRASFRPKGQVAELRSYVRQRERLLEYAASHIQHMQKALTEMNLQLHHVVADITGATGLRIIRAILAGERDPEALAALRHYSCHSSAETIAKALTGSYRAEHLFALEQALALYTAYREKASACDMRIEAVLKELSIHRGRDHGAVPPPRRRHRTDQVNALAFDVRAALFALLGKDITAIDGLGAYLSLKLIAECGDDLSSWPSAKHFTSWLGLAPSNKISGGKMLSSRTRRSGGRAAALLRLAAVAVGRTDTALGAFYRRLSSRIGKAKAVTATARKVAVLFYNAVRHGMEYVDPGASSYETRYRTRVVNNLHRRAKAFGFVLQPLEPKAGAAVS

SEQ ID NO: 73499 - protein, 342 aa, unidentified
MNTNTTGTTYQLYVGVDISAATATVAWMKPGNKVTRPFTINQTPQGYTAFQKKIIEEGFTPASVLVVMEATGAYWICMATELVEAGFVVSVINPACAHHFAKALLKRAKTDAIDAQTLAQLARLLQPEPWTPPPLVYHELQQRLHQRETLLCLQRQVSNQLHALQHNPVTITAVRSRMEALVETLKQQLKEVDAEIQQALNQDQQWAASAVLLQSIKGIGWLTAAWVLVTTLNFTTCETAEAVTAYAGLAPTLYQSGSSVWHKPAIGHTGQIRLRTALYLATLSAAQSNPVIKSFYDRLRAAGKPMKVARCAAARKLLHIAWAVVKKRQPFDQNYALKPQTT

SEQ ID NO: 73500 - protein, 338 aa, unidentified
MKLYAGIDLHSNNSVVSVIDEQDRVVAEKRLPNELERIVMFLAAFKRALVGIVVESTFNWYWLVDGLMEAGFRVHLANPTAIQQYAGLKHTDDRHDARWLAHLLRLGILAEGYIYPRQARGVRDLMRRRMQLVQCRSAQVLAMQTQLMRSTAHSMRGDQLKRVELEVLRALVVDGNVASGLQANWAVMRTLDREIARLEREILQQAKLAAQFEPLLSIPGIGKILGLCVMLETGEVGRFAKVGNFSSYARCVDSERLSNGKKKGEGNLKCGNRYLAWAFIEAAHFAVRYNARIGRFYERKAAKTNALVGLKAVAHKLARAAYHIMRTHEQFDERRAFG

SEQ ID NO: 73501 - protein, 377 aa, unidentified
MNRILKIGMDVHSTNYTLCAMEPVFGADDRIYANIQVAPDYKNILMFIEKVKQKLDPYDTYDIECGYEAGCLGYSLYNQLTSAGVKCVILAPITMLTQQGNRIKTDTRDALMIAQCLSYGGYQPVYIPTEDDDSVKEYLRMRDDHKIALKKVKQQINAFCLRHGYHYPQGKWTQMHLDWLTAIKLPPLYQETLDEYMATYFELTDKIEKYDTRIEEIAAQEKYADKVKKLGCFIGVKTHVALSLIVETGDFKRFAKGNAYAAYLGLAPGEHSSSDKINRLGITKAGNSNLRRLLVEAAWGICKGNIGYKSKDLKKRQQGNSVQIISYADRANNRMRSKYYRLIRHGKKKNVAIAAIARELACFVWGMMTDNIEERVA

SEQ ID NO: 73502 - protein, 351 aa, unidentified
MLIVGCDYHPSFQQIAWVDTESGECGERSLLHSTGEAERFYRNLKEQGVKVRVGIEATGHSRWFERLLMELEYELWVGDAAEIKAKRVRKQKNDREDARLLRTLLVENRFPRVWLADQLNRDLRQLLWHRHRLVQMRTRVMNQLQAVALNEGVQRKKGLWSQAGRAQLEAFQLLPWAARRREDLLKLLDGLTPRIQALTAEVNKQAEQYPEAQRLMTHPGVGPLTALAYVLIIGSPDRFRCGKQIGCYVGLIPSEESSANRQRLGHITKEGNSLLRFLLLEAAQAAVRSDADWRREFLHLTMRRGRQIAVVALARKLAVRLYWMWRNGRDYQKSLKFSSHVGQPGTGYGVK

SEQ ID NO: 73503 - protein, 320 aa, unidentified
MQKIALGLDISKQTIDAYFNGQEDFIRVMNNQAGIEKLIECIKNYQQQSKEIHACCEYTGVYYLPVASALHDSGIKISVINPLSIKLYGEYRLRRTKTDKQDAKLIADYCDKENPPLWTPLSEKRNTLKVLNRRIEQLNVLLNIESNRKDVSDSVIKSGISRIIDVIKTEIESCKTAIQNLIDSDEELSHNQQLLQTISGVGKTTAAWLLSVLVDIDKFENSKKLISYLGLSPIIKDSGTSVRQAKISKMGDKKVRKALYYPARAACLRSKLWRPWFEQKIKQGKHPKQIYVLMMCKIVKYAYAVIKTGQPFDENRHKPA

SEQ ID NO: 73504 - protein, 355 aa, unidentified
MDRIYIGVDFHARQQTICYLTTEEGEVHTHELKHQDKTAVRTFYAQFSGQVVIGLEASGYSPWFEQLLEELGHEVWLGDATEIRRRARWRQKNDRRDAELILDLMVHDEFPRLHRPCPQSREILRMLRYRQKLIKIRTMGKNSLQALALQSGLAKRSELFTKAGQQELRTAAMSPVMQWQRDQWFKLLEPLNERLLETMLWLKQQTKDDERISRLRTHPGIGLLTSLCVVHTLWPVTRFRNQRKVAAYAGFDPMERSSAERKHFLGISKAGSRVLRYLLVEAAHTAVKKDDDLKRFYQRLVERRGRPKAKVAAARKLLIRSYIMLRDEIDYAEFRRRAVAARLARQSTRPFVPEA

SEQ ID NO: 73505 - protein, 365 aa, unidentified
MLLGSESIPATPYMEILGMERTLNHQWCVGIDLHKDTLTACVFCGCCGEVSFQKITCKCRKQIAAYFAGLPRPHTVAIESVGFYRWLWEMLEPIAEQLVLADATQARALAGRRLKTDREDSLNIAQLLAAGRLPTCYAPPLEVQWLRDLTRHRNGFSRQHARILHRVKSIMNANNRPGPARMRSDGLIRYLKAQGPKLPARHVEMLWQSVDALALTERQMAQMERAIGEVVRRDSFHEVYEILVSFPGVALITAATVIAEVGDFKRFTDGKAIGRYAGLNPRVYASGGKQRIGHIAKTGSPDLRWILQQAAWTAIRTDDSVRRIFLRIAKRSGRKAAAVAVARKILTWMHSAVVKGEPYRTRVAA

SEQ ID NO: 73506 - protein, 337 aa, unidentified
MIYIGMDIHKPFTVAVAQDEQGNILAEDKFENNKDCFQQFLLKFPKEETKIVMESTCVWQYIYDLLEELGYNAKLSNPVRTKAIASARIKTDSIDAKTLADLLRANLVPESYIPNKEIRNLRDVVRQRKTLVKGRTQIKNKIHSVLNMHGIKMPFKTLCDKAIEWIIDEIRETTIKTVIVSYLNILEQYEHELRFINDKIEKIACQNKQAILLMTIPGIGGIRSLEIISEIADISRFKDSSKLCSYAGLVPSIKQSGNSLRFGKLIQQASRSLKYVLIETSWTIVKVKEPNQLSEFYKKLCKKKSKQKAICATARKLCCIIHAMLRKQEEFKDFIIL

SEQ ID NO: 73507 - protein, 320 aa, unidentified
MSDSLDIGVDVDSKEFVPAVADRKAGDRVANTRAGIAKWLKTLPQRCRIGMEATGRYYELLARMAGQAGHVVYVIDPRLIKNYARATGSRGKTDAMDAQAIARYVKKECDRLREYVPRTDEQQQMHDLLRKRRALVETRARLEQSFGVSKSDPGELSDLFCALAGTLSELESELQRLGRDGEHGALYKRLLTIPGIGPAVASHLIYYMTRWPLANVNAWIACTGLDPRPNESGGRTGRRRLSKQGAPMLRQMLYMAAMGLKRCRRGQPLYDELAKRGHPSTAVFNILARKLARIAWGVFKSGRDFDPAMLKVGQACFQQA

SEQ ID NO: 73508 - protein, 343 aa, unidentified
MNVTTIGFDIAKGVIQIHGVDAAGLVTVRKRLSRAGALSFFARLESCLVGMEACGGAHYWARELTSFGHRVRLISPLYVKPYVKRSKTDAADAAAICEAVSRPHMRFVPVKSRDDQALAQAYKTRGLLVAQRTALVNALRAHLTEFGLVAPLGPAGAARLIGLVRANEAPLPELARETLVELADMIEATEARIAAFDARLKRLAAGDEAIRRLMKVPGVGPVAAGTIRALAGDVTRFRTGRDFAAWLGLTPRQNSSGDKVRIGAISKAGNRELRTLLVMGQLAVLRYALAKPAKASAWLAGMIKRRPRLVVAVAMAAKTARILWAMLARGESYRPFQASTMAA

SEQ ID NO: 73509 - protein, 432 aa, unidentified
MEKMRMQAAGIDIGSRQVFVSIEGQPVKSFETFTSDLESLSNYLLNNEVTTVAMEATGSYWYVLYDILLEAELDVWLVDGRQTRQVPGRKTDVKDCQWIQQLHSYGLLNRCYVPDAMIKELRSYERLREDHIRSAGMHVQHMQKALIEMNIRLPEVLSQVHGASGTALITAILAGERDRHKLLSLCHKSVREKKGEELLKALEGHYTPQGLFALDQAYKGYLFYQGQILACDKQIQVTLEKINQDKDLPPGTQAGNRKPIRHNKPKIEGLGNHLLKIFDGRDATKLPGITDYNWLQLYSELGADLSKWPSEKHFTSWLGLSPGQDRSGKKNKSKSKGKPTVGQIFKEMAHGLLNSKYIGLGAFAKRLRGRKGPSIAIKATARKLAVQYWRLMVKGTDYVEKGIENYELMLKQQRHRLLQRLAVELNVSLVPV

SEQ ID NO: 73510 - protein, 356 aa, unidentified
MGDGSWVGVDLHARSAVAGVLNGESGELSARRVSAASGQLVEWLQTLPAPVRVAYEAGPTGFALVRACERAGIACLVAAPGKIPRAAAERVKTDRRDAERLARLLRLGELTAVRVPSELEEAARDLIRAREDARSDLMRSRHRLSKLLLRHGLLWERRAWTGEHDRWLRSIRFGGTLAVCFDESYGTVLQAKARRDRLDQAIAELAASPAYAEVVGRLCCLRGVSTLTAVALTVELGDWRRFQPATLGAFLGLVPSEHSSGEQRRQGRITKTGNSHARRLLVEAAWHQRRPLRPSIALAGRRAGQPATVRAQAEAVARRLHRRWWDLERRGKRRTIVAVAVARELAGHCWKLATIE

SEQ ID NO: 73511 - protein, 359 aa, unidentified
MRYVGIDYHKRYSVLCATDERGQELKRRRISGNSATGFAQFFSELGEETKVVMEACWNWGWLYDLLAKIDGIDEVMLAHPYKTRLIAEAQIKTDRLDAQMLAKLLRGDLIAQSHAPSAATRARKHLLRQRLFWVRLRTMLRNRMHAILDRQHGLERPQLKNFFSRRGQTWLEEVQLPCAEDQPLLKQDLEVAELLEGKIKQLDRSIGQSQSEEEKLLESIPGIGPLFSSVIATEIDGVGRFNSATKLAAYAGVVPTTHASGGRVFNGRLLWQCNKWLRWALIEASWSAIQFSGYFGSIYRCARARGKNKNIAITIVAHRMIKIIWLLLTEKRPYTETLPDRSEDGMTVVVRRKVLGLAS

SEQ ID NO: 73512 - protein, 421 aa, unidentified
METVAGVEPLAFVGVDWASEEHAVCVLGLDGRNQDAFAVAHSKDGLAKLIRRLGGLGSTGQVPVAIERPDGRVVDALLEAGHPVVPVSPNAIKSWRESEVLSGAKDDPGDAEVIAEYLRLRAHRLTVLAPFRADTRALRAVVRARDDLVEQRVAANNQLEACLDAFWPGAKAVFADVCSQIALAFLERYPTPASARSLGEKRMAAFLGQHGYSGRRPAAELLERLRAAPDGIAEGAETEARRDAVLGYARVIRALNTSIKNLDRSVSAHLGEHPDGEIFASLPRSGRINAAQMLAEWGDCREAYDSPDAVAALAGATPVTKKSGKHEAVHFRWACNKRFRKAITTFADNSRHASPWAADVYQRAIARGCDHPHAVRVLARAWIRVIWRCWTDRKPYNDTNHTAAVRLAALANNNERKKFAA

SEQ ID NO: 73513 - protein, 407 aa, unidentified
MLFIGDDWAEDHHDVEVQDEQGRVLRRARLPEGMAGITEFGELVGRFLSEDGQAADVLVCTETDRGPWVNALIAAGYRVFCVDPKQAHRHREILSSSGAKSDKGDAHGLADMVRTRRHQLREAGGDSEIAEAVKVVARAHQTMIWERTRHMLRLRAALREYFPAILAVCDMVDLSLTSRPVLVLLGKAPTPELAAKLTARQILPMLKGYRNKDAKAAQIQQILRGEHLGQPPVVTRAYAASVRSSVAVLMVIVEEITHLETEVKAHFGQHPDAEIILSQPGLGPILGARVLAEFGDAPGRYRSSKDRKNYAGTSPITRQSGKMRIVAPRYIHNNRLVDALQGQASCAILHDPDVRGYYDQLRARGTKHNAALRQVANRLVGVLHGCLNTRTRYDRNTAWAHRHTAAA

SEQ ID NO: 73514 - protein, 357 aa, unidentified
MSNKATKLDFRGQVFHIGIDVHKRNWRVTVLNNGLELKTFSINPSPEGLSSYLQSNYPGGEYYTAYEAGFCGYWIHRKLESLGIKNLVVNPADIPVNFKETVRKTDTIDSRRLARALYSNLAHGNYIPSLEQQGFRSLCRLRKQLVKDQARVKNRIKSFLDFSGIKVISQNEISHWSGLFLNYLSNLDLGNEHSNETLSRMLGQLMSLRNQIADLVKRLKTIVRQDEAILRVMNNLMTIPGVGFSCAIVLYSELMDINRFSSVDKLCSYVGLVPDLRSSGESEYTLGISKLQLQFLRAMLIECSWIAIRKDPALTAAFNTLSMRMKKQEAIIRIAKKLLTRIMYVWRNNEPYICSIV

SEQ ID NO: 73515 - protein, 408 aa, unidentified
MEVLYQCCCGIDVHKKSVTACVQWAENRGKVRKEKRRFGTFTQDLEELATWLQGCGVTHVAMESTGVYWKPVYNVLEGRFELLVVNAQHIKAVPGRKTDQRDSEWIADLLQHGLLRGSFIPPRPTREMRDLTRYRVSLTEELNRVANRIQKVLEDANLKLASVATDILGASGRLMLEAIVSGQQDAEKLAGMSKGQLRDKIPQLQLALEGRVTEHHRFLLRQLLDDLQHTESKIAAVEAEIDRRNRPFESEVARLCTIPGVGRVTACAVLAEIGLNMDQFPSAGHLASWAGLCPGNCESGGKRLSGKTRKGSPTLRRCLCQAGWAVTRRKNSYLASLYARLAARRGSKRAVIGVAHALLVIMFHMLKRKTDYHDLGADYFDRLNPTRLTHSLVRRLERLGHTVILQPA

SEQ ID NO: 73516 - protein, 442 aa, unidentified
MSKTRLFDSWTFRLALPAPFDDPQFSGAKDIGLSQYNTAGRTRKATLHAPTLRAILAYAKLTLASNQGQSTEGLGAIGHAILALGEDTRVIMEATGRYHEPVAAALHEYGIYVSVLNPLYIKQSGGGSIRKVKTDKADAIKIAKYGLDNWVDLREYTPMEAVRQQLKLCSRQYNLYMKTIVALQNNLISLTDKTFPGVNELFSSPERADGHQKWVDFVMTFWHCDCINLLREKAFTERYQKWCKRKGYNFSEEKALDVYASSGGHFTTLPKNANTKLLITTAAQQLMTAKTTLVAIRTEMLRLAKQLPEYETVHAIYGVGEITAAQLMAEIGDVHRFPHRSSLVAFAGVDPAVNQSGKHEVQSNPSTKRGSPHLRKTLFQIVCTYLKKSPAAEPVYQFLDKKRSEGKPYFVYMTAAQNKFLRIYYARVKECLAAQDSSTIQD

SEQ ID NO: 73517 - protein, 385 aa, unidentified
MVIIGVDPHKRIHVASVVEPATNHQVAALQIEASLAGYRRLLRWADKFGERSWAVENTRGLGCHLAQWLLARGEAVEDVPSTATARVRELSRGGRRKNDVIDAAAAASVAALHGDATPVLAEDITTVLGLLDERRANLTTQRTRLINQLHAVFRDVLPGGAPKGLTAAIASALLAGIRPVGPVEVARKQLARDLVAEIRDADRRLKLLTAQIAQTVAATGSRLMEVDGVGPVVSGRLLARTHQMSRFATAAAFASYAGVAPVEVSSADRLRHRLSRGGDRQLNLALHIVAVNQIRMPGSAGRAYYDTKIAAGKTEKEARRCLKRRLADHIWRLMIKDEHGAAGPGGQQGATMQSSAAGSTPTTSSSDKSLPEPATPDSTTGQTAA

SEQ ID NO: 73518 - protein, 345 aa, unidentified
MSKNTVIGIDLAKTSFAVIELGRGGDVKRRKTFRRDGLKRFLAKHEPATVALEACGSAHYWGRWLEAHGHEPVLLPPQHVKGYLRGQKNDYNDAQAIAEACLHGAIRPVAVKSIEQQDEQAFHAIRRSLKVESTRLVNQMRGLLAEYGLTVPKSVSAFRRRVPELLEDAENDLSARFRMLLNRQWRRLQALLEEQVWYDEQLQQQAKEDDTCRRLTGIPGVGPVVASAVKSWMGDGNQFRRGRDASAALGLVPKQYSTGGKQSLYGITKRGDAYLRSLVVHGARAVVRTAKNKQDALSQWALAVEARRGHNRAVVAVANKIIRMAWVVVARQENYRPAESQMAMA

SEQ ID NO: 73519 - protein, 390 aa, unidentified
MEARTVNDLLPAASHDDAVGCLVAIELSKKSWIVAVNTPLSDKISRHTLKPGDGKELLDLCERIRTRVARETKRRVEIVSCYEAGYDGFWLHRLLEAHGIRNYVIDPASLQVDRRARRAKTDHVDVERLLRSLMAYLRGEPKVWSVVCVPSVAEEDDRRLNRERGRLINERIQHVNRIKGLLAIHGIYDYQPLRRDRMLRLERLRTAADGQTLPPRLKAEILRELQRLELILGMIKTIEAERDAIASPKTETEHTNAKKIQDLAKIKSIGPEFATTLIGEVLYRSFDNRKQLASYVGLTPAHFQSGAMCRDQGISKAGNGKARTVMIELAWLWLRHQPDSPLSVWFRERVGKLKGRIRRITIVAVARKLLIALWRYLETGLVPKGAILKA

SEQ ID NO: 73520 - protein, 359 aa, unidentified
MINVGVDVHKRICQACLKDERGSIVEEFRFPNNHEGATRLAMIIKKYGEARVALESTGNLWVRLYDRLDEEEGIDVILTNPKKTRMIAEAKIKTDKIDARILADLVRADLVARSYVPPKEIRMQRALLRERISLVESRTMIKNRIHNLLDKYEIQPTYTDIFGKRGREWLRTLQLPSIDQTILEVNLQRLQELEAHINSFTGKIAQEAYDKPEVKLLMGFTGVDYYSAMLLASEIGDVTRFPSAKKLVRYAGLAPGTRQSANKTVHGHIVKEGNKRIRWILVEAAQHASRHDPRLRGFYLRVMKRRGYQRAIVAVARKMLVSMYHVLSKNEAYRGERTELLERKLKRLEWKATHSLQAI

SEQ ID NO: 73521 - protein, 379 aa, unidentified
MATTKQALLNDTSVKLMLYMALELSASKWKVALADGQRAASQHTLVAGDVGGLLLLIDKAKKRCGLQGKVRVVSCYEAGRDGFWLHRWLLEQGIDNVVVDSSSIEVNRRARRAKSDTLDSAKLYEMLVRYVAGEKRVWRVVRVPSVQQEDERRLHRELERLKKERNAHVNRIRALAVLHNVRLQRVGGRGWSERLEELKGQLPAGMVAEIERQSARAQLVGEQIAALEKSRQEQLQAMIDQQQDGPLLALLKLRAIGVQTAWVLVRELFSWRRFSNRRELAGCVGLNPSPYDSGASQREQGISKAGNRRVRALLVEIAWYWLRYQPHSALSAWFNRRFGGAGKRMRRVGIVALARRLLIALWRYVEQGVIPEGAQLKRP

SEQ ID NO: 73522 - protein, 408 aa, unidentified
MKRYYMGVDWADEFHQVWVSDSQGKKVAEMKIEQSPKGMSELGRWLHERKAEDIELWAAIEKPHGRIVDFLLDHGVVVYPVNPKAVDRARDRFRMSQSKSDSFDAYVLAEFLRTDHVHLRALKPDSEQAQELKMLTRDHHRLGRHKTRLLNQIEVTLKEYYPRPLEVFSDLESKIALDFLEQYPTPRALSNLTRRKWNRFAKREHHLGEERCKELWEKLSQPQLKIPEHVVRAKSQLLLVLVIQLRSLTEAVKNYSEEVERFFASMPAAKLVKTLPGGKSGITVPMLWAELGDAKSRWQSFRHLQAEAGGVPVTKASGKSRVVQFRYACNKLLRYASYWFSFNSLNRCEWAKKYYRDQRAKGHSHHEALRALGAKWLKIIFVMWRDHKPYDENYHLANIARQQMRQAA

SEQ ID NO: 73523 - protein, 344 aa, unidentified
MLYVGLDLSRKRLDWQALDPEGAVAAVGAVPPDRDGLVRLADRLDERPVLAVIESMTGARFVHDQLELAGWDVRIADAVKARGIAPLACKTDRIDCWVLAELARRELVPEVWLPDPAVRAERERARFRLHLVKHRSSLKNRVHAILFQHGVPNGHSDLFGVSGRRLLERLALPEPWASTVQASLALIDTLDEQISGCERELRALGADHPYIPLLMTCPGIGWVLAYTIASEIGEITRFATPRKLVGYTGLCPRVDQSGERDRRGPLRKNGPNYLRWALVEAAHTACRHPAYAPVRERMRERHGQKRGSKIAAIEIGRRLSEAIWHMLTNSQPFAPAGAAASLAT

SEQ ID NO: 73524 - protein, 471 aa, unidentified
MAAGKGKADGTGVPGRGGDGAEVAEDSTQVVEYAAAIDVAKGAGMVCTRVPGSRADRRRQQTWRAEARFTEVTALMDHLRCEGIQRLVLESTSDYWRIWYYLAEAAGLEVWLVNARDVKHLPGRGKSDKADCVWLCKLNERGMLRRSFVPPQPVRDLRALTRTRARLAQDQARHQARVEKILEDALLKISVVISDLFGTSGRRFLDALVAGERSPAALAALGDKRLRATRAELAEALTGRFRDIHATEIAVHLRLIDAINAEIGLLDERIEQQLALVPGTAPACAACGLAGGGHVPGCGDSGAEPLGLAGRLGEITGIGAVNGRAVIAELGTDPSQFPTPGHAAGWARLTPRSQQSGETAKPGRTGKGNRYLRGALGQAAMTAARTDTRLGAMYRRIARKRGKQKAIVAVSRVICETAWMLICDPSARYRELGPDYYHPLSTARQTGAKIREIERLNPGKKVILADVGAAA

SEQ ID NO: 73525 - protein, 457 aa, unidentified
MTKHRKKAKSRSFKLTKLPKQLQHINLNAAGIDVGSERHLVAVPEGRDDISVREFGTFTGDLEALAAWLKKCGVTTVAMESTGVYWIPLFELLERRGFEVKLVDARHVKNVSGRKSDVLDCQWIQQLHTYGLLAGAFRPPDEVCVLRSYLRQREMLTQAASMHIQHMQKALQQMNLLLHNVVSDITGATGMKIIKAILAGERDPRVLARHRHELCKHSSATIAKSLVGNYREEHLFALRQAVDLYETYQAKIADCDQAIIKQLENQPNVSDDDPPPTDKPIKARDRVRDGVDVRELLFKKSGVDLFTVPGLGADTLLTLASEVGFDLSPWKTEKHFASWLGICPGTKRSGGKVLDAKTKRNPNRSAQAFRMAASSLHHSQTALGAFYRRIKARTGGQQAVTATAHKIARIYYAMLTKGTSYVELGQQAYEQRYKERRLDHLKVQAKSFGFQLVPCTS

SEQ ID NO: 73526 - protein, 343 aa, unidentified
MQAVTTIGLDIAKSVFQVHGVDATGQVVIRRQLKRRYVLAFFERLRPCLVGIEACASSHHWSRELQALGHTVRLMPPAYVKPYVKRQKNDMADAEAICEAVTRANMRFVPTKTPEQQGGLMLHRTRHLLIRQQTSVINAIRAHLAEFGIVAPVGRKGIEELLGVIADPSDKRVSDVVRACLAALGSQLLGLKKQILDFDRMIMAWHRSNQTSKRLNCIPGVGPLLATALVASVADPKAFRSGRNFSAWIGLVPRQHSSGGRNRLGSISKQGDRYLRSLFVAGAFAVIRYAKLHGTKYRPWVAALLARRPTKVAAIALANKLARMAWALMARGERYNYPAGLRV

SEQ ID NO: 73527 - protein, 338 aa, unidentified
MKAYAGIDLHSSNNYIGIMDQDYKRLFARRLPNKLDNILRVLEPFKANMEGVVVESTYNWYWLVDGLQEHGYTVHLANPSAIKQYEGIKHTDDKWDSFWLAHMKHLNILPEGYIYPKEQRAVRDLLRRRLFFVRHRTANILSLQSTVTRNLGIKISGNDIKKLQLDDASDLFDSSNLVFMAQNNISTIKHLRKIIKGIEKEVKSQVQLRKEFVMLLTIPGIGLILGLTIMLEVGDIDRFSKVGNYSSYCRCVSSKRLSNGKKKGENNKKNGNKYLAWAYVEAAHFATRYIPRAQKFYQQKMAKTNGAVATKALANKLARASYFIMRDQVPFDEDMLFK

SEQ ID NO: 73528 - protein, 447 aa, unidentified
MVAVAQIPRLHNEPLYVGIDVSKNTHMVALISPFLLRKNGRYDACPTFEVKNTQAGFDDLIARMECYAPRSECVVLMEQTGHYHRPLQQYLLNIGIAVYEIHVQKRPSRNKSDKRDALNLANLLYNQLELKAQATDSMQIAHRVIGASATATTLRPLVMRRFELAQRSTRCRNQLIAICDELFPEFTQAIKDPNGASALRIREHFPTPGDIAAASVKDLKAFCPGVQPSARVLGQLQELASCSVGIKDPARIEALLFEQGQLIAELRLLREHMEVLDEKIEALVEGTREGVILTSIPMISPLRAASILASIGIISNFRSSAALKAYFGWSPVSNQTGTSTDTMKLGRGGNRLMKQTMYMTGLSAIRGDTEWRSLYQELVLKKCPLDLRTKKRKGKNKALGAVIGRIIGTIYFLLKKDYDLLQQLPLGETPPPPMCYDRAVHKAHRRR

SEQ ID NO: 73529 - protein, 332 aa, unidentified
MNMHQQGGVANGEVRLNAGIDVSKLHLDVCVGTTQQRVANDANGWNELTAILQAEQVDLVVLEATGGYERCLVCALQSAGVCVARVNPRQARDFAKSMGVLAKTDQVDARVLRDFADVLSHHADRHKFVTPMLDQARQALAELMTRRRQLVDMRVAEHNRLEHAGPRAARSIGSVLKLLDKQIAAIDAHIDDHMDQHFKTQRQLLDTVKGVGPVTILTLTAALPELGRLGRRQIAKLVGVAPLADDSGGRSGKRRTWGGRSEVRSVVYMAAIVAMRHNDVIRAFYERLVQAGKPKKVAIVACMRKLLTILNAMLRDQAIWAATRHLKPSEQT

SEQ ID NO: 73530 - protein, 366 aa, unidentified
MSVFYVGLDVHSKMTEHVIEDADGTVIAQGRVPTTPEGLRSIVVDSGVEPGTRVGLETGTMARYVANLLQDLGLEPVVIDAHEVRLKAYRPRQKSDRRDAFEICEGLRRNIYRTIVHMPPESIQKLRATLAQRRHFVRVQSAEMSATKHVLRSSGLRHLSRQLETESGWQRLASQIEDVLLGSRIALHHAVWRAAGEQVALLNNSLFEQSRPFEEEFLRLQTVPGVGPIVALTVIAAFSDAKRFPSAKHAASYAGLVPSTSQSGDRDWHGHITKQGSAELRSMLCEAAHHASRKTNPLNPYFKSLCARRGYKMAITAVAHRLCRVLYAMMRDQADFDIQQIGVEVGPFEKKVVVPFRLRRTKAPQA

SEQ ID NO: 73531 - protein, 346 aa, unidentified
MSNSNPKSEVVVLGIDLAKKSFQLHGVDASGQVVLKKKLSRAKLRQFMVQLPRCIIGIEACGGANHWTRVFEKMGHTVRMIAPEFVKPFVKSNKNDAADAEAICEAVQRPSMRFVPAKSIEQQDIQSLHRIRSQAVARRTAQTNQIRGLLMEYGIIIPQGISYVRQQIPLILEDAENDLTYLFRELLLGLYDEMVHLDQRIKTLEVKLETLCAQNEDCQRLLSIPGVGLLSATALVAAIGDIGVFKSGRELAAWLGLVPRQHSTGGKPTLLGISKRGDAYLRTLLIHGGRTVVRVAANHQDRRNRWVCKLEERRGKNITAVAVANKNARTAWALLSKKTVYTVCAV

SEQ ID NO: 73532 - protein, 353 aa, unidentified
MNATTVAIDLAKDVFELGFADAGNRMLDRKRLARKAFAHCMENRPPLRVIMEACGSAHYWGRRFEALGHQVVLYPPRDVRPYVRRNKTDRTDVAGMLEADRCADIHSVPLKTPEQQGVQALHRIREQIKAQRTATINLLRGVLREFGVVIPLGAAKVRPAVQSALEDGDNDLPMGLRHTLAEQLEQVLALETRMAAIEQRLAEFASRDAATQRYQQAPGIGLLTATALRASVGPLDRFPSGRHLSAWIGIVPREHSSGSQRQLGRISKRGDSYLRTLLIHGARSVLRAAKARQRKAQPLDRLQAWALDVQQRQGHNKAAVALANKLARRLWAMEHHGKTFDANHCSVRPKSTH

SEQ ID NO: 73533 - protein, 415 aa, unidentified
MPDQEDKLLLIGDDWAEDHHDVEVQDEAGRKLAAARLPEGVEGIAKLHELVAKHGGGDLVPAGVVVGIETDRGSWVQALIASGYQVYAINPRQVARFKERYASSGAKSDRGDAHALADMVRIDRDQLRPVAGDSEQAQAVKVVARAHQTLIWERTRTFQRLRSTLREYFPAALDAYADLTLTSTDALELLIKAPTPAAGAKLTRTQITAVLARARRHHRAAKAATIQTALREPQLGLPEPVTTAYAATATAHAKLLIALNEQIADLEGQVKAHFLKHPDAEVYLSMPGIAEITGARVLAEFGDDPTRYADAKARKNYAGTSPITRASGKSHTVQARYVRNNRLADALQTQAFSALRASPGARHYYDKQRAREIGYNPALRQLGNRLVGILHGCLKTRTLYDEATAWSHHTHPHAA

SEQ ID NO: 73534 - protein, 349 aa, unidentified
MAAALVFLEPERLRAPSLSAHAQVWDGRTMSGNSVVVGIDVAKAHVDCAALGAHLPTRRFTNDSDGHSALAAVLQPLGVALVVMEATGGYETAVACGLQAAGLAVAVINPKQARDFAKGTGRLAKTDRIDAEALAELAATLLRRGDLGRVLRPLADVQQRELAALVTRRRQLLTMMHSERLRLQLATPKVLPSIEALIAAIRAQLDDVEGQMQSHVKEHFAELDHLLRSARGIGPIASATLIATLPELGRLNRRQISALVGVAPMANDSGTSHGRRRVTGGRFQVRRVLYMATLTAATHNPTIKAHYQRLVGAGKVPKVALVACMRKLLTILNAMVRANAPWHPTAHRT

SEQ ID NO: 73535 - protein, 348 aa, unidentified
MTLVGCDLHSRKQQVAVLDTRTGELIEQELAHEGDAVERFYRALPTPVTIGIETTGYTQWFHALMHQLGHTVLVGEAAKIRAMVVRKTKTDRRDAKHLLDLLQHDRFPTVWIPDPGTRDRRALIAHRVRLVRMRTMVKNGLQAIALNQRLALHSALWTQRGLTQLKALALPPHTTRRRDDSLALLAWLTTRIDQLDAHIAAVASADPRVQLLLTHPGVGPLTALTTVLVLGPLARFPDSKHVVSYVGLAPTVNASADKQRLGKITKQGNALLRWVLGQAAPLAARADDELRRRYFSVLHRRGRPKAKVALARKLLVRLYIMLRDQIDYEEFRRRGRTPRPQHIPGAVM

SEQ ID NO: 73536 - protein, 309 aa, unidentified
MTIHPCYVGCDVSKAHLDLFHPGTGQLARIANTEPAIEDWLDGQALQGLFIVHEATGHHDRVLRQVLARHGIASARLNPMMAKRFAQATGQRAKTDAIDARVLSRLGASLHPPADPPGCARRERLVALVRLRDQLVDNRAKERQRLSAVFLDEIAAVHREMIDLLNERIDRVERQIREAIQSDRQMAERAALLDSVPGIGPVSAATLIALMPELGQANPKKLAALAGLAPFNHDSGALRGHRKIAGGRRRVRHALYMTAISAARFNPKVRHTYDTLIEKGKPAKLALIAVARKLLVIVNAIIRDQKAFA

SEQ ID NO: 73537 - protein, 439 aa, unidentified
MSTPCLSVLDATAAAIDVGSEQLHVSIAGGPPRIFGTTTGELHGLRDYLLAQAVRTVAMEATGIYWLCPYEVLENAGLEVVVVNGKYVKNLPGRKTDMSDCQWQATLHAHGLLKAGFVPPEHIRRLQDYLRLRADHIVMAASHEQHMQKALERMNLKIHDVISNLTGVSGLKMIEAILAGERNPAVLLALCDPQIQRNKAGRVRAALEGTWKDEHLFALRQACELWQSYQKKITECDQAIAAVLQELVGPEDPKHPTPPAGKRSGINAPTITGLHGMLCRLCGGKDLTQLPGVADYVWLQLLSEIGTELDKNWKSEKHFTAWLGLAPGSRQSGKRRGTQRRSRNRAGRLFCVIARSVGRSVDKALGGFYRRLKGRRGGLVANLALARKLAELFWRLMVHGIRYVEQGLKKYEEKVAQTEQRLLQKLARKYNLVLQPKIS

SEQ ID NO: 73538 - protein, 408 aa, unidentified
MKPLFVGIDVSSRNNVAYLMKPDGSEYSSFSVQNNLGGAKLLSEKIVSALRSMQLERVVIGLEATSIYGDSLVYALREDGSLGRFQRKIHVLNPKQVRKFKEAYPDLPKNDWVDAFVIADHLRFGRIAKEVYMDDYRYQALRTLTRARFDVIQNLTREKQRFANYLFLKCSGIAQDKAIPNTSATTIALMEHFETVDDLANAILEELTAFIIEAGRGKFVDPDATAKAVRAAAKGSYRLPKTVNDTVNQAMSVSIASMRALKEQIKVLDKAIEQQFEIIPNTLTSIPGIGKVYSAGIIAEIGDIHRFDSQASVAKFAGLVWPKDQSGEFKAEHSRMIKSGNRYLRYYLLEAANSVRRCDSEFRRYYNLKYHEVNKFQHKRALALTARKLVRLVFRLLKDNRLYIPPEG

SEQ ID NO: 73539 - protein, 341 aa, unidentified
MKYVGIDLHKQSITVCVVDQDRTVLQTRRFACADTARIDAFFRALGPFQAVVEATASYEWLWQRLEPLAQRLVLAHPGKLRVIAESTRKSDKLDARVLAEFLALDMIPAAYRPTPRQRAHRALVRHRQFLQKERTQLRNKVRRIVSDYNADRRDLFSQQGRRYLTALTLDPSDLFVITQLLQQLEALEGQLTALRKTLHAFAESSLEHEKRQRQLLRSVPGVGEVTTEVVLAELGDARRFRSARQVVAYAGLAPGRRESAGKARDLGITKQGSGLLRWVLVEAAWQVVRRSRHWAGIYEGLKRRRGSRRAIVAVARRLLGVLVALLRHGQEYREPPAAVAA

SEQ ID NO: 73540 - protein, 375 aa, unidentified
MREKVRFLGLDVHAETIAVAIAEPEGEVRSLGTIPNREDSLRKMIKKLGPTDKLRVCYEAGPTGYVIYWQLAELGVKCEVIAPTLVPVKAGDRVKTDRRDAEKLARCYRAGDLTAVWVPDEGSEALRDLVRAREAAKQDQLRARHRLSKFLLRSGQRPPSGVRSWTRPYLIWVAQLRFTQMAQEATRLDYLHEVEHMRERVERLELAISEAVKLASPALQQVINDLQALRGIADISAVTIAAELGQVSRFDSARQLMGYCGAVPSESSSGKRTRRGSITKTGNAHLRRIVVEAAWSYHRPPGIWYGLRKRQESISEEAKEIAWKAQHRLHKRYLRLAAAGKDKRKITTAVARELLGFIWAIGTRAETEVRQRIAA

SEQ ID NO: 73541 - protein, 406 aa, unidentified
MQVIYERCCGIDVHKKMLAICLRRGRKSEIREYGTYTRDLLELAEWLLESGCQMIAMESTGPYWKPLFNVFESVGLPAMIVNARHMKALPGRKTDISDAQWIADLLQHGLLKASFVPDRQQRELRELTRYRKSRMEERAREINRLQKMLEGANIKLSSAVTDIMGLSSRKLLELVTSDHPVTLERVEQCMKGHLKASAEELLLTLEGVVTGLQRELIGEVLHVIDEQTAQIARAEALIDKYMDDSYAQAVDAVDTLPGIAKTSAQQIVAEIGIDMSRFPSANHLSSWAGLSPGNNESAGKRKSGRTNHGNKMLKSTMVQCAMVAVKNKNTFFHAQYQRLLVRRGKKRAVVAVAHSMLIAIYHVLSGEPFVDLGADYYNQFGTEKKINSYLAKLKQLGWEPPQAPIS

SEQ ID NO: 73542 - protein, 346 aa, unidentified
MGKESSTLFVGLDVHKDSIDIAVADAPRDAEIRHIGSIKGDLASLDKALRKLVSRGQPLHIVYEAGPCGFVIQRHLCAQGLHCDVVAPSSIARPPGERIKTDRRDAMLLARLARSGDLHVVRVPDSVDESVRDLVRAREDAVREQRSGRHRLKALLLRNGVPYAGKSSWTAAHLRWLATVKLAHSAQQIAFQEYLHAITQAGERIARLEQALRDALPDWGLMPVVQALQALRGVQLIAAMTLVAELQDFLRFESPRQLMAYLGLVPTEHSSGPKRRQGAITKAGNSAARRMLVEVAWHYRMEPRVSPIIAARQDGLPEGVTQIAWKAQTRDPVRISVCKALNSLLA

SEQ ID NO: 73543 - protein, 375 aa, unidentified
MKGVYIGLDVHKEVIVIGVADSEKVFVYGQCSSDIRRFMKILRELLKKHGLTKGQARICYEAGPSGFALARHLLRMGYGVEVVAPSLIPTKSGDRVKTDKRDAKKLARLYRAGELTPVHIPDAEDEVMRDLCRARTDAIDDQTRAKHRLTMFLLRNGHRYTGRSPWGESHRKYLRELVLIDPIQKLILEEYLQAVDLALGRVQALEEQMRIRLEGWSRRPFVEALQGFKAFQLVSSMIVTSELGDLTRFRHPRQLMAYLGLVPAEYSSGSSRHQGAITKTGNGHVRWILIEIAHCFRLAPKVSMHLSKRQEGLSREIKALSWKAQKRLHKRYIKLKMRRLHENKIKVAIARELSSFIWDLGQIMKDAPQSGETAA

SEQ ID NO: 73544 - protein, 476 aa, unidentified
MPLLGRDHKQDMKTKAQKSKKHNKKVSLEQGWETINPHAAGIDIGSKEHFVCVPPGSAQGTVRRFGTFTADLEALADWLKECAVTTVAMEATGVYWIPVFQILEARGFQVLLANPRQTKNVAGRKTDVQDCQWIQRLHTYGLLQGSFRPADPYCVLRTYMRQRDELVSARSTQCQHMQKALQQMNVQLAQVLSDVTGVSGLAIIGAILKGERDPVELVKLVDRRVQATPAIIQKALVGDYRKEHLFVLGQAFALYHTYEEKIGACEEQMVLEIAKLPDKVDLSLQPLPPRKEGRKPYLDQMAGQDMREGMYKKFGVDLTAIEGIGVTTSLVLFTEVGPEVSRFASEKRFCSWLGLCPDNRISGGKVLSSRTRRVVNRASDALRMAAATLERSQSALGGYYRRMKARLGAAEGVTATAHKLARIVYRLLKHGEAYVRQGMEDYEQKFRERKLMALKRAAKTMGFELIAAQTAASGVS

SEQ ID NO: 73545 - protein, 315 aa, unidentified
MTNLKKSKTIIHVGVDVGKWFLDVCIYEKAIHWQEDNNPEGIKRILKRLAHYEVELLVMEATGRYEFALAEAAFNKNIPVCIAKPLSVRRYAGAVEQLAKTDKIDAAIIAEYAAVIKPRATPRKSKNLLDIKDLLARRRQVMQMRTQELNRKGIMGQSLEPSCKRLIKVFDLEIKRLEKKLNQHVLQQAEWSERREILKSAPGVGDTLIYTLLAELPELSQMNNKQASALVGVAPINRDSGKSRGKRRIQGGRANVRTILYMATLSATQCNSVIKAFYQKLVAQGKHKKVALTACMRKFITILNAMVRDNVEWSV

SEQ ID NO: 73546 - protein, 340 aa, unidentified
MLHIGIDMHKRFSEVAVIDDAGKLISRYKLYHDSHEAMREYFAQFGTDVMVTVEATRNWYWLYELLESQGIPVKLAHPLKVRVIADAKLKNDKVDAWVLAHLERLDFLPEAYIPSREIRDQREVLRYRISLVRARAIFKNRVHAILDKLGINHKYTDLFGKGGLEFLKTVELRPIYRQALDGYLSIIEFLDQKIDEVTKQLRTILKPDPRAKLLISIPGVGELTAYLLICEIGDIQRFSSDKKLCNYAGITPTIRESAGHRWEGHITKQGNRYIRWAMVEAAQFAPKQDPALFAFHQRLADRRGPKKARVAVGRKLLTAVWHVLTEGVEYRCNCLSKYHA

SEQ ID NO: 73547 - protein, 483 aa, unidentified
MRSITKNQAKGKGQIIQLNSILVVIDCAKAEHVVQFLEPGRGVPLLKKALSISNNNDGQEKLLSLLSKTCKKHKLNYKDSTFVMEDPASYSRNLINQLQKKGFQVNYVNAKKCTDYRTNTRASSDELDLEGIAGAAMRGHMIDVQNNSQLYKQLTRSVRERAHLVKDQSAHKNIIHTYIDELFPGFLDHKLSGVEAFTEHCLALMLRSDFSVYSYAKKPLERLTTILHKIGFNTPAARAQQLKDLAKNALKPSLDYIDDMQDRLQLAVKLFQLRQECIIKEEQRMAKLLSQTGGFYLTSIPGVSIVLAAYIMAEYGNPLFWRSSDQMASYAGVVPRQKQSGGSDKAPVVLTLPIKQACNSPLRSSLFSAVLGIQKYEHPSIAVSGYKHDLKEHAENVENRGGKSRIACIKKFIRIMKVMVTNEDLYMPRKHEIAPQQLIAWIEIETQRMFKKWEAYNVYPSDDNKLGEWLRKKDKIIKVLTNT

SEQ ID NO: 73548 - protein, 387 aa, unidentified
MTVRTVSNLPAAMHVEMARCLFAIELSKQSWVIGFITPLSAKISRRILSGCDWKGLLDLIEEVRARVSRETGRAVDVLSCYEAGYDGFWLHRLLEAHGIRNYVIDPASLQVDRRARRVKTDRIDTERLLRSLMAYLRGEPKVWSVVRVPSVAEEDARRLHRERDRLVSERVQHVNRIKGLCALHGIYDYQPLRPQAMARLEQLRTAQGISLPPRLKSEIKRELQRLELVVEMIATLEAERDAIVEDEASTHVNAKKIQNLHQLKAIGPEFAAVLVGEIFHRDFNNRRQLASYVGYAPSPFQSGNVAHDQGISKAGNRKGRTTGIELAWLWLRYQPDSDLSVWFRARVGTTKGRIRRIAIVALARKLLVALWRYLETGLVPRGAILKG

SEQ ID NO: 73549 - protein, 323 aa, unidentified
MRKHITVCAGIDTGKYKLDVAIDGSLEEFQIDNTADGHAALSVWLDRHKVNRVGIEASGGYEQQVVVRLRRDGFVVVVFQPAQVRAYARFLLQKAKNDKIDATLIAACTAAIKKIHAPPDDRLAPFAARMTLIEQLTDQVVCYKCYREGCREAQIQQFWKAEIARLNKLLRAELKDLAAAIRQHRDLAKRLDLIESVDGVGLKTAVAILVRMPEIGRVTREQAAALAGLAPFDDDSSMHSGIRHIGGGRERLRGSLYNAALAAAFHWNPQLIALYKRLTRVGKPHKLVLIACARKLLIFVNTVVERGTPWTSTAPPLVIGKVA

SEQ ID NO: 73550 - protein, 370 aa, unidentified
MSVRRILAKTIDTDLEYEAIGIDLAKNCVSAALLTTDGEVVCIDRLDYSELEKSAQALSSTTFAMEPCTEMNYLVQKLEAWGHRCLVIGGKNVQNYVENHYSGQKTDLNDAQALAFLAQDTQLRTIKAKDMEQQKYASLTTLREQYIKQYRQTIVSLKGICQAWGLNISKGISGKARLKDLIENHAAFPEELKESLVDMVTHAQTAQKALNKITKTLEELAKSDKVCQLIQTIPGLGSICSCRLRATVGDIKRFKSPKDFPAYYGLVPRSIATGHNERKGKITHRGDRTMRSLMVQAAGSLVNMATKGKLKSKQLTKWILKKQKEKMPWGKLVCAVAAKLLRIVRAVLISNKPYNSKIAGVAKCSLPKGS

SEQ ID NO: 73551 - protein, 339 aa, unidentified
MENVTLLGIDLAKNVFQLHGIDDKGNPVLKKRLTRGKFVETIANMPTCTIVMEACSGANHWCRKFTSLGHTTKLISPQFVKPFVKGNKTDRNDSEAICEAASRPTMRFVSPKSIEQEDIQAIHRVRSRLIEGRTALINQIRGLLAEYGIIIAQGANHVREELPFILEDSENELSVLSRELFNNLHEELLAQDKLIKIWDAKIDRIFKSNSACQKIAKIEGIGPITATAIIATIGDPKTFKNGRHFSAFLGLVPKQNSSGNKERLLGISKRGDSYIRTLLIHGGRSVVRCVGTKDDNRSNWVRNIKERRGGNRAAVAVANKNARIIWAVLSKGEQYRKAV

SEQ ID NO: 73552 - protein, 335 aa, unidentified
MQIYGIDLAKEKFDVSFLRQSAKSAVAAPVHKVVSNTESSIRTFLKSVPAGSILVAEHTGVYGERLLKMCTDMNVKIAYVGGHVIHTYKAGPDRGKTDELDCSLLREFGERFTDKLRLATFPTEAIYELQQLSRQRTMLVEERKRVATADKAEECRPYRSETVRRSMRNLMDMLDEEIRDIEKAMLDIIGKDEGLSNSYDIITSVNGVGLVTAVELIVKTKNFTTIKTAKQYAAYAGTAPYEKSSGKMNRGAHISKWGNRRSKTLLYICAESARRYNKEIKLYYERRTIVDKKAHHYVLNAIANKLLKLVFTLIAKNEKYDPCYIQHDPRTFNKK

SEQ ID NO: 73553 - protein, 394 aa, unidentified
MISIGIDVSKRKSTVAIINVMGEILHTPFDIDHSQNGIQNLLHLIKDYPKEQVRFIMEATGIYHLGLVNELQKQGYFVHVANPLLIKKYFDAEIRKGKTDRKDALKLSRYGTEKWWLLQEHSKADQIYQDLQFLSREYNSFMANKIKLKVQLSNLIERSFPGLEKILKGHYFGLLLDFYELYPCASVVREVSEKRFLNQFIRMAIKKGHRKGAQIAQKVYRLAHECVTFEPSHKVAALSVKHCVSLLRSTEQATDSIITQMDELAKELPEYEIVKRMKGVGDKLAPRLVAEIGDVRRFKNSKSLIAYAGIDAPPYQSGQFEGTNRHISKRGSRSLRKCGYEVMMAIKSSKPKEDNAVYEYMLKKEAEGKNKKLVKIAGLNKFLRIYYARVMEVY

SEQ ID NO: 73554 - protein, 347 aa, unidentified
MNFYTKQHKFYCGIDLHTQNMFVCILDASGNVRVHQNIHTNQEAFLRIIAPFREDIVVAVECMFTWYWIADLCIQENISFVLGHALYMKAIHGGKAKNDKIDSLKIATLLRGGMIPQSYVYPARMRATRDLLRRRNHLMRKRAELFAHIQNTRSQYNLPDPLGCIAKPQNREGIVERFNDPSVQKSMAVDLEMIEAYDHILTQLERDIIACAKEHDLRSYALLQTISGVGRILGLVLLYEIDSIERFPSVQDFVSYCRLVKCIKESNGKKYGSSGKKIGNAHLKWAFSEAAVLFLKGNEPAKKYLQRLARKHGKAKALSILAHKLGRAVYFMLKNKEAFNQKKFLGL

SEQ ID NO: 73555 - protein, 349 aa, unidentified
MIIIGVDFHPEFQQIASVDTESGEFEERRLQHREEAERFYRELGSRGVAVRVGMEASGHARWLEHLLKELQFELWIGDAAEIQTKRVRKQKTDRQDAQLILKLLLEDRFPRIWVPDAENRDLRQLLWHRHRMVQARTRIMNQLQAVALNEGLRCKKKLWRERGRQQLESILLLPWASRRRSDLLQLLDRLSPTIAELTDAIEQEAEKRPEARRLMSHPGVGALTALAYVLIIGDPERFRCGKQVASYLGLVPLEKSSGRRRRLGHITKQGSSILRFLLVEAAQATVRSDPNWRNKYFHLAMQRGRKTAKVAMARRLAIRLYWMWREGRDFEQQIKFGSHAGQPENRYGV

SEQ ID NO: 73556 - protein, 344 aa, unidentified
MGEVSTIGLDIAKSVFQVHGVDVAGAVVIRKRINRAKVLEYFGELPPCLVGIEACPSAHHWGRELQKLGHVIRLIPPSYVKAYLKRSKNDANDAAAICEAVTRPSMRFVPIKTKEQQTALMLHRTRQLLVRQRTMLSNALRGHLAELGIVSAKGRSGTAELLRIIRDGEDGRVAPAVRGILDVLARQYGAIGTEIASIDKRIMALHRACEASRRLAEIPGIGPVGATALVAEIGDWNSFSSGRSLAAWIGLVPKQHSTGGKDRLGSITKQGNRYLRWLLVVGAMAVIRYARKHGTERRPWLGRLMERRPTKVAAVALANKIARMAWAIMVRGERYKEPKLSLAA

SEQ ID NO: 73557 - protein, 323 aa, unidentified
MNKDIKYFGIDISHLVFDVTDSDGNYYQFKNNEFGFKKFTKLLNNKSHCVMEATGYYHYQLAYHLLESGIKVSVENPLSVKRFIQMGLSKVKTDKSDSKLICAYAEQVELKLWQGNSKEEIECLQIVRTLSVYTKQSTMLKNKLHGEAVLGNPSKLVVTSLKRSLRQLIKEIKTLEDKLLILVKQSHQDLFTRLKTIPGIGSKTAIMLVVLTGGFDRFTSASELCSYAGLTPVIRQSGSSVKGRPRISKMGNQKLRNLLFMCSFNACKYNKACRDLYERIVAKGKSKKLALIAVCNKLLKQAFALAKSGLIYDGNYKSTLVKN

SEQ ID NO: 73558 - protein, 411 aa, unidentified
MNPVVGLDVAKGESQVQMFLDKKMPYKSSVKVDHTVDGLEELHSYLLDLERQTGMKPPVVLESTGHYHAPVVQFLEAREYIVIIVNPLVSYRAKSSSLRKTKTDAIDAYHLGELYYKEDLAPQKKRGVQLLNLRHLTRQHENMTGIMIQTKLQFQAVLDQIFPEYKGVFGDLYAEISIKTLQAYPTSESVKEAGVEEIAQFIDTHCKARSFNWALERSEKLIGAAERNPFQSTLYQSLLVSLNMYIDLLQVYHQQLSTLEREIDELAAQLEEYELLQSIPGIGEKIAATIISEIGEIDRFNHPKKLVAFAGLDPSVFESGRFKGTKNHITKRGSAMLRHMLYTAVRCSIRDSRKKKTTPETIARNKRLRAFYDLKREEGKPYKVAIIACANKLLHWIYAILKTKTPFQETM

SEQ ID NO: 73559 - protein, 407 aa, unidentified
MEVLYRRCAGLDVHAKSVTACVRIAADATITYDQFTASTTTRGLLALDAWLTAHGCTHVAMEATGVYWKPVWHVLEEHFTLVLANAMHIRNVPGRKSDTNDARWIADLLAHGLIRGSFIPPASIQALRDLTRTRRQLGREVARHIQRVQKTLEDTNIKLTRVLTDIMGMSGRAILAAIIAGETDPDQLADLTRGRLKASRADLREALHGRVTEHHRFVIQLHLLQIDGLERAIAAIDVRIGDALGAVRAAVALLSTMPGLSETTARSMVAEIGTDMTRFPSSGHLVSWAGLCPRQDQSAGITRSTRTRRSAPWLKPLLVNAAWSATRKKDSYLRAQFLRLKSRRGPKKAILAVASSMLTAAYVMLRDGVEYHDLGPYHFEQQDKDRVTKRLLQRLRNLGVTVQVTAA

SEQ ID NO: 73560 - protein, 416 aa, unidentified
MSGASYYCGIDWAEKHLDFAVINNKGDTLVEGRIGHDPAGVDELFRAFRTVARRRKAVQVGIETDRGAVVAALRAADQQVVVLCPSKVVRYRGRRTLHGGKSDRADALLLAQVLRWGGDELRPLPASSPAALAIREIGRAQIEAARKQWTTASQVRGLLREFHAPASGAWAGRQGGPSGLFRPEARAVLAVAPTPAHACQLSRRQLREALEASGRKRLLDDEVDRLYDRFRQPALRHPTAVEDAMGERLLTLLRVLNQQIECTDDLTVRLTDRFHAHPHAPIYASLPGLGPVLGGRLLGEFGDDLGRFATARDRTTWAGASPITIASGATHVVRRRRHANRILMGAAFSWPFATLTRSPGARAHYDRRRAAGDRHATALRNLFRRLVSQLHYCLKSGEVYDEARAYPAQSDREGDR

SEQ ID NO: 73561 - protein, 331 aa, unidentified
MSNSIGIDVSKASLDCAYLHDPDQNKAKRKTCHNEVHCFAALVAWAEARSGLPVQSLAFIIEPTHVYHEQLVEFLHNTGATVYLVNPGKVRKFAEGIGILSKNDLVDADLLARYGLLARKLIAWAPVPQELNDLRSLLNRLEVLERNLRRELNRQEKIGKTRVFHRLEQQSIARTVKRLKAEIMTFKNAIRQCIQSTPSLQHNFYLLCTIPGVGAKTAWVMLVILGSRQFRSAPEVASFLGPNPIEKRSGKSQYRRPRLSKSGSGHYRQQLYFPAMVATRKNPDIKALYERLLAADKSKMCALGAAMRKLVHICYGVVKNQTPYQAQTVQS

SEQ ID NO: 73562 - protein, 407 aa, unidentified
MGKDMDVFAGIDWGGDAHQICVLDADGTRLQQRRVTHDVPGLLALDRALDHYPGVAIAIERSEGLLVEHLLAAGRRVFCVSPKISARARERYRLANTKSDAFDAFVLADTLRHEHAHWRPLATGSRLWHELRAVSRDRDRILLAQHAAESRLRATLEAYHPAPLHLFSTLDRDISLAFITDYPTPEAASRVGQARMGRFLTRHGYSGRTPAEVLVERLRPHLLSASPGTVAGKTLAASVFTEQLALLTTHLRAYDRRLDQLLAQHPDTSVLFSFPGLGPVTAATLIAEMGEDRARFPSPGVLLAEAGLAPVTRASGRTRQVRFRYAANRRMRHAIDWWTWVAVREDPWSAHLYEQARAAGQGKYRALRGIGTRWTRVLWRCWHTRMPYQPDEHTTRHDYLRQIDQAA

SEQ ID NO: 73563 - protein, 344 aa, unidentified
MERYIGLDVHAASCTLAVISQAGRRLKDFPVETNGQALVEAIRMIPGHKQLVFEEGLQSAWLYETLSPHVDEIVVAGVTESRGQKDDKRDAYGLAEKLRRGTLEKRIFKAPRQFTILRELCRTHMTITRDLVRVQARIKSLYRSRGIPTPGGWVYSPRRRGEWEEQLPASARRRAERLYQHFDFCFEQKKQAEADLLRESRKHRIVRILETAPGFGPVRSARLVPIVVTPHRFRTKRQFWSYCGLGIVTRSSSDWVQTSDGDWIRARVPQTRGLSRQHNRVLKEIFKGASTTAITQRNKDPIYARYERMLDSGTKPTLAKLSLARIIAATVLRMWKDEEEYRPQ

SEQ ID NO: 73564 - protein, 388 aa, unidentified
MIYVSIDIAKLNHFTSIVLSDGEVLVEPFEFSNDAEGFRSLSLVLDRFERNNLLIGLESTAHYGNNLVEFLFSKGYRFCILNPLETSALRNNNVRRTKTDRADTFLIAKALLVNSHRLFEKQDLDLLHLKNLCRFRQVLMKKRTTNKIKLTSFVDQAFPELQYFFHGVHHKGVYALLKEAPSPELIASMHMTHLANLLRVASHGHFKKDKALELRVLAHRSVGSNDSSISIQITQTIEQIELLDSQMDDVEDQIRKITLSLDSVIMTIPGMGPLEAGMILGEIGDVHRFANPGKLLAFAGLDPTVRQSGKFKASRTRMSKRGSRILRYALVYSAHNIVKNNCTFKAYYDSKVSQGRRHYAALGHCAGKLVRIIFKLLTDNVPFNPASL

SEQ ID NO: 73565 - protein, 401 aa, unidentified
MFGVGIDVAKNKSMVAILSDDGEIIKAPFEIANTESGLSLLCTIMEGLDGEVYCVVESTSVYHFPVVSYLQENGIFVSVVNPLIIKKYASMDIRKVKTDKVDSLKLASYVIDNYRHLVNYSPDDEVYSELRILSRQYLHYVKVLANAKVNLTDMLDRTLPGIKPLLKSNIRTSGKNKLCDFVEKFWHCDVITNMSENKFVSEYIKWAKKKGYHSNETKAKSLYTNALECIPTLPSDSPSTKMLVLEAAKAVRNIETTLAFILTQMSALAKSLPEFSVVRAMSGIGEVLAPRIIAEIGDVRRFHSASALVAYAGIDAPPYQSGSFYGTNRKISKRGSASLRKTGYEIIQALKVVQPQQDNAVYQYLIKKENEGKPLKVAKIAALNKFLRIYYSRVKEIYLQS

SEQ ID NO: 73566 - protein, 353 aa, unidentified
MNVKTIGIDLAKNVFQIHGVDEHGKRLFNKQLRRAQMASFFANIPPCLIGMEACASAHFWANKLISMGHNVKLMAPQFVKPYVKTNKHDAADAEAICEAVTRPNMRFVPVKTAEQQAVLALHRSRQSFIKQRTAQANQIRGLLAEFGIVVPRGIQQLQRRLPELVEDADNPLPVLFRTQLSLLQHHMAYLFDVIATLDKQIEQCYRQNALCQRIGKIPGIGPVTASALIATIGKANNFENGRQLAAWLGLVPRQHSSGGKQVLLGISKRGDTYLRTLLIHGARAVLQSAKHKQDAVSSWANQLMARRNNNIASVALAKEGANKQVISSQADSLIKISRIWADFFPANTSNQPI

SEQ ID NO: 73567 - protein, 410 aa, unidentified
MERVIERGAGLDIHKKSVTACVRGPGPDGGRRQERRSFATTAAGLLVLRDWLSAHGVTHVAMESTGVYWKPVYYVLEERFTCLLVNAAHVSKVPGRKTDLLDCEWLAQLLEHGLLRGSFVPPEPIRELRDLTRYRAVLVQDRTREANRLHKVLTDAGIQLASVDADVLGKSGRAMLTALVEGTTDPQVLAELAQGKLRRKLPALWEALAGRFRKHHALLVSQLLAHLDYLDEALEDLAVQIEEALAPFAREAARLDAIPGVGSRTTAVLIAELGVDMRHFPTARHVASWAGLCPGTHESAGKRRAVRTRKGNRWLRAALIEAALAAINVRDSAFAARYRRVARHRGHKKAIVAVAHKLLTTAYLLLADGRTYQDPGAGYYDGRRKDRDVRRALHLLERHGYRVTLEAAAA

SEQ ID NO: 73568 - protein, 415 aa, unidentified
MEVLYPRCAGLDVHKDNVVACARIASADGSKATQDVRTFGTTTSALLELSTWLEEHQCTHVVMEASGVYWKPVWHVLEGSFELVLANAQHVRNVPGRKSDVNDAMWLSDLLAHGLVQGSFVPPTPIQEVRDLTRTRKQLAREIVQHQNRIEKILEDTNIKIASAISDTLGRSGRAILDAIVAGETDPEKLVALCSGRLKASRKSLVESLRGRVTDHHRFLLKLHLTQVDQLRQGMRDLEARMGSALEPFRQHLEHLTTIPGVSDVAAHVIAGEVGLDMTRFPTASHLISWAGLCPRLDESAGKHRSRRIRKGAPWLKTTLVSAAWAAVKTKGSYLQAQFQRLRARRGAKKAIIAVAASMLTAAYHILRDSVPYKDLGPEHFTRRDKKHAARRLQRRLEDLGFAVEIRVANAGVSI

SEQ ID NO: 73569 - protein, 316 aa, unidentified
MEHISSLPDVFVGIDVAKKHLDVHILPTGTRMTVARDAGGLDQLVTQLRELSPRLVVLEATGGFEAIVTATLGGAELPVLAVNPRQIRDFARACGRLAKTDALDAEVIALFAERIRPALRPLPDEATRLLGELAARRRQIVEMITAETHRRRAASAKRVQKRLDAHMAWLQKELSSLETDIDDAIRESPLWCEDQALLTSVPGIGKVVARTLLAELPELGHLDRRAMAALVGIAPMNRDSGQFRGKRTIRGGRGTVRAALYMAAWVGVRFNPVLKEFYQRLIAAGKPRKVAIVACMHKLLTVLNAMMKSRTTWKHA

SEQ ID NO: 73570 - protein, 363 aa, unidentified
MAKCIMVGCDLHDRSMLLRIAVDRGPAVTRPWGTDLKARPAMGADLRRRAAEAGASRIVFAYEACGFGFRLHDELRAAGIECYVLAPSKMERSAVHRKRKTDERDAQRILELLRGHVLAGNELPSVWVPDLQTRDDRELVRHRLAVAQDAAAAMVRIRWLLKRNGVEARPGAEGWTEKHWAWLQELAQAGLPWGAGAALASLLRQVQWLWSERERLDAQVETLSQAPRYAPLVAALRRWKGVGLLTAMVYLTEMGDPGRFENRRQVGAFLGLVPGAHESGEDDDHKGHITHQGPSRVRKVLCQAVWSRLRVVESERTSYERIVARNPQHKKIAVVARMRVLAVVLWHEAMRAKQSSEAGKVPA

SEQ ID NO: 73571 - protein, 363 aa, unidentified
MGRADPARYWKESGSLILHVGLDLSRKRVDVCLISSEGELVEQFRSPADRDGLYGLTRRVAVYDEPVRGVVESMNGARFVHDELVRYGWEVLVADAQRVKGLAPLACKTDKVDARVLAELSFRDLVPAIWLPTPELRAERERARWRLHLVKHRATLKNRVHSSLIAFGHQVPMADLFGVAGRKLLAELDFPEPWRSHVQASLELIDDLDRRIAEIERWLQRSGADHRYIPVLMTAPGIGWVTGFTIASEIGDINRFSSPTKLTGYTGLCPRVRQSGEMDRRGALSKHGPKYLRWGLMEAAIAASSHPLLQGALPAHQTPPRSPARRQGRADRARQKADRGDLAHADPQPNRSIPSLRQAPFSP

SEQ ID NO: 73572 - protein, 436 aa, unidentified
MRGCRCSMIMGFTKPIEHFNLQRKKVITMNTLYVGIDVSSKSNVVYLMLPNGDKHSNFSVANSHEGSTLLVKKIYSALTSHSLDTVLIGLEATSVYGDNLVYFLREDATLAPFNRKIHVLNPKQVKKFHDTYNDLPKNDYVDSFVIADCLRFGRINKEVYMGEYRYKALQNLTRARFFAVQNLVKEKQRFMNVLFKKYSTMTQEKVFSDAFSTTALAVYDEFESAEALANMDLHELTDFIIEKGKNRFPDPVAVAKAIQKAARSSYRLPKTVNDSVNQVLSISITSMKALESQIKEFDKAIKALMELLPNVLISIPGIGPVYSAGIMAEIGDINRFDNQASLAKYAGLAWKQHQSGGFEAEVTRLIPSGNRFLKYYLCEAAFSLVRCDKEYSDFYHLKYKEVNRCQHKRALALTARKFVRLVFRLLKDNRLYCPAK

SEQ ID NO: 73573 - protein, 321 aa, unidentified
MSEVTFLGIDVSKAKLDCALLLGDKYRSKVVGNNAAGLATLRQWLEKNQGSTAQVCMEATGIYWELAAQTLADAGHKVSVVNPALPKAHAQSLGLRIKTDAADARVLASFCKEKQPAAWVPLSFSERALRALVLRHQGLVEIQTQEKNRMESARQEVRESLEAHLKWLAGELDRIEQAIKQTIDDDPDLKGKRDLLDSIPGLGERTIAVLLAYCGQAKRFSTARQFAAFAGLSPRLHESGSSVRLKPRMSKVGHAFLRRALYMPAMVTLYKTAWGRVFRERLAANGKAPKLIIGAMMRKLAQVAYGVLLSGKTFDPALHGA

SEQ ID NO: 73574 - protein, 327 aa, unidentified
MKYTPVGVDIAKHLIQVHFIDEHTGEVIDKQLRRQDFLMFFCNREPCLIGMEACRGSQHWGRELTKLGHKVRLLQAHFVKAFVMGNKNDVMDARAIWMAVQQPDKDIAVKTEEQQSVLVLHRSRRQLVKFRTMQINSLHGTLLEFGKTIHKGRAAMERELPEALERMKERLPPYLITVLENQYNRLNELDSLIEDIEKKLTSVARQNETCKRLLDIPGVGPLIATAAVATMREASAFKSGREFAAYVGLVPKQTGSGGKIRLLEISKRGNTYLRALFIHSARAAALLPKEPGPWITELKKRRPTSVAIVAMANKLARTVWAIAAHGM

SEQ ID NO: 73575 - protein, 316 aa, unidentified
MAQDAVFVGIDVSKIRLDVHVHPGGESFSVGNDATGIKQLGMKLLKLSPRGVGLEASGGYEKATAKGLCAKGLPVYIVDPAQVRSFALALRRRAKTDAIDAAVIARCLAATIDALRPFAPDPSAERLSALVGYRCRLIGEKTALLGYRDRVDDRLVLAMVARQIAVLALRIATLDKAIAACLAEHPRFAAQASLMRSAPGVGPVLAATLIAQLPELGQLDRRRIASLVGVAPHARQSGQTDKGGKCSGGRKHVRNVLYMAALSAVKAKKSPLWPFYNRLRQSGMAFKPAIVAVMRKLITIVNAMVRSQKTFQPTLV

SEQ ID NO: 73576 - protein, 352 aa, unidentified
MQCIAFDAHKQYTWALVEDEGGKVLREQRISHRKGALIEFLAGCEAGSAVAVETVGNWYWIADEIEAAGMVPRLVHAGKAKAMSGSINKTDKLDVRGINRLQRSGTLPTVWIPPRQLRDARELPRTRMVLVGQRTRLKNRIHANLAKYGATSREATDLFGVRGRVVLGERIRELPSQTRYATERLVEELEHLQLQIEGFEERMAELFRDTEDLELVETLPGVGFILGVVILMEVGDVRRFPSASQLAAYSGMTPRVHASGGRVRYGHTRSDVNHYLKWAYAEAANATAIHRRRHAQWHVSRLYERVRHRSGHQKAIGAVGRHLAEATYWILRKGEPYRDPTLDSVVKSKGEA

SEQ ID NO: 73577 - protein, 296 aa, unidentified
MKHYAGLDLSMETTHVCVVDVDGRKIGAQCVDSTPEAIATALEQYGPIERAVIETGRITPSIALGLRELGVAIVCIDARQAHQSLKAMRANKTDPHDAAGLAQLARTGFYKEVHVKSPAAHGVRSVITARGHLVEARVRLDNTIRGLCATFGIRLGVGQGERFLSRMQVAASVPGLGEAVASLLRARERLVVEIGQLDRQLKAISTASPICQALMSIPGVGVQTSAAFAAAVDDASRFKRSRTAGAYFGLVPRRHQSGELDWTGRITRQGDKLRVRCAPAIAAQGNRSGCEATPRS

SEQ ID NO: 73578 - protein, 459 aa, unidentified
MSQQQSKKNRRRRVTAQSLAPQLQHINVNAAGLDIGAEQHLVAVPAGRDEVAVRAFGTFTAELVALADWLEQCGVTTVAMESTGVYWIPVFELLERRGFEVKLVDARHVKNVSGRKSDVLDCQWLQQLHTYGLLSGAFRPPDEICVLRSYLRQKEMLVQASAQHIQHMQKALQQMNLLLHNVVSDITGVTGMKIIHAMLAGERDPQVLAGHRDGRCRNSQQTIAQSLIGNYRDEHLFALRQAVELYEFYQSKIADCERAIVDQLDSYPDAADGEPPAPSKPSNASARIRSGVDVRELLYKKSGVDLFAVPGLGADTLLTVTSEVGFDMSPWKTVKHFTSWLSLCPGTRKSGGKELKKRGKRKANRAAQAFRIAAATLGRSQTAFGAFYRRIKARYGGQHAVTATAHKIARIYYTILTKGSAYIEVGQTAYEQRYQERRLTHLHRQAKALGLQLVPCPAT

SEQ ID NO: 73579 - protein, 346 aa, unidentified
MTYSTTVGVDLAKNVIQISVVSGRGKGLCNRSLTRNKFAEFLGKQKPSLVAFESCASAHYWARAAKRHGHEARIIPAKAVMPFRQGHKTDSNDALAVAEAAGRPNIKEAPMKTAEQQGLQAIQRSRELLIGECTALSNHLRGILLEFGVAIPQGFASLLRALPEVLEDGDNELPDLYRPTLHRMHARLLELREDIEAMTKEVDALVKQHPVCKRLTAIEGIGPIGALSLYAVMGSGKAFTKSREFSAYLGLTPRQFSSGGKTNIVGISKKVGNRRLRSILIQGARAYVYRMKEPRSLKDRWLKDLIERAGPNRAAVALANKNVRTAWAMVTQGTEYQRRLQLEMAA

SEQ ID NO: 73580 - protein, 427 aa, unidentified
MPYRIAGIDVHKRMLAVVVSDVEVADEYSFERRQFGSNPGQLRLLADWLLEQQVEEVVMESTAQYWKPVWGALERYWKPLCQKREGARPMSGTLHLAQAQSNRGPRGRKNDFADAERLVKRLVAHELILSFVPDPEQRLWRTLMRRKYQTTCNRVRLQNRLEALLEEAHLKLSSLVSDLLGTSAQRMLQALADGETDPEALAALADYRLRATREQLCDALGACQELNPVYRRLLAMALEELHLIEKQIGQLEQEMADLLRPHQNSVQRLAEVPGLGVDSVQQIIAEVGATAATFPSGGDLSSWVGACPGEEETAGVSHSHRSPKGNRHMRRILNQAANAAVKLKGSIFQILYRRYVPRLGHKQTIGVIAHRLCRLIWKILHQGVRYEERAPAVSKKSSQTRAARMIRELRSLGYRVELAASPSAVRA

SEQ ID NO: 73581 - protein, 343 aa, unidentified
MQIVSVGIDLGKTTFHLVALGAAGKVLVRKKFTQGQLLTYTANMQASLIGLEACSGAHFLGRALRKQGHDVRLIAAQFVKPFVKSNKNDFVDAEAIAEAVERKNMRFVPIKTDDQLDLQAIHRVRDRLISRRTAVINQLRAFLLERGLVFAKTPAKLRAALPDVLENADLDLTPQMRNLIDLLWNEWKSVEDQIEGLSLELERISAADPGCTRIRQIPGIGPIVATAIVAAIGNGAAFRKGRDFAAWLGVVPRQYSTGGKARLLGISKRGNVYLRKILIHGARAAVLRIKRDRAPIGAWLDALDARAPKNVVVVAMANKLARIAWAVLSSGEDYRPHSNLVTA

SEQ ID NO: 73582 - protein, 451 aa, unidentified
MDQGNNGLSRGDRNRNARLAALRVVLPRDYAILGIDLAQSRQAAVLADHDSRVIARWRPRCSPWKLGELLDRARRKALAAGFSGITVACEPTGHRWMVIAQLAAERGIPMVCVQPLVVARGREAEDYTRGKSDDRDAVLIARLAAQLHCYLPEQAGQGWARLRHLGARRSRLIDSSTMCIQQLRDLLEVAWPAVLPAAAKPLESATWLACLWVTLERGDGDLGAVHAMGRDGFTAAARGGLGAWGARRICQRIAAAAYAALADPAGVAAQRPGALERAFSVLGDWRTIRGELAGVNARMLQALEAMGVLEVAGSIPGVSALQVAAILAETGDPSRFPTARAIVKHAGLAPCENSSGNHAGQAGISRRGRPALRLAAWRAVWGALRHNPVYAARHASLTGRAEDQLTDQQARAAIAAALLRQIHAIITRRIPWDAGIAAGRRRHGQEVNAAA

SEQ ID NO: 73583 - protein, 343 aa, unidentified
MQITTIGLDLAKHWFQVHGVDADGRVVARRRLWRSGVIAYFRSLEPCLVGMEACATAHYWARELTALGHTVKLMPPAYVKAYVKRNKNDAADAEAICEAVTRPSMRFVPVKDAAQQSVLMLHRARSLLVRQRTMLVNALRAHLAEFGIVAPQGLRHVEILTKTITRQQPQLPELARSILQTIVDQLNGTMARIQEIERRLARWHRQSRVSRLLATVPGVGIMGASAIAATVADPSLFRSGREFAAWLGMTPRQNSSGGKERLGRTSKRGDKYIRCLLTAGAVAVLRHARNRPTRDGEWVRALLARKPTKLAAVALANKTARIVWAVMMRETGYRPTAVFGQPA

SEQ ID NO: 73584 - protein, 341 aa, unidentified
MDKTLFCGIDLHSNNAVYVITDEQDRQLLRKRLPNDLTVVLGTLAPYRDRLKAVAVESTYNWYWLVDGLQDAGYPVCLANPAKMEQYDGLKEANDLTDAAFVTHLLRLGVLPTGYIYPREDRPVRDLLRRRTLLVRYRTSLKQSLQNMVVRQTGRSLGWRKVRDLGAEARAELLGDEDCLPFVAGQQVELIALLDERIQRFERKVLEHTHLRPAYECLLTMPGVGVILGLTIMLETGEIGRFRRVGDYTSYCRCVRATRRSNGKKKGSNNSRNGNAYLSWAFVEAVHHAIRSCPAARTFYDRKVATRNGALATKALAAKWTKAAYYMLTRQEPFDLKRVFG

SEQ ID NO: 73585 - protein, 379 aa, unidentified
MKKNSRFVGLDVHAETISVAVAEPNGEVVSLGTIPNRAEAIAKLMKKLGPPEKLRVCYEAGPTGYALYWQLTKLGIHCEVVAPTLVPVKAGDRVKTDRRDAERLARSYRSGDLTAVWVPDRGCEALRDLVRAREAAKQDQLRARHRLGKFLLRHGRRAPEGIRAWSRKHVAWMEEVRFEEVAQQVVLLDYLAEVAHASHRIQRLEGAIEEMVKVMPERMQAVMAGLQCLRGVAKVTAVTVVTETGDLGRFTSPRQLMSYAGIVSSEMSSGRSTRRGGITKTGNAHLRRVIVEAAWSYRYGPAVGAELKRRQQGQSEQVKEIAWKAQHRLCGRYRRLLARGKPHQKVVTAVGRELLAFIWAIGVAIDKARSTSQNTQQAA

SEQ ID NO: 73586 - protein, 349 aa, unidentified
MSEPYAGRQIVGIDLHRRRSVLVRMTEAGERLETIRISNDPDYLREVMTRAGEAPEVVLEACYGWYWAADTLAELGATVHLAHPLGVKMFSYRRLKNDERDAADLADLLRMGRLPEAWIAPPATRELRGWVRHRAKLVGLRSNLKCQVHGILANAGITVPMSDLFGASGQRLLATADLATESRSRIDSLQRMITALDFEVELFAKLVAGRLRTHPGYQAIQLIPGVGPILAAVFVAEIGDITRFRRPEQLASWAGLTPKHHESDTTVHRGRITKQGSRLVRWAAIEAVQRLPGHTRIGQVRDRVAARRGRNIGVVAAARELTELVFYGLRDHHVHALAVHSPARTPLPA

SEQ ID NO: 73587 - protein, 350 aa, unidentified
MSKINHSPNSCVVKKAESLLVWATQIIQEECKMTKKELRFVGIDVGKSWLDIAVYGEEEPKRYQNDKAGIEELLDHVTEIKAHLIAVEASGGYERQVVETLILRGFQVGVVNPTRVRALAKAMGLLAKTDRIDAKLIAAYAKKIQPMPKSLQEEPEMKLKALVIRREQLVEMNTAEQSRLGTVHESMKDVIREHIHWLKSQIELIEIEMKHMMDNLPVWQAQVDRLISIPGVGFITAITVVVNMPELGQLDRQKIAALAGLAPFNQDSGKKRGKRRIFGGRKAVRRVLYMSCLSAMTHNPIIEKLYKRLIKSGKLFKVAITACMRKLLTIMNTMARDQSVWEPRLLSSGS

SEQ ID NO: 73588 - protein, 338 aa, unidentified
MKPIMIGLDLAKSVFQVHGVDEAGRVVVRRQLRRGQVEGFFAKLAPAVIGMEACGGAHHWARRLQGLGHEVRLMPAAYVKPYVKRNKTDGRDAEAICEAMQRPTMRFVAVKRVEQQGVAALHRTRALLVRQRTMAANALRAAFAEFGVVAAPGLRGVRELIAQLPAAAIPADAGQALLVLARHWEALGADIQALETRIVQAVRADEAARRLMAIPGLGPISASAILAAVPDARLFRSGRGFAAWLGLTPRQNNSGGKRRAGGISKQGERYIRSLLILGASAHLRQERSRGVKDPWLSGLLARRPVKVAAVARAAKTARVVWALLAKGERYRAPAQLAA

SEQ ID NO: 73589 - protein, 341 aa, unidentified
MGRSVGVDLHKNSFTVCFYESEERYTFKTYRVSRVGLAAFRKQLQAADELAVESTGNTAFFVREIAASVKRVRIVNPVQFKVIANSVKKTDTIDALTIARFLSRDLIPEVRMRSKEESQRSSLIGTRDKFVKLRTALKNKLHNILNANGIVSQPEMVSSEKGLEQILGVPLEPSYRFEVELLVTEIRHLNEAVKKLDEELRHQGQQLPGHQNLTSIKGISDTGATIFLTAIGNLADFKDEKALASYFGIVPRVYQSNQTCHYGRITKRGNKIARTTLVQSTLVAIRYSPYLRAFYEQVKARRGSGKAIIATSRKLLGIIYNTLKHHWVFEDFTTFKLATSS

SEQ ID NO: 73590 - protein, 408 aa, unidentified
MMSTSTDVFAGLDWAVHTHAVCIIDASATVRDRFEVAHDRQGLAELMRRLARFGAGVRIAIERPSGLIVDALVEAGHQVFPIHPNAVKASRPRYRSHGAKSDSSDAYLLADLLRTDGHRWAALSPQSDSIRALRALVRARDDLVSTRVALGNQLHSTLEAFWPGAACIFADITSPIGLAFLRRYPSPASASRLSEAQLLRFCCAQHYSGRRSPAELLARLRAAAQALPGKLTSESMAHVVRSLVAVLNPLVAQISGLTRRIERFVESLPDGQIIMSFPRAGRVCAAQILAELGDVRERFSTLDQLAAEAGTVPVTYQSGKTRSVTFRWACNHRLRQAITCLADNSRHANAWAHSIYAAARARGCDHPHAIRILARAWLRVIWRAWTDRKPYDPKLHLSALKLASDTGG

SEQ ID NO: 73591 - protein, 379 aa, unidentified
MDDTIRFVGLDVHKRRTVVAIADSGRDGEVRQYGAVETERSAIAKLAGKLARGGKTLRFCYEAGPCGYSMHRWLTGLGHECEVVAPSLIPRRPGERVRTDRRDAVKLARLHRAGELTAVWVPDPAHEAMRDVVRARAVAVSAVRRARQQLSGFLLRHDRIYSRKAWTGAHRRWLAELKFEHAAQRVVLEDYIDAVGAAERRRDGLTEQIRELLPRWSLAPIVAAVQALRGVAAIAAIIIVAELGDPRRFDNPRQLMAYLGLVPSEASSGEKVYRGGITKAGNRTARRALVEAAWTYRFPARRSRHLLARCQAASPAIQAIAWKAQLRLSSKYRKLVGRGKLATVAVTAVARELIGFIWAIARELPAIPPEPVPSVSSQR

SEQ ID NO: 73592 - protein, 317 aa, unidentified
MAQKSRLVGIDVAKGKIDAAIRSGPEASFANDPEGRAALVAWLREHGVGKAVMEASGGYEKSWAGLLREAGLEVVIVDPKRVRHFAKSAGRLAKNDAIDARIIAWFGEVFDDLESQAGDADREELDRMVTTRLGILGLKDQVDNWNEHEQPKAVQKILQALRKAIDAQLAKLQQLIAAKIDRTEPFAQRAEIVCSVPGLAAIAASGVIAFFPELGRIDRQAAAALLGAAPFDDDSGQRHGERHIRGGRRKLRNLLFMPVLSAATRHNPVLKAHYQQLIARGKKPKVALIACMRKLIGILNTMLARGEKWDPTKHAVA

SEQ ID NO: 73593 - protein, 318 aa, unidentified
MSEAVFIGIDVSKDTLEVASSAQASSWQAVNDTAGIEALSTQLLAMAPALVVLEATGGYEFEAACALQAAGLDVAVVNPRQARDFARAMGALAKTDSLDARMLAAFARVLHQHPERSRFIKPMADEALQRLQALVLRRRQLVGMLTSERQRLRMSHASARPSIERTIEFLKAQIHDMEAEAGEHVRAHHGALAAALSSVKGVGAATVSTLLAELPELGQLCRRRIAALVGVAPLNRDSGQMRGQRSIWGGRADVRKTLYMATLVAVRHSPVFKAFYERLVAAGKPKKVALVAAMRKLLTTLNAIAKSGKHWEEPLHVA

SEQ ID NO: 73594 - protein, 355 aa, unidentified
MWYLGIDQHARQITISLRNAIGDVVWARQVSTQPEKIQAFFQQLTQDRLQQGEEFVAILEVCGFNDWLIRMLQDYRCHKVILIQPDDRQKCKTDRRDAAALSELLWVNRARLLAGKPVRGVRQVDIAASTDQENRRLTTLRKEARQARTRVINQIKHIIRRHNLQWYLPTKTFPTKPAIAWLKALVLPEVDRLEMNHLLADLEHLEQRYLDLEKVIAQRCMISEEAVLLSSIPGVGNFTATALACRVGRVERFPRSHSLPNYWGLTPRCRDSGEKTQRLGSITKAGSSMARWLLAQVAYQVLRKDRRLREWFKNIKRRRGANIARVAVMRKLATIIWHMLKHRKTYAECRAFIIT

SEQ ID NO: 73595 - protein, 386 aa, unidentified
MDHPTTLSVSDPTGICGDCATLFVSLELSRSTWVATSLALGSRKMSKHTLVGGDARKLLELLARLKSRAEQHMAAPVKIVAIQEAGLDGFWIHRLLEANGVESHVVDPASIAVPRRHRRAKTDAIDGETLLRTLMAWQRGEPRVCAMTVPPSPSEEDRRRVSRERAMLLRERIRHTNRIRGLLFGQGITNYNPLRKNRREDLEELRTGDGRPVPAHLKAEILREIHRLELVLRQISEVEAERDEMLRPPQASSPAALLMRLKGIGAEFASVLYLEGLFRHFDNRRQLAAYAGLAPSPWKSGSVDHEQGISKAGNPRLRTTMIELAWMWVRYQPASALSCWFRQRVGSERGRIRRISIVALARKLLIALSRYINQGEIPAGAVVKPV

SEQ ID NO: 73596 - protein, 324 aa, unidentified
MSDHGSVPVYIGIDVSKAFLDIAVRPSGEPWRSPNEFEALESLVKKIKALQPALIVLEATGGFEVMVASALAAAGLPVAVVNPRQTRDFAKSLGRLAKTDRIDANDLAHFGEALHPEPRPLPDEAAQQLQAILGRRRQLLEMLVAEKNRLGLVHPLVKANLQEHIAWLQRQLSDLDQDLHQRLLASPVWRTKENLLRSVKGVGPVTATTLLAELPELGTINRKQIAALVGVAPFNHDSGQMRGKRTIWGGRACVRNVLYMAALSASQHNLVIRIFYERLLKAGKCKKVALVACMRKLLTILNAILRNGQSWQPALAVAKTPVAP

SEQ ID NO: 73597 - protein, 351 aa, unidentified
MEAYIAFDVHKRYTLAEREGIESRKVKHHRIEHEHGAIREYLKDVEPGTTVAMETVGNWYWIADEVEAAGCRPALVHALKAKLMMGQVNKTDKLDVHGLNRLQRVGTLPTVWIPPAEVRDKRELPRTRMFLVEQRSRLRNRIQAELTKYGLNVTGFSDPFGVGAREAMAEQIKQLPRMAALMTEALVKQHDFVNEQVKALETEITQVIEETPEVRLLMTLPGVGRILSVVMALEIGDVSRFGSGPQMASYAGVTPRVHSSGDKTRYGRMRQDVNRYLKWAFNEAATCICLNRRRDASRHVSQLYERLVKRKGYKKTIGAVSRHLAEAAYHVLSKGVAYREPGNRTDRSTGV

SEQ ID NO: 73598 - protein, 346 aa, unidentified
MLYAGLDLSRQRLDVHVMDEDGTAVEVTAVRPDADALRTLVGLVSRHGQPVTGVIESMNGARFIHDQLERWDWDVEVADAVKVKGLAPLAAKTDKIDAKVLAELARRDLVPGIWLPDPSVRGSRERARFRLHLVRHRVALKNRIHATLIAFGHPVPVSDLFSKGGRELLERLAIPEPWTTTLTTSLRMVDDLEREIRGCEAELRRLGADHPYVPRLMTVPGIGWVLGYTIAAELGDIGRFSSPKKLVGYTGLCPRVYQSGEQDRRGSLAKNGPKHLRWALVEGATTAARSPFFRERYLRTRRRLGRQRGPSIARVELARDLTTAIWHMLTKDEPFAPAGPASHLAA

SEQ ID NO: 73599 - protein, 412 aa, unidentified
MESSYKVAGIDVHKAMLAVVITDAAATGEFRLERRKFGTGAAELRALTEWLAGQAVREAVMESTAQYWKPVWQALEGQVQLHLAQAHSNRAPRGRKGDFRDAERLVRRHIAGELILSFVPDAEQQLWRTLTRTRQQLRRDRVRLHNELESFLEQARIKLSSHLSDLLGVSGRRMLEALAEGQTDPARIAALADQAVRATPEQLCDAVSAAATMSGLHRHILKLFLERLQLIEQQIDSLETSIGDAMREQQESVRRLAEVPGLGADSALQIIAEVGPRAATFASASQLASWVGCCPGREESAEVSKSNRSPKGNRAMRRILSQSANAAVKAKGTVFERLYRRLVARMGHRKAIWAIAHRLCRITWKILHQGVRYEERGPRFNPKADQRRATSLLRQLRQLGYAVNLTPLNPGA

SEQ ID NO: 73600 - protein, 443 aa, unidentified
MNRSIEFLSVGIDVGADFSLMAFALPSQELLGKPYKIIHSSQRSLNGAVEKIKTLSQKYQLPARVFMESTGIYHYPLYHKMKDAGFDVFVLNPLVTHAGRDLNVRNIHNDKYDSQKIALLGLRPGLKTSLIPSDQVISMKVILREYYAVKKEISMYICRLKNQLRQAFPQFLPLFSKVNGVTAMAILCEYPNPESLLNAGEHAVADFMKSVSHNGPLKVQKKAAALIQAAQDARSFGHWNHGISILIRHYIEMIRLLDVRAKTLLAQAKALLAEQDSKTLAHQTELLQTIPGIGFLSALTLICELGDFSAFKRPKQLFSYFGLDPIVRQSGNYNGTNLKLSKRGSPFARRCIFVIALQSISLNIHKEPKNPVLRTFYEEKCMCKAKMTAIGAVMHKICNLIFAVLRNDAPFVLQTPEQHPAEPLFRSCACCLSVKNTFSRITY

SEQ ID NO: 73601 - protein, 401 aa, unidentified
MKQHWCGLDWASRTHAVCVIDDTGGIRARFEIPNTGKSFAGLVRRLVKLHVAGVAIERPDGPLVEALLEAGLTVHMVPPSMLKAVRARYGAAGAKSDPGDAFVLADLLRTDHHRLAPLTPDSSATKGLRALTRVRKDLVETRVALCNQLLAQLGVCFPGANGLFGDLHSGVADAFLRRYPTAAKAASLTEARLRAFLRRIHYCGRTPVAELLRRIKEAPPAVLGPEEDEARAACVLVLVEAIRACQGRARELEAEIIERLEVHPDAHVFTSLPRAGHGVRAASLLAEIGDVRERFPDPESLMALAGAAPVTRASGKHRVVSFRWACDKKLRGAVIDFANDSRRGSAWARRIYDRSIAKGHTHPHAVRILARAWLRVIWRCWQDGVPYDVTKHRGAVVPIAA

SEQ ID NO: 73602 - protein, 450 aa, unidentified
MKVVYPRCAGLDVHKKGVHVCVRIRPTGSNKIRTEFAQFATFYEDVERLHEFLRKHKVRRVVIESTGVYWMPIWNVLERMTWKYDLVLVNPQHVRALPGRKTDQQDCERLAELGQYDMLRGSFIPPVEIRALRDLTRRRAALQQDWNRLVNRVGRLLETANIKLGSVMSSLTSKTGMAMLEAIARGVWDRERLADLAQGSLKDKKLELIRALPERCSDHFRWLLRELLDELDTLENRRLKVEARIRHDMEPYAVQIRNLCTIPSVSEITAWTLIAELGVNMSQFPDPAHCASWAGLCPGNSESAGKRQSGRTRKGNRYLRRALVQNAWAVAHIKDENPLTDLFYRIAGRHGMKKAAVAVAHRVLVIAYCVLRDGSCWKGPAVGRRKHVQKARRLMRRLARMGFPVQPARRADAASPDECKKCAAWGIPCMHAWNPIFQRRKVRKVENQTT

SEQ ID NO: 73603 - protein, 296 aa, unidentified
MSPNNHPILYAGLDVAKLSLPLHLAGRFYHLSNHAKGHAQLLKRLRSLPEVHVVCEATGGYEQPVVRGLQAANIPVRMVAAGRGRYCARAQGRRAKTDPMDAAVLTPYGGTFHPRVTPPTSPQPQRLADWSQRRRQRIHTLTVETNRAEHHADAFCQRQARPLRRLLAKPIEPCNQAITQLIAADVVLAHKARRLDAIPGVGPVVAATVLAEMPERGSLNRQTAAALAGVAPYHRDSGAQNGIRRISGGRRPVRCAFYMATWSAIRHDRTLISACGPPETDRSSPSPPVCANSSSS

SEQ ID NO: 73604 - protein, 356 aa, unidentified
MTSLTDLTHLGEVVDVVIGVDTHVATHAAAVVDAHTGAVLDQITIESTALGYAELVAFADQHSGLRAWALEGTGSHGAGLTRHLLERDEVVIELDRPERAHRRNGAKSDPLDAIRAAREALARPRLGTPRHTGDRQALAVLLAARRSAVQGAGDAQRQVFGLLIAAPEPIRTRFRDQNLPTVIAAAAKLRTHPSWDTETTTTVTVLRALARRAQALAAEAAVHEKAILAIVRSWRPDLLAQYGVGPIVAATVLCAWSHPGRIHSEAAFAMLAGVAPIPANSGQVITRHRLNRYGDRQLNAALHTIALTRLRGHQPSRDYAQRRTSQGKTTREIRRCLKRYIARDLYRLLERAPATS

SEQ ID NO: 73605 - protein, 339 aa, unidentified
MTRRCIGLDVHRDFAQVAIWEDGLVRQAGQIAATPEALRVFADSLAPSDEIALEATGNTHAIVRLLEGRVARVVVSNPQKTRAIAEAKVKTDKVDAEILAQLLAADYLPGVWVADEDTQARRRQVARRAHIVRQRTRLKNQVQAILHRNLVPRCPAADLFGIKGRRWLAEQDLPADERHAAEALLRQLDLHAEELGLIDSQLARIALACQDTRRLMTIPGVDVTVAMSITAAVGEFSRFSSPNKLVRYVGLNPRVKQSGGQPASHGRIAKQGRAHARGMLVEAAWVAVKTPGPLRAFFERVRARRGMQIAVVATARKLAVLCWHMITRGEWSSPALMDI

SEQ ID NO: 73606 - protein, 351 aa, unidentified
MMLIGVDYHPSFQTIAFFVEETGEYGEQELNHSDGQAERFYRDLKQRGICVRVGMEATGYSRWFERLLAELGFEVWMGDPAEIKAKRVKKQKFDREDARLLLRLMRENNFPQVWVPSPENRDLRQLLWHRHRLVQMRTRIMNQLQALAMNENKCWKKKLWSERGRAEFEKLPLGFWASRRRQELLELLDRMNPTIEELTAAVEQEAKKRPEALRLMTHPGVGPLTALAYVLIIGTPTRFPRGKQIGTYVGMIPSEDSSAGKQRLGHISKQGSSLLRFLLVEAAQAAARIHPDWRRRYMHLAMRRHKNIAKVAMGRRMAIKLYWMWRNGCEYSQSVKCGSYAGQLGTGHGVK

SEQ ID NO: 73607 - protein, 423 aa, unidentified
MPISIRPKCHGDVASRLREYGTWEIAIEVKKNGRLIELATRMSRSFAPSCEFGSMHAHINVYMSTGTPSIAVRREKNARFQSESSSSNTRSSPCFNPSQLTSELEKPVLRIAGGLFECEVIEEREVLQEAELSGQADSENDLGGSSETMYFIGLDVHKKTISYCVKDAAGRVYQEGKIGSSRRELDVWIRTMPQPRMIAMEATIFTGWIYDHLLPHAEKVKVAHPLLLRAIAAAKRKNDKIDAGKIADCLRCDFLPECHMASTEIRDRRRTLRYRSLVVKQMVQMKNRVSGLLMETGVNYNKQRLHKVGYFKELMTTNQDVHESIRPLLKLSREMISRSQKLDYALISSLERDPLLKERLRRLRTVPGVGPITAVTWALEIGDFTRFTSNKQAISYCGLCGDEKSSADKIMRMPSGTSISSAC

SEQ ID NO: 73608 - protein, 352 aa, unidentified
MAATAQSAIAVIGIDIGKNSFHVVGLDGRGAIVLRQKWSRGQVEARFANMSPCLIGMEACVGAHHLSRKLKALGHDARLMPARYVRPYSKGQKNDFRDAEAIAEAVQRPTMKFVVTKTADQLDLQALHRVRERLVSQRTGIINQIRAFLLERGIAVRQGQRFLRVELPRILATPPDVLSPRMVRVIEGLASDWHRLDERIEGLSTEIEELAKRDAGCERLMSIPGIGPIISSAMVAAIGTGDSFSKGRDFAAWLGLVPRQISTGDRTILGKISKRGNRYLRVLFVQAAWVVLVKVKPTRWQGHGLRPWIEAAKKRLHHNVLAIALANKLARIAWSVLAHGRAFETNKLLAAA

SEQ ID NO: 73609 - protein, 356 aa, unidentified
MTKTSSMASIAAVGLDVGDRFTYLCAVDERGEVVNEPRLKTRPEDLSAYFAGKPRCVVILEVGTHSPWISRLIERLGQEVIVANSRRVRVIAESDRKSDRIDARMLAELGRTRSKLLKTVKHRSEQTQADLTQLRSRELLVRMRTKLVNRLRGTLKTVGIEPPRCDASCFHRRVRTHIPVQLMDALKPLADLASFVETEIRALDRKLAQVARERYPVTEHLSQVDGVGPVTSLAFALTIEDPKRFKKSRAVGAYCGLTPKQRDSGNTRSQLGITKAGSRLLRACLVQCAQRILSKRGQDGDLRRFGLAIFRRGGGNAKKRAVVAVARKLAVLLHRLWVTGEVYDPLRQAKRLAPAA

SEQ ID NO: 73610 - protein, 360 aa, unidentified
MKYYIGLDVSQKQTAICVVDGAGKVFVEGCALSRPLDIAGWITNRVDACEVAKVGLEAGNMSSWIYTGLVKAGLPAMCLEAFQAHRFISTQRNKTDKNDARGLAQLVRMGEDFLKLVTVRSQASQEARALLSMREHLVSQKASLENHICGILKPFGLMVPRGDVCAETFRDRVLEALCLAEDRGVHIQAIVMPSLDVYRSSREQLSLLTSQVEKLAKHDPTCKRLMTVPGVGPVVALSFATAVDYPERFKKSADVGAYFGLTPRQYQSGETDRMVGISKRGDPMVRQHLVTAATVLLMSTKKWCPLKAWGVKLAKKHGISKARVAVARKLAILMHRMWINKQDFQWKTMSAKELEGVALS

SEQ ID NO: 73611 - protein, 335 aa, unidentified
MSSYYAAVDLHSNQSVLVLIDEKDQTVWKGRLNNDLELVLLALAPYREQVAGVAVESTYNWYWLVDGLREAGYEVELVNPAAVKKYEGLKHTDDVSDAYWLAHLMRLGILPTGYIYPRERRGLRDLARKRLRLVSQQTSHILSLESLYNRCLSQRLRASQVGQVEPEQLEDPYWAQAARSSQHILESLRAEIHLIEEQLKAVLQSDQQYQILQTIPGVGEVLSFTIWLETGDLKRFSKVGNYASYCRCVGSEKTSNQKKKGEGNRKNGNKYLAWAWQEAAAGAIRWQTKARSFYQSKKAKKGAWVAHKALAHKLCRAGYFMLRDQVEYSSVRLFG

SEQ ID NO: 73612 - protein, 320 aa, unidentified
MTILTSPTVIGIDVAKAEIVAYREDLKITQAINNDRETLGRWLKKLPAQSSIALEATSIYHLDTVELAHEMGHRVYVVDAYRLSHYRESIGQRAKTDFCDARLLARYLTSEQDRLRIWSPPPQAYKVLKSLLHRRAELINVRVGITLSWSSEPLLKEALAQQLKSFKQAEQVIQKLLHKVSKDAGIIENIKRCKAIEGIGDLTAIGLATAFMRGHFASGDAFIAFLGMDLRAKDSGKKNGPRHLSKKGDTEIRRLAHNAAMAACRSTTWKPYYESYLARGLAKTQALVILARKLCRVAFALMKNQSEYQPNLRLQGSPAT

SEQ ID NO: 73613 - protein, 310 aa, unidentified
MDAIVVGIDISKDRLDVHVAPVGEAFQESNDQAGIARLADRLGKLAPQLVALEATGGYETLVAATLQAAGLRVAVVNPAQVRSFANALGKRAKTDPIDAAVLARFAMAAAIKPMAPADAQSRLLADLVARRRQIVDMINAEKARLSRALNREVKKSLKRLIAALERELESLDGDLDKQIRASPAWRVKENLLASVPGIGKTIARTLIAELPELGRLDRRQIAALAGLAPWTRQSGQWRGKSFIGGGRTTVRAALFMGAMVAARHNPTLKAFRDKLVAQGKPKMVALIATARKLLTILNAIIRDNKPWQTA

SEQ ID NO: 73614 - protein, 409 aa, unidentified
MNENGKRYIGLDVHKHYLIALGVDEDLQVVLPARRVELAHLEWWMKKTLTKQDAVVLEMTTNTWQLYDELVEYAGSVMVVHPPHVALITRSQVINDKIAASILARLLAKGLLVGIWVPPQEVRELRGLVAQRQKMTRLATQAKNRLHAVLQRHHLKAPAGNPFAKANNDWWQALTLGKLEKMNMQSDLETLQFAEDQEAHLEEEMTMIAAEDEQIGRLMHITGFGVITAVTVLAAIGDIARFIEPKKLVGYAGLGTKVHDSGMTTRTGKITKAGRRDLRVALVEAAHIAANNHPHWKAELARLQPRLGYNKAIVAIARKLALTVWYVLQGKVDKYAEPETVAQKMLKFAYTVGKANRPKEQSAAQFARIRMDALGLGRELTSIPWGSKKPIPLPPSSLKTERSDVPNTK

SEQ ID NO: 73615 - protein, 472 aa, unidentified
MSKGSGSGMTRGDRRRNARRERLRALLPRDGAVVGIDLAEEKQALAVIDHDVRVLARKTVRVKAFGLGEALDWAVGQARVKGFDRVTVACEPTGPRWMQVQRLCAERGLPLVCIQPLISHIAREQQDYTTHKTDESDCVMIARLAVELHCYIPEELDETWAHLRHLGRRRQQLITAQTASGQRIMDFLSVAWPAVTETCAGPVESRTWLAALEVVTARCGADPGTLAAMGREGFTALTRGAVAGWGITRAHGPICARVFAALTDTEGAVTWSRRGLLRRVADELGDLKRTRVQLRQVEADMVAVLDELGLSRLADIPGLTAVGAAAILAETGDPRRYDSSSSLVKHAGMSPSDNASGAFSGQAHISRRGRPGLRLVVWRAVWPMLQYNPVMAAKYQAMTRAADAAAAGAGPRQGTAAQAAARARRAKARVACAASLLRWIYCMVVHDTSWDPAVASGAASRHDTARTQAEAA

SEQ ID NO: 73616 - protein, 412 aa, unidentified
MFKIFRNNCCGLDVHKTWIYACIGITDANGRTEYKQARFSSFSKGLRDLAAWLANYSCFEVCLESSGKYWIPVFNILEKTYLVTLAHPKYTKPQKGNKTDVKDAKWICDLFMCDMIKPSFIPSPEIRQLRDLIRYRIKLTNMLTGEKNRAQNCLTVSNLKLDDVFSDVFGKSSRSITNHMLDHPGETFDVAPFVDARCQTPLDEIQAAVDGAISSEQAVKLRQCLAHIDELEAHRKEIEREILMIAEPFSAVLELLYTLPGLDKNPMTAIAILSEIGPDMSVFPSSKHLVSWAGCCPRNDQSNQKVKSRRISRAGCYLKPLLVQVANALIKSKKHPEFKERYRRIKSHRGHKKAIIAVCKMLLTAIWNMLSKLEPYNPDGFLEHRPVNEKRVLTKSQALELLRLRGYTITND

SEQ ID NO: 73617 - protein, 410 aa, unidentified
MEVLYPHCAGLDVHKDTVVACVRHMVNGSVRREVRSFKTTTKELLALSDWLAGEGCTHVAMEATGVYWKPVWHVLSDGDFTLVLANAAHVKNVPGRKTDVNDATWLADLLAHGLIRSSFVPDGQTQQMRTLLRTRKQLVRECSRHVQRLQKTLEDANIKLDSVISDIVGLSGRRMIEALIAGETEPGALAAMAHRRIKATPDELEAALRGRVTRHHRFLLQLHLQQIDAVNAAIDQIDQEVDAYVEPFRATVRLLTTIPGIDELSACVILAEIGRDMSRFPTAGHLISWAGLCPKNDESAGKRRSTRMRKGAPWLKTTLVQCAAAAARKKASYLQAQFHRLRARRGAKKALGALAASILTSVYHMLISGELYRDLGPHHFDQRAKAVNTRRLVVRLQNLGYAVQITPLAA

SEQ ID NO: 73618 - protein, 374 aa, unidentified
MENTITYVAMDTHKKQHKIALHYPCQEEIVEFTISNTVRDIKKIVNKIKKQAPGEVEFCYEAGVCGFTLKRRIEQFDCRCCVIAPSLVPRKPGERVKTDRRDAKKLLMMHRAGLLTEVHAPNEHQEAARELTRLRETARDNLKRIRHQLLKLLTRHGYVYTEGRHWTQKHITWLRTVEFAESTLTDVFENYFNEMIYCIGRLENLDKEVGLLASSQEYKEIVGLLCCYHGIDTLSAITIITEIFEFGRFESPRHLMSYLGLTPSEDSSGDKQKKGAITKAGNKRIRRLLNEASWHYRHRYVPSTALKKRRKGQPKWAIEIADAAGRRLSTRHRYLVNKGKMPCKANIAVARELAGFIWFTVTQYQARKNTNDAA

SEQ ID NO: 73619 - protein, 394 aa, unidentified
MCQQYKAEASMTKHNILFIGLDTHKTFTEVAYIEDQRGAKTIHLGKILSNKAAFKKLARQLQSKYPHATLHFVYEAGPCSYWIYRLLTNLAHCCYVIAPSLIPKKPGERIKTDKRDALKLAKLLKSEDLTPIYVPEPEDETVRDLSRARETCMKDLKDAKYQLKALLLRNNINSKVKDNWSLQHLRWLAELVLPHPCQQIVLQEAVSTITERLKRLKRLDNELTHQVKNWRYYPIVKAVQALRGVRLLVATGVIAELGNLTRFDHPRKLMSYLGLVPSEHSSGGKHRLGAITKCGNSRARRLLVEGAHSYKHNANISKEMQLRQEGLSKEITDMAWQAQLRLCRRYNRLIHRGKHRNVVVTAIAREMIAYFWAISREVVLPVVDVKLRLARMPA

SEQ ID NO: 73620 - protein, 367 aa, unidentified
MVYKRLNSTGTLIQRNNHGGSSRDIMYYIGLDVHKKKISYCVKDASGQVHREGTIGATRNELDCWVRTLPQPRIMAMEATIFTGWIYDHLLPHAEQVKVAHPLMLRAIAAAKKKNDRIDAGKIADCLRCDFLPECHMASTEIRDRRRTLRYRHLLVRQMVQMKNRISGLLLETGVSHNKQRLHKVGYFRELISHNQEVHENIRPLLRLSRETIVRCQKTDYALVSSLQRDPLLAERIKRLRTVPGVGPITALTWALEIGDVSRFRSVKQAISYCGLCGDEKSSADKVLRTPLSKQRNKHIQSVLVEAAKLAPRQNHELALVHEREKQKGNANRATLAVARKMVAYLLAVDRREREFIPAEGHRTTAA

SEQ ID NO: 73621 - protein, 355 aa, unidentified
MTSTKYIGMDVHTESISMAVRNSVGKVVMESVIETKASMILQFIEGLRGDLHVTFEEGTAAAWLYDLLKPHVARLVVCNPRRNALLKVGNKSDRIDARKLSELLRGNQLHPVYHGEHGLRALKELVRSYLTISKDLARVMTRVKALYRSWGIPCSGTQIYSRLHRVTWLSKISEPGVRLRAAFYFQQLDALRTLRQEVRQELLAESHKHSAWKRLCGIPSIGPIRAAVALGVLQTPHRFRTKRQLWSISGFAIETRSSADHRHVNGQLQKVKKRVSIRGLNQNHNHDLKNLFKGAAVIASTKPGPFQEFYTALLAKGMRPEMARLTLARKIATIVWIVWKRGVSFDAQYLKPQTV

SEQ ID NO: 73622 - protein, 316 aa, unidentified
MSQFSVFVGIDVSKDHLDVHLLPEEGSWRVANDEAGCAELSNRLRALSGPVLVVMEATNVFWRLAATELASEGISAAVVNPRQVRDFARATGQLAKTDAIDAHVLALFAQRIEPPVRALPSEQCQVAAELLARRAQLMGMRVAEKNRLATARAAKVRKDISATIAFLEKRIAALDEEIDQWLKSTPIDQSRVNLLKSFAGIGEHTAKSLLITLPELGSLSAKQIGALAGLAPFARDSGHKRGARQIRGGRSTVRAALYMPAITAIRCNAVIRALYQRLINAGKHHYVAITACMRKMLIILNAMLKSNQPWKNPQEG

SEQ ID NO: 73623 - protein, 411 aa, unidentified
MQLFVGDDWAEDHHDVEVMDQAGKVLAKKRLPEGVAGIAQLHELIGRCMGEDDQDAEVVIGIETDRGPWVAALVAAGYTVFPVNPLQASRYRERHGVSGAKSDQGDSHMLADMVRTDSHQLRPAAGDSPEAEGIKVLARTHKTLIWERTRAVQRLRHQLREYFPAALDAFEDLDAPDTLELLGKAPDPARAAKLTRAQVSAALKRARRRNIPDKATAILAALRAGQLGQPPALSAAYAATARALIAVIATLNEQVKVLQGQVEENFGRHPDAEIYLSQPGLGPILGARVLGEFGDDPHRYASGKARKNYAATSPLTRASGKKKVVAARFVHNDRLVDALNAQAFASLNASPGARAYYDELRARGIEHNDALRRLANRLVGILHGCLKTRTLYDEATAWSHRENLPQSSVAA

SEQ ID NO: 73624 - protein, 343 aa, unidentified
MSAHYFIGLDIHKKMIAYCVKTVDGRLVDQGMVDADRKSLHEWAANLPGPWVGAMEATIFTSWVYDFLLPYAVNLKVAHPEMLKAITAAKKKNDRADAERITDLLRVNLLPECTMLPPEIRELRRVLRYRNHLVRTAVKMQNKMCGLLMEVGASYNKRRLRGKRYFHELLEKVSEIPPSVKDLLVLSRAGFEMFQESQKRLIQSLRTDALIRERVCRLMTIAGVGEVTALTWTLEIGDPLRFGSIRQAISYCGLCSAQRESAGKEHRSPISKKRNKHLQTILVEAAKIAPLWNPQLASVHQRELKKGNRNRATLAVARRLVAYMMSVDKNQKDFALRGEQKAA

SEQ ID NO: 73625 - protein, 312 aa, unidentified
MDMMVVGIDVAKDQLDVCVRPSGESFVVARSGAGIEELIGRLHKLTPRVIAIEATGGFETIVAAGLAAADLAVVVVNPAQVRAFAQALGKRAKTDPIDAAVIAHFAEATKAQPRALPDDMTRLLADLVARRRQIVEMMAAEGQRERRLADKRVKKSIVRLRKALEKELAEIDAEINDHMRGSPVWAEKEDLLASVPGVGPIIARTLIAELPELGSLDRRKIAALVGLAPWTRQSGQWRGKSFIGGGRKTVRNALFLAAMVAARHNPVLKQFRDKLVTAGKPKLVALVAVARKLLTILNAILRDKRPWRPKIA

SEQ ID NO: 73626 - protein, 384 aa, unidentified
MPADYRHDQTAIRIDLGAIFVSLELSRATWLITSLSPGRQKMSKHRVRGGDIAGLLACFAELRAKAQTRTGQLFPLIVIQEAGLDGFWIHRVLQSEGIESHVVDPASIATSRRRRRAKTDKIDGEALIRALLAYKRGEPRVCAMVKAPTCREEDDRRICRERSVLTAERVAHVNRIKGLLFGQGISDYEPMHRCRRARLDELKTGDGRPLPPQLKAQVSREVDRLELLIQQIKAVEAERDALLASTESADKPAPTALLLGLKGIGPEFASVLWSEGLCRSFANRRQVAAYAGLAPTPWQSGTVDREQGVSKAGNPRLRTTMIQLAWLWLRHQPDSALSRWFHERIERSRGRRKTIIVALARKLLVALWRYVTAGIVIEGATMKA

SEQ ID NO: 73627 - protein, 404 aa, unidentified
MELLHERCAGLDVHRDTVVACVITPEAREVRTFGAVTGGLLELADWLAGQGVTHVAMESTGVYWKPVYNLLEGGFELLLVNARHMRAVPGRKTDVRDAEWIADLLRHGLLRASFVPDRPQRELRELVRYRRTLIEERSREAQRLHKVLEGANIKLGAVASDLMGVSGRAMLEAIAAGQDDPELLASLARGRLRDKHDQLVAALQGLLGPHQRSMLAAQLRHIDFLEAEITTLGTEIEERMRPFGVAIALADSIPGIAQRTAEAILAETGTDMSRFASAGHLASWARVCPGTDESAGKRRSGATGSGNHWLRSALVEAAHAAARTKGTYLAAQYRRIAARRGARRAAVAVAHSILVILYHLLRDGVVYQDLGATWFDKRDAGATVRRTVKRLEALGYRVTIEAVA

SEQ ID NO: 73628 - protein, 351 aa, unidentified
MVEISTIGLDIAKNVFQVDGGDSAGCRVLQRQLRRSEVLKFFRKLPPCVVGMEACASGHYWGREIAALGHDVRLMPPTSVKPYVRRGKKNDKIDAAACREAVGRPDMKFVPIKTEEQQAAVMLHRVRQMLVSERTRLCNAIRAHLAEFGIIARKGDGGFKALLKMLANEQDPTIPATIRPILEPLVTQWCSAGDQLVVIERQITAWHRSNSDSLRLAGMPQIGPIIASAFVAKVGDATRFDNGRQCSAWIGMVPSQHSTGGKTSLGPITKAGDRYLRQLLVIAGTGMIRRLQAKPDLWPWAAKLLERMPRKKAAIAIANKLARIAWAILVTGKEYRQIGTAIADADLAVAQ

SEQ ID NO: 73629 - protein, 355 aa, unidentified
MLYSGIDLHRDNSMITTINDSGTIINQQKLPNEDLSILDYFFSMGKQHRAVVEATANWYWLSDLLNDHGIDLVLAHAKYLKAISYAKVKTDKVDSQTLANLLRIDMIPAAHQIAPELRGLRDLMRARLKIVSKNTSCQNSIHRLMGKYNLNIPNDRKLHDLSTLNLLNDLPIPAEALLQLELHKEQMRLLHRQINDLEKSLHPKLIPNPDIQRLLWIPGIGKILAFTIYLEIDGIERFPDVKHFHSYCRLVPGADNSNRKIKHKSGNKDGNKYLKMAFTEASVRAVQYFKEIKAFYQSKERRKHKAIAKTLVAQELAKTCYYVLSTKENFNNTFKGITLSRRKSMQWPRLASPGV

SEQ ID NO: 73630 - protein, 400 aa, unidentified
MISVGIDVSKGKSTVCILKPYGEIVSKPFNITHTHKDLSELSSMLFRLNDEVKIVMEATGIYHLPVLTYLQEKGFFVSVINPYLMKSYRNESLRKAKTDKIDSRIIANYGIDHWFKMKEFQTSGEIYEELKLLGQQYRHYMKLHLLSLAELTHLLDLTMPGIKNLLASWNETNRKDKRSDFVERFWHYDVITSMSEQEFTEEYILWAKEKKYVPSQEKAKVIYTLAQESIPTLPSETSSVKILVTEAVRVLKEVDATLGLILSRMQEIAKTLPEYSVVREMGGVGNTLAPKLIAEIGDVRRFRNGKALVAFAGIDPPPYESGQFVGCNRKISKRGSASLRKVGYETMRSLKMRSRPEDPVYRYVVKKESEGKSKKAAKIAGLNKFLRIYYARVTELYKNI

SEQ ID NO: 73631 - protein, 310 aa, unidentified
MDAIYVGIDVSKDRLDVHVRPSGEAFAVTRDGKGLEELIERLRALAPTLIAVEATGGFETIVAAAVAGASLPLAVVNPAQVRHFARAIGKRAKTDPIDAAVIAHFAEAVKPEPRPIPNAEARLLGELVARRRQIIEMLVAERQREKRVDAVRVRKSLARHIAALEKELPVIDHDIDTMVRGSPVWREKENLLVSFPGVGGILARTFLAEMPELGSLHRRQVASLVGVAPYTRQSGRWRGKSMIGGGRAAARSAVYLAALSAIRCNPVLRAFYQHLLAAGKPKMVALIAVARKILTILNAILRDKKPWQPA

SEQ ID NO: 73632 - protein, 389 aa, unidentified
MRFAGIDIASEKHVVAIVNADGAVELKATVFTEDAAGYEKVLALLGTPNEVLIAMEATGHFWKNLFAVLAAAGHAIALVNPLRTHRFAGVDLERTKTDAIDAMGIARFAAEKRPAVTALPDALAEELRELVHLRDRLLQDFGDRVRQLHRLVDLGFPEFTRYVRTLDSELAVAILRDYPTAAAFRGVSVRRLAALRYDGRHQVGLDLARTLIEAARRSVGKHHSATYRLQIRYACDDLNVLRHRLRDIDRDIGGKLREHEIGRLLTTIDGIGTNTAACVIAEVGDPAHFRSGSALAAYVGAIPALKQSGKRQFARGAMTPIGNARLRAALWMPTLSAVRNNPSLRAYYQRLRARGKLPKVALVACMRKLLLAIYSVAKHRRPFAVEVSP

SEQ ID NO: 73633 - protein, 356 aa, unidentified
MKQTVQPDFTGQNIYVGMDVHKKSWTVSIFSEHHEHKTFTQPPNAQSLVGYLKRTFPGATYHAVYEAGFCGYWIYDSLHQQGVDSMVVNPADVPTTDKQRRGKNDKIDSRKLGKNLRSHDLQPIYIPCTMQREDRSLVRTRHGMVCKQTRCKNQITSLLAFYGVFLPPEMETKRWSRRFINWLESIQLEHTSGTIALKTLIEELLHLRKLIAGLTRQIVLLSRTYDYAEAVWLLRTIPGISTLTAMILLTEIGDISRFKNLDTLASYAGLIPDTKSSGEEEHITNITMRRNPMLRAILVESSWVAVRKDPALMLAFNKLCRRLKKTNAIIHIARKLLNRIRFVLKNRQPYVLAIVA

SEQ ID NO: 73634 - protein, 366 aa, unidentified
MNTIYIGVDFHARQQTVCYLKTETGELVTCELKHQDKQVVQAFYAQFRGQVIVGLEASGYSPWFERMLEELGCEVWLGHATEIRRRARWRQKNDRRDAELILHLMLHNEFPRLHRPAVQSREVLRMLRYRQKLIKMRTMSKNSLQAIALQAGLAKGSRLFTKAGQQELGTAEMSPVLHWQREHWLQLMEPLNQQLLETMVWFKAQSKDDVCITRLRTHPGIGLLTSLCIVHTLQPVTRFRNTRKVAAYAGFDPIERSSGERKCFLGISKAGSRLLRYLLVEAAQTAVRKDEDLKRFYKRLAERRGRPKAKVAAARKLLIRAYIMLRDEIDYAEFRHRAVAARLARRGQGPSNVPEVLIGQPASPEQ

SEQ ID NO: 73635 - protein, 448 aa, unidentified
MAAEASSSELRLAPSTGFQGSNGILRRAAASPRIDKREHGNRLRGSRPPPSGKGCQVRFVGIDIAAEKHVVAVVSEAGDVLVKPTTFGEDAGGYEKLCVILGQPEGALVAMEATGHYWKNVFAALAGRGFQLALLNPLRTHRFAGENLERTKTDAIDALGIARFAAQKRPAVTRLPDAVTEELRELVRHRDRLVQDFGDRTRQLHRLVDLGFPELTRYIHTLDSQLATAVLHEYPTAQAFVGLPWKKLAKYRYDGVHIVGDELAKSIIEAAKVSVGRHHGHAYRIQVQHACEDMDLLRRRIKQLDGDIETKLGEHEVGSLLTTIDGVGIQTAAKLVAELGDPAQFHGPEALAAYVGVIPALRQSGKRSPSRAGLTPIGNARLRAALWMPTLTAVRRNPWLKAHYERLRARGKLPKVALVACMRKLLHAVYSVAKHRRPFVPELAGGPA

SEQ ID NO: 73636 - protein, 313 aa, unidentified
MHLGIDVSKQTLDCCLISDGIFYERKFYNDSSGMNKLQKWLDEHGADHTLHCCCEATGTYYETVAVALSGQYKMSVVNPRTVKGFGAAVLNRSKTDRQDAKLIARYCQAMKPEQWQPLKPEHRQLQELVRYIARTKRQRAAEQTKRQTAPDYLKPHIQSTIEHLTELLNRLEQDLKAHYRSHPEQDKRRKRLKTIDGIGENAAAVLCSIITERFTHAKQLVAYLGLDPKEHQSGTSVKGRTRISKIGKSETRAALYMPALVAYRMGAFPNFTARLEAKGKPPKLIIVAIMRKLVVIAFHLLKNGENFDRSRYR

SEQ ID NO: 73637 - protein, 343 aa, unidentified
MKIIRVGVDLAKNVFQVHGVDRNEKAVWRRKLNREEWLKVLLEKIEPGYEIGMWASGGAHHWARKLEAHGYTVKLIAPQFVKPYVKGNKNDANDAEAICEAMSRPHMRFVKVKTIEQQDIQAVHRIRAGLMEQRTAKANQIRGLVSEYGLVAPKELLHLRAAIPLWLEDAENGLSSRFRRLLNGLWADLLLLDQRVRELDQEITAIAAEDPVAKRLQQLRGVGPMIATALLATVGDATQFANGRQMAASLGLTPKQNSSGGKDKLLGISKRGDAYVRCLLVHGARSMIRTAKDKDDRLSQWVMRIATVRHPNIAAVALANKTARIAWAMIVHGSDYQPGLVTA

SEQ ID NO: 73638 - protein, 439 aa, unidentified
MQYQNAPRACPYIFKDHWEEMARCLDERPDQTALELLVEFQARYPGQYSLRQLHTLQKRVKIWRKQWDGRPHPIAASMCQSGGVIDHSNRKGASTMEITIIGVDLAKNVFQVHGVNDRGMAVLRKQLRRDQVAAFFANLPACLVGMEACGGAHHWARKLQALGHTVKLMAPQFIKPYVKSNKNDAADAEAICEAVGRPTMRFVPIKNIEQQTVLALHRVRQGFVKARTAQANQIRGLLGEYGLIVPQGIGHIATRVPDLLEDAGNELPGTFRQLIHRLLEHLKQLQRQVAEIEGQIKAWHRSSEASRRLEKVPGIGLLTATALVATVGDAKNFDNGRQLAAWLGLVPRQYSSGGKSTLLGMSKRGDAYLRTLLIHGARSVIYRAGQRAPVDSWLVKLIRRRNANVAAVALANKTARITWALLARDREFRPDYTTVAATA

SEQ ID NO: 73639 - protein, 425 aa, unidentified
MPYRIAGIDVHKKMLAVVVSDVEIDNEYQFERRKFGGNPEQLRLLAAWLLEQEAEEVVMESTAQYWKPVWEVLERYWKPTCEKRAGARRKSGKLHLAQALSNRGRRGRKRDFPDAERLVKRLVAQELTLSFVPDAEQRLWRTVTRKKYQLRCDRIRLQNQLESLLEEAHIKLSSLVSDLLGLSAQRMLKAIAEGETNPATLAALADKHLRATPEQLCDALGACTQLHPVYRRLLKLGLEELRLIDDQIGQLDREMASLLSAHQDTVQRLAEIPGLGADSAQQIIAEVGATAATFPSEKCLSSWVGACPGDDETAGVNRSHRSPKGNRQMRRILNQAANAAARTKGSIFEIVYRRSVPRLGHNQAIGVIAHRQCRLIWLILHQGVRYQERGPAVTKRSKQLRTWRMIRQLRSLGYRIEPPTPQPQP

SEQ ID NO: 73640 - protein, 361 aa, unidentified
MRVQRKSIDFKGHNFYVGIDVHKKSWTVTILNEEYEHKTFSCSPSVENISKYLERNFKGGDFNIVYEAGFCGFGVQRGFAKLGMRCIVIHPADVPNSSKQRQQKTDVHDSRSLARYLRGGLLKGIWIPDEQLEEERHLVRQRFTIVKDLSRVKNRVKSLLMSSDIKIPEHITTSQSRHWSKVYTKWLDSVIEEDQGSLGGVLRNHVDQAEELREVKKRVTMQIRKLSQTDRYKEDYELMVSVPGIGLMTGMTILTEIGDIKRFKRLDELCSYVGLIPRMNNSGERTVTGKLVNRGRKEIKIMLIEASWVAIRHDSALMLKFGELSKKMNKNKAIIRIARKLLNRIRHILINKVPYEKGIVQ

SEQ ID NO: 73641 - protein, 402 aa, unidentified
MFYCPPRDIRVSVDVGCKQHRVAVGLPDGQILDEFSISHQPDGFATFFDRLSKLEQQYQCPIRVAMEGYNGYARPLDQMVMARGWQLYNINNLKLARFKEIFPGAAKTDVLDARKGLELFQLQQHLPIAKDVLQAVAEPPRENQILKRLSRRRKRLVNERVRVKNLLQSDLQAVCPSLLALTSNVGCVWFLHFLTSTNDLTELARMRQKTVSRISGVGSKYANVIQGWQRHAQFSAEVEWVGEMIQQDAMRILELRRHIKSLEAKMAALIGESSLATIIHSIPGFGPVSTAELAGELGHEDRFLQESSLALYLGMAPLSKESGQYKGSKTPRQVNRRAKAAMMVAVDRHRKQVPASQKYYEKKRAEGKGHNQAIRSLGRQLSRVIFKMFKEQKDYVPPVSGI

SEQ ID NO: 73642 - protein, 425 aa, unidentified
MSKGIALTDSELEGKVVAGVDTHADTHWLCVLDERRRVALSREFPATPDGYEALADAIGDPALCAAVGVEGTCSYGAGLTDALTARGFRVLEVLSKKKDRRRRRGEGKDDGIDAERAARDVLAADGTSVPKLRGGWVDELRSLLVARERCVSCAVEAHAAALSLARTAPEEVRRRWEGMSQERMMGAALGIEEGAASALERALLALARMWKAARDEADALESLMRRVLEERCPSLLAIYCLGTVGASELAVAAGENPGRLRSEAAFAMLCGTSPIPASSGKTSGRMRLNRGGDRRANKALHTVAVRRMRYDPRTRDYVERRMSGRRALSKAEAIRCVKRYIAREVYHALMHPKDVGERVDRLSLRKARKSAGLSQTEAAHALGVSPSTVSGFENGRCESRMLAERYSAWVLEGMPMGVENPESDS

SEQ ID NO: 73643 - protein, 394 aa, unidentified
MKLVGIDVGKNSHHFCVMDKETGEFNVTPSSFSNNKEGFDFLINSLKPYSKKSILLGMEDTGHYHVALLKFLLSNGYTVALINPKTTDLTRKMEGGITKNDKLDTITICDVLDTPERKKQYRITKVDRFDLYEQRQLTRHHHNLKEELNIYCNRLQKSIDLVFPEFNTLFGSKYGVVYMNLLKTFGSAEAIASTDIRTIRKCFEIKGRGGRISLTAEKLKECAKNSIGISSEVETIQIKHLVSQIMLIKEQIAEIDKKIEEFSIKNNSPILSIPGISHFSGTSILAELGDIGNYSKPSRIIKFAGVAPYHYESSQYNAQHTAITKKGSKYLRKTLYQVILPVINNNPVFKKYYRLKISQGKGLRFTQGHCIRKLLRVIYHLLETGQSFDPALLR

SEQ ID NO: 73644 - protein, 400 aa, unidentified
MLSIGIDVSKGKSTVCGMKPGGEIVYAPFEVQQTREGMLELVSLLRSSGEEVRAVLESTGSYHCPVVAALLENGIFVSVVNSLRMKRFCSQSIRKVKTDRIDAMQIALYGLAYWQELQPARLPEDTYRELQLLARQYYQMTSMLIKAKVDFNAICDQVLPGMQELMNDHAGRHKLSDFVLRYRHTTHILEMGETRFRKDYCKWAEKKGYRNCERMAALIFATAQNGIPVLPNAPSTQIVITEAIRVLHTVEASRDAILTQMQALAKTLPEYSLVREMPCIGDTLAPRLIAEIGDVRRFHSKRALIAYAGIDAPPYQSGKFCANNRHISKRGNRYLRKTGYEVMQSYVMHKPTNDPIFTFIEKKRGEGKSGKLAMVAGLNKFLRVYYGKVTELYRSLPAIE

SEQ ID NO: 73645 - protein, 354 aa, unidentified
MSQNLNSAVAVIGIDIGKNSFHIVGLDSRGAIVLRQKWSRGQVEARFANMPPCLIGMEACVGAHHLSRKLKSLGHDARLMPAKYVRPYSKGQKNDFRDAEAIAEAVQRPTMKFVATKTADQLDLQALHRVRERLVSQRTGIINQIRAFLLERGIAVRQGQRFLRAELPRILATPPDVLSPRMVRVIEDLAIDWRRLDERVEGLSGEIEAVARQDADCERLMSVPGIGPIISSAMVAAIGRGEVFAKGRDFGAWLGLVPKQTSTGDRTILGKISKRGNRYLRVLFVQAAWVVLIRPKSWERHGLKPWIEAAKKRLHPNVLAIALANKLARIAWGVLAHGRNFEARTNINATAQAA

SEQ ID NO: 73646 - protein, 316 aa, unidentified
MEANNYFIGIDISKAQLDMVIRPTGKHSTHPNNQVGIIEIVTQLKALQPKLIVMEATGGFEVHLASALATASLPVVVANPRQIRDFAKATGRLAKTDALDAGVLAQFGEVVQPTVRPLADVETRELDGLVTRRRQLSEMITAEKNRFGTASPTIQKQVQKHITWLERQMKQIDSDLSSKIRTSPLWREKDDLLQSVPGVGRVLSMTLLAALPELGKLDRKKIAGLVGVAPLNRDSGTMRGKRSVFGGRASVRSTLYMGALVGTRFNPVLKAFYERLCATGKTKKVAITACMRKLLTILNSMLKHKTSWKENCLQTA

SEQ ID NO: 73647 - protein, 412 aa, unidentified
MTEDTQWFVGLDWAREKHRVVVLDAKGESVAERDVTHDGAALSELCAWLIEVTGAQPAQIAVAIETPRGPIVETLLERGFVVYSINPKQLDRFRDRFTVAGAKDDSRDAHVLASSVRTDRRAFRRLTFDDPLIIELREWLRIEDELKQERIRLSNRVREQLWRYYPQANRLSDDVADDWFLDLWEQVPTPATAAQVNENTVAKILKTRRIRRFNAAEALAILRQQPLQVAPGTAKAATAHIRTMAVRLRLINEQIKQAERRLDELCAGIKAGQICEQRDVAILRSFPGLGRINIAALLAEACQPLRERDYQVLRVLSGSAPVSRRSGKSWIVLRRYACNNRLRNAIYHWARVAIQHDAVSKRRYDELRRRGHGRARALRGVGDRLLYVLCKLLQRQTPYDPEYKIQQMQLTA

SEQ ID NO: 73648 - protein, 430 aa, unidentified
MSLDRSVEQEPQFAAFVGVDWADQKHVWSLQGAGSQKRESGELEHAPEAVEVWVAQLCQRFAQGPIAVALEQSRGSLVFMLSKYERLHLFPVPSTMAGNMRDALYPSGAKDDPRDADLLLDLLLKHRDKLRRLSPDTEATRRVQNLVEERRKLVDEKTEQINRLTSHLKIYFPQMLDWFDRLDREAACALLERWPTLEELQKVPPAKLRTFFCKHHCRDQKVTERRIVGIRQAVPAIRDRAVMEAKSAVVKVITQMIRILVQGIAELDRKIEEEAAAHPDFFIFNSLPGAGPALAPRLLSAFGSQRARYGSAQEVQAYSGIAPVIERSGKKKWVHFRWAAPKFLRQSFHEWAGRSITQSQWARSYYEQQRQRGKGHHAAVRALAFKWIRIAFRCWKDSVAYDESRYQATLVRRASPLSASMVASTLAKTL

SEQ ID NO: 73649 - protein, 353 aa, unidentified
MKCNKYMGMDVHQAMTVVAVMDGDGKVILETMVQTEAAAIIRLVQSISGPLHVTFEETTQADWLYEVVRFFVADVVVCDPRHNKLLSEGSKGDKIDARKLADLLRTGMLRRVYHGSEGTRRLKQLVRAYETLSVDTKRTMVRIKAIYRARGIPTPGRSVYQPQQRDLWLELLTEPGLRERVGWLYEELDHLKPLRRQAKQAMLSEGRKHRAVQLLRTIPQLGPIREAVITATIDTPYRFRTRHQLWSYSGLAVVTHMSGEYEMKAGRVVRSRKPIATRGLNRNCNHRMKQVFIGAATAGSRTEPYRTYLQGLQQKGIRKEMARLTLARKIAAMALTIWKKGETFDPKKLNWKT

SEQ ID NO: 73650 - protein, 448 aa, unidentified
MEPQEIDDEEHEQVLERVAAVDVAKASGMVCTRVPHQSRPGKRRTRVWPVDATTNAVLELADHLVAEGVEKVTLESTSDYWRIWFYLLESAELDVQLVRAQDVKQAPGRPKSDKLDAVWLAKLTERGMLRPSFVPPAEIRRLRDYTRLRADLTCERTRHYSRLEKLLEDALIKVSAVASSLAAKSVRDMLEALIGGERDPKILASLARGRMRAKHDRLVQALAGRFDDHHGELARLLLDQIDTLSAQIGRLTTRIGELIAAIPPAQGIDADGTTGPAAGHGKNAPVLPAVDRLDEVTGIGRGGAQAIIAEIGLHMSVFPTAAHLVSWAKISPQTIQSGTRSRAGHTGKGNPYLRGLLGEAAAAAGKTDTFLGERYRRLVKRRGKLKALVAIARSILVIVWHLLDDPAARYHDLGAGYYASRVDKNRKMRHHVRQLEALGYTVTLTQAA

SEQ ID NO: 73651 - protein, 331 aa, unidentified
MSNIIGIDVSKLSLDCAYLRDVDQHKAKRKRVTNNPEGFASLLSWAQTVSGLCVNEIRFIIEPSSIYHELLVQFLDQHHATICLVNPGRVRKFAQGMGILSKNDLIDADMLTRYGLLNRKLMAYQAEAQEIGDLRSLLNRLDSLERDLRRELNRQEKIGRSSVLHRFEKQSMQRCVKRLKAEVVLFKKHIRKTIHSSTLLKKDYDLLLSIPGVGAKTAWVMIVVLGSRQFDSAVQVASFLGLNPIEKQSGTTRYRRPRLSKAGSGRFRQALFFPAMVATRKNPDIKAQYERLLEAGKTKMCALGAAMRKLVHICFGVLKHQRPYENRAQQS

SEQ ID NO: 73652 - protein, 446 aa, unidentified
MATRTVGIDVAIRGPHVAIILDEQGRPLGTPIRFRLSAAALDELVTKIRAGLQADDTVMVVLEPTGMAWFPLARRLTQAGCTVIRVKGQRVKALRRYLSEYAKTDVTDAQVLGRMLAFGRRGLLPLYVPAAKQQALNCLTKQRARYQDAISSIRRRLLDLIRWAQPTLEPVLPSLGTSVSLAVLEHYFNPAQLQALGAHRLTEFIGRHVGGNHPAHGPFVEELARGLLAAAADAVALFGADGVDFELLQLEVRQEIQLLRHHRELLVELDRAIEQLYRELHLVEALRTLPGIGDTLGPALLGVLHTASRFGAQRRLRGFCGLFPRRQESGGVAHPGQPITQDGNNRIKRNLMLAADVARTVDPELAAVYYRCMVEKGHHHRQALCAVATRLVNRIHAVLRDGRPYELRDLDGHPITVSAAKQLIQTHLRVPDVIRRTRKKAPVAAA

SEQ ID NO: 73653 - protein, 353 aa, unidentified
MTTHKYVGLDVHQATTSIAVLDSNGKLLSQSTIQTSAPQIRDFIGGLSGAVHLTFEEGTQAVWLYDLIKPLVAELIVCDPRQNHFLKSGNKADRVDAAKLAQLLRAGLLNPVYHGDKSTRTLKELAHLYDCLVSDTTRVMNRIKALYRSRAIPCPGRDVYYTRNRDQWLARLDGPGIRTRAEVLYSELDHLKLLRRDSKNAMLREARRHQAFKILLGVPVLGPIRSAQIIASVGSPFRFRTKRQFWTYCGLAVVTRSSDDYRFIEGRLERSSRSVATRGLNQNYSRRLKRVFKAAALDGTSREPFCSIYQRLTDKGTRRELARLTLARKIAALALSVWKKGETFDKLKLSAQA

SEQ ID NO: 73654 - protein, 387 aa, unidentified
MSQVSDLSRSLAPFDQNTTLTVVVELSEASWLVAGMIPGIERQPVKKQDPDPVALLRLLERWRLEAIKAGKTIGQIALAFEAGRDGFWLARWLQARDIAAHVIHSTSVAVSREHRRAKTDRLDTAMLMRVFVGWLRGERGHCRMVAIPTLEQEDAKRPSRERESLVGERTRIINRMKAALARLGIRGFNPALRKAPQRLAALRTPEGVPIPPNTLDEFRRDMDRLAVVREQIDGIERARLARLENAPAAGPHAMVRLLARVVGVGVETADMLVQEVLSRNLRDRRAVARYVGLTGSPDESGKRRREKGLAKAGNPRARRGLIQLAWRFLRFQSDSALAQWYRARTDGPKGARKTTMIVALARKLLIALWRMVTIGDIPVGVALRPTT

SEQ ID NO: 73655 - protein, 402 aa, unidentified
MTYDYVIGMDVGKYFHHACVLDIDGTQVLSKRINQNEKSLRALFSTFSAHDHKVLVVVDQPNNIGRLTVAVAQDLGIDVRYLPGLAMRQLSRIHAGNAKTDIRDAYIIAHAAKNLPESLRSVDRAEEAFLQLKVLNGIDEDLARSYTRLINQIRSALVGCYPQFEQALRGQIIHRKWVLHLLARYGGPTKIKRLGKAKAAAFARRYKARNPEPVLDAIFAAISEQTVDIAGAHYAEMGVAMSAKDALLKLEHRKQIEQEVIELINDIPHTQILLSMPGIGPKTAGQILMAAGDMSDFPTAGHLASYAGLSPRTNQSGTSIMSNALNRAGNKKLKNALWQSSFASIRFHERSRQFYERKRREGKRHNAAVVALARRRLNVLYAMMRNHEHYRDPDQSQEVKAA

SEQ ID NO: 73656 - protein, 357 aa, unidentified
MTQITDSISPVIIGLDIGDRTTHCCMLQDREVISRRIAKTTHAGLDEALADYPAARVVLEAGSQSPWLSRHLRARGFEVHVVDPRRVQLISKDPRKTDRRDAEMLARLEHGMPELLGKVHHRGEQAQADLAMIRARDQLVRCRASLVQCTRSLCKAFGLRLPAASTAAFTKRVRDLVPQALLPAIEVVLDQIKALSESIRELDRRITKLAKDRYPEIDLLQQINGVGPVTATAFVLTLEDPSRFAESRRVGSWVGLCPRNHASGDRDPELRISKSGDSYLRRLLVQCAQYMLGPFGKDSDLRRFGLRLAARGGRANRKKAATAVARKLAVLLHQVWSSALVYEPLHNSNRQAATNAV

SEQ ID NO: 73657 - protein, 350 aa, unidentified
MVVVGADVHKRTHTFVAVDEVGRKLGEKIVKATTPGHAEAVMWARERFGAQLVWAIEDCRHLSARLERDLLSAGQQVVRIPPKLMAQTRASARTRGKSDPIDALAVARGFLREPDLPIASHDEISRELKLLVDRREVLVAQRTATINRLRWRVHELDPERAPKAASLDRTKHRQILGAWLITVPGLVAELACEELADITRLTEQIDALAKRIGERVRAVAPALLAMPGCGDLTAAKLVGETAGVTRFKSEAAFARHAGVAPIPVWSGHTAGRVRMTRSGNRQLNAALHRIAITQIRLNGVGQTYYRKRLTAGDSSPEALRCLKRRLARIVFHHLHTDHQNRIQPCQSAAA

SEQ ID NO: 73658 - protein, 392 aa, unidentified
MEPSYQKKRFSTFNNSILQFKEWLVKNQCRDVCMESTGKYWVPVFNLLEDEINITIANPKWVKAVKGNKDDTKDSKWIGDLFRLGLVPGSYIPCKPIRILREFTRNRYKLTSCRTSEKNRYQNALTVCNVALDSVVFDIFGKSATSVIDYLIEQPDNSINHEEIASRLLRSLKKKSDSVIESIEGYQMTDSQKYRMRLIRAHLDYITSTINDIDTMLNSLIAPYENAVQLLCTIPGVDRNSAITVISEIGTDMTPFSNSKRLCCWAGLTPDNNESAGKKKSVRITRAGVYLKPALVQVAHAAVKSDKSPYYKQKYERIMKRRGKKRAIIAIARMILTAIYQMLSTGEAWNPTDLFKIDMPEPMKEKQKEKAIKQAMKLLIREGKISESQLAS

SEQ ID NO: 73659 - protein, 347 aa, unidentified
MIIIGCDFHSRFQQIAMLDTETGEVVEKKLEHENGEAKTFYEGLKEPVLVGIETTGYTRWFAEMLAGLGHELMVGDAAKIRASETRKQKHDRRDAWHIMELMAEGKFPRIWLPSAEERDVRVLVEHRHQLVQLRTRAKNGLQAMALSYGLRRRRRLWSERGQEELKKIPLREGMARRREDLVQLVQQLDTWVKELDERIEQEVAHREDAQRLMTHPGVGPLTALGTVLVLGPVERFPDFRHLTSYLGLIPEEESSGGRQRFGHLTKQGNRLLRFLLVEAAQTASRYDPRLQRAYRRLAFRKGAAIAKVAVARKLAIRLYIMLRDKIDYAEFCRRGSHAGMLGDVALV

SEQ ID NO: 73660 - protein, 401 aa, unidentified
MKKNTTAKRNQKAVPKRHKNQIRHMAAKQRLTIGLDLGDRNSRYCILDEAGEVVSEGQLPTTKTGFRALFEKMPSSRVALEVGTHSPWSSRHLAGMGHEVIVANPHQVKLITQSTRKNDRIDAEQLARLARVDPKLLSPIRHRGEEAQGDLAVIRARAELVEARTGLINCARGLVKPMGERLKKCDADQVGESLLGGLSDQVGRVVGPLLKSVEGLNEQIAEYDRRIEAVAQRYPEVELLTQVYGVGILIALTFVLTIEDAERFAHSRDVGAYLGLVPKQRDSGDSQPQLGISKSGDRLMRSLLVQGAHCILRKGAPDSDLRAWGMARLPSGDYPGKQPGGGKNAPPPRSGSKRGKRRTIVAVARKLAVLLHRLWVTGEVYDPLYNRKAMQAGQGKAKVAA

SEQ ID NO: 73661 - protein, 354 aa, unidentified
MNIKYIGMDVHKETISIAVMNSDGKVVMESIIETKASTILQSIQGIRGDLHVTFEEGTWAAWLHDLLKPHVTELVVCDPRKNALLKDGNKSDKIDARKLADLLRGGYLRSVYHGENGLRTLKELARSYLTISKDLTRVMNRVKALYRSWGILCVGQQVYGPRYRAEWLNKIGEAGVRRRAEFFYQQLDALRALRQDVRRDLLAESQKQSAMKILREIPTIGPVRAALLIALIQTPHRFRTKRQLWTYSGLAVDTRDSAQHRYVAGQLQRSKKPQQVRGLNKNHNHDMKAIFKSAATMASSREGPFHDFYQGLLTKGTKPAMARLTLARKIAAITLILWKKGAHFDAEHLKLQAA

SEQ ID NO: 73662 - protein, 371 aa, unidentified
MEHTRFVGLDIHKERISIAVAESGRSCAVEYLGEISNDPVAISKLCDRLERPSKTLAFCYEAGPCGYGVHRQLISLGHRCDVVAPSLIPTRPGDRVKTNRRDASMLARLHRAGELTPVWVPDADHEAMRDLIRLRSVVRQIVTRARQHLQGFLLRHGRKHGRGTAWRMAYRRWLSTLAFEHPAQQIAFQDYVDAVMDAERRLQRVEEQISGLLPEWNLRPVVDALQAMRGIALITAVVLVAEVGDFTRFSNPRQLMAYFGLFPGERSSAETIRRGGITKTGNAHARRALVEGAWAYRMKARIGRHKVDRIEALPKVVRDIAWRAQLRLCTRYRRLSARGKTANVVNVAIAREMVGFIWSIACTVQSAPKTA

SEQ ID NO: 73663 - protein, 340 aa, unidentified
MRIIGCDLHAAKQTIAMLDRDTGEVVEQTLNHDGDAVRAFYAAVPKPAVVGIEATGSMGWFVRLMEELGVTCRVGHPAAIRTAEPRRQKHDRRDAQLLLRLLAEDRFPAIWMPTAEQRDLRALLLHRHQWVRMRTRVQHALQAIALGQGVRRGGTLWSIQGQAVLAALPLLPHATDRRDALQALYQQLDAHVERLDEQVGAIAQQRASATVLMTHPGVGPVTALATEVFLGDPSRFPNGKALASYVGLIPSEYSSGARQRLGHLTKQGNPFLRFLWGEAVLGAVRRDPELQRFFRRKLAQKGLGKARVAAARKLGIRLWIMLRDQITYNEFCRRRQRRPT

SEQ ID NO: 73664 - protein, 367 aa, unidentified
MKKNITARQSPRGSKPIPQPITIGLDLGDKSSRCCELEGEAMRESSVATTKKAMRQKFGPMRRCRMAIEVGAHSRWVNRLLTELGHEVYVANPRQTRLISQSSRKDDRLDAQTLARLARVDPQLLRPIRHRSEEAQQDLTVIRARTRLVEARTSLVNMARSTVKASGERLPKCDADQMGVERSENLPEPLRETLKPLLEAVESLTEKIRQYDEKIEQIAREKYPETKLLKQVSGVGTLIALTFVLTLEDKERFQKSRDVGCYLGLRPRRSESGARQPQLGISKEGDMYLRKLLVQGAHGIVRRRSPDTNLKRWGLKLAERGGKNAKKRAIVAVARKLGILLHRLWVTAEVYEPLRTIPVRQRLRPAA

SEQ ID NO: 73665 - protein, 412 aa, unidentified
MEVLYECCGGLDVHAKTVVACLIKKGHKQIRTFSTMTDEVRQLRDWLTSEGCTQGAIESTGVYWKPVFNILEGVLTVVLVNARHVKGVPGRKTDVRDCEWLADLLRHGLVRASFIPPPEIRALRELTRYRQTVVTEHTAVANRLQKLLESANIKLGQVASDVLGVSGRLMLRALAEGEQEAEKLAALAQGKLKSKQGELQRALEGRVTEVQRWVLTELLTRLDELEAALQRVETRIGKEVESCADPFVQEAVELLDSIPGIGERGAQTIISEIGVDMSRFPSAGHLASWAGLCPGNNESAGKRKSGKTTKGSKYLRTALVEAAWAATRAKGTYLQAQYQRLVKRMPKKKALVAVAHTLLVIGYHLLSRRVAYADLGSDYVDRQHIERQRRRLVERLAALGVKVTIEEVAEAA

SEQ ID NO: 73666 - protein, 344 aa, unidentified
MTSNDYIGLDIHKKTISFCAKAQDGTILDQGTIVARRDTLVAWAKARPRPWIGAMEATLFTGWIYDLLKPLALELKVAHPAMLKAITAAKKKNDKVDARTIADLLRCNLLPECYMAPSAIRDLRRVLRYRNLVVRQATRMKNRIAGLLMETGTPYNKERLHGRAYFSELLGSLREVPRSVVELLQLSRGQLEFFATIQRRLLKGLGQNPDLSERVARLQTIPGVGEIMALSWALEVGEVKRLPSIAQAASYCGLTSAQHNSAGKEQRGPISKQRNKHLQTILIEAAKLAPRHNSQLAVVHERELQRGDRNQATLAVARKLVAYLMAVDKSGKPFAMRASGEEAA

SEQ ID NO: 73667 - protein, 412 aa, unidentified
MDVIVERQSALDVHKAQVTACVRVPGEGRERVEEVAQFATTVRGLLVLRDWLQAYGVTHVVMEATGEYWKPVWHVLEDDFELMLVNARHVKQVPGRKTDVCDAAWLCQLAEAGLLRASFVPPKPIRDLRQLTRYRRTQIAERKREAQRLHKALEETGIKLDCVATDILGKSGRAMLDALVAGTTDPELLAELARGKLRKKIPALREALEGRVEPLHALLLGAILAHLDFLDEQIDLLSEAVEEQIRPFWPAVRLLCTIPGVQQRTAELIIAEIGTDMSVFPTAGHLASWAGQCPGNDQSAGKRRSGRTRKGSKNLNAALKDAAMAALRTNDSYLQALYRRKKPQLGHSRALGAVKHSMICACWHMLTTGELYTDLGGDYYARRNPERQTKRLIAQLERLGHKVTLETLAEAA

SEQ ID NO: 73668 - protein, 314 aa, unidentified
MRTQVFVGIDVSKAQLDVAFRPEGRFSAPNDEAGCAQVLERLRAVPPTLVVLEATGGLEIPLTGVLAAAGVPVVVVNPRQVRDFAKATGRLAKTDTLDAQTLAHFAQVMRPELRPLPDEQTQALAAILARRRQLVEMLTAEKNRLGSAPKPVRKSLRTHIAWLERELRHTDSNLAHAIRESPVWREKDALLRSTPGVGPVMTTTLLANLPELGTLTGKQIAALAGVAPLNRDSGTWRGKRTVWGGRAQIRATLYMAALVAARFNPVIRAFYQRLCATGKAKKVALTACMRKLLIILNAMLKHRTPWRTELVQCA

SEQ ID NO: 73669 - protein, 418 aa, unidentified
MTFLSNGVVPAGRPLAPKARALAREPVLQIGPPPSSPRLRRIRGLVSLRYQGQSETIQGRGAGTTAYCTEAVMDKFDPCGVEVSARELVVALSREGRAERLRSFPNTAEGHAALCRFLTSGSQRVRVVLESTGLYGLDLAYTLHQDAHIEIQVANPRAVRHFASALMQRSKNDRLDAVVLREFAARMPFQAWVAPSPHCFALCAVTRRLETLTEQSTAEKNRLHAASLSVAIPAAVRRDLQRSVRSIQRAIVRLTREAQRILQADPLLASSYHLLLTAKGIGPTSALRLLAETALLSEDLDVRQWVAYAGLDPREYQSGSSVHKRVRISKTGNRHLRRALYMPALVAVRHEPHLRAFYQHLLAQGKCKMQALVAAMRKLLHAVYAMLKHRQPYDGAKLYRLVENLPASSSTHCSAEAA

SEQ ID NO: 73670 - protein, 339 aa, unidentified
MNAVTLIGIDLGKHSFHLHAQDGLGRMVFRKKLSRQQLLRTLSNVPACRVVMEACAGSHWLARRLADMGHEARLISPQFVRPFVAGNKNDFGDAQAICEAACRPSMRFVSPRNEAQQTVSALHRIRERLVRDRTAAVNQIHGFLLEFGLSLPRGAALMSRLPAVLDHETLPPRLVALVVRLREHVYYLEEQIKQIEQDLVAALREDDKSRRLLEIPGIGPITASALAVELGDAQQFANARQFSASIGLVPRQYSTGGKPTLLGISKRGDRNLRRLLVQCARAVMQRADSRTDALGAWVKALSTRRHSNVVACALANKLARIAWAVLARGTRYEARAVAA

SEQ ID NO: 73671 - protein, 593 aa, unidentified
MLCICGTVKSDFFRYTRAQAGPYSVVAECSYLRIGDCNCRALGSQREFNPREPVSDVAKQYIKMLSVPAEHFGKMSMNSIERSGHISDELYRLRQSMVFRPKQPIVQRKAGVSSDGAGGARRGSCCWLARRSPRDRRNATWREIASGVTANWMARTRRGGWRVRNEPRRACAGRAVKRHFGHSPHRYLDSYDGSSARSVASAAARFAGRRPFLTHIESPLPPATLESPETRSRKGAAAMKNQAIQYLALDVHQATTVATVRDESGSIRMRATIATEAGAIIGLVRGLGPRVHVAFEEGTQAQWLHDLLQPHAERVVVCNVRGRSETTNKSDRLDADWLSEMLRVGSVKPVHHGSTSLLTLKELVRSYANLVEDSIRVMQRIKAIFRARGIDTPGKSVYRASQRKTWLSKLESRGARTRAAALYEQLDLLSKLRPAAKAAMIAEARRHPGAKILRSIPFIGPVRTAVILAIVATPFRFRTKRQLWPYAGLAVITRSTSDQQIVEGKVRRRKRSPLTRGLNRNHNAMLKDVFKAAANTAAAADGPLKEFYDRCISRGVREEMAKLTLARKIASVVLRLWKKGELWDPAKLTMQTT

SEQ ID NO: 73672 - protein, 326 aa, unidentified
MPHDSSSSDHSLPTVVGIDVAKATLDCYLDPSGQRLTLANDDNGIAQLLTHLRGLAVQLVLIEATGRLHRQVAAELLQAEIPVALVNPQRSREYARSTGRLEKTDRVDAKVLAEFARGVKHQLLQKRSEKQVELDDLIARRRALVQMRVAEKNRLAEQQPKLAKAQSKQLLRLIDQQIQDLDRAVAKLIDGDDDWKRKSDIITSIPGVSTGSANQILADLPELGEMNRQRIAKLAGVAPLANDSGPRRGQRTIQGGRQSVRNALYMAAFNAMRYCERFKRFAKRLTDAGKPFKVVVTAAMRKLLITLNQMVKTDRVYQPLLLGSFS

SEQ ID NO: 73673 - protein, 361 aa, unidentified
MTGTMTWVGLDVHARSTHAAAIDSMTGELRRQRFGPGVEAPLAWLGELPGPVRACYEAGPTGFGLYRSAVAAGIAMQVIAPGKTPRGPSDRVKTDRKDAELLARLLLAGSLTRVVVPPPEIEAARELTRAHDACRRDLMTARHRVSKMLLRHGRVYPKSTTWTVEHRRWLATQRFDEQVSDTVFADLLAAVDGLSNRKAQIALQLSKLATDEQWWPTVARLRTFRGIDTLTAFSLHLELGGDWKRFEKATSLGAWLGLTPSLSQSGESSRQGSITKTGSMLARRLLVESAWHYGRPPRLGATLANRQIGQPEHVLQISNRAQQRLHKVNKTMKARGKPHNVVVVACARQLAGFLWAAATAD

SEQ ID NO: 73674 - protein, 410 aa, unidentified
MEVILSCCAGLDVHKDSVEACVRRTSAGGKVEHEVRHWGTTTRELVEMSDWLSSLRVTHVAMESTGVYWKPIFNILEEHFEILLANAHHLKNVPGRKTDIRDCQWIAQLLQHGPLRGSFIPPRPQRELRDLTRQRTQLVDEASRISNRVQKVLEDANVKLGSVASNVVGASGRLMLEAIVSGQDDPAQLADLAKRRLRAKIPQLEQALYGKLTEHHRWMLGLLLDQLKSTEQFIARLDERIAELTRPQQPVLEKLDAIPGVDRRVAEVLLAEIGPDVTPFPTDAHLASWAGICPGNNESAGKKRSGKTTKGSRWLRQALVQAAWAASHKKNSYFQAHARNLMHRRGRKRGLVAVAHSLLTVIYHMLKDGTVYRDLGPQFLDRLRATHLIRFHVRRLQHLGMEVSVTPAEA

SEQ ID NO: 73675 - protein, 370 aa, unidentified
MNQIIRIGIDTSKSVFVLHGVDAAEQPVLRRKLRRGQVLGLFGKLEPTKIGIEACGAAHHWARELTALGHEVVLLPPQYVKAYVKRNKNDAADAEAICEAMSRPTMRFVPVKTTDQQAALMLAGRRDGLIRRRTQLSNTIRGYAAEFGLIAAKGLDKIAPLLGRIAADNDLPELAKELFADYGREYTALGKHIMKIEAKLMAWHKNSELSRRLAELPTIGPIGASMLTMKVTDPHAFGSGRDFSAWIGLTPKDHSTAGKMRLGVITRAGDEALRSTLVAGATAVIQQVRRGRGNPTPWLADLVRRKAPKLAAVALANKMARIAWKLMVSGERYDRQRAAGRFVPPTSRVAPSSRRQGRFAPPAAVAVGQP

SEQ ID NO: 73676 - protein, 442 aa, unidentified
MAHANQLSRGDLRRNARLERLRGVVSRDRAVLAVDLADDTQVVVVCDHDSRVLARRTWRCRPWQLDRALGWGLAVACRQGFAGVVVACEPTGHRWRVVVEHADRLGLEAVCVQPLLVRRAREAEDFTHDKSDDKDALLIARLTTQLHCYLPERPTAAWARLRHLGNRRVEQLTLATAAQQRLRDLLECGWPAALEVTRHPLDSLTWRAAMTVGRCDPARIRRLGLARFARAVARELPRWGGRRRHLGILRALYAATGDARGVTAQRAGALERAALVLADFKQALAALAEVEGRMAKVLEELGLAELVTSIRGVSVVGAAAILAETGDPARFDDAKAVVKHAGLCPRDNASGAFAGKTTISGRGRPLLRLAAWRAVWGALPHNPVFAARYTHLTSRQRNRLSDGQARTAVAAALLRQLWVVCVNRIPWELAVAGGTPARLLRR

SEQ ID NO: 73677 - protein, 351 aa, unidentified
MIIIGVDYHPSFQQIAFMDQETGECGERELNHSDGEAERFYRELKERGVSVRVGMEATGHARWFERLLAELGFELWIGDPAEIKTKRVRKQKTDREDARLMLKLLLENRFPRIWVPSPENRDLRQLLWHRHRLVQMRTRIMNQLQAVAMNEGYRWKKKLFGQQGRALLEKLSLAPWASRRRKELLELLDQLDPKIAELTAAVEREANKRPEVVRLMTHPGVGPITGVAYVLVIGTPDRFPCGKKIGSYTGLIPCEDSSAGRQRLGHISKQGNTLLRFLLVEAAQAAARCDADWRRRYMHLMMRREKGIAKVAMARKLAVRLYWMWRNNWQYSQLVEFGSNAGKLGTVHGMK

SEQ ID NO: 73678 - protein, 327 aa, unidentified
MNITTIGIDLAKSVFQVHGTDERGKAVLTKVLRRSQMMPFFTQRAPCLIGMEACGSAHFWARKLTALGHTVKLMAPQFVKPYVKSNKNDARDAEAICEAVGRANMRFVAIKTPEQQALLALHRARQGLVRARTAQGNQIRGLLAELGCVIPKGRRHLESHIRAILEDAENGLSGMSRELFARLLEHLRYLDEQVQALEAQIKAWHREDAASRRLEEIPGIGPLTASALVASIGDARNFKNGRQLSAWLGLVPRQHSSGGKSTLLGISKRGDVYLRTLLIHGARSALQRQSSERWGGGVGRAAQQEPRGRGLGEQERPHRLGAARARA

SEQ ID NO: 73679 - protein, 405 aa, unidentified
METIIEKGCGLDVHKETVVACIMGTGVRKEIRTYSTMTNDLLRLKGWLQETGITHVAMESTGVYWKPVFNILEDYFEVILVNARHVKNVPGRKTDVQDSEWLCRLLRSGLLKGSFIPPRGIRELRDLTRYKRKLIQAIVAEKQRVEKVLEDANIKLSSIASDTFGASGKRIIEELVKGKLGAEKMAELSKGRLRRKREHLKEALVGEVREHHKFMIKVSLKHIRAMEKILLGVERKIREKIERNYKEEDELLQTIPGVKENASTIIAEIGVDMDIFPSEMHLSSWAGVSPGNNESAGKKKPGSTTYGNKCLKAMLIEFAWVASKTKDTYLRSKYHSLVGRRGKKRALVALGHKILIMCYHILKYKRPYKELGVDYLDQRRKDKIARSYIKRLNHLGYEVTLQEAA

SEQ ID NO: 73680 - protein, 322 aa, unidentified
MSESSVVVGIDIAKAHVDVAASGTVALAERFANDGDGHVALIVRLEPLKVALVVMEATGGYEAPLACALQAAGFPVAVVNPRQARDFAKAMGQLAKTDRIDAEGLVELGRMLLTRADLARYLKPLATTEQQDLAAWVARRRQLVTLLVMERQRLAGARRAVRPSIKAVITVIERQLERVDHDLGRHVGSHFAALDRLLRSADGIGPVASATLIAELPELGRLTRRQIAALVGVAPMAHDSGQARGRRRIQGGRGQIRRTLFMATLSAARHNPVIRAHYQRLVDAGKFKKVALVACMRKLLTILNAMARTHTAFTPDQHAVRT

SEQ ID NO: 73681 - protein, 343 aa, unidentified
MDYFAGLDVSVKETSVCIVDDAGKIVREARVASEPEALLQVLTNTLYRFKRVGLEAGALSQWLLSALAEAGLPVICVETRHMRAVLKAQINKTDRNDARGIAQMMRAGLYRPVHVKTLCSQKLRMLVTHRKLLQSKAIAIENDLRATLRNFGLKVGVVGTVKFEARIKELVENLPDMAVLVEPLLTVRRVLREQITVLHRRLLAIVRDDDVCRRLMTVPGVGPVVALTFRVTVDVPARFRHSKAVGAVFGLTPSKYQSGESDRSGGISRCGDEMMRAMLYEAAQSMLMRSAKWSWLKAWAMKIARHRGLKKAIVALARRLAVIMHRIWVAGTEFRWTREVAAA

SEQ ID NO: 73682 - protein, 353 aa, unidentified
MKILGMDLGQSKSAWEMLDTQTGEVVDGQVRMDDQAVGKLLDRTRPDQLVVESGPLAARVHDRARAAGVSVLVADTTQDAWRWKNVKRKTDADDAGKLVRLAALGQINPVHIPAPPVRERRHLLEYRQALVAEQTRCKNRIRATLTLHGRTLPRGKTGWSATAREPLAAETRPWADCTPEELWRGVLKTELEHLQQVEALVATVTAKLDALAKADPRVAQLRTIRGVGPRTAEVIVTVLDQPQRFATRRQVGAYAGLVPRRYQSGQMDRSGRITKRGNALLRQVLNQAAWVAVRCNPELRAFFLRLGGGHKKRRKPAIVAVMRKLLVIAWALLRDGTVYQARSPRRPQAHAAA

SEQ ID NO: 73683 - protein, 351 aa, unidentified
MKQQTTALIPKLYIGIDIHKKSWKVHFRTDLFSGRHFTMPPDAELLRKHVNKHYKGYEVETCYEAGCCGYSAHRSFEAFGWRSLVVNPADIPKPHKQHRQKTDKIDAANMSKQLKASQLRGIYVPGQQQEQLRSLFRRRNDLVKDIRRMKSRIKSMLLYYGIKLPEKYDNSYWSKAMIRWIEQQEWIYETGSESIQSLLSHYHFVEKEMRRVSVRIRAYCRKHYKADYYLMRSVPGVGPIVAAGLISELGDIRRFNSRQFAGYIGLVPGIYQSGEKSKIGGMTYRCHRLLRSYLVEASWQAIRQDPIMEQYYRKHQGKDVKKVIVKIAHKLANRILGVVKSGVPYAIGIVE

SEQ ID NO: 73684 - protein, 452 aa, unidentified
MARKRKQGGKTNNAAIPVMRPDAAGVDIGATEIFVAVPADRTAENVRSFPTFTQDLYALAEWLKQCGITTVAMESTGVYWIPLFQILEERGFEVWLVNARHVKNVPGRRTDVSDCQWLQFLHSVGLLKASYRPAQEVCAVRSLLRHRESLVQMAATHVNHMQKALDQMNLQLHHVISDIVGQTGLAIVDAILSGQRDPLELAKLRGERIKASEAVIAKSLVGDYRHEHLFTLKQSLEAYRSYQKMIEACDREIRQHLEEFPPPAAPTAPASAADTGTKKPSTDGILRSELQRVWGVDLTKIPGIRTGVAQTLFGEIGPDFTKFRSASAFASWMGLCPDNDISGGKVLFVGTRKVKCRAALALRMAAQSLHHSKSALGDFYRRMRAKLGAPKAITAAAHKLARIIFHLISTRQEFDDSHFAADQLRYQKRQEAKLHAKAKSMGYALIPLEAAG

SEQ ID NO: 73685 - protein, 322 aa, unidentified
MKKSNNYVGIDISKLTFDVAISGSDDKYKYFKFANNHEGFMMFLEHLKVSESICVMEASGPYYLKLATFLSEQAIDVCVINPLVIRRFSQMRMSRAKTDKKDAMLIAEYGKTEKPDLWQPEAAYVLELKQMQAYLEQLNKNKTAFTVQKEAFNQNPIKSEILEKSINSVIETIDKEIKQIEKRMELIIKTHHQEMFDQLKSIPGMGSKTSLLLIVISGGFSKFNNHKQLASYVGISPRIFESGTSVKGRSKICKMGMSKVRAMLYVCAWSAKRCNKSCKELYDRLIEKGKSKKLALIAVVNKLLKQAFAIATKKEYYSVKIN

SEQ ID NO: 73686 - protein, 456 aa, unidentified
MSGKNAKPTPTGLPIIHARAAGIDIGSRFHVAAVSPDLSDEPVRTFQAFTSDLHRMADWLIDTGIKTVAMESTGVYWVAAYEVLESRGLDVILANAREAQAVPGRKSDVNDAQWLQRLHACGLLRASFRPGRDIAALRVYVRSRERHLDYAAAHIQHMQKALTFMNVQLHHVLSDMTGATGMKMIRSIVAGERDPDILAAMRDTRCKASGETVRAALVGNYQPEHVFALTQALALYDFYQRCVEECDRQIEQAVAALNAARQKPEAPLPKPRHRTKQPNEVHFDVRSALYQLAGTDLTPIHGIGPFLALRLVAECGTDLSRWRTAKHFTSWLTLSPGCNMSGGKVLSAYTRKTNNRVTAALRLAAVTVGRTHTALGAFYRRLAARIGHAKAVTATARKIAVLFYNAMRFGMDYKDPGADHYEQQYRDRVLKQLHRRAAQFGFMLQPQRVSVVERVS

SEQ ID NO: 73687 - protein, 395 aa, unidentified
MVMACIAYGPLDKPPKYEIRKFSTMTSDIRELKDWLKKYNVTAVAMESTGIYWKPIFNILEDGFEIVLANAQHIKNVPGRKTDIRDCQWIAQLFRNGLIAGSFIPPRDIRELRDLTRTRRKLVEEMASEKNRVQKVLEDANIKLSSVVSKVFGVSSLKMIGVLLEKEELSAEEIAALAKGKLKKKVDQLVKALDGNVTDHHRFLLKEHLAHIDFLLEQIKDFDEEIRKKLRPYETKFKDIQSVTGVKDVSAASVIAEIGVDMSKFPDEAHLSSWAAVCPGNNESAGKKKSGRTRRGNNYLKATLTESAWAASRKKGTALSAIYHSIARRRGKKRALVAVGHRILIEIYRVLKTGKPYQDVGADIANERRSKNREHAMIRDLERRGYVVSKVMASI

SEQ ID NO: 73688 - protein, 330 aa, unidentified
MFSNKTFIGIDVSKDTFTAAQRLPDDRWNVRDFNNDSCGIQALINLFQTTQNVHFVLEATGNYSMPLTFALCNAKLDVSVLNPKQSQGFIHGVLLSTTKTDHQDACALVLYGYNNNPPTFKIPSDKILKIRQLNTLLRQLKKDHVAVQNRLHALDFHVAPDPFVQQLLEDNCARLETQIAEVQKRLSTCSKETFKQAYTLALSVKGIGPATAEAILTATNAFEHFDNPKQLAKALGVCPSRHESGSSIRGRGRITKTGDPQLRGLLYMGARSTKRINPACRDLYERLRRKGKCHKVAMVAVCNKMVRQLFAVVKSGVPYQDDFEKMRQLP

SEQ ID NO: 73689 - protein, 361 aa, unidentified
MKKPAQHLIAEVPRRQAKVEITIGIDLGDVWSHYCTLNQDGEVVDRGRFRTTPKAIDKWFTDVSPSRVAMEAGTHSIWISAQLQELGHEVIVANVRELRAISHSDRKSDQVDAEKLARYARLDPNILRPIAHRTVQQQEALTLVRARALLVRLRTAAVNAVRGLTKACGYRMPASATTCFAQRSLAVMPPGLAQALGPVLQQIAEMTVKIKQYDRQIQQLGQTEYPETQALLKVHGVGPLTALTFVLTLGSKERFGRSRDVGCYLGLRPRRSQSGDHDPQLGITHAGNAYLRSLLIECSNHILRPHGRDSALRQWGLHLAARGGKQAKSKAVVAVARKLAVLLHHLWSTQEPYVPFYEQAA

SEQ ID NO: 73690 - protein, 355 aa, unidentified
MSQEKYIGMDVHQATISVAVMDARGKLIMECLLETKAATILEFIQGLRGTLALTFEEGTSAAWLHDLLKPHVSRLVVCDPRKNALLKDGNKSDRVDARKLAELLRTNQVKPVYHGKHGTRALKELGRSYLTITKDVTRVMNRIKAVYRSWAIPCAGTSVYTPRHRAEWLAKLVEPGVRIRAEHLYQQLDSLEPVRLEARRELLLESRKHAAVKLLRQIPSIGPIRAALLVALLQTPHRFRTKRQLWAYSGFAVEIHDSGEYRSVRGKLQRNRERITVRGLNDNHNKDVKSLFKSAAISASTRPGPLHDFYVARVESGMRPTMARLTLARKIAAITLTLWKKGVSFDPKQLQRQAA

SEQ ID NO: 73691 - protein, 425 aa, unidentified
MLGVGIDWAEQFHLVALGRPETGVFEVTRVEHTPKAVTALMSRIVGLEPDPAEVRVVIETSHGMLVEQLLDAGFTVVPVNPDLIARRRGPARKKDDAEDARIACLLALDRFASLRPLIPHGPVAAELRAIARDDERASRDERRLLNRLRADLIATFPAALQIAGDDMGRPTFLRLLEHWPTAEALRAAPREQVIELARAGHHGWPDRFADQVGTALTNETFTARGYLVRAKADTIRLTAVQLLAIGAQRRAWEKRMGQLLLGTPGTRRNPTSTDQQDQPGQAFPGGEIYLSFPGLGDRLAARVAGEIGDHIEQFDSPNALACYAGKAPVTRRSGKSEYVVACRLACNRHLRDAVQQWAFCSLTRSGWAKQFYDRHLADHHSHHAALRALGNRWLEVLWHCLTHRVRYDEAIHTANRNRAAQPRAA

SEQ ID NO: 73692 - protein, 311 aa, unidentified
MTDDTIGIDISKAALDIHRLSDGKTMSFSNCPAGFKALSKLCAKTAVTRVVYEATGAYHSGLERALGAHLPLVKVNPLQARRFAQAQGVRAKTDAVDAKMLAVMGNAFVLEPDEPVTKIQHDLKELRAFRSGLIKDRTRIMSRLKTQTLSITSRQSKARLAQVDKQIAEIDAEIDRLIHSSDTLAHSMKILRSIPGIGAVCAATILIEMPEIGSMDRKQVASLTGVAPMTRQSGQWRGKSFIQGGRKVVRNALYMPALVAMRFNPDLRVKYQALIKAGKPPKVALTALMRKLIELANALIKADRYWVKKGA

SEQ ID NO: 73693 - protein, 434 aa, unidentified
MTDSHSTATARILVAIDVAKAKHDVLVELPGTGRKKMIIRNQRDEFQRLAAYLKSLGGTCRIALEPTADYHRCLAYFLGSQGFDVRIVSSLAVARTREALHNSWDKNDPKDAQVILHLLRNGTTQRFYDPVIEQTNDLQELSKTHHQVSLRKTRLQHSLMNHYLPLYFPEAERFLCTTRAGWFARLLIAFPTPASVTQLPEAEFVATAAELLRTKHSKQAVLRSFHAKASESVGIPVSLDSQAVATFRLLLNEHSELCRQREQLERTAHELLKERIDYQILRSVPGIGPIIALTVLAEAGDLRRFGHVRQFLKFCGLDLSTAQSGAYRGRSQLSKHGNGRLRAALWLAATVASRMTENTLRKKFDRYVQSEPTNADLKRKAYTACTAKMARTVYGLIKHQQFYRAYHEDAVPAPDGRTRSHGPLRPAASAAVTS

SEQ ID NO: 73694 - protein, 318 aa, unidentified
MLHVGLDVGKSFLDAAATAPTPALPRRVPNDAAGIARLVATLVTLAPRLVVLEATGAYHRPLLAALVATKLPVVVANPAQVAAFRAVRLGREKTDRADARLLARFAAVHGADLRRATVADPMQTRLRELVAYRDGQVAERTRLKNRLHANGFGGDAWVAARLAADLAEVEARLAAVEAETDALLEGLPEAAVLLAMPGVGRRVAAAVLAYLPRGVWGEAKAAAAFAGVHPRREQSGQRDRSRLSKQGHAGLRRYLYVAATVAIRWDDGLAAFRDRLRDRGHAPTSATCAVMHKLLRRMMGKLRAFYATHDVPPTTLAA

SEQ ID NO: 73695 - protein, 345 aa, unidentified
MSYYAGIDVSLEQSSVCVLDGEGKIIREAKVASEPEALIAWFGSLGLAMTRIGLEAGPLSQWLFAAMKQAGLPVELLETRHVRNAFKTMPVKTDRKDARGIAELMRMGWFRPVHCKSISAQETRAILTTRTLIEAKLRDVEMSLRGVLRGFGLKVGKTTPTNFSERIKELVSGHANLQVVADALLAVREVLLREFRGFEKRVRTMARHDGRATLLMTTTGVGAVISLTYAAAIDDPARFKNSKQVGAHYGITPKRYQSGEIDYTGRISKIGDKSVRTALYQAAHIILMRPVKASALKTWAMQLAKRVGMAKAKVALARKLAVIMHRMLVDEKPFDHKLPNQVATA

SEQ ID NO: 73696 - protein, 376 aa, unidentified
MAQTDVQYPTIHLAIELSRSAWLVAARLPGVEKPSLHRIEGGDTAALLALAAALRARAAARLGTPVRVACCFEAGRDGFWLHRLLTAEGIAAYVLEPTSILVNRRARRAKTDRLDALGMLRVLAAYLGGDRQACSMVRVPTPEEEDAKRPHREREELVRERVRLENRIAALLATQGVRERPSLRSWERDLAALRTGDGRPLPPHLRAELDRLRRRLVLTLGLIRELEAERDAALAAGPRDAAGRKIAALCRLRGVGANFAAVLTREVFYRAFDNRRQLAGYVGLAPVPHQSGEADRDRRISRAGNARARTTLIQLAWLWLRYQPDSAPARWFRDRVGALRGRTRRIAIVAMARKLLVALWRYVETGLVPEGVEVAA

SEQ ID NO: 73697 - protein, 525 aa, unidentified
MPYVAKATRREHRKPRSRSRQSLQKPNGIIGPRVQKVGGDRFAIVCVDPAKHRSEWMMADYFGNLLIKPQTVEHRAVSFQLAIAQIREAQQQHDIQDMIVVVERTGNYYLPPKRAFAKAGFETRVVHPFATKQYRVPADPGNKTDETDLYAQHRAAAAGFGLRELELESPYRELQLRARHRRNLVEKSAAMACQIREHLHMAMPGYAKLFDHLFEQQTALAIARCCESPAKLIELGRAELSQYLKENNVRHQLRTIDKVLCWASQAATDSIQDGPLHHAIWTDLHALYRQFQQHILASERELARDLVQTPYIRLLAIPGINVVSAAELAGEMGPMSRYANANAITGRSGLYPSRYQSDQTDNASGPIIRQANRRLRCALMRIADNLACHCAYYRGQADVDETRGIDKRAIRVKIVKRFSRLALACVGGDEPMRHPCFQQPDSIMEKLRDFYHKHQMPVDLLLADLEKAVGQLPYETRSREAEIVADVLHQRASRRRGVCPIGELLPAILARLGVTTTEDENGDRP

SEQ ID NO: 73698 - protein, 340 aa, unidentified
MALYAGMDLHSRNTLVGVINGSFQRVFEKRVPNDLSLIVDTLEPFASRLKGIVIESTYNWYWLVDGLMDAGYSNVRLANPSAVKQYEGLKHTDDRHDAFWLAHLFALGILPEGYIYPKEDRPVRDLLRKRSFLVKHRTAHILSLQSMLEREKGYKLSGNEIKRLKAEDIARIFSQEHLVMSAQANRSSIEFLGHHIKRIEKAVRNRVKLSKSFEYLLTVPGIGDILALTIMLEVGEIARFARVGNFASYARCVSSQRLSDGKKKGQGNRKNGNRYLAWAFVEASHHARRYNEGLRSYYQSKCAKRNKAVATKAVCNKLARACYYIIRDQVPFREEALFCS

SEQ ID NO: 73699 - protein, 415 aa, unidentified
MKKHSNSPKKSESRSKRAKLRGPVQQDTKEVLAELVGKLREKLDPKVGAASAGEEHQQGRPRPNLDRLTVGVDLGDQWSQYCILGLEGETLAEGQLRTTKQDVSEFFEALNAARVVLEVGTHSAWIREVIHSYGHEVLVANPRLMEGSKRRKRKNDRIDANKLARLGRVDPQSLHPMQHRSAEVRQDLVMLRARDALVAARTELINATRGLVKSMGTRLPKCSSPSFAQKVEEAVPAEIREALLPLVRMTAELSDCIKGYDEKIEKLASEKYGHTALLRQVKGVGPITALAYVLTLENPERFVKSRDVGPYLGLVPKQEDSGESQPQLGISKAGDTMVRRLLVGSAQYILGPFGPDTDLRRYGLRLCERGGKNAKKRAAIAVARKLAVLLHRLWASGEVYEPLRPALSTPITAAA

SEQ ID NO: 73700 - protein, 391 aa, unidentified
MIYIGIDVAKDKHDCFITNSDSEVLFKAFTIANNLDGFNDLYQKIESVMDDVTKVKVGLEATGHYSYNLLGYLIDKGLPTYVINPLHTNLYRKSLSLRQTKTDKVDARTIASMLMSDVNLKSYSDTSYHNEELKSLTRYRFDKVKERAKLKTSVSRLVCILFPELEKLVPTLHMASVYALLSEFPSAKHVATAHLTRLTNLLSKSSKGRYGKDTAITFRDAARASIGSNMPAKSLELKHTIKLIQELDSEIDEIENEIKIIMDEINSPILSIPGINYRMGAMIIAEIGDFNRFDSPDKILAYAGFSPSTYQSGQLDGAYAHMEKRGSRYLRYALYNATKYVCHWDPTFAAYLAKKRAEGKHYNVAISHAVKKLVRVIYHLEKTKQQYIKAA

SEQ ID NO: 73701 - protein, 399 aa, unidentified
MTPDDIDVWVGLDVGKSAHHAHALDHDGNTLYDKPLKQDEKAIRTMLGKLSKHGRVLLVVDQPNTIGSLPLTVARNMGIAVAYLPGTAMRRTAQLLPGDAKTDRRDAHVIAWAALKLPETLRDAGPDDETLAALKLLAGHDEDLAHESTRHVNRLRSLLLQTHPAFERALKGERITRDATLALLERYGGPMGVKRAGIEDVKDWAKSNGLRAGRIIDDMFKAIGEQTVTVPGTLMAETIIPSIAHDIKTIRDRRREVGRQVEKLLEDHPLLTVLTSMPGIGVRTASNILLGIGGDIANFKSSAHLAAYAGISPVTGQSGTSIKGERPSRRGNKRLKNALWQTAFVTSTKHPPSVAYYKRKREQGKHHNAAIICLARRRCDVIYSMLKNGTLYQEPALVA

SEQ ID NO: 73702 - protein, 354 aa, unidentified
MTRVNASEPSPPDAADAAADAAADAAADAAADAAGDDGIFVGVDVSKAKLDVARSDAGNAVQAFANDPAGIAELVRRLLVAGRPVRLVLLEATGGLERPLVAALLEAGLPAASVNPTRARYFAIGAGVLAKTDPVDARVLVECARRGEHRLLRKRDERRAELEALVTCRRQLLHVRTEQSNRRDGTTSRPALRAIDAVLKTLDRQVLGLDRQIEKLIESDDDLRRDGGILGGVPGVGAVLTATLLAELAELGAVGRRAVTALVGVAPYPDDSGPRTGRRRIRGGRASVRNALYMATLSAIRFNPVIRPFAQRLRDRGKAAKVVIVACMRKLLCILNAMLRDRLTWAELDLVKNA

SEQ ID NO: 73703 - protein, 497 aa, unidentified
MPNKTSIYSRCNPQLLKLFERAGHPAKVLCVALDYAKAQHTALICNGLGDLLKSSFAVANTAPGVAQLLKEVRACAQARKVRCEHVFFGGEDYPSYAENFVRQLRQEQFLVVRVNAWEAKQQRDNFQASSDALDLLGIARCCLHRRGEPVRDLPQAYPNLRIATRDRDKLVRMRTAVSNRIHSYVDRLFAGFLSADQSGLEPFGRASLELMEDRFSPAQLRRRPRQALAQWLGRRGVTQAPEKADQLKQLAKRVLPPAPEQTAMLQQSLAQLVGLYRNLEQSIGRIDREVAYWLARTPGAWLTSIPGFGITLAAGWTAELGPPSQWHSVRQLCSYSGVVPKSKQTGGPDKEPVVGAVQRRCNKRLKNVVLQAAEKVIQYGPEELRQTAQQLEARGAHTAFAIAKRLVRLGKYLAVTGTVYRPKALMDPDTPQAPLAAHYQQVWEKLLPKWKDKADLRDVFAPEHPLGQWRKMVQDLYALELRLPQPRAAQKSSALTP

SEQ ID NO: 73704 - protein, 313 aa, unidentified
MIIPLRYVGIDVSKHHLDIFDEAIGVSERIVNATQAITQLVARWRCDALVVFEATGVYDLELREALRQAGIRFARINPARARDFARASGQLAKTDPIDARMLAAFARAMQPATEQVASPARSALARLAKRRDQLVLMRVQEKNRRSEADDCAMAERIGRFIEVLDGQIAEIEADISALIKAEPEISDDAQLMRSLPGVGPVACMQLIAQMPELGRIGPKQVAALAGLAPFNVDSGAYRGKRKIGGGRKRVRAALYMAALNAVRRAAPFKTFYTRLRQAGKPAKLALIAVARKLLTVLNAMMRDRKPYQLEPAT

SEQ ID NO: 73705 - protein, 343 aa, unidentified
MTRILKQVAGIDVAQNELVVSLGRVDEFLCKEIYSYKTFANKPSGFAALQLWINKHTDNQVSVRYTMEATGVYHEKLAYYLSDQGFEVSIVLPNKISSYMKTLEIKTITDKTASQAICQFGLERSLDLWQQPKKIFRDLKQLTRERDQIVADRTMAKNQLHAEQAEAFPNDRSIYRANQRIKLLNEQEKEIKQELAVFVKTDKELHKKIDLITSISGVGDLTAVIVLAETNGFELIRNKKQLISFAGLDVIGKDSGTSVKGKPRISKKGNRHIRKAMHMPSLNAIRNDERFKAIFVRLVSKHGIKMKAAVAVQRKILEMIYTIWTTEKPYDKEYLQKTNIATA

SEQ ID NO: 73706 - protein, 341 aa, unidentified
MSKRSVSPCAVLYCGIDVSAATLQVAVQPEGGHGFEQREFANSAAGHKQLLGWLSKRGALARVSLEATGIYSLDVALALDAADGIAVAVLNPRTVHQFAESLRRSKTDPADAVALAEYSRRMDFVAWARPSVAALELRSISRHIETLTEEHARLKNRLHAARGSASTSRCVREDLRRSMTGVDKRLLRLRREASAVIAADAGLKRKFEHLIGIKGIAEVSAIQLLGELAGLDPEMTARQWAAQSGLDPLHQVSGTSMHKASRISRRGNRHLRRALFMPAVSASRFDPHMKAFYTLLLTRNKTKMQALTAVARKLLHAIFGIFKTATPWDGAKLFPQLILTS

SEQ ID NO: 73707 - protein, 482 aa, unidentified
MKSKPQEKNKRATNHPTQHHWHEMNRKQRREMTRQIQSEDLSLEVIHPDAAGIDIGNESHYAAVPPSRDSQPVREFRCTTAELKAMAAWLQQCRIRTVAMQSTGVYWVAVYDILEEAGLEVYLVNARDTKNLPGRKSDVQESQWLMKLHTYGLLRNSFRPPQEIRTMRTYWRQRNDLVQSAGRHILRIQKALTQMNLQLANVLTDVSGATGQAIIKAILAGEHDPHKLAEFRDPRVKASEEQIAQSLEGNWQPDLLFLLKQEQDGYEFCHKQMAECDRQLAQYLQRREDRSHGAPLPEEKRKGRLNKKRANKPQFDLREGLFRMTGTDLTRIDSVDVMTATTVISEAGYDMSKWETENHFVSWLRLCPDNRISGNKVIGKGRLPTNNPLSIALKMAASTLRQSKTYLGAQFRRLRTRLGAPIAIKAMAAKLARLIYRMLRYGMKYVDQGAAFYELQHRHLQIKQLKWKAAKLGFQIVGAPAA

SEQ ID NO: 73708 - protein, 339 aa, unidentified
MKRYIGVDLHRNSFTVCYLDSETGEKEISTYRLDMIEKFIRELNCEDEVALEATTNARYFKKKVEKFVKRVIVINPYKFKVISESVKKTDKNDAEMIAFYLSKGMIPEVRMKKEEIAEIESLANTRDKLVKLRTSLKNKVHNILRMNGIETDREFLSSEIGLKRALSYEMSDTAKVEVKVCVDQIRSLTSSIKEIEEELVEKGKKMKGFDNISSIKGIGDKSATILLSVIGDIDDFENRKQLDAYFGIVPRVSDSNDSIRHGRITKRGNKLGRTTLVQCTLIAMKYSDYILSYYARMKSKKGSGKAIIATARKLLGIIFDTLKNNWIFEDFPNFVLKTT

SEQ ID NO: 73709 - protein, 398 aa, unidentified
MDGPIISFDVSKNSSHMKGFIDVSKPISKAIKINHDLDGFNSIKELARKIEERTNLKPAVVYEFTGVYALPLLSFFIEDDFKIYQISPLESAKMRKAEIRPVKNDSLDTNTIAKVYYTKELKEFSKQEKAYEDLKEMSRHYQFLIYQSNVEKNRYHRCLDAIWPMLDQVIQYDSEIALTIIKKYKHPSNVKTMKGVLSTISECNTGRSGTKENMAMKIFDYVQTHNSGVNKESYMVDELVSLVDRINNTSLALEKLLNQMKQICLQLPEYEIIKSIPSVGDKLSIRLLAEIGNISKYSSSKSLIAYAGLDPMIMQSGKQSGEHMHITKKGNSFLRSSLYLLITCLCIHYPNSSIALYVAKKKNDGLHPKAAKIAGCNKLLRIIYSMLSNGTLYSEKQQ

SEQ ID NO: 73710 - protein, 479 aa, unidentified
MAKRKRSTFERLQRGERLSRRERKQIERQFQAEEPGWEIVHRNVAGIDVGNESHFVSVDPRQTDQPVREFGSWTAGLHQMVDWLKTSQVQRVVLQTTGVYWIPVQDVLEKAGFEVAVVDARGTRNLPGRKSDVQECQWIRKLDIYGLLRGCFQVPDSIRSIRTIWRLRQRWVEEAGRSIQQMQKALTLMNVQLANAITDLSGQTGMAILRAIVDGERNPWILAKLRDPRIQASEEEIAHSLQGNWREDVLFELEQVLAAYNFQLQQIEKCEQQLEKYMKAQPTRPAVGPVLGPATLGVEEAPKKHRKKARNTKPPRKNRISFDLETELARVMGADLTAIDGIKLMTIQTIYSELGPALSAFPSENHFASWLMLAPKRDVSGGKVIRHVWVKGRNRVANALRMAAESLNNSQSYLGARYRSLRGRLGAPKAIKAMARYLACLVYRMLMKGQDWVDRGATYYEQRRRQRELIHLQHKAKAL

SEQ ID NO: 73711 - protein, 409 aa, unidentified
MEVLYPRCAGIDVHKRQVTVCVRVAEGRKPRKEVREYGTDTASLLELRDWLESEQVTHAGMEATGAYWKPVWHVLEEAIELVLANARDVKNVPGRKSDVKDADWLSDLLAHGLIRSSFVPPEPIMELRDLTRTRKQLVRERGRHVQRIQKVLEDANIKLSSVVSNVTGLSGRKMLVALIEGETDPDRLAELGSVWLKASKEELRAALHGFVREHHRFMLKLHLDQINALDAAIQDLEARTEKCLEPFRRVVEHLNTMPGVSETTAAVIVAEIGVDMSRFPTADAVVAWAGLCPGQDESAGKHRSRKLKKGGQWLKATLVQCAWAAVKNKDTYFHAKYLRIKRRRGSKKAAIAVAAAMLTAAYYMIQRDEDFHDLGPDYFQRFDRQVLTLRLIRRLHELGLDVAVQPRAA

SEQ ID NO: 73712 - protein, 362 aa, unidentified
MFTERTSVGLDVHARSVAAAAIDGVTGELFKAKLTPSHEHIRSWLGDLPGPVAVAYEAGPTGFGLSRALNAAGIRCEVVAPSKLQRPSGDRVKTDAKDAVHLARLLRLDEITPVAVPSVEQEAARDLVRAREDARGDLMRARHRLSKLLLRQGHVYCGGQAWTGAHDVWLRQTGAQLAAVATRATFGSDYEAVLAVKARRDRLDAAIAAMAADCEFTPLVTRLGCLRGIGTLTGFALAVEVGDWDRFTGKTIGSFVGLVPSEYSSGQSRVQGSITKTGNTHLRRLLVEAAWHHRPAYRVGKTMRERWELAGPAARARGDEGNRRLHHRWNTMRARHKRHVVANIAVARELAGWCWSLAVLEE

SEQ ID NO: 73713 - protein, 454 aa, unidentified
MAKARDRRRTLDGFAEINHDAAGIDVGNAQHWVAVPAGRDAESVRMFGCFTADLHALANWLERCGIKTVALESTGVYWIALYEILESRGFKVCVVNARQAKNLPGRKTDVKDCQWLQQLHTYGLLAASFRPQGEIIILRRYLRHRETLVQEAATCIQRIQKALTEMNLQLANVISDISGTTGLRILRAIVEGERDPQRLAAMRDWRIKATPDEVAKSLLGNWRDELIFVVGENLALYEVYQQKVERCDYRIEQHLKNMSAQVDNNTNPLPKPRKGKRSHGNAPSFDLRSELYRVTGTDLTQIDGINVVTAQAILADTGTDMSAWRTEKHFVSWLGLCPDHRISGGKVLQRGTRKVISRAATAFRLAASALRRSQSALGAKYRRLQSRLGAPKAITAMAHHLARLFYRMIKYGSKYVDHGAAAYEAKFKEQQLRWLSRKAAELHLCLAPLPNSAF

SEQ ID NO: 73714 - protein, 401 aa, unidentified
MVIGIDEVDVVLGLDVGKSNHHGHGLTPAGKKVFDKTLPNGEPQLRAVFDKLKAKFGTVLVVVDQPASIGALPLTVARAAACQVAYLPGLAMRRIADLYPGEAKTDARDAAVIADAARTMPHTLRTLDLTDEVTAELTMLVGFDQDLAGEANRTSNRIRGLLTQFHPSLERVLGPRLDHPAVTWLLERYGSPQALRKAGRRKLVEVVRPRAPRMAERLVDDIFTALDEQTVVVPGTGTLDVIVPSLAKSLAAVHEQRRALETRIEALLEAHPLSQVLTSMPGIGVRTAAVLLATVGDGSSFPTAAHLASYAGLAPATRRSGTSIHGEHAPRGGNRQLKRAMFLSAFAALHDPASRGYYDRCRARGKTHTQALLRLARHRISVLFAMLRDGTFYEPRSPRLA

SEQ ID NO: 73715 - protein, 278 aa, unidentified
MSLLDPLCVGIDVSKSSLDVSAGTVTSFTVSNDTDGFDVILAKLREQQTISLILMEATGGLESAVACFLQSEGFDIAVINPRQARDFARSMGYLAKTDSIDARMLAQMGEVINRHPDRERFIRSLPDIERQVLAAMVVRRRQLISMLVAERNRLYPSHPQSRKSIKAIIDALEKELALIDRNMDKHVREHFKVLSDLFSSVKGIGAATIATLLAEVPELGKLSRREISALIGVAPINRDSGKMRGRRTIFGGRASVRATLYMATLVATRLSGIFTPVW

SEQ ID NO: 73716 - protein, 311 aa, unidentified
MDDIVGIDVSKADLKVFRLKSREHLCIPNDRPGLRRLRDWLGSDIPELIVFEVTGAYHRSLEAFLHLNGLRCVKVNPKQARRYCQAVGQLAKTDRVDAELLARMGRQLDLQAQAAPPANQTILQDLLVCRRGLTKDRIAAKTRLAVATLPILARMLRRRIRQIGEDIAAIDAELQRLTNQDPGQKRRVEILASIPGLGQLTAVTMAAELPELGSATAKQIAALVGLAPIAQQSGRQEKPRRIQGGRPWVRRSLYMPALVASRFNPDLKRVYQRLLAAGKRQKVALTAVMRKLVILANTLIADARKWSPAAP

SEQ ID NO: 73717 - protein, 354 aa, unidentified
MEIVPFKAKKFKYFIGIDVSKKTLDYAVMYESKLLFHQLGQNDPSDILTFISTLKTIPKFTIAKTVFCMEHTGIYCNHLLYSLKRSKANMVMENPLLIKKFLDLTRGKNDKADAIQIASYAQKNRDELTLWTWRRPVLVELMSLFGLRNRLLTTAVALKTPLEEQEPYIQKYIQKQCVQLCHKSLISINADLLNIDLKIDQLINSDEHLKRLTELITSVPSIGRVTALRILISTNEFRDINDPKKFACYAGVAPFKMESGQVQRKARISHFANKKMKSLLHLCALTAVRCDEGIKAYYIRKTQIEGKPKLAVINAIRYKLIVRIFACVRQNRNYEKNYARPKKLTASGLIKCEV

SEQ ID NO: 73718 - protein, 318 aa, unidentified
MYFLGIDIGKRTHVASIMNEEGKVLLKGFSFPNTTEGAESLIERMVDYSGAPSDFVIGMEATGHYWLSIFSYLHESDYLIHVVNPLQTDGWRKGTEIRKRKNDIIDSVLIADLMRYGSFVETVLSDENVFSLKQLSRYRTYLVGTASDFKRKIIAVLDQVFPEYATIFTKQGVFGKASKELLLAFSAPIDLENISSETLAQYLAELSRNRIKAEKADQLKQAASNSFGVKFAQEAFTFQLRSMIEQLKFIESQIKETEREIKHIMDTLNSVILTIPGIGPINGATILGEIGDIQKFSNPKKLVAYAGIDASVTQSGQY

SEQ ID NO: 73719 - protein, 375 aa, unidentified
MSDHSEAFIGLDTSKLRNAVAIAEGVRGGEVRFLGEFENSATATAKLVKKLAAKYQRLTFCYEAGPTGYGLYRQIKKLGHECMVVAPSLIPKKPGDRVKTNRRDALNLAKLLRAGELTAVWVPDRGHEAMRDLTRARETAMMDLRSKRQQVSAFLLRQGLHYSERKKTWTKTHMNWLASRKLEHAEQRLVFEEMMLAVRQAQERLERLEQAIRVAVPDWSLAEVVTALMAMRGIDLISAATFLAEIGDLSRFQHPSELMGYLGLVPSEASTGDKIKRGPITKAGNRRARRMLVECAWSYQHPPRVGQEKQEKVAAAPPAVREIAWKAQCRLHGRYRALVRRGKLKTVAVTAVARELAGFIWAVSRAITTARVVAK

SEQ ID NO: 73720 - protein, 428 aa, unidentified
MENMDINRIKEFRQFKKEIRGSEQHLIVGIDIAKDKHHAFLGTANGHTVQKGLIVENNLSGFSYLMGRVQFHMDRDGFEAVVFGLEPTSVYHKPLAEFLIEQGCLVVYATNEAIKKNRSLLDGRWDKNDMKCSANVADLISQGKCQYYDLPDIKLRDLRNLLLLRKRLRKQLHGSKMRIRNNLVAQYFPELDKFWKTREEENLAIVRWCLAPAKIAAMKFEDFCCLVTSRNRGDRQKQRLFKIWDSASFSIGCFAGNGLELEAKVLVDTVKLIQAQIVEVDGATEAICEQFEEYQYLLSIPGFGPYVSAVVLAAIGNAHRFENTSQILRLAGFDLCAIRSGKKSATAVPVISKKGKADLRYAVYQAALVASSLTTHFAHYYHRLLDGRQREKGIRTKMRVKLAAKLLVIAWTLMKKKESFNPDYIISQ

SEQ ID NO: 73721 - protein, 424 aa, unidentified
MTKVLYVGLDVHKESIVVATAPQGDTQAQLYGKIGGTLDALDKVIKKMARPDLELRFVYEAGPCGYVIYRHLKKQGYHCQVIAPSLIPTKASDRVKTDRRDARQLARLFRAGELTAIYVPDEEDEAVRDLVRARDRAMVDQRKARQRLKGFLLRLGHRYLGRGNWSAEHLRYLAQIKLSHAAQQIAFQEYLEAITVATERLERLTKAMEAALPAWKRAPVVHAVMSLRGVALINGMTLIAEAGDLTRFDSPTSLMSYFGLTPSEYSSGEKRVQGGITKAGNGACRRALVEAAHHYRIAPRVSPAMQKRQEDQSKEVRAIALKAQQRLHSRYRLLTARQKKPVIVIAALARELCGFVWAIACQLSAPEKLKTREKGTSKETKAAVQTTPAPVQSSVLTETTKKTYQLNAEKTFKKQAVNTRAIPG

SEQ ID NO: 73722 - protein, 376 aa, unidentified
MERGSLMLNTTTFVGLDVHARSIKAVALDAMTGEVRSATFGYDAAEVAGWVSSVDPSAKCVYESGVTGFDLQKKLSSLGVDCVVGAVSKMIKPPADRKRKNDRNDAEFLARMLSVGNVVEVWVPDDECEAARDLVRALDDAREDLKRCKQRLSKFLMRHGYAFSETTPTGRRKGNWTAAHWAWIRSISFPEKADGDALAYYVDAVRQAMEDKARLEKLVEAEASKPRWKRRVDSVRCLKGIDVTSAADLVFEAGEFSRFKNARSFAAWLGLTPSEHSSGESVRQGGITKAGNKHLRRVLVESAWHYLGCSPHSKDLAKGQVPDPAARRHAAKGVRRLVERRRAMLERGVHKNKANVATARELACWCWAVGRMVENG

SEQ ID NO: 73723 - protein, 367 aa, unidentified
MTVTIVDAARPVTGSGEMHPDLIVAPCPVTGGVDTHLDLNVAAALDGIGGLLAVAEFPTTSDGHRELLGWLSGFGPVARVGVEGTGSYGAGLARFLRRAGVEIVEVDRPNRQARRRAGKSDPLDAIEAARAALSGRARGAAKSRDGNVEAIRALVVAKRSARSAKIQTLNQIRHLSFTAPDELRQRLAGVSRQQLAAKAAALRPGSREGADPVVAATKTALRILGRRVLALDEEKAHIDALLTGLVTQTAPQLLAVFGVGVDTAAALLVTAGDNPGRLRSEAARAHLCGTAPIPASSGKVTRYRLYRGGDRQANRALRGIVITRLRNDPRTQAYMARRLAEGRSKSEVIRILKRYVAREVYHRLPRA

SEQ ID NO: 73724 - protein, 361 aa, unidentified
MNATTAAVDLAKNVFQVALADANARVLEQHRLTRAQFERFFDNRTVARVVMEACGSAHHWARVFAARGIEVILLPAHYVRAYVRRSKTDAADALALLEAARCADITAVRVKSIEQQSLQALHRTRSLWMGTRTSRINALRGFCRELGLHVPIGARTGLEAMGRAVADDQSVIPPLLRPVMQQLLDEIRVLETRVAQLERQLAQLARESASCTLLMSIPGVGLLTATAIVAATSGSVSHFKSARHFASWFGLTPKESSSGGTRRLGRISKMGDKYLRMLLTHGARSVIRAASVAKLKGQELLGVRHWVLQLQARSNHNKAACALANKMARICYAVLRDQTPFGQPATRLGKKMQRQTFELAH

SEQ ID NO: 73725 - protein, 352 aa, unidentified
MARRLWVGLDVGVETTSVCVIDADGAILHETVCPTNAKYVHREIVSLGCRRSGTVGLESGTGIGLARDLRNLGYTVEIYEARQLSKFLRVRRNKTDAGDALGIAQAGRIASPLVSRVHLKSLECQSIACRLKIRRYFVKARMDAVSIVRRQLELFGVRIAPGNPATFHARVDKALKTTFRSASDPLEGEIRHLIDHIEELRTHKSGLDRELNRLALGIDICRRLMEIPGVGPICALTFFAAVGEPGRFRRASDIGPYLGLTPKLHQSGLAQRSGRISRMGNSMARALLIQASLRFMRCCDPQSRFRAWTSEIESRRGRGKSRVALARKLATVMVAMWKKGTAFDPQLVLAAP

SEQ ID NO: 73726 - protein, 308 aa, unidentified
MTTIHTGLDIAKLNLQLHFAGRIHDLPNTAAGHRRLLKLLAAQPGVQVVCEATGGYEREVVAALHEAKVPVSVLNPARVRHFARATGQRAKTDDIDAAVLTAYGQALQPKPTAPRTEEEQQLAELIRRRVQVVEVLVGQRQQAERLTVPALRRQAQSLVRRLERDVTQIEDHLKALRQQATTLDTRVQKLEAITGVGALTALGVLAELPELGTLNRRQAAALAGLAPHPRDSGQWHGRRSIGGGRAPVRRALYMAALVAARANRQLKAFYQRLRAAGKPAKVALTAVMRKLIVLMNHLLKNPNFALQN

SEQ ID NO: 73727 - protein, 421 aa, unidentified
MKNKAAKKLKQIPAGYLTIGIDPHKRKHAAVAITEDLMVRTKFKFDNSRAGFEQALGNVRNEMVKADCRGVIFAIETGGHYWRNFAYFLEERGIPFRLVSQITLKRMRDGRDINRRKSDYRDAEMAANVLRTGDFTETKLPQGIYADLRSTHSAYFRLVRERSRIMNLLKGLLDGLFPEFTRVFKDPCGRTALAVLMTCPSPAAIASTDEQVFAARIRERRPRHLMVRKLRALHEAAQTSIGVKPGADSVAIEVSLLADRYRFIEEQIDQLVKLLIALVNRTEEGIYLLSIPGLNYLSAGALLAETGALGQYQNAKQVIKMAGTNPIESESGGKRLGETPMSKKGRPRLRYSAWNAVIPLFRHNPDFRSWAKRLRERPAHANPLNGKEVVGAALNRLLRLAFALVKKREFYRSPQMALVTN

SEQ ID NO: 73728 - protein, 354 aa, unidentified
MSKYSIKFFIGIDLGDKKNQICVLDQNGEILEKTIIDNNITELNKFFDRYDKPKELMVALETGTHSPWISQLLNARGFRVLVGNARKLRLIWDSTNKTDERDAEMLARIARFDPKLLSPIRHRSRSAHMDLAILKGRDTLVRCRTSLINFVRGTCKTAGTRLPSCSADSFAKTVIEYIPEDLLAATVPCINTIMELTQKIRQLDSQIETLCDEAYPETEIIREIQGVGPVTSLAYILTLEEPGRFRKSRDVGPYLGLIPKRDQSGDTDKTLSITKAGNTYLRRLLVSSAQYILGPFGPDCELKRYGIRIASRGGKVAKRKAVVAVARKLAVIMHNIWKNKTVYDPFYQSYLKAA

SEQ ID NO: 73729 - protein, 348 aa, unidentified
MAHFVGLDVSVKETSVCVVDDAGKVILERKVPTEPAAIIALLTSLGATYGRIGIEAGPLSQWLVNALMAAELPVICVETRHMKALLTAQQINKTDRNDARGIAQMMRVGLFKPVHVKTLAAQEQRMLLTSRKLLQRKLLDVESDLRGTLRNFGLKVGVVSGSRYEARVRQLVEGFPVLAAIAEPLLKVRQVMRQQLAVLHKMLLDTVRGDPVCRRLMTAPGVGAVVALTYRATVDQPQRFVHSRAVGAHVGLVPKRYQSGEIDYDGGVSKCGDALLRTMLYEAAHSLLIQSRKWSWLKAWGIRVAQRRGIRRAIVAVARRLAVILHRMWVDGSEFRWSKDSTAVPTAA

SEQ ID NO: 73730 - protein, 363 aa, unidentified
MTVYCGVDFHTRQQLIKWCDTRDGAIKEERLFHDSLDDVRKFYAQFSDEVIVGIEACGYSEWFERILHDLGHDVWVGDATKIRRRARSRQKTDRRDAELLLDLLLKDEFPRITRLSFESLEILRRLRYRHRLVQMRTRMRNSLQAIALGSGIVLKSKLRTKKGREKLNDLPLSPVLSQQRSGWLEMIEEVERRVAQVEQELEKAAASDERVQRLRTHPGVGLLTGLALVHTLSPVARFANSRKVTAYVGLEPRESSSGERKRMGRISKAGSRVLRFLLVEAGIKAAREDAEMKKLYYRVMQRREQARAKVAVARHLLIHAFIMLRDEIDYAEFKLRGAEMRSDARTIHRPNVPDHLIERPASV

SEQ ID NO: 73731 - protein, 410 aa, unidentified
MEVMFDRVAGLDVGKDSVTVCVRTPGPRGGRRSVTRTFKTVFGSLRVMRDWLMECGVTIAAMESTSTYWKSPFYCLEEVMVVWLLNAAHMKAVPGRKSDVRDAEWIAQLLEHGLLAPSFVPPPEIRRLRMLTRYREQLMGDRTRDTTRLELMLEDASIKLSSVASSLNTVSARAMLAAMINGETNPVQLADLAKGRMRRKIPDLAQALTGTFDAHHAKLAKSMLRRLELVEVALAELDAVIVEACRPWQHQIDLLRTIPGVGEKVAQVIIAETGADMSRFPTAAHLAAWAGLAPAMHESAGRQSPAGKRHGNKWLTAMLVEAAGSVGRMHGKNYLAAQHARLTRRRGMRRAQIAVAHSILVSAYWMLTRDEAYHDLGADWHQRRNNEAHARRLIAQLERLGHTVIIDPAA

SEQ ID NO: 73732 - protein, 373 aa, unidentified
MTISTKYIGLDVHRDTISIAVADEGRDLEIRFFGTVANDCEVLHKALASIGKNGATLKVCYESGPCGFVIYRFLKGLGIDCVVISPSSMPRRPNDRVKTDRRDAQTLARLLRAGELTAVWVPDEAHEAIRDVVRARRQTKQDLVSAKNTMKSFLLRHDRRYPGKAIWGRMHWRWLSDQRFAFAHQQFVYEEYKRRIHELEERCARLEQVLEEAVLDWPLAPVVTALQALRGIRFIAAITLVAEIGDLHRFDSPKKLMAWLGLVPAEHSSGTRTRRGELTRTGNAAARAMLIESAWQYRYPAREGRALRERNAGLPDHIRAIAWKAQTRLCAKFRHLAGTGKHAAKIVAAVARELAGFIWDIARHTPAPASRQA

SEQ ID NO: 73733 - protein, 427 aa, unidentified
MKKIKIDYLSTLFVGIDIGSRTNVISALNFDQDFLIRMVPVANAQGGAEQMEELVAQVLSQHHEFRAVIIGLESTGFYGVHIANYLSTSEKLAPFSTKVYCLNPNEVKQYKKSFNSLDKNDGIDSFVIADFARVGRIHTEPWRGAQYLALQRLTRHRLHITECIAREKTYMLNNIFLKFSEFAMLNKDEHPFSDKYGATAEAVLTDYLSTEDIVDASVDELVAFISSKSRGRIADPEQTTYLLRKAAQDSYRLDQCLYEPLTVSIGCSFNCISAFEKELKAINAAIQRAVKGLNPTEYQILTSVPGIGPVYASGILAELGTIKCFKSNDALAKYCGIVWKENQSGEFEAEDTPMNKAGNRYLRYYMIEAAGSVMQHCPEYKAFYDKKFAEVRTHQHKRALALTSRKLIRMLFGLLANGKLYSVEKSR

SEQ ID NO: 73734 - protein, 345 aa, unidentified
MEISTIGLDLAKNVFQVHAVDALGNVVIRRAIRRSQVLPLFAKLRPCLVGIEACGASHHWARELLALGHDVRLMPPAYVKPYVKRSKTDAADAAAICEAVTRPTMRFVPVKSREQQAILSLHRTRALLVKQRTQLVNMIRGQLAEFGITIPQGLERALMLARQIIEGKEMPDLPGHAVKMLAIVCRQTLLTHEQIREIDRDLLALQKSDEMARRLATIPGIGPIGATAFAAAVTDPGQFRSGRQFAAWLGLTPLQNSSGGKERLGRISKMGDKYLRRLLVIGATALVRQFRNKPDKATPHFASLLARKPVRVATVAMANKMARIVWALMTRKETYNAGHTPMLAA

SEQ ID NO: 73735 - protein, 394 aa, unidentified
MKLVGIDVGKNSHHFCVMDKETGEFNVTPTSFSNNKEGFDFLINSLKPYSKKSILIGMEDTGHYHVALLKFLLSNGYTVALINPKTTDLTRKMEGGITKNDKLDTITICDVLDTPERKKQYRITKVDRFDLYEQRQLTRHHHNLKEELNVYCNRLQKSIDLVFPEFNTLFSSKYSIVYMNLLKTFGSAEAIASTDIRTIRKCFEIKGRGNRISLTPEKLKECAKNSIGISSEVETIQIKHLVSQITLIKEQIAEIDKKIEEFSITNNSPILSIPGISHFSGTSILAELGDIGNYSKPSQIIKFAGVAPYHYESSQYNAQHTGITKKGSKYLRKTLYQIILTVINNNPVFKKYYRLKISQGKGHRCAQGHCIRKLLRIIYHLLETGPSFDPALLR

SEQ ID NO: 73736 - protein, 344 aa, unidentified
MTNIQPKETAQEAKPDLFAGIDVGAEELILVIRKNGKPFDPQKFTNTPADRARLVKKLVKLPGIVVCLEATGIYHFDLSLALHDAGVLLMVVNPKASHNFAKVLMKNSKTDAVDANTLAEYAARMDFVAWTRPSDEQIALRSFARRINALTGQKAAAKNHLHALNATSETPKAVIKDAKLAITQLEKRIDRLTAGALVLIGKHPELERILALLIGIKGIGQTSAIALMGELLLLPPDLSHREWVKFAGLDPRAFDSGKSVHKKTRISKAGNRYIRAALYFPALSAKQHDKHVKAYFQHLLDNGKTPLQGVCAVMRKMLHAIHGMLKHNEPFDNTRFYAIPEFTG

SEQ ID NO: 73737 - protein, 345 aa, unidentified
MSNNIHFSCICGIDIAKKVMQVFKVTSDGVVTNTSVSRKDFLEHFRNIPPALIGMEACATSQHWGRELQGLGHTVKLLSPKAVKPYVKGLKNDRNDAEGIYRALIMGVREVSIKSTAVRDLSLLQTMRAKRQRDKVATINHIRGILAEYGLVMGKSVRAFLSNAGTLIARLKESETTSQLVISELEKLLKEVKEIVSRIEELESSIKKIASENKNYDLFRSAPGVGPITAAMMVVLLCNPTVFKNGRDFAAYLGLAPMSFGSGGRNQVTGIPSKYRCHNEARSLLVQCAHSITRLKYKSDWVASILSRKPKKVAIIAIANKLARQLWVMAKKGDNFEKRLVLAAV

SEQ ID NO: 73738 - protein, 395 aa, unidentified
MFIVGIDIAKRSHEAIIIAEDGQVVRKAFSFRNNCTGYNLLLEQVRRLTLVKSQIVFAMESTAHYWLALYARLLKDGYAVMVLNPIQSHSLRELYIRKAKTDARDSLVIADLVRFGRCKASNVPQDKILALRELCRSRAYLVDMAADLKRKLIALLDRIFPEYESLFDSVFSKASIAVLSKYSTPQKVKNANLRKLTDILMESSNGHFGEWKAHQLKEAACSSFGIDDSGGVYSTLLGMFLEQILSLTAQADSLEKQISVFFQEFNNPLTSIPGVGTVLAATILSEIGDITRFSSADKLLAYAGLDPSVKQSGEFKSNQNRMSKRGSPYLRRAIWLASTVAVHRDPMFQTYYEKKISEGLHYMNVIGHVSRKMTAVIFAVLRDGQPYQPILQSAG

SEQ ID NO: 73739 - protein, 318 aa, unidentified
MAQIERIVGIDVAKEKADACIRSLSVRHSSASTPEGRRELIDWLRVHGVGKAVMEASGGYERGWAAALREAGIEARLVDPKRVRHFAKSAGRLAKNDPIDAEMIAWFAETFCETPGQAHDPEREELQAMVNARAGLVEMRTQILNRGEHGEPPAVRQAHAAMLKTLAAQLLKLEAAIAAKLKATPRFAALAEIIESVPGLATQAAAALIAMMPELGRVSNKIVAALLGTAPYDDDSGNHRGERHVKGGRRDLRNLFYMPALGAATQHNPVLKAFYLRLRAKGKKAKVALVACMRKLIVILNVMVARGEKWDPARHALA

SEQ ID NO: 73740 - protein, 350 aa, unidentified
MEKRNMKHYVGLDVSVKETSVCIVDEAGKVCRELKVPSHPEDLVDALKDSTWRIERIGLEAGPLSQWLFSGLAEAGLPAVCIETRHTKAFLKAQVNKSDRNDARGIAQMMRVNLFRPVHVKTLTSQKRRALLTARKILQEKAVAIENDIRGLLRNFGLKVGGVGLGKFDERIRELVEGMPELVEIMEPLLAARQKLREMFTKLHRKLLLIVRNDGVCRRLMTIPGVGPVVSLAFKSTIDVPARFKNSKAVGPSLGLTPVLNQSGESRRIGRVSLCGDNMMRALLYEAAQVMMTRVQKWSWLKAWAMNVAKRRGRQKAIVALARRLSVIMHRIWIDGSVFRWTNKATPAAA

SEQ ID NO: 73741 - protein, 352 aa, unidentified
MNQIATVGADLAKAVIVVCAADREGQVLFYKQLSFRGFAQWAATIPPCTIGMEACGSAHHWGRRLAAFGHTVRLMAAEFVKPFRKSQGAKNDRNDAQAIVTAVRQPDMRFVSVKSIDQQAVLAWHCVRRGWSDDRTALISRLRGLLAEFGVWLAQSPEALKRSLPKLLENEALPLRMRTLLTVAQEELRRVEGRIDLCEVEIRAHAQQSDAAKRIEAIIGVGPMTASAVAATVTNAGDFKNGRQMAAWLGLVPKQFSSGGKTSLGKITKRGDTYVRGLLTGGARSALIAALRRPPEKRTRLQHWMIEARLRLGYYRTLVAIANKHARMIWAILAKGEAYDPDAWKRYTPRTT

SEQ ID NO: 73742 - protein, 356 aa, unidentified
MAVYVGIDVHKKYCQAALMNNNGRVVQELRFDNNSEGATSLVQLARSVDPQIKAVLEPSANFWIRIYDKLEGEGVDVKLSNPLRTKAIAEARIKTDRIDAKTLAYLLRGDLVAESYVPSRKNRERRALIRHRASLIQMRVDIKNRIHALLDKHELTHTYTDLFGKQGLEWLHNLPLPNPDQEILQSNLQVVETLNEQIRSMDIQIAKDATSEEKAKLLMTMPGVDYYAAMVLLSEIGDVHRFNSDEKLVSWVGLAPQVHQSGETQWTGHITRKGSKRARWILGQCAQSARQHDPRMREFYERIERKHGHQKAVVAVARKMLAIMYVMLIRNEPYRGGNPELTEQKHKRLDTLANRA

SEQ ID NO: 73743 - protein, 319 aa, unidentified
MPTQNAVMYAGVDVAKASLQVHLQGRQSEFKNTPSGLRQLCLELRKTSGVHVVCEATGGYEHALVKALHKEQIPVSVTNPAQVRAACQARGQRAKTDRIDAQMLTDFGQRYQPQPTAPTTPSQDQLGALTQWLQQLIHGLALAKTQAEHHQDPFVGRQHSKLMTHLESQIEAVEKQIKALLEKDPVLQQRVDCLDEIKGVGARTAWMVLAHMPELGRLNRQEAAALAGLAPWTRESGTMKGMRCIGGGRPEVRVALYMDCLSAVRSNPVLRPLYQRLRAKGKLPKVALTAAMRRLLIYMNHQLKHLAADVPASGGDKTK

SEQ ID NO: 73744 - protein, 295 aa, unidentified
MNYSHFVGLDVGKKSFDASLVSLDQELSHHTFPNTPEGIEELLHWIKQHGVEVETALFCAENTGSYVIDLCLSSYQYHFPLALECPLTIKKSIGLQRGKNDRIDARRIAQYASLHYRKLRLYELPDKDLVRLRNWLVIRDNLVKQKVSSLKLLELTRETSRLADLMVPMTFLENQICQIKEKISYVEEEMEKIITENITLSTNYQLLTSIKGIGPVNAIVLLCVTDNFQRFSAPRKFACYSGVAPFEYSSGTSIRGKTKTSHLANREVKVYLTRAAITAIAWDPQIKAYYKRKIA

SEQ ID NO: 73745 - protein, 361 aa, unidentified
MRIIGCDLHARQQTLAMLDTVSGEVVSHTLMHEGNEVREFYSELPRPVLVGIEAIGPMQWFLNLLEELGIECQVGDAAKIRAAEPRKQKHDRRDAELILKLLVEKRFPAIWMPSRELLDLRALLLHRHQWVRLRTQVQNALQAIALANGLRRGPSLWSYDGLAKIAFLPLPPHTSLRRSALQALYRHMDEEIEKLTVQVAEQAEQRPGVQLLMTHPGVGPVTALATDVFLGDPQRFDDGKSLASYVGLIPQERSSGRRRRLGKISKQGNPLLRFLWNEAGAHAARRDPQLKRFYRRKLVQKGMGKARVAVARKLGIRLWIMLRDQIDYQEFCRRGQKQQSGAACAGMPEVRFGAHRHRPVD

SEQ ID NO: 73746 - protein, 445 aa, unidentified
MHYKRLLTWIDGSSSYLSVGLDVGADFTWMSIALPNGAFIGKPFKIVHSDPRSRDLAVTKIKEAQETYSLKSRCFLESTGIYHIPLLCFLRDKGFDCSVINPIITKNSTNINIRKLHNDKFDSKKAALVGLNVSLKASIIPEDSVVDLRNLVRDYYYFKDLQSAVALKLTAELKVSFPAYAKVFSKVTTQSSLKLLSSYPLAGDMLEAPKDDIVETIRSTARFGEAYALRKYDAVIAAAQDASVFGRALPSNAVRIRLYIDTYQEYQKHLDALLKALHETVERLQDTLIYDQICLLQSLRGIGFLSAVVLIAEMGDFKLFPSPKKLYAYFGLDPAVKQSGKLNGDKVHMSKRGSSLARRVLHMVALNNVKVDKGSGTPVNPVIYDYYTRKCSGKKKPVAMGAVMHKICNIIFAMLRDNKPFEIITPEEHCQRFAAEYPDKIRKAA

SEQ ID NO: 73747 - protein, 372 aa, unidentified
MNYNTVYVGMDVHKESFTLCSCKYEDEKASHYQRTPASYKNVLRYLAFLRTIYGEDTRFVCGYEAGCLGYSLYHQLENFNVECVILAPTTMLEQRSKRRIKTDKRDAEIIAKSLAQHNYSPVHIPTETDNQTKEFIRMRDDHKAELKKIKQQILSFCLRQGYQYDGSGNWTAKHVKWLRSLKPAGLYKEILDEYLLTYTILTDKLNRLDQRIEELASKEEYKESVSKLTCFLGIKTHTALSVIVEVGDFQRFVSARKFAGYLGLVPGQHSSGDDRNGLGITKAGNTHVRRLLVESAQSYTRGKIGYKSRVLRSRQAGNSPQVINYADRANERLRRRYYKMVLKDGKKYNIAKTAIARELACFIWGMMTDNIY

SEQ ID NO: 73748 - protein, 330 aa, unidentified
MNSICSSTDRVTVAVPVLGLDVAKKSVQAELRNSSNKVRFGFANNAKGFAQLARILKEHDVPKVWAGLEASGPYSQALALWLYAQGHRVSLLNPRRVKHYARSAGNRNKTDLLDAAVIADFVCAHQPVAWQPPTLEVAQLQALVRRREELSLMLQAEKNRLEGVTPNVRSSLERMIATLSAEKARLEKLITQQIRSHQQLSCDHQLLCTIKGIGSLTAAILLAEMARPGQVERARQAAAHAGLVPRRELSGTSVHRNRGLGNEGNRYLRKALYMPALIAIKYNAPLRHFASRLRTAGKPKMSILCAVMRKLVHIAFAVLKHQKPFNPSLA

SEQ ID NO: 73749 - protein, 369 aa, unidentified
MDKDTTYVALDDSKRKIVVGILRPGAVEPELREIVNDPRQIRRLFERLKREGPVTACYEAGVSGYDLHRQITALGVVCAVIAPALTPRRPGQRVKTDRRDAAKLVRLFRAGELTAIHVLDEGEEAVRDLVRCRDDLRRDVLRWRHRVLKLLTRHGRAYLAGKNWSQAHWRWIREQRFDLPPLQRAFEATVFALEQAWARQAELDKELEAVAGTAPYREPVGWLRCFRGIDTLSAIILLAEVVDFQRFRRPRELMAYLGLVPSEYSSGESQRRGALTKAGNSQARRVLIEAAWHYRHRPTIGRALASRSQGQPDEVLSQAWRAQQRLHRRYRHLVGHGKRPPVAVAAVARELVGFIWAAMTRHESRRQAA

SEQ ID NO: 73750 - protein, 353 aa, unidentified
MTQATVNALPRTIGFDLGSKRSSFCILGSDGEVEREGSIPMSRASVEGFLAREPQSRVVLEACGVSRWTAGIARVLGHEVVIANPRRLALVTQSCRKSDRNDAYKLADLGQVRPRLLSPVHSRGDRSYLGQMHQRVRSQLVQIRTGLVNLVRGCARTAGYPLPKCSTAAFAKRCAKALPAELRTVLGPAFAELESVNARLAECEKETERLGREAFPEARCLRQVTGVGPVLSLAFVCAVEDPTRFEDSRSVGAYFGLAPRSRQSGAKCPQLRISKRGDPEVRRLLVSAATYILGPFGPDCDLRRYGKRIAASGSQSAKSKARIAVARKLAVLLHRIWITGQVYQPLTKERATA

SEQ ID NO: 73751 - protein, 382 aa, unidentified
MTQTTSRKKHSVETERLYVAFELGWTTWKLGFCTRLDEKAWVATIDARDIGAMKKTIAKAQARLGLSPTCPVASCYEAGRDGFWLDRLLKQIGVVNVIVDSASIQVNRRARRAKTDRLDAEALLKMLVRHVSGEPKVWQVVHVPTPEQEDARHLQREIRTLTKERTRIVNRVRGLLANQGVAVKMGARGLVSSLESLRIWDGSPLPPGLKLRVEQELSRRTVVHEQLLALEVERNRGIREGADATAAISRRLMELKAIGPATAETLTREVFFRRFKNRRQLGSYSGLTPSPYQSGEMSHESGISRAGNTHFRGISVDLAWDWLRYQPQSALSRWYQRRFGSGGPRMRKVGIVALARKLLIALWRYAEKGILPEGARRKTLAV

SEQ ID NO: 73752 - protein, 348 aa, unidentified
MQISTIGIDIAKNVFQVHGVDAAGKPVLKKQLRRGQMLEFFGKLPPCLIGMEACATSHHWAREIRKLGHDVRLMPPSYVKAYVKRGKNDAADAEAICEAVTRPSMRFVPIKSAEQQGALMLHRTRDLLIRQRTQLINAMRAHLAELGLVAQTGREGVQQLMRTVAEADNERLPSDARVACQAIIAQLQAVQMQIAGLEKRIHQAHRANPASKRLDAIPGFGVIVSTAVVATMTDPRAFKTGREFAAWIGLVPRQNSTGGKDRLGSISKQGDRYLRRLLVVGALAVIRSARARPDKYPWVMKLLGRRPAKVAAVALANKMARIAWAILAKGEAYRTPARSSSAAIAVSA

SEQ ID NO: 73753 - protein, 372 aa, unidentified
MDESSKTLYVGLDVHKESIAVAYAPEDRGAEVVSLGAIGTRQCDIDKLIRKLQAKGATLVFAYEAGPCGYGLYRYLTGKSLACHVVAPSLIPRKAGDRVKTDRRDAITLARLMRSGDLSTIYVPGIEDEALRDLSRGRDDAMQDLKRSKRRLKSFLLRQDLRYEGRASWNAAHLRWLAEVVCPTPPQQIVFQEYVRAVTEQQERVQRVERELHEAVKSWRLYPVVEAIQALRGVELTGAVILMSELGDITRFETPRQLMSYLGLTPSEYSSGARRQQGGITKAGNSHARRTLVEGAWAYRYPAKVSRHLQLRLEKLPAEVQAIGWKAQVRLCKRYRQLTARGKHVNQVVVAIAREMAAFAWAIARLVPLATS

SEQ ID NO: 73754 - protein, 351 aa, unidentified
MKSINKQVQGEELFVGIDLHKHRWHVTIRTADVVIFSNSIAGRWQELKKVLNRYNGCRIHAVYEAGYFGFSLYDNLTKYGVECIVTPPSLIPQEHGNRVKTDRLDSRKLARLLAKGLLKSIWVPSAKERFHRQVIRRRRQLVGDRVRTQNRIKSELCFYGIDLPTPRSKWSQVYFANLQRIKFKNHWMQKSFNQLLEQYEFLSAQIDKQTQLLKQLSQLPLYRDRVKILCSIPGIGILTAMEILLELQDFSRFRRAEQLAAYVGLTPSQYSSADKIRMGRITGAGKNTVRSALVESCWHLIRKDKAMRKKYEQIKARAGGKRAIVAVSRKLILCIRRLLLDNRPYEYEPVN

SEQ ID NO: 73755 - protein, 371 aa, unidentified
MNHVTSIGLDVHARSVTAVALDSITGEVRSQKFGYSPAEIAGWILQLDSPKAVYESGVAGFHLVRELREMGVDCIVGAVSKMHKPASDRRKKNDRNDAEFLARQLMAHNIVEVFVPDVETEGARNLSRALEDVRDDLTRAKHRLTHLLIRWGYIWNEFNEDGKRRGSWTHAHWEWIRGIELPDAAARESLDYYISEVRHIESQKKAIEKRVAQCASRPRWRDRVEALRCMKGIETVTAFALTVEAGVFSRFDSARAFASWLGLVPSEHSSGERTSRGGITKAGNSHLRKLLVEASWHYTRATKERKRSLYDESVPASISNHAAVGVKRLVERRRHLSCELRKRPVVANVATARELACWIWALGRMSEGALA

SEQ ID NO: 73756 - protein, 350 aa, unidentified
MDQQQHYVGLDVSLQTTSICVIDDKGTAVWRGKCASTPESITEAVHTYAPAAVRIGLETGQLSNWLTLNLRRRGLPVVCLDARHAKAALSLQINKTDANDAFGLAQIVRTGWYREVAVKSMDAHTLRMLMVARAQLVSQRQTIANTIRGLLKTFGLVIVRGSGGLFAVRVREQIAGNDVLVAIVEPLLVVWHAIREQIEMLDRQILGRARADAAARRLMTIPGVGVVVALAYTAVIDDPARFRRSASVGAYRGLTPRRYQSGEADTSGHISKCGDGLLRAYLFEAATVLLQRHSRASTLKTWGLALAKRIGMRRAKVAVARKLAVIMHRVWSDRSEYRWGDVPVAANHRR

SEQ ID NO: 73757 - protein, 349 aa, unidentified
MTEQRISYAGERVYVGIDVHKETYTVTCVCHQQIVKTATVPAEPASLAASLLRWFPGATLASAYEAGFSAFVLHRALTQVGIANIVVNPASIAVAANDKVKTDRRDSKRLARDLADGRLRGISIPTEAEELARLLPRTRAQIVKHRATIARQIKAKLHQFGLIAPSNRRLLSSRYLREIATWPLPRELGVSLTLLAEQWRFATRQLIEMRRLLRDQAKAQEEIEKVYRSVPGIGEVVARTFATELGDMTRFANERALFSYTGLTPSEYSSGTSVRRGHISRQGSSRVRHLLIETAWRALPRDAVLKEIFDRIAATRGKKRAIVAIARRLTGRMRACFRQGTTYAVGTYA

SEQ ID NO: 73758 - protein, 419 aa, unidentified
MIGIDPHKGSHTAFVIDGREKPLGQLRVRASCEQAEALLGWAGRWRQRTWAIEGARGLGQLLAQQLLAAGERVLDVPPKLTARVRLLESGQINKTDENDARAVAIAALRARQLPQLTVEDQTIVMRVWARRYHDLGRLRTQAVCRLHTVLCELVPGGVRTQLRTSQAIAVVDSITAESPVAQAKLELAHDLVADLQRLDAQRREVKRRVSRAVAAAPTSITEVYGVGPIVAACVLGYVRDIRRFPSRDRFASYNGTAPIEVSSGDRKIYRLSRRGNRQLNHAIHIAAVSQISHRGSEGHAYYQRKRAKGMTGKCALRALKRKISDTLYERMLHDIRQRKDPGGHSGNDAASSAAGSHPDGPALRTSHSRATANSKTATTNQRPLTSPPAPDKRRTSRSGTGVKLQPRPRPRRGRGQERA

SEQ ID NO: 73759 - protein, 380 aa, unidentified
MTTTAPPNGHDTTPERVLFVAFELREKTWKLGCTTGHGQKPRERTVTARHHEHVLNDIAQAKRRLGLPETAPVVRGDEAGREGFWLHRFVQAQGITNPVVDSSAIAVNRRRRRAKSDGLDVRTLLRRLMRYAQGERQVWQVVKVPAVEAEDQRHLHRDLETLKQERASTTTRIQGLLRSQGLRVTRLTKLPEQRETLRLWDGSPMPPGLRRRVLRVYAQYTLLSEQIAAVEVERRALLQTSPEASIDKVRQLMQLKGIGSNGAWLVVRAFFGWRAFKHRREVGGFAGCTPTPYPSGERAREQGITKSGNRHGRWMTTELAWSWLRFQPDSALRCWFRERFGGGKRLRRLGMVAVARKLLMALWRFLETGVVPEGAVLKEG

SEQ ID NO: 73760 - protein, 345 aa, unidentified
MPIVGGLDIHRKQLTFDYLDTVTGEVMRGQVAPADRAHLRAWLVRFAGRDDVAFALEGCTGWRYVAEELAAAGVAAHVAEPADTAFARGRKRHAKTDKTDSRHLRQLLAEGRLPECWIPPSHILECRALLETYHDLRAEHTAWVQRIHAVFFRQGAPALGEAALRTGRDLQAVRAAAACHLSPVGQLQVDTALDMLAALEARLDVLRHRLLAAARHLTGAKVPAARLYGVGPATALAMTCWLGGAGRFSSSRKAVRFAGLDITVWSSDRKGPPGRLSRQGPPVLRWAVYEAGKTHARAPAPDHRYYAQVKDRQDGKRAALSEARKILRQACHILAELGDVALTAA

SEQ ID NO: 73761 - protein, 343 aa, unidentified
MVYIGMDVSSKDFVVHAIDQRQQKVFEGRIAPSRAGLRKLIKELGRGPKLFVFEAGNQMKWIALMLMKEEGVRVHVVHPNEIKWIGQSNGKTDKIDAKKMAQLARANLLPKPVHIVEGKTRELREFVSARGQLQGKRVALINTVRGYMRQEGVLLPEKFFQRSDWKNSLENHSMGETQKLIVKSFMDGIDALEHSEEEITKKMVEIQDNRCELLETIPAIGKIASRVLVGALDDAGRFDNKRCVANYGGLAPTIYQSGDTTNLGRINRDGRHEVRKVLLQCAHTIQRMTSYDAAPIREFFERLEKRRGKKRAVVATARKLLTIAYGVLKSKTPYDPMKLRAFA

SEQ ID NO: 73762 - protein, 410 aa, unidentified
MEVQHPRCCGLDVHKATVVACVRLVIDGKVVKETRTFATTTASLIALSEWLTETKCTRVAMEATGVYWKPVWHILSDQDFDLVLANAAHIKNVPGRKSDVKDADWISDLLAHGLIRPSFVPDGPTQEMRTLLRTRKQLVREKTSHILRIQKTLEDANIKLDSVITDVMGLSGRKMIEALIAGQKDPAKLARLADHRVKASQESLREALRGRVTKSHRFLLRLHLGQVDAIDAAIAEIDREVEAGIAPFRTAVEQVSAVPGIKSLAAQTILSEIGIDMSRFPSSAHLISWACICPRSDESAGKRRSTRIRKGSPWLKTTLVQCAWAATRTKGSYLQAQFYRIRARRGPKKAILAVAASILTAIYHMLKDGTLYQDLGPNHLNARSKERQKNRLIKRLADLGYVVELVPQAS

SEQ ID NO: 73763 - protein, 369 aa, unidentified
MIIIGADYHPGFQQIAFVDTDTGEFQERRLQHREEAEKFYRDLAAQGMQVGVGMEASGQARWFERLLAELHCELWIGDAAEIRTKRVRKQKTDRQDAQLILQLMLEDRFPKIWVPSWENRDLRQLLWHRHRMVQARTRIMNQLQAVALNEGLRCKKRLWRDAGREQLESFALAPWASRRRRDLLELLDRLTPTIAELTQAIEQEVEKCPAAQRLQTHPGVGALTALAFVLIIGRAERFQCGKQIASYLGLVPLEDSSGQRRRLGHITKQGSSMMRFLLVEAAQVTVRSDPEWRGKYFHLTMRRGRKIAKVAMARKLAVRMYWMWRKGWDLRAVEKVRFARGTTRKSPWCVVEHREIDWVSRSPLRGSSN

SEQ ID NO: 73764 - protein, 360 aa, unidentified
MVQFTLVGADVHDKSILVKVAVDRGPAVTRSWSNDRDGRQAMIADLKRRAAEAGAKEIWFAYEASGQGFGLYDDLTEAGIRCGVLAPTKLKRSAQERKKKTDEKDAERLLEVLRGHLLAGNRLPEVWIPDMQTRDDRELVRSRLDAGEKISAVKAQVKALLKRNGVGRAAEAGEGWSQDYRRWLTWLTQEGSVLGAGARAGLLTLLAQLDFLEEEAGKLYEAIAELSEAQRYAGSVKEMRKLKGAGLLTVMVFLTEIGDLKRFRNRRQIGAYLGLVPTAAESGEQNDRKGHITREGSARLRKVLCQATWARVKHDPEEREFYTRLAEKNPKHKKKAVVAVMRRLGIRLWHAGLRGMEATA

SEQ ID NO: 73765 - protein, 348 aa, unidentified
MIVGIDVHKRSHAAAIVDERGASIATLTIANSRAGVARLCRWLQEQSADGVAVGVENAGGYGRLLCAVLVASGHEVLNVPAWRVKRERVHEGPGKSDPADAVAIAQCVLRHRDKLGPALEPPLIRAIALLDTHRRQSVTRRTDAIQRLRAVWAQLDPEAECATSNVATKRALRHLKEIDFGDGLAELAAARCIHDLACEIEALNTRVAELERELAELLAAPGDPFADVRGAGLATTVTLIAQSGDVRRFRGDAAYARYGGSAPIPCGSRATAGRHRLHRGGNRQVNACLHRIAVTQARVDPRARAFLERKMGEGKTKREARRALKRHLSDVVYRRLYAWAEQALPSPT

SEQ ID NO: 73766 - protein, 352 aa, unidentified
MIIIGVDFHPEFQQIASVDTGTGEFQEKRLAHREDAEAFYRALAGQKVRVGMEASGHARWFERLLAELQMELWVGDAAEIRTKRVRKQKTDRQDAQLILRLLLEDRFPQIWVPSWENRDLRQLLWHRHRMVQARTRIMNQLQAVALNEGLRCKKRLWREYGRQQLESFRLAPWASRRRRDLLELMDRLNPTIAELSQAIEQEVEKCPEAERLSTHPGVGALTALAFVLIIGKAERFHCGKQVASYLGLVPLEESSGNRRRLGHITKQGSSMLRFLLVEAAQVTVRSVPEWRSKYLHLMMRRGRKTAKVAMARRLAVRLYWMWREGWGYEQVKKFGSHAGQPGNRDGVPSNTE

SEQ ID NO: 73767 - protein, 353 aa, unidentified
MMIIGCDFHPSFQQIAYVDQETGEYGERRLNHREEAVRFYRSLAGRQVRVGMEATGNDRWFRKLLNEAGHELLVGDASAIHASAPRQQRTDKRDARHILCLLVEDRFPVVWQPPAANEEQRQLLMHRCRLVRVRTRIKNQLDSIAKSEGLTGWRSGSSQRRQQIEALPLKGWYARRRADLLELLDALELRIKPLDAAVEAAAGQDAEARLLMTHPGVGPVISLAYVLVIGDWQRFPRGKQVASYLGLIPSEASSGKRQQQMGHITKQGNTLVRWLLVEAAATAQRYDASWHRQYVRLSMTKHHGVAKVAIAHKLAVRLYWMLRSGQDYGQMMERGSHARQSECPVGRSQGPIE

SEQ ID NO: 73768 - protein, 416 aa, unidentified
MKKHNNSGKKSEPTSKGTKSGGPVQRDTKEVLAELVGKLKAKLDPTKVAATSAGEKHQRGELRPNLDRLTVGVDLGDQWSHYCILGLEGERLAEGQLRTTQEDLATFFQGLNEARVVVEVGTHSAWVQEVIRGCGHEVLVANPRLMDGSKRRKRKNDRIDANKLARLGRVDPESLYPIQHRSREVRQDLVMLRARDALVAARTEIINTTRGLVKSMGTRLPKCSSRSFAPKGEEAVAVEMREALLPLVRLAATLSADIKEYDKKIEELGREKYGHTALLRQVKGVGPITALAYVLTLENPQRFAKSRDVGPYLGLVPKQEDSGESQPQLGISKAGDTMVRKLLVGSAQYILGPFGPDTDLRRYGLRLCERGGKNAKKRAAVAVARKLAVLLHRLWVSGEVYAPLHHAMAAPIVAAA

SEQ ID NO: 73769 - protein, 334 aa, unidentified
MMNASELIFVGIDVSKDSLEMALDDKGKTLHISNDEKGIAELHAAIMAACTPADANEAPRTVSAIVLEATGGFERKAAVALCTAGLPVMVINPRQARDFAKSLGYLAKTDAIDARVLSHFARTLYHSDKGVQLLMHLPDAGQVALHALMIRRKQLVEMRVAEDNRFAMSEKAQRKSIDAVRKVLNKEIGKIEQDMDGHLKEHFAKQLKLIDKCKGIGPVTKASLMAALPELGSLSHEQIAKLVGVAPLNCDSGKHKGKRITWGGRADVRCTLYMATLSAMRYNLVIKTFYDRLISKGKLKKVAIVACMHKLLTILNAIMKSGKPWDDQYLIKNP

SEQ ID NO: 73770 - protein, 433 aa, unidentified
MAKVRPQVIDDEEHERIYERVAAVDVAKDSGMVCARTPHPSRPGGRQSTVWTVKARRNAIAKLGRQLSQDGIEMVTLESTSDYWRIWFYVLEAAGLAVQLVNAAQARNLPGRPKTDKLDAMWLARLTEMGLLRPSFVPPAAIRELRDYTRARTRLTQERTRCFQRLEKLLEGALIKLSSVASKLTTVSAQDMIKAMIAGQRDPQALAALARGRMKARHDDLAEALDGMFDDHHGELAQLLLDQIAFLDDRISTLATRIGQAVTAIPAAWGVDAGGATGPGAGTGPDAAVLPAVQRLAEIPGMSEDLARSIIAETGLDMTRFPDAAHLVSWAGLCPSARQSGPRTRAGGKGQGDSWLRGYLGQAAASAAVTATFLGERYGRIARRRGKAKAKVAVARSILIIIWVRREALSLRMEVKDRPSPCRRSGGVKLEAA

SEQ ID NO: 73771 - protein, 319 aa, unidentified
MPQTIIGVDIAKQKFDVARLCENKYRHKKFDNNAQGFAAFLDWLTNFGDLQPWVCMEATGAYSIPLAEFLAERGYPVSVVNPAKIHAYAKSELSRAKTDKADAKLIARYCLSMQPNLWTPPPRAIRELQALLRRSEHLLEMQQMERNRLDTADPAIVDSLQTVLDTLEKGLDETRKRLKNLIDNDPDLRQRRHLLESIPGLGPAAAAYLLTALSPHYGFSSAKQAVAYAGLAPAIQESGRWVGKTRLSKTGDPALRKALYMPALVAWQHNPIIRAFCQRLKENGKNGKAIAGAAMRKLIHIAFAILQSGKPFDPKLTLA

SEQ ID NO: 73772 - protein, 315 aa, unidentified
MNYVGIDISKDFLDVYIRPSGDFQRFENNSKGFKKLIKELKDINLIALEATGKLESPLVRALIEAGFNVSRINPRQIRDFAKSGGKLAKTDKVDASVIAHFAEVYNPRLVALACEQEETMQELVSRRRQLIDMRTAEKNRVSTATRELSKGIRKHIKWLDSEIEEIDKQLDEFMKSSEGFKQKIELLQSVPGIGPVSATTLLLELPELGTLSAKQISALVGLAPMNRDSGKMRGKRTIVGGRKSVRTALYMPIVSAINFNSVIKDFYQRLVGKGKVSKVALTACMHKLLIILNSIIKHGKTWNQNFNNNKLTAKS

SEQ ID NO: 73773 - protein, 374 aa, unidentified
MSNDSEAFVAFDTSKLRHAVAIAEGSREGEVRYLGEIDNSDAAVRGLVKKIAGKYSKVVFCYEAGPTGYGLSRLITDLGHDCLVVAPSLIPIKAGDRVKTNRRDALNLVKLLRAGELTRVWVPDERHEAIRDLTRARQTAAADLVRKRQQILSLMLRLGRIYTGKRHWTRAHMKWLASQKIEHLEQRMVLEEMLLAVRQAQERIARLEEARAAVPGWSLAELVHALMALRGVDFISATGFLAEVGDLLRFQSARQLMGFLGMVPSEHSTGGEIIRGSITKAGNRRARRILVECAWSYRYPARVGPDKLGKVMSTPRTVQEVAWKAQCRLTTRYRALLRRGKGKNVTVTAIARELSGFVWAIAHAVAEPSKRQAA

SEQ ID NO: 73774 - protein, 463 aa, unidentified
MQISGDKIRQPDNDVEMEGLPVVRSKVAGIDLGSTNHWVCAPKNGGAGREVERFGATTPELEKMAEWLKERNVESVAMESTGVYWIAPHEILERQGLEVVLVNTRELARVPGRKKTDRVDCKWIQRLHSCGLLTGSFRPKEQVCMLRTLARDKGNLVAEAGDWLRRMQKSLDQMNVRVHRAVSDIDGVTGLAIMKAIVGGERDARNLAKLRDPRCRKSEEEIAEQLSGHWRADHLFSLQQALKMYDAIQERIADYEQEILRKLAEMEREECRGQAAPQLNNPQKAKAIKKRGQEPLRHALYRISGVDLTGIDAIGVETVQVVLSEYGADLTRFPLEKQFVSHVTLAPHKAMSGGKPVKKKKRGSASSRVAAALRMAALSLRHSQTALGAYYRQIARRIGGDVAVFATARKLATLIYRLLRWGQPYVDEGAAACEKRYHEARIKSLTAKAIELGYQLTPKPSHA

SEQ ID NO: 73775 - protein, 364 aa, unidentified
MLIIGCDYHPSFQQIAVLDIETGELQEHRLKHREEAEQFYRTLATTGARTRVGMEASGHAVWFERLLSELTIELWTGDAAKIAAKRVRKQKTDRQDAQHILRLMVKGDFPKIWVPSWANRDLRQLLWHRHRMVQTRTRIMNQLQAAALNEGLRYKKKLWRERGRQQLESLPLAEWASRRRRDLLEVLDRINPTIAELTRAIEQEAEKSPEAKRLMTHPGVGALTALAFVLIVGQAERFDCGKQIASYLGLVPEEDSSGERRRLGHISKQGNSLLRFLLVEAAQVTVRSDARWRNRFFHLAQRRGRKIAKVAMARKLGIRLYWMWRQGCDYGSWQKLASYVGEPGHPDGVQSITAVMIGHPAPGK

SEQ ID NO: 73776 - protein, 358 aa, unidentified
MAHRTLKMEKSKPLALSKEDRLVVAMDVHKKTVYAALRRNGQEVDTWVMPMRIETVAASLEPMKPWLKKVVYEAGPTGYGLARALKTAGMPVEVIAPGKTPQPANPGSKTDRLDCRRLAEYAEKGLLTPVAIPTEQEDADRQVVRLRDQIVIKQRRVKQQIKSLLLQQGIAEPAGLAHWSAEGIGALKAMSLRHQIRLALELLVEELEFLIASRQRVERQMAWLAKQKRHRENHRILRTHPGVGPVTAMSFLTEVYQAQRFTRAEELTSYVGLAPRVRQSGQTRREGPLIRAGRGALRSLLIEASWQWIRRDDAAAGVYRRLVRNTGSGQKAIVAMARRLAVHLWCMVCRKEKYRVAA

SEQ ID NO: 73777 - protein, 346 aa, unidentified
MTTVDATRPVTGGVNTHLDVNVAAALDAIGGLLGVAEFPTTPAGHRRLAEFLASFGTLTRVGVEGTGSYGAGLSRYLRSTGVEVVEVDRPNRQSRRRTGKSDPVDAIEAARAALSGRAQGAGKSRDGNVEAIRALVVAKRSSRSTKIQTLNQIRHLGFTAPEELRSRLKGISRQHLGAEAAALRPRAGGDPVVFATKTALSLLGHRVLVLDAERERLNLLLGELVEKIAPQLLEIHGVGVDTAATLLVTAGDNPGRIRSEAAWAHLCGVAPIQASSGKVSRVRLDRGGDRQANSALWGVVITRLRSDPRTQASMERRLKEGRSKPEITRVLKRYVAREVYHRLPSA

SEQ ID NO: 73778 - protein, 368 aa, unidentified
MATEAITVIGGVDTHKHTHYAAVIDDRGRLLAHRQFPAADQGYRALLEWMRQHGPIAAIGVESTGSFGAALARALTAAGEQVIEVNRPNRIARHMDGKSDRLDAEQIARAVLGRTSTATPKAKSGTVEVIRTLRVTRSSAVKARTQTFNTLFGVMIGAPSPLRDELVDLTKRTLVNRCLRLRPETDDLHALVGDSARLLLAGTKTALRDLARRWKSLDEEVKALDLQIAVLVREAAPALVELHGVGVELAGQFLVTAGDNAERIHSEAAFAKLCGVAPQPASSGRTTGRHRLSRGGDRAANSALYIVAIVRMRHHAPTRAYVQRRTAEGLSKREIIRCLKRYIAREIYANLPRAAAEAPESAAVHAAA

SEQ ID NO: 73779 - protein, 412 aa, unidentified
MQAIIERCCGLDVHQETVVACLLIAAPGAQPKKEVRTFRTVTRDLEALRDWLLEAGVTHVGMESTGVYWRPVYAVLEGFFELIVGNARHIRNVPGRKTDVKDSEWIADLVRHGLIAKSFVPPRPLRELRELLRYRRKLVESQAAERNRLLKLLETANIKLASVASDVFGVSGRAMLRAMIAGEASAEAMADLAKGQLRRKRADLILALDGRLEEHHRFLLAMQLRRLEAIEADIAALDRRIGERLEPYSAAHALLMQIPGVDWVVAAVLIAEIGVDMSVFLSVYHLSAWAGVCPGNHESAGRQTSGRARKGNIHLRTILVGAAISASKTKGSYLKDKYHRLKARRGALRAALAIAHKILVSAYHMLAKNLPYRDLGEAYLDQIGQTRTVANLKRRLERLGYKVTVEPSVRPT

SEQ ID NO: 73780 - protein, 335 aa, unidentified
MKKHSTLFIGLDTHKDSIAVAYATDSRTEPVTYLGALGTQHYSIRKMVRQFESRHPGCQLQFVYEAGPCGYWLYRLLSSWGYPCFVVAPSLIPKKPGQQVKTDKRDCMQLAQLLRNGDIDPIYVPEPEDEAIRDLSRARETAMWDLKNAKSQLKAFLLRHDIRYTGSANWSAAHIRWLSELVMPTPAQNTVFREMLYTIVERHKRLERLDNELTYQVRRWRFYPLVKAVQALRGVQLLVATSVVAELGDLQRFDNPRKLMAYVGLTPSERSSGSRRRLGPLTCAGNKRARRMLIEAAHAYRYPAKTSKILQLRQEDLPKAIVEKAWDAQVRLCRR

SEQ ID NO: 73781 - protein, 400 aa, unidentified
MLSIGIDVSKGKSTVCGMKPGGEIVYAPFEVQHTREGMSELVLLLHNSGEEVRAVLESTGSYHCPVVAALLENGIFVSVVNSLRMKRFCSQSIRKVKTDRIDAMQIALYGLAYWQELQPTKLPEDTYRELQLLARQYYQMTSMLIKAKVDFNAICDQVLPGMQELMNDHAGRHKLSDFVLRYRHTTHILEMGETRFRKDYCKWAEKKGYRNCERMAVLIFATAQNGIPVLPNAPSTQIVITEAIRVLHTVEASRDAILTQMQALAKTLPEYSLVREMPCIGDTLAPRLIAEIGDVRRFHSKRALIAYAGIDAPPYQSGKFCANNRHISKRGNRYLRKTGYEVMQSYVMHKPANDPIFTFIEKKRGEGKSGKLAMVAGLNKFFRVYYGKVTELYRSLPAIE

SEQ ID NO: 73782 - protein, 343 aa, unidentified
MKLMRVGIDLAKTVFQVHGVDRHERVVWRRKLTRTNWLKVFLETVEPGCEVGMEACGGAHHWARVLQGHGFTVKLIAPQFVKPYVKSNKNDANDAEAICEAMSRPSMRFVAVKTVAQQDVQAVHRVRAEVSKQRKAIGNQIRGLVSEYGLVAPKELVHLRAAIAAWLEDAENGLTGRFRRLLNALWHDLRALDQRMIELDREIAVIAGADPVAKRLQQLRGVGPVIATALVATVGDVKQFANGRQLAASLGLTPRQNSSGGKERLLGISKRGDTYLRTLLIHGARSALRTATNKEDRLSRWVSRIAATRHHNVAAVALANKTARIAWAMMKNGTEYEPDRAAA

SEQ ID NO: 73783 - protein, 392 aa, unidentified
MRVAIGIDVAKEVHWVSAVDDQGEIRIDRKLDNTPAAIAALIAELKTLEGEITIGLDVVGGIAGLAEAMLAAAGLRLVHVPGLAVNRARQGTRGGESKSDPRDARVIADQVRMRRDLRVIEAESELDLDMRLLVGRRRDLVDEQTRRIGRLRDLLVSIFPSLERAFDYTTKGPLWLVSKYVTPAELRQAGRARIIRHLQHAGSLRNIEVLVDRALDAARGQTISVPGERMSATLIRELAVEALSIRKRIAELDKELETLVARHPDSALIRSLPGMGAVLTAELIAEAGNLQRFRSADALAAAAGLAPVLRQSGKVRFLKRPTGGNKTLKRVFYQSAFCSLHTADSRTFYDRKRREGKRHHQALIALARRRINVLWAMLQNRQPFQADFKKAA

SEQ ID NO: 73784 - protein, 402 aa, unidentified
MEKYAGIDIAKKVHWMCVTDGEGRLLMEPRPYANDSEGLSRMVVDLDLYGGDIAVGMESTGCYWRSCYKVLAEGGYPVSVINPVKTCAERKQGNLGRAKTDRVDCLVVADTLRKQGIPPTPSPDADSAQLRDLCRFRRTVSESSTRAKLQFTTILDQVWPEYSNLFSDKFGDSSRAVLRRFSLGDMDADELADDLRGASRNRFGAAKAGEVLESLCSTCGVPASAALRLQLRLLLDQLDFCAAQLAEIDAEADALLDSVAPMLPTVPGIGRATAAQIAAEVGDATRFRDAKALVAYAGLDPTRRQSGGFDPERNRISKRGSAHLRRSLYIAAQASLRADCEFREFYDRLRARGYSHRYAVCAVARKMLCVVWALMRSGEEYSRDRHRARGKAPEGASPVDAG

SEQ ID NO: 73785 - protein, 342 aa, unidentified
MDYYAGIDVSLEASSICVVDASGKIIKEAKVLSEPEALIAWFKALPFLLARIGLEAGPLSQWLYAALKEAGFAVELLETRHVRDAFKAMPVKTDRNDARGIAQLMRLGWFRPVHCKSAPAQETRALLTARKLVQGKLYDIEMSLRGILRGFGLKVGRTKKAGFASRIMELTEHHPASKAIAKALLTVHEVLLEELNRFENQVRKLARGDARARLLMTTPGVGPIVGLTYVAAIDDPARFSSSKTVGAHFGMTPKKYQSGDIDVTGRISKMGDKSVRAALYEAAHVILTTPVKGGALKSWAAKLARRAGMRKAKVALARKLAVILHRMLADGSPFNAAKAAAA

SEQ ID NO: 73786 - protein, 392 aa, unidentified
MGQPITWVAMDTSKTRHCVAILGPDDLDPRERVVPNEPGPIRRLARSLVQEAIGEVRVCYEAGPCGFALARQLEEATSGLRCEVIAPALIPVRPGDRVKTDRRDARKLVRLYRAGELTVVRAPTEQEEAVRDLVRCREDAKADLLRTRHRLAKFLIRRGRVYPGRSAWTVRHALWLGQQTWDHPADQMVFEEYRLAISQVEDRVHDLDRQIEAISQTEPYREPVGWLRCFRGIDTIIAMTILTEVNDFQRFQNPRSFMAFLGLVPSERSSASRVHRGGITKAGNIHARRIFVEAAWSSRHKPTVGYHLRKRREGQPAWVIAQADRAMRRLYVRQLHLRERGKPLNKTVIAVAREIAGCVWAVMHEGLQQQTRGLTAQPPLATLSSVTLFKTT

SEQ ID NO: 73787 - protein, 364 aa, unidentified
MNAMIAGNTANQEAYWVGADVAKQTFDAALVSPGQHYPSTPLRDVPVATFARSAEGVNEFLSWLGAQLRGVSSPVSVRMVMEATGSYSVELAGWLNEKYPALAPAIANPRQTSAYLDSMQLRNKTDRVEARALAFYGAERRPAPYETLSPERLELRALSRHRDALVGEKVREQNRGEEPFASKLLASLHKRRLAQLERDIAKIEARSKDLIEMTPELRRDEKLLRSIPGVAFVTSMVVLAELGDLRRFSRARQVTAFAGLTPRRKQSGSSVNAPAVLCKRGNPRIRQALYMAAMVAVRLRGPLKDFYDRLVAKGMNGKAALCAVMRKMLTIMRAILIHETPYNPLWKKQGTKPSRPVDNAAQNA

SEQ ID NO: 73788 - protein, 371 aa, unidentified
MPSARQLAKSGKALKGRSVVRGAEPFSSKTSNGCMGTSPHSQARGVRRGKGTRQERPSEGHSVFVGIDVSKARLDVAFRPEGTSFEASNDEAGIGDCVRRLQALRPELIVVEATGGFETALVAGAAVVGLPIVVVNPKQVRHFAKAIGRLAKTDSIDAEVIAHFAEAVRPEVRPIQNEAGELLTALLSRRRQVLDMVVAENNRLTTTRERQVRQRITHHLHFLKQELRELDKDLDKEVRSSPAWREKEDLLKSVPGVGPVLARTLLAELPELGRLDRKRIAVLVGVAPMNNDSGSLRGQRRIQGGRAKVRNVLYMAALVASRFNPRLKRFYEGLRASGKTGKVALVACMRKLIVILNALVRSGERWNAEAT

SEQ ID NO: 73789 - protein, 382 aa, unidentified
MPAYADPAPKPISADTIFLAFELSGTSWLVALHAPDADKVERHRLSAGVAAEVLGLIARTKARVTRRLGTTPRVACCYEAGRDGFWLHRVLEAEGIASHVMDPSSLQVDRRARRAKTDRLDAQALLRALMAWSRGERQVCSMVRPPSPEHEDERRLSRERGTLLKERLRLSNRIKGLCAAQGIYDYEPLGADRRERLARLVTGDGRALPGRLAAEIGRQLDCLELVLRHLAEIEAVRDARAAQAREEGGSKLAALLRLKGIGPELATVLELEVFHRHFANRRDVAAYAGLAPSPYASGGTSREQGISKAGNRRARKALIELAWLWLRHQPESALARWYRDRVGTATGRVKRIAIVALARKLLVAIWRYVETGLVPAEATVRT

SEQ ID NO: 73790 - protein, 374 aa, unidentified
MIFVGIDVAKDKHDCFILNSEGTVLADVFTIANNRIGFETLLSRIQSCSQGESKIKVGLEATGHYSYNLLGFLLDSGLATYVINPLHTNLYRKSLSLRRTKTDRIDARTIAMMLMSDVDLKSYSNTAYHNEELKSLTRYRFDKVKERAKLKSSVARLVNILFPELEKLVSSLHIAVVYALLSNYPGASYIANANTEELAETLCTASKGRYTKSKTAEIQVAAGVSIGSKMPAKSMELKHTIALIRELDKEISEVESAIDKITSQMDSLIFTIPGIGRHMGAMILAEVGDFSNFASADKLLAYAGLSPSTYQSGQLQNCYAHMEKRGSRYLRYALFNAAKYVCLWCPTFSAYLEKKRSEGKHYNCLLYTSPSPRD

SEQ ID NO: 73791 - protein, 408 aa, unidentified
MNPLYVGIDVSSKSNVVYLMLPDGSKHSNFSVANSHNGSIQLTKHILSAVTSLSLDTVIIGLEATSVYGDNLVYFLREDASLVPYDRKIHVLNPKQVKKFKDAYNDLPKNDYVDSYVIADCLRFGRINKEVYQGDYRYKALQNLTRARFFAVQNLVKEKQRFINVLFKKYSTMTQEKVFSDTFSTTALAVYEKFDSAEALASMDLQELTDFIMEKGKNRFPDPDAVAKAIQKAARSSYRLPKTVNDSVNQVLSISITSIKALDAQIKEFDKAIKAQMELLPNVLTSIPGIGPVCSAGILAEIGDINRFPSQAQLGKYAGLVWTQNQSGDFESENTRLIRSGNRFLKYYLCEGALSLVRCDTEYSSFYHSKYKEVNRHQHKRALALTARKFVRLVFRLLKDNRLYRAAE

SEQ ID NO: 73792 - protein, 343 aa, unidentified
MEYYVGLDVSLKQTSICVVDQTGSVVREGVVDSDPEAISVYVRSKAPGAVRIGLETGPTSTWLWTELKRFGLPVICIDARHAKAVLKMQINKNDRNDAIGIARIMQTGWFKEVHVKDIDSHSVRALLASRALLVKIKRDLENHVRGLLKNLGLVIGRATFNVFAARAEELIEGRPDLVAAVRPLLEARNAVEQQVSELDRKVMKLARRDAQVQRFMTVPGVGPITALAFKATIDDPARFARSRSVGAYVGLTSRRHASGEIDWSGRISKCGDVMLRSYLFEAAGVLLTRVPKWSTVKAWGMRLAKRNGLRKAKVAVARKLAVILHRMWIDGTEFNWSKKEIAA

SEQ ID NO: 73793 - protein, 342 aa, unidentified
MQVTTIGLDIAKNVFQIHGIDAAEKVVVRKQLRRSQVLAFFKALPPCLVGMEACATAHYWARELTKLGHRVRLMPAKDVKAYVKRNKNDAADAEAICEAVRRPTMRFVQVKSAEQQGQLMQHRTRDLLMRQRTQVINALRAHLAELGIVAAQGREGIKELLAIVADDRDARLPIDARASVIVLAAELQALQTLIGSIEKRIKVQHRSNEASKRLETIPGIGVIGATAIVATVADPTVFRSGRDFAAWIGLVPRQDSTGGKHKLGPISKQGDRYLRRILVVGAHAVLRYAKQNPEKYPWLTQLLARRPFKVVAVALANKMARMAWALLAHGGTYRVPELAAAA

SEQ ID NO: 73794 - protein, 418 aa, unidentified
MQTELSQFTAIIGIDWADKKHDICVHDMATGRRRRSQVRHKPEDLDEWAGSLHRRYGGPIAVALELSKGPIVSVLQKYDFFVIFPIDPSTLAYHRKAFAPSGAKDDPTDAELALDLLFKHTERFKPLQPQSVEMRTLMLLVEHRRKLMNDRVRITNRLRNALKQYYPQVLEWFDRIDTVLFCDFIRRWPSLIQARRARRATLEKFFREHNMNRKALLERRIQAIKTAMPLTEDEAVIVPYRLQVLGLVAQLEIALESIKTYDQEIAELMPRHPDHELFDVLPGAGPVHAARLMVAFGEQRERYASADEVQMYGGIAPVTKRSGDSTWVHWRWQCPTFMRQTFVEWAGQTINKSYWAGLYYYQQRAKGCSHQAAVRALAFKWIRILYRCWKTRTPYDEARYLKALQDRGSPLLKMAETA

SEQ ID NO: 73795 - protein, 417 aa, unidentified
MSKLAAYVGWDWADKKHQLCMQVAGQTGMEQRQIDADPASVHGWANQMLERFEGQTIGVCIENSRGRVIWALMDYPHIELYPVNPKAAQSYRAAFHSSGKKDDPVDAEMQMKMLAGHQDDLRRFAPPDVETRKISLLNEHRRTVVGEVVRLTNRLRETLKGYFPLALLMVGDLDTLMACAFLLRWPTLDELSRARDQTIHKFYTDHRSRSAEKINARIELLRNAVALTNDKAIVEVGRLAVTTTVPVIKALLEAIAKIDLELDQAYQSHAEFELIDSFPGAGRVMGPRLLAILGSDRSRFESASELQCLTAAAPVTIQSGNSRLVQRRYRRSKFVHQTVVEWAGHSLRSSLWARAFYDLQRARGKSHWVALRALAFKWLRILFRCWQTHTPYDEKTYIDSLIRRGSPIASAIGSAAA

SEQ ID NO: 73796 - protein, 361 aa, unidentified
MEKIREYVLKGKEVYVGLEDSKKSWKVCVRSGRLVVHETSMPAEYENLRNYFRKRFPECQIRVMYEAGFRGFELHDQLVGDGWECVVTPPHMVVQEKCNAQKNDRNDSRRLAKNNENGDYRECHVPDRERRQDRQVSRLYGQLQKDITRVSNRIRKTMDFHGLAGFFPGGAWNKHSYRAAEERLKSLELSESLRFAFNGMFAELRSLRSLQAAVLKQLRVLAHSERYRRATELLASVPGIGLLTAIRLALEWGDMRRFKSKAAFSSFLGLVPSDYSTGEQDHKGHITRQGNRQVRSWLVESAWLALRHDPVLLEKYQRVVSHCGSGKKAIVAVARKLAMRLRAILLSGQPYQVGLLECTKA

SEQ ID NO: 73797 - protein, 330 aa, unidentified
MKNKEFIGIDVSKNVLDIFILSLNFHFTIENNPSGFAKLLEVCFGKIKNKEDIFFCFENTGRYSRLLSIFLQENNLTFSMVNALEIKKSIGLKRGKSDKKDAKTIAVYAWKNRDNIQPSVLHSQQVGQLKQLIHLRDKLIKHRTAYKNAICDLQDCFIEGENDFIRSSQERMIENLNNEIKLVEKQIDMIIQSMPNWNINYQLIQTVKGIGPVLARYIIIYTENFTLFNDPRKFACFAGIAPFEYSSGSSIKGRTRVHPLANKHIKSLLNIAAMGVIQLNGEYKTYYERRTKEGKNKMSTLNIIRNKLIFRIFAVVKRGTPYVDLSKFAA

SEQ ID NO: 73798 - protein, 328 aa, unidentified
MFYLGMDVAKAKLDCCLLLDDTSNKRKTKVISNNKSGIADFMVWIGKQQISPNALHVVMEGTGVYHEQAALALADAGITVSIVNPAQVKDFGRGLAIRTKTDGVDSFVLARYGALLKPAAWTPPAPEARILQALLMRRDAVAQDLQRERNRREKADVTDTPVQIQKSISDSIAFLSRQLAQLQQDIDQHIDLHPGLKEDLSLLQSIPAVGPQVGSNMLAIMHSHNFGSAEQVAAYLGLVPVERQSGSSVLGRARLSKAGPARMRAVLYMAAIVAKRCNPHVKAIYERLLARGKSKMSALGAAMRKLVHLCFGVLKTREPYRHDYVKIG

SEQ ID NO: 73799 - protein, 357 aa, unidentified
MQRNKLSFKGQNIYVGIDVHLKTWHVTTVTESGYKYSFAQHSDARELFDRLNRKFPDAHFVSAYEAGFCGFSAHYALADLGFESIVVHAADIPTTGKEKAMKTDAVDSEKIAWALKRGELTGIYVKDKQYMDDTNLVRLRQRFVADLSRQKNRTKHLLYTQGVTFPERFSKNRTHWSRNFMSWLREEVELLSGEKRSLVLLCDQVENTRRAILAVTREIRRLSTSDKYKENYGLLSSVPGFGLIMSMSMLTELDNDVTRFPNERTFVSMLGLIPTCHDSGEKKAIGEKTNRGSKQLGPLIVEASWVAIQRDKGMGAYYSNCCQSMKPHKAIIKVARKLACRAYAVLKTKTKYKYEQS

SEQ ID NO: 73800 - protein, 412 aa, unidentified
MRIEYERCCGLDVHKKTVVACLLVPDGKGRRQKQTRTFSTMTAGILALADWLTQAGCTHVAMESTGGYWQPIYNLLEGLFTVLVVNAQHSKAVPGRKTDVLDAEWIAELWQHGLLRGSFIPSAAQRAGRELTRYRATLVAERVRHVERLHKVLEGTDIKLAAVATDIVGVSGRRILQALLVGVTDPGQLAELAKGRRRAKRAELAQALRGRIPAHHAFLIAEVLAHVDHLDEAIARVSQEVAERLRPFDDDIARLDPIPGINRRVAEDVLAEIGTDMSRFASARHLASWAGMCPGNNESGGKRHSGQTRHGNPWLRKTLIEAAHAAARCKQGYLAAQYHRLAARRGKKKAVVAVGHTLLGIVYHVLTRHEEYHELGGNYFDERDKQAVTHRLVQRLEKLGYEVSLQPTTIAA

SEQ ID NO: 73801 - protein, 332 aa, unidentified
MYLGIDVHKRYAQVAVMDEAGEIVEEVRVENANLDDLAQRYAGAQAAIEATSNYYHIHDTLSEHLDVTVAHPTKLTQIANTDKKTDRVDAKELARMVRLNSVPESYVPTDEAREARALVRGRQTLVENRTKYANKIHGLLSDHGITEDVKPLSVEGREFLRELSVPTPWDALLESYLELIETLTEEIQRLEATIEERAGSLRETQLLMTIPGVSYYTALAIYAELGEIDRFDGHKEVVSYVGLNPVIRESGGSRIEGSISKRGSDRVRWLLVQAAHTAVHTCNDEYLSRFYGRLASRKNSQKAIVATARKMLVSIYHMLDRDEVYDPPGVSA

SEQ ID NO: 73802 - protein, 319 aa, unidentified
MVVGIDVAKAELVVGVRPTGTGWTAVNDDQGVRDLVTRIQALGPTLIVLEATGGDELLCVAALAAAHLPVVVVNPRQVRDVARATGQLAKTDRIDAEILARFADTVRPEIRTLPTVEAQALDALLTRRRQLLDMLGAERNRLGQVFGSGKKPVTKSLTAHIAFLEKALARADAELDAAIAQSAIWTAQDALLRSVPGVGPILSRTLLADLPELGRLSRREIAKLAGVAPLSRDSGTMRGRRFVQGGRAPVRAVLYMAAMVAARRNPVIKSFYARLVAAGKPKKLALVACMRTLLTVLNVMVRTTTPWNPEFATMSVATA

SEQ ID NO: 73803 - protein, 355 aa, unidentified
MNEHSRTTERETIGVDLGDRESELCVVDGSGEVVARTKAATTKAGLTKSLKRYPGSRVIIEVGTHSPWVSRHLEGLGHEVVVANAARVRRIAEMEDKSDKIDAELLARLGRVDVKILRPIKHRGEQVQRDRGLLRVRDELVRARSSLVTQARGIAKSLGERLPRCDAQNFAKRLGRDELGNLFPGLGTIIKSVAELTQQINVLDGEIEEVSRQRYPETARLRQITGVGPITALTYVVTIEDPNRFARSRDVGPYLGLRPKRRQSGKADPELRISKAGDPYLRRTLVQAAHYILGVHGPDTALRRFGERVKSRGGRSATKRAAVAVARKLAVLLHRLWVSGEKYEPQRGATQAAAA

SEQ ID NO: 73804 - protein, 326 aa, unidentified
MESTKCIGVDVSKDTLDIALYEGNGYEMYKITNEEREIKRFFKPFTKSDPVHVAMEATGIYHKKLLIVLLNLKIKTSVINPLKIKRFSEMKMLRAKTDPVDARLISLYCFEQHPEPYIMPSAEQEEIFALIKAVDDYQKTNTAFQNRLTALYDSGIKNNVIIKNLKKTIDFNNKVIADFEKQIEDLIQKYYPSEFEKLTEIPGVGKKVASTILGCFGRFEHFESAKQAACFIGINPNPRQSGKSVRMGSNISKKGNSYVRKILYMGALSAKKYNKDCEIMYQRFLNNGTRPLEAQVAVAHKLIRQMFAIIKFDRRYQPEYYKNRLT

SEQ ID NO: 73805 - protein, 437 aa, unidentified
MSNKVIFNLDELFISVGIDVGADFSWMSIALPNQQFVGKPYKILHNSIDSLTTAVSKIKEAEELYSLESRIFLESTGIYHYPLFCYLRDKGFNCSVINPIITKNSTNINIRKVHNDRFDSKKAALVGLKPDLKVSLMPSDLALNCRNLCREYYDLMDNRSAYVNKLQGELRMAFPQYLGIFSKVTINTSLTLLETYTSPSAFLKADKQEIIDIIKSTARFGLTYAQNKYNAIIQAATDANQFGYIIDSNIKRIRLYISFIRKYDEEINSILESLHELVDANEDSDFVKQIHLIETFKGAGFLSAVSIMGEIGDFSAFSKPKQLFAYFGLDPAVKQSGKFEGTKVQMSKRGSAIARRVIHTLTLQSISISRNREAKNPVLREYYLKKCDSKPKLVAMGAVSHKVCNMIFAILRDNKPFKIIAPQELSLIHISEPTRRS

SEQ ID NO: 73806 - protein, 334 aa, unidentified
MKSGIVHIGVDVSKEKLDVFVPAQRDGMRPETKEVDNCVAGFREIRELARKAKATVCVEPTGGYELELIAFLHRFGVPVAYADALRVRQFARAEGSLSKNDSIDAALISRFADKIGVRVLEAQEVEAVELKRKARFRQTMMDSRTAMANRLETEIDPEMKALLKEQIRLMGKVIDKAERLCLETVGKDERMNVLRERFTKVGGVGNLTAISILAGLPEIGKLPDAKLNRLVGIAPEEKQSGTKEWQRRIWGGRRDVRNALYMAAVASIIWNSTLGAYYRKKRAEGHPHKWAIVPTMRKLLSLLNRIARDQNFNPRPEPESTKRNANVGRKKKVA

SEQ ID NO: 73807 - protein, 412 aa, unidentified
MSNKVEFEQVIERGCGIDIHKSVLVSTVQGKGIKTETRSFNAFTESIEQLRDWLKSLGITHIAMESTGVYWKPVYNILESDFEIVLVNARHLKNIPGDKTDKKDSQRIAKLLLAGLLKGSFIPPKPIREMRDLTRYKRRLIEQIASEKNRIQKFLEDANIKLSSVVSDMSGATATKIIDAMIEGEGRVEELAKFRHGKMKASEQELMVALTGNLTGHHRFMLKLVKQSIKDKELLISELDKQIDNKLKENEMVLDAELLSTIPGVDKESAAYILSEIGNDMERFPDEQHLASWAGLSPGNNESAGKKKSSKTTHGDKWLKVMIVQCAWAATRTKGTYLRSKYDSLAGRRGKKKALVAVGHKILIAAYFILKNKESYNELGGDYLDKITRVKQIKRHLRRLRELGVDVSQYAA

SEQ ID NO: 73808 - protein, 343 aa, unidentified
MKLHAVGIDLGKTVFHLVGLDSTGRVVIRKKCSRKQLLAFSANLEVKLIGMESCSGSHFLGRALRDQGHEVRLMPAQYVKPYVQTNKSDFLDAEAIAEAVQRPRMRFVPIKTEEQLDLQALHRVRERWVMRRTSVVNQIRSLLLERGLTLPKGRRYVDQMLPRILEDATLRLSDSFRVLLAQLKLELGQVTARVDEVDRVIQKTAKENEDCQRLTEIPGVGPVTATALVAGVGNAGEFRKGRNLSAWMGIVPGEYSTGGKQKLLGISKRGNKYLRTLFIQGARSVLQQRHKQAPGLSEWLAQLLARAHQNVVIVALANKLVRMAWAVLCKKERYRAPVLAVTT

SEQ ID NO: 73809 - protein, 394 aa, unidentified
MKGQESKTRVVIGMDPHKRSVTIEVMDGDEHILGGGRYATDAAGYRSMLDHVRATPNRVWAIEGCNGIGRHIAHRLIADGEQVVDVPPKLSARARVFATGQGRKTDATDAHSVALVGTRMTGLRPVVADEQLEVLRLLVDRRRSLGEEHTRKIAQLHRLLLELIPGGAKVFLSAAQARKLLASVRPRDVVGKTRKRVAMELVVDLEKIYARTKAADKELTELVKATGTRLLDLQGIGPSGAARLLVEVGDITRFPDRGHFASWTGTAPIDASSGDHVRHRLSRGGNRQINRVLHIMAVVQLRNPTEGRAYFDRKKAAGKTSMEAMRCLKRRLSDLVFKTMLDDFTAAQKTDPGGQTGNVSDSSAAGSHSHTGSSDKSLPGPANTQPTTLQPAAP

SEQ ID NO: 73810 - protein, 322 aa, unidentified
MRYIGIDVSKATFVVAYSSDKGGEIRTFNNTTTGIKQFIGALPKDGSIHCVMEATGNYSALLLYMLNVAGITVSMGNPLKVKNFAKAMLSTIKTDKSDARLITLYGEKMNPRPFKVQGEAILRLRQKRTVIRQLTKQITAMSNLRGSLACLPVPDKGATHTVDETIKFLEKKRDRLQSELTDLVEVEFSRQLALLTTIKGIGITLATALIITTGGFTYFQNAKQVSRYLGICPTYEQSGTSVNIRGHINRNGDAYTRGLLYVAAWTASRFNTKCGETYTRLRQNGKPGKLAMIAVANKLVRQAFAVVTHDKEYVDGFVSNRP

SEQ ID NO: 73811 - protein, 355 aa, unidentified
MLADRVDYIIGVDTHKATHTAAVVTPTGAALAHRTVPADADGYLHVYRFAVEQAPGRRVWAIEGTGSYGAGLTTHLLEQGEWVVEVDRPARPARRNGTKTDDLDAVRAAREALGREHLAQPRQRGDREAIRVLVTTRQSAMQARTCAINHLKALVVNAPERLRQQLRALATDQLLARCARLRSHPTQPIEYRATIAALRRTAQRSLALAAEADDLHAELDTLIRRRAPWLLAEPGIGVICAAQLLNAWSHAGRLRSEAAFAMLGGAAPIEASSGKVVRHRLNRSGDRQLNRALHTIVLSRMAYHAETRAYVARRIAEGKTAREIQRCLKRYLARRLFKLLEAPPAHAQKEKIATT

SEQ ID NO: 73812 - protein, 342 aa, unidentified
MLEIAIVGLDLAKNVFQVHGADTEGAPVLRKKLRRTEVLPFFAKLPPCLVGMEACGGAHHWAREVAALGHQVRLIPPAYVKPFVKRGKTDAADAEAICEAVSRKTMRFVPVKSAEQQADAMVLKARELLVRQQTQAINALRAHLHELGIIAGAGVAKVSQLIDIARDPDDPRIPATARVALAAIVGQIDALGQELRRLERTIVAMGKRDPDTQRLTTIPGVGAITAASIKALVPDIGGFRSARHFAAWLGLTPKPHSSGGKERLGHISKMGNPTLRKLLVLGALAMLRRAKNAEPGLEWVARLLARRPGKVVAVALANKTARIVFALLSKGEVYRKPALATA

SEQ ID NO: 73813 - protein, 348 aa, unidentified
MLADQLDYMIGVDPHRDSHALAVVHVISGAIVFEATVAANSAGYGQALEFADQHAAARRAFAVEGTGSFGAGLTRFLSGRGERVLEVGRLRRDRRSGGKTDALDAVRAARSVLTQKRPATPRAGGERQALQALVAAREGSVNAKRAALCQLRDLLITTPEPLRSQLRPLSRARLLQQLAATRPDGRRDPELRGSMLALRSIARRVLQLTVEERQLAREIETITRKLAPQLLDQPGVGPHAAAQLVLSWSHRGRIGSEAAFARLAGAAPIPASSGQTIRYRLDRSGDRKLNRALHMILVTRKRSHPATIAYIERRLQEGKTKREANRCLKRYLARSLYRLLEHGAPLAT

SEQ ID NO: 73814 - protein, 365 aa, unidentified
MKKIAYVGFDYHQNQISIAVMIEGQKDFHDTIRIQNEDKGIKKYMKKLSKEYETKSCYEASSSGYVFQRKMNSWGYACDVIAPSLIPRKKGDRRKNDFRDARDLCRLYAYGLLSIVRPPSEEEESVRALIRCRVAFKKDEKRTKQQINSLLQAHGYRWPYSKWTYQHTKWLSEITLRNRRLQHVLEEYREHLAYLQSRIRHLDQEIEQIAQSEIYTLSVKKLKAFKGIGTLTAMVLIAEITDFRRFPNPGSLMSFLGLIPSENSSGDKQKGGGITKSGNHRCRTMVVESVQHYTKSSFTRAAMRDNLAQVDAHSAQIATKCLKRLHKRYWALTMKGKNRSLAIAAIAREFVGFISAMMQPEPAVA

SEQ ID NO: 73815 - protein, 394 aa, unidentified
MCATSARRFEDSNAARSPLYLAFELGDRHWTLGSTIGLGQRPRRRVIAARALDAVWEEIARAKERFHLPADASVISCYEAGPDGFWLHRALEAHGVTNVVVDASSIEVNRRARRAKADALDVEKLAEMLLRYHAGERRVWHVVRVPSVADEDRRQLERERMSRVQEHTRLINRMRGLLVTQGILLSLRGDVPAALARVRLWDGSAVPPALLRRLTREWQRVETVGAELRALEAERRALLSSRPRQPQTSEDRAARACARRLLQLRSIGPTIAWALTTELFAWRHFRNRRELGAVLGLVPTPYQSGTSHHEQGISRAGNARLRGLAVELAWLWLRHQPQSALSDWYRRRFARGGPRLRRIGIVALARKLVIALWRFVQDGQLPAGAQLKPTGAAA

SEQ ID NO: 73816 - protein, 458 aa, unidentified
MEKRKEVVFEEIRRNVAGIDLAGRADHYVCGPRRENGECEVVSFGTTTPELHRMLSWLKERHVESVAVESTSVYWIPIADLLEANGIEVVLVDTREVRMVPGRKSDVKDCQWLQKLHSCGLLRGAFRPPEAVAAVRSIIREKENVIRMRTQTLQQMQKSLDQMNIRVHHAVSDIDGMTGTAIIKAIVAGERNPATLAALRDRRCKKSEKEIADHLTGTWRDEHLFNLSQAFKHLQFLDERIAEYELKISQMFSSLAGTVDTSGKSPPSIPTIKLTAKKQINVLDVFNISWFMGFDMTSIPGIGYGTAAVIASELGALFGRFPTEHHFASYIGLAPSLGKSAGKNVRQKRLCKNSSRAGTALRMAAATLFRSETELGAYLRSVARHSDKKTAVRATARKMAHMIYRGVRYGKEYIDNGAKAYADRLRKRTVQTVNKLIRSHNIDISELSIALSSLAAAV

SEQ ID NO: 73817 - protein, 390 aa, unidentified
MIVVGVDTHKCSHALCAVHEGTGRVRGSREIKAEESGHLAAVRWARGLDEERVWAIEDCRHVSRRLEQALLAAGERVIRVAPKMMSSSRKGERERGKSDPIDAQAVARAVVKDGVDRFPAAYLDERAMEIRLLFDHREDLVKERTRAQNRLRWHLLELCPELEARLGRGALSASRQLERLDRKLRRLAPSVRLRVAREQLAQIRALTRQADQLEAELAVLISGYRPKLLEEQGCGALTAALMIGRTAGAERFATDACFARQAGSAPIPCSSGQRTQHRLDRGGDRQLNRALHTIAIVRASRDPATREYLARKRAEGKTDKGALRCLKRYLARHFWRLLAEPPLEPEQAATSEQPAAPAEPQPTTPIPERPAPRREVDRASTAPIPMPCIT

SEQ ID NO: 73818 - protein, 407 aa, unidentified
MSYKVAGIDVHKKVLMVVVCEVAEPEPLAQRRRFGTTTSELRRLSQWLREGGVEEAVMESTAQYWKPVWYELEPHLRLQLAQAYSNRAPRGRKHDFKDAERLVRRLVADELRLSFVPTGEQRAWRTLTRMKVQLSREASRLHSQLECLLEEMRLKLSSVISDLLGISGRRILQAIAAGESDPQRLASLGDHHLRCTQEQLIDALSGNPQPLHRQLLALYLERYQLIQQQIEQLNQMTAAAMQAHSEAVTRLAEVPGFGADSAQQVIAEVGVEAATFASAAQLSSWVGTCPGQHESAEQNHSSRSAKGNRYLRRILNQAAHAAVKKNGSHFQAVFRRLLPRLGYKSAIWAIAHRLCRLVWKILHERVRFVEAGSEPSPRAKRQRAQRLLRSLRRLGYQVTINPLTAGA

SEQ ID NO: 73819 - protein, 480 aa, unidentified
MRTGARYVRDVGRTAHGRRVGGHQECPPEWWDLSDRAPAGVGRGGSRVATIGIDIGGRSHALPRCRDGQTRADREVLRVSQSRAGFAALDAWLERQAEPVSLVTMESSGHYWMPLASHLRRRDVPVAVVNPLAAKYFARSRLARTKSDPADARSLAEMGMRDTPPARDPLAGAELRQAARFAMTLVAEQAKVCQRLIRLVELGFPELGELFDDPACRTAREVLRIAPTARAATRRRVATLANANAGPGHRRLGQAKAERLQAAAAESIAVPELYAEVAFEVGLLLDQYDLLEHQIEAADRRVAALLDGATARRLQTIPGVGPSIATTLMAEIGDLQRFTDFDQLLAFAGVHPAERSSGRKGANPETAWHMSKAGNSHLRAAAYRMAVVGSPAQSGHRRPLRPETGRRPVQAERPRPLHAQGAQPRLGHLAQRSELRSQLGLRLAPGSDSRRSRRSGLATSGRTGSTSRSRSGLPITLAAV

SEQ ID NO: 73820 - protein, 421 aa, unidentified
MRGLRSSRVKAVKKDTLIVTVDVGMASNMGYCTTADGRDIKPFKFGNTREGFDKLWSIVVVNKNRFKCNEVIVGYESTGPYAEPFVHYLRSRPATIVQVNPMHTKRVKEINNNSPLKTDEKDPRVIADILRLGHALSVVVPEGDAAYLRRLNNARERHIKERTALLNQLQQLVFIIFPEFKMVIKDIKIKTARSILKHYTTPERIGATNRETLGDEMRKRSSGKFGAEHAGLLISLARDTIGIKEGVAGVAMDIHHILMQLEATDGFVAEIESEMEKTLTRIPYSTRILSMKGLGTVTVAGLIGEVGDFTKFKTQSEIMKLAGFDLYEISSGKRKGQRRISKRGRSLLRKILYYAAISTIRKNGIMHEQYASLTGRGMKRTSALIVIAKKLLRIIHAIVRDDRDYVRDYGSPKRMVIQKAA

SEQ ID NO: 73821 - protein, 430 aa, unidentified
MKSNTQNAKIEAITEKTLVLGIDVGSETHYARAFDYRGVEYSKKPFKFSNTEVGFVTFKAWVLDIKEKHGKDKVIPGMEPTGHYWFNLGKFLQDNEMKPVLVNPHHVKKSKELDDNHPTKNDRKDPKVIAGLVREGRYMIPYLPDGVYADLRTASNIRFQLQAELTRIQNRINRWFNIYFPEYKTVYGKPDAKSGILILKEAPLPEDILTLGIDGVNQIWRDAKLRAVGKARAKTLIEAAEHSVGSKEGAVSARMEIRMLLEDYESRNIRLQEVMGLIEGLVNQIPMAEKLLEIKGVGIKTVSGFLAEVGDIRRFNDPKELQKLAGLALVENSSGKHKGKTTISRRGRKRLRYLLFEVAMSLVAKNPEFRELHNYYTTRRLNPLKKMQSLMAIAAKLLRVFYAILTKNVGYDPKKMVNDIRRPATYAQAA

SEQ ID NO: 73822 - protein, 357 aa, unidentified
MTTATTTPTATILGIDLGRYKSVACVYDRATAAERFHTIDSTPAAVARLFARHPGALVIIEACANAGWVHDLAVAHGLAVKVANTNGEAWKFKHLKRKTDRDDAHRLAELEALGRLPTVVLPDPATRQRRALIAHRQALVGRRTATQNRIRAVFAAQGLPSPRGHRAWTATGLAGLDLQARPLADCGPDELWRGMLHLALADYRHLLALIDQAEMALDRLAAADPASQLLTTAPGVGPRTAEAVAAHLGDPKRFTSGKQVGAFAGLVPRQYQSGESDRKGRITRRGPGVLRKLLVECPWAALRYNAWARATYARLTRGGVTRKKPAIVALARRLLVRLWAMLRDGQPWHADPQPAAP

SEQ ID NO: 73823 - protein, 345 aa, unidentified
MEHHAGLDVSLEETSLCIVDGAGKIIREAKVPSEPEALVDYLSTLEIKVMRVGLEAGPLSQWLHAALTEAGFEVVLLETRHVKAALSAMTVKTDRRDARGIAHLLRMGWYRPVHCKTLPSQEVRAIITARKTLLGKLIDIELSMRGILRGFGLKVGAVTRKSFEVRVRDLMAGHSTLTAIMEGLLNARATLIAEVAKLHRALLKIARADGVCVRLMTVPGVGALTALTFKTAIDDPTRIAKSRDVGPLFGLTPGRYQSGETDIVGKITKVGDVTVRTALFEAANVMLTRSTKRSRLKAWAMDLVKRRGTKRAIVALARKLGVILHRIWVDGSRFRFAQEILPCRR

SEQ ID NO: 73824 - protein, 356 aa, unidentified
MESMPAPAIPVTVGVDTHLDTHVAAVVDQAGRLLDTKAFPASTRGYVALVTWAEHFGPVERIGVEGTGTYGAGLARFARAYGLQVIEVDRPDRSTRRRQGKSDPIDAQAAARATLAGVAATTPKTRDGQVEMIRVLRVARRGALKARVAAAEQLHGVLYSAPEELRQPLLGLKTKTLVELCAAMRPGSLTSPTAATKTTLRTLARRWQQLQTELDQLDRQLQALVTSVAPTLVALPGIGVDTAGQLLVTAGDNPQRLRSEAAFAHLCGTAPIPASSGRTDRHRLNRGGDRHANNALWRIALVRMHCHPPTRAYVERRTKQGLSKLDIMRCLKRYIAREVYQHLTSPPALAPAACPK

SEQ ID NO: 73825 - protein, 359 aa, unidentified
MSQALERVVRVGVDLAKQVIHVHAVSAEGQLLVNRALARERFLAWCAQLPRPCLVVMEACTGAHHWARQLRAMGLQAQLISAEFTAAYRVQGRTGKNDANDAAAICEAASRPHMRFVPVKSTAQQGLMTLHRLREGIKRDRTACINRIRGLLSEFGLVFPKSPQALREGLDEVITTQPQAVDPNGLLGLKLASRQLSGFDGQLAECDRAIGAHARDDQRARAVAQLQGIGPVSASALIAGVGDFSVFRNGPQFAAWLGLTPRQYSSGGVIRLGRITKRGDDYLRTLLIQGAKGAVLTAHKREDAISRWAVQLRARVGWQKAAVAMANKNARIVWALLWRGGRFDAEHAPLSHRLQPSLF

SEQ ID NO: 73826 - protein, 447 aa, unidentified
MNNLPQHLRHINLYAAGIDIGSDRHLVAVPEGCDKPSVRQFGAFTSDLHDIADWLGRCGVTTVAMESTGVYWIPLYELLEQRGFEVKLVDARHVKNVSGRKSDVLDCQWLQQLHTYGLLQGAFRPPDEICVLRSYMRQKEMLIQTSSMHVQHMQKALQQMNLLLHNVVSDITGVTGMKIIKAIIAGERDPNVLALNREKECRNSEQTIAKSLVGNFRDEHLFALKQAVELYETYQAKIAECEAAIVKHLGTQPDITDDQPPKPDKPIRARERIRGGVDVREKLFKMNGVDLFAIPGLAADTLLTLASEVGFDMTPWKTVKHFTSWLGLCPGTKVSGGKALDRRTKRNANRAAQAFRMAASSLSRTQTALGAFYRRIRSRTGGKQAITATAHKLARIYYWMLTKGTPYIEAGQQAYDQMFKERRIKALKKQAHSLGYQLMPRQELGGF

SEQ ID NO: 73827 - protein, 341 aa, unidentified
MKNLFIGVDFSKEKVDVAIIFADGLTETAARVFNEFKTTVSGYKQLVKWVEQNSYGIDSSLWLFCGENTGDYSKGLCNFLYGKGYDMWLENAKSIKDASGLRRLKSDRADASMIAEYAMRNYDKAIMYEPLSESLAQLRELFLYRQMVVRHRCSFQVRRGEKKLTMEKSPIKTMISQSGRHIVSELNKEVEKIDKRIAELIKSDEELTEVFTIVTSVPGIGTQNAVCLMVYTDNFRRFNYDSRKIACYYGIAPFGKDSGTSVHSDPHVHYMANRQIKAMLTQAALAAVNFNPVMARYYMRLVERGKKKQVALNNVKNKLVHLITAMVRNRQLFSPEYKISA

SEQ ID NO: 73828 - protein, 410 aa, unidentified
MEQQVDNVAGLDVHRDSVVACARLGRGEHPRVMKKSFKTTTAGVGELAGWLADLEVTRVVMESTGVYWKCVYYGLEGLFPQLWLVNAHHVKNVPGRKTDMADSEWLADVAAHGMVRPSLVPEPAARELRELTRYRKTQVTVRAQEVQRLDKVLQDAGIKISSVASTVLGKSTRAMIEALIAGERDPAVLADMALTRMRPKIGALSEALVGRFGAHHGAVARAILAHIDFLDANIAALDEEVAARLGPFRAAVELLKTIPGVGQVAAEVFVAETGGDMSRFPSASHLAAWAGLAPANDESAGKHRPAGTRHGARWLRRAFIESAKSASRSRGTYLAAQYRHLAARRGPNKATVAVAHSIVVAAWHMLSTGTRYNDPGPDWHTSRRDPGREVRRLVARLEALGQKVSVSPAA

SEQ ID NO: 73829 - protein, 344 aa, unidentified
MTTIDYIGFDIHKKTISFCAKAPDGAILEEGTIPSLRNRLLAWAKARPRPWMGAMEATLFTGWIYDFLKPLAQELKVAHPPMLKAIAVAKKKNDKVDARMIADLLRCNLLPECYMAPVAIRDLRRVLRYRNLVVRQATRIKNRIAGLLMETGTAYNKERLHGKAYFSELLGSLQEMPPSVVELLKLSRGQLELFAVIQRRLLKGLNEHPDLSERVMRLQTIPGVGEILALSWALEVGEVGRFASIGQAASYCGLTSAQHNSAGTEQRGPISKQRNKHLQTILIEAAKLAPRRNPQLAVVHERELQRGDRNRATLAVARKLVAYLMAVDKGGKRFAMRARTEVAA

SEQ ID NO: 73830 - protein, 341 aa, unidentified
MSIVGAFDVHRRQLTFEYLDTSSGELRRGRVVPADRQHLRQWLARFAGQDDVHFALEGCTGWRYVAEELAAAGITPHLAEPADTAALRGKKRHAKTDKTDTRHLRVHLMAGDLPECWIPPGHVLEARAVVRLYKDLLDERGAWHQRIAATLFHQGVPVIGSMATAEGRAAVEQVDLSPAGRQAVQTGLRQIDRLTGELDVLRRQLGMLSRRQPGCAALRATWFGIGPVTAVAIWAELGDVRRFGNSDDVVRHTGLDITVWSSDDKGPPGRLSRQGPPLLRWALYESAKCAARAAAPDHGYYAAVRDKRTAGLATLSVARKLARRCYHTLRELGEEALAPAA

SEQ ID NO: 73831 - protein, 338 aa, unidentified
MAIVTIGIDLAKNVFAVHGVNEAGKPVLVKPTVARGKLLELIASLPPCTIGMEACSGAHHWARLFMTHGHTVRLMAPKFVAPYRLSGKQGKNDAADAAAICEAVQRPHMRFVPIKTVEQQGQLCIHRVRQGFIEQRTATINRIRGLLSEFGIVLPLKAATIRREAMAHLEDLPGWANTVIGDLLNEVSHLDKHVEQYDQHIEQIAKEDTRTQQLMRLPGVGPTTATAILAMIGNGHEFKCGRQFAAWLGLVPGQYSSGGKARLGHITKAGDSYMRSLLVLGARAVLNSAKNKSDSTSRWAVALAERRGYWRAIVAIAAKNARMAWASLTLGERFAMPA

SEQ ID NO: 73832 - protein, 447 aa, unidentified
MQKKNVKMEVVNPNACGIDIGSRSHFVAIGQGNGDVKEFGVYNEDLHNLTQWLLDNEVKTVAMESTGTYWQNLYATLQAAGLEVILCNGKFTKNIKGKKSDVQDCQWIQKLHTLGLLSGSFLPDEVTEQLRTYCRHRTNLLEQAASTSKKMQKYLRLLNLRLDVVVNDVTGLTGLKIINAICNGENNPEKLASLRNGNCKKSEEEIAKALQTNGRNDYLFTLKHEYLMYLNLQSKITECDVQIEKMLNVQINSDDEKRQHHIEKKVHKRINKNSPKNLDINLLSYQYFEGVDLLAIEGVSYSTVLTLMSEVGNGIHKFETAKQFASWLRLSPNNKISGGKVLSNKIPKGSNRLKIALRNAANAIGNLKNTALSNFFNRISHRKGRVSAISATARKLAVIIWNMVVKKVPYIPQTEYQFLDQKRKKITAMKKLITKFDISTDDLNLHL

SEQ ID NO: 73833 - protein, 368 aa, unidentified
MKKNSIRHQNPSRGEQVRQSITIGMDLGDRTSRYCALDGRGEVREGSVATTPRAMRQKFGSRARCRIAMEVGAHSRWVSRLLRELGHEVFVANARQVRLITHSTRKDDRLDAQTLARLARVDPQLLRPIRHRGEEAQADLTVIRMRAGLLDARTKLVNLVRGTVKGFGERLAKCDADRLGGEHGQALPEPLRETLKPVLEQIESLTERIRQYDVKLEQIARTKYPETELLRQVSGVGILIALTFVLTLEDAARFSRSREVGCYVGLRPKRSESGQRQPQRGISKEGDRYLRKLLVQGAHLIVQRRAPDTDLKRWGLKLAERGGRNAKKRAIVAVARKLAVLLHRLWATAEVYEPLRNSRARERLRTAA

SEQ ID NO: 73834 - protein, 330 aa, unidentified
MYVCMNNEVYVGVDVHEGESQIAVLNKDGELLEEKRLPTCSLTKYLSSINGNKHVAVEAVGFVYPIYDKLKMLNDCTVSVASPSRLQLIAKSKLKNDRVDAIALGELLRTNYLPVSHMIDEQAREKKLLAMERARYARRKARVIVEIKWLLKRRGIKVKGHDDLKELHLPEIDRRLREMELLNSIIDELESAIRETAANDERVKLLDTIPGIAPYSALYLSTMLDDVGRFHDSKQAAAYLGLVPSLYQSGDVCYTGHITKAGDPVLRSILIQCARASIKSDKRLKEFYLRIKHKRGEKKAIIAVARKIVVYAYWILKKNVTYKELILGRN

SEQ ID NO: 73835 - protein, 437 aa, unidentified
MLPCLNPNAAGVDIGATEIYIAVPGDRDPQPVRCFSTFTEDLHAAADWLKGCHIETVAMESTGVYWIPLFQILEARGFTVFLVNAHHVKNVPGRKSDVSDCQWLQYLHAVGLLRGSFRPEQAVCTVRSILRHRDSLVQMASSHVQHMQKALDQMNLQLHHVISDITGVTGVAILEAILAGERNPHTLAALRDRRIKANADTIAKSLVGDYRREHLFTLGQSLEAFRHYQALIAACDREIAQYLEGFESKVDPPPAPPSPAKDRPKPNDSQPRFDLQTHLHRIFGVDLTKVPGINVLTTQTLLAEIGPDFSRFASGPALTSWLGLCPDNRVSGGKVLSVKTREVKNRAATALRMAAQSLYRSQSYLGHYFRRMRAKLGAPKAITATAHKLARIVYHMVTTRQAYDETICAHNEVQNRQRLEARLRKQARELGLQVVAI

SEQ ID NO: 73836 - protein, 314 aa, unidentified
MSACAAGIDVGKNFFDVGMVPTGHNFRVPNAPNGVAIVIARLRRSQIRRVVLEAIGPYGAALIAALRSNGFEVGVVNPRRIKAFRDAEGHRAKTDRLDASLIARFALTMSDVVRPLPSADQLALKALATRRRQLVEIIAMEKTRLKQTIEPLILASHRTAIATLTLERRAIEREIEQRIAQDAALTRRKEILTSIPGIGQQVATVLLTELPELGSIDRRAVASLAGLAPHPNQSGTSQGRSQIAGGRPCVRAALYMAGLASCRANPRARDSYRSMREAGKPAKVAIIAAARKLVILANTLIKSDKTFDSDHAIA

SEQ ID NO: 73837 - protein, 385 aa, unidentified
MKKVSKSTTPELYIGLDVHKSSISIAYADTQGSKPVFHTKTGGTNLCAERHLLGLCKKFGVAKDSLRICYEAGPTGFVLVRRLIKLGYDCIVIAPSKIPTKSGDKVKTDKKDAKKLARLLRAGELEGIHIPAPIDEAIRDLCRARTDAVQARARAKKQLLSFMLRNGMSYTGRTNWTQGHMNYLRKIALPSPVQQIVLEEYIMEIDALEQRVARLLAHMQEQLATWHRKPMVDALMSLRGFQIVTAMTVIAELGDLDRFETPRQLMGYLGIVSAEDSTGERRRQGSITKTGNGHVRWMLVESANAYESKEMVSAALSKRQEGQTREVITLSWRAQTRLCYRRRKLSARNVTRNKVTVAIARELCGFLWELDALVRKQAKPAASAS

SEQ ID NO: 73838 - protein, 312 aa, unidentified
MTELTIGIDISKDHLDAHRLPDGAAKQFANSKAGLTRLIRWIGVEDVARIVFEPTGRYHRALERRLGEAGYPLAKVNPRRAKRFAEVLGVRAKTDRADAEMLARMGAALALEPRPVKPEILHDLNDLQVARRALIKDRTAAKNRAGALRLALLKRQNAARLKRIKADLSQIDDAIAAMIMAEPELKARHAILISIAGISGVTAAAMITLMPELGALEHKQAASLAGLAPVTRQSGNWRGKAFIQGGRAALREALYMPALVACRFNPDLRAKYTQLIQAGKPPKVAITAIMRKLLILANALIRDNRLWEKNHA

SEQ ID NO: 73839 - protein, 358 aa, unidentified
METKIRQISFKNQDIFIGIDSHLKNWKITIMLENTVFKTFSMNPSAKELAMYLKKNFPEGNYFSAYEASFCGYSIHRELEKYGINNIIVNPADIPTTDKERKQKEDKRDSRKIAKTLQNGDLKGIYIPSITTVEFRSLIRYRKTLVKEISRTKNRIKSFLYFQGICIPIELDSASKYWSGKFTKWLYTINFATKYGKLVMCNLIDTAEYLRTNLLKVNRELRSIYSSSTFSNKLKLLCTIPGIALIVAATILSELENIERFGNLDKFCSYIGLVPTTKSSGDKDKVGNITPRANKPLRGILIESAWVAIRNDPALALSFNELCKRMKKNEAIIRIAKKLLNRIRYVMKNETEYVYAVV

SEQ ID NO: 73840 - protein, 414 aa, unidentified
MKEGEKMNKLFVGIDVGSRDNEVYIMLPDGEKHISFSVQNNLGGAQTISDKVVSALTGLNLKDVVIGIEATSVYGDNLMCFLREDGALGQFERKLHILNPKQVKKFKEVHPDLPKNDPVDAFVIADNLRFGRITNAVYMDDYRYKSLQNLTRARFYAVQSLTREKQRFMNYLFMKCSGFAQDKIFSDNYGAAALAVFEEFDSPDDIVNMDVDELAAFISVKGKNRSPRPDEIAKAVQSAARGSYRLPKTVNDSVNQVLAISVSSMRALQSQIKALDKEIERQFVNIPNTLISVPGIGKVFSAGIIAEVGDVNRFGKGQSGLAKYAGLVWNENKSGLFQGQNTRLIKSGNRFLKYYLCEAAYSLVRCDTEFKRYYDLKFKEVNKYQHKRALALTARKLVRLVFRLLKDNRLYKPV

SEQ ID NO: 73841 - protein, 349 aa, unidentified
MSQTLNTAIAVIGIDIGKNSFHVVGLDARGAIVLRQKWSRGQVEARFANMPPCLVGMEACVGAHHLSRKLQGFGHDARLMPAKYVRPYSKGQKNDFRDAEAIAEAVQRPTMKFVATKTADQLDLQALHRVRERLVSQRTGIINQIRAFLLERGIAVRQGQRFLRAELPRILATPSNALSPRILQMIQDLTSDWRRLDERIEGLSGEIEAIARHDIGCERLMSVPGVGPIISSAMVAAIGAGDAFSKGRDFAAWLGLVPRQMSTGDRTILGKISKRGNRYLRVLFVQAAWVVLIKPKSWERYGLKPWLEAAKKRLHHNVLAIALANKLARIAWSVLAYGRDFEASKLRVA

SEQ ID NO: 73842 - protein, 320 aa, unidentified
MASRESLFIGIDVSKQTLDVAFGADPHAPRETIPSTDEGVQLLVTRLQRLQPTLIVLEATGGLERMVFAQLLQAGVPTARVQPRRVRALAHAEGRQAKTDRLDARLLARFAERVRPPHHQATDEQRASLRDLLVRREQLIQMRTAEINRLTAAAPNLRPGIQQHIDWLDQEIRALEQERDNEAERTDEVRRKRELRDSVPGIGAITALNLLLRLPELGTINRTEAAAVVGVAPYANQSGAQHKPRHISGGRRDGRSVLYMATLAATRRRLVRRAFDQRLCQAGKPRKVAIVAAMRKLLTILGAILRQQKPWDPAVHTSAP

SEQ ID NO: 73843 - protein, 320 aa, unidentified
MPAPNDPGRCPTALEAENTLIAVVEMSQSSWLVAAMVPGVGRHPLKKLEADEAALLRLLERWRGEAAKAGRSITRIAVAFEAGRDGFWLARWLRARSVEAHVIHPTSVAVSREHRRAKTDRLDTELLKRSFLGWLRGEPNHCSMATVPTLEEEDAKRPHRERESLVAERTRVVNRMRGCLARLGIRAFRPTLRKAPERLESLRTREGAAVPPNTLAELRRDMARLRFITDQIREVEAARLERLERTPGEKQTAMVRLLARIIGVGVETADMLVREVLSRDLRDRRAVARYAGLTGTPDASGAKRREKGLAKAATRGCAAA

SEQ ID NO: 73844 - protein, 444 aa, unidentified
MGKPQVFDDQEQGRVFERVAAVDVAKASGVVCMRLPHPAQPAGRRSQVWEVPATMHAVTELAGRLAAEGVQKVTLESTSDYWRIWFYVLEEAGLAVQLVNASQARNLPGRPKTDKLDAMWLARLTEMGLLRPSFVPPAEIRVLRGYARARTRLTHDRTRCWARMEKLLEDALIKVSAVASKLTTRSVQDMIRAMISGQRDPQVLAGLARTRMKAKHDALAEALAGLFTDHHAELAQLLLDQIAFLDTQIARLTMLTGEQLASIRAAWGIDADGPTGPSPGAIPLPVISRLDEVPGVGAELAASIISETGLDMTRFPSPGHLASWAGLCGRTIQSGARTRTGKGQGNAWLRGYLGQAAIAAARTNTFLGERYRRLARRRGAARAQVAVARSILIIIWHLLNDPTARYHDLGPGHYQARTDKSRKARNHIRQLEALGYTVTITQAA

SEQ ID NO: 73845 - protein, 279 aa, unidentified
MSIPIVYIGADISKSTIDFRFRDQSFTLPNSPAGFLQLQTRIKPLQVQFRPHLICEATGGYQNALVESLHKHSIPLSVINPRQVRHFARSRGILAKTDRLDARVLADFGAANSPAPQEPIPAHLQRLASLLAARDHLVSSRAVEKTLRDANPALKANADRLDQVAGIDWRGAVGLLGLLPELGTLNRRAIAKLAGLAPLNQDSGQYRGQRHISGGRAPVRRLLYLASLSAIRYNPIFKTFYKKLRAAGKPGKVALIAVARKLLVLLNSALKNPQLSLAN

SEQ ID NO: 73846 - protein, 338 aa, unidentified
MSSVASLSVGLDYHESRVQVCVMDQQGRILINRDVANDWRAVRDAVPAGGRPVRAAVEACCGAASLADELAERAGWSVSLAHPGYVARMKQSPDKTDWGDARLLADLLRVGYLPRVWLAPQEVRELRRVVRFRQQLVSERRDAKLSIRALLRDCRLRSPEGINPWTRRWRAWLKSAELPAQARWVVERQLARLARLDEEVREAERHLEQLVAGDAVVRRLRSAPGVGLVTAATLRAEVGRFDRFGSGKQLARFCGVTPRNASSGQRQADAGLIKAGNPQLRATLIEVAQQLLWRDPRWMAFGARMKKRGKPHNVVVAAVANRWLRRAYHELQPERLAM

SEQ ID NO: 73847 - protein, 366 aa, unidentified
MKKISTMQVFSNEILKDQKLTIGVDLGDRWSFYCILDEAGKIILEQKLPTTPEAMKRTFGKISRSLIALETGTHSPWVSRLLIELGHEVIVAHAQKVQLITKSNRKDDRHDARTLARLARIDPELLGPVRHRSAQAQIHLTVIRARAELVSARTALVNAARGLAKSYGERLPKCGRYQVSEKLAERLSAELRDVLGPLLKEIESLNERVKEYDERMEKIAKEVYPEVSLLQQVKGVGTQIALTYVLTIDDPYRFSKSREVGCFLGLKPGRRDSGESAPQKGISKEGDRYLRTMMVQGAHYILGPFGEDSDLRRWGLKLAERGGKNAKKRAVVAVARKLAILLHRLWVSGEVYEPLRNSQKAVRAVA

SEQ ID NO: 73848 - protein, 436 aa, unidentified
MEEVTDEPLYRDRVCGIDIGKAEVHATIRVPSDTNPERRMSETRAFATTKRGVLALADWLRSWQVPAVVMEATSTYWMGPFFRLEAEGLECVLADAKQVKNLPGRPKRDPSDSSWLAQCFERGAVRACFAATKEFRVIRLHTRYRRDLINERTREKNRAEKLLETAAVKLSSVITDLHGVTGRDIMDHLIAGERDPKVLAQLARTRARAKITELQHALEGAEFFTGHHARLLKTMLERIDQIGAQISDLTAVIEELLAPYEEQLAQAESMPGWGRRSAEDAVAETGADMTRFPTGGHLVSWAGRAPLDKQSGKRKGQARHKKGNTYLGGVLGETAISAGRTQTREGARYRKLARSRGKAKACVAVGNTQLKAYHKLLSSPGMRYEDLGPDYYERRAATRRKITWHMRQIEAEGFDVTLTPREPAPGEGAPSGAQAA

SEQ ID NO: 73849 - protein, 426 aa, unidentified
MRVMHERVAGIDVHKDMIKVGIRGPGHRAWTRTSEVLEYRTFYGVLRAMAADLSKRGITHVVMEASGVYTEPVYYALMEQDFEQVAVINPAHAKALKGHKTDARDALRLAELFECGLLRGSYIPSQALKDLRDLTRYRTKTVQARTSEVQRLAKALESAGIKLDSVVSDLTGKSAGLMIEGLIDGERRGQVLADLAIGRMRTAGKLADLSQALAGRFTEHHAALCRLHRDRIALFSAAVGDLEARIAVKAAPYQRELELLKSIDGFGDAVAHAWLAEIGPAPHEYFASHEKLASWVTLCPGNHMSAGKRRHGRTGDAGTYIKPMLVQAAWSAIKTQGRLQARYHKLVRRFGGPKNPAAVKKAITAIAHTLLKIAYQVLKSGRPYEDLGADFYTQRESPEQRRAYLLRQLEKLSPGCTVTITPAETA

SEQ ID NO: 73850 - protein, 341 aa, unidentified
MPTMIVGPDLAKHVFQVHAVDPAGKVTIRKKLRRSEVLEFFKGLPPSLVGIEACGTAHHWGRELTALGHDVRLMPAGYVKPYVKRGKNDAVDAEAICEAVTRPTMRFVEIKSAEQQSGLMLHRTRELLVRQRTALINSLRGQLAEFELIAPKGVWSIPDLHALAQGATPAVLPDAVRSCVELIMGQIDDLQTRVQTIEKAIRVAHRASEVSMRLQTIPGIGVITASAITATIGDIKVFRSGRHLAAWIGLVPRQSGSGGKVHMGKISKKGDAYLRKLLVLGATAVIRYRRNKPQFAAWINALLQRRPARVVTIAVANKMARIAWGVMSRGETFRQEASAIA

SEQ ID NO: 73851 - protein, 382 aa, unidentified
MSDRVCTRVMVRNAMKEGLPRSHAPRVLEDEGRPHAMLYAGLDLSRKRLDFCLLDELGERVEVGAAPPDADGLRSLTTRVGRFGEPVFAAIESMNGARFVHDRLELAGWRVEIADAVKVKGLAPLACKTDRIDAWVLAELARRDLVPAIWLPDPAVRAERERARFRLHLVRHRTSLKQRVHAVLLAHGKPCPVSDLFGVAGRDLLERLALPEPWLATVAASLQLIDELDQQIGDCERDLHRLGVEHRYVPLLVTVPGIGWVLAYTIAAEIGDISRFATPTKLTGYTGLCPRVYQSGGSDRRGALAKNGPRYLRWALIEATMHASRHPLYRDRYQHTKQRLGRQRGAKVAQIDLARRLAEAIWHMLTRDQPFAPAGAASPLAA

SEQ ID NO: 73852 - protein, 347 aa, unidentified
MIHLKQIYMKKHYQHILGIDVSKKTLDLSLVIDRDKQNVVYEQFENNAKSIRRIGLWLKKYNIEWDRVLVCMEFTGIYNRPMLQFCTLKKIAVWMIMPIEIIRSMGIQRGKNDKIDSKKIAMYAILHHDKIKVWQPVSKNIVLLKDLLALRQRLIKVSKILLQPINELKAIKDKVAAKETEVHCKSSIEQLKKELHKTEARIKKIITEDEVLQKNYNLLLTIPGIGAYTALDLVCYTNNFEYYQEAKQLACYAGTAPFEHSSGTSVRGKTRVSKMANQSLKTNLTLGAWSVIRTKGFLRKYYERKLDEGKAKMLVVNAVRNKLLHIASAVIRNQMPFDRNYSSPLAS

SEQ ID NO: 73853 - protein, 374 aa, unidentified
MRDYSEAFVAFDTSKLRNAVAIADAGRGGEVRFLGEIENSGPATEKLVRKLAARYERLTFCYEAGPTGYGLYRQIEGLDHACIVVAPSLIPKKPGDRVKTNRRDAVNLVKLLRAGELTAVWVPDPRHEAMRDLTRARGAAVEDLRGKRQQVSSFLLRQGRHYSGQKTWTKTHLSWLASQKLEYPEQRIAFEEMLLAVRQAQERIERLEEAIRTAVPDWSLAELVTALMAMRGIDLISATAFLAEIGDLSRFQTPRELMAYLGLVPSEESTGDTIKRGPITKAGNRRARRILVECSWSYQHPPRVGKKKQEKVAAAPRAVREIAWKAQSRLCARYRALTRRGKPKTIAVTAVARELSAFIWAINREIVTARAAAM

SEQ ID NO: 73854 - protein, 339 aa, unidentified
MDGDTGEVFQRRLCPDHGEIVAWLGDLPGPVAVTYEAGPTGFGLARALTAAGIFCEVAAPSKLIRPAGDRVKTDARDAAHLARLLHLGQITAVTVPPASQEAARDVVRAREDCREDLMTARHRVSKLLLRQGIIYSGGKPWTGRHEVWLRAQRFDNPALQLSYEAAFDAMLACVDRRARLDDAITKLAADSEFTPVVHRLGCIRGIATLTAFGLAVEIGDWHRLTGRTIGAYVGLVPSEYSSGETRAQGGVTKTGNGHARRLLVEAAWHHRSPYRPGAELRRRWDLAAPAARARGQSANRRLHTRWVGFDARQKRPVIANVAIARELAGWCWSLAVMPD

SEQ ID NO: 73855 - protein, 412 aa, unidentified
MLRIVYPVCCGLDVHKSFVFACVASTDKEGITTYKNHRFSTFTKGLRELADWLKTNSCSDVCMESTGKYWIPVYNILEHTCKIVLAHPKYVKAIRGKKTDKKDAKWIADIFKHDLVTGSFIPPLDIRQLRDLMRYRTKLTNFNTGEKNRAQNCLTVSNIQLANVVTDVFGKSASDITKHLIENPNDKDFDFRPLLKKSLKQKAEDIGLAIDGDITPEQAEKMKIILSHMESIKFCKANLDSVILNLAEKYISQIELVLTVPGVKNPLSAIAIISEIGVDMSVFMTSKHLCSWAGLTPQNNESAGKKKTTRISRAGAYLKPLLVQISNAVVKSEKHSEIRNRYLSLKKRRGHKKAIIAIARMLLTAIYQMLKKNEPYNAKLYKKSEIIPQNREVSLEQAIFILQRQGYVISKD

SEQ ID NO: 73856 - protein, 374 aa, unidentified
MSDHSEAFVAFDTSKLRNAVAIADPGRVGEVRFLGEIENTGTATAKLVKKLAAKYQRLTFCYEAGPTGYGLYRQIKSLGHECVVVAPSLIPKKAGDRVKTNRRDAVNLAKLLRAGELTAVWVPDRHHEAMRDLTRSREAAVMDLRTKRQQISAFLLRQGLHYLGKTTWTKAHMSWLASQKLEYREQRLAFEEMMLAARQAQERLERLEQAIRTAVPDWSLAEVVTALMAMRGIDLISAAGFLAEIGDLSRFRTPSELMAYLGLVPSEDSTGDTIKRGPITKAGNRRARRILVESSWSYQHPPRVGKEKQEKVAAAPRAVREIAWKAQCRLSGRYRALIRRGKLKTVAVTAVARELAGFIWAISREVTTARVAAK

SEQ ID NO: 73857 - protein, 350 aa, unidentified
MDRYIGLDAHTSSCTVATIGQSGKRLRSQVVETNAKALIEVIRAVPKDRHLCLEEGQHSNWLYEVLSPHVQEIVVALVNESRGPKNDKLDAFGLAEQLRIGAIRTKVYKKRGSFGRLGYRVKAHALLVADSVRVQSRLKALLRSRGVATAGGDVYSTSERDEWLLKLPQSARSLGELLYLEYDHLMELRGRAQTEMIAEARKHDVYRIIQTCPGIGEIRAAQILPVVVTPYRFANKRAFWSYCGLGIVMRSSSDWVRGGDGQWIKAPVQQTRGLNRNFNRPLKGVFKGAATTVIGRAQDEPLYRHHVSLLDGGTKPNLAKLTIARQLAAIVLALWRSMEVYDSKKLGHAI

SEQ ID NO: 73858 - protein, 355 aa, unidentified
MKYYTSTTQFNCGIDLHAHQMYVCLMDRDGKKLVHTNIRNNDFAYFLKLVAPYRHDLTVCAECMFGWYWLADACQGAGLHFVLAHALYLKAIHGGKNKNDRIDSEKLAHLLRTNLIPPAYVYPAAKRPLRALLRQRILYVWRRSELLARIQSHQLAHNRPTLRQTRPNRAPWEQQLLAQEDDPVRQFTLQNDLALIGHYDRQLAILEKELLQLTKQTASRDFTLLQTTPGIGEYLGLTILYEVGDIARFPTVKDFLSYCRLVKGTVASAGKIKGLRGAKLGNPYLRWAFGEAAVIAKRDHALLGPLAQRLEARMNGNKFKANTVLAIKLARAVYFMLKSHTVFDADRLVATLSTN

SEQ ID NO: 73859 - protein, 420 aa, unidentified
MVVGRRWGMEVVAERCAGIDVGKREVQASIRVPDGQGGRRKETRTYSTFTSSVEAMAQWLGDEGVTEVVMESTGSFWKPIWYVLEDRGFELKLVNSRHVKMVPGRKTDVKDAEWLAELLEHGLLRGSFVPPPAIRKLRDLTRYRKRLIQTRADECQRIQKTLEDAGIKLASVATDILGVSGTAMLKALVAGERDPEVLAELAQRRMRGKIPELRQALRGRFSEHHALLIRISLDLVEHLDEAIATLDGEVEALMAPFAEAAARIDTVTGVGQRAAQCVIAEIGVDMSVFPTASHLASWAGCCPGNNITGGKRRSGRTTKGDPWLNEVLNQCAWAAAHSHDTYLSAQFWRLARRIGKKKAAVAVAHSILVIIWHLLTNECDYKDLGGDYFVKRDAARERDRAVNELMRLGYKVTLEEAYVA

SEQ ID NO: 73860 - protein, 353 aa, unidentified
MPVYVGVDFHVKTQTVCWMDTAEGEMHQHRLDHQQEDVAAFYRQWTPPATIGVEASGYAQWFHRLVEEQGHQLRVGDAHAIRQFARRRQKNDRRDAELLLDLLLHGDFPAVHVPAPASQEVLRLLRHRQRLVRMRTALKNSLQAVALNHGLRRGPGLFTGDGRARLAALPLSPAEQWQQRDGIELLDQLQQRLTALDGELESQAAADERVARLRTHPGVGRLTALAIVHTLEPVARFPQSCQVAAYCGLDPQERSSGETVRTGGITKQGNRLLRTLLVEAGWSTIRPGQDAELRRFYFHLAARKSSGVAIVAVARKLALRLYRMLRDQIDYDEFRRRGRDARRARGMTEALRA

SEQ ID NO: 73861 - protein, 374 aa, unidentified
MSPAKHQRTRYVGLDVHSTSITAAVAEGDEPPTSFGSIANEPAAVRKLITRLGGPDIQLRVAYEAGPTGYALHRQLSAMGIECVVIAPSLIPVQPGVKVKTDRRDALKLARLLRSGDLTPIWVPDEAHEALRNLVRARADAKADSLRAKHRLSKFLLRQGRHAPVGRRAWSQTYFQWLRGLQFEQLADRVVFADYLAVVTSADERLKRLEAALRQCSAVASQAALIDALQGLRGIGFLSAVTIVAESGDLRRFATAPQFMAYAGVVPSESSSGNRQHRGRITKTGNALLRHVLGEAAHHARHAPHVSGSLKQRQAQLPQPIVDLSWRAQLRLHHRYRQLGARIGPYRTVTSIARELAGFVWAVGQLQQATPPAA

SEQ ID NO: 73862 - protein, 403 aa, unidentified
MKHVIAFDISMGKSYMVIYNAQKQCVFENEIKHSKPEFEKLQEKIHKLTDKTGELPEIVFESTGIYSRQLERFMQGKQYTYCLLNPLEVKLQCDSLRIHKTDRSDAHRLALTHFTVTRRVSNGTINSFHQLKSLSRWYSELDSELSIIRGRMHKVIQLTFPELERMFTSKSDLLLNFVQLFPHPDCVLSLSKTIIKNRIRANTNKKISNITAEKKAIQIIEIAKTSYPAVSQNDVLCDQLKLYARCYQELLYQKECCINKMVYIAEQRAEYGIILSLTGIGPNTAVRLMAEIGDITRFNNNKQLNAFAGIDIRRFQSGKTFYKDKINKRGNKHLRKPLFLIIQNMIKQRRYGQNHIVEYYDKLKTQPYNKCHKVASIACVNKFLKLLFHLITHDIHYDYRLTA

SEQ ID NO: 73863 - protein, 343 aa, unidentified
MKDTTIAVDIAKDVFEIAVSHEPGVVNEKHRVSRKKFLSFFANRPAATVVMEACGSSHHWGREINKLGHQVVLLPPHVVRPYVQRNKSDQTDAKGMLEAYRNKDIKPVPVKSIEQQSVTALHRVRSSWVASRTASLNMSRGLLRELGIFIPVGARKVVPTVLELVEDADSRLPDAIRNTLHEVSMEIRNYEKRILGVEKQLEALSKQIPTVGLLRTIPGVGLLTSTALVAFIGDIQRFRSSRQFASFLGLTPRLRGSGFAVHLGSISKQGDRYLRSLLTHGARSVLIRAGAMEKPDRLRAWALKVYSRRGHNKATVAIANKLARTVWAVWKHNTEFQSYPKAS

SEQ ID NO: 73864 - protein, 331 aa, unidentified
MDHCAIDLGGRKSQVCVRSPDGQLLFEGPYDTRSLPEFLRLLPRSRVIVETAAEAFRVADAAKEAGHEVRVVPATLVRSLGVGARKTKTDRRDARALSEVSCRIDLPSVHIPSARSREWKAICGMHDALITARTKLINNLRGWLRGQGLRIGKGKAETFAERMMKFRPLPDYVTSQAEALAALTKKIRESDKRIESLAKDELCQRLMTVPGIGPSSAVRFMAAIDEISRFESAHKVESYLGLVPGESSSSERQQRLSITKAGSSSVRWVLGQAAWSLQVRCQNRAARPLQLWAAEIARRRGPRIATVALARKLAGILYALWRDGTKYEQRQ

SEQ ID NO: 73865 - protein, 343 aa, unidentified
MQITTIGLDLAKSVFQVHGIDATGRVVVRKSLRRSQMLPFFAKLPSSLVGMEACGTSHYWARELIKLGHEVRLMPPAYVKPYVKRGKTDAADAEAVCEAVTRPTMRFVPVKSPEQQAALSIHRTRDLLVKQRTQLINMIRGLLAEFGVDIPKGLERALLMARRIVDGKAPDVPIEAAKIVGTLSQQALDTHVRLREIDRDLAIWLRGNDVARRLMTIPGIGPIGATALAASVTDPHQFRSGRQFAAWLGLTPLQKSSGGKERLGRITKMGDKYLRKLLVVGMTALVRRARKNPEGDPRLADLLARKPTRVATVAMANKTARIIWAIMTRGETYHAGHRPALAA

SEQ ID NO: 73866 - protein, 369 aa, unidentified
MKSFAQSRGPIHLGLDVHKLSITAGVLEANATTPVLQRIGSDDAAVRQLISKCGDPGRLRACYEAGPTGFTLARTLKSWGVACDVVAPSRIPKESGDRIKTDKRDAAALAVLHRAGMLTPIHVPAPEIEAVRDLARARHDLDDDLKRVRRRLLALLLRHGHVYRAGTTWTQAHHQWLDALRFSEPAERQTFEYYRSVMAIREQQLAAISTDLRAWLDKPPIGQAAHRLAAYHAVGYLGGLTIAAEVANEWERFAQARSFMAFTGLVPSEHSSGDRRRQGAITKSGNVVIRTQLIESAWHFRGRPVAGKTLQERQSHVGPATVARASVAHQRLAGRYRRLTARGLPPNVINVAIARELAGFMWAEMTSPD

SEQ ID NO: 73867 - protein, 413 aa, unidentified
MQVVYERCCGIDVHKQTVVACVIVPGPDGQTTKETRTFATMSEDLEALASWLAGLNVTHLAMESTGVYWKPVFNLLDGRFQILVVNAEHIKALSGRKTDVQDAEHIADLLRHGLLRGSFIPSQVLRELRDLTRYRTKLGNDRVSEVNRVQKVLEDANIKLASVATDVMGVSGRAMLEQIVQGQTDPAILAELAKGRLREKQDLLQKALSGRVRSHHRFMLAQHLSHIDFLDEAIAQLDQQIAEQMRPFEVALARWDSLPGINRRIAEIVIAELGPDLTPFEDAEHLASWAGMCPGNNESAGKRKSGKTRRGSPWLRRALVEAAQGAARTKNKYYQALYHRLAARRGKQRALMAVGHSLLVTGFYLITRQTKYEDLGGNYFDERDREAVKRRAVKRLEKLGYRVDLSPCAASAG

SEQ ID NO: 73868 - protein, 421 aa, unidentified
MDVHKKTVVACVLVTKQDGQVSQEVRTFGTTTGEILALAEWLKRQEVNSVAMESTGVYWVPVYNLLEGALELLVVNAQHMKAVPGRKTDVSDAEWIAQLHRHGLLRGSFVPPKPQRQLREVVRHRTNVVERRSQSVNELQKVLETANIKLASVVSEITGVSAMEMIRGLIEGKNTAEVLAELARGRLQDKKPQLRAALTGRLEKHHRFILSQLLADISFCEEQILELDLEIRIQMKEYEELIKRLDEIPGVNRRIAEVIVAETGADMSRFGDAAHLVSWAGMCPGNNQSGAKRRTSRVRQGNKSLKRVLVEAAHAAGRKKDSYFSAQYRRLSARRGKKRAKVAVGRSILETTFHMIQRGATYKDLGSDYFDRRDPERLAKRLAERIVRLGYKVSFEPTGKPATGYRLNYEPVHSLDQIKAA

SEQ ID NO: 73869 - protein, 377 aa, unidentified
MKRIIKIGLDVHSTNYTLCAIEPVLGAEDRIFANIQVAPDYKNILYFIANLTTKLGLEDEYSIECGYEAGCLGYSLYNQLTAAGQKCVILAPTTMLTSKGTQVKTDARDARMIALCLAYGGYHPVYIPTQEDDSVKEYLRMRDDHKIALKKIKQQINTFCLRHGHHYTGNNWTNSHVAWLRRLELPALYKETFDEYLASYDEQTAKIERFDKRIEELASEKAYCEKVKKLRCFLGIETHTALSLIVETGDFKRFSKGNIYGAFLGLAPGERSSGAKTRRLGISKAGNSHLRRLLVEAARGICKGKIGHKSKALRSRQSGNTAEVIAYADRANTRLRSKYYRMIRHGKQRNVAVAAIARELACFVWGMMTDNTVVKAA

SEQ ID NO: 73870 - protein, 358 aa, unidentified
MPVYIGVDFHARQQTISYLTTEDGEIQRLRLEHSQEDLRQEGVRRFYAQFTGEVIVGFEAGGYSQWFEAMLERLGHEVWIGDAHEIRLLTKRKQKNDKRDANHILELMVSGRFPRLVRRTAESREVLRQMGYRHKLVKMRTMAKNSLQAIALGAGLSLRSRLHSKRGRATLKELNLTAATACQSDKLIELIDYLTTEIERVETWLIERAKSDERVKLLQTHPGIGLLTSLALVHTLHPVERFSNSRKVTAYVGMDPVEDSSADRKRIGSISKAGSRMVRFLLAEAAQVAIRTDRDLRQLFNRVSKRRNTPKAIVAISRKLLVRSFIMLRDRIDAEEFLRRGVEARSSRIAHRPTMPEP

SEQ ID NO: 73871 - protein, 338 aa, unidentified
MNYVGIDHYRQYSHITWLDETGEVVKSGRVANLRRELQEYLQGARDVKAVIEAGRSSYTMVDVLADLGIETTVAHPKDVKAIAKAKVKTDERDSYKLAHLLRTGYIPEVHKRSRENRSSQRVLRQRAFYVGKQTAVKNLLRALLAQQGEEIRAEVERVENLFTEKGMKVLQGLALPEREAKMVGALLRTYHYLEERINETNGLVKELYEKSPSARLIQTVPGFGIFLAVLVAVEIEDLRRFEDVSKFHAYAGVIPSTHSSGERSWHGKIIKEGNRWLRWAAVEAVRPALRADFDIRCFYDRLKKRKGANSAKVATARRLLTIIYRMLKENRPYIPHKR

SEQ ID NO: 73872 - protein, 336 aa, unidentified
MYSGIDLHSNNSVVAIIDDADRIVAQKRLPNDITKIVGFLARWQDDLAGVVVESTYNWYWLVDGLQDAGLHVHLANTAAIKQYDGLKHSGDETDAQHLAHLLRLGILPTRTILPREHRVVRDLARKRMQLVNCRTTHVLAVENIMARQLGERMTSNQIKQLTADTIDSLPLAADVGLAIKANVAVIATLQSQIEVLEKRLQERVKPRPQYGLLTSIPGIGQTLATVIFLETGPIDRFVDVGNFASYARCVDSVHTSNRKKKGEGNVKNGNRYLAWAFVEAANFARRLCPEAKRFHERKKARTNNIVATKALAHKLARASYHILKEGKPFDATRCFA

SEQ ID NO: 73873 - protein, 316 aa, unidentified
MAKAVCEIIFGIDVAKHELVVYRWDTAQYLTLNNDAAAIGAWLKGLSDPVQLAVEPTSNYHLTLVELAHTAGVSVYLVNPRQLAHYREAVDLRHKSDPDDAWLLARFLLNEGQQLRPFAPHSRQAQALWALIKRRAVVVESRQQLQQSLAELQLAHRALMTQFKTLLARIDQRIQALIAALGWQPDYRRCQSIPGIGPLNAAALVCAYHRGAFAGSDPFIAFLGLDIRRRESGRFRGQRKLTKRGDAELRRLLFCAAQPARSHARFDRYYQTQLDKGHSKIAAKIILARKLARIAFTLMSKQQLFNKSEIAYSKAP

SEQ ID NO: 73874 - protein, 396 aa, unidentified
MYIVGIDIAKRNHEAVVMDGQGSVVKRSFSFANSTAGLEKFLGILSGILQEPSDFTIGMESTSHYWFALFSALKRRGYSIQVLNPIQSNALRGLYIRQVKNDQRDSFIIADVIRFGRYTQGQTPSDDLYALRELCRARVFLVSMAADTKKKVIALLDQVFPEYETIFSKIFGVTSTALLLECATPTEILAIDTEKLAGILGDASNNRFRLKKALEIKELAQNSFGVLLAADTFSLLIKQHMEHVHFIEGQIAALDAKIAELFSRFDTCITTIPGIGLVLGATIFSEIGDISRFSSSAKLAAFAGIDPTVNQSGEFIGTHNHMSKRGSPYLRRALWQAAVTSVHFNPVLKAFHQKKLAEGKPHMNSIGHVTRKLTNIIFAVLRDNRPYVPRTVPLAE

SEQ ID NO: 73875 - protein, 420 aa, unidentified
MHEEPEIFRVYVGIDWATAAHQVCEVTPSGTVLSERAVVHEAESLQALATALIERAGGDAAAVAVGIEVPHGAVVETLLERGLVVFALNPKQLDRFRDRFTVAGAKDDRRDARVLADAVRTDRHAFTRVRLPAAHVVELREETRLHEELRSQWNQVTNRLRQQLARFYPQLLQLGDVDEPWLWALYELAPTPGAAAAVRPARMTRLLRTHRIRRHSAASVLEKLRTPALTVAPGTVEAAQRHIAVLLAQVRLLHRQRQECDRCVATLLTREEVAGAPRPDGPRREHSDLEILLSLPGAGNLVVATMLAEAGEALAARDSTTLRTRSGVAPVTRRSGKMLTVLCRYACNEPLRNACHYWAQSASRWDPRSQQHYARLRAKGHSHGRALRGVADRLQAVLIAMLRDGTLYDAARHGVQCAVA

SEQ ID NO: 73876 - protein, 290 aa, unidentified
MECTINARSDAACFVGNDLHKDTLTVCTIDVKDRAVSCRKISCVAREKVCEFLAGLPRPSVVAIETGGLYRGLWTDAEPIVDQVLVAAARGARALAGRRIKTDREDAFNVTDLLMTGRLPLTRAPPGQVQRLRDWTRHRNGLSRDHAKTLHRVKSIMNRLKRPGPARMDATGLQRYPLSGVERIEAEDLTMLWQHQRRLVEIEQDISASERRIVDLMKAPDFRPLRAILESIPGVGLITAATAIAEIGDFSRFAESKAIGRYAGLTPIGYSSADKNRPGRICKTGSPDPR

SEQ ID NO: 73877 - protein, 445 aa, unidentified
MHNTLLHDKRRMIEGMTIVGIDPAKAKHQAVILDSTGSQRGKTFSFDVTHEGYCETLWGKVRQIVPNCNPQNTAFAIETSCNLWLTLAFYLHSEGYRVVLVSPLTTYHARPMVNHDFSRTDPKDAMLIAANARQGYYDRFVVHEPLHSALHRLSITYDKLRKECAQNRARLRALIEQIFPEFLTIVEPDTQSAMYLLKRYLFPDEFLSLNIAQESDALVAISRHQYGMNSMIQLQRAAHHTIGVVTTAEDRIAERITLDCWLAQIETISANLERIFNELVRCAGQLPEYHILLSLKGVSETTAALFLAEVQDIHRFSHYKQIEKRAGMNLRLSQSGQFVGTRHISHLGNSRLRWLLYSMTEETARWIPEVRIKYLQRQMKVRRHRKNIVASCPQLLKLIMALVKERRTYEIRQDSLARMTVLEQQYAEFKEKRKNKKRAFTEQAA

SEQ ID NO: 73878 - protein, 410 aa, unidentified
MAGELLEQTRFIGLDVHKHYIIAVGVDRDKNLVLGPQRVEIVRLEEWARKRLSAQDAVVLEVTTNAYEVYDALRPLVGSVTMVHPPHVALVTQVQVKTDEKAALALAKLHAVGLLEGIWVPPDDVRDLRSLVADRRKLVGMRTQIKNRLHSVLHRCRVVLPPGGPFSEKNRQWWSSLQLGDLERARISAYLETLDFLEGQIDELEACLARTSGPDPRLPLLIQLPGIGFTIAVTILSAIGPISRFESASKLVGYAGLGARVHDSGQTHRSGRITKSGRRELRAAMVEAAQNAVRSHPYWQEQLARLEPRLGRNKAIVAIARRLLVVVWHVLSEETADRHADPRQVARHLLALAYKLGLKNLPDARSCGDFTRRELDRLGIGQELSCVEWGKRRPGLPACQRSEAVAPNAG

SEQ ID NO: 73879 - protein, 385 aa, unidentified
MDILKYGCGIDMAKEKFDVHLLGINSVMQFQNLGSRTFDNNHSGFKEFQKWVRRFCKQDVPVVYLVEATGSYHENLSMFLYSAGEFISVVLPNKSKRYMECLGLKSKTDGIEAYGLSHMACSQEHRKWKAPTGAMYRLRVITRQIENMASLKTSARNQLEALVYSMERHKDIEKMLEDQIRFYEKQRMVLISKLNEIVKEDPALEKKLGHLVSIKGVGILTAATIVAETNGFELFENSAQLVSYAGYDVVENQSGKREGKTKISKKGNGHIRRILYFPSLNVVTRKVGPFRKFYERISERSKVKMKGYTAVQKKLLVIMYTLWKNEVPFNENHVWSYNKTSGEQEKESSLVSVSKKRSTKKVAPDSSEATQDKHPSINRSMSSLV

SEQ ID NO: 73880 - protein, 387 aa, unidentified
MVMDAVDQPAAPAPRRPWGVAGIDPHKRTFTVAVLDERGGLHGVASFDTSEQGLAVALAWLGEVGFDLDRVGVEGSAWLGNQVATFLAAAGYDVREVQASRTAERRRRRRRAKTDAEDAQAIARETLAHPDLPPAGKQHAPDPDWNELVALRNQRRSLTAQRRRLLNEAESVLVGLPLAVRAVLPATSQVRPRLRALTQGAADQLEPTGADRVHLAWLAASAADIGRLDQRIRQLDQRIPAVLARHCCTLTEEVGIAAVGAMELLVEVGDPTRFTTEARFARWCGAAPMAVSSGEGDGEPERHRLDLGGNRRVNSVLHTMHITQARCYQPAKDYLGGKRAEHKTAREARRAHKRLLANVIIRRMWADHQRRRSPTLNLSKATTPKAA

SEQ ID NO: 73881 - protein, 310 aa, unidentified
MIISHRCVGIDVSKHHLDIFDEAIGASERIANAPHAITELVVRWRCDAFVVFEATGVYDRELREALRQAGIRFSRINPARARDFARAGGQIAKTDPIDARMLAGFARAMQPATEQISTAARSALARLAKRRDQLVLMRAQEKNRRSEADDRTMAQRISRLIEVLDHEISEIEAEISALIKAEPELAEDAQLMRSLPGIGPVACMQLIAQMPELGHIGPKQAAALAGLAPFNVDSGAYRGKRKIGGGRKRVRDALYMAALNAVRRADPFKAFYAKLRQAGKPAKLALIAVARKLLTVLNAMLRDRKAYMPA

SEQ ID NO: 73882 - protein, 450 aa, unidentified
MARRQKSTQNLPVIEPNAAGADVGATQIFVAVPADRDPEPVRCFDTFTTDLEALADWLEACGIRTVVMESTGVYWIPLFQILEKRGIEARLVNARHVKNVPGRKSDVADCQWLQYLHAVGLLRGSFRPNQEICALRSLWRHRDSLIQMASVHLQHMQKALDQMNLQIHHVISDIAGITGLAIIDAILAGERDPKRLADLRDWRIRATEETIMKSLVGDYRDEHLFTLRQSLLAYRHYQQLIAEVDEKVKQLLSALPAQVDPAEQPIPSARNPRKSPWRNEPIGLRGDLYRAFGVDLTQVPGLDSLTVQMLLTEIGPDLSAFPNVAAFASWLRLCPDKRVSGGKVLSSKTGPTKNRAALALRRAAQGLHHSQTFLGEHYRRLRARLGAPKAITAAAHKLARIVYHLLTTRQAYDECIFVEEEKRFQKRRETRIRAQARELGFQLVPVGTVP

SEQ ID NO: 73883 - protein, 425 aa, unidentified
MNEVQKKLLVHGDVIIVGIDVAKHNHWARIYNQIELDVVKPFKFHNSKEGYYRLVAKMEEAKEKARATKVVIGMEPTGHYWKPLAWFLQEQGYTVVIVNPYHVKRRKEEVGNSPTKNDRKDAGIIAKIVKDGNFLHCLLPKGKYAELRNLTVTRRQQRRKLNSALNQLQAILDEYFPELGQVFKNLLGKAAQWVLRNCPFPSLILAHKVEELAEQLKEASNHRVGMKRAQALYQTAQESIAVTEGLTGARHKLNACLDEIAFYQQQIEQTEAAMAEILAGIDIAGNLLSIPGIGLVTIAGFLGEIGDPQNYEHWKQIQKLAGLNLSEQSSGKKDGQSKISKRGRAELRNLLYQASLTLVAKNREIKALYHYFLTRRENPLKKKQALIAIAVKLLRVMYGLARKKENYDPDKVLGDYRRAQLQQAA

SEQ ID NO: 73884 - protein, 423 aa, unidentified
MGRSIGLDVHRDFCEVAVADGGRARSAGRVVTSVEDLELFAASLAGDDRVVLEATGNALAIARLIEPHVGEVVLANARQLKAISHARVKTDKVDARVLADLLAADLIPPVWVGDERVRMLRRLVSRRRGLVKRRTQVKNEVSAVLLRNLKGRAPASDLFGHKGRAWLAAQELPADERLTVDAGLRQLDFLGEELAAIDHLVAVEAQGDEGVRRLLTIPGIDVTTAVTLLAVIGDVRRFPSSRHLVGYLGLHPRVRQSGSGPAHHGRLSKQGSAAARHVLVEAAWMAAASPGPLHAFAARIAARRGRQVAAVAVARKLSVLSWCLLTRGEDYAFARPGVVRRKLRRLELAAGAPRRRSGPQPDPVWNRDNDAAERRLAEQAERAYERLVADRTASPARVGAGATPGRASSWPSKGGAARQATCP

SEQ ID NO: 73885 - protein, 470 aa, unidentified
MVARGKGPIRPATSLPVVHPHAAGIDVGASELYVCVPEDAVSPGESPVRRFGVFTGELDKLVEWLQSCGVKTVAMESTGVYWIPPYQKLEAGGLEVVLANARHLRQVPGRKTDVKDCQWLQRLHSYGMLQGSFRPAEEYCRLRSLMRHRENLVDGCVQQVQYMQKALDLMNVRLHQVVSDLNGETGLRILDAILAGERDPKKLTSLRDERIKRSTPPEMEAALQGDWREEQLFILQQARETYRFVETQLARCDAQIEKVLQQIVVVAERRPSLETPPNPTAAPTPRKKKERRPRKTGHGLKRDLRAELQRICGIDLTRVIGLNVLSVLIIISEIGVNMSRWRSAKAFCSWLGLNPGNRISGGKVLSSRTPHVVNRVSLLLRTLATAVGRSETWLGIFHRRMKARLGPAGANTATARKMACMIYHLLKYQEQYIDVDTLIYAEKIQRIRLNKLRKTAQELGFELLPIKQAA

SEQ ID NO: 73886 - protein, 412 aa, unidentified
MEGETVIAGVDTHKDVHVLCLLDGLGRKIWSGSFGADPEGYDRLAEAIGDPGSCMVVGVEGTASYGAGLTRRLVELGYNVVEVLRPKRDKARPGEGKSDPLDAERAARKAASGRGCSVPKSQDGWVEAVRQLYVARRLAVATSTSCVACAKSMLTTAPSALRERFRGRERPKDLMPLLARGRKAGDALEESVLASLRSVAAVWKEARSQVESLDERIRALLEANAPALLGIEGCGTTTAAALVVAAGDNPGRLKGEAAFSMMCGASPIPASSGKTDRHRLNRGGNRQANWALYEIAIKRMAYDERTRRYVARRTSEGKSRREAIRCLKRYIAREVYRVLMDPNPDGAAPEGPELAKMRKAMRVTQKKAAAELGLSAATLGHLERGKRRSTKLERRYYELLCELERALPQTAS

SEQ ID NO: 73887 - protein, 338 aa, unidentified
MIVIGVDVHKHSVTAVAADEAGRMLAEQTIQVGSDQLLAWAAGLDPQRLWALEDCRRLTRWLERQLLSAGEELVRVPPKLMAPERRHARGRGKSDPIDALAVARAALREPSLGRPRPDEEPFRELKLLVDHRDAIVDERRRAHQWLRWHLHQLDPAFAVPLRMLARKVHLERVSRWLARQEQELQVRLARDLVASCRSLDRVIAELDRELERRTADLAPALLDLPGCGAITAAKLLAEIGPIGRFQSDAQLARHSGVAPLEASSGRIQRHRLDRGGNRQLNAALHRIAITQARIHPGARAYLERKKAEGNSRREALRCLKRLLARVVYQTLKTSAALT

SEQ ID NO: 73888 - protein, 353 aa, unidentified
MPRSTNLSVATMGIDIGKNSFHVVGLDQRGAIVVRQRWTRSQIRARLANMPPCLIGMEACVGAHHLSRRLHSLGHDARLMPAKYVKPYRKGQKNDFRDAEAIAEAVQRPTMKFVATKTADQLDLQALHRVRARLVSQRTGIINQIRAFLLERGIAVRQGLRFLRAQLPEVLGKRTDVLSDRMVHVIEDLAADWRRLDERIQGLSGEIQIVASQDPGCKRLMTVPGIGPIISSAMVAAIGSGAVFSNGRDFGAWLGLVPRQLSTGDRTILGKVSKQGNRYLRVLFVQAAWVVLIKPQIWERYGLKQWITAAKRRLHPNVLAIALANKLARIAWAVLSNDCDFRCEKTDETPRCA

SEQ ID NO: 73889 - protein, 343 aa, unidentified
MEYYAGIDVSLEQSSVCVVDETGKLVREAKVASEPEALVRFFRQLDVRVTRIGLEAGPLSQWLHAGLSAAGFEAVLLETRHVKAALSAMVVKTDRKDARGIAQLLRMGWFRPVHRKSADAQEVRALLVGRKLLQSKLRDVEFSIRGILRGFGLKVGEVSKGRFAARVEELIAGHMMLEAVIGAMLTARAGLHSEFMRLHRRMLAIVRADAVCRRLMTVPGVGALVAVTFKVTVDDPGRFTASKAVGAHFGLTPKKYQSGETEITGGISKVGDAMVRMALYEAANVLLSRTTRFSTLKRWALEVARRRGVKRAKVALARKLASVLHRMWIDESEFRWGKEAPAV

SEQ ID NO: 73890 - protein, 354 aa, unidentified
MTSTKYIGMDVHKESISIAVMNAAGKIVMECVIETKASMILQCIDGLRGDLHVTFEEGTSAAWLYDLLRPHVTELIVCDPRKNASMREDSQNDKIDARRLAELLRIDHLTPVYHGEHGLRTLKELVRSYLTVTKDLARVKTRVKAIYRSWAIPCNGKEVYAACHRAEWLEKINELGVRRRAEFYYQQLDALRVLRQGVRRELLAESKKQKAWKRLCQIPAIGPIRAAVLLGILQTPHRFRAKRPLWKYSGLAIETCSSADHRSINGQLQRSKKDSVRGLNRNCNHDLKNLFKGAAVIASSKPGPFQEFYAALLTKGMRPEMARLTLARKIATIVLIVWKRGVNFDAQHLKPQTA

SEQ ID NO: 73891 - protein, 418 aa, unidentified
MATPAPTAISGREVNRVFCGWDWGSTMHAVCLIDDHGAVINRWMVSHTEDQLMLVFSELAELIGGDVERVPIAIERGEGLVVGLIAGAGHPVWMVEPGAFKAARPRWGSAGAKSDVGDAFLLADYARTDGHRLRRVEPVAEATRNLAALVRARTALVEARTAASNQLWAILAEHWPGAAVVFQKLTSQIALAFLTDYPTPQAAALLGEGRMGLFCRRHSYRGGKSPAELVRRLRAAPASANPLAATILEAIVHGSTAQIRLLNTEITRLERDISGALTAHPKTPLLQTLPRVATVSLAALIAEIGPLLERCENPEQVAALCGASPVTRASGKSRTVGFRYTANKPARVAITGFADNSRHASAWAGDAYRRARARGARHPHAIRIIARGWIRVIWACWTTDTIYDPARHRAEQLLAAAT

SEQ ID NO: 73892 - protein, 346 aa, unidentified
MAYYVGLDVSVKETSICIMDDKGVVAARTDISTDPDLITNFISKHAPDVERVVHESGILAIWLTRELEKRGVPIICIDARLAHKALSGRINKSDQGDAEGLAQLARTGWFTQVHIRSEASERVRVLIGARERLIRMRKDLEGHVRGVLKVFGVCMTSVGTGKLRRDFRDQLAAAADTDPAIALLSETFIPLHKTLCIARDALDDQVRMMARESELARRLMTVPGVGPIVALAYIATLDDEKRFRKSVDVGAFLGLTPKRHQSGEVDWSGKISKCGDCDMRRLLYSAASTLISCTRKPSRLKEWATKLAERKGHKKAAVAASRKIAVLLHCLWRNETVFEPGMGGAS

SEQ ID NO: 73893 - protein, 346 aa, unidentified
MKDVQIIGVDLGKNGCSLVGLDHAGQVVLRRRVRRDGLTALLAKLPSAVVAMEACCGAHHLGRLLVAQGREVRLMSPEYVRPYVKAQKNDDRDAEAIAEAATRPTMRFVALKSEAQLDVQVLHRVRDRLVGQRTSLMNQTRSILLERGLVVAQGRRALLDALQAVEEQGEASKLSGRVRLLLADLLDQWHALDSRIAALDEEFTEMARNDPAARRLATIPGVGVMNATALVAAVGDGRTFSRGRDLAAWLGLVPRQATTGGKPKLLGITKRGSKYLRKLIIQGARAALPSLARSPTPLGAWLRGLLARAHGNKVVVALAAKLIRVAWALLRHGTSWSWAPSQLAAT

SEQ ID NO: 73894 - protein, 356 aa, unidentified
MAKRNTRGRGVTIGLDLGDKWSEGAVLGARGELSERARVRTTQKGFAQAFTGYEGARLVLEVGTHSPWASRSFAARGFEVIVANPRRTRLIAESDKKNDRFDAEQLARLGRIDPDLLSPIVHRGEEAQRDRILLLSRAGMVRARTQLINQARGFAKSLGTRLPSSSSEAFAKRVRAAVSEDLFPGLSTMLKMIEQLTQEIRTMDREVERLCRDRYPETALLRQVSGVGPQTALAFVLTLEDPWRFAKSRSVGAYLGLRPRHRDSGGQRPQLRITKAGDVLLRCLLVSAAQYILGPFGPDTDLRRFGLRLAEHGGKSAKKRAAVAVARKLSVLLHRLWVTGEVYEPIGYGERHEQAA

SEQ ID NO: 73895 - protein, 385 aa, unidentified
MEHQTFIPRDYDVFAGLDVDKRSISVTFTDHQGLLKSLRIPNNVEHLVNHVRKHFPNQRVAFAYEAGPTGYGLYDGLVAQEFRCLIASPSMIPKAPGQRVKTNRLDSVGLSENLRGGQLKGIHVPSPLYRELRHLTQLRDTFVNEMVGMKQRIKSLLLMEGVEFPPAPAGSQWSFMVKDKLRKLPCSSTVRFKLDQLLDSLEFNEKQVLKTTREIRRFCQNDPELSQCIKYMMSVSGIGWIVASQLLARIGDWRELRNIRQLGGFLGLVPTEHSTGERTDRGSITRTGDERLRSKMIQASWSAIRKDAELREFFRLICHRHPRREGPRVAIVAVARKLSVRISVVLMQQRPYVVREKVHSAPLTQEETSPQGTTRRQAEPGDKDS

SEQ ID NO: 73896 - protein, 426 aa, unidentified
MKVVYPVCCGIDVHKSFLIATVITTKAGELTPHYQKKRFSTFNNQILALKNWLLECNCYDVCMESTGKYWVPVSNLLEDVITVTIANPKWVRAVKGNKDDKKDSKWIAELFRMGLVKGSFIPTKDIRVLREFTRYRTRLVSHRSSEKNRLQNAFTVGNVAMDAVVSDMFGVSSKKVRDYLISTKAFDPDHVITLLHGRMKPKGQELIDSIEGYHFSKEQILRIQIIEEHKTYLDNSIDFLDYLLDQMVEPYEPAIQLLETIPGVRRQSAVQIISEIGIDMSQFSTSKRLCCWAGLSPSSHESAGKKKSVRISRAGVYLKPALVQCAHAAVKAKEKNPYYRLKYERIYKRRGKKRAIIAIARMMLTAIYHMLSTGEVWNPTDLYKIDMPDNLVQKQKGKAIKQATKLLILEGLLPDNFVRKESARST

SEQ ID NO: 73897 - protein, 345 aa, unidentified
MPIVGGLDIHRKQITFDYFDTVTGEVRRGQVAPADREHLRGWLARFHGRDDVAFAVEGCTGWRYVAEELAAAGVAAHLAEPADTAFARGRKRHAKTDKTDCRHLRTLLAEGRLPECWIPPGHILECRALLETYHDLRAEHTAWVQRVHAVLFHQGAPALGEGTLRTEQGLAALRAVSAAHLSPAGQLQVGTALEVIAALEARLHLLRHQLLDAARHLAGAKVLAARLYGVGPVTALAMTCWLAGEGRFSSSRKAVRFAGLDVTVWSSDRKGPPGRLSRQGPPVLRWTVYEAGKTHARSSAPDHGYYAAVKDRQNGKRAALSEARKILRQACHILTELGDDALAAT

SEQ ID NO: 73898 - protein, 467 aa, unidentified
MQLRLGIDIACRAPHQASLADERGEFVFTGRRFRTSVEDLEHLWTMLPEGTESGDVTVIMEPTRNAWVPLAAWFRRRGARVVLVPPERSADLRAYYAKHTKTDRLDSRMLARLPLLHPEGLHEEHGLGPGDRLRRATRLHQTLTRRRSQSLARLDAMLEILGPSWLGVFGADLSNKTPLRFLAAGYACPHTVKRLGKARVTRFLYRHSRGRWGEEEAEALLGAAAETLALWADDLEFAELADDIAIEARLALHLGEELKELDERIAIFLAEADPTGILTSVPGIGRVLGGQILGRLGDPNRFRTLAGVRSFSGLVPSLDASGVSGRHGGPTKRGDACLREAVFMAADQARRCDPSLAARYNRLMVEAGKHHTSALCHVAAVLLTRIVACWRAGEHYVIRDVDGTVVDLVEGRRIVAERYTVPADLRAVRRAGGRVEDRRGTDRRSKGSLRAPSTGPSLANATALAGA

SEQ ID NO: 73899 - protein, 408 aa, unidentified
MGEVGRSIGLDVHLEFCEVAIAENGALRSAGRIETTPEALELFARSLGPDDRVALEVTGNAWEIARILEPHVERVIVVSPDDTGIRQARAKTDRLDARTLARLLAAGELEAVWRPDERTRVMRRRLARREQLVRSRSRAKNEIHAVLMRRLKGRPPVSDLFGVRGRRWLGALELPLEEAETIASALRHVEFLDREITAVERLIASDALESGDARRLMTVPGVNVICAATFIAAVGDVRRFRSARALVGYLGLDPRVRQSGSEPARSGRISKQGSASARWALVEAAWSVVHQPGPLRAFYERIRARRGHGIAAVAVARKLAVLFWCLLTRSEDYAHQQPSLTAKKLRLLEIRAGAPTLKGTNTGLFATRQRMRKAERELAQQAEASYKRTVSDWQAAKKTGASVTPGRA

SEQ ID NO: 73900 - protein, 450 aa, unidentified
MGNASGVSRGDRNRNARLARLRSLVPVTNAIVGIDLADAKQMVVVTDHDSKVLARKTFRCRAWDLGAALGWAAERAAAKGFAGVTVACEPTGHRWRVLGQLAADRSMPFVCVQPMLSSWARRSEDLTSDKTDEKDAVLIARLTAQLRCYVPEPVDETWGRLRHLGARREQVIVEMVSQIQQMRALLECVWPAALDTAKQPFRSKTWVAAMSAICERDGGDLDRTRRLGPARFEQAVRREILKRGGQKPSLRIARRLFAALTDPTGVIAHRPGALERVAFLLVDWHTAGDKLTDTEARMISVLGELKLTALATSIPGLSPVGAAAILAETGDPNRFASGRALVKHAGLAPREKLSGTFVGRTKLTGAGRPGLRLAAWRAVWGTQRGNTVYAARYRHLTSREQNKLTATQAQTVIAAAILRQLHAVITTGQAWDPDIATHGTGHRKQMPIAA

SEQ ID NO: 73901 - protein, 342 aa, unidentified
MPNRPLILKIEYHHSRANRLNHKENAMNVIGFDISKDTIDVTLLRTSGQSDYIKIANACEGFEKLNDWIRSKRIRKISISMEATGIYYEEAADYFSAIYQVFVINPLKIKDYSKSQFSHTKTDRADSRLIAEYTKRHLDKLTPFKPSENPTLYKLISLLQQLKQQQNESQNRLHAAKDTFIRATHEEIILLLAKQIDQTAKRIDLMIQQQDSLNTHYKNLQTIPGIGKDTAAILLRHLTDKQFKTANQFVSFAGLSPLIEQSGTSVNKKGRLSRYGHRRLKRALFMPALVAYRIKAFPKLVQNLSHKPKMVVIVALMRKLAKIAYYIHKTQKPFEKMRYQTA

SEQ ID NO: 73902 - protein, 355 aa, unidentified
MDRYIGLDVHATSTTLAVLGPSGRRLKTAVIETNGKALIDALKAIPEPRHVCFEEGTQAEWLFQILKPHAAEVVVAKVENSRGQKSDAKDAFGLAELLRTGKLGTRVFKDVGAFATLRDLSRLYSMLRDDVVRTKNRIKSLYRSRGVATPDGDVYAVKHRTKWLKTLTPGKRLAAEKLYDELDKQSELKDAAEDALVEESHRHPIARILETCPGFGPIRAAQMMAIVVAPHRFRTKRQLWAYCGLGIVTRSSSDWVPGPKKGDWLRAPVQITRGLNLNHNHLAKAILKGAATTVITKRTSELAGDYQRLLMNGTKPNLAKLTIARRIAAILLAVWKTGEEYDPKKHRKQKLSLAS

SEQ ID NO: 73903 - protein, 384 aa, unidentified
MNKHSMIFIGLDTHKEFHEVAYCEEQRGATPVHYGRIPSSKVSVKKLIRQFESKYPGATLHVVYEAGPCGYWIYRLITSLGHRCYVVAPSLIPKKPGERIKTDRRDALKLVRSLKSEDLTPIYVPEPEDEAVRDLSRAREAAMKDLKEAKYQLKALLLRNNIRYEGTANWSKKHLRWLTELILPHPAQQIVLQEQLQTIEERIRRLERLDNELTHHVHQWRYYPVVKAVQAMRGVRLLVAVGVVAELGDLNRFDHPRKLMAYLGLVPSEQSSGGKRHLGAITKAGNGRARRLLIEGAHSYRYPANVSTELQLRQEGLPKDIVDIAWKAQLRLCKRYQRMSKKGKHYNLIITAIAREMAAYIWAIAKEVVLTPVNPKLRLSRVPA

SEQ ID NO: 73904 - protein, 377 aa, unidentified
MFNLPIFVGLDYHQKSIQVCVMNQKRKILANVTVANDPDAVHRVVAPFGSNVHVAIEASTGVANFVDLLIHRFQWFVEPAHPGYVARMKQTPDKSDWTDARLLADLSRAGYVPRVWLAPEHIRDLRALVRHRHGLVEQRKQSKLRLRAELRNHRIVCPHSPWSIKGKDWLLEPENISSLTLRFLLRSHYDTIAHFDKKIREVTEEMSESVMDDPVVQQLLSQPGIGPITAITMRAMIGRFDRFQTGKQLAHFCAVCPRNNSSAGKTTTGGLIKAGDELLRQVLIEAAHRLIRHEGRWRDMALRLRDKGKKTCVIVAAVANRWIRWLFHQMVECKSTPGEASGFLRHGQESTVSLENPSDAGTRRPAAPKGSVQTVLP

SEQ ID NO: 73905 - protein, 411 aa, unidentified
MDIVNARCAGLDVHKATVVAGVRVPGPRPGERRGETKTFATTTRALRELTDWLIGHGVTDVAMESTGVYWRPVYAALEGLAQVVLVNARHVKMVPGRKTDVKDCEWLAQLLECGLLRGSFVPPRAVRDLRDLTRLRKALIRERGHHVNRIEKTLELAQIKIGCVVTDLMGKTGRAILEALSAGIDDPDQLAEYAQGLLRKKRAALREALGGRLTPHYAFLLQQHLSLIDALDAHLATLQARIETAMAPFADTAALVQTMPGVAARAAQAILAETGVDMSCFPTPAHFASWARLCPGNHESAGKRQNTTTGKGATWLRATLQEVAWAAVRSKKSYYRALYHRLKARRGAKKAIVAVQHAMLVALWHMLKHRVAHHDLGADYFERRNTARIRRHHIRRLEQLGYDVVITDKAA

SEQ ID NO: 73906 - protein, 457 aa, unidentified
MLKIPQSTIRLLTGRLVKILLNREVSTMKSNTQNAKIEAITEKTLVLGIDIGSETHYARAFDHRGIEYSKKPFKFSNTEVGFVTFKEWILDLKERHEKDKVVPGMEPTGHYWFNLGKFLQDNEMKPVLVNPHHVKKTKELDDNNPTKNDRKDPKVIAGLVREGRYMIPYLPDGVYADLRTASNLRFQLQAELTRIQNRISRWFNIYFPEYKTVYGKPDAKSGMLILKEAPLPEDILTLGIDGVNQIWRDAKMRAVGKARAKTLIEAAGHSVGSKEGAVSARMEIRMLLEDYESRNIRLQEVMTLIEELVNQIPMAEKLLEIKGVGIKTVSGFLAEVGDISRFNTPKELQKLAGLALVEKSSGKHKGKTTISRRGRKRLRYLLFEVAMSLVAKNPEFRELHNYYTTRRLNPLKKMQSLMAVAAKLIRVFYAILTKGVDYDPKKMVGDIRRPVVYLPAA

SEQ ID NO: 73907 - protein, 441 aa, unidentified
MSEYFLGIDVSKGYADFILLDNKKNIIEKNFQLDDTFEGHHHLYSFLSSFIANTPDAYIITAVESTGGYENNWVNLLLKLQEDLPVSVARLNPFGVSHSSKADLKRVITDKISALCIAEYLINHRSKVSFAQEDYFAPLRKQWIFIKLLVKQKVQLYNQLESLLYSVNPEVLIFCKYGKSKWVLQLLKRYPSANSLSKASISTLTKIPYITSEKASTLINKAKSSVASVTDKVSSSLLKAVVGQILSLDKSIAEQVKLLEKSCSLPEVELLKSFTGIGTYSAVGLMLEIRTVERFPSAKKLASFFGLHPVYKLSGDGIGGIHMSKKGRKEPRLILFNIARTAITYNPLIKEIYQKHLKSGMTGLAAIGVVMHKILRIIYGMLKHNSEFNAEIDKLNSEKTIKPVIKPLVLKHRRYQSFDSSAPISRKQNRKREEQMKSHNG

SEQ ID NO: 73908 - protein, 405 aa, unidentified
MNAVGIDVSKGKSMVAALRPWGEVALTPREFLHTEVELESLAYLILGLGEDTRVIMEATGRYHEPVAAALHEMGIYVSVLNPILIKQSGGGSVRKVKTDRKDALKIAKYGLDNWEKLREHTPMDTVRQQLKLFSRQYNLYMKTVVSLQNNLISLLDKTFPGANELFTSPERADGRRKWVDFVMTFWHCDCITRVSERAFTERYQKWCKRKGYNFSAEKAEEVYASSAGHFTTLPKNDNTKLLITSAAAELTASSKVLATIRAEMIRLARLLPEWETVLLMYGVGEITGAQLMAEIGDVRRFPNRGSIVAFAGIDPEVNQSGKQEQKSSPATKRGSPHLRKTLYQVVCTYLKRSPADEPVYQFLDKKRTEGKPYYVYMTAAANKFLRIYHARVKECLNALDNNCEP

SEQ ID NO: 73909 - protein, 346 aa, unidentified
MQKNKEYVGVDVSKESLDMVVYSTGETRSFGNDDAGIAKATTWLKQVNSAIIVMEATGGMEVSLYIALQEANLPVAVINPRQIRDFAKSMGILAKTDKVDAKVLARYAATIQPEARPLPDEEARQVNTLVTRRCQLVEMITAESNRATIIRNKTMKQRIHAHIDWLKQELAGIDKDISQMIKENPVWHAKDELLQSVPGVGPVLSATLIAELSELGILNRKKIAALVGVAPFNRDSGKHRGERSIWGGRCRVRQHLYMATLSAVRFNPTIRIFYERLLANGKEKKVALTACMHKLLIILNVMLKHNSYWSCNYAIFNNTCIPDAKTVAYTMLDFINICIPDAKTVA

SEQ ID NO: 73910 - protein, 362 aa, unidentified
MSYRIAGVDVHKKMLAVVVSNVEIESEFQFERRMFGSNPEQLRSLAAWLVEQEAEEVVMESTAQYWKPVWGALERYWKPICEKREGARRKSGTLHLAQALSNRGRRGRKRDFVDAERLVKRLVARELVLSFVPDAEQRLWRTVTRKKYQLRCDRVRLQNQVESLLEEAHIKLSSLVADLLGVSARRMLKALADGETNPAALAALADERLRATPEQLCDALGACRELNPVYRQLLKMALEELRLIDEQIGQLDQQMASLLSQHQDAVERLAEVPGLGVDSAQQITAEVGPTAATFPSEKCLSSWVGACPGDDESAGVNYSHRSPKGNRHMRRLLNQAANAAARTKGSIFEIVYRRSVPRLGHN

SEQ ID NO: 73911 - protein, 410 aa, unidentified
MEVILGCCAGLDVHKDSVEACVRRTSAGGKVGHEVRHWGTTTRELAEMSDWLSSLGVTHVAVESTGVYWKPIFNILEERFEILLANAHHLKNVPGRKTDIRDCQWIAQLLQHGLLKGSFIPPRSQRELRDLTRQRTQLVDEASRISNRIQKVLEDANVKLGSVASNVVGASGRLMLEAIVAGQDDPVQLADLALRRLREKIPQLEQALYGKLTEHHRWMLRLLLDQLKATEQFIARLDERIAELARPLQPVLEKLDAIPGVDRRVAEVLMAEIGPDMTPFPTDAHLASWAGISPGNNESAGKKRSGKTTKGSRWLRQALVQAAWAASHKKDSYFQAHARNLMHRRGRKRGLVAVAHSLLIVIYHMLKEATAYRDLGTQFLDQLRAKHLIQFHVRKLQSLGLQVDLAPKTA

SEQ ID NO: 73912 - protein, 429 aa, unidentified
MYVVDRIRIENFRQLKREIRGSADHLIVGIDVGKENHHSFFGTSTGKTLLKKLVFSNDMDGFSKLLTYVEAVKVKHNLKHEVFGVEPTANYHKPLGEYLIRCGLDVVLVAGTAVKKNRELLDGRWDKNDTKDSANVADLISQGKFLYYDYPCMPLRDLRNLLSFKRGLKKHEHRIRVRIRNHLLAEYFPEIDRYFGRISNWNLAIVKWCLSPAVIAGLAYEEFVQMVAPGKRTVGQEEKLHHIWKTAEKSVGCDAGETLQFEAQMIVDELQKIREAISEVDRKIEDVCLDFPEYRFLLTIPGFGKDIASKVLGAIGNPFRFSSRRQVLKLAGWDLSANRSGKRSEQVVPVISKKGKADLRYALYQAAMVASSRNQHFVAYFTEKLRGRSREKGIRTKMRVKLAAKLLVIAWTLMKKEEPFNPEYLNMPA

SEQ ID NO: 73913 - protein, 417 aa, unidentified
MVNDVQWFVGIDWATQSHCVCLLDAEGRRVGEREFAHGGAGLTELRNWLLEKTRAVPGQIAVAIEMPHGPVVEMLLEHGFVVFAINPKQLDRFRDRFTVAGAKDDRRDAHVLAGSLRTDRAAFRQLAADNPVVIELREWSRMADELQQERTCLANRLRQQLWRYYPQAAKLTDDVADDWFLALWQKVPTPDSAAKASEKAIARVLSAYRIRRLDAATVLSILREPPLFVAPGTTEAACAHIRSLAARLHLVNQQIREAQHSLDRLCAELEGEENPSGQSCEQCDVTILRSWPGIGRINLATLLAEAAEPLRRRDYHALRALAGVAPVTRQSGKQRFVTRRLACNRRLQTAVHHWSRVAIQHDATARRRYDALRQRGHGHARALRSVGDRLLYALCTALKRHTPYDPNHKNVPMTSKG

SEQ ID NO: 73914 - protein, 381 aa, unidentified
MKNRSDLNQSYAAFDQASTIVSVVELSSKNWLAAATVPGVKRQPRKNLSCNPHGLLPQIERWRAEAVKAGHEIKRIVVAFEAGRDGAWLARFLRDHGIEAYVIHAASIPVPREHKRPKTDRLDTEMLMRALLGWLRGEPRHCRMVQIQTLEQEDAKRPSREHDSLVRERTSLINRMKSMLVMLGITDFNIKLVNLRTPEGEPVPPNTLAELYRDLERLAMVRKHIKAIEEARLKRLKEKPNHGANPLVLMLAKIFGLGLETADLLVHEVLARNLRDHRAVGRYGGLTGSPDESGKTRREQGLAKAGNWRVRHSSLQLAWRWLKHQKDSALAQWYRERTAGGGDIIRKKMIVALARKILVALWRYVTTGELPAGVVLKPVAI

SEQ ID NO: 73915 - protein, 429 aa, unidentified
MSSLFISVGIDIGADFSYMSVALPNQTLVGKPFKIVHNNLKSLEKAVSTIEEAEKLHSMKSRIVMESTGIYHYPLFCYLRDKGFCVVVINPIISKNSTNLNIRKVENDKFSSKKLALIGLKPDLKTSVTPSDAVLDLRNLVREYYNLMDCRCAYVNKLRGILKVSFPGYSGIFSKVTTQTSLALLEKYPSPADFLSARKSVVVNIISKTARFGKAYAETKYQAIIEAAKSAGVFGHFVSSNSIQIRLYISFIRKYDEQIKDVLASMHYLVDEYADELFVRQIRLIETIPGAGFLSAVTVICEIGDFSVFKSPKQLFAYFGLDPAVKQSGNFTGTNVKMSKRGSAVARRAIFTIAVVGIGISRNGIANNPTLRDYYILKCKSKVKMVALGAVMHKVCNIIFALLRDHKSFSLISKDDHIRLYQANLISAT

SEQ ID NO: 73916 - protein, 457 aa, unidentified
MTGTNKPVQSRAMSPIHPRAAAIDVGAKMHVAAVGPDRASEPVRTFGTFTDDLNRLADWFQECGIETIAMESTGVYWIPVFEILEQRGFEVVLVNARDAKHVPGRKTDVSDAQWLQRLHEFGLLRASFFPKGEIAALRAYLRQRERLVELSATHIQHMQKALMQMNVQVHHVVSDIMGVTGLRILRAIVAGERDPGVLAANRDRRCHADVETIQRALTGNWRAEHLFALEQALALYDACQEKVTDCDRKIEATLKRIEAQSAKPVGKPPPARSTKRQPNALDFDVRTALHAVLGVDLTQIHGLGPYLALKLVGECGTDLSAWPNAKHFTSWLGLAPSNKISGGKVLSSRTRRSSNRAASLLRLAAVTVGRTDTALGAFFRRLSGRVGKAKAVTATARKIAVLFYNTLRHGMDYADPGASYYEERYRQRVLTNLQRRAKSLGYVLQQADAAPATNGVS

SEQ ID NO: 73917 - protein, 410 aa, unidentified
MEVLHAHCAGLDVHKESVVACVRHMADSKVTTSVKTFKTTTQELIALSNWLSAEGATHIAMEATGVYWKPVWHILADGEFELVLANAAHVKNVPGRKTDVNDAMWLTDLLAHGLIRASFVPGEPTQQMRDLLRTRKQMVRERSSHVQRIQKTLEDANIKLDSVVTDILGLSGRRIIEALIAGQTMPQALASLAHRRIHASADELEAALRGRVTRHHRFLLKLHLDQIDALDAALARIDEEVGANVEPFRTAVEMLSTIPGISTLSAEVIVAEIGIDMSHFETAGHLISWAGLCPKNDESAGKRRSNRMKKGAPWLKTTLIQCAWAASRKKNSYLQAQYLRIRSRRGAKKAIGAVAASMLTAAYHMLKDGTLYQDLGADHFDNRAKGKHVLRLVNRLQNLGFDVQITPLAA

SEQ ID NO: 73918 - protein, 353 aa, unidentified
MRTYYVGMDVHLASIVIVVLNGAGKVVMESVLETGAERVRGFLKQLRGKVYVTFEEGTQANWLHEVVRPLVTEVVVCDPRHNKLLQSGNKNDRVDAKKLAELLRNGALKAVYHGDNGVRTLKELVRTYDCLVSDSTRVMNRLKAIFRGRAIACGGHEIYRQDGRGQWLEKLREPGAKQRAGFLYEQLAALKPLRRKAKLAMVKEVRRQTAYLWLMSVPKLGSVSVAQLIAVVGTPHRFRSKQQFWSYVGLAVVTRSTADHEVVAGVLRRSQRPVSTRGLNRNHNHLLKRVFKNAATSACHSGPFKAGYDLRVARGMAPSLARLTIARQLAATTLAIWKRGEQFDPERKKQQAA

SEQ ID NO: 73919 - protein, 412 aa, unidentified
MNIVYERCAGLDVHKRSVTACASTPDAKGQRHKEHESFSTMTPDVLRLRQWLTTRGVTHVALESTGVYWQPIYALLEGHFELLLVNAQHIKAVPGRKTDTKDAEWLADLLQHGLLRPSFVPPPSQRQVRELTRYRTSLIEERSRAVNRLQKILEGANIKLASVASDLMGVSARAMLEALLHGDVDPSTLAQLARGRMRSKRDLLTQALQGRFTAHHRFLIREQLAHIDGLDETIAHLSGEIAERLQPFEAQLTRLETIPGIKRRLAEVLLAEIGADMSRFPSARHLASWAGMCPGNNESAGKRLSGRTRKGSPWLRTALVEAAHAAIHTKECYLSAQYHRLVIRRGGKKATIAVGHTLLVIVYHVLADEKDYEELGGNYFDEWDRLAVQKRLVRRLEKLGYEVTLIPAEPAV

SEQ ID NO: 73920 - protein, 348 aa, unidentified
MYDSKDIILAVDYHDENLVIRQFNCHTGQERLLKYRTTSRNIRKIVSDSADDAAQVGGHVFWIMESTTGWARAKKAIGPLATMLVANVLQMPLPPKAYRRKTDKIDTGRILREYLNGSLPMAFQPSIELRQIRRLVATRESLVSRRTALRNWINRYLAHETWRSRAGLWSAKGMRNLKRFAASVEGPDKVVLSVKLKELEHLLELQTTVEAEMLAIYKQWPQAQWIDEIPGIAEISAVSILARIGPIERFDSPEELISFAGLAPGIQQSDGTKREGRIGGGGTDKHLRHYLIEATFWARRVQRYRPTYERMLDKRGPKIARVVVARMMLRSIHKMLRARVHFNPLRAA

SEQ ID NO: 73921 - protein, 436 aa, unidentified
MDQVIIGVDPHKLSVTIEARDSREVLRSTGRFGTDTAGYRQLLRAARQWPQRVWAVEGANGIGRPVAQRLLADGERVLDVPAKLAARARVSGTGQGRKTDATDAHAIVMVALRDTGLRELSSDPELMVLRLLCDRRDEISRARAQALNRMHRLFLELVPGGAPVKKTTSQYKSLLARVRPRDLAGKTRRRMAAEELADLARYDAKLKTMKAELKATVQARGSRLMDIHGIGPAGAARILADVGDVARFPDRNHFASWTGTAPIDASSGEHTRHRLSRAGNRRLNHVLYMAGIVQLRNDTPGRAYYRRKVQQSKTSMEAMRCLRRRLSDVVYRQLVADAARTAALDQAGPGGHSGTTLKSSATDLTPDIGSSDQPFPGPAPSTLPPPPPARNPARPGTGAIPRRRAGGVNVERPTGRTTLTPTSAGAHSKGLPDPPP

SEQ ID NO: 73922 - protein, 370 aa, unidentified
MQFIGVDLHTNKFTCCYRDEKSPTEGKRGKTTETFELTSYGLAQFSKTLTPETYVLVEATITTFCFARLIQPLVKEVLVANTYELKQISLARKNTDKIDADILCRIIKMQVLSGEKAISAVTIPPLVIQELRGFFTDYRLLKKQTTQIKNRIHSVLKEKLYGFTQEEIFDRKSRKKLREMKEDPVLSFQLDLHFTHLEQVETLIDTLEDKIKERAEPFMREIEILTSMKGVSVFIAIAIIADIIKVDRFKNSKAFTSYLRSAPRVSNSNTSVSIRGTNKKGRKTSATLLTQSLNHVLDASKKLNTWYTRLTVYKKKGLVRTGLRRRVFAEIYQMLKKGEYHYGREAQKHEAKMLQYRRFLKKRKILLETA

SEQ ID NO: 73923 - protein, 316 aa, unidentified
MVPSPLFVGIDVAKATLDIAVRPTAETWSVSNDATGIDALVLRLGAWAPTLIVLEATGGYQGPLVAALVAAALPVVVVNPRHIRAFAQAVGILAKTDRIDARVIAHFAEAVKPAPRPLPDAETQALRALLVRRRQLVEMVSAERARLDTVPPRIQDAIQAHIAWLTTQIAGLDDALTRASQTHPVWQAKDDVLQSIPGVGPVLARTMLGQVPELGTLGPKPLAALIGVAPFNRDSGTLRGRRPVYGGRAEVRAVLSMGALVATRHNPVIKTFYERLLAAGKAKKVALTACMHKLLTIMNAMVRDLKPWQPQEVPSA

SEQ ID NO: 73924 - protein, 359 aa, unidentified
MNKCSTEKKKIYVGFDVSEKTIEIFAVCGTETSKGSCKIDNNHDAIKKFLSIFKDPSRVCVVMETGTHSLWMSELIEKLGFEVIVAHARDLALIYRSDKKNDQLDAEKLARLAQADRKLLHPVKHMTLERQTDLTVLKARDLVVRQRTQLINTIRGLLRAAGHKLIEEEYSTRTIKKCCSALPEYMRPAIMPLLQQICYLDLAIKEYDRLVRKLCKKYPATKILQQITGVGELTSLAFVLIVGDPNRFDNAARLCAYLGVVPKQDQSGDTDKQLGITKKGNKLGRKLLIQAAHYILGPFGTDSELRSYGLRIQARGGKIAKKKSYVAVARKLVTVMLALWKNPDIEYDPNFKATRKLHK

SEQ ID NO: 73925 - protein, 348 aa, unidentified
MKTLYCGLELGSSKCQFSLVNEAKEEVLNESIPTSEYQLTAFLGSLQKEGERVKVHMESGELVQWVRGIIMENTNIDIEDVIVGDSKKNSWIAKDPHKKDRIDAYKLAELLRLGRTHPVYYSNDKNILQFKKQVQHHESLTKEVGRIKNQIKAALRRVGIIIKSNAAYSKKNRQEILRSIENPIYRQSVGDMYELLENAEKLAKKAKKRVMKMSENWPIIEYFMEVPGVGPILACRFVAYVQTPWRFSSKEKLWAYSRLGLTDRSSDGKPLGSKRLDKNGIGTLKDLSRRVFETAKKKNDNNAFKRAYYRYLNKTHNEMHARLSVQRKVLTVLWTMWRKNERYDDRRG

SEQ ID NO: 73926 - protein, 452 aa, unidentified
METKKQISLEVVNSNAAGIDIGSRSHWVAVGQNAEDVKEFGVYSQDQLEMCHWLHSNGVTSIAMESTGTYWQNLFSTLVGQGFDVILVNGRQTKNIKGKKTDIKDCQWIQKLHSLGLLSASFLPDSDTDTIRTYSRHRQNLLKQSASCTRRMQKYLRLMNMRLEVVVRDIVGLTGSCIIEAFLNGEYRGEELAKLRHYNCRKSEEEIAKALQFNGRKDYLFALQQEWDSYKHLQQQIMDTDLQIDRLLKEFIEKDDHKKQHTIEKKKHKRKNKNAVSQTDMNLIAYQYFEGIDLMAIEGVSEGLIMALIAEVGLDGIRKFPTAKQFTAWLRLAPNNKISGGKVLSNHIPKGSSRLKTAFRNTANAIGNLKEGWLAEFFKRLSYKKGRATAVSALARKLAVIIWNMLVKRKGYNPPSQYLFLDEKRKIAAAKRIQKQITKFGLTNKDIEFKTT

SEQ ID NO: 73927 - protein, 369 aa, unidentified
MDDITFVGLDVHKATVCIAIAQGSRGGEVRQLGVFENRPEILSKVVSRLSKGGRRLSFCYEAGPCGYGLHRLLTGHGHECIVVAPSLIPMKAGDRVKTDRRDALMLAKLHRAGELTAVWIPDAAHEAMRDLVRARATAVRVLVKARQHLQGFLLRHERIYRGARTWTLAYRRWLSTVRFEHPAQQIVLQDYIHAVQEAETRRDRLTQQIEELLPNWSMAPVVTALQSMRGVALIVAVTVVAEVGDFRRFANPRQLMAYLGLVPSEHSSGSSVRRGGITKAGNALARRVLIEGAWTYRMSARVSCKLHNRLEGLPAAVRDIAWKAQLRLCARYRRLAATGRPKVVVTTAIAREMVGFIWAIARLAQPALV

SEQ ID NO: 73928 - protein, 351 aa, unidentified
MGMLADEVDYVIGVDTHRDQHTLAVIAAPAGAVLAQAVLGANTRGYSAALRFAAKHAAGVRVWAIEGAGHYGAGLTRYLAERGETVIEVGRHARSERRLRGKDDPLDAIRAARAGLAAETLTLPRSGQRQEALRVLLLARRSAVDVRRVALVQLRSVIVTAPEHLRDELRRLAVTQLIRHCSRFRRSHSRTADELAIVLALRSLARRIEAATTEANELEHEILGHVRALAPQLLDEPGVGPIVAAQLIVSWSHHDRVRSEAAFARLAGVAPLPASSGKTIRHRLSRGGDRQLNRALHTVILHRRQHDPATRDYIARRVADGKTTREATRILKRYLARHLYRVMQNAAPMTA

SEQ ID NO: 73929 - protein, 346 aa, unidentified
MMIIGCDFHPSWEQVAWLDTETGETGERRLVHADGDAERFYRQLPAPVLIGMEATGNSHWLVDLLSELGHVLWVGDAAQIRASYVRQQKTDKRDAAHILKLLVEGRFPRIWMASSEVRDLRQLLVHRYKLVIIRARVKNELQHLCLNKGVQRKRKLWTKAGQQVLRELPLKPWAGRRREDLLSLMAMLDQQIEPLDEAVKAEAQRDKMALLLQTQPGVGPITALAYVLTIGDVGRFPRGKQVASYLGLIPREHSSGGRQHLGAITKQGNRMLRMLLVEAATTAVRLDPEFRKEYLHRCHQKPKAVAKVAAARKLAVRLYWMLRTKVAYPEVVRIESSPRVRLVGAN

SEQ ID NO: 73930 - protein, 423 aa, unidentified
MIKLKYSICCGLDVHKNVIVATIVTTNKDGISEYLQKSFSTINSDIQRFHNWLIENNCYHVCMESTGKYWIPIFNYLENDIDICLTHPKYVKAIKGKKTDKKDSKWIADLYKFDLVRCSFIPPKDFRQLRELSRYRFKLVCMKSSEKNRIQNCMTVSNVGIASVLSDPFGKTATEIMSYLLEHTADSMDEKAVRKLIKKGAKSKSDEIIEAIKGYTIETDQAKKLELARGHLEYLDDMITQTEVELYVRIKPYYKFVEFVSTMPGMTELSSTIVLAETGVDMDIFDDAKHLCSWCGLSPANNESAGKKKSVRIAKAGDYLKPMMVQCALAAIKSKKQPYFAIKYGRIKKRRGHKKAIIAIARMMMVCIYHMVSEKKPFTPTDYEELMNPQNHVERVVLNENNVFAYLESLGYDSSKLVKRNDN

SEQ ID NO: 73931 - protein, 346 aa, unidentified
MVIVGCDFHPRWQQVASFDAASGERVERKLVNGNGEAEQFYRSLPVPSLVGLESCGNSQWFLELVEQLGHEVWIGDAAAIRASYVRKQKTDRRDAGHILKLLLEGRFPRLWTPAAEVRDLRQLLIHRHRLVQIRTRVKNGLQHLAMNRGMQKQGKLWSAAGQRAFLALPLPGWAGCRRQDLLALLAKLDEQIRPLDAAVEKAAFAHEQARLLMTQPGVGAITALAFVMTIGDANRFQRGKQVASYLGLIPREHSSGGKQRLGAISKQGNSFMRLLLVEAAQTAVRLDEGLRKKYQHRCHSKAKGVAKVAAARKLAVRLYWMLRTHTAYPEIVHNESSSRCPMAGAS

SEQ ID NO: 73932 - protein, 347 aa, unidentified
MKITTIGLDLAKSVFQVHAVDGQGRVVMERRLRRGQVKAFFAALEPCVVGLEAGGGAHHWARVLGGLGHEVRVMAPQYVKPYVKTNKNDAADAAAICEAAGRPTMRFVAVKSAEQQAGLMLHRVRELVVRQRTMLINALRGHLAEFGVVAAKGARQAGKLVAALDAIDENQLPCAARELVAVLARQLADTEARLGELDRRLLAAHRVNETSQRLATIPGIGPITASAIVATVEGAQGFASARGFAAWIGLVPRQHSSGGKQRLGAISKRGNVYLRKLLIHGARAVVRWRRQRPCADAPWLGGLLARRPVNVAVTALANKNARVAWALLRRGGVYRSGPHTPTPAIAG

SEQ ID NO: 73933 - protein, 344 aa, unidentified
MSIIKVLGIDLGKSSFHVIGRDYSDNQIIRKKFSRAALIQFLHQVQPCTIAFEACGGAHWLGRQCESMGHKVRLLPPQYVKPFVKSNKNDFIDAEAICEASTRPNMRFVSVKSEEAQVISAIHKVRHGYIKDRTACMSRIGALLLEFGVALPTGHSVMKRLFNWLAQQRQELPGLLMQELAELHDYYLFLNESIEKQDKKLKQLVESNPIGQLLKTIPGIGDMTASLCIANIGSATDFKSGRNMAAWLGLVPAQYSTGGKPKLLGISKRGNKELRTLFIHAARAVMSRPDKTGKIYGDWLINLRATKPFNVVTVALANKLVRIAWAVMKTKQAFNSKALAPGLQ

SEQ ID NO: 73934 - protein, 362 aa, unidentified
MAESTTFVAFDQHAATTMAAVLLPGQRTPALHPMTSDLGELRRFVRRLRASGGLRCCYEAGPCGFELQRALATDGVPCDVIAPALIPRRPGDRIKTDRRDASQLAVLSRAGALTTIHIPTEQEEAARDLLRCREDIRADLLRARHRLSKFLLRHGRRFTGTKKAWSKRHETWLRAQTWAIPALDQTHWAYLRAVDEAVARLRAVEADLQALLTLEPLRARVARLRCFRGIDDLTALTIAAEFGDPRRFPTAPSTMAFVGLVPSEHSSGGKRAQGAITKTGNAHLRRVLVEAAWHYRHHPFVGRALQRRQADAPPDVVARAWTAQQRLHRKYARLAARGKPKQHVVTAVARELTGFVWAVLTQ

SEQ ID NO: 73935 - protein, 404 aa, unidentified
MNAIGIDVSKGKSTVAVLRPYGEVVVSPFDVAHTGSDLRALADLIKKLPGETKVVMEATGNYFESIARYLHEQNIFVSVVNPVLISDFGGNTLRKPKTDKKDSVKIASYALTYWLDLKEYTSQEDLRKSLKLLNRQYQQSIKLKTMMNNNLISLLDLTFPGINKLFTSPSRESDGHEKWVDFVLEFSHCDMISKLTIKAFAKKYKKWSDKNSYHFTESSCEKIYAFAKDCVSSVSSDKAIVFSVVQAAKMLISATENCHAIQSEMNRVASKLPEYDTVMNMYGVGKAVGPQLMAEIGDPRRFHSRKAITAYFGYDSENNDSGQKTTRSNPMTKKGSGALRRTLFIIMQVLLQTKPQDNPVYDFLIKKKSEGKHYYSYINAAANKFLRIYYARVKEVLNVSEQMT

SEQ ID NO: 73936 - protein, 314 aa, unidentified
MPEACFVGLDISKAHIDVSVRPSDARWRAVQTDEGRAELVTRLAALAPTLVVVEATGGYETPVVTALAVAQVPVVAVNPRQVRHFAQALGQLAKTDAIDAAVLALFAERVRPAVRPLPDEAHHELIALVARRRQLLDMLTAERNRATMARRAVRRSIQEHIRWLERRVHDTEGDLTAMIQGSPLWRAQEDLLRSVPGVGPITARMLIALLPELGALSRRQIASLVGVAPLNRDSGQQRGRRGTWGGRATVRAPLYMATVVATRRNPVIRAFYQRLRTAGKRPLVALVAAMRKLLTILNAMVKQQTPWQSRPVEN

SEQ ID NO: 73937 - protein, 415 aa, unidentified
MEVLVERCGGLDVHKQTVMAAVRVPGDNGKRHQEVREFGTFADELVKLREWLGSFGVTQIAMEATGVYWRAPWYELETMTGVELLLVNPHHVKKVPGRKTDVKDSEWLAQLLECGLLRGSFVPPREISRLRDLTRYRTKLTRERAKEAQRIQKTLEDAGIKLESVVSDVLGKSSRQMIGALINGERDPEVLAEMAQTRMRSKIAELKRALVGRFEDHHALMLKMHLDHVRYLDERIEQLDTEVDKLMIPFRPKTERLTTMPGIAKRSAEIILAEIGGDMSRFPTPQDLASWAGLCPGNNESAGKQRSGRARKGNKALRTVMCEVAWAAAHTKDSYLQAQYRRFSRRFGTKSEGKVIFALAHTMIVIVWHLLAHDSDYEDLGSDYFNRRNDTDYRKRYLVHELEKMGNRVVLEPAA

SEQ ID NO: 73938 - protein, 334 aa, unidentified
MNEITTVGIDLAKSVFSLHGVGGSGQVLLRKGVRRDQLEETVAKLPRCLIGMEACSGAHEWARRFARYGHTVKLMAPKFVTPYRKSGKNDGNDAEAICEAVTRPNMRFVSVKSVEQQALLSLHRVRRGFIVERTATINRLRGLLSEFGVVLPLRSKTVRRQASAAAESLPALARRGIEDLLDHLRALDGRIEAYDQEIESQAKLCEPAKRLMKIRGIGPTTALAIVATVGNAKEFNNGRQFAAWIGLVPSQFSTGGRSRLGHISKQGDSYLRGLLFQGARSVLHSAAGHQDRMSRWALALRERRGYNRTLVAIANKNARIAWALLSKNEELRVA

SEQ ID NO: 73939 - protein, 412 aa, unidentified
MKDLLEISCGLDVHKEKIVACILTGPLGKPTRSEIREFSTLIPDMIALRNWIVSKNCHHVAMESTGIYWMPIYEILEDAFSGDITLLVVNARHMKNVPGKKTDMRDSEWISTLLRAGLLNGSFIPEKKIREFRDLNRYRKSVIRDITSQKNRIEKFLQSSGFRLSSFISDIFGASGRNIILHLIEHGQIDKTALDSCLKTKTRNRIDEILMSVNGTLSEHQKAFLRILMTHYDSLKKHLAEIETSLEEDMAPFALQVEQLNSIYGISTTASCAIIAEIGIDMKPFKTAEHICSWAGLCPGNNESAGKRKSTSVTKGNPYIKSMLCEIAWVIAGKRNTYLSAWYWRIKQKKGAKKAIVALARKLLVIIYTMLKQGTLFDEFCFETRRKHCEQKQLSRYIRELEKHGYHVEAQS

SEQ ID NO: 73940 - protein, 345 aa, unidentified
MDEVSIIGVDLAKHVFQLHGAAADGRVVFRRRVRREQLLPFLAARPACGVVMEACGSAHYWAREIGALGHRVRLVAPAYVKPFVKRQKNDAADAEAIVEAAQRPTMRFVAVKSAEQQASAMVFKTRDLLVRQRTSLVNALRAHMAEFGLVAPKGICHVGRLEALLAEDTTLPEPVRRLCGELLALIAGLTERLGVLDREVRERARTDELARRLQKIPGIGPVTALALAVLAPPPETFERGRDLAAWIGLTPRQHSSGGVSRLGKTSKMGQRDLRRLLIIGASAVVRWARRPQHGERLAPKGSWLAGMLARKPPMLVVVALANKMARVAWALMARGDAYRAPAPAS

SEQ ID NO: 73941 - protein, 367 aa, unidentified
MKVFIGVDPHKLSVTIEAVNDRETVLTAGRFSTNNAGYAAMLKHVAAWPERVWAVEGSNGAGRPLAQRLLADGEHVVDVPAKLAARARLFDTGHNRKTDAHDAHAVAVVAVRTGGLRVLSYGVELEALRMLADRREELTRQRVQTVNRLQRLLSELTPGKAKKDITALQAKGILASVRPRDLAGKTRRRLAAEQLTELVAVEKKIKALTKELKEMVIARGSTLMDLPGVGPIVAAKILADVGDVARFADRNRFASWTGTAPLDASSGEQVRHRLSRAGNRKMNHMLHIAAATQVRLDTPGRTYFRRKLAEGKTRMEAMRCLKRRISDAVYRQLSPTPEPQPTPPRTSRRTRRRPRLARAREGTAGRL

SEQ ID NO: 73942 - protein, 320 aa, unidentified
MMAQNDCVVVGIDVAKDKVDASIRSLSQRQTFPSTTEGRRTLIRWLRKHKVGKAAMEASGGYERDWAKALREARIEVRIVDPKRVRSFARSAGRLAKNDAIDAEMIAWFAETFGEAPSQAYDAARDKLVQIVRARQSLLDLQTSLQNRGEHAAPEVVQKMQARLLKTIALEVAKLEAAITAMIKATPHLAELAEIIESVPGLAGTTSAGLIARMPELGQVSNKIAPALLGAAPYDDDSGRRRGERHIRGGRRKVRNLFYMACLGAATRHNPVLKAFYRRLIAKGKEPKVALVACMRKLIVILNTMIARRQKWDPGRYALS

SEQ ID NO: 73943 - protein, 324 aa, unidentified
MTDATLGIDVSKETLDASCARGQRRQSRTFSKSPDGWKLMVAWLKAMGSKQTHVCMEATGRHSLGLALALHDAGHIVSIVNPAQIRDFGRTKLGRNKTDKVDATLIREYAELLKPGPWTPPSSAMRTLNELQTVRAGIVGSRTEWKNRIGSGLGDSTATKLAAATIEHFTIQLQAIDKAISETIDGDAELRGRCDLLLSVVGVGETLAALLLAEMPEPGILRQGGELVAYAGLNPSHHRSGTSIDRPTRISKIGNATLRSSLYMPALSAMRYNPAIAALVARLKSAGRLKPKQIVVAAMRKLLVICFGVLKTGQRFDPALAMPA

SEQ ID NO: 73944 - protein, 468 aa, unidentified
MKSKVNSNKSQKKIIPKTENSLPIIYHDCAGIDIGSASHFVAVPSDRDEQSVREFSSFTSDLHRMVEWLKKCKIKTVVMESTGVFWIPVFEILEQNGFEVKLVNARHVKNVSAHKTDVLDCQWLQQLACFGLLKSAFRPESDIVALRAYIRHRDNLIKCAGQHVQHMQKSLTQMNIQLHNVISDITGKTGMLIIRAIVAGNTDPKILASYRDGRCHKSEEVIMESLIGNYRDEHLFTLRQALELYDVYSDKIKQCDVTILAQVNNLASKSNPSELEKKEGVLNEIQARSKRKLKKHEYPFEMKSELMRIAGVDLTLIPGIDISSALALIAEIGTDMSPWQSAKHFASWLGLCPGNKVSGGKRLSGKTKPCANRAAIILRLGANTLYNSDCALGAFLRRMKMRLGSPKAITATGHKLAKQVYYALKYGREFIEKGAEHYEAIYREKREISLKRKAHQMGYELVPIKKAA

SEQ ID NO: 73945 - protein, 390 aa, unidentified
MYIKFKPWSMPHIILTVIAMCHKNAGGQIMNNTNTEMYLGMDVSEKSIELFALSADNKKESKGKIENNPAKIKAFLADVKNTSRLTVALETGTHSPWLSKMLEEHGCKVLVGHARKLRAIWGDDHKCDQRDAEMLARIARMDPKLLHPIKHVSQEVRAEQAVIKARDVLVKNSTMLINHLRGTLRSFGISTSEIPCTSMHSKLMPLIPKDLRPALKGIVKQLKEVRTEIKEYDKKLTELCKKHKETKILQQLNGVGPVTAITFALIIADPRRFSSAGRVGSYLGLTPKRDQSGEVDKQLGITKSGNGMLRKHLVKSANYIMGPFGVDSELRRYGERIAAKGGKIARRKAKVAVARKLAVTMWRLWINEAEYDPFFKEHQKQKKKAARVAA

SEQ ID NO: 73946 - protein, 393 aa, unidentified
MKSTQSPRVVIGMDPHKRSVTIEVMDAHEDVLGGGRFATDIDGYRSMLDYLRPWPDRVWAIEGCNGIGRHIAHRLIADHQEVIDVPPKLSARARVFSTGQGRKTDATDAHSVALIGTRMSGLHPVVADDQRDILRLLVDRRRSLGDEHTRKIAQLHALLLEVVPGGAKRFLSAAQARRILASVRPRDEVGKIRKRVAMELVVDLERIYARTKAADKELTQLVKATDTSLLDLHGVGPSGAARLLVEVGDITRFPDRGHFASWTGTAPIDASSGDHVRHRLSRGGNRQINRVIHIMAVVQLRNATEGRAYFDRKKADGKSSMEAMRCVKRRLSDLIYKTMLDDLTTTQKTSPGGHLSNVSDSSATGSQLHAGSSDKSLPGPARPQPKPALPAAS

SEQ ID NO: 73947 - protein, 403 aa, unidentified
MIFVGDDWAEQHHDVYLMDGAGKRLASRRLPEGLAGIRQLHELMATHAEEPDQVVIGIETDRGLWVGALTGAGYRVFAGNPLAVARYRDRHHVSGAKSDASDAKLLADLVRTDRHNQRLIAGDSPQAEAIKVLARAHQSLIWTRNRHTNALRNALREYYPAALEAFEDLAHGDALGVLHRAPTPTLGAHLDLAAIQSALKRGGRKRNIAARAREIRATLRTEQLSAPAPVADAFGATTRATVGILTELNRQIGELETSLAAHFETHPDADIYRSLPGLGVVLGARVLGEFGDDPNRYTDTKSRKNYAGTSPLTIASGKKRAVLARHIRNRRLYDAIDHWAFTALTKSPGARALYDQHRAAGDLHHQALRALGNRLVGILHGCLHHRTLYDEHTAWAHRMPAAA

SEQ ID NO: 73948 - protein, 350 aa, unidentified
MMIIGCDFHSRYENVAMVDTETGEVVERRLEHENGEARAFYAGLPLEARVGIEATGRTQWFERMLAELGHQLWVGDAAKIRAQRVRLQKTDTRDAAHLLDLLISNRFPRIWVPSPPERDARQLLRHRHKLVQFRTSVQNQLHALAMSQGVCRKKKLWSVRGRQELEGLALGRWASRRRQELLALLDQLNPSLEELDRAVEKEAEHCPAARRLIEQPGVGPVTALAFVLTLGPVERFPNSRKVVSYLGLNPREHSSGGRQRLGSISKQGNRMMRWLLVEAAQTASRFDPEWRRHYQRLKFRRGPGVAKVALARKLAVRLYWKLREAAPRRTAGSHAGSPQRTLVDTRPPTF

SEQ ID NO: 73949 - protein, 392 aa, unidentified
MVVSVGIDVSKDKHDCFIVSSDGDVLADVFTISNTLDGFHDLLQRIQDCATPQDKIKVGLEATGHYSYNLLGFLLDNGLTTYVLNPLRTNLYRKSLSLRKTKTDRVDARTIASMLLSDAGLKPYTNTAYHNEELKSLTRYRFDKVKERAKLKSSIARLVCILFPELEKLVPSLHIASVYALLEEFPGAKQVANTHLTRLKALLETASNGHYKRDMALEIRNAAKNSIGSQMPAKSLELQHTIRLIRELDREIDEIEEQIQSIMDELHSPITTIPGLGFRMAAMILAEVGDFTRFDSPDKLLAYAGMSPSTYQSGQLKNCYPHMEKRGSRYLRYVLYNAAKYVCHWDPAFADYLAKKRAEGKHYNIAISHAAKKLVRLIFAMEKSRQPYCSAA

SEQ ID NO: 73950 - protein, 332 aa, unidentified
MGFTYFIGTDVSKNELDFAVMQGKTLLFHKEIVNTQEDVLIFLKELVKLPGFELTKAVFCMEHTGIYNNHLLACLYKKKANIWLEAAIQIKNSSGKLRGKNDKVDSIRIADYAYTQRDKVRLWTPKREVVQQLAHLSAARSRLIEAKKMLKTPLMELDSFSSKKIAGPGASICSHTLKAIDADLERADNKIDKLIADDPELCRLFSLVTSVSGVGKVTATQILITTNEFKDISNPKQYACYAGVAPFTDDSGKIEKKARVSHMANKKVKTLLHMSALIAIQHNKDITLYYHRKVNEEKKNKMSVINAVRNKLILRIFACVNHNSPYQNNYQK

SEQ ID NO: 73951 - protein, 311 aa, unidentified
MNEKSDSIHYIAIDVSKSTLQVQDDRRAFSVGNDTEGHRKLLNYLKTCTNPLIVFEASGGYERALLQFLHKAAIPLAMVNPARVRDFARSEGVRAKTDPIDGKMILSFAKSKELRPMKAPSQTCVKLAALLDRRGHLVEQLAREKNRLQNSETLIHRSIKRMIRILEKEIAAIEEAIEKLIGSNPGLKSRSEIIRSVQGVGKITAWTLLAYLGEIEDLNRNRLVALAGVAPFNHDSGKISGKRTIQGGRAKVRKCLYMAAHTAASYNPVIAAYVQGLRDRGKPYKCAIVAAMRKLLIHIQSLMKKVQLSPC

SEQ ID NO: 73952 - protein, 345 aa, unidentified
MDIVRIGLDLAKTVFQVHGVGSDDRTILRKTLRRDAVVPFFAGLPPCLVGMEACSGSHYWARTLSELGHEVRLISPQFVAPYVKSNKNDCNDAEAICEAVGRPSMRFVPQKSPEQLEIQAVHRIRQRLISDRTRLVNQIRGLLAEHGFVIARDISRLRQALQQIVNGCRRDDGVPDMIRDLVIEIREELAELDKRITSFNSRIRVLFRTNEACQRIGRIEGIGPITATALVAAAGDQSCFRNGREFAAWLGLVPKQRSSGGKARLFGISKRGDRYLRTLMIHGARAVLGKAHGKTDARSLWIGRLRERRHPNVVAVALANKNARIIWSVLARNEDYDPTRGAAVG

SEQ ID NO: 73953 - protein, 345 aa, unidentified
MDYFAGLDVSVKDTSVCIVDDTGKIVREAKVASEPEALLAVLAKLTYRFKRIGLEAGPLSQWLFSALAEAGLPVICVETRHMRAVLKAQINKTDRNDARGIAQMMRAGLYRPVHVKTLRSQKLRMLLTHRKLLQSKAIAIENDLRGTLRNFGLKVGVVGTARFEARIKELVENIPDLAALVEPLLVIRRALREQIGVLHRRLLAVVRDDDVCRRLMTIPGVGPVVALTYRTTVDVPARFRRSKSVGAVFGLTPAKYQSGESDRTGAISRCGDEMMRVMLYEAAHIMLVRSTKWSWLKAWAMQIARRRGLKKAIVALARRLAVIMHRIWMDGTEFRWTREQATAAA

SEQ ID NO: 73954 - protein, 367 aa, unidentified
MKKVSTAGAKQIRNFFEQKLTIGLDLGDRFSCYCVLDEAGRIVLEEKVATTAKALQTKFGAMPRSRMALETGMHSPWVSRCLNELGHEVIVAHARNVRLIGESRRKDDRLDAQTLARLARIDPQLLCPVKHRSAKAQADLTMIRARAGLVRARTALVNTARGLAKSYGERLRGCNVRNMNPEKGEGLSAELQKALEPLLAGIESLSERIREYNERIEDLAQKSYPQVALLKQIHGVGRLIALTFLLTLEDAHRFGKSRDVGCYLGLQPGRRNSGQSEPQMHISKEGDPYLRTLLVQGAQHILGPFGVDSDLRRWGLRLAERGGRNGKKRAIIATARKLAVLLHRLWVSGEVYEPLRNSKLIGMPTAA

SEQ ID NO: 73955 - protein, 315 aa, unidentified
MMNEQTYCGIDVAKRHFVIGLSTQKRTKTETNNPKGIAHTIEYLRRFSVDLIVLESTGGLELPLAKALHRTGFRVVIANPRQTNQFAMSQSLAKTDNKDAKMLAFYAQMLAMRDNVAQQLYIPPTPEQEQLEALVSRRNQLVEMRFAEKNRLEQVHSTQVFSVEQHIDYLSLRIDELDREIEQHLKHFDDTIKKFKDIKGLGTQTIAVLMSMLPELGQYTHKQIASLVGVAPHPKESGNTKWKSRCSGGRKAVRNALYMATFVCVRFEPKLKQFYERLRANGKAFKVAINACMRKLLTILNAIVRDDSQWDAHAL

SEQ ID NO: 73956 - protein, 364 aa, unidentified
MKRKVYVGMDVHKETIRIACLTNNTKEIVKEQQIKHNEVQIKKFVNKLKSEWNEIHSCYEAGVTGYPLYRNLKSLGVNCILVAPGKIPRQSSDKIKTDKRDAIKLAKLLRSEELESIHVPSEEDEAVRDYLRSRDSLRLDLGRNRQRLMKFLLRKGITYSATKYWTVSHNKWLNNLQFNNEILQETFNDYYSRVRVQEENLKAMDKRIQEIAESEPYREKVGILRCFRGVDYLTAMFLLCEVCDFKRFKTAGSFMSFLGLVPGEYSSGSKRKQTGITKTGSPRLRRILTEAAWQHRFPGTGSKIVTARRSGQPALVVALAEKASLRLHKKFRNLQQRGKTPQVMITAVSRELSGFLWAAMNLVA

SEQ ID NO: 73957 - protein, 525 aa, unidentified
MEKIITIGVDPHKLSATIEVVDDRETALATGRFATDKAGYAAMRRHVAAWPARVWAVEGSNGAGRALAQRLLADGEHVVDVPSKLAARARMLDTGHGRKTDAHDAHSVAVAAVRAKELRVLALDPQLEALRMLADRRDELARARVQAVNRLRRLLAELVPGQSKKDITTGQAKAILAGVRPRDLVGKTRRRLAAEQLAELVAVEKKIKALTRELKEMVHASGSTLMDLPGVGPVVAARALADVGDVARFADRNRFASWTGTAPIEASSGEIVRHRLSRAGNRRMNHMIHIAGHPDPPRHRRAGLLPAQDRRRQDPPRSHAVPQAADLRRPVPPTPCRREDRLGPWRGRGSGRAPRGVTSIQRGRLTPAHRHFGSATSRTRTRDATRAHPSEEDHDVETPRTSLLTSEGCRNDASSKPGWSGDRAALVEWFGGSARWGTFHSRPHRLFRTPVDVRSRNRSWSRPVLQPLRRAGERHRGSRRPRCHTGPLGRPRPRGRGACRLARAHPWTRTPVRGHVRVSRLEAWS

SEQ ID NO: 73958 - protein, 354 aa, unidentified
MSNQSNATVATIGIDIGKNSFHVVGLDQRGAIVLRQKWSRGQVEARLANMPPCLVGMEACVGAHHLSRKLTALRHDARLMPAKYVRPYSKGQKNDFRDAEAIAEAVQRPTMKFVATKTAEQLDLQALHRVRERLVSQRTGIINQIRAFLLERGVAVRQGPRFLRTELPNILAKRSDVLSPRMMRIIEELAGDWHRLDERIEGLSTDIKTLADQDPACGRLMSVPGIGPIISSAMVAAIGNGAAFSKGRDFGAWLGLVPRQMSTGDRTILGKISKRGNRYLRVLFVQAAWVVLVRPNIWERYGLKSWIEAAKKRMHRNVLAIALANKLARIAWAVLNKGRNFECTKTNAMEPRPA

SEQ ID NO: 73959 - protein, 321 aa, unidentified
MTKEAVYVGVDVAKSSLDMAVSNSEEVRQFTNDHEGITNAVQYIAGLKPSGVIIEATGHLEMPLAAALQADSLPVAVINPRQVRDFARATGTLAKTDTIDARMLALFGIRVQPEIRPLPDEKTREMRNLLTRRRQLIEMLTAEHNRLFHSSDDVRPGIETHIKWLEKALSDINDDLDRRIRLSPSWFEKDNLLKSVPGVGKVVSSSLLIELPELGMLNRRKIAALVGVAPFNRDSGTMRGRRTVWGGRAKLRAVLYMAALVASRRNPIIAAFYQRLLDAGKAKKVALVACMRKLLTILNAMMRTMTAWQPETILERIPVEV

SEQ ID NO: 73960 - protein, 359 aa, unidentified
MLKYSLGIDISKKDFHACLSVIDVNQQVKVKASRKFSNNEQGFKELISWLGNHRKEGRVPLTIVMEATGVYYESCAMFLFKAGLQVAIVLPNKAKKYLQAIGLKTKNDKIDATGLARMGAEQCLELWQPMDEFFYTLRALTRHHQSLQELKTNIGNQLHADEHSIYSNKKVMKQLKKLITTIEKELLEIADEIDKQLYSNPEIAKKVQLITDIKGIGNITVATILAETNGFALFSSIAQLVSYAGYDVVENQSGNHLGKTRISKKGNSHIRRAMHMPAFNMIRYDVGSFKPFFERILERHHLKMKAYVAVQKKLLVLIYTLWKKNEAFNSGEKINTSGNEETVPSFALTEGQLNEVAPA

SEQ ID NO: 73961 - protein, 346 aa, unidentified
MVTTIGIDPHKATHTAVAIDEAETVLGELTVPADRYQIARLLDWAVKVDGDGDRVWAVESAGGLGYLLSQQLVADGEHVVDVPAVLASRVRVLSSGKSDKNDPNDARSVAIAALRQPALAVVRRQDHATVLRMLAKRHLELTSLRTQAVCRLHATLVLLKPGGMQRRLSAQQASRMLQGMRTLDTVGEQRRRGAKAHLVDIRRLDRDIKANKALIRQAVATAHTTVTDVYGVGPIVAAFLIGYTGDVTRFATADHYAAYNGTAPIEVSSGGKTRHRLSLRGNRKLNHAIHMAAVTQIRFDTQGRVYYDKKLTEGKSKKEALRALKRRISDAVYRQLVADQQQTTTS

SEQ ID NO: 73962 - protein, 409 aa, unidentified
MEVLITHGAGVDVHQATVVATVRVSDDRGGRRSVTETFGTMTADLLAMREWLQAYGVTHVALESTGVYWKPVYYVLEDGFTLLLINMQDLKRVPGRKTDVKDSEWLAQLLECGLLKPSFVPPPPIRELRDLTRYRVQQVRDRTQEVNRLCKVLEDAGVKLTSVLTDVMGVSGRAMVRALVEGTTDPTVLADLARGKLRQKLPLLQRALQGRFGRHHAFLIEQIFAKIDFLDDTLGRLTAEIESRLAPFEAMLTHLDTIPGVDRIGAISIVAETGGDMSRFPSAGHLCSWGAMCPGQNESAGKRHSGKTRKGNRYLRRTLIQAALGATHKNGSALQSRYHRVKRHRGHKKAVVAVGHQILEIAFYVMRDGVSYDELGGDYFDRRHAERAVRRHVRQLEALGFQVTIEKAA

SEQ ID NO: 73963 - protein, 373 aa, unidentified
MKEKVRFLGLDVHADTIAVAVAEANGEVRSLGTIPNRAESMRKLVKKLGGVEHLRACYEAGPTGYVLYWQLSELGVQCDVVAPTLVPVKAGDRVKTDRRDAEKLARNHRSGDLTAVWVPDAGSEALRDLVRAREAAKQDQLRARHRLSKFLLRTGQRPGPGVKAWTQGYLVWVRRLCYAQAAQTATLLDYLHEVEHMGERVGRLEQAITEAVKLASPQMQAVVRDLQALRGIAEISAVTIASELGRISRFQSARQLMGYSGTVPGEDSSGKRMRRGPITKTGNAHLRRIVVEAAWSYRLRPAVGPGLRKRQQEVPQEIKEIAWKAQIRLSKRYARLAAAGKDKRKIVTAVGRELLGFIWAIGIKTEASGQRAA

SEQ ID NO: 73964 - protein, 468 aa, unidentified
MAKRKSSRQGQRREKTEKAVAVSAGPTQVKQDVAGIDVGSEHHYVAVPAGRDPEPVRRFGSFTADLYRMVKWLLDCGIKSVVMQATGVYWFGLYQVLEDHGLAVTVTNARYTKMLPGRKTDVAECQWLQQLESFGLLTQSFRPTEEFRVLRSYMRQRENLVADIGICIQRVQKVLTEMNLQICNVLSDINGKSGMAILRAIVKGERDPYRLADLCDSRIQAPRQQVAESLEGTWQNELLFILKQQLEIHDALAAQVSQCDRQIETHLQTIQQKVVPEVTPMPAARRPSKLPNRKHTSQYDLRKYLYQITGVDLTQIDGIGEQTALTVVSEVGVDMSRWKTEKNFASWLGLSPTNEKTGGKVIQRGTKKVVNRAATALRLAAQNLRTSQSFLGAKYRRFRGRMDAAKAITAMAHNLATLIYRMLKFGHNYTDKGMQFYEQRYRERQLQYLKKQAAKQGFQLTPTPRVVA

SEQ ID NO: 73965 - protein, 365 aa, unidentified
MFFIGIDVAKRSHQAAVTDISGNVIVKPFNFKNSSDGFSKFLSVVESNAIEKNDCTIGLESTGHYWYPLYFFLIENGFDVKVFNPIQTAAFREITIRKVKNDNLDSLLIADFTRFGRYSETYIPDENMLALKNLTRFRLSISDICGSLKKKVIAILDQVFPEYTGVFSDVFGKTSKQLLEQFSTPDEFMDISTTKLTNLLLKVSRGRNGREKAELIKTAAQSSIGISYALDAFSFELKQLLAQIEFMENQLSDVDAEMEKLLSQSEYAVITTISGIGPMLGSVIVSEIGDINRFENSSKLVAYAGLDASVKQSGEFNSSKNKISKRGSPYLRRALWMAAFMSLQCDPALYDYYSKVRARGKRDWQ

SEQ ID NO: 73966 - protein, 412 aa, unidentified
MDWADQKHVVALQETNREQRQRFSLDQTPEALQNWIQQLRDRFAGRPVAIAVEQKRGALIYALMHVDFLYLYPVNPQTLSQFRKAFYPSGAKDDPIDAELLLEILTTHRQHLRVWVPDDVLTRSIQLLTEDRRGLVDERTALTNQLTAALKMYFPQVLEWFGDLHAPRACAFLQRWPSLQSLKAATPSSIRKFYKAQGYRGEDKLEQLIANIQKAQPLTQDGAVVLSGSMKVQALVRPISLLTESIQRYDQEIASLFDKHDDSTLFSSFPGAGASLAPRLLAAFGSDRGRFEFAAEMQQLAGIAPVTEKSGTGIWIHWRLACSKFLRQTFQEFAGCSILQSDWARACYDQLRKRGKSHHAALRALAFKWIRIIFRCWKTRTPYDETVYCNSLKLRRSPLAAELPVDEKFALT

SEQ ID NO: 73967 - protein, 334 aa, unidentified
MALELLAIDLGKRSFHLYGIDTDGMILSRKVSRAKLAEVVNNLAPMAIAMEACASAHYWARCWLAVGCEVRLINPRFVKPFVKGSKNDAVDAEAIFEAAMRPTMRFVPVKSTDQQDLQSLHRARDRLICQRTALINHTRGLLAEYGIVLPQGPSRFTARAPAAIAGADLSDLARTIFGELLDQLDDLDRRVKKLDATIAGLCRTKETCRRLAKLPGVGPVVATAIVAAVNDGRQFRSGREMAAWIGLVPRQYTTGGKPRLGGIGRRANHYLRRQLIHGARAVVSRSAKHDDRQSTWLKALVARRGFNRTIVALANKTARIAWVLLSRKEEYAAP

SEQ ID NO: 73968 - protein, 359 aa, unidentified
MSLPIDNCSTIVGGVDTHKELHVAAVVDHHDRLLGSASFPTTRHGYKSMLAWMRSFGTLSRVGVECTGTYGAGLLRYFQQAGITVLEVTAPDKSVRRKRGKDDTIDAENAAHAAYAGRRTVTPKTRDGMIESLRVLKVCRKTAIAARRIALQMIQMQIISAPDELREPLRKMTRMQLIRTLAAWRPDLSGYRDLTTAYRITFKSLARRYLELHDEIADLDVMIKAIVDDLAPELVARQGVGYESASQLLITAGDNPQRLRSEASFAALCGVSPIPASSGMTQRHRLNRGGDRAANSALHIIAIGRLRLDPKTQDYIVKRTGQGLSKLEVLRCLKRYIAREVFYILRSRNHEINRAQIAT

SEQ ID NO: 73969 - protein, 355 aa, unidentified
MSKLKYIGLDVHQASISVAVREESGRLVMESILATRAAAILEFLGGLRGTLHVTFEEGTYSTWLYDLLVRRVHQVVVCNPRKNALLKKGNKSDRIDARKLAELLRSGLLSPVYHGQNSIRTLQELTRSYLTLTQDTTRVMNRLTAIYRSQAIAYGSKKLYTRRHRGEWLGKLQQPGLLRRAERLYEELDLLQQLRRKARQEVMVESQKHPVCARLCSIPYLGPIRAAVLAARVQTPHRFRTKRQFWAYCGLGLETRSSGDYQQIEGQLQRSRKKVLIRGLNLDHNHDLKNIFKGAAMSASVFSGPLQEFYQERLRAGIQPEMAQLTLARKIAAIALTIWKKGDRFDRTKLKAQAA

SEQ ID NO: 73970 - protein, 364 aa, unidentified
MNKCHSNTELSSHEGTRCQFNGGRCAIKLGIDVHQDFYVVVEQEGGSNPKPPQRFQKQAFLHWASKLKSRGAEVYAVYEACGFGFCLQRQLSALSIQCYVVCPQKLDEQNRRVKTDGLDAKALCLKLDRFVQGNRDALAIVRVPSEEEEQARAIHRQREQLVKARKQLEAQGRSLMVNHGLEPVHNWWKPRTFAALPAPQWMKELLGNSQPILLALQQKIAALTIQLQSAAAPKQPRGLGLMTSVIVDREIGDWNRFSNRRQIASYTGLCPGEYSSGNTRLQSCVTKHGNPRLRAALVELAWRLVRFQPNYKPVVKWRATLAKGALATGAARKKAIVAVARQLAVDLWRIKTGRLRAEELGLIN

SEQ ID NO: 73971 - protein, 320 aa, unidentified
MMAQNDRVVVGIDVAKDKVDGCIRSLSQRQTFPSSAEGRRKLIAWLRKHKVDRAVMEASGGYERGWAKALREACFEVRIVDPKRVRNFARSAGRLAKNDVIDAQMIAWFAETFDEAQSQTHDAAREELAALVKARKAVIDLKTRLQSQNEHAVPGAVQKAHARVLKGLDAEIAKLEEAIVVTVKATPAFAARAEIIESVPGLAETASAVLIAGLPELGAVREEVAAALLGAAPYDDDSGKRRGERHIKGGRRWVRNALYMPCLGAATQNNPVLKAFYRRLIARGKEPKVALIACMRKLIVILNTMIARGEKWDPSRYALR

SEQ ID NO: 73972 - protein, 313 aa, unidentified
MTTSSAWIGVDICKKCLDVAAASGTPVRIANDADGRAALARRLKSENVRGVIVEATGGLERALVEALHAEGVPASIVNPARVRKFAEGTGQLAKTDRIDAVILARFGAYMKPMPTCLADAPRQKLRDLIAYRAQITREITARSAQVRLYTDPDLLARAAAAIAALREERKALERDMEALIKSQGAMQALYKRLLTVPGIGLIGAATLIAELPELGRLSRRQIAALVGVAPFPNESGDRRGYRAIRGGRDEVRQALFNCARVAIEHNRVAKPFYERLRARGKAHKVALVATMRKLLTILNAMLKTNTDWTCKPA

SEQ ID NO: 73973 - protein, 404 aa, unidentified
MYFVGIDVAKEKHFVCILDEDREIATKPFWIYTDILGLQNLEKRLAALSLDRDDFIIGVESTGAFSENLYEYLTDSDYKVVLLNSYQTAKFRDFITMKKIKNDAIDALVIAELLATGKYKESHISNNAYHSVKVLGRLKASLDKKIKSIKREISTVMATVNPEISKVFPNLFTKTGLAIIKEYPTATDIATATPKKLTRLFRHIRGNNFSEDKAKLLIELAKSSVYTGRACEARSLMITTNIRILELYCQEKKEIEAQIKELINSEIDSIDNTVENLKSIPGVSDKTIASILGECGDLKRFDSAKAFIGYLGLYPIQKQSGNTLVIGKLARRGIPIAKHALYMASVASVLHNSELNKLFRDKISTGKSKKEALIILSKKLATIIYSIVKHNTPYQPNRVFIPQR

SEQ ID NO: 73974 - protein, 428 aa, unidentified
MNDKDTIRRDQFCQIKSEIRGSSDYLVVGIDVAKDKHHAFMGTATGNSLLRNLVFENDLEGFRKLQERSEAIRTQNALSKIVFGVEPTGNYHKPLGAYLIGTGHHLVMVTGKAVKNNRELLDGRWDKNDIKDPANVADLICQGKCLYYDYPPASINQLRQLLSLRRRLKKEEHSLRMRIRNNLLAQYFPELDRFFSACETESLAIVRWFLDPSMIACMEFDEFFMSVTRTRRGIAQKQRLQKIHRLAAQSVGCPIGPAVEFEADLLVGKLEQVRQQLKQTADLMEDFCMEFTEYNWLLTIPGFGPYIAARVLASISNPWRFDSSNQVIKMAGYDLGAKRSGKKSNDAVPVISKRGNGELRYALYQAAHVASTRNPYFIRYYTRTLRGRGRERGIKTKMKVKLAVKMLKIAWTLMKKNQGFDPDYLITE

SEQ ID NO: 73975 - protein, 348 aa, unidentified
MKELMAGIDLHSNNIMVGIVDGEGKRLAHQKLPCELKRILEFLAPFKKRLRRLAVESTYNWYWLVDGLQGAGYPVVLANPAKITQYSGLKHADDKSDAFFLAELLRLEILPTGYVYDAQRRPVRDLLRRRMSLVHQRTALMLSFKSLFTRTTGEQMSLGRLKTLAVAQAQALYEHPANQLIAGLQIHHIEQLDASIGRLEKAVLNVARELPYYPQLKTLPGVGIILGLTITMEIGDIQRFAGPGQFASYCRTVAAQCSSNGKPKGENNGKCGNKYLSWAFVEAANFAKRYDEPCRQWYERKAAKTSQVVATKALACKLAKAAWHLVAEQTDYEPGRMFPQLAGAAMSK

SEQ ID NO: 73976 - protein, 344 aa, unidentified
MHIASIGIDLGKTVFHLVALDERSKVLVSRKFSRPQVLAYTANLPSSLIGIEACGGSHFLASALREQGHEVRLIPAQFVKPYRKSNKNDFIDAEAIAEAVTKQNMRFVAIKTQEQLDLQAMHRVRDRLMHRRTALINEIRGFLLDRGITFQNHPIHLRKSLPTVIEDAEQNLSPRMRWLLQQMWQEWKQMEIDIETISNEIDRIGQEDARCRRLRQIPGFGPLVSTATVAAIGNGAAFRKGRDFAAWLGLVPRQYSTGGRQQLFGISKRGNIYLRRMLIHGARAVLLRVKYDTGGFGQWVKRLEQRAPRNKVVVAIANKLARIAWAVLSSGNDYRHQPLQLNAA

SEQ ID NO: 73977 - protein, 387 aa, unidentified
MEVRVVNTPSAGRNNDPVHCFVAIELSKSNWVVGFQTPLTDKASRHQVKAGDAKGLIELIERVRMRVGRQLSRPVEIVSCYEAGYDGFWLHRVLESYGIDNHVLDLASLQVSRRARWPKTDRIDAERMVRALIRHLRGEPEACSVVCVPNVEQEDAKRLHRERRRLIAERVQHVNRIKGLCATQGIYDYSPLRKDRLARLDGLRTGDGRALPTRLKAEIVRELKRLELVIEMIATVEAERDAILTNPASTHVNAGKIKMLAKLRAIGPEFATNLVGEVFYREFANRRKLGSYVGLGSSPFCSGSVDRDQGISKAGNSTARSMMIELAWTWLRYQPGSALSVWFRERVGNLKGRPRRIAIVAMARKLLVALWRYLETGLVPTGTALKA

SEQ ID NO: 73978 - protein, 330 aa, unidentified
MLENVVVGLDLHLKNTQGTIMGMNGMVLSQERFRTDKESLRRFLCGVPRGSKVALESVGFCWPWIDFLEELGYAPLLANPVKVKMRAEDVKTDKVDSELLANLTRMDWLPTCYVPSAELRWLRSLLRHRAFRRKMSTAVKNRSWSELRKRDVKLGVNLGTCKGRDLAASLGVFEVDQDMELLEVVEGQIKKIEALLRRRYGDLKPVNLLMSVPGIGFLTALTVYAEICDVGRFSSPEKLAHYAGLVPRVRSSGEHTRLGKEVKANKWLKWILIETAWSHVNWCRDGKLAKVYEDACRRKRDKRKAIKIVARKLVNVVWAVWAHEKEFTLE

SEQ ID NO: 73979 - protein, 350 aa, unidentified
MEYIAFDAHKHYTLASVTRPDGQLVREERIEHERGALRQFLERCERGSPVAVETIGNWYWIVDEIEAAGCLPRLVHARKAKLMMGEINKTDKLDVRGLNRLQRTGTLPTVWIPPGELRDQRDLPRTRMVLVRQRTQLKNRLHATLAKYALHDLEVSDFFGERGRTLLRERFALLPTHTAYASRQLLAQIEALGRQVRAFEKRIQATFKPTPAIQRLLTLPGVGLTLGVVIALEVGDVARFASAEKLAGYAGTTPRVHASGGKTRFGPSRPDVNRYLKWAFVEAANAICLTRGRAPHRHVSRLYERIARRKGHAKAIGAVARHLAEATYWVLSKQEAYREPKGVGGFVHGG

SEQ ID NO: 73980 - protein, 316 aa, unidentified
MDAILECCAGLDVHQETVVACILFGSLESKPKKTIRTFSTTTSDLLALTDWLEEEKCSHVAMESTGVYWKPVWNILEAGSFQLSLANAQRIKNLPGRKTDVKDAEWIAQLLRSGLIEGSFVPPAEIRDLRDLTRYRKKLLQDATQEKNRIHKILQDANIKITTYISDIFGVSGRNIMESLMDGEVITVEKLNQMVKGKVKSKIPGLADALNHRLRSHHRDMIRYSWSHLKFLEQSLINVEQKISESMAPYQQEVELLTSIPGINQTSSAIMIAELGADMSVFPTDSQLSSWAGVSPGNNESAGKKKEGVFPQETKR

SEQ ID NO: 73981 - protein, 390 aa, unidentified
MDTAYFCGIDVSKDSFSVAIKNGSFILKDKLFSMDSKGFKEFECILSEFKRSLFIGMESTGIYHKNLFNFLCFRGYNTIEIDPYKMWRFFRFTNSKPSTTDKKSAKTIAQFLEFNKNELKDNKNHLKDERYSLRYFVREKERITQSIAKTKTEIKRILSLVFPEIEKNASLFSKEILNILAKFPSANKIRNTPFGEFIKQINLPKKGRNIKFSLENIYQLACDSVAFDYPLYEKLLKIKIDRLFSLLKEKENISKLIEEIADKSFRREIEILTSIPGIGKESAIYFMAEIVDIKRFANKRKLIGFCGLDPVVKQSGNYKASFKISKRGNSHARRIAFIMAGSVKRNCPYFREYYLKKRKEGKSYTEGVIATSTKLLRTIYTLLKENRLFK

SEQ ID NO: 73982 - protein, 336 aa, unidentified
MNFIGCDLHKKSITFCVVNQERKILKRDRIHCDQPDRIVAFFKAWQPCQFVVEATSSYQWFVELIGPLSERTVLAHPKKLRIIAESTRKSDKVDAQVLAEFLAVDMIPEAYRPTPRERAHRRLVRQRIHLTKNVKRVRSRVRAILAEYNADRKGLFTEEGLKYLDAVKVSAEDRFVICQSVAEWKFLQEQIKQIDKKLKEFAASAPPAEAEARELLDTIPGVGAVTIDVVISELGNVQRFRSQKKASAYAGLNPGSRESDGKRHELKITKEGSPLLRWVLVESAWRLVRQTKRWQSIFEALAKRRGKKRAIVAVARRLLTVMVGMLQRGERYRMAA

SEQ ID NO: 73983 - protein, 343 aa, unidentified
MNEYDGKQFVGIDLHRRHSVIVRQTSTGERLSAVRIVNDPDSLALQLEEAGEHPDVVLEATYGWYWAVDALQAAGATVHLAHPLGVKGFRYRRVKNDVRDAGDLADLLRMNRLPEAWIAPPPTRELRELVRYRAKLVALRSGLKAQAHAVLAKAGVLIAVSDLFGVEGRQRLARVPLGAAYAQRMSSLLELIDVLDTHERRFAEQIAAKLHDDRGYGAIQQLPGVGPVLGAVFVAEIGDVHRFADPSHLCSWAGLTPQPRESDTVVHRGHITKQGSKLVRWAAVEAIQRQPAGTKISVDRKRIEARRGKNIAKVAAARKLLTLVYYGLRDGHIRALTHQPAAA

SEQ ID NO: 73984 - protein, 349 aa, unidentified
MRRPTEKLIAGIDLHSNNLVIGVIDQDGKRISHQKLDCSLKSVEQFLKPFKQRLESMAVESTYNWYWLVDGLRARGYPVDLANPAKIEQYNGIKHADDKHDAFFLAELQRLKILPTAHVYDPELRPVRDLLRRRTNLVQQRTALILSFKSLYQRTTGEEMPLKDLKAMEPKGAVKLYTHPANQLIAKIQLEQIQSLDKSIGLIEKAVLGCAREIPMYAKLETLPGVGRILGMTITMEVGDIARFKTDGDFASYCRAVDSRRMSNGKQKGENNPKCGNEYLSWAFVEAAHCAKRSDPNCRRWYDRKKARTSTTLATKALACKLAKAAWHLMAKGTDFDPARMFPELASKK

SEQ ID NO: 73985 - protein, 349 aa, unidentified
MRYSIGIDMHQRYSFCSVKDTVTGSRMRTRVSHTGDAVPAFLAAYRGVAAAAVEATRNWYWMVNALDAADIEAHLVDPTAAKPLISRRNKTDRIDSDGISDLLAEGLLPESWMAPRPVRDGRELLRGRMTLVALRTATKNRLHGLVERYLPTPVIADLFGVRGRQWLAHVTLPPHAQFVLERQLALLDQLEPLLLAYEARIHEVVRRTPEAQRLDTLPGIGPLLALTIAYEVGTWTRFPSHEHFCSYSGLAPTIQASGGHTRYGPTPKASNRFLRWAFVEAANVIASHPSPKPVYQVFAGVRQRRGYGKAIVALARHLAVAAFHMLRKGEAYREDRVGSHAGQVLVRNR

SEQ ID NO: 73986 - protein, 392 aa, unidentified
MNWKHINGNRDYRIQIGGHYMNYNTVYVGMDVHKESFTLCSCKYEDEKASHYQRTQASYKNVLRYLEFLRTIYGDDTRFVCGYEAGCLGYSLYRQLESFNVECVILAPTTMLEQRSKRRIKTDKRDAEIIARSLAQHNYSPVHIPTETDNQTKEFIRMRDDHKAELKKIKQQILSFCLRQGYQYDGSGNWTEKHVKWLRSLKPVGLYKEILDEYLLTYTTLTDKLNRLDHRIEELASKEEYKESVSKLTCFLGIRTHTALSVIVEVGDFQRFASARKFAGYLGLVPGQHSSGDDRNGLGITKAGNTHVRRLLTESAQSYTRGKIGYKSRVLRLRQAGNSPQVINYADRANERLRRRYYKMVLKDGKKYNIAKTAVARELACFIWGMMTDNIY

SEQ ID NO: 73987 - protein, 344 aa, unidentified
MQTTTIGIDLAKQFFQVHGIDQSGKAVLKKQLRRQQMAEFFVQLPPCLIGMEACGSAHHWARKLQSMGHTVRLMAPQFVKPYVKTNKNDAADAEAICEAVARPTMRFVPIKNVEQQGVLALHRARQGFVKARTAQANQIRGLLAEFGISIAQGMGHLTREVPDLIEDASNELPGMFRLLVQRLLDHLKALDQQVDEIEAQIVAWHRQSAQSKKLDKIPGIGPLTASALVASLGDARSFESGRQVAAWLGLVPRQHSSGGKHNLLGISKRGDCYLRTLLIHGARVVIHHAGKRTDSDSWINHVVARRNKNVAAVALANKNARTVWALLAHGSEFRSGYTPALAAA

SEQ ID NO: 73988 - protein, 365 aa, unidentified
MNKQNTTYTAYVGIDWADKKHDFCIRSAHESDSSKTFGVIPHNPAKIEEWVLSLQEKYGGKMAFAMELAAGPIVYALQKYDFIDIYPIAPTTLAKYREAFSPSRAKDDPTDAELALDLILRHPERFKMLKPQSTEMRSLIALVEQRRKLVQDKVRVTNRIRSTLKQYYPQSLEVFDRIDTFTFCDFIERWPTLDNVKRARQSTITSFFKDHSIRRKDLIDKRLELINSSMPLTKDKAVIATNSLQALVHIDLLRTILRSIKKYDETISELAPQHADYALFESLPGAGPSLAPRLLAAFGEQRERFTSAAELQQYAGISPVTERSGQKHWVHWRWHCPTFLRQTFVEWSAQTINKSFWAGAYYRQQ

SEQ ID NO: 73989 - protein, 404 aa, unidentified
MLEVCVIKDHESVDVFIGVDVGKTNHHAVALDRNGKKLLDKALPQDEAKLRAIIDSLAKHGTLLLVVDQPATIGALPVAVAQGAGILVGYLPGLAMRRIADLHPGEAKTDARDAYIIAEAARTMPHTLRSIAVTDEQAAELSMLCGFDDDLAKQATAASNRIRGLLTQIHPALERVIGPHLDHPVMAELLQKYPTPEALRRAGQSRVAAFMARSAPRAGKGWAAGVFTALSEQTVVVAGTGAAGVVLPQLAAQLAQLRASRAEVLAQVEKLVEAHPLHQLLTSLPAVGVRTAARVITEVVGKEFKTAGHLGSYSGLAPVTWRSGTSIRGDHSSRKGNKILKRAFFLSAFASLKDPVSREYYDRKRAEGKRHNQALIALARRRCDVLFAMLRDGTFYEAPSPKTA

SEQ ID NO: 73990 - protein, 430 aa, unidentified
MEIIYPRACGVDVHKSFIVAVICISESIKPTYIKKRFSTFNNQLIQFRDWLIENNCQNVCMESTGKYYIPVYNALEGHIPNVVVANPKWVKAIKGEKDDNKDAKWIADLFKFGIVRSSYIPDKDIRILREFTRYQYKLVNIRSSEKNRFQNALTVGNCKLDLVFTDVFGKSASSIVDTILSDEPYTSEDILSKVHGKCKSSTGDILSAVEGTDLNHFQKERIKIVQKHMKQLDSLLDEVQHHIDMMVLAYEDYIQLLMTIPGVSRKSAIIIISELGIDVSQWSSARKLAAWAGLAPGRNESAGKKKSVKISKAGIYLKPCLVQVAHAAVKDKSCSYYAEKFGRISKRRGKKRAIIAIARKILVAIYHILKTGEVFNPSDMADVETTKEDRIAYITNNFRNAFNQLSRTGLSEEEILSIIIKKSDNSPQTE

SEQ ID NO: 73991 - protein, 277 aa, unidentified
MELYSGIDLHANNHVVGIVDEKGKRVMKQKLVNDPELTLNLLEPYRAELVGIVVESTYNWYWLVDTLMDHEYQVHLANPSAIQQYSGLKYLDDDHDAFWLANLLRLGTLKEGYIYPKQERPLRDLLRKRWHLVKLRTSLVISLKNIMARNFGIRWSASRIKGQSLDSIVSPLPQEDNVALVIRTSKASIDFLTVQIEQVESSVLKQAKEKPSYDKLLSLPGVGKILGLTIQLETGSVSRFQKVGHYASYCRKVESRWLSNEKIKGRGNPKNGNKYLA

SEQ ID NO: 73992 - protein, 368 aa, unidentified
MNKNSMLIIGLDLGDKFSYITIIDQDGEPIEESRLPTTKASFQRKFSALQPCRVAMEVGTHSRWASHLLTELGHEVLVANARKLRAIYHNPRKGDRADAEMLARLARLDPALLSPIHHRSPQAQADLAVLRSRDAIVRCCTLLTPCQHRRCGINHARDIVKASGSRLPSCSADSFTHKTAPHIPEPLRPALDPIIDTIASLSKQIRAYDKKVETLCRQRYPETKLLRPVSGVGTLTALGYILTLENPHRFRRSREVGPALGLVPRRDQSGDRDPQLRITKTGDAYLRRLLVGSAQYILGPFGPDCDLRRWGLKLAERGGKNAKKRAVVGVGRKLAVLLHHLWKTGEIYDPFYLARKYNQAPEAVPAAA

SEQ ID NO: 73993 - protein, 309 aa, unidentified
MENIALIGIDLGKNSFHIHCQDRRGKAVYRKKFTRSKLIEFLATCPATTIAMEACGGSHFMARKLEELGHFPKLISPQFVRPFVKSNKNDFVDAEAICEAASRPSMRFVQPRTESQQAMRALHRIRESLVQDKVKTTNQMHAFLLEFGISVPRGSAVISRLSTILEDNNLPLYLSQLLLKLQQHYHYLVEQIKELESQLKRKLDEDEVGQRLLSIPCVGTLTASTISTEIGDGKQYASSRDFAAATGLVPRQYSTGGGQHCWASASEATRRYEPCWFSAPEYLYKNWNTSQAGWPTGSGSYCAGKVTLS

SEQ ID NO: 73994 - protein, 441 aa, unidentified
MKLQNLEMKRHYISDKFIVGIDPAKHKHQAMILDPKGIPIGNTFSFKSSYSGFHFKLWQKLNAFPFELNPENTAFAVEISINYWQKICHYLSEKGYTVLMVRPITTKYERPRLNNFSRTDPKDALCIASSARQGYFNFYQKYDDEILGLHRLAITYDKLKKQIVIAKQRLRSEVEMLFPEFPSVLKIDTDTARYLLSKYLTAKDFSEINVFYEAIELVAISRNHHGVSTLKALKEAAAKSIGLTLDKVGYMAHRMTVNMWIEQIKMLKIQQYNILREMSALAQKTPFFKLLNSIKGISEITAARFIAEIPQLGNDLHFKQVEAFAGLNLRLAESGQMTGYRRISHWGNNRLRAVLYKMTEETKNHIPEIRIRFIKRQMKHTTYTKNITACTSNLLKLIIALIRDNRCYQFDPDKVKEMEALEEKYQELKQKRQSKAFIKVA

SEQ ID NO: 73995 - protein, 395 aa, unidentified
MLILGVDIAKLNHVASLVDSNSNEIIFSNFKFQNNFNGFSSLKLELEKFNIDAVFILLESTGHYGENFTAFFHNLGFKLGIINPLQTASLRKAKIRDSKNDRLDSITIAQSYLINKPRVISQKDILCNTLKYLNRSRNDRVKERSKYKIKLTGCIDIVFPELQFFFNGIHHKGVYALLKHYNTKEAIAAIRIDKLSNTIYKASHGRFDRDKATALKSLAKTSVGIDSKALSIEITQIIQLIEFLDKQINDLEDEIKTVLKTLNSTIQSIPGISHNASAAIIGEIGIIDKYSHPSKLIALAGIDPKVRQSGNFNASSTRMSKRGSRYLRYALIFTAWNLVRHSPNINAYYQKKRAQGKSHYNALGHVAGKLCRIIFKLLKNDMVYNEDKIKVLLDS

SEQ ID NO: 73996 - protein, 337 aa, unidentified
MKAVCRIGLDIAKLYFQVHGVDKRGKEVFNRKLRRAEVLPFFANLPSCLVALEACGGAHYWAREIAGLDSGHTVRLVSPRHVKPFVINNKTDAADARAICEVVGRPSTRFVTIKTVEQQDMTAWHRIRERKVKERTALVNQMRALLSEQGIIIPQGIAHVRKLLPAIIEDLENKLSMSARDYLSELYTELVEYDGAIAKYESRIVSFAKSSEACRRIQKIPGVGPLTATAIVAHVGQAKHFKNGRAFAACLGLTPREHSSGGKQKLLGITKRGNSYNGLLQPEEKSTPRIHWLRALCGRRGKHVAAVALANKTVRIIWALLSSGEAYQPSTAQHTGT

SEQ ID NO: 73997 - protein, 355 aa, unidentified
MERYIGMDVHAASCTLAVISEKGRKLRDFPVETNGQALVEAIRMIPGHKHLVLEEGLQSAWLYETLSPHVDEIVVTGVTESRGHKSDKRDAYGLAEKLRVGNLDKPVFKSPRQFTRLRELSRIHMTLVGDAVRAQSRIKSLYRSRGILVSGVNVYGVRHREKWQQQLCSSAQTRATRLYDHLDFLLEQKKQAEADLLREAKKHPIVRVLETAPGFGPIRAARMVPIVVTPHRFRTKRQFWSYCGLGIVTRSSSDWIQTADGGWIKARVAQTRGLSRQHNHFLKSLFKGAATTVITQLSKDPIHARYERLCDGGTKPTLAKLSLARMIAATVLRMWKDEKEYDPERGDPSTVTREG

SEQ ID NO: 73998 - protein, 370 aa, unidentified
MKGGLPGGSLRVVTWEATMRRPLNIMLHVGMDLSRHRLDVRVLEDGGATVAELVVAPTEPELRQLAARFKPGGPVRGVIESMNGARFVHDTLELAGWEVEIADAQKVKGLAPLACKTDRIDAWVLAELSRRDLVPAIWLPDPAVRAHRERARFRLHLVHHRVELKNRIHASLITFGHGCPTSDLFGRVGRQRLTELEFPEPWASDIAAAVELIDHLNAQIATIDTDLRREGADHPYVPLLMTVPGIGWILAYTIAAELGDITRFPTPKKLCGYTGLCPRVYQSGSVDRRGRLAHNGPKYLRWALIEAAVHACRHEHYRDHHQATKVRLGRQRGAKVARVETARKLTEAIWHMLTKGEPFAPQVPRQSLAA

SEQ ID NO: 73999 - protein, 338 aa, unidentified
MTIVMGLDQHRAQITAEWLDSETGELSRARVAPAHRESVRRFLGRFRGRELEAALEATTGWRFVVEELQRIGASAHLVEPAETSALRGNKKRAKNDRSDARHLRELLQAGRLPESWIGPDHLLDLRARVRLRHSLVDDRGEWQQRMQAVLYHHGVPKRADLLTRENRAWVQELPLPATGREQIAVGLAMVDAIDLQLQPLDRELCAYARRQPGCKALRGHYGIGALTSVTILSELGDVSRFSSSREVVRYAGMDITVHASDRRRAPGHLSRQGPPALRWALYEAAQAAAREGSPDRAYFLQAAERLGRNRGCLALARKLLKRAYHTLKDLGEEGLQPA

SEQ ID NO: 74000 - protein, 341 aa, unidentified
MEKFIRTAVDLGKNYFQVHGLESEGGRSISRKVKRSKMHEVYSQIEPCRVGMEACGSAHYWARQLIAMGHEVVLIPPAYIKPYVKRGKNDAIDAAAICEAMSRSDMRFVPVKSADQQAVLMLHKTRELLVKQRTMAVNALRGHLAEFGIIAAKGIGRVDELLALAQMDATLPHIARAAVACLTQHLEGLELSIDTVDEEIAKAHGQNPTSCLLDEIPGVGTLIASAVAASVPDPGVFRSGRDFAAWLGLTPKQHSSGGKEKLGAITKQGNRYIRKMLVTGATSVLRVAGKRKGALADWINALRARKPERLVAVALANKLARICWAIMTTGEGFRTATYVKA

SEQ ID NO: 74001 - protein, 422 aa, unidentified
MLGVGVDWAESFHDVALGQPGKGVVAEFRIEHGPAGVARLIARCLELEPDPAEVRVVLETRHGLLVEALTDAGFSVLPVNPDLVARRRGPARKKDDAADARICCLLALDQYAELRKLIPHGQTGAELRAIARDDERAARDERRIGNRLRADLLAVFPAAIDIAGGDLGAPVFLRLLEHWPSAEALASASGGELEAFARSARHGWPGQFAGKVTAAMAEPRLPARPELARAKAGAIRLAAAQLLLLRAQRKTWERRMGELLLGAPRYGRAKTPKDPDPGKAFPGGEIYLSMPGLGDRLAARVAGEIGEHPEQFTTPNALQCYAGRAPVTRRSGRSEFTIARRLAYNRHLGEAVQQWAFCSLSRSAWAREFYDAKITAGKTHHAALRTLGNRWLEVLWHCLRLEIPYDEAIHTANRNHALKHAA

SEQ ID NO: 74002 - protein, 358 aa, unidentified
MSNGSRVQLKMTAGLDLGDKYSHMCLIDTDTSEVIEEGRLRTTPEALRRRFDSEQPLKIAIEVGTHSPWVSRLLEECGHEVLVANARKLRLIYGSKRKTDKLDAENLARLARLDPKLLYPLKHRSEASQAHLAVIRSREALVGSRTQLINHVRGAVKSFGHRLPKCSARSFQKKILEHLPKELVSALRPLLETIGELTERIREYERKLEEIATEHYPETELLRQVAGVGALTSLTFVLTLEDPHRFSKSRSVGAYLGLVPGEDQSGDSDPQQQISKEGDEMLRRLMVGSAHYILGPFAPDSDLRRHGLKIAERGGKNAKRRAVVAVARKLSVLLHHLWVTGELYEPLHNAQRSGDQAA

SEQ ID NO: 74003 - protein, 361 aa, unidentified
MRIIGCDLHARQQALAMLDTTTGEVVAMILKHEGDNVREFYSKLPRPVRVGIEATGSMLWFVNLMEELGIECQVGHPANIRAAEPRKQKHDRRDADLILKLLVENRFPKIWLPSKEQQDLRALLRHRHQWVRIRTRIQNALQAMALANGLRRGPALWSQDGQRTIASLPLAPHAAYRRSELQAMYAKFAKEIEKLNQRVEEQACERPGARLLMTHPGVGPITALATEVFLGDAARFADSKALASYVGIIPSEYSSGERQRFGGLSKQGNPLLRFLWGEAAMHAVRRDPELQRFYRRKLVQKGLGKTRVAVARKLGIRLWIMLRDEIDYNEFCRRGQKQQKSSEACAGMPDTGHGAKQSPAD

SEQ ID NO: 74004 - protein, 361 aa, unidentified
MQSTTIIAFDEHAATTVAAVLLPGQRTPALHSLTSDSPAILRFVKRVHRDGAVRCCYEAGPCGFELQRAMMAEGIPCEVIAPALIRRRAGDRVKTDRRDAAQLAVLYHAGALTAIHVPTDQEEAVRDLLRCREDIRAALLRARHRLSKFLLRHGRRFVATKSTWSARHWAWLRAQTWSLPALEHTHQAYLRAVDEAIAQLQAVDAQLQELVTHDSWRMRVNRLRCFRGIDDLTALTIAAELGDPRRFPSARGLMAYVGLIPSEHSSGTKRARGAITKTGNAHLRRVLVEAAWHYRHHPFIGRALHRRQEPAPESAREQAWRAQQRLYRRYQRLAARGKPKQHIVTAIARELTGFVWATLTQ

SEQ ID NO: 74005 - protein, 391 aa, unidentified
MVCVGIDVAKDKHDCCILDSDGMVRADCFTIPNNMDGFKQLLQTIQNCTKKSDKIKVGLEATGHYSYNILGFLLDNGLPTYVINPLHTNLYRKSLSLRKTKTDRVDARTIATMLLSDVDLKSYTDIAYHNEELKSLTRYRFDKVQERAKLKQSVSRLATILFPELEGLVSSIHGTSIYALLSEYPGTKQISEVHLTKLTNLLTTASKGRYGKEKAIQIREAARASIGSVMPAKSLELKHTIKLIQELASEIDEIEDSIQKIIDELNPPILSIPGMGVNSAAVILAEIGDFSNFSSPDKILAYAGCSPSTYQSGKLTNCYAHMEKRGSRYLRHALYNATKYVCYWNPVFAEYLAKKRAEGKHYNVALSHAMKKLVRLIYALQKSGKAYLAAA

SEQ ID NO: 74006 - protein, 420 aa, unidentified
MARRLELGKDMTDQRQWYVGVDWASESHHVFLTDADGRKIAERVFKHGGEGLAEMAAWLVAASGAEASQIQVAIEVPHGPVVETLVERAFKVHAINPKQMDRFRDRYTLAGAKDDSRDAQVMASALRTDPRCFRLLAAADPVVIELREWSRIAEDLSAERNRLTNRMREQLWRYFPAMLELDGDLGAEWLLDLWEVVPTPAKALRIRDKTIATLLKRNRIRRFDATHVLDVMRKPPVRVAAGTTEAASAHISALVARIRLVNRQLVQAHRQIDALTARLIPPEPEPGQRKQHDVEILASLPGVGRIVLATLLAEAFDALQRRDYAALRSLTGVAPVTKRSGKSCIVVRRQACHDRLANAMYHWARVAVQHDPRSRAKYAALRSRGHSHGRALRSVADRLLNVACAMLKTGTTFNPSPAAP

SEQ ID NO: 74007 - protein, 369 aa, unidentified
MAKSITFIGLDVHKDTIAVALAEAGLRGEVREHGKIPNAAAALKALAMKLASAGRELRFCYEAGPCGYGIQRQLAGMRHDCTVVAPSLIPRKPGERIKTDRRDAINLAKLHRAGELTPVWVPDQAHEAIRDLVRARQAAVRTLRQARQQLSGFLLRHGYHYHRPAWTQLHRRWLASLRFEQAVHHIVLEDCIAAVEAATARRDRLEAHIEAALPEWALAPVVQALQALRGVGLVAAATLLAELGDITRFTNPRQLMAYLGLVPSEHSSGRTRRQGGITKAGNGAARRMLIEAAWSYRFPARISREQLLRQERLAKPIRDIAWKAQERLCRRYRQLARAGKLPTVITAAIARELAGFIWAIARQPQSTTP

SEQ ID NO: 74008 - protein, 350 aa, unidentified
MNIIGCDVHTRYQVVAWVDEETGEIRRRRLEHGKEEVRAFYAGWPRGACVGIEATLPALWFERLLEECGHELWVGDAAEIWARSVRRQVTDTRAAEHLLDLLLTKRFPRIWVPTAEERDVRQLLVHRMKLVRMRTLMKNQLHALAMSQGVCRKRKLWTVKGRAELEGLGLLPWARRRRKELLELLDRLQAGIEPLDQAVEEEAKARPEAVRLMTHPGVGPVTSLTYVLTLGPVARFPNSRKLVSYLGLNPSEHSSGGRQRLGHISKQGNTMLRWLLVEAAQTAVVGDPELRRAYQRLKFHRVSGVAKVAMARRLAVRLYWMLRARVDYAQRALTSGSPSSAVVDASPSKV

SEQ ID NO: 74009 - protein, 343 aa, unidentified
MDYFAGLDVSVKETSVCIVDDAGKIVREARVASEPEALLQVLTNTIYRLKRVGLEAGPLSQWLYSVLAEAGLPVICVETRHMRAVLKAQINKTDRNDARGIAQMMRVGLYRPVHVKTLRSQKLRMLLTHRKLLQSKAIAIENDLRATLRNFGLKVGIVGTVKFEARIKELVAKLPDVALLVEPLLVVRRVLREQVGILHRRLVAVVRDDDVCRRLMTIPGVGPVVALTYRVTVDVPARFRNSKAVGAVFGLTPSRYQSGENDRTGAISRCGDEMMRMMLYEAAQSMLVRSTKWSWLKAWAMKIAKHRGMKKAIVALARRLAVIMHRIWVDGTAFRWTREVAVA

SEQ ID NO: 74010 - protein, 430 aa, unidentified
MMRPNAGGIDIGATEIFVAVPADRDVEWVRCFATFTQDLHMLADWLQQCRVDTVAMESTGVYWIPLFQILEARGIEVHLVNAQHVHNVPGRKSDVLDCQWLQYLHSVGLLRASFRPEQAVCEIRSLMRHRENLVQMACVHVQHMHKSLDQMNLQIHHVISDITGQTGLAILDGIIAGNTDPEELAKHRNYRIKASPETVKKSLVGDYRAEHIFTLKQSLTVYRYYQQLIGDCDREIQQRIQSFENSDGDSSRKSEQSSPTPRADFDLHTHFERIFGVDLTRIPGFDVLRVQTIFSELGADLSAFPTVESFCSWLNLCPKDGTSAGRRIRVYLKTKNRVTQVFRMAGQSLHNNKSYLGDYYRSQRARHGGLKAVKNAGHKLARIFYHLVRTRQPYDETVFAKLEVRNHQRRLHKLQFMAKQLGYSLLQAHA

SEQ ID NO: 74011 - protein, 342 aa, unidentified
MEQYVGLDVSLEETAVCVLDKTGKVIWRGRCSSDPDAIARTVRDRAPFAVRIGLETGQLSTWLVHGLRRLDLPVVCLDARHAKAALSLQVNKTDDNDAHGLAQIVRTGWYREVAVKSMDSQAVRVLLMARAQLISQRQATANQIRGLLKTFGLRVGQAGGSRFAVRVRELVADHPMLVAIIEPLLTVWQTLREQAAELDRQVRMRVREDAAARRLMTAPGVGAVVALAYTAVIDDPARFAKSASVGAYLGLTPRRYQSGEVDCAGRISKCGDGLLRSYLFEAANVVLSRITKPSWLKTWGQALAQRIGARKAKVAVARKLAVVLHRMWRDNTEFRWEVKPAR

SEQ ID NO: 74012 - protein, 353 aa, unidentified
MEEVNTRSEVILGVDTHLDVHVGVVIDAVGRVQGTLAIATNPSGYEQLISWAQGFGALRRAGVEGTGSYGSGLTRFLEARGVTVIEVNRPDRSRRRIRGKSDPTDAESAARAVLADDAKGIPKAQSGLAEALRTLSVARRSAVKAKTQAVNQLRALLVSAPSFIRDVVLQVKPEQCVAACTALPQDDANPVLASLKTTLRLLAKRWTALHEELRELDKQLTRITKLAAPRLLARFGVGPQTAATLLVTAGDNPTRLRNEAALAALCGVSPLDASSGKMSRHRLNRGGQRQANNALWTIAMVRMRSDARTREYVARRTREGLSKKEIHRCLKRYIVRELYPLILADLKDSARPA

SEQ ID NO: 74013 - protein, 344 aa, unidentified
MSIKVVGIDIAKNLFQVCVLSSDGQILSNRKVKRDKLLDTVRQLPEKTSIAMESCATSHHWGRIFQELGHSVALIPAQHVKPFVGRQKNDANDARAICEAFSRPDIHFVPVKSVEQQDLKAIRSVRKRLVENRTALSNQIRGLAAEYGVVFPLSIKALRSHLPIALEDAENDLSPVMRNLLQTLYCDFVSLSEEIDEMTQSVTMLSQQNPRYEAIRNIPGFGPILTAALISEVGAGHQFQNGRQFSAWCGLVPKQNSTGGKSSLGSLSKNGNRELRALLIHGARAVVRCGANKVDSMGAWLRGLIARRGKAKAIVALANKLGRVAWHILVKNSEYDINQAFKPV

SEQ ID NO: 74014 - protein, 379 aa, unidentified
MVQWFLDLRTRDREPREKPSMKIVGCDFHPRWQQIAVFDGETGGVSEQKLLNGDGEAERFYRGLEAPALVGIEACGNSQWFIDLLERLGHQVWVGDAARIRASYVRRQKTDRRDAGHILKLLMEDRFPRLWMATAAQRDLLQLLVHRHKLVEIRTRVKNGLQHLALNRGMQKQRSLWTAGGMAGLKNLALEGWSLRRRADLLKLLGELDQQVSALDEAVGQAAAGHPEARLLMTQPGVGPVTALAFAVTIGDVRRFEHSGQVASYVGLIPREHSSGGKQRLGAISKQGNRFMRQLLVEAAQTACRLDEGFRKPYVARCHHKPKGVAKVAAARKLAVRLYWMMRQKVAYPEIAHIESSSRVPLTGTKEVVTLNERSRIRQ

SEQ ID NO: 74015 - protein, 371 aa, unidentified
MDPPLCRTALMSQNGCHEFRHIIHPQEASPVNQHIRVLGIDIAKQVFHLVGMDGRGTVVLRKRLYRSQLMAFITTLPPAVIGMEACGGAHDWARRFREHGHEVHLMPPQFVKPYVKANKNDMRDAEAMAEAVTRPTMRFVPIKSVAQQDIQAWHRVRTRLLKARTALIHEARGLLLEYGIVVPPGALTFRKHLLATLAANDAKLTPMSRVLFQQLAEELAALEDRLTRSDTQLTQLARHHPVCQRLMTIPGLGELTATALVAAVSDAAQFNNGRQFTAWLGLVPRQHRSGGKARLLGISKRGDRYLRTLLVHGARSCLRWVDRQRDRRSQWARSLLERRGWNRAAVALANKNARVAWVLLRTDQVYCAVEA

SEQ ID NO: 74016 - protein, 382 aa, unidentified
MQRAINTATVSANTLECALELSKKTWLLAIQFPDRVQPSVYTIKGGDAAALLEKLIAARNRWAKVSGSPPSIVLCYEVGYDAFWLARFLMAHGIECLVIDPGSLEVKRRPRRVKTDRVDLKKLLRTLSAWRRGERHVWSVVRIPTIEEEDLRHSHRERSRLISERTAHMNRIKGLLFAQGIRVDNIPKTLTLEKLVTGDGRRLPPRLAAEIVREMQRLAVVEEQIEAVERERDTAPTACKETEKKRHLLLQLKSIGPTNAALLSREVYYRHFDNQRQIGSFLGLTPSPFKSGAEERCQGISRAGSGRVRAVMIEATWLWVRHQPKSALTRWFLQRTAGQSKRVRKIMIVALARKLAIALWRFVELGLVPEGAILSPPVKARS

SEQ ID NO: 74017 - protein, 400 aa, unidentified
MRCTDHPAHLRTAVREQDSSLFVALELSKSAWLIAASAPGSEKVSKYRVAAADVAALVALLARLKAQAERYRGGPVQVVSIYEAGLDGFWVHRMLEANGVESHVVDAASIAVNRRSRRAKTDRIDVEGLLRTLMGWARGERRICSMVRPPSPADEDERRLTRERGTLVTERTRHVNRIKGLLATQGVFGFEPLHKNRRQRLEELQQWNGQPLPTRLKTELVRELDRLELVMSQLAALEAERDRALQARRTAVGNTTKAASSGTASAGEVGSQLLRLRSIGPEIASVLSLEAFYRNFSNRREVAAYSGLAPSPWKSGGIDVEQGISKAGNARLRTTMIQLAWLWVRHQPGSALSRWFHERVGDKRGKIKRIAIVAVARKLLVALWRYVAQGVVPEGAELKA

SEQ ID NO: 74018 - protein, 348 aa, unidentified
MRTEYFITMDAHCRTTDVCIKTGRGKLLRREHLATGIPQLREVIQSVPHPRHVAFEESSMAGWMYRHLRDCADELIVCDPRRNALIAKDGDKDDPIDAGKLNDLYRGGYLRPVHQLDSAEKAATKQLVGMYHDRVARRVAEGNQLLALGKRWGVLLKRSELVPSQGQMLLQDRLGQAGVPESIRQIGDSLWKSFQQTVEQEQDLYERVCRLARANPMMKRTAELPGYGPVRAATLISYLDTPWRFKSKAALWKYVGIGLHREQSGQGAEYLCVEQACNRLLRNVVIGAARSAIECKENVFGERYARWIKNGLSSRNARRNVARDQVTAVWGMWKSDRDFDARLIPTLS

SEQ ID NO: 74019 - protein, 397 aa, unidentified
MALRVPAALWGWLFLELSAGRILLLWCGSKEARAHRPESGVPATVSPSTERQIPMTIMIGIDPHKATHTAVAIDHDENVIDQLEIRASKTQARRLCEWAGQFDDKAWAVESARGLGYLVAQQLVAAGETVFDVPPLFASRVRVLGSGRSQKNDPNDARAVAIAAMRSDRLARVGADDHAQVLRLLVKRHRDMAQLRAKQLVRLAALLTELQPGGTGSSITLNRANRLLDNLDVTDEVSAHRVMIARELVADVVVLDTSLKTSKARITTAVTASGTTLCDIVGIGPICAATIIGYSGDITRFATKARYATYNGTAPLEASSGGRTRHRLNPRGNRTLNFAIHIAAVVQVRTGGEGRIYYDRKITEGKTNKEAVRALKRRISDRVYRHLVNDARTALNT

SEQ ID NO: 74020 - protein, 406 aa, unidentified
MEEIIIDKGCGLDVHKETVVGCVMGSGIKKEIRTFSTMTGDLFRLKGWLSEKGITHVAMESTGPYWKPVFNVLEDSFEVILVNARHIKNVPGRKTDVKDSEWICKLLRSGLLAASFVPPQGIRELRDLTRYRRKLTQTISSEKNRIQKVLEDANVKISSVLSDTFGVSGMEMIEAIMEGNLSVEQISELAKGRLKSKKAEIKESLVGNFRDHHRFMIQASLGQIGSLEKTIADLDQEIDRKLEGYHQEYELLQTIPGVKEQGAASIIAEIGVDMDTFPSEGHLSSWAGMSPGNNESAGKKKSGKTTHGNKNLRAILTQCAWAASKTKNTYLSAKYHSLVGRRGKKRALIAVGHKILIMAYHILKNGVPYKELGKHYLIHRREDKIVKSHVKRLQDIGYEVELKKVA

SEQ ID NO: 74021 - protein, 461 aa, unidentified
MKAKKNSKKIKAKRPGSAGLPKIQPLVAGIDVGSENHYVCAPTSDGGVEMRVFGATTPDLLEIAAWFQQLGVVSVALESTGVYWIPLFEVLDNRGIEVILTDTRQLSRVPGRKTDAEDCQWIQLLHSCGLLQDCFRPQDAICHLRSLVRGKATLVAERSDWLRRMQKSLDQMNVRVHRAVSDVDGVTGMAILRAIVAGERDPVQLAKFRDPRCRNSQATIAKELSGNWRQDHLFNLAQGLKMYDWIDERIADYQREILRKMAELRCEQAAQNPLQPVKNKEKAKGIKKRGEEPMRQVLHGMAGVDLTTIDTIGVGTAEVVMSEYGADLSRFPSEKQFVKHLRLAPRQSITGGKPQSKGKGKKGSTRAGQALRTAATTAHHSKSAIGAYYRRLAANKGSDVAVFATARKLASLIYRMLRWGQAYVDEGVAAYEKRYQTARIHRLKTTANQLGYKLEPQISVA

SEQ ID NO: 74022 - protein, 343 aa, unidentified
MARFVGLDVSQRLTSICVVDDTGRRVWRGQCASDPEQIARLISRHAGDAAGIGIETGPMTPWLVHEFRARGLDITCLDARHASAALKMQMNKTDQNDAEGLAQIMRTGWYRSVHVKSLDAHRARALLGARAQLVGMTTRLSNHIRGVLKTFGLLPGAMRGLPFDRRVETLLADRDDLTSIVRPMLLAWRQLREQIAAFDKEVRALAKKDPTCRRLMSVPGIGVVSVLAYVSTVEDPKRFARSRSVGAHMGLTPRQYQSGEIDRSGRISRCGDTLARTLMYEAAVVILTRVKRASNLKDWAQAIAKRSGPGKARVALARKLSVILHSIWRSGEAFRWSEQPAVG

SEQ ID NO: 74023 - protein, 357 aa, unidentified
MPSITPDDAAIIEVTGGVDTHLDTHTAAVIDPIGRVLGTQQFPATPAGYAALLTWMRGFGPLRRVGIEGTGAYGAGLARRLRDEHLEVIEVDRPDRKTRRFQGKSDPIDAIAAAKTALAGERTGIPKQRDGRVEALRNLRVARRSAVDQRADAQRQIKTLIVTAPDDLRTQLRGLAVKPLISTCANLRPDRTDAATPATAAKIALRSLARRHQQLAVEVADLDELIEPLVAAINPALVAVNGVGADTAGQLLITAGENHDRLTSEAAFAMLCGVAPIPASSGKTNRHRLNRGGDRQANKALYRIVLCRLRWDPRTRDYMQRRTKDGLSKKEIIRCLKRYVARELYQLITSKDLELAA

SEQ ID NO: 74024 - protein, 350 aa, unidentified
MASTPNMSTPPVMIAIDPHKRSWTAAAVDVRLQPLATIRVPVSRDGYRTLLRFARRWPDTAWAIEGASGLGAPLTVRLRQDGITVLDVPAKLAARVRLLSTGHGRKSDEADAVSVGVAAHTSSSLNTAEIDSATMALRALVEHRDDLVKTRTQTINRLHTVLTHLIPGGASRDLNAERAAELLRTVRPRDTAGKTLRALAADLISELRGLDRRIDKAVHDIEIAVKDCGTTLTELHGIGALTAAKIVSRVGSIQRFDSPAAFASYTGTAPIEVSSGDVVRHRLSRAGDRQLNYCLHVMAITQIRRDTPGRTYYLRKRANGKSHSEAMRCLKRRLSDTVYRQLLRDANTTT

SEQ ID NO: 74025 - protein, 315 aa, unidentified
MSKETLDANCARGQRKQAKIFANSPDGWKLVLSWLKALGSKQAHVCMEATGRHSLGVALALYDAGHIVSVVNPAQIRDFARAKLGRNKTDKVDAALIGDYAALFNPAPWTPPSPAMRRLCELHTVRAGIIGSRTEWKNRLGSGLGDSTATGLAAMTIEHFTHQLETIDRAIGETIDQDAALRGRRDLLLSVSGVGETLAALLLVEMPSPEVLRRSGEMVAYAGLNPSHYRSGSSIDRPTRISKIGNATLRSSLYMPALSAMRFNPAVAALVARLKEAGRLKPKQIVVAAMRKLLVICFGVLKTGRPFDPAIAMPA

SEQ ID NO: 74026 - protein, 343 aa, unidentified
MSTYYYIGLDIHKRTISYCIKAINGSLIGQGKIEADRKSLDAWAKGLPGPWVGAMEATIFTGWVYDFLKPHAVALKVAHPEMLKAITAAKKRNDRADAEKIADLLRVNLLPECHMLSEEIRELRRILRYRNHIVRTAVKMQNKISGLLMEVGVNYSKRRIHGKKYFHEILERVEEIPHSVKELLKLSRSSYEMFRTFQKRLVETLCTNNLIHDRVQRLMTIPGVGELTALTWVLEIGDSGRFTSIRKAVSYYGLCSAQRESAGKEQRGPISKKRNKHLQTMLIEAAKLAPHWNEQLAIVHERELKRGDRNRATLAVARRLVAYMLAVDKRQTGFEPLSIAKVA

SEQ ID NO: 74027 - protein, 363 aa, unidentified
MSTITIGVDLAKSIFSVCEMDAAGHVLGRRDLGREAFALWLAQRPAGTVVAMEACSGAHHWARRCLAYGLQPRLMAAQFVAPFRKNRTAKNDRNDAEAIATAARQGNMRFVPVKDVDQQARLAWHRVREGYKTESLAIGNRLRGLLAEFGVVVAKSDLALHRVLAALDQHAALPGEFKELLRDLSAHWAQLRAAIDACGARIDAHARQDVRCVRIGAIVGVGPITVDAMVASIGNAREFRNGRQLAAWLGVVPTQHSSGGHTRLGTISCRGDAYLRTLLIQGARSSLQRAKAVSVEKSTPEQIWIRQLDGRMPFGKVLVAIANKHARQLWAMLAHDLDYDPHACVKHPMAQRFADQHTLTAMA

SEQ ID NO: 74028 - protein, 342 aa, unidentified
MRIIGCDLHAAQQTIAMLDRDTGEIVERTLSHEGTTVRDFYTNLPPPIVVGIEATGSMRWFLRLMEELGVTCRVGDPAKIRQVETRRQKHDRRDAALLLQLLSEDRFPAIWMPPAELCELRELVRHRDQWVRLRTRVKNALQGLALAHGLRRRAGLWTQRGQATMAALPLAPYASDRRSALQALHEHLTTPIDALDQRVGEQARTRPQARRLMTHPGVGPVTALATEVFVGDPSRFADAKALASYVGLIPSEYSSGDRQRLGKLTKQGNPMLRCLWCEAAIHAVRRDAALGRFYRRKLQQKGLGKARVAVARKLGIRLWILLRDQIDYAEFCRRAPSPATAR

SEQ ID NO: 74029 - protein, 442 aa, unidentified
MRIVYKRCCGMDVHKDSVTACVLLIDEDGEFRKQTRYFPTMTRGLKEMAAWLASLEVEAVAMEATGVYWKPVWNILEAEMKFQLLLVNAHHVKHVPGRKTDQKDSEWIAELLQHGLLKGSFVPPPSIRRLRDLTRTRAKVTQNVATFANRIQKVLEDANVKLGSVATDALGVSGRRMLKALIKGQRDPKQLAQLALGRLRKKLSQLELALEGHFTEHHAFQIKALLDLVEFGEKRLCQLEAEIQRLLRVQEPEPRRPDDSAIAEVDTSSTPPTSPLQRAVELLDTIPGVDQVAAWTLVAEIGINMHQFGSASQLAKWAGICPGNNESAGKRLSGKTPKGNIWLRRVLCEAAWAASRTKDTYLAAQYKHFIVRKGKKKTIVAVAHSILRIAYYLLTRQCPYTELGGDFFDRLNQEAVRSRLVKKLVSLGYQVTLTPVSSEATA

SEQ ID NO: 74030 - protein, 429 aa, unidentified
MKQKSNSLTKGDGVGKTTKARGPVQRDAKEVMAELVVKLSQKLEPQSTRTSTEDQRKAGMPGPNRDRLTVGVDLGDKWSNFCILGLDGEKLTEGELRTTPQDFAEFFQAMAGARVVMEVGTHSAWARDVVARSGHEVLVANPRQMEGPKQRKRKNDRVDAHKLARVGRMDPQSLFAIEHRSVEVRQDLVALRARHAVVAVRKDLINTVRGLVKSMGTRLPKCSTESFAKKVEGALPTEVRDALLPLVRLVEALSSSIKGYDERIEKLATEKYPHTKLLRQVKGVGPLTSLAYVLTLQDPQRFVKSRDVGPYLGLVPKQEDSGDSQPQLRITKMGDMMVRQLLVGSAHYILGPFGPDTDLRRYGLRLSERGGKNAKKRAVVAVARKLAVLLHCLWVSGEVYEPLRHALPKATRKKAERPTAAEASGRAAA

SEQ ID NO: 74031 - protein, 352 aa, unidentified
MDITTAGADLAKNVITVCAQDRSGRTMERRDLRRDAFLAWLRRLPAGCIVGMEACSASHYWAREMGAIGLQPRIMAAEFVQPYRKSRAGKNDRNDAEAIAIAVRDPNMRFVAVKSVEQQARLARHRVREGWKEERTAQGNRIRGLLGEFGLVIPKSQAALAKALVEALHDERVPEPVRELVRATREHLDLLGKRIADCDRAIGLACRGDPAAKRLQEMFGVGPTSADAAVATVGDARAFRNGRQFAAWLGLTPRQFSSGGKTRLGAITKRGDAYLRTLLVQGARSALTGAQRCAPERASRLQQWIVQLHARVGFQKTLVAIANKNARVIWALLAREETYNPEAWKAYAPAKG

SEQ ID NO: 74032 - protein, 350 aa, unidentified
MDKELYIGVDVSKQTLDLAYYDGESIDWKKAHIKVSNNNAGFKKIGSWVAKVSKGFDIVLFCMEYTGLYTQNFRLWLEEKHYIYRMVEPRKMHRFEPDLDDGLRSLDRIKTDELDSFRIAIYCEQNHRKILRNPSKLPPPVYFKLKRLLAERKQTVKQSVLYKQQLHDICAYDTDLSVERKNGQLKTLNDALKGIDNEIDMYIKEDADISKNFSLLTSIPGIGRVVALEAIVLTENFMAIDNPRKYACYIGVAPFKKESGTSVRKGSSVSKKGFKQAKADLSIACLVCMQHIPNIRDYWERKRKEKCSGIVFNAIKFKMILRMFAVIKRGTPYVETDNYRNGKNKQPGVN

SEQ ID NO: 74033 - protein, 349 aa, unidentified
MKIIGCDFHPGYQQIAMWDKANGEMLERSLSHERKEEVRAFYAGLQGPVRVGIEASGQSQWFERLLVELGHEVWIGDAAKIRASCERKQKTDRRDAELLVKLLDENRFPQIWVPTPEERDARQLLWHRAKLVRMRSQVKNQLQALALNQGVQRKRKLWSAIGRKQLENLPLLPWANRRRTELLALHDQLDASICELDQAVTEQAYRRPAVRRLMTHPGVGPITALAFVLTLGPAGRFRRGKQVASYFGLIPTEHSSGSGGQRLGHISKQGNSFLRGLLVEAAQSAVRHEPEMRREYQRLAQRKCRALAKVALARKLAVRLYWMLRMEMDYAQLLQGSHAGQLESFRGRS

SEQ ID NO: 74034 - protein, 353 aa, unidentified
MWIIGCDFHPRYQQIAALNQATNELVERRLSHEGKEAAVFYETLPRGALVGMEATCTAQWFERLLERCGHTLRVGDAAQIRASVVRKQKTDTRDAWHVLDLLLTDRFPCVWIPTPAERDARQLLLHRHTLVRWRTAVQNQLHALARNQGMLPHTSFWTRAGRQQLESLVLDPWAARRRQDLLCQLDHLNSQIDELTQQVQHEARRRAETAELMQQPGVGPIVSLAFVLTLGTAKRFPRGKQVASYLGLNPTEHSSGGTQRLGHISKQGNRMMRWLLVEAAYVAARKDPELKRIYQRLAFRRGRKIAAVAVARKLAVKLYWRLREVQEQPGAPPTPVQGCSGSGLVKAVTSPSV

SEQ ID NO: 74035 - protein, 357 aa, unidentified
MSTIADDDRRVIAGVDTHKDFHVVVVLDEHGRRLDQATFSTTTRGYRDLTGWVTGFGEVLALGVEGTASWGAGLSRHLRARGLNVVEVNQPDRHRRRRRGKSDPIDAEMAARVVLAGDATAIPKAGDGPVEALRQLRLARTGAMKARTAAANQLHSVCDTAPDQIRAQLRGLTTRRKVAVASRYRAGDLLTPTGGAKRALVAIARRWSSLDTEVRELDQAIKAILDAIAAPLLARHGVGYDTAGALLCTAGDNPDRLATEASFASLCGAAPVPISSGNTQRRRLNRAGDRTANSALWTIVMVRLRSRHAPTLAYLERRVAEGHSKRDAIRCLKRFLAREIYLDIQHITTTAALDIAA

SEQ ID NO: 74036 - protein, 346 aa, unidentified
MEQYVGLDVSLKLTAICIVDRTGKIEREGVVASDPEAIAAFVKSHAPHVARIGLETGATSTWLWTELNKMGLPVICIDARHAKAALKMQINKSDRNDAVGIARIMQCGWYKEVRVKDLDSHAIKALLVSRALLVKIKRDIENQIRGLLKNLGLVIGRAKMNVFAVRAAELAEVRPELAAAVEPLLKAREAVGRQIADLDRKVMRLARNDAQVRRFMTAPGVGSITALCFLATIDDPTRFKRSRSVGAYVGLTTRRYASGEIDWTGRISKCGDVMLRSYLYEAANVLLTRVARWSTLKAWGIRIAKRSGLRKAKVAVARKLAVILHRMWIEGTEFKWSSKEAANQPA

SEQ ID NO: 74037 - protein, 367 aa, unidentified
MTKDTLYVGLDTDKKHIDVAVAEPLPGGEVRYWGKIANQPAALDRVVKRLRKDGRALAVCYEAGPCGYGIHRRLNGKPGVACQVVAPSMTPRRPGVRVKTNRRDCLTLAKLLRAEELTAVWVPDAAHEAMRDLLRARGAAVEDLMRCRQRLGGFLLRQEIAYAGKPWTKKHRAWLGRLEFAEPAHRPMFGELLDALDQAQARRDRLTDRIAEAVPGWSLAWLVEALQALRGYRLINAATVAAEIGDPRRFDSPRRLMAYLGMVPSEHSTGESVRRGGLTKTGNGRARKALIEAAWTYTRPAKLPKATAAGQPAALRAIADKARHRLSGRYRKLIARGKRAPVAVAAIARESLGFIWAIAQAAAPRHR

SEQ ID NO: 74038 - protein, 335 aa, unidentified
MNKKKLNAQSKKQTSKKQTDKEPVFVGIDVAKDKLDLARSDTDELITIANTAEAIASMIEWLADATLIVIEATGGYERTALDAMLDANLPVALAQPAHVRHMAKALGILAKTDAIDACVLIAYARHAQPRLANKRSKNRVELEALVTCRRQLIKSRTEQRNRLGVTRAASARAAIEAVLATIDEQVAELDEQINQLISSDDDLNGSDQIIRSAPGVGPVLSATLLAGLVELGSLTGKQISALVGVAPFNRDSGRMRGKRAIRGGRPDIRSTLYMAAVTAIRCNPVIAGFAARLRAAGKPGKVVIVAAMRKLLTILNAMLRERIEWSQLKIVQNLT

SEQ ID NO: 74039 - protein, 378 aa, unidentified
MLSENIIHIAIELSVSSWLVAVRLPGAEKSRLHRITGGDTTALLALIAELRARASAKLGQAVEVACCFEAGRDGFWLHRLLTAQGIAAYVLEPTSILVNRRARRAKTDRLDAEGMLRVLAAWLAGDGQICSMLRVPTPEDEDAKRPHREREHLVQTKLRLENRIKALLFTQGIRSRPSLRSWERDMAELRTGDGRALPPLLRSELDRLRRQLVLILELIRELEAEQAAAIEAAADDAMVQKVVGLQRIRGIGPNIAAVLVREVLYRSFANRRQLASYVGITPMPHQSGGMDRTRNISRAGNPRARTTLIQLAWLWLRYQPGSTLALWFRERVGALQGRTRRIAIVGMARKLLIVLWRYVETGVIPDGVEITTPEAATA

SEQ ID NO: 74040 - protein, 412 aa, unidentified
MRRVIGIDIHRTFGEVVTWEDGKLRNLGRVEMTRTALEGLGGKLLPTDEAVIEATGNCMAVSRVLSTFVRRVVIANPLQVKAIAHARVKTDKVDAGTLASLFAAGYLPEIWIPDAETERNRRLTARRYQVVRHRTRIKNEVHAILHAHLIPKCPHADLFNQRGRAWLGRQELPDDERLAIDRHLRELDRLGDDLAVLDREIAEAALDDGAVKRLMTITGVKLTVAASLMAAIGDIHRFSDPGKLVSYFGLNPRVRQSGLGPAHHGRISKVGRSHARAMLVEAAWSAAKAPGPLHAFFVRIRAKRGHQIAAVAVARKLAVLCWHVLTKEQDYLWARPALVANKMRAMEIQAGLPQKKGNQPGPAYAYNVKALRDQELALAQQAERNYARFVDRWKTQPSKGGARERLNPARNE

SEQ ID NO: 74041 - protein, 352 aa, unidentified
MEDYIGIDVSMKETALSIRRGGQRVWRGKCVSDPQRIAQIIRKHGPSATRIVFETGPLSVWIYHALRAEGLPAICIDARHAKAALNMAANKTDANDADGLAHLAEVGFYREVRVKGFDSMLARTLVAARTKLVRIATDLSNQIRGLMKTFGLIVPAGKGRTFEKNVRNLLSDRGDLARILLPILDAWHSIRTRAAELTKMLLASARQSPACQLLMTIPGVGAITATAFATAIEDPENFKNSRAVGAWLGLTTRRYQSGEVDYGGRISRRGDPHVRGLLYEAALVILTRSSAESDLRNWGLRLRERLGFKRAAVAVARKLAVTMHAMLRTGKVFNRTIDAREWAKPGDQAASV

SEQ ID NO: 74042 - protein, 382 aa, unidentified
MHQTRRSAVHPPGRRVPSPDLGRETAITTIAHPESARVTVGVDTHGEVHVASARDQLGRRVAITLVPTSPAGYQHLLDWARQLGEVAAFGIEGTGSYGAALARFLRANGQQVFEVNRPDRATRRRKGKSDPLDADAAARAVQAGDAAGLPKAGTGTVEMLRVLRVARQSALKARTQATNALRALLVTAPAELREQLRGLSKTALPRTAAALDPGKLTSPTAATMLALRTLGQRHAALTAELTALEAEINRLVARHATPLLALFGVGPDSASALLVAAGDNPERLCSEAAFAALCGVSPVQASSGKTRRHRLNRGGDRQANAALYRIVLVRLRWHQPTKDYMARRVAEGKTTKEVIRCLKRYLAREVFAVLTQTGQTNHSDAA

SEQ ID NO: 74043 - protein, 359 aa, unidentified
MKIVGCDFHPHWQQVAVFDPETGELTEHKLFNGDGEAERFYRELEPPALVGIEACGNSQWLIELVERLGHMVWVGDAAQIRASYVRRQKTDRRDAGHILRLLMENRFPRLWVPDAEQRDLRQLLIHRHKLVEIRTRVKNGLQHLALNRGLQKQRALWSVRGRACLEKLPLQGWTARRREDLLQLLAELDRHLDELDKAVTQAAEAHPQARLLMSQPGVGPITALAFALTIGDVSRFRHSGQVASYVGLVPREHSSGGKQRLGSISKQGNRFLRQLLVEAAQSVTRLDEGFRKQYQARCHHKPKGVAKVAAARKLAVRLYWMMRQNVAYPEIAPIESSSRVPLTGPRQVAMLNERSRIQR

SEQ ID NO: 74044 - protein, 384 aa, unidentified
MLKPNDLNQSRIVLKQDSTLIAVIEMSLSSWLVAGIVPGVERQPLKKLAVDESALLKRLNRWREEAEKAGRRIERIAVAFEAGRDGFWLARWLRARGIEAHVIHASSVAVSREHRRAKTDRLDTELLKRAFIGWLRGERDHCKMVAIPTTKDEDAKRPNRERQSLVGEQTRIVNRMKAALIRLGIRGFNPKLKKAAGRLEDLRTPEGEPIPPNTLAELRRDMERRRLVSNQIRQIEEARLERMEQAPGDGPHAMVRLIARVIGVGIETADMLVHEVLSRKLRDRRAVARYAGLTGAPDESGSKRREKGLAKAGNARVRGGMIQLAWRFLLFQRDSALAQWYRTRTEGGRNRKKIVVALARKLLIALWRLATTGEVPAGVVLRAA

SEQ ID NO: 74045 - protein, 333 aa, unidentified
MVEGTKGSHHKEGSTKMSKSTISAAGIDTGKHKLDVALHGRKDLLQVNNDAAGHRQLSAWLRRHRVERVGIEASGGYERAVIAQLRKDGFTVIRFQPLQVRAYADYRLQRAKNDKIDAVLIAACAAEATTIREAPDPRLEPFAEHLTLIEQIEEDIVRFKTRREAVRDVKLGRRLDREIVRLKAWRALELKQLAAKLRQHQDLARRLALAASVDGVGERTALAFVIRAPELGNISREQAAALVGLAPFDDDSAERYGQRHIAGGRSRLRKSVYAAALPAAFHWNPQVIALYKRLVAAGKPHKLALVACARKLVVYVNTVLARGTPWTSRPLSI

SEQ ID NO: 74046 - protein, 327 aa, unidentified
MEHFAGIDVSLEHSSVCVVDGLGKIVREAKVASEPEALVRFFRGLETGVTRIGLEAGPLSQWLHAGLVAAGFEVVLLETRHVKAALSAMVIKTDRKDARGIAQLLRMGWFRPVHAKSPGSQEVRALLVARKLLQAKLLDVEFSIRGILRGFGLKMGEVSKGRFAARVRELAAGHAMLERITEPMLRAREALRTEYARLHGEMLAIVKPDPVCRRLMTVPGVGALVAITFKSAVDDPGRFARSRVVGAHFGLTPRKYQSGETDVTGAISRVGDGMVRMALYEAAHIMLGRVTRFSSLKRWALDVAKRRGLKRAKVALARKLATVLHRM

SEQ ID NO: 74047 - protein, 331 aa, unidentified
MADAKRFVGIDVAKAQLDVAIGPNGESFSVANDETGISELLRRLEPADLVIIEATGDLEVPVASALATAGIAVAVVNPRQVRDFARATGQLAKTDALDAQVLARFGEAVKPQVRALRDAQAQALEALVNRRRQLVEMLTAEKNRRANSLKVIHKGIDEHIRWLEKRLSGLDDELAGLVRETPIWRERDELLRSVPGVGKVLSTTLLAHLPELGALNRKQIAALVGLAPFNRDSGSLRGSRCIWGGRAQVRRVLYMAVVAAVRSNPVIKNFYAQLRARGKYPKSALTACMRKLLVILNAMLRSKISWQTPALASSTATLSPLLGAVPEHGCC

SEQ ID NO: 74048 - protein, 419 aa, unidentified
MSNRKGKVCGIDVHKSFLVATILDREGNIETRRIRLDQESLFALRDWIHTEKCESVAFESTADYWRSLYLVLEGRVPVTVANAHHIKHVPGRKANIIDSRWIAQLELNGLIEPSRIFSGEKYDLRSLTRSRELLVRNRTELKNKIHHLLDDSSIRLSSVLSDLFGKSGSIILKGLVQNRPLEEIMTSLPRKMRGNTDMISAALPAAISPVTLVFLQTYLKLVDDLDAEIKLLEGRIRESLMGKSRELQILTSIPGIGFIGASTLIAEIGNVHDFEDADKLAKWAGLTPSVYQSANVTRTGSITKQGSKHIRWILVELAHIAIRSPGRIKSFFERLLPKKGYKKSIVAVARKMLRTVWHLLIYDEIFVNDMPRSKQVKLPKLPKKIQSFGINRIIELFSKATEVIIRDRNQEIFRLGLTD

SEQ ID NO: 74049 - protein, 424 aa, unidentified
MRSIGLDVGRQFAEAAAIEPGGEVHRLGRITASPAGLRAFAAGLGPDDAVVLEATANTWAIAELLAEHAGRVVVSNPLRTRAIAAAKTKTDQIDAATLAQLLAADYLPEVWQPDAATQALRRLVAHRAGLVRGRTGARNRVHAICARRLLSAPVSDLFGVAGRAWLDRLVLEPDERLALDAQMRLLATLEVEIDAAERAIAAHVLDDRRMRHLLTIPGVGLATAASLVAVIGDVGRFPRPHKLVSYLGLDPRVRQSGARPAFTGHISRAGQAHARGLLVEAAHAAVKVPGPLRGFFVRTRGRRGTGVAIVAVARKLTVLAWHLLADDVDYRWAPAVRSAEKLRRLELLGGASKRFDLRGRREGVKARRAAELVRERVVLEQAEAAYVALVAARRGAHKKDAAATNGERLDGPALNGPGPAARRS

SEQ ID NO: 74050 - protein, 438 aa, unidentified
MSNKVIFNLDELFISVGIDVGADFSWMSIALPNQQFVGKPYKILHNSIDSLTTAVSKIKEAEELYSLESRIFLESTGIYHYPLFCYLRDKGFNCSVINPIITKNSTNINIRKVHNDRFDSKKAALVGLKPDLKVSLMPSDLALNCRNLCREYYDLMDNRSAYVNKLQGELRMAFPQYLGIFSKVTINTSLTLLETYTSPSAFLKADKQEIIDIIKSTARFGLTYAQNKYNAIIQAATDANQFGYIIDSNIKRIRLYISFIRKYDEEINNILESLHELVDANEDADFVKQIHLIETFKGAGFLSAVSIMGEIGDFSAFSKPKQLFAYFGLDPAVKQSGKFEGTKVQMSKRGSAIARRVIHTLTLQSISISRNREAKNPVLREYYLKKCDSKPKLVAMGAVSHKVCNMIFAILRDNKPFKIIAPQEHIKQYNAAKCDIAA

SEQ ID NO: 74051 - protein, 337 aa, unidentified
MRFCGIDLHSDNCVLVVTDEGDRVLVSRRCRNDLGVILGLLEAHRAELAGVVVESTYNWYWLVDGLKAAGYEVKLANTVAMRRYDGLKHGDDESDAAHLAQLLRLGILPEGYVHPPAERALRDLGRKRAMLVRTRTRHVLAVENVLSRQWGHRLRSAEIKGLTVEKVDELKLPESVALAVKADVAVIVAANGQIGALEGELLKAIRKCPKYTLLRSIPGIGEVLSIVILLEAGPIERFAAVGHFASYARCVGSAHYSNGKKKGEGNTKNGNAYLAWAFVEAAHFARRYCEEARRFFDRKRARTNATVATKALAHKLARAAYHVLKDDEPFDVKRCFA

SEQ ID NO: 74052 - protein, 365 aa, unidentified
MQKAELSCEADSENDLGGSSETMYSIGLDVHKRTISYCVKDAAGRVHMEGKIGSTRRELDSWIKTLPQPRTIAMEATIFTGWIYDHLLPHAEQVKVAHPLMLRAIAAAKRKNDKIDASKIADCLRCDFLPECYMTSTEIRDRRRTLRYRGLLVKQMVQMKNRISGLLMEKGVTHTKRRLHKVGYFAELMGGNEEIDQSIRPLLKLSREHIVRAQKLDYALVSSLERDPLLVERLKRLRTVPGVGPITALTWALEIGDVARFRSIKQAISYCGLCGAEKSSADKMLRTPISKQRNKHIQHVLVEAAKLAPRQCHELALIYEKEMQRGNRNRATLAVARKIVAYLLAVERREKDFVPTEEFGGTAAA

SEQ ID NO: 74053 - protein, 384 aa, unidentified
MNNFNIIFIGLDTHKIFTQLAVLKDERGAKPESLGKINTNKSSFIKLARQLQSKYPKATLHFIYEAGHCGYWIYRLLTSLGHCCYIVAPSLIPKKAGDRVKTDKRDAAKLATLFKAETLTTIYVPEAEDEAIRDLSRARETAMNDLKDAKFQLKGLFLRNNIKCAVKDNWSNQHLRWLTELVLPHHSQQIVLQEMIQTITERTKRVARLVNELEHQVKQWRYYPVVKAIQAMRGVRMLVAVGTIAELGDLRRFDHPRKLMAYLGLVPSESSSGDKRRLGKITKCGNGRARRLLIEGAQTYKHKANISTELQKRQEGLSKEIVDIAWQAQLRLCRRYQRLMHKGKHRNLVVTAIAREMIAYIWAISREVVVTPIEPRARIARLPA

SEQ ID NO: 74054 - protein, 317 aa, unidentified
MYVGIDVSKEHLDVATDDGAFSAQFANDEQGYGELVIRLQEVKPTLVILESTAQYQLEVSLMLATAQIPLAIVNPRQVRDYAKAMGILAKTDKLDAVTIARFGATVKPAAQTLPDAETLELEALLTRRRQLVGMIASEKNRLQAIFGPAKQGAAAQSVRDTLSYLTKQLKQLEKDLQKRLERSPVWKAKEDLLKSVPGIGKVTAMTLVIDLPELGKLNRKQIASLAGVAPFNCDSGKNQGKRRIRGGRATVRTALYMACLASLKHLSEPTASRYERLKTQGKKPHGVAIVACMRKLLTILNAVVRDGKPWNPDLASA

SEQ ID NO: 74055 - protein, 409 aa, unidentified
MQYFVGLDWAAREHAVCVVDGRGAVVAKFTVAHTATGMADLAARLVKVAPAAELRIAIERPTGLVVDTLVEGKFAVVPIHPNVVKAARPRYSAAQGKTDLGDAYLLADLLRTDGHRFRTLVPLSDETKALRGLVRVRDDLVGQRVATANQLRCLLEQFWPGAAELFADIDSPIALEFLDRYPTPQSAASLGEKRMAAFLARHAYSGRRTAAELVQRLRSAVPSAAGELEAEAKGECARALVAVLRPLVAQLATLSAAIEHAVDAHPDGKIVTPLFRSGRICAAQLLAEIGDDRARFVSADHLAAEGGAAPVTRESGKHRAVTFRWACNMHLRRALSTLADTTRHTNPWARSIYQRARDRGHAHPHAIRILARAWCRVIWTCWQQRTPYDPTKHRAAHQFTLHLVDQEAA

SEQ ID NO: 74056 - protein, 296 aa, unidentified
MQITTIGLDLAKNVFQVHGIDAAEKVVVRKQLRRRQMLEFFKALPPCLIGMEACATSHYWARELTKLGHEVRLMPAKDVKAYIKRNKNDAADAEAICEAVRRPTMRFVQIKSAEQQGQLMQHRARDLLMRQRTQVINAMRAHLAELGIPARQGREGLKELMAIVADDDDTRVPVNARASLMVLAAQLQALQTLIGSIEKRIIKQHRVNEASQRLESIPGIGVIGATAIAATVADPKVFRSGRDFAAWIGLVPREASTGGKQKLGPISKQGDRYLGQSRNKAIAICDASWWSEPARY

SEQ ID NO: 74057 - protein, 368 aa, unidentified
MSKVRCVGLDVHEESITIAIAEPGDGQVTVLRKIGHNLNELVKTLKGLQHSDATVRVAYEAGACGTGLWRRLREYGFDCVMVAPSRVPTQGRSKTDNEDAMRLARYLRSGDLVKAYVPNEECEALRSLTRAREDAVQAQQTARGQLRNFLVHQGLKYEGKSKWTKEHLKWVKGLQFAHPALALVRDDYLREVEAVEARITRLTQDLEILAVQSSKKDVIEALQALRGVKLVTAATLAFEIGDFSRFASPRPMMSYFGLVPGESSSGKTVSRGSITKAGNSHVRRVLCECSWNYRFAGTSSAITKRRNATSERIRAIAARAQERLNSRYRSMALRKKELNKVNVAISRELLGFVWAIGTEVEARTTMTT

SEQ ID NO: 74058 - protein, 346 aa, unidentified
MLYAGLDLSRKRLDFHLLDAEGETVERGASAPDADGLRGLSERLAGHGEPVSAAIESMNGARFVHDRLELAGWQVEIADAQKVKGLAPLACKTDRIDAWVLAELARRDLVPAIWLPDPQVRAERERARWRLHLVRHRSSLKQRVHAVLLTHGKPCPVSDLFGVRGRQLLATLGLPEPWQGTIEASLRLIDELEREIGECERELRRLGAAHRYVPLLCTVPGISWVLAYTIAAELGDIERFASPRKLAGYSGLCPRVYQSGERDLRGPLSKQGPRYLRWALIEAATHACTHPAYRDRYQQTKARIGKQRGAKVAQIDLARRLAEAIWHMLSRGEAFAPKGATDPLAA

SEQ ID NO: 74059 - protein, 347 aa, unidentified
MTKSATKTAIHTIGLDIAKNSFCVHGFDAEGVTVLTKDLKRGQVLMWFAKLPPCRVGLEACALAHYWARELAKLGHDVKLIAAQRVKAFLPRMKNDGADARAIARAVRDREMRFVGVKTVERQSLLMLFKARDLLTAQRTQLINALRGHFGEIGSVVPKGAHEVKVLITRIMTDDSLPAVMVQALRPLVNSLLALEDEIKTLNVVILKQHRASEMSMRLATVPGIGTLTATVLTATVSDPRQFDDGRNFAAWIGLVPRQHSTGGKAKLGKISKMGNRDLRRLLVVGAHAALYRIKSGKTQSPLADWARNLLAKKPFKLVAVALANKMARIAWAIMAGDDCYNPKHGI

SEQ ID NO: 74060 - protein, 415 aa, unidentified
MEVVHPRCAGIDISKKDAKVCIRIQGSGGRRTSSTVTTWGAMTNEILALKDFLVEQQVTVAVMESTSDYWRPFYYVLEADLEVLLVNARDVKSVPGRKTDVSDATWLADLGAHGLLRASFVPPEPIRQLRDLTRARTHITQGRTREIQRLEKLLESSGIKLSSVASDITGVSGRLMLQALIDSQGTADPAVMADLAKRRMRSKIPVLTEALNGRFTAHHAFMTQLFLDRIDGHTRDITTLSERIDGLMKPFLPARELLESIPGFSQIIAEIFIAETGGDMTQFPTAGHLASWAGVSPGSNESAGRVKSTKTRPGNRYLKGALGVAALNQARTKKTYFSAKYRRLASTRGPMKAIVAVEHSMLTAAWNMLSNGAFYRDPGPDYYTRHDPARTKARAVKLLEALGYDVTLQQVAQAG

SEQ ID NO: 74061 - protein, 316 aa, unidentified
MSISKTFIGVDVSKERLDCFCRPTGIEISFDNTPPGIAALVRWVEAQQPQLIVLEATGGLERPLVAALVVAQLPVVVVNPRQVRDFARATGQLAKTDQIDAAVIAHFGEAVNPEVRPLPDYLTQQMDALMTRRRQLVQMLAAERNHLVSAPVQVQNYVKEHIVHLEELIKKLDQDIDQMITTSPICKTKENLLRSVKGVGPVLSRTLLAELPELGRLSRQEISKLVGVAPLNNDSGKHKGKRTCWGGRASVRVPLYMATLSATRCNPVIKEFYKRLLSRGKLKKVAIVACMRKLLTILNAMIKSNKPWDASLAQIG

SEQ ID NO: 74062 - protein, 343 aa, unidentified
MSKPTLPVQLTVFCAIDVSAASLAVAIHQDDQQCEQRVFNNNHSGHKALISWLRKRKAIVRVSMEATGIYSMDLAMAVDKADGIEVAVLNPKMVHHFARTLRRSKTDSADAQSLAEYSRRMPFTPWYAPTLNSLQLRTISRHLLGLTAEYIRQNNRLHAAGKSAATPSCIVSDLKLSMASLKRRILRFRREARDLVRSDETIRKHFDLLISIPGIAEISAVQLLGELSSLSPEMSVRQWVAHSGLDPVHQVSGTSVNKPSRMSKAGNRYLRRALHMPALVAVRHDPHLKAFYETLLNRHKAKLQAIVAIARKLLHAIYGVLHSQTPYDGCKLFPALLPAIISG

SEQ ID NO: 74063 - protein, 412 aa, unidentified
MNNSPKGIFNLFVGIDVSRASNTVAIHSSDGSLIEPVFTLPNNQLGVDTLIQKLGQYLTKTPELQLIIGCEATGIYSFHLLQALACANELNSFSVALYHLNPKLIHHFRKVLNKQQKTDLVDASVIAERLRFGHLPEPYSPQPPLLVLQRLTRFRFHIIEAISKEKTYILNTIFLKFNTFSQEKPFSNAFGKTAEALLTELTCEDIASMTLDDLIAFLMKHGKSRFRDPEDIALKLKKIARESYRLRPELAKSVTFVLALAFRNIRALQQNLKELDKAIIEELKAFPNTLMSVHGIGLVFSAGIISEIGDISRYPSDAQIAQAAGLVWRQHQSGDFQAEHTPMTKTGNKYLRYYLIQAANSLRHHNAEYRKYYSLKFHEVKLHPHKRALALTARKFVRLVYALLSKQQLYHA

SEQ ID NO: 74064 - protein, 349 aa, unidentified
MEVLHSHCAGLDVHKKTVVVCCLTPGAQGQRQREVRTFSTVTGELLQLLDWLLAQGVTHVAMESTGEYWKPIYNLLEGHLELLVVNAQHMKQVPGRKTDVKDAEWIADLLQHGLLRGSFIPPLPQRDLRDLTRQRANLMQDRTTVVNRLHKTLEWANIKLTSVLSDVTGASGRAILGALLTGQTDPTVLASLARGRLRSKQTELVGALTGVMRPHHSFLLAQALIQLDFLDEQLEVFDTMIAQYLAEAPPIHASPPDLPPDPPADPPADPPLTREEALVLLDTIPGVGPRVVAILLAEIGTNMAQFPTARHLAGWARLAPGNNESAGKRRSGATGRGNRWLKSTLVQSP

SEQ ID NO: 74065 - protein, 342 aa, unidentified
MHTTRYIGIDLHRNKFTCCVRLENGREYLSDWKLEDLERFIKKLRPTDQIAVEVTGNTRLFHDAVKPHVSRVVAVDPNQFKVISHSVKKTDPNDARNLALYLAKDLLPEVRMKDKTQAQVASLTQTRDTLVKLRTALKNKINNILSAHGINLAKEALSSEKALNEVLARTFAPMVEIELKVIVDQIRSLNKSIAELEKSITDQGSKLEGHKNLTSIKGIGPLTGSILLSVIGDIHDFADEGKLAAYFGIVPRVSNSNETEHTGRITKRGSKLGRTALVQCALIAQRYSPYLKTYYEKIKARRGTGKAIIALARKLLGIIYRTLKNNWVFEDFPNFVLAESAT

SEQ ID NO: 74066 - protein, 403 aa, unidentified
MNAVGIDVSKRKSMVAIIRPFGEIVYSPFEIKHTSNDIQSLIQLIYSMEGESRIVMEHTGHYYESLAHELSAAGIFVSALNPKLIKDFDNNSLREVKSDKADAMKLARYALDKWPDLRQYSVMDELRNQLKIMNRQFDFYMKHKTAMKNNLISILDMTYPGVNTYFESPARSDGRQKWVDFATTYWHVDCVRKMSLKAFTEHYQKWCKRKKYLFSEAKAEEIYGKAKELVPVLPKDAVTKELIKQAAEQLNSISSTVEELRTKMNETASKLPEYPIVMEMKGVGSSLGPQIMAEIGDVMRFTHKSAITAFAGVDPGVNESGDYKKKSVHTSKRGSSQLRKSLFQVMEVLVKTMPQEDPVYRFIDKKRGEGKPYYVYMTAGANKFLKIYYGRVKEYLSSLSDSN

SEQ ID NO: 74067 - protein, 319 aa, unidentified
MDNIILGVDISKLTFDVALFNDNKVKTRKFNNTTKGFSELQQWLQNKGVNSAHVCMEATGGYEAKLAQYFYDNNFKVSVINPARIKGFSMSQLSRVKTDKADCKLIAYFCQAMQPDLWQPMPKHIQELQQWVRRLDTLIANKNQENNRLDEASDIVAVKIRAHIEFLDKQIKEVEELISNHIKEHQDLNDKSKLLDSIPGIGEKTIGVILTFLTVEYFDSAKQVVAFVGLNPKPRQSGSSVHGVGRISKTGDADLRKAFYMPALTAIKHNPIIKDFAERLSNAGKSKMVIVIAAMRKLLHIIYGVLKNRIPFNENIKTI

SEQ ID NO: 74068 - protein, 343 aa, unidentified
MQDVATVGLDIAKQVFQAHGADASGETLFNTKIKRENVLEFFSKLKPCLIGMESCATSYHWARQLLEFGHDVRLIHTSYVKPFVKRGKTDANDAEAINVALTQKTMRFVPVKTLNQQAAITILRTRSLFVSQRTQLVNALRGHLAEAGLIAAKGIQNYSKLVKLMESAADTVLPTVMKKALTDICDQIHRLNDLVTKLDKEIERRVQHDENACRLLTIPGVGPKTAMCVIATIPDIHRFPSGRHFSSWLGLTPRTHSSGGRSVLSRITKMGNSELRTMLYLGGTVIMMRDKKTPIGRWASRLRARRPYKVAVIAVANRIARIIWALLTNGGVYDPTYGREASA

SEQ ID NO: 74069 - protein, 355 aa, unidentified
MNSEKYIGLDVHQATISVAVLDFRGKLVMESILETQAATILEFFAGLRGTLWVTFEEGTWAAWLYDLLKPHVAKLVVCNPRKNALLKDGNKSDRIDARKLAELLRLDNLKPVYHGETGVRMLRELARSYLTLVKDLTRVMNRLKALYRSWAIPCAGRDVYYTRHRAEWLGKIREAGVRRRAEQLYQQLDMLQHLRQQARRELLAESRKHAITARLRQIPSLGPIRSALAVALIQTPHRFRTKRQLWAYSGLALETRTSGEHRYVRGQLRRSKKQISIRGLNKEHNHDLKGLFKAAATRASVQPGPFQEFYQRSLAKGIKPTMVRLTLARKIAAITLTLWKKGENFDVEKLKSQAA

SEQ ID NO: 74070 - protein, 313 aa, unidentified
MDPVYVGIDVSKDTLDFCVYPNGKEGLFRNNRVGIGRLIRMLMKVKPALVVFEASGGIEMPMYLAMSEARLPVAPVNPRQVRDFARSMGILAKTDRIDAQVIARFASAASIEPKLIPDTQDLKEMLTRRDQLVQMITMETNHLRTASRELRKSIEEHIAWLKQELVDMDTMLKGRIQQDPVCSDKDTILQSAPGIGPTVSAMLIGRIPELGNLNRRKIANLVGLAPLNRDSGQYRGKRTIWGGRSRVRALLYMATLVATRCNPVIRCLYLRLLEAGKPTKVALVACMRKFITILNSMVKHHATWSNSYTLSPG

SEQ ID NO: 74071 - protein, 400 aa, unidentified
MRTVFGIDVSKASSEVAILVNGERVHGYTMPNDIIGFSHLLKDLKTVSNPEIIFEATGVYSRRLQAFLEENSYDYTRLNPLEAKKQLDGLRVRKTDKIDAEKLASSQFVLNRMPTYVQEKVYQNLHDLSRFYQNLTEDIVRTKNRLHKVLQVAFPEIEILLSTPAGEQYWNLVSIFPTKHWVLELSEVELKETIRQSTSKRISENRAGNLAEKLVGLAKQSYSAISKTSPMIEEVKYNAQELIRLTNRREQVLEQLIELAKPLPEYEILLSIPGIAETTATSIIGELGDIRRFQSTNQINAFIGIDLRHYESGNFLAKEHITKRGNPYARKILFKCIHNIASASHTNPCHIADFYEKRKRQSQTTSTKPHTIASIHRLIRTMYYLIMHNKLYDYTLAQSH

SEQ ID NO: 74072 - protein, 416 aa, unidentified
MYYVGIDWADENHQVFITDDSAQRLGAFSIENSRSGVEELFERIRYFVKDQKQALFALETSKGLLIDSILDAGYTVYPINPKSVDRYRDRYKVSGHKNDDFDAMVLANILRTDRHNYRPILPDSPITRELKILTRECCSLIRLKTLLSNQLTSCLKDYYPVALKLFCKLDQPITLLFLKNFPTYQQAKQVSLPQWGKFLSKHHYRVGVKKKANEIYLKLQEPQFNVEPFVDNAKARYTLALVEQLQLLLAQIKSFEDKIEQLLKQHTDGEIFLSLPGAGITLAARMVSEFGDNRERYKKVSSVQAEAGTAPITESSGNWKFVHFRSACRKSFRNTMHQFAFCSIKESSWAKQRYQQYVASGKKHTQSIRCLANAWLEIIFPMWKNYMPYSEQRHLLKYVKEQKPVNYSRNLNYLSV

SEQ ID NO: 74073 - protein, 410 aa, unidentified
MKEQKQKTKANTVHVDHRNIIGIDIGKRKHAATAVTPKGAVIASLKSFENNRAGVDLLERQVLHPATGRSKPMIAMEATGQYWNALHDELQRRGYYCVVLNPIQTGNRGNKRIRKTKTDPTDSEMIARTILAGDAQATLVPNESIFELRLLVRHRWRMIRVHGVVLRYAIGLLDRVFPEYDGIFCKPFITSIRTLIREVGLTPKTLNSKQAEVKKILEKASRKRLSAETIDELLKRAKVSIGTQQGKSVVNGQFRMVVDYLDFVESQVLSINKLLKERMVALDSPLMSLGIGAEVVATILAESGDIARFPGPGEYSAFCGLDPSIRDSGDSIRGVSHISKRGSPLLRWALYVSAPTMITKHRDFAKIYERHLNRHKGHRFALIAVAHKLARVIWRLVKDGRSFTKRPPKR

SEQ ID NO: 74074 - protein, 315 aa, unidentified
MEQPPSAPIFVGIDVSKDRLEVHVRPSGEAFAVVRDGEGLERLVADLRGRDVALVVLEATGGFEMTVAAALAGAGLPLAVINPRQIRDFARATGRLAKTDALDAEVIALFAERIRPEPRPIAGPDAQALAELVARRRQLVEMIGMEKNRARQARGKRVQRSLAAILKALEAQLASLDRDIDGVVRGSPVWRAAEELLTSVPGVGDVTARTLIAELPELGALDRRRIAALVGVAPVNRDSGQWRGHRAIAGGRVAVRNTLFMATLTAIRWNPAIRDHYARLVAAGRPKKLAIVACIRHLLTILNAILRTKTPWQNA

SEQ ID NO: 74075 - protein, 478 aa, unidentified
MIYSVGIDLHKGQHRVHCLDEKAQPCGAFSFQTAPEGLAALEQRIFRDGSNPIVVFEPAGLTWLIVAAYLRSCHPECRVVRAKGQKVAALRRYLRGPVKSDRIDALTLAKMPFIDPERLDEVYLAPAQTHALQRLTRQRKRLEDQITTHKKRIGSIVDGYLPGVRQAFSHPWSVQVRAFLHSQINPFAVIRAGEEVLHRFLTQAKPGNKGAGTESHFVYQACQKVLALQELCAAAGMLNEEFFVYLQDEIDRELRLMEAEEAESKALDRRIEELYQELHPSDNLRTIPGVGEHTAPVFVANIGDPTRFPGQSEFANWTGVVPAARQSSNVESKGLRMTKAGPATVRWALYQAGQISRRWDPQLASVYYRQMVYHGKNHKQAMGAVMSHMAARVFTVLREDRPYELKDTEGKSISKLAARDLIMAKYRVPEDIRQERRKSKGRKANTLGLQKKGGTAAGMEHEAAIAPQPATSLPSPVT

SEQ ID NO: 74076 - protein, 374 aa, unidentified
MNNVIYIALDVHKNNIVAGLSRSAGESMILGEYVNTATGLKQLIKILHKIQEECDEIQICYEAGPCGYEVKRLLEKNGYLCQVIAPSLIPQRSGDRIKTDKRDALKLARLFRAGELTPIAVPTELQESVRDLVRCREDMSRALMSARQKANHFLVRHGYFYEGRNWTKGYFMWMKKIEFENKYLKETMNQYIDQIEHLYFQLDDIDREIAAVAETEEYKLKVNALRAYRGLSTLSAMVIITEIFTFSRFKNAPEFMSYLGVVPSEYSSGGSVMKGSLTKCGNKRVRRILVEAALHNRHEPKTSYAMRANLNKVDSELRNPPLKAMKRLHKRYYHLIFAGKPKPKAAAAVARELAGFIWHSMIIVESRIVNNQAA

SEQ ID NO: 74077 - protein, 432 aa, unidentified
MMNDELCVVHPRAAGLDIHKGHITATVRLSEAPAGPPRCETRMFSALASGLAALVAWLTSHRVVAAAMEATGVYWHTPWQALTDAGVEAQLLHAQHVKQLRGRKTDVEDSRWLARVCQFGLGRPSFVPSQQFRDLRALSRHRRKLVARRSQVRNQAQKVIDRGGVRIGAVLSDIFGRNGRRILDGLVARRPSADILASLSAHVRGKLEQLGDALGLTLRETERRLLADLLSEHDTLSRRVDDFNRHLDEALAPWAEQLRLLETLPGIDHAAACAILSETGADPHRVFGNAHRLAAWAGLCPGNNESAGKRRAGRTRRGNQTLRTVLIECAHAAARTHNCQFQTYHQTLTRKRGFKRAILATAHKLLRCIFAVLRDATPYRDPDTDYEALLVQRSASRWLRKLHQFDILVRNDDGTCSIHWPPPANRSTVPTH

SEQ ID NO: 74078 - protein, 340 aa, unidentified
MSLYGGIDLHANNSVIVLLNEQDEVSYQKRLPNDLTTILGQLAPYRTEIKGLVVESTYNWYWLVDGLMAADYRVHLANPAAIQQYNGLKYTDDLSDARWLAHLLRLGVVPEGYIYPKAARAVRDVLRKRAHLVRQHTANVLSVQNIMTRNTGARFSGKRMQELTKQDLTTLLTDETQVCAVTSSLVVLDCLRQQIKTLEKIVHKRLHDTPSYEQLLTVPGIGPILAQTITLETGAISRFPTVGNYASYCRCVDSQKISNGKRKGTGNVKNGNPYLAWASMEAAQFALRFQPAAQRFYQRKLAKSRNNSVLARKAVAHKLARACYYMMRDLVPFEERKAFG

SEQ ID NO: 74079 - protein, 370 aa, unidentified
MRKDTSGNKQQIRSKAERETRDGFEFHIGIDLGDKNSDVCVLDQSGEVSKEFRLRMKEADFRTYFASIPRSRVAIEAGGQSRWVAEVIEKCGHEVYVSNTRKVPYIHQSDDKDDPGDACKLAELLYFKPRLLHPVQHRSREAQVDLSWIRAREVLVKSRTQLINAVRGISKAFAERLEKCAAESVTAKLAGQVPGVIRGAVAPLLETIDHLNEQIRYYDEMEEHIARERYPKYRLLEQVSGVGVHTALSFMLTIGDPERFQKSRMVGSFLGMRPKKQDSGESKPQLGITKAGDMFLRKTLVNCAHHILGPNRKDSDLRRFGQRICARGGKNAKKRAVIAVARKLAVLLHRLWITGEVYEPLRNSKQSKAA

SEQ ID NO: 74080 - protein, 455 aa, unidentified
MAKKGKQTKPIPDNMLIIHPHAAGIDVGAEEHWVCVPADRDAQPVQKFSAFTCDLHRLADWLTACRITTVVMESTGVYWIPLFQILEARGFAVALVNARHVKNVPGRPKTDRFDCRWLQKLHTYGLLAPSFRPPEDICQLRSLLRHRENLIRMTVKHIQHMQKSLDQMNLHLHHVISDITGVTGMRIIRAIVAGERDPRTLAQYRDYRIQSSADTIAKALEGDYRAEHVFTLTQSLALYDFTQQQIAACDQEIERVLGTLDSQVDPAEHPLPPPTTTHRQPQRNEPAFDLRTHLYRITGVDLTQVPGLQAPTIHIILAEVGLNMHKWPTDKHFASWLGLCPDNQISGGKVLSTGSRRVQNRASRALRMAAQSLRTSPSYLGAFYRRMRSKLGPAKATTATAHKLAKIIYHMLKEKTPYRAHGAEEYLHKDHERQLRQVRKQAKHLGFDLVPQPTN

SEQ ID NO: 74081 - protein, 417 aa, unidentified
MIRKVMEVIHQSVGGLDVHKKMVTACRRRMLGDGQVESEVLEFGTTTLQLCALSKWLSAGGCTHVAMESTGVLWIPVWNVLEGDFKLLLTNAQHLKKVPGRKKDVTDAEWVAQLMQCGLLKPSFVPSREVRHWRALTRQRMKLIDQRTGVINRMHKILQQGNIKLSSVASDVMGVSGRAMIWAMIEGESDAESLAKLAKGRLKSKHEELVESLEGRLNQDDRWVMKELWEQMEYLEEEVARYDEQIKEKMSPYEEALERLMTIDLIERRSAENILAEIGPDMTFFPSDDNLVSWAGLCPGSDESAKKNRSGRMPKGNQWLRRALVEPGWGAARRKDGYLGAMYRGIAVRRGEKRAVIAVARTILQAAWHVLSKGVEYKERGGDYFDRINGEQTKLKLIRRLEKLGYEVDLKPKQSAG

SEQ ID NO: 74082 - protein, 387 aa, unidentified
MTRVVIGMDPHKRSVTIEVMAPDETVLDRGRYATDVSGYAAMLRDAQRWPERVWAVEGCNGIGRHVATRLLADGEQVVDVPPKLSARARVFSTGQGRKTDATDAHSIALVGTRMAGLRPVVDDQQLAVLRVLADRRRALGEDHTRMVAQLHHLLLELIPGGAKKDLSAAQAKTLLARVRPRDAAGKARRRVAAELIADLERIYARKKAADKELRELAEATGTSLLTLNGIGPSGAARLLIDVGDITRFPTKGHFASWNGTAPLDASSGDQIRHRLSRAGNRQINRTLHIMATVQLRNPTEGRAYYDRKKASGKTSMEAMRCLKRRLSDIVYRHMVDDAVRAMTGPGGQPGTATQSSATGSHPHTGSSDKSLPGPATTDPRTVLPAAS

SEQ ID NO: 74083 - protein, 345 aa, unidentified
MTEAYDGRQVVGMDLHRRRSVLVRTTMDGRKLETARIANSPAALRAVIARAGSRPLVVVEATYGWYWAADVLEAAGAEVHLAHPLGVKAFSYRRVKNDERDCADLADLLRLGRLPEAWIAPPPVRALREVTRYRHKLVGQRTSCKDQVHAVLAKCGIPVTRTDIFGPGGGIWLDGLPLPQPYAGKVASLRALTGVLDSEIARLEEQAAGLLAGERGYAAIRQLPGIGPVLGAVIAAEIGDITRFRTPGQLASWAGLTPRHHESDVKVIRGHVSKQGSRMLRWAVTEAIQRQPAGTRPQQVKEAIITRRGEQARGIAKTAAARQMLTLVFYAMRDGHLRRATSQAA

SEQ ID NO: 74084 - protein, 327 aa, unidentified
MITVTAIGLDIAKSVFQVHGVDAAGQVVLRQRLARGRVLAFFEKLAPCLVGIEACGSSHYWARELTARGHEVRLMPAQYVKPYVKRSKNDAADAEAICEAVTRPTMRFVPVKTPEQQSVMMLHRVRLMLNRQRTQLPIGRRGLDQLLAVVADAEDTRVPADARLCLQMLAAQLAVVKEQILENDRRVRTSARTELGRRLMQVPGVGPLLASAFIATVADPAAFKTGRDLAAWIGLVPKQNSSGGKERLGSITKAGNRYLRQMLVVGAMAVIRYAKRHGTRRPWLVQLMQRRSTKVAAVALANKTARIIWALMTSGERYREPTAAMAA

SEQ ID NO: 74085 - protein, 301 aa, unidentified
MTIVGCDLHTRKQQVAVLHTDTGEVVEQELLHSGDAVEQFDRALPRPVTVGIESTGYALWFHELMQRLGHTLLVGEAAKIRAMVVRKTKTDRRDAQHRLDLLKHERFPAVWIPDPATRDLRALVTHRVRLVRIRTMVKNGLQALALNRRLALGSKLWSQRGRAQLTALDLPRHTAQRREDSLELLTWLETHIDGLDARIVDAARAHPGARLLLTHPGVGALTALTTVLVLGPTARFPGSKHVVSYVGLAPAVRASADTCHLGQITKQGSALLRWVLGQAAPLAAREDSGPRAAVPVRAFSE

SEQ ID NO: 74086 - protein, 343 aa, unidentified
MCSPHYYAGLDLHKKTIVFCVKQADGTLVEEGTIRAVKPELERWLCERDTRCVVALEATMFTGWVYDVLVSHEVETHVGHPYMLRAIAAAKKKNDKVDARMLADLLRCDLFPSCYMAPEKLRELRRVMRYRNFLVRESVRMQTKTAGLLMEVGAEYNKKKLKGRKYFTQLVNELTQVPESVRRLLRLSHDTMEAFERHQQWMVDELARHPDLCERVERLMTIDGVGVVTALTWALEIGPPSRFASIGNAVSYCGLCSAQRESAGVAHRGPISKQRNKHLQRVLVEAAKLAPRWNAHLAGVYDKERERGADHNQATLTVARKLVAYLLAVDRSGKVFEQRKEAA

SEQ ID NO: 74087 - protein, 352 aa, unidentified
MNSASTIGLDLAKKVFQVHGVDQAGEVLVRRTLRRSQVLAYFGKLAPCLVGMEACATAHYWARELSKLGHTVRLIPPAYAKAYVRRNKNDPADAAAICEAVGRPAMRFVTIKTAEQQAAAGVHKVRELLMKQRTMLMNSLRGLMAEFGIVVAEGPRHIGELVAILVDPGDRRIPAPLHGGLVRMADVLRHLERQIEVVDKQILDWGRGNKTCRHLITIPGFGPILSTAMAAIVVNPATFRSGRDFSASLGLVPRQDGTGGKVKLGPISKRGNGYLRRLLVSGAMTVLSGKRAKQDSWLVKLLATKERKVAAVALANKMARIAWAMMMRQEDFRAVAAAPERPTLAGLEGLRG

SEQ ID NO: 74088 - protein, 451 aa, unidentified
MAKRKEKQARRFMVLEPDAAGIDIGAEEIYVAVPPDRAEESTRRFSSFTCDLHALADWLGQCRIQSVAMESTGVYWIPLFQILEERGFKVYLVNAHYLKSVPGRKSDVSDCQWIQYLHSVGLLRASFRPPEAICALRTLWRHRGSLLEMAAEHILHMQKALSQMNLQLHHVLSDITGTSGQAILDAILSGQRDPVALAQLCHRRVQSPRDKVAQALVGDYRPEHLFTLKQSLAGYRYYQKLILELDQETARLMQALPSATEDPIPPRTKPTAYHRKGNDPQFDLRSELYRIAGVDLTDIPGVSAATAQVVLTEIGTDVSRFRHASAFASWLGLCPEKRISGGKVLSCKTRQVKHRAATALRMGADSLCRAKGYFGEFFRRMRAKLGTAQAITATAHKIARILYHVLLTKEPYTETVFHRCDEQAQQRAEMRLRKQAARLGFQLLPIPVTGE

SEQ ID NO: 74089 - protein, 422 aa, unidentified
MQGNETELDLAAFVGLDWADQRHAVCLRAAEGKLSQHFSLEQTPETLHGWVSQLRVQFGGRKVAIAIEQSRGQVISALMTYDFLVLYPINPKALARYRQTFATSGSKDDPSDAELLLSLLLLHREKFRPWLPDDPQTRTLQMLVEHRRRVVQDRVRLTNRIKSLLKVYFPQALEWAGSLATLQACEFLERWPSLEKVKKAKASQFRNFYVKHGCRQIKIIEERIEQMRTAQALTQDPAVLTASMMMLQATVAPLRTVIQAVEQFDDQIALLFQQHPDHELYQSLPGAGAALEPRLLAAMGMDRARYGSAADIQQLSGTAPVTDRSGKKHFVYRRRACAKFMKQSFHEFAAHSVASSAWAGAYYREHRDRGVSHHACVRALSFKWIRIIFRCWKDRKPYDERIYLESLRRRGSAYALALAPRE

SEQ ID NO: 74090 - protein, 328 aa, unidentified
MRRRKLLSIGIDVSKDALVVAFRSAGAEESCAFPNTQNGITALMRSIGKQRCPIVMESTGRYHILAAFLLMERGHDVRVINPIMAKRYISASVRKIKTDKSDASALAHMGQVQTDLPAFHVSALDIQIRQKMGLIALLEKKLQALQRALKTYVEFQESMNVERSTAEQSIAEIVKTLQEQKDALGEEVSQLIGRDAEKKEVRDIACSIPGISTLTGSLLAQMLSRTCESSKQWIAFFGLDVSKNESGKTKRRERLSKRGNAYLRKRLYSAGWGAIMNYEQFRTYYETLKEKGHSHRAAVVIVARKLLRILFSLLKNNTSFSWDQCSFG

SEQ ID NO: 74091 - protein, 412 aa, unidentified
MKDLLEISCGLDVHKEKIVACILTGPLGKPTRSEIREFSTLIPDMIALRNWIVSKNCHHVAMESTGIYWMPIYEILEDAFSGDITLLVVNARHMKNVPGKKTDMRDSEWISTLLRAGLLNGSFIPEKRIREFRDLNRYRKSVIRDITSQKNRIEKFLQSSGFRLSSFISDIFGASGRNIILHLIEHGQIDKTALDSCLKTKTRNRIDEILMSVNGTLSEHQKAFLRILMTHYDSLKKHLAEIETSLEEDMAPFTLQVEQLNSIYGISTTASCAIIAEIGIDMKPFKTAEHICSWAGLCPGNNESAGKRKSTSVTKGNPYIKSMLCEIAWVIAGKRNTYLSAWYWRIKQKKGAKKAIVALARKLLVIIYTMLKQGTLFDESCFETRRKHCEQKQLSRYIRELEKHGYHVEAQN

SEQ ID NO: 74092 - protein, 285 aa, unidentified
MKKFDYYIGIDVSKLTLDVTMLTECENIAKTEHYKIENSKKGIAQFVKHKLAKYDAQQLLFCFEDTGIYSMPLADYLNVCKLTFWQVSSVEIKRSKGISRGKDDKIDSKEIAFYAFTHMHKFRQGKVSTQSIRQLRLLFTEREKVLKALALFENTSENKGFIPKEVFNAVASVNKSVINQLRKTLKSIEEKMLVIIESDDKLNRQHKLVTSIPGIGIQTAVYLLIATKGFEAFDNWRQLACYAGVAPFPYQSGTSIRGRTKKSTSACRQEAQIAPQYGRHGGCQA

SEQ ID NO: 74093 - protein, 369 aa, unidentified
MVYFVCPEQKHTQRRLAMAKGTKLDFTGQHIYIGMDIHKKSWSVSIYTEHFEHKTFTQPPEVKKLTNYLQRNFPGATYHCVYEAGFSGFWIHDRLTEEGIHCMVVNPADVPTKHKEKAGKADKVDCRKLARNLRSGDIKGIYVPFRVQAEDRHLIRTRQSMVRKQTRCKNQIKAILFFYGILIPEEGHWSRNFINWIETIRMERASGDLALKVHLEELNYLRQIIAGLNKAIRALSRTDTYRDKVLLLRTVPGISTLTAMTLLTELCDISRFSSLDKLASYAGLVPDIKSSGETEYTSGITHRRNPALRAVLIEASWVAARKDPALIIAFHKFSLRMKKTAAIVHIARKLLNRVRFVLINQERYVPAVV

SEQ ID NO: 74094 - protein, 377 aa, unidentified
MMKCSVYVGLDVHKDTISVAVALPGREQPVYRGEIKNQRRSLERLIRSLSPNGEVLSFCYEAGPCGYGLYRELVETGHLCEVVAPGLVPRKPGDRVKTDRRDALSLARQHRAGELTAVWVPGEEQEAMRDLTRAREDMKGIEMKARQRLGAFLLRHGRVYREGRSRWTQKHFRWLETLKFDQAVQQIVFEEYVDTVKESQARVASLEAQMRQALESWSLRPVVEGLMALRGVDLITAMTVLAELGDITRFDSPRQLMSFLGLVPSEYSSGAKRRQGAITKTGNGHVRRVLVEAAWSYRHPARKTAHLRRKGASASREVQAMAWAAQKRLCGRYWHLYEAGKAKPRVCAAVARELVGFIWAIACEVMGRPHASRSVEA

SEQ ID NO: 74095 - protein, 392 aa, unidentified
MIAVGIDIASKKHDYFMIQSETGLTFKRSSVTIENNESGYKKLHEDIQAFSGATGDSDILIGLESTGIYHTNIIAFLINRDYKVMMINPILTNMARKSSKVHSQKNDNLDSQVICKYLIDNSDELTPYTPTLYHRQNLKSLSRKRFYIVESLRKAKLAVNNLVQIMFPEFKTLFSNIYGDSAISILKEYGSPSKLAKAHVSKVSSLLHGRCKCTAEDLIEAARHTVGISDNCYSFELADAIEELEHIQKRVDKYDAEIKKYVDELCPNILSVPGVGYVTAGLLVGEIGDANRFHSAESLIAYSGIDPMIYESGEYVAKHLIPSKKGSKYLRYALFQVARIIWQCDPVYKAYYEKKLAEGKHYYVALGHIQKKLVRLIHSLMKSGSNYEVKTA

SEQ ID NO: 74096 - protein, 410 aa, unidentified
MEVLYPRCCGLDVHEEFVVACFSRVEQGQRSRELQSFRTMTGGLIALRNWLLERGCTHVAMESTGVYWRPVYDRLFGFFELTVANAQHMKAVPGRKTDKQDAEWIADLMQHGLLKNSFVPERSQQDLRGLTRLRATLVQERARLTNRLHKILQEANIKLGDVLSNILGVSGKAILQALAAGETDGHRLARLAHRSVHATQDQLADALESEIGEHHRFLIQELLTLIEGLDRSLAHLEQKIEERLQPFEKKSQERLEEITGVSQQVLHVLLAEVGTDMSRFPDDAHLASWAGMCPGQHESAGKRKSGKARKGNRWLRAALIQAAHAAGRTQTYLGEQYRRISKRRGKKRAAVAVGHSILVIYYHMMLTGEHYQEKGVAFFQQRDQQQQERRLIQRLEHMGYQVSLQPRPAA

SEQ ID NO: 74097 - protein, 345 aa, unidentified
MSQQELYVGLDVSLETTSICVVDREGATVWRGTCPTDAAQMADAIRLRAPNAVRVGLETGQMSNWLTLSLQRRGLPVICLDARHAKAALKMQINKTDANDAWGLAQVVRTGWFREVAVKSMDAHKLRMLLVARSQLVVQRQALANTIRGLMKTFGLVVPRGCKGVFAARVREAGEGNDALMAIIEPLLAAWQSHREQIAVFDRQIAARAKADSVAHRLMTVPGVGVIVALAYAAVIDDPVRFKHSSSVGAYLGLTPRRYQSGDIDVTGHISRCGDGLLRAYLFEAATVILQRYSRASDLKEWGLTLAKRIGMRRAKVAVARKLAVIMHRMWMDQTEFQSGERLAA

SEQ ID NO: 74098 - protein, 339 aa, unidentified
MFYSGIDQHKRDCFITTYGPDGEVVNQERVPNSPMLIQRYFSQRPGAHKAVVESTGSWYWLADLLEAQGVKLTLAHATRLKAISAAKVKTNKIDSDVLAMLLYADIIPEAHMIRPEMRGPRDLMRARLRLVEKCVSCKNSIVRLLEKFNVQDVAELDELYRLQAACHEAQIELLQDQIGTLEAALHPHLIPNEDIQRLLWIPGIGKVNAFTLYTEIDGIERSPCPKRFFSYCRLVPGAANTGRRTRHRSGSKQGNRYLKLAFGHAGVWAMQYYPEIRAFYRAKRRKKPERIARTLVALEIARIVYHVLSRQQDFNGLFKGKPLSRTKQSRWPRLASPSA

SEQ ID NO: 74099 - protein, 466 aa, unidentified
MTPRRGKHFRPSEASADLTVTHRHAAGIDVHAAVHFVAVPVEDVPAGFLNPDAKLPAGVRKFGANTGDLEALAAWLKDCGVRTVAMESTGVYWIPLYELLASRGFDVILVDPRQTKHAPGRPKSDVLDCQWIRRLHSYGLLTASFRPADEIVVWRGFQRQREMLIRYAAQHVQHLQKALEEMNVKLTEVVSDIVGQTGLKIIKDIVRGVRDPLKLAKHRHERCQATEAEIASALFGNWRKEHLFALQQGLQLYEFYQKHLQACDREIETCLRGFADKSGGAALPSKPGQQKPRRHEPKFGARALLFRMAGVDLTAIEGISETTALVILSEIGTDLSRFPTEKNFVSWLGLCPQHRGSAGKIFNRRVRRGANRAARALRMAAQGCHHAKNALGAFYRRIQARCGGAKAVVATARKIAERVYRMLRYGQEYVRQGEQAYEDAYRLRTVKAMARKAESLGYKLVPATAE

SEQ ID NO: 74100 - protein, 343 aa, unidentified
MQTVTTIGLDIAKSVFQVHGIDAAGQVVIRRQLKRRYVLAFFQKLPPCLIGIEACASSHHWSRELQALGHTVRLMPPAYVKPYVKRQKNDATDAEAICEAVTRANMRFVVTKTPEQQSGLVLHRARHLFIRQQTAVINAIRAHLAEFGIIAPVGRHGVEELLNVVADPNDKRVPEIARACLMAFGAQLRRLKEQILEFDRMIRAWHRSSETSRRLDDCPGVGPVLATALVATVADPKSFRSGRNFSAWIGLVPKQHSSGGKNRLGSISKQGDCYLRGLFVAGALAVIRYAKIHGTKHRPWLTALLARRPTEVAAIALANKIARMAWAMMAKGERYKEPIALAA

SEQ ID NO: 74101 - protein, 325 aa, unidentified
MSSPSQQEVHVGIDVSKRTLDVCLLPSEAGEVFTLANDQKGLDELLSRLAEPGLSPKLVVLEATGRYERLAATTLASAGIAVAIVNPRQARDFAKAIGRLAKTDKIDAFVLARFARAIEPTASVIPDEEAQHLQAILARRRQLIEMSVSENNRLKMAPRFAALAKRIRAHIKWLEKEVSRTDTDLDEAIEDNATFKANEKLLRSVPGVGRVLARTLIAELPELGTITHRRLCALVGVAPFNRDSGQRSGKREAWGGRASVRATLYMAALVATRHNPVIKEFYQRLLKAGKPKKVALVACMRKLLSILNALMRDQAIWRCPHALTP

SEQ ID NO: 74102 - protein, 392 aa, unidentified
MYIVGIDIGKNHHEASIVSPEGKQIGRSLRFATTHKGADSLMSFIFKNIGNSPCVFGMEATGHYWYPIYSFLKAKGYTIYVINPIQSDSLRKMYIRQTKNDSIDSFLIAEVIRFGQFGTTSMADENILAMRQLCRYRDSVISSRTEIKLRIGTIMEQIFPEYEKQFSSLWVSTSMGILEKYLTPENIENAPIDELFEIIKDKSHNRLTRAKAISIKEAAADTFGIKIAQDAFSFQLKQLIDRMNFLDKQIEALDCQILEYYEKFDCYLHTIPGIGIIGAATILAEIGDINRFKSSSALVAFAGIDPTVRQSGEFSSTHNHMSKRGSPYLRHAIFLAATTCSFHNSPLNAYYKKKREQGKHHLTATGAVARKLTTVIYAVLRDGKPYEPKSFC

SEQ ID NO: 74103 - protein, 481 aa, unidentified
MSAGKKNANDGAPDGAVAAHGGDGAEVAEDRVQVVEYAAAIDVAKGSGMVCTRVPGSRPDRRRQKVWRAEATCGEVTALMDHLRCEGIQRLVLESTSDYWRIWYYLAEAAGLEVWLVNARDVRHLPGRGKSDRLDCVWHCKLNERGMLRRSFVPPQETRDLRALTRTRARLAQDQARHQARVEKILEDALLKISVVISDLFGASGRRFLDALVAGERSPKALAALGDTRLKATRRELEAALTGRFRDIHAFEISTHLRLIDAINEEIALLDEKIAQQLALVPRTAPACVACGLAGGGHVPGCPDEGAAVPGLAGRLDEITGVGECNARVIIAELGTDPSQFPTPGHAAAWARLTPRSRQSGETARPGRTGKGNRYLRGALGQAAMAAASTDTRLGAMYRRIARKRGKQKAIVAVSRVICEIAWILICDPGARYEELGPDYYSPRSPARQTRDKIREIERLNPGKKVILAPADPGAGAGQAA

SEQ ID NO: 74104 - protein, 420 aa, unidentified
MKSWQDLTHYAGFDWAKDHHAVVIVNSEGRLVADFQFEHSLEGWQSFAQKTSAWPNLAVAIETSQGAAVDQLLQREYTLYPVHPVAAQSYRERKAPSGTKTDHLDAWGLADALRGDGHGWKPLQPLDPLTQQLRLLCRDEVSLIEQRTALVNQLQQALAEYYPAALQAFDDWTDTFTWEFVLAFPTPQALVTAGKRRWEKFLHTHKLWRPETVEKRLKLFAQADQFKASDPIVRAKSQLAVSLCKLLCTLGKQLALYRKQIEALFRDHPDRDLFGSLPGAKKVLAPRLLAAVGGDPDRYGSHEALQSIAGTAPVSYQSGRLSKVHLRWACDKFMRHTVHLWADCFRKASAWGQAYYEQKRQEGMTHACALRCLGQRLLKILFRMIRDRKPYDAELHARNQQKHGSWVLKLVNKPAARLSE

SEQ ID NO: 74105 - protein, 313 aa, unidentified
MPTCFVGLDIAKDHIEVSVRPTADRWQADQTDSGIEALVARLVALTPALVVVESTGGYETAVVTALAVAQVPIAVVNPRQVRDFAKALGRLAKTDTIDAGVLALFAERVRPEVRWLPDEAHQELVARVTRRRQWLDMLTAERNRLATARRSVRPSVQQHVRWLERRIHDADADLTTTIRQSPLWRATDDLLRSVPGIGPITSSLLIALLPELGALSRREIASLVGVAPLNQDSGQHRGRRIVWGGRASVRAPLYMATLVATRHNPVIRTFYDRLRAVGKPPLVAIVAAMRKLLTILNAMVRHQQPWQPVPVER

SEQ ID NO: 74106 - protein, 344 aa, unidentified
MNISALGIDLAKNIFSLHGADDHGKTVLRKTVSRAKLLPFLATLPRCKVGMEACSGAHHFARCLQELGFEVQLMAAKFVAPYRKGGKNDGNDAEAICEALTRPNMRFVAIKHEDQQALLSLHRIRESRVSERTALINQLRGLLSEFGLVMPKGRHQAQQLIPRLLEDAENNLPWLVRNLFNDEYQRLLQLNEQLKGYDKQIEQIATQNEDMKRMMTLPGIGAITATALLASIGDIKNFKSGRELAAWLGLVPRQYSTGGKTKLGRITKHGDKYLRTLLIHGTRSVMNVLGDKQDRLSQWLRNVIERRGKKKAAVALAAKHARIIWAMLSRGESYQLKIDPLLVA

SEQ ID NO: 74107 - protein, 443 aa, unidentified
MESIACSTDYTAYVALDWADKKHAWALQEAGQKRMETGWLDNTPEAVEVWAMELARRFGERSIALAVEQPRGAVVAKLSKYAHLVIHPVPPSMLAHYRQTFCPSGAKSDPGDSRLLLELLTQHRDQLRTLRPDTPETRRLQLLSEARRKIVDDRTAGKNQLTNWLKQVFPQVLDWFDDIGMPLALGFLRRWPTLQSLGHKRKETLRRFFKQRNCRSRERIEQRLEAIATAVPATNDEMLLEAAIVVIRHLVVLVEQHNKTIADLDDRIAKAYRAHPDYPIAHSMPGIGPALGPRLIAAVGTDRDRFANATELQCYTGIAPVITRSGNQKWVHWRWACSKFLRQGFQEWAQHSIGFCGWAKEYYTRQKAKGKAHHAIVRALAFKWIRIYFRCWKDHQPYDDERYLAAITTPRPKPPDKPEGQSGSLAVQWETHAGFSKVNAISC

SEQ ID NO: 74108 - protein, 430 aa, unidentified
MSVGRSGGHEPLFAAFVGIDWADQKHVWSLQTADSQKRESGELEHAPEAVEVWVAQLCQRFAQGPIAVALEQSRGALVFMLSKYERLHLFPVPSTMAGNMQEALYPSGAKDDPRDADLLLDLLLKHRDKLRRLSPDTEATRRVQNLVEERRKLVDEKTEQINRLTSHLKIYFPQMLDWFDRLDREAACALLERWPTLQELQNVPPVKLRTFFCKHHCRDQEVIERRIVGIRQAVPAIRDRAVIEAKSAVVQVIAQLIRILVQGIGGLDRKIEEETAAHPDFFIFDSLPGAGPALAPRLLSAFGSQRARYGSAREVQAYSGIAPVIERSGKKKWVHFRWAAPKFLRQSFHEWAGRSIAQSQWARAYYEQQRQRGKGHHAAVRALAFKWIRVAFRCWKNRVAYDESMYMATLARRASLQSGSTVALSPAKTL

SEQ ID NO: 74109 - protein, 356 aa, unidentified
MGQRGRHSQISNKARTVVRVNQTRMMQGRAKKERAPLMKESVYVGVDVSKDSLDVANSNFRETYQFTNDHEGIMQAVRHIASLQPDGIILEATGNLEMPLAAELQAKCLPVVIINPRQVRDFARATGVLAKTDAIDARILALFGLRVKPEIRPLPDKQARELTSLLTRRRQLVEMLISERNRISRADEGIRPNIKDHIKWLEAALSGVNTDLERRIRSSPAWHEKDNLLRSVPGIGKVVSSTLLIELPELGKLNRRKIAALVGVAPLNRDSGTMRGKRTVWGGRAKLRAVLYMAALVATRRNPVIAAFYQRLLAAGKVRKAALVACMRKLLTIVNAMMHAMTVWNPESNNQIITEA

SEQ ID NO: 74110 - protein, 360 aa, unidentified
MTATMTWVGLDVHARSTHAAAIDRESGELTRARFGGGVEEVTAWLQALPQPIHGCYEAGPTGYALYRAAEAAGLRVDVVAPSKTPRAAADRVKTDRKDAELLVRLLLAGSLSMVAVPPASFEAARDLARAREQVRADLARLRHRVSKLLLRYGRVYDDGGTWTQAHRRWLAAQRFEHVPTELAYLDALAAIDGLLARRAALDEQLSLLATEPEHWPTVARLRCFRGIETLSALVLHLEVDDFARFQRPGQLAAWLGLVPSLHQSGESETRGSITKTGSGFARRILVEAAWHYLREPRIGASLNDRHTGQPDHVLQIAWRAQHRLYRLQRRLRARGRPGNIAVVAAARELACFLWAAAVAD

SEQ ID NO: 74111 - protein, 325 aa, unidentified
MQSSINYIGVDISKSFFDVAVPGGQAYRHYRFDNNTDGFEALLKMVPSEHVVVMEASGPYYLRLATYLKKQGIGVSVVNPLVIRRFCQMRMSRAKTDKKDSRMIAEYGHVEKPALWQPPQEYVVSLQQMEALLANVRKEYTAVSNQLESFRSSGMLDEGLEQFITKELEHKQELIDDLTAQIEDLALKHYGSMLADLESIPGLGRKTAIMLIILSGGFSRFSNYRKLSAYIGLSPRIFESGTSVKGKARICKMGMSRIRAMLYLCSWSAKRYNKACSQLYERLLAKGKPKKLALVAVANKLLKQAFAIATKQTMYNENYLIKACF

SEQ ID NO: 74112 - protein, 370 aa, unidentified
MAQSTPLFVGLDVHKDSIAVAHAQGQSADPPVFVGAIGTRQADLDKLIRRLQAKASTLVFAYEAGPCGYTLYRDLTGQGFTCQVVAPSLIPKKPGDKVKTDRRDAVELARLLRSGDLTAVYVPTVDDEAIRDLCRARDAARLTLKNAKLRLKAFLLRLGRHYVGRADWNEAHRRYLAKVVCPTAAQQIVFQESVRAVDEQVDRMHRLEAELLERAPAWRLYPVVQALQALRGVQFLVAITVVAELGDLTRFDSPRQLGAFVGLIPSEDSSGPRRRLGAITKTGNGRARRALIEGAWAYRHPAKVSEHIQRRIDGLPKPIQDIGWKAQVRLCKRFRRLTARGKHPNVAVTAIARELIAFMWAIAKEVPIPT

SEQ ID NO: 74113 - protein, 433 aa, unidentified
MRCISNEVVFRKEARGNSVWKLKMGGHTMYYCGIDIAKYKHEATVIDKTGKALLDSISFSNRAEGCEKLLILFERLSIAKDELLIGMEATGHYWLSVYGYLLENGFEVKVINPIQSEAFRKMYIRQTKNDSKDSFIIAQIMRFGQFSATSLSDEVIIAMRQLSRYRLALVDNCGDCKRRVIALLDQVFPEYDSLFSDTFGVTSKEVLAKYPTPEDMLSVSTGKLTNLLGKASHGRFGKQKAEQLKSMAAGSFGVSFAKDAFAFQIRQLIEQLNFLETQIGELEEQIAVLLKQTGSYITTIPGIGDTLGALILSEIGGMRRFDAPGKLVAFAGLDVRVSQSGEFTGTRQKISKRGSPYLRRAIWLAASRAAFCDPALSEYYQGLRARGKHHLTAIGAVCRKLCNIIFAILSQNRPYQMLPPNDKKTSVSSFSPT

SEQ ID NO: 74114 - protein, 485 aa, unidentified
MVQSVGIDFHEGQHQVRCLDERAQLCDGFSFRTTPQGLAALEERICRDGSSPIVVFEPMGLAWLIVAAYLRARHPGCRLVKAKGQKVAALRRYLRGSAKSDRIDALTLAKMPFIDPEQLGEVYLPPAEVHALQRLTRQRQRLEREVVARKNRIGRIVDGYLPGVREAFSSPWSLQARAFLRSQLDPFAVVHAGEEALHTFLTKARSRSRGDTAETHPVYQACQNVAGLYELSRPSGGVDEGFFADLQEEIARELRLMEAEEAESEAISRRVEELYQKLHTSDNLRTIPGVGEHTAPVFLAVVGDPTRFRCQAAFANWTGVVPGASQSSDVEAKGLRMTKAGPPIIRWALYQAGQIGRRYDPQLAWVYYREMVHHGKNHKQAMGAVMSHLAARVLTVLREGRPYELRDTEGKPVSREEARGLLSRYRVPEEIRREKRRRNPARGSGRTLRKKTQGMASHRTSEAADAPQSVAATAIPHEPVYRGSA

SEQ ID NO: 74115 - protein, 364 aa, unidentified
MNANNTQNNLERALVETGVIIKLGLDVYAAKVAICVQIDGATPQPSQLVPSERVLGWISALRARHPGARVVSCYEAGPIGYVLHRQLVAAGIENLVVTPQRLDTDGRRQKTDRLDARALAERLDRYIRGNRHAMSIVRVPTPAQEQARSLVRMRSQLMRTRRKHEARGRGVMLAQGIRVQGAWWSPAKWEKLVPTLPGWLRPIVEVWQRMALEADAEERKVREKLEEAAPSQLPRGIGALTWVTISREILDWSRFKNRRQVASYTGLCPGISQSGERTHYGSVNRHGNPAIRHALIELVWRLALWQPQYPPVRCLVEKSLSPRLRRKAAVAAARRLAIDLWRLATGQTTPENVGLTAPYAPRTS

SEQ ID NO: 74116 - protein, 313 aa, unidentified
MKKTICGVDVSKAKLDVCIEPGHRLASFNNNTAGIAELAAFCREHAVTLLVMEASGGYERRAFIELWEKGISCALTNPRNVRRYGEAMGILEKTDRIDSSVIARFAHAKQLAPMPLPSRAQQRLKALVTRLRQVTDDLTVQKQRRAGLLDNPEMLASLDQVIALFKRQSRSLEGEIASMIDDDPLWAKLAETWREMKGVAGRTVARLHAELPEIGTLSNKAIAKLAGLAPIANDSGKRKGKRPTRGGRPGVRSILFLVAATAARYDKSLADFRARLVAAGKEKMVIRIALARKLLVRLNAKARDARTAYANAT

SEQ ID NO: 74117 - protein, 312 aa, unidentified
MAMLSFCGIDVSKDRLDVVVLPEGWFFSVSNDTAGWAELVVRLRPLAVSAIGLEPSGGYERGIIRALLAAGMSVRRINPNKLRQFARARGVLAKNDRLDARLIAEYVAIMPTRVVQRDAAVERLAEIVTMRRQLCDEHVAAENQAAHLEDAMLRRLSKRRQTRLEADIRLLDKRLAEMVAANVALAQRYELLTSMPGVGPVLAFTLIALLPELGKMTRKQIAALVGLAPYDFDSGKLKGHRSIYGGRMPVRNVLYMAALSASRYSPALKAFHNRLADADKKSKVIIVAVMRKMITTLNAMLRDNAAWQPQSA

SEQ ID NO: 74118 - protein, 329 aa, unidentified
MEFKTIVGIDVSKLTIDAAVHGQKDTEEFANSKKGFRKLFSWIRKLTKEPLDQALFCFEHTGLYSVALSVHLSESGFSFAQVSALEIKRSMGIARGKNDRVDALRIARYAYERREDIQLSTLPDASLTKLQLYLTLRSTLVRQRSSLNTTAKEQQAVYSSKEYKELFRVYAKASASLQKQIEEIERKMSAIIEADEKLKQNYKLVTSVTGIGQFTASYILVCTQNFQRFENWRKFACYSGTAPFEYSSGTSVRGRTKVHHFANREIKSLLFMCALSAVKFDGELRRYYQRRTEEGKSKMSTLNIIKNKLLARIFAAVKRQSPYVKLDML

SEQ ID NO: 74119 - protein, 347 aa, unidentified
MRNITTVGIDLAKLVFQVHGIDARGKVTLRKQLKRSQVVTFFAQLAPCLIGMEACAGAHFWSGKLVEFGHTVKLIAPQFVKPYVKTNKNDAADAEAICEAVGRPNMRFVPIKNTEQQALMGLHRARQGFVGARTAQANQVRGLLAEFGLVMPAGIRCIERKLPEVLQDADNGLSDASRALFARLLEHFRVLERQVEELEREIGAWHREDSASRRLQAIPGIGPITASALVASVGDAKVFHNGRQFAAWLGLVPRQRSSGGKTNLQGISKRGDTYLRTLLIHGARSVLLSLKRDPARADGWLAHVANRRNPNIAAVALANKNARTVWALLAHGREYQAGYRSANAMAA

SEQ ID NO: 74120 - protein, 447 aa, unidentified
MTDERDGFPVLRRDVAGIDVGSEEHWVCAPSRTGDGRDVERFPATTPGLERLIAWLQDRRVRAVALERTGVYWIVPHEMLEQAEFEVRLVDTRELRRVPGRPKSDRRDCEWLQRLFSCGLLRGAFRPPETVCLLRTLVRDRATLIAERADWLRRMQKALDQMNVRVHRAVADLDGVTGMAIVRAIVGGERDPHRLAALRDYRCQKTEAAIAEQLTGHWRADHLFSLQQGLKMYDAITDRLADYEREILQQLAAMAQTDDTPPPPTNVNKARMIQKRGEEPLRQALYRISGVDLTTIDALGVETVNVILSEYGPDLSRFPTEKQFIAHLRLAPHQAISGGKPVRTPKKPQRRSARVTMALRMAATSLRRSRSALGAYYRRIAQRLGADVAVFATARKLAQWVYRVLRWGQPYVDEGAAVYEHRYRQARITRLAATAKDLGYPLVSVEA

SEQ ID NO: 74121 - protein, 311 aa, unidentified
MKTFVGIDVAKAHFDLYDTTTGRHVRFENNRTGIKGCLKSLISLNPRLIVLENTGGYEQDLAVALHQASLPTVVVNPRRVRDFGRAIGQLAKTDQIDAALLAHYAASIQPPRRPYPDLHSRQMKALVARRGQLVNMHVAEVNRREHIHDPAIARSIAAIVKAIDREIEKVEEKLALLIGQIPELQQKMQTMCAVTGIGQTTATMLVTEVPELGQLNRRKIAALIGLAPLNRDSGSFRGKRMTGGGRRSVRARLYMPTVVACHHNPVLKAFYNRLLQKGKSKMTALVAAMRKLLTIINAMIAKGETWNPKIA

SEQ ID NO: 74122 - protein, 353 aa, unidentified
MKIYYVGMDVHKATIVIAVLDVFGKVVSQSIIETSTQAVRDFFKSLRGEVDVTFEEGNHAAWLYDVVEPLVKQLVVCNPKHNHLLKQGSKNDRIDARKLADLLRLNALKPVYHGEHGTRTLKELVRCYECMVKDLSRVQNRLKALYNSQAIPNRRGELYHLSQRESWIQKQENAGRRVRAELLFRQMDELKVLKRAARKAMIAESRRHKAQSILSQVPELGSVRVAQIIATVDSPFRFRTKRPFWAYLGLAVETKSSADHELTNGRVSRRKMKIETRGLNEDYNRRLKSVFKSAATHACSCGVYKEYYEKLVAGGMRPEMARLSVARKLAAAVLAVWKKGQSFDEGMIMSRAA

SEQ ID NO: 74123 - protein, 420 aa, unidentified
MARRLELGKDMTDQRQWYVGVDWASESHHVFLTDADGRKIAERVFKHGGEGLAEMAAWLVAASGAEASQIQVAIEVPHGPVVETLVERAFKVHAINPKQMDRFRDRYTLAGAKDDSRDAQVMASALRTDPRCFRLLAAADPVVIELREWSRIAEDLSAERNRLTNRMREQLWRYFPAMLELDGDLGAEWLLDLWEVVPTPAKALRIRDKTIAALLKRNRIRRVDATHVLDVMRKPPVRVAAGTTEAASAHISALVARIRLVNRQLVQAHRQIDALTARLIPPEPEPGQRKQHDVEILASLPGVGRIVLATLLAEAFDALQRRDYAALRSLTGVAPVTKRSGKSCIVVRRQACHDRLANAMYHWARVAVQHDPRSRAKYAALRSRGHSHGRALRSVADRLLNVACAMLKTGTTFNPSPAAP

SEQ ID NO: 74124 - protein, 315 aa, unidentified
MAESQGPYVGIDVSKARLEVAVWDEGECWSSANTPEGIRRVIERLAELRPALVVVESTGGLERPLVVELCFAHLPVALVNPGRVREFAKSAGQLAKTDRIDARVLAHFASAIKPAVFVLPSEQQQLLSALMTRRRQIVEMLTAEKNRLLTTPSTTRHWVERNITSLEQQLAELNQQIDDFISHDPGLRNKERILRSVPGVGRITAAILLSDLPELGKLDGKKIAALVGVAPFNRDSGPKSGKRWVKGGRSAVRSVLYMATVCAVRFNPTLRAFYSRLLDRGKQKKVALVACMRKLLTFLNAMARDSSMWNPELST

SEQ ID NO: 74125 - protein, 349 aa, unidentified
MRHIGVDLHKTNFVVCFLNEDDTFNLETFPLSKAGIGHFTEQLKKDDALAVEVTQNIYYFYDQIKSSVARVVLVDTYRFSVIAKSKKKTDKADAKALARFLKLDHLPEVPVPSERVRQLRHLLQARETLVGLRTKLKNLGHAALTRNGIALPRSAFASQVARERLRKRDDLSAADRVILTAALRQIDELDQEVGRLEDEIVRLGKTLKGIKRLLQLHGMHLLSAISLLAEIGSIELFETSKQLVAYSGLATSVRQSNETTRQGHITKQGRKRLRTIAIRAVLSMVNRTHTPLMDFYQRKKREKGSGKAICATARKLLTIVFVMLKKELDYWYLEDRLYNRKLRLLNAAA

SEQ ID NO: 74126 - protein, 379 aa, unidentified
MDVFIERCAGLDVHSETIVACVLTGKQDEDLIRVTETFPTLTKDLFRLLKWLEDHGVSHIAMESTGVYWKPVFNILEDFFDITLANAQRIKNVPGRKTDVSDAEWIAKLLRHGLIEKSFVPPSDIRELRDLTRLRKKWIGHLTSEKNRIQKVLECSNVKLSSVISDVFGVSGRKLLERLVEQGYVDGDDVESRIHGKMSSKKQLITDSLFGTINDHQRFLIKQSWLHIQQLEGHIVEVEKRIDQLLEEYKEELHLLLTIPGIKKDTAAIIIAEIGVDMNQFPTSQHLASWAGVSPGNHESAGKRKSTRTTKGNPHIKSAMCEVAWAVSRSRNRWLATKYWSTAARRGKKKALVATSHRMLRIIYSMLINKEPFKERQVI

SEQ ID NO: 74127 - protein, 466 aa, unidentified
MKHNHRRRPSKPRVSPSVLERINLNVAGIDCGSAEHFVAVPPDRDPTPVRSFPTFTSDLHRLADWLTTCRVTSVAMEATGVYWIPIYEILEARGFEVHLVNARHVENVPGRKSDVSDCEWLRELHSVGLLRGSFRPTDAIVALRAYLRHRQTLIESAGAYIQRMQKALVQMNLQLPLVVSDITGVTGLRILRDIVAGRRDPSLLAEHRDHRCRASKTEIVAALTGNYRPEHVFVLQQNLELFDACQAQLAACDTAIEAHLRTLTASIAVPTTPLPPPRVTKKPRDNEPRFEVRTPLHQLTGGVDLTQIDGITAYTALKLLSEIGTDMCRWPSEKHFTSWLTLAPRNKISGGRLLSSRTQPSANRAAAILRMTAMSLGRTQTALGAFYRRMAARIGKPQAITATARKLAILIYRALKGELVYRDPGADAYDDQQRTRVLRRLRLRAATLGFELVSRETGELLDGVVS

SEQ ID NO: 74128 - protein, 352 aa, unidentified
MTVTIVETGVRARAITGGVDTHADAHVAAALDPIGGLLGVREFPATPAGYARLLGWLGGFGTVCLVGVEGTGSYGAGLARHIAAAGIRVVEVDRSDRQDRRRRGKSDPLDAVSAARGAQSGRAAGAPKGRDGQVEAIRALMVAKRSARSERTQTINQARALIVTGPDDLRARFARHAPADLAAELASLRPRPGSMVRYHTLLSLRELGRRAQFPGGQLQRLDEFIVPLVTARAPGLLGLYGVGPDTAAILLVAAGDHPERLRSEAAWAHLCATAPLSASSGKVTRYRLNPGGGRQANHALYRIVITRLGSHPPTRAYAGRRGKEGLSKKEIIRCLKRYVAREVYPHLRPPAG

SEQ ID NO: 74129 - protein, 415 aa, unidentified
MRVHRQCCGLDVHKKMIAACLLTEDAEGNSVVEKRLCGTMTRELHALAQWLWAAQVTAVAMEATGVYWMPVWNVLEPYGLQLLLISPEHYKAVRGRKTDLKDGTRIAELLQDGRLEGSYVPPVTIRVLRDRTRYRIQLVQYQSALANRMQKLLEQCNIKLAAVASDALGVSAMAMLGALAQGETDPVRMADMAKKQLRKKIPQLQLALEGCVLPHHRLLLREMIEDLDHVGTKITRIEETIEQQMRPFQSAVHRWLTVPGIKHRLAWTLVAEVGPTGSLSLCAADLVSWAGVCPGNNQTAGKRKSGTTRAGHPWLRRALCEAAWAASKSKGTYLPAQFRRLAAWRGPKRALIAVASAILTAGYYMLHRGTTTKNSGPDYFDKPNTVRATHRLVKRLEALGHRVILEPRFIPAPSS

SEQ ID NO: 74130 - protein, 313 aa, unidentified
MGGVNAAIEVGKQQLVVQLGSQGEQFSEANEPRAIKRIAKRLLQAGCERVLIEGGSYQSVLIAGLRAAELPVLIVNPRRVREFAKSIGQLAKTDTIDARLLALYGEQTQPPLRELPDEQSQALRALWVRREQLIEMLGMEENRLEHVAEKAKTVRHNLRSHIDYLRKQIKQADDDLDREVRNSSLWDKYEVLSSVPGVGLVLSVALLSDLPELGRLNRGEIAALAGVAPFNCDSGILRGKRKIDGGRSRLRRVLYIATVAAVRCNPVLKPFYLRLRAGGKPAKVALVAASRKLLTILNAMLKTKTAWKPPCPA

SEQ ID NO: 74131 - protein, 344 aa, unidentified
MGEVITIGLDIAKSVFQVHGVDGLGAVVIRKRVSRARMLEFFAGLPRCLIGIEACPAAHHWARELQAIGHIVRLMPPSYVKAYLKRSKNDANDAAAICEAVTRPSMRFVAVKTKEQQAALMLHRARQLLVRQRTMLSNAIRGHLSELGIVSAKGRNGTDELLEIIGKDADSRIPLAARSVLKVLAAQYSAIGAEIASISKSILVWHRSCEPSRRLEEIPGIGPIVATALVAEISDWKAFSSGRGLAAWIGLVPKQHTTGGKDKLGSITKQGNRYLRWLLVNGAMAVIRYAQKHGTKKHPWLGRLMARRPTKVAAVALANKIARMAWAIMTRGERYREPVLLLAA

SEQ ID NO: 74132 - protein, 342 aa, unidentified
MEQYVALDVSLKEISVCIIDSKGEVIFEGKTAAEPAMLVELIRSKAPQVKRVGLETGATSPWLFHALAAAGLPVVCMDARHAHAVLSMRPTKSDRSDARGLADMLRMGWYREVHAKSVTSHEHRTILGARHQLVTMRSDLDAQIRGILKTFGLILGTGNKDTLIQRAEKLAAGHPVLSGLVAKLAEVRRHVTSQIAAIDRDIRHLVHTEPTLKRLISVPGVGPITALAFLSAVDDPSRFKHARDVGPYLGLTPTRYQSGETDRQGRISKCGDTFTRTCLYEAAHVLLTRVQRFSPLKAWGMRLAKRIGGRKARIAVARKIAVILHCIWTDGTEFWWTREKAA

SEQ ID NO: 74133 - protein, 415 aa, unidentified
MHAFEQLTHFAGFDWAKDHHDAVIVDRQGATVASLTFAHTAAGWTQWRETIGAYPALGVAIETNQGAAVEQLLQSQVTVYPMQPKAAERYRDRHVPSGSKTDRIDAWCFADALRVDGQHWRALAPEDPLTEELRLLCRDEVELITQRTALVNQLQAALYEYYPAALEAFDDWTAPYAWEFVLAYPRADQLVKAGKRKWEKFLHTHKLWRPDTAPKRLEIFGRADRFCGSEAVTRAKSRLAVSTAQVLRTLQKQLEEYRSAIEQLFARHPDHDLFGSLPGAGARLAPRLLSEIGSDREQYPEAQGLQCVAGTAPVSFESGKIRRAKIRWHCNRHLRHAVHLWADCSRKFCAWAGTYYQAQREKGKSHACALRCLGQRWLKILWKIWQTRQPYDETLHALNQQKHGSWLLQLKPKTT

SEQ ID NO: 74134 - protein, 337 aa, unidentified
MMYSGIDLHSNNSVVAIIDDADRVVAQKRLPNDVTKIVGFLVRWQEQLAGVVVESTYNWYWLVDGLQDAGIHVHLANTAAIKQYEGLKHSGDETDAQHLAHLLRLGILPTGTILPREHRAVRDLARKRMQLVQSCTAHVLAVENIMARQLGGRMTSNQIKRLTDDAIDSLPLAADVGLAIKANAAVIATLQSQIKVLEKRLQERVRPRPQYDLLTSVPGIGQTLATVILLETGPIDRFADVGNFTSYARCVDSVHTSNRKKKGEGNVKNGNKYLAWAFVEAANFARRFCPEARRFHERKKARTNNIVATKALAHKLARASYHILKEGKPFDVARCFA

SEQ ID NO: 74135 - protein, 359 aa, unidentified
MQTQNTTRVTDFTGQNIYVGIDTHYKTWMVSIYSDEFELKTFGQEPDVDRLENYLHKHYPKANFKLAYESGFCGFWIQRSFAKKGLHCDVVHAADVPGSNKELIRKTDKVDSRKIAKGLRNNELNCIFIPDEQLESDRQLLRSRTKIVRDTTSVKNRIKAFLKLKGIKIPDEYKSNTWSKKFISWLQSIELNNISSKTAFNIYIDELNFLLEKQKQLKKAIEILAESDNYSGDFHLLRTVPSMGLLSGMTILTELGNINRFQKQDHLYSYCGLTPDCHNSGDVERIGKVSRRGNIFVKTILIECAWIAVKKDPALLLYYKQQLPKMEPNKTIIKVARKLLNRIRYVLKNKAAYQIGIIE

SEQ ID NO: 74136 - protein, 426 aa, unidentified
MKRTQNEKISQIKIETLVVGIDIGKETHYARAFDYRGIELAKLLKFSNTAEGFELLGRWMQSTCRQHAKTEVIAGFEPTGHYWFTLGDHLNRQGHKLAIVNPFHVKRTKELDDNSPTKNDRKDPKTIAMLVKDGRYREVYIPEDIYQELREAVAERERLQGQLTAIHNRVVRWLDIRFPEFTGVFKKWTGKTAFLTLRIFPTPAKVLEAGEDKILAAWRTVVKRSVGIKRAQALVKAAVSSIGRTNGHVASEAGLQNLLAEYELYHAQLERLEQLMWELLLQVPNAVKLLSIKGIGLVTATTFVGETGDIHRFEHPRQIQKLAGCNLVENSSGKHKGKTTISRRGRKRLRHGLFMAMIAILGKNPEFRELHHRNLTREKNPLNKMQSIVALCGKLIRVFYAILSKGVDYNPEKMMGDIQQPVRIAA

SEQ ID NO: 74137 - protein, 341 aa, unidentified
MQITTIGLDLAKNVFQVHGIDAAENVVVRKQLRRRQMLEFFKALPPCLIGMEACATSHYWARELTKLGHEVRLMPAKDVKAYIKRNKNDAADAEAICEAVRRPTMRFVQIKSAEQQGQLMQHRARDLLMRQRTQVINAMRAHLAELGIPARQGREGLKELMAIVADDDDTRVPVNARASLMVLAAQLQALQTLIGSIEKRIIKQHRVNEASQRLESIPGIGVIGATAIAATVADPKVFRSGRDFAAWIGLVPREASTGGKQKLGPISKQGDRYLRRILVVGACAVLKLARQKPEKYPWLTQLLGRRPFKVVAVALANKMARMAWALLANGGTYRAPRIAAA

SEQ ID NO: 74138 - protein, 485 aa, unidentified
MTKRRMSTFERLESGRLNRKQRRELERQVAAADPGLRIVHANAGGIDVGNESHYVAVPPDRDPNPVREFGCWTAALNEMAEWLKSCRIDTVAMQATGVYWISLYDVLQQHGIRVVLANAQHTSNVPGRKTDVQECQWLMKLHTYGLLRDSFRLAQEMESVRTIWRLRDRHVKEAGRAVQHMQKALTKMNIQLANVISDINGLSGQEIIAAILRGERDPWKLADLKDYRTRASREEVARSLEGNWREDVLFELQQAVDSYHFAHRQMQECDKKLESYLASEPTRTLDIPTPPESAQAATPGKKTRKAKKPTGNQPRLDLPKELKRVCGVDLTSIDGIDVMTALTIVSEIGTDVSGFQDENHFASWLGLTPAKDISGGKIVRRGKRKVKNRVAVALRTAATTLLKSDSYLGARYRSLRRKLPSFAAAVKAMGRYLAVLIYRLLTKGEAWVDRGTVQFERRHTEQELASLNFRARAQGFKLIPITQAS

SEQ ID NO: 74139 - protein, 403 aa, unidentified
MNSVGIDISKGRSTIAVMRPFGEVVISPFEVRHTVSELSELARQLKSLDGETRVVMEATGNYHTPVAKLLHDAGLYVSVVNAKLVHGYGNNDLRRVKTDRKDAVKLANYGLDRWLTLPKYVPEEDTRLLLKNCYRQYRQYSKVQTLLKNNLISLLDTVFPNANRLFSSPIRGDGSEKWVDFVAEFWHCRCVSEKSERAFTSKYLRWCRKHGYNFREAKAHTIYAEASGHIGVMPKSETTKLLVEQAVAQLRATSAALAALKHEMQSLASMLPEYPVVMDLFGVGPTLGPQLIAEIGDVRRFYSKKALVAYAGLDAPPNDSGDVTGRHKSMSKIGASSLRRTLFLVMSVYLQTAPLDEPVYQFMDRKRAEGKPYRVYMMASANKFLRIYYATVKAYLESLEHTA

SEQ ID NO: 74140 - protein, 428 aa, unidentified
MLNKLDRLQQFQDLRGTIRGSDSILIIGVDVAKDKHYAFFGTSNGRTLWKKLIFDNSIQGFNKLLSMTQDLSIQHSLNARVFGLEPTATYHKPLAEHLIKKGEQVVYVSNVAAKNNRALLDGRWDKNDTKDAANVADLVGQGRCQYYDLAEDSLRELRSLLAYRAKLKKQEHALRMRIRNSLLAQYFPELDKQMPQGGQDGLILDIIAHDFAPARIAALPFEVFRQQYQMEKRHLIQEQRLRTIWEISQSSVGCALPASAAWEGRMLVEQLRQIRQTKRELEKQLKEVGQTFPAYAYLLSIPGFGPIVSAMTLAAIGDAHRYTSRKQVLRLAGLDLSASRSGKSSNNAIPVVSKQGKAGLRYALVQAAQIASYKDDVIRSYFTGLLKGRELERGIKLKMRVKLAAKMLVIAWTLMKRNEYFDSDYFRT

SEQ ID NO: 74141 - protein, 362 aa, unidentified
MDVHVNSYTLCCYSIEKDEIFAIVPMEPDYKNILKYLEQIKKNQDKEYEFLCGYEAGSLGYTLYHQLSDHGINCVILAPTTMPKTSKREIKTDKRDAGKIAKCLAYRTYSAVYIPTAEDNAVKEYIRMRNAAKDTLKKIKQQILSFCTRHGKHFTEGRSYWTQRHLIWLKKQAFTDKILQEAFEEYLILYFQAFDKIERFDRRIEELAHQERYEEKVKKLSCLIGIKTHTALATIVETGDFKRFQTAQNYASYLGLVPGEDSSGDSRRRTGITKAGNSHVRKMLIESAQCYSRGAVGAKSKTLSRRQAGNEPKVITYADRANERLKRKFYRIMFRSKRNIAITAVARELACFIWGMMTDNVA

SEQ ID NO: 74142 - protein, 380 aa, unidentified
MQQHSPTDPTGARPNDAVLFVALELSRASWLVAIQAPGRDKISRHKLAAGASAELLELVGRQRARAEHRTGGKLRVMSCYEAGRDGFWLHRLLVANGIENLVIDPASVAVNRRARRVKTDRIDVETLLRAMMAHARGERRVCSVVRVPTPEAEDARRLTREREALLEERVRHVNRVKSLCALQGVYDFEPLRPRAAERLDGLMTGDGRPFPERLKAEVRRHLERLGQVVHQIAEVEALRDKPASPLAKGVARLVALRGVGPNVASVLQAEILGRCFANRREVAQYAGLAPSPWASGRAQREQGIGKAGNARVRAAMIELAWLWLRHQPDSALSHWFRERVGQARGLVRRIAIVAVAPRLLVALWRYAIDGVIPEGAVARG

SEQ ID NO: 74143 - protein, 429 aa, unidentified
MNFNTQNGRIEALTEEWLIVGVDVGSDKHFARAFTNRKVELSKKPFAFENNSDGFEAFNAWIAQFLKLYGLKHVMVGMEPTGHYWFNLAHYVKTHGMMLSHVNPAHVKKAKELDDSDPSKNDRKDPKVIGGLITEGRYVLPYIPEDTYAELRELNNLRYRETEQHTRQKNLYARWISINFPELKTVYSDVETAVTAKMILKEAPLPEDVVKLGIDGINEIWRMNKIRGVGLKQARKLYEAAERSIGNSGCPKIARMEIQEILEDLDKYESRLKKLMEMLEQAARNVPNADKLFDIPGVGVKTITGFLAEVGDISRFEDAKAIQKLSGMAIVANQSGKHNGQSSISYRGRKHLRHVLYLGAISVIGRNEQFAEIYNYYLTRKNNPLKKLQAVIAVACKMIRVFYTILTKGISYDGSKMMAGIKRPVGALA

SEQ ID NO: 74144 - protein, 360 aa, unidentified
MSTSIALVEPTAKVIVGVDTHKLVHVAVAINLLGARLATISVSADRAGYAELVAWARALGTVEAFGIEGTGSYGAGLASFVRRHAIRVVEVNHCDRRKRRNNGKSDTIDAETAARSVLSGIATAVPKTADGASEMVRQIKIARDTAVKARSAAIITLKTLIVNAPGELREILEPLTDRKLIDRCAALVSGDLIDPTASVKHALRALASRWLMLSTEIVSHDEALDTITMAAVPSLREAFGIGPDSAAEMMIVAGDNPQRVRTEAAFAKLCGACPIPASSGVTNRHRLFRGGHRQANAALYRIVIVRMRWHQPTIDYVTRRTTEGLSKKDIIRCLKRFVAREIYNALITDHQARLELAEAA

SEQ ID NO: 74145 - protein, 461 aa, unidentified
MSANKPTGAKKKSVPKKVDWKALEVVHPDAAGIDVGGSEHWVAVSPDRDPEPVRRFGCFTADLREMACWLVEKGVRSVAMQSTGVYWMPVFEILEQQGLEVYLVNAQHTKNVPGRKSDIQECQWLLKLHAFGLLNNSFQPNDEIRIARTLWRHRGNLVAEASSVVQRMQKVLTERNVQLSNVLSDISGVSGMKIIKAILDRVRDPWELAALVEPGVKATPEDIVKSLEGNWREELLFVLRQHVEFYQIYQKKIRACDLQLRKHLQSLGSKLDLQAQPLGPRPKGKKLSRNAPTFDLRTELYRITGIDWSQINGIDVLTAQTVISEAGADLSAFPSEKQFASWLGLCPTNQQSGKKILNRRTRKVVNRATVAFRNAAMTLVRSQSYLGAQYRRLRTRLGAPKAITAMARKLACLFYRLIKHGQQYVDQGTEYYETRYREQQIRALAKRAQKLGLRLVIPKTA

SEQ ID NO: 74146 - protein, 372 aa, unidentified
MDNVTTGRRRILPQEYDVFMGVDTDKRSIAVTHLDHLGLGKSLKMPYDGQMLLSFVSNHFAGKRVAFAYEAGPTGFGLYDEIVAGGHDCLVVAAASVPTPRNRRVRTNRLDSRKLAYQLRGGALVGIHVPSEAYRMLRELVTLRQQYVSEVRANKCRIKGLFLRNGLVFEWNTPGGYWSSEVLQGLRECDVNPVLRLKVSKLVDGLVFAQYQASEAQRAIREFVSSTEELKESVRLLMSIPGIGWVVASYALARVGDWRELGRSHEMASFFGLVPSEDSTGEGADRGSITKAGDPRMRSLLIQAAWSAIRKDDELNEFYKRTYKSHAQNAAARVAITAVARKLTARMHCVLKERREYAVRPDAHKPSQAAAA

SEQ ID NO: 74147 - protein, 338 aa, unidentified
MEQTQQYVGIDLHRRHSVIVRRTPEGETLDTVRIDNDPVTLAAELAKAGEHPEVILEATYGWYWAADLAAECGANVHLAHPLGNNWGHRRVKNDERDATDLVDLLRMGRLAEAWIAPPALRELRELIRYRAKLVHLRTGLKAQVHSVLAKEGVRVPMSDLFGVAGQALLDACPLAEAYTVRVESLRDLIGAVDREIDMLQVRIDHELADDSGWWAIQAIPGVGPVLGAVFVAEIGDVGRFATARHLSSWAGVTPSHQGCDTTVRRGHITKQGSRLVRWAAVEAVQRQRGPTPIRAHHHRVGDRRGKHIGRVAAARKLLTLVYYGLRDGEIRCLAEAKG

SEQ ID NO: 74148 - protein, 355 aa, unidentified
MDNRKYIGMDVHQASISIAVSDAAGKVLMECIIETKAATVLEFIQGLRGSLWITFEEGTSAAWLYDLLKPHVTKVVVCDPRKNALLKAGNKNDRVDARKLSDLLRAGLLTPVYHGESGVRTLRELSRSYLAASKDLTRVMNRLKAIYRSWAIPCAGQQVYSARQRAAWLEKLKEPGVRRRAEQTYQQLDFLMGIRKETRKELLAESRKYPARKLLEQIPWLGPIRVALLIALIQTPHRFRTKRQLWNYCGLGLRTQSSGEYRFTGGQLQHARKPPALRGLNVNHNHELKNIFKSAATQASASGNPLGEFYQNLLAGGMEPPMARLTLARKIAAIALNIWKKGERFDPAKLKQQAA

SEQ ID NO: 74149 - protein, 430 aa, unidentified
MKSNTQNAKIEAITEKTLVLGIDVGSETHYARAFDYRGIEYSKKPFKFSNTEAGFLTFKEWIRDIKERHEKDKVVSGMEPTGHYWFNLGKFLQDNEMKPVLVNPHHVKKSKELDDNNPTKNDRKDPKVIAGLVREGRYMIPYLPDGVYADLRTASNIRFQLQAELTRIQNRISRWFNIYFPEYRTVYGKPDAKSGMLLLKAAPLPEDILTLGIDGVNQIWRDAKLRAVGKARAKTLIEAAEHSVGSKEGAVSARMEIRMLLEDYESRNTRLQEVMILIEELVRKIPMAEKLLEIKGVGIRTVSGFLAEVGDISRFNNPKELQKLAGLALVENSSGKHKGETTISRRGRKRLRYLLFEVAMSLVSKNQEFRELHNYYTTRRLNPLKKMQSLMAIAAKLIRVFYAMLTKGVDYDPKKMVSDIKRPAVYLQAA

SEQ ID NO: 74150 - protein, 376 aa, unidentified
MKKIVICGADVHDNSITTRIAINKEEPETRIFSYTSHGRKNMFDYLKFIAGKHGAERIVLAYEASSLGFGLCDEGRDRGIECYVLAPTKMPQSEEQRKRKTDKRDAQKILEQVRGHVLAGNDLAKVWIPDPQTRDDREVVRMRLEVADKLTASRTQVRTLLKRNKVEKPKEVGKAWTVSDCQWLQRLIEPGNELAFGGRVALASLLRQIEALEAEIKEVDEAIKVLAATDRYRAAAEVLIKELTGVAVLTAMVFLTELGDMRRFRNRKKVGAFLGVVPSSNESGENNDRKGHITRQGPARVRKVLCQAAWARIAFDKEEQKVHARIVEKNPKKKKIATVACMRRLGIRMWRKALEAQFKAGVYQTKELPQMKCSAA

SEQ ID NO: 74151 - protein, 350 aa, unidentified
MIIIGCDYHPGVQQIAWVDTDTGEFQETRLQHREQAEKFYGELAIRGVRVRLGMEASGQARWFERLLAELQMELWIGDAAEIRARRVRKKKTDREDARHILRLLVEDRFPRIWVPSWENRDVRQLLWHRHRMVQMRTRIMNQLQAVALNEGLRCKKRLWREKGRQQLESFPLAAWGSRRRRDLLEILDRLSPTIAELTQAIEAEVANYPAAQRLMTHPGVGALTALAFVLIIGETERFQCGKQIAAYLGLVPEENSSGESRRLGHISKQGSGLMRFLLVEAAQVTVRSDGEWRSKYFHLAMRRGRKIANVAMARRLAVRLYWMWRKQWDYEQLKKFGPHAGQPGMSDGVK

SEQ ID NO: 74152 - protein, 321 aa, unidentified
MADSVLGIDIGKHKFDVALLVNGKTRTKAVKNSIEGFQTLCDWLKKHNATRVHACMEATGNYGEELAIFLHDAGHIVSIVNPARIKGFAQCELSRTKTDKADADLIARFCLAMKPAQWLPLPLKTRGLQALVRRIDALVSMHTQESNRLKVAHKLIKPSIKKHIAHLDAEIKKLKAQLRSEINNDPDLKGKKELLTSIPGIGEATVAMILTEFDFQKFDSVKAVVAYIGLAPKDTLSGSSVKGKPRLCKVGNARLRKGFYMPALVAKKHNPIISNFYSRLKESGKNGKVAVCAAMRKLVHIVYGVLKTGKPFDPDYGTKLA

SEQ ID NO: 74153 - protein, 315 aa, unidentified
MRSTVAQSVGVDISKDTLDVAIHPGGESFRITNNPEGHRALIKRLKGFDIARIVFEATGAYHRLFQQAMVEVGLPWVKVNPCQARRFAQATGKLAKTDRCDALMLARMGAVLELETRAPASKTVEALRELVNARDALIKDRVAALNRQAIAVSPLIKRQLAQRLRQINGQIEAIDRRLKTLRNADSDLCQRFDILTSIPGIGEVTANVLVVETPELGRLEHAQAASLVGLAPVPRDSGQTHGKRSIRGGRPRARQALYMPALNAIRLNPEFKAKYEAMVKVGKPAKVAIVAIMRKLLILANALIRDQRKWAPAKP

SEQ ID NO: 74154 - protein, 355 aa, unidentified
MTSTKYIGMDVHAESISMAVRNSVGKVVMESVIETKASMILQFIEGLRGDLHVTFEEGTAAAWLYDLLKPHVARLVVCNPRRNALLKVGNKSDRIDARKLSELLRGNQLHPVYHGEHGLRALKELVRSYLTISKDLARVMTRVKALYRSWGIPCSGTQIYSRLHRVTWLSKISEPGVRLRAAFYFQQLDALRTLRQEVRQELLAESHKHSAWKRLCGIPSIGPIRAAVALGVLQTPHRFRTKRQLWSISGFAIETRSSADHRHVNGQLQKVKKRVSIRGLNQNHNHDLKNLFKGAAVIASTKPGPFQEFYTALLAKGMRPEMARLTLARKIATIVWIVWKRGVSFDAQYLKPQTV

SEQ ID NO: 74155 - protein, 429 aa, unidentified
MSEEKPLELRVSVDVGYRRHSVAMGLSSGEVLEEFEIDHRIEGFQEFFSRIEKHRKEKNCAVAIAMEGYNGHARPLDSLVRERGYRLYNLNNLKFARFKEIFPGAAKSDRIDARKGLELFQLSDHLPLAKEVLQEVRGTPPENEVLKRLTRRRRRLVNERVRVVNNLQADLQAVCPGLLEITGEASNQWFLSFLVSADTLPQLARLKRGSLVKIPSVGVKSAAIIEDWQKRAHFSQEVQWVGEMIQEDAKRCLELDEKIKRLETKIAEVAKGSKIAKTLRSIPGFGAVCTSELAGEIGTIERFASEGSLSLYLGMSMLDNSSGKYQGTKAPKHVNTRAKAAMMIAVDRHRKYVPESQRYYEKKRSEGKKHNQAIRALGRHLSRIIYKMLKVERDYEIRPEKGNTKTKVSPRSFVKTQIRRPKISIIENK

SEQ ID NO: 74156 - protein, 322 aa, unidentified
MAMLSFGGIDVSKNRLDVMVLPEEQCSSVPNDAAGWANLVEQLRGCSIAAIGIEASGGYERGVMRALLAAGIPARQVNPFKLRQFARASGVLAKNDPLDARMIASFVAIMPTRPAQLQAPAAERLAEMLAVRRQLSAEKVAAENASRLLEDAMLQRLSRRRIGRLAADIDVLDERMVEIVAADAALAHRYRLLTSMPGVGAVLACTLLALLPELGRMSRKQVAALVGVAPYAFESGTLKGRRCIWGGRAHVRHVLYMAAMSASNWNPVLKAFHDRLKAAGKLPKVTIVAVMRKMITILNAMVRDDVTWADRYIGRHSVPTAR

SEQ ID NO: 74157 - protein, 347 aa, unidentified
MKNTTIAIDLAKSVFEVGISDRPGHVARNHRPSRAEVSAFLAAQPPATVIMEACSSSHYWGRKFQGLGHDVKLLPPFYVRPYVQRSKTDRTDVKGMLEAWRNSDIRPVPIKTESQQQLTSLHRVRSTWMAARTMRMNSARGLLREFGIVFPAGASTLPDRVQLLIEDADAAVPMVLRDLLQELVLEIGELESRIKTVEKHLQALASQTPVVERLRTIPGVGLLTATALVGFVGDVARFPSGRHFAAYLGLTPREHSSGGRQRLGRISKQGDVYLRMLLIHGARAVLQGAQPKSDPDRFRSWALEIQRRRGHNKAAVAVANKMARIVWAVWKFGKPFQSRSQNDDIEI

SEQ ID NO: 74158 - protein, 402 aa, unidentified
MYNAVGIDVSKGKSTVAVLQPAGVIIRKPFNVNHTSSELDDLAKYIGSLEGETRVVLECTGRYHEPVVKTLSEAGLFVSAVNPHLIKNFGNNSIRKVKSDPADAKKIARYTLDNWIELRQYSSMDNTRTQLKTLNSQFSFFMKQKVAAKANLIALLDNTYPGINKLFDSPVRDDGSEKWVDYAYSFWHVDCVRKIGLKTFTERYQAFCKKHHYNFQPAKPEELFLASKDLIAVFPKEASYKLLIQQSIQQLNLASSHVEDLRSKMNELASTLPEYATVMGMYGVGKTFGPQLIAEIGDISNFTHREGLTAFAGVDPGVDQSGTHNSKSNRASKCGSSRLRKTLFQIMSTLLQTAPENDKVYQFLAKKRAEGKPYYVYMTAGANKFLRIYYGKVKECIRNLEQ

SEQ ID NO: 74159 - protein, 378 aa, unidentified
MKYLSKGVVPAGRPLAPKARASAREPVLQIGPPPSSPRLRRIRGLVSLCYQGQSETIQGRGAGTTAYSTEVLMDKFDACGIEVSAQELVVALCRDGRAERLRSFSNTAEGHAALCRLLTSGPRRVRVALESTGLYGLDLAYALHREAHIEVMVANPRAVRHFASALMQRSKNDRLDAVVLREFAARMPFRAWVAPSAHCFALCAVTRRLETLTEQCTAEKNRLHAASLSVAFPAAVRRDLQRSVRSIQRALVRLTREAQRILGQWVAYAGLDPREYSSGSSVHKKVRISKTGNRHLRRALYMPALVAVRHEPHLRAFYQHLLAQGKCKMQALVAVMRKLLHAVYGMLKHRQPYDGTKLYRLVEPLPVPSSGHCSAEAA

SEQ ID NO: 74160 - protein, 468 aa, unidentified
MWKAGSPRPRQQTKVMNQSPPRRIKHVGLDVHATSHAVAVAESGTEEVRYHGEIPGTPEAVDKILRKLGGEGVELRVCYEAGPTGYGLARHLLARGIACGVVAPGLIPRKGGERVKTNRLDAQRLARLSRAGELTFVHVPDAGDEAIRDLVRARMSAVEDLRRQRQRLLGLFLRQGRRYPGTGRNWTRAHMAYIAGMEWEREEHRFLCQEMLQAIDTEQARVDRLAAALESRLPGWRWASVVGALRCLRGFDTVSAMTMVAEVGDFSRFESPEQLSAYMGLVPGEDSTGSRRIQGSITKTGNAACRRTLVEAAHHYRCAPAVGEKLRGRQEGQPEAVVAHAWGAQVRLCGRFAHLKGQHKKTVVVVTAVARELAGFVWAVAMLAMGKGLPERRHRGAAPRARLGDAGVGTPGQAEKTKAESIGEKPAGPRGAKGPRVYVLRPFEKAGAGSPGERPARRRVAEGRGSNG

SEQ ID NO: 74161 - protein, 353 aa, unidentified
MATIPVCKNYSIMDKFNKKKYFIGVDISKTVLDLALLREGDYDSFTELKTKNSIDGFNGIMEWIQKEGVQLRDCAFCMEHTGTYGLLFYAWLAQIKILFCVESGLHIKRSLGMTRGKNDAVDARRIADYLATHRAKLKPFEMPSPLLVKIKQLLTYREQMVRIRTSLKNSLKSHEQYRTISGLDNIVAQIKEQIDRQDQIIIGIKQQITDIIESDQELRKNYRLMASVKGIGLIIGAFMLVSTNNFTSFDNGRKYACYAGIAPFEFTSGTSIRGKTRTSKFGNKIIKTLLNNGANSAIRYDKQIKKYYERKRGEGKDHKVIVNAVCCKLVNRIFAVIRRQSPFVEVYEQNFIN

SEQ ID NO: 74162 - protein, 322 aa, unidentified
MQVNAILGVDISKKKFDVCLLMDNKKRHKVFQNNQDGFAKLVVWCNGHGANLIHLCLEATSWYGEDLATFMHDLGHNVSIVNPAQIKAFGKNELLRNKTDKSDAAMIARFCIANKPALWKPIAPEMRHLRDLYRCMQSLKNDKLQQMNRLENENMHSSCKEAISKVILAIEEQIIVLETEINEHINHYPHLKNMVENLKTIKGIGHLTAVAVIAEMPAVDNFDNAKQFTAFAGLNPGHYESGSSVSKRSCICKIGSERVRKALYMPAIVVKNHNNHFQKFCQRLASKGKCPKVIVLALMRKLMHVFFGILKNNQPFNCNLVG

SEQ ID NO: 74163 - protein, 341 aa, unidentified
MQITTIGLDIAKNVFQVHGIDATEKVVVRKQLRRGQLVKFFEAVAPCLVGMEACATAHHWARELTKLGHKVRLMPAKDVKAYVKRNKNDAADAEAICEAVRRPTMRFVMVKSAEQQGRLMQHRVRDLLMRQRTQLINALRAHLAELGIAAAQGREGVKGLLAIVAQNEDSRLPVDAHASLIVLAAQLQAVQTMIGSIEKRVVGQHRSNEESKRLETIPGIGFLGATAISATVPDPKVFRSGRDFAAWIGLVPRQDSTGGKQKLGPISKQGDRYLRRILVVGACSVLRRARQQPEKYPWLIQLLARRPFKVVAVALANKMARVAWALLAKGGTYRAPRLTAA

SEQ ID NO: 74164 - protein, 428 aa, unidentified
MKYNTQNAKIKSITEKTLIVGIDVGSETHFARAFDWRNYEYSKKPLEFSNTEAGFMTLKAWMADFAEKYGKNVVIPRMEPTGHYWFNLGAYLQDNGMKPVHVNPHHVKKSKELDDNNPNKNDRKDPKTIAALVNEGRFSYPYIPTGIYAEIRSLSNLRLQTQEEITRIKNRIARWFSIYFPEIKDVYRNPDSVSGLMILKEAPLPQDIVKLGVDGINKIWRDAKLRAAGLKRAKTLVTAAEHSIGSQEAPDSARIELKNLLNDYEIYKNREEDLMSLTEEKLSEIPHIDKLLEIKGVGLKTVSGFVAEVGDITRFDNPKQLQKLAGYAIVECSSGKHKGESHISYRGRKRLRYVLYEAAISLIARNEEFKEVHRYYRTRKENPLKKMQSVIAVACKVLRIFYTILTKGVTYDGAKMMQDIKRPQMLAA

SEQ ID NO: 74165 - protein, 312 aa, unidentified
MAKIICGVDVSSETLDARVGRDGSFQVFDRTPEGIEALAAFCKTHDVEFVAMEATGGYEKLPFGLLWLAGVPCAIVNPRGVRRFAEAMGIFEKTDHIDAGVIAHFSEVKRIVPQTPASATQEHLEAMVTRLRQITDLRTMQTNQRRLLTDAGVLAGIDELIALINRQIRGLERQIAQSIDADPLWKVLDAAFRSIKGVADRTVARLMAELPEIGTLSGKKAAKLVGLAPLARDSGKVKGPRSIRGGRAHLRSILFVVAEVVRRHEPEFYKFHKTLTDAGKCKKVVRVAVARKLLVRLNAKARDARKELGLAV

SEQ ID NO: 74166 - protein, 461 aa, unidentified
MRRANALYVGIDVANLTLEVSFLGEDARPVRGGASFSNDPEGHTALCAAAVAAARLVGSKPRIVFGMESTSNMHKRLEQRLRAEKRRSAEVHVINPRSVKHFAKVLLSDNKTDAIDSRIIARYLISIEPKPAALLPDGSEELREATRTRRRLIEERTQSKNRLHGLMRFHLPGYHSKIGRQLTKGILTVLNAYPTPAEILAASDEELTRLTTGPRSRVGVALAAKMKELAAAAPQPNLGRTTALIIRTTAARVLELSAIIDEMDRGIEELLAQVYPDQVLTTIPGVGPVSAASILAEIGDVHRFTDATAFIGYCGLYPIVWQSGEASRHYRMTFKGNAMLKMTFLVASAAARQYNPAIAAYYERLRRRGKSTKAAGGAIARKLAQIVFAVLVSGKPWSAEIASAGIDRGTAMAGEDAAKTETGADCLIGEMRAPHEATRPYSRSGGSRISNVAKEASHAQP

SEQ ID NO: 74167 - protein, 343 aa, unidentified
MSNDTRIAVDVAKAVFELAISDRPGHVARRERLPRAQFLAFVAQQPTATVVMEACGSAHYWAREIQKLGHRVVLLPPHHVRPYIRRNKTDRTDAKGILEASRNDDIRPVPVKTVNQQVLTSLHRLRSGWMLERTARLNALRGLLRELGVFIPVGSREVIPAAWALIEDADSTLPDALRPIFAEACREIRDIEARVHLVERQLASIAEQLPAVDRLQTIPGVGLLTSTALVGFIGDIQRFPSGRHFASYLGLTPREYSSGLKRNLGRISKRGDGYLRTLLIHGARSVLVHARKQQPDRLREWANQLAKTHVHNKAAVAVANKLARIVWAVWRHERPFALMARAA

SEQ ID NO: 74168 - protein, 457 aa, unidentified
MRTIGIDLAVAAAHKAIVMEADGTFITPILPFHTRRDEIEGLVIRAREGVTPDYPLRAVLEPTGMMWFPVSVVLEQMGVTVYLVNGRRVHDLRRFYKRHSSSDRISCRVLAKLPLVDEESLYPLEIPSAVQLACQRGCKELDRLSTQITAIKNRLRDTDRFAWPGLESIFKNIYSPTTRLFRRTWYDPARVVAAGAGEVRRTFEALSGQEDDLKWVDYLVKLASEILQLYGPTAIDYPLLQREVCREQRQLAYLEERAEAVWRDTVRPLYHQLHPGRHLETLYGVGEESAAVYASFIGRAGRFPDNRHFRGWHGLIPDSRQSGDAESKGLHISQAGPDLVKKYGYLGADVARRYDPQIAVIYHDQMVNKGKHHNQAVCACATHLLDRIYVILKEDRPYELWDVDGTPVTPEQARAIIAERYTVPEEVRKRNNRRARKKRAERRMERKRKQRESRRKK

SEQ ID NO: 74169 - protein, 354 aa, unidentified
MKRSTKHVALDVHQATTLASVREDSGRVIARSILPTEAPALVEFFRGMRGTIHVALEEGTQAQWLHDLLTPLVDRVIVCDRRGEARHGNKGDQRDADGLSEQLWRGGLRAVYHGGGAGAELKELTRSYQNLVQDATRVMLRLKALFRARGIRTPGQRVYHPAGRAAWLARLAERGARLRAEALYAELDVLRALRPPAKAAMVAEARRDPAWLVLQSIPFMGPVRVALLLATMQTPGRFRTKRNLWAYAGLAVVTHSTADYELVAGRPQRRCRAPLTRGLNRNHNRVLKEVFKGAATAAKARPGPLQDWYDGLVARGMREELARVTLARKLAAITLRLWKKGERYDPTQLTTPAR

SEQ ID NO: 74170 - protein, 384 aa, unidentified
MRTDQTDMTNAGEVVLAVSLELATAKWKVALHDGRRDSPAIHTVAQLQSAARLQAVLSLIEQHRQKWALPASTRVVVSYEAGQDAFWICRALQARGIECYVVDPASIPVERHKRRAKTDRLDVIKLVINLRAWLRGERDRMHVVHVPSPQDEASRHLMRDRGQLQKEVLQHRDRMRKLLATLGCQDEVDSRKFAGRLARSEVRCHDGAPLPAELHERLLRECERLALAEAQLAALEKARPTSLPEPARERIDHLTRLNGIGPVGGSRLALELFWRQFSNRRQVGACVGLVPQPYDSGESQVDQGISKQGNRRVRALLIEMAWSWIRYQPGSTLTKWFKERTQGTGPNRRARRIAIVAVARRLAIALWRYLKDGVIPEGARLKSV

SEQ ID NO: 74171 - protein, 411 aa, unidentified
MRVHHNVCCGIDVHKKSVTACLMWGPANQEPEFEIRRFGTMTRDLQKLTEWLKQAGCEAATMESTGSYWKPVWNVLEGQIPKLLLANAQHVRALPGEKTDRKDGKRLAELTRHGQIRPSYVPPRAILELRDLTRYRNKLLSAGSSERNRVQKVLEDANIKLGSVLTDVFGVSGQKMLQALVKEETVDTTKIAQLAHWSLKPKVEAIQQSLEGKLTAHHRFLINASLEHMRFIEEQLIRLDQEIQRRLQPYQEEYALLQTIPGIKETGAARILSEIGADMSPFADGDRLSSWGGACPGNNESAGKKFQSKVRKGNVHLLAALTECAWAATKKKDCHFRNKYYRLKSRRGSQRAIVAIDHAMLKCIYVVLSQRKPYEEPKPTSLTEAQKQRKASSLCRQLRALGYDVKIQKAA

SEQ ID NO: 74172 - protein, 341 aa, unidentified
MEKVSIIGLDLAKSSIQVHAASVDGSVLFRRKISSKKLLAFLSGLDPCIVAMEACAGSHHWGREIAKLGHRVKLIAPIYVKPFVKRQKNDAADAEAICEAALRPTMRFVAVKSEEKQAAATVFKVRDLLVRQKTQIINALRGLMAEFGITVPQGPSHVGILISHVEDGGSSLTEAARAPCLALVLTLRALVDKVRELDLEIGRRARQDDVAKRLMSIPGIGPVIATALEALAPPAETFTRGRDFSAWMGLTPRQHSSGGKPRLGKTSKMGQRDLRRLLIIGASAVVRWASRRGALDGSWLSRMIGKKPPMLITVALANRMGRIAWALMTNGGRYEEQRLAA

SEQ ID NO: 74173 - protein, 370 aa, unidentified
MKEPITSYVGLDIHKDSIAIAIAKAGRDAPQFIGTTVAQLAQVRKVLTRQKCTPSKTLVVYEAGPCGYGWARYLNTNGWRCEVISPAHVVRSAAGKAIKTDRRDALLLARESRAGNLTPIAVPDERDEAIRDLSRAREDAIAARLRARQQLKAMMLRHGRTYSGNAWTLAHERSLATVRFEHPAQQIAFDEYRQSVKDAHERCERLTQALREQCAGWRMGRVVEALMCLRGFDFIAAVTIIAELGDLNRFSHPRALMSYLGLVPSEHSSGNSRRQGAITRTGNRHARRILVESAWTYRYGAHVGREHQIRQQGQPKAIRDIAWKAQLRLTQRYRKLSLGRKMKATKVCVAVARELCGFIWDLARHVPVHQ

SEQ ID NO: 74174 - protein, 422 aa, unidentified
MQVLYQRCAAVDVGKDVIAVAVRLPGDGPDGRVMIKRTFRTFYGVLAEAARWLTSLGVTHVAMEATGIYSMPVYHALIEHGGFAKVLVCNAGHVKNVPGRKTDLSDAEWLVHLLECGLLAGSFIPPAEIKAARDVIRYRARVCQSRTSEIQRLGSVLQDAGIKIDSVASSIATKSGRAMIEALIDGERRGKVLADLAKGAMRAKIADLSMALEGRFGDHHALMCRLHLDHTDHLEAMIARLDAQIEAMMTPFHAARRLLTTVPGIARLSAAAVISEIGTDVKEFFPDDAHLASWTGLCPGNHESAGKRRGGKRRKGNPHLQSVLVECAWAAVRHDGYLKSLYHRHVMKWGGYRSPVAKKKAIVVVAHALVIIIWHILATGKPYEELGADYFTRRLDPERETRRLIARLEALGHRVTLEDTAA

SEQ ID NO: 74175 - protein, 366 aa, unidentified
MKKGITFVGMDAHKVAIKLAVLLPGETKPVEWQLANEKAAVRRMVRKVQRLAPGEVRFCYEAGPCGYALQRWIQEAGAACSVIAPSLIPRKPGDRIKTDRRDARKLAELFRAGLLTEVHPPTPEDEAVRDLCRAREDAHEDLVRCRHRLSKMLLRRGWIWNGSKKAWGQGHRLWLRSLRFEQAADQVVLEDYLQAIEQVEQRLRGLEQHIEAASQLPAYAEAVGALRCFRGIDTLTAMGLVAELHDFMRFDSARGLMAFLGLVPSEFSSADSERRGAITKAGNRHARRLLIEASWHYRHQPNAASLKRRRQGQPAEVVALADKAMYRLNRRFNRLLAKGKPRSKAVVAVARELAGFIWAALHSKAA

SEQ ID NO: 74176 - protein, 345 aa, unidentified
MVMLHYVGLDVSLKQTSICVVDQAGSVVREGVVDSEPESIASFVRSKAPGSVRIGLETGPTTTWLWTELKRLGLPVVCIDARHAKAVLKMQINKSDRNDAAGIARIRQAGWFREVHVKRIDSHLVKALLVSRALLVKIKRDLENQIRGLLKNLGLVIGHAKFNVFGARAEELIEDRPELVAVIRPLLAARKAVEDQVDDLNRRVLKLARQDVQVRRFMTVPGIGPITALCFKATIDDPTRFGRSRSVGAYVGLTTRRHASGEVDWSGRISKCGDAMLRMYLFEAAGVLLTRVPKWSALKAWGMRLAKRNGLRKAKVAVARKLAVILHRMWIDGTEFNWTKKEAIA

SEQ ID NO: 74177 - protein, 356 aa, unidentified
MEKLTTVGIDLAKDVIAVCVLDVHGAAMERRVFRREAFERWAEQLPASNVAMEACGSAHHWGRWFAARGHTARLIAAEFVVAFRKGGKNDTADAEAVAIAARQPTMRLVPIKSVDQQAILAWHSVREGWKEERTALLNRMRGLLAEYGVVIARSADRFLAALPKLSEDSRLPDPVRALLLEAREQFAALHARLARCDAQIAAHARNSAAARRAGELLGVGPITSSALIATVPDARVFKSGRQFGAWLGLAPRQHSSGGKTRLGRISLRGNVYLRTLLIQGARSTLQSAINTEPSRASRLQRWIIELYARKGYYKTLIAIANKHARMLWAMLAKDQRYDAAAWQRHPMHQPPLAGNA

SEQ ID NO: 74178 - protein, 320 aa, unidentified
MKQMIYVGVDVSKKQLDVAIRPLGQAFGVSNDRRGISQLVKRLKKLQPVCIAIDATGGLEKELAYALAAENLPVAVVNPRQVSNFAKSTGQRAKTDAIDAAVLAHFAEVMKPAVRPLPDAASRELSALVTRHRQLVEMMTAESNRRDLASKSVRKLINSLLRSLKDQLAVVDREIHKAIAASETWRHKAELLRSVPGVGKVTTATLLAGLPELGELDRRQIAALVGVAPFNRESGTWKGKRMIAGGRGWIRSVLYMSTVVAVRRNPILKEFYERLRARGKPAKQALTACMRKLLVILNAMLRRQTHWSVPTPLLSLSVAG

SEQ ID NO: 74179 - protein, 429 aa, unidentified
MNYTQNEKIEQVTDSTMVVGIDIGSQIHYARAFDNRGRELTKRIFSFHNDLEGFNSFKLWAETLKTENKKTAVLIGCEPTGHYWFAFAKYVNDHQKRLVMVNPFSVKKIKELDDNSPKKTDSKDPKTIAKLVVDGRYSIPYMPEGIYAEIRDLVYSRDRIMKQHNISANRIQRWLAIHFPEYLGLYTRFDAISGLAVLEKAPLPKDVIALGVNGIRKIWHDKKMRGRGVTEDRAKTLVEAAHNSVGLDGGIGTKSELYMLLEEHRLWTSQLEAVNKVLEEMILKVPHVEKLLAIKGVGSITIAGFIAEVGDIRRFDSPKQIQKYAGLELLENSSGKHKGRTRISKRGRRKLRKILYQVMVPLLARNKEFRGIYDYYVTRVKNPLKRRQAMVAVSCKLIRVFYAVLTKGVEYDRFKMMSDIHRKSDIIAA

SEQ ID NO: 74180 - protein, 323 aa, unidentified
MDEAGRLVFQGQAKSDPGALAAVLAKRAPHAERVGFETGAMSSWLWHELKLIGLPVVCIDARHAHAALSVRMNKSDENDARGLAELIRIGWYCEVAVKSEASQKVRSLLVTRSRLVSIRRDLENQIRSLLKEQGLLFPRAIGAQFRRSVEELTGEDQALQLVTTPLLNIHEQVCREQEKLDRTVRLSAREDETVRRLMTVPGIGVVTALTFKHPIDDPSRFQSASSVGAYLGLTSRRKQSGDKDVTGRVSRWGDRLRRTYLFEAASVLLHRTKKWCSLKAWGLRLAKGVDAKKAQVAVARKLAVILHCIWVDGTTFEWKQQEA

SEQ ID NO: 74181 - protein, 429 aa, unidentified
MKIIYPRVCGIDVHKKFIVAVICISESVEPVYLKKRFSTFHNDLIRFRDWLIQNDCQNVCMESTGKYYIPVYNILESHISNIVVANPKWVRAVKGEKDDDKDAKWIADLFKLGIVKSSFIPQKDFRILRELTRYKYKLVNMRSSEKNRYQNALTSGNCKLDMVFTDVFGKSASNIIDLILSNNPYTDEDILSKVHKNCKASPDMILNSINGTDLTPVQKSRIELVNNHIKQLSSNIQRLDKLIDLMIEPYEDYISFLCQIPGVSRNSAIIILSEIGVDMNQFTSTRRLTSWAGLTPSSNQSAGKKKSVRISRAGVYLKPCLVEVAHAAVKDTNHPYYANKFNKISKRRGKKRAYIAIARKILVAAYHMLLTGEIWNPADLAEVETPVEQRIKYVKNNLKSDIKQLLDIGLTVEELTLMIQQNANNIATQ

SEQ ID NO: 74182 - protein, 316 aa, unidentified
MVPCPLFVGMDVAKATLDIAVRPTAETWSASNDATGLDALVTCLEALAPTLIVLEATGGYQGPLVAALAAAALPVVVVNPRHIRAFAQAVGILAKTDRLDARVMAHFAEAVKPAPRPLPEAETQELRALLVRRRPLVAMVSAERARLDTAPPGIQEASQAHIAWLTTEITGRDDALTHASQTHPEWQAKDAVWQSMPGVGPVLARTMLGQVPELGTWGPKPLAALIGVAPFNRDSGTLRGRRTVYGGRAEVRAVLYMGALVATRHNPVIKAFYERLLAAGKAKKVALTACMHKLLTIMNAMVRDRKPWQPQEVAIA

SEQ ID NO: 74183 - protein, 331 aa, unidentified
MNILETVGIDVSKLVVDVRIHSNQYFTQFENSNKGFRKMCKWVFENSKFPPDETLYVFEHTGLYSHLLAVFLSEKTIAFTMVPGLEIKRSLGITRGKDDKIDAAKIAKYAYRLRDEIEPYVMPSKQTTEIKNLLSIRERMVRQRAGYKASLKEQRRVYRGKEYHVLFNTQEAIIKHLTKHIDVIDREMIDIVCSNDELQRIYKLITSIKSIGQQTALFMIAYTDGFTKFKNSRKFAAYCGIAPFPYTSGISIRGKTKVSHLANKKIKSLFDLCAKNAILHNQEMKKYYNKRIEQGKHKMCVINIIRNKLLARVFAVVNRQTPYVDLLQYEN

SEQ ID NO: 74184 - protein, 422 aa, unidentified
MQVLYQRCAAVDVGKDVIAVAVRLPGDGPDGRVMIKRTFRTFYGVLAEAARWLTSLGVTHVAMEATGIYSMPVYHALIEHGGFAKVLVCNAGHVKNVPGRKTDLSDAEWLVHLLECGLLAGSFIPPAEIKAARDVIRYRARVCQSRTSEIQRLGSVLQDAGIKIDSVASSIATKSGRAMIEALIDGERRGKVLADLAKGAMRAKIADLSMALEGRFGDHHALMCRLHLDHTDHLEAMIARLDAQIEAMMTPFHAARRLLTTVPGIARLSAAAVISEIGTDVKEFFPDDARLASWTGLCPGNHESAGKRRGGKRRKGNPHLQSVLVECAWAAVRHDGYLKSLYHRHVMKWGGYRSPVAKKKAIVVVAHALVIIIWHILATGKPYEELGAGYFTRRLDPERETRRLIARLEALGHRVTLEDTAA

SEQ ID NO: 74185 - protein, 344 aa, unidentified
MPTEARQSLYAGLDLHKRNVFCGIIDREGKPIYRRRLPAELPTILQALAAYQPQLKAVAVESTFNWYWLVDGLQEAGYPVRLANPAEMQKYSGLKHSDDESDALWLAEMLRLEILPTGYIYPKAERPVRDMLRRRMLVARQATQTLLSLQSMVTRHTGREVSAAKLQDWTLRELGEEFGGGCSQQTAAAMLELLGQQRRIQHSLEKQVLAVAKLSGSFQRLLTLPGIGKILGLTIALETGPITRLASAGDYASSCRAVDSRRESDGQKKGEGNRKNGNKYLGWAYVEAAYFAQRYSSRAQAWFARKSARAGRVVAVKALACKLAKAAFYVLRDAAAFDEHNLFG

SEQ ID NO: 74186 - protein, 366 aa, unidentified
MIAAEIERCAGIDVGKEQLDVHVMVGPLAGEPRCEYRQFGTITAELKRLRQWLEAEGVTDVVMESTGSYWKPVFNVLEEGFKVYLANPHEVKNRKGHKTDKKDSWWLAHLLRHAMIRPSFVPPCGLRELRDLTRRRRKIIGVATSERNRVEKILQDCNVKLSSALSDLFGVSGQLMLEALLKGKATAEQIAQFARRKAKRKIPEIIAALEGPRMSDHHRRMIRYSLEHLRFLEEHIQELDKQIVAKIEALGYTGQWQLLQTVPGVKENSAARVLAEVGPDMGQFGSEKKLSSWAGVCPGNNRSAGKNKGSKTTKGNRWLRGTLIESAWGASGKKNCFLKQKFWRLATKKQRKPPATMALAHTLLVL

SEQ ID NO: 74187 - protein, 411 aa, unidentified
MQVLYPRCCGLDVHKATIAACVLLADGHTKQKHLLRCKTMTHDLLAFAEWLAGFGVTHVAMESTGVYWKPLWNVLEGRFELLLINAQHFKAVPGRKTDMKDCEWLADLLQHGLIRGSFVPPTATRDLRDLNRNRTILVQQRAAISNRIEKLLEDANIKLAAVASHVLGQSGRAMLHAISAGEADVDTLAGMARAKLRNKIPELRVALNGMIRDHHRFVLKQWLLELEAVEKRIASFELEIEQRTEPFQEVVNRLMSIPGVDRITACALIAEIGTKMSQFPTAQHLASWAGICPGNHESAGKRLSGTIRKGNPWVRRILCQAAWAASHTKDTYLSAQYRRLAARRGKKRAIIAVGHTILVIAYYLIARGERYRELGGGYFDQIHSEGLKRHLVKRLEGLGHKVTLESPIPGC

SEQ ID NO: 74188 - protein, 428 aa, unidentified
MNNENINASDSNQYAAFIAVDWADEKHSFALQCAGAKKKETGILEQTPEQIGAWVGELRQRFGGQQLAIGVEQSRGALIHALLSYDFLVIYPIHPTTVANFRQAFKFSRAKSDPLDTDQILEILTKHLDLLKPIRPDTEETRLLARLVEDRRNTVNTRTAHIQALQASLKEYFPQALDVLSGNMRSRLAADFLEKWPNFELFQQAKPANIKKFLHQHNVRSTELIAQVLAIAEKSQPLTTDVAIVKSGSLLSLMHAQSIQTLNGFIEQYDQQIKKVFNAHPESYLFTGLPGAKDALAPRLLAFWGTDRSRFTDATSAQQFSGVAPVTISSGKSSVVVFRQACPHFPRQTFHEFARLSVNTCQWARNYVDYYTQKGKKYHAIIRSLAFKWIRILFRCWKDRTPYDEATYIKSLEKRGSIFATFHLNKKS

SEQ ID NO: 74189 - protein, 358 aa, unidentified
MNVIHYIGLDVHKKTISYCIKTAAGQVVKEGTLAAERSVLRSWAERQQQPWHGAMEATIFSAWIYDTLKPYAERLEMGHPAKMKAITAGKKKSDIIDARTIADLVRCDLLPGCYVFPPDLRDLRRLMRYRQMMVQQSVRMHNKTAGLLMESGVSFRKTKLQSKKYFADLITNLEEVPESVKDLLRMSRAAKELFEGVQNQLVRRLLADAALKQRVERLSSIDGVGAITALTWALEVGDPHRFASIAEAVSYCGLTAALRSSAGKQQRGPLSKQRNAYLQTALIEAAKLAPRWNSQLAQLYAQQLQRGHANRATLQVARKLVAYLLAIDKSGQPFQVRTPPEKTFPTKKKTKRPLASAA

SEQ ID NO: 74190 - protein, 323 aa, unidentified
MVIVGVDVSKATLDLFVRPWNQAYRVSNNKTGFGQWLKQFTVLLETGSSVLVIMEHTGHYSTRFEQFLQSEQIDYCKVAALQIKRSLGVIRGKNDKIDATRIADYGWIRREQLSADEKVEQEIVELRQLLSLRNKMVKDRSGYLTRLKEMKVMGCCDSFQERIQKNTIQFLTRQISFIENQIKRLIASNVDFKTTSELLQSIKGIGWVIAANMISSTVNFKRFKDARKFNCYAGLAPFNYQSGTSIKGRARVSHLANKDLKTLLNLAACCSIRCDEEMKQYYLKRVSEGKRKMSCLNIIRSKLVARMFAVVKRQTPYEHRLAA

SEQ ID NO: 74191 - protein, 321 aa, unidentified
MSPADVYVGIDVAKDWLDVAQRPGGEAWRVSSDETGVVALVERLKGVRPTLVVLEATGGLQIPAVAALAAAGLRTAVVNPRQVRQFAGATGRLAKTDAIDAQVLAQFGEAVRPEVRPLPDAATQELSALVARRRQLIEMLTAEKNRLRLATKKVRPNIEAHIRWLEGQLLDLDDGLGEVIRSSPVWRERDNLLRSVPGVGPVLSSVLLADLPELGRLNRKEIAALAGVAPLNRDSGQFRGRRTVWGGRSQVRAALYMAALVAARFNPVIRAFYQRLQAAGKPKKVALTACMRKLLTMLNAMARDQTSWQIVPSPLASQDSC

SEQ ID NO: 74192 - protein, 392 aa, unidentified
MYIIGIDIGKNHHEASIVSPKGKQIGHSLCFATTHKGADSLMNFIFKNIGDSPCVFGMEATGHYWYPIYSFLKAKGYTIYVINPIQSDSLRKMYIRQTKNDSIDSFLIAEVIRFGQFSTTSMADENILAMRQLCRYRDSVISSRTEIKLRISTIMEQIFPEYEKQFSSLWLSTSMGILEKYLTPENIQNAPLDELYGIIKDKSHNRLTMDKALSIKEAAADTFGIKIAQEAFSFQLKQLIDRMHFLDQQIEALDCQILGYYEKFDCYLHTIPGIGMIGAATILAEIGDTKRFKSSSALVAFAGIDPTVRQSGEFNSIHNHMSKRGSPYLRHAIFLAATTCSFHNSPLNAYYKKKRDQGKHHLTATGAVARKLTTVIYAVLRDGKPYEPKKFC

SEQ ID NO: 74193 - protein, 343 aa, unidentified
MQIRSVGIDLGKTTFHLVALGDNGKVLLKKKFTQKQLIAFTANMQTCLIGMEACSGSHFLGRTLREQGHDVKLIPAQFVKPFVKSNKNDFIDAEAIAEAVERENMRFVAIKTDDQLDLQALHRVRDRLMARRTALINQIRAFLLERGIVFGKSPIRLREALPEVLENVNENLTPRMRNLVAMLWSEWKDLELQIVQRNDEVERIASSDAACRRLRQIPGIGPLVATAIVASIGNGAAFRKGREFAAWLGLLPNQHSTGGKVRLYGISKRGNCYLRKILIHGARAVVLRSKRERIAMGPWMTSLETRAPRNVLIVATAHKLARIAWAVLSSGQDYRAVLEALTV

SEQ ID NO: 74194 - protein, 376 aa, unidentified
MNPVIGLDVSKGESHAQAFLDRGVPHGKIFRFKHDLEGLASFLTYIRGVESAAGMRPSIVMEATGHYHSPVVQFLDEHQYLYFVINPLISHNAKKTNLRRLKTDAADAHLLGALFYKEEFEPFKKRGQHLMNLRYLTRQHESLTGMYVQAKLQFQAILDQVFPEYHGVFGDLYSKVSLRFLALHPTSKEVLDMSEKEITATIQRLTGRGRSALWCLEHAQILIAAARRNPFKETAFPSHLISMQLLIKLLLQYQDHLADLDKSIEALAEELLEYDLIQSIPGIGTKIAATILAEIGEIDRFDHAKKLVAFSGVDPSVFSSGKFTATINKITKHGSRRLRTALYQAVRCGIRSNRNKRLRAYYDKKRAEGSDNCLRE

SEQ ID NO: 74195 - protein, 412 aa, unidentified
MLFIGDDWAEDHHDVELVDGQGRILARRRLPEGLGGITRLHALVAEHAPEEWADLDPAEAAAQVLVGIETDRGPWVGALVAAGYTVYGLNPKSVARYRERHSTSGAKSDTADAHLLAEIVRLDRAHHRPVAGDSATGEAVKVTARAHQSMIWDRTRHVLRLRAALRDFFPAALSAFEDLDEPDTLVLLAQAPDPDSASRLSRAKIVRALTAANRRDVTARSEKIRQILTTPELRQPDPIQDAYAAIVTSEVALITVLNAQVEALGQVVAEHFGRHRDADIYTSLPGLGVILGARILGEFGDDPHRYADAKGRKAYAGTAPITRASGTRRVVLARYARNRRLGDALQQWAFCSMRGSAGARAYYQALRRRGVGHQAALRQLANRWVGILHGCLRYRTFYDENTAWQQHLNKAA

SEQ ID NO: 74196 - protein, 300 aa, unidentified
MEYYVGLDVSLKQTSICIVDQAGLVMREGVVDSDPEAISAYVKSKAPDAVRIGLETGPTSTWLWTELKRLGLPVICIDARHAKAVLKMQINKSDRNDAIGIARIMQTGWFKEVHVKDIDSHSVRALLASRALLVKIKRDLENHVRGLLKNLGLVIGRAKFNVFAVRVDELIEGRPELVAAVRPLLEARNAVEQQVSELDRKVTRLARHDAHVRRFMTVPGVGPITALAFKATIDDPARFARSRSVGAYVGLTSRRHASGEVDWSGRISKCGDAMLRSYLFEAAGVLLTRVPKWSAVKAWG

SEQ ID NO: 74197 - protein, 344 aa, unidentified
MSEYAGQQFVGIDLHRRRSVIVRTAESGEVLESVRILNDVESLERVIARAGEDPEVVLEATYGWYWAVDALREAGTNVHLAHPLGVKAFEYRRVKNDFRDAADLADLLRMGRLPEAWIAPPATRELRELVRHRAKLVALRSHCKAEVHAVLAKCGIQVLMSDLFGLEGTKLLDRLRLPAPYAARIASLRRIMGDLDVEVDLFTNLARERLRADPGYVAVQQIPGIGPILGAVFVAEVGEVTRFSNAAQLACWAGLTPKHHESDTHVRRGRITKQGSRLVRWAAVESVKRIGAHTRVGALRDRVAARRGGNIGAVAAARQQVEYVFYALRDGHVRALQHPARESA

SEQ ID NO: 74198 - protein, 335 aa, unidentified
MNYRLFAGIDVSKIKTDVVFFLAEDPDEQFHGTFSNNEEGCTEMMAWMQDLTGLSIAEMLFCAEDTGLYTLPICTFFDGQGGNLWVENALRLKRSLGLKRGKSDKADAAEIANYGFLHRRKAILFKLPSKTISKLKHLLSCRKQLVKQQTALKNASGELEAFDVDSADFTLGIRKSLITEYDKKIDMIEAELLSCVKADKQLEKQYCLVNSVYCIGPQTAMFIVVLTQGFTLFDDPRKFACYCGIAPFGNTSGTTLKGKPKVSHLANKRIKTLLTMCALNTIKKDNEFKRYYDRKIKEGKHHSAVLNVLRNKLVSRAFAAVLKDRPYQIDLYIAA

SEQ ID NO: 74199 - protein, 341 aa, unidentified
MSNANTYIGVDLHKKSCYVTVMNGDGQIKKQTEISTDSDKVSRFFKKYTAGQVAVESTMNWIPFYENLESLGCHVVLSNPLATKAIAAARIKNDKVDSKILADLLRTNLLPTAYIQPREIRDLKELVRQRVSYVQWRTMLKNKIHSVLFKSNIAQGFSNLYGIAGMKWLRNLELRGIYRQELDRYLKTLDLLNGQIEELSQTIMDTAKTDYDCKLLMTIPGISYFSALVIKSEIGDISRFPNSNKLCAYAGLIPSTYASADKVRFGRITKRGSKWLRKSLIDAVTSGSRHPSRLCFFYRKLKKNKGTGKAKVATARKLCTIIFAMLADKQPFREFTPIKQR

SEQ ID NO: 74200 - protein, 348 aa, unidentified
MNIVTTIGIDLAKNVFQVHGIDAEGTVIIRRKLKRSQMLPFFKKQSACLIGIEACATSHHWGRQLVELGHDVKLMPPRYVKPYVKRNKNDMADAEAICEAVTRPTMRFVEIKTPEQQSVLMLHRTRQLFVRQRTTIINALRAHLAEFGIVAGVGRNGLDKLLKVIEADGDERVPGAARDCLLALREQLELVKHQILVADRRILVWHRANEVSLRLDDIPGVGPLIATALIASVPDPRAFKTGRDLSAWIGLVPRQNSTGGKERLGHISKAGNRYLRMLLVVGALSVIRRAKQVGYSKRPWLTKLLERRSTKVAAVALANKIARTAWAMMAYGTFYEEPKVQGLETNGI

SEQ ID NO: 74201 - protein, 312 aa, unidentified
MALQDVFVGIDVSKGRLDVHVRPLGVGFSVSNEAAGYAALIARLRPLRVKRIVLEATGGYERALWLALSEAGLVAAIVNPRQVREFARAAGRLAKTDRLDAAVIAHFAETFAPRIGKPDPVADRLGEHVLYRRSLQDEIVALEHQRRRLETPALRERAERRHAALRAEVKEIEAAMRAIVDSDPAKKALFACLTALKGVGLVLACTLIANMRELGSLTRHQAAALIGVAPLNHDSGARRGYRAIAGGRRRVRNVLYVATLSAVRCNGPIREFYRRLSAGGKPAKVALVACMRKMVVMLNGRVRDQLAATATP

SEQ ID NO: 74202 - protein, 387 aa, unidentified
MIYVGIDVAKDKHDCFITNSDGDVLFKSFTFPNNRDGFETLFQRIESVSDDLNKVKVGLEATGHYSYNLLGFLLDKGLTTFVINPLHTNLYRKSLSLRKTKTDKVDSRTIATMMMSDMNLKSYSDTSYHNEELKSLTRYRFDKVKERAKLKSSVSRLVCILFPELEKLVPTLHMASVYALLCEFPSADAVANAHLTRLSNLLSESSKGRYGKDTAIMFRDAARSSVGSYMPAKSLELKHTIKLIRELTVEIDEIEATIKRIMDEEIHSPIRTIPGISYRMGAMIIAEIGDFSRFDSADKILAYAGMSPSTYQSGQLDNCYSHMEKRGSRYLRYALYNATKYVCHWDESFRVYLEKKRSEGKHYNVVQIYLKCISAIHSKNFHFRLDF

SEQ ID NO: 74203 - protein, 431 aa, unidentified
MLKINPLSTLYVGIDVSSKSNYVCALDFFKNKYINSSFANNQPGAEELALKILECLNQHPDLTMVVAALESTSVYSIHIANYLSSCEELMRFKPYVFVLNPKCTANYKKSYIGLGKSDPIDAFVIADYARAGNIESEPWRGSQFLALKRLTRHRIHLVECMTREKTYLISNLYLKFSELQMLEGDDQPFCDIYGATSSSVLMEYLSPEEILASSEENLIAFLAEKSRNRIKDISKTADLLKKAARDSYRLDKALYEPLNVSIASSFNCIETFKREIKVIDNAIEKEIKGLNPNAFIILQSIDGIGPVFAGGIIAEIGDITAFHSSDALAKYAGLTWKSNQSGDFYGEDTPMIKAGNRYLRYYLGEAANSMRKHNVEYGAYYRKKYNEVPKHQHKRALALTSRKFVRLVYGLLARNQLYSGVSLDTSIKDSN

SEQ ID NO: 74204 - protein, 497 aa, unidentified
MPSTDVAAKATIVDAMKRKSIFKNNSQNIDAAFIEAGLPEKVLLVPLDFAKSTHYACFCDGLGRYLRQAFTVKNTKEGLDYLVERIEATRKSRAIGNKRHVIIGGEDSASYTRNFMQRLNELGYLAVRLSSCEVHRQAESVDSSTDRTALRAIAKTMLNRDARPIDGHDVYTELRGLTRQRRRIVHLSTAVKNRIHTHADRLFPGFLAKDSVLTPFSRASLELMSKPAFGAVSISQKNEKALGQLLKRAGTARSAEIAPALKQQARDSIPADKDAARLSAYILAGELQLFRSLASNLEALDQGCARLLARTPEAFIASIKGIGITLAASICAESGSLTQITRTDGLNAYAGIVPKVKQTGGPESEAKIRGRRRSFNRVLKDYTMQAGNHLYLHGPEELMQDAVRRKLAGKAVDTAMARRFIRIARALCKNHLTYLPSHLRGQNASSRERAQYILDTWPALLVKWKRLGLHEEAFAAENPLGQWRLIMQEIHDIDLPL

SEQ ID NO: 74205 - protein, 361 aa, unidentified
MTGMVTYAGLDVHARSTHAAAIDVSTGEVLRARFGPGVEEPVAWLRGLPGPVRACYEAGPTGFGLYRAASAAGVPVEVIAPGKTPRGPSDRVKTDRKDAEMLARLLLAGSLTAVVVPPVQVEAARELMRAHDACRRDLMTARHRVSKMLLRHGRVYPESSTWTVAHRRWLARQQFQETASELVFADLIASVDGLTARKAAIAERLSRLAEDEQWWPTIARLRCFRGVDTLTAFALHLELGGDWQRFARANALSAWLGLIPSLHQSGESSHQGSITKTGSGLARRLLVESAWQYGRPPRIGVTLENRQLGQPDHVLQIANRAQQRLHRVYHRMRSRGKAHNVTVVACARELACFLWAAATAD

SEQ ID NO: 74206 - protein, 312 aa, unidentified
MAFLHQQPQLCLGLDIAKDTITASDGTSTWTIANKRRAIRACLKSRKADLVVCEPTGGHEGLLLEECLRMGIACHRADTLKVKSFIRSFGTHGKSDAIDATMLRAYGRERWEKLSLWQAPDLDELRLRALVRRRQELIAIKGAEKNRAKAPSGRDLAASFAAVIEAVDHQIQAIEAAMRELIANSSTLRQRAAICTAMDSLGPIVAAKLLAILPELGSMTRRKAAALAGVAPHPNDSGLKRGYRKIRGGRPDVRSTLFMPALRAAAGHGEFATFYKRLIANGKKPMVAIAAVMRKIVVTLNARLRDNLLPQS

SEQ ID NO: 74207 - protein, 431 aa, unidentified
MSKYLNSVVVGIDVASEFSFVAVLAPDGSQYRKPFKVFHTAVGFNYLIEQIKKAEEEFSTKPVFFMESTGVYHLTLFHFLKDKKFETFVINPLVTNCNKNKDIRKVKNDKNDALSIAKLGKFEDIKVSSDSDINIFTLKLLVRDYYKLIDTRSTFKKKLSNSLSISFSGYQNVFSNTCGLVSIKILKKYPTPQAVISAQKQDIMDILLNSRKGLKWAEKKYTNLVEASKNAQIVSLTSPWLSVSITTSISIYEAINNEIATLLKKIKSFIDSDEMSLTFRKNILLLMSIPGVGYNTAITILGEIGGIDKFITPKQLVAFFGIDPAVNESGKFKGDRVKMSKRGTRFGRRALYAVALASVRIKRNGEATNQVLLKYYQENLKGKKAKVALVAVMHKLIKYLFAVLRNQEEYQVRDPKLHQKMFIENHTVQVA

SEQ ID NO: 74208 - protein, 347 aa, unidentified
MKFYTKTHQNYCGIDLHTRTMYVCIINNQGEILVHRNIPTEPEPFFKLIADHREDLVVGVECIFSWYWLADVCDQAGIKFLLGHALYMKAIHGGKSKNDKIDSEKIARLIRGGTFPQAYVYPAELRPYRDLLRRRNFLVHVRSEVLAHIKLTNYQYNLPTIEKHIGKKGNRQELAERFTVPSVRKNVEVDLAVADTTHALINQLENYIIRHTKQFDPRTYYRLQTVPGIGKVLALVILYEVGDLSRFPTVQAFCSYSRLVKCPKESAGKLYGYSGGKIGNAHLKWAFSEAVALFMRESDRAKDFVAKHEKKHGKGKAMSILAHKLGRAVYFMWKRNDAFDEHYFFRT

SEQ ID NO: 74209 - protein, 520 aa, unidentified
MKTEHGKLQNPQMSLAPMRAPLRAWDCCCFEKNFIGMGCSPIHHHVCKTSFFYPATEFVMLYSLIIKCKDMSKVSKELHPLQLAVINDHAAAIDIGSMMMMVSYSDRNGIPQLLECSAYTESLDSLVHTLQQEGVTHVAMEATGIYWIVLYEILEQYGMKITLINPKHFKNVDAQKTDVKDCQWLHQLHASGLLRASHIAPEIFRELKNYLHERDILQKQKSDTLNRIQRILTQMNIKFQHLISDIEGVSGMKLLHGISSGITDPKKLLLLIDTGKLKASADDLIKSLTGIYKQQFITILKNLLKAYHFFKDEMKAYETIIEQVLKRMLPEDKDGNKPLIEPKKTYYRKNQYSINLKSYLNHILGVDLTKVDGLDEISILTILAITGVDMNKWPTADHFVSWLNLSPRPKITGGKRIGHDKRFTDNPATQAFRMAAQSMWQNKGPLGHLYRRLSAQKGSKKAIKAIARKLAVIFYNMVKNKSEYDKTRLQQNTHRQQQRRIARLRKEAAKYGFKLENLIA

SEQ ID NO: 74210 - protein, 446 aa, unidentified
MAQRTRMKLDIANPNAAGIDVGSASHFVAVPPDRDDEAVREFTSFTQDLERLADWLVACGIDTVAMESTGVYWIPLFELLESRGLTVYLVNARHVKNVSGRKSDVLDCQWLQQLMSYGLLSGAFRPKDEICALRSIMRQRTMLLSYQGQHIQHMQKALSQMNIQLGNVISDVVGETGQRILRAIIAGERDPLKLAELKHGRIQASKEQIAMALHGNWREEHLFALTQAVELFDAYSQALQRCDIRLESMLGALSRTKDEPGPTKRRRISKVKNAPKFDVRTYLFRICGVDLTAIDGIDTTTALKVIAEVGPDLTRFKSAKHFASWLGLCPGTKISGGKLLSGATKRTANRVAQALKMAAISLRASQSALGAYFRRMCARLDKGKAVTAVAHKLARLIYAMLTKGAAYVDQGQQYYEERYRQRVVFHLKTKAAALGLELVPVQSQQT

SEQ ID NO: 74211 - protein, 338 aa, unidentified
MKNFVIGIDISKKTLDWCLLKEKEVIGFHQTSNDMDSVVNKLREVLDKDAIDVGDVLICAEYTGRYIYPLVMACHKCGVDLWLESGYNVKCEARKERGKDDRTDARRIAEYGRKNQDDARIYELPSESIATLRDLMSERSLYTSQRAAHKAQLKDMKDYMPAETYSARYARQQNVIEALDKQIQEVDIEMEKIISSDRELKRQSDLLCTVPGISKISATVLIAITAGFSLFMDGRELCCYAGLAPFAYMSGTSIHSKRRVSGRADHDLKALLHMCAIAAATRMKSSKFAEYYKRKVEEGKNKMSVLNAVRAKLVLTAFAVVRDNKKYEENYKNNLAKS

SEQ ID NO: 74212 - protein, 326 aa, unidentified
MEHELHYIGIDTAKEKLDVDVLRPDGRHRTKKFANTTKGHDELVSWLKGHKIDHAHICIEATGTYMEPVAECLYDAGYIVSVINPALGKAFAQSEGLRNKTDTVDARMLAEFCRQKRPAAWEAPHPLERALRALVVRHQALTDMHTQELNRTETAREVQRPSIDAHLLWLEAELKRLEKQIKDLTDDDPDMKHRRKLLESIPGIGEKTSAVLLAYIGLKDRFAHARQFAAFAGLTPRRYESGSSVRGTSRLSKAGHVSLRRALYMPAMVATSKTEWGRVFRDRLAANGKKGKVILGAMMRKLAQVAYGVLKPGVPFDAARHNPVAA

SEQ ID NO: 74213 - protein, 482 aa, unidentified
MKKRNIYQNQSQELLSLFETAGSSAKVMCVPMDYAKKDHLVMFCNGHGDILRKPFSVKNSPEGIKYLIDQVTRSCRRRGIKKEHVFLGGEDANSFAENFVNTLRVKGWLVAGVNAHDAKKQRVNLQASTDRIDLMGIATMLLNCRANCCPAASGIYLNLRTLVRHRRKLVVMLTEVKNRAHGIVDRLFPGFLNENKSGIVPFTQSSLYLMEDRFSPKQIRRRRRQKLIEILRRFGTSKAQETAFKLQQYAATVLHTPDEYIDTLQISLAQHVKHIRCLKESIVQLEKEIAVNLAQTQGAFLTSVRGIGIVLAAGVSAEIGDPYEQKSLNNVISYSGIIPRVKQTGGVDGKTYTGHVAKRCNRILKDYVVKSAYHLGLSGPEDLMADYKRRDASGQHADFGIGRRYLRMAMSLMRTSQIYLPPRLRRTDTAPEERAAYYLMSWPFLRDKWKKTGALKVAFSKDRPLGLWRQIVQKLYDIKLKI

SEQ ID NO: 74214 - protein, 441 aa, unidentified
MEQSQLFKDEGASEPNRPISQKAEPAFAAFVAIDWADQIHYWSLRAAGYEQIERGEVKNTPEAMEVWAAQWSARFASRPLAVALEQSRGPLVAMLSKYQQLHLYPVHPLTLAKYREAFFSSRSKSDARDADLLLELLCKHRDHLRRLEPDTVEMRTLQFQVENRRKLVDERTAVSNRLTSSLKMYFPQILVWFEDVSSALVGDLLLRWPTLAELQKAKPRTLQMFFQQHNCRDLEKTEQRIQQIRTAIPATHDEAVIVSARSVVSVCVRQIEVLRQAIVDLERQIKEIAHKQDDWKIFESLPGAGEALAPRLMSSMGSNRERYESANQAQCFVGIAPVKEASGNTQFVHMRWACPKFQRQTFHEWAACSIPHCGWAKAYYDELCERGKKHHTAVRALAFKWMRILYRCWKDRQPYREEVYLASLAKRRVPMQRLVKSVQMR

SEQ ID NO: 74215 - protein, 339 aa, unidentified
MTRGTSAPTLPVHWAGADLAKASLDLALWGHEDLPRRRVRSFPRTQSGAAELLAWMKSEAPEGTRFGLAMESTGAFAEELATWLSGLDPELHLAIVNPIQSHAYIRSLGLRNKTDNLDARALAGFGSERRPRAWEKPSLALAELKDLARIRADLVDARVAMRLRLKDHPRAAKGATRALEQVIKTFDQQIGKLEAAIRAHMKHHEALGAQVKRLTSIKGVGLITAVTIVGELGDLRRFIRSRQLTAFAGVSPRKKESGISVRGTTRLCKQGNARVRAALYMAAMSAVRSNPDLADTYASLLRRGLHWRAALGAVMRKLLVLMRAVLKAEHDWVPKIQAA

SEQ ID NO: 74216 - protein, 360 aa, unidentified
MNNVLDVNSVIVGVDVHKFNHMAVAMDCFGQEKGSLSFSNLRLPEFNQFLYSLGSKENTLVALEDVNGYGVHLVNDLVTEGFKIRYVPGILTERDRKQSIYRDKSDVFDAKRVGKVILTKYEETLPARESIASLEERLISQEFDLLLCERRDLTSSKTILKNQLHALLHQLLGDTYGERFKNTKIFTKRTIPYYQEVVSAKKPSPLTRGVLRRLIRLKLVMDQISGIDKEIAKAAKDDKLVEVLTKEINGCGLVTAALIISQVMTVRRFANKAKFAKYAGIAPTQRSSGRKEKLHTSPFGNRILNRAIHTIALYQISKKGSLGRVYFEKKVKEGKTKLWALRCLKRQIVNKVFNTLKYAN

SEQ ID NO: 74217 - protein, 334 aa, unidentified
MQYQYVIGMDISKHNFDMAILSVTSPEEIFHNAFTNDAKGFEEMMSFVKEKMPGFDFAKALFCMEATGLYCNALLHFFQSQQANAWVENAIQIKRSLGIKRGKTDKVDSISIAKYALKNAELVRLWKPSGAVLEKIKHLATLRERMVMTQKRLITPIEELRDAGQEKMAEYLHKSIKRSITAIDADLKKIESKITECLKEDASLQHLFTLITSVVGIGFVTAVNLIIYTQGFNVMCDSRKLACYCGVAPFPYESGISIKGRTKVSHMANKKLKTNLHLAALTAIKFDPQLKAYYDRKVLDGKPKMSVVNAVRFKLLARVVSVVKNDRLYVKKTA

SEQ ID NO: 74218 - protein, 412 aa, unidentified
MEVLYPHCAGLDVHKDTVVACVRHMATGSVEREVRTFKTTTKDLLALSDWLAEHGCTHVAMEATGVYWKPVWHILSDGDFVLVLANAAHVKNVPGRKTDVNDATWLADLLAHGLIRGSFVPDEQTQEMRNLLRTRKQLVRECSRHIQRLQKTLEDANIKLDSVISDIMGLSGRAMIEALIAGESDPERLAQLAHRRIKAPPEALCEALRGRVTRHHRFLLRLHLKQIDAVNLAIDDIDQEVDAQIEPFRTAIQLLITIPGVSELSACVILAEIGHDMNRFPTAAHLISWAGLCPKNDESAGKRRSTRMRKGAPWLKTTLVQCARAAARKKASYFQAQYHRLRARRGDKKAIGAVAASILTTAYHMLKYGTLYEDLGPDYFDKRGKGKHVHRLINRLQNLGFAVQITPVEAAA

SEQ ID NO: 74219 - protein, 358 aa, unidentified
MKIIGCDLHARQQTIAMLDSETGELEEKTLEHQGETVRKFYSALSGSILVGIEATGSMQWFLELMEELGIECRVGHPAKIRKAETRKQKHDRRDARLLLTLLAENRFPTIWMPSSEQRDLRTLLRHRHQWVRLRSRVQHTLQSMALNHGLRRGRSLWSQAGQGELRALPLAPHASERRKALMTLYPHLQESIDELDRQVSEQTQQRTDARRLMTHPGVGPVTALATEVFLGDPKRFSDGKALASYIGMIPSEHSSGRRQRLGAMSKQGNALLRYLWCEAAMHAVERDPELKRFYRRKLVQKGLGKARVAAARKLGIRLWIMMRDEIDYQEFCRRGKARQESGSVRAGMPDRNSGPAEQ

SEQ ID NO: 74220 - protein, 348 aa, unidentified
MTVYIGVDFHARQQTISYLTTEDGEIQQLVLLHESPTEVRAFYEQFAGQRVLVGFESSGYAAWFEELLEELGCEIWIGHASYIRQYARRRQKNDRRDADLILELLLSGDFPRIHRYSQATRQVLQQLRYRQRLVKMRTMVVNMLLFMASSRGVTFRTQLQSKRGQARLAQLPLPQPLAQQRDELLQLLQGFDHKIATVEKELEQVAAQDVAVQRLRTHPGIGLLTGICIRYTLECVERFATTRKVSAFAGFDPMEDRSDERRRMGAISKQGSRWLRFFLVEAGQAAMRKDPDLARVYKRISLRGGHAKAKVAVGRRLLVRAFIMLRDEIDYAEFQRRGVAARSSRGSA

SEQ ID NO: 74221 - protein, 444 aa, unidentified
MKTTSASPRGAVPNVAAWIGLDWADQQHVGCLYDVASGQQEAFSLESSAEAIPLWLAQLRQRYGGRRVAIVLEQRRGALIHALLGCEFVILYPINPQSLAKYRQAYFSSGAKSDAADAPLLMDLVRHRPDRFHPWQPDDPETRSLQLLTQARRRWVDQQTALTNQLTQLLKGYYPQALELAGDLSSPGACQFLKRWPTLAALQQARPSQIRKHYQRYGRPTAAELDGRLERICQAQPLTQDPAVLLHGSLMLRALVDQLLPLFDTLREFERQIAALFAQHPDRPLFEHLPGAGKVLAPRLLAAFGTQRERWQQAAEVLTYWGVAPVTEQSGRSRWVHWRLACPKFLRQSWHEFAAHSRKHCGWAQAFYQQLRAHGKGHHAALRALAYKWIRILFRCWQTRTPYDEQVYLKSLEQKNSPLLAAIQALSSSSAPSKAVRGSLVKNL

SEQ ID NO: 74222 - protein, 356 aa, unidentified
MSHEVKYIGMDVHKEAIVIAVLNESGKQVIESVIETKASSILQFLHGLRGELHVTWEEGCWAAWLYDLLQPQVQHIVVCNPRRNALLKEGSKSDKLDARKLAELLRSGMLRPVYHGENGLRTLRELGRSYQTIGKDLTRVMNRLKAVYRGWGIACAGTRVYVARYRKEWLSKLPQAGVRRRAELLYQQLDGLQALRREVRPEFLAESRKHKATKLLRQIPCIGPIRAARLIGLMQTPHRFRSKRQLWTYSGLGIETHDSAQYRYVGGQVQRSKKPQQIRGLNRNHNHEMKEIFKSAATRASCGRGVLHDFYAALLDKGMKPEMARLTLARKIAAITLTLWKKEERFDAKKLKTQAA

SEQ ID NO: 74223 - protein, 346 aa, unidentified
MEIHTLGIDLGKTIFHLVGLSASGETVVRKKFSRNQLLHFTVNLRVRLIGMEACGGAHFLGRALREQGHDVRLMPAQYVKPYVKTNKNDYIDAQAIAEAVGRPTMRFVPIKSDDQLDMQSLHRVRERWVGRRTAVVNQIRGLLLERGITVRKGRRHAEAALPGILEDPDSNLSGSLRMLLVQLQRELKQLQSQIEEVDAVILKAAHEHEACQRLMAIPAIGPVIATAIVSAIGNGTDFKKGRGFAAWLGLVPGQFSTGGKQKLLSISRRGNCYLRSLLVHGARAVMQCRKKQSSGLSAWLGKLVSRVHCNVAVVALANKLARMAWALLAKGETYRPPLLAANPVTV

SEQ ID NO: 74224 - protein, 416 aa, unidentified
MLRIIYPICCGLDVHKSFVFACIAATDENGVTTYQSRKFSTFTGDLRELSNWLAANNCKDVCMESSGKYWIPVWNVLEPTCNLVIAHPKYVKAIRGKKTDKKDAKWIADLFKHDLVSGSFIPPADIRQLRDLTRYYRKLVGFNTGEKNRAQNSLTVSNIKLDDVFTDVFGKSASAITDRLLENPGETFDVTPYVHGRCKTPISEIQAAIDGAICPEQAEKLKIVRSHMGNLELCKAELESVILGIAQKYLAQLELILTVPGIANPFTAASIIAEIGVDMSVFPTAKHLCSWAGLVPQNNESAGKKKTTRITHAGTYIKPLLVQCSVAVSKSEKHPEIRNRYLSLKKRRGHKKAVIAIARMLLTAIYHMLKKNEPYNAELYRKADKPPEHRQVSIEEAIFILQRQGYFITESQAVAE

SEQ ID NO: 74225 - protein, 416 aa, unidentified
MKPWQDLTHYAGFDWAKDHHAVVIVDREGRVVADFEFEHSLEGWKSFADKTSAWPNLAVAIETSQGAAVDQLLQRQYSLYPVHPVAAQSYRQRKAPSGTKTDHLDAWGLADALRSDGHGWKTLQPLDPLTEQLRLLCRDEVSLIEQRTALVNQLQQALAEYYPAALEAFEDWTDAFTWEFVLAFPTPQALVGAGKRRWEKFLHTHKLWRPETVGKRLKLFATADQFKASDPIVRAKSQLAVSLCKLLCTLAKQLALYRKQIEALFRNHPDHDLFGSLPGAKKILAPRLLAAVGGDPKRYGSHEVLQSIAGTAPVSYQSGKLNKVRVRWACDKFMRHTVHLWSDCFRKASAWGQSYYEQKRQEGMSHACALRCLGQRLLKILFRMLVTRTPYDAELHARNQKKRGSWVIKLVSEPAA

SEQ ID NO: 74226 - protein, 341 aa, unidentified
MNATTYAVDTAKNVMQLHWVDAQGVIHSRKLSRAKFVDFMGQRRDAHVVMEACAGAHHWARRLAAMGHRVELLPARQVRPFVRGNKDDAADARAIWVASQHGDIRRVAVKTEQQQAVLSLHRMRSHWICVRTATINALRALMYEFGVVLPQGKALGLKTLAARRAEFDELLPAIMQRLVDQQLAALRQIDLDVARIEAELLRVQAADANARRLREVPGLGLLGATALAAVLGDGAAWRRAREFATGLGLTPRHHGTGGKVQIGAINKRGDPYIRTLLVSGARSLLNSPSAPQWAKEVASRRPANVAVVALANKLARTAWALVAHECSFDRRWGRARCAAAA

SEQ ID NO: 74227 - protein, 387 aa, unidentified
MPQPNDLSRSLVALDQNSTIIAVVEMSQASWLVGGVLPGIERQPRKKLEPSPERLLALLHRWRDESVRAGRTITRIAVAFEAGRDGFWLARWLEARGVEAHVIHPSSVAVSREHRRAKTDRLDTELLKRGFLGWLRGERGHCSMARVPTLAEEDAKRPNRERECLVKERTRLVNRMKGTLARLGIRNFRPTLRNAAEHLAALSTPEGSPLPPNVAAELERDIARLRLVIGQIKQIEEARRQRLEEQPERGPHAMVGLLARVVGIGIETADMLVHEVLSRPMRDRRAVARYAGLTGAPDESGAKRREQGLAKAGNARVRRGMIQLAWRFLRFQKNSALTQWYQARTADRRGATRKTMIVALARKLLIALWRFVTIGEPLDGVTLRPAS

SEQ ID NO: 74228 - protein, 334 aa, unidentified
MWHVGIDLHRQTLVIAAVNDAGACMAPRRIDCRDRDTIIDTMRRLGPFRAVIEATGTYRWLYDLLAPLGTVLLANPLRLRAMVQRRSKTDKLDSQLLANLLRINQIPLSYIPPQRYQLLRDITRHRARLARQAAMAKTQLRSLLAIHNRGPLPFSAVGIRACTWFAHQDFGAAGNWVRDELLLRLDHYRLQLALLYKRLESLHRETPEVEALSDIPGIGLYSALLIVGELGEVHRFRTARQVGGYAGLTPRVHQSGDHCYRGSITRQGSCWLRWILVEAAIKAARYDPQLKHFYVRARKRSGVKIARVAVARKLAEICWKRLIGWHGRPVTSIA

SEQ ID NO: 74229 - protein, 341 aa, unidentified
MEQATTIGLDIAKHVFQVHGADGAGHVLFRKRITRVKLLGFLAAQARCVVAMEACAGAHYWAREIAKLGHHVRLIAPAYVKPFIKRQKNDAADAEAICEAAQRPSMRFVPVKTEEQQANGIVFRARDLLVRQRTQCVNALRGHLMEYGYVFPKGITHVEALVALVEDLQSSLPDSVRVILKLLVDTFTALEAQIAVLDAEINQRSKSDPAARRLMTIPGVGPIASTAITALVPAAEGFPAGRDFAAWLGLTPLQKSTGGKQKLGAVSKRGERTIRRLLIIGASAVVQQASRRGAPKGSWLAQMLARKPKMLVTVALANKMARIIWALLVKGGTYRTPVAAA

SEQ ID NO: 74230 - protein, 350 aa, unidentified
MNEGYAAQRQFVGVDLARRRSVIARMDPDGGVVDCVQIDNSAQDLVAEVGKAGPGAPVAVEATFGWYWAVDALQDAGHEVHLAHPKGNASMHGRRVKTDARDAAELARLLRMEDLAESWIAPPAVRARRELVRHRHKLVRTRASVKASVHAVLGKCGVLLPLDDIFGPVGLGLLAATELPEPYASRVASQCRLIEAISREVDLVETAIAAAFTDDPGYRALLTINGIGPVFASVFVAEIGDVHRFGSPQALASWAGLTPRHYASDNKARRGHITKQGSRLLRWAATEASQRIREPYLADKRRLITDRRGRSAANISKVAAGRRLIHVVYYTLRDGHARCLDRPTAGSAAG

SEQ ID NO: 74231 - protein, 347 aa, unidentified
MLALHRDLGVVIGVDTHKHTHTAAAVGSTGAVLEHLTVPADPAGYRQLIAFGQRHDATLWAIEGTGSFGAGLTTALLARCVRIVEVDRPQRPARRAGVKSDDIDAVRAARQALAGVGLSEPRRRGEREAIRVLLTTRAQAVEFRTRAISALHALVTSAPDGIRERLRTLPLGQLLQTCTGLRGSARYSAEESATVVAMRSTARRALACEREAAELEAQLDRLVRRLAPELLDQLGIGPVVAGQVITSWSHHGRVRSEAAFAKLGGVAPIEASSGTVIRHRLNRSGDRQLNRALHTIVLVRMRQDSATKDYVQRRLAQGKTIRDIKRCLKRYIARQLFRQLEALPSPT

SEQ ID NO: 74232 - protein, 337 aa, unidentified
MKFCGIDLHSNNSVVIVSDEEDRIVFNKRLPNDLGQIRAALEAHQEELAGVVIESTYNWYWLVDGLMDAGYRVHLAHPAAIKKYEGLKHSGDFADAAYLAQLLRLGLLAEGYIYPREERGARDLARKRMQLVRYRTAQILSIEGILMRQTGARMKGEAVKRLTAEQVDAFAFAPDVALAVEANRAVSQALGQQIEALERRLKERVSLRPEYRLLKTVPGIGQTLATTIMLETGAIGRFAQVGNFSSYCRCVDSLRESNGKKKGEGNTRNGNKYLAWAFVEAANFALRYCPQAKSFYERKKSKTNRVLAIKALAHKLARACYHMLRDQKPFDVHLCFG

SEQ ID NO: 74233 - protein, 400 aa, unidentified
MLSIGIDVSKGKSTVCGMKPGGEIVYTPFEIQHTREGMSELVSLLHNSGEEVRAVLESTGSYHCPVVAALLENGIFVSVVNSLRMKRFCSQSIRKVKTDRIDAMQIALYGLAYWQELQPTRLPEDTYRELQLLARQYYQMTSLLIKAKVDFNAICDQVLPGMQELMSDHAGRHKLSDFVLRYRHTAHILEMGETRFRKDYCKWAEKKGYRNRERMAALIFATAQNGIPVLPNAPSTQIVITEAIRVLHTVEASRDAILTQMQALAKTLPEYSLVREMPCIGDTLAPRLIAEIGDVRRFHSKRALIAYAGIDAPPYQSGKFCANNRHISKRGNRYLRKTGYEVMQSYVMHKPANDPIFTFIEKKRGEGKSGKLAMVAGLNKFLRVYYGKVTELYRSLPAIE

SEQ ID NO: 74234 - protein, 408 aa, unidentified
MLFVGDDWAEDHHDVEIQDETGRRLAKARLPEGISGMARLHGLVGRFLPEDGAAAGVKIGIETDRGPWVAALVASGYQVYAINALQSARARQSQGVSGAKSDAGDAHVLADLVRTHSHQLPTVAGDSEHAGAVKVLTRMHQTLIWDRTRQVLRLRSSLREFFPAALEAYEDLAFPDVLELLTKAPEPNSAARLTRAQITAALTRAHRRDREAKTTAIMAALAAEHLTQPPLIAAAYGAAVRALAALIRTSNEQITALQGQVEACFGQHPDAEIYLSQPGLGLVLGARVLAEFGDDPTRYDGARARKNYAGTSPITRASGKKKVVLARYVRNNRLADALHQQAFSALSGSPGARAYYDALRDRDISYNAALRQLGNRLVGILHGCIKTHTPYDEATAWNQHIQQAAADT

SEQ ID NO: 74235 - protein, 410 aa, unidentified
MEVLHAHCAGLDIHKDSVVACVRHMVEGKVTSQVKTFKTTTQELMALSDWLSAEGVTHVAMEATGVYWKPVWHILSDGEFELVLANAAHVKNVPGRKTDVNDATWLADLMAHGLIRPSFVPDEPTQQMRDLLRTRKQFVRERTGHTQRIQKTLEDANIKLDSVISNVVGISGRRMIEALTAGRTDPQALAALADGRLKATPAELEASLRGRVTAHHRFMLRLHLDHLDALDAAIARIDKEVDGNVEPFRVAIEMLITIPGVSHLSAEVIVSEIGIDMSRFPTEGHLISWAGLCPKNDESAGKRRSTRMKKGAPWLKTTLVQCAWAATRTKGTYLHAQYLRLRSRRGAKKAIGAVAASILTAAYHMLKNGTLYQDLGADHFDKRAQGKHVLQLVNRLKNLGFAVQITPMAA

SEQ ID NO: 74236 - protein, 337 aa, unidentified
MKTYLFIGIDISKATLDACVLSASGSMEIHYHEFSNNSKGFVLLMKWLKEKSEGIAVEDWRVCMENTGIYSLALNCFLHEKSIWQSMENALQIKRSMGVVRGKTDKADCKTIALYAYRFYDKLNPYVLPGKTLLRLRALFSQRERLVGMHSQLLVGNQSMKGYASELVKDIQKQNETLLKNLAKQIKTIDKSLKECLQQDDELQHKAKLIQSVPGIGQQTASYLLIVSRGMQSFATAREFACYSGCAPFAHTSGTSIRGKTKVHFIANKKMKMLLHMAAMNAITFNDELKIYYQRKIAEGKNPMSVLNAVRFKLICRIFSVIKRNEEYQKDYKKIAA

SEQ ID NO: 74237 - protein, 295 aa, unidentified
MTMNPAPRVFNHIVAFDVAKESLAIHVLPGDERQAIANKPKAIRKLLIAQSRRNAKLGLGPLLVICEATGGYERRLLEICAELGIAAHKAHGSRVRNFARYLGLIAKTDPIDARVLALFGLKTENLRLHTPLTPALTALIDLRARRDQVQAMLLAETGRLEHVRYAGVTRSLKEHIASLRKSLAALEAQIAAHIQANEALARKAALMRTLKCIGPGTVAALLAYMPELGALSRTQAASLAGVAPFDDRSGKLSLPSHIEAGRAAVRRALYMAALTATRHNPIMKSFAERLKAPKR

SEQ ID NO: 74238 - protein, 331 aa, unidentified
MNMHVGLDVGSRTTAMGWRNGGRFAGQCNIDQTPAGRKAAVGKLLELKPMSVVMEATGIYYLDLAMELAAAGLPVSVINPKSFHNFAKLMLKNSKTDAIDAQLLAEYGERMSPRLWTPPTSIQLELRAIGRHINRLTGHRTRAKNELHALKATQTTLLMLIEDEEEAINAFDKRIERFRLAGRALIDNCPTLSAQFAHMIAAPGMGEISVFAALAELTTLPVTLKSAQVSRHAGLDVRLTQSGASIDKPGRISKGGNAYLRSAMYMPALTAIRCDPNVKAFYEALVTRGKRKMQAIVAVMRKYLTGLWACMRAGEDFSTAKLFSGKHTQKA

SEQ ID NO: 74239 - protein, 457 aa, unidentified
MAEQEAEQVEEPVELVARVAAIDVAKDSGMVCTRLPHPSRAGRRVQQVWSVPARFAAVTELADQLVDLGVERVVLESTSDYWRIWFYLLEAAGLEVWLVNARDVKNVPGRPKTDKLDCIWLCKLNERGMLRRSFVPPEEIRDLRALTRLRAMLTAECRRHKQRVEKILEDALIKVSAVVSELFGVSGRAMLRALVAGQRDPKVLAELAQGRLKVKKAQLAQALTGRFRDVHAFEVGMLIDLIDTLEAKTTALTEKIAAHLASLPGVPAACTSCGVLGEHAGDCANRSLQLPSLVARLDEIPGIGPHTAHVLIAELGLDMSQFPTPAHASAWAKLAPQTRQSGATTRPGKTGKGNRWLRGALGDVAMAVGKTDTFLGERYRRIRRRRGKQKAMVAIARTILEIAYLLIADPTLRFNDLGADYYDRLDPNRQTRNKIREIERLNPGVKVTLTPADTTAA

SEQ ID NO: 74240 - protein, 334 aa, unidentified
MENIALIGIDLGKNSFHIHCQDRRGKAVYRKKFTRPKLIEFLATCPATTIAMEACGGSHFMARKLEELGHSPKLISPQFVRPFVKSNKNDFVDAEAICEAASRPSMRFVQPRTESQQAMRALHRVRESLVQDKVKTTNQMHAFLLEFGISVPRGAAVISRLSTILEDNSLPLYLSQLLLKLQQHYHYLVEQIKDLESQLKRKLDEDEVGQRLLSIPCVGRLTASTISTEIGDGKQYASSRDFAAATGLVPRQYSTGGRTTLLGISKRGNKKIRTLLVQCARVFIQKLEHQSGKLADWVRDLLCRKSNFVVTCALANKLARIAWALTARQQTYVA

SEQ ID NO: 74241 - protein, 343 aa, unidentified
MQHYVGLDVSQKTTAICVVDEQGQRLWRGECTTDPGAIAARVFKHAGVDAKVGIETGSMTPWLVHGLRGTGLDVRCLDARQVKVALQMRLNKTDENDAEGLAQIMRTGWYRAVHVKSLDAHRARALLGARAQLVGMTTQLSNMVRGVLKTFGLLPGTGRGLRFDRKVEALLEGAPEIAVIVRPLLATWRQLRDQIAVFDKAVRQRVRADPICRLLMTVPGIGALSSLMYVSTIEDPGRFSRSRAVGAHLGLTPRRYQSGEIDRSGHISRCGDGLARTLIYEAAVVILHRVKRSLQLKDWAKAIERRAGSGKARVALARKLSVILHSVWRSGEPFRWAPRPEVA

SEQ ID NO: 74242 - protein, 343 aa, unidentified
MHTITTIGLDIAKSVFQVHGTDAAGQVVIRRQLKRRAVLAFFQKLPPCLVGLEACASSHHWSRELQALGHAVRLMPPAYVKPYVKRQKDDMADAEAICEAVTRANMRFVPTKTPEQQGCLMLHRTRHLFIRQQTAVINAIRAHLAEFGIVAPVGRKGVTELLHVVADPSDGRVPEVARACLAALGTQLLGLKEQIVEFDRLIMAWHRSNETSKRLHYIPGVGPLLATALAASVADPQTFRSGRNFSAWIGLVPKQHSSGGKDRLGSISKQGDRYLRSLFVAGALSVIRYAKIHGTKHRPWLTALLARRPTKVAAIALANKLARMAWAMMARGERYRQPVALAA

SEQ ID NO: 74243 - protein, 372 aa, unidentified
MDANGITWVGLDAHKDSIKVAAWLPGQPEPVEWTEDTTAEAVRRLARRLQRLSPGGVRCCYEAGPTGYALQRQLRATGVDCAVIAPSLTPIKPGSRIKTDRRDARKLGELYRAGMLTEVHPPSETDEALRDLCRCRDDVRVDLLRARHRLSKFLLRRHLIYRQTKHHWGTRHVQWLEELRFDDAMSQATFDSYFLAVQQLEERQQQLDARLAEFGAQEPYREPVAALRCFKGIDTVTAVCLVAELHDFRRFHSPRQLAAYVGLVPSEHSSGEREQRGPITKSGNRHVRRLLVEASWHHRHRPALSRPLRARREGQPARVLAIADRAQERLAARFRRMSEAGKVHPKTIVAMARELCGYLWAVLHPAAVATRV

SEQ ID NO: 74244 - protein, 355 aa, unidentified
MREEKYIGMDVHQATISVAVVDVHGKLIMECLLETKAATSIEFIQGLRGTLSLTFEEGTSAAWLHDLLKPHVNRLVVCDPRKNALLKEGNKSDRVDARKLAELLRTDQLKPVYHEEHGMRTLKELGRSYLTLTKDVTRVMNRIKALYRSWAIPCSGTTVYTPGHRAEWLAKIAEPGVRVRAEHLYQQLDSLQPVRLQARRELLRESQKHAAVKLLRQIPSIGPIRAAMLVALLQTPHRFRSKRQLWAYSGFAVETHDSGEYRNVRGKLQRNRERMTVRGLNDNHNKDLKNLFKSAAISASTRPGPLHDFYVARVEKGMRPTMARLTLARKIATIALTMWKKGVGFDPQQLHRQAA

SEQ ID NO: 74245 - protein, 351 aa, unidentified
MPRRSTVHAVTVIGVDLGKNTLHLVGLNSFGAIVLREKVSRGRIASRLANLPPCLIGIEAGMATHYVARELAALGHDVKQVPAMYAKPFRQGHKNDFRDAHAVAEAVQRPTTRFVPAKSDEQLDLQALHRVRSRLVSDRTAVINQIRGFLLERGVIVRQGLRFLRHSLPDILAKRTDVLSLRMVRIVADLADDWRRLDERIETVTDEIETIAKNDDNCRRVMTVPGVGPIISSAMIAAIGNGVAFARGRDFSAWLGLVPKQMSTGDRTILGRLSKRGNGYLRMLFMQAARVILLRPRNWPKHSFGGWLARAAQRLHPNVLAAALANKLARIAWTVLAQQRSYEARVSKAAA

SEQ ID NO: 74246 - protein, 351 aa, unidentified
MTEITRLAIDTSKSVFTLHGVDVVDRPVLRRNLRRRELLAFFERLPPVEVALEACGGSHHWGRALLALGHRVRLIPPQYVKPFVKRSKNDRNDAEAISVAAAQPSIGSVAVKSAEQQAAAMLLSVRELLVRQRTQLVNAMRGHAAEMGVVAPLGEKGVSALQAEIATADDAAVPAAAKQAIALLGREAERLETRLRAIEATLMQQHKANPVSRRLAAIPGIGPIGALSLAVRVDPKQFASARHFAAWLGLVPRECSTAGKQRLGGISRAGDERLRQLLVLGATAVIQHANPRVRPAGQGPTGRPAASQWLLNLLSRKPRKLAAVALANKMARIVWAMMTSGDVYRPRPAAA

SEQ ID NO: 74247 - protein, 398 aa, unidentified
MTESSDYESVQVFIGVDVGKDTHHAVAINRSGKRLFDKALPNDENKLRSLISDLKQHGQILLVVDQPATIGALPVAVARSEGVLVGYLPGLAMRRIADLHAGEAKTDARDAAIIAEAARTLPHALRTLKLADEQIAELSMLCGFDDDLAAQTTQASNRIRGLLTQIHPALERVLGPRLEHPAVLDLLQRYPSPEKLASLGEKKLAAQLCKLAPRLGKRLAADIAQALAEQTVVVPGTNAAAVVLPRLALQLITLRKQRDEVALEVEQRVIAHPLYPVLTSMPGVSVRTAARLLTEVACRAFASAAHLAAYAGLAPVTRRSGSSIRGEHPSRRGNKALKRALFLSAFAALRDPLSRAYYTRKMSQGKRHNQALIALARRRCDVLFAMMRDGTFYTPQGS

SEQ ID NO: 74248 - protein, 364 aa, unidentified
MNDTYYIGLDVHKKSISYCVKTASGAIVQEGQVVARRTDLRAWATAQPKPWRGAMEATLFSAWIYDTLKPYAQQLDMAHPARMKAITSGKKKSDRLDARTIADLLRCNLLPTCYVLSPEMRDLRRLLRYRQLVVTQSVRMQNKMAGLLMETGAPFVKAKLHGKKYFTQLLATLQEVPESVKDLLRMSRGALEMFEISQKQLVKRLLAEPVLEARVERLASIPAVGPITALTWALEIVDPHRFSAIGDAESYCGLTTAFRSSAGKEQRGPLSKQRNPWLQTALIEAAKLAPRWNPQLAAVHERELKRGHRNRATLQVARKLVAYLMAVDKSGQPFQLRTSPTLATALPTRKKEKAAPPAVVLQPA

SEQ ID NO: 74249 - protein, 425 aa, unidentified
MKKIDYLSTLFVGIDIGSRLNVISALNFEQEFLIRMASIPNSQYGAEQMELMIAEVLQQHHEFRSIIIGLESTGFYGVHIANYLSTCQMLAPFSTKVYCLNPKEVAKYKESFNSLDKNDGIDSFVIADFARVGRINTQPWRGAQYLALQRLTRHRLHITECIAREKTYMLNNIFLKFSEFAMLDNDEHPFSNKYGATAEAVLTDYLSTEAIVNASVDELIAFISSKSRGRIHDPEQATYLLQKAANDSYRLDKCLYEPLTVSIGCSFNCINAFEKELKAIDDAILRTVKGLNPTEYQILNSVPGIGKVYASGILAEIGTIKCFKNNDALAKYCGIVWKENQSGNFEAEDTPMNKAGNRYLRYYMIEAAGSVIRHCPEYKAFYDKKFAEVRTHQHKRALALTSRKLIRMLFGLLDKSQLYSVEKSR

SEQ ID NO: 74250 - protein, 280 aa, unidentified
MTTSGTFVGIDVSKAQFDVAVRPTGEHWTRAHTEAGITMVVARLVWLRPTLVVLEATGGLEISLTGAGATAGLPIVVVNPRQVRDFAKATGHLAKTDTLDAQVLAQFAEAVRPTPRPLPDVQTHELAARLTRRRQLVEMLVAEKTRRGQAPGHIQKQIQVHLIWLERRLRDLDEELATAIRSSPLWREKDERLQSIPGVGPVLATTVLASLPELGILSRQQIAALVGVAPLNRDSGTIRGKRTIWGGRAHVRATLYMAAIVGFPLQPDDPGVLSPALCSG

SEQ ID NO: 74251 - protein, 353 aa, unidentified
MTYTGIDYHKRYSVACTLDEKGRRLLERRIEHNAPEAFAAYFAELGEPSEVVIEACWNWGTLYDLLEQVPGVTRVVLSHPAKNRIIADAQIKNDRVDAHALATLLRGDFVARVHVPNREVRQRRNTVRQRLWAAKVRTMVRNRIHTVLDRHPGLDRPVYKDVFCQRGVSWMRTAELPAPDRELLTEDLALHTLLERQMAGLERRIEADSATSDDARRLRTLPGVGKVLGPVIALEIDGIRRFRTSDRLCAYAGLVPTTRSSGGKTSHGRMLPFCNHWLKWAFIEAAWVAVGCSDYFGGFYRQHRARGKCANEAITITARRLAKIAWQMLTAQRDYRRVPTQPDPLSPAALATD

SEQ ID NO: 74252 - protein, 418 aa, unidentified
MHRWFVGIDWASQEHVVTLCDGEGNRIGERKFDHGGTGLSDMISWLLKASGSEPGEIHIAIETPHGPIVEALLERGFNVYSINPKQLDRFRDRFTVAGAKDDSLDSYVLADSLRTDMPLFRKLIVSEPLIVEVREWSRIDEELKVERVRLTNRLRDQLWRYYPQMLELGDLDEDWMLDLWDAVPTPEKAARASKAAIVRVLKKHRIRRFDAAQVLSELRKPALSVAQGTIEAATAHIRVAIERLRLVNRQLADADVQLGRLCKKLAEPVAGDDGENVPGQRQEHRDVTILDSLPGVGRTVLATMLAEAPDALQRRDYHALRTLCGSAPVTRRSGKSCFVTRRRACNRRLTNAAFNWGRVAAQHDPVSKAKYEALRARGHGHARALRSVVDRLLYVACTMLEKGTLFDPSFAEAKKAAA

SEQ ID NO: 74253 - protein, 402 aa, unidentified
MWYVGVDWADTHHDVEVVDERGKRVGAQRFAHSHEGLNQLKAWLLQIAGDAEQLACIVETNHGLLLTFLLEAGIPVYPVNPKMANQLRKTAGAKTDQIDAHLRAKMGRFELSELRRVEPDSATVQELKTLTRDQDLLVQTQTRLVNQLTACLKDYYPAALKLFAKLQQRSTLLFLQAYPTQEAVQAASLDEIIATLRAGKHTNPRGAAPKIFEEVHRPQLTAHPVVVRAKSRLMLSLVKQLLVVIEDLASYDKHIRTLFLTHPDQPIWQSLPGAGKRLAPRLLAEWGEDRARYADASSVQALAGTAPGPFQSGNYAKAHKRFACLKPLRTALHQFAWQSTRQEAWARDYYQRKRAEGKTHSAAVRALANVWVRIIYRLWKDGTCYQRAVFEQAQQQHARRAA

SEQ ID NO: 74254 - protein, 347 aa, unidentified
MAFIGVDLHQNSFTVCRLDCDGSETFATYQLCRADLDRFCLGLDADDEIAVEATGNSAWFRDEVISCVGRVVVVNPRQFQVIRKSVKKTDRNDARALAVFLSKDMLPATRVKSKAENELASLVHTRDLLVKQRTRLLNKIHALFNRHGVKLKKAGLSSRRRLLVLESGHFSTLEQVELKVLRDQALSLTATIAELDGEIEHAAQGLAGYESLVSIKGIGPRAAAVFLSGIGNVDDFENADKLAAYCGIVPRVSQSNETDNRGRITKRGDKLMRTTLVQCTLIAIRYSGYLNAFYRRIKNRRGAGKAIIATARKLLKIIYDTLKNGWVFEDFTTYTRAQKPLSAGQSS

SEQ ID NO: 74255 - protein, 445 aa, unidentified
MKQKKPHKQKSVKLPRHLQHINAHAAGIDIGSKSHFVAVPEGTDEQPVREFSTFTDDLERLAEWLNSCSVTTVAMESTGIYWIPVFEILESHGLEVKLVNARHVKNVPGRKSDVLDCQWLQQLHTYGLLRGAFRPSDQVCALRAYVRQRCTLVRSAASYVQRMQKALAQMNLQLHNVVTDITGMTGMRIIKAILAGERNPEVLAALRDRRCKNSKETIARSLKGSYRPEHLFSLQQAVELYEFYQAKIADCDQQILEQLRSFDGTSDNDPNIKPPGSVGEALQRMSGVDLSNIDGIDTKTALKIIAEIGIDMSRWKTAKHFASWLGLCPGTKVSGGKVLSSATKPVANKAAAALRMAALGLFRSKSALGAYLRRQRARLGTPKAITATAHKLARLVYSMLRNGSMYVDIGQDYYEERYRSRVVQNLKRKAQELGFELVAAQPQTT

SEQ ID NO: 74256 - protein, 338 aa, unidentified
MIIIGIDPHKASHTAEAIDMNETAVATVRVRADRRQVQQLVAWAAPFPERRWAVEGANGVGRLLAQQLVAAGEEVVDVPATLAARIRVLNGLDKTDAHDASSVAVAALRRPGLRAVRVEDHAAVLHLLSERRAQLVVARTQTVSRLHSLLRYLVPGGAKRFLTVAQARSVLAGIRPTSEIERQRKVVARELVAEISTLETRLKTIESQIKTAVDASGSTLTEIPGVGTVLAAKTLGIVGDAARFENRAHFASYAGVSPVEASSGAHVRHRLNRRGNRQLNYAIHMVAVTQRAHAGIGRDYFERKLAEGKSPAEARRALKRQIANVVYKRLRDDTRRNT

SEQ ID NO: 74257 - protein, 338 aa, unidentified
MNIVFLGIDLAKNVFQLCGLNQAGKPVYTKRTGRKELLQTLANIPACLIGIEASTGAFYWQREFEKLGHKVKVISPQYVKPFVRGQKNDGNNAQAIAVALMQPTMQFVPPKSPEQQDIQALHRARQRIINHRTATVCQIRGLLLDRGIPIGSAVSRARRAIPLILEDAENGLRSRMRRTIAELYELFNDLERRIHFFDKEIETVFRQSEACQRIARVKGIDPKTATAVVAAIGKGTEFKNGRHFAAWLGLVPRQHSSGDRQVLMNMTKKGDKHLRTLFIHGARAVVRVATNNNDGHMNQWVNQLKERRRFNKTTVAVANKNARIIWSMLRNETEYQVV

SEQ ID NO: 74258 - protein, 368 aa, unidentified
MFEHTFIGLDVHAVNVVGHALNPATGEISGHTMASDPALVLEWVRRFEPPVKVVYESGPTGFVLARYLRAAGINCVVAASSKLLRAPGDRIKTDRRDARVLAEMLAVGSVTEVRIPDPDEEALRDLSRLRSGTAKDLAHARQHVNAILLRHGIRYPKDSRWTKEHSLWLHRQRFDEPALQFTYQADVEQTELLAGHLKRIDKQIAATAAACRYGPVIDALMCLRGIQITTGFGLAVEIGDWTRFTGSSIGSYLGLVPSEESSGQSRHQGPITKAGNTYARKLLIEAAWQHRRPYARPGERLLRQLDLVAPATRIRALEGNHRLHNKWEHFDERRKMSVKANTAIARELAGWCWSLAAPLQQGERMNAA

SEQ ID NO: 74259 - protein, 476 aa, unidentified
MAQSHTLSVGMDGHKESIAVASVAQDHGAAVISRSPIGTRQCASDKLLRTLQSQSTQRVCGDEAGPCGSWLSRSLTPTGSVCWVVAPVLMPTKPGDRGTTDRRDARQLARRMRSGALTPVSVPAGDDEAMRDLSRAREETRRDLHAATVRLTACVRRHALRSTGRAHGSPAHLRWRSAVVCPTPAPQRVLQEDGQTVPEPTARLQRLAHALRAQGHTWRLQPVVEALQALRGVQCTVAVTTVAAWGDLTRFANPRQLLHDLGLTPAAYARGARRQQGSMTRTGNPRPSCPGRRRVGLPVSGASQPSPATASREAPRRDPGPQLEGPGPALHTGSPADGHRQTCPSSRRRHGPGIACLSVGDGPPDCCAIASRKRAAGCRTSSRECSRPSAETQPRCGVTLGRVQRPQGTLVPRMRQAPDGGQEGGSQPTESSVSNRRVFLAPALPIDKGKPGGRRKKSCSLLLTSEVISTLGIRRG

SEQ ID NO: 74260 - protein, 344 aa, unidentified
MNKYAGLDVSLEETAIAVVDESGRTVREGKVASEIEALDGWLRASGAAIVRLGLEAGPLSSWLYAGLRACGWPGVCIETRRLRAVTQAMPVKSDRKDAEAIAQVMRTSWYRAVHVKSDDSQRLRVLLRHRQILQAKRQDIDNELRGTLKAFGLKLGKVGQTGFAARVMELVAGEPWLERLTQPMLAARAALRQSFAELHKLLLKIVREDTVCRRLMTAPGIGAVNALAYKTAIDDPTRFRHSADVGPHFGLTPRLYQSGETEYSGRISKCGDAMVRSLLFEAATALLHRVKAASPLKLWARRLARKIGVRKATVALARRLAVIMHRMWVDGTDFDPELGRAAAH

SEQ ID NO: 74261 - protein, 411 aa, unidentified
MEPLYRCIAGIDVHKKMLAVVVRTPQGEYVQRKFGTTKSEIGHLAAWLQDHQVSEVVMESTAQYWRPVWYGLEGHFKLHLTHPLKTRAPRGRKSDFRDARRLADRWHSGDLEESFIPGAEQRSWRWLTRSRVHLKRMLGVIRNQVEGLLEQGEIKLSAVASDIFGVSGWAILERIAAGESDVDQLVKEARGTLNRKKSKLREALQGKLDPLYRLLLQQHLAQAQLICQQVEELNQALAEALKEHVAVLCRLTKVPGINLYAAQELVAEIGPGAVAFPSAEQFASWVGVCPGSKETAGVNYSHRSAKGNRYLRRLLCQNAWGAIHTKNTFFAGLFARLKPKVKGKGAAWAVAHRIAKLVWLILHEGVEYVEKGTAPLNPRTLVRKFRRLVREFGQQGIDVKSLLEQELAATV

SEQ ID NO: 74262 - protein, 347 aa, unidentified
MNFYTGQHKHYCGIDLHAKAMYVCILDQSGTILVHKNLPTTPEAFLRVLGPYREDVVVGVECMFTWYWLADLCQKEGIAFVLGHALYMKAIHGGKAKNDKIDAHKIAVLLRGGMLPQAYVYPAEMRATRDLLRRRCHLVRKRAELLAHIQNTNSQYNLPEIGKKLAYKTNREGVADHFPDPSVRKTIEVDVSLIDHYDKLLGEVELYITRSAKTHDVQTFARLQSVPGIGQILALVILYEIQDIARFPRVQDFVSYCRLVKCAKESGGKRLGTSGKKIGNVHLRWAFAEAAVLFLRHNQPGKEYFTKLERKHGKAKALTVLAHKLGRAVYYMLSRQQAFDLNRFVPA

SEQ ID NO: 74263 - protein, 362 aa, unidentified
MSYRNRNDAQWREKPERTVGLDLGDRFSHYCILNAHGEVIEEGRIATTEKGLRQQFANVPRQRIALECGTHSPWVSRRLQQWGHQVIVANPRAVPSITHSVSKNDRHDAEQLARLAHSDPELLKPIQHRRQTRQQDLNWLRVRHTLVRARTLVINSLRGLAKSAGGRLPNCSSESFPKRVAQHIPASLTPLATPLLEQVAALNTHIAALDQQIETLAQRYPEIALLRTAPGVGPVVAAAYVLTLDRPDSVAHSRQMGARLGLRPKQHQSGDRDPQQGITKISNRYLRSLLVQSAHYVLGRFGPDSALRRWGLQLAGTGNQGAKKRAVVAVARKLAVLLHAMWRTGQSYRPFPPVRAVPHSNP

SEQ ID NO: 74264 - protein, 349 aa, unidentified
MRYYAGLDVSMKETFICIVNEKGKTFCQGQVPSDPEAIALYLKGAEVPIEKAAIESGSISHWLVTELQKMDIPVICVDARHMSSMLAMTVNKTDSNDAYGIANALRGGFVREVSLKPPLLVEINTILQSRSILVQERTKLKNAVRGLLKSFGIRISTTGQKSFIKEVRTLIQDKPSSVKLAIDALLNTFEVIMEQIQVLETRIYEIAREDKNVQLLMTIPGVGVLTALSFIVALGNYERFEDSRNVAAYLGLTPRQYSSGEVQRMGRISKCGSRDARSLLVEAATVMLTRTRSWCKPKAWAMKLQRKKGFKKASVALARKLAVIMHRMLVNQEPFYFGEAPEELKEKIA

SEQ ID NO: 74265 - protein, 324 aa, unidentified
MTDAVLGIDVSKNTFDTNLGAGTKARSKSFANSPAGWHHLIAWLGEHKIGQVHACLEATGRHGLGIALALHEAGHVVSIVNPAQIRDFARTKLGRNKTDQVDAVHIREYAELFKPRPWTPPSPAMRRLCELQTIRAGTVAGLTEWKNRRRSGIMDDLALSLAKTTIQHFTSQLEAVDQAIAETIDNDAELSAKRDLLVSVNGVGEALAGIVLAELPGPDILGSSAAVTAYAGLNPQQHQSGISVNRPARISKIGNAVLRTALYMPALSAMRYNPAVAALVDRLKAQGRLKGKQIVIAAMRKLLVLCFGVLKTGKEFDPTMAMGK

SEQ ID NO: 74266 - protein, 414 aa, unidentified
MVVDEEIFILFVQEKKKSFLATMTLINFVAANQKNYAFNLLSVFIMVFWSVQYLLQHLLVQTQLSDQLLQPLILILQLPQTPQFRHARPGKFFLPVNGMDYLLPLRLTVRNVLTRRITMNIVFLGIDLAKNVFQLCGLNQASKPVYTKRTGRKELLQTLANIPACLIGIEASTGAFYWQREFEKLGHKVKVISPQYVKPFVRGQKNDGNDAQAIAVALMQPTMQFVPPKSPEQQDIQALHRARQRIVNHRTATVCQIRGLLLDRGIPIGSAVSRARRAIPLIPEDAENGLSSRMRRTIAELYDLFNDLERRIHFFDKEIETVFRQSEACQRIAKVKGIGPKTATAVAAAIGKGTEFKNGRHFAAWLGLVPRQHSSGDRQVLMNMTKKGDKHLRTLLFMVPALSSGLPRITMMVI

SEQ ID NO: 74267 - protein, 353 aa, unidentified
MAYLEPPRVTVGVDTHKHVHVAAARDQLGRRLGVTIAPASRAGYGELLTWACGLGEVDVWGVEGTGSYGAGLVRFLAAHSQRVLEVNRPDRATRRRRGKSDPVDADAAARTVQAGEAIGTPKAQDGTVEMTRALRVARQTAVKARTQAINAIKALLVTAPVELREQLDGLPTTRLVRQAAALDPGQVATPTAAYMVAVRSLAARYQHLGAEIQLLTGELDRLTLRHAPALRALLGVGPEVAAELLVCAGDNPARLHSEAAFAALCGTSPVEASSGKTRRHRLNRGGDRHANAALHRIVIVRLRWHQPTRDYVARRTAQGKTKKEILRCLKRYVAREVFAVLHQLAKQDQATAA

SEQ ID NO: 74268 - protein, 481 aa, unidentified
MSKRINNDFQAIAKLDQEVSSLAKRRNLLLVYGLEDSGAYGSTLKEYLLEKERTTLEINPLKTNRQKDFYGQDKSDTVDATCCASIVLRSYDKLPQITRENQIYAYIREASRFRDTLVKNKTQIINRLHAQLTRAYSGIYKEFFPRIFSRQAVEFFVNYPTPEYLKNVSSHKIASILSKASRHRTGSRKKAKSPQDKAALILKKSSLMSKRALSLEKEMQAEIIKQLSLSLKQTIEAIDSIEKKLTELIKLTGQKLTTLRGLNTALAGVILGETLSPQRFSQTSSFALFNGTAPREDSTGGRCRHVSNRFCNRRLKRAFYQLALTSSRCDLISLEFYQSCIKRGLSKNEALKRLGRRLSDIVFVMMKTKSSYDAQVALESMEHRKRCSLLKQNEGKMANLITRDIPQEAGILSEILEPCLTPKKNCIRGKTKIKENIPSLRKRIFPDFASQKLALESSRTKDLGLGIDKCIPDFVLSKSRR

SEQ ID NO: 74269 - protein, 410 aa, unidentified
MQVLYPRCCALDVHKQTVVACLRLADDDKVTTEVRTFETTTACLIGLRDWLVANKCTHVAMEATGVYWKPVWHILADGDLELVLANAAHVKNLPGRKTDVRDAEWVVDLLAHGLIRASFVPDTQTQELRALLRTRKQLVREASSHIQRVQKTLEDANIKLDSVISDVMGKSGRAMIEAMIAGETNPTKLAAFADRRLKASPAQLREALRGRVTKQHRFLLRLHLQQIDALETAIAEIDQQVEADIAPFRGAVKQLSSIPGVKALAGQVIVSEIGIDMGRFPSDGHLVSWTGICPRNDESAGKRRSTRLRKGAPWLKTTLVQCAWSAVRQKDTYLRAQFYHVRARRGAKKAIIAVAASILTAVYHMLKDGKMYQDLGPNHFQRRNKDQQKHVLVKRLTDLGYTVALTPLPG

SEQ ID NO: 74270 - protein, 347 aa, unidentified
MNFYTQQHKHYCGIDLHARAMYVCILEQHGTKLVHKNLPTTPEAFLRVVTPYREDLVVGVECMFTWYWLADLCQQEGIAFVLGHALYMKAIHGGKTKNDKIDAHKIAVLLRGGMFPQAYVYPAEMRATRDLLRRRCHLARKRAELLAHIHNTNSQYNLPEIGKRLANKSNREDVAEHFPDPSVRKTIEVDVSLIDHYDQLLGEVELYLTRSAKAHDVQTFARLQSVPGIGEILALVILYEIHDITRFPRVQDFVSYCRLVKCAKESSGKKLGTSGKKIGNVHLRWAFAEAAVLFLRQSQPGKAYFAKLEHKHGKAKALTVLAHKLGRAVYYMLSREQAFDLKRFVTA

SEQ ID NO: 74271 - protein, 399 aa, unidentified
MSMAELRVAVDIGSERHRVGIALADGKILEEFEISHNREGLELFFERIGVCENRFNLPVVVAMEGSGGWARPLDGMTLKRGYELLNVNNVKLARFKEIFAAPAKSDKIDTRKILELIHMREVLPLAKAVLHRVEAIPVENDQLKRFTRRRRQYVEEKVRVINRLQSDLQAVSPGLLEITADAGNLWFLNFLTSREDLTKLAGIKHASLLKIAGVGKSYAAKIEAWQKTATFADETAWMGEMLIADAQRVLDLIRQIQAMEKRIDLVATRSEIATRIQTIIGFGPISSATLAGEIGTLDRFDSEASLALYTGMTRLDNSSGKSVGTKNTRQVNTQARAAMMTATARHIDNVPESRIYYDKKRGEGKTHNQAVRALGRHLIRVIWSMLKQRRDYLQKPPTT

SEQ ID NO: 74272 - protein, 348 aa, unidentified
MQTTVSLPIVGMDIAKNLFQLHVVDAETGEIQRHKLKRAKVSAFFANHQKSLVAMEACGGAHHWARTLQRLGHEVKLLPAKHVKPFVLRDKTDARDAQAIWVTAQQLHIKSVPVKSEQQQACLALHRLRAQLMKMRIMQTNSLRGLLYEFGIVLPEGHRVLLKRIQNELAKAQEQAQLPDVVVVSVQDQLRRIDSLQDDIDQLDKRLAAMVKQNQHMQALQAIPGIGPLTATALVSTATDLSSFESGRQFAAWLGLTPRQTGTGGKTRQLGISKRGDPYVRTMLMHGARAVIARSQRTGWIERLLLRRPYSVVVAALANKLARTAWAVLVKGKAFDQLRWNPVDLAAA

SEQ ID NO: 74273 - protein, 351 aa, unidentified
MIIVGVDYHPSVQQVAFLDTETGETGERRLNHSDGEAERFYRDLQRRQVKVRVGIEATGHARWFERFLAELKFELWIGDPAKIKAALVLKQKTDRQDAQLLLRLLVESRFPQIWVPNPENRDLRQLIWHRHRLVQMRTRAMNQIQAAAMNEGVRRKKTLWSKTGRRQLEALPLARWATRRRQDLLELVDRLNTAIDELTAAAEQEARKRSEVLRLMTHPGVGPITALAFVLVLGSPDRFGCGHQIGSYLGLIPCEDSSADGQRLGHITKQGSSLLRFLLVEAAQAAVRWDPDWRRRFVHLAMRRDRRIAKVAMARKLAVSLYWMWRKECDYQQTLQFGSHAGEPGFVHGVK

SEQ ID NO: 74274 - protein, 322 aa, unidentified
MRDMNQSAYVGIDVSKRQLDVAIRPTGKVFGVTNDRRGISQLVKRLTKLQPVCIAIEATGGLERELAYALAAKNLPIAVVNPRQVSNFAKSLGRRAKTDAIDAAVLAHFGEVMKPEIRSLPDAAAQELTAFVTRHRQLVEMMTAESNRSEMASNPVRKLINSLLRSLKDQLLLVDREIRKAISASDLWRHKAELLRSVPGVGEVTTATLLAGLPELGELDRRQIAALVGVAPFNRESGIWKGKRMIAGGRALIRSALYMSTVVAVRRNPMLKNFYERLRAKGKPAKQALTACMRKLLVVLNAMLRHQTPWSGPSHLLSSPAS

SEQ ID NO: 74275 - protein, 436 aa, unidentified
MTPHNDYCLAPPPPVPTPMLPESSVLSDTLQVCHPHAAGIDIGEAEPWVAVPPGCDPQPVRRFGTFTVDLDAVADWLIDCGVTTVAMESTGVYWIPLFELLEARGVQVLLIDPRQAKRVPGRPKTDRLDCKWLQRLHTYGLLAGAFRPEAHVCVLRSYLRHRQMLLTYAAHHIQHMHKALEQMHLKLTQVVSEITGVTGMAILKAIIAGERDPQHLAKLRNPHCHHDEDDIAKALQGTWRAEHLFALRQAIALYDFYHQQITQCDQQIKAHLATFDDKSAGRPLPPKARRHKKTNEPRFDARTPLYRLAGVDLTTIEGIEEGTALVILSEIGTDMHRWPSVKHFCSWLGLCPQHKISGGKVLSRRVRPGAHRVTVALRLAARTLHHSQSALGAFFRRMKARLGTPKAITATAHKLARLVYSLLQHGSAYVQQGLDA

SEQ ID NO: 74276 - protein, 348 aa, unidentified
MALTIVEDTRAITGGVDTHAGTHVAAALDPVGGLLGVREFPVTPAGYTRLLGWLGGFGTVALVGVEGTGSYGAGLARYLIAAGVRVVEVDRSDRQDRRRAGKSDPLDAVSAARAAQSGRARGAPKGRDGAVEAIRALTVAKRSARSERVQTINQARSLIVTGPDDLRARFAGHTAAALVSELAALRPRPGDAVGYATRIALRELGRRAEFLDGQLGRLDELIVPLVTARAPGLLALHGVGPDTAALLLVAAGDHPGRLRSEAAWAHLCAAAPIQASSGKVTRHRLNPGGDRQANHALWRIVLTRMSTHPPTLLYVERRTQEGLSKKEIIRCLKRYVAREVYHHLRAAG

SEQ ID NO: 74277 - protein, 414 aa, unidentified
MEVLYPFCAGLDVHKRIVVACRIMRDAAGKKVLQKRTFSTTTRDLLALLDWLQAGQVTHVAMESTGEYWKPVYNILEGSFELWVVNARHYKNVPGHKTDVKDATWIAELMEHGLLRPSFVPPQPQRDLRDLTRHRSNFVRERATVVNRVQKLLEGANIKLASVATDVLGVSGRAMLDALVAGTTDPTLLAALSRGRLNRKRDELEEALLGRVRPHHRLILRELLQQIDSLDASIARLDTAIEEATAPFAEAVAALDTLPGVARRAAEGIVAEIGTDMTRFPTAAHLCAWAGVCPGNNESAGKRLSGRIRHGNLHLRGLLIQAAHAAAHTKGTYLSAQYHRLAARRGNKRAIMAVAHSILVIAYHLIQRKETYQDLGADYFDKQQPEATARRLVSRLQRLGYEVTLAQQQAPTAA

SEQ ID NO: 74278 - protein, 346 aa, unidentified
MMIIGCDFHPSWQQIAWLDTETGETGEHKLVHAAGEAQKFYRQFSVPVLIGMEATGNSQWFIELIEELGHEIWIGDAAQIRASYVRKQKTDKRDAAHILKLLMEGRFPRLWAPDGEQRDLRQLVLHRHKLVLIRARVKNELQHLSLNKGVQRKRRLWSEAGMQLLRELPLKPWASCRREDLLGLLAMLEEQVGKLDRAVKAAAENHPAAKLLLTQPGVGPNTALAFVLTIGDVGRFRRSKQVASYLGLIPREQSSGGRQKLGAITKQGNRMLRSLLVEAAGIAVRYDPQFRKQYLHRCHSKPKAVARVAAARKLAVRLYWMLRTQTAYPEIVRIESSSGLALVGAS

SEQ ID NO: 74279 - protein, 406 aa, unidentified
MFIGWDWATETHDVTVMDDAGKRIDRWELTHTEQGFTKTLARLRKHGDPADLPVAIETTRGLAVDRLLAAGHPIVPVHPNAFHAMRARWGASKAKTDAGDSMKLADYLRTDGHLLPRLEPTEQATLDLQALTRTRSDHVEARIAAVNQLAALLDEHWPGGRTVFHGLDSDIAIAFLERHPTPASAAKLTVGRLEAWCKRHGYSGKKPGSVLIERLRAAPKAASRLGEAVVGQLVRVQVQLVQAIRTTIQALDKAIADATEAHPYTPLFATMPRIGKVSLGQVIGEIGPLLERARTCEQLIAEAGVVPVTRASGKSRTVAFRFATHRRARVALTTFADNSRHGSDWAAKIYNDARARKKRHPHAIRILARAWLRVMWACWRDGTCYDPATHQADNKVSAAAEEPFTT

SEQ ID NO: 74280 - protein, 349 aa, unidentified
MLHVGLDLSRKRVDVCLISSEGELVEHFRAPADRDGLYGLTRRVAVYDDSVRGVVESMNGARFVHDELVRYGWEVLVADAQRVKGLAPLACKTDKVDARVLAELSFRDLVPAIWLPTPELRAERERARWRLHLVKHRAILKNRVHASLIAFGHQVPMADLFGVAGRRLLAELDFPEPWLGHVRASLELIDDLDRRIGEIERWLRRSGADHRYIPLLMTAPGIGWITGFTIAAEIGDIARFSSPVKLAGYTGLCPRVSQSGEVDRRGPLAKHGPRYLRWGLMEAAIAASSHPLFTERYQRTKRRLGRQRGAKVAQIELARKLTEAIWYMLTRNQPFKPFAPAGAIFRLTA

SEQ ID NO: 74281 - protein, 399 aa, unidentified
MRDVGWLVLGLRPAGARGGRSGSKEVCAHHEVGMPFARADGGGDPTETEVRALMKVLIGVDPHKGSVAVAAIDEATGELLERTAFPQDRSGLRRLEHWARRFPESRWAVENAGGLGRHLAVRLAGSGESVVDVPPKLSARVRVLSSGNARKNDGLDALATALAASRNERLAPVDPEAASEALRLLSERREDLVAERTRSLKRLHALLRDLLPGGVTGKLSADRATRILRGIRPKGTSARLRRGLASEVLRDLRTLERKIAELNGRIEAEVEASGTTLTEIYGIGPILAARILGTVGDVRRFPSKGHFASYSGTAPVEASSGEVMRHRLSLAGNRKLNYALHMVATSQARSDAPGGTYYRKKLAEGKSSKEALRCLKRRVCDAVYKSLVADSQAPSHRAA

SEQ ID NO: 74282 - protein, 474 aa, unidentified
MNINSTQTSNSIFSEKYFCGIDLASKVIQVSVTKPGEGSFDKALSKDEFTKFIKANNPEDYIYGMEACGDSNYWAELINTLCNDKAFIFPAKKCRSYNHGCKDDRGDARGVRDLLLTYFLSPDASTIHPCVIRDRQNRADMALLKSYGDNQSDITRNVRRLIAFLKEQDATLCYSYSMSPESTIKAATEYIKKPNKEEAQNNSFLISDIQTQSAIIAMLLKRRSNILMGFLKYFESHSECQYFMAIPGVGLLLAVGTHIITQGDFTRFKNARSFAAYTGFTPAHSGTGGKNKIAHMSDNGNPVLKTLIYEGANACTILQKHKNKKDKRVKISYGRHIAIDLWKIGINLKNPDIKEIVSHYDAELAFKITEKNTSTKLCKFKSKCNKANKTFERLSSTPAVTSWCQNNLLEQHKQDSTLSPYLAEFKNKNQLIDLSDPEGPFRRQSATLVAYLVEHNEVRELEINDLERLDLAEW

SEQ ID NO: 74283 - protein, 469 aa, unidentified
MAKRANNHQKRKSRAQERGEKVRAMPVLQPDTAGIDIHAMAMFVAVPVDRDEEPVRRFGTNTGDLLEIAAWLKRCRVKRVAMESTGVYWIPLFQILASQEFEVCVVNARHFKNVPGKKTDVADCQWLQFLHSVGLLRGSHRPTQVICAVRTLVRYRSELIGMASQHLLHMQKSLEQMNVKLHHVISDLSGVTGLAIVEAIVKGERDPQKLAKLRDKRVQASEETIIASLVGDYRREHLVTLESALKFYRSYKGNIEELDRKIEQALLELPNKNNEKQELAPRKPGRKASRNAPAFDLRQHCYRLLGVDLTEIPSMDAITAHLVVTEVGTDMGAFPSSGAFACWLGLCPMNRGSAGKILSRRTRLGKHRLGIALRVAAQTLHGSKSAMGDYFRRMKAKFGPGKAITAAAHKLARIIYHLITTQQPYDETILAKQDENLKAKQYSRLRRLARELGCDLIPRQDLPAQNFTV

SEQ ID NO: 74284 - protein, 344 aa, unidentified
MDTHRDAHVAALLSLVGEVIGTDEFPATAAGYRDLLGWARASGTVRRAGVEGTGSFGAALSRYLLAQGVDVFDVNRFDRADRRRRGKSDPLDAENAARAVLSGRARAQAKTGDGPVEIARMYKLAKDSAVKARTQAINQLKVVLIRADPQLREELAGLGNAELFRTCARLVDDSLNHEADEGAVLHATHITLCLLARRISQLSEEIQDLEGRLTRLVERHAPQLLAVVGIGPDTAVTLLITIGDNPERLGSEASFAARCEVSPVERSSGSRQYRRLNRGGDRQANAALHRIVQTRLRVDPRTQEYYERRSKEGKTRREIVRSLKRYAAREVFHLVRPVQSSPPL

SEQ ID NO: 74285 - protein, 346 aa, unidentified
MLYAGLDLSRKRLDFHLLDAEGATLEVGASAPDADGLRGLSERLDRHGGPIRAAIESMNGARFVHDRLELAGWEVEIADAQKVKGLAPLACKTDRIDAWVLAELARRDLVPAIWLPDPLVRAERERARWRLHLVRHRSSLKQRVHAVLLAHGKPCPVSDLFGVRGRKLLAGLGLPEPWQGTITASLRLIDELDREISECERELRRLGADHRYVPLLMTVPGIGWVLAYTIAAELGDISRFASPGKLAGYSGLCPRVYQSGERDLRGPLSKQGPRYLRWALVEAATHACTSPAYRERYQQTKARIGKQRGAKVAQIDLARRLAEAIWHMLSRGEPFAPRGATDPLAA

SEQ ID NO: 74286 - protein, 412 aa, unidentified
MKDLLEISCGLDVHKEKIVACILTGPLGKPTRSEIREFTTLIPDMIALRDWIVSQNCHHVAMESTGIYWMPIYEILEDAFSGDITLLVVNARHMKNVPGKKTDMRDSEWISTLLRAGLLNGSFIPEKRIREFRDLNRYRKSVIRDITSQKNRIEKFLQSSGFRLSSFISDIFGASGRNIILHLIEHGQIDKTALDSCLKTKTRNRIDEILMSVNGTLSEHQKAFLRILMTHYDSLKKHLAEIETSLEEDMAPFALQVEQLNSIYGISTTASCAIIAEIGIDMKPFKTAEHICSWAGLCPGNNESAGKRKSTSVTKGNPYIKSMLCEIAWVIAGKRNTYLSAWYWRIKQKKGAKKAIVALARKLLVIIYTMLKQGTLFDESCFETRRKHCEQKQLSRYIRELEKHGYHVEAQS

SEQ ID NO: 74287 - protein, 343 aa, unidentified
MYYIGLDVHKRTISYCVKDAAGHVRGEGKIGSTRRELDAWVKTLPQPRMIALEATIFTGWIYDYLLPHADKVKVAHPRMLRAIALAKKKNDRIDASKIADCLRCDFLPECHMATTAIRDRRRVMRYRNLVIKQSVQMKNRVSGLLMETGVSYNKQRLHKVGYFSDLLSHNEEISDSIRPLLKICREQIERSQKLDYALVSRLERDPLLQERLERLRTVPGVGSITALTWALEIGDFTRFASIKEAISYCGLCGEEKSSAGKVMRTPISKQRNKHIQSVLIESAKLATRYSHELAMVYDKERLRGNPNRATLAVARKLVAYMLAVERRKQNFVPAEEFRPTSAA

SEQ ID NO: 74288 - protein, 332 aa, unidentified
MGWTVAIGVDTHKHVHVAVACDRLGGQLDAFQFEASARGYARLWEWSQELGEPAFAIEGCGSYGAGLARFLQASGASVFECERPRRRERRRGKSDLIDAALAARRLLAGEGLGRPRGGGRREELRLLLLERRGLVQARTAALNQLQAVLLSAPERLRQRLGSLRGSRLARAARALRRGRADERILVGVLRRLGRRVHQLEAELEAIVNELVPELLEECGVGPVCAAQLVASSGDPARMQSEAAFAALAGTSPVDASSGRQRRHRLNRGGDRQLNRTLHVIALARIRHHRETAAYHERLLASGKTTREARRCVKRTLARHFYHRLCANPALTT

SEQ ID NO: 74289 - protein, 376 aa, unidentified
MTRVIYTGMDVHKDTYSLCSYDAQDNVMFSETTVKAETTSVLSYIKSIEKRYSNDDVMIVCGYEAGPTGFSLCRQLQKKNISCVVMAPTSLPKAPDEKKRKTDKGDARSLALHLAHKTYKAVHVLSPEIETIKELTRTRATALKAQKRAKQNLLSFLLRKGMVYPHGGRAKYWTQKFYAWLKTLEFANDIERYSFEEYLSEVNHQMSRVSRLDEKIGEIAEDPLIRDDVKKLCCFSGISTLTAVSLVSEIGDFNRFEKARYFASYLGLCPGIHSSGLSSQTLGITKAGNKHLRCLLIEAAQAMSRSQICGKKSLRLLARQKDMNPLVVAYADRATERIKRRRSSMIFRGVNCNKATTAAAREMACFIWGLMTNNIA

SEQ ID NO: 74290 - protein, 364 aa, unidentified
MKAENPRFIGIDLGKRSMAVHFIDHREKHESWNCQTDVEGRIRLIKRLLPSDTIAMEACPLAFILESLIRKQVGAKVLVLNPHGLAMIYQSTKKTDREDAAKLAWVIQRLPEDELPTVTVPSETEQELRLLVAEQVALVQSRTSEINRLHALFAQDGITTVTKKDLKSKENRQHRFTDLSEKAKDRANRLEKIITAYEENLEEVENRIGLLVAQHELTPYLISIPGVGPSVVAAFLGYLGDGKRFSLNTIAAYAGLVPKVDCSGDRNKYGSITKRGCTVLRRALVQSAWGLARTTNGGVLGKKYQYWLQQKGKSKAIVAVARKLIETMWVLATQKTMYRGYDQIRYKQKLVRYKINYGGEVGVA

SEQ ID NO: 74291 - protein, 354 aa, unidentified
MKYFAGMDVSLEETAICVVDETGQMIKEARATSEPDALHALLASFNLPFERVGLEACSLTAWLHGELTSAGWPAICIESRHAKAAMGAMPNKTDRNDARAIAQIMRTGWFKAVHVKTPTCRSWRSLLVARRAVLNEMRTIENVVRAIFRETGLKLGTPARKDFIVRAREFVAGEKGLAMMIDPLLEILATMLREFTRLTKQVLVIVRDEPVCRRLMSTPGVGPLTALAFRATIDRPERFKKSRDVGAHLGLTPRRYQSGETDIQGRISRCGDELARTALYEAAHSLLIRSKKWSALRAWGIKIAKHRGMARARVAVAQKLATILHRMWVDNTEFRFGREQAAYPTIKAITVVAA

SEQ ID NO: 74292 - protein, 314 aa, unidentified
MKKTTESFIGIDISKAWLDLAVHEQTEVFRFSNDDPGILSLVQRLKKLKPVLIVLEPTGGFEMLVVAELTHAGLPAVVVNAKRVRDFARATGRLAKTDKLDAKVLAHFAAAVRPAWRNLKTAEEEQLTALLTRRKQVLDMLTVEKNRLVTVHAKMCSEIEAHIHWLINSLKALDKEITEFVKGTPVWKAKDALLQSVPGVGPVTSATLLGRLPELGLLNRQEIAALVGVAPVNKDSGKKQGKRRVYGGRADVRSVLYMAALAAKKFNPVIKKFYERLIKQGKEKKVALTACMRKLLVILNAMMHTDQPWRIQAT

SEQ ID NO: 74293 - protein, 315 aa, unidentified
MERSPVAPTFVGIDVAKNRLDVHLRPAGETFALGRDGFGLAALVERLVALTPALVVLEATGGFEVTVAGTLAAAGLPLVVVNPRQIRDFARATGRLAKTDRLDAEAIARFAEAVQPAPRPVPSAAAQALGELVARRRQLVEMITSEGQRRRQTRDPRLGRRLEAHVSWLQRELATLETDLDDAVRGTPAWRATEDLLASVPGIGKTSARTLIAELPELGSLDRRKIAALVGVAPINRDSGCFRGRRMVMGGRASVRTALYMPTLTAIRHNPALQAFYQRLIGRGRPAKVAITACMRKLLVVLNAILRDQTPWQSA

SEQ ID NO: 74294 - protein, 425 aa, unidentified
MNPQEHQLAAYVGIDWADQQHQVCLQVDRHSPRSAQALDQTPEAITEWALKLKGQFPDGLIGVCLEQSRGPLIYALSQFPWLVLYPINPKSLARYREALYPSLSKDDPTDAELLCQFLQFHESQLRAWHADDSTTRRLRLLQENRRTLVDDRSRLSNRLTDCLKRYYPQALRWAGPLTQPMAWDYLLKWPTLAQVQRAQKRTVLAFYYAHHVRRGDELTQRHQEMHQAIPLLQDAAIVETTVSMVQAICRQLHAIERAIRQHDREIAAVFAVHEDHDLFATLPGAGPVLAPRLVVAFGTNRDRWQEAGDLQRLCGAAPVVERSGKTCWVHWRWAAPAFLRQTFHEYALHSMHKSQWAAAYYRLSRERGKSHHAAVRALAFKWIRVLYRCWKERTPYDETRYINELRRRGAPLLRHLKPETQDQAA

SEQ ID NO: 74295 - protein, 400 aa, unidentified
MSVLKGSFDGFVGIDVSKDKFDACGITGDETKRFQFSTTMDRKGFEKLNGHLAAVSISSVLIGMESTASYHVNLFSYLVSEGYKVILINPLLISNYVKMQLRKTKTDKKDAVVIAQFLLANGEALVERATPSLISDLRDLSRQRESLVDEMTSLKIEIKQLLNITFPELEHMAGIFTKSILKLLQQYPSAFALKNADLGQLSQTLIADSYGHKRGAFAAELIKAAHSSIGSKSSAKDMILKQKIALLLHFEDALQEVTGMLIEMSRKLMNEDINLMTSLKGIGEKAAANFLIEMGGDINQFERSGKVIAMAGLDPAVYQSGKHDGKGRITKRGNRHLRKIIWLMTTKVIQYTDVFSIYYLKRRKEGLPYKMAVLATAHKLIRVIYAMLTQRTTFCPQVNS

SEQ ID NO: 74296 - protein, 401 aa, unidentified
MSKKNTRNALDTSLSYAVIGLDLAKADCAVAAVPCADDELGLIDRMDYESLFEQAEKLGPTLFAMEPCCGYSQISLRLQNMGHEVKVISGHAVKNWIATHKSNQKTDLNDATALAKLALYDHDLQPIRVKNVEECRIASVQAIRIQLRTQATKSLVCFKSLCQCWGIVIRRGSLNTKKMAEAVAAVKKLLGVEVASSLMILRDAYKFTMKQINALDKLLDALVEANEQARTMKTVLGIGTQTAARLAVTTGDIKRFPMPRSYVAYFGLAPRNIITGHSGTPSPSKRGALKPVSSRGQGKVSRRGDRVARSFIIQGAATIYMLYCKDMLPECQLRRWLHEQIKRGKPYGKIIVSLAAKLLRIVWALLTYGEKFDSHKAGVPRSVLAAMEKPLKHDAAAESAA

SEQ ID NO: 74297 - protein, 318 aa, unidentified
MTSAPFVGVDVAKERLDVAVRPSGEHWSVANDDAGVAALVARLSPLGPALIICEATGGFERAAIAALAARRLPVVVANPRQVRDFARASGQLAKTDQLDAGILALFAERVRPTPRPLPDAAVQLLDAVLTRRRQLLEMLTAEKNRLGFAPKPVHRGIQAHIRWLERQLDDVTKELAALIEASPVWRAKDDLLQSVPGVGPILSCTLLGELPELGTVSDKQIAALAGVAPLARDSGTLRGKRMVWGGRASVRTALFMAAMCARRWNPVIKVFYERLLAAGKPKKVALIACARKLLTILNTMVRNNTRWMTGEARIQYSC

SEQ ID NO: 74298 - protein, 379 aa, unidentified
MDHAITGTPVETVLYGALELSKNSWLLALQFPDRAQPSLYPIRGGDTEGLMARLMAARDRWAKVSGKSPSIVLCYEAGYDAFWLARFLKARGIECLVVDAASMQVNRRARRAKTDRIDVGMLLRALIAWGQGDRHVWSVVRVPSVDDEDLRRSHRERDRLVRERTAHINRIKGLLFGQGIRGINVKSKYKTLQIDKLVTGDGRPLPLRLASEITREIARLALIQEQIATLERERDQAPTPCKATEKKRVQLMSLTGIGPAIAAVMTREVYYRQFDNRRQVAGFLGLATSPHDSGDVERSQGISRAGRGQVRGTIIQAAWLWLKHQPKSAITRWFVQRTAGQSGRIRRIMIVAVARKLAIALWRFLEQGLVPQGAMLANR

SEQ ID NO: 74299 - protein, 383 aa, unidentified
MKSVCGLDVHKDSVYLCILSEFGELIEKVFGVLTYQLEEMRDLMLHHHVIEVSMESTSVYWIPIWRVLSPHFKLNLANPYFIKQLPGRKSDVKDAQWIAECTMKELIRGSFVPPEIIQQLRQYDRRIFDLNEEIVRKLSKLDAVLQRCNIRLSNYVSNVDSKSYKAVVRAISQGITDPEELVKLIHGRIINHHGIDVITASLKGVVSLAEIDMISQLRDELDMAEAHKEKCQARMLEICEREFPEELRRLQTIPGIKERTATSLIAEIGTDMNKFETANHLASWSGLKPRNDESNKKIKSRSITHGNVYLRKTIIECAWAASRTKDCFFSRFSFHQTQVRKKNKMKVLVAVARKMLIAVWHVLHDNTNYIDFTTDCKTSQTRG

SEQ ID NO: 74300 - protein, 347 aa, unidentified
MVSWEQNPQARLGELHCQTGLVFYTAMPKTYIGIDIAKNTFDACFIVDDIWQHHTFTNTHKGFIELMRWVQSCYYNTSLHLIIEATGIYWEKLAHWAVSHQHKVSVVNPLYIHAYAKSLGIRTKTDKQDAILLARYGTKENPPSWQPKSNNEIKLTALLKQRDHHKRQLIKERTRQESQSIYVKSYTDDNIRHWRESMIQIDDQIWLLIDKTPELKHRASLLATIPGIGKKTLPYLLATIGDGSSFQSAKHLASYAGLSPRHHQSGISIHKQSAIGFSGQKELRSALFMPAVVVSFGRYPTFEKFVKRMEKKGKTKKQIIIAIMRKLLTISHAVIRQNRPFDKHIHE

SEQ ID NO: 74301 - protein, 389 aa, unidentified
MNKIHVGIDIAKKIHYASFIDSSGEILIKPFKFTNDQAGFDILEDKLKSYSKDDIVIGFESTAHYANNLMIYFFNKGYNLTIINPLKTHALRNINIRGAKTDRIDATLIATFLRSNDYKLITKNFIDLITLKTLTRSRQNIVTSRTKAKIQLVTVLDQIFPEYVTLFKDARHGEASYALLKEFSSPKDISSLNLTKLTNILLNNSHKRFGKDFAQKLKEVASSSVGIDNPAQELNVKHYIEQIELFTKQKTELEKEISILLSSLECKLTNIKGIGIVTAATIIAEIGDINRFKNSSKLVAFAGLDPKVKQSGNFNASSVKMSKRGSRQLRYSLIFACENLVRNTKTFAEYYNKKCDEGKSHYQALGHCAGKFVRILFRMLKDNTEFNLI

SEQ ID NO: 74302 - protein, 418 aa, unidentified
MADEIMAEETIRWFAGLDWGSATHQACLLDEAGTVVGERAFAHGGAGLAALCDWLVSLAGDPGSVAVAIEVPHGPVVDALLDRGFAVYAINPKQLDRLRDRISVAGAKDDRRDARVAAAGLRTDPHLFRRVLAGDPSVIELREWSRLAEELQHERVRLGHRVRQQLWRYDPQLLALSDDVTAEWVLALWNMAPTPAQAARLREATLARLLRQHRIRKLDAPAVLAILRQPAIPVAPGVTEAAVLHLRSLVARLRLANQEFRQAERKLEELCTALSETQPTAQDSGPGDATILRSLPGVGPVTLATLLTEATGPLARRDYPALRTLSGVAPVTKRSGKSCIVVMRYAAQVRLRNAVFHWARVAVLNDRRCRGRYEALRARGHSYGRALRGVGDRLLGVACVLLRRGTLFDPDYGSSASA

SEQ ID NO: 74303 - protein, 411 aa, unidentified
MIKENYIYVGIDLHKETHTAVMIDCYNQKLGEITFPNRPADFPKLVAKVKKCNTDGKTIVFGLENAYGYGRALAVWLIDKGYLVKDVNTAISHRQAKHRGAMYRKSDSDDAEAIALATLNMLDKLPDACPNDAYWSLGQLVHRRDNIMKQRTRLVNQLHEQLCIAYPSYKQFFNDISRPTALYFWEHYPSRKYLKGKSVEDLRAELVPVSHNKCSTRTCEKILDAIAGDKVKNNAYQDARDMVTLSIVSDLQHYDKQLAEVDKMLEQMYKMLGCTLTTIPGVNVITAVKILAEIGDIKRFSNANKLAQFAGIAPLHLSSSGKGKDLATKQGNRRLQATIYFLAIQMVQISSKGTPRNPVVRAYYEKRKAEGKTSQQALICISRRLISIIYGMLKSGTEYRMPVMENTGETV

SEQ ID NO: 74304 - protein, 355 aa, unidentified
MTETVYCGVDFHARMQTVAYCDTANGEIQLAQLDHRKDDIRGFYAQFTGQVIVGLEAGGYSCWFEAMLEELGHTVWTGHATEIRRRANWRQKNDRRDAELILEIMLKGDFPEVHRHSRESVEVLRMLRYRARLIKMRTTISNSLQAIAISCGVLERSRMLSQSGQQRLKSAQMTPAFRHQTEDLVTLLVPINERIGRVDKWLKQQVSTDERVKLLMTHPGVGVLTALGVVHTLEPFSRFRNQRSVVAYVGLEPMERSSAERKRYIGISKAGSRMLRFLLGEAAQMAVRFDPELKQFYERVGKRRGKQKATVAVARKLLIRCWIMLRNNVDYAEFRSRGVEARLAPKHPRPGVSVG

SEQ ID NO: 74305 - protein, 326 aa, unidentified
MTYALGIDVSKAKLDAALLKADGKYRSKVFSNDRADFKGLLQWIAANVPTGKADVHVCMEATGSYHEALALFLSDQGIAVSVVNPLLVKRFIEVDRVRNKTDEGDAKSLARFCQMTRPELWEAPSVGVRTLQALVLRLDTLQEMRQGELNRLDVAHASVQQSMRDVIAGLERSIRDVQAQIRQTIDDDPDLRQRSTLLESIPGLGNRTIPQLLAYIGRPERFKTVKALIAYAALAPLIRQSGTSLNKHKGTHPQGHRDLRSALYFPAMVAGKHNPLVAAFWQRLKTQGKPGKVIVVACMHKLLAIAYGVLKSGKPFNPDHLKAQMA

SEQ ID NO: 74306 - protein, 467 aa, unidentified
MKTLHKRCAGLDVHKAEVVACLRLISERKVEREVRRFPTTTQGLLALAEWLESARCTHVAMEATGVYWKPVWHILEGHFVLILANAAHVKNVPGRKSDVNDATWLADLLAHGLIRSSFVPPPAIQELRDLTRTRRQLTREIVQHVQRIQAVLEEANIKLCSVITDIMGASGRRMLKAMIAGETDAEKLAALGHERLGCTRAELVEVLTGCVREHHRFLLGQHLRTIEQLEDSVAAFDARIEAALSPFHDIVERLKEVPGLGATATETVIAEIGTDMSPFPTVGHLLSWAGFVPRLDESAGKRRSTRIRKGAPWLKPVLVQAAWGAARKKNSYFQAQFLRLKARHGAKKAAIAVAASILTTVYHMLRDGTCYQDLGPEYFTRRNPAQAAARLANRIRNLGYHVKSELPHEASNPVSKKTARFHIAARRCGGVAGGDARAAAANAGDRVSAQRLACGLLASGGCVSPGP

SEQ ID NO: 74307 - protein, 322 aa, unidentified
MLYVGIDVVKHKHDLAVIDTKGAIFIRHLQIKNNREGFTKLQMTLANLQKSTGEDIQIALEDNDHYCFNILRFLRTQGYPTYSYNPYLIKEYAKNQSLQKTKTDKKDTMTIARKIRTDLDKQSFSANPSIIELKYLTRHTARLKEDCTRKKVSYTRILDILSPELTPSLGSSSAKHQSYVYAILKEYPSAKKLGNAHLTKLTNLISAHSKGRFGKEQAVKLKALAQASIDQESAVLEFELLQTIDAIQYLTTMRDKAKKEVARLMSEIDSPILMIPGIGYKLGSVILAEIRDIKNFRSPNQLLAYAGVEPSVSTFGMNQTET

SEQ ID NO: 74308 - protein, 407 aa, unidentified
MFCGYSIKNLTAGGFVMVSVGIDVAKDKHDCFILSSEGEVLAGVFTIPNTMDGFNHLLQKIQDCTTSQDKIKVGLEATGHYCYNLLGFLLDNGLTTYVLNPLHTSLYRKSLSLRKTKTDRVDAQTIAAMLLSDVSLKPYTDTAYYNEELKSLTRYRFDKVKERAKLKSSISRLVCILFPELETLVPSLHIVSVYALLKEFPGAKQLANAHLTRLKSLLADASKGRYKRDMALKVRNAAMNSVACQMPAKSLELQHTIRLIHELDTEISEIETAIQSLMEELHSPITTIPGISYRMGAMIIAEIGDFSRFDSPDKLLAFAGMSPSTYQSGQLKNCYPHMEKRGSRYLRYALYNAAKYVSYWDPTFAAYLAKKRAEGKHYNVALSHVAKKLVRLIFALEKTKEPYRLAA

SEQ ID NO: 74309 - protein, 372 aa, unidentified
MDQHSRLFVGLDVSKLKISVAVADGERGGEVRFFGDIPSDPASVSSIAQKLAKRGAKLHFCYEAGPTGYELYRQLTEMGHDCVVVAPALIPKRPGDRVKTNRRDAVSLARLHRAGELTAVWVPDRGHEAMRDLVRAREAAQEAQKRARQQLQSFLLRHGRIYSGRSSWSLAHMRWISTLKFEHPAHFIVLKEYCQAIEDAEVRLKRLTDLISETVKSWTMAPVVEAYQALRGVSLIAAVVFVAEIGDIRRFENARQLMAFLGLVPSESSTGEHVKRGGITKAGNCRARRMLVEGAWAYRFPARVSRTKQAQLEGLPRTVREIAWKGQLRLCSRYRKMILAGKHKAIAITAIAREMGAFLWAIGQEVQPAHQA

SEQ ID NO: 74310 - protein, 343 aa, unidentified
MNTYVGLDVAQKKTAVCIVDDEGRTVCHGAIETRPEEIKNFLEAKGCGHAKIGMETGPLSVWLYHSLRQFNLDIDCIHARHVHAALTVQLNKTDQNDARGIANLVRSGWYQPTYVKSLECHNERLMISARERLVRVRVSINNQIRGLLKTFGVVLSPGRNEVFRREVLAADPSVEAVKSVILMLLETWRHVSRQIKECSKMLERRAVQDPVCKVLMSIPGVGVLTALSFKTAIGDPSRFRRISDVGAYLGLTPRKYQSGDVDRNGAISKQGNRHTRSLLYEAASCLLSRYGTETGLARWASMLRQKKGYKKAVVALARKLSTIMLSMWKSGALYKDADLQVSR

SEQ ID NO: 74311 - protein, 351 aa, unidentified
MDLAPLHKRVIGLDVHQAQITACAIIEEADGTTRLEQRQFGAFKRDRRALAEWAQALRPDQVVMESTGIYWKSPYAALEMAGIRAWVVNARHVKNVPGRKTDIGDAHWLATLARAGLLRASFVPPAAMRELRLIARQRQKLVGQLASEKNRLHKVLTDGGIRLGVVVSDLNGQSARAMVKAIIECRPAHEVLDCASRRLKASREELFDALQGELTASHRFALHELMLHIEEIEARIARFDARLLAGLSDEHNTLALLQTLPGVDLIGAAMLLVEIGADMSAFGSADRPAAWVGICPGNNESAGKHKSGRVRKGNPYVRRLLCKFAHAASRMTSVFKLKFQALAVAVKLVVA

SEQ ID NO: 74312 - protein, 366 aa, unidentified
MKKTSTVRVNKNTIFKGHKLTIGLDLGDRWSCYCVLDEAGEIILEQKVAMTPEAMKQTFSKIPQGLIALETGTHSPWVSQLLTELGYKVIVAHAQKVQLITKSNRKDARHDARTLARLARIDPELLGPVRHRSAQAQIHLTVIRARAELVRARTALVNAARGLVKSYGQRLPKCGTRQVSRELGAGLHAELREVLEPLLKEIESLNERIQEYEVRMEEIAKDSYPQVELRKQVKGVGTQMALTYVLTLEDPHRFPKSREVGCFLGLRPGRRDSGESQPQMRISKEGDRYLRTMLVQGAHYILGPFGEDSDLRRWGLKLAARGGKNAKKRAVVAVGRKLAVLLHRLWVSAEVYEPLRNSQKAMRAAA

SEQ ID NO: 74313 - protein, 369 aa, unidentified
MEQHREVFVGLDVAKLRHAVAVAEGGRDGEVRFFGEIDSDSEAVRRLVDKLEKRHTEIHFCYEAGPTGYGLHRQITKLGHQCTVVAPSLIPRRPGDRVKTNRRDAIQLARLLRAGELTAVWVPDEAHEAMRDLVRARETAVDDLRRKRQMISSMMLRQGRLYPGKTTWGPRHIQWLQAQRFEHPAHHLILQDLLLAMKHARERQQRAEASIVEFLPKWSLAPVVEALQALRGVNLVAAVIVMVEVGDLRRFENPRQLMAYLGLVPGERSTGESIRRLGITKAGNGRVRRTLIESAWSYRHLPRTGKMKHYLVERVPPAVRDIAETAQKRLCGRYRALSTRGKKANVAITAIARELAGFIWAIGKEVQST

SEQ ID NO: 74314 - protein, 349 aa, unidentified
MKILALDLGQSQSVACVYESTTANAEFRRVATSPAAIHELLESLRPERVVVEIGSITGWVSDLVQATGIPLEVANTAAPAWRWSNTKRKTDRDDALRLAQLSALNQLPQVHVPQRDVRQWRSLIRYRHHLVVRRTQIKNRIRAVLVAQGQPLTRGKSSWTVETLIQLRQMALPLEEASVQDLWRGELGLELEALAHVEQLIARAEKVLDRLVAQSQPCQLLCSIPGVGPRLAEIAVAMIDNPRRFRSAKQVASYVGLTPRQYQSGDQDRQGRISRMGNNLLRALLVEIGWVGLRYNPWMWNVYERVRRGSPVRKKLAIVAVARRLIVRCWAMLRDGRCWELRPIPVAIP

SEQ ID NO: 74315 - protein, 413 aa, unidentified
MLKIAYPICCGMDVHKAFIVACIASTNEQGVTTYKSKRFSTFTNDLRRCAVWLAENHCKDVCMESTGKYWIPVYNILESTCAIVLAHPKYVKAIRGKKTDKKDAKWIADIFKHDLVSGSFIPTADIRQLRDLMRYHWKLTDFTTEEKNRAQNCLTVSNIKLDDVFSDVFGKAASAITTRLLESSEPFDVTQYLTKNIKAPVEKIQAAVDGEMCAEQAEKLRIIRSHMDALELCKLNLQSLILTTAEKYLPQINLVTTAPGIQAFSAIGIISEIGVDMSVFPTSKHLCSWAGLTPQNNESAGKKKTTRISRAGAHIKPLLVQCALAAIKAKKKHPEIFRRYQNLKKRRGHKKAIIAIARMLLTAIYNMLKKNEPYNPELYRKADHPPAHREVSVEEAVFTLQRQGYLVTAPSTA

SEQ ID NO: 74316 - protein, 409 aa, unidentified
MFYAGIDIAKRSHEAAVIGADGQALVESLSFANSQAGCEKLCQLFERLRISQQELVIGMEATGHYWLALYAYLTEQGYTVQVINPIQSDAFRRMSIRQTKTDAIDALLIAQIMRFGQYSTTALSEENIVALRQLSRYRLALVDICGDCKRRVIALLDQVFPEYERLFSDMFGVSSRELLLRCQTPEDMLDISTEELAALLNKTSRGRFSEQKAQEIQSAAASTFGITYAREAFAFQIKQLIEQICFTEQQLEQLEAQIADILRRTNQVIATIPGVGETLGAVILSEIGDIYRFETPAKLVAFAGLDVRVNQSGEFTGTRNKLSKRGSPYLRRAIWLAATRAAFCDPTLSAYYQALRARGKHHLTAIGAVSRKMCNILFTILRENRPYEPLPPKPAPPQLSEPGPSSATQ

SEQ ID NO: 74317 - protein, 351 aa, unidentified
MSVRRILAKTIDTDLEYEAIGIDLAKNCVSAALLTTDGEVVCIDRLDYSELEKSAQALSPTTFAMEPCTEMNYLVQKLEAWGHRCLVIGGKNVQNYVENHYSGQKTDLNDAQALAFLAQDKQLRTIKAKDIEQQKYASLTTLREQYIKQYRQTIVSLKGICQAWGLNISKGISGKAQLKDLIENHAAFPEELRESLVDMVTHAQTTQKVLNKITKTLEVLAKNDKVCQLIQTIPGLGTICSCRLRATIGDIKRFKNPKDFPAYYGLVPRSIATGHNEKKGKITHRGDRTMRSLMVQGAGCVIRLATCGKLKSKQLTKWILKKQKEKMPWGKLVCAVAAKLLRIVREALQNT

SEQ ID NO: 74318 - protein, 324 aa, unidentified
MGTASQTVCFVGIDVSKAHLDGYIRPQGVEFQVDNSPSGITQLIEKLRSYTVSLVVLEATGGYEQESFVSLNAAGIATVRINPRQARDFAKATGKLAKSDRIDARTLAHYAQAIQPEVRAVPDEATRQLQALLDRRRQVVEMLVAEKNRLSICHASVRERVKEHILWLEQELDDLNRQLQQAVKDHPNWQQQSDWLRSVPGVGPVLTCTLLADLPELGQLDRKKIAALVGVAPFNRDSGFMNGKRAVWGGRGSVRHALYMATLAARRFNPVIRVFFERLTEAGKPFKVALTACMRKLLTILNALLAHHTAWNPNWVDQKVLVTT

SEQ ID NO: 74319 - protein, 318 aa, unidentified
MRKSFGIDVGKNELVYFSREGKTLGVVKNSAAGREKLINIIKKLSIDLVVFENTGIYHLDLAEDLGSQGISFLIANPKRMRDFAKGLGKLAKTDKIDAEVICWYGEKTDESPTLPPSKKMRELKDLNSRRAQLIEFRIAEKNRLSELRKSTPIAIRSSIKQSIKTTMKQVSQIENAMLAIVDADEELKNNYKYLLSVKGVGKITAIVLVATLPELGTLSKRQISSLCGVAPFNNSSGGFAGKRKIYGGRRIVRSALYMAILSATRYNPPIREMYKRLLANGKLKRVAQVACMRKLIITLNAIVRDKAMWNPKGTPWMA

SEQ ID NO: 74320 - protein, 405 aa, unidentified
MTAVGIDISKGRSTVAAVNAAKEVVLTPRDFDHTEIGLERLIYNEILALGGEVRVIMEATGRYHEPVAQALHEAGIFVCILNPLITHNYGNNIIRKVHSDKADARKIARYGIDHWVELREYTPLDSMRVQLKLISRQYNFYMKHVVQQQNNLIALSDKVFPGVNEIFTSPMRKDGHQKRVDFFATFWHADCISRVSQSSFTERYRKWCKRKGYNYSEYKAFEVYVSALGHYITLPKNAYAKLLITTACAQLTATLKNLAAIKAEMLRIATLMPEHKIVMSLYGVADVTAAQLMAEIGDVRNFDNRSSLIAYAGVDPSTSQSGKYESKSGKATKRGSAHLRKTLFQVVSTHLKRSPKDEAVYQFIDRKRAEGKHYFVYMTAGANKFLRIYYGIVKPFLVSIEKTNR

SEQ ID NO: 74321 - protein, 309 aa, unidentified
MTTNPPQIVFNHIVAFEVSKEKLVVHTLPDDEQWTIDNKPQAVRRLIKAEIKRNRKKQLGQMLVICEATGGYERHVLDGALEMGLSVHRAHGTRVRHFGHYRGLLAKTDPIDAHLIAQYGLKTENIRLYSPPPPDTAALRALHARRTEIQQMLIAETSRLDHAQHKSVLKSLKAHIASLKAALAAIEADIAQLVEGSEMLRKKVALMQTVIGIGPISAMVVLAYLPDIGQLTKGQAARLAGLAPINNDSGKKRGTRHVEAGRTAIRRALYMAASVAMRANPILKAFSDRLRSKGYPFKYVVTAVMRKLL

SEQ ID NO: 74322 - protein, 336 aa, unidentified
MNYIGMDIHKQFTVAVAKDKEGNLLAEEKFDNSRTNFGEFLRDFKQEETKIVMESTSVWEPIYDLIEDMNYSIKLANPTKTRAIAEARIKTDKVDADTLCDLLRANLVAESYIPSKDVRMLRDIIRARKSLVQGKVKIKNKIQAILIKTGLKLPYKTLCKSSMAWIIEEIETKHFNMKSITVSYINMLEHYNFELEKIDEKLSEIAMKDDRVQLLKTIPGIGNIFALTIIAEIGDINRFESSQKLSSYAGLVPGIKQSGNVLKFGRLIKQSNKDLKTCFIEASWVLIRTKEASRFKWFYGNLSKKKGKQKAICAVARKLCCVVYAMLKKNQEFMLL

SEQ ID NO: 74323 - protein, 401 aa, unidentified
MPTVRENSQRIKRFRELKATLRTDRTRLLVGIDVAQAEHVIHLRHAHTRVVVPTLTIPNTPRGFTALWTRIQQAQHSTGCREVVVGLEPTGTYHQAVATFLEAQGADVVFLSSSVAYWNRRTQDGTWDKNDRKDAANCADLLEQGKVLFYSQPTGPLAELRQLVRCLRRARTELAACKARWRTTLRPALAPAGASLPPRLRAELPAVLQAWERAAPGRPAGPKGRLSLGLATACADLGAQVTAVQARIAALEQTLTPVAERLPAYGLLRSIPGIGATVTAILLAEIGDIAWFTQFSQLRKLAGLDIVRVQSGQFAGQCRISKCGRGLLRWALYHAAVGLVRTAAGRARLAALKAKRRADRYAGFKAITELAAKQLRVVWGVWRSGMPYDPTRAGGLRRQPR

SEQ ID NO: 74324 - protein, 345 aa, unidentified
MNSTRFVGLDVHAATIAVAVAEPDGAVRGLGIIPNEPDAVRRLVKRRGPAARLRACYAAGPCGYTLYWQLTELGVDCHVVAPTLVPVKAGDRVKTDRRAAARLARSFRSGDLTPVWVPDPAHEALRDLARAREAAKKDERRARHRLQKFLLRPGHRPPAGIRAWTERHRQWVAAGPFEYPAQEATRLDYVTEVAHAADRIARLERALDEVVATAPAAVRAVISALQALRRIATLSAVTIVAEVGRLSRCARPSRRMGDSGAVASEHSSGARIRRGGITKTGNAHLRRIVVEAAGAYRHPPAIGATLRRRQAPLSEPVRRSPGRRSTGCISGTGGGWAEGRPRSRW

SEQ ID NO: 74325 - protein, 383 aa, unidentified
MNYNTQNAKIASITEKTLIVGIDVGSETHYARAFNWRNYEYSKKPFAFSNDEAGFASFKAWMNDMAEKHGMETIIPGMEPTGHYWLNLGAYLQEQGMKPVHVNPHHVKKSKELDDNNPSKNDRKDPKTIAGLVNEGRFSYPYIPTGIYAEIRNLSNLRIQTQEEITRIKNRIARWFSIYFPEIKDVYRNPDAVSGLMVIKQAPLPCDIKELGVNGVNKIWRDARLKGAGIKRATILVTAAEHSIGNTEAPRSARKEIRNLLNDYETYKNRMDELMQEIKETLSEIPYIDKLMEINGIGIKTVSCFIAEVGDIGRFDNPKQVQKLAGYAIVADSSGKHNGESRISHRGRKRLRYALYEAAISVIGKIKSLKRSIVIIGRGKKIH

SEQ ID NO: 74326 - protein, 422 aa, unidentified
MLEETPDDGVIIERVAALDVGKAEVVCCVRVPSPGGGGRRAQEVRTWTTMTRSLSAMGDWLRGLGVTRVVMEATSDYWKPPFYLLEASGFEVWLVNARDVKHLPGRPKTDKLDAVWLCKVAERQMLRPSFVPPEPIRRLRDLTRYRVDLVAERGREKNRVEKLLEDAGIKVSVVASDIFGISGRAMMAALVAGERDPLVLAGMARTAMRKKIPELRQAFEGRFSDHHAFLLSRMLARVDAIDTDIAAVDGRIEELIAPFADAAARLDDIPGVGPVAARMLIAEIGVDMTRFPTAAHLASWAKFSPGVKESAGRTLGNGSTGHGNHYLARVLGEAAVAASRTDTFLGERYRRLARRRGKKKAIVAVGRSILVIIWHLLNDPAAEFVDLGPDYYDQRRGTQRAVRSHIRQLQALGYQVTLQPAA

SEQ ID NO: 74327 - protein, 356 aa, unidentified
MSQKLDNSTAVIGIDIGKNSFHVVGQNQRGVIVLRQKWSRGQVEARLANLPPCLIGMEACVGAHHLSRKLQALGHQARLMPAKYVRPYSKGQKNDYRDAEAIAEAVQRPTMKFVATKTADQLDLQALHRVRERFVSQRTGIINQIRAFMLERGIAVRQGLRFLRAELPGILATRTDVLSPRMLRVIEDLAGDWRQLDVRIEGLSSEIEALARQDTHCERLMTVPGVGPIISSAMVAAIGAGDAFSKGRDFGAWLGLVPKQLSTGDRTILGSISKRGNRYLRSLFVQAAWVVLVKIGPKHWDRYGLKSWIEAARKRLHHNVLAMALANKLARIAWAVLHKGCAFACIKTNEAASQPA

SEQ ID NO: 74328 - protein, 356 aa, unidentified
MSEGSCVGLDVHARSVVAGVIDVGSGEVRSLRVPPGSDATVTWLKTLPAPVRVVYEAGPTGYRLARGCAEAGSSCVVAAPSRIRPAADRVKTDRRDAERLARLLRLGEITPVRVPGPEEEAARDLVRAREDARGDLMRARHRLSKLLLRHGAVYDATAWTRAHDAWLRRQRFQSGPLAIVFDECYGRMVDAKTRRDALDEAIAELAASEPYVDVVERLVCLRGVSTLTAFALTVELGDWGRFRPESLGSFLGLTPSENSSGERRRQGGITKTGNTHARRLLIEAAWHQRRPPRLSVTLERRRTGKPLAVRAQADRSARRLHGRWQALEARGKPRLIVVVAVARELAGHCWALATMD

SEQ ID NO: 74329 - protein, 370 aa, unidentified
MMEWMPLLTASRCAKVVMFSHPTNGEASMEKVSIIGLDLAKRSFQAHGALVDGGVGFRKKLSREKVLGFFAEQPRCIVAMEACGSAHHWGRAIGDLGHEVRLIPPAYVKPFVKRQKNDATDAEAIAEAASRPTMRFVAVKSEGQQARAMLFRTRDLLVRQRTQLINALRGHLSEHGVVAAQGPANVKVLEEAVEDQTTSLPLLVVELARVFLDQIEGLSKTIAKLEKVTAHEATGGETTRRLQTMPGVGPIAALAIETFAPPMDVFKRGRDFAAWLGLVPRQHSTGGKQVLGKISKMGQRDIRRLLIIGAMTVVRSALRKGAPEGSWLQRMLARKPKMLVAIALANKMARSVWAMLAKGEDFRVPRVAAI

SEQ ID NO: 74330 - protein, 369 aa, unidentified
MEKDTTYVALDDSKRKIVVGILRSGDTQPELREIANDPRQIRRLFERLKREGPVAACYEAGVSGYDLHRQLIALGVAGAVIAPALTPRRPGQRIKTDRRDAAKLVRLFRAGELTAIHVLDESEEAVRDLVRCRDDIRRDVLRWRHRVLKLLARHGRACLTGQNWSQAHWRWIREQRFDLPPLQRAFEATLFALEQALARQAELDKELEAVAATASYREPVGWLRCFRGIDTLSAIILLAEVVDFQRFRRPRELMAYLGLVPSEYSSGECQRRGALTKAGNSHARRILVEAAWHYRHRPTIGRALASRTHGQPDEVVAQAWRAQQRLHRRYRHLVGHGKRTPVAVAAVARELVGFIWAAMTRHESRRAAA

SEQ ID NO: 74331 - protein, 378 aa, unidentified
MQSMKQQHTLVVGGVDAHADTHHAAALDERGALLATKSFPTTTPGYAELLGWLRAFGAVAVVAVESTGAYAAALVRYLREHDVRVVEVNQPHAHTRRRVGKSDPIDAEMAARLFLAGKAKAIPKQTDGIVESIRLLRAARHSAVKSRSAAMVQLGGLIVTAPQELRDQLSSPRTIRGKAALCRRLRPSIGELRRPTHAAKFALRSIAGRIDALDDEIAVLDRQLEQLVRAAAPRTIQLLGISTGHAGQLLVTAGQNIERLRGEAAFATLCGANPIPASSGKTTRHRLNYGGDRQANRTLHLIAVCRLRYCARTRAYTQRRTAEGKTKPEIMRCLKRYIAREAYNALRADLAALQHPAPSATVTISCSAGPIGTTRRRT

SEQ ID NO: 74332 - protein, 423 aa, unidentified
MQNTAARKRKQVPEGYLVVGVDPHKKRHAAVAITQDFTIRDRFKFDNTREGLEFLLRRIRIEMIKSDCRGVMFAIETGGHYWRNIAYYLEERGIPYRFINQYTLKRRREGKDLNRRKNDYRDSEVAAQLLCTGEFTESKIPQGVYAELRAAHNGYRRLVKERTRITNLVKGLLDGLFPEFVQVFKDPGGLTALSVLLTCSVPRVIAGMTEEEFVATIEAQHRGRLMRKKLRALHCSARTSIGIEAGARSVSSEISFLVEKLELIRRHIRIIEGTLVRLVDETEEGKYLLSIRGLNYTAVAGLLAELGCFKSYRSAKQMIKMAGSNPTESESAGKKKTRTPMSKQGRPVLRYCAWTSVIPMLRFNPDFRAWAKQRRERPAHANPLCGREVVGAALNRLLRLAFALVKNQTYYQVSKLELALVAV

SEQ ID NO: 74333 - protein, 388 aa, unidentified
MLPVINALEVQKGKPAMKKNITELENPRRRVVRKNKQRELTIGVDLGDKTSRYCVLDREGNVLFERSTATTKKGLAQAFASMGASRIAMEVGTHSPWVKRLLESWNHEVIVANAHRVKLITESTRKDDRLDARKLARLARVDPELLSPIRHRSEGAQAHLVMIRARAALVEARTKLVNSARGVTKSFGGRLASCDPDQMRVKCLVGLPSSLQSALQPLVTAVESLTRQIHEYDDKIAQIARSEYPETARLRQVTGVGELIALTYVLTLEDPQRFRRSRDVGGYLGLRPKRRDSGASRPQLRITKEGDVYLRMLLVQGAHYILGWHGVDTDLRRWGLKLAARGGKNAKKRAVIAVARKLAVLLHRLWVTGARYEPLRHSQIASSLQVAV

SEQ ID NO: 74334 - protein, 339 aa, unidentified
MKVVSAVGLDIAKQVFQVHAADKAGRAVVRRKLKRNEVERFFAELVPCVVGIEASGSAHHWARVLSGLGHTVRLMAPQFVKPYVKSQKNDANDAEAICEAVTRPNMRFVPQKSVEQQDLQCLHRVRSRLVANRTQLINQIRGLLAEYGIVLPRHPGQVRSGLPAVLEDAESRLTGFGRELFQNLYEELAQLDEKIAAADGRIQIAFQNIPDCRRIAAVEGVGPLIATAIVAAISDGHAFESGRQFSAWLGLVPRQNSSGGKSRLLGISKRGDPYLRTLLIHGARSVVYRAKAKTDRRSLWINDKQQRLGTSKACVAVANKNARIIWSLIAREQEYRRAA

SEQ ID NO: 74335 - protein, 367 aa, unidentified
MKKVSTVAAKPSKKISQQKLTVGLDLGDRNSWYCVLDESGQIQLEQRVRTTAKALQEVFGAMPHSRVALEIGTHSPWISRLLSQLGHEVIVANARKVRLIGESRKKDDRLDAQTLARLARIDPELLYPVKHRSAQAQADLMMIRARAGLVRARTGLVNTARGLAKSYGERLRGCNVRNMNPEKAESLSPELQAALQPLLAAIESVSERIAEYNERIEKLAQESYPQVALLKQIKGVGTLIALTFLLTLEDPHRFRKSRDVGCYLGLQPGRRNSGQSEPQLHISKEGDPYLRTLLVQGAQHILGPFGVDCDLRRWGLKLAERGGKNGKKRAIVATARKLAVLLHHLWVSGEVYEPLHNSIRVTIATAA

SEQ ID NO: 74336 - protein, 318 aa, unidentified
MNIIGLDISKDTIDATLHKTNGSIHYIKFKNIDDGLKQFRLWIKGNRIRKVYIGMEATGIYYEKAADMLSSYYTVYVINPLKIKDYGKSRFNRTKTDKADSNLIADYIKRHQDTLIPYQIPKNKALQKLINLKNQLHQHQKQIKNRLHSTEEDFIRNIHQDLIDTIQDKMEQVKIAISEQIKKQTDNNHYRNLQTIPSIGKDTASVLYAQLTEKHFKTANQFVSYAGLNPAIIQSGTSVRGRGRLSRYGNRRLKSTLYMPALCAYRFNAFPKLINNLKKAGKPKMVIIVAIMRKLAKLAYYIVKTGQPYDAERHRLNQ

SEQ ID NO: 74337 - protein, 414 aa, unidentified
MEVVHQRCAGLDVSKRDAKVCVRSPGRRPGSYVKPVATFSSVTEDILRLRDRLIEDEVTLVVMEATGDYWKPFFYILEDGPFEVILANPVHVKNLPGRKTDVSDAQWLAELGAHGLVRGSFVPPQPIRELRDLTRLRTTLTRDRAREVNRLERVLQDAGIKLSSVATDILGVSGRAILDALVAGQTDPQALAGLARMSLRRKTQQLTVALTARFTPHHAFLVRLHLQVIDQLAANIAEITAHINEAVKPFQPTLDLLRTIPGISDRVAVTVLAEIGDDMSQFPTAGHLASWSGVCPGHHESAGRTKQVSTRPGNNHLKAALGNAAMGAARTTDCYLHARYRRLASRTSVLKALVAVEHAIIISIWHMLADHQPYRELGAAYHQRRDPQMTMRRIVKQANDIGLTVPFDPIEVTG

SEQ ID NO: 74338 - protein, 417 aa, unidentified
MSLNIVGALFFVGIDWAAASHAVCVLDAAGRPVAAFTVEHSAAGLAELIRRLARLGDPEQMPVSIERPDGRLVDALLEAGYPVVPVKPNAIKTWRESETGSGAKSDAGDAEAIADYLRCRAHRLTVAAPYSAETKALRTVVRSRDDLVDMRVAATNQLSALLDAHWPGAKAIFADVESPIALEFLTRYPTARHAQHLGAKRIAAFCAKHGYSGRRTGEQLLARLRAAPAGVLDETMCEAVRDAATALVTVLKALNAALKDLGRSVVAHLGEHPDAEIFTSLPRSGQINAAQMLAEWGDCRQAYDGPESIAALAGATPVTNQSGKHRAVHFRWACNKRFRQGITTFADNSRHDSDWAAEVYAQARSRGHDHPHAVRVLARAWIRVIWRCWHDRVAYDPVRHGNAVRLTQPGQNELLAA

SEQ ID NO: 74339 - protein, 348 aa, unidentified
MEQITRIGMDTSKHVFQLHGVNAAEEPVLRKKLRRKDMVAFFERLDPTVIAIEACGGAHHWARLLRSFGHEVKLIAPQLVKPYVKRGKNDAADAEALCEAMSRPTMRFVPAKTAEQQAALMLVGLRDRLIRSRTQLANAIRGYAAEFGVTVATGMARVVSLLDRVRSNATLPALAREMFAIQAEEYAQLQARIDEVEAKLMAWHKADECSQRLARVPGIGPIGAVMLMMKTPAPELFQSGRQFAAWMGLTPKDHSTAGKTRLGGITRAGDEGLRSVLVSGATIVLRHVRNGKGTSPFAHWLEQLLKRKSPKLVAVALANKLARIAWKLMATGQSYVARSAPAAAAGAA

SEQ ID NO: 74340 - protein, 418 aa, unidentified
MKFEKDTSGIERYIAIDIHKEYALVGGQNARQDWVIQPRRIGIEKFGEWAAMNLRTGDAVVLETTTNVWDIYDIVASLVNYVVVAHAGGVRQIAEARVKTDKKDIERLLRLLIADIVPEVWVPPAHVRELRGMISYRHRLVKMSTMIRNRLQSLIHRHNLTAAGVPKGALTDQAWWEMQQLSGLEKMQIRQELAMLEEIGRHKAEVDAELGRQSLGERWSKQAMRLLQLSGFGVVLSMTVLSAIGDVSRFESAKKLVGYAGLGAGVHDSGKEHIEKRITKSGRKELRWALVEAAWRAIRISPYWKEQYEKYLRRMRKPNQAIVVIARKLLVAVWHVLSKEETDVHVSEEELAYKMLVLAWDLDEDVRMGLTYKQFAKYALMKLGVETDITRFVRRNVPRRLAPRAEVLARMEELGLTC

SEQ ID NO: 74341 - protein, 363 aa, unidentified
MDKYIGFDIDSKKTVACVVQKGKKDRYTTLKTDIGQMKKFLQRLRQNGEKLHLTFEIGGEAGYRYDLLIDFVDDITVSNPTKMTWIYRTAKKNDRIDARKQAILLSIGEIPKVHIPSKEVRQWRATIQHRRKIVNKVTQVKNRTRTLLKANGFSKPAVGGSWWKMANRLWMHQLAEELDIASEQLWRMSLADMLGELELLENQLKRVTKYLDRYLDSHPGGFLLMSIHGVGPRTTEAVLAYTDDIKRFNRGKQYCSYFGMTPRLDESGSTKRLGHISKQGPSVVRWLIVESAWRAIRKSPALRAFYERVMAGQKGRKKIAIVAVARKLLSIMRAMQMTGELFNEQLVCTECGIDRLVKVKKLA

SEQ ID NO: 74342 - protein, 406 aa, unidentified
MNQLFVGIDVSSRSNAVYIMLPDGSKHSSFSVPNNLGGAQTLSKRVVAALEKLQFNDVKIGLEATSVYGDNLVCFLREDGSLSKFNRQIHVLNPKNVKKFKGSHTELPKTDPVDAFVIADNLRFGRITPAVYMDDYRYQALRNLTRARFFAVQNLTREKQRFLNYLFMKCSGLAQEKAFSDNFGAAALATFQAFETPDDLADMDLNELTAFISEQGKNRSPNPEKIAAAVQAAARGSYRLPKTISDSVNQVLSISVSSMRAMQSQIKALDKEIERQILNIPNTLTSVRGIGPVFSAGIIAEIGDINRFKGHPSLAKYAGLAWSRYQSGSFDGQHTRLIRSGNRFLKSYLCEAAFALVRCDTEFKRFYDLKFNEVNKFQHKRALALTARKLTRLVFRLLKDNRLYVP

SEQ ID NO: 74343 - protein, 441 aa, unidentified
MSDRLPIAESEPEWAAFAAIDWADQKHAWRLVPADSAVHEQGTLENTPEAVDLWAANLCVRFGGRPIAVCLEQSRGPLVYMLSKYAQLVLFPVHPSTAARYRQVFFPSGAKDDPRDAASLLDLLLHHRSQLRPWQPDTVETRHLQRLVEQRRLMVNEKTRQSNRLTACLKMYFPQILQWFDDVSAPVVGALLERWPSLQQLQRAHPGTLKKFFLQHNVRSQKRIEERIQSIYQAVPATADQAALQGEAAAAHGFLALLKTLGENIALLDQQIEQLVASHPDHALFASLPGAGPVMVPRLMVAFGTRRERYDTAFQMQCYSGIAPVKERSGNSEWIHFRRSCPKFLRQTFHEFAFLSTRSSVWAKAYYDRQRDQQQSHPAAIRALAYKWIRIIFRCWKEGQLYDEQIYLQSLQKRRSPLGPPITALGCKPVAGFQKFSGNPS

SEQ ID NO: 74344 - protein, 347 aa, unidentified
MKFYNQQHQYYCGIDLHARKMYVCILDQKGKTMVHENIKTDPEAFIQLLSPYLEDIVVGVECVFCWYWVSDLCAKHKIPFVLGHALYMKAIHGGKTKNDKIDSYKIALLLKGGNFPIAYQYPAEWRATRDLLRRRMYLVRRCGELVAHIQNTKTQYNLPGFTKRLARKYNHAGVAEQFENPEVRKSVEVDLAVIASLNLILNKLEWHIEKTAEGHDYHTLYLLRSIPGVGLILALVMLYEIQDIKRFPSVQDFSSYARLIKPAKESDGKWAGKANGKIGNHHLKWACNEAAILMLRESEKAKQYVAKLERKYNKGKALGIFTHKIGRAVYFILKNKEAFNMDKFFSQ

SEQ ID NO: 74345 - protein, 381 aa, unidentified
MLDQNPHNPVPTVYAAIELSKKSWVVAIMQPAKDQPSIYRIKGGAFSDLVMRLRMATRGGERLLVCYEAGYDGFWLARSLKMEKIDCRVLDPASLQVNRRARRVKTDRIDVLMLVRALIAVDRGDRHVCSIVRVPTVEEEDARRSHRERQRLIRERTAHINRIKGLLFGQGIRRVEPRLRRSRIDFSDLRTGEGLPLPARLRAELEREYARLDLVETQLRVTEAERDTTDAQDPSIEYKRKMLIQLRGVGPASAAILTREIFGRHFANRRQLGSYLGLTPSAYDSGSTTRCQGISKAGNSFARRVMIEVAWLWRKYQPDSALAKWYEERAAGQSPRIRRIMLVALARKLIVALWRYVEIGLVPAGAVSCAKNDPALEVAAV

SEQ ID NO: 74346 - protein, 349 aa, unidentified
MIRNKPRDADVYGVDIGKNIFHIVGVNAAGAPIQRVRCRRETLIQFFQRAAPAIVGMEACPGSQWLARKIQSCGHTVKIVPAQFVKPYLKSNKNDTLDAEAIAEAVTRPTMRFVEVKAVEQIDTQALHRARDQMVMHRTRLISQMRAFCLEYGVAIRQGAGVFKLDLPRVLGDESNDLSPAIRRLLADLFEDLHRLEGRIAQVTREIEALVSQDEVARRLMTIPGIGPLGASALIAAVGQGRQFKKARDLGAWLGLVPRQYSTGGKPTLLGISKRGNGYVRRLLIHGARSCVMHLDRNRTRLGAWIDQLEGRMHANKVVVALANKIARIAWVVLNRPGTLYERIDPAFT

SEQ ID NO: 74347 - protein, 369 aa, unidentified
MKKKVLYVGLDVHKKTTDVAIAPGRSNGKVRSYGKIDSTVDALNKLIKKLEDGDKQLRFVYEAGPCGYQIYRHLDAKGIACSVVAPSLIPRRSGDRIKTDRRDAVNLARLFRAGELTSIYVPTVEDEAIRDLVRCRDDIKRFEKKARQRLLSYLLRHGYQYSGKRNWTKGFYNWLATVKFSHSAQQVTLQEYIEAANECSQRIERITQQIRVHVEEWSRARFVKAYQALRGVSLIVSTTVASEIGDMRRFPNPKQLMAYLGLIPSEHSSGKTVRRGPITKTGNSHVRRALIEAAWTYKMQARISTVLLKRQQGLPKSVCDISWKAQTRLCARYRRLLARGKTKQTVVTAIARELSAFIWAIDKEMQFAK

SEQ ID NO: 74348 - protein, 309 aa, unidentified
MGDVFIGIDVSKEHLDVASRPSKLVERFGNDASGIAKLVDSVRQLAPTLVVLEATGGYEMNVAAELALVVPTAVINPKQARDFAGAIGRPAKTDALDAELLAHFAEAVRPEARALRDEQTQELTDVVHRRRQLVEMIVAETNREKRAQQSVRARIRAHLKWLRKELDRVDEDIDTLIKQSPIWRANEELLRSAKGVGPVLASTLLGRVPELGRLNRKQIASLVGVAPVNRDSGQHRGKRWIRGGRADVRVILYMGTVNAVRTNPSIRAFYQRLLAAGKPKKLAIVAAMRKLLTILNAMMRDKAIYSNPA

SEQ ID NO: 74349 - protein, 424 aa, unidentified
MNLTQNERLKQVTSDTLIVGVDVGSQTHFCRAFDWRGFELSRRVFKFSNTGMGFLTFLRWTEELMNKTEMRKVIVGCEPTGCYWLTFQKFLQEHEIQLVTVNPFTVNRSKELDDNSPEKSDLKDPKTIALLVKDGRYSTSYLPSGVYAEIREASVCRDQIMKQHVRLSNQIQGWLQKFFPEYFECYASWDSTSGLMLLKEAPLPQDILKIGAGGINQIWRDAKVRAAGIKRAQTLVEAAQNSVGLEAGEAARLEIWILVNDYILKAEQLKRLDEYLEEKIKEVPNVEKLLAIKGVGMSTVTGLIAEVGDIGRFTDPKQIQKLAGLEIVKKSSGKKKGQPRISKRGRRKLRRTMYESARALMNWNPAFQDVFLYYRNRTKNPLGGMQAKIAVACKAIRVFYVVLQTGCDFDEEKFRRDIIRPEAA

SEQ ID NO: 74350 - protein, 314 aa, unidentified
MKLQQEINVGVDTGKTQLDIFIRPVGDYFTVANNVSGIKEAIKRIKTYKPTRIIIEATGRLEMPFVCAAAKANIPTVVANPFHVHKFACATGKLAKTDKLDAQMIAHYGEALQPRATEIKPDNIMLISDLLSRRSQLLEMRTMEKNRLSILPKGLHTQIKQHVQYMTKSIMSIEKKLDKLINATPQWQDLMAILLSVKGVGKVLAYTLISNLPELGQLNRKEIAALVGVAPMNKESGSYKGKRKIRGGRYQVRTILFMAMMSAIQSNTKFKAIYTRLVQAGKPKKVALVACMRRMITILNTMVKNGTVWDERLA

SEQ ID NO: 74351 - protein, 340 aa, unidentified
MKQYVGLDVSMEETSVCVVDEAGSTIWEGRVASDPAAIVRMLHLRAPHAERVGLETGPTSTWLWHELRNAGVPVICIDARHAQAALSMRLNKTDRNDAAGLAQLMRMGWYREVQVKQLAAHGDGALLASRALLVRQRCELENQIRGLMKNFGLRVRATKGKAFEQSARSLAARSALLKDVVLPLLAAWSALRLQIAVLSRAVNERAKNSAVCQRLMTMPGVGPLTSLAFSAAIDDPARFKRSSNVGAYVGLTPRRYASGEIDRMGRISRCGDALMRSYLYEAANIMLVRTRGTNPLKSWATKLAKRAGHKKARVALARKMAVVLHRMWLDGTDFGAQQAA

SEQ ID NO: 74352 - protein, 401 aa, unidentified
MVSDFRKGRYNLMKIFVGIDIAKLNHFAAAISSDGEILIEPFKFTNDADGFQLLVSKLESFDKNSIIIGLESTAHYGDNLVRYLVAEFYQVCVLNPIKTCQMRKNNVRKTKTDKVDTFVIAKTLMMQDDLRFITFFDLDMMDLKALGRFRQKTIKQRTRLKIQLTTYVDQVFPEIQYFFKSGLHQNAVYALLKEAPSPKEIASMHMTHLANLLKVNSHGHFTKEQAKELRVLAQKSVGANDSAISIQITQTIQQIELLDSQLEKIEAEMTDIMKFNDSVIMTIPGIGYINGGMILGEIGDIHRFSNPNKLLAFAGLDPSVYQSGNFQAKTTRMSKRGSRVLRYALVNAAWNVVRNNATFKAYYDAKRAEGRSHYNALGHCAGKLVRVIWKMLTDEVEFNLE

SEQ ID NO: 74353 - protein, 373 aa, unidentified
MKKRSSSQQSQKVTAKTKSAQERVTIGMDLGDKTSRYCMLDNDGEILREGQVATTKAGIVEAFGSLGRVRIAIEVGTHSPWVSRLLQKLGHEVIVANPRQVKLITESSRKDDRLDAQTLARLARIDPQLLRPIQHRSEKAQGALMIIRVRAALITVRTSLVNTVRGLAKSMGERLPQCDADQMGVARAVSLPPQLRQTLEPLLKEVESLTEKIKNSDREIEQIARKDYPETALLQQVGGVGTLIALTFTLTIEDKNRFQKSRDVGCYVGLRPRRSDSGQSQPQLRITKEGDPYLRTMLVQGAQFIISRRGPDTDLKRWGLHLAKHGGKRGKKRAVVAVARKLGVLLHRLWVTGEVYEPLRNHNARQEQKKVAA

SEQ ID NO: 74354 - protein, 330 aa, unidentified
MTNADVRESTMPPLEFVGVDMAQQAFEWAVHGVRGTHSARNDESGFEALREALQDRRIGLIVIEATGGLERALAGFLLRHGLPVAVVNPRVAREFARSMGHLAKTDAIDAVALAHLAQTLAAKADQAGVRLTPPSAEVELLQAMVARRVQLLGMRTAEKNRLGGVVRVLSKSIAAVIKTLDKEIARLDRDIDAHLEQHFTDQAQRFDAIKGLGLTTCAAVLAFMPELGTISGARAAKLAGLAPLNNDSGKERGKRHIWGGRSIVRSALHMATLSAVRFNPVIKTFYDRLLAAGKPKKVALTACSHKLLRILNAMARTGQPWNESFHAITP

SEQ ID NO: 74355 - protein, 372 aa, unidentified
MASIIYVGMDVHTTNFTFCCYTADSDRGFAVAQTEPDYRQVIKYMERVQKQCGEECKFVCGYEAGCLGYSLYHQLTRCGVDCVILAPSTMHQEKGKRIKTDRRDAENIARCLAFSLYSPVYVPTTEDDAVKEYIRMRDDIKADLKRVKQQIIAFTTRHGFDFDGKSYWTQKHLKWLETLVFEHPLYKETLQEYLILYYMLDEKVAVYDTRIEEMSHLEHYEENVQKLCCFRGVAAHTALSLLVEVGDFQRFRSAKHFAAYLGLVPGEHSSSDKQIRTSITKAGNTHLRRLLVEAAQSYNRGAIGKKSAALKARQGGNPAEVIAYADKANERMQRKYYRIAFKSRHNIAKTAIARELACFVWGMMTGNISNAA

SEQ ID NO: 74356 - protein, 349 aa, unidentified
MRFYTKQHRHYCGIDLHARTMYVCILDSAGQVLVHKNLPAKPEAFLETIAPYREDLVVAVECIFTWYWLADVCAAEGIVFVLGHALYMKAIHGGKAKNDRIDALKIATLLRGGLLPQAYVYPAGMRATRDLLRRRLHIVRKRGQLLAHIQMTSHQYNLLPLGKRIAYPSNREGVAEHFEDRVVRKSIEVDLALLERYDALVSDLESYLVRQAKQHDPQAFALLRSIPGIGKVLALTILYEIHDVHRFDRVQEFASYARLVKCAKESAGKRHGTSGAKMGNVHLKWAFSEAAVLFVRHSAQGKQLLARLEKRFGKGKALSILAHKLGRAAYYILLRGKAFEIERFAATAS

SEQ ID NO: 74357 - protein, 271 aa, unidentified
MADAKRFVGIDVAKAQLDVAIGPNGESFSVANDETGISELLRRLEPADLVIIEATGGLEVPVASALATAGIAVAVVNPRQVRDFARATGQLAKTDALDAQVLARFGEAVKPQVRALRDAQAQALEALVNRRRQLVEMLTAEKNRRANSPKVIHKGIDEHIRWLEKRLSGLDDELAGLVRETPIWRERDELLRSVPGVGKVLSTTLLAHLPELGALNRKQIAALAGLAPFNRDSGSLRGSRCIWGGRAQVRRVLYMAVVSAVRSNPVIKNFW

SEQ ID NO: 74358 - protein, 366 aa, unidentified
MKKISTVQVLGNEILQEQKLTIGVDLGDRWSFYCVLDEAGKIILEQKVATTPEAMKQTFGKIPRSLIALETGTHSPWASRLLTELGHEVLVAHAQKVELITKSNRKDDRHDARTLARLARIDPELLGPVRHRCAKAQIHLTVIRARAELVSARTALVNAARGLVKSYGEGLPKCGTQQVNRELAAGLNTELREVLQPLLKEIESLNERIPEYDERMEKIAQEVYPEVSLLEQVKGVGTQIALTYVLTIEDPYRFEKSREVGCFLGLKPGRRNSGKSEPQKKISKEGDRYLRTMMVQGAHYILGPFGEDSDLRRCGLKLAERGGKNAKKRAVVAVARKLAVLLHRLWVDGEVYEPLRNSQKAMRAVA

SEQ ID NO: 74359 - protein, 382 aa, unidentified
MNQPTEAAAIRVDLGAIFISLELSKSSWLVTALSPGSAKMTRHSVPGGDLPALLNCFSGLRDKACAREGKLYPLIVVQEAGLDGFWIHRALETEENITSHVVDAASISVPRRSRRAKTDRIDGETLVRTLMAWVRGEPRVCSMVRVPTVDDEDRRRISRERKTLVDERTCHTNRIKGLLFSIGVRDYRPLRRDRRERLEELRTGDGQRIPPHLKARLVRELDRLDLINEQIERVEAERDALNAEASGTAPQTMLGALRGIGPEFANVLTSEGLFRSFDNRRQVAAYAGLAASPWQSGTIDREQGVSKAGNPRLRTAMIQVAWLWLRYQPDTSLARWFHERVRANDGRGKKVAIVALARKLLVALWKYATRGVVIEGAVLSRA

SEQ ID NO: 74360 - protein, 367 aa, unidentified
MGWMAPLRHLSAKVLVDRKPPANREPSMNEITTVGLDLAKHVFQVHGVDAEGTTVLRKQLRRGQVLAFFSRLPRCLVGMEACATAHYWARELRALGHEVRLMPAQYVKAYVKRNKNDAADAEAICEAVGRPTMRFVPVKTAEQQAAVLLHRGRERLVRQRTMLVNALRAHLAEFGVIAPQGLRNVGRLIAIIRDDDDAHLPGLARQVLQVLAVQIEQLEAAIAALEKRLMGWHKSNPVSQRLATVPGIGPIIATAIAAMVAEPSGFRSGREFAAWLGLVPRQNSTGGKNRLGGISKRGNQYLRRLLINGASANLLRSKATNADPWVIGLRRRRPSLVVAVALANKTARIAWAVMHRQENYQRMATAA

SEQ ID NO: 74361 - protein, 410 aa, unidentified
MLFVGDDWAEDHHDIEIVDEQGRRLVRRRLDEGANGIAALHALIADHLDDQAESGQVVVGIETDRGPWVQALLAAGYTVYAINPLQACRYRERHGVSGAKSDPGDAHVLAELVRLDRDHHRPIAGDSTIAEHVKVVARAHQSMVWSRQRQTNTLRSMLREYYPAALAAFDDLAGRDALAVLALAPTPAAGRRLRVARVEKALRAAGRQRNLTATAQRIVETLRGEQLEAHPGVVEAYAASAKALVAVITELARQCEVLKGEVEAGFGRHPDAELYLSQPGLGPVLAARVLAEFGDDPTRYADTRARKNYSGMAPVTRASGKARVVLARHARNRRLADALYQQAFAALSASPGARAFYDAHRARGNTHHQALRALANRLVGVLHGCLRHQQPYNETTAWPPPAEHAETSAA

SEQ ID NO: 74362 - protein, 376 aa, unidentified
MTVISAVYYNIDVSKHIYEPLKKELAMPYETEVGMDIHKMYSMFGVVKCDGNVVSYDKVSNDTRLFDRFFSRFAEGTFRVTLEATRGISWVIDYFDRKNIPYIVSNPFLNRAIANVHCKNDKYDARTLADLARSNYIARCYVPTKPIRELRDLIAHRAKLVVITTKLKNKVHDVLAKYNYVQPISDIFGVSGIQWVRNQKLSDMHKQILEETLALIGAFLPRTMALEKTIKEKVHEHRYFRLLQTVPGIGPINAATIIARVEDINRFPNVTKFIRYAGLSVNTRESAEKMYLGKLNKKSDKFLRTAFVDAEIAAVQKDPGLSMFYQYLLARKGKGIARVAVARKLARSVYFMLRKSQPYHYRQLQNIWSNTTADKG

SEQ ID NO: 74363 - protein, 404 aa, unidentified
MTAAAAEAIADQKVFGGVDSHAETLHVAVISDNGGHLADAEFATTTAGYAASLAFLAAHGHVLAIGIEGTASYGAGLTRVARSHGYRVVEVNRPDRAERRRIGKSDPIDAYAAARAALSGRASAAPKDDTVAGIRALHNAARSAIKARTAALNQISHLLIAAPGTIRAAYGQLKGADRTDALARLRPTGDAVHIAVLTALKSLARRVKELTTEHDALTKALDTHVTQHNPGLRAAYGVGPDTAAQLLVTAGGNPERMRTEASFAALCGAAPVPASSGKTSRHRLSRGGDRAANAALYRIALVRMSSDTRTREYVARQTTAGRTKKEIIRLLKRAITREIFRCLTTTVTVPAIADLRPRRQAMNITLTAAAQHFGVWPTTISRLERGLSRDDSLARAYRDWLHTA

SEQ ID NO: 74364 - protein, 428 aa, unidentified
MSDKKLLELRVSVDVGYRRHSVAIGLPSGEVLEEFEIAHRPEGFEEFFTRIEKHQKVRNCEVAVAMEGFNGCARPLDAMVRRRGYRLYNINNLKLARFKEIFPGAAKSDRIDARKGLELFQLSDHLPLAKEVLQEVKGTPRENEVLKRLTRRRRRLVDERVRVISNLQTDLQAVCPGLLEITKAAGNQWFLNFLISAATLPQLARLRPSTVLKVPAVGRKYASLIEDWQKRAHFSEEVEWVSEMIQEDAKRCLELDEKIKALKAKIKGVAKGSKIAKTLLSIPGFGTICTAELAGEIGTIERFSKEGSLALYLGMSSLDNSSGKYQGSKQPKHVNTRAKAAMMVALDRHRKYVPQSQRYYEKKRSEGKKHNQAIRALGRHLSRIIYKMLKEEREYEIRPEKGNTKTKVNPRSSFKTKIRRPKISANAK

SEQ ID NO: 74365 - protein, 370 aa, unidentified
MEKLITYVGLDVHKETISVAFAQGGDRGDACYIGKIANSAGALSKLARKLSQEGRRLRFCYEAGPCGYAIHRHLTGLGHDCVVVAPSLIPRRPGDRVKTDRRDCLGLAKLDRAGALTAVWVPDVAHEAMRDLVRARAAAARALRRARQQLSGFLLRHARVRSGKNWTRAHRRWLAEQRFEQPAQRIVLEDYIQAVEEAQARCERLTTQIDALVASWSMAPLVKALQALRGVALVTAVTLVAELGDLTRFESPRQLMAHLGLVPSENSSARRVRRGGITKAGNGEARRVLIEAAWCYRFPARVSRCLLERSGGLPKALRDIAWKGQLRLCGRYRQLRAQGKDTPVVAAAIARELLGFIWAMAQAVGPAKTA

SEQ ID NO: 74366 - protein, 398 aa, unidentified
MRVERAWAGVDIGKGHHHVVVIDAEGTRMLSRRVNNDETVLLELIGQVTALADEVRWAVDVSTGGAALLPALLVAHGQQVFYLSGSQVNRAAGGYRGEGKTDAKDAAIIADQVRMRRDLTPLRVDNELIVELRMLIARRRDLAGDRVRLVNRLHEQLLGISPALERFLDLTNRGPLVLLTHVQTPAALRQLGAAGLEEWLRTQKVRNATTLAATVATAAGSQQTTLPGERLAAQLVADMAKGVIALDEQLKHTDKPIEGRFRRHRHATVLLSMPGIGTLLGAEFLAATGGDLTAFASADHLAGYADLAPAPRDSGRISGNLHRPRRYHRGLQRALYTSALVSIRYHDASRIFYDRKRSEGKRHTQTVLALARRRVNVVWALLRDQRCFEPAPPQATAA

SEQ ID NO: 74367 - protein, 423 aa, unidentified
MQAAWFVGVDWGSQEHQVCVTDAGGKVLGERMFEHGGAGLSEMADWLLSFAAGAAGDVGVAIETPRGPVVESLMEHGIAVHSINPKQLDRFRDRLSPAGAKDDRRDARVLASALRTDPHCFRRLEPTDPTIVELREWSRLSEELTRERVRLGNRMRQQLWRYYPQFLDAVGDDVAAPWALELWRRLPTPRAGQRVREVTLTRVLKQHRIRRIDAATLRSKLRAPAVKVAPGAVEAAVTHVELVAERLVLVNRQLDRAQRALDGLVEQLAETASADDPDASAAGEPASSKQPSDVAILLSVPGIGHKVVATLLAEGGDAVRRRDYDALRCLCGVAPVTKRSGKSLIVMRRLAADGRLRNAAYHWARTAAQRDPASHNKYQALRARGHGHARALRSVADRLLGVVCAMLRDGACFDPHRVGTTAT

SEQ ID NO: 74368 - protein, 317 aa, unidentified
MQASTLCIGVDVAKAELVVAVAGQRPYSVPNEAASISRWLRTVPAHALIAMESTGRYHGLLAGLANQMGLNVYVLNARDVFFYARALGTRAKTDGVDATVIARYLSERHLQLHPWRPADSTHRQVQELLTRRAQVVMHRSALCQAFKATDLQDSIDTSALHGAFDALLRSIDAQVQRLIASDTQLAEGYHRLCTITGIGAQTGALLATLLSRIPFANADALVAYSGLDPRPNDSGTRRGRRRLSKKGPAFLRRQMYLAGLAASHSKALGPLYRAIRAKGFASTEAIVILGRKLLRVAFAVWKGSEGFDAARFAPRTT

SEQ ID NO: 74369 - protein, 315 aa, unidentified
MTASMPQTLGVDISKEKLDVHLHPEGSGASFHNDRKGFSMLIKWLAGRVIARIVYEPTGAYHRGFERRFLEAGFPLAKVNPRQARRFAEAIGTLAKTDRVDAELLARFGAMFELRLLTDSGAILLTMKDLLVARRALVKDRTAARNRDHQRSLPLLKAQAAERLRQIERQIDAIDQALREQLESDAALRARFDILVSIPGLGEATAFALLIDMPELGHIENKCAASLAGLAPMARESGQWRGKRFIRGGRPELRHALFMPALVAIRSNPDLRAVYENLTAMGKPAKIALIAVMRRMVVLSNALLRKQSHWRPNPA

SEQ ID NO: 74370 - protein, 427 aa, unidentified
MAEEKMDREPEFAAFVGIDWADRKHVWCLQAAGSSQRETGELEHKVEAVEAWVAELCQRFGYRPIAVAVEQVRGALVFLLNKYECLHIFPVPSKMTAKMREALYPSGAKDDPRDADLLLDILGQHRDKLHRLSPDDEATRRVQNLVEERRKLMAEKTAQGNRLISYLKIYFPQMVEWFAKLDIPLVCDLLQRWPTLEELQKVSPEELRTFFRQHHCHRGLMERRILAIGGAIPARGDRAVIEAKSAVVKVIVQLIRSLLEGIAELDRKIEEVTAEHPDFFIFESLPGAGAVMAPRLLAAFGSQRDRYSCPDELQKYSGIAPVTESSGKRKWVHFRWACPKFLRQSFHEWAGHSIAQSTWARAYYQQQRGRGSDHHAAVRSLAFKWIRILFRCWKDRVAYDENKYLAALARRGSPLGKLVAVGMGTSF

SEQ ID NO: 74371 - protein, 311 aa, unidentified
MQQTIGIDIAKDTLDAYRLGDGHRLNVDNNREGHRLLLKWIGKCQKILIVFEATGPYHRELELVLGGRDVPFVKVNPKQARRFAQATGRLAKTDRVDAAMLARMGAALELQAQTPRPKSFHDLRELLAARRALIKDRAAAKIRRSVATLPLLKRQLEDRLALIDKDVKRIDTELARMAALDPDLSRRVAILQTIPGVGEVTAVTLTIDMPELGELEGKQAASLAGLAPVSQQSGRWQGKERIQGGRAALRQALYFPAIVAARFNVDLKLIYDRLTAAGKQKKVALVAIMRRLIVMANALIRDNRPWAPNHT

SEQ ID NO: 74372 - protein, 367 aa, unidentified
MVKDSTAFVGLDLGDKRSNVFILDQEGELIEETRIPTTEPAFRHKFTSLPPCRVAMEAGTHSRWASRLLEQLGHEVLVANPRRLRLIYENSRKADEADAEHLARLARLDPQLLSPIRHRGPEAQAHLTVIRSRDSLVRARTLLINHVRGSVKSSGARLLACSADSFHHRVEPSIPAELQPALLPIVQTIASLTAQIHAYNRQIEQLCQEQYPETQGLRAVGGVGPIVSLAYVLTLDDPDRFRKSREVAPALGLVPKRDQSGSRDPQLRITKTGDSYLRRLLVGSAQYILGPFGPDCDLRRWGLKLAERGGKNAKKRAVVAVARKLAILLHRLWVTGEVYDPFYHSHPDQTSVTQTNLLVRQPEAVCA

SEQ ID NO: 74373 - protein, 341 aa, unidentified
MEQFIGLDVSLKDTFISVRQGGQRIWRGKCPSDPKLIAEVIRKRAANVERVVFETGPLSVWFYHALALEGLPAICIDARHAKAALDMARNKTDANDADGLAHLAEVGFYREVRVKSFDSMLTRTLVAARTQMLKMTIQLSNQIRGLMKTFGLLVPKGAGRVFEGHVRNLLASNAGLEQIILPVLEAWQGMRARAAELSKQLVASARASEQCQLLSSIPGVGAVTASSFVAAIEDPENFRKSRSVGAWVGLTTRRYQSGEVDYDGHISRRGDNHLRGLLYEAAIAILTRSTAESALRIWGLKLKEKIGFKRAAVAVARKLAVIMHTMLRTGELFESSIAAEA

SEQ ID NO: 74374 - protein, 353 aa, unidentified
MTITVYCGVDFHARVQTVAYCSSTDGEVHLCELDHRRDDVRAFYARFSGEVVVGLEASGYSPWFERMLDELGHTVWLGHAAEIRRVANRRQKNDRRDAELILDLLVKGEFPRIHRPTTDSLEILRMLRYRHRMVKIRTMIKNNLQALAIGSGLALKARLLTRPGRVRLLAAQMSPAMSRQREEWLALLDNLDARIAAVVRWLEQQAKDDVRVQLLRTHPGLGLLTALGVVHTLEPVSRFSNQRKVVAYVGMEPMERSSAEKKRYIGISKAGSRLVRFLLGEAAQTAARGDQELKRFYLRLVSRRGKPKALIAVGRKLLIRSYIMLRDNIDYAEFLRRGVDARSARKTHKHLNA

SEQ ID NO: 74375 - protein, 362 aa, unidentified
MLYLAIDQHAKQITVCVRNAAGDEVLRRQVSTRPEKVQTFFQQLTERDANFMAILEVCGFNDWLIEELRRWNCQEIVLIHPEKPSKKKTDRRDARKLADLLWLNRDRLAAGEPVHGLRRVHMVTQREREDRQLTALRKTLGQRRTRTLNKIHRILNRHNRMWDYPTKTFQTQRGRRWLETLELPEMDRLEMDMLLQEWTIWEEQIAQVDAQIVQRASHQEEGEVVNATQILMTAPGVSHYSGLTLASRIGPVERFPRPRSLANYFGLTPGCRNTGQAKDRLGSITKEGSKIARFILGQLVLHFLKQDPRMRAWYRRIKTRRGSKIARVAVMRRITTIFWHMLTHREAYSVGEPPPRLRSKVA

SEQ ID NO: 74376 - protein, 402 aa, unidentified
MNAVGIDVSKEKSMVAIMRPFGEVVVSPFEVGHIVSELDKLANLLENLNGETRVIMECTGRYFLPVAHTLHERGIHVSAVHAQLIHDFGDNTIRRAKNDKKDAVKIANYGLSYWLELPKFVPEEDIRKSLKVFSRQYNKYSKLKTMLKNNFISLTDEVFPAVNELFTSPPRRSDGHEKWLDFATEFWHCECVCGLTPKRFAQKYKKWCKTNGYRFSEEKADDIYASSCGHVSVMPMNDTTKLLIDVAANQFNAVSETLQAVSTEMKRLSQMLPEYPVVVSFFGVGELLASQLIGEIGDIFRFQKKSSLVSFAGLEPVENKSGKYQGQETISKQGSPHLRKSLFQVMDCTLKRSPEDNPIYRFLDRKRSEGKHYYNYMTAGSAKFLRIYFAKVREYLLNLEED

SEQ ID NO: 74377 - protein, 298 aa, unidentified
MVVAAEVADATRAAVELEGRKLGSGARERNHLVSWLQQRRVHEVVLESTAPYWKPVWLDLEPHLEKLHWAQAQSNRAPQGRKNDFRDAQRWGRRWLAGELMLSFVPEPEQRTWRWMTRGRLPLVRERVRLPNQVEALLEEARIKLSSVISDLLGVSGRRILEALSQGETDAVKLAELGDDRLRCTQEQLADALRGSPEPSHRALLKLHLERLKLLDQQIEQLSQRSATALKQHQDAVVRLAEVPGFGIESAQQRIAEVGVDAEAFPSAGELASWCGACPGSAVSAEENYSSRCPKGNR

SEQ ID NO: 74378 - protein, 436 aa, unidentified
MEVNTTTPVVSIGIDAAVVAAHQIAIRGEVREDFKAAPTLAGLAKLTERLEPYAGSLVVAEPTAGTWLPLAHAVTAAGCEIGFVANRDSARLRKAITGASKTDLIDADMLAHCAEVLGVGPAQMPPPGQIALRRAIRRRHVCTVDAHRVECRLWALAAWAFPDLWRAAGGHTVAQPLLTRWPDLESLSRARLGSITEIVAAHSRDSHPQRRAERIRDDAAGWATFWTGRLDLDGLAWEVTEMLNDINTADRRHKAATDQALGLWQQHWPDDVLTSIPGLGPICASTIRGWWGNATHLNSAKAATAHAGLNPSMWSSGLTESPSRRITKQGPAELRLALYQAANVARRRDPQLAAHYRRLMAERGHNHISANTAIARKLACRAWAIATSGRPYQPRDLDGNPLSLTDAAALAVELAVPDDTRSRTRGHTRRGRLNPT

SEQ ID NO: 74379 - protein, 346 aa, unidentified
MSIVETRAITGGVDTHADVHVAAALDPIGGLLGVREFPAGPAGYARLLEWLGGFGTVCLVGIEGTGSYGAGLSRHVTSAGVRVVEVDRSDRQDRRRQGKSDPLDAVSAARAAQSGRARGAPKGRDGTVEAIRALMVAKRSARADRTQTINQARSLIVTGPDDLRVRFARHTAAGLVAELALLRPRPGDVVGYATRIALRELGRRAEFLDGQLERLDELIVPLVTAHAPSLLALYGVGPDTAALLLIAAGDHPERLRSEAAWAHLCAVAPIPASSGKRTRHRLNPGGDRQANHALWRIVITRMSSHPPTRAYVERRSEEGLSKKEIIRCLKRYVAREVYRHLRTTAG

SEQ ID NO: 74380 - protein, 334 aa, unidentified
MLYVGLDVHSRQSSLCILNSAGGTVNEIQIKGPRAGIVDRLRQLNEPFRVCYEASCGYGHLYEALRPLAQHVAVAHPGKLRLIYGSKRKNDRIDAQKLAKLLLLDMVPPVHVPSIDVRAWRSLILLRQRLLQQVVRAKNRIRGVLREHDIVGAKWLWSKKQIAWLESLELHPVAKLRLELAVEEFKTLQMKVKRIERELQKYADAHPAVALLMTIPGVGVRTAETFIAWVDDVARFRNNRQLGSYFGLVPCQDASADRNRLGHITRDGPPVMRKLICEATWTAIKRCPRFKQFFERVSGGKSERKKIALVAAMHRVIKVMGAMLRSGESYDDAR

SEQ ID NO: 74381 - protein, 425 aa, unidentified
MNDLPVAGIDVSKEFSDFCILTPDNTVFSRGKIFHRPASMDKLCKQLTMAEQAFEVKPICIMESTAYYHRILYRYLTNHGYKVIIINPLQSKAAANFNIRSVKTDKVDAYKIALLYSTKNLKPSMVPDQTIQELRDLCRNRNSLNEQLIVAEERLRANVEQTLPGFDKVFSRLCSKSGLVLLSNYASKAELNEAGVEKIAEIIRSVSGMGQSWSESKAHMILMGINNNQEYISSPSHSAIIKSIAMTVLAILNAITETDNALELLFEQNESLMEDRMLLMSIPGIGKQIAAVLIGETGSFENFKNYRQLSAFYGLDQKVNQSGKRRKTGLGISKKGSSLARKMLRMAVQNSVYATKKGEPANPVLAEYFQAKANEKAPKVAETAVMRKLTAIIFAVMRDRKPFELRTPEEHISIMGIDTSKRISA

SEQ ID NO: 74382 - protein, 346 aa, unidentified
MKKCNVLGIDLAKNVIQVCLIDEHGSIIYNKAVSPSKLKALLANLRYSIVAMEGCGSCHYWGQLAEQFQHDVRIISPKKIKAFLQGHKTDANDALAIAVAATQPGMVFSRIKTQEQQSLQVLEKSRKFLDKELTALGNHIRAYLYEFGITTPKGRKSLRHSVVQTLDEQDERLPRCLKGTLSQLWSRYTDTIEQLKHTEKAKAALVNQIEPCRRLLDLEGVGPVCAAMLYTSLGDGSDFKNGRQASVYTGLTPKQHSSGGKTTIRGINKQEGHKALRTALYQGAFSVINRLPPEPKTVKQQWLLDLVKRVGIKRACIALANKTVRTAWALLATGKAYRPVPLHPMQ

SEQ ID NO: 74383 - protein, 328 aa, unidentified
MDHFAGLDVSVKETSICIVDDTGRIVREVKVASEPEALLQVLGNPIYRFKRIGLEAGPLSQWLFSALAEAGLPVICVETRHMRAVLQAQINKTDRNDARGMAQMMRAGLYRPVHVKTLRSQKLRMLLTHRKLLQSKAIAIDNDLRGTLRNFGLKVGVVGTVKFEARIKELVENLPDLAVLVEPLLMVRRVLREQFSILHRRLLAIVRDDEVCRRLMTTPGVGPVVALTYRATVDVPARFRNSKAVGAVFGLTPSKYQSGEINRTGAISKCGDEMMRVMLYEAAQIMLVRGEVVLAQGLGHEDRQAPRDEEGDRCAGAPVGRDHAPHLG

SEQ ID NO: 74384 - protein, 351 aa, unidentified
MKKVAYLAIDVHAGHCVLGHIDIDGTFLGNRRFPTSEQHIIEALKGVKAKEKYLALEESNLAYWAAQVARPYVTEVICSDPKENALIYRSSNKRDKVDTHKLCRLLRLGELKRVYHAENDERAIFKAAVQHYIDLRDQQVVLKNKIKAMYRHWGVIDVAGEAVYGIKRRHDYLQRVKHLHIRNQLHRLYCLMDETESMQKRALKAMKQLGRKYPEIKQFKKMPGIGEIHSHTFDAFIQTPHRFANKRKLWRYCRLGITDRSSDGKPLGFKRLDRSGVSELKSLSYQAWLCAMRSDNEVSRFYSESFRRTSNRVHARLNTQRKILAVMYGMWKTGEAYRSELFLDSPQMSVV

SEQ ID NO: 74385 - protein, 323 aa, unidentified
MQGKVLSEPNATPAVYAGIDVCKEWLDVHVHPAGQSFRVANDGGGLRRLKRHLGGLAVTRVVMEATSKYHRAAQRSLHEAGLHVAVVNPLRARLFAEACGQLAKTDRIDASLLALMGAALDPAETTPAPLAMEALQEVVGARSAASAERTALINRLATLQSPFLRAELKRRLAAIARHLVRLEAEIGRLILADPRLARRYAILMSIPGIGPATAATLLAGLAEMGALNAKQAAMLTGLAPVAHDSGPRQGRRAIKGGRKCVRNALYMAALSASRYNKDLAAFAARLRKTGKPAKVVLVAVMRKLVVMANALVSQDRIWSPIAP

SEQ ID NO: 74386 - protein, 382 aa, unidentified
MKKVTRFVGLDVHADTIAVAVAESGRNGEVRSLGQIPNRLESVRKLVQKLGGPKGLQVCYEAGPTGYALYWQLTKLDVECEVVAPSLIPTKPGDRVKTDRRDAVKLARCYRAGELTTVWVPDRDHEALRDLVRAREAAKKDQLRARNRLGKFLLRAGVRPAKETQAWGTVHMQWLRGLKFEHVAQQATMVDYLGEIDHVAARIQRLEEAIDEAVKHASPVVREVIEALQALRGFAKLTATTIAVEIGCFTRFERAKQLMAYVGSTPSEYSTGGSRRQGAITKTGNAHVRRVLYEVAWAYRHRPGLGAALKQRQRGLPTEIIEIGWKAQHRLHRRYTALVAKGKPHCKVVTAIGRELLGFVWAIATRVEQAHAQKEGVRRVAA

SEQ ID NO: 74387 - protein, 350 aa, unidentified
MRQPNDLSRSLVALDQDSTLIAVIEMGQASWLVAGIVPGFNRHPLKKIATDQEQLLQVLRRWAKEAETTGRMIKRIAVAYEAGRDGFWLARWLRARGVEAYVIHPSSVPVSREHRRAKTDRLDTELLKRAFLGWLRGEPDHCSMAAIPTLTEEDAKRPGRERESLVGERTRIINRIKGALARLGIREFKPMLRSAPQLLETLRTPEDAALPPNTLAELRRDMARLSFVKQQINEVERARLERLQQAPGERGNAMVRLLTRVVGVGVETADMLVQEIFSRNLRDRKAVARYAGLTGAPDESGKKRRERGLAKSGNARVRRGMLQLAWGFLVTSRIACWPSGIAHELQMRAA

SEQ ID NO: 74388 - protein, 471 aa, unidentified
MKKQGKTKTKSEASKPLHEPEPDAAGIDVGANEIWIAVAPDRTEEPIRRFGAFTGELKAIAQWLRDCGIVTVAMESTGVYWIPLYQLLADAGLKVCLVNARHVKNVPGRKSDVRDCQWLQYLHSVGLLRASYRPDQAICAARSIYRYRQNLLTQAAQHVQHMQAALDQMNIKLHHVIDDVTGMTGLAIVEAILNGERDARQLAKHRDPRIKASAATIVKALEGDWRSEHLFVLRVAWENWQQAQQQIQKCDQQLLQYTRQLEACTIVAKPIKTVRLSAELAGSQPIPAWSKRRRKKTSKNEPPGPWREELSRFFGVDLTAIPSVSVLTGITLMTELGNDLGAFKTAHHFSSWLCLCPDNETSASKVLRRATRRSQNRVRQALRMAASTLHHDKSYLGDKYRRLRAKLGAPKAITAMAHQLARVIWHLIVHRVPFDLTIFAAHENANQTRRLKRLSSAARQMGYQLTPIAAA

SEQ ID NO: 74389 - protein, 315 aa, unidentified
MTKHLLPVNVGVDVGKNQLDLYLLERDRALTVPNEEQAILVLVRSLSRYRVERIVVEATGRLEQPFVRAALAAGLPVIGVSPLKIRRFADVIGQLAKTDQIDTRLIAQFAATVKPLPRPASDANAQAIKDLVVRRRQLTSLRTMEKNRRQVMPNDLKPSFDRILKALDRELKSLEQLINLAIDQHASSRHKRELLTSMPGIGNCVAATLIGDLPELGSLDRRQIASLTGVAPFNRDSGTLRGKRRIRGGRAHSRTALFLSAMVATRFNPDIKRFYQRLLTAGKHKKVALTACIRKIVTALNAMLRDNLPWRSAIA

SEQ ID NO: 74390 - protein, 418 aa, unidentified
MLKIVHPNCCGIDVHKKFVVATVGITNKSGVTEYQTKQFSTFTEDLQLLLNWLESHSCFEVCMESTGKYWIPPFNILETGCNVVVANPKYVKGIRGKKTDKKDSIWLCDLHKHGLVPNSFIPPLVIRQIRDLMRYRYKLTNFKSSEKNRIQNSLTVSNIMLSSVVSDTFGVSALKIINQLLDDPDNTTFDVEPMLHGRMKTNAQTVSKSINGHLTEPQADKMKVCFNHYDSIELCIADIEAAVLKLTEPYMRQIEIILSLPGIKNIFTAIAIIGEIGIDMSAFNSAKHICSWAGLTPQNNESAGKKKSVRVSRAGVYIKPLLVQCANAAIKSKDCPYFKTRYDQIKKRRGHKKAIIAVAHMLLNCIYHMIQKDELFDYDLYKEAHKPQQSYPPHITEAVAVRYLQTLGYPIPDLSNTT

SEQ ID NO: 74391 - protein, 330 aa, unidentified
MGNWNVVLGVDVSKLTLDISCAERRLHIKIDNHSKGFAIFKRWCKTNSIELKELLVVMEYTGGYEYRFIQFLESQFIAYTRISGLEIKNSMGMVRGKNDKDDSFRIGQYGEDKIKRLEASRPLNNNILILRQLLSFRKRLVRETAGLKSTLKERIYMFSTGKDDRISKIIRSKIKADQKHQSEIEAEIASIIRQDGEMVKNYRIISSIKGIGRVNAWMTIAYTENFSSFPDARKYAVYVGVIPFGNTSGTTIKGKSKVSYLAQKELKQELNQAAKSAMQHDPEISAYAERKQKTKGYNLVLNNVKFKLILRMFSLVKRGEMYVENYRRAS

SEQ ID NO: 74392 - protein, 355 aa, unidentified
MSEDKYIGLDVHQASVSVAVLDRGGKLTMECVLETKASAIVDFIQGVRGSLAVTFEEGTCAAWLHDLLQPHVNRLVVCDPRKNALLKDGSKSDRIDARKLAELLRGNQLSPVYHGDHGVRTLRELARSYLTLTQDLTRVMTRIKALYRSWAIPCSGAGVYAERHRSEWLAKLSQAGVGQRAKHLYQQLDLLRPLHQQARCALVEESRRHPAVKRLCQIPSIGPIRAALLMALVQTPHRFRTKRQLWAYSGFAVETHDSGEYRYVGGKLQRNRERIRVRGLSDNYNRDLKNIFKSTAVSASTRPGPLRDFYLALLAKGMRPSMARLTLARKIAAITLTIWKKGVDFDAKQLGRQAA

SEQ ID NO: 74393 - protein, 395 aa, unidentified
MFIVGIDVAKRSHEVCMITSDGQPVQRPFSIRNNCTGYNLMLEKIRKHTNIKSQIVFAMESTAHYWLALFTRLRKDGYHVILLNPIQTSAMRDMFIRKIKTDAKDSFIIAELIRFGRYAESNVAQDRLLALKELCRNRFYLVDMAGDLKRKLIALIDRVFPEYEAQFDTIFCKSSVAVLKKYPTPQKLSNAHLDKLTELLWNSSNGHFGEWKARELRELARNSFGVEDCDGAYSTLILLMLDQIQSLSGKADALEKEISRLFQSFDTTVTTIPGVGPIIGAVILSEVGDISRFSSADKLAAYIGVDPSVNQSGEFQAAHAHMSKRGSPYLRRCIWMASQVAVQRDPMFRAYYEKKAAEGLKYMTIIGHVTRKMTAVVFAILRDHKVYEPVLPTAA

SEQ ID NO: 74394 - protein, 356 aa, unidentified
MSHYRVGCDAHKHYSLFAVLDDQGRLREKQRVDHEPGTIRDYLAQFPEGTPVALESVGNWYWIVDEIEAAGCVPRMAHALFAKKMMAHIHKTDKLDAQGLATLEHLGSLPTVWIAPGEIRDARELPRTRMAFSKMRTALKNRMHSTLAKYNLSLDDASDIYAPKWRPQLLQLIDTLPQETARCMHQELEMLGQVQDHIDRLEARIKQRIKVTESMQLVQSLPGVGTVLAIVIALELGAVDRFPSPSNLASYSGTVPKVKSSGGKQRHGRMVKQANNYLKWAFIEAANVVVMKRNHPIWRRKHVSVLYDRIRRRKSHAVAVGAVARHLAEATFWVLTKAEPYQDPMKVSPKQGQARG

SEQ ID NO: 74395 - protein, 338 aa, unidentified
MATTTTIGIDLGKSSFHAIGHDLSGKETFRKKLSRTKLLQMLSVHEPVNVAMESCGGSHWLARKCKSYGHTVKLIPAQYVKPYVKTNKNDFIDADAIAEASTRPSMRFTSPKAEEAQVASMVRKVRSSFMKERTACMNRIGAMLLEFGLSLPRGHSHLKKLFAWIELQNEVLPNSLVCELKTQVEYYQYLSEKIELQEKKLRLINKENIRYHLLQTIPGVGPLTAACCVANVADPKDFSNGRNFAAWIGLVPHQHSTGGKSRMLGISKRGNSDLRELFIHAARSILKKTETAEKHFGEWVVNLKRKKPFNVVVVALANKLARIAWSVMVTNKEFSLKI

SEQ ID NO: 74396 - protein, 436 aa, unidentified
MEESTNFPTVNPHAAGIDIGAEKIFVSVDGIQVRNFATFTSEYRKCMEYLLEHGVKRVAMEATGVYWIALHEMLEQKHLEVCLVNPREVSQVKGRKSDVSDCQWIQRLYSAGLLRQSYIPAGKLKELRIMVREREDLIQMGSAYINKMQKALELMNIKLTSVISQIQGASGMRMIEAILQGERNPQTLLDLCDTRIVRHKSDNILKALEGNYNPTYLFMLNSNLGMWKIHQLELKSIDEKIESLLDELNQDRPSIEDQTKTKDIRHHAPDIKGLHQKMLDLYGVNVGSISGLNDYSLLRLAGETGNDLSRYPTSKHFVSWCQLSPRHKQSGKMFRRIRVKTGSPAGQIFRNAARSLLNSKHIAIGAFMRRIRSKKGAAIAIKAGARKLAEAYYNIITKGNSYVEQGIIAYQNQLKEREFKLLTRLAVKHNITLMPT

SEQ ID NO: 74397 - protein, 388 aa, unidentified
MNKIIYIGMDVHSTNFTLCSFEPGYGFEADKIFGQTQIKEDIFNSTVKYINKLKSMRPDVDVVCGYEAGCLGYNLHRKLKAKEIESVILAPTTMAVSRNCSKKKNDYRDAITIAKCLASSAYKAVYIPDDKDEDVRDFIRMRDDHKTALKQIKQQLNAFCLRHGHHYDKTKWTGLHLNWLRKLELSKLQRETVEEYLVTYETLTSKITALDIRIEDIASEERYAEKVNKLKCIKGIKTHTALSFVCEIGDFNRFKSADKFAGFIGLVPGECSSGNTERMLGITKAGNRHLRRLVVEISNTYRRGTVGRKSVALKERQKDMPKDVVAYADKAINRCQRKYQRMMFKGKNSNQAVAAVARELCCFIWGMMTGHHSRTAQAEASVYRSELD

SEQ ID NO: 74398 - protein, 393 aa, unidentified
MIPRFFGIDAHKNYVMAAAVDAEQESILKPTRVSMADLSEWAAQQLRASDQVVVEVSSNAWAVVDSLRPHAGRVLAANPYKTKLIAEARIKNDKVDATALAKLLAARFIPEVWVPDTPVREQRSLARHRASLQKQSTQVKNRLHHLLQRHNLRCPERSLFSPAGREWLQTQALPAADRLRIGHLLRQLDVLKEELEETDRLIAQEASHDPRVARLMQITGISYTIAFTILAAIGDIDRFPAADKLAAYAGLVPRQHQSGGHDYHGSITKAGNSRLRWLMIEAAHAAIRWDPHWRQVHERIARRRGFSVAVVAVARRLLVLVWHLLTKNDHYRYLQPQTFVTKLQNWAYRIGRAQLPTATAQEFVQHHLSALGLRDLARSLTLQPNGKLRVQLA

SEQ ID NO: 74399 - protein, 344 aa, unidentified
MNNMHYVGLDVHKKTIAFCIKLVDGQIVEQGTVSTNKNELAAWANSLPTSCIIAMEATMFTGWIYDFLQPYALEIKVAHPEMLKAIAAGKKKNDKLDAKKIADLLRCDLLPECYMAPTEIRELRRVLRYRNLIVRQAVQMKNKISGLLMELGAEYNKKRLHGQNYFNELLENLHDVPQSVINLLKLSRSNLEMFKASQKRLLIFLQNNPLIQHRVELLKTIPGIGEVTALTWILEISDPHRFAKNRQAISYCGLCSAEKESAGKSCRGPISKKRNKHLQHVIIEAAKIAPIWNVQLAIVRTQMIAKGADCNTATLEVARKLVCYMLSVDKSGRPFEYRRLNMAA

SEQ ID NO: 74400 - protein, 294 aa, unidentified
MLYAAIDIHKHAFQAAVLDPETGEVVEQRFSADRESLARWAEPWRGRVVAVAIEATTGWRWVWRELVAGDFEVRLAEPVQTRALLGRRRSAKTDRLDARWLARLLAKEMLPQSWIPPAQIQELRDRTRLRKALAEDRRRWGQRLHAYLLHEGWPCSRSNLLRPPGLRWAAALQLPEHARLQVDSLLSVMAALETQLDTVEAELRRFARNDQRCQALQTIYGIGPILACHLLAEIGEARRFRHPDQITRLAGLDPVVDESGESLWVPKTRFPCESAHSQTAIRVLGTRDVLVAAH

SEQ ID NO: 74401 - protein, 336 aa, unidentified
MNKFKAFTGIDISKKTFDAALHFSEKCVVQHKCFSQTTEGFMSFVKWLQSHQVTMKDTLICMEHTGLYTNGIIEFLVDMKANLWVEMAIKIKRSMGLQRGTDDKASAITIAQYCMRFSDRARFWKPVDTRLSKLKNMIVQRDRIVNALRQLSVPIEEMKSCNAAKEAGELERLQLPAIKGLYKAKEKIEASIQSYINSEEIINKSIQLMCSIKGVGLQTAASLFVYTKGFTMFENAKQLACYCGVVPFSKSSGTSVRFKPGVSPFANRKLKSLLHLCAMSALRWDKEIKAYYERKVMEGKNKMSVINAIRNKLLLRIFAVLRDQRTYVENYKLAGA

SEQ ID NO: 74402 - protein, 406 aa, unidentified
MTLYIGIDWSQEKHDVCFVNEKGASLLELKVKQGVAGYKELDEKRKAFKVEASECIVGIESAHSLLIDFLWEQGYRQIYVLPPAVIAANRGRNRQSGANNDRYDGWVIGETLRTDLHKFYPWHPGSELLQMMRVRVKQAEFWTKQSTRLANRLEALLLRYYPAALAVFTSWPSPLICHFVIAYPTPTAAKELTLADFKSFAKSYRYPKPRLLSACYDRLCAAYPEAQPALVTAYASEAVPLAQALLVSLQNEKQNLCLLQKLFLQHADAKIFAALPGAGEWLAPALLVKFGEDRKRFPKPEPLQSLAGTCPVTNQSGKKRSVHFRRSCDHAFRHIAQQWARCAISQSDWAASYFHELTDRGFTATHAYRCLANRLLAIAWRLWQDHLLFDESVLLQNRLQRRKPRT

SEQ ID NO: 74403 - protein, 419 aa, unidentified
MRVIKTKKHRIVNGRTLLVAVDLAKKKHVGYYRCPDGTDIKPFEFSNNREGHQKFYDRICQAKAAHHLEEEVVGFESTGVYGEPLIHFLNNKGIKLVQVNPLHTKRMKELEGNSPGKTDRKDPKVIADIMELGHFLSVVIPEGVSAELRRLTQARERSVERRTAFYNQLQDLVFIVFPEFLEVMKDIKTRSAQYLLRHYPTPQAMLQCGVDELSLVLRRVSCGKLGRQRAEVLYEAAGRSVGIQEGQRSILLEIEEILLGIERGECFIGKLEREMRRLLEQVPYSRSILSVKGIKAVTAAGLIGEVGDFRKFRTVSELLKLAGLDLFEISSGNYEGSRHITKRGRSLLRKLLFFASLNMIRKGGVMHEPYQRYIGRGMPTHKALVAISRKLLRILFALIRDHREYVVNYSERENLKLAA

SEQ ID NO: 74404 - protein, 517 aa, unidentified
MGPSTAITTLVTPSSEGDPVLGDCTLFAARTSHLPSKGNDMQKDKYTKTRSKNNRKTSTSADSNPVLHADAAGVDIHPTAIFIAVPPGRDRNVVRKFSTFTCDLVEAVDWLKHCRIRTVAMESTGVYWIPLYQMLNDHGFQVCLVNARHVKNVPGRKTDVSDAQWLQYLHSVGLLRGSFRPPQEICALRSISRHRESLLEMGAVHIQHMQKALDQMNLHLHHVIDDIVGVTGLAIIEAILAGERDLQRLAKLRHCRIQCSEETIMKALEGDYRREHLFVLRQSLNSWRHRQQQIAECDAELESLTRQLEAKSNQEPVPLAPCPRKKVSKNQPKGEWQPLLTQAFGVDLTEIPGVKTATVQTVFMELGTDWSCFPSSGHFSSWLNLCPDVELSNGKVVHRHRRRTQKRLRCALRMASLSLHRNQSPLGYEFRRRRSQLGPAGAITAMAHKLGRIMWHMVTYKVPYDEAVFSTAEKKHQQRHQKNLIKRIESMGYRVITAQKPDPGAIPLVPQVPAQVP

SEQ ID NO: 74405 - protein, 325 aa, unidentified
MSSNGITFVGLDAHKNSISVAILPAGRGRVVEWQVANEPAAVRRLARKLEREAPGEVRCCYEAGPCGYALPRQLQAAGVICEVVAPSLIPVKPGERIKTDRRDAIKLAELLRAGLLTEVHAPTEDEEAVRDLCRCREDAREDLTRVRHRMSKFLLRRARIYSLTRKAWGKLHRQWLRGLKFERAADQAIFDDYLLALEQLEERLCTLEARLDAVARQEPYREPVAWLRCFRGINTTTALSLVAELHDFRRFTSAPALMAYLGLVPREHSSGEGRRQGAITKTGNRHVRRLLVETAWQYRHRPAVGLGLRQRRRGQPARVVQFVPI

SEQ ID NO: 74406 - protein, 346 aa, unidentified
MKYFAGLDVSLEETAICVVDEAGAMVREARIPSEPEALVAFFQGSGLVMERIGLEACSLSAWLHESLVAAGLPAVCIETRRAKAAMGAMPNKTDRNDARGLAQIIRTGWYRAVHVKSPACRSWRALLTARRLLLNKMRDLENGLRAVLREAGLKLGTPTRKEFAARVRELTAADPVLSVLAEPLLTIIAAMTRELAQLTKRVLEIVRDEPVCRRLMGVPGVGPLTALTFRATIDQPERFRHSRDVGAHLGLTPKRYQSGETDVQGAISRCGDELARTALYEAAHSLLVRSRRWSALRAWGMQVAKRRGMARARIAVARKLATILHRMWADGTEFRWGKEGTMPAAA

SEQ ID NO: 74407 - protein, 430 aa, unidentified
MKSNTQNAKIEAITEKTLVLGIDIGSETHYARAFDHRGIEYSKKPFKFSNTEAGFVTFKEWILDLKEKHEKDKVVPGMEPTGHYWFNLGKFLQDNEMKPVLVNPHHVKKSKELDDNNPTKNDRKDPKVIAGLVREGRYMIPYLPDGVYADLRTASNIRFQLQAELTRIQNRISRWFNIYFPEYKTVYGKPDAKSGMLILKQAPLPEDILTLGIDGVNQIWRDAKMRAVGKARAKTLIEAAEHSVGSKEGAVSARMEIRMLLEDYESRNIRLQEVMTLIEELVNQIPMAEKLLGIKGVGIKTVSGFLAEVGDISRFNNPKELQKLAGLALVENSSGKHKGKTTISRRGRKRLRYLLFEVAMSLVAKNPEFRELHTYYTTRRLNPLKKMQSLMAVAAKLIRVFYAMLTKGVDYDPKKMVGDIKRPAVYLPAA

SEQ ID NO: 74408 - protein, 344 aa, unidentified
MANLNQFCDFTKLIGIDIAKSVFQIYSCDTQTGEITNVQIKRDKVLESLANCGKCLIGMEACGSSQYWARKLQALGHTVRLMDPKLVKPFVRHNKSDKADAEGVYHALVSGVRAVAVKTETERDIQTLLTMRALLVKQRTARINHVRGLLAEYGHVMPKSVDQFDKKVDECINSLEGDAVQLVIDMLRDTIKSIRDEHDRIKTLQREISRLANQTRNAKHFLTVPGIGETIMAYMCVLLADPTQFSSGRQFAAYLGLVPMHTGSGGKTVTTKIPGRCDKALRALLVQGAHAVARSKYRTDWVKNILAKKPKKVAMVAIANRMARQCWAVASKGHDWRRMPVTAA

SEQ ID NO: 74409 - protein, 443 aa, unidentified
MLSDALHVCNPHAAGIDIGEAEHWVAVPPGRDPQPVRRFGTFTVDLDALADWLIDCGVITVAMASTGVYWMPLFELLEARGVQVLLIDPRQAKRAPGRPKTDRLDCQWLQRLHAYGLRAGAFRPDDQVCVLRAYLRHRQRLLTYAAHHIQPMHKALQQMNLKLTQVVSDLTGVTGMAIIKAILAGERNPQHLAKLRNPHCHHDADDIAKALQGTWRAEHLFALRQAVELYEVSHQQMAQCDQQITRHLETFADKSDGQPLPPKARRHKKTNEPRFDARTPLSRLAGVDLTTIEGIEENTALILLSEIGTDMHRWPSVKHFCRWLGLCPQHKISGGKVLSRRVRPGAHRVTVALRLAARRLHHSQSALGAFFRRMKVRLGTPKAITATAHKLARLVYSLWQHGSAYVQQGLDAYEAQYRERKVTTMAKQAKALGYTLVLLAAQG

SEQ ID NO: 74410 - protein, 344 aa, unidentified
MQVHFVGLDVHKQVIAFCIKTPSGEIVREGTVLARRESLDQWVATLPGPWHGGMEATMFSHWIYRHLEPHAAQLEMGHAARMKAITAGKKKSDKIDARTIADLLRCNLFPACFVISPELGALRQQLRFRGLLVQQRVRFKNKTAGLLMEAGVEYQRRRLHGQRYFQDLLQHNAEIGEHLRPLLEFNHREIQTLRRMDGQILVRLQQHPRLQARVKHLQTIAGVGQITALTWALEIATPQRFPSIKQALSYCGFTSALRESAGRQMRSPLSKQRNRHLQSVLIEASKLAPRSNALLREVHRKALQKGAHKNRATLQVARKLVAYLLAADRAFGAQESLAAAPAAA

SEQ ID NO: 74411 - protein, 366 aa, unidentified
MSSLVYIGMDVHQESFSLCALDNGTGEILLETQCTAEINNVTKFIDRLAIDKSQCVLGYEAGIWGYSLHNRLEELGYDCVILAPSTMYSNAKHTMVKNDRQDAKMIAHNLAAGTYKSVYVPDEEDDQVKEFIRLIKSYKKELKQTKQRIHAFVLRNGFRYERCPWTNIHLEWLDQLKLPELKRQVLDEYVTHYRNLKDNIDRLTTQLDEIAQNDRYQAPIGKLCCFKGIKAAAAMTIHIETSDFSRFPNAKAYTAYLGLTPSEHSSGNKVSLGRITKQGNSVIRTTLVECAQSIVRGNPYVKSKALKARQADQSGKVVAYADRAIKRLQKKFEKMIHQGKARNIAIIAVARELACFIWGMENNKVA

SEQ ID NO: 74412 - protein, 366 aa, unidentified
MDAIYIGVDFHSRQQTICYLTTETGELVIRELKHKDKEQVRAFYRQFQGSVIVGLEASGYSPWFEALLEELGCVVWLGDATEIRRRARWRYKDDRRDAELIWDLMVHQEFPRLHQPTLPSREILRMLRYRQKLIKVRTMTKNSLQAIAMQAGLAKGHQLFTAAGQVEFKAVAMSPVLQYQRDHWFELLKPLNQELLETMKWCKAAAKGEAAIARLRTHPGIGLLTSLCLLHTLQPVSRFRNQRKVVAYAGFDPMVRRSADSAIHLGISKAGSRMLRYLLVEAVHTAIRNDEDLKRFYQRLAERRGRPKAKVAAARKLLIRAYILLRDEIDYAEFKRRAVAARLARRSQGPPSVPEVLIGQSASPGA

SEQ ID NO: 74413 - protein, 362 aa, unidentified
MRTVKMQDYIVKIKKIFVGLEDSKKTWKVAVRCEKMLIHQTTMPVDYQNLRSYLRNKFPACTIELIYEAGFHGFWLHDLLVSDGVTCVVVPPHTVTEEKTSRVKTDKRDARRLAQNLENGDYKRCHVPDRERREDRQISRTLEDVQHTIVATRNRIWKMLDFHGITVRFAGTVPTKKDIRDLRNLKIPEMVGNALTAYVDLLEFLWNQQEQLREQLRAMTEKEKYKKTFDIIHSAPGIGWFTAIRLVLEWGEDLTRFASKRHIASFVGLTGSEHSSGETVHRGHLSGLGHQRSRSWLTECAWVSIRKDPVLLDKYKRVLRNTGSKKKAIVAAARKLVGRILRCVVSGQPYTVGLVAVGCEPS

SEQ ID NO: 74414 - protein, 372 aa, unidentified
MGHHTEAFVGIDTSKLRNAVAIADSGRGGEVRYLGEFPATEAAIRKLVAKLAAKCCHLTFCYEAGPTGYGLYRLLKSLGHDCLVVAPSLVPKKAGDRVKTNRRDALSLAKLLRAGELTAVWVPDERHEAMRDLSRARLAVKKDLQGKRQQISSLMLRLGRIYPGKTTWGPAHMRWLMEQKFEHREQRIAFEELLEGIRQESERMERLEDAIREVVPEWSLAEVVTALQAMRGIDLIAAVGVLAEIGDLSRFQNPRELMGYLGLVPSEDSTGDRVKRGGITKAGNGRARRILVEAAWSYRYPPRVSRDKRPKVEAAPRRAREIAWKAQTRLCGRFRSLERKGKRRTVIVTAIARELSAFIWAINRELMAPPQA

SEQ ID NO: 74415 - protein, 415 aa, unidentified
MALKIVYKICCGIDVHKTFVVACIASTDNKGITSYESHRFSTYTSGLKDLLQWLLTRNCKDVCMESTGKYWIPVYNILESDCSIVLAHPKYVKAIRGKKTDKKDAKWIADLFKHDLVAGSFMPPADIRQLRDLMRYRFKLTCFKSSEKNRLQNCLTISNIQLGNVVSDTFGKSAQAILDKLLENPADTSFDLEPLVFRSLKKKLPELRDAIDGYITPEQAGKLKIIKAHYENLESRKAELEKLILALAAPYQQELTILQTAPGISSPFTAIGIISEIGTNMEAFPSAKHLCSWAGLTPTNNESAGKKKSVRVSKAGCYIKPLLVQCANAVVTSKKHPEMRNRYLRLRKRRGHKKAIIAIARMLLTALYHMLKNGENYNAELYQKSDLPPVDREITVEQALIITRNQGYKIKSATI

SEQ ID NO: 74416 - protein, 343 aa, unidentified
MQAITTIGLDIAKSVFQVHGVDAAGQVVIRRQLKRRQVTAFFRKLAPCLVGIEACASSHYWSRELQALGHSVRLMPPAYVKPYVKRQKNDAADAEAICEAVTRANMRFVATKTPEQQSCLTLHRTRHLFIRQQTSLINAIRAHFAEFGIVAPVGRKGVEELLHVVADAGDKRLPEVARACLAALGAQLRMIKVQILNFDRMITAWHRSNETSKRLDELPGVGPALATALVASVADPKAFRSGRDFSAWVGLVPKQSSSGGKQKLGSISKQGDRYLRGLFTAGALAVIRYAKIHSTSHRPWLTALLSRRPTKVAALALANKIARMAWAMMARGERYREPVALAA

SEQ ID NO: 74417 - protein, 380 aa, unidentified
MRPVTTSKTQSMASPAVLYLAFDLGDRRWKLAFTTGLGQRPRVRTIPARDLEQLDHELARARTRFGLREDARVVSCYEAGRDGFWLHRALVARGIANHVVDAASIEVNRRARRAKADRLDAEKLVLMLVRAEHGDPRTWRTVQAPTPEAEDARQLHRELDALVCERTAKRNRIHELLATQGVHLSLTSEGVAALATARCWDGAPLPPALGARLVREWRDVEYLTQRIEAVKALRDGAIASDASPAYQQIRQLMRLRAVGPTIATVLVLEFFSWRAFRNRRQVGGCAGLTPTPFQTGTSLRELGISKAGNRYVRYLAIELAWSWLRWQPQSALSQWYRRRFGEGGPARRRVGIVALARKLLIAMWRYVTTDELPEGTVLKA

SEQ ID NO: 74418 - protein, 366 aa, unidentified
MEKIMTPIGTPVGIDVHKRSCQVVEFDHGGIKVRKSMTNTREGWLEMVAELPPDAEIGLEVSTAGYFAMSVLEEAGWRERAHWVHTAGIDSNRRQKNDRLDAERLARKLAAHHLDPLPEAWFPPPEIRALRLRARQRCWLALLRTKAKNHLQSLLGMHGLQAPGTDPFGAAGEKWLAEQTLPMPLSESIPQIKRLLKFLEEEIKVSEKYLQAVDGQFPELTLLRTIPGIGPILSAVIWSEIGTIQRFRSAKALANNTGLVSSFYDSGDVKVSGPITRQGSRWLRWALVTAANVVIQYRNPFARRYHRLRRGKKPNVAKAAIAHSLARCVYGVLKHGCPYREDRWGRQVGVLEQEARAGARSTKTAL

SEQ ID NO: 74419 - protein, 320 aa, unidentified
MSTTGRTTCYVGIDVSKATLDVAILPTEECFAASNDEAGIEELIGKLAELPEALVLLEATGGFERPVVAALAASGVALFVVYPRQARDFAKATGQLAKTDALDALVLARFAQAIRPTPRTIPDQEAREFGEILARRRQLMRMLTAEKNRLGASGFEAVRGRIEAHIRWLEEELARTDRDLDETIEKSPTFKANEALLRSVPGVGPVLCRTLLAELPELGSLSPKELSALVGVAPLNRDSGTLRGRRTVWGGRARVREALYMGALIASRFNPAIREFYERLLTAGKPKKVALVACMRKLLIILNAVMRDRTPWRSPHTLHP

SEQ ID NO: 74420 - protein, 339 aa, unidentified
MENFVGVDLHRRVSQLATLREPKPASQLRFPNHTVTVEKVLKKLPQGSKIALEATGSWWWFVDLAQRSGHEVVMSHPKQTKAIASARLKSDKVDALMLAKLLKADLLPTVWIPPAAQRYVRELLTHRARLVRQRTSVINELHALYAKRNIDPGMIFHRVRPPAFRAEDLGGYGPRIVEEDVAFLGFLNRQVQGLDKELKAIAEKDPESKRLMTIPGVGPVSAVAGSCWIGKIERFSNSKKLSSYFGLAPKVRQSGERERHGHITKEGNRMVRSLLIQAALWHVRRGPVSSRKHYLGVCKRRGKQIARVAAANKLLGIIFQMMKEKIDYEEFLRRGGNAQ

SEQ ID NO: 74421 - protein, 416 aa, unidentified
MIDQETFTWFAAIDWGTERHQACVLDARGGIAGERAFSHSGAGLALLCDWILSIAGSATVVAVAVEVPHGPVVDSLLDRGMAVHAINPKQLDRLRDRFCVSGAKDDRRDAYVAADGLRTDRHLFRRLHVADPRLVELREWSRLAEELQQERVRLSNRLHDQLWRYYPQMFGISDDIAADWLLDIWTMAPTPEKSKQLRKTSVEQLLKRNRIRRIDAETVLRTLRQPAIKVAEGVTEAATIHIRSLITRLRVVNRELRDATHKLDELCADLDEAPPAAAEHGGEQHDIKILKSMPGIGRINLAILLAEASGPLSRRDYQALRTLSGVAPVTKQSGKSRVGVRRYAAHVRLRDAVYHWARVATQHDPKSRSRYVALRQRGHSHGRAIRGVADRLLALAYTLLQRQTVFDPDFGTTKVA

SEQ ID NO: 74422 - protein, 335 aa, unidentified
MQVYGIDLSKEKFDVSFTNLNGKEKKQQVKNKVVSISKFLETLSCDSVLVAEHTGSYGDLLVYLSNQLNINIALVPGYNIKHSMGLIRGKSDPIDAKRIREYGERFFDKLKFKVYDDETIIELKALYSLRSQLVKSRKSLRTGEHGRSQVPMQSIAVNTHIKRALLALGKEIESLDGEIECLIKGNEATKENYELATSIKGIGPVIAADLIIKTGNFQNIDTARKASSYAGVCPFPNTSGKMVGKSRTSPFADKKLKALLYMGAKAAVKHNKEYRLYYQKKKQEGKPHYLIMNNVSNKMLRTIYSVVKNRTPYRQDYICLDPRETNINSSTEKVA

SEQ ID NO: 74423 - protein, 415 aa, unidentified
MEVFLMEILYDRCCGIDVHKKLIVACFKCGKKQEIRTTGTTSDEIRDLTQWLLDGKCQMVAMESTGSYWKPLYNIFEILGLDVIVANARDIKNVPGRKTDVGDAEWIADLLKHGLIRASYIPSREQRELRELSRYRQSLIGERSRELNRLQKMLEGGNVKLASVVSDVNGRSARNLLKAMLESDSPLTEDRVSQLVHGRLQSKVDAIVKAMNGFFTPVQKALIRKVVDHIDDMTKRIGEMDDMLREYLQPYEEAIAKLDEIPGIARRSAETILIEIGLDMTRFPSAGHISSWAGLAPGNNESAGKRRHSRTVHGNSTLKSALVQCAKVASKCKCYFRAQYQRIVIRRGANRATVAVAHSMLIAIYHMLKDNQAFRDLGEDFYMAFNREKKINRYLKQLQKLGWMPDMTNAALATA

SEQ ID NO: 74424 - protein, 355 aa, unidentified
MNSEKYIGLDVHQATISVAVMDCRGKVVMESILETKAATLLEFLAGLRGTLSVTFEEGTWAAWLHDLLKPHVQKLVVCNPRKTALLKDGNKNDRIDARKLAELLRLDNLKPVYHGQTGVHMLRELARSYLTLVKDLTRVMNRLKAMYRSWAIPCAGRDVYYTRHRAEWLSKIREAGVRRRAEHLYQQLDMLQHLRQQARRELLAESRKHAITAKLRQIPSFGPIRAALAVALIQTPHRFRTKRQLWAYSGLALETRTSGEYCYVRGQLRRSKKQISIRGLNKDHNHDLKGLFKAAATRASVQPGPFQDFYQRSLAKGIQPTMVRLTLARKIAAITLTLWKKGENFDVEKLKSQAA

SEQ ID NO: 74425 - protein, 347 aa, unidentified
MVIIGCDFHPSFQQVAIFDNRTGEIREKRLQHRAEAEQFYSALAGQEVLVGMEACGHYPWFERLLEGLGIELWLGDAAGVRASVVRQQKTDRRDAEHLLDLLREDRFPRIWVPSLEVRDVRQLLVHRHKQVQARTRTKNQLQAMALSCGVQKKYKLWTKAGREELEQLPLLPYAAQRRKRLLEALDGLEVEIVELDRQVAEEARQRPEAVRLMTHPGVGTVTALAMVLTLGPAERFGSGKQVGSYFGLIPSEESSGGKQRLGRISKQGSSFLRFLLVEAGQTAARYDPQLKRFYRRLAVRKNRSVAKVAVARKLATRLYLMLREDWTYAQLCQAVMQVSPSHSVAGE

SEQ ID NO: 74426 - protein, 363 aa, unidentified
MPEGIQGVAGLDAMVADHFPEDWIQLESEQIQGLVKVGIETDRGPWVAAALVAAGYEVFAINPLSVSRYRERHSTAGANSDAGDAHVLAEIVRVDRAHHRPLADDSEEAEAIKLVARTHQSLTWERSRHVLRLRAALRDFFPAELEAFADLDAPDALELLAAAPGPDRAGRLNRRQIITALRRAKRRDVEARAAELLQIFGAEQLRRSAPVETAYAAIVASQATIIATLNTQIDQMATVGEAHFGRHPDAEIYANQTGLGVVLAARVLGEFGDDPHRYTDAKARKNYADTAPITRASGKKKIVLARYARSRRLGDALQQWAFCSLRGSPGARAYYRQLAPAASDTTPLCARSRTASSASSTAA

SEQ ID NO: 74427 - protein, 395 aa, unidentified
MHKEKHCAVVIDCWMEKIGEVNFENKPSKFPAFVEDIRKICGTKEFVFGLEDTRGYGRNLASYLTGRKLEVKHVNPAYTNAVRLSNPIIYKDDSYDAYCVARVLRDMMDTLQDAKHEDIYWAIRQLVKRREIIVKYNVMNKNQLHSQLSYSYPSYKKFFSQIDGKGALCFWENYPSPVHIWNSTPEQIYETIKAVHRAFKIERVHAIIDMIKNDGNTQKGYQEERDSIVRNIVKDIKNNQELLKDIDEQLRKLLPQTGYKLQTMPGIDLITEAKLVSEIGDINRFPNSDKLARFMGLAPVHFSSAGKGKDERCRSGNRELNAIFHFLAIQMVAISPSGKPRHPVFREYFEQKVKEGKNKPQALICIARTLVRIIYGMMKTKTEYKPYEKKEKEND

SEQ ID NO: 74428 - protein, 376 aa, unidentified
MSKVTMIGCDLHDRNMLLQVAVGRGKPWQLEFRNDAKGRLKMISGLKKIALEKGNGRIVLAYEASGLGHNLSDQLHDAGIQCHVLSPNQLPKTSKSAKLKTDAKDAMMLLEQVRGFVLAGNSMPAVWTPPKQLRADRELVRARVDSGDEITRVKLKLKSFMKVNQLSLESPTERLWTKAHIREIRKVLLDQLDFSLATKLDLLLQRLEYYQQEQLALDRAIKTLSGSQRYAAACQQLRNLPGVGLLVAMTFLTEMGDLNRFNNRREVAAYLGLCPASHESGNTDNRKGRITRQGPARLRKMLCQATWVAIQRCQEAQAAYHRIRQDQQKRTKKALVALMRKLAIRMWHEAMSMGVSPELEGRGGPSAMLDHAATPA

SEQ ID NO: 74429 - protein, 411 aa, unidentified
MDKIYDKCCGIDVHKKLIVACFRCGKQQEVREFGATTRELLELADWLKEGGCEMVAMESTASYWKPLYNILESSDLNAMVVNARHMKAVPGRKTDVKDAEWIADLLQHGLLQPSYIPDKDQRELRELVRYRKSLVGERTRELNRLQKMLEGANIKLSGTVSDINGKSARSILEYLLAGESIDESKYDEMYEQKIIAHNLKATKEQIIDDLNGVMSPLQRRMMKELLVHLDELNVHIKNLNDEIDNFMKPEEKQASQAIQDVTGIGNTSAQAIISVIGSDMSRFPTDRHISSWAGLCPGDNESAKKRKSGKTRKGNSLLRTTLITCAHAAVKNKKSYFYAQYMRISAHRGPKRAYVAVAHSMLISIYHILKAGVVFKDLGANYYNQFNKERKINAYLKKLKALGWEAPVVAA

SEQ ID NO: 74430 - protein, 348 aa, unidentified
MQRYIGLDAHAISCSFGVINEKGKKVGQAVVETNGAALVEHVKSIPGSKSLCLEEGAQSGWLYEILSPHVDLLVVTRLVQKSQGGKDDIRDAFRLAEMLRLNNVLPVFKERGQFSRLRAQSDLYGKVNADSVRVQCRLKALFRSRGVSTTDGDVYASAQREQWLNRLPVAYRSAAEVMYEQYDAACRTKLQAAEQLKKASHAHPISRILQTAPGMGAIRVAQLMAIVVTPYRFRTSRQLWSYSGLAIEMRSSSDWIPGPEGWQRANLNRTRGLKRQYNRTMKHIFKGAATTVLQRRMQPLYNDYLKQLEQGTKPPMAKLTLARRIAATVLAMWKNQEAYDPDRYRVQR

SEQ ID NO: 74431 - protein, 420 aa, unidentified
MLAESEDEEQIIERVAALDIGKAEVVCCVRIPGPGKKRLQEVSTHSTMTRSLSELANHLVTLGIERVVMEATSDYWKPVFYLLEAHGLQPWLVNARDVKHLPGRPKTDVLDAVWLCKVAERQMLRASFVPPHPIRQLRDLTRYRIDVIGERGAEKNRVEKLLEDACIKLSVVASDIFGVSGRQMMAALIAGERDPKVLAQMARSRMRTKISQLEEAFTGHFDNHHRFLLTRMLARIDAIDADIAAIDAEIEAHLAPFASAAARLDDIPGIGPVAAAIIIAEIGTDMTRFPTAGHLCSWAKFSPGINSSAGKTKGNGSTGHGNRYLARVLGEAAVGAARTDTFLGARYRRIAKRRGKKRAIVAIGRSTLTIIWHLLNDDTATYADLGADHYTRHANPDTKKRNHVRELQALGYKVTLEPAA

SEQ ID NO: 74432 - protein, 408 aa, unidentified
MPDLNLPAWPVFAGIDWGGENHQLCVVAPDGKRLLETRVSHDVAGLHQLDLHLNGFGRQVPIAIERSEGLLVEHLQATGHAVFPVSPRISARARERYKVAAVKDDRFDAFVLADTLRFDHAHWRPLSVPSPLLAEIKALTRDRDRLLETQQATESQLRMILEAYHPAPVRLFSSVDRQITLSFVTDYPTPANASRVKTTRMAGFLSRHHYTGRVPAQTLADRMRQNLLSGSPGTVAGKSFSALAFTQVLQLLNTQLAEYDDAIAAATAAHPDALIFASFPGIGPVLTAVLLAEIGEDRARFPQPEVLLAEAGLAPVTRSSGRSRSGRFRYAANSRLREATMWWAFNSIKMSPWAAAAFRDARDQKGQRYHRALRGLAARWTRILWRCWTNHETYDPARHGSAALITAA

SEQ ID NO: 74433 - protein, 338 aa, unidentified
MRLYCGIDLHSNNSYLVVQDERDRAVYRRRLRNDLRVILQELEPYNEELAGIAIESTFNWYWIVDGLMDAGYRVHLANPNAMQQYNGLKFADDQSDARWLAHMLRLGVLPEGYIYPREQRALRDLLRKRGRLVQQRTAQILSLQGLVQRNTGQRLGGQALRKVELAELEPERPDANRTLALEATRRVVECFDVEVQQLEQEVLRQLKPDPQLRRLMTIAGVGKVLAPTILLEAGTVERFASAGNYVSYCRCVGSERLSNAKTKGKGNRKNGNPYLAWAYTEAAHFAIRHHAPVRRFYERKKARTHQVVALKAVAHKLARASYYVMRDRVPFEIERAFG

SEQ ID NO: 74434 - protein, 319 aa, unidentified
MNALTDPVILGVDVSKEWLDIHRQGDAEVTRIDNTRIAIDAYLKPYRGAAMAVEATNRFHELMVERARRWGVTVYLISGYELKHYAVSVRRRMRNDPIDAQLLSRFLTRERDQLTPYQPRPAQLNRLWQLLKRRALLVKQNEQRRQSFAAVSDLRSIERSLARHYQRALTQIDRQLLALSRELDFTADLTRLRAIPGIGNLTAYALLVAYRSGRFVHRDPFIAYLGLDVRAKDSGKHVGQRKLTKHGDGEYRRLLHCAAMACRHHPHYQRRFDALINRGLAKTAALVVLARDLARLAFTLLHRQLEFDENRLSRACLET

SEQ ID NO: 74435 - protein, 339 aa, unidentified
MQKKYFIGIDVSKHTLDVAFIIKELTSFSKPVWKQFDNTPGGLKQMQKWLSQMHIPLSNQTIVVIENTGIYHRLLWQFFSALHVDLCIENAAQVKWSLGIARGKNDKVDSRRLALYAARHIDRLKPTPALNQQVLTIKDLLTLRNKLLMQINSLKTGIKELKNIHVSGSLDVDSKKLLQPAIKGLNQTLKKVEQQIKEMLKAEKTLFDIYKRLITVPGIGHVTATYLICCSNVFTMCNSGKQLACYCGVVPFDHQSGISIRGKHHVHKMANKELKRLLYMCALSSIQNYEEFRAYYDRKKQEGKHPMSILNAIKNKIVLRAFAVVKNEREYVDKYKKAA

SEQ ID NO: 74436 - protein, 390 aa, unidentified
MLKYSVGLDVSAKDIHCCISVIDTAQRVTVRATRKISNNNKGFGELDDWVQRHRKQKDLPLAVCMEATGVYYEHCAMYLFKAGYTVSVILPNKAKKYLQASGAKSKNDRIDAKGLAQMGAEKSLDPWEPMGEFFYQLRELTRHEQSLQELKTAISNRLHASNRGMYLNKEVIKQLKAQLRLLEKQVATCEKLTVDHMEANAEVFAKANKICQMKGLGIKTVATLVAETNGFLLFKNARQLASFAGYDVVENQSGSHVGKTRISKQGNSHIRRILHMPALGVVQYNVKPFVYLYERTVAKHGIKMKGYVAVQKKLLTTIYALWKKNEDFDEGYKTKQHTEEQEPVLPLGSAALAAGATAPAVVKHVVPTSKLALHKVSMPSEQSPYASSRV

SEQ ID NO: 74437 - protein, 330 aa, unidentified
MNYVGLDIHTENIVYTVLSEEGNVKMRGKILNNSDELIEFLRNFEDGDLFVMESTGFYEPIYDAIESKGFKVKLANPLKVKLIAESRIKNDKIDSEILARLLKNNWVPESYVPDKKIREIRRIVRTRINLKRVSTGFKNRIYMELKRLKIDYDGNLFTLEGRHFLRTLNNFRINIYLNSLEDIEKELKIIENEIQKYSDIEEVKLLMTIPGIGLFSALIIYSEIGDINRFSNSRKLVSYAGLNPTTRQSSDIIYHGHITRQGSPYLRWILTECIHIHLIKDSHSNLSNYYRKMVKRIGKKKAIVASASKLLKIIYWILKEKREYIKNYAQ

SEQ ID NO: 74438 - protein, 370 aa, unidentified
MTTAPASVTVIGGVDTHKQTHYAAAIDDQGRLLGHREFPATDSGYRHLLAWMRSQGQVLAIGVESTGSFGATLTRALTKAGERVVEVNRPNRVARHMDGKSDRLDAEQIARAVLGQTSTATPKTKSGAVEVIRTLRVTRASAVKARTQAFNTLWGVMIGAPSPLRDELVVLTKRTLVNRCLRLRPETDDLLALTFHPDRLLLAAVKTSLRDLARRWKALDGEIKALNRQIDVLVRAAAPDLVELHGVGVEIAGQFLVTAGDNIDRIRNEAAFAKLCGVAPQPASSGRSSGRHRLSRGGDRAANSALYIVTIVRLRHHQPTRDYVDRRTAEGLSKREIIRCLKRYIAREIYANLPRQAPPAQPATTTPAAA

SEQ ID NO: 74439 - protein, 411 aa, unidentified
MDLLYPCCAGLDVHKQTVVACARIVCDRDVAKDIETFGTTTEDLLKLSDWLTERGCTHVAMEATGVYWKPVWHVLGDGGFDLILANAAHVKNVPGRKTDVADATWLAELLAHGLIRASFVPDAATEAMRTLLRTRKQLAREKASHTQRLQKTLEDANIKLDSVISNVLGASGRAMIEALIAGETDPAVLAALARRLKAPNDKLRAALRGRVTRHHRFLLRLHLNQIDALDAAIAAIDREVDAQLAPFRTAIRRLSSIPGIGDLGAQVIVSEIGTDMGRFPTAGHLLSWAGLCPRNDESAGKRRSTRLRHGAPWLKTTLVQCAWAATRKKDSYLQAQFHRLRARRGAKKAICAVAASILTAAYHMIKDGTFYEDLGADHFDKRSNASHTRRLIRRLANLGYDVEIKPRAAAA

SEQ ID NO: 74440 - protein, 421 aa, unidentified
MRGLRRRGLRAVKEGTLIATVDIGATTNTGYCTTVDARDMKVFKFGNSREGFEKFWHMIITARNRFGCDDVIMGYESTGPYAEPLVHYLRDKPVRIVQVNPLHTKRLKEVNDNSPGKTDDKDPRVIADIIKLGRALSVVVPEGDAAYLRRLNNARERHVCEHIALLNQMQQLVFLIFPEFKTLIAPMRGRTVRFILKKYTTPESIGALTKEVFGEEIRKKSMGKLGIKEAELLVTAARHTVGIKEGVPGIALDLKHIIAQLEVVERFMSEIEAEMVMTLDRIPSSSRLLSIKGMGVVSVAGLIGEVGDFSKFKTQSELMKLAGLDLYEVSSGKRKGQQRITKRGRSVMRKILYFAVVQMVKKHGIMHEYYERLTGRGTLRMRALVAAMRKLLRIIHAMMRDERDYVGQYEAPKRRMIKKAA

SEQ ID NO: 74441 - protein, 392 aa, unidentified
MSKVIMIGCDLHDEKMRLRMAADAGKSVAKSLATADVAGLVDWARDFAVQQGASRIVLAYEASGQGFGLYDALTDAGIECYVLAPTHLPHTPHGRKNKTDDKDAQMILDEVRGHILAGRKLPAVWVPDPQTRDDREIVRMRLEMGEARTRIKNQIRNLAKRSKLAFPAWFTKSGEWSKRSLAWLTEAAQGTAGNLAEGVRTGLTSLLALYGEFSRQLGELDKAVAQLAGRERYAQVFRKLKLMPGVGTLTAMTFLTELGSLARFANRRQLSAYLGLAPTAFESGQQDDRKGHITRQGPARVRHMLCQASWAALRASDQWRATYEKLKRGSAKRSKIAIVAVMRRLAIAMWHTARSTELDGLLHEIDQQRTSAPARQKGPPLAPYALASACCE

SEQ ID NO: 74442 - protein, 400 aa, unidentified
MRSIGMDVHRSFAQVAILDGGRFTQEVRLELDHDAVVAFGQSLRADDEVVLEATGNTAAIVRLLTPFVARVLIANPLQVKAIAHARVKTDKVDAKILAQLHLAGFLPEVWAADDATQNLRRLVSERAALVRSVRRVKSRVQAVLHANLVPKYAGHLFGKGGQRWLAKGPLPKPERDLLARHLDELDWLTAKLEKLDRELVRISLDDTRMRKLMSVAGISVVTATAVIAAIGDIARFPTPDRLASYFGLTPRIRQSGDRSAIHGKISKQGNATARTMLIEAAWSAASVPGPLRAFFLRIKERKGVNVAAVATARKIASLIWHLLTKDAPYRWARPAFVAMKMRKLELRAGAPKAHGPAGPGRDYWIKEIRHRELELVAQAELAYARMVEAWRDKPPKPQRG

SEQ ID NO: 74443 - protein, 455 aa, unidentified
MVKQKANKPTAIETVNISAAAVDIGSRMHMAAVNPDVAEMPVRAFGTFTHNLHDLADWFKSHGVTSIAMESTGVYWIPAYEILEQHGFEVILVNARYAKNVPGRKTDVSDASWLRQLHSYGLLRGSFRPSAQIATLRAYLRQRERLVEYAAAYIQHMQKALMEMNLQLHHVVSDITGVTGMRIIRAIVAGERDLDVLASYRDVRCHASVETIKAALNGNDRAEHIFALTQSLDLYDFDQAKMLECDRNLEAVLDTLAANQDHDLSRLPRVRTKRKQVNTPSFDVRAALFGVLGVDLTQIHGMGPSLSLKLVGECGTDLRAWPSAKHFTSWLCLAPGNKISGGKVLSSRTRRSSSRAAALLRLAAVTIGRSDTALGAFYRRLAARAGKAKAVTTTARKIAVLFYNTLRHGMTYQDPGASHYEERYRNRVLGNIKRRAKSLGYDLQKLPNEAEMAVS

SEQ ID NO: 74444 - protein, 414 aa, unidentified
MIEVINKACGLDIHKLFFIATILCRSGEKQQKRFNRTDDDILTFKKWVISEKCNVVACESTSDFWVPIHDSLINYLPVIVGNARDMKAFTHKKTDKLDSEFIAQLALNNMIQPSRIFPIDHRAFRSCIRLRHSLVQKRTDIKNKAHAILAPEMFNLKNVLTDIFGKNGIMILSGISSGKSVDQIIASLSPNVRKKSDQIREVLNNEISQSAAFRLQICLKLIKSLDDEIEVLENEIFNYAYNNHKHEMEILMSVPGIGKLGAATLIAEIGDFNDFSSGDKLASWLGLVPNVYQSADKYHNGRITKRGPKEARWILTQIAQAAAKTKNSKLKEFFNRKKKSIGHSKAIIALARKIATIIWHLITNDEMYEDETGYKKGETQKTKIVENEILSVDERITIMSEIFAITRKKEEKST

SEQ ID NO: 74445 - protein, 342 aa, unidentified
MQITTIGLDIAKNVFQVHGIDAAEKVIVRKQLRRGQVLAFFKALPPCLVGMEACATAHHWGRELTKLGHQVRLMPAKDVKAYVKRNKNDAADAEAICEAVRRPTMRFIEVKSAEQQGRLMQHRTRDLLMRQRTQVINVMRAHLAELGITAAQGNVGLKELLTIIASDKDERLPADAHASLVVLAAELQAVQTLIGSIEKRIMVKHRGNEASKRLETIPGIGIVGATAIDATVTDPKVFRSGRDFAAWIGLVPRQDSTGGKQKLGHISKQGDRYLRRILVVGAIAVLQRARQQPKKYPWLTQLLARKPFKVVAVALANKMARIAWALLAKGGTYRAPELAAAV

SEQ ID NO: 74446 - protein, 372 aa, unidentified
MDKPIKEFVGLDVHKDSIAVGVASAAGRDPGRAVCTVAHDVAKLVKQLARLGMPEQLHVVYEAGPTGYGLQRELTRRGYVCEVIAPSLIPKRAGDRIKTDRRDSVRLAELSRSGDLRAVWIPDAADEAIRDLSRAREDAVKARTQARHQLKGFLLRHDIRYPGNSGWTQAFYRWLGTLDFGQGASQTAFTEYRLQVEAADQRVDRLTGALGTSIQGWRFEAVVLALRALRGIDMVSAVGLVAEIGDIQRFDHPRKLMGYLGLVPSEQSSGERISRGSITKTGNAHARRLLTEAAWNYRFKPRICRQAQQRQESLAEPIRATAWKAQLRLSARFAKLHGRGVQINKVCVAVARELSGFVWAIARQATPETPAH

SEQ ID NO: 74447 - protein, 505 aa, unidentified
MKTKRRKAKNQAAKKTDKVRTVSRAEELAILRPDAGGVDCGAEEHYASVPPDRVRAGQASVRCFSAFTEGLDALVDWFKECRITTVAMESTGVYWIALYQKLEAAGIEVYLVNARHVRCVPGRKSDVQDPQWLRQLHRFGLLNASFRPVDVVCRIRSLHRDKENRVASAAAEIQHMQQALQQMNLHLHHVVSDITGETGLRILDAILAGQREPKELVKLRDKRCSKSTPQQMQAALVGDYRPEHLSVLKRSLEAYRFYQSQIEECDRQIEPLLLELAQRVEAASAQLQLPSPKPKAGEPEQKLAEKQQQQSDATEPNTNALRTKKKRKAKANEPKIEIAGLLQRICGVDLTRVVGLNVASVLLIVSEIGVDMSKWRSARAFCSWLGLCPANKISGGKVLDSRTRKVVNRVATALRLAAQSVGRTDTCLGIFYRRKKAHLGAPKATTATARKLACLLYHLLKNKEPYQDPDPVLYQHRLQISALTKLQRQAAALGYTLLPTAPAPV

SEQ ID NO: 74448 - protein, 413 aa, unidentified
MQVLIERCCGLDVHQDTVVACLLVGAPGFRPKKEVRTFRTMTRELEALRDWLKASGVTHVGMESTGVYWRPVYAVLEGHFELIVGNARHIRNVPGRKTDVKDAEWIADLVRHGLIAKSFVPPPPLRELRELLRYRRKLVESQAAERNRLLKLLETANIKLASVASDVFGVSGQAMLRALIEGTASPIEMAALAKGKLRRKRDDLILALEGRVEPHHRFLLTMQLHRLEVTEQDIDALDLRITERLEPYRIQLALLMQIPGVDWVVAAVLIAEIGVDMSVFVSAHHLAAWAGVCPGSHQSAGKQKSGRARKGNVHLRTILVGAAVCAGRTKGSYLKDKYHRLRARRGALRAALAIAHKILVAAYHMLSRGLPYRDLGEAYLDQLDQTRTAANRKRRLERLGYLVSLQPKEAATA

SEQ ID NO: 74449 - protein, 362 aa, unidentified
MKFYGVDLHSNNIQVSILDQDNLSLNARITLNSPAFQDFLSDLTRDDYVAVEASTNTFWFYAQVKDRVKQCLVINPFEFKLICHSAVKTDKRDSSKLAKLLRYSILQKDPSILPCVYVPDQKIIQLRSLFTSYEIVKKQKNMTKNRIHSLLKQNAIILDTKDIFKSSFREKILGSKVDEVALFQIQFFFHQLDETESQLKKLKTKILEQGKHFLNEIRLLTSIKGFSVITSLALISDIADINRFSNEKKLCSYLRTAPRIDSSNNKDKIGHVNKNSRTLTLNFLTQSILHFRSGSKKLDAFYTKKRKGKSAGKVRIAVMRKMIVIVFHILKKNELYFYTDKQNHQAKLLHYAHFLKHFSESA

SEQ ID NO: 74450 - protein, 343 aa, unidentified
MKLSYVGVDLAKNVYQLHGVDRHGKSVWKRRLRRGQWLQALLEKTEPGCEIGMEACTGAHHWARELQARGYTVRLIAPQFVKPYVKSNKNDVNDAEAICEAMSRPHMRFVTVKSIEQQDIQATHRVRTELKDHRNAKANQIRGLVAEYGLVAPQTLLALRRAIPEWLEDAENGLTDYFRSLLHGLWDDLLTLEDRLKELDKEIEKLARSNEVAKRLQQLRGVGPIVATALVATVGDGAQYKKGRQMAAALGLTPRQYSSGDKHRLYGISKRGDVYLRTQMIHGARAVVSQAKHRDDPLSRWVTDIAKRRHPNVAAVALANKTARMAWAMLRNETNYDPGLGTC

SEQ ID NO: 74451 - protein, 373 aa, unidentified
MSSGKKFIGLDVHQDTIAIAIAEADTKEVRFYGTVRGTTEALHSALKKIGQDGSALCVCYESGPTGFVIYRFLVKLGIECLVISPSSMPRRPNDRVKTDRRDAETLARLLRAGELVGVWVPNEAHEAIRDVVRAHRQAKHDLSAAKTCLKSFLLRHDRRYPGKTCWGTTHWRWLADQTFAYPHQQFVYGEYKRRIRELEERCKRLEQVLVEAMQGWELAPIVEALQALRGIRLIAAATLVSEIGDLHRFESPKQLMAWVGLVPAEYSSGQRIKRGEITRAGNAAARSMLIESAWHYRFSAREGRALLERNSQIPEKIRAIAWKAQVRLCGKYRRLANAGKKTVKVVAAVARELVGFIWDIARHTQLMTVGAHV

SEQ ID NO: 74452 - protein, 345 aa, unidentified
MQITTIGLDLAKNVFQVHGVDAEGRVVVRRKLRRAKVREFFAGLAPCLIGMEACGTAHFWARELIAMGHQVKIMPPSYVKAYVRRGKTDAADAAAICEAVMRPHMRFVPIKTEDQQAALMLHKARELLVRQQTMLTNAIRGHMAELGMVAPQGSAKIKDLIAVIQDSEDQSIPVLARAALQPLVHQMQTLDGQVEVLDREIMAWHKTNETSRRLATIPGVGVITASAIAATVPDPSFFSSGREFAAWLGLTPKQNSSGGKERLGRISKKGNTYIRRLLVTGATSMLRYARAKTAAAADWVNGLLQRRPARLVTVAMANKVARIAWAVMVKGENFRVPVRPVTEAA

SEQ ID NO: 74453 - protein, 343 aa, unidentified
MQIRSVGIDLGKITFHLVALGDNGKVLLKKKFTQKQLITFTANMQTCLIGMEACSGAHFLGRALRAQGHDVKLIPAQFVKPFVKSNKNDFIDAEAIAEAVDRHNMRFVPIKTDDQLDLQALHRVRDRLITRRTSVINQLRAFLLERGLVFAKSPAKLRERMPEILENAEENLTPRMRSLLALLWSEWKELELQIVEMNDEVELIASSDAACMRLRQIPGIGPLVATAIVAAIGNGAAFRKGREFAAWMGLVPKQYSTGGKAKLAGISKRGNLYLRKILIHGARAVVLRSKRERIAMGSWLTALEARAPRNVLVVAMANKLARIAWAVLSSGQDYRAVQEPVAA

SEQ ID NO: 74454 - protein, 351 aa, unidentified
MLYLGVDYAKKFSVATLLDEKGNLVKRGTLSNRGAEFERFLAGYQDVVAVVEAGRNWHVMVDILQPLTREVKLAHPYKTRLIAEARIKTDHIDSESLAHLLRTDLIAEAYLRGAESRKQQRILRSRCFYVRLRTKLKNRIHHLVDGQPEEIRLQIPKVSDLFGKAGRSWLKGLRLQQPDQDMLQELLTLEEHLSGLVAQSDKLIAQLFEENQAAQRIKTLPGFGEFLSVLVAVEIADIHRFRSAKHLASYVGIVPSTYSSGGTTRHGKITKLGSKWLRWALVEAAIHAPLTSKALKSYSGRIRRRKGTKAARLAVARKLCHIIYRVLTENRHYYEDLQMRSRPQLVNSAAK

SEQ ID NO: 74455 - protein, 369 aa, unidentified
MKLYRLEAAPTASAKELKNEKSAKAKQILVGADVHLRGYQVARKVDNGVVGVVENFRSEAGFMLLIEKQLERAEQVVVVYEAGPLGFTLYRKLTARGVLCYVCAPDSSEQQKKRRKNNKIDARSLTSKLFNYLNGDQSALQLARVPTEAQEQLRLASRQHDQLVEERKRLGAKGNAMLLSQGFGSWNNWWRPKAWAQLSSLVPPWLLERLKVWVDVLKMLDEKICQAKAAFARTCKGSPRPKGVGALSQMQLQSEVLDWSLYTNRRKVACLAGMVPSEWSTGDKERRGSITKVGVPALRRIIVEMVWRMILFQPQYKPVQKWQEILKGPNPALKKKAVVAIGRQLIVDLWRLQTGRVTAQELNLIMITD

SEQ ID NO: 74456 - protein, 407 aa, unidentified
MTVVTFPVYIERGCGLDVHQQTVVASIAGKDIESETKTFGTFTEDLYALTSWLQNQGITHIAMESTGVYWKPVYYVLEDFFKIILVNARHIKNVPGQKTDKKDSEWIAKLLMSGLLKGSFVPPQSIRELRVLHRHRRKLICERTAEKNRLQNILEDANIKLGSVISDVFGKTGSLIVNALMEGVSDPSALAELAKGSLVQKKEKLKKALNGRVTEHHRFMLRFIAQTIQHINQQIALLEARMASYIADMKQDAELLQTIPGVSEQIATGILAEIGKDMGVFPTHAHLASWAGVCPGNNESAGKKMSSRVTQGNKHLKTTLVEAAWAASHSKTNPLLAVKHRNIALRRGIKKANVVIGHKILKAAYYVLRDKTPFISPLNNKEILEIKRKKKIERLEKELKALRNTSV

SEQ ID NO: 74457 - protein, 329 aa, unidentified
MKSVCGLDVHKDSVYLCILSEFGELIEKVFGVLTYQLEEMRDLMLHHHVVEVSMESTSVYWIPIWRVLSPHFKLNLANPYFIKQLPGRKSDVKDAQWIAECTMKELIRGSFVPPEIIQQLRQYDRRIFDLNEEIVRKLSKLDAVLQRCNIRLSNYVSNVDSKSYKAVVKAISQGITAPEELVRLIHGRIINHHGIDVITASLKGVVSLAEIDMISQLRDELDMAEAHKEKCQARMLEICEREFPEELKRLQTIPGIKERAATSLIAEIGTDMNKFETANHLASWSGLKPRNDESNKKIKSRSITHGNVYLRKTIIECAWAASRTKEQIQ

SEQ ID NO: 74458 - protein, 343 aa, unidentified
MQAVTTIGLDIAKSVFQVHGIDAEDNVIIRRQLKRCYVLTFFQKVPPCLVGIEACASSHYWSRELKALGHTVRLMPPAYVKPYVKRQKNDAADAEAICEAVTRANMRFVETKTPEQQSCLMLHRTRHLFIRQQTSVINAIRAHLAEFGIVASVGRNGVEQLLDVVADSSDKRLPEVARACLAALGAQLRMLKTQILEFDRRIMAWHRSNEASKRLDEIPGVGPALATALVASVADPKAFRSGRDFSAWIGLVPKQHSSGGKDKLGSISKQGDRYLRSLFTAGALAVIRYAKIHGTKHRPWLTALLARRPTKVAAIALANKIARIAWAMMAKGERYKEPVALAA

SEQ ID NO: 74459 - protein, 350 aa, unidentified
MYIGVDTHKRSHVLVAIDEQGQACGSRKIANTPEGWAAALEWGRGWERGRIWGVENSGSLGKGLAQFLLEQGEEEVREIVPHRTAQYRKRARTQDKTDTADALAMARLLRAESEYLPRVHADDVSTELRVLSEHRDNLVDDRTRLINRLHAQMLQIDPSYREKSGPLTGERGLSYCRDLSLPDASDLVRTRLLIVRQLTEQLARLNEEIAEVTKALQRRVHSTNTPLLELCGVGDVIAARLIGELGAAPRVHSAAALASLAGISPVEVSSGGRHGHRLNRGGNRKLNRAIHIIALSQRRCDPRAQEYYAKKRAEGKTERAAMRCLKRRLVDVLYRLLRQGAMGGDTLRAA

SEQ ID NO: 74460 - protein, 367 aa, unidentified
MKKVSTAAVTTTKNFSQPKLTIGLDLCDRNSWFCVLDESGQIQREQRVRTNASALREVFSAMPHRRIALEIGTHSPWISRLLSELGHEVIVADARKVRLIGESRKKDDRLDAQTLARLARIDPELLYPVKHRSAQAPADLATIRARAGLVRARTALVNTARGLAKSYGERLRGCNVRNMNPEKAEGLSPELQAALQPLLSAMQSISEQIAEYNERIEQLAEQSYPQVALLKQIKGVGTLIALTFLLTLEDPHRFRKSRDVGCYLGLRPGRRNSGQSQPQLHISKEGDPYLRTLLVQGAQHILGPFGIDCDLRRWGLKLAERGGKSGKKRAIVATARKLAVLLHHLWVSGEVYEPLHNSSRMTVAAAA

SEQ ID NO: 74461 - protein, 422 aa, unidentified
MNEADGKRQEEQRCWAGLDWGTEEHTVSVVSDAREVLGGFRVEASLKGLEQLVKRLGEFGRLAGIAVEATRNPVLNYLVSAGFTVYPINPKLSKNWRACNSVAGVKNDERDGLVLAMELAGRHASLRALEREEPAVAELAGLCEKLRGLVDERTSLLQRLKATLGQYYPGVLGFFTDWTSPVAWRFLQQFPRPEALAHARKDTLIRFLKANRIGIKPLWLAQIEARGEVTHWPHPGDQVALEAMTLAILAQLQALQPHIDKMDRLIAESARHLPHAYLLKSLPGVGKRLAPVLAAITAPVASGKTEIEAIRCVSGVAPVEDQSGKRHRVCIRRRCNKHWRDVMHLFACSSTHWCSWARAFYDMHREQGDRHASALRKLADKWLRIINRMLETGEPYDDQRYVDALRRNGSPLYLRLAGKTCG

SEQ ID NO: 74462 - protein, 374 aa, unidentified
MHEPSTFVGLDVHKKDIVVAMLAPESPIPLEWRVAHEPTAVQRLAKKLQREGGSAIHCAYEAGPCGYALQRQLQGLGLECDVVAPSMIPIRPGERIKTDRRDARKLAELMRAGLLTVVHPPSEDDEAVRDLCRGRDDVRLDLMRARHRLGKFLLRRGRVFGSGAQRAWSQAHRWWLGQQAFERTAERVMFEDYLLAVEQAEARRRSLELHLEDLAREPRYAAAVGGLRCFRGIDTITAITLLAELHDFRRFRSPSQLMAYLGLVPSEYSSGPQQRRGGITRTGNRHVRRLLIEAAWHYRHKPRVGEKLKQRRHGQPASIIALADRAQLRLCRRYRRMERRGKHPTKIVVAVARELVGYLWAALTPPAQATLVTN

SEQ ID NO: 74463 - protein, 418 aa, unidentified
MREEVSTVELLVPRCAGLDVAKDEVVACVRVPDGQGGRRQEVRTYPTFTSGLEALADWLTAGGVTQAVMEATGQYWKPVWWVLEERGFQLLLVNARHVKILPGRKTDVADAAWLAELLEHGLLRGSFVPPAAIRQLRDLTRYRKRLIQAHTAEVQRVQKTLEDAGIKLDSVAADVLGVSGRAMLAALVGGERDPEVLAELARGRLRTKLPQLRQALRGRFSDHHALLLRLALAHLEHLEGAIAALDTEVDRVIAPFARARDQLDTITGVGKRAAETIIAEIGVDMAVFPTAGHLASWAGRCPGNNLTGGKRRSGKTTKGNRWLGEVLTECAWAAARSRDTYLSAQYWRLARRIGKKKAAIAVGHSILVIAWYLLANDCDYQDLGGDYFVRRDADRARQRAVAQLQALGYRVTLEPLAA

SEQ ID NO: 74464 - protein, 410 aa, unidentified
MELLHRRCCGLDVHKETVVACLRLVSDGKVTTEVRTFQTTTADLLRLSEWLAANECTHVAMEASGVYWKPVWHILDDGEFELVLANAAHVKNVPGRKTDVNDAMWLAELLAHGLIRASFVPDSQTQEMRNLLRTRKQLVREQSSHVQRVQKTLEDANIKLDSVLSDLMGKSGRAMIEAMIAGETNPAKLASLAHPRAKASHEEFREALRGRVTKHHRFLLRLHLNQIDALNAAMATLDTQVEANLGPFRTAVELIMSIPGIKNLGANVIVSEIGIDMSRFPSDAHLVSWAGICPRNDESAGKRRSNRLRKGAPWLKTTLVQCAWAAVKKKNSYLQAQFYRIKARRGPKKAIMAVAASILTAVYHMLKDGTMYKDLGSNHFDRRSTDQQKNRLIKRLADLGYAVQIKPLSA

SEQ ID NO: 74465 - protein, 346 aa, unidentified
MEYYVGLDVSLKEISICVVDRDGKTVARGVCPADPEGVAGWFRNRELTPRRIVHESGMLSIWLQRGLAGLGLPATCIDARKAHKSLSARLNKSDAADAEGLAQLARTGWFTPVHIRSEEADRLRSLVGARERLIRLRKDLEGHIRGVLKTFGIRMIGIGQGRQRQAFRDQLAAAGETDQVLRVIADAFIATHAKLCQVADDLDKAVRKTAKVHPVARRLMTIPGVGPVNALSFIALVDDPGRFNRTSDVGAFLGLTPKRHQSGEMDWSGRVSKCGDGAMRGLLFEAASSVIHQVKRFSRLKSWAVRLAGRRGFRKAAVATARKIAVLMLTLWKNGTDYQWTKEATA

SEQ ID NO: 74466 - protein, 412 aa, unidentified
MRVSCGIDWASDHHDVALVDHDGALVARARISDDTAGLQQLLVLLTDHGDSEDSPIPVAIETSRGLLVACLRATRRPVYAINPMAASRYRDRHAVARKKSDHLDAMVLANIRRTDRAAHRPLPNDSELAQAIAVLARAQQDAVWNRTQAGNKLRSHLREYFPGFLAAFQHTREGLCLPVARVVLAAAPTPAHAAKLTRAQLRSLLKKAGRQRGIDAEADRLHDAFRLPQMRQLAQVEQAMGLQALALLRQLEAACTSADDLTTAAVESFDTHPDAEIITSLPGLGSLTGARVLAEIGDDRSRFTDAKGLKAFAGAAPVTRASGKSLVVMARRVKNQRLAAVGYVWAFSALSSPGARAHYDRRREAGDRHTAAQRHLFNRLLGCLHHCLTRRVPYDETTAFPPPDTAALPAAA

SEQ ID NO: 74467 - protein, 346 aa, unidentified
MKILKQSVGIDVSKSDFKVCLGKLDEQLSVAFSFQKAYDNNLKGVTVFLKEVSRLFTAQVPVQFILEASGVYHELLAHKIYQHGYEVSIILPSKSRAFFKSITQKVKTDKVDARLLSQLALERQLDNWVPADPIYAQMRSLTRERESLMKEKTVIMNKIHAQQSAYQIAKSTLRRSKQRLKLLQKQIMSIDSELKTLVESSEMLSSKVNRITKVKGLSLLTVATVIAETNGFGIIRNRRQLVGYAGLDVLINQSGQKSSKGRLSKKGNPHIRKALFMPALSSSRSNELMKIIYQQLNQRQAAKKQGIMVVAKKLLLLIYALWKNSTEYDPQKKYTISLGFGHGMTP

SEQ ID NO: 74468 - protein, 392 aa, unidentified
MKNRYGSVAYGGMDVHYKFSNVTLRDAGGAVVRRGRLDHRDREALRRQLAQWPRGMVMVLEASFGWPWLSDEVRGAGLEPHLSNCYKVDQMRKARGLAKTNKKDADLVSLLPGEQTRWWEVWLAPPAVRDHRDWLRHRADLVQMQTATKNRIHAIFHRQGIFYEETKDLFGGRGRGFLMALCQDGRHAGGVLPAGALEALRGQMRLLMHLRAELATVAGHLRGQLKRDPLIRLLDSIPGFGLILSHMVAAEIGAIRRFRNHKALASYACLAPRCHDTGEADPRRAPLGRHLGTRGNRTLKWVFIEAAHGAVKRGGKWGAMFNRYTDGGKTNRGRGYIKVARELVKVVFVVWSKQVAYTETPPPRPGGKQARRGRKHSRPGTGQPSHAMVPAK

SEQ ID NO: 74469 - protein, 451 aa, unidentified
MIEKALFETNVTTCCSGELSPWCAESSEILPFGPAQPHLEGAGLKSLRSLAPLWITSEKDASCTLRTKPLKKKGKSHIFGYNLVAEQNPTERRLAMLNVSRIDFTGQPIYIGLDVHKKSWSVSIYSKHGEYKTFSQPPEVETLLHYLRHHLPGAQYNAVYEAGYCGFWIHDQLKEKGIQCIVVNPADIPTKNKERRTKRDRIDCRKLARSLRNGEIEGIYVPCRPKLEDRSLIRTRQSMVRKQTRCKNQIKGMLLFYGIDLLEEETRGHWSRRFIQWIEQIRMERGSGDIALKAHLEELSHLRQLIASLNRAILRLTRTEEYRPLVRLLKTVPGISTLTAMILLTELCEIARFRSIDELCSYVGLVPDIQESGEKEHVEGMTQRRHSQLRWLLIEASWVAVRKDPALMMAFDQYCKRMRKTKAIVKIARKLLNRIRYVLKNQAEYVPSVIQ

SEQ ID NO: 74470 - protein, 350 aa, unidentified
MQIIGVDLHTRQQTVAMLNVETGEIVEKTLRHEGDSVREFYSTLAGPTRVGIEATGSMQWFLELMEELGIDCEVGHPAKIRAAEPRKQKHDRRDAALVLQLLVENRFPSIWMPSREQRDVRSLILYRHQWVRIRTRVQNALQAIALSHGLRRGSSLWSKMGQHAISSLSLTRYTAERRTALQSLYQQLEQQIADLNQKVEELAWQRPQARRLMTHPGVGPITALATETFLGEPKRFVDGKAVASYVGLIPSEHSSGGRQRFGGLSKQGNPLLRFLWCEAVGHAVRKDAELQRFYQHKLVQKGLGKAKVAAARKLGIRLWILLRDQIDYQEFCRRGQLRQKHGGAHAGMPA

SEQ ID NO: 74471 - protein, 331 aa, unidentified
MKKAVLVGIDVSADELVVAVEREGDVVPVTSFENDAAGHRKLIRWLTKSGRPVRVCLEATGVYGLDLALALHSAKRVEVMVANPRAIKDFARAFLQRSKTDVLDARAILEFVKRMPFRAWQAPPVEILQLRAVSRRISALTKNMTMEKNRLHVSDRSEALTKFIRDDIAAHIEHLQESIRRLGTEAVAMIRQRPELSRAFDHLVSVKGIAAASATQILAELSVLPGDMTSRQWVAHAGLDPRQHESGSSIHRPPRVTKAGNKYLRSALYIPALVAIQHEANVGAFYEKLLARGKKKLQAIVAVMRKLLHVIHGMLHHDRDFDGEKFFAMNA

SEQ ID NO: 74472 - protein, 452 aa, unidentified
MATKRRKRTEDLPVLHPDAAGIDVGASELFVAVPADRDPEPVRSYPTFTRDLHELADWLQNCGIRSVAMESTSVYWIPVYQILDARGIEVFLVNAHYLKNVPGRKSDVSDCQWIQYLHSVGLLRASFRPPAVICAIRSLWRHRGSLIEMAAEHVLHIQKALDQMNLQIHRVLSDITGLSGLRILDAILEGKRDPVALARLCHARVRSSQDTVAKALEGDYREEHLFALKQSLESFRYYQRLIGEVNKEIESRLQALEKSPAAGEKPPARTKKRAYQRQHYEPISFDLRSELYRIFGVDLTEVPGISAVTAHTILCEIGPETAQFRNASAFASWLGLCPERQISGGRVLFTKSRRVRSRVALALRMAANSLHHADNYLGEFFRRITRKLGKPQAITATAHKLARIVFHLLNTKEAYNDSVFVQCEEEAQKRAELRLKRQAAQLGFQVIPATNA

SEQ ID NO: 74473 - protein, 345 aa, unidentified
MNKISVIGLDLAKNVFQVHGVDSAGEVVVRKQLKRSQVRRFFTNVEPCLVGMEACGGAHYWTRELAGLGHTIRMMAPVFVKPYLKTNKNDRNDAEAICEAVQRPSMRFVQPKTPEQQAVLHLHRARRLLVRQRVALSNHLRGILSEYGIVLPQGAKVLSGRLPALLEDAENDLPMLTRDLLAECKEEYDQLMERIERLEGRIKAWHVTHDVSQRLASIPGIGVLTASALAATVGEGQDFSNGRQLAAYLGLVPRQASSGGKVRLLGISKRGDGYLRGLLIQGARNVIYHIRRRQRAGQPGGNAWVEQLLQRSHPNAVAVALANKMARIAWVLLVRHETWCPARAV

SEQ ID NO: 74474 - protein, 342 aa, unidentified
MAGIDLHGNNLVIGVVNQDGQRVAHRKLDCDLKQVVEFLKPLKPQIQSMAVESTFNWYWLVDGLHAQGYPIDLANPAQIEQYSGIKYADDKHDAFHLAELQRLKILPKAHIYDAQLRPVRDLLRRRTNLVHQRTALLLSFKSLYARTTGETMPLQKLKAMTPKEAAQIYVHPANQLIAQVQVEHLEALEQSLHRIEKAVLGCARELPLYEKLLTLPGIGRILGMTITLEVGDIARFPTDGDFASYCRTVDSRRLSNGKQKGANNAKCGNKYLSWAFVEAAHCAKRSDDNFRRWYDRKRAKTSTVIATKALACKLAKAAWHIMAKQSNYDEKRMFPELAMKKN

SEQ ID NO: 74475 - protein, 343 aa, unidentified
MDHFGGLDVSVKETSICIVDDTGRIVKEVKVASEPEALLKVLGNPAYRFKRIGLEAGPLSQWLFSALAEAELPVVCVETRHMQAVLKAQINKTDRNDARGIAQMMRVGLYRPVHVKTLRSQKLRMLLTHRKLLQSKAIAIDNDLRGTLRNFGLKVGMVGATKFEARIKELIEDLPDLAVLVEPLLIVRRTLREQLGILHRRLLAVARDDDVCRRLMTVPGVGPVVALTYRATVDVPARFRRSKSVGAVFGLTCAKYQSGEIDRSGAISRCGDEMMRTLLYEAAQSMLFHSTRWSWLKAWAMQIARHRGMKKAVVALARRLAVIMHRIWVDGTEFRWTREVAAV

SEQ ID NO: 74476 - protein, 431 aa, unidentified
MNESGSEQPLNPKVAAYVGIDWSDLKHDVVLRSAGNPSAKPEHQVIKSEINSLADWIAQMHERFGAKGKVLVCLEQSRGALIYQLMAFELFELYPINPSQLANYRKTFFSSGAKDDRPDADLLSELLMCHRDRLKAWKPDDQLTRELATLNEGRRNAVDRRSELANAIKSELKLYFPLALQVLDNDLTTALAADLLVQWPTLAELQKVSPGKLRKFFYGHNSRQEKKILERLALIQEAKALTTDLAILRPMALRVKLLAQQLKSLLPFIAEYERRIAEIFGSHPDRFLFDNLPGAGPALAPRLLTAFGTDRDRFEVAGDLLNLSGIAPVRIASGKKTGKNASVHCRRACPKFLRQSFHEFSECSIRYCPWAQACYQAQRDRGKGHHAAVRAVAFKWIRILFACWKQRIPYDPDRYLKALQNRGSEYAQTTA

SEQ ID NO: 74477 - protein, 450 aa, unidentified
MGNGSGVSRGDRNRNARLGRLRALVPFVNAIVGIDLADKKQMVVVTDHDSKVLARKTFRCHAWDLGAALDWASKQAAAKAFAGVTVACEPTGHRWRVLGQLAGERGMPFVCVQPMLTSWARRSEDLTFDKTDEKDAVIIARLTAQLRCYVPEPVDETWGRLRHLGARREQLLVEAGSQVQQMRALLECVWPAALQTARQPLRSSTWTAAMSIVVDRDGGDLTRTRRLGLARFETAVRREIVRRGKQKPCLRIVRLLFAALTDPAGVIAHRAGALERVALLLSDWLETHRRLLDTETRMTAVLDELRLTELVTSITGLSAIGAAAILAETGDPNRFASARALVKHAGLAPREKLSGNFKGRTKLTGQGRPGLRLAAWRAVWGAQRANPVYAARFTHLTTREQNKLTVTQAQAVIAAAILRQLHAVITTGNRWNPVVAIHGTKQPAVMPIAA

SEQ ID NO: 74478 - protein, 347 aa, unidentified
MEEKVTYVGLDVHAEKTVASWGRPLEQVRRLEVPTSREGYRILTRRIGRTRLWGAYEASSCGFVPYDWLVEMDWRVSVIPPTHIKRSRKSRKNKADPKDADMLRDLVMSHGELGAEMAEVFIPDKELRDDRELTRQRLHLKEKSSAVKAGILQLLRRHGVDRPADLKSKWTKKHVAWLRRLAGEKGALPPMSRLVLAGQLRTLDFLERETAILDEALERMTQKPRYEAALKRMTRHKGVGPLTAAVVLLELGDPHRFANRRKVGSFFGLTPSRRDSGRQVDHLGHITRMGSSLARKVLNQAAWAYLRCNDKQNAWFSQVANRRRKKIAIVGVMRKLAILLWHEAKAA

SEQ ID NO: 74479 - protein, 422 aa, unidentified
MMTERTDTMKTYILRDPKTVEPQTAARPLRAQRVAPAAPPPGPALCIGLDVHNDSIAVSLAPSDSTEVRRYGIIGGTHDDVLKLLKKLQAAHLGVTLRCCYEAGPRGYPLCRFIRAHGAECLIVAPSKVPRQPGDRVKTDRRDADQLARLLRAGELTGIYVPDPQDEAVRDLIRARYQVQKQQHRARQQLKMFLLRQNLRYAGTKPWTPKHLNFLATVKLPFAEQQWVFQEMVHVITEAGQRLVRYEKQIASVVEHWRWQPVVQALMSLRGVALLTGATLVAELGDLARFASAPQLMSYLGLCPSEHTSGATRQQGGITKLGNGIARKAMIEAAWNNRTPARISRTVLARQEGLPKAVTEASWNAQTRLHQRYKHLTGVGRKKSQVAAAALGRELAGFVWAIGRMVKPHALPVAGKGPAPAA

SEQ ID NO: 74480 - protein, 358 aa, unidentified
MVQSKGINFNGQNIYIGIDVHLKSWSVTVITESNYKKTHSQKPSAKELFEHLKKHYPGGKYQAVYESGFSGYSTYYSLKEYEIDCIIIHAADVPTTQYENVMKTDAIDSEKLAKSLKSGILKGIYIREKEGLDDRNLVRLRKTLQRQLAGYKSRVKHLLYNNGVEYPACFDKLSLHWSKRFILWLKNDVALLSSTRCSLDLLLDQVELFRKNLLKANRMVRELAKNPKYHDQYENLISIPGVGTTTAMCLLTEIDDINRFHNQREFASFLGLIPSCHSSGETICSMEKTFRGNKQLGPLIIESAWVAIRYDKALAIAYSEYCKRMKGQEAIIRIARRLSNRVLSVLKSGKKYQYDRCR

SEQ ID NO: 74481 - protein, 406 aa, unidentified
MKPCFAGLDWATATHTVCAIDPLGAVEARFEIAHTAAGLQELLARLRSLTPEPAQLPIAIERPSGLLVDTLIEAGYPVIPIHPNIVKATRPRYRSHGAKSDASDAYLLADLLRTDGARFAPLQPQSDTIRALRALVRGRDDLIATRVQLANQLRSLLESFWPGATSIFADIDSPIALAFVQRYPTPQAAAHLGEKRLTAFLAQHQYCGRRHPTELLTRLRSAPGHRAAELEIDAKGALVQSLAAALQPLVEQIRQLTSRIEHAIAALPDGQLVMSLPRAGRVCAAQILAELGDVRERFTTDAQLAAEAGVAPLTYQSGKSRSVTFRWACNHRLRRALTCFADNSRHASRWAAAVYARARTRGCDHPHAIRILARAWTRVLWRLWIDRCTYDPARHHAALAFNTPGG

SEQ ID NO: 74482 - protein, 343 aa, unidentified
MNVFIGLDVSLASTAICVLGPQGKIVDELEAASEPEALARAMTSLPYAVDAIGLEAGPLSQWLSKGIEEAGFDVVLMETRLVKAALKAMPIKTDRRDAQGIARLLQMGWYRPVHRKSVSSQEIRALLTARKSVQQVIINLELSMRGVLRNFGLKLGHVTRIRYEARVRELVEQNEILSASTEALLRARAQLRVELAELDAKIADLAKQDDVCRLMMTMPGVGRIVALTVKSAIDDPTRFVRSKDVGPWVGLTPRRTQSGEMDIVGQITRAGDRALRTALYQAAMILMHRGSPNWLQAWALRVAHRRGSKRALIALARRIGVVLHRMWRDGTPFRHAQSSPATV

SEQ ID NO: 74483 - protein, 403 aa, unidentified
MNAVGIDVSKGKSMVAVVRPLGELVIKPYEVRHTASELGQLANSLKSLDGETRVILEHTGRYYEPVARMLHDAGIFVSAVNPLLIKEYGNNSLRHVKTDKADSLKIARYGLDNWMELREHTPMDTIRSQLKNINRQFGLYSKNKTALKNNLIALLDQTYPGANALFGSPAREDGSQKWVDFAAAFWHVDCVRNMGKTAFVERYQKWCKRHGYNFNAAKAAEIHEAAKDLIALLPKDSLTKMLVQEASTQLKTVSRTVEVFRTQMNRLARQLPEYPVVMSLYGVGDSLGPQLMAEIGDVRRFAHRGSLVAYAGVDPTLNQSGTKEVKSTPSSKRGSPQLRKTLFLVMVALLQSAPPDDPVFCFLDKKRAEGKPYHVYMTAGCNKFLRIYYGKVKEYLTSLDSAE

SEQ ID NO: 74484 - protein, 420 aa, unidentified
MQYAPARLPGTPPGGLTAGIDWASADHAVCVVGAAGVVAGRFGVEHSAGGLRALVSRLARAGVREAAIERGDGPVVDALLEAGVTVVVITPRQVKNLRARYGAAGNKDDRFDAFVLADVLRTDRARLRPLIPDSPATTTLRQACRARQDLVRHRVAVGNQLRAHLLCAFPGMVGLFSRLDSAVSLAFLARFDCQDRAGWLSEKRLAAWLDSAGYSGRTSPAELSRRLRSAPRGATGQHGAASAQVTRALAAVLASLNTQIKALETQIAAQLAAHADGHVFTSLPRSGTVRAARLLAEIGDCRARFPDPQALICLAGAAPSTRQSGKHKAVTFRWAVSKQLRGAVCDFADGSRHASPWAAKIYNDAIARGKDHPHAIRILARAWLYVIWQCWQNGVSYDPARHRALQQLLAPHDTGAGQAA

SEQ ID NO: 74485 - protein, 343 aa, unidentified
MEYYVGLDVSLKHTSICVVNPTGSIVQEGVVDSDPEAIALFVRSRAPGTVRIGIETGPTTTWLWTELNRLGLPVICIDARHAKAVLKMQINKSDRNDAAGIARIMQTGWFKEVRVKDLDSHAVKALLASRALMVKIKRDLENQIRGLLKNFGLVIGRGKFNVFAVRAAELIDNRPELIAAVRPLLEARNAIEQQVDDLDRKVHKLARHDVQVRRFMTVPGVGPITALCFKATIDDPTRFKRSRSVGAYIGLTTRRHASGEIDWSGRISKCGDAMLRMYLFEAAGVLLTRVPKWSGLKAWGAKLTKRNGFRKAKVAVARKLAVILHRMWIDETEFNWSTKKAAA

SEQ ID NO: 74486 - protein, 367 aa, unidentified
MKKVSTVGAKPNKKILGQRLTIGLDLGDRNSWYCMLDESGRIQREQRVRTNATALREVFGEMAQSRIALEIGTHSPWISRLLSELGHEVVVANARKVRLIGESRKKDDRLDAQTLARLARIDPQLLYPVKHRSAQAQADLTVIRARAGLVRARTALVNTVRGLAKSYGERLRGCNVRNMNPEKAEGLSPELQAALQPLLAALESLSEQIAEYNERIEHLALESYPQVGLLKQIKGVGTLIALTYMLTLEDPYRFRQSRDVGCYLGLQPGRRNSGQSEPQLHISKEGDPYLRTLLVQGAQHILGPFGVDCDLRRWGLKLAERGGRSGKKRAIVATARKLAVLLHRLWVSGEVYEPLHNSKQRALPAAA

SEQ ID NO: 74487 - protein, 309 aa, unidentified
MDAIVVGIDVSKDRLDVHVRPSGEAFAVSRDGGGLDVLLARLRELSPRIVVAEATGGFETVVAASLGAAGLPVVVVNPAQIRAFAKALGKRAKSDPIDAAVIAHFAEATKVEPRPLPDAETQRLADLVARRRQIIQMIVAERQRDQRASKRMKKSIARLLRALQAELSEIDTDIDEAVRGSPAWWEKEDLLASVPGVGPATARTLIAELPELGALDRRQIAALAGLAPWTRQSGKWRGRSFIGGGRASVRTALFMSALSAARCNPALKAFRQRLIEAGKPKMVALIAVARKLLTILNAILRDKTPWQSA

SEQ ID NO: 74488 - protein, 368 aa, unidentified
MTSIIYVGMDVHTTNFTLCCYDAATDSCFACIQTEPDYRKILSYLKRVEKNIGHKCCFLCGYEAGYLGYTLYHQLMDHDVDCVILAPTTIPTKKNEPKTDRRDAKKISRCLAYHDYSPVYVPTSQDDAVKEYIRMRDDEKSTLKRIKQQILALCARHGQRFDGKSNWTLKHLAWLRKLDFENPILNETFREYLALYDQACNKVDLFDKRIEEFAQQEQYELRVKKLSCLLGISTHVALSTLVEVGDFKRFKTAPQFASYLGLVPGEKSSADSQKRLGITKAGNSHIRRLLIEAAQCYNRGGIGFKSKKLKAQQEGNPPEIIAYADRATERLKRKFQRMKYTKSWNTIVTAIARELACFIWGMMTDNIA

SEQ ID NO: 74489 - protein, 363 aa, unidentified
MAVKAMTLVGLDVHARQTHAAIVDPVTGEVRVSRLRMAPIEVASFLEGLGSGVLAVYEAGPTGFGLARAARERGVDVRVVAPGSIPRGPGDRVKTDRRDAIRLARLLAAGELRFAFVPGVADEAFRDLVRAIEDIRGDLMRARHRLGKFLLRRGERYPGPGGAWTAAHLRWLRALTLDDACSRAAGADYLAAVELLSGRRASLLAALEQQIPESSHAPVIARLRCFRGIDTLSGAALCAEIGDWRRFAKPARVSGFLGIVPSERTSDTKRRQGSITKAGSGHARRLLVEAAQHYRHQPAIGAALARRQHGQDPRVIAIAWRAQRRLHQRWQHLHHHRGKPAGVVAIAVARELAAFCWEAATRD

SEQ ID NO: 74490 - protein, 366 aa, unidentified
MKHVTTYVGIDAHKKDLFIAMLCGDAKTPVTWTVPNEPNALRRLVRKLEREAPGPVRSCYEAGPCGYVLQRQLTTSRVTCQVIAPALVPRKPGERIKTNRRDARKLAELLRANVLTEVCPPTPEEEAVRDLCRARDDAREDLQRCRHRLGKFLLRRGLHFHGRNWTRAHRQWIDSLTWAHAAERTLIDDYLLAIDHADARLIELDRRLVEIADTPPYRQPVGWLRCFRGIDTLTAMLMLAELHDFRRFESPRALMAYLGLVPGEHSTGEKQRRGRITRTGNALVRRLLIETAWHYQHRPHIGAALTRRRKGQPGRVIAIADKAQQRLCRRFRRLIEQHKPAPKIAVAVARELAGFVWAALQVPAAA

SEQ ID NO: 74491 - protein, 360 aa, unidentified
MSDGSKEQPKITAGLDLGDKYSYLCLIDTESGEVIEEGRLRTTPEAFKRHFCSEQPLRIAIEAGTHSPWVSRVLEEECGHEVLVANPRKTRLIYSNKRKTDEIDAENLARLARLDPKLLYPLKHRAEECQAHLAIIRSREALVSCRTQLVNHVRGAVKSFGGRLPKCPAVSFHNKAPEHIPEALWPALGPILKTIGSLTERIREYDRQLETISKEHYPETDLLRQVEGVGVLTALTFVLTLEDPYRFAKSRTVGAYLGLVPARDQSGDRDPQKHITKEGDEMLRKLLVSSAHYILGPFGSESDLRRHGEKIASRGGKNAKKRAVVAVARKLSVLLHRLWVSGEIYEPLYNAHRRGEQQAA

SEQ ID NO: 74492 - protein, 360 aa, unidentified
MGKFTLVGADVHDGSILVKVAVDRGVATKRGWSNDRDGRGAMIADLKRRAAEAGSKEIWLGYEASGQGFGLDDELTEAGIHCVVLAPTKLVRSAHDRKQKTDEKDAERLLEVLRGHVLAGSHLPAVWIPDQETRDDRELVRLRLDVGEKISAVKAQVKSLLKRNGVARGPDTGSSWSWAYRGWLHGLAEGGPELRRGARVALGSLLAQLESLEEEGGTLDQAIADLAGTERYAGSVKELRKLKGVGLLTAMVFLTEAGDLRRFRNRRQVGAYFGLVPCAAESGESSDRKGPITREGPGRVRKVLCQATWARVRHDPDEKEFYCRLVERNPKHKKKAVVAVMRRLAIRMWHAGLRGREAAG

SEQ ID NO: 74493 - protein, 346 aa, unidentified
MTIVDSSRPITGGVDTHLDNHVAAALDANGGVLGVESFPTTAVGFAALHAWLCAFGPVARVGVEGTGAYGAGLSRYLQSCGLVVIEVDRTNRQLRRMQGKSDPVDAIEAARAALSGRASGIAKTADGNVEAIRALLIAQRSGRQARARCLNQIRHLGFTSPDALREQFRDVPKAHLARQAAALRPRADGDPVLHATKLAMRTLGRRALAISDDMHDLDQVLAKLVAATAPALLACHGVGVDTAATLLVAAGDNPERIRNEAAWAHLCGVAPLDASSGKHRRHRLSRAGNRQANHALWRIVFTRMAHDARTRVYVERRTEEGLTKPEIMRVLKRYVARETYRLLPRS

SEQ ID NO: 74494 - protein, 341 aa, unidentified
MEQATTIGLDIAKYVFQVHGADSAGHVLFRKRITRGKLLGFLAAQAPCVVAMEACAGAHYWAREIAKLGHHVRLIAPAYVKPFIRRQKNDAADAEAICEAAQRPSMRFVPVKTREQQANGIVFRARDLLVRQRTQCVNALRGHLMEYGYVFPKGITHVETLAAVVEDLQSSLPDRVRVILQLLVDTFTALEAQITALDAEINQRSKSDPTARRLMTIPGVGPITSTAITALVPAAEGFPAGRDFAAWLGLTPLQKSTGGKQKLGAVSKRGERTIRRLLIIGASAVVQQASRRGAPKGSWLAQMLARKPKMLVTVALANKMARIIWALLVKGGTYRTPIAAA

SEQ ID NO: 74495 - protein, 345 aa, unidentified
MEPMYYIGLDVHKQKISYCVKDSGGKLFAEGWIPATRHDLDCWMKNLPQPWSAAMEATMFTGWIYDHLKPHATELKVAHPLMLRAIAAAKKKNDRIDASKICDCLRCDFLPESYMAPTAIRERRRTLRYRNLLVRQMVQMKIKTSTLLMEAGVSYNKQKLHKAGYFRELLASNPDIDEGLRSLLRQCREMVVRLGRMEAALIHSLQQDHLLAERVERLLSIPAIGPITALTWALEVGEVQRFSSIKKAVSYCGLCGDQHSSADRVQRTPLSKQRNKHLQTTLIEAAKMAPRYSPTLALLYDKEKQKGNANRATLAVARKLVAYLMAVDRGQTHFLVLDRETCAAA

SEQ ID NO: 74496 - protein, 366 aa, unidentified
MKKVSTAATKQSRNFSEQKLTIGLDLGDRSSHYCVLDESGGILVESKVSTSPHAMQGIFGSMPRSRIALETGTHSPWVSRLLSELGHEVIVAHARNVRLIGESRRKDDRLDAQTLARLARIDPQLLCPVKHRSARAQADLTVIRARAGLVRARTALVNTARGLAKSYGERLRGCNVRNMNAEKADALSPELQTALQPLLVGIEMLSEQIHEYNEHIEKLAEESYPQVELLKQVKGVGTLIALTFLLTLEDAHRFKKSRDVGCYLGLQPGRRNSGQSEPQMHISKEGDPYLRTLLVQGAQHILGPFGADCDLRRWGLKLAERGGRNAKKRAIIATARKLAVLLHHLWISGEVYEPLHNHQCAIAAAA

SEQ ID NO: 74497 - protein, 331 aa, unidentified
MIQIYGIDLSKEKFNVSLVDPKGFLKDFEVKNSYSAICKFLTELNKEVMLCIEHTGIYGDLLIFLANSFSISICAIPGYEIKHSLGMKKGKSDPIDASRIREYGERFQDKLVETRFCSEQLHELKELHSLRDMLVKQRKMLQTHGIEKNKAPFCSVKVKLISDDILRKLDDQIRDTEKQIQEIILSVEEFAENSRLMQSIKGIGPVTANELIIKTHNFKKINTARKASSFAGVCPFPNSSGKMVKKSKVSPMCDKKLKSLLFLCASSAIQHNKDMKYYYERKKAEGKPSYLALNNVANKLLRTVYAIIDSRKNWDPEHICLDPREKEKKAA

SEQ ID NO: 74498 - protein, 326 aa, unidentified
MDQIIRIGMDTSKHVFQLHGVNAAEEPVLRKKLRRQDLITFFGKLPPTVVALEACGGSHHWARLLQSLGHQVKLIAPQLAKPYVKRGKNDAADAEAICEAMSRPTMRFVPVKTADQQAALMLVGVRDRLIRQRTQLINVIRGYAAEFGLIAPTGLCRVGPLLDRVKTDETLPALARELFEMQATEYAQLQARLEEIEDRLMAWHRAHEISRRLAKIPGVGPIGAAMLVMKTPAPEAFRSARHFAAWLGLTPKDHSTAGKVRHGVITRAGDEALRSVLVVGATGSSGSCGAASVRRLRRGWWRCSSASRPSWSRWRWPTRSPGLPGS

SEQ ID NO: 74499 - protein, 421 aa, unidentified
MKIVYPICCGIDVHKSFLVATIVSVTKLRTLTYKKERFSTFNKDLLKLKKWLIENNCYDVCMESTGKYWVPVLNVLEPDLHVVIVNPKWVKAVKGNKDDVKDSKWIGELFCFGLVRSSFIPSKDIRILREYTRYRYKLVNMRSSEKNRFQNGFTVCNIALDSVVSDMFGKSASEITNYLLTDENPNAEHCATMLHRSLKKKAVAVVESIEGFQLTEEQKFRMRQVLHHKEYLDLAIELLDTKLESLTKPYTAAIKLLCTIPGLDSDSATTIISEIGTDMSQFDSSKRLCSWAGLTPGNNQSAGKKKSVKITRAGVYIKPMLVQVAHAAVKCTSQPYYKIKYENITRRRGKKRAIIAIARMILTAIYNMFCTGEVFNPSDLKQIDMPEELKQKQLQKNVSNAITLLKKQGILSDDFSAPSCA

SEQ ID NO: 74500 - protein, 410 aa, unidentified
MEILYPHCAGLDVHKDTVVACARHITDGKVSTQVKTFKTTTEQLIALSSWLSSAGCTHIAMEATGVYWKPVWHILSDSEFELILANAAHVKNVPGRKTDVNDAVWLADLMAHGLIRASFVPDEPTQQMRDLLRTRKQLARDRASHIQRIQKTLEDANIKLDSVVTDLLGLSGRRILEALIAGQTMPLALASLAHRRIHASTDELEAALRGRVTRHHRFLLKLHLDQIDATDAAIARIDQEVSANVDPFRAAIEQLTAIPGISPLAAQVLVAEIGIDMSRFETVGHLVSWAGLCPKNDESAGKRRSTRMKKGAPWLKTTLVQSAWTASRTKGSYFQAQYHQLRSRRGSKKAVCAVAASLLTTAYYMLKSGAPYRDLGPDHFHQPDKQKQATRLLKRLQNLGYIVQIQPIAA

SEQ ID NO: 74501 - protein, 412 aa, unidentified
MKDLLEISCGLDVHKEKIVACILTGPLGKPTRSEIREFSTLIPDMIALRHWIVSKNCHHVAMESTGIYWMPIYEILEDAFSGDITLLVVNARHMKNVPGKKTDMRDSEWISTLLRAGLLNGSFIPERRIREFRDLNRYRKSVIRDITSQKNRIEKFLQSSGFRLSSFISDIFGASGRNIILHLIEHGQIDKTALDSCLKTKTRNRIDEILMSVNGTLSEHQKAFLRILMTHYDSLKKHLAEIETSLEEDMDPFALQVEQLNSIYGISTTASCAIIAEIGIDMKPFKTAEHICSWAGLCPGNNESAGKRKSTSVTKGNPYIKSMLCEIAWVIAGKRNTYLSAWYWRIKQKKGAKKAIVALARKLLVIIYTMLKQGTLFDESCFETRRKHCEQKQLSRYIRELEKHGYHVEAQS

SEQ ID NO: 74502 - protein, 430 aa, unidentified
MNFTQNKKIRQVTEKTMVVGIDVGSEKHYFRAFDWRGIELTKKPFCFGNSIEGFRTFYNEIGLLMDRFHLSETLVGMEPTGHYWFNLGQYMSGKSIKFVMVNPHHVHKSKELDDNSPSKNDCKDPRIIAGLVREGRYYYTYMPRGIYAELRNVSNRRFTLVEEQTRIKNRLYRWISVYFPEYKGIYRQINAKGGLLILKEAPIPEDVIKLGIDGIIEIWKREKLRANGLKKAMVIYNAALNSIGYREGLVEARMEIRDLLEDHEQNEKRLKQINDLIENLTLRIKNVKKLLEIKGIGVITIAGFIAEVGDIMRFDSAKELQKLAGLELVADSSGKHNGKTRISKRGRKHLRYLLIQAAVSVVGKSKEFKEIHNYYTTRESNPLKKMQSIIAVACKLIRVFFVILVKGIDYDASKMLEDIKHPRETPNIAA

SEQ ID NO: 74503 - protein, 427 aa, unidentified
MRTEAERLQAYRQLRAEIRGSDHHLIVGIDIAKEKHHAFFGTATGKVLCQQFTFPNSKEGFELLLNKTEQLGLQQQLDTVVFGMEPTANYHKPLADHLVRQDQQVVQVSGVAVRQNRELLDGRWDKHDRKDAANVADLMAQGKCQYYEYPSLEIRHLRELLSLKHKFKKEEHGIKTRIRNNLLAKYFPEMDQFVNTCQQDTLAVIGTCCAPELISELDYPSFFARVVPVYKGKRQDAHLLRIWQVAQHSIGCQAGELATYEGALLIRQLESVRQLIREIEERIESLCLGFPEYACLLSIPGVGPDISSKLLAYIGNPHRFETTSQVIKLAGLDLSASRSGKPALKATPVISKRGNADLRYALYQAALVASTRNTHFRCWFARQLKGREREHGVLGILRVKLAAKLLVIAWTLMKNKEMFAYEKLNYS

SEQ ID NO: 74504 - protein, 286 aa, unidentified
MVLYGGMDLHGDNVFCTIMDQAYRPVFEERLPNELPVILEALAPYRERLKGVAVESTYNWYWLVDGLQANQYPARLANPARMQENIGLKSANDKTDARFLAKQMAMGVLPEGYIYPKEERPVRDLLRRRMRLVHMRTGEWLNLEGQVARHSGRDLGLTALRGLEAGELSQLLGGDPLVLEAAQINYRLIAFLDREIRQIEKAVEGRVKLTDGYERLLDVPGIGRILAMTIRLETGSIARFPGPGNYASYCRAVKTEHTSNDRKKGEGNGKSGNRYLAWAYVEAANF

SEQ ID NO: 74505 - protein, 360 aa, unidentified
MAQVRTWVGLDVHAAKVVAAIADAESGELATQRMGGVTEQVAEFCAGLPAPVRVAYEAGPTGFGLARALAVRGIECTVAAPGKIERPAQDRVKTDRRDAERLARLLMIGGLHAVRVPTPAEEAMRDLVRAREDVRGDLMRARHRVAKLLLRHDLRFEGNNWTQRHLDWLGRVQLPEPVAQSVLLDGIGSIDALLVRRESLETQMASLVEGSPWEQQVAHLRCLRGIDTLSALGLCAEVGDFERFARPAQLMSYLGLVPSENSSGEKRRQGAITKSGSRHARRLLVEAAWHYRRAPRKGRELRRRQEGQPQTVCAISWCAQQRLHRSWVRLDAERGKRRTLCAVAVARELTGFCWAVATAD

SEQ ID NO: 74506 - protein, 367 aa, unidentified
MKTYDYTNKIIYIGIDVHKKTYSCVSICEGTVVKRDTMPADPALFLRYLKNTFTNSSSINTAYEAGFSGFHLHRYLITNGITNIVVHPGSIEVASRNRVKTDKRDALKIATQLEAGRLQSVFIPSVEQEEKRSVTRLRIKIVKLKHQVGYQLKALLFTQGLIDMDDDTILCQSWIAKKLIEVEAGNYSKHFLYTLNQYIEQWFQLNARVKEIDKMIKRQSNEERGLQDIYESVPGVGPLLARILANELGDMKQFPNEKRLFSFTGLTPSEHSSGEHTRQGHITRQGNPILRGILVEAAWVAIRRDPGLEEIFKRMAATRGKRRAIVGIARRLAGRIRSCVLAGELYQTGATTINHLSQEESVCATSS

SEQ ID NO: 74507 - protein, 357 aa, unidentified
MIDMKYYTCTTQFNCGIDLHARQMYVCVMDRDGKKLVHTNIRNNDFAFFLKLVAPYRHDLTVCAECMFGWYWLADACQAANIHFVLAHALYLKAIHGGKNKNDRIDSEKITHLLRTNLIPPGYVYPAAKRPLRALLRQRLLYVWNRSELLSRIQSHQLAYNRPTLRQTPSNRESWTEQLLAHEDNPARQLALQNDLALIGHYDAQLASLEKELLKLTKQSASRDFTLLQTAPGIGDYLGLTILHEIGDIARFPTVKDFLSYCRLVKGTVASAGKIKGLRGAKLGNPYLRWAFGEAAVIAKRDPLVLGPLAQRLEARLNNKFKANTVLAIKLARAVYFMLKNKTVFDPERLVAALSRN

SEQ ID NO: 74508 - protein, 348 aa, unidentified
MLHAGLDLSRRRLDYCLLDEEGGRVEVGAAAPDGDGLRGFARRVELRHGPVVVRAAIESMNGARFVHDTLEREGWEVEVADAQKVKGLGPLACKTDRIDAWVLAELSRRDLVPAIWLPSFELRAERERARWRLFVVRKRSALKHRVHAQLLAFGHRCPVSDLFGRQGRELLARLEFPEPWRAGVLAAVAMIDDLDREIAGIDRELKSLGADHAYVPLLMTVPGIAWVLGYTIASEIGDIHRFASPKKLCGYTGLCPRVYQSGNTDRRGPLTHAGPKYLRWALIEAAQHACRHPLYRDRYQRNKARLGKQRGAKVAQVDIARRLAEAIWHMLNTNQPFAPAGATAALAA

SEQ ID NO: 74509 - protein, 430 aa, unidentified
MKSNTQNAKIEAITEKTLVLGIDIGSETHYARAFDHRGIEYSKKPFKFSNTEVGFVTFKEWILDLKEKHEKDKVVPGMEPTGHYWFNLGKFLQDNEMKPVLVNPHHVKKSKELDDNNPTKNDRKDPKVIAGLVREGRYMIPYLPDGVYADLRTASNLRFQLQVELTRIQNRISRWFNIYFPEYKTVYGKPDAKSGMLILKEAPLPEDILTLGIDGVNQIWRDAKMRAVGKARAKTLIEAAGHSVGSKEGAVSARMEIRMLLEDYESRNIRLQEVMTLIEELVNQIPMAEKLLEIKGVGIKTVSGFLAEVGDISRFNTPKELQKLAGLALVEKSSGKHKGKTTISRRGRKRLRYLLFEVAMSLVAKNPEFRELHNYYTTRRLNPLKKMQSLMAVAAKLIRVFYAILTKGVDYDPKKMVGDIRRPVVYLPAA

SEQ ID NO: 74510 - protein, 350 aa, unidentified
MASTKISYFGKKVYIGTDVHKATYSVTCICEGVVAKKVASVPASPAEFAQSLLHWFKGAEIYSAYEAGFSGFNLHRELEKAGIKNIVVNAASISIAANDRVKTDLRDSKKIAEQLSTNQLKAIYVPSKDEEARRTLTRTREQVVEARATASRQIKSKLHYHGLMAKDDKRLISNRYLKGIEKLELPAEVLCSFKIFIDQWRLFTRQLMDLRKALQKQADNDEKAEKVYRSVPGIGLITSRTLANELGDLSRFKNEKALYSYTGLTPNEYSSGEKVRRGHISRQGSARVRGLLVEAAWRVIDKDEALKEAFERIAKTSGKKRAIVAIARKIIGRIRACFRTGKTYAVGTYV

SEQ ID NO: 74511 - protein, 354 aa, unidentified
MTSTKYIGMDVHKESISIAVMNAAGKTVMECVIETKANTILQCIDGLRGDLHVTFEEGTSAAWLYDLLKPHVAELIVCDPRKNASMREDNQNDKIDARRLAELLRIDHLSPVYHGEHGLRTLKELVRSYLTVTKDLVRVMTRIKAIYRSWAIPCAGKQVYAARHRAEWLAKINEPGVRRRAEFYYQQLDALRVLRQGVRRELLAESKKQKAWKRLCQIPAIGPIRAAVLLGILQTPHRFRAKRPLWKYSGLAIETCSSADHRSINGQLQRSKKNSVRGLNRNCNHDLKNLFKGAAVTASSKAGPFQEFYAALLAKGMRPEMARLTLARKIATIVLIVWKKGVCFDAQHLKPQTA

SEQ ID NO: 74512 - protein, 331 aa, unidentified
MADVKRYVGIDVAKLQLDVALGPNGERFTVANDEPGISALLKRLESADLVIIEATGGLEVPVASALATAGIGVAVVNPRQVRDFARATGQLAKTDALDAQVLVRFGAAVKPEVRRLPDAQAQALEALVNRRRQLVEMLTAEKNRRANSPKVIHKSIDEHIRWLEKRLAGFDDELAALIRATPIWRERDELLRSVPGVGPVLATTLLAHLPELGELNRKQIAALAGLAPFNRDSGKLRGSRCIWGGRAQVRRVLYMAVVSAVRSNPVIKNFYAQLRARGKYPKSALTACMRKLLVILNATLRNNTHWHATALTFSNSTLYPPGGAVSEHGCC

SEQ ID NO: 74513 - protein, 390 aa, unidentified
MIYVGIDVAKDKHDCCILGSDGEILFSPFTIQNSLQGFDELYEKIWSLTSDLTEIKVGLEATGHYHINLLRSLLDNGLPSFVINPLHTNLYRKGLSLRKTKTDKVDAASIAMMLLTDRTLKPYSDTSYHNEELKSLTRYRFDKVQERARLKTSVSRLVSILFPELEKLVPSLHMASVYALLSEFPGASFIASAHLTRLKHLLYDASKGRYSRDMALTVRDAAASSIGSVIPAKSLELKHTIHLIEILTSEIDEIEAAINSIMDTLDSPIITIPGLKNRMGAMILAEIGDFSRFDNPDQILAYAGLSPTTYQSGQLTSSYAHMEKRGSRYLRYALFNATKYVCIWDPTFKSYLAKKQAEGKHYYVAISHACKKLVRVIYRIHLTGESYRTA

SEQ ID NO: 74514 - protein, 422 aa, unidentified
MLQDSEDTEEIIERVAALDIGKAELVACVRVPNPDKPGRRAQEITTYSTMTRSLLGLADRLRELRVTRVVMEATSDYWKPVFYILEAQGLDPWLVNAKDVKHLPGRPKTDKLDAVWLAKVAERQMLRPSFVPPVEIRLLRDLTRYRVDLVDMRTAEKNRVEKLLEDAQIKLSVVASDIFGVSGREMMAALIAGERDPKVLAQMARARMRGKIALLEEAFVGHFTNHHAFLLRTMLARIDEASGDIAAVEARIEELITPFARATDQLDEIPGVGLIAAWVMIAEIGVDMGRFPTAAHLCSWARFAPGVKESAGRKKGRGSTGHGNSYLARVLGEAAVSAGKTDTFLGERYRRIARRRGKKKAIVAVGRSILVIVWHLLSDPEARFHDLGADFYDNRIGPDHRKRNHIRQLEALGFKVTLEPAA

SEQ ID NO: 74515 - protein, 313 aa, unidentified
MTEPLFIGIDVAKDTFHVASCPAAVNISLPNNSTGTQQLIKTLKAYTISLIVLEATGGYERPIVADLLEADFKVVVASPRQVRDFARGIGEFAKTDPIDAAVLARFAQVVQPKPKPPSSPETGELADLVRRRKQLIDLRVQETNRSQLALHPKIRKSVRKMIKTLDYQIAELDRIIEEHIKSDDEFRKKDEILRSTPGIGPGTSAILLSQLPELGQLNRQEIAALVGVAPYDFKSGRFAGKSRIWGGRKDIRCALYMAALCATRFNSVIHRFAVRLAEKGKVFKIVITACMRKLLTILNTMIRNQTLWRPENT

SEQ ID NO: 74516 - protein, 412 aa, unidentified
MEVLHSRCCGLDVHKKSISACVMIREHGRLEKLERRFGTFTGELEDMAAWLAEHKVTHVVMEATGVYWKPVWNVLEGRFDLMLVNPQHIKALTGKKCDRRDASHLTELLQHGLLQGSFIPSAAIRHLRDLTRNRARTVQEAARIKSRVQKVLEEANVKLGSVATDVLGVSGRLMLNGLVAGKQDPEELADLAVGVLRKKRDQLVQALSGKVGDHHRLMLGKLLRALKTREVEIAEDETDIRTRIEPFRKAVLAWMQLPGIDEVTAWSLVAEMGADMAPFDTAEQAASWACVCPGNHESASKQGDGRTRKGNPWLRSTICEAAWGASRTKKSYFHALYIRTCARRGPKRALMAVAHSMIVVGFYLIKRDFKFNDLGADFFDRRNREQATRRAVKRLNALGYSVHLEQAASAPA

SEQ ID NO: 74517 - protein, 372 aa, unidentified
MSENSITWVGLDAHKNSIKVAAFSPDQPEPREWQEATTLEAILRLARKLIRQAPGPVRCCYEAGPTGYALQRQLRQAGVECTVIAPSLTPVQPGLRIKTDRRDARKLAELFRAGLLTEVHPPSESDEALRDLCRCRDDVRVDLLRARHRLSKFLLRRHCIYRQAKHHWATRHGAWLEALRFDDPVSQATFDSYQLAVQQLEERLQQLDVRLAEFGGQDPYREPVAWLRCFKGIDTVTAVCLVAELHDFRRFRSPRELMAYVGLVPSECSSGERERRGAITKAGNRHVRRLLVEAAWHHRHRPALSEPLRRRREGQPARVLAIADRAQERLAARYRRMTLQGKIQPKTIVAMARELTGYLWAVLHPDATATRN

SEQ ID NO: 74518 - protein, 475 aa, unidentified
MNVNGKRKKNQVVTANIFEQQELLKKAEVIRANLTASTWRELETNGKFDKNEKLSFISDDMLILGCDVGSETHYLRAIDTRGRELSKSEFPFSNDSEGFQSAKEWAVTIAAENNKNQIVLGLEPTGHYWFCLATWMISNGISVVQVNPYAVKQTKEVEDNSQLKDDTKDPKLIANLVKDGNFGMPYLPEKLYAELRRLSMFRDQLNEDRIRSINRMHREMKIYFPEYKDALGKVDGTFSLELLKQAPFPEDLTALGEDGIRQIWHDAKLRGRGYSRAGEILQYAKVSVGIKDGAAAGKTAVQWFVRKIMELDAELAVIEEQINQKCQEIPHTGNILEISGIGENTLSGILAEMGDISRFDDVKEIQKLSGLGLVACSSGKHKGETKISHRGRKRLRYWLFQAAKSAVAHAEEFKELHVYYTTRADNPLKKMQSLIVIACKLLRIIYTILKKGTVYDPKKMLLDIRRPEKKEAIAA

SEQ ID NO: 74519 - protein, 354 aa, unidentified
MRKSVGETIGCDLGDKTCAICIVDASGRIKERTSVATTRKAMAEFFARQAAHVVIEVGAHSRWVSQILNEAGHRVTVANPRRVQLISANDNKTDRHDAELLARLGRADVELLAPVEHRSPEAQKDLAVAKARDMLVATRTSLINHVRGTIKSVGERLPTCTSESFARKTWEKVPPSLRPALEPIYQSLSRIDEQIRECDRTIDRIARRYPDVEVVSQVHGVGTLTGLVFILTIDDKSRIERSRTAGAFLGLRPRKDQSGDGDPQLRITKAGDPFLRRLLVNSANHILGPFGRDSDLRRWGLELARRGGKNAKKRAKVAVARKLAVLMHRLWVTGEVYEPIGYRDSGKARNAAAA

SEQ ID NO: 74520 - protein, 417 aa, unidentified
MALKIVYLICCGIDVHKSFVVACIAATDNKGVTTYKRRRFSTFTSDLRLLAKWLADNECRDVCMESTGKYWIPVYNMLEATCKVVLAHPKYVKAIRGKKTDARDAKWIADIFKHDLVSGSFIPPFEIRQLRDLMRYRVKLTNFSVGEKNRAQNCLTVSNIKLDDVFSDVFGKSASAITDQLLLHPDGNFDVSDYVDRRCKASPDKIQAAIDGLMCSEQVQKLKIIRSHMDSLDLCKSNLESAILSLAEPFQSQIELVMTVPGIQLFSALSIVAEIGVDMSVFPTVKHLCSWAGLVPQNNESAGKKKTVRITRAGAYIKPLLVQCALTVCNSDKHPEIKSRYLALKKRRGHKKAIIAICRMLLTAIYAILKKSEAYNPNLYRKVVSIPDNRSFTVEQAVAFIQRHGFLVVDSDGVIAS

SEQ ID NO: 74521 - protein, 344 aa, unidentified
MSKLSRVGIDLAKNVFQIHGVDRHGKSVWRRRLTRDKWLRALLEKVEPGCEIGMEACAGAHHWARQLQSRGFTVKLIAPQFVKPYVKSNKNDANDAEAVCEAMSRPSMRFVAVKTVEQQDIQAAHRIRSELIGHRTAKANQIRGLVAEYGLVAPQQLARLRAAVPLWLEDAENGLTSRFRGLLSSLWHDLMTLDQRVAELDHEINMIAQSDPIAKRLQQLRGVGPMVATALVATVGSVEQFANGRQMAASLGLTPRQHSSGGKDRLLGISKRGDAYLRSILIHGARSVIRTAKLKDDRLSQWVTRLAERRHPNVAAVALANKTARIAWAMLRHGTDYEPGMITA

SEQ ID NO: 74522 - protein, 331 aa, unidentified
MKNQNYVGIDVSAKTFTVVIDHQGDRGEAFDLANDSDGHKKLIRMITRKGYQARVVLEATGVYSLDLALALHRAERAEVMVANPRTIGQFAGAYMRRSKTDALDANIIVEFAMRMEFKAWKPPKPHAFDLRAISRRIEGVIKMATQEKNRLHAATSFDEMSEVVRNDIEVNIRHLERRVERLREQARELIAGHPDLERAFVHITSVKGIASSAGIQILAELSILPKDMDVRQWVAHAGLDPRVFQSGTSVNKPARISRQGNVHIRRALFMPALVAVQYEPHVKAFYEKLLGRGKTKMQANVAVMRKLMHAIYGMLKHDRDFEGEKFYVIGA

SEQ ID NO: 74523 - protein, 336 aa, unidentified
MSIVQNMHKQGGVTNEAGRPNAGIDVSKQHLDVCWGAESLRVDNQASGWEGLIAKLQAAGVDLVVVEATGGYERGAVCALQEAGLAVARVNPRQARDFAKSMGTLAKTDQVDARSLRAFADVLSRHQERDKFITAPPNPQREQLAALMVRRRQLIDMRVAETNRLEQATKKTAQSIRGVIKYLDRQLRTIDNDIDNHLDRHFESQRDLLDTVTGVGPVTILTLIAILPELGRYSRRQICKLVGVAPLANDSGPRKGSRHIWGGRAPVRSVLYMSTIAAITHNPAIRAFYQRLIAAGKPKKVAIVAAMRKLLTILNAMMRDRAVWDAARHVQTGKMA

SEQ ID NO: 74524 - protein, 354 aa, unidentified
MSSSASSDVAVIGIDIGKNTFHAIGLNQRGAIVLRQKWSRRQVAERLANLPPCLIGMEACVGGHHLARQCVALGHDARLMPAKYVKPYSKGQKNDFRDAEAIAEAVQRPTMRFVAIKSIERLDLQALHRIRQRLVSQRTGVINQIRAFLLERGIAVRQGQRFLRSELPIVLASRLDALSPRMARMLEDLAADWRGLDARIDAVTEEITALARQDAGAERLMSVPGIGPIISSAMVAAIGAGDVFAKGRDFAAWLGLVPQQISTGDRTILGPISRRGNRYLRALFVQAAWVVMVRPQSWERYGLKSWIEAGKKRLHHNVLAIALANKLARIAWAVLARGREFAMQRTDDAASQPA

SEQ ID NO: 74525 - protein, 370 aa, unidentified
MLNTTTFVGLDVHARSIKAVALDAMTGEVRSATFAYDAAAVAEWVRSLDPSAKCVYESGVTGFDLQKRLASMGIDCVVGAVSKMIKPPADRKRKNDRNDAEFLARMLSVGNVVEVWVPDDGCEAARDLVRALDDAREDLKRCKQRLSKFLLRHGYVFSETTPTGRRKGNWTAAHWAWIKSISFPEKADDDVLAYYVDAVRQAMEDKARLERLVEAEASKPRWKRRIDSIRCLKGIDVTSAADLVFEAGEFSRFKSARSFAAWLGLTPSEHSSGESVRQGGITKAGNKHLRRVLVESAWHYLGCSPHSKDLAKGQVPDPAARRHAAKGVRRLVERRRAMLERGVHKNKANVATARELACWCWAVGRMVENG

SEQ ID NO: 74526 - protein, 424 aa, unidentified
MNFIGVDLHKKSITVCVMDQSRKVLARKTIYCKETTEIVAFFRKFRPFKVVVEATASYPWFVELVEPLADEVVLANPKKLRIIAESTKKTDKLDAQILAEFLVLDMIPRAYQPTPRQREHRTLIRHRQYLQGRITSVRSKIHHILSNYNADRKDVFSVNGGPAYFKEVPLSDADRFVIKQLWALWQDVVAQRTALTKKIKAFVAKAPQREEEDRAILMTAPGVGFVTAEVILSELGDIGRFRNAKTVASYAGLVPAVRQSGDKRSKDMRITKEGSGLLRWALVESAWRLVGSSPKWSAMYGRLKERKGSKRAIVAVARKLLCVLYAMLRTRTPYKIVTTKIKASPAPRKRLVIVRTSTAQQTPTTETATVEQKPTTETAKPGTTRQRSAKAPAAKQSATAEKATPRTTRRRSSRASTAEQTITV

SEQ ID NO: 74527 - protein, 418 aa, unidentified
MEDLSVIFPVCCGLDVHKSFVVACIAATDDKGITAYSAKRRFSTFTRDLRLLSEWLAQNNCKDVCLESTGKYWHPVFNVLEQTCHVVLSHPKYVKSIYGKKTDKRDAKRIASLFKYGIVEPSFIPPFKVRQLRDLMRYHVKLTNFSTGEKNRARNCLTVSNIKLDDVFSDVFGKSASAITEQLLLHPDGNFDVSIFIDGRCKAPVDKVQAAVDGFMCSEQAEKLKIIRLHMSSVEECKARLESVIRSLSEQFQTQVEFVLTVPGIQLFSAIAIISEIGVDMSVFPSAKHLCSWAGLVPQNNESGGKKKTTRISRAGAFLKPLLVQCALAVCKSKKHPEIRNRYLALKKRRGHKKAIIAICRMLLTAIYHILKKSEAYNPNLYKKEVSVPADRALTMKQVLAFAKHRGFVIIDPDGVVA

SEQ ID NO: 74528 - protein, 339 aa, unidentified
MAIVGGLDLHRKQVTFDVVDTTSGTVERGRVTPADRESFRRWLARFDGLPVDLAVEGCTGWRFIVEECHAVGVRAHLAEPADVAGLKGRRQHAKTDRLDARHLRELLEAGTLPECWIPPEHVLEIRAKVRLYKDLLEERGGWQQRIHATLFHLGAPAQPNLLGSDPGRLARLEALSPATRQATAVALRMIEALDGEIARLRAELVAFARRQLGCRELQHEYGVGALTSVVIWSELGDARRFANSRNAVRHTGLDISVYSSDGKRSRGHLTRQGPPLLRWALYEAGRCAARQTSPDHAYYERVARRVGKQRAALSVARKLARRCHHRLRALGDAALAPVA

SEQ ID NO: 74529 - protein, 466 aa, unidentified
MTADNKLWRNRKERKEWARRLRSEDPGLEVVHPHAAGIDVGNSAHYVAVRPDRDPEPVRRFECFTADLYRLAEWLESCGVKTVAMQSTGVYWIPLYEILEDRGFEVYLVNARHTKNLPGRKSDVQESQWLLKLHTYGLLNNSFQPPAEIRVLRTYWRQRAEHVSEAATCIQRMQKALRQMNLQLANVISDLSGVTGQAIVRAIVAGERNPQKLAELGDPRIEASREEVAKSLEGNWRPELVFVLRQEVEMYDAYQRRIAECDQQLQKHLASFADTELPQSPKAESKEKRAKSTKNAPRFDLSSELKRITGVDLTRIDGIDVMVAQTLLSEVGMDMSRWNTEAHFSSWLGLCPDNRISGDKLLGKGTRHVVNRAATALRLAARNLIRSRSYLGAQYRRLRTKLGAPKAITAMAHRLARLVYRMLKYGQQYVDKGTEYYENRYRQPQIHLLQKNAAKLGLQITVAAQS

SEQ ID NO: 74530 - protein, 348 aa, unidentified
MLADQLDYVVGVDPHRDSHALAVVHVLSGAVVLETTVAASSDGYAQALKLVEVHASGRRAFAVEGTGSFGAGLTRFLTGRGERVLEVSRLRRERRSGGKTDALDAIRAARSVLAQERPATPRAGGERQALQALVAAREGAVNAKCAALGQLRDLLVTTPEPLRGELRLLTPARLLKRLAATRPDHRRDPELRGTMLALRSIARRVLQLTAEERELAREIETITRKLAPQLLDQPGVGPHSAAQLVLSWSHQGRITSEAAFARLAGVAPIPASSGQTVRYRLDRSGDRKLNRALHMILVTRKRSHPATIAYIERRIQEGKTRREATRCLKRYLARNLYRLLEHGPPIAT

SEQ ID NO: 74531 - protein, 387 aa, unidentified
MSPTIAARRPAAVDYERTLILSIEVSNQSWVLAAQVPGLPHTKAKRTVDPEAEALMAAIAGYRSRAAAMGRSIERVIAVYEAGWSGFWLARWLTRHKVEVYVIQPSSVPVDRRMRRAKSDGIDAELLLRTLLAWLRGEPRVCSMVPVPDEADEDARRCIRERTELISERVGLTNRIGAVLATLGVTDYNPLLRNRHHRLAELRTGLGEPLPPNAHAKIARLLARLELVLAQITELERERDAVVETETPDHASKMIQQLISLRGIGVQSATVLVREAFVRRFANGKALGSYAGLTSSPYSSGGIDREQGIGKGGNRRLRTVMVELAWLWTRYQPAAAQVCWFRERVGSTGRRVRKIMVVALARKLLIALWRFVIDGVVPEGAVLKPAA

SEQ ID NO: 74532 - protein, 418 aa, unidentified
MSNKVTRAASPWSEQYQKLLPSTKGVNMVYVGIDVAKDKHDCYICNSDGVELYSPFIIANNRKGFENLMDHIRSASDDLSKVKVGLEATGHYSYNILGYLISQGLLISLINPLHTNLFRKSLSLRQTKTDKVDARTICMMLSSGMDLPSYSDSSYHMEELKSLTRYRFDKVRERAQLKQSVSRLVTILFPELEKLVPTLHMKSVYALLSEFPGAGHISKAHMTRLKHLLSDSSKGRYGKETAQTIRDAARRSVGSDMPAKSLELKHTIAMIRILTEEIDEIESSIQKIMDSLDAPILGIPGINYRMGAMILAELGDMSRFSSPDKILAYAGMSPSTYQSGQLTSSYAHMEKRGSRYLRYALFNATKYVCMWDPTYKAYLEKKRSEGKHYFVAISHAAKKLVRLIYHLQTTGEAYCPTI

SEQ ID NO: 74533 - protein, 372 aa, unidentified
MKEDSVIFIGLDTSKLKISVAIADGSRNGEVRFFGDISSEPASVASMVSKLPKRGAKLHFCYEAGPTGYGLYRQIVELGHDCVVVAPSLVPKRAGDRVKTNRRDAMSLARLHRAGELTAVWVPDEGHEAIRDLVRAREAASDALKQARQQLQSFLLRHGRIYAGREPWTRAHRRWLTCHAFDHPAHQILLAEYCQAVADASVRLDRLTKLVVETAASWSMAPVVAAYQAMRGVAFMTAVTFIVEIGDVRRFDNPRQLMAYLGLVPSESSTGERVKRGGITKAGNTRARRVLIEGAWTYRFPARVSPKIQARLDDLPRTVREIAWKAQVRLCARYRKLLAAGKPKVVAVTAIAREMAAFLWAIGQEIAPTAKA

SEQ ID NO: 74534 - protein, 414 aa, unidentified
MEQKLIYVGIDWADDHHDIHLTDDSAKILEQFRIDHSCDGFALLHSHIANHQASPNLVLVAIETSRGLLVHELLQKGYTVYAINPKAVNRYKDRHVLSKAKSDTLDALSLGNILRTDRHLFRPLKPLPEDYRLLDRLCTDLRKVVDEKSRVTNQVTACLKEFYPKALDIFSLDSQIFIDFLKAFPDHRTLSTCKKKTFLAFLKKHRYPCSAKADELWNTIQSPTLQPGKVTVRSGRLRLGMLLGQLENLKEHINHYEQEIQDILNKLPESASVKSLPGVGDRLAPELVATLGPNSKDGHQRFQAAEEIAKLSGCVPVVRESGKWRKVSLRYTCVKSLRRTFHDWAFTSINCSPWARAFYDYRNERDQSHCTILRNLGKKWIKILFAVWSQGTSYDETLHIQNLKAKNVPWAMAL

SEQ ID NO: 74535 - protein, 348 aa, unidentified
MRFYTKTRPYFCGIDLHARSLYVCILDHNAEVLVHKDIKASPDALQRLIEPYSDQLVIGVECMHCWYWIADFCEARGIEFILGHALYMRAIHGGKAKNDRIDSHKIAMLMRGGNFPLAYVYPQELRATRDLLRRRSKLVRYSGQFKAHVSNTATQYNQPPPPKGSLRQIKGRAEMADVFTDPAAQRSVDLDLSLVGFMDKEVQQLERFVEQQAAGHFTKEVKLLRTVHGIGKILALTILYEVGDITRFESVQQFASYGRLVKCKAESAGKQYGTQGNKIGNMHLKWAFSEAAVTYLKGNDAGKAYLAKLQRRMSKAKALSVLAHKLGRCVFFMLRSHQVFDEKRFLQG

SEQ ID NO: 74536 - protein, 350 aa, unidentified
MNKQQPMGAEGQVTPVIWAGIDVAKKSFEAAIHLPELARPIATRGFDMSDVGTGQFLQWCDKIITSHAPGAQLRVVMEATGCYSRQLFEWLTNLRPQTQPAMLNPSFIKSFGQSLGVRNKTDKVDARIIAHYGHERKPAPDMRPTPEMNRLQLLVRERRTICDALTAEKNRAGEPCEDKDVLKLRNQRIALLTKQLKDILALLRKTVKQSQTLSRDIKLLQSIPGVGFIVAVTVLGELGDLRRFLCPRKLSAFAGLSPRYFTSGSSVNRPAHICRMGNKAVRPLLHLAARSLVGRTKYHLGRLYEKLVAAGKTKPAAVTAISRKILVLMRAILISGKPYNDELCACGKAA

SEQ ID NO: 74537 - protein, 408 aa, unidentified
MSGLSNVPIAAVTPAATSYYCGIDIGKRKHMALFLDSTGHVVRPAFPILNTRDGFAQLVQELQNLNGAVAIAVEATGHYWLALYECLSSQGFDVVVLNPLQVHAYHRSGVRKCKNDRGDAFWIADFLRIAQPQPTSASLPTLLQLRELARFRYGLTAQLGDCKRKIVSVLDRVFPEYETLFSNVFLVTSQRLLQEAVTPEEFAEFDLSELSHLLQTFSRGRFQAPQAMAKAQAIQEAAHQTVGVSFLRTAIHVEMRCLLDQLQLLEAQREQVDEALAALMQKLPQWLTTIPGIGLATGATILAEIEDVQRFSSIEKLVAYTGIDACVYQSGEFEAKRMHMSKRGSPYLRCALWQAAHGAIQHDPELQAYYKRKRAEGKHHGTALGAVCRKLVGRIYVVLKEQRPYLVH

SEQ ID NO: 74538 - protein, 391 aa, unidentified
MDNAWAGIDAGKEFHWARVVGIEGETLLSRKVENDEADLRKLIGEVLPLAEEITWATDQPGGTAALLLALLWERNQKVIYIPGLTVDRARDTYRGESKTDAQDAYVIADQARMRGDLSELQANEGELAELQLLISRRRDLVTDRSRTITRLREALLALFPALERTLDLNNSSALTLVAHYQTPTALRRAGYKRVATYLKNRGIKGADTLAKKALAAAESQSAVLPAQDVASAIVAELAREALVLKQRIERVDEELKHRFFIRPEASILTSLAGMGPVLGAEFLVAAGDLSAFSSADQLAAYAGLVPAAHDSGKRAGNDHRMRGGNKVLKRAFYQSAFASLRTSPVSRAYYDRKRREGKRHTQAVIALARRRVNVLWAMLRDGTTYKAPSAA

SEQ ID NO: 74539 - protein, 435 aa, unidentified
MFGGRVREEMTESMLAESQDEEEIIARVAALDIGKAELVCCVRIPAEGNRKKRLQEVSTHSTMTRSLGELANRLVGLGIERVVMEATGDYWKPVFYLLEAHGLQPWLVNARDVRHLPGRPKTDVLDAVWLCKVAERQMLRPSFVPPVEIRRLRDLTRYRIDLVGERTAEKNRVEKLLEDACIKLSVVASDIFGVSGRDMMAALIAGERDPKVLAQLARSVMRNKISDLEEAFTGRFDDHHRFLLARMLARIDGIDADIAALDEQIEVQLAPFAAAAERLDDIPGIGPVAAAIIIAEIGVDMSQFPTAGHLCSWAKFCPGISSSAGKTKGNGSSGHGNRYLARALGEAAVIAGRTNTFLGERYRRIARRRGKKRAIVAVGRSILVATWHILQDPDTRFHDLGHDYVHARTNPDARKHNHIRQLEALGYTVTLTPVA

SEQ ID NO: 74540 - protein, 434 aa, unidentified
MHSHYNTLFVTLDIGKNVHWVGAYEGYELKAVGEPFKVRSDQAGFEQVTAVIDGLLNCGRYHQVVLGHEPTGIYHEAWSRALAERYAPHCQGQAQPSLLYQFLNPLLSKRKRAELTKGRHRKTDKLDLKAIAYCLRDGLGQPAFLATEPVLRFQLWGKSYRHNHRERRRLTTNLLAQLDRLWPGAVVNLKRFHQMHPDLAAPVPLVRSKPLERQRVQAILQHCPNPHHFLALGQAGIQAFYRTHIGRCGTATAKLAYNLVKQALLPPPDVAALLAQQLQTDFAHFLALAHRFEELSNQAAALVPSSPAAVLTTVPGISPLLAARYLAHLGHPQRFKHPQEIWAFAGFDVVIEESGDFRRLGHITRKGDPGLRDTLYLIGLHTAQNVPAIGRTKQRALKRGKRDVGATLHAAQKANRICHHLLYHQLPFDPDRLR

SEQ ID NO: 74541 - protein, 422 aa, unidentified
METKCPVIGIDVAKEFSYYCILGPDGKVYRDSFRAENDLKGLTTVLSEAKKAEKEFGLKPVVILESTGHYSNPLVHFFAKKELTILLVNPLQSHSIKNSQIRKLKNDKVDAKELAELYFLKEFRPFRLSDAALENLKVLTRAFASISEQRVTLISQLTASVEQVMPRYTGLFSDIASKTSLTLLKDYSSPDQMLKAPKEEVVHLIRKVSRKSEEYATEKYTQLMNLCHESQEIGVLLDSNYQLINLYAKMIKSIDVEIEELNRSITDLSKQILAVDLIKSIPGIGDKTAPALIAEIGEIERFDNAKQLIAYCGIDPSVRQSGKFTGTKNKLTKRGSKHTRRSLYMTATVAVRKGKNGKCVNPVMHDFYQEKIKTKHKKQALGAVMNKLVRVIFSVLKNKQPFVLITPEEQVKMYQANMKIAA

SEQ ID NO: 74542 - protein, 336 aa, unidentified
MVEGTEGSHHKEGSRKMSEITMICAGIDTGKRKLDVAIAAAAPTLTLANDAGGHARLADFLRQHAVVRVGIEASGGYAAAVVMKLRAAGFTVIVWQPAQVRAYAKYKGQRAKNDRIDAALIAAATAAAADVHPAPDSRFAALAATLTVIEQIGEDIARLKNRCESCHGAGDARAFWENEITHLAARQRALLAQLVAAIRAHADLAQRLDLIESVDGVGLRTAVAILVRMPELGTVSRERAAALAGLAPFDADSGDHKGIRHIGGGRGRLRRALYAAALPAAFRWNAPLGVMYQRLIGRGKSHKAALIACARKLLIYVNIVVERGTPWRSQPGAALA

SEQ ID NO: 74543 - protein, 470 aa, unidentified
MSSTREVETEAKKRTPRRKKRGSCQQDRPVVEPNAAGIDVGAREMYVAIPPDRDSEPVRVFKTFTSDLECLVDWLIARGITTVAMESTGVYWIPLYQMLEDRGVRACLVNARHMKNVPGRRTDWHECQWLQYLHAAGLLRAAFRPEQDVCGVRTLLRHRNEMVRMAVQHVQHMQKALTQMNIHIHHVISDITGLTGLAIVDAILSGERDVAKLAELRHRSIHADEETIRKSLEGDWREEHLFTLNQSRQMYMNYRNNIEACDEKVAKLLGGFEAQVDIQLQPLPAPPGPSRKRRTKRTGDFRFEVRTEAYKLFGLDVTRIPGLNELAIPIFSEVGRDLAARFPTAGQFASWLGLCPDNDKSGGQVLWTGVRKINNRAAQMFRMAASSLHHNRSPVGDFLRRMKAKLGPAAGITATAHKIAIIFYTLVTKQIEYDDSIWATRDEHRQKRFEQKVKRQARLLGYELVPVQPA

SEQ ID NO: 74544 - protein, 394 aa, unidentified
MFLVGIDVGKLSHMFCIMDSSNGEILVSPVSFKNNKQGFDFLMDNIKPYPKDKILIGMEDTGHYHFNLLKFLLDSGYTVALINPITTDLTRKMQLNPTKDDNLDTMTICDVLASSPRKKGYRISKINNFEFYEQKRLTREHHDLKEQLNVYANKLQKCIDIVFPEYNSLFRSKYGTVYMKVLKAFGSADSIAHADIRNIRKCFETNRNGRTISLTPEKLKEAAKHSIGFPSKAEVIEIRHLIDLIELIKEQINDVDIKIEEFSTQLNSPILTIPGISHFSGTSILAELGDLRNYSKASQIIKFAGVSPYKHQSSQYEAQHTAITKKGSRYLRKTLYQVILPVIRYNPVFNEYYHLKLSQGKGHRCAQGHCVRKLLRIIYHLVITNQPFDSTLLK

SEQ ID NO: 74545 - protein, 392 aa, unidentified
MLYLGIDIGKRSHVASLLNEEGKVVFKAFSFHNTTLGADKLLTKLNTYIESPCDVEVGMEATGHYWLSIYSFLVESNFTVFVVNPIQTDGWRKGIEIRKRKTDIIDSILIADLIRYGDFLETSISDEDSLALRNLSRFRNYLSHSCSDLKRKAIAVLDQVFPEYDSVFSDIFGKSSKQLLLNFSSALEFEDISAAQLSKALEKITFKKFATKKVHALSSLAKNSFGVKFAIDSFSLQLKMIVEQIIFIEQQIDQLELELEILVSKIDSPILTIPGIGAVNAATILGEIGDISRFSHPSKLVAYAGLDATVSQSGEYSSTNNRISKRGSPYLRKAIWSAAFVASNHDPVFKAFYEKKRREGKHHLVAVGACARKMCNTIHAILKKNVPYVPQI

SEQ ID NO: 74546 - protein, 342 aa, unidentified
MNITTIGLDLAKNVFQVHGVDEQGKAVLKKQLKRNQVLPFFANLAPCLIGMEACAAAHHWARKLVGLGHDAKLMAPQFVKPYVKSNKNDARDAEAICEAVSRPNMRFVPIKTPAQQAVLSLHRARQGFIKARTAQANQLRGLLGEFGIAIPQGIRQLPTHVPDIVEDADNGLPGVMRALVQRLWEHFQELDRQVGELDREIRRLQREDEASRRLAEIPGIGVLSASALAATVGDAKAFANGRQLAAWLGLVPRQHSSGGKEMLMGISKRGDCYVRTLLIHGARAVIQQAERRNEADSWLKRLLGRRNKNVATVAVAAKNARIAWAILAHGRDYDSDYQPVAP

SEQ ID NO: 74547 - protein, 337 aa, unidentified
MEHFAGLDVSMKETHVCVVDRDGDVALETMATTLPEAIAEALARTPSCQRVVLETGRMAPTLYHGLEALGVPVICIESRQAHLALKSLATHKNDRNGARGLAQLARTGFFKPVYVKSLPAHAVRALILARKKLVGQRVTLENQIRGLAVVFGVRLPRGLSPAFAKQVASGSQGVAGLACAMTGLLAARNAVLEAITAIDRDMKRLTRASEACRRLMTIPGVGQLTALAFVAAIDDPERFRRSRDVGAYLGLVPRRYQSGEVDYTGSISKCGDRRVRTLLYEAANVMLTRYRGKLALKEWALDIGRRSTMRKARIALARRLAIIMPAMLRHGTEFRPA

SEQ ID NO: 74548 - protein, 449 aa, unidentified
MTNGSGVSRGDRNRNARLVRLRSAVPVANAIVGIDLADRKQMVVVCDHDSRVLARKTFRCKAWAMGAALDWAGDRAVRLGFVGVTVACEPTGHRWRVLGQLAADRGMPFVCVQPAASSWARRTEDLTSDKTDEKDAVLIARLTAQLRCYLPERVDETWGRLRHLGSRRTQLLDAHTRCIQQVRDLLECVWPAALTTAKQPFKSITWVAAMRVLMLRDGGDLTRTCRLGRARFERQVRAEVVRRGRIKPCLRIVNRLWAALEDPAGVEAHRAGGFERIGWILDDWDAARTNQAEVEQHMTDALDQLGLTQLVTSIDGLSPVGAAAILAETGDLTRFTSARAIVKLAGLAPRERLSGTFAGKARLSGAGRPGLRTAAWRAVWGCLHSNDVYDARYRHLITREHNKLKPTQAQTVLAAALLRQLWAVITTGQAWDPAIAANGLAHLEEAHVA

SEQ ID NO: 74549 - protein, 418 aa, unidentified
MAPTKSEKRKTINEKTLIVALDIGKNIHYGYFRTPKNQDIKPFRIYNTGQSFKHFWKKLNNFRQQHGLDEVVVGFESTGPYAEPIASFLRKKPVSLVQVNPMHTKRIKELTGNSPNKTDKKDPRVIADVISLGHALTLVVPEGAAAQLRRLAHARERAIKRKTAMGSQLQHLVFVVFPELGDIVKPTTKTGMYLIKNHPDPDSIVNLGFEKLHDIVRKVGRGRYSIDRVEKLYKAAKNSVGITEGKESLLLEVSHLVSNIENENRQLKILEEQMTLYLDPIPYSHSILSIKGIGKITVAGLVGEVGDFRKFKTISEITKLAGLDLFEVSSGKHKGMRHISKRGRALMRKLLFFAALNAVKSHGIMHAKYHTMLNNGTSKMKALVSVSRKLLRIVFALARDNTEYDEHYVGKHEYKLAA

SEQ ID NO: 74550 - protein, 428 aa, unidentified
MNNFKQNQKIAQVKNCTLVVGIDIGSTKHFARAFDWRGTELGKVCIFSNSREGFNALSAWMQRISAKHNKSNVIVGIEPKGHYWFNLDAYLEDEGILLVMVNPYAVKQSKELDDNSPSKNDYKDPKVIAKLVIDGRYSKPYIPEGVYADLRIMVSNRMRVNKELGAIRNRLARWFSIYFPEYCNVFGDYEAIGSMLVLNVACTPQKILELGPEGVNNIWRAAKLRAVGMKRATTLCETAKASIGQRTSAVGAEYEMKILLQDYAYKKAQYDAILEEITRLCNEIPESKQMLAIKGIGILTVSGFLAEAGDLRRFESPRQIQKLAGLSLRENSSGKHKGQTTISKRGRSRLRAILFNAAIPMVAHNAEFSALHNYYTTRANNALKKKQSIIAICCKLIRVFYAIFTKHVAYDGQKLLSDIHRNFEPQIA

SEQ ID NO: 74551 - protein, 343 aa, unidentified
MNHVAIDLGSKESQVCIRQADGTIVIEKKHPTRRLGEWMQQWSPSRVILETSSEAFRIADAARSAGHEVKVVPATLAKQLGVGERGIKTDERDARKLSEVSCRIDLPSVHIPTPAARELRSILRSRQLLIDTRTKTINHVRGWLRTQLWKLGAGKTTTFPDRVRDRAAENQQPLPPHIERVLLVIDAINVQAKEADRQVEKLARTNPTCRQLMTTPGVGPITALAFLAAVDDVSRFRHAYLVQSYLGLTPGENSSSERERRTHITKAGASSVRRALIQAAWAAFVRHPKEPMARWAAQIAARRGRFIAVVALARKIAGILYALWRDGTSYKSSRSALMETASG

SEQ ID NO: 74552 - protein, 421 aa, unidentified
MQVLYERCAAVDVGKDVVAVAVRVPGDGPDGRKTVKRTFRTFYGVLREAARWLTDQRVTHVAMEATGIYSMPVYHALVEHGDFEQVVVCNAGHVKNVPGRKTDLSDAEWLVHLLECGLLRGSFIPPVEIKAARDVIRYRTKLTESRTSELQRLGNVLQDAGIKIDSVASTITTMSARAMVEALIDGERRPKTLADLAKGRMRAKIPDLARALEGRFGDHHALMCRLHLDHLDHLDEMIAKLDAQVEEMMEPFRPQRELLITIPGIGQMSSAVVISEIGDDVAAYFPTAEQLASWTGLCPGNHESAGKRYRGKRRKGNQHLQPWLVECAWAAVRTDGYLREFYRRQVRVPGGFRSPTAKKKAIVAVAHKLAVIIWHVLTTGRQYEDLGADYFTTRIDPEKQKNRLVAKLEAQGYTVTLEPAA

SEQ ID NO: 74553 - protein, 347 aa, unidentified
MKYVGVDIGKRKCRAAIMSAEGRIVKELDFTNNSDGITSLTLLLTMDDRVVMESTGPYWLDLYNQLDQLHISVVLANPLKTKAIASARIKSDKVDARILAHLLRTDLIPECYVPSKEMREIRSLVRHRLSIVKLRTMVKNKVHALIDRNGLKHEFSDLFGRAGMQWLKSVELSGLDRLMLDNYLMHIESLELQIERVDLEITSRASFDGDVKILLSLKGVNVYGALLIKSEIGSILRFSDYKKLVSWAGLAPSLHQSGDVEFHGSITKQGSTMLRWMMVESARVASVFDSRLKAFYERVARRRGDQKAVVAVANKMLKIIWFMLTRKEPYESVDEGRYAKKLKSLNG

SEQ ID NO: 74554 - protein, 342 aa, unidentified
MQHLAIDLGGRESVFCVRNQDGVIAEEGRVPTHALGTFLAKRLPCRVILETCAEAFAVADSSVAAGHDTRVVPSRVVRALGVGDRRLKTDQRDAQALSEASSRSELPSVHIRSSVSRELQALHRTREELVECRTKLINGVRGWLRTRLIRIPSGNPCTFPKRVREAALATPHGVPSYLERNLVVIAQLTEHIDAANQEMKELVAESELCGRLKTVPCVGAVTALRYMSVVDDVRRFKSAHRVESYLGITPGENSSSGRKQRLAITKAGPGDLRGLLLQVAWSAWRTRPDDPMVRWARKVAERRGRKIALVALSRRIAGVMYAVWRDGTTYDPKRTHASVAER

SEQ ID NO: 74555 - protein, 413 aa, unidentified
MEVLYRVCAGLDVHKKTVVACLRGPGPNGTRAEEIRTFGTTTRELLQLADWLAAAGCTHAAMESTGVYWRPVYQMLEGRFELLLVNAQPIKTVPGRKTDVKDGQWLARLLEHGWLRASFGPPAPVRELRELTRSRRQLVEERARDANRVQKVLETATITLAAVATDVLGASGRAMLKALIAGERDAEHLAALARGVLRKKQAQLREALVGRVTDHHAFMLQALLSHIEFLDQQIALFDAHIEAQTRPFAAAVARLDTIPGVARRSAEPILAELGDDMSRFPAAANAASWTGIGPGNNVSAGKRQSGRTRKGNRWLRATLVECARGAVRARHGYLAAPYHRIARRRGDQKAITAVGHSIVVIAWHVLRTGQPYRDLGHEYFDRLDRDRLVHDHTRRLAELGVVLPPPSPASAAS

SEQ ID NO: 74556 - protein, 412 aa, unidentified
MTAIDQFAAHVGLDWADKKHDVCVQFKNGERIFHVIKHTPEALDIWLNELHQQVKGRIAIALELKKGPVVYALQKYPFVTVFPVHALSLARYRQTFWPSGAKDDPQDAELALELMLRYPEKIKAIEPDNADIRLLQQLVEQRRLLVEDKRRFVNRLINTLKQYYPQPLEWFSHRGSLLLCELIIRWPTLQQLKRARRDTIRNFLNAKGGRATALTEQRVASIDNAIPLTTDSSVIEANALMATALTTQIKVASEIIKTYDERIETLFDTLPDAGLFKSLPGMGPCMGPRMLAALGDNRDRFNSAEEIQNYAGIAPVTERSGQKSWVHWRWQCAKFVRQTFVEWTAKTVNSSYWAKLYYQSLREKGKSHQSAIRALAFKWIRIIYCCWKTRTRYDEAKYLLALEARHSSLLKS

SEQ ID NO: 74557 - protein, 341 aa, unidentified
MRAFVGLDVSLASVAICVIDDGGRVAWEGKTASEPEAVSAALAPWSEVLERVGLEAGPTSEWIGGSLGAAGFPVACLETRHVKAALSAMVVKTDRNDARGLAQIVRAGWFKEVHLKSPASQRHRTLTAARKFLVRSMTATEQALRGLLRPFGLKVGAVTRRRFGFRVRELVAADPVLAAIVDPLLAAHEHLVTETARLHRLLLQTVRADPVCRRLMTMPGIGPVTALTFRATIDDPHRFRRSRSVGAYLGLTPRRYQSGETDKTGRISKVGDEETRTALFEAANVILRPSTRWSAMKAWAMRIAGRQGSRRAKVALARRMAVILHRMWIDQQDFRWTSAAA

SEQ ID NO: 74558 - protein, 426 aa, unidentified
MRVLYDRVAAIDVHKDMVKVAIRVPGAKRGTRKTDVLEFRTFYGVLQEMARELRRRGVTHVVMEASGVYTDPVYYALAELDFEEVMVISPAHAKALKGRKTDAKDAIRLLDLYECGLLSGSYMPSQELREVRDLGRYRMKTVQARTSEIQRLQKALETAGIKLGSVVSDITGGSATAMIEALISGERRGAVMAALAQTRLRTAGKMADLSMALTGRFTDHHALMCRLHLDRIKLFDDAVTDLDARIASKVARYDREAGLLKTLPGFGDVVVAGWLGAIGPAPHQHFATASRLASWATLCPGNYMSAKKSKGGRTGDGGACIKPLLIQAAWAAVRVPGRLQARFRRLVRKFGGPRSKGAQKRAITAIARTLLKIACTVLKTGTPYQDLGADFCTRRESPDARQDYLMRQLQKLNPGCVITITPAEAA

SEQ ID NO: 74559 - protein, 342 aa, unidentified
MKVIGLDQHKHFSQVAIMDEQGVLLKEQRLAHSDRESIAQYLTPFKGEAKVAMESTGNWTWMCDLLQEAGLEVHLSHPLKTRVICEAKVKTDKIDAKMLAHLLRSDLLPESYIAPLEVRQQRQELRYRLNLVKMRTAVKNRIHSLLEQLGIKTPEVSDLFGKEGLNWLKTLDLSDAYDSSLKGYLKLLAELGALIHDVDTEIKGTLRKDPRAALLNTMPGIGFLTADLLLAEIGQIERFSSAKKLCSYAGLVPSVHQSGQSSYHGRITKQGNRYIRWAMIEAAQRAYLKDAELSKFYRKLYLKKGRSTAIVALARKMLAIVYNLLKHNEPYNPSGKPVERAG

SEQ ID NO: 74560 - protein, 375 aa, unidentified
MGDHSEAFVAFDTSKLRNAVAIADGGRAGEVRFLGEIENTGAATAKLVRKLAAKHQRLTFCYEAGPTGYGLYRLIKSLGHECIVVAPSLIPKRPGDRVKTNRRDALSLVKLLRAGELTAVWVPDRHHEAIRDLTRARGTAALDLRRKRQQMSAFLLRQGLHYPENRHTWTKAHMSWLASQKLAHAEQRLVFEEMMLAMRQAQERIERLEQAIRAAVPDWSLAEVVTALMAMRGMDLVSATTFLAEIGDLSRFQTPRELMAYLGLVPSEQSTGDKVIRGPITKAGNGRARRMLVECAWSYQHPPRVGKDKQEKVAAAPPAVREIAWKAQCRLNRRYRALVRRGKPKTVAITAVAREFAGFIWAVARAANAARAEAK

SEQ ID NO: 74561 - protein, 297 aa, unidentified
MFHSDYTVGCDAHKHFSLFAVLGPNGDLVQRIRVGHVPGAIRTFLEQFPEGTPVALETVGNWYWIVDEIEAAGCTPLLAHAAKAKVMMGNVHKTDKLDAQGLATLLYLGKLPSVWIPPNDVRDARELPRTRMAFSKSRAALKNRMHSTLAKYALSLDTTSDIFTPKWRPPLLKLIDTLPEETGRCMHQELELLQLVQQQIDQLEARIKERIKLSATMQLTQTLPGVGVILAIVITLEIGAIDRFSAPKHFASYCGLVPKVSASGGHVHYGRMVTPSRCPSGSRPTTTSSGPSSKPPM

SEQ ID NO: 74562 - protein, 347 aa, unidentified
MNFYNNAHPYYCGIDLHARSLYICIIDQHGEICLHKEISANPDKLNHILEPYIGNIVVGVECMHCWYWVSDFCHEIGVDFILGHALYMKAIHGGKAKNDRIDSFKIASLMRGGNFPLAYVYPQKMRATRDLLRRRMKIVRHGAHLKAHVANTTTQYNLPPNKVNLKNIDAREQIRTTFPDLVVQRNIDLDMAVLDCYAKELSKIEWFLEQQAKQHNPIHFHLLRSISGIGRILALTIIYEVGDIKRFESVQKFASYSRLVKCKAESAGKIYGTNGNKIGNAHLKWAFSEAAVLHLRGNQKAQKYLQKLQRRMSKAKALSVLAHKLGRCVYFMMKHEKVFDESRFIAS

SEQ ID NO: 74563 - protein, 350 aa, unidentified
MYYVGCDQHKHYSQIAVKDETGQMIEQQKLYHHDRDALKAYFDKLPSDSLIALEASGFQPWLCDLLSELELKFKLVHPRKTRAIAEEKIKTDKLSASVLADLLRANLVYEAFYAPTQMRQFRYWSRYRQSLVHLKTNAKNKIHSILDQLGVQPPTLTDLFGKAGRNYLTSLEIPDVYQKAIQGYLKLIDTLQELITSVEGKYRCFAKENPAIELLKSLPGVGPILAHMILAEIGDIKRFWSSSKLSGYAGMVPSLHQSGQQYYSGPITKQGNKYLRWAFVEAAQRAIHQDVYLAKFYAKIYHKKGRPTAIVAVAHKLLIYTYWILKEQKSYKAQRPVGDPVDYTGPLAAV

SEQ ID NO: 74564 - protein, 347 aa, unidentified
MAAVMIGVDPHKGSYTAVAISSAEEPLGELRVRASAGQAEQLLAWAVAWPQRTWAIEGAGGLGHLLAQQLLAAGEQVLDVQPKLGARVRLLATGAVNKNDPNDARSVAVAALRSPSRRPVQPDDHAAVLKVWAKRHRDLGRTRTQVVCRLHAVLCELVPGGVPKAITANHATRLLSSITPARAVQAARCELAAEFLDDLRRIDAQLLEAHKKLTTAVRASGTTLTDVFGVGPVVAATLIGAVHDVSRFPGPDHFAAYNGTAPIEVSSGPRKIYRLSRRGNRRLNHVIHMAAVTQIRYRHSPGRAYYDRKLAEGKTGKEALRSLKRQISDAIFTRLLADARRAATGLR

SEQ ID NO: 74565 - protein, 416 aa, unidentified
MGKIIERCAGIDIGKRFLLCCILTGAAHEEPRSETRRFDTTVPGLERLRNWLNDEQVTDVVMESTGSYWIPVFNLLEGRFTIVLANPEEVKNRKGHKTDRKDAEHLADLLRHNHVRSSYIPAEPVRQLRDLTRRRVQLTQDATRERNRVQKLLEQVNVKIGSVLTDVFGVSGLHMLLALLEGRAAPAEIACLARGSAKRKIPQLIEAIEGNRMSDHVRFLIRGCLRHLACLEEEAEELDAEILRRMQFSTFQKAFTLLQTIPGVGQLSAATILAETGPDLDAFPTVEQMASWAGLCPGNRESAGIQKGPQTTHGNPYLCTALVQCAWAATRKRDSVFRSRFQRLAPRRGEKRAIIAVAHLMLIILYCMLKEGVPFRGAENAPKQRRRERRAHHHLRCLRRLGLSVEIRLDPRVHPA

SEQ ID NO: 74566 - protein, 424 aa, unidentified
MNQKQYFAAFIGLDKSDKKINVSLQQCAGTGIERSVIKGGAEALHAWVAMLCARFPGQRVAICVEQPAAGLIHALMGYAFVVLYPINPVTLARYREAFTTSRAKDDPTDADFLCELVSLHREQLQAWQPDDVCTRKLRHLTQARRSSVNMRTRLSNQLKALLKTYFPQALELCGEDLTAPMACALLQKWPSLQQLKNARKETLRRFYYAHNARRGQVIEKRLALIEKSVPLSNDPALIESSIITLQALILGLRAVHTANARFDREIARTFNEHPDAPLFAALPGSGTCYSARLLAAFGSRRELFQSAQAMLNFSGIAPVLKRSGQSTTIHRRYARPLFLHQSFIEYANQSIRHSLWARAFYQKQQAAKKSHWVIIRALAYKWIRILFRCWQERTPYDELRYLRSLQKCRSPLLQYLVPQTTQPA

SEQ ID NO: 74567 - protein, 369 aa, unidentified
MLFQSFSTQKGALTVNSSKYLAMDVHTATISVAVRDAAGKLIMESVIETKSSTILQFIQGLRGDLYVTFEEGTWAAWLYDLLRPHVTNIVVCDPRRNALLNEGSKSDRIDARKLSELLRANLLRSVYHGENGLRTVKELSRAYLTIGKDLTRVMNRVKAIYRGWGIPCAGKSVYHPHHREEWLRKITQASVRRRAELYYEQLDVLVVLRKQARQELLAESKKHKAWKLLRSIPALGPIRVAVLMAIVQTPHRFRAKRPLWKYSGFGVVTHTSADHRYVNGQLERSKRPVSVRGLDPGHNHQLKYLFKSAAIQASTAKGPFQEFYEALVAKGMRPEMARLTLARKIAVITLTVWKKGAAFDAKYLKSQTA

SEQ ID NO: 74568 - protein, 428 aa, unidentified
MPPQAPEAFAAFVGLDWADAKHDICLQAAGTTRREFLHLEHRPEAIDAWVQSLHTRFNGQPVAVCLELTKGPIVSALCKYDFLVLFPVNPLTVAKYREAFTPSRAKDDPTDAELQVELLLTHRDKLTPLTPQSPTMRALAQLVEHRRRLVGDKVRLTNRLTSALKNYFPQVLQWFQEKDTAIFCDFLSRWPTLKAAQLARRAPLVAFFQAHHVRVADVIDSRIQALKSATPLTTDEGIIAPSALLVQALVSQLRMTLQAIKDFDDAIAQRAQAHPDFPLFDALPGAGAVFAPRLLVAFGEQRERYTSATELQTYAGIAPVTERSGKKSWVHWRLQCPTFLRQTFVEWAAESTRPSFWAQVYDQQQRDKANAHQAAVRALAFKWIRILYRCWQERTPYDESVYLQALKRRNAPLLHHLAKEAGNTVKKP

SEQ ID NO: 74569 - protein, 353 aa, unidentified
MEYIAFDAHKHYTLASVVRPDGRLVREQRLPHERGALQQFLARCESGSPVAVETIGNWYWIVDEIEAAGCVPKLVHARKAKPMMGEINKTDKLDVRGLNQLQRNGTLPTVWIPPGELRDQRDLPRTRMVLVRQRTQLKNRIHATLAKYALHHLEVSDLFGVRGRALLRQRLELLPPCTAYATQQLLEQVETLDRQVRGFEHQMQTVFKPTPTIQLLLTLPGVGLMLAVVVALEVGSVARFATAEKLAAYAGATPRVHASGGKTRFGPSRPDVNRYLKWAFVEAANAVCLNRSRAPRRHVSRLYERVARRKGHQKAIGAVARHLAEATYWILTKQEAYREPNAAAVSSTGDKRG

SEQ ID NO: 74570 - protein, 364 aa, unidentified
MVPAIRLSRPERGPEVIVIGIDPHKQTHTAVAIEQATGEVIAELTVRARTPGFERLVDWARGLGAERLFAIEDGRHVSGALERYLIDRGERSVRVAPRMMGESRRADRIGGKSDPIDATAVARAALAHPDLPVAILAGPEREIGLLAAHRESLVAERTAAQNRLRWLLHDIDPDLAPPARSLDRFRTLGRLEGCLAGMEPSVQVRICLELITRCRQITRRVGELEREIEKLVKACAPALLQIPGCASLTAAKIVAETAQVDRFPTEGHFARYAGTAPVPASSGATHRHRFNRRGNRQLNAALHRIAVTQLRIHEPAKLYLAKKRSEGMSKTEAIRALKRHLSRVVFKTMTSMNQPADGLTAVAA

SEQ ID NO: 74571 - protein, 320 aa, unidentified
MSEAYTVGIDVSMDRLDVAILPGGQRLFVANDVAGWAELGVQLQRCAIAAIGLEPSGGYERGVVRALLAAGFSVRRVNPNKLRQFARARGVLAKNDRLDARLIAEYVAIMPTRAVQCDPAAERLAEIVTMRRQLCDERVAAENQASHLEDALLRRIAKRRLARIAADIGLLDKRLAELVAAEPGLAQRFRRLCSMPGVGATLAYTLLALLPELGQIGRKQVAALVRLAPYDFDSGRFRGQRHIWGGRMAVRNVLYMAALAAFRFNPALKAFHRRLRAAGKQPKVAIVAVMRKMIGILNAMLREGTDWVDHTTGRHTVPAI

SEQ ID NO: 74572 - protein, 455 aa, unidentified
MGKRNGLSRGDARRNARLVRLRGVVGHDRAILAIDLADTKQVLAVCDHDSRVLARRTVRGRAWQLEEALRWGRGVAVQHGFAGIVVACEPTGHRWRIVAELCDRLGLELVCVQPLLVARAREAEDYTRDKSDPKDAVVIARLVGELRCYLPERPDATWARLRQLGARRVQLTTTAGACRQQLRDLLECAWPAVLDTAAKPLDSVTWQAAVTVVLARDQGDPAGIGRLGYARFARQVTRQLARWGGQRRCQRIVQAVWTAATSPQALALGVSSQRPGALERASLTLDDWHHALGQLADTQQRMTGILDQLQLTALVGSIPGLSAVGAAAILAEAGDPTRFDSARALVKHAGLCPRANESGASAGTTRISGRGRPALRLAAWRATWGALAHNPVLQARHAYLTGRDRNQLTTAQARTALAAALLRWLWVVITKRIDWQAAIAAGTLDPRKEVTIPAA

SEQ ID NO: 74573 - protein, 263 aa, unidentified
MDTHGEVHVAAVLSPLGKVLGTESFPATAAGYRRLLVWAGKLGAVRRAGVEGTGTYGAGLSRYLLAQHVEVYEVNRPDRSARRLLGKSDPFDAQAAARAVLSGRARARAKSGDGPVHSARMFKLAKDSAVKARTQAINHAPQLLEPVGIGPDSAVTLLITMGDNPERLSTEASFAALCGVSPIEYSSGRRITRRLNYGGDRQANAALHRIVFTRLRHDPRTQAYYERRTQEGKTRREIIRCLKRHAAREVFNLVRPVSHTPAL

SEQ ID NO: 74574 - protein, 423 aa, unidentified
MTSMTLDPPLTNLLPPDAELVAGVDTHKKTHHVAILDLVGRPVADREFRADGRGYAQIVAFLHAHGDVVRIGVEGTGSYGAGLARALTTAGLTVVEVARQDRQARRRRGKSDPLDAHQAAVAVLAGTDTAIPKSGDGAVESMRILLAERRSAAKARAQVMNQIHALLITAPELVRQAFRALSGQRLVNTLAKTRPGTVSSTDPEVVVRQTLRRFAVRHRTMQAEIDLIEQQLDFLVRQVNPTLLSLSGVGPVTAATLLVAAGDNPERLGSRASFAALAGVAPIPASSGQRTRHRLSRGGNRHANAALHRIVLLRMRHREPRTMAYFERRRSEQLTDRDIMRCLKRHVANEIYAALLNPATDNPVGRELRARRQAKGIPISVLAATLGVPYQRLRRLEIGTRADPELEARAATVLEQISPTLTA

SEQ ID NO: 74575 - protein, 312 aa, unidentified
MPLQESPLFIGVDVAKLTLAIQFPDHLWSIANTPAGHATFIAKLSALGAVHVVCESTGGYERALVLGLHAAGIAVSAINARQIRDFARACGRLAKNDDLDAAIIRDYGCRIQPSRDPAPAPGEPEFAELIRARQDLVALITDEINRREHACLPPLLRLSYARQRQLEKQLVTLDALIDAHVAAQADLAAKTERLQQVSGVGRVTALTVVALMPELGTLRDNEAAALAGVAPMNRDSGQHRGQRHIHGGRAALRRVLYMAALTATVHNPILKAFYQRLRQNGKPAKLALTAVMRKLIILLNRLVKNPAFNLVS

SEQ ID NO: 74576 - protein, 344 aa, unidentified
MEEGGVVYQLYVGVDVAAETFVAAWLAPGGQPGTPVTHEQTPAGFAALQRHLRATASPPAATLVVLEATGNYWVALAVALHETGYRVAVVNPRQAHHFAKAQLRRAKTDALDARDLARLAAALRPAPWSPPPAVYHEVRQRLVARDGLLAMRTQARNQRHALAQWPVVVAAVRQHLDELIADLDRRIAALEAEIAAVLKESAWAESLACLTSAPGIGLVTASWLLVGTLNFALCAGPEALTAYAGLAPVPRESGRSIRGRAAIGHDGNGRLRTALYMATLSAARYNPAITAFYQRLRAAGKPKKVARCAAARKLLHQAWALGSKLQRFDPGYQQQHEASPDLAA

SEQ ID NO: 74577 - protein, 342 aa, unidentified
MYYIGLDVHKKTINYCVKDVSGQVHREGQIGATRRELDGWMKTLPQPWTAAMEATIFTGWIYDHLLPHARQVKVAHPLMLRAIAAAKKKNDRIDAGKIADCLRCDFLPECHMASTSIRERRRTLRYRHLLVRQMVQMKNRISGLLMETGVSYNKQRLHKVRYFRELLTTNEEVNESIRPLLRVSRDSIVRLQKTEYALVSSLQRDPLLAERIRRLRTVPGVGPITALTWALEMGEVSRFPSIREAISYCGLCGDEKSSADKMTRTPLSKQRNKHIQRVLVEAAKLAPRQDHDLALVYETAKQKGNGNRATLAVARKMVAYLLAVDRGQRDFVPAEAHRSAAA

SEQ ID NO: 74578 - protein, 342 aa, unidentified
MNEYDGKQFVGIDLHRQRSVIVRQSESGEQLSAVRIVNDPVALGLQLEDAGADPEVVLEATYGWYWAVDVLQAHGAQVHLAHPLGVKGFRYRRVKNDVRDAGDLADLLRMGRLPESWIAPPATRELRELVRYRAKLVAIRSGLKAQVHAVLAKAGVLIAVSDLFGVGGRKRLAKVPLATAYAQRVRSLLELIDILDGHEARFAALIAKRLDADRGYQAIQQVPGIGVTLAAVFVAEIGDAHRFTGPAQLCSWAGLTPRHRESDTVVHRGHITKQGSKLVRWAAIEAVQRHPTTAKIAADKDRIEARRGKNIAKVAAARKLLTLVYYGLRDGHIRALDRGKAA

SEQ ID NO: 74579 - protein, 338 aa, unidentified
MYYTGIDLHKSSSFLTTVDATGNIIKQADIKNIDFNFVQYFTDLHGEHQATVESTCSWYWLNDLLSSINIPLTLAHAKYVKAIAYAKVKTDKVDSHILAQLLRMNFIPSAHKISNDHRFLRDALRARLKIVQRYTSVNNSMDRLLTKYNLSDGEQLSDIAGFQYQQLLTLSSLLKEQMLNLEKSLYPYLIPNDDIQRLLWIPGIGKMNAFTIFLEVDDINRFPDVKNFFSYCRLVPAARNSAGKSKQHSSKDGNKYLKIAFSDAAVHAIQYYPVIRKYYESRLRRKNKPVAKSIIAKELSRIVYYVLKDKNNFNNKFKGIEIQQKKSFQWPRVVSPDA

SEQ ID NO: 74580 - protein, 362 aa, unidentified
MTNRSQTLFVGVDVHKDTHTAVGVSPFGEKLFELTVGNYEKDFTLLSERAQQAASDTGLSVRFCLEDCHGYGERLASFLVDAGNSVCHVPAILVDHARKREVHPEKNDSKDAHGVAQVMIQRIDTLPSYSITKETETAKNIREVSMDREYLVKERTRVKNQLHTLLYRIFNTEYAKLFKDPFSLKALTYWMKSRPKNISPFLLRTMKRKVKRLLDIREEVSELEDELKDLITESGHTLQTASGCGTVLAGELIGEIGDVARFKTPAQLAKYAGCAPREHSSGKTVRWRKTRGGNRRLNRAFHRMALSQISRMGNVNARDYFKKKISEGKSKSQSLVCLRRHMVTLVWNMMKHKDQYRFPTEI

SEQ ID NO: 74581 - protein, 478 aa, unidentified
MSDELFIGCDVSKGYADFQPVRCDGTPLEAAFRLEDTLQGHLQLKAIIERWISQGIEHLHIGVESTGGYENNWVRLILDWQGELPVRIARLNPTGVSSLRKAGLIRTVTDAVSAEAIARYLLIFPKKVIWLTPRQAPGNEFAAARKFLRGTATLDKQRQQLASQLEKLMYEYFSPLLVYTRHGIPRWLITLLSKYPSARSLRRAGKKRLSAVKGVTLEKAGVILDKLSASDTEPGYLDQENIRQTARQILHLYGLIKQRHELLQSEYSDDWQVRLLMSAPGIGLQTAVLLRIEIEDVRRFATAKKLATYFGVCPKYVESGDKKGQIRMSKQGRPQVRKALYMSSLTGIRKDEAMKKLYHRYRSKGHNHYQAMGVVMHKLLRIVYGILIHQAPYNPEVDKKNQQRAKQKQRAKEDDQNTIRSRQKKQLNRYQKETVNAPRSRRSVQKLRKEQLASQSSTVEECTGSPNAPRTEIYENVT

SEQ ID NO: 74582 - protein, 436 aa, unidentified
MGFLLNRSGTATRKSVRTESTVMSEASSQQPTPAALAYVVGIDIGMESCLMCCLTPEKRQVIKPSQFSNDAPGFAWLFERLQRLGSAPEHLLVGLEATSRYGENLYHALLKQGYRVCLLHPGQIHAFAQQRGLRAKTDRLDATTIARARLREEARFGYVPDEQVATYRELVRLQQQLNEDVVRYKNELHALLVVVFPEFHQVFADPSRRTALAVLKAYPSAQAMREADPAVLSQLLHQRCPSHYGRQTAEHLIQLAQGSVSSGVAIAARASCLRILCDQLEHSQHNLEQVQEEIERLLSRDPKVKGLLAVTEFGPMTVAVLRAELGEVNRFARMDQVVAYAGLDLQVKQSGKWKGQTKLSKRGSGRLRRILYLAALRSIRLRASPFGSYYHRLVDRGMKKGMALVAVMRKLLIVSTHLLQTQQDYDAGKVGVQAGS

SEQ ID NO: 74583 - protein, 394 aa, unidentified
MKKTHKKSQRSKSKKKLVASGGRAVEVRASGELNRINEHAAGVDIGGERHYVAVPPGSTEHPVREFGVFTKDLYAIADWLRECGVETVAMESTGVYWVPLFEVLEECGFKVKLVDARKVKNVSGRKSDVLDCQWVQQLESYGLLQAAYRPTDEIVVLRSYVRQREMLVKSAATHIQHMQKALQQMNLRLDNVVSDITGQTGMRIIKAILSGERDAQKLGMMRDYRCHATAEEIAQSLIGNYRQEHLFSLKQAVELFEYYQEKIAECEAEMEKYLERLPHVTEEEPPELPFKEKRNLMSFNVQDHAYKLLGVDLFRIRGLNSETVLRIVSEVGVDLSAFPSEKHFASWLCLSPNQRVSGGKVLSSRTNPSSNRAAAAFRQAAVSVERSQSELGAF

SEQ ID NO: 74584 - protein, 418 aa, unidentified
MLVAGIDVGAEVHYVAVVDQSEAVVTKPTVFEESAAGYEKLFALLARAGARGGEDLPLATASAPQQSTLVVMEATGHYWQNLFAALVAKGFAVALVNPLRTHRFAGEELARTKTDRVDCLQLGRFGAQKRPAPSQLPEPAVAELRELMRLRERLMQELVARLNQLHRLVDLGFPEFTRYLKDLNTELASAILHQYPTAQALRGVSRKRLAKLSYDGRHQVGAELAQQLIDAAACSVGSQHSPSHQLGVRYACEDLETLRKRLKRLDGEVAGSLKQHQVGQLLTTIGGIGDTTAAMIIAELGDPARFESAAALAAYVGVCPAHKHSGKHQPKSSSLTPFGNRRLRRALWMPTLGAATQNNPWLMIFYRRLIERGKPHKVALCAAMRKLLAAIYSVAKHRRPFSPDLNRQSQLRIGYENA

SEQ ID NO: 74585 - protein, 392 aa, unidentified
MDTTKSRVVIGMDPHKRSVTIEVMAADERVLGGGRFATDVDGFAALKRYVSRFADRVWAIEGCSGIGHHIAMRLLAVDEEVIDIPPKLSARARVFATGQGRKTDATDAHSVALVGTRMSGLRPVVNDEDLAVLRLLVDRRRSLGEDHTRMVSQLHQLLLELIPGGAKKDLSARQAKALLAKVRPRDAVGKTRRRVASELISDLERIHARKKAANKELTELLEQTGTGLLDLNGIGPSGAARLLVEVGDITRFPNKAHFASWNGTAPIDASSGDQVRHRLSRGGNRQINRVLHIMARVQIRNPSEGRGYYERKKADGKAPMEAMRCVKRRLSDIVFQQMLTDAIKHQATGPGGQTGNDSDSSATGSHPSASSSDKPLPGPVTTKPKTPLPTAS

SEQ ID NO: 74586 - protein, 422 aa, unidentified
MRFIGLDVHRDFCEVAIAEAGRLRSAGRIETRVEALELFARSLAPDDQVALEATSAAAALAALIEPHVARVVVANTRKLAAISQAKAKTDRLDARTLARLLASGYLEEVWAPDEQTRALRRLTSRRARLVRARTRAKNESHGVLARNLCPRPPVVHLFSKAGRRWLAELELPLDERLTLEGCLRQIDFLDSEIDSLEQVLAEQALGSPEIQRLMTVPGVNMITAATFVASVGDIGRFSSPRKLVSYLGLDPKVRQSGNEPARHGRISKAGAAEARHVLGEVAWKVSRTPGPLRAFFERVRARRGAQVAATATARKLVVLFWHLLTREQDYAFQRPSMTRNKIRRLELLAGARPRKGKAGVAGGKSKKLWDAERELSRQAEASYRRLTADWRATGPAKKVGAGATQGRASSRPSKRQAARQTR

SEQ ID NO: 74587 - protein, 366 aa, unidentified
MKKVSTTAAKQTTNFSQQRLTIGLDLGDRWSHYCVLDESGRILTESKSATSPNAMKEVFGKIARARIALETGVHSPWVSRLLSKLGHEVIVAHARNVRLIGESRRKDDRLDAQTLARLARIDPQLLCPVKHRSAKAQADLTVIRARAGLVRARTALVNTARGLAKSYGERLRGCNVRNMNPEKADGLSPELQTALQPLLAAAEVLSQQIREYNERIECLAEESYPQTELLKQVKGVGTLIALTFLLTLEDAHRFRKSRDVGCYLGLQPGRRNSGQSEPQMHISKEGDPYLRTLLVQGAQHILGPFGSDSDLRRWGLKLAERGGRNAKKRAIIATARKLAVLLHHLWISGEVYEPLHNGQRAIATAA

SEQ ID NO: 74588 - protein, 453 aa, unidentified
MAKRKTGDHPDLKMVNPNAAAIDIGSTMHMAAVNPDIDTMPVRAFGTFTQDLHELAQWFRSCDVTTIAMESTGVYWIPAFEILEAHGFEVILVNARYAKNVPGRKSDVSDASWLRQLHSYGLLRGSFRPEAEIATLRAYMRQRERLTEYAAAHIQHMQKALMEMNLQLHHVVSDITGATGMRIIRAIVDGERDPEVLAAHRDVRCKASIETIKAALVGNDREEHVFALTQSLELYDFYKAQIEVCDRKLEAAVGALTVRAGDDLAPMPKARIKGKQHNAPSFDVRAALYGVLGTDLTQIHGLGPSLALKLVAECGTNLRAWKSAKHFTYWLCLAPGNKISGGKLLSSRTRRSSSRAAALLRLAAVTIGRSDTALGAFYRRLSSRIGKQKAVTATARKIAVLFYNAIRHGMTYQDQGAAAYDERHRQRVLSNLRRRAKTMGFALAPIPETAAVS

SEQ ID NO: 74589 - protein, 367 aa, unidentified
MKKVSTRAAKQSRNICQPQLTIGVDLGDRNSWYCAVDEAGQIRREQRVRTNAKALREVFGAMARSRIAVEIGTHSPWISRLLSELGHEVIVANARKVRLIGESRKKDDRLDAQTLARLARIDPELLYPVKHRSVQAQADLTLIRARAGLVRARTGLVNTARGLAKSYGERLRGCNVRNMNPEKAESLSPELQVALEPLLNAIEALSERIAEYNERIEALAERSYPQVALLKQIKGVGTLIALTFLLTLEDPHRFSKSRDVGCYLGLQPGRRNSGQSEPQMHISKEGDPYLRTLLVQGAQHILGPFGMDCDLRRWGLKLAERGGRNGKKRAIVATARKLAVLLHHLWVSGEVYEPLHNSSPTTVAAAA

SEQ ID NO: 74590 - protein, 318 aa, unidentified
MSDSIFVGIDVSSQVLEVASSGQAKTWQVANAAQGIESLVQQLKDLSPALVVLEATGGYEFDAACMLQAAGLSVAVVNPRMARDFARAMGRLAKTDALDAHVLAEFARVLHQHPQRDRFVKPLPDAELQRLQALVLRRRQLVQMLTAERQHMRMAHVAARPSIERVVTVLQRELDDSDGQVAEHVQRHHAALAEALRSVPGVGATSMAVLLAELPELGKLDRRRIAALVGVAPLNRDSGQMRGQRTIWGGRAEVRRVLYMATLVAVRCNAALKAYYDRLVAAGKKTKVALVAAMRKMLTMLNAIAKHGSKWNPTLQSA

SEQ ID NO: 74591 - protein, 466 aa, unidentified
MSKQKKANRCAVAQQRAIDLKVMRTDVAGIDVGAEELFVCAPGPKEGLTQVMVFGTTTPELMRMAEWLKQWEVVSVAMESTGVYWIPPYEVLESQGLEVLLTDTRQLSRVPGRKTDMLDCQWIQCLHSHGLLKGCFRPEESIVELRSVVRGKAVLVAERADWMRRMQKCLDQMNVRVHRAVSQLDGVTGMKIVREIVRGERDPRQLAKLRDQGCHKSEEAIAEELSGHWREDHLFGLAQGLKMYDSIEERLGEYEREILRRMEGLKCEKAQGREVPAVQKREKAKSIQRRKQEPARRALFGMTGIDGTAIDGVGVETMEAVISEYGTTLEKFPNEDAFVSHLRLAPHLNITGGKPIRKKRRSRASSTRVGNVLRTAAVTLEKTSTELGAYFRHMARHKDRGVAVFATARRLATLIYRALRWGQEYVDRGAAAYEQRSFEIRVRNLTRNAAQIGYQLVPTTATSTAL

SEQ ID NO: 74592 - protein, 345 aa, unidentified
MEIRTIGIDLGKTVFHLVGVNARGEVVVRKKCSRTQLLRFTSKLRACLIGMEACGGSHFLGRALREQGHDVRLMPAQYVKPYVKTNKNDYIDAEAIAEAVTRPTMRFVPIKTDDQLDLQSLHRIRERWVGGRTAVINQIRGLLLERGITIRKGRKHVEASLPHILEDAENKLSGALRALLTQLQIEMQYLDRQVEESDQLIERIASELEPCRRLVAIPGIGPVIATATIAAIGNGAAFKKGRGFAAWLGVVPGEHSTGGKQQLTRTSRRGNKYLRKLFVLGAHTVLLQRTKQSSGLSTWLASLVSRKRKQVATVALANKMARMVWAVLCKGEAYRPPLLPQPVTA

SEQ ID NO: 74593 - protein, 386 aa, unidentified
MRRSNQDRIVGLDVHPDSFAGAILQGMNPWKARVVSTSTRVALPLLEKWALHHTREEDILVMEASGNAFCVAERLRALKRKVVILESHRAGKVGKTYCATDRVDAIKIARIYLSALSPVVWQPDAKTRERREVFSAYQAVVKEGMRLKQQIKSMLNEHCVRLEKGFRLSHPSAIARLLQRRKWTPAQKMLLSQLHAGLVGARVRRQHLRHYMAQEILGEKELLRLTRLCGINLITLYGLIAAIGDIQRFANARKLSTYFGLNPTVEQSGNYEGSGALKRHGRGAIRALLVQSAKKLLQVNNPLQKWGLAIAARRGRNKVAVARKLCVAVWHVMQGHVIGAIERMDTLHTKLRKLATELGVPTIKQLGFETKEAFVQKKLYVLRSYP

SEQ ID NO: 74594 - protein, 419 aa, unidentified
MNTTKTTKFAATIGLDWADQKHDLWICPADQSKAEHLRLEQTPEALHEWVAKLRKRFPTGRVAIAVETSRGPVISALMAYDFIVFFPVNPKALKDYRAAFCVSGAKDDRTDAMLLEELVRLHRDKLHALEPDTQLTRKLAGLVENRRHLVDERTRLVNQQHSTLKTYFPLALDLLEDQMNTLLAAEFLARWPSLEALQKEKPKVLRAFFYQHNSRNARRIEQRLQAVPAAQPLTTDAAIIEPACALVGARAGMLRPLLKAIQRLDQSIAQAMDQHPDAPIFRSFPGAGPALAPRILVAFGTNRERFGSAVEVAQFYGIAPVVEQSGNSKTVHVRYRCPKFGRQSFHENAACAFKKEPWARAYYDQHKKKHDDKHHPACRALAFKLIRIYFACWRDKRTYQSDHYLLALQKNGSPLHKAL

SEQ ID NO: 74595 - protein, 404 aa, unidentified
MELKPLYRCVAALDVHQAKLTVCVLHEDGDGELHVELREFGGFKRDRRAMAEWVASFHPEEVVMESTGIYWKSPYAALERCGIAALVVNARHVKQVPGRKTDIADAQWLAILARSGLLRGGFVPPARFRELRLTSRQMQKLTGILAAEKNRLHKVLTDAGIRLPVVVSDIHGQSARAMVKGLIAGESPEQVLTYASKRLKATEEELLDALDGELTAEHRFVLAELMDHIEDLERRIARFSDHLLAGLAPQQGLLQALQTIPGLDERGAAMLLVEIGDDMDAFGSGEKLASWAGVCPGNHECAGKRKSGKKRKGNPYVRRILCEAANAAARTRSALAELFKSLFIRRERKRAIFALAHKILKIVFVLIRRGDYYRDATVDYEAMSVERNAPRWMRMLKKYGYISA

SEQ ID NO: 74596 - protein, 388 aa, unidentified
MEARLVDTTSTAGNDAPARCLIAIELSKASWVVGVQTPVSTKTSQYRLTAADWKSLSKLIERISRQVGRELGRPVEMISCYEAGYDGFWLHRLLEAHGVRNHVLDPASLLVNRRARRAKTDRIDVERMLRALGRYLRGEADACSVVRVPSVEQEDARRLHRERHRLIRERVQHVNRIKGLCATQGIYDYEPLRSDRKAQLEGLRTGDGRTLPARLKAEIIRELHRLELVLKMVAQIEAERDAIVTQAAPQHLNAGKIKALANLKSIGPEFATTLVGEVFYRSFDNRRQVGSYPGLAPSPFSSGAIDRDQGISKAGNPKARSTAIELAWMWLRYQPDSTLSMWFRQRVGDHKGRVRRIAIVALARKLLVALWRYLETGLVPAGAVFKTR

SEQ ID NO: 74597 - protein, 339 aa, unidentified
MKYTPVGVDIAKHLIQVHFIDENTGDVVDKQLRRRDFLEYFSNRESCLIGMEACGGSQHWARELTKLGHKVRLLQARFVKAFVMGNKNDVMDARAIWMAVQQPGKEIAVKTEEQQSVLVLHRSRRQLVKFRTMQINSLHGTLLEFGETIHKGRAAMEREFPEALERMKERLPPYLITVLENQYNRLNELDSLIEDIEKQLTSVAKQNETCKRLLDIPGVGPLIATAAVATMGEASAFKSGREFAAYVGLVPRQTGSGGKIRLLGISKRGDTYLRTLFIYGARAAALLTKEPGLWITELKKRRPVGVATVAMANKLARTVWAIAAHGRKYDKEYVSIRSY

SEQ ID NO: 74598 - protein, 347 aa, unidentified
MHFIGVDLHKQIISVCVLVRAGDQRQVMARRTLRCDQPEQIQAYFVGWAPFQVVVEATSSYEWFVQLLEPLAQRIVLAHPKKLRIIAESTKKTDKLDAQVLAEFLSLDMIPSAHRPSPRLREYRALVRQRQYVQRRITSLKNRLRHLLSHYNADVKHLFSQEGQTYLDQLVVSAADRFVVEQLREAWRFFDGQLVAIDKQLRQFARSAPVAEREARQVLESIPCVGPVTIDVVLSELGDVRRFRSQKQVAAYAGLAPGIRESAGRGKQLSITKEGSGLLRWVLIETSWRLVMKTRRWGLLYEKLKQRIGSKKAIVAIARRLLCVMVALLRSGRAYRLSSEARVLNPT

SEQ ID NO: 74599 - protein, 328 aa, unidentified
MQGKVSSERTAMATVYVGIDVCKEWLDIHLHPLGRSFRVTNDTAGLRRLKRELDALDQMPRSALRIVMEATGKWHRAVQRSLHADGFYVSVVDPLRARLFAKACGFLAKTDRLDARFLAIMGEALKPAQTPPPDQALEALQELVNARSAANGERTALSNRMKTAVTAFLRKELTRRLAALDTHIARLDAEIERSICADPEMRRRLDILISIPGIGAVTAASLIAGLCELGACSGKQAAMLTGLAPIACESGERAGHRSIRGGRPAPRNAIYMAALSASRHNPDLARFAARLKKVGKPNKVVLVAVMRKLIVLANTLITKNRIWTPNPP

SEQ ID NO: 74600 - protein, 340 aa, unidentified
MGEITTIGLDLAKQVFQVHGIDADGTTVLRKQLRRSQVLSFFSRLAPCLVGMEACATAHYWGRELAALGHEVRLMPAQYVKAYIKRNKNDAADAEAICEAVVRPTMRFVPAKTAEQQAALLLHRGRERLVRQRTGLVNALRGHLAEFGVIAPQGLRNVGKLIAVVRDPSDARLPDLARQVLEVLAAQIEQLEGAVAAVEKQLMAWHKSNPVSQRLATIPGIGPIIASAIAASVAEPGGFRSGREFAAWLGLVPRQNSTGGKHRLGGISKRGNRYLRRLLINGASANLLRSKATKADPWVIGLRRRRPSLVVAVALANKTARIAWAVMQRNENYQRMAAAA

SEQ ID NO: 74601 - protein, 408 aa, unidentified
MEVLYPKCGGLDVHKDVVVACARVVGDAGVSQEVESFETTRQGLFALADWLSQRGCTHVAMEATGVYWKPVWHVLEEHFELVLANAAHVRNVPGRKTDVNDAMWLADLCAHGLIRASFVPPTPIQELRDLTRTRKQLVREQGQHVQRIQKTLEDANVKLASVVSNIVGMSGRAILNAIVGGETSPEKLVELGSGRLKASRKTLIEALRGNITPHHRFLIKLHLDQIDALGRAIDAVEKEAGSALEPFRARAELLTTIPGVSDTVAQAIVSEIGVDMSRFPTVGHAISWAGLCPRNDESAGKRRSTRVRKSGTWIKTILVQAAWAAARKKDSYLRAQFLRLKSRRGPKKAIIAVAASILTAAYYMLRDGTEYRDLGPRHFDTIDKSKLATRLVRKLETLGYKVELEKAA

SEQ ID NO: 74602 - protein, 348 aa, unidentified
MKYYIGLDAHSTTSTFAVVDETGQCVLRETVKTSEQSLVHVINRVIGERHMTFEESSISQWLYVQLKDKVDKLLICNPTYVAKKQGAKTDFRDALHLAQELRTNHLQAVFHDTSHWMEIRTTVSGYLDIVEEIVRFKNRLKAVFRAEAIQTDENSFYKNKVRVREIANPSARFVAEKLFDQIEFLEAEKDKYKEVFEKNRKKYRPIRNLMTIPGISIVRANIIAAIVCQPARFENKHKFWGYCMLVRHIQVSGGKIYGNKRFFGRRELRNVFIGAAENVIRIDGELRDRYDALRAKGVEHKDAKLNLARQIAAISLCLLKNNDKYNENYGEYLKERKQLRKDFFESTL

SEQ ID NO: 74603 - protein, 386 aa, unidentified
MQTLNDFSRSRIALEPNATLIAVIEMSLSSWLVAGILPGVERQPLKKLAVDESALLKLLQRWREEAEKAGRRIERIAVAFEAGRDGFWPARWLKARSIEAHVIHAASVAVSREHRRAKTDRLDTALLKRAFLGWLRGERDHCKMVAIPTIKDEDAKRPNRERENLVSEQSRIINRMKATLIRLGIRGFNPKLKRAAGRLEDLRTPGGEPIPPNTLAELRRDMERRRLVRDQIRQIEEARLERFDHAPGDGSHPMVRLLARVIGVGIETADMLVHEVLSRNMRDRRAVARYAGLTGSPDESGRKRREKGLARSGNGRVRHGMIQLAWRFLLHQKDSALAQWFRARTENARGSRKRMIVALARKLLIALWRLVRQGVVPDGVVLRPAQ

SEQ ID NO: 74604 - protein, 405 aa, unidentified
MVDIMVSDFMKGRYNLMKIFVGIDIAKLNHFAAAISSDGEILIEPFKFTNDADGFQLLVSKLESFDKNSIIIGLESTAHYGDNLVRYLVAEFYQVCVLNPIKTCQMRKNNVRKTKTDKVDTFVIAKTLMMQDDLRFITFFDLDMMDLKTLERFRQKTIKQRTRLKIQLTTYVDQVFPEIQYFFKSGLHQNAVYALLKEAPSPKEIASMHMTHLANLLKVNSHGHFTNEQAKELRVLAQKSVGANDSAISIQITQTIQQIELLDSQLDKIEAEMTDIMKFNDSVIMTIPGIGYINGGMILGEIGDIHRFSNPNKLLAFAGLDPSVYQSGNFQAKTTRMSKRGSRVLRYALVNAAWNVVRNNATFKAYYDAKRSEGRSHYNALGHCAGKLVRVIWKMLTDEVEFNLE

SEQ ID NO: 74605 - protein, 329 aa, unidentified
MAKHTMICAGIDAAKLKLDAALECCSERLRVDNTPAGHKALLDWLRRHQVTRVGIEASGGYEQAVVAELRRNGFVVIVFQPGRVRAYAMFHLKRAKNDNIDADLIAICTAAVKKIHAPPDPRLAPFAEHLTMIDQIVDDIARHKNRLETCRDARIRQVWKEEIARLEKHRKIELKSLVAAIRRHQDLAVRLYLINSVDGIGLPTAVAILVRVPEIGRLTREQVAALVGLAPYDDDSGGRSGTRHIAGGRKRPRSALYAAALPASMRWNAQLIALYQRLIAAGKLHKVALVACARKLLIFVNTVVARGTPWMRDYDRPPGAAADALVAAH

SEQ ID NO: 74606 - protein, 413 aa, unidentified
MKEERFAWFVGIDWGSEKHQACVLDQQGDIAGERSFPHSGVGLAELSDWILSIVGAANAVAIAIEVPHGPVVDSLIDRGFVVHTINPKQLDRLRDRFSVAGAKDDRRDGYVLADGVRTDRRLFRRLSVADPRIIELRAWSRLTQELTEERVRLSNRVHHELWRYFPQLPKLTDDLAASWFLELWTLAPTPAKARRLRKSTVEQLLKQHRIRRVDAETVIRTLREPAIKVADGVAEAASVHIRSLIARLRVINRELREAEGQLDKICTAIGESEAASGECLQRQDVMILKSMPGIGRINLAALLAEGSGPLSRRDYLALRTLCGAAPVTKQSGKSRIVIMRYAAHARLRQTVYHWARVATQNDPKSKARYATLRRRGHSHGRALRGVADRLLGLVCVLLQKQTPFDPQYGHSAT

SEQ ID NO: 74607 - protein, 381 aa, unidentified
MRTTYDKQHRADDQVLAVALELSKASWKVAMSDAQHNPRIKNADAQQPLERLEQVLTLIKDARARWTLPEDVRVVVLYESGQDGFWIQRALAARGIETLIIDPASLPVERKARRAKTDRLDARRLVEALLGWLRGEQQRFRVLRQPSVAQEDSRHWGREREQLQREMQQHRDRMVKLLVTQGCWEKLDRAFAQRLANGELRDWEGKPLGATLQARLQRELTRWQQARDQFRQLEQERADRFSAQQQAQLTQLVQLRGVGPVSAQRLVLELFWRHFANARQLGACVGLVPQPYDSGTMRKDQGISKQGNRRVRALLVELAWMWLRYQPNSALSCWFASKVQGDSKRSRRVAIVALARRLLIALWRYLERGVPPEGSQLKAAA

SEQ ID NO: 74608 - protein, 387 aa, unidentified
MSKQNDLSKSLVALKQDATLIAVVEMGQKSWLVAGIVPGLNRYPLKKLGPDRDALLQLLHRWRQEAAKAGHAVNRTAVAYEAGRDGFWLARWLRAQAVEAYVIHPSSVPVPREHRRAKTDRLDTELLKRAFVGWLRGEPKHCSMAAIPTLEDEDARRPSRERQTLVGERTRILNRLKANLARLGIRGFRPNLARAEGQLEALRTPEGAAIPKNTLAEMRRDMDRLQVVKRQIKEIEKTRAKRLSKEPSEQRDAMVQQLGRVVGVGIETADMLVQEVFSREIRDRRALARYAGLTGAPDESGQRRRERGLAKAGNSRVRRGMIELAWGHLLHQKGSPLTKWFWKRASDGRGGTRKTMIVALARKLLIVLWRLATTGETPAGLQLRPAA

SEQ ID NO: 74609 - protein, 337 aa, unidentified
MNSTKYIGMDVHKEATTAATIVQFLEGLRGEMYVTLEEGTWAAWLYDLLKPHVTKVVVCNPRKNALLKAGNKSDRIDARKLAELLRGGLLSAVYHGETGLRTLKELSRSYLAISKDLARTMNRVKALYRSWSIPCGGASVYAPRHRAEWLSKITEPGVRRRAELFYQQLDGLQKLRQEARRDLLAESRKHGATSLLQRIPYIGPIRAALLIALMQTPHRFRTKRQLWAYSGLALETHSSGEYHYVQGQLQRSKRPVALRGLNRNHNHDLKSIFKGAATKAGSAKGAFHDFYTALLTKGMKPTMARLTLARKIAAITLLVWKKGVCFDAQQLKRQVSV

SEQ ID NO: 74610 - protein, 400 aa, unidentified
MKYYTSTTEFNCGIDLHARQMYVCVMDRQGKKLVHTNVRDNDFNLFLKLVAPYKHSLTVCCECMFGWYWLADACQNAGLTFVLAHALYVKAIHGGKNKNDRVDSEKLTHLLRSNLIPPAYVYPADKRPLRALLRQRLFYVWRRSELLARIYSHQLAHHRIAAKQTRRTRDLWEEALLKAEDHPLRQLALKNDLAMIKHFDTQICQLEGELQRQTQKVAGREYALLQTVPGIGENLGLTILHEIGDISRFPTVKDFLSYCRLVKGTVASAGKIKGLRGAKLGNPYLRWAFGEAAVIAKRDHHLVGPLSQRLEAQMGGNKFKANTVLAIKLARAVYFMLKNKTVFDSERLVASMQKCFSPGRRQPGSLTGRAKKAMPLPVPDDASCAPSTAVCVGQASSPAH

SEQ ID NO: 74611 - protein, 347 aa, unidentified
MAEYVGMDVSLEEVSICVLNDEGRVLVRGTAPTDPAAIVGFIAEHAPEVVRIVHESGQISIWLTRALRALGAPVICIDARMAHKALSARPNKSDKSDAEGLAHLARSGWYREVHVKSEVSDRLRTLIGARDRLLRIRRDIEGHVRGVLKTYGIRLAPVTSARNRAGFRDQVQAVAEGDPVLEVVAASFIVAHETICCERAAIEEQLVTLARGSALARRLMTVPGVGPIVALSFMATIDDAARFGKSSQVGAYLGLTPRRYQSGEVDHSGRISKCGDGAMRALLVEAASSLITRVKRFSPLKAWAVRLAARKGFKKAAVATARKLAVILHRIWCDGTTFAWRRQAATA

SEQ ID NO: 74612 - protein, 398 aa, unidentified
MTESSDYESVQVFIGVDVGKDTHHAVAINRSGKRLFDKALPNDENKLRSLISDLKQHGQILLVVDQPATIGALPVAVARSEGVLVGYLPGLAMRRIADLHAGEAKTDARDAAIIAETARTLPHALRTLKLADEQIAELSMLCGFDDDLAAQTTQASNRIRGLLTQIHPALERVLGPRLEHPAVLDLLQRYPSPEKLASLGEKKLAAQLCKLAPRLGKRLAADIAQALAEQTVVVPGTNAAAVVLPRLALQLITLRKQKDEVALEVEQRVLAHPLYPVLTSMPGVGVRTAARLLTEVACRAFASAAHLAAYAGLAPVTRRSGSSIRGEHPSRRGNKALKRALFLSAFAALRDPLSRAYYTRKMSQGKRHNQALIALARRRCDVLFAMMRDGTFYTPQGS

SEQ ID NO: 74613 - protein, 462 aa, unidentified
MANEDQKGRPECSEAIDEGFPVLRGNVAGIDVGSEEHWVCAPARTGRGREVAVFAATTPGVEQLAAWLKDRDVTSVALESTGVYWIVPHEMLEAHSFDVVLVDSRWLGRVPGRKKTDRRDCEWIQRLHSCGLLRGAYRPVEQVCMLRTLVRDRGTLIAERADGVRRMQKTLDQMNVRVHRAVANVDGATGMAILRAMVAGERDPHQLATLRDPRCRKSEAQIAEQLTGHWRDDHLFSLRQALKMYDALSDTIAAYEREILRYLETMTSVDRRDDQAPPPTSPTKAQAIKSRGQDPLRHALYRMSGVDLTTIDAVGVETVSVVLSEYGPNLSQFPTEKQFVSHVGLAPHAPRSGGKVVKKKKKPGSASARVGAALRMAATSLRHSQTALGAYYRQVARRAGADVAVFATARKLAQHIYRVLRWGQPYVDEGAAAYDKRYQLARAKRLAATAKDLGYKLIPVEA

SEQ ID NO: 74614 - protein, 415 aa, unidentified
MAAPLFVGVDVHNQTNHIALLDQAGAPVGKQFTVCNNRPGAQVLVSRLVQTLREGDFDGLRLAAEATNWYWFPLFQTLSQDPVLQHWPVSLFALNPRLVAKYKETFTDQDKTDASDAFLIADRLRLGRDLPESYPVADAYLALRFLTRYRYHLVKDLVREKNYCLSLLYLKASAYRQDHPFSDVFGVTSQAVLQEFASTEQLAAMPLAELLTWLDSQAKGRFPDPAAVARELQQVAQDSYPVARQLQQPINYVLNWSFQLVNFLERQVQRANTAIADTLAPIPHTLATIPGFGPVYSGGIIAEIGDIARFDHDETKVAQFAGLHWRKTESAQFRAEETRLTKRGNAYLRYYFCEAANAVRMRNAEYAAYYQRKHDEVRKHQHRRAIVLTARKLVRLVVRLLTTNQPYQPRRQPSG

SEQ ID NO: 74615 - protein, 456 aa, unidentified
MPTHASPVPVAPSPAVRVQVGIDAAIVAQHQVCVRAVDVNGRVSTHRFRVQPTLAGLTSLGKQLSAYPGVVAVAEPTSMTWLGLSIAVTEAGGQFALLGSRHAARLRGAISGKKKTDVIDADVLARAGEVFELTPLRLPSPAELALRRLCVRRGAAVIDANRYLRRLLSLARWAFPDVWNAFEGSLPTARAVLGRWPHLAQLACSRRAALTAVVAEHTRGVADVPERVEAIRSNAAAWARFWTGRLDLDALAFDVTEHLTDLTAAEQRVARVTEQARQYWERLYGDDPLLNSIPGVGPITGPTIRAYLGDGSLHDSAKDAASYVGITPSNWSSGTVVQPNRAITKEGPPVLRLAFYQAANVARSHDPQLAEFYYRLMVHRGHTHTQACVAVARKLVERTWTVLRRAQPYQLRDLDGNPITQRAAKQLIKDHYTVDQQTRARARAHTAATKRSKTTR

SEQ ID NO: 74616 - protein, 312 aa, unidentified
MTDQIFVGVDVAKDWLDIHHASHGATRINNSHAAVRSFAARCAKEGAWVVFEASGGYDHQLRDALESAQVRFSRINPRQARDFARAMGVIGKTDRVDARMLAELGARLTPAPTQPLPPERRALQAQATRRRQLVEMRKQEATRLQQTADPVARADIRGVIAMFDRRIAKIEARMTDLVTADPELAAIERRLRTAPGVGPIVAATLIAELPELGQIDRRSIAALAGLAPIARDSGRRSGPRSIGGGRPIVRTILYLAALQASRRSPQFIHFRERLQAAGKSVKTAIIATARKLVVVLNAMLASGTDYRPTAVV

SEQ ID NO: 74617 - protein, 377 aa, unidentified
MEYSTTIGVDVSDRTSKICVMAKTPDGGRRIVAETTCATTKDGFAEAAVKFDRSWPVVFETGTHCRWMERHFKSLGFRVIVANPAKVKLMGDPTSKTDRNDARKLARLALADPALLHPVSLRGEKYQRMLRLHEARQLLMRMRTSAICQVRSFAKSMGFRLPGVSPERFHALDMAGLPDDFERTVWPMMDAVKTVNLKIAAYDALIDELAGEPEFKAMVKRAMEIYGVGVIGATAVVAAIDGAPGRFTRARDVGPYLGMTPRKFQSGESDPQLGTTKAGNDLVRRALVECANVVMKENAKDTDLKLKGLRIGARGGRIARKKAKVAVARGLAVLVVALLKDPSRKYVPLSDRGIAGFERYRAERELLAPGKGRMAVV

SEQ ID NO: 74618 - protein, 316 aa, unidentified
MNTQVFVGLDVSKQKLDVAVRPQNRHFVTPNDDRGIKQLVKRLAALKPQLIVLEASGGYEFLVTAALAEAQLPVALVNPQSVRKFAGATGKLAKTDKIDAQVLAHFAEALRPEPRPLPDQAQQMLKAALQRRLQVVKMIGQEKNRLEKTFIPAVRQDIQAHLTWLSQRLEQLDRDLSDQIRQSPLWRDRDRLLRTIPGIGPIVSRAVIAQLPEAGTLPGKKAVALVGVAPYNRDSGRFRGKRMIRGGRSYLRRMLYMAAVVASRWNPVIRAFYQRLLAAGKPKKLALTACMRKLVLILNAMVKNNQPWNQFINQVP

SEQ ID NO: 74619 - protein, 399 aa, unidentified
MRCADHPVRLRAAVREEDSSLFVALELSKSAWLIAASAPGSEKVSKYRVAAADVAALVALLARLKSQAERYRSGSVQVVSIHEAGLDGFWVHRMLEANGVESHVVDAASIAVNRRSRRAKTDRIDVEGLLRTLMGWARGERRICSMVRPPSPADEDERRLTRERGTLVTERTRHVNRIKGLLATQGVFGFEPLHKNRRKRLEELQQWNGQPLPARLKTELVRELDRLELVMSQLGALEAERDRALQARRTVVGNTTKAPSGTASAGEVGSQLLRLRSIGPEIASVLTLEAFYRNFSNRREVAAYSGLAPSPWKSGGIDVEQGISKAGNARLRTTMIQLAWLWVRHQPSSALSRWFHERVGDKRGKIKRIAVVAVARKLLVALWRYVAQGVVPAGAELKA

SEQ ID NO: 74620 - protein, 320 aa, unidentified
MNQARFVGIDIAKDKFDAAKWLNHGYQTREFSNTKQGFQTFVEWVKKDVESPWFCMESTGNYGRPLADYLHTNGYQVSEINPLQIKRFAQSKLKRNKTDALDAKVIAEYGTANEPREYEPKKESQREITELMNLLNSLKNELVRLKNQLSSAQGKVSKKMLTNAIERLKKESNAVEKELANQTQEDKDLQQQEALLSSIPCVGKLTIYTLLGRIVDIRQFENAKQFAAYLGVTPYQRQSGKYVGKTTMSRMGDASIRKILYMAALVGMRYNPILKEFAERLKAKGKASKAIIGALMRKLAHIIYGVLKNETPFTVGPATI

SEQ ID NO: 74621 - protein, 372 aa, unidentified
MNPNILHVGLDVDDTQYHGSAFNKATGEVIDFRCRPTLKGLLTQLDKLQRHFPGLPIRLCYEASYIGYCLQRDLSSRGWHCDVIAPSSIPSPRGKAVKTDRIDAGHLAQFYANDLVTIVQPPDAEQEQDRDLLRTRQKLLQQRTQLRTHLQALLRRNGLHFKAQTGFKSHWTKPHYAWLRRTIKGAAGSLQVNLSLLLRQIRDLDEVLAEYGQHLEALAVTPRYREAVQSLTCYKGIKNLFALTMITEIGDIKRFAHPRQLMSWSGMDVREYSSGGKHNRMGITKQGNRYLRTAFIEANQRGYRSTRMGSNLQARRQDTPPELVRIADRCMRRLNRKGNRLLLAGKHPNKVKVACAREMVGFVWESLNAVAA

SEQ ID NO: 74622 - protein, 346 aa, unidentified
MSDKQILKQVVGIDVAQKELVVSLGRIDNHLSTEIYAGKTFPNNEKGFIDLVAWVKKLIKEDAPVLFVMEATGVYHESLAYFLDDKSWNVSIVLPNKISHYAKTLDIKTVTDKTASQAIARFGLERQLETWKRPKKSYKNLRQLTRERNQIVEQRTMAKNHLHAEESEAFPNKSTLKRIKKTIDFFDKQESEIKKEIEVIVKKDQEVSEAVALLSSIKGIGELTAVTVLAETNGFDLIRNSKQLASYAGYDVKEKESGTSVKGKPKISKRGNKYLRKAMHLPTFSVINNDPRYKAIYARLISKHGIKMKAAIAVQRKLLELLYILFKTKNKYEPDYLSKQEILINN

SEQ ID NO: 74623 - protein, 389 aa, unidentified
MQALLDCCCGIDVHDEMIETCILKGDVDDDEPEIIHKQFQTMPKDLKDFAAHLVKHECFHVAMESTGVYWRPIYEIIEDNCPHTKNIVVTNAAHMRNIPGRKKDKDDAKWAANLLRHGLLDPSFVPERLFRDLREASRLYKKFTGEKCRYTNRVMKLLQAHGFKLSNVLSDILGTSGRNILNILAERGSLSAKDVASCIRGRPRHTVEAIYASVSGSLNSDEQKLLSLLLSKIDTAEKDMEVIVKLMLQMASPHQKALEIMDSIPGIDILAALLILAEISAAPHLSFASAAKLCKWAGLSPRDDTSAGKVKSRKTLPGNPYIKSILCQIAWVAVRSRNNPFRNWFWSHRVKGEKKAIIAVARKILTTIYALLKDGVPYDPKIAAANCRK

SEQ ID NO: 74624 - protein, 388 aa, unidentified
MIYVGIDIAKLNHFASAISSDGEILIEPFKFTNDNDGFQLLLSKLDPLDKDSIIIGLESTAHYGDNLVRYLVACNYKVCVLNPIKTSTMRKNNIRKTKTDKVDTYIICKTLMMQESLRFVTFYDLDLMDLKALGRFRQKTIKQRTRLKIQLTSYVDEIFPELQYFFKSGLHQKSVYALLKEAPTPEAIASMHMTHLAHLLKVNSHGHFNKEMAQQLRVLAQKSVGANDSALSIQVTHSIQQIELLDSQLERVEAEMTDIMKFNDSVIMTIPGIGYINGGMILGEIGDIHRFSNPNKLLAYAGLDPSVYQSGNYQAKKTRMSKRGSKVLRYALVNAAHNVVKNNATFKSYYDAKMAEGRTHYNALGHCAGKLVRVIWKMLTDNVEFNLK

SEQ ID NO: 74625 - protein, 355 aa, unidentified
MFYSGIDLHKNMSFITTLDNEGNIIKQEKLPNDEHAILNYFFSIGKHHKVVVECIANWYWLSDLLSNHGIELVLAHAKYLKAISYAKVKTDKVDSFTLARLLKINMIPVAHQISPENRDLRDLMRARLKLVRKNTSCQNSIHRIFEKHNITIPNNRKLHDLSTFDLLVDLPLSSDQQFQLDLLKQQIELLHEQIKILEQSLHSRLLINNDIQRLLWIPGIGRILAFTIYLEVDGIDRFPDVNKFYSYCRLVPGSNNSNKKVKHKSGNKDGNKYLKMAFTEASVRSVQYFKEIKQFYQSKARKKHKCIARNIVAGEIEKICYYVLKTKTDFNNTFKGITLSKRKTMQWPRLASPDV

SEQ ID NO: 74626 - protein, 363 aa, unidentified
MSESTTVTVGLDVHARSIRLAAIRADELLEERTLPYDEEAVERALRRWPVVRCCYEAGPTGFGLYRHLVEQGFDCRVVAPGLVPQRPGDRVKTDPRDARKLARLLAGGLLEPIHVPSPEQEAARDLVRAREDARLDRMRDRHRLSKFCLRHGRTLPTSSWTVVRRKWLSEQRFPFAAQQITFDSYVHAVDLVDARIDQLERAIRETAEQGSWRELVARLRCLRGVDTLTGLALVVEIGDFTRFRRAEEFMAFVGLVPSEHSSGDRRRQGSITKVGNSHVRRLLVESAWHARRRPKVGYELARRQRGQDAIVIERAWRCQQRLYQRWQRMAGRGKPQQKIVVACARELAGFTWAIATDQPLRRT

SEQ ID NO: 74627 - protein, 315 aa, unidentified
MSEQGVNVGIDVAKDTLQVAVSEQEGFVVANQDAGHAELVQRLQGLKPARIVLEATGGYEQAVVAALGLAGLPVIVVNARQVRDFAKALGRLAKSDALDAQVLRQFAETVKPRYRPLPEAQTRELQALVTRRRQLLAMVVAERQRLAQAPAVVRRDIRTHIAWLIKRLKDTDRQMGQSLRASPWWREQEQLLGAVQGVGPVLLASLCAGLPELGRLGRREVAALVGVAPFNCDSGRFQGKRHCWGGRRDIRAVLYMAALSAIRCNPVIHAFYARLRAAGKPTKVALTACMRKLLSILNAIVRDRSVWDPSLHLST

SEQ ID NO: 74628 - protein, 372 aa, unidentified
MNYNTVYVGMDVHKESFTFCAYTIDAEKGSHFQRTEADYKNVLKYLEFLRTVYGNDANFICGYEAGCLGYTLYHQLTEHHVTCVILAPTTMLEQRSKRRIKTDRRDAEIIAKCLAQHNYSPVHIPTATDEETKEFLRMRDDHKLALKKVKQQILAFCLRHNYRYDGNSHWTAAHIKWLKSLKPEALYKEILDEYLLTYTTLSDKLERLDKRIEELASKDEYRESVKKLCCFIGIKTHTALSVLVEIGDFQRFASAQKFASYIGLVPDEDSSGDEQTRLGITKAGNRHIRMLLTEASQCYARGQIGFKSKELKSRQSGNSSQVIAYADKANERLRRRYYKMVLGKNKKHNVAKTAIARELACFMWGMMTDHIA

SEQ ID NO: 74629 - protein, 336 aa, unidentified
MNYYIGIDVAKATLQVYVPEGNQDIEISNTKTALKSLYSKLKKVYKKEQGRIVIVYESTGSYSTILEDFAQKQNIKCFKVGAVQSASFAKTIKNRSKTDKVDARMLSRMSILALAKDIKVPYRDEKAHQIRSLMKYYQSLAKEQTRISNYLEAAKYNKEDSFVIKRLEQKILKLKKEQKELITKILQIIEVNEKYKKAYENIISINGVGEKSAIILLYLFLRYPKASRQHITALCGLDPIHRESGTSLKKRAKISKQGMSLVRSILFMPVMTAVVTNEEMKYYYDKLLERGKCKSLAQIAIMRKIVLLAHSLYKNDEKYDSEMYLNHLDLKDGLMS

SEQ ID NO: 74630 - protein, 351 aa, unidentified
MLIVGCDYHPSFQQIAWVDTESGECGERSLLHSTGEAERFYRNLKEQGVKVRVGIEATGHSRWFERLLMELEYELWVGDAAEIKAKRVRKQKNDREDARLLRTLLVENRFPRVWLADQLNRDLRQLLWHRHRLVQMRTRVMNQLQALALNEGVQRKKGLWSQAGRAQLESFQLLPWATRRREDLLKLLDGLTPRIQALTAEVNKQAEQYPEARRLMTHPGVGPLTALAYVLIIGSPDRFRCGKQIGCYVGLIPCEESSANRQRLGHITKQGNSLLRFLLLEAAQAAVRSDADWRREFLHLTMRRGRQIAVVALARKLAVRLYWMWRNGRDYEKSLKFSSHVGQPGTGYGVK

SEQ ID NO: 74631 - protein, 298 aa, unidentified
MERYLGGDVHAASVTFSLIDVVGKEIRRDVVETNGKALVGYLQQLPGTLHLCIEEGEWSQWLYEILSPHVAELVVYRGEWKPGTKSDAIDAHGLAEKLRTGRIDHPVYKHPKQFTELRDRVRVYTMVTRDVARVKNRLKSFFRARGFLCVGEAIYREEERKRRGDQLPLAGRQSVELLGRELDALLALKGDAEKAMLEESHRHAISRVLETGPGIGPVRVAQMLPIVITPQRFRTKRQFWSYCGFGIVTRSSSDWVWEGRPSTRVAQSRGLKFNHNRTPKAIFKGAATTVIAHAGSTP

SEQ ID NO: 74632 - protein, 400 aa, unidentified
MAAVMIGVDPHKGSHTAVAIGAAEELLGQVRVRASAAQAERLLAWAAPWPQRTWAVEGAGGLGHLLAQQLVAAGEQVVDVPPKLAARVRLLASGDTNKNDPNDARSVAIAALRSSGCRPVQADDHATVLKVWAKRHRDLGRARTQVACRLHAVLCELVPGGISKRISAAHAARVLSQVTASGAVAQARCELAADFLEDLRRIDAQMREARKKLAAAVQACGTTLTAIFGVGPVVAAVVIGEAGDPARFAGRDHFAAYNGTAPVEVSSGNRKVYRLSRRGNRRLNHAVHMAAVTQVSQRHSAGRAYYDKKIAEGKTPKEALRALKRQVSDTIFKHLKADAARASAGSQQGPGGQQGNDSVASAAGSHPERQLFGQATPGPTSTLRPHPQKKATSRASKKTA

SEQ ID NO: 74633 - protein, 432 aa, unidentified
MSQFQDDFVVGIDVSSQFSVVAMLEPSGKMIRKPFRVDHSPAGFNKFLEILKKEEERLQRKPIYFVESTGIFHLPLFFFLRSNDLKGFVINPLSVHSIKNFDLRKVKNDNKDAEAIAKLAKYQDVKFSVVPEPKILALRLMAREYFALADTLTETKNRLCTDLYLLFPGFLNIFSSPFGKTALAVLKEYPSPKAIRQADRAYLTELIAQNARKSLAWASAKVDALLEISNFANAMPPELAVLDSKIAIHLGTILQLQASQAAIERQLHEMVDAEDFPVDARRYIELLDDMPGVGFITAATLVAEIGDFSLFKSPKALVAFFGIDPSVNQSGKFTGDRNKISKRGTRFGRRVLFTVAMASIRTTRNGQPINAVLREYYQKKCVTKKKKVALVAVMHKLLHYMFAVLRDGKPYQVRKPEQHQTWRQDKLQVVAA

SEQ ID NO: 74634 - protein, 441 aa, unidentified
MAMRKREEDEVFPNAAGIDVGGSSHWVAVPRQADDEPVREFGAMTGDLNAMADWLLSCGVDTVALESTGVYWIPVYEVLEQRGLTVWLVDARQMKYVPGRKSDVQDCQWLQKLMSLGLLRAAWRPGDEVCVVRAVVRQREVLLAEQASWVMRMQKALVQMNLQLTEVLTDVMGMTGQAIVRAIVAGERDPKVLARHRNGRVKASAADIERALTGNWRDEHLFVLQQALAMFDSLAQRTIECDAKIEALLAPLGCHEVELSGPGKRRGKNTPGFDVRTALARWAGVDLTRINGLAVTTVMTILSEIGPDLSRFANVKHFCSWLGLCPGTKVSGGKVLSARTRRSTNRVRQALKLAAMSLSRNDSALGAFYRRLCARMDKPRANTAVAHKLARMVYFMLTRGEAFVDQGQQHYEEQQRQRSIDALRRRATALGFQITPAAQTP

SEQ ID NO: 74635 - protein, 316 aa, unidentified
MNTQVFVGLDVSKQHLDVAVRPQNRHFVTPNHDRGIKQLVKRLAALKPQLIVLEASGGYEFLVTAALAEAQLPVALINPQAVRKFAGATGKLAKTDKIDAQVLAHFAEALRPEPRSLPDQAHQVLKAALQRRQQVVKMIGQEENRLEKTFIPAVRQDIQVHLTWLRRRLEQLERDLDDQIRQSPLWQDRDRLYQSVPGIGPIVSRAVIAHLPELGTLPGKKAVALVGVAPYNRDSGRLRGKRMIRGGRSHLRRMLYMAAVVASRFNPVIRAFYQRLRSAGKPPKLALTACIRKLVLILNAMVKNNQPWNQFASQAP

SEQ ID NO: 74636 - protein, 345 aa, unidentified
MSQYKRIAIDTSKAVFTLHGIDQADRPILRTNLSRAQLIAFLTKLPRTEIAMEACGGSHYWARELAAVGHKVLLIPPQCVKPYVKRGKNDRNDAKAICEAAGRPGMHFVPAKSADQQAQGMVLKVRETLVEQRTALVNTLRGHAGEFGVIAGKGLGNIIPLLEKVAAETAIPLEARETMALLGEEIGRLDARLKQMETKVHQAHKANPVSKRLATIPGIGPVIALTLATEIDPTAFESGRHLAAWAGLTPREHSTGGKQRMGGISRAGNERLRALFVLGATSVIKVAERPGNKLATEWLLKLLRRRPRKVAAVAPAFLRNKSGGRLRGRLSQQDGAYRLGDDDER

SEQ ID NO: 74637 - protein, 341 aa, unidentified
MLKNTFFIGLDIACDDFAASIYQSPEKPVITKEAIKNNPEGFGMLISWLKEHNIDCTNSVICMEATGVYSEAIAYYLSTYGFKVSVEPPLKVKRAFDPVGHKTDPVDSKQIAEYAYRYSDELKFWQPRKDILEKIKHLLTAREQFTKQNTAIKNAMKSYERHVVQVPLIVKAHHETLKELKKHIAEIDKELNRLIRQNPIISQMSNQLKGIPGVGLLLASNLITITGAFNDISSYKTLAAFLGICPYQHRSGKSIYKAPHIRNFGPAYARKLLMLAARSVATHNTAFRKYYLRKLAEGKAKQLVLNNIANKIIKIACALIKNNSQYIKGYYSVSPLCLNLT

SEQ ID NO: 74638 - protein, 400 aa, unidentified
MMTPDDIDVWVGLDVGKSAHHAHALDHDGNTLYDKPLKQDEKAIRTMLGKLSKHGRVLLVVDQPNTIGSLPLTVARNMGIAVAYLPGTAMRRTAQLLPGDAKTDRRDAHVIAWAALKLPETLRDAGPDDETLAALKLLAGHDEDLAHESTRHVNCLRSLLLQTHPAFERALKGERITRDATLALLERYGGPMGVKRAGIEDVKDWAKSNGLRAGRIIDDMFKAIGEQTVTVPGTLMAETIIPSIAHDIKTIRDRRREVGRQVEKLLEDHPLLTVLTSMPGIGVRTASNILLGIGGDIANFKSSAHLAAYAGISPVTGQSGTSIKGERPSRRGNKRLKNALWQTAFVASTKHPPSVAYYKRKREQGKHHNAAIICLARRRCDVIYSMLKNGTLYQEPALVA

SEQ ID NO: 74639 - protein, 430 aa, unidentified
MNYTQNQKIEQVTESTLVLGVDIGSSEHYVRAFDYRGRELTRKVFRFSTDINGFNSFYDWVTQICIKHGKNEAMIGCEPTGHYWYTFYQFVKDYGMKLAFVNPASVKKAKELDDNSPKKTDLKDPKTIAKLVIDGRYSFPYVSEGIYAEIREVTSSRDRIMKELNAASNRIQRWLKIYFPEYLTVYKKFDTTTGMMILEEVPLPTMVTALGVDNIIKIWREHKVRGKGASFNRAKTLVDAAHDSVGKSGGQGAVMEIQMLLEDYKVKKQQLEMVTSVMEELIMQIPNAEKMLSVDGVGLVTVAGFISEVGDISRFKNPKQIQKYAGFELVENSSGKHKGRTTISKRGRKKLRKIIYQVVLPLIQSNKEFRSIYDYYRKRIKNPLKGRQAMIAVGCKLIRVFFAIMTKGVAYNGSKMIEDIHRPTQLPQAA

SEQ ID NO: 74640 - protein, 368 aa, unidentified
MKKVSTATRKQSKNFSAQQKLTIGLDLGDRSSWYCVLDEAGSVLLEQRVSTTPKALREVFGGMPGSRIALETGTHSPWISRLLSELGHEVIVAHARNVRLIGESRKKDDRLDAQTLARLARIDPQLLCPVKHRSAKAQADLTLIRARAGLVRARTALVNTARGLAKSYGERLRGCNVRNMNPEKAEGLSPELQAALKPLLAAIESVSQQIREYNQRIEALAQQSYPQVALLKQVKGVGTLIALTFLLTLEDARRFRKSRDVGCYLGLQPGRRNSGQSEPQMHSSKQGDPYLRTLLVQGAQHILGPFGPDCDLRRWGLKLAERGGKSGKKRAIIATARKLAVLLHHLWGSGEVYEPLHNSAGVAMPAAA

SEQ ID NO: 74641 - protein, 341 aa, unidentified
MAVIIGIDPHKLSHAASAIDNNEHELAQLHVRAGQHQLELLLGWAQPFSERRWAIESAAGLGYLLAQQLVGAGECVMDVPATLSSRVRLLGTGRSNKNDPNDARAVAIAALRAPSLAVVRREDHVTVLRLLAKAHLDAGRARNRACCRLHALARELVAGGIRKEVVVSQAESLLAGVEPVGVAQRQRLELAYELVDEIRALDAKLRRSKARITTAVVASATTVTDLYGVGPIVAATVIGYSGDVRRFPTAGHYAAYNGTAPIELSSAGRTVHRLSRRGNRVLNHAIHMAAVTQIRNLQSEGRAYYDTKVAAGKTKREAMRALKRRLSDRVYRQLLADTRTR

SEQ ID NO: 74642 - protein, 471 aa, unidentified
MSKVKAKKTKVNEIIAMQVVNPYSAGIDVGDKEMVVAVPEGLSDPRVRTFGTMTCDLEEISAYLKTCEIDTVAMESTGVYWKPLFRKLINEGVEVYLVNAAHVKNVSGRKDDESDAMWIQKLHSCGLLKSSYLPDEDQEAVRTLVRHRKTLVQDASRFVNRMQKSLELMNVKFHTVINDIVGQTGCAVVEAIIGGERNAANFLPLIGKRIKADLPTIEKSLQGNWLEEHLFTLKQNYEMYKIFWKQIAVCDQEIEKHLQKYEAKYNEGVIEEPKAVKEEPDITIAAGKKGKVIKKHGDKNRPRFEVRGYLERIYGVDVMAVYGINSTGALEIFAEIGTDLTKWKNEKHFVSWLNLCPNNKISGGKLISSKLFHKLPNPASRAFRAAANGVQNSDNWLGDYFRRKKSKGGNKYAIIATANKIATIFYKIVRNKEEFKPVELEQYQRKYKQVKIAYLERKLMQLKQETETVAA

SEQ ID NO: 74643 - protein, 381 aa, unidentified
MTETTRSTECTALGAKLYLALELGSTKWTLAFASAPGQRARLRQIAAGDLSALTREIATAKIRFALVADAPVRSCYEAGRDGFWVHRWLVGAGVENVVVEASSIEVNRRARRAKTDRLDATKLLALLLRSASGERVWSVVHVPSPEDEARRQLTREIETVLRDRTRARNRIKGLLATQGIRLSMTRRFLTTLAAAHTGDGRPLPDAWRQRIERDWAQLQATELRLRTLRAARDTQLEEGADRVAEVAQRMCTLRGVAEVSAAAFSAELFGTRTFRNGRQLGALVGLVPVPYRSDQRVQDQRISKAGRPELRRLALQLAWNWLRYQPNSALTQWFRRRFEAAGGRARRIGIVALARKLVIALWRYVTHGTLPEGAVLKPVVV

SEQ ID NO: 74644 - protein, 360 aa, unidentified
MAKAKTLVGLDVHATKIVAAVLDAETGQLQTFSMSGETATAAAFCAGLPRPVRVAYEAGPTGYGLARELLRRGVECVVAAPSKIPRASGDRVKTDRRDAEHLVRLLLAGKLHAVRVPGDEEEALRDLVRARESVRVDLMRYRHRLSKLLLRHGIRFDDGHAWTERHRAWLATVTLPWPAAQATLLDLRGAIDALAHRRDQLEREILAMLPACPWTPQVARLRCLRGVDTLTAVGLCSEIGDFERFARAEQLMSYVGLVPSESTTGQQRRLGSITKTGSGHARRLLVEAAWHYRTQPSIGRALAGRQQDQPAEAIAIAWSAQRRLHRTWTRLEARAKRRTIIAVAAARELAGFAWAITQIE

SEQ ID NO: 74645 - protein, 334 aa, unidentified
MEQKYFIGIDISKQKIDVAIILSNYQVVFEKIVVNQDKNITSFFKGLMRKMKCSPSEFLVCCETTGIYNKPLARVCIELKIDLWIEHALKIKFASSDLRGKSDRKDAMRIAEYCVRYQDRKHLYECPSVAIEEFDTLCKVRETLLANKVGIENQLREAKSHDTRKFQQLKQLFNRQLKSLEKDLRELELKIEEKLLENNEMRSNVELIKSVPGVGKRTAIQLVILTNNFKDFTSAKHLACYAGVVPFTNESGTIKKKPRISKKANLKLKTLLHLSAMAATRSKTELKQYFIRKVSEGKNKMSVINAIRNKLVHRIWAVVERQTPYVCQENFLTN

SEQ ID NO: 74646 - protein, 367 aa, unidentified
MKKVSTVSAKQSRNFSQPKLTIGLDLGDRWSWYCVLDEAGAIVLEQKLGTTPKAMRDVFGAIPHRRIALETGTHSPWVSRLLNGLGHEVIVAHARNVRLIGESRKKDDRIDAQTLARLARIDPQLLCPVKHRSAKAQADLTVIRARAGLVRARTALVNTARGLAKSYGERLRGCNVRNMNPEKAEGLSPELRTALEPLLAGIESLSERIGECNERIERLAKDSYPQVALLKQVKGVGTLIALTFLLTLEDAHRFRKSRDVGCYLGLQPGRRNSGQSEPQMHISKEGDPYLRTLLVQGAHHILGPFGADSDLRRWGLKLAERGGKSGKKRAIVAVARKLAVLLHRLWVSGEVYEPLRHRQQPALPTAA

SEQ ID NO: 74647 - protein, 411 aa, unidentified
MEVIVERPAALDVHKATVTACVRVPDERGVRMPHLTEFQTTVRGLLALRDWLAAHRVSQVVMEATGVYWKPVWHILEDDFELLLVNARHVKQVPGRKTDMSDAAWLCQLAEAGLLKGSFVPPKPVRALRLLTRYRKTQIAERQREANRLHKALEDTNIKLDCVASDILGVSGRLMLDALVAGTTDPEVLADLAKGRLRQKLPALRDALEGRFDRLHALLIGSILAHLDFLDEQIDGLSDAIEEQLAPFATAAVALLVTIPGIAERGAQNILAEIGTDMSVFPTDKHLTSWAGQCPGNHQSAGKQRSGRTRKGSKWLNEALKEAALAATRTKNSYLQALYQRLRPRIGHGRAIGAVKHAILQAIWHMLNTGETYRDLGGDYYQRRDPKRATRRLVAQLERLGHTVTLQQAAA

SEQ ID NO: 74648 - protein, 394 aa, unidentified
MRYVGIDIGAERHVVAIVREDGAVLTAATPFQEDAEGYGQLRAVMGDAADTLVAMEATGHYWQNLFAYLVAEGFAVALLNPLRTHRFGAEDLARTKTDRLDAVLIARFAAQKRPPATQVTEPVLAELRELVRLRDRLVQEAGDRVRQLHRLVDLSFPEFTRHIPNLNTRLATSVLAQYPTAAAFRQVSRTRLAKLRYDGRHTIGLELAQALLESARQSVGQHQAPAYQIQVRYACEDLEVLRQRIQELERDIERRLRDHEIGTLLTTIDGIGPQTAARLIAELGNPGDFRSAAALAAYVGIVPGLKQSGKHRPVHAALVPIGHARLRAALWMPTLTATRFNPWLRAYYEQLRARGKHAKVALIAVMRKLLIAVFSVAKSKRPFVPHTKPLEVPA

SEQ ID NO: 74649 - protein, 414 aa, unidentified
MESVDRCIAGIDVHKKMLAVVIRKQNGERVEYEKRKFGTTRAEIQHLEAWLQARAVSEVVMESTAQYWRPVWYGLEAHFRLHLTHPLKTRAPRGRKSDFRDAQRLADRWNSGDLEESFVPGAEQRSWRWLTRTRVQLKKKVGVIRCHVEGLLEQGGIKVSAVVSDLFGVSGWAMLEHIAGGETDVEVLAKEARGALRKKDQQLKEALVGQLEPVYQLLLKQHMDQVRLLRRQVEEINQAVAEAMKEHIQALYRLSKIPGVDVYAAQELLSEIGPNAAAFASAEQFASWAGVCPGSKESAGVNYSHRSAKGNRYLRRLLCQIAWAAIHTKETFFAGLFARLKPRVEAKGAAWAVAHRIAKVVWLLLHQQVEYQEKGAAPPNERTLLRKFKRMLKEFGHLGLDVRALLDQHLPAPA

SEQ ID NO: 74650 - protein, 362 aa, unidentified
MATQKKQRTLFVGVDVHKDTHTAVGLSPFGEKLFEMKIGNEHADFISLVEKTKVEAKKIGLVPSFGLEDVHSWGERLSSFLVEEGLSVRAVAPILVDHRRSKTTHPEKSDSLDAVGIAEVMIQKIDTLPIYKLTEEAKKAKQIRELSLEREWLVKERARLKNQLHVLLHRIHNTGYRAKFKDPFSLKALRYWIRGIPKNTESILRRRMKRAVKRLLDLREEIQEIENELETMMRENKQTLSTANGCGVVIAAELIGEIGDINRFHSPGALAKYAGCAPREHSSGKTIRWKKTRSGNRRLNRSFHRMALSQISRSGNSAARAYFKRKISEGKTKAQVLVCLHRQLFNVVWMMLKHKAEYRWPC

SEQ ID NO: 74651 - protein, 357 aa, unidentified
MEAAGLKLRWRSHFNPKEAHVKFSGIDLHSNNSVVVVSDEEDRIVYRKRLPNNLEQIRAALAPYRDELAGVVVESTYNWYFLVDGLMDAGYRVHLANTTAIKKYEGLKYSGDFADAAYLAQLLRLGLLPEGYIYPREERAGRDLGRKRMQLVRCQTMQILAIENILARQTGGRMSGERVKRLTAEQIEELGFMPDVALAVEANRAVSETLQRQIAVLEKRLQQRVKLRPEYFLLKTVPGIGETLATTIMLETGTITRFASVGNFSSYCRCVDSRHESNGKKKGEGNVKNGNKYLAWAFVEAANFALRYCPEAKRFYERKKRRSNRIVALKATAHKLARACYHMLREQKPFDVQRCFV

SEQ ID NO: 74652 - protein, 391 aa, unidentified
MVCVGIDVAKDKHDCCILDSDGMVRADCFTIPNNMDGFKQLLQTIRNCTKKSDKIKVGLEATGHYSYNILGFLLDNGLPTYVINPLHTNLYRKSLSLRKTKTDRVDARTIATMLLSDVDLKSYTDIAYHNEELKSLTRYRFDKVQECAKLKQSVSRLATILFPELEGLVSSIHGTSIYALLSEYPGAKQISEVHLTKLTNLLTTASKGRYGKEKAIQIREAARASIGSVMPAKSLELKHTIKLIQELASEISEIEDSIQKIIDELNPPILSIPGMGVNSAAVILAEIGDFSNFSSPDKILAYAGCSPSTYQSGKLTNCYAHMEKRGSRYLRHALYNATKYVCYWNPVFAEYLAKKRAEGKHYNVALSHAMKKLVRLIYALQKSGKTYLTAA

SEQ ID NO: 74653 - protein, 320 aa, unidentified
MENIALIGIDLGKNSFHIHCQDHRGKAVYRKKFTRPKLIEFLATCPATTIAMEACGGSHFMARKLAELGHFPKLISPQFVRPFVKSNKNDFVDAEAICEAASRPSMRFVQPRTESQQAMRALHRVRESLVQDKVKTTNQMHAFLLEFGISVPRGAAVISRLSTLLEDSSLPLYLSQLLLKLQQHYHYLVEQIKDLESQLKRKLDEDEVGQRLLSIPCVGTLTASTISTEIGDGKQYASSRDFAAATGLVPRQYSTGGRTTLLGISKRGNKRSELCWFSVRGIHTKTGTPVWQVGRLGQGSCCVGKATLSSPVLWQTSWPE

SEQ ID NO: 74654 - protein, 412 aa, unidentified
MGSLLQRSLPSSTLVVAIDPGKAHHRVWLSTDAAGLVTEPLTVPVLRAGLDALDRLVRQHLGGEQLVFAVEATGGLHRAWASELNRRFPAAVRVFAPSETAAARTQLGMRRFKTDDRDCAALTYLARQGHGRPVPAEEHEALLAVVRWRRALVTERKIAQQRLHDQVNALCPGLSSPVRQGRKLDLAGVAGQAFLNCLVDLQGRPAPARSLQARADGRLTRADAEFWSQRWLQCLPPPGDAAARISRIARSLSRWRALTSDITTAETEIEVLLAATDGQVLTSLPGVKAIRAAAFAAFSLPISRFPTAGHLYSATGLAPASYQSSSISRRSGISRQGLPEHRDALMAIAWGLSQYCPPFRQREEEYRARGMKPMQARVALARHACRLTYRMMLTQDTFDEQRYRQNRHQAGR

SEQ ID NO: 74655 - protein, 400 aa, unidentified
MNAVGIDVSKGKSTVAIMRPFGEVIAEPFEVSHTDTELRKLACFLKKLPGETRIVMEYTGSYWQPIAKVLHDAGFFVSAVNALLIYKYGNNSIRKGKTDKLDAVKIANYCLDRWTDLERYSPTDQIRQTLKTCRRQYDQYIRLKVNLKNNLIALLDGTFPGVNTLLKSAPRDTDGHEKWVDFAGKFWHRQCVCGNSEKAFANQYRKWCAKAGYRFNAEKAVAIYSHAGSQVDTLPMSSAIQSLITHAVAQLNMIIETISAIQHEMLTLASQLPEYPIVMRMFGVGPVLGPQLMAEIGDVLRFHCKQSLVAFAGVDAPPCQSGTFESKNRHISKRGSPRLRKTLFQVMSTIIQHAPADDPVYQFLDRKRREGKHYYVYMTAAANKFLRIYYGTVMAYFEKP

SEQ ID NO: 74656 - protein, 366 aa, unidentified
MRKVMAGMDLHGNNVMVGIVDDQGARLQHRRLACELPEIIEFLDPYKSELESIAVESTFNWYWLVDGLRAAGFPVVLANPAKIDQYSGIKHADDKNDAYFLAELQRLKILPTGYVYDPELRPVRDLFRRRMSLMRQRTTLFLSAKSLHQRTTGRGLELRRLKAMEPEEAAALYTHPANQLIAQIQKEHIDSLDQSIRQIEKAVLKVALQQPYYQRLQTIPGVGIILGLTISMEVGNIDRFAGPGQFASYCRTVDAKRISNGKTKGDNNQKCGNKYLAWAFVEAAHGARRFDATCRRWYDRKAAKKCTTVATKALACKLAKAAWYVMAKGTEYQAGKIFPGLTEPKAEEISGEQASASKGVGPNPED

SEQ ID NO: 74657 - protein, 325 aa, unidentified
MDILGVDISKLKFDVVLIVGERSKHAVFSNTEAGFQQLRAWLDKQRPDPARPLQACMEATGNWGLDLADFLHESGVRVSIVNPLRIKAFGQSELARNKNDKLDAGVIARFCRTQNPPLWVPPAPHLRELRELVRRCNALKDARVQEANRQKSGFVSPAVAQSIEAHLAWLDNQIAEVSQAALRLIQSDPTLRKNLALLRSITGLGEVAAGILLAELPNIADFTPKALAAFVGLSPQEHSSGSSVRRPGRMSKVGAERLRGTLFMCAFSAKRFNPRLADFVKRMTDAGKAPKVILVAVARKLLVYAHAVIRTQKPFQPFPDAPSSI

SEQ ID NO: 74658 - protein, 324 aa, unidentified
MTAVVGIDIAKHTFDIATLQSNGKHRTKAKLPNDLKGFEALQQWLLKHAEPQAWIVMEATGIYHEALAEWLFKQGYRVCVLNPAQPAFYARSQLQRVKTDKVDAKLLADYGSRHLAELRSWQPEAPEIRRLRALVHRLKDIQELEQIERNRLESTQESKVRDSIQSVLDHLKKQTDETLKAIKQLFDDNDDLRGKRDLLTSIDGIADRTAALLLAELGDIQRFDSSKAVTAFSGLNPRLQESGKHKGHVRISRMGSARLRAGLYMPAVSSLTHNRAIREMAERMKAKGKAGKQIACAAMRKLLCIAYGVLKSGRPFEPTLAIAR

SEQ ID NO: 74659 - protein, 445 aa, unidentified
MSSEWWPHSGLHYRACAGPTPSAQLHDERRRSDLNSIVAYIGLDWADERHSVHLQTADGTTEHLELEQKPAVLHEWIAQLQQRFAGGKIAVALEQRKGAVIHALLMYDCFVLYPINPKALARYREAFRTSGAKDDPLDSALLLDLVVRHRDKLRAWVPDTVESRKLQALCEQRRKLVNQRVALSNRLTSLLKQYFPQALEWVGDLASVQACDFLTQWPTLAAVHRARAKTLRQFYRAHNCRKAEVIEARLAAMASARPLTTDAAVIEPLSLSVQTYATQLRALIAAIQTFDERIAEVFAAHADHDVFTSFPGAGDVCAPRLAAAFGTDRSRWDSAAELQAHSGIAPVTERSGKTVWVHHRLACPKFVKQTFHEFADQSIRFSKWARAYYDQQRARGNDHHAALRALAYKWIRILFRCWKERRPYDEDTYVEALRRRGSPLAKNFA

SEQ ID NO: 74660 - protein, 355 aa, unidentified
MKNQAIQYLALDVHQATTVISVRNEQGVVVMRATARTQADTILSVVRAAGPRVHVAFEEGTQAQWLHDLLQPYAERVIVCNVRGKSEVANKSDRIDADDLSEKLRLGALKPVYHGAPSVLTLKELVRNYNNLVEDATRVMLRIKALFRARAIRTPGTSVYRAARRTEWLNQLKTPGARVRAASLLEQLDLLMELRPKAKVAMIAEARKQSGWKSLRSIPFLGVVRTSQLLAIVATPHRFRTKRNLWPYAGLAVVTRSSADQEFAGGKLRGSARAPRTRGLNRNHNPMLKSIFKGAATAAAAKPGPLQDLYETCVARGTKPELAKVTLARKIASIVLRLWKKGELWDPDKLTMQTT

SEQ ID NO: 74661 - protein, 416 aa, unidentified
MNAVGIDVSSRKSTVAVLRPLGEVVCLPFDVTHDIAGLASLAEKLKALDGETRVVMEHTGRYYEAVAKALHEAGFFVCAVNPLLIKEYGANSLRRVKTDKADAIKIARYALDNWADLRDFTPMDAIRYDLKTLNRQFQLASKQRTASANNLIALLEQSFPGIRKCFDSPVRSDGTQKWVDFAHSFWHVDCVRKQPFAAFCERYRKWCKRHAYLFKLSNAEEVYALAKRAVVLTPKSKVVKVLVQEAANQLISISRSVEVYRAEMDRLAAMLPEYPVVMAMYGVGKSYGPQLMAEIGDVRRFERKQALVAFAGIDPMPNQSGDKNVRSNKSSKRGSPYLRKTLFNVIRTYLQCAPQDEPVFQFLNRKRAEGKPFYVYMLAAANKFLRRYYAKLRDYFASLDTLQPVAPIPTILKATL

SEQ ID NO: 74662 - protein, 341 aa, unidentified
MGQASTIGLDIAKRVFQAHGADATGRVVFRKRLVRAKVLEFFAGQPPCLVALEACGGAHYWARELGKLGHTVRLIPPAYVKPFVKRQKNDVADAEAICEAAQRPGMRFVPVKDEAQQANTVVFRARDLLVRQRTQCINALRGHLAEYGHVVPQGPAHVDSLVALVEDPKSSVPESTRGILQVLIRTLNALEEQLKELDGEIARRAKADPVARRLMTIPGIGPIAATAITALVPAPEGFRAGRDFAAWLGLTPLQRSTGGKHKLGAISKMGERTIRRLLILGASAVVGWASRRGAAAGSWLARMLARKPRMLVTTALANKMARIVWALLVKGGTYRAPAVAA

SEQ ID NO: 74663 - protein, 352 aa, unidentified
MAALTKYFAGADIGHKFIDICIIGQPQNSDLEKKPLFECRIENKLNHFRAFIKDLRKLNDKLGGDCIFHLAMEATGTYYLKFVTCLASEAEGLVVPYVVNPCQIKATGEVIKAKNKTDKQDALKIASYIRFAHTEPNVHPWELPSPEMEELRQLAHLYEDTRELIRAEKNRIHAIEQSPNMSMPTAKIRLDRIKYLEAQLEEIKKKMEDHIKKNPRLKEQADLLRSIPGIGKISSALLLCEIGDVERFKNKKTFTAFAGIVPSEFQSGSSINKPARITKKGSKRIRRNLYMPAMVAIKWNPLIRDFYLKLKARGKKGKSALIAAMKKLLQIIYGVLKTGQPFNPAYEIQRAA

SEQ ID NO: 74664 - protein, 420 aa, unidentified
MSLDPHEEPAAIQTHIGAIFISLELSRSKWLITSLVPGGGQRMSKHWVEAGDLAGLLARFWAIRDKVLARTGKSYPIVVIQEAGLDGFWIHRSLVKEGIESHVVDAASIAVSRRRRRAKTDKIDGEGLLRALLAFKRGEPRVCSMVRVPTPQDEDRRRICRERKTLTAERIRHVNRIKGLLFSQGIGDYEPLRRDRRRALEAARTGDGRALGANMKAQIGRELDRLELLLGQIAAIEAERDAMLARQAEAEAVQGAQGAPARVLKPMDPNGPGAETVPEAEAAPGVQKLMDLNGLGAETVAMLWTEAFYRSFDNRRQLAAFGGLAGTPWKSGSIDHEQGVSMGNHRLRQTMIQLAWLWPIHQPNSALTRWYLERTKGASKIQKKKMVVALARKLLVALWRYVDAGVVIEGAVLKRAARAR

SEQ ID NO: 74665 - protein, 317 aa, unidentified
MLNKNDYIGIDVSKARLDTSLDDGEAANVANDEAGLAALVKRLRAVSPLLIVMEATGGYERLAAGELTAAGLPVAVVNPRQVRDFAKATGRLAKTDRIDASVLAHFARAILPAQRPLQDEMTQAFAEQLVRRRQLVEMLSMEQVRLKQARGKAVRKNLKSHIEWLTRQMHANEDGLRQLIEDSPVWQAKRDLLTEVKGVGEVASMTLLALLPELGTLGRKPIAALVGLAPFNRDSGTLRGRRTVWGGRAAVRHVLYMATLSAVRYNPVLKAFYEQLRARGKLPKVALVAAMRKLLTMLNAMLRDNAHWTPHRHAQMA

SEQ ID NO: 74666 - protein, 354 aa, unidentified
MLAELVDAVVGVDTHRDTHQVEIALPNGAPIACTTISNDTSGYAELLAWIVDHTPGPRLAVSIEGTRSYGIGLARAAAAAGLVVLECEQPHRKARRGKGKSDPIDAHLAVLAALRLDADRLPTPRADGDREALRILLGARQELTTASTAQTNRLRALLLGGDDTDRTVARGALTEARLASLARRRPPREASREQAVRHAEIRRLALALREAARALKANRAQLQTIVNDVVPRLIERRGIGPVSAAQAIVSFSHPGRCRNDAAFAALGGVSPLPASSGRTVRHRLNRGGDRALNRALHTIAATRMRSCPTTQAYVARRTAEGKNPREIRRCLKRYIARQLYRTLATAMTPAAETS

SEQ ID NO: 74667 - protein, 369 aa, unidentified
MGDRITYIGLDVHKDGIVVAVAEGGRRGEVREYGRIGNTPAALQRLASKLGREGVELRFCYEAGPCGYGIQRQLSAHGHECIVVAPSLIPKRPGDRVKTDRRDAASLAKLHRAGELTAVWVPDRRHEAMRDLVRARLDAVRALRRARQQLSGFLLRQGCHYGRPAWTKLHRRWLAGLRFEQAVHHIVLEDYIAAVEAAEARRDRLTAQIEAMLPDWTLAPVVAALQTMRGMALVNAATLVAELGDLSRFANPRQLMAYLGLVPSEHSSGASVKHGGLTKAGNSAARRLLIEAAWTYRFPARVSRELRLRQEEQPRPICEIAWKAQLRLCARYRKLARSGKPANVVTAAIARELAGFIWAIARCQPPAAG

SEQ ID NO: 74668 - protein, 334 aa, unidentified
MQNVTLIGIDLGKHSFHVHCQDKSGRALLCKKFSRAKLMEFLAGSPSTTVVMEACAGAHFMARRIAAFGHDAKLISPQFVRPFVKSNKNDFVDAEAICEAASRPSMRFVQPRTEAQQAMRALHRVRESLVRDKVKTTNQMHAFLLEFGISMPIGTAVIKRLSTVLAENELPPYLAQLLMRLHAHYLYLVEQITELETALEQELSRDETGQRLQTIPGVGPITASVLSSQLGDGKQYGCSRDFAASTGLVPRQYSTGGKNTLLGISKRGDKNLRRLLVQCARVFIQRIDYQSGNLAEWVKAQLERKHSNVVTCALANKLARIAWAITTRQTVFER

SEQ ID NO: 74669 - protein, 431 aa, unidentified
MNRSVGFLSVGIDVGADFSLMAFALPSQELLGKPYKIIHSSQHSLNGAVEKIKTLSQKYQLPARVFMESTGIYHYPLYHKMKDAGFDVFVLNPLVTHAGRDLNVRNIHNDKYDSQKIALLGLRPGLKTSLIPSDQVISMKVILREYYAVKKEISMYICRLKNQLRQAFPQFLPLFSKVNGVTAMAILCEYSNPESLLNAGEHAVADFMKSMSHNGPLKVQKKAAAPIQAAQDARSFGHWNHGISILIRHYIEMIRLLDVRAKTLLAQAKALLAEQDSKTLAHQTELLQTIPGIGFLSALTLICELGDFSAFKRPKQLFSYFGLDPIVRQSGNYNGTNLKLSKRGSPFARRCIFVIALQSISLNIHKEPKNPVLRTFYEEKCMCKAKMTAIGAVMHKICNLIFAVLRNDAPFVLQTPEQHNAAYLSKTHSVA

SEQ ID NO: 74670 - protein, 316 aa, unidentified
MESPQNFVGIDVSAKRLDVAVLPAGTHFAVAHTDEGIASLVRRLQELRPHIVVLEATGGYELSVAYAMSEASLPVVIMNPKVLRHFAKSTGKLAKTDKLDAQVLAHYAQAIQPPVRPLKDSEQMELATLMSRRRQLRDMIVMEGNRRRTSTPKVRGNIDQHLLYLRQLLEDLDREIHDAIRRTPLWHEKSAILQSFNGIGPKVSASLIADLAELGTAPRTQISALAGLAPMNRDSGQWRGKRTIQGGRPAVRQALYMAALVASRRNPVIREFYQRLRQAGKPAKVALTACMRKILVILNAMLKNRTYWNPQLPLAA

SEQ ID NO: 74671 - protein, 405 aa, unidentified
MWYAGIDWADQHHDAVVIDEAGKRVGTTRVAHSAEGLDTLVTFLKGSGDVTAHPDHLACIIETHRGLLITALLDAGLPVYPVNPNTVERHRKPAGAKTDAIDAYLLARTGRSDLSDLRRLTPDSPVIAELTALTRDQDTLIQSQTRLVNQRTACLKAYYPVARELFGKRQQPTTLAFLQAFPTPDQSRAATVEQIAAVLKAAGHPTANVKARQVQERLSQPQLRADAVVTRTKTRLMLTLVAQLQVLLPEIAAYDEEITRLFRLHSASRACARLPRAGTRLAPRLLAEWGDDRGRYTDAASVQALAGTAPVPFQSGNFAKAHRRYACNKPLRNALQPCAWQSTQKEAWALTYYQRKRRDGKSHAMAVRALANQWVRLIYALWAKHETYNPATFLAAPQAHAPRAA

SEQ ID NO: 74672 - protein, 323 aa, unidentified
MPGSVVFVGIDVSKAHLDVALSDSDVIWRVANTEAGIEELVDRLTVTELTLVVMEATGGFEIPSAAALTAAGLAVVIANPRQVRDFAKATGQLAKTDRIDAHVLALFAARVRPHVRPLPDEQTRALDAMVARRRQLITMITAEKNRLGFALESVQKRIRKHIRWLERELASVDSDLDQMIRSSPVWQAKSDLLREVPGVGPNLARTLIAELPELGRLSNKEIAALVGVAPLARDSGVMRGKRMVWGGRAPVRSALYLSIWSASKHNPVIRVFYDRLRDKGKPSKVAQVACMRKLLTILNAMLRDGRKWDPSIPLEQLRLQHSC

SEQ ID NO: 74673 - protein, 333 aa, unidentified
MSTMTETTPRVTAGVDTHRDVHVVAVLDERGAQLGCEPFAADPAGYRKALAWVRSFGVIDRIGVEGTGSYGAGLTRYLHNQRVAVIEVSCPNRQQRRSHGKSDPVDAVAAARATQSGEASAQPKSRTGNVEAIRALRVVRHSAAHSRIDSVNQMRALLVTGPEQLRESFRDSTIWTMVTAASKLRPGDPTTVIGAAKFALRELARRIQGLEEELKRLDDILGLLVRTTAPALVAKYGVGPDTAGALLVSAGDNPERLHKESAFAHMCGSAPIDASSGLVTHKRLNRGGDRSANQALWRIVMVRMVSDPRTRAYVDRRTKEGKSKKDIIRCLIG

SEQ ID NO: 74674 - protein, 459 aa, unidentified
MARSQRKGNGLPVQLAAVNLHAAGIDIGSQEHWVAVPPDHDPQPVRRFGACTADLEALATWLRACGVTTVAMESTGVYWIPLFELLEARGFGVVLADAREVQRAPGRPKTDVQDCQWLQRLHTYGLFAAAFRPPEQICVLRSYLRQRSMLVTYARHHVQHMQKALPQMNLKLQHVVSEVTSVRGRAIIRAILTGERDPSVLAQLRDRHCQHSEAEIARALQGTWRTEHVFALQQAVELSEFYHRQIAACDRQIAGQLQTLADQSTGTPLPAASRKSKRRRKEHHFDVREPLFRATGVDLTAIEGINEHTALVLLSESGTNMSRWPTEKQFAAWLGLCPLHKISGGKVLSRKVRPSANRAAVALRLAASSLHHSQSALGAFFRRLKARLGTPKAIVATAHKLARLVYRVLKHGEDYVAQGMAEYEQTYRDRVVKHLARKAKELGYQLLPANTQPPQEAVG

SEQ ID NO: 74675 - protein, 422 aa, unidentified
MNDAIKLAAFIGIDWADTEHTVCLRIAGGSDVEISVLLQKPEALADWAVKLKERFGDRTVGVCLEQSRGALIYALSQYPWLVLYPINPKSSARFRESLYPSRAKSDPADAVLLAEFLVKHQDRLRPWRAEDVETRKLRLLLENREKLVDDRTGLCNRLRATLKLYFPQALEWGGPLTKPMIWTFLLKWSTLADVQKASKKKLLDFFYAHHVRRGDQINGLYEQVQSAKALVTDAALVDTSVLLVRSLCKQLTELQVGIDRHDTEIEALYARHPENHLFSSLGGAGKVLGPRLVAAFGSDREKYKDAGEVQKMSGIAPVVEASGKTTWTHWRWAAPAFPRQTFHEFAAHSIPSCAWAKAFYELQRKRGKSHHAAVRSLAFKWIRILYRCWKDNVPYDENRYVQQLIAHGSPLLKFLIQKPLEA

SEQ ID NO: 74676 - protein, 367 aa, unidentified
MIVIGADTHKSSHTFAAVDAATGALRGTLTVSSTRAGAEQALAWARGLDRERVWAIEDCRHVSGRLERGVVAHGERSVRVAPKLMAGARRGARERGKSDPIDATAVARAAIREGTDRLPGAQLDQRALEIRLLLDHHDDLVSDRSDEQRRLRWHLHDLFEDLEIPAGALDRDIWLTRLERRLRAQRPTARVRIAREQIRSVRASTKRIRALEGELGTLVGDYAPQLLAEVGCGPLTAAKLIGELAGAERFATDAQLARTAGVAPIPVSSGRRDRHRLDRGGNRQLNLALHRLAVNKGRLDPTTAQYLERKQAEGKSRMEALRCLKRHLARRVWHLLRDGAPTPDQDTNTHMTNNKNVKAPAPKPALT

SEQ ID NO: 74677 - protein, 410 aa, unidentified
MELLHRRCCGLDVHKETVVACLRLVSDGKVTTEVRTFQTTTADLLHLSEWLAANGCTHVAMEATGVYWKPVWHILDDGEFGLVLANAAHVKNVPGRKTDVNDAMWLAELLAHGLIRASFVPDTQTQEMRNLLRTRKQLVREQSSHVLRVQKTLEDANIKLDSVLTDLMGKSGRAMIEALIAGETNPTTLASLADRRAKASHEEFREALRGRVTKHHRFLLRLHLNQIDALNAAMATLDAQVEENLGPFRTAVGLIISIPGIKNLGAHVIVSEIGIDMSRFPSHAHLISWAGICPRNDESAGKRRSNRLRKGAPWLKTTLVQCAWAAVKKKNSYLQAQFYRIKARRGPKKAIMAVAASILTAIYHMLKDGTMYKDLGHDHFDRRSTDQQKQRLVKRLAELGYVVEIKPLAA

SEQ ID NO: 74678 - protein, 369 aa, unidentified
MVEGKEAFVGIDAAKLRNAVAIADAGRDGEVRFYGEVDASPDSMRRLAAKLAGRYQRLNFCYEAGPTGYGLHRLLTELGHSCVVVAPSLVPRKPSDRIETDRRDALTLARLPRAGELTPVWIPDTAHEAMRGLVRARAAAARDAGTKKRQVSAFLLRHSRLFPRKKNWGARYRCWLQEQSFEHPADQIVLQELIEDVRLAEERRARIERAIGEFLPTWGLAPVVEALQALRGVELVTAVTFAVEVGDIRRFENPRQLMGYLGLVPGERSTGETVRRGSITKMGNARLRHLPVESAWTYRHPPRVGKAKLARLERVSPRVREIAWKAQSRLTARYRALIARGKKTTVACTAIARELAAFMWAVAREARPA

SEQ ID NO: 74679 - protein, 370 aa, unidentified
MNSIVYVGMDVHTTNYTLSCYTIENNQDFATVKMEPDYRNVLKYLEKVQENYGDSCEFRCGYEAGCLGFTLYHQLTEHNVKCVILAPSTMPSKKGEIKTDKRDAMKIARCLAYNTYSAVHIPTKEDSDVKEYIRMRDAHKMALKRVKQQILAFCKLHDLRFDGGKNYWTLKHLAWLKNMPLDDMLREILDEYLVTFNWFTDKIERMDKRIAELATGPKYAEKVKKLSCMIGIRTHTALALIVETGDFSRFAKAGQYAAFLGLVPGEHSSSDDRNQLGITKAGNTHLRRLLTEAAQCYGRGRIGYKSKQLKERQAGNSPKVIAYADKANERLRRKFYRMVLKNNKRHNVAVAAIARELACFVWGMMTGRIA

SEQ ID NO: 74680 - protein, 352 aa, unidentified
MQYVGIDWAYRRAAWCALREGGEIGGEGLVPADEDGLAKLVLRLGGDVRACVEMMSGAVWVRDRLQAAGWEVEVADARKVKGLAPLACKTDKVDARVLAELCRRDLVPAVWLPSLDDRALRERLKRRMQLVRMRTMARNRIHGLLTQWGLKLSTTRLRQRDAMELLEGRGMPEVWRCSVAEALAVIDLLDERLAPLERELRPLARADPRVARLETIPGIGSLLGLALAAEIGDIARFQSARKLVAYAGLAPKVRQSGQSSRTGPLSKAGSKTLRWAAVEAAQQAWRESNPWHRLYLETARRQGKTNAGKAAVARKVLIAVWHVLSRNEPFKPCRRHGGADPVPASSHFHLAA

SEQ ID NO: 74681 - protein, 371 aa, unidentified
MADRKVGKVKGCRMNCLVAGIDLGDRESLATVLSPMGDVADRFTFSMNEEGYAFFASRGPKDARVAFESTIMAYPICRALRTRGYGDVTVAHPKTLAWIVRSKKKNDRVDSLKIAKLHMAGMLPESHLLDRDQQIVRDLLVQRVKLGVEIGRLKNSVIGYLKREGVYDSLPKTGDNFSIKRREAIRSLKFNDERDLVLGTMMDRLEFLDRQCLPLEESVRANAKLSDDVRLLMSITGVDYYLASLTSSFVGDVNRFPSDDHLASFLGIVPTSRDSADVKRRGKMTKDGSSVARWALSVMVDTVMRHNDPIREYYVSVKKRTGSGKLAHVSTMRKLTRMLYHMLKTRENWKWENPLLTERKMARLEDGGDVS

SEQ ID NO: 74682 - protein, 343 aa, unidentified
MVMFAALDVSQEETAICVVDRDGGLLAEAKVATCPDAIARWLAERAEGLERVGMETGPLAVWLWNALTARQVPLVCLDARHASGVLKMMPNKTDRHDARGLAQIVRTGWFKPVQIKSHDAYVDRALLTAREALVGMRVKLENEIRGLLKTFGVMFGKRVGGFKRRAEEVIRGELAVSPELVPIFEALMQARRDILARIAALDSRIRSIARRHATVRLLMTAPGVGPITAMAVVAAFDDASRFRRSSSAGAYLGLTPRRYESGEISRNGRISRRGDMFTRKCLYEAANAIFCRNLGDTRLRSWAKAIAERTGPRKAKVALARKLAVTLHAMWRTNTPFREEAMA

SEQ ID NO: 74683 - protein, 415 aa, unidentified
MLFIGDDWAEGHHDVVAQDDAGKTLARRRLPEGADGIARFHELVASWAGEEGEPDPAQVIVVIETDRGPWVKALAAAGYRVYPANPRQAARRKETVANSGKKDDFFDAACLADMGRTRRHQMRELAADSDIAEAVKIAARAHQKLVWERTRHLLRMRSALREYFPAALEAYADLTLAGPDALELLRKAPDPGSAARLTVSQVTAALRRAGRRGDLAQRARDIQAALRAEHLAQPDVITEAHAASVRAAAAVITALNEQVKIMEAKVSELFRRHPDAGLYLSLPGIGDITGARVLGEFGDAPGRYATAKARKNYAGTSPLTIQSGKRKTVHARYIRNKHLIDALHAQALSALSVSAGARRYYDELRDREMGHDDALRRVASRLVGILHGCLRTGRGYDEATAWSRRAGTPEAAEAA

SEQ ID NO: 74684 - protein, 369 aa, unidentified
MREYSEAFVAFDVSKAKHAVAIADGGRGSEVRFLGEVSNSPDAVERLIRKLSGRYGKLHFCYEAGPTGYGLYRQIKALGHACMVVAPALIPKRPGERVKTNRRDAVTLARLHRAGELTGVWVPDEVHEAVRDLVRAREGAAEDRRRKRQQLLSFLLRHSRIYSGGGHWTLAHRRWLAKQAFAHPAQQIVFQEAIDAIAEADQRLRRLEQQVAQIVPNWSMAPVVEAYQAMRGASFIVAVTFAAEIGDVRRFETPRQLMSFLGLVPAESSTGQTVRRKGLTLAGNRRARRVLVEAAWTYRYPARVSETLRARLEGLPKAVRDIAWKAQVRLCARYRRLSNTGKKLPVVVAAIAREMAAFLWAIGREVAPA

SEQ ID NO: 74685 - protein, 582 aa, unidentified
MSTAPPLDRIGVGIDTARYGHRVSFLRPDRLPAAKPLTVLENRAGYQALQERLESLHRQHPQAHFHVRIDAAGQYAANLEHFLRGLALPMTLSVGEPKRNKDYQKAHFPKRTTDDTESQAMARFAVVELPKATAPTAPALLLLHEVAGRLQAKVKQSTQAVNRLHNLLARAFPELATLTEDLTTGWVLELLDRYPTAERIAQARLQILKKISYISPELAEQVQLAARQSVASVQGDVAEALVRDLVAQVRHTQQAEHKLRQLLADAFAALPPSPHLQIVTIPGIGTATAAVLVAKTVDIDRFVTPGQFVGYFGVFPEEDSSGVDKQGHPLPPGTLRMSRKGNDLVRHYLWNAARAAIVHNPAIRALYGRLKAKGKRGDIALGHCMRKLLHLVFAVWKTNRPFDAQHFPWERPQDNPRSPAAAPGAAGAGNDKAVGHKRDEPASEVVTAAASTVAPAPAPVKPAPAAPPPARPRVDFAFVRQQVTLAQVLEHLGLLANLRGRGQQRRGPCPIHSRPDDPQRTFSAHLSKNVFQCFHADCGAHGNVLDFWAALHHLPLYEAALQLAETFQLRRNREEEPVRGTR

SEQ ID NO: 74686 - protein, 418 aa, unidentified
MRYNKTEKIRTINKKTLIAALDIGKKVHYGYFRAPSGHDIQPFAFHNTRNGFDKFWKKLCDFKKKQMLTEIVIGFESTGPYAEPICHYLRHQSVKLVQINPMHTKRIKELTGNSPNKTDKKDPRVIADVMSLGHSLTVIVPEGATAHLRRLTQARERAIERRTAMNNQLQHLVFLIFPELVHIIKPSTKTGMYLIRHYSDPEKLLFAGIDKINAIIKKISRGRLGADRAEQLYGAAKKSVGITEGKESILFEITHLVSKIESENHYVEDLEKQMGDYLEKIPYSHSILSITGIGYVTAAGLIGEVGDFRKFKTISEVLKLAGLDLYEISSGAHQGCRRISKRGRALMRKLLYFAAINTTRKNGILHGPYQRHLAKGMPRIKALMAIARKLIGIIFALVRDHSNFIADYSSQLMFKKAA

SEQ ID NO: 74687 - protein, 315 aa, unidentified
MSDMPCFVGIDVAKAQLDIAVRPSGERWAVPNDADGVVTLVERLQALHPTLMVLEATGGLERIAAAALATAGLPVVIVHPRQARDFARATGQLAKTDAWDARALAHFADVIRPTPRPLPDTQTQELRALLSRRQQLIGMRTAEQNRLAGTSERLTQDIEAHIAWLNARIATLDADLETMLRASPLWRENDDLLQSVPGIGPVCARTLLLELPELGTLTRQQIAALVGVAPLNCDSGTLRGRRTIWGGRAHVRTVLYMGTLVATRFNPQIKVFYQRLLAAGKRKKVALTACMHKLLTILNAMLKHRTSWQAQEVQN

SEQ ID NO: 74688 - protein, 355 aa, unidentified
MKIVGCDLHARQQSIALLDTETGELVERSLEHGAEQPGEFYSSLSGPVVVGIEASGAMQWFLQLMEELEIECQVGHPAKIRAAETRKQKHDRRDALLLLQLLLEKRFPKIWMPTTEQRDLRTLLRDRHQWVRMRIRVQSTLQAIALNQGLRKGKGLWTREGIAALEALPLPCYTTQRRNELLRLYAQLQKRIEELNRQLDKVVGEHPQAQRLLTHPGVGPVTALATEVFLGDPHRFAHGKAVASYIGMIPGEYSSGPRQRFGQLSKQGNTLLRYLWCEAAMHAVNKDSELRRFYRRKLVQKGMGKARVAAARKLGIRLWIMLRDEIDYQEFCRRRRQEGEVRAGMPDHNNGPAVQ

SEQ ID NO: 74689 - protein, 412 aa, unidentified
MLKIVYPICCGMDVHKSFLVACIASTNGQGVTSYKSKRFSTFTGDLCRCAVWLAENGCKDICMESTGKYWIPIYNILEPTCNIVLAHPKYVKAIRGKKTDKKDARWIADIFKHDLVSGSFIPPSDIRQLRDLVRYQWKLTNFMTGEKNRAQNCLTVSNIKLDDVFSDVFGKAASAITTRLLENTEPFDVTPFLTKNHKASAEDIQAAVDGSLCIEQAEKLRIIRSHMGALDLCKLNLESLILSVAEKFLPQLNLVLTVPGIKTFSAIGVISEIGVDMSVFPTSKHLCSWAGLTPQNNESAGKKKTTRISRAGTYIKPLLVQCSLAAVTSKKHPEVRNRYLVLKKRRGHKKAIIAIARMLLTAIYNILKKNEQYNPELYRKADRPPAHREISIDEAIYLIQRQGYLVTAPAHA

SEQ ID NO: 74690 - protein, 415 aa, unidentified
MSETRRWFAGVDWGSESHCVFLTDDQGRKAGQKFFKHSGEGLAEMASWLLKASAAAEPGEVFVAIEVPHGPVVENLIERGFAVHAINPKQMDRFRDRFSMAGAKDDSRDAEVMASCLRTDAKCFRRLVCAEPIFIELREWSRIAEELGVERNRLANRLREQLWRYFPALLELEDDCSAEWLLDFLALAPTPAKAVRLREAKLAQLLKQRRIRRLDPAAILKAVRAPPPKLAAGTLEAASAHVASIIPRLRLVNRQIGEAERKIGALVDSLTASEDSEPGQKKQHDAAILASLPGVGRIVLATLLAEAWEPLQRRDYPALRSLAGVAPVTKRSGKSCIVVRRQACSDRLSNALYHWSRVAVQHDPRSRAKYAELRKRGCTHGRALRTIADRNLSVACAMLKTGTLFDPSLKQEKNP

SEQ ID NO: 74691 - protein, 451 aa, unidentified
MKKEKANKGVIKMGSGLPVFNHFAAGIDIGDTLHCVAINDGNGGHEVKTTSAFTCDLNEIVDYLKHNGITTAAMESTGVYWLPLYIMLEEAGIEPYLVNAKHVKNVTGRKKDDTDSIWIQKLHTCGLLQKSFQPDNEIRLLRNYTRQRKNLIILGTDAVRRMQKALELMNIKIHTVISDILGKTGMEMVKAILAGEKDPRILATLCDPRIKASQEEIIKSLQGIWKEEYLFMLEQAVENYEFHQKQIKNCEEKIKQQLIKQVAIIQEGDITSLEKMLKKKAKSKRNQFDFAIAPLLNAIAGVDLCMIPGISEVTALGFISEVGVDMSKWNSGKQFAAWLNLTPNTKITGGKIISSKMMKKNNKAGQYLRQAASCLSTNKTPIGDYYRRMRARLGGRGAALTTAHKLSRIIYTMLVKKTAYNPGMMIDNQERFKEEKIKKLEKQLARLKQAA

SEQ ID NO: 74692 - protein, 402 aa, unidentified
MNCVGIDVSKGKSMIAVMRPFGEVVVSPFEVLHTDSELSELARLLKSLDGETRVVMEATGNYHAPVAWLLHDAGLYVSVVNAMLVHDYGNNSLRRAKTDKKDAVKLANYGLDHWLTLPRYVPDEDTRLMLKTCYRQYQQYSKVQTMLKNNLISLLDTTFPDANRLFASPPRADGSEKWVDFVDAFWHCECVCGLSEKTFITRYQKWCRKHGYNFNENKALDIYASACGHFGVMPKTDTTKLLVEQAISQLRATSAALAALKQEMQSLAASLPEYPVVMEMFGVGPALGPQLMAEIGDVRRFHSKKALVAFAGIDAPPYQSGQMDVRSRSISKRGSASLRRTLFLVMGVLLQCAPMDEPVYQFMNKKRSEGKPYRVYMMASANKFLRIYYASVKAYLDSLEHN

SEQ ID NO: 74693 - protein, 469 aa, unidentified
MSSDLEIAAFIGLDWADQQHVIRLRMAGSASVEAQLLDQKPETLQTWIGQLRQRFGGRPVAIALEQSRGSLLYALMNVDFLRLYPVNPQNLAQFRKAFYPSGAKDDPQDALLLLEMLEKHRDRLRVWVPDDASTRCLRLLAENRRKLVNRRTALTNQLTSLLKESFPQALDWAGPLDSLRACDFLQHWPSLQILQKTSTSRLRRFYRVHTRLDSQAIHQRLDQIRQAQPLTSDSAVLAAAELMIPALVRQLRCLIESIQQFDQQLKDRFQQHDDYTLFHSFPGAGPALGPRLLSAFGSNRNRFECAAEVQMLSGIAPVTERSGKSHWVHWRLACPKFLRQSFHEFAAQSILFSTWARAFYDQLRSRGTSHHAAVRTLAFKWIRILFRCWKNRTPYQEQIYLASLQRHGSPLCAALSPPTGALCTSSLTFYLRGLSRVGERGTEIVSAQARCRQCPFPFRLSPHRQTHSN

SEQ ID NO: 74694 - protein, 444 aa, unidentified
MGTSKVKPARGKLEVLHPDAAGIDVGGTAHYVAVRNEAAVESVRQFGVYTRDLHALADWLRTCGVKIVAMESTGVYWIPLYELLESRGFEVMLVDARQVKNVSGRKSDVLDCQWLQQLLSYGLLKAAFRPQDQFCQLREFNRLRTRLLVDQGRSVQHMQKAMTLMNIQLSQAISDVAGVTGQKIVRAILAGERDPMVLAAYRDSRIKASEEEIAASLQGTWKAEHLLALKQAMGRYDFFAEQLQECDQQIEAVMQQLQAHTKELAKGKKRSKAKNAPKFNLRERLLKMCGVDVTRIDGIGETTALNVVSEVGTDLSRFPSDKHFASWLGLCPGTRISGGKVLGSKTKHSVNRAAQAFRQAAAALRSSKSALGAYYRRLCARMDKAKAVTAAAHKLARLFYALLTKGQEYVDQGQQYYEERYRQRVISQLQRRAQSLGMALVPTA

SEQ ID NO: 74695 - protein, 441 aa, unidentified
MAMRKKDETVVFPNAAAIDVGAASHWVAVPHERDAEAVREFGAMTDDLHALADWLLACGIDTVALESTGVYWIPVYEVLERRGLTMWLVDARQMKYVPGRKSDVQDCQWLQKLMSLGLLRAAWRPGDEVCVLRAVVRQREVLLREQASWVQRMQKALLQMNIQLVEVLTDVMGLTGQAIIRDIVAGQRDPAVLARHRNYRVKASVAEVERALTGNWRDEHLFVLAQALSMYDSLAERLLECEAKMKALLAPLERHPIALEGASKPSGKNSPRFDLRAALARWAGVDLTRINGLAVTSVLTVLSEIGPDLSRFANVKHFCSWLGLCPATKISGGKVLSARTRRSTNRVRQTLKVAAMSLSRNNSALGAFYRRLCSRMDKPRANTALAHKLARMIYFMLTRGEAYVDQGQQQYEEQQRQRSIAALRRRAANLGFAITPAAATP

SEQ ID NO: 74696 - protein, 420 aa, unidentified
MEEITEEPAELVERVAALDIGKASLVCCVRVPHESRPGARRQEVRTCDTVTPALLELRDWLICQGVTRVVMEATSAYWKPPFYLLEDDIECWVVNARDVKNVPGRPKTDKLDAVWLCKLAERGMLRPGFIPSRAGRQLRDLTRYRRTLTQERTREKQRAEKLLEDAQVKLSSVISDIFGASGRDMLAALIAGQRDPHALADLARKRMRVKISVLRQALTGHFTEHHAFLLAMMLGRVDALTAQIDQLTTRIEKAIAPFARQVSQLDEIPGIGVTTAQEILAETGTDMSRFPTPGHLVSWAKFAPKARQSAGRSKAAATGKGNPWLGGTIGEAAIGAARTRTFLAARYKRVVKRRGKKRALVAVGNSILVIVWHLLSDPDAHFTDLGPDWHDRLAPQRRKRQLITELERLSGQKVTLTNAA

SEQ ID NO: 74697 - protein, 337 aa, unidentified
MNNSVIGLDIAKNIFHMYSLTTGNKVYKKKLKRAEMLAFFATYQTSLIGIEACGGAHYWARELAKLGHEVTLLNARYVKSFVVGNKNDYNDAQAIFDAVTRPNKRVVAVKTVEQQDIQLIHKIRQGYVDKRTALVNQIRGLLSESGIVIHQGINQVRKELPFILEDAENKLSPISRELFAEQYEELTKLDEKIKQQDQRITRLCANNETAKRFLDVPGVGPMTASMVAADIGEGKGYISSRDYAASLGVVPKQHSSGDKQVYLGISKRGNRYIRTLLIHGARAVLKNCADKTDALSLWLQGLIERRGFNKAAVALANKNARILWSMAVTGKAYEVKA

SEQ ID NO: 74698 - protein, 319 aa, unidentified
MAQNDLVVAGIDVAKDKVDVCIRSLSLKRTFVNTIEDRCELTSWLRRNKVGKAVMEASGGYEREWAKVLRNAKIEVRIVDPKRVRSFAQSAGRLAKNDTIDAEMIAWFAETFGEVPGQTYDAAREQLHQMVHARQALKDMQSKLTSQGEHATPAAVQRIHARIVKTIAVELVKIEAEITALIQATPHFAELAEIIESVPGIGRVTSAALIAAMPELGKASGKIVAALLGVAPYDDDSGRRRGERQIRGGRRRTRNMFYMACLGAATQHNPVLKAFYDRLVAKGKLKKVALTACMRKLISILNVMIARREKWDAKRYAVN

SEQ ID NO: 74699 - protein, 407 aa, unidentified
MLFVGDDWSEENHDVELMGHDGRVLARARLSEGAAGMTRLHAMIGEHAADGEPVVRVGIETDRGLWVMALAAAGYEVFAINPLQTSRYRDRHAVSGSKSDTGDAHVLADMVRTDSHQLRQIAADSPAAQAVKVVTRAHKTLIWERTRQVNRLRHQLRDFFPAALEAFDDLDAPDALELLAKAPDPASAARLSTAQVSAVLKRARRRDIAGRTAVIRAAFRGPQLAQPPQVTAACASVVRALTAVLAALNEQITVMEAQVNAHFLQHPDAEIILSQPGLGPILGARVLAEFGDDPARYASAKARKNYAATSPITRKSGKKKIVLARYVHNDRLIDALDSQAFSALSISPGARAYYDRQKERGNSHHAALRQLANRLTGILHGCLKSRTLYNEATAWPQTASHQISSAA

SEQ ID NO: 74700 - protein, 345 aa, unidentified
MEHYVGLDVSLKLTAICIVDRTGKIEREGVVSSDPEAIAIFIKSHAPHVARVGLETGATATWLWTELNKLGLPVICIDARHAKAALKMQINKSDRNDAVGIARIMQCGWYKEVHVKDLDSHAVKALLASRALLVKIKRDLENQIRGLLKNLGLVIGRAKMNVFAVRAAEMTEDRPEPAAAVVPLLSARAAIEQQIADLDRKVMRLARNNAQARRFMTAPGVGPITALCFLATIDDPTRFKRSRSVGAYLGLTTRRYASGEIDWTGRISKWGDKMLRSYLYEAANVMLTRVARWSALKAWGIRVAKRTGLRKAKVAVARKLAVVLHQMWIDGTEFKWSKEAANQPA

SEQ ID NO: 74701 - protein, 447 aa, unidentified
MALDVVTKTDKTPVLGRMLSKYVGRKTSSIENDITKARNHSRQRGNIMRVVFGIDVSKASSEVAILVNGEKVHGYTIPNDAIGFNRLLGDLKTVHEPEIIFEATGVYSRRLQAFFEDNSYAYTRLNPLESKKQLDSLRVRKTDKIDAEKLAASQFILNRKPSYVQEALYQELRDLSRFYQNLTEDIVCAKNRLHKVLQVTFPELENILSAPTGEQYWNLVMTFPCNSFVLESDDATLTAIIRQSTAKRISEKRVTYLVDKLTKLANQSYCAVKKTSPVIEEVKYYAGELLRLSEHRQGVLEEMVALAQSLPEYEILLSIPGIAETTATSIIGELGDIRRFHSANQINAFIGIDLRHYESGNFLVKEHITKRGNPYARKILFKCIHNIASASHTNLCHIADFYEKRKRQSQVTSTKPHTIASIHRLIRTMYYLITHNKLYDYTSTQNR

SEQ ID NO: 74702 - protein, 392 aa, unidentified
MLFVGIDIAKRNHEASVIAQDGHLVRKAMRFANSQAGYNKFMDMVRGLSEPVVFGMEATGHYWLTLYAHLRNDGFTVHVINPIQSDALRGMYIRKTKTDSVDSVIIADVIRFGRYCETSVEPGDLHAMRELCRQRFYVIDMASDLKRKVIALLEQVFPEYEKLFSDTFGVSSMELLSQYTTPEEMLSVSSQQLAEVLEKASRGRLGAEKAAEIQDAARNSFGIVMASSSFSLIIRQYIEQIRSLEASVDVFDAEIARLLSGFDTQLTTITGIGPTLAAVILSEIGGDIRRFSSPAKLAAYAGVDPTVKQSGDFSGTRMKMSKRGSPYLRRAIWLASTVAAFKDPAIHALYERKRAEGKDHMTVIGHVCRKMISIIFAVLRDNTPYVPAAISD

SEQ ID NO: 74703 - protein, 340 aa, unidentified
MDIIRFGLDLAKNSFALCGVDAHGKIVLRKTLKREQLLEFFANAPAALVAMEAGSGAHHWARELTGLGHDARIIDPRLVAPYRQSGRAGKNDFNDAIAICEAAGRPHMRFIPVKSKDQQAILLVHRLRRSCVAEHTRLVNQLRGFLAEFGIVVPKGANTFKHRWPRIRQRHDQDVPALAWETLDALYSKLGELHQQVLAYDRQINAFVRQDERAKRLAQINGIGPITASAIVATIGNGHDFRNGRQFAAWLGLVPRQHSTGGVQRLGRITKRGDTYLRTLLVHGARSELMLTARRADHKSTWAESLKATKSWNKAAVALANKHARIAWALLANDQTYRPA

SEQ ID NO: 74704 - protein, 316 aa, unidentified
MATSSSVFVGIDISMRSLEVAFHGMNKIYSFFNNAEDISRLIVFLLEKRTTLVVVEATGGYEKALVQALNSSSIPVSVVLPKRIRDFARAQGISAKTDKLDAKNIAFFAYSLKPHPNAPYSAELLRLSALVDRRRQIVLMIKAEKSRHPKASPEIRPSIDEHIEWLIDEEKRLNAEIHNLMQNQPEMKRKSEIVRSAKGIGPVTASNLVAELPELGTLDRKKIAALVGVAPWNDDSGKKHGKRRIRGGRSMIRRTFYMATLTAVHFNPVLALFYQRLLAKNKEKKVALVACMRKFITILNAMVRDNQPFRYQASMA

SEQ ID NO: 74705 - protein, 316 aa, unidentified
MQSILNLGADVDSRYVMVACAADSFKPHRIANERKAIHTWLRTVPRGSRLAMESTGSYHELLADLAHQADLQVFIVNARDLRRYGQGIGRRGKTDRIDAEVIARYIAREHQELHAYVPPTDAQRLLARLIGRRAKLIQAKDSIRQSLRGLPALQSEARRLIAHIDRVIASLDLLIQRTVQQMPAVHEAAGHIVTIPGIGVLTSTCLGHRFTRLPYPTSDAVVAATGLDPRPEDSGQKAGRRRLSKRGPAEERRLLFNCARSAAQRKPWRPYYEAQLAKGLSKTAATVVLARKMLRVAFAVYRHHQPFNPLLIGGGT

SEQ ID NO: 74706 - protein, 387 aa, unidentified
MIKKRGRVVGLDVHPDSFAGAVVAGSDPASAQVSSTSTRVELERLEQWALRHTRTEDTLVLEASGNAFSVAERLRGIGRKVEVLDSHRAGKVGKVYCANDRVDAVKIARIYLSALLPIVWQPDPKTLERREVFSAYQAVVKESTRARQQLRSMLNEHCVRLEKGFRLCHPNALMRLLALREWTPARTMLLQQLHGSLVAARARRTLLRRHMAQEIVAEEALLRLTRLCGINLVTLYGVVAAVGDVRRFSHSKKLVAYLGLNPSVSQSGNFEGSTALKRHGRRALRALLIQSGKKLLQVTNPLQKWGLAVAARRGRNKAAVAVARKLCVALWHVLMGHAIGALERLDTLETKLSKFATEMGPAALHAFGYNNKADFVKKKLYVLRSYP

SEQ ID NO: 74707 - protein, 359 aa, unidentified
MQRQRTELNFEGQNIFIGIDVHLKSWTVSILTAELHHKTFNQIPKAEALKVYLDRNFPRANYHSVYEAGFSGFWAHYQLNEMGIKNIVVNPADVPTSQKEQLQKDDPTDSRKLARSLRSNVLESIYVPSPSTLEERSLVRFRATLVKDLTRFKQRIKSFLYLHGVTYPSEFENSNSHWSNKFMLWLKEDVELKHQAGKLTLAFLIKEAEQQRVLLLETTRKIREMSRSDKYAQNMHLLRSIPGIGFVTAITLLTEVEDINRFKNTDHFAGFIGLVPSRHSSGEKEKNGEMTFRGHDFIKRALIESSWIAARMDPALNLAYHNYVKRMESNNAIIRIARKLVNRVYFVLTKKQEYVMGIV

SEQ ID NO: 74708 - protein, 343 aa, unidentified
MQAVTTIGLDIAKSVFQIHGVDAAGNVTVRRQLKRRYVLPFFQKLPPCLVGIEACASSHHWSRELQALGHTVRLMPPAYVRPYVKRQKNDAADAEAICEAVTRANMRFVATKTPEQQSCLMLHRTRHLFIRQQTSVINAIRAHLAELGIVAPVGRNGVEELLGVVADPSDKRVPEIARACLAALGAQLRVLKAQILEFDRMINAWHRSNETSKRLDEIPGVGPALATALVASVADPKAFRSGRNFSAWIGLVPKQHSSGGKDKLGSISKQGDRYLRSLFTAGALAVIRYAKIHGTKHRPWLTALLARRPTKVAAIALANKIARMAWAIMAKGERYKEPVALAA

SEQ ID NO: 74709 - protein, 391 aa, unidentified
MVCVGIDVAKDKHDCCILDSEGTILADCFTISNNLDGFNKLLQTIQNCTQKSDKIKVGLEATGHYSYNILGFLLDNGLPTYVINPLHTNLYRKSLSLRKTKTDRVDARTIATMLLSDVDLKSYTDTAYHNEELKSLTRYRFEKVQERAKLKQSVSRLVTILFPELEQLVPTLHIASVYSVLSEYPGAKQVSEVHLTKLTNLLTTASKGRYGKDKAIQIRDAAKTSIGSVMPAKSLELKHTIKLIRELTSEIDEIEDSIQQIMDELHPPLLSIPGMGIHSAAMILGEIGDFSNFESPDKILAYAGCSPSTYQSGKLTNCYAHMEKRGSRYLRYALYNATKYVCHWNPVFAEYLAKKRAEGKHYNVAISHATKKLVRLIYALQKSGKAYLTTA

SEQ ID NO: 74710 - protein, 307 aa, unidentified
MMVLGVDVAKRELVVSDGLRVWASANTANGIRKLLKGLSPDTVIAMESTAEFHLPLADAAHEAGLTVYVLNPKHVKRYRDSLPVRGKTDPLDAQLIAAFASKERDRFEPYRPQPASLRRLKALLRRRAGLISTKVRLRQSLEGCPELRAEMNGILARIDKTIARIDELVEKLADSERYARLQQIPGVGKVTGAGLLVALSQGEFRSADAFVAFLGLDLVANDSGQKSGKRKLSKLGDSESRRLAYMSAMAAMRTKTWKHIYEAYRARYSTTAALVALSRRIVRTAWSMLAHNTNFNLSRLASLDMKT

SEQ ID NO: 74711 - protein, 461 aa, unidentified
MTQLRSKDGKGSRKSRRVTAANLPRSLRKVNLNAAGIDIGATEHYVAVPEGCDEDIVRSFGTFTADLEALADWFKECGIQTIAMESTGVYWIPVFEILESRGFEVKLVEPGKLKNVPGRKTDVLDCQWIQQLHTFGLLQGSFVPIESICILRSYMRQRSMLIECAGKHVLHMQKSLMQMNIQLHHVISDITGATGQRIIGAILEGERDPQKLSKLRDPRCKKDEHTIALALEGHWREDHLFVLKQAVQLYHFYHNQLEKLDKKLEDYLKTFEDLSKVRKLPASPKPKAGSNAPNFDMRNHLYKMSGIDLTTIDGISGHSALQLISEIGIDMNPWPTEKHFASWLCLCPGNKKTGGRLVSGKSRSSANRAAAVLRMAAQSLSRADCALGAFYRRMKSRLGAPKAITATAHKLAKIVYNMLKYRKAYIDVGAEYYEKRFRQRVLANLTRRAFQFKLRLVPLEE

SEQ ID NO: 74712 - protein, 383 aa, unidentified
MAEYTISSQYGSLFGMDVHARSTTVRGFDFATGETKVKRFGDCPAPAEIAAWMKGGFAGPHYAAYESGCTGFHMCRELRGMGIDCDVVAVSTIARSTDDRKRKNDRRDAKRLLAELLSPDSSYSTVWVPDEECEGERDLVRARHDARQALKRSRQQANAILLRHGLVWNEKAPSGRVKTTWARDHVNWVESQSLPAASQEALQHYLDAIAEQQALARKLDALVREHAGLPRWKPAVDALSHVKGIDVPSAFLLAVEFGDFSRFESGRAVSCWAGLVPSSCDSADKHANGHITKTGNPYVRGALIEGLSNMHVRKADAKKLRKGQEVSGPVRRLCRRCDARMAERHERMSKEGKQPNVIKIALANEMVRWVWAIGRAVARERAV

SEQ ID NO: 74713 - protein, 344 aa, unidentified
MQITTIGLDLAKNVFQVHGINSASEVVVKKTLRRAQMRRFFEQLDPCLVGIEACGTSHYWAREITKLGHAVRLMPPAYVKPYVKRGKTDAGDAEAICEAVTRPTMRFVAIKSPEQQEALALHRTRDLFVKQRTQLVNMIRGLLAEFGIEIPRGIGQALMLAKRIAAHDVPNIPPLAAKVIAGLAGQVLDLQARLGEIELELLAWLRSNDLAKRLATIPGIGTVGATALAASVTDPHQFRSGRQFAAWLGLTPLQHSSGGKERLGRISKMGDKYLRRLLVVGMTSLIRRAKYKPEAVDPWLADLLSRKPARLVTVALANKAARVVWAIMVRGGVYRRPAGVMTPV

SEQ ID NO: 74714 - protein, 264 aa, unidentified
MRFYTNQHKYYCGINPHTRKMYICILDEKGEIREHRNMKTDRDAFLKAIAPFREDIVVAVECIFTWYWVADLCHKEGIPFVLGHALYIKAIHGGKAKNDKIDSQKIAVLLRGGMMPMVYVYPAKMRATRDLMRRRNHLMRKRSELYAHIQNTNSQYNLPDSFGPISKHQNRNGIAVDIEMIRTYDGILSQLEKSIIKLANNHDPVFYALLQTIHGVGKIIALIILYEIENIRRFASVQDFASYSLLVKCAKESNGKNAAPAAVK

SEQ ID NO: 74715 - protein, 404 aa, unidentified
MIFVGIDWASKEHTIHVLDHDGQLCKQLQVPHSGDGFAQLARQLHELEPQPQHVHVGIESHNGPLMDWLHNQAYSVYPINPKSAAKGRGLFRASDAKDDPFDAETLARLVFMKVPRPSPRLPDGQPHQTLEDLLRFRENLVQEKSDLLRRLGALLQTWAPTLAALCVDLDSRWQRDLLRRWPLCCDLQNAHPNTLTAFAKKHRLAAKTRARLTHARQQTPVPILPARQDILRWEIHRLLDRLERVLAELDEVGQTMTVLTQADPRAPLVASLPAVGPISQAALLVALSQAEARGDDWRSLAAYTGMAPVTKQSGKYRLVRHRRACDHLLRRLLTYYAFQTILQSHCWASEDYKRRRAKGASHHTALRAIGRRWIKIACAVWRTQTPYSEEYFRQAQKRHTQRAA

SEQ ID NO: 74716 - protein, 409 aa, unidentified
MEVLYARCAGLDVHQKSVVACVRIHGPVGRAQTSTRTFATDTAALLELSAWLEENQCSHVVMEATGVYWKPVWHILEESFALVLANASSVRNVPGRKSDVSDAAWLADLLAHGLVRASFVPERPTQELRDLTRTRKQMVKQRAQHVNRLHKVLEDANLKIGAYVTDITGVTGRAMLGALIRGETDPAKLADLRDPRLKTPRDELMKALRGKVTEHHRFMLRMHLDQIAATDEGIARLDAQITELTSPLAEVVERLAAMPGMSETSASVVLAEIGSDMSRFPTAGHLISFAGLCPKMDRSAGKSRSTKLRKGSNWLKTVMVNCGWAAARSKNTYARAQFHRLKSRRGSKKAVIAVAASMLTAIYYMLRDSVPYRDLGAGYFDRRDSTKIANRLRRRLESLGFQVSRQPAA

SEQ ID NO: 74717 - protein, 366 aa, unidentified
MCVGLDTHKAKVAVAVAEPGRSGEVRFRGEIANRPEAVRQLIERLAEKHGQLRVCYEAGPCGYGLHRQITALGHDCTVVAPSLVPRKPGDRVKTNRRDALTLARLLRAGELTAVWVPDPTHEAMRDLVRARTAAMEAVRRARQQLQGFLLRHGRVFAGRKAWSPAHRRWLAGLRFEHPAQQIVLQEQLDAIDEAERRRDRLGEQIRELVPRWSLAPVVAALQAMRGVAFLSAVVLAAEVGDFRRFATPRQLMAWLGLVPSERSSGSKVERGGITKAGNGRARRVLVEGAWSYRFPARVTGELRARLEGVPEAVRTIAWKAQLRLCARYRRLVAAGKNANLVTAAVAREMAAFAWAIACQVRPATAA

SEQ ID NO: 74718 - protein, 421 aa, unidentified
MENTAARKLKQVPEGYLIIGVDPHKKRHAAVGITRDFTTRDKFKFDNTREGLEIMLRRARMEMVKLDCRGIMFAIETGGHYWRNIAYFLDEQGIPFRFINQFTLKRRREGKDLNRRKNDYRDSEVAAQLLCTGEFTESTIPQGVYAELRTAHNAYRRLVKERTRITNLIKGLLDGLFPEFTLVFKDPCGLTSLSVLSTCAIPGVIAGMTEEEFVATIEAKHQGRLMRKKLRELHHMARASIGIAAGARPVSAEISFLVEKLGLIRRHICIIERTLVSLVDETEEGKYLLSIRGLNYIAVAGLLAELGCFKAYRSAKQMIKMAGSNPTESESAGKRGSHTPMSKQGRPVLRYCAWTSVIPMLRLNPDFRTWAKQMRERPVHANPLNGREIVGAALNRLFRLAFAMVKNQTYYRLPQLVQITG

SEQ ID NO: 74719 - protein, 339 aa, unidentified
MDHIGIDVHKKESQICILAEEGELIERRIRTEPRRFAEELGERPHARILLESSTESEWVARSLEGLGHEVIVADPNFAPMYATRTRKVKTDRRDARALAEACLLGAYRPAHRLSDAQRHVRARLTVRDTLVRTRTRYISLSRALLRQHGWPVPSGSAEGFPRRVMALPLPGRLRSEVAPLLAVMRHLQQQLAYSDERIAAVTQTDERVRRLQSVPNIGPVTAAAFVAALDDAARFRRAHEVEAYLGLIPRALSSGETQLRGRITQAGSSRVRWLLLQAAVSMLRLHDPRTAALRQWAGRIAARHGTGIAGVRRHQMIPLSRRKWRMNSADSSGRSMGTK

SEQ ID NO: 74720 - protein, 387 aa, unidentified
MSQTVAALIPAAVDYERTLILAIEVSNKSWVLAVQVPGLPHTKAKRTIDPEAEALLAAVSGYRARAAATGRSIERVIAVYEAGWSGFWLARWLIRHGVEVYVIQPSSVPVDRRMRRAKSDGIDSELLLRTLLAWLRGEPRVCSMVPVPDEADEDARRCVRERTELISERVGLINRIGAVLATLGVSDYNPLLRNRGRRLAELRTALGEALPANAHAKIKRLLARLELVLRQIAELERERDAVVETEASDKASEMIQQLTALRGIGVQSATVLVREAFVRRFANGKALGSYAGLASSPYSSGGIDRQQRIGKAGNRRVRTVMVELAWLWTRYQPGAAQVCWFRERVGSTGRRVRKIMVVALARKLLIALWRFVTDGVVPEGAVLKPAV

SEQ ID NO: 74721 - protein, 331 aa, unidentified
MQCVVGIDIPARSFDLTVRKGGKCQKAQTYAQTPQGHRQAVKRLKSMQPTRIVMEATGVYYLDLAMALHEASLPVCVINPRSFRHFADIKLSGSKTDAIDSALLAEFAERMEPARWSPPPHLHLELRDLGRHINRLVHARTQAKNRLHALTARKSTPRLLIEDEQESIENLDRRIDRLRQAAREVTARSDTLSEPFECLATAKGVGEASAIAILAELCVLPGTLKAPQVVRHAGLDVRLTQSGSSINRPGRLSKAGNTYLRSALFMPAMAAIRHEPRAKAFFNALVARGKKKIQAACAVMRKYLTGIWACIKNRSRFDASLLFSDIHALTG

SEQ ID NO: 74722 - protein, 339 aa, unidentified
MKIVATIGLDIAKQVFQVHGADKSGRPVLKRKLRRSEVARFFSEIPPCLVGIEASGSAHYWARVLGGLGHTVRLMAPQFVKPYVKSQKNDANDAEAICEAVTRPQMRFVPQKSVEQQDLQCLHRVRSRLVACRTQLINQIRGLLAEYGIVLPQHPGQVRRGLPTVLEDAENQLTGAGRELFRSLYEELAELDEKIAAADNRIQVAFQNTPNCQRIAAVEGVGPLIATAVVAAISNGHAFENGRQFSAWLGLVPRQNSSGGKSRLLGISKRGDPYLRTLLIHGARSVVYRAKAKSDKRSLWIVDKQQRLGTTKACVAVANKNARVIWSLIAREQEYRRAA

SEQ ID NO: 74723 - protein, 347 aa, unidentified
MKKVTVIGLDMGDKNHKAIGLSEDGEIVDRMEVACTPDDVRTYLSQHPGAMLAIETGTHCRWVSRMGVELGHKVLVGNARKLRMIWGSTRKNDWKDAEMLARIARTDPKLLAPVRLRSDSDQELLRMLKARDFLVAHRSGIVTMIRGFCKSDGCRLEKCATEAFARQEFEVPVTVRATTKPLFAMLRDLTKKIALYDKMIAVAVREKHPAEARLLNTIDGVGPITAAAFLATIGDPATFGHARDAGAYFGLVPKQDQSGQTDKQMRISKQGNELVRKLLVTGANYIMGPFCKDSDLRRHGLRIAERGGKNAKKRAKVAVARKLAVLMLAMLKTQTEYRPLSNVGVAA

SEQ ID NO: 74724 - protein, 364 aa, unidentified
MTSMTTTTLDVTGGVDTHGKTHHAGVLDPLGRQLGDREFPTTPAGYRALVSWLRSYGQLQRVGVEGTGTYGAGLTRHLRVAGVPVVVEVDRPDRKARRAKGKSDPLDAYSAARAALAGTASGVPKTRDGRVEAIRALRVARSSAVKARSQTTNQLKSLLVTGPAELREQLRELSATALVVTCARMRPTADLADPEQATKAALRRLARRHQYLSEEIADADGELRTLVTAAAPRLLALRGVGPEVAGQLLATAGDNPDRLRSEAAFAHLCGVAPIPASSGRVHRHRLNRGGDRAANNALHIVVLGRLRHDPRTRQYAQRRTTEGLSKPEIIRCLKRYVAREIFTALTTRATDDQPSAPPTMSMAA

SEQ ID NO: 74725 - protein, 382 aa, unidentified
MLYLGIDQHANQLTIDLGDELGKVLVNRRVSTAPSRLTAFLTELQERSADEGGYAAIVEVTGFNDYLLKLLPQFGCSHVLLVQPQESSKRKSDRRDARQLRELLWGSRHRLLAGKRVSLVRVITPPSPEEAKLRQLTSLLRQLKKQRTQVLNRMHTILKKHNFQHELPAKRLDAVKSQAWLEHVLELEDVDRLEMNLLQENLKHFDKQIAKIDLDMANRFVKSQPSRIVASTPGLSVYSSLVISSRIGQVNRFANGDALANFLGLTPSSRNSDQTIRHGGVTKLGSGFVRHMLCQSLVHVLRKDPWIRKWYRKTKSRRGVSVARVAVMRRLATILYAMLRDEMPYVPGGPDRYQLLLKLRDQRQLTFEEVWTMAYQDSAKAS

SEQ ID NO: 74726 - protein, 314 aa, unidentified
MFKYFAGIDVSKDTLDVCVLPSGELFKVSNDAAGIAELLARLQPLFPERVVMEATGGYEMPAAVALFLADFKVCVVNPLQVRNFARADGQFAKTDSIDSAVIAKFGERMMPQLRTIADEELRGMDALVTRRRQLLQMTTAEKNRMGTAAVALRPRIQAHIDWMDQEIAGIEKELETTIKKSPAWQEKFKVYTSMPGIGPKTGFSLIAELPELGLLCSKKIAALVGAAPFPRDSGAFRGQRRIRGGRATVRCALYMATLSAIRWNPVIKAMYERLKERGKPFKVAMVACLRRLLVILNTMARTNTPWNSALGATA

SEQ ID NO: 74727 - protein, 576 aa, unidentified
MFLVLRAYWLRPVVRLGWGAFSAHAVGDVRSFSQADDPVGTAVPLPTPPPDALFTFPILEIVVANSKAKSLHVQTLQQAVQPPITPTIGSPASTSQPNDHFQRANRLAEQTRRSAEECAKLTSMPVQHHHAAGIDVGDATHWVCVDSTPDHSDRVREFPAHTPGLRRLVEWLKLCGVTTVALEASGVYGHVLFLTLVEAGFAVVMTAAHFARQIKGRPKTDNRDCQWIQRLHKHGLLPPIFQPDETTQTLRDYVRQRGNLIRLSGQHIQRMQKALELMNLKLTKVLGDITGVTGLKIIRAILKGERDPVALARLRDRRCKHEEAEIAQALDGRYRPEFVLELRSCLTMWEKYQEVIAEVDKSINAHLKTMRRKTELPPLTAKPRLRGRKPHDPQFDVREALYYVTGVDLTAIEGIDEIHALTLVSELGTDFTKWPTVKQFTSWLGLCPNWKKTGGKVKSSQTRKGKNRAARALRLAAWSLMRSKSYLGAYMRRQRSRLGAPKAITATAHKLARIVYNVMRYGLAYNREAEALYAEQVRERQEKQLHRRARELGYTLNKIEAPATPTASAEAPTVVA

SEQ ID NO: 74728 - protein, 406 aa, unidentified
MNAIGIDVSKGKSMISAISVTKEVLIEPQEFSHTEKGLAQIIAVILALKGDVKVVMEATGHYHEAVAQTLHQAGIFVSVVNPLLIHAYGGNSVRRVKTDKKDSLKIARYCLETWAELREYIPQETIRHHLKLFSRQYNLCIKTVHTLENNLSSLLDKSFPGATKFFTSQKKKNGHQKWVDFASSFWHAELVSNMDEAAFVENYCNWCEQNNYKFTKVKAQEIYAASRGHSTTLKNNRECKLLITAAAMQVTALAKTLAQLKSQLICLSSMLPEYPATISMFGVGELTAAQLIAEIGDLRRFHGGRALIAFAGIDPLPKQSGTYEKKSTKTSKRGSAPLRKTLFQIVVTYLRLSPETEAVYQFLSRKRAEGKPYFVYMTAAANKFLRIYYARVKEYLDGLEAEEIDK

SEQ ID NO: 74729 - protein, 464 aa, unidentified
MNGDSKAGSGQEGGRKEEGIAALGRRVAGVDVGSKEHWVCAPVREGEGREVGVFGATTAQLEKMATWLIERRVESVALESTGVYWVAVYEVLEARGLKVLLVDGRALARVPGRPKTDRRDCQWIQRLHSCGLLQGAFRPPEQICMLRTLVRDKGNLVAEQGDWVRRMQKSLEQMNVRVHRAVADLTGATGMALVRAIVKGEREAGELAKLRDPRCHKSEEEIAEQLKGHWREDHLFSLGQALKMYEAIQERIQDYERAILEKLKAMEREECRQQEPPELKNKKKAQTILHRGQEPLRQALYRASGADLTAIDGLGVETVQAVTSEYGTDLSAFPQEKQFVKHVLLAPNRPTSGGKPVKKKQKHGTASSRVAAALRMAALTLRHSQTALGAYYRQIARHKGDDVAVFATARKLATLIYRMLRWGKDYVDEGAEAYENRYREGRLRRLTSLARELGYQLAPLPAKP

SEQ ID NO: 74730 - protein, 347 aa, unidentified
MTESVFAGIDLHSNNVMIGIVDQSGQRLKFQKLECDLQKVDQLLSSFKAQLKNVAVESTYNWYWLVDGLQRAGYPVVLANPAQIDQYSGLKHGDDKSDAFFLAELLRLNILPRGYISNAPLRWLRDLLRRRLSLVRQRSALLLSFKSLYTRTTGQDLELRTVKSMGPLEASKLYEHPANQLIAGIQIEHIGQLSQSIGRIEKVVLKVSQKLPYYEKLTTLPGIGIILGMTITMEVGDISRFADAGHFASYCRTVAAQRFSNEKKKGENNRKCGNKYLAWAFVEGSQFAKRGDKQCRQWYDRKAARCGSIVATKALACKLSKAAWFTMAQNTVYEPQRMFGGGPAVKS

SEQ ID NO: 74731 - protein, 408 aa, unidentified
MQVTFGIDVSKSHSTVCELIGESKNELTITNDRPGFIQLLHELAAFSKHPQIIFEATGVYSRRLQAFLEDYGYEYVILNPLKAKKEMDMGLRHNKIDKTDAYHLALIQRLYCHPVNQSESQTYKQLNALSRFYDQLTSDLVIAKNRLHQALQSTFPEIENLFSIARGKNYWQIVARYPHCDLVRKDDKKQIINWLMKLKGIAFNHAQRTTDKLIELAHLAYPVVSCSDIEVQQAQYYAQRLLNLSNKRESIITKMVKLAKTLPNHDLENLESIPGFAQTTAVRVLAELGDLRRFSNPNKINAFIGIDPGRYQSGETDSNLSITKHGNAVARKLLYRAIGQIDNAAKTNPCHIADYYESKKLSSQTKRFKKIAIASIHKLIRTIYALIINDQPYNYNVATHNQKDFSRN

SEQ ID NO: 74732 - protein, 362 aa, unidentified
MQSQVKTLDFTGQNIYTGIDTHKKNWRVSIYSEELHHKTFHQPPKPEILFRYLAKHFPNGTYYSVYEAGYCGFWIHEQLLFHGINSIVVNPADVPTTDREKKQKSDSVDSNKLARHLRNGDLDAIYIHSRDILEDRSLIRMRSTLVKEITRYKNRIKSDLSFFGIEIPEQYHKDQQYWSNKFIQWISELEFNQESGTDAFRILVNQVKYLRKELLEVNKKIRALSRNEYYRTRAELLISIHGIGLITAMVILTEIDDIHRFSNQEKLTSYVGLTPTSHSSGDNQVHGEMVNRGNKYVKKAIIEAAWVAARVDPVLHMDFVAYSRRMKKNKAIVRIASKLLNRVNFVLKNKVPYNDGAEYDPI

SEQ ID NO: 74733 - protein, 340 aa, unidentified
MNVIIGVDPHKATHTAVALDGNELELGEVQVRANTSQLKRLLAWAAPFEKRTWAVEGAGGCGYLLSQQLVAAGEDVVDVPATLAARVRVLGSGKSNKNDPNDARSIAVAALRAPRLARVRPSDHASVLRLLAKRNSQLSSSRTRTACRLHALLAELLPGGSASKLKANEAERLLATITPATPMQAARHAVALEHLDDLRRLDAQLAESRKRIVEAVAASGTSVTGIVGVGPIVAAMAIGYTGDVRRFATRHRYAAYTGTAPIEISSGPRVIHRLSRRGNRQLNHAMHLAALSQIRYPDTPGRVYFDRKIAEGKTSKEAFRTLKRRVSDAVYHQLLTDAGR

SEQ ID NO: 74734 - protein, 353 aa, unidentified
MDRYIGIDAHSESCTVAVMGPSGKRIRQQVVDTQAKVLIDLLKGVAGDKYVCIEEGQLAEWLVEALGPHVKEIIVMQPKEHHGRKSDADDAWALAEQIRVRAQGTYVFKTTTQYRTLREAVRSYGVAVKEQTRAKNRFRSLLRSRGLSQLDDTIYDPTIRSEWIRKLPTTYRRRAEWLGQQVDTTTEAYELAESWLKEEAKKCTEVQRLKTVPGLGDVRAAQVVALVVTPHRFRKTRQFWSYCGLGIVTRASSEWKRNCSDGRWQHVQGNVQTRGLNLNRQPMLKAVFKGAATIVLARPNPLREHFDRLLANGTSAHLARLTIARRIAAATLAIWKKKEDYEPTKHCSPQEAA

SEQ ID NO: 74735 - protein, 455 aa, unidentified
MYLPDWKWIPIRKGLLLMSNKVIFNLDELFISVGIDVGADFSWMSIALPNQQFVGKPYKILHNSIDSLTTAVSKIKEAEELYSLESRIFLESTGIYHYPLFCYLRDKGFNCSVINPIITKNSTNINIRKVHNDRFDSKKAALVGLKPDLKVSLIPSDLALNCRNLCREYYDLMDNRSAYVNKLQGELRMAFPQYLGIFSKITINTSLTLLETYTSPSAFLEADKQEIIDIIKSTARFGLTYAQNKYNAIIQAATDANQFGYIIDSNIKRIRLYISFIRKYDEEINSILESLHELVDANEDADFVKQIHLIETFKGAGFLSAVSIMGEIGDFSAFSKPKQLFAYFGLDPAVKQSGKFEGTKVQMSKRGSAIARRVIHILTLQSISISRNGEAKNPVLREYYLKKCDSKPKLVAMGAVSHKVCNMIFAILRDNKPFKIIAPQEHIKQYNAAKCDIAA

SEQ ID NO: 74736 - protein, 419 aa, unidentified
MSNVVYRRCCGMDVHKDTIVVCVLPPDGGDGTPARKTYMTFRNDLTRMRVWLKQLKVTEIAMESTGVYWRPVWNVFEDHGFRLLLVNPAQVKALQGRKSDRRDAKRIAEYLQDGRLDPSFVPPHEIRELRQLPRHRLSLLQQRGESHNQIRDLFETANIKLSSVASDLLGLSGRCIIEAMIAGEDSPELLAWKVKGKLRKKEKQVKESLKGCFNEFHRTMLKTHYALYQFLSRQVEELEAEIARRMQPYADRVDALATIPGVEKIAAWHLIAEMGPDMSVFPDADHCASWAGVSPGSCESAGKQLSGRTKKGNKYLRRILTQSAWAASRCKRGYLRAFFHRVKARRGWARAVIAVAHKIVVIAYCILKTGAPYQDLGDDYFDRLHPERTAKRLVHRLERLGLTVCVTPSADLTPGFSES

SEQ ID NO: 74737 - protein, 320 aa, unidentified
MRNTVGLDISKLTFDATAIVGNAEYSAKFDNDSKGLDQFSDRLKSLGCQNLHICMEATGSYYEEVADYFAQYYSVYVVNPLKISKYAESRFKRTKTDKQDAKLIAQYCRSAKESELVKRQKPTDEQYRLLRMTAAYAQIKSECAAMKNRHHAAKDEEAAKAYAEIIKAMNEQLEVLKEKIKEQTEKPNCKEGVKRLETIPAIGRMTAAVLFHHLTSSKFETSNKFAAFAGLSPQQKESGTSVRGKGKLTKFGNRKLRAVLFMPAMVAYRIRAFPDFIKRLEEKKKPKKVIIAALMRKLAVIAYHVHKKGGDYDPSRYKSA

SEQ ID NO: 74738 - protein, 338 aa, unidentified
MTTGLAAGTYELFVGIDIAATTAEVSTQRPGAKAGRSFKIDQTPEGFHRLVHTLQATDNEPSHVLVVMEATGSYWMSLATRLVHEGFRVSVIHPSQAHHFAKALLKRAKTDAIDAQTLAQLAMVLQPEPWMPPPQIYYELQQRLAQRDDLLNLRQQVRNQLHALDQHPEVIASVRTRMERLLVLFQSQIDEVEGEIAAALNQDSAWAAAAERLQSIKGVGWVTAAWTLVTTLNFTTCDTVDALTAYAGLAPMPRQSGSSVWHRPSIGHSGNGRLRTAFYMATLTAARFNPAIKAFYNRLLEAGKPEKVARCDAARKLLHMAWAVVKKDQPFDPNYAQG

SEQ ID NO: 74739 - protein, 348 aa, unidentified
MTVYIGVDFHARQQTISYLTTEDGEIQRLQLDHGQPEEVRRFYQQFAGQRVVVGFESSGRAAWFEELLEELGCEIWIGHATAIRLFARRRQKNDRRDADLILDLLVRGDFPRIHRYSAESRTVLQQLRYRQRLVKMRTMLLNSLVFMAASRGVVLRSQLKTKRGLERLRQLSLPPALREQRDELCQLLLDLKPKIDKVERELAAKAESDIRVRRLRTQYGIGPLTGLCLAHTLERPERFANPRKVTAYVGFDPVEDSSGERRRIGSISKQGSRLLRFLLVEAGQIAVRRDQELARVYKRVLVRRGHAKAKVAIGRRLLVRAFIMLRDEIDYAEFQRRGVAARSSREIA

SEQ ID NO: 74740 - protein, 342 aa, unidentified
MEYYAGIDVSLECSSVCVVDASGKIVRETKVPSEPKALIAWFGSLGFGLERIGLEAGPLSQWLFAAMKKAGLAVELLETRHVRKAFEAMPVKSDRNDARGIAQLMRLGWFRPVHCKSMSAQETRSLLTARKLVQSKLLDVENSLRGILRGFGLKVGKTTGQTFAGRIEELVAGHPHLQTIAKALLAVRAVLRTEFAAFEKQTRRMVRSDTKARLLASVPGVGPIVALTYASAIDDPARFKSSKQTGAHFGLTPKKHQSGETNYTGRISKLGDASVRTALYEAANVMLTKPVKGCSRLKRWAMQIKKRAGMSKAKVALARRLAVIMHRMLADGTPFNPAAAAA

SEQ ID NO: 74741 - protein, 316 aa, unidentified
MSAEGEAIRSNDYRKDTTVKAPSTRPAAVLGLDVGKSSHWACLIDRDGEVLASAPVRNREAELDALFASAPAGTLVVVDQFRNIGSLAVRRARAAGLGVAYLPGLAASRAAGLFAGEAKTDERDAAVIARTALGVPDSLSGVPGRGEALEAARALSSQRDHVVACATRDKNRLRAVLLESCPALEAAVDLSDRRWLELLTVPGIGPRTAAQLAVSVDIGRFPDHDHLASYCGIAPRVRSSGTSVRSVRASRRGDARLKSLLIFSCNSLVRSSGRYGEYYRACRARGMGRGRALKAVARKRLRAIYAVMRDRVPYRE

SEQ ID NO: 74742 - protein, 385 aa, unidentified
MKPNSQMTLGEFFRQCVGIDISKNKFTVCLYMYDRASDVGCCTKSIDFDNTKSGFNQMVRWSRKEAVKGYPLTFLMEPTGVYYERLAYHLHKIGQTVYVVLPNKARKFCESESIKTKTDAMDARCLALMGCASRKLKPWSPPATIYRELRQMTRFHADLCVIRRSVANRMEALDHMEGVSKTVRKHCEKLIEEIDTLTEKNDKDIMRKVAEDKELQARVKRIATARGLGVTTIVCVIAETEGFHLIENRKQLTSYAGLDVKARQSGKEDPKHRISKEGNAHIRAALYMPALVAVRHNRQIREAYGRICQKHPKEKMIGVAAAMRRLLMLIYTLWKNGEEYDEMRDKTHTPRKKVLEPEYGPEDCIGTFQEPVDWGDTNGYGEPPF

SEQ ID NO: 74743 - protein, 392 aa, unidentified
MDNLRYIGLDVHRDTISAAVLDRDGKLIMQSVLPTRAAAILDFLHGIKGTLHVTFEEGIHSAWLYDLLQRRVARLVVCDPRKTALLKSGNKGDLIDARKLAELLRNNSLSPVYHGELSALEVQHRARSYTMLTVDTTRIMSRLKAVFRGQAVSCHGKSVFRPDHRESYLAQLPTTGLRLRAELLYQELDAVHLLRLRAKREMLAECRKHPAMKWLQSVPFLGKVRTAVLIGRVQTPHRFRTKRQFWSYCGLALETYDSAQYHVVHGQVQRKPRPVQVRGLNWNHNHDLKGVFKSAATMAAHREGVFREFYAGLLAKGMRPEMARLTLARKSAATMAAHREGVFREFYAGLLAKGMRPEMARLTLARKIAAITLKIWKEGGTFNAEYVKPQAA

SEQ ID NO: 74744 - protein, 315 aa, unidentified
MSDVPCFVGIDVAKAQLDIAVRPSGERWVVSNDAGGVVTLVERLQALHPTLIVLEATGGLERAATVALATAGLPVVVVNPRQARDFARATGQLAKTDALDARALAHFADVIRPTPRPLPDAQTQELRALLGRRQQLVVMRTAEQNRLAGTSERLTKDIVAHITWLNAAIATLDNDLETILRASPLWRENDDLLQSAKGIGPVCARTLLLELPELGTLTRQQIAALVGVAPLNCDSGTLRGRRMIWGGRAHVRTVLYMGTLVATRFNPQIKVFYERLLAAGKVKKVALTACMHKLLTILNAMLKHRTPWQPQEVQS

SEQ ID NO: 74745 - protein, 405 aa, unidentified
MQVTFGIDVSKSNSTVCELIGESKNELTITNDRPGFIQLLHELAAFSKHPQIIFEATGVYSRRLQAFLEDYGYEYVVLNPLKAKKEMNMGLRYNKTDKTDAYHLALIQRLYRHPVNQSESPTYKQLNALSRFYDQLTSDLVIAKNRLHQALQSTFPEIENLFSIARGKNYWQIVARYPHCDLVRKDDKKQIINWLMKLKGIAFNHAQRTTDKLIELAHLAYPVVSCSDIEVQQAQYYARRLLNLSNQRQRIITKMVKLAKTLPNHDLENLESIPGFAQTTAVRVLAELGDLRRFSNPNKINAFIGIDPGRYQSGEMDSNLSITKHGNAVARKLLYRAIGQIDNAAKTNPCHIADYYESKKLSSQTKGFKKIAIASIHKLIRTIYALIINDQLYDYNVATHNQKRL

SEQ ID NO: 74746 - protein, 429 aa, unidentified
MNCTQNKKIEQVKETTMIVGIDVGSEKHYFRAFNWRGIELTRKPVAFSNSMEGFNSFYNTIVELMQKSELEEALVGIEPTGHYWFDLGQFMGEKDIKFVMVNPHHVHKTKELDDNSPSKNDRKDPRVIAGLVRDGRYFYSYMPTGAYAELRNASNRRFVLVEEQTRAKNRLQKWIAVYFPEYKGIYTHIDAKGGMLVLKKAPTPEEIVRLGVEGIIKIWKDAKLRGNGHKKAILILAAAMRSIGLKAGLTEARMEIQDLIEDYELQTKRLERVNDLIKGLCQQVRYADKLLEIKGIGITTVAGFIAEVGDITRFDSTKELQKLAGLELVADSSGKHNGKTKISKRGRKRLRYLLFEAAISVVGKNEEFKEIHRYYTTREKNPLKKMQSLIVVACKLIRVFHAILTKGIRYDASKMLKDIRHPGEQLKAA

SEQ ID NO: 74747 - protein, 401 aa, unidentified
MYYVGIDISKRSFTVSILDDAGEMVKSPFTFPVNQKGLAKLLDILKGISEDKDKIHVGMEATGSLWENIYSFLEEKGYTLFLINPHQSRKFHELARRKAKTDKVDSVVIAGLLRSGETIRSYVPENDVQSLRELVRLRHSLQKTRKNYQRRALSLLEVVFPEYLQLVKNPFGEVSCMILTRYPTAFHMREAKASHLVKICRRIKGNNYSGELAYRLIEAAKNSIYSGKACRIRGESIRILLEEIKSLKEKIERIDKQIDDILSSKEPPSPEEHLLEIPGVGPKTVATFIGEVGDVARFKQAKELIGFIGFHPTISESGKRKNQHPKMSRKGSPTLRAALYMASISCIKHNRELRALYLKKISQGKKPKQALICVGKKLACIMYSMLKNGTSYDPQRVFTQA

SEQ ID NO: 74748 - protein, 313 aa, unidentified
MINIICGVDVSKARLDACIEPGAIFASFDNDAAGIAELATFCRQHQAGLVVMEATGGYERLAFLSLWEAGMPCGMTNPRSVRRYAEAMGVLEKTDRIDASIIARFAHAKHLQPTPAPTPAQQRLKALVARLRQVTDDLTVQKQRRASLLDNVEILASLDEVIALLKRQSRTLEGEIASMIDDDPLWAQLTEAWRSVKGVAGRTVARLMADVPEIGIYSNKAVAKLVGLAPLADDSGKRKGKRSIRGGRASVRSILFLVARIAAKYDKSLAAFRDRLLAAGKPKMVVRIALAHKLLVRLNAKARDARAQYANAT

SEQ ID NO: 74749 - protein, 377 aa, unidentified
MHSENIAAYVGLDVHKETLAVAIAAPERLGEVRYYGTINNEAQAVRRLFQKLQGLYGNILSCYEAGPCGFGLYHQLTAMNIKCQVIAPSRIPKSPTDRIKNDHRDAISLARLLRAGELTPVWIPDLTHEAMRDLIRARAAAKRDSRVARQRILSMLLRTDKHYAGKHWTGKHRTWLANQSFSQPSQQIAFQHYCQSLEQIEDRILQLDQEISRLLPEWSLCNLVCQLQALKGVSQLTAITLVAELGDFSRFSSPKQLMAFLGLVPGEYSSGNSIRPRGITKVGNSELRRLLYEAAWSYRTPAKVGAWLIYYRPDSVTQYSKDIAWKAQQRLCSRYRSLTAKGKKSQVAITAVARELTGFMWDIALAAQSSFSQQKQN

SEQ ID NO: 74750 - protein, 423 aa, unidentified
MNSPTLCVGADVHLKEITLRAVDKLTAEEVIAPFNVANNLPGAQSAASRLAEVATRLGYTHIEIGYEATGMLWIPFHRFLRTCPLLQPFHLQQVCFNPKLVADFKDALVLRGPKDDDRDAFNVAARVRVGHWPDSYVPDDFWQGVRRLSRYRFKLSRNLSQEKLRFQAYAFLKCSDWKRLKAFSDVFGATSAALLTEFTAAELRQMTHDQLADPIAHRGHGRFYDPDATARTVQRALRTSYPIDDLMDEMVTATLATGWEHIRAINRLMKRLDQHITRYIAPVPNPIITVKGLGPVITAGLLAEIVDVSRFPEHKHMAQYFGISWTKRSSGGFVSQNTRMTKVGNPYGRYYFVIGADKLRQFNLEYKAFYRRKYNEAATHKHKRALVLTARKLVRLVHALLTKNVSYVRPQMPVGLEEDDLLE

SEQ ID NO: 74751 - protein, 494 aa, unidentified
MSNEMIRYVGLDVHKRLVVACLVDQAGNVLQRERFALNRRTLERFATKVLRPTDHVALEATTNCWAVTDVLRPHVARVVVSNPMATKAIAQSKVKTDKVDAHVLAQLLRCDFLPEVWQPDEATRRLRELTGRRSALVGQRTALRNRIHSVLATRLVEAPLRLFNDAGLDWLATVPLDEQARLLVDSDLRQMESLEKEIDLLDDQLAERGYASDAVKLLMTLPGVDLATAQAMLAAWGDMTRFPDGDRAASYLGLVPSTKQSVGPYYHGPITKRGNSHARWMLIEAAQHLDKHAGPLGHFFRRLAKKKTRNVAVVACARKLAVIGWRMLHNREPYRYAIPRSTETKLSRLRVKATGQRRKSGPPQGVKATAKLPGGSRTIKPLGEVCRNEGLPLPHTLSPGEQRTVRATGSTEFVAQIGQAQVVPRRTKPAATPAARQAASQHPASVASAEKSTAVAARQNPAAGARPRVAAKAQTHLRERVARPRMPGGAEVIR

SEQ ID NO: 74752 - protein, 409 aa, unidentified
MDKIYDICCGIDVHKKLIVACLNHKRKKELREFGATTRELMELAEWLQKNECEIVAMESTGSYWKPLYNIMESYGLHAIVVNPAHMKAVPGRKTDVKDAEWIAELLQHGLLQPSYIPSKDQRELRELVQYRKSLVGERTRELNRLQKMLEGANIKLSGTVTNINGKSARKILEYILSGNEIDEKKYDEMYEEKLIAHNLKASKEQILDDLKGFMSPLQRRMLKELLQHLDELNVHIENLNDEIDNFMKPEEKQASQVIQDVTGIGNTSAQTIIAVIGTDMERFPSDRHISSWAGLCPGDNVSAKKRKSGKIRKGNALLKSTLVLCAHAAVRHKSSYFHAQFKRISTHRGKKRAYVAVAHSILIAIYHILKDGVKYQDLGAEYYNQFNAERKIHAYLKKLKALGLSLIHI

SEQ ID NO: 74753 - protein, 344 aa, unidentified
MKKVLIGIDFSKEKFDVAIIVKSTSTQEHALFDNKVSGYRKMIKWVNSVVEDIPCSSWLFCGETTGGYSRMMSDWLYAQGYDVWIENALVIKRTFPLKRLKNDTVDAFMIAEYALRFEDRVQLYEPLSQALTELREIFLYRHHLVRHRCSFEVRRIEKRFTQQKSANKNVISQSARHIITEINKEIAKCDEKIKEYIESDDQLSSIFAIVTSMPGVGTINAVSLMVYTNNFTKFAYNPRKIACYYGIAPFGRDSGTSVHTDPRVGFIANKMLKSLLTQAALASVRTCPQIAKYYQRLIERGKKPMVALNNVKNKMIAIITAMVRTGCMYQPDNICLATQSVNVK

SEQ ID NO: 74754 - protein, 444 aa, unidentified
MLRFVGCDVHKRTAVFSILLEDGTLFASYTVPVTREALTAFAERQLCAADRLAVEATTNTWAVAGVLRPFVREIVISNPLKVRAIAEAKIKTDKVDARALAQLLRCGYLPEVWQPDAETQRLRRLTHRRAALVSDRTRLKNRLHSILHHCLIPLPEFDLFSKKGIAWIREIPLPSEERMARDSDLRLLEQTVLEIAEVEQLLAREAWQDDKVRLVMSIPGIDYTVAQTCLAAIGDISRFSNGKKLAAYLGLNPSTRQSGNHCYHGPITKQGNAHARWLLVQAAQHLGQYRGPLGQTMRKIIQRKNRSVAVVACARKLAVLLWHVLTTGEPFRYALPKSLEAKYARLRVRATKQRRRGGVAKGTPRSARYGKGRARAVPSLPQVLATNGLPQIAPLARGERIMLERKKLDDFYHDLQTPTHIEANTPRAQTEQTQEDVRTQLTQS

SEQ ID NO: 74755 - protein, 429 aa, unidentified
MQESSLSAPAEGVAAYVGMDWADQKHDVILRAASEPAKVEYRRLAQQPEALMEWVAELQQRFAGKGKILVALEQSRGALIYHLMGYEFLELYPINPSQLASFRATFSPGGAKDDRPDAELICELLYCHRDRLKAWKPDDELTRKLTFLNEGRRKAVDQRTQLANEMKSQLKLYFPLALQVLDNDCSTALAADLLLQWPTLDSLQKPSAHKLRKFFYAHNCRQEQKLLERLELIKAAKPLTPDLAVIEPTALRVQLLAQQLKSLLPYIARYEKLIAELFDAHPDSFLFRDLPGAGSALAPRLLAAFGTDRERFEHSMEISSLSGIGPVRRASGKKSGKHATVHFRSACPKFLRQSFHEFAACSIRYCSWAEACYQTQRNRGKGHHAAVRAVAFKWIRILFACWKQRVPYDPQRYQQALQTRGSEYAEITA

SEQ ID NO: 74756 - protein, 430 aa, unidentified
MKSNTQNTKIEAITETTLVLGIDVGSETHYARAFDYRGIEYSKKPFKFSNDEAGFVTFKAWILDIKEKHGKDKVVPGMEPTGHYWFNLGKFLQDNEMKPVLVNPHHVKKSKELDDNNPTKNDRKDPKVIAGLVREGRYMIPYLPEGVYADLRTASNMRFQLQAELTRIQNRISRWFNIYFPEYKTVYGQPDAKSGMLILKVVPLPEDILTLGIDGVNQIWRDAKVRAVGKARAKTLIEAAEHSVGSKEGEISARMEIRMLLEDYESRNTRLQEVVALIEELVKKIPMAEKLLEIKGVGIKTVSGFLAEVGDISRFNNPKELQKLAGLALVENSSGKHKGETTISRRGRKRLRYLLFEVAMSLVSKNPEFRELHSYYITRKLNPLKKMQSLMAVAAKLLRVFFAMLTKGMDYDPKKLVGDTKRPAVYLQVA

SEQ ID NO: 74757 - protein, 346 aa, unidentified
MNQIIRIGMDTSKHFFQLHGVDAAERPVLRRKLRRNEVLAFFAKQPPTVIGMEAGGAGHYWARELGKLGHEVRLIAPQHVKAYVKRNKNDGRDAEALCEAMSRPTMQFVSAKTQEQQAALMLMGVRQQLMTRRTQLSNAIRGYAAEFGVIAAKGLVKVEPLLAQIARDESLPALAREMFVIQGRDYARLQVELKAIEARLIAWHRANADSVRLAKIPGIGPIGATALVMKARHPQLFPSGRHFAAWIGLTPKDHSTAGKTRIGKITRAGDEMLRSVLVSGATSVIQQAMKGRGRSSPWLVALLARKPPKLAAVALANKNARIAWKLLTTGGSYDGALMPVASKQAA

SEQ ID NO: 74758 - protein, 330 aa, unidentified
MSVFVGVDIAAKTFDLVNRKGGKASKVESFSQSPQGHAKAIKRLHNLKPTLITMEATGIYYFDLAVALVQAGLPVAVINPKSFHHFAKLKLAGSKTDGVDAALLAEYGERMEPSLWTPPDEVRLALRDIGRQINRLTGTRTQAKNRLHALQAKNSTRSLLVEDEQEGIAYLDRRIERLSQAALALIAECETLSRYLTHMCAAKGVGKATALIVLAELCVLPSSLKAPQVSRFAGLDVRLTQSGSSVNRPARLSKAGNAYLRAALYMPAMSAVQHDPRGKAFYDALVSRGKKKIQALCAVMRKYLTGLWACIQTETAFDSAMLFSEEHLKA

SEQ ID NO: 74759 - protein, 348 aa, unidentified
MKNIIIGIDFSKETFDATVLDLSKTNGVLSASIDGMHQKFQNGKLGFRQLLRWVKTSTRQRPSKDWMFCGEQTGKYSHGLCDFLSSNGLDMWCEAPLRIKRCMGIARSKNDSLDSLRIAEYAYRYQDKMSAYKPVSKAIAQLKELFLARLKFVEQRKALFVRNNTCTEYSRGSEAEKTVAMLSRKLIEQYDECIKKIEEEMQALIDSDEEILETFENISSIKGISLINASAFIIYTNNFKDFGADPRRIASYWGVAVFAQDSGTSVHHPARTSPMCSKMLKSLLSEAAVAARMYNPEIKRYYNRLIAKGKHKGVALNNVKNKLVHIITALAVNKTKYMEGYESFRKAS

SEQ ID NO: 74760 - protein, 397 aa, unidentified
MVFMKLVGIDIGKHKHFVSIVDKLTDEIILQPVAFSNNAQGFEFLISQIALYPVDSVLIGMEDTGHYHFALLRFLLQKNYSVALINPKTTDLNRRMDGGITKNDKLDTLNICDILSSNKLKKPYRLTSSKKFDLYEQKQLTRLHHSLKEQINVLSNRLQKCIDLVFPEYNALFKSKYGKVYMSILKQFGSAKAIAQADIRTLRKCFDITGRGNRISLTAEKLKESAKTSVGISSLADEMQIKHLIAHIELLNDQLKEIDKKIEEFSTDLNSPIISVPGISHFSGTSILAEYGDIFNYSKPSKIIKVAGVAPFHYESSQYEAKHSAITKQGSSYLRKTLYQIIVPVIRYNKVFKDYYDLKRSQGKSHRCAQGHCIRKLLRVIYHLVTTNQQFGASLLR

SEQ ID NO: 74761 - protein, 361 aa, unidentified
MTHPATAAPTREVTGGIDTHGDTHTAAALDATGRLLGHHQFPATPTGYTALLDWLRTFGPVVLVGVEGTGAYGAGLTHYLRGAGITLVEVDRPDRSTRRQHGKSDPIDAQAAAHAAQSGRATGVPKHRDGQVEATRVLRIARRSAVDQRAHTQTRIKSLIITAPEPLRAQLRALSDRELITHCASHRPAPASAADPATDPATALLIALRSLARRHQHLTTEIAELDSLITPLVAAINPALVALLGVGTDTAAQLLVTAGENPHRLHSEAAFAMLCGVAPLPASSGRTHRHRLNRGGDRQANAAIYRIVLCRLRWDPRTRAYAHRRTTQGLSKKEIIRCLKRYIIREIYAALLTQHDLHTAG

SEQ ID NO: 74762 - protein, 347 aa, unidentified
MRFVGIDIGKAKCRAAIMDPGGIILEEFTFTNNHEGIDDLASRLNMHDRVVMESTGSVWTNLYNRLDEWHIPVALANPLKTKAIASAKIKSDRVDARILAHLLRSNLVAECYVPPKHLREIRTLVRHRVGIVKIRTMVKNEVHALIDKHGLAHEFSDLFGKGGLEWLRSLELPALDKLILITHLTHLESLNQQTERVDEEIHSKACEDEDVRLLLSMTGVDVYTALLIKSEIGSIDRFPDYKRLVSWAGLAPSLHQSGSVEYHGSITKQGSRMLRWIIVEAARVAVNHDAKMRSFYERVKHRRGDQKAIIAVANKMLKIIWFMLTRREPYQSRNERRYQQKLNSITD

SEQ ID NO: 74763 - protein, 371 aa, unidentified
MQDYREAFVGIDVAKLKNAVAVADGGRNGEIRYFGEVESSDASMRRAIQRIASRFDHVYFCYEAGPTGYGLYRLIRSLGYDCLVVAPSLIPRKPGDRVKTNRRDSLSLARLLRAGELTAVWVPDEGHEAMRDLVRARAAAVETLRVHRQQISAFMLKHGRIYPRKKGWTMRYLRWLQEQKFEHPAHQIALQEMVEAVRISKERVERLERVIEEFVPEWSLAPVVRALQTLRGVDLIVAVTFTTEVGDVRRFESPRQLMGYLGLVPGERSTGETVRQSGITKAGNGRVRHMLVESAWTYRHPPRVGKVKLYRLEQAPQAVREIAWKAQSRLTARYRMLIGRGKRTTVVCTAIARELVGFMWAVAREAQPRLQ

SEQ ID NO: 74764 - protein, 342 aa, unidentified
MNYYAGIDVSLECSSVCVVDASGKIVRERKVASEPEALIAWFVSLGLKLERIGLEAGPWSQWLFVQMRQAGLAVELLETRHVRNAFKTMPVKTDRKDARGIARLVQLGWFRPVHCKSMEAQETRAVLTARKLVQSKLQDVENSLRGILRGFGLKIGKTTGRTFASRVRELVAGHPSLGKIAESLLAVRDVLEREFKGFEKQVRAMARADARARLMMSAPGVGVIVSLTYVSGIDDPARFRSSKAVGPHFGLTPKKYQSGEIDVSGRISKIGDASVRTALYEAANAILTKPIKGCALKSWAARLAKRAGMNKAKVALARKLAVIMHRMLVDQRPFDFTRAAAQ

SEQ ID NO: 74765 - protein, 433 aa, unidentified
MAVQSLHSPHYHFGGGFAVKVVFPTCCGVDVHKTFVVATIITTPADSLQPHYQKKRFSTFNSDLNRFADWLLEHNCLDVCMESTGKYWVPVFNILEKRGIRVVIANPKWVKAVKGNKDDTKDSKWIGDLFRIGLVKSSFIPELNIRILREFLRYRYKLVSMKSSEKNRFQNAFTVCNVALDSVVSDMFGKSATAITDYLTSDESFDPDHCVSLLQRSLKKKAEKVLESIEGYSISDEQKARIKIIREHYDFIEKLIAKVDTCVNEMVEKYEGEINLLCTIPGIDRNSAITIISEIGTDMSQFGSSKRLCCWAGLTPGNNESAGKKKSVRISRAGVYLKPALVQVAHAAVKDKANPYYALKYERIAKRRGKKRAIIAIARMILTAIYTMLCTGEVWTPVDLFKIDIPEHLKEQQLAKAIKQATRFLEKQGLTVA

SEQ ID NO: 74766 - protein, 433 aa, unidentified
MSLLNHERRIVHMKVVYPVCCGIDVHKRFLVATIVSVTKMQTLSYKRERFSTFNKNLQRLKHWLIENGCYDVCMESTGKYWVPVLNVLEPEMHVVIANPKWVRAVQGHKDDAKDSKWIAELFCFGLVKGSFIPSKDIRILREFTRYRAKLTNMRSSEKNRFQNGFTVCNIALDAVVSDMFGTSAQRITKYLLTDKEPTAQHCSSLLHRSLKKKAVAVVESIEGFQLTEEQKFRMLQIRQHMEYLNAAIQVLDEKLDQMAAPYAAAIRLFCTIPGMGRESALTILSEIGTDMTQFGSSKRLCSWAGLPPGNNQSAGKKKSVRITRAGVYIKPMLVQVAHAAVKCTSQPYYKVKYENIARRRGKKRAIIAIARMILTAIYHMFKTGEVFCPTDLRQIDMPEELKEKRRSRKIQNAIHLLKQQGILSETFVAPTCA

SEQ ID NO: 74767 - protein, 338 aa, unidentified
MSHDPIYVGLDYHQKSIQVCVLDAHGKVLLNRSCENSSAAIKTIIDRFDSAQVWVAIEACCGSADLADELVDQFGWCVSLAHPGYVSRMKQSPDKTDFSDARLLADLLRVGYLPKVWLAPEYIRELRRLVRYREQQAAAKKATKLRCGALLREQRLRCPHARPWTVAWLDWLRNTPELSEQGRWVMDQHLADLEHMQTKLAGVEARMRERCGDDSLIAFLMTIPGIGFLTAITIRAEIGRFDRFVSGKQLSRFCGLSPRNASSGERQADAGMIKAGRPQLRVVLIEAAHRLARYEPRWKDMATRLRRKGKPGSVVAAAIANRWMRWLFHQVQTPHLAA

SEQ ID NO: 74768 - protein, 334 aa, unidentified
MRQVSQVGVDVDSEKLVCMMQRVGQRMPLTTFANTAAGHKKFIRWATKRARSARVCLEATGIYSLQFALALHDAKSVEVMVVNPRAIKDFARACMQRAKTDAVDAGGILEYLERMPFTAWQPPAPEILQLQAINRRIVQLQTELTREKNRGHASEFAGASGNAVANDIEVNIRHLERRIERMHDSGLQLVHGVPALATKLAHLVSAKGIGEASAMRLLAEVLVLPVDLAAPQWVAHAGLDPRPYESGTSIHRPRRITKVGNRHLRAALYMPALVAIQHEPNVKAFYNKLVAAGKKPMQAVVAVMRKLLHAIWGMLKHDQDFDGNKFFRLAEKTA

SEQ ID NO: 74769 - protein, 351 aa, unidentified
MSLAEDAELIIGVDTRMDTHTAAVCDARGRAVSQLQVPATTAGYVQLLTWVRAAAGDRQVIWAVEGTRHYGLGLARHLASHGQQVSETGCSRHIGKRRAGKSDPIDAVRAAREPLARPWPAQMRADGDREALRLLMIDRDNAVQSAKTARTALAAVLVTAPAPLREQLRPLPRERRAKECAALTCPAGADRQTRVLHQALIRLGQRIAALAGEAAGLEAQITQIVEDMAPGLVAAEPGLGALSAAQILLSWSHAGRIHSEAAFGMLSGTAPVPVSSGRTDRHRPSRLGDRQLNRAIHVIAVTRMRCHPATIAYVQRRRAEGKTDKEIRRCIKRYLARHLYRTLSNGIPSNA

SEQ ID NO: 74770 - protein, 371 aa, unidentified
METGEGRFVGIDLAKKTYVARIESNGEGPAVILTGKNDAKGYAKLCKTLSSADRIAIEAGALGFWMARLLKEKVGCEVYVLNPGQLAIIYKSTKKTDLEDAAKLAWILRRFPPAELPVVPLPSPGEERQRQIVSELHFQKKIRTKLVNRLHSVFVRVGKTDVVKKDLETSNLRKETVKHLSGRELVEANRLTKQIDLVERQINETERDASGALVEDEKTKLLLTVPGVGEITAMAFLAYIGDGSRFACASQVSNYVGMTPRVYASGETVRLGRISKRGCSAIRSIIVQSAWAAVRAKNNRFRMKYDELKDRIGKKKAIVAIARRMIEVMWIVVRKNEQFRDYDEKSYKRKLRILYKKAQDGKTTQETKKAS

SEQ ID NO: 74771 - protein, 370 aa, unidentified
MGEPTTLFVGLDVHKESMAVAHASADPASEVVYVGQVGTREADLDKLLRRLHSHASRLVVAYEAGPCGYGLYRTLTHKSISCLVVAPSLIPKKPGERVKSDRRDAVQLARLLRSGDLTSVYVPTVEDEAVRDLSRAREASIGVLKDAKLRLKSFLLRHGLHYSGRATWNEAHLRYLAKVVCPTPAQQIVFQESLRAVSEQTERVSRLEDELIDIAATWRLHPIVDAFQAMRGVQHHTAVTLAAELGDLTRFDSPRQLAAFVGLIPSEYSSGESRRLGPITKAGNGHARRALVEAAWAYRYPAKVSAHLQQRLERCPTPIQNIAWKAQVRLCKRYRRMVARGKNPNVVVTAIAREILAFLWAIAREVPIGA

SEQ ID NO: 74772 - protein, 322 aa, unidentified
MSQPGSLCVDIDVSKAILDIAASSAIEQFSVGNDSDGFDAIIAELRMYAIALVLMKATGGLETAIVCALQAEGFELAVVNPRQARDFARAMGYLAKTDSIDARVLSQMAEVLNRHPERERFIRALPDTECQVLTAMVVRRRQLITMLVAERNRLHPAHPLNRKSINIIIKALEDELARLDADMNSHIHSHFKELAKRLSSIKGVGPMTAAALLAEVPEQGNLSRREISVLVGMVPVNRDSGTMRGRRTIFGGRAGVRTALYMAALVATRFNPVIKVFYMRLLAAGKPKKVALVTCIRKLLTILNAMLRKNEEWNESYHHVAP

SEQ ID NO: 74773 - protein, 423 aa, unidentified
MAYRIAGIDVHKKKLAVVVADVEVEEEYEFEGRWYGSVPQPLQLLCEWLIEQQVDEVVMESTAQYWKPVWGALERWWKPICEKREGAGRMSGSLHLAQALSNRGRRGRKRDFRDAERLVKRLVSQELNLSFVPDTEQRLWRTLTHTRYQRTREKVRLQNQLEALLEEAHMKLSSLVSDLLGASARRMLKALAEGETDPAALATLGDRRLRATPAELHDALGACTELNPVYRRLVKMTLEELHLIEEQIGQIDEDVASLLREHQDAVQRLAEVPGLGVNSAQMIIAEVGAKAAAFASAKHLSSWVGASPGEEESAGVNRSKRSPKGNRQMRRVLNQAANAAAKHKGSIFEIVYRRLVLRLGHYKTIAAIAHRLCQLVWIILHKGVRYEERGPAVREKSKRARTVRMIRTLRTLGYRVEPLENPA

SEQ ID NO: 74774 - protein, 361 aa, unidentified
MTGTMTSAGLDVHARSIDAAAICVATGELTRRRFGAAPGSVIGWLKALPGPVHCCYEAGPTGFGLQRAAAAAGIRMDVVAPSKTPRAAGDRVKTDRKDAELLARLLIAGQLTAVRVPDARMEARRELFRCHEQARGDLQRARHRTSKMLLRHGRVWSEGGTWTQRHRAWLARQRFEHVESELAFADYLATVDAAAARKLALAERLSRLAQEEDLWPTISRLRAFRGIDTLTALGLHLELGGDWARFARPAQLSAWLGLIPSLHQSGESSAQGAITKTGSLYARRLLVESAWHYRRAPYLGPTLAARQEGVPEAVLQGSWRAQRRLHRVVGQLKARGKPANVATVAVARELAGFLWAAAVAD

SEQ ID NO: 74775 - protein, 342 aa, unidentified
MKPEMSVLGIDIAKRVFHAVGMDDKGKVVFRKRLSRHDLMPYIAKLPPVLIGMEACGGAHYWARRFRAHGHEVKLMAPQFVKPYVKSNKNDARDAEGISEAVTRPTMRFVPIKDVAQQDLQALHRVRERLMGARTALVNEVHGLLHEYGIVIPKGVAKFRQAVVGKLESEKDKLTPLSQAMFWKLVVEEFAALEAQLAYYQEKLDTLAATHPECQRLMTIPGIGPLTATALVAAVSDASAFKNGRQFAAWLGLVPRQYSTGGKERLLGISKRGDSYLRKLLIHGARATLRWVGRKTDRRSQWIRQLVERRGKNRTAVAIANKNARIVWALLTSHQAYEPAKG

SEQ ID NO: 74776 - protein, 331 aa, unidentified
MNYSHFVGLDVGKKTFDASLMSADEKELSHKSFDNTPEGIQSLLDWIAGYHLSLSKLLFCAENMGSYVTELSVSSVSMGFSLALVCPLTIKKSIGLQRGKNDRIDAKRIANYAVLHYRKLELYKLPDKDLVRLRGWIIIRDNLVKQKVSSIKLLETFSQMAKLANVTEAISFLEEQLKSIKEKILKVEEDMEQLIAVSTSLYTNYLLLRSIKGIGIINAIVLLCVTDNFQRFDNPRKFACYCGVAPFEHTSGISIRGKTQTSSLANKEVKVYLTRAAITAISWDPQMKAYYKRKIAEGKHKASVINAVRAKIIARSFAVIRRQTPFVTLAV

SEQ ID NO: 74777 - protein, 400 aa, unidentified
MVDIDAVGVFLGLDVGKQTHHGHGLTPAGKKVFDKQLPNSEPKLRAVLDKLTAKFGTVLVVVDQPASIGALPLTVARDAGCQVAYLPGLAMRRIADLYPGEAKTDAKDAAVIADAARTMPHTLRTLDLTDEVTAELTMLVGFDQDLAGEANRTSNRIRGLLTQFHPSLERVLGPRLDHPAITWLLERHGSPQALRKAGRRKLVEVVRPRAPRMAERLIDDIFTALDEQTVVVPGTGTLDVIVPSLAKSLAAVHEQRRALEARIEALLEAHPLSQVLTSMPGIGVRTAAVLLTTVGDGSSFPTAAHLASYAGLAPATRQSGTSIHGEHAPRGGNRQLKRAMFLSAFAALHDPASRSYYDRCRARGKTHTQALLRLARHRISVLFAMLRDGTFYQPRSPRPA

SEQ ID NO: 74778 - protein, 343 aa, unidentified
MQIVGCDFHPGFQQIAVLNTETGEIEERRLGHSDGEAEQFYRQLEAPALIGMEAVGNSLWFEQLVVRLGHRLWIGDAAKIRASYVRKQKTDRRDAGHILRLLMEDRFPRIWVPSAQQRDQRQLLLHRHRLVGMRTRIKTELQHLALNQGMQKKRRLWSVRGRADFKNLSLAGWTARRREDLLCLLATLEGQVEKLDAAVAEAAQGDEQARLLMSQPGVGPNTALAFVVTLGDVGRFQRGKQVASYLGLIPSERSSGSKRRLGAISKQGNVFLRTLLVEAAQSACRCDEQFRKEYRHRCHHKSKGVAKVAAARKLAVRLYWMLRTQRPYGPVPTGGSPSHPVVG

SEQ ID NO: 74779 - protein, 397 aa, unidentified
MYIVGIDIAKRKHEAAVIDGEGTVIIKPFSFTNNCSGYNRLLAMLTKAKLPLDEVSFAMEATGHYWLALFTRLQKEGFRVQVINPVQTNSIRSFYIRQAKTDPRDALLIAEVIRFGHFSESTLHPENIYELRELCRGRHAIVSMQADVKRKVVALLDQVFPEYETAFTNLFGDTSMAILQTCPTPKELSETPLEELCHLIEVSSHKRFRMAKAQELQALARNSFGFAMAGDVFSTMIRLYAKHLDFLKQQVREMDRKIAEIMETLDTPITTITGIGPTLGAYILSEIGDISRFSSAAKLAAYAGIDPTMRQSGEYNGVRNRMSKRGSPYLRHAIWLAASSAVLHDPALKLYFQKKRDEGKPYMASVGHACRKMVSIIYAVMRDNKAYTPYIPNEISA

SEQ ID NO: 74780 - protein, 375 aa, unidentified
MREKVRFLGLDVHAETIAVAIAEPEGEVRSLGTIPNREDSLRKMIKKLGPPDKLRVCYEAGPTGYVIYWQLAELGVKCEVIAPTLVPVKSGDRVKTDRRDAEKLARCYRAGDLTAVWVPDEGSEALRDLVRAREAAKQDQLRARHRLSKFLLRSGQRPPSGVRSWTRAYLIWVAQLRFTQMAQEATRLDYLHEVEHMRERVERLELAITEAVKLASPALQQVINDLQALRGIADISAVTIAAELGQVSRFDSARQLMGYCGAVPSESSSGKRTRRGSITKTGNAHLRRIVVEAAWSYHRPPGIWYGLRKRQESISEEAKEIAWKAQHRLHKRYLRLAAAGKDKRKITTAVARELLGFIWAIGTRAETEVRQRIAA

SEQ ID NO: 74781 - protein, 357 aa, unidentified
MRILALDVGKSKSVAYQVNTRTGVCGFRTVLTRPAVLGRLFARSRPHRLVMEVGPMAGWIGDLARSSGVRQVEVANVAHEAWRWRNVKRKTDRDDAVKLADLSMSGRLPTVHVPAAATRQWRGLIGYRVKLVERRTAVKNRIRALLASAGETMPRGPSGWSQRTLAYLGALSGPLTEVGPQDLWRGELALELDALGRFEEQIGTVEARLETLAAGDRRVGQVQTIPGVGPRLAEHLVALIDDPHRFCSGREVSAYVGLVPRQYQSGETERHGRITRRGNRLARRLLVEVAWQAVRYNPRLRAIYERVHRGSRPRRKVAIVAVARHLAVMAWAMLRDGTTWQAGHGNVPTQAAAGSSR

SEQ ID NO: 74782 - protein, 354 aa, unidentified
MTSTKYIGLDVHKESISIAVLNFAGKVVMECVIETKASTILQFIHGLRGDVHLTFEEGTWAGWLYDLLKPHVTELVVCNPRKNALLKEGSKSDRIDAHKLAELLYMSKLSSVYHGEHGLRMLKELSRSYLTISKDLGRVMNRLKALYRSWAIPCAGTQVYAPHYRSEWLSKIREAGVRRRAELYYQQLDALRLVRQQARKELLAEARKHRATKLLRQIPGIGPLRAAHLVALMQTPHRFRTKRQLWNYSGLGLETHDSAQYRVVEGQLQRSKKPVTLRGLNDNHNHDLKDIFKGAAMRASTAAGPLHDFYEALLAKGRKPTMARLTLARKIAAITLIVWKKEVRFDANYLKQQA

SEQ ID NO: 74783 - protein, 410 aa, unidentified
MSLVGALFFVGVDWAAKTHAVCVLDPAGRPVAAFPVAHTAAGFTGLIRRLAKLGTPGDVPVAIERPDGRLVDALLAAGHPVVPVKPNAIKTWREGEVISGAKSDPGDAHVIAEYLRLRAHRLRAATPLTEHTTALRIVSRTRSELVEARVAATNQLSALLDTHWPGAKEVFADVESPISLAFLTRYPAPAHAAALGEKRMAAFLTKHGYSGRRSATELLTRLRTAPAGTTSAVIAEALRDAVLAMVAVLTTLNTAIKDLDRSAAAHLYEHPDGEIFTSLPRAGLVNAAQIRAELAEHSAYTGPEAIAALAGLVPVTRASGKHHAVSFRWACNKRLRVAITTFADNSRHASPWAAGIYQRARASGKDHPHAVRILARSWVRVIWRRWIDQQPYDPTRHGGAAQLLDHTTAA

SEQ ID NO: 74784 - protein, 320 aa, unidentified
MLSFCGIDVSKDRLDVMVLPDEYSSSVPNDPAGWAILVEQLRGFSITAIGIEASGGYERGAVRSLQAAGMPVRQVNPFKLRQFAKASGVLAKNDPLDARMIASFVGIMPTRPAQRTTPAAEQLVEMLAVRRQLSAEKTAAENASRLLEDLMLQRLSRRRIARLAADIELLDKRLLEIVATDATLAHRYRLLTSMPGVGPVLACTLIALLPELGGMSRKQVAALVGVAPYAFESGTLKGRRSIWGGRANVRQVLYMAAMSASNWNPMLKLFHDRLKGAGKLPKVVIVAVMRKMITTLNAMVRDDIAWADRLSGRHSVTTAR

SEQ ID NO: 74785 - protein, 423 aa, unidentified
MEVMHCRVAGLDVHKETVVACVRVMAGRRPTRECRTFTTPTQGLLELLGWLTASRVTHVAMEATGVYWTPVWKILSEGDFTLIVANAAHIKQVPGRKTDMNDAMWIADLLACGLLKASFVPPEEIQELRSLMRTRKQLVREQTRHVQRIEKTLEEANIKLGAVLSDLMGVSGRRMIEAMIAGERDPHRLAALAERSVKASPKALHDALHGRLREHHRFLLQLHLRQWDALDAAIRQIDEQVAGHIARVDQEAADGQPPFGELIARLCAIPGVSFLSATAILAEIGRDMSRFATAGHLIAWAGLCPGQNESAGKRKSSRLRKGAPWLKTMLVQCAWAAKRAKHSYYSAQFHRLCGRRGPQKAICAVAASILTAIYHMVRSGASHRDLGADYFDRRTPQARAKRLVAQLAKLGFAAQLQPLAVAA

SEQ ID NO: 74786 - protein, 420 aa, unidentified
MARLKIVYPICCGMDVHRDFLVACIASTNSKGVTEYCTKRFSTYSGELRDLRAWLASNNCRDVCMESTGKYWFPVHNILESTCHIVVTHPKFVKAIKGKKTDKKDAMWIADLFKHDLVRGSFIPPEDIRQLRDLCRYWVKLTQYITGEKNRAQNCLTVSNFKLDSVFSDVFGKSASAIVSHMLEHPGETFDVAPFVNRRCKTPIEEIQAAADGSFSPFQAEKLKVIRKHMDDLAHCKAALEKQIYALALPYTHLIELLLTAPGISEPMTAIRIIAEIGADMSVFESSKHLCSWAGLTPQNNESAGKKKTTRIGKAGQYIKPLLIQCALAASNPRSAKYPEVLSKYQQLKKRRGAKKARVAIARRLLTAIYQMLVKNEPYSPYVAPAAPAAPKERVLTAREALAFLRSKGFVITEDQPSSA

SEQ ID NO: 74787 - protein, 358 aa, unidentified
MQSKSKEIDFKGVNIYSGIDTHLKNWRVTVMVEDTCYKTFSMNPKAKELSVYLRKHFPGGNYYSAYEAGFCGYSIHRLLVNEGIQNIIVNPADIPTTDKERRQKEDSRDSRKIARSLSNGELEGIYIPSQETEELRSLVRYRKSLVKDIGRNKSRIKSFLYRHGIEVPLELDTASKYWSSNFTIWLRTVQLSTDFGHTVIHNMLDTVTLLRAKLLEVQKELRRIAKQEGYSQQVQWLTGIPGIGLITAMTLLSELESILRFKSLDKLCSYIGLVPATNSSSDTERVGSITPRSNQYLRGIIIESAWIAIRNDPALTLAYNNLCKRMKPNKAIIRIAKKLLNRIRYVLKNQTKYEYAIV

SEQ ID NO: 74788 - protein, 351 aa, unidentified
MTIVANTYTHVIGIDTHARTHTLTVIAAATAARGATAAFPTTARGLSRAGSWIARHGSHLATLVVIEGAGSYGAVLARVVRQAGYRVVEPLPIPKSLRAGRGKSDPIDAALIASSVLHADVGELRNPRDDQGVRAAVTVLLAGRELLTRHRSASVNALTALVRLHDLGIDARGPLKDPQIATIAAWRDRTEDIATATARAEARRLARAIIQAKEDLADNHDQLHALVLASPAAVLLDEVGIGTVNAATILTAWSHPGRIHSEAAFASLAGACPIPASSGNRTHHRLNRGGDRRLNRALHSIVLTRKRHDPATRDYVARRTAEGLGRRAIDRSLKRYLARHLYRALEHPSAY

SEQ ID NO: 74789 - protein, 367 aa, unidentified
MKKVSTAVVKAAKNFSQQKLTIGLDLGDRSSWYCLLDEVGEVLLEQKLSTTPKAMREVFGSMPRCRIALETGMHSPWVSRLLSELGHEVIVAHARNVRLIGESRKKDDRLDARTLARLARIDPQLLCPVKHRSAKAQADLTVIRARAGLVRSRTALINTARGLTKSYGERLRGCNPRNMNPEKAQGLSPELQAALEPLLAAIEALSERIYEYNQQIEKIAKESYPQAARLEQVKGVGTLIALTFLLTLEDPQRFRKSRDVGCYVGLQPGRRNSGQSEPQMHISKEGDPYLRTLLVQGAHHILGPFGADSDLRRWGLKLAERGGKNGKKRAVIATARKLAVLLHRLWVSGEAYEPLRNSHQAAMPAAA

SEQ ID NO: 74790 - protein, 345 aa, unidentified
MKIVGCDLHTRYQQIAMLDAETGELVERRLEHESGEARAFYAGLAGPVRVGIEATGHTRWFERMLGELGQELWIGDAAQIRASVVRKQKTDARDAAHLLDLLLSDRFPRIWRPSLEERDLRQLVWHRQKLVWMRNAVGNQLHALAMGEGVCRKKKLFTKKGRVELEGLKLGPWASYRRQELLTMMDQLDASLKELDQGVAKQAEQNQAALLLMTHPGVGPVTSLAFVLTLGPVERFGRSKQVVSYLGLNPREHSSGGRQRLGAISKQGNPMMRSLLVEAGHTAARLDSELRQDYQRLKLRRGSGVAKVAIARKLAVRMYWMLRSPASYAQLVRMQGSPRGTLVGQ

SEQ ID NO: 74791 - protein, 359 aa, unidentified
MDSINGSKRRVVGGVDTHKDLHVAAVVDEQDHVLGTGCFATTRQGYRQMLSWMRSFGDLRRIGVESTGSYGAGLLRFMQAAGVEVLEVTTPDKHDRRRRGKNDDLDAQNAAHAAFAGKRTVTPRSRDAMVESLRVLTVCRKTAVAARRVALQMIQTTIVSAPDGLRDTLRSMTRMQLVRTLAAWRPDLTAYRDVEAAYRLSLKSLTRRYLELHDEIADLDTMIGAIVEDLAPELIARKSVGHNGAAQLLLTAGDNPERLRSEASFAALCGVSPVPASSGKTIRHRLNRGGDRAANSALHIIAIGRIRTDPATKAYVAKRVTEGNSKLDAIRALKRYIAREVFHIITKRHREINQSRIAA

SEQ ID NO: 74792 - protein, 339 aa, unidentified
MGDRKCYVVELNGARKVSFKLTVATTRDAFTKHFERERIRIVLEVGTHSRWISSLLRDLGHDVLVIDPRRIPRNASEDKSDWKDAEHLGRVAQAMPELLYPVQHRSDEAHADLSVIKAREALVAVRTKLINTIRGMVKSTGERLPSGDAAYFATKVAGAIPVRLAPACAPLVRQIAATNAEIKCLDKEIKRLAKAKYPETAILQQVTGIAELTSLAFVLTIGDPHRFTKSRDVGSYLGLRPRLHKSCSIDPQLPITKQGNAMMRRLLVLAAHCLLRKNCKTDNALRRWGLVYCERGGKNAKKRAVVAVARKLAVLLHRMWITGEVWEPLRNTPDQTTAA

SEQ ID NO: 74793 - protein, 406 aa, unidentified
MDIIIDKGCGLDVHKETVVACVMGSGIKKEIRTFSAMTGDLLRMKGWLTDLGITHVAMESTGPYWKPVFNILEDSFEVILANARHIKNVPGRKTDVKDSEWICKLLRSGLITASFVPPQAIRDLRDLTRYRQKLIQAASAEKNRIQKVLEDANVKLSSVVSDTFGVSASRMIKAIMSGNFDTDSLAELAVGRLKGKKEKLKEALQGHFRDHHGFMIQASLDHIASLEKIIADLDRQINEKLKDYHRERELLASIPGVKEQGSSSILAEIGAAMNVFPSEGHLSAWAGMSPGNNESAGKKKSGKTTHGNKNLRSILTQCAWVATKMKNTYLSAKYYSLVGRRGKKRALIAVGHKILIMSYQILKTGIPYKELGHDYLSRRKEDKIVKGHIKRLKDLGYQVELKKATA

SEQ ID NO: 74794 - protein, 353 aa, unidentified
MHTHQKSSDPIASIGLDIGKNTFHLVGLDKRGAIAMRIKVSRHQLVRRLVNLPRCLIGLEAGSGSHHIARQINPLGHDVRLIPAQYVKPFLKGHKNDYRDAEAIAEAVQRPTMNFVAIKTPEQSDLLSLHRVRSRLVRHRTAIINQIRGFLIERGITVRQGPGPLRKVLPEVLSSPPQALSPRILRLIAELDQDWRYLDDRLEALSAEILSLSENDPACQRLMTVPGIGPIISSAVVASIGIGSGFKQGRDFAAWLGLVPKQESTGGRTKLGRISKRGNKYLRTLFVQAAHVVLQRRPATAMRVLWPWIEQASRRLAHRNLLAIALANKLARIAWAVLARGRHYDPRITPNAA

SEQ ID NO: 74795 - protein, 419 aa, unidentified
MLRIVHRNCAGMDVHKKFIAVCIATTDFKGVTTYRKRRFDTFNSDLKACRDWLLRHKCSEVCMESTGKYWIPVFNVLEGHLHVIVANPKYVRAIKGQKADDKDAMWIADLFKFDIVPSSYIPIKEIRKLRELFRYRYKLVNERSSEKMRLQNSLTVSNIALGSVLSDTFGKSASAIIEYLLSGQGFDPEYCKSLLLRRAKDKADDVVASIIGYEISNDQALKMKLCREHTDYLDATIGKLDDAITELSRPYDDLVQLASDVPGITENSARYIIAEIGADMTVFKSAKHLCSWAGLTPQSNESAGKKKSCRISRAGVYLKPLLVQCALAAIKDKKNTYFRTKYDRIKKRRGHKRAIIAVARMLLTCLYHMFLKKEAFQPSDIHYEELPEQLLRKRKEQYIQQAIKLLEKEGMTVLPPAVA

SEQ ID NO: 74796 - protein, 370 aa, unidentified
MKTQAWIGLDVHKNSVTVALVESGAEGEKFTQKMPNSPHQLVQLMRKLQREYDLRVCYEAGPCGYSLYRKFAAAGIPCTVVAPSLIPVDLKKVKTDRLDAVKLAKYHRSGLLTAVNVPDARLENDRDLVRLRFSQVKELTRIKQQILAFLLRKGMESPAHTGWSGRFENWLATVDLGDAQERALLHRYLNHYNYQKRFILELTGEIGELAGSERYAPMVAILRGFRGIETVTAMTILTHLADFRAFPGPRKLMSYIGLTPGEYSSGDSRKNRGITKTGNNLLRRAFVSIGQHYSTADKVSAQLRLRRDQLSAPILAVVQRADRRCRKRYFALRAKGKHNNTVKTAVAREVIAFVWEAMMHHYGGQMRAVV

SEQ ID NO: 74797 - protein, 359 aa, unidentified
MDIRDQAKRHVVGGVDTHKDLHVAAVVDERDRVLGSQSFATTRQGYRQMLAWMGSFGEVQRIGIESTGSYGAGLLRFVQTVGIEVLEVTTPDRHDRRRRGKNDDLDAQNAAHAAFAGQRTVTPRRRDGLVESLRVLSACRKTAVAARRVALQLIQNTIVCAPDGLRDVLRSMTRMQLIRTLAAWRPDLTAYRDVEAAYRITFKSLARRYLELHDEIADLDIMIGAIVDELAPDLVARNSIGHVGAAQLLLAAGDNPDRLRSEASFAALCGTSPVPASSGKTIRHRLNRGGDRHANSALHIIAIGRLRTDPKTKTYVAKRIAEGHSKLEAIRALKRYIAREVFTLIMRRHKTINQTQIAA

SEQ ID NO: 74798 - protein, 354 aa, unidentified
MAVRRTIIIGGVDTHTTTHHAAVTDLRGRLLADAQFPASPTGYAQMLVWMRRHGRLSRVGVEGTGAYGAGLARYLHEQQVEVLEVPRPDRRLRRQRGKSDPIDAEAAARSVLAGNATGAPKLATGPIEAIRMLKVARNGAVKAKTAAANTLIGLLVTAPEPLGSQLRGLSTAKLIDTCLRLRPDLTDLADPVQAAKVSLRSVAARARALDQEARTLKRQLDALTTEITPATSAVFGLGPDTVAALLVTIGDNPDRLRSEAAFAHLCGVAPIPASSGKTNRHRLHRGGDRSGNRALHIAAVVRLRYDQRSRDYATRRTSQGSPCPRSSAARSVTSPAKSSPPSRPTTPRSALDDL

SEQ ID NO: 74799 - protein, 418 aa, unidentified
MKGVARWKLSITCCCGLDVHKKSITACVLWAEAKGKSRKEKKRFGTFTHDLLQLADWLEQCGVTHVAMESTGVYWKPVWNILAERFEVLLVNAQHIKAVPGRKTDQKDSEWIADLLQHGLLRGSFVPPQPTRELRDLTRYRVSLVQEINRIANRIQKVLEDANIKLASVATDALGASGRAILEAMLAGEQDSARLAELSKGLLRNKIPELKLALEGRMTEHHRFLLRQLFEHLRFTESKRSEIEQEIDKRMLPFEDKVTRLCTIPGVDRVTAWGMLAEIGLDMNQFPSSGHLASWACLCPGNFESAGKRLSGKMRKGNVSLRRCLSQAAWAVSMTKNNYLSALYRRIAARRGAKRAVMAVAHALLVIGYHMLKRKEDYRELGADHFDRIDANRIRRSLVRRLERLGHKVTLEPLAQTA

SEQ ID NO: 74800 - protein, 370 aa, unidentified
MLDTTTFVGLDVHARSIKAVSLDVMTGEARCATFGYDAGAVAEWVRSVDPKARCVYESGVTGFDLQKRLSGLGVDCAVGAVSKMIKPSADRRRKNDRNDAEFLARMLSVGNVVEVWVPDDECEAARDLTRALEDARDDLSRSKQRLSKFLLRHGLAFDERTPTGRRKGNWTRAHWSWIESIRFAEGADNDVLAYYVDAVRRAAEEKARLEGLVEAEARKPRWRRRVDSLRCLKGVDTATAADLVFEAGEFSRFRNARSFAAWVGLTPSEHSSGESDRRGAITKAGNKHLRKALVEAAWHYLTCSGRPKDLAKGQAPDRVARRHAAKGVRRLVERREALLARGVHNNKANVATARELACWVWAVGLMAEEA

SEQ ID NO: 74801 - protein, 391 aa, unidentified
MTYWIGIDIAKHKHDCFILNHQGEFIRDSFSFSNNRSGFTQLYEILSSLDSTQEKRIGFESTSHYALNLKIFLDQMDLSYMEFNPFLVRQFSKASTLRKTKTDKVDARQIALYLSTVEYKPYPNKSYHIAHLKSLTRHREHLIKQRSLQLVRMTNMLDRIFPEFKPFFNDSLTSKTCLYILDHYLIPSKIMRMNQDSYHKMASTLRRTISYARFCELKRLAKETIGEEDPVLVFQLKQHMDEYRFLNTQIDEVEAFITQEFSCIDTHIHSIKGIGFFSAATIFSEFGSIERFTSANQLLAYAGLEPSRHQSGLNESVGYMVKHGSPYLRQALMNVSESSLMHNPVLYDFYLKKRKEGKHHRVALSHVAKKIVRIIYHLETHHCDFDLDKMS

SEQ ID NO: 74802 - protein, 338 aa, unidentified
MSVTIIGLDIAKSVFQVHGADDAGNPLIRRKLRRRDVMRFFVNIERCLIGIEACHSSHYWARELIALGHDVRLIPTQYVRPFRRGGKNDANDAEAICDALSRPSINTVAVKSAEQQSVQSLHRSRERLIHQRTSTANQIRSLIAEEGVVCGRGITQLRRCLHEVIADPDGVTPLLRSLIGQSLEQLAALDQWIGELDLKIHELARQSTVCRQLTRLPGVGPVIATAILGTVGSAHAFRNGRQFAASLGLVPGQRSSGGRTLLLGITKRGDAYLRKLLVQGARAIMRVVDRHDDRQSQWVRQLLERRHKHVVAVALANKLARTIWALLVKGEQFEMVRR

SEQ ID NO: 74803 - protein, 393 aa, unidentified
MLLDHPSDGLTAIRTYIGAIFVSLELSRSTWLVTSLSPGKGEKMSKHSVAAGNMAELLTLFAELKRKTEVRTGQSYPIITIQEAGLDGFWLHRVLQQEGIESHVVDPASIATPRRRRRAKTDRLDGETLLRALLAYKRGEPRVCAMVVAPSPEEEDRRRLCRERQALIAERITHVNRIKGLLFSQGISDYAPLRRDRRSRLETLRTGDGRELPSHLRAQIGRELDRIELLLEQIKAVEAERDGLLAAARKPAEKPADEKAALDPVAMLLALKGLGANFAAVLWSEAFYRQFSNRRQVAAYAGLAATPWQSGGIRHEQGVSKAGNPRLRTTMIQLAWLWVRHQPQSALTRWFKERSQQGRKRAIVALARKLLVALWKYVTQGVVIEGAVMKPAA

SEQ ID NO: 74804 - protein, 377 aa, unidentified
MRNRATYKEERVMKIIYWIGIDDHADKWTIAQYRGEEARPSKELELVPDEKGYKRLLAYLKGLDGEVRIVYEAGPCGYELYRRLTKAGYQCQVAAPALTPRKPGERVKTNRRDAAKLGRYLRSGELTFIAVPDEERESLRDVIRSREAAQKDVGRTKKRIVHLLLRYGQRYRDGQAWTMRFWTWLKSVELAGENSQFVLDDLISELEHRIAQVRRYDEQIELAAQKPEYKPYLDGLRTLRRINTLSAMTVLSELGDLRRFPTAPQLMAAIGVVPSESSTGDKTNRFSITKTGNAHVRRIAVEAAWNYRRRPTAGRSIQARRKGQPKKIADIAEKCEKRLNSKFFRLTSRHKKSTVAAVAVARELLGFIWAIGQIAHP

SEQ ID NO: 74805 - protein, 345 aa, unidentified
MNNTRVIAIDLAKTIFQVCLFDRHSKVLWNRSMRRPALLKFLARQEPALVAMEACGGAHYWGRKAQSFDHQVKIIPPKQVAPYRQGHKTDGKDALAIGIAAGQAELKTVGVKSIEQQSLQCDKRVQEHLSDQLTASGNLMRALVAEFGVVIPKGVAGLKRELPLILEDAENGLPLSMRESLYLAWQQWQQLAESLLQSERILAQRVRLLEPCQRLTRLSGVSNKNAIGLYVRIGAGDQFKNGREAAACTGLTPKQKSSGGKVKIGSIGKFKGDQRLRSSLIVGAWSVVNALQKRPATNTTELWLQQLTKRRGRGRAAVALANKNVRIAWAMLRYNRSYETQPIAR

SEQ ID NO: 74806 - protein, 347 aa, unidentified
MIIIGVDYHPSFQQISFMDQETGECGDRRLNHSDGEAERFYKELKERGVSVRVGLEATGYSRWFERLLAELGFEVWIGDAAEIKKLRVRKQKTDREDARLMRKLLLENRFPRIWVPSPENRDVRQLLWHRHRLVQMLNQLQAVAMNEGYRWKKKLFSEQGRALLEKLSLAPWASRRRKELLELLDQLDPKIAELTAALEQEGNKRPEVVLLKTHPGVGPLTGLAYVLVIGTPDRFPCGKKIGSYTGLIPSEDSSAGHQRLGHISKQGNALLRYLLGEAAKAAARCNPDWRRRYMHLMMRREKRIAKVAMARKLAVRLYRMWRNNWQYSQLVEFGSNAGKLGTVHGVK

SEQ ID NO: 74807 - protein, 343 aa, unidentified
MKQYVGLDVSLEQTAVCIVDEHGKALWRGKCASTPEAIAAVVHAGAPHVVRIGLESGPLSTWHWHELTKLGLPVICLDARHAKAALSLQVNKTDPNDALGLAQIVRTGWYREVTVKSSDSQVVRSFLTSRARLVEMRVDLTNQIRGVLKPFGLVAGKGGGQPFIDRVRGLVTDGPLEDVVEALLTALQAISRQIGILTRRLMALARQDQAARRLMTAPGVGSLVALAYISVIDAPEQFSKSSSVGAYLGLTPRRYQSGEIDRSGRISKCGDPLLRTYLFEAAGIILNRVSRWSPIKAWGARLTRKVGGKKAMVAVARKLSVILHRMWHDGTDFRWSNTEGLPA

SEQ ID NO: 74808 - protein, 354 aa, unidentified
MTADTILAIDLGRYKSVACAYSRSTRAHAFRTFDTAPDDLGQLLARHPGAVVVVEARANAGWVHGRAVAAGHPVKVANTAAESWKFQHLKRKTDKDDAKRLAELEAIGQLPTVALPDPATRQRRMLIAFRQELVGRRVACQNRVRALFAGQGLATPRGHRAWTAAGLEGIEAQARPLADCGPDELWRGMLHLALAEYRALAERIGEVEGALDRLAGSDGRTKLLETIPGVGRRTAEAVAAHLGDPGRFASAKQVGAYAGLVPRQYQSGVTDRKGRITRRGPGLLRKLLVECAWCMLRYNPWARAQYVRLTAGGATRKKPAIVALARKLLVRCWAMLRDGKPWRADPAPAAGASG

SEQ ID NO: 74809 - protein, 368 aa, unidentified
MNESITGFVGLDAHAQSTAIGFAETGRAAPRFIGTVGPKRAELTKALGKLGEPESLLIVYEAGPCGYGLARELVELGYRCEVVAPSKIPKQAGERIKTDRRDALKLASLARAGELTAVTIPDERDEAIRDLSRARVDAVRARLKARQQLQALLLRHGRRYDGNTAWTAAHERYLAEVSFAHSAQDIAFTEYRQAVGECDTRVRRLGEALAHEVESWRMQPVVGAVMTLRGLDLVAATTVVAELGDLRRFARPRELMGYLGLVPSEHTTGAKRRLGAITKTGNGHVRRVLVEAAWNYRFPARVSRVLQIRQERQPAAIREIAWRAQLRLSHRYRRLKARGLPHNKICVAIARELAAFIWDIGRHVAPNP

SEQ ID NO: 74810 - protein, 414 aa, unidentified
MKVVYPVCCGVDVHKSFLVATVISTTSGLEPSYSRKRFSTFNRDLRNFTCWLKTNNCVDVCMESTGKYWVPIFNILEDENINITIANPKWVKAVKGNKDDKKDSKWIGDLFRFGLVPGSFIPAKPIRILREFTRYRFKLVSMKSSEKNRFQNAFTVCNIGLDSVVSDMFGKSASLITDYLLSDESFNPDHCVSLLQRSLKKKADSVIESIEGYQITEQQKFRMNSIRSHLAYIENSIHKLDEAINSMVAPYENALSLICTIPGLDRKTAITILSEIGDDVSHFNSSKQLCSWAGLTPGNNESAGKKKSVRITRAGVYLKPALVEAAHAAVKSTKTPYYKTKYEKIAKRRGKKRAIIAIARMILTAIFSMLSTGECWNPIDLFKVDMPIELREKQEEKAVKIAIKFLESKGLAVS

SEQ ID NO: 74811 - protein, 344 aa, unidentified
MDYFAGLDVSVKETSVCIVDDTGKIVREVKVASEPAALLAVLKNPAYCFKRIGLEAGPLSQWLFSALAEAGLPVICVETRHMRAVLKAQINKTDRNDARGIAQMMRVGLYRPVHVKTLRSQKLRMLLTHRKLLLSKAIAIENDLRGTLRNFGLKVGMVGKVKFEARVRELVENLPDLAVLVEPMLIVRRVLREQIVILHRRLLAIVRDDEVCRRLMTTPGVGPVVSLTYRATVDIPARFRKSKSVGAVFGLTCAKYQSGEVDWDGRISRCGDEMMRTMLYEAAQAMMRSKKWSWLKAWAMQIARRRGMKKAIVALARRLAVIMHRIWVDGTEFRWTREQATATA

SEQ ID NO: 74812 - protein, 348 aa, unidentified
MKNKSFVGIDISKNVIDVSIFREDTNIKMFPHEVFNNTRKGFGDMCSWLKKSRVVLSQALFGMEFTGCYSLDLEKFLTFKNYSFCMLSTRIVKHHPMGTIDKRDKNDSAKIADFLYRYDGTECAKPYKLPSKAMQQLKQLVNERKFLVEQRTNFMNRMQMFETKEDSAMYESYIKKLNHDIEKIDQEECELMSKEEDVFDTFQNLLTIPGIGFVNATNIIAITRNFTAFDTARQYARYVGVAPCSHTSGTSVKWRARPSAHCNGQVKADLSMAALRAVEYDVEMQMFYNRKLGGRKDSDTKRKALNAVKFKLIRRMFAIGKQKRKWEVLNTSDGRKNLHIEKSKASEL

SEQ ID NO: 74813 - protein, 414 aa, unidentified
MDPDQGQPVDDQRDDFRYFAGVDWGGSFHQLCVLNAAGGLVLQQRINHDVAGLALLTAKLAQLGTPVALAIERAEGLLVELLQTLPAVTLFCVSPKISARARERYRLSASKSDLFDAFVLADTVRHEHRRWRPLSRPSAVTAELQAVSRDRQRVLNVKVACENRLRAVLDTYHPAPLHLFSELDRDISLDFIRAYPTPDQARRVKTARMTAFCARQHYSGRTDPQVLVDRLQPHLLSASAGTTAGKAFAVKLFAEELRMHTDHLRAFDARIDQLLKVHPDAPIFLSFTGIGPVIAAALIAEMGDDRSRFVTADVLLAETGLAPVTKASGRTRQVRFRYAANRRMRHVIDWWMFIAAREDPWSKAVYDAGRARGQGKYRALRGLGARWVRILWRCWTDHTTYDPTHHHRPELTAA

SEQ ID NO: 74814 - protein, 344 aa, unidentified
MWIIGCDYHPSFQQIALVNQATGEYRRLRLEHKGGEAEHFYRGLAGRQVRVGMEATGSIRWFERLLQELGFQLWVGDPARIRAAAAHKAKTDKRDADLLLQLLLEKRFPKIWMPSPEQRDARQLVLHRHRLVQVRTRAKNQLYALATNEGLHPKKRAWTQAGQAELMALPLPQWAGTRRQDWQELLAELNQRIEPLDRAMEQEAKQRPEVQLLMTHPGVGPVVAMAFVLTLCDPNRFQSSKQVAAYLGLVPSEDSSGKGRQRLGHITKQGNSLLRGLLVEAAHVAARKDEHWGRKFLRGGMKKNRSIAAVAVARNLAVRLWWMWKLGLDYGQMKESRSHAEQLV

SEQ ID NO: 74815 - protein, 323 aa, unidentified
MVVVAGIDVSKATLEISVSEGPVLSFENSTAGIRRLLRHLERAGVTKAVCESTGGYERLAVGKLREKSVTVQVAHPVRVRAFARACGYEAKTDPLDAQVLSRYGVVFSESDTAQPEVDPDREELRQLLSRRRQLVDQRVRERNRLDKGLSGGVGKSTRRHIRWLDGEIERLDEEYKELLKHNASLGETVELYQTVPGVGQLTAATLVAYLPELGRWDGRALTSLVGLAPWSRDSGKKRGNRSIRGGRGTVRRALYICAWAVLRIDGDLRDFYRRLRERGKPGKVATIAVARKLLMQINAVARRGTPWVKQHGSGGPSYQADPA

SEQ ID NO: 74816 - protein, 318 aa, unidentified
MTKTSMMCCGIDVAKAWLDVAISASSETVRVDNDAAGVEALVVWLIERGVERVGLEASGGYERLAVRRLRQAGLEVRLFQPAQVKAFAGFKLRRAKTDRLDAFLICDCTAMANEAPRAARSPDMEALAEHLTLLEQIEEDLVRAKTRCEGFRLPELKARQMQEVSRLKALRRAELKRLVSQVQALPEQAQRFQLLLSIPGVGQRTALAMLLLMPELGELTREQAASLAGLAPFDDRSGKRVGQQHIHGGRGRLRSSLYAAALPAAFKWNPALISLYKRLIANGKSHKAALVACARKLIIYANTVLQRHSPWTEQITPI

SEQ ID NO: 74817 - protein, 411 aa, unidentified
MEIVHPRCCGLDVHKKTVVACVLLSQPDGSVDRQVRTFTTMTEDLLALSDWLSSLRVSHVALESTGVYWRPVFNVLEDDERTLLLVNPQHMRAVPGKKTDVRDSEWLADLLRHGLLRASFIPPAPIRAVRELTRYRKTLVQMRADQANRLQKTLEGANIKLAAVAADVLGASGRAMLAALLAGERDPDVLADLARGRMRTKLPQLRQALVGRVQPHHLVLIAQILAHIDYLQEAIIQVQTEIERCLPPFEEALELLQTIPGIRAIAAAAILAEIGADMNRFPTAGHLASWAGLCPTNKESAGKRMQGPMNRGNVWLRSIMGEVAWASVKTRATYFYAQFHRVARRRGRNKAAMAVAHSLLVVVYHVLSTRKPYAELGVDYLDQLDAARMERHHVRRLEQLGYIVTLTPSAA

SEQ ID NO: 74818 - protein, 455 aa, unidentified
MPRKKLHKKNQRVAPPIMNPDAAGIDIGATEIYVAVPADRDPEPIRMFATFTQDLNRLADWLQQCGVRTVAMESTGVYWVALMQILEVRGLEAYLVNAKQVKNVPGRRTDVSDCQWLQYLHSVGLLRASFRPAPEVCALRSLLRHRDSLVEMATTHVQHVQKALDQMNLQIHHVISDITGTTGLAIIDAILAGNRDPQVLATLRDPRIRASKDTMAKSLVGDYRPEHLFTLRQSVDLYREYQQRIAACEEEMQRFLKSMGASATSSASLPAAKDSVRKCKVMAPAKALALREEAYRILGVDLTTIPAISVLHAQAILAELGDGISKFRSAGAFSSWMGLCPDNDISGGRVLWTGTRKVKNRVAVTLRMAAQSLQKSESALGAFYRRMRTRLGAPKAVTAAAHKLARIIYHMLKTREPYDESVFARTEIKYRQRAENRLRAMAQNLGYTIAPAQAK

SEQ ID NO: 74819 - protein, 371 aa, unidentified
MKSSITFVGMDTSKKSIQVAMLLPERDKPLEWEETNDARGLKRLKRKLQHEAVGELRVCYEAGPCGYALQRDLRAASIDCIVIAPSLVPVKPGERIKTNRRDAKKLAQQFRAGTLTEVHPPTPEEEGVRDLCRCREDIREDLMRARHRLGKMLLRRSLIYSRKAWTGAHRQWLRTIRFEGEADRAVFDDYLRAIELLEDRLATIEQKLEQIAQREPWAEPVGWLRCFRGIDTVTAIGIVAEVHGFGRFASARQLMSYLGLVPSENSTGESHRRGRITRTGNSHVRRLLVEASWHYRHKPATGAKLRKRREGQPGWVIAAADKAQARLHRRYWKLVLNGKSHPKAVTAVARELAGFIWATLYQHDAAVGAEA

SEQ ID NO: 74820 - protein, 361 aa, unidentified
MQIIGCDLHTRQQTMAMLDTKTGEVVEKTLTHKGSNVREFYSTLPGPVRVGIEATGSMQWFVNLMEELGIECQVGHPAKIRAAEPRKQKHDRRDADLILKLLLENRFPSIWLPSKELSDLRALLLHRHQWVRMRTRIQNALQAIALANGVRRGPSLWSQAGQCTIASLPLAPHTAHRRSELQAMYVKFEAEIEKLNQRVEEQACERPGARLLMTHPGVGPVTALATDVFLGDPTRFADGKALASYVGMIPSEYSSGGRQRLGGLSKQGNPLLRFLWCEAAVHAVRRDQELQRFYRRKWIQKGLGKARVAVARKLGIRLWIMLRDQIDYNEFCRRGQMRQKNGGAGAGMPETRYGAEQSPVD

SEQ ID NO: 74821 - protein, 428 aa, unidentified
MMSEVESVRQEPQFAAFVGIDWADQKHVWCLQAAGSEKRESGELEHTPEKVEAWVGQLCQRFGNRPIAVAVEQSRGALVFMLAKYEPLHLFPVPSTMSASMRKALYPSGSKDDPRDADLLLNLLLQHRDKLHRLSPDTEATRRVQNLVEERRKLVDEKTAQTNRLTSHLKIYFPQILGWFEHLDSELVCALLEHWPTLEELQKVPPPKLRTFFRKQHGRDQELIERRILAIRQAIPALQDRAVIEAKSTVVKVIVQLIRNLVKGIADLDEKIEAAAAAHPDFFIFESLPGAGAVIAPRLLAAFGSQRERYGNAGEVQSYSGIAPVTEKSGKKKWVHFRWACSKFLRQSFHEWAGHSIAYSVWARSYYQQQRSKGQDHHAAVRALAFKWIRIVFRCWKDGVAYDESKYLASLARRGSPLAALAATAKTL

SEQ ID NO: 74822 - protein, 343 aa, unidentified
MHTVTTIGLDIAKSVFQVHCVDVTGHVVIRRQLKRRYVLAFFEKLPPCLVGIEACASSHHWSRELQALGHHVRLMPPAYVKPYVKRQKNDMADAEAICEAVTRANMRFVPTKTPEQQSGLVLHRTRHLFIRQQTSVINAIRAHLAEFGVTAPVGRKGIEELLRVIADPNDKRVPDIVRACLAALGSQLLSLKKQILDFDRMILAWHRSDQTSKRLNCIPGVGPLLATALVASVADPKAFRSGRNFSAWIGLVPKQHSSGGRNRLGSISKQGDRYLRSLFVAGAFAVIRYAKLHGTKYRPWLAALLARRPTKVAAIALANKLARMAWVMMARGERYNYPAALRV

SEQ ID NO: 74823 - protein, 386 aa, unidentified
MRKSNDLSRCLAALEQDSTLIAVIEMGKSSWLVAGVVPGIERRPLKKLAANEGALLALLYRWRDEAKKAGHPIKRICVAYEAGRDGFWLARWLRKRKIEAYVIHSTSVCVSREHRRAKTDRLDTEHLMRAFIGWLRGETDHCRMCAIPTLEEEDGKRPSREHEHLVGERTRIINRLKSCLARLGIRDFNPASCKAPERLAKVRTPEGTPIPPNSLDELKHDMAHLRFISDQIDEVEKACLARLQKAPKKGPHAMVRLLASIHGLGIETADTLVHEVFSKNFRDRRGAPRYAGLTGSPDESGERRREKGLARAGNTRVRRSMIQLAWRFLQFQKESALVQWYYKRTADGRKDTRKTMIVALARKLMIALWRFVTTGEIPAGVQLRAA

SEQ ID NO: 74824 - protein, 401 aa, unidentified
MNKLVVGIDPHKDSLGICITHPDKDEIISSFSIKNGSLKKAKLLFGKAHKFAAELETSPVFVIESTNVFWRPIFSFLKRYGADAQTVNSYQTKNLRKTLMRKTKTDTIDAKLICDLYKQGKSHKTVLAKEPLFSLRELTRLYKFLVDIKAMVSNRIQGYLLQIFPELESILPKSSKNVLLSLYAEELIHPETIAKTRMDKLSNLLSKASHGRLKQDVAIRLKSYAKASFGLREGKVGFSFAIKILTLLYWQLENLLLTLEKERIEPLLSEVSQKFWTLKGLGTVSAASYVSELGSPHRFSNANDALAWFGLDPSTAQSGPKKGTGKRISKSGTKYGRETMFLAAGSCMLHNPELKARYKQLKAKGRKPREAKTILAADLVKILFAMYRDNSEYNPEKIKSN

SEQ ID NO: 74825 - protein, 351 aa, unidentified
MNYVGVDIHKRYSVLVAVDERGRELGRSRINGNTAFGFAQFFGGLEGKSKVVLEACWNWGRIYDLLSEIGQVEEVVLAHPLKTRLIADAQIKTDGLDAYALATLLRGDLIARAHVPAKPTRQRKEVLRQRLYWARLRTRIRNRIHALIDRQRELKMPQCSDLFGRKGLTALNKLVLSEPDATLLREELGLLELIQGQIKAQEARIVEFNSNDEMTLRLQSIPGMGKILAAVAAAEIDSIERFSSAAKLCVYAGLVPRTHASGGKVYQSHLLKSRNKWLQWAFIEAAWVAVGCSAYFGGLYRQHRARGKNANIAITIIARRMSQICWTLLKERRDFIETFPGRSAVRLTAAA

SEQ ID NO: 74826 - protein, 385 aa, unidentified
MQSDLSKSHVVLNQDSTLIAVIELSLSSWLVAGLVPGLARQPRKKLGPDPEALLALLERWRDEAAKAGSRIERITVAYEAGRDGFWLVRWLRGRGIEAHVIHPNSIPVPREHRRAKSDRLDTELLLRGFLGWLRGEAKHCMMVRIPSIEEEDLKRPNREHQRLVNERTALINRLKACLIRFGIRTFNPKLKKAAEHLSQLTTPEGVPLPPNTLAELDRDLARLRLVKEQIKAIETERCRRLAKAPEQRHAVTVRQLIQVVGLGLETADMLDSEMFTRPLRDRWAVARYGGLTGSPDESGQRRREQGLARAGNSRVRRGMLQFAWRFLRHQKDSPLAQWYRQRTQSARKDVRKLMIVALARKLLIALWRMVAQGVLPEGIRLQQVA

SEQ ID NO: 74827 - protein, 354 aa, unidentified
MKLYVGLDVGLEETSLCIVDSEGLTVREVKVSTEPEAIRSAVENYADRLDRVGVEASSLGIWLYRELQPAGLPIIVVEARHMRVSLSTMRNKTDRNDARGIAQMMRLGWYRAVHVKNIDMQKMRTLLTNRKLLKRKLIDLENHVRGALRAYGLLVGTVARGAYEARIRELIEHCDPVFVMSIQVMLDVRRALLEGYDRLHRVLLQVVQHDPVCRRLMTVPGVGPVVALSFKVGVDDPHRFTRSRTVGAHFGLTPKRHQSGTSIDFEGHISKQGDISVREALCEAAASLLLRVRKWSALRAWGLRIAKRSSMLCAIAAVARKLACILHRMWINETDFNVGFGAKITQRLRLKPAQ

SEQ ID NO: 74828 - protein, 356 aa, unidentified
MTKVKASFAEQTIYVGVDVHKRSWNCALFLNDQYIRNIHQPPSPKALHHQLKQQYPGARYVCAYESGKFGYWIKRQFTTLGIECLVVNPSDIPSTHKDEVNKTDVRDARSIGHALASGQLWSIYVPNEEQEADRHLVRQRKKLWRDLVRCKNRIKGFLDYKGIEVPSQYDNANWSHNFIHWLQVLQFEHTSNRITLNYMINEMELLRKDLLNISNDIRKLMRSKKYNKLYYLLRSISGIGPLTAAALLTEIGDMKRFTSFYHLNSFIGLMPMEHSSGERELKGRITVRKHRQLRSDLIECAWTAKRMDPALALYYSQQIKRGKNGKAAIVKVARKLLSRIRYVWLTEQYYQTAVVA

SEQ ID NO: 74829 - protein, 409 aa, unidentified
MEVLYPHCAGLDVHKETVVACVRHMQGQVMTTVKTFSSTTRGLMDLSAWLSEEAVTHVAMEATGVYWKPVWHILSDGEFHLVLANAAHVKNVPGRKTDVNDATWLADLMAHGLIRASFVPDEPTEQMRNLLRTRKQFVRERASQVQRIQKTLEDANIKLESVISDVVGVSGRRMIEAMIDGQSEPQQLAALADGRIRATGAQLEAALRGRVTAHHRFLLKLHLDHLDAVDAAIARIDKEVDGQIEPFRTAVERLSSIPGVSSLSAEVMVSEVGLDMSRFPTVGHFISWAGLCPKNDQSAGKRRSTRMRKGAPWLKTVLIQCAWAATRVKGCYLQAQYLRLRSRRGAKKAVGAVAASILTAAYHMLRDGTSYQELGASHFDRRSTTQQIGRLLKRLHHLGYDVQIAPLAA

SEQ ID NO: 74830 - protein, 413 aa, unidentified
MEVVYARCCGLDVHKKSISACVIIREHGKATKFERRFGTFTSDLEELADWLEELGVTHVVMEATGVYWKPVWNVLEGRFELMLVNPQHVKALSGKKFDRKDASHLADLLQHGLLQGSFVPTKEIRQLRDLTRNRARTVQETVRIKNRIDKILEEANIKLGSVATDMFGVSGRLMLKQLIAGEEDAAKLAGLALGRLKNKHSQLLQALAGKINDHHRRMLDRLFRALETREAEIGEDERDIRQAIEPFSKAIQAWKQLPGIEDITAWSLVAEMGPDMAPFDTAEQLASWACVCPGNHESAGKQRTGKTRKGNPWLRHAISEAAWGASKTKKSYFHAQYHRICARRGDQRAILAVAHSMIVAGFYIIKHGVPFKDLGADFFDRKNREHTARRAVKRLSSLGYKVTLEELPPAQQN

SEQ ID NO: 74831 - protein, 342 aa, unidentified
MKYYCGIDLHTRDSVLCVIDEKDRIHLREKVPNCIFTIVEKLDSFSPRPPVAVEATLNWYWLVDGLQEHEFNVKLAHTYGLSMIKGAKVKTDQRDAFTLARLLRLDAIPEAYIYPKEKRPVRDLLRRRAKLVDLRAQAYVSIRTRLLQNGLYGFSQTAIKKLDAREICEMVTHPVIQADMFHELERIALYSREIEKTEKRVLDSVKNEPMLELLQTIPGVGKILALTIYFEAGQIERFGSAKQFCSYARVVPGIAQSSSVTRRGKGSKQGNPHLKWAFMQAAAIAVRFYPNVRKFRQTHLARRRSKAKKLISMSIVAHKLAIGAYHVMKGKQPFRQEMMFAD

SEQ ID NO: 74832 - protein, 378 aa, unidentified
MKNDIRFVAMDAHAETLAVSLSEGPGEVRRLGIIPNRPEAVRRLIRKLGPVEKLRVCYEAGPTGYALYWQLTQLGVPCDVVAPTLVPSKPGDRVKTDRRDADKLAVLYRGGQLTSVWVPDKDHEALRDLVRAREAAKSDQLRARHRLHKFLLRHGWRAPQGIKSWTQKHLNWVRRQVHFERPAQEAVLLDYLTEVDHARDRITRLEQAIDAAVVAAPPHMRAVIEALQALRGIAQLAAATVVAEVGALSRFSRPRQLMGYSGAVPREHSSGGSTWRGSITKTGNAHLRRIVGQASWSYRHRPAVTGALRQRQKGLSEEVKAIAWKAQHRLYGRYRRLIGRGKPKQQVVTAITRELLGFIWAIGVHVEQSLGTAKRRAA

SEQ ID NO: 74833 - protein, 367 aa, unidentified
MLGLDVGKSSHWACLIDRDGEVLSSAPVRNREAELDALFASAPAGTLVVVDQFRNIGSLAVRRARAAGLGVAHLPGLAASRAAGLFAGEAKTDERDAAVIARTALGVPDSLSGVPGRGEALEAARALSSQRDHVVACATRDKNRLRAVLLESCPALEAAVDLSDRRWPELLAGFGGAWGIARSGAEGPQAEAAGEAAAASTAPPPALVEAENRQVRFLAARISEALDEAGALEAETAALLEGDETYACLLTVPGIGPRTAAQLAVSVDIGRFPDHDHLASYCGIAPRVRSSGTSVRSVRASRRGDARLKSLLIFSCNSLVRSSGRYGEYYRACRARGMGHGRALKAVARKRLRAIYAVMRDRVPYRE

SEQ ID NO: 74834 - protein, 393 aa, unidentified
MYQNLFVDWPPALFANTVEYLRLRACIYKEDRRMCRVGEPVNILLSLPMERNTMTVQSKQKIVDKPLSLFAGIDVGSSELVLLIRKSGTSYKSQKFANTAADRARLVHKLVKMPGIIVCLEATGIYHFDLSVSLHDAGVALMVVNPKASHNFAKVLMKNSKTDDIDADTLAQYAERMDFVPWVRPSDEKIAIRGFSRRINALTRQKAAAKNQLHALIASKETPKEVLHDVKLGISQMEKRIEKLSQGALILVEKHPELKRVLNLLLGIKGIAETSAIALMGELLLLPSGLSQKQWVKFAGLDPRAFDSGKSVHKQARLSKGGNSHIRSALYMPALSAKTHDPHVKAYFQHLVDNNKKPLQALCAVMRKLLHAIHGMLKHDKPFDNSRFYALPA

SEQ ID NO: 74835 - protein, 338 aa, unidentified
MPLYGGIDLHANNSVIVLLNEQDQVIYQRRLANHLPTILEQLVPYHTDIQGVVVESTYNWYWLVDGLMEADYRVHLANPAAIQQYSGLKHTDDHSDARWLAHLLRLGVLPEGYIYPKAERAVRDVLRKRSHLVRQHTSNVLSLQNIIVRNTGARLSVKQMQELSLAALTTLLPESDQALAVRSGLAVVHTLSQQIKTLEKTVTKHLQHTPAYEQLLTVDGIGSILAQTITLETGDLRRFPAVGNYASYCRCVQSTKVSNGKRKGQGNVKNGHKYLGWAYMEAAQCAIRSNPRVQRFYQRKQAKAHFMVARKAVAHKLSRACFYIMRDLVPFDANKAFG

SEQ ID NO: 74836 - protein, 385 aa, unidentified
MSSTIIGIDPHKESWTAVAVDPLGQKLAALRAPVTRTGYRQLRRFADRYQEPVWAIEGAYGLGAPLSALLAEDGVMAWDVPAKLAARVRVLSTGHSRKSDEDDALSVAVAATTSTRLRLVRADPAATELKLLTEHRDDLVRARTQTVNRLHAIMVVLVVGGAPRNLTADTAANLLRRVHPNESLTMTRRLIAIDLVAEIRRLDKRITTATERVTTRVTGTQSTLTTIPGIGQLTAGKILARTGPVTRFTTEAHFAAYAGVAPREVSSGDVIRHRLSRGGDRQLNYALHVVALTQISMKSSPGRVFYDRKRSEGKSGKEALRALKRRLATVVFRTMIADHTSLAVGPAGHSGTTLQSSVTGSHPDTGSSDKSLTEPTTEKHIHAAT

SEQ ID NO: 74837 - protein, 305 aa, unidentified
MNVTTIGIDLAKNSFSLHGVDTRGKTVFRKTLSRAKLLPFLVQQPPCLVGMKACSGAHYWAREIGKLGHETRIMAPKFVIPYRKGGKNDNNDAAAICEAVARPDMRFVPVKSAEQQAVLALHRVRQGLIQHRTALINQFRGLLSEFGLIIPKGRYQTHEHIPAILEDADNGLPDQARRLMTIPGIGEQVATAIVASVEPTQFNNGRHLAAWIGLTPRQFTTGGVIRLGRITKRGDKYLRMCLIHGARAVVANLRDKQDKTSCWIRELIARRGYKRAIVALAARNARLIWTLMIKQENYRAIPVSA

SEQ ID NO: 74838 - protein, 319 aa, unidentified
MLAATTVVGIDVSRDWLDGFCLPGHQRFRFANSPEGHDELILMIGQMSAPVHVGFEATGGQEWVLWTALMEAGIEARQLPPAQIKAFAMSRGTRAKTDRIDAELITRFMMFRPEAGRALPGENLRVLRILTTRRAQIVEMRKRLAAQMSARRKQGIPAGIEDLDDALKAMLDAQISELEQRIERALASEQTSATKAGLLRSIPGIGPVSAAMLVAEMPELGRMTAGEAAAMAGLAPVPHDSGVMRGRRAIAGGRRALRQVLYQAALAAACHNPVLKPLAKRLTGRGKPHKVVIIAIARRLVTIANAILKTGETWRHQPG

SEQ ID NO: 74839 - protein, 343 aa, unidentified
MQVVTTIGLDIAKSVFQVHGIDAEGKVTIRRQLKRRYVLAFFQKLQPCLVGIEACATSHHWSRQLKALGHTVRLMPPAYVKPYVKRQKNDAADAEAICEAVTRANMRFVETKTPEQQSCLMLHRTRQLFIRQQTSVINAIRAHLAEFGIVAPVGRKGVEQLLAVAADASDHHVPEMARACVVALGAQLRMLKAQILEFDRRILAWHRSNEICQRLDELPGVGPALATALVASVADPKSFRSGRNFSAWIGLVPKQHSSGGKDKLGGISKQGDRYLRSLFTAGALAVIRYAKIYGTQHRPWLTALLARRPTKVAAIALANKIARMAWAIMAKGEPYKEPVAFAA

SEQ ID NO: 74840 - protein, 349 aa, unidentified
MALTIVEETRPITGGVDTHADTHVAAALDPVGGLLGVGEFPATAAGYARLLGWLGGFGTVCLVGIEGTGSYGAGLARHITAAGIRVVEVDRSDRQDRRRQGKSDPLDAVSAARAAQSGRARGAPKGRDGAVEAIRALMVARRSAAGERTRTINQARALVLTGPDDLRALFGRHTPAALITGLASLRPRTGDVAGHATRVALRELGRRAQFLDGQLERLDELIVPLVTAHAPGLLALYGVGPRTAALLLIAAGDHPGRLRSEAAWAHLCGAAPIPASSGKVTRHRLNPGGDRQASHALWRIVFTRLGSDAATRAYAERRTAEGKSKAEIIRCLKRYVAREVYPHLRPAAG

SEQ ID NO: 74841 - protein, 347 aa, unidentified
MNASAKVIGLDIAKDVFFAVGLDGSGKAVFKRKLSRDQVLPLFAQMAPAMVGVEACAGSHYWARKLIELGHDTKLIAAQHVRAYVTGNKNDMNDAAAIAEARSRSATKYVPINTVAQQDLQMLHRARSALMTERVAMINRIRAFAGEYGQVFAKRVERFRDGLKAWLNDPGNGLSGMALETFRELKAQLDDKEEKILTYDRRLNQAAKSELAKKLMEVPGVGPLTATAVQATIADPHHYKSARDFAANLGLVPREHSSGGKQRLFGITRRGDSYLRTLLIHGARSALRTASGKPDKLLRWAAKLAERSSFNVAATALANKMARVIWALMAHGRAYVPAWSKDTPRPA

SEQ ID NO: 74842 - protein, 420 aa, unidentified
MEQVPGEEQVVERVAALDIGKAEVVVCIRVPGSRAGARAQEVCSFPTMTSSLLAMADLLRTHRVSRVVMEATSDYWKPPFYVLEASGFDPWLVNAADVKHLPGRPKTDRIDAVWLAKLAERGMLRASFVPPVEIRLLRDLTRYRADLVRAATADKQRVEKLLEDAQIKLSTVASDVFGVSGRAMLTALIAGERSPQILAELARGRMRSKIPLLEEAFLGRFNDHHAFLLSTMLARVDATEADIAKVEARIEEVITPFAWARQRLDDIPGIGPTAAAAIIAEIGVDMTRFPTPGHLCSWARFAPRTQESAGRVKGRGGTGKGNPYLAGVLGEVVISLSRTDTFLGARYRRIARRRGKPRALVAVGRSLLVVIWHLLNEPDATFNDLGAEHYDQRSTPARQIRNHVRQLEALGLKVTLEPAA

SEQ ID NO: 74843 - protein, 346 aa, unidentified
MIHVGVDLHQRFCYVTAVKASGEVVLQRSVENEAESLRKVLRSLPEPRQVVMEACGFWPAFQRVVEGEAARVVMVHPQRVKAISAARLKNDRVDSATLAHLSRCDLLPEAWMADGATQQLRIGVRLRIALGRQRARAKNLLQAVLHQEGKRKPVSDLFGRRGRQWLAGVELSPAARNAVDTQMRLIDVFDELIGEQTRALEKQAESDPRARWLQTIPGVGAYAAMVILAEVGDVARFADKKALASYAGVVPRVRESAGKRSHGDITRAGSETLRWILLQVAQVAARTSPAARGYYQRLRVRKRPQVAKVALARKLLHCLWALLRDGVCYDDKVFAAEQGAVQKTAR

SEQ ID NO: 74844 - protein, 418 aa, unidentified
MRKIISKPKIVNSNTLLVTVDISKGKNTGYFRCPDGTEVLPFEFTNDQSGFNKLYQMMEAVKQQKQLGVIILGFESTGPYAEPLTHYLKDKDIKLVQVNTAHTKKLKEVYDNSPGKTDRKDPKVIADLVELGRVLKVVIPEGICAELRRLTHARDRYIKTRNMLINQLYDLEYVLFPELGQIITDFQSKTAQYLLRHYPTPQKMRKVSSNRLETILRKVSRGRYGKEQAQRLYQAAIHSVGIIEGLSSIVEEIENILKAIALQSRFIGKCEEDISRNLVQVPWSRELLSIKGIGEITVAGVIGEVVDFNNFTSPKEVEKFAGLNLYEVSSGKHKGKRRISKRGRWFLRKILYFAALNTIRKGGVFFEQYHRYMDRGMPGKKALIAIARKLLRVMFAIARNQKAFKEEYHHISKISEAA

SEQ ID NO: 74845 - protein, 403 aa, unidentified
MNSVGIDISKGRSTVAVMRPFGEVVISPFEVRHTDSELSELARQLKSLTGETRVVMEATGNYHAPVAKLLHDAGLYVSVVNAKLVHSYGNNDLRRVKTDRKDAVKLANYGLDRWLTLPRYVPEENTRLLLKNCYRQYRQYSKVQTVLKNNLISLLDTVFPNANRLFSSPIRGDGSEKWVDFVAEFWHCRCVSEKSERTFTNKYQRWCKKHGYNFREAKAHTIYAEASGHIGVMPKSETTKLLVEQAASQLRATSAALAALKHEMQSLASMLPEYPVVMDMFGVGPTLGPQLIAEIGDVRRFYSKKALVAYAGLDAPPNDSGDVTGRHKSMSKVGASSLRRTLFLVMSVYLQNAPLDEPVYQFMDKKRAEGKPYRVYMMASANKFLRIYYATVKAYLESLEHTA

SEQ ID NO: 74846 - protein, 403 aa, unidentified
MNSVGIDISKGRSTVAVMRPFGEVVISPFEVRHTDSELSELARQLKSLDGETRVVMEATGNYHTPVAKLLHDAGLYVSVVNAKLVHGYGNNDLRRVKTDKKDSVKLANYGLDRWLTLTRYVPEEDTRLLLKNCYRQYRQYSKVQTVLKNNLISLLDTVFPNVNRLFSSPAREDGSEKWVDFVAEFWHCRCVSEKSEKAFANKYQRWCRKYGYNFNEAKAHTIHAEASGHIGVMPMSETTKLLVEQAVAQLRATSTALAALKHEMQALTSMLPEYPVVMDMFGVGPTPGPQLIAEIGDVRRFYSKKALVAYAGLDAPPNDSGDVTGRHKSMSKIGASSLRRTLFLVMSVYLQTAPLDEPVYQFMDRKRAEGKPYRVYMMASANKFLRIYYATVKAYLESLEHTA

SEQ ID NO: 74847 - protein, 346 aa, unidentified
MYDRKDIILAVDYHAQNTEVRWLNCASGEERCLRIPTTRGGILRLMEKAVGEAGRVGGQVVWIMESTTGWARVKELIGSRVQFIMANVLQMPLPPKAYRRKSDKIDTGRILREFLNGSLPQSYQPTGWWREVRRLVDSRQDLVERQTAVKNWVTHFLHHETWYDREGLWTQKGMKRLRAFRLPASDRMVLDLKLQELEQLAQRRGEMEAAMQGVYDQWREAQWVDEVRGIGMVTAVSILAHIGLIERFPSAEDLISYAGLAPGHRQSDQTAHNGRIGGGGTDSQLRYLLIESMQWVCQIPRYRPAFERAQAKHGTNIARIIVARMLLRSLFKVLRDRVRFSQVQAA

SEQ ID NO: 74848 - protein, 323 aa, unidentified
MSTQTIIATHAIGIGIDVSKDKLDLAIRLSDHKYVESSFANNRKGINSLCIFLKRQEAAKAAPLVIESTGDCHLQSALIIKQREFNVKVINPITTKRYQKSSIRNAKTDKIDAKRLSDIATLEQGLPDFNGNVEQVKARKLVSLLAHLEKTKQQLIMGLNRFEETAKVIGLKHPLTHLRKSLAELDAQIEKIKSALSDLMPEPEKQLADQTAGLSRGKLAVIYTLLDGKHFNNPDQLSAFFGLDIAIRKSGKWNGKSKLSKRGNAYARKILYQIAWGMKTHNEIFKACYKKYRENKYHYNAILMILARKFLRFYFSYGFKGAN

SEQ ID NO: 74849 - protein, 344 aa, unidentified
MQIAVIGLDLAKNVFQVHGIDDSGQAVLKRKLRRSEVPPFFAGLAPALVGIEACHTAHYWGREIAALGHDVRLMPPQFVKPYVKSQKNDAADAEAIAEAVQRPTMRFVPIKSADQQAVLMLHRTRDLLIRQRSSLISAIRAHFAEFGIVVGQGIRNVERLLALLETAGDQRLPALAAEMLSILAAQLRYVAAQVKEVEVKLLAWHRANETSRRLQSVPGLGPITASAIVATVGDPKQFKSGRQFAAWLGLVPQQRSSGSKERLGGISKRGDGYIRRLLVHGARAIVGWRKRSATHKTPWIERLLARRPTNVATVAYANKLARIAWAIMMHGNRYNPALAFATIP

SEQ ID NO: 74850 - protein, 394 aa, unidentified
MAFKIFRKNCCGLDVHKTWIYACMGITDTNGRTEYKQARFSSFTKGLQELADWLAKYDCNDVCMESTGKFWIPVFNILEKTCWVTLAYPKYTKPQKGNKTDHKDAKWICDLYMCDMVNPSFIPPPDIRQLRDLMRYRSKLTNIMTSEKNRALNCLTVSNLKLDDVFSDVFGKSSRSVIRYILEHPGETFQVAPFIDRRCKHPVEEIQAVIDGTISHQQAVKLRECLQHLDELEVHKTNVEKEILCLVQQYPYQLELLQTVPGFSGNIMTAIALISEIGADMSVFPSAKHLVSWAGCCPRNDQSSKKVKSTRISRAGVYLKPLLVQVAIQPFTANADKLSAAGALEIRCQICDGRFLSMWAALFIFLGCPLSPCPKNLHVHNGRIVILASVAWIF

SEQ ID NO: 74851 - protein, 351 aa, unidentified
MTIIGCDLHTRYQVVAWIDEETGEIRSRRLEHENGEARAFYASLPRGARVGIEATFPALWFERLLAECGHELWVGDAARIRASEVRQQKTDARDAEHILDLLRTDRFPRIWVPSVAERDVRQLLVHRMKLVRARTTVKNQLHAQAMSQGVCRKHKLWTVKGRAELEGLALLPWASRRRKELLEMLDQLDAAIEPLDQAVKQEAQARPEAVRLMTHPGVGPVTALGFVLTLGPVERFRNRRKLVSYLGLNPREHSSGGRQRLGAISKQGNSMMRWLLVEAAQTAARYDPELRRAYQRLKFRRVSGVAKVAIARRLAVRLYWMLRARVDYAQLVRMSGSPSSAVVPQEKGSKV

SEQ ID NO: 74852 - protein, 418 aa, unidentified
MKWERNSRGAELRYIGLDVHKHYITVGGLNAQQEIVLRPRDVEMERFKTWAESNLRQTDEVVLEATTNTWDVYDTIAPLVGRVVVAHPAEVKQIANSRVKTDTQDVIRLVRLLIADIVPDVWVPPVEVRELRATISYRWRLVKMSTAIQNRMHSLLHRHNIQAPQGKIDTGENREWWEGLKLSELENLRLKQEIKTLRLVREHIVEVEKELGHLSNSERWGDQAVYLMQIPGVGIIVTMTILSAIGDISRFESPKKLVGYAGLGAGIHDSGQKHREKGITKMGRKELRWALVEASWQAIRSNPVWRAEYDRLCKRKHPNQAIVAIAHKLLVTIWYLLNRKQVYEQSSEEDLAYKMLTWAWHMDKPALNGMTNQQFAKYGLLRLGKGEDITRIVKGGLPRRIASKEEVLALKPELRIPQ

SEQ ID NO: 74853 - protein, 428 aa, unidentified
MQYALIQVLPDVPAGGVCAGIDWATADHVACVVDMAGRVRDRFSAAHDKAGLDAMITRLRRAGAREVAIERGDGVLVDALLAAGLTVVVITSRQVKNLRSRYGSSGAKDDRFDSFVLADTLRTDRARLRPLIPDTAATIALRAAVRARRNLVAHRVAACNRLRAHLAVAFPAAAGLFFELDSPISLAFLARFGCHDAIAGVGEQQMTAWLQTVRARGNAAPASVLCARLQAAAPGATGEEGAAQAAVTAALAATLTALAAQVKVLQARIAAQLAAHPDAHIFTALPRAGTLRAARLLAEIGDCRSKFPDPESLAGLAGIAPVTRQSGKHASIEFRWAVNRQLRDAFCDFADGSRHASPWAAGIYAEARARGKDHPHAVRILARAWSCIIWRCWQEGTAYDPAKHTALQRILGQQASEPADGPGPGQDR

SEQ ID NO: 74854 - protein, 352 aa, unidentified
MEHVAIDLGSRKSQVCVRRTDGSILEERKIATVGLAQYLAERPLSRVIIETCAESFRIADLARAAGHEVRVVPATLVRSLGVGARKTKTDRRDAQVLSQVSCRIDLPSVHIPSMEARERKTICGMRETLVSARTQLINCVRGWLRTQGIPIKIGADAFAARVRQEYNAQRPQPVPEHVDSLLVTIEQLSKQVRDADRRLAKLAKADATCRRLMSVPGVGPVTSVRFCAALDDRSRFASAHAVQSYLGLVPGEHQSADRQQRLSITKAGSTRLRWALVQAAWSARNTRPHDPAVRWCLEVEKRRGKRIAIVALARKLAGILFAIWRDETTYDRRRGADPVASPTAVAELAAPG

SEQ ID NO: 74855 - protein, 326 aa, unidentified
MEHELHYIGIDTAKEKRDFDVLRPDGRHRTKKFANTTKGHDELVSWLKGHKIDHAHICIEATGTYMEPVAECLYDAGYIVSVINPALGKAFAQSEGLRNKTDTVDARMLAEFCRQKRPAAWEAPHPLERALRALVVRHQALTDMHTQELNRTETAREVQRPSIDAHLLWLEAELKRLEKQIKDLTDDDPDMKHRRKLLESIPGIGEKTSAVLLAYIGLKDRFAHARQFAAFAGLTPRRYESGSSVRGASRMSKAGHVSLRRALYMPAMVATSKTECLRAFRDRLAANGKKGKVILGAMMRKLAQVAYGVLKSGVPFYSSLHNPLSS

SEQ ID NO: 74856 - protein, 311 aa, unidentified
MAKQDVFVGIDVSKDRLDVHVRPLRSGFSVANDAAGHAALVAQLKPLRSTRIVLEATGGYERALWIALTEAGLVAAVVNPRQVREFARASGRLAKTDRLDAAVIAHFAETFSPAGIRNPDPVADRLGEHVLYRRRLSEEAVALDNQLRQLAELRPRAERRLASLKAEIREIDREMQRIVAGDPRKKALYTCLTAYKGVGPVLACTLIANMRELGRLTRHQAAALIGVAPINHDSGAWRGHRAIAGGRVGVRNVLYVATLSAIRYNPAIKAFYRRLRDNGKPGKVALVACMRKIAVTLNAMVRDHLAEQPAT

SEQ ID NO: 74857 - protein, 361 aa, unidentified
MRIIGCDLHARQQTLAMLDTTTGEVATMTLKHEGNNVREFYSKLPRPVRVGIEATGSMQWFVNLLEELGMECQVGHPATIRAAEPRKQKHDRRDADLILKLLVENRFPRIWLPSKELQDLRALLRHRHQWVRIRTRIQNALQAIALANGLRRGPSLWSQDGQSKIASLPLAPHTAYRRSELQAMYAKFEAEIEKLNQRVEEQALERPGARLLMTHPGVGPITALATEVFLGDAARFADSKALASYVGMIPSEYSSGGRQRLGGVSKQGNPLLRFLWGEAAAHAVRRDPELQRFYRRKLVQKGLGKSRVAVARKLGIRLWIMLRDEIDYNEFCRRGQKQQKSSEACAGMPDTGHGVKQSPAD

SEQ ID NO: 74858 - protein, 378 aa, unidentified
MSLVILGVDPHKQSHTATALVVGSHQQLASLQVPASQSGYRQLLAWARQFPQRRWAIENARGLGCHLTQWLLAGGETVQDVRTTATARVRELSRGRGRKTDALDAAAAAGIAALQGDAEQLQPEDATVVLAVLEERRSNLVGQRTRSVNQLHALLRKLIPGGAPRKLSADKAAALLRAVHPLTAADRARKQVAWDLVAEVRGLNRRLAMIGKQIQDTVTALGSRLPETVGVGPIIAGRLLGRTGRASRFPTAAHFASYTGAAPVEVASGERARHRLSRAGDRQLNHTLHIIALVQVRSQAAPATTTSGANWPRARRPEKLCVASSAGSPITSGESCSATNRPATSANSRRLDTQRRPRPVAVKRQAICGGGTPLVRCR

SEQ ID NO: 74859 - protein, 413 aa, unidentified
MQVVYERCCGIDVHKQTVVACAIVPGADGQSVKDTRTFATMTEDLEGLAGWLQGLGVTHVAMESTGVYWKPVYNLLDGRFAILVVNAEHIKTLAGRKTDVQDAEWIADLLRHGMLKGSFIPSQVLRELRDLTRYRTKLGDEHKSEVNRVQKVLEDANIKLASVASDVMGVSGRAMLDQIVGGQSDPAILAELAKGRLRDKQELLLKALSGRVRAHHRFMLAQHLSHVDFLDEAIAQLDQQIEEQMRPFAAALAAWDSLPGINQRIAEIVVAEIGADLVPFEDAEHLASWAGMCPGNNESAGKRKSGKTRKGSPWLRRALVEAAHGAAHTKGKYFQGLYRRLAARRGTQRAAVAVGHSLLVTGYYLITRQTKYEDLGGNYFDERDREGVKRRAVKRLEKLGYRVDLAPIAAPAA

SEQ ID NO: 74860 - protein, 431 aa, unidentified
MMILALDLGKFNTMCCFFDSETRKHEFIVAATQREYLTKIFKLKHVDIVVMEACGPCGWISDLCEELGLKTFVCSTNEDAWKWANVKRKTDRDDALKLARLFILNELKPVHVPSKEHREFRLLVKNRKSIDYRITRVKNCIRSIFVNQGVSIGRGSTAWTKEGRKYINSFRNPMSTCLPREYWKGQLDLELSQLDALVEQLGIAEKPLEDIAKKDPRIIRLMTIPGVGRKTAEVIVAAIDNADRFANCRQVSAYFGLVPKQFQSGETDRNGRITKRGSSLVRAILVECAWCSIRYNPWAKAVYERIHGKQKTRKKKAAIALARKLVVVAWAMLRNKTDWAPAIMAKVTSSYKGGEPRVETAQNASSVSAPKEETSTESPERVERVVASKPKERSSRATSSLTGQVKTPGRKVVIDAAEAKVRKPSRRAVAT

SEQ ID NO: 74861 - protein, 343 aa, unidentified
MKLTRVGVDLAKQVFQVHGVDRSERAVWCKRLKRVRWVADLERDVEPDAEIGMEACGSAHHWARVLQAKGYRVKLIAPQFVKPYVKTNKTDANDAEAICEAMSRPSMRFVAVKTIEQQDLQAVHRVRSSLIRDRTAKANQLRGLVYEYGLVAPREISSLRRAVPEWLENAENGLSARFRSLLAGLYRDLQQLDERVSELDHEIATIAREHEPVGRLIQIRGVGPLTASALYALVGDARQYRNGRELAVALGLTPRQHSSGGKEKLLGISKRGDKYVRTLMIHGARSALRTAPGRTDRISRWALALAERAHPNVATAALANKMSRVAWAMLRHGTNYEPEHAVA

SEQ ID NO: 74862 - protein, 442 aa, unidentified
MIDTNRSPDLVIGLDRSDRKADLHFIDTTTGQTRSETLASSPENLRQWLLDLRQRHPKASVAICLEQPAGHLIPFLETYNWITLYPINPISLQKYRETFVTSRAKDDGKDAQYLAELLLNHRHKLKPWQPQDSQTRLLQQMVSHRRAVVDERTALTNRLQALLKAYFPQALELCGEDLWRPLATAFLLKWPTLLAVQKARPATLKQFYYLNGSRSQKLIEQRLKLIEQAVPVSDEPALNLSFAMRVQLVCRQLQQVVRTIKQYDEQIAQTFAQHPDRQIFTSLPGAGPVLAPRLLAAIGSERERFESAANLQRYTGVAPVTKQSGKMRYVHRRYLCPLFERQSFHEYAKESVLWCRWAAAYYLDQRTKGKPHHTAVRALAFKWQRIIWRCWQNRKPYEEKIYEAALRKNGSKLVSLFDRIEVGKNPVKNPAKPLEKTDAKKI

SEQ ID NO: 74863 - protein, 356 aa, unidentified
MSSQTAVGWDIHRKFSQLSVVQRSEHGEIRVVKRIRLEHADRPGMRAALSQLPPGTPVAMEGAFGWPWIADLLDELGLDPHLGHPPAIKVLAKNEAKADRVDADRLGRFWLRGIFPKSYLSTPEVRNLRERLRYRMALVCLRSGMKNRVQAILHRQGILHDFSDLFGKGGRAFLKTLALPAAGRAVLDGWLAQIDLVGEHLAEVEAWMEEHLEADEIVRLLKTIPGIGLILAHVIRAEIGQLVERFPSRKHLTSYAGLAPVADDSADRHGRRHIASACNHTLRWALIEAAGCILRSKSCPTNLRQLHNRLTHGGRVHKSQAKVAVARELCELVYVIWKKGEPYREPTVVRPPRAKR

SEQ ID NO: 74864 - protein, 343 aa, unidentified
MDYFAGLDVSVKDTSICIVDDTGRIVREVKVASEPDALLAVLTNSSYRFKRIGLEAGPLSQWLFSALAEAGLPVICVETRHMRAVLKARINKTDRNDARGIAQMIRVGLYRPVHVKTLRSQKLRMLLTHRKLLQSKTIAIENDLRGTLRNFGLKVGMVGAAKFEARINELVENLPDLAVLVEPLLVVRQALREQIGVLHHRLLAIVRDDEVCRRLMTVPGVGPVVALTYRATVDVPVRFRKSKSVGAVFGLTCSRDQSGERDRPGAISRCGDEMMRAMLYEAAQSMLVRSTRWSWLKAWAMKIARHRGMKRAIVALARRLAVIMHRIWVDGTEFRWTREAAAA

SEQ ID NO: 74865 - protein, 316 aa, unidentified
MSIIVGIDVSKASFEAYMQGKTRSFANSKAGFAQLLKWSKGADLYVMEATGAYHFALADHLHGTGMKVAVVNPRMASHYARALGMVHKTDRADAKVLATYAERNDVPPYVPDSAALRRVRKLSRHRERLVQSLCVLKRQLAEPGLDGFESRQLKAQMKLLKEQLKTVEREVLGAIAADEDLARSFALLVSIPGLGTITAVTLLAEAGDVSRFPSAKHLASYAGVHPRLKESGTSLRAKPKMSKSGSSAIRKALYMSAMAAARQEGPCKALFVRLQERGHPRMSALGAVMHKQLRLAFGVCSTRTPFSLQRTGLTTA

SEQ ID NO: 74866 - protein, 367 aa, unidentified
MKKVSTVETKQIRNFSEHKLTIGLDLGDRSSWYCLLDEVGEVLREQKLGTTPKAMREVFGGMPRSRIALETGMHSPWVSRLLSGLGHEVIVAHARKVRLIGESRKKDDRLDAQTLARLARIDPQLLCPVKHRSAKAQADLTVIRARAGLVRARTALVNTARGLAKSYGERLRGCNVRNMNPEKAEGVSPELQRALEPLLAGIESLSERIREYNEGIEKLAQESYPQVALLKQVKGVGTLIALTFLLTLEDAHRFGKSRDVGCYLGLQPGRRNSGQSEPQLHISKEGDPYLRTLLVQGAHHILGPFGADSDLRRWGLKLSERGGKSGKKRAIIAVARKLAVLLHRLWVSGEVYEPLRNSNQRTIPAAA

SEQ ID NO: 74867 - protein, 423 aa, unidentified
MPYRIAGIDVHKKKLAVVVADVEVEDEYQFERRWYGSNPEQMQLLGEWLIQQQVEEVVMESTAQYWKPVWGALEQYWKPRCEKREGAGRMSGTLHLAQALSNRGRRGRKRDFRDAERLLKRLVSQELTLSFVPHAEQRLWRTVTRTKYQLRRNKVRLHNQLEALLEEAHIKLSSFVSDLLGASARRMLQALADGETDPAALAALADQRLRATSAQLRDALGACTELNPVYRRLVKMALEELQLIEQQIAQLDQEMAGLLRQHQDAVQRLAEVPGLGVDSAQQIIAEVGVKAATFVSAKNLSSWVGACPGAEESAGVNSSPRSPKGNRHMRRLLNQAANAAAKRKGSIFEIVYRRLVPRLGHNKTIGAIAHRICQLIWMILNKGVRYEERGPAVSENSKRTRTSRMIRTLRKLGYRVEPLSDPA

SEQ ID NO: 74868 - protein, 337 aa, unidentified
MDYFAGLDISMDETHVCVLDREGAVVRESKAASTAEAIAGELSKAPSCRRIVFETGRMAPILFHGLNQLGLPVVCVESRQAYQALKSLATHKTDRNDARGLAHLARTGFFKPVHVKSLRAHALRSLISARKKLVGQRVTLENQIRGLAVVFGVRLPRALTTAFIDQALKASEGVAGLSAAMRGLSAARVAVMTAVAAIDADIRRMTRASAACRRLMTIPGVGQLTALAFVAAIDDPSRIRRSRDIGAYLGLVPRRYQSGEVDYTGGISKCGDGRVRTLLYEAANVMLTRYKGQLKLKDWAFAIAKRSTMRKARVALARRLAIIMHAMLRDGTEFVPT

SEQ ID NO: 74869 - protein, 372 aa, unidentified
MDAPHLRNGIGCAKVWVLKPRKAGESVMSKVTTIGLDLAKNVFQVHGADEQGKRVYTKRLKRGQVLEFFAQHPIARVGMEACGGAYDWARRIEALGHEVKLMAPQHVKPYVIGNKTDARDARGIAEAAARASVPALALRSEESQQCTVLHTVRSQWMKQRIACANEMRGLLAEFGEIVPKGMKQFRAHVNAALERLRPRLPLFAGVLDDMLEQLRKFEENIAKLEGQIKQLHVNSPASRLIEGICGVGVLSATAVVARYGGCENFDSSRKFASAIGLTPKEHSSGDKQMRLGISKRGDPYVRYLLIHGARSVLKVRMNNPAYQDDWVVRVARRRGVNIAVVALAAKNARRIWAMLRTGELFDPNHGKALVPA

SEQ ID NO: 74870 - protein, 425 aa, unidentified
MEILVERACGLDVHQATVVACVLAGEAGRKPTKEVRTFGTCLRDLEELRDWLTDRGVTHVGMESTGVYWKPVYTVLEGSFELVVGNAHHIKNVPGRKTDAKDSEWIADLVRHGLIAKSFVPPKPIRVLRDLMRYRRKLLNSRSSERNRLLRLLETANIKVASVATDVFGKSGIAMLEAIARGETSGETLAEFAKGRLRNKREKLAVALDGRVEQHHRFLLRLQLDRLRGFDASLRTLDEYIDAKMDPYLTQQQALEEIPGVGVTTARALIAEIGVDMTVFKNEHHLAAWAGVCPGNHESAGKRLRGTARRGNVHVRSALVEASIAAVRKKGSYFRDKYYRLKARRGSKRAALAIGHKILIAAYHILADGRPYRDLQNARDVEPPGRARAPRRPRARLLFHPHAKRQGRGPGHPDAPLVAALGPRL

SEQ ID NO: 74871 - protein, 482 aa, unidentified
MVVPNEEPKKPTKPNKPTKPNKLTKPNKSRERSLPIPVPVSAAALHVINPDAAGIDVHSDMHMVCVPADRDANPVRQFGANTADLQEIVAWLKKCRVRTVALESTGVYWIPLFELLESEGFEVNLVEPGQLSRCGARPKTDVLDAQWIQRLHSYGLLRASFRPPDSVLALRAYWRQRQMQVRYAASHVEHMQKAMEQMNVKLTEVVSDITGLTGMLIIGAILEGERDPIKLAQLRDRRCQHSEEQIALALQGTWRPEHLFELRQAYELYQFHHRQITECDQQVEAELANFPNRAGEKTRTVKRRKRGRKSNDVRFDATGPLFQALGVDLTLIEGIDVGTALVILGEIGVDVSRFPTEKHFASWLRLCPPQDESNKTKKRRGHRKGTNRVTIALRMCARSVGKAMTPLGLFYRRIRSRIGGLGAVKATAHKLACLVYRMLKYGQQYVTQSMEDYEAKVKANMLKALKRKAAAMGFQLSPLPTQ

SEQ ID NO: 74872 - protein, 345 aa, unidentified
MQSMYYIGLDVHKKTISYCVKDGSGIVHGEGAIPATRWDLDRWMKMLPQPWTAAMEATIFTGWIYDHLKPHAAALKVAHPLMLRAIAAAKKKNDRIDANKIADCLRCDFLPECYMASTEIRERRRTLRYRNLLVHQAVQLKNKISGLLMEAGVSYNKQKLHKVGYFKELLATNPDINEGLRPLLRLCRETLVRLQKTESALARSLQRDSLLAERVQRLMTIPAVGPITALTWVLEVGDVKRFSSIKKAISYCGLCGAEKSSADTVKRTPISKQRNKHLQSVLVEAAKMAPRLSPELALIYDREKQKGNANRASLAVARKLVAYLVAIDRSQRDFLVVEKENCAAA

SEQ ID NO: 74873 - protein, 360 aa, unidentified
MEYIAFDAHKRYTQVSVETVEGERRYEGRIDHARGALQQFLATCQRGSPVAVETVGNWYWIVDEIEAAGQVPQLVHARKAKLMLGMVNKTDKLDARGLNRLQRAGTLPTVWIPPGPLRDQRDLPRTRMVLTRERTRLKNRIHATLAKYGLRLEGTSDLFGRRGRQWLLTAALPVLAPHSRYATERLLEQLDVVSAQIEGFEQRLRAVFAPTPELQLLRTLPGVGWVLAVVILLEVGDIRRFPRAAQLAAYAGTTPRVHASGGRTHYGPARGDVNRYLKWAFIEAASTAWRTRPARPHRHVSRLYARVQQRKGHATAVGAVARHLAEATYWILTKREPYRDPASSTEGPARSAHERATLGI

SEQ ID NO: 74874 - protein, 342 aa, unidentified
MSEILTVGLDLAKNVFQAHGADASGRAVLRKKLRRHQVLEFFGQLPACVVAMEACGGAHFWGREIGKLGHDVRLIPPAYVKPFVKRQKNDAADAEAICEAALRPTMRFVPVKSEETQGAAMVFRVRELLIRQRTQAINSLRGHLGEFGQVVPQGAANATKLIAIIEDPECDLPADAIPTLKVLVAALAQLEAEISKLDTEIARRAKENDVARRLMTVPGIGPLIATAIATLAPPPETFRKARDFAAWLGLTPRQHSTGGKQRLGATTKMGERSLRRLLIIGANSVIIKRHVHAAARPGSWLAGMLTRKPPMLVRVALANKMARIVWALMARGGVYQSPVVAA

SEQ ID NO: 74875 - protein, 410 aa, unidentified
MEVLYPHCAGLDVHKDTVVACVRHMVNGSVRREVRSFKTTTKELLALSDWLAGEGCTHVAMEATGVYWKPVWHVLSDGDFTLVLANAAHVKNVPGRKTDVNDATWLADLLAHGLIRGSFVPDEQTQEMRTLLRTRKQLVRECSRHVQRLQKTLEDANIKLDSVISDIVGLSGRRMIEALIAGETEPGALAAMAHRRIKATPDELEAALRGRVTRHHRFLLQLHLQQIDAVNAAIDQLDREVDAYVEPFRATVRLLTTIPGIDELSACVILAEIGRDMSRFPTAGHLISWAGLCPKNDESAGKRRSTRMRKGAPWLKTTLVQCAAAAARKKASYLQTQFHRLRARRGAKKALGALAASILTSVYHMLISGELYRDLGPHHFDQRAKAVNTRRLVMRLQNLGYAVQITPLAA

SEQ ID NO: 74876 - protein, 336 aa, unidentified
MISGLGVLLGTRSFPTTASGYRQLLDRAGGFGTIRRAGVECTGSYGAALARHLSANHIEVIEVNQPDKASRRRRGKTDTVDAEAAARAVLSGRARATAKAGDGPVEMLRIFKLAKTSAIKSRTQAINQLKAVLVSADPQLRESLSGLRNPTLIRRCAQLDTSPPHDAPTVAAYTLALLARRILELTTEIDDLNQQITAILTRHAPTLLQRNGVGPDTAAALLIAAGDNPERLHSEASFAALCGVSPVEASSGKTHRRRLNRGGDRRANSALHTIVLSRLRWDRPTRAYPTRAYLARRLTEGKTRREAIRCLKRYVARELYRLIAPPTEPQRQTPAA

SEQ ID NO: 74877 - protein, 357 aa, unidentified
MPSSDVKYIGLDVHKEAITIAVLNGASKLVMESIVETKASTLLDFLHGLRGELHVTLEEGTWAAWLYDVLKPHVREVVVCNPRRNALLKEGSKNDKVDARKLAELLRTGMLRTVYHGENGLRTLRELARSYEAVSKDLGRVMNRVKALYRGWGIPCMGMQVYSRRHREPWLNKILEPGVRRRAELFYQQLDGLQTLRRTVRGELLAESRKHAGVKLLRQVPFIGPMRAAQLVALMQTPHRFRSKRQLWTYSGLAVETHDSGQYRYVDGQLQRSKKPQQVRGLNHNHNHAMKEIFKGAALSAALRAGPFQDFYEGLLARGMKPELARVTLARKIAAITLTLWKKGACFDAGYVKPQAA

SEQ ID NO: 74878 - protein, 391 aa, unidentified
MSMYFIGIDISKYKHDCCIISAANQKVVSKVIIKNNKAGFNELLTIIHSLANPADIRIGFESTAHYALNLELFLENSLLTFMEVNPVLISEYKKSKTLRRTKTDSVDGESIARWLMTVEYKPHSKGFYHAYSLKSLTRLRDKLIRQRSFYLVKITNVLDHTFPEFKPFFNERLSKTALYLLENYGSAEKMARMNSASYEKLRSVSRGKFSPQQFLRLKELAVNTVSVNNSIFDVELNSLLSLYKSLVKEIDTIKKEINQLIEEVHPHYMSVPGIGPLSAAVIYSEYGDISNFTNPGQMLAFAGIEPGINESGTESHGGKMVKRGSSQLRYTLINCCLPLIRFDMTFATYYAKKRGEGKPHRVAITHVAKKLIRVIYALESQDIDFNAQELR

SEQ ID NO: 74879 - protein, 365 aa, unidentified
MPSVTSAAGLIHLGMDTSKNTIVVGVLMPGEQIPAVDRIFNDEAAIRRLIGRFPDRGLLRACYEAGPGGYDLYRLLASMGVACDVVAPSLIPKGGSDKVKTDRRDAVRLTRLHRAGELAPVRVPTPAEEAVRDLCRVRAAVLSDRKRAQQRLTAMLMRHGRIWRNTYWTGPHRAWIAAQSFDEPALATALAHYRATLDTRETELACIESELAPWARRDPLAPAVARLGCYRGIAELTGLTLAAEVVDWRRFPAARAFMGFTGLVPAEYSSGAKTWRGHITKAGSGPVRTALIEAAWAYRFQPAIGVTLRRRQEGAAPDTLARSWKAQRRLHGKYRRMVTGGKAAPEAATAIARELAGFVWAEMTS

SEQ ID NO: 74880 - protein, 312 aa, unidentified
MMAQHDGVVVGIDVAKDKVDACIRSRSQRRTLANTAQGHRALLAWLRKHKVTQAVMEASGGYERSWAKTLREGGIAVRIVDPKRVRSFAQSAGRLAKNDPIDAEMIAWFAETFDAAREELQKLVNARQALLDMRSKIQSQAEHAAPAVVQNMQARLLKSIAAETAKLEAAIAAMIKAVPHFAARAEIIESVPGLGDVAAANLIAAMPELGEVSDKAAAALLGVAPYDDDSGRRRGDRHIKAGRRKVRNAFYMACLGAATQHNPMLKAFYRRLTAKGKLPKVALVASMRKLIVILNTMIARGQKWDASRYALS

SEQ ID NO: 74881 - protein, 338 aa, unidentified
MAMYCGIDLHSNNNFVAIQDGAYEDVVCRRLRNDLGAVLKFLEPYREELEAIAVESTFNWYWLVDGLKEAGYDMRLVNTTKASDYSGMKYTDDRHDARWIAHLLALGILPEGYIMPPQERGLRDLLRRRSYLVHQRTSLYLSVKTIFARSNCQKVTTHDIRSWDFETVRRMFDDPHVAESVVAMLPVVRVVTAQIKGVEKIALETGKLRDEFRYLLTAPGIGDILALTIMCETGDISRFRKVGNYGSYCRCVKSERFSNNKKKGKGNRKNGNKYLSWAYSETAHHAKRFEPLAKRYFDRKKSHSHPMVAARALANKMARACYYVMRDQVPFDSSRTFC

SEQ ID NO: 74882 - protein, 405 aa, unidentified
MDLLYTRCAGLDVHPRSVSACVRIVIEGRVSHEVRTFGTSTRELREMADWLASLGCTHVAMESTGVYWKPVWHVLEGRFELVLANAMYIRNIPGRKSDVKDAVWIADLLAHGLLRASFVPPEKIQELRDLTRSRKQLTREITRHTQRIQKTLEDANVKLTEVISNILGVSGRAILRALITGETDPDRLIELTGGRLKAPRPQLRDALRGRVTDHHRFMLKMHLEQVEHLEAAVRDLEARADQGPFRVATELLMTIPGVSKVTARVIVAEIGDDMSRFPTAGNLVSWAGLCPRLDESAGKRRSTRVRRGAPWLKTVLVQAARAAANKRDSYLRAQYQRLKARRGPNKAVLAVAASMLTSAYHMLKYGVEYRDLGPHHFDRDKQIQAARLLRRLKALGVDVTVRPAA

SEQ ID NO: 74883 - protein, 346 aa, unidentified
MEQISRMGMDSSKHVFQLHGLDAGEKVVLRKKLRRKEMIAFYQKLPPTVIAIEACAGSHHWARLLTSFGHEVKLIAPQLSKPYVKRGKNDAADAEALCEAMSRPTMRFVPVKTAEQQAALMLVGVRDRLIRNRTQLSNAIRGYAAEFGLTVAKGMAHLSPLLERIRADDSLPALARELFAAQAEEYQQLQAQIDAFDVKLAAWHKTNECSRRLAKIPGVGPIGAALLQMKTPAPGLFRSGRQFAAWMGLTPKDHSTAGKVRLGIITRAGDEALRSVLVVGATAVIQHVRRGGRAEPWIVELLKRKPPKLAAVALANKTARIAWKLMVTGESYSVKSPCAAVSAVAA

SEQ ID NO: 74884 - protein, 419 aa, unidentified
MVQDDDNSLVSVVHPICCGLDVHKETLAACLLITGADGRIQSEIKEFATFTDELLRLREWLVVNDCPVVAMESTGVYWRPVHNVLEGQVTVILVNARHIKNVPGRKTDVADSQWLAGLLRLGLLKGSFLPPQEVRQWRELTRLRKHYQESIGDFKRQVHKLLESANIKLAAVLTDIFGATGRLILERLAHQDGIPDLSDLERGAGGPRRQKTQELRRAVGGFFTAHHRFQLCLLLRSIRQLEGQLGEVLVRLEEQLTSHQELRQRLQVVPGIRQVASAGILAEVGPSLADFKSSNALSSWCGLCPGNNQSAAKRKSGRSPVRSHPLKTLMVQVAWAAVKKKGSYYKDKFHRLRYRLGPQKAIVAIAHRLLKAVYHIIKDGAAFRDLGEDYLQRRHHPGRLNYLKKQAQLLGYELIPATA

SEQ ID NO: 74885 - protein, 449 aa, unidentified
MERYAGVDWASEKHDVLVQEAGGEQVLAATFTHDERGLAALCSTLMRLNVVLVAIERPDGLLVERLLDAGLRVMAIHPNQVAAARPRFRTSGGKSDGFDAFVLCELARTDAHRFRVLVADSDDTKALRALSRAREDLVQARVALANQLRAELECFWPGAALIFAEIDSPIGLAFLARYPSPSDARGLGEKRLAAFLARHAYCGRKQPTELLAKFTSAPAGRAGDAEIEARRAIVLALVAALRPIVTKISQLTREIAHRVRSHPDGHVFLSLFRDPKSVVCAAALLAEIGDCRARYRSAEALAADAGMSPVAVESGKRKVACFRHGCDHRLRSAFATLTDATRHWHPWAADRYAAARARGQDHQRAIRTLGRAWCRILWRCWQDHAAYDPERHRGLQQHIAVMIPDQSSPRLDLKATQRMAGAAVTRRAARSAEREALDGKPTSATTLEG

SEQ ID NO: 74886 - protein, 371 aa, unidentified
MKKSSMFIGLDIHKDSIEIAIAEAGRDGEVRSYGGIDGTLDALDKVIRKLVSKGCNLHFVYEAGPCGYDVYRHLTAQGFDCVVVAPSKIPRQSGNRIKNDRRDAQMLARLHRAGELTAVYVPFVEDEAMRDLTRAREDAKAVEKKAKQRILAFLLRHGHRYSGKSTWSRAHFRWISILKMPHPAQQIVLQESLDALAECTRRVDRLTEQIQTLSPQWRLFPVTQALQSMRGVSLIVATTTIAEIGDLTRFGRPAELMSYLGLVPSEHSSGQTTRRGSITKTGNGHVRRVLIEAAWAYRLPARVSRKLLIRQEGLSQEVCAISWKAQLRLCARYKRFTAKGKSHQLVVTAIARELCAFMWAIAHEVQGPVKM

SEQ ID NO: 74887 - protein, 318 aa, unidentified
MISINPILSRSAGLDVHHRTVVCTVLIAEGENQVTKTTRHFKTFRSELVKLAHWLNGQRIEVAVMESTGIYWKSVYRALEEAEVTTLVVNARHVKVVPGRKTDACDSEWLAELGRYGLLRGSIIPPSDFREWRLLTRYRRKLSGYVSAEKNRLHKLLDDCGIRLGCVVSDIDGVSARSMIEALIEGSMTPVQIARLAKGTLNRKVEDLILSLEGDLSDRHRFLLKQVLAHLRGLEEEIRAIDRKVEEGLAPYKTQWQLLQTIPGLDQASAAMLLVEIGVDMSRFGHKERLCSWAGVCPGNNESAGKKKVAEPDPATIT

SEQ ID NO: 74888 - protein, 385 aa, unidentified
MSELNDLSRSLTSLEQDKTIIAVIEMSQSSWLVAGIIPGIERHPLKKLEPSEEELVRLLMRWRTEATKNGHTITRFAVAFEAGRDGFWLARWLRARDIETYVIHPTSVAVSREHRRAKTDRLDTGLLKRVFIGWLRGEPDHCHMAAIPTLAEEDAKRPNREREGLVRERTRIVNRMKSCLARFGIRNFKPTLRKAPERLATLATPEGVPLPPNTLLELRRDMARLRFVMDQIKEVEEARAQRLEQAPQEKTHAMVRLIARVIGVGIETADMLVHEILSRQLRDRRAVARYAGLTGAPDESGNKRREKGLAKAGNARVRRGMIQLAWRFLVFQKDSALARWYRTRTESAGKKRKTMIVALARKLLIALWRLVTIGEVPAGVVLRAA

SEQ ID NO: 74889 - protein, 370 aa, unidentified
MADDITFVGLDVSKEVIAVGVAPGDRLEAVHYFGTISNNLDALYTLCERLSREGSDLHFCYEAGPFGYSLHRRLERWGHVCDVVAPSLIPKRPGERVKTDRRDALSLASLLRAGQLTPIWIPDASHEAVRALVRLRRLAAGDVARAKQQILSFCLLHERVWRGGSHWTKTHRNWLLDQKFAHGALALTYAELLGRLERAEEMLARTRSELKENLAAWALYPVVEALQALRGFEWENATMVVAEIGDFRRFPTAGHLMAYVGLVPSEHSSGDRRRRGQITKTGNGLVRRVLVEAAWSYRYPARQSHRIRNRSAHLPEPIRDQAWRAQTRLCRRMRDLRRRGKHQNTALAAVARELAGHVWAIARMVEPKMA

SEQ ID NO: 74890 - protein, 403 aa, unidentified
MNMNAVGIDVSKGKSMVAILRPYGEIISKPFEVKHTVSGIRSLIEQIQSIDGESRIVMEHTGRYYEPLVRELSKADLFVSAINPKLIKDFGDNSLRKVKSDKADAVKIARYTLDSWTELRQYSLMDEIRNQLKTMNRQFDFYMKHKTAMKNNLISILDQTYPGANTYFDSPAREDGSQKWVDFSATYWHVDCVRKLSLNAFIDHYQKWCKRRKYNFSRSKAVEIYEASKELVSILPKDDLTKLIIKQAVEQLNTASQTVKQLRTMMNEAASKLPEYPVVMAMKGVGKSLGPQLMAEIGDVSRFTHKGAITAFAGVDPGVNESGSYEQKSVPASKRGSSTLRKTLFQVMDVLIKTKPQDDPVYLFMDKKRAQGKPYYVYMTAGANKFLRIYYGRVKEYLSSLPE

SEQ ID NO: 74891 - protein, 414 aa, unidentified
MANKKEVIEFDQVIDKGCGIDIHKKVLVATVQGKGIKKETRSYDTFTESLESCKIWLKELGITHIAIESTGVYWKPVFNIFEDSFQIVLVNARHLKSIPGNKTDKKDSKRITKLLLAGLLKGSFIPPRVVRDIRDLTRYKRRIIEQISSEKNRIHKFLEDANIKLSSVVSSLSGVVATKIINAMIGGEDDIKELVKLRHGKMNATIEELSSALTGKLTKHHKFMLSVVKKSIESKEVLIKELDAEIDKLLKDNQMVHDAELLSTIPGVSKESATYILAEIGNDMGQFPNEQHLASWAGLSPGNNESAGKKKSSRTTHGDKWLKAMIVQCAWAATRTKGTYLRSKYDSLVGRRGKKRALIAVGHKILIATYFILKNKETYKELGGNYLDKMTKEKQIKRHLRQLRELGVDVSQAA

SEQ ID NO: 74892 - protein, 381 aa, unidentified
MCRCRASCIGDGSWRIVSRISGLMFTRQTLSWPWPRVACAASRDYGRIVNTPAALERLARKLGHDGVKLRFCYEAGPCGYGIQRQLSALGHECVVVAPSLIPKRAGDRIKTDRRDAASLARLDRAGELTPVWVPDAGHEAMRDLVRARLDAVQALRRARQQLSGFLLRQGCHYGRPAWTKLHRRWLAGLKFEHPAHHIVLEDYIAAVEAAEVRRDRLTAQIEAMLPDWSLAPLVAALQTMRGIALVNAASLIAELGDLSRFANPRQLMAYLGLVPSEHSSGVSIKRGGLTKAGNGAARRLLIEAAWCYRFPARVSRELRLRQEAQPIPIREIAWKGQRRLCARYRKLARSGKPANVVTAAIARELAGFVWAIARQVAIPTG

SEQ ID NO: 74893 - protein, 330 aa, unidentified
MKKWNFILGVDVSKLTLDVHCAELNQHIKIENGAKGFALLKKWFKQLGIDLAKSIIVMEYTGGYEYKLIQFCESLSIPYTRIPGLQIKNSLGITRGKNDKVDAKRIALYTEEKIKTINPSKPLNKQVLRLKDLLSFRKKLVRNNAGFKASLKERIFMYDVTKEDPIRKITETQIRRTEKDIEKVENELKSLIKEDQSMFMNYLILTSIKGIGFVNALMTIAYTENFTSFTDPRTYAVYAGVVPFDHSSGTSLNAKKRVSHLANKEIKQELNQAAKTAIIWDKDLSEYAQKKLKIKPYPLVLNNVKFKLILRMFSLIKRGEMNVDNYVKAA

SEQ ID NO: 74894 - protein, 411 aa, unidentified
MELLLREVPGDRLVVAIDPGKVCNRVWLTTGERGLIGEPVSLPVLRDGVEELGRLIAASGVGGAPVIGIEATGALHRAWAAELERRWPGSLRTFAPSETQAARAQLGSRRFKTDDRDCAALVWLLRQGAGRPSAPSTIDALLGAVRHRRQLVDARRVLQQRLHDQLNALCPGLSAPVGHGRVLELEDPSGQAALACAIAFAGRAPTVRSLLARAPGRLTEANARFWVQRWKRLLPPPADAELRAQRLGRDVERWLGLRRDISALEDDLAELLARSDGQILTTLPGVAVVRAGAFAAHTLPIERWPTPEQLYSATGLAPASYQSASITRRGRISRQGLAEHRDTLMGIAWGLSQHSPAFRQRDRELRARGLRPIQARVALARHACRLCWRLLQTQQPYDDRRYDRARRDRGR

SEQ ID NO: 74895 - protein, 434 aa, unidentified
MSLGWQEMTLNDDVLIAVDPHKASNTAAVLDPVTKTVIEAARFANTVGGYAELIAFAARWAQRRWAVEGCHGAGRSLAQRLVADGELVLDVPAKLAARVRVYSRGHGRKTDKDDAVSVGLAALDGTGVTLVACDDATVSLRLLCDRREELTAQRTQAACRLHRLLAELTPGGMRRELSANKAQALLARIRPAGDVATVRVHIARDHLADIRALDARIKYLGGQIAALVTASGTGLTGLFGIGPVIAGRLLAEVGDVARFATKDTFASYNGTAPIDASSGEQVRHRLSRAGNRRINHALHMMAVTQIRYPATPGRLYYERKRREGKTPKEALRCLKRRLSDQVYYQLLTDRRGTIGTCGSPTTPPPTRSTSTSPAARSHQAAPPSRPLHRPAPPGSSRWTGKTAASSASRSSTPAPASPTTSSTRPKPTAKTATS

SEQ ID NO: 74896 - protein, 383 aa, unidentified
MTTAVTHHEQRNPNEATLFVAFELSEKTWKLGFTTGHGQKPRERTVTARHHEHVLNEIAQAKRRLGLPETAPVVSCYEAGREGFWLHRFLQGHGITNQVVDSSAIEVNRRRRRAKSDGLDVRKLLSMLLRYAHGERQVWQVVKVPSVEAEDQRHLHRDLETLKQERASTMTRIEGLLSSQGLRVTSLTKLPEQLEALRLWDGSPMPPGLRRRVMRVYAHYTFLSEQIAAVEVERRAQLQTSADASLDKIRQLMQLKGIGINGAWLLVMEFFGWRAFKNRREVGGLAGFTPTPYQSGESAREQGITKSGNRHVRWMTTELAWSWLRFQPDSALSVWFRERFGSGGKRLRRMGIVAVARKLLIALWRFLETGVLPHLHQATLFDL

SEQ ID NO: 74897 - protein, 408 aa, unidentified
MRLFVGDDWAEDHHDIELMDASGRRLAKARLPEGVTGMSRLHAMIGDQFSEAGDEDAEVVIGIETDRGPWVAALVAAGYAVLAVNPLQAARFRDRMGVSGAKSDAGDAHMLADMARTHSHQLRPVAGDSAQAEAVKVVARTHKTLIWERTRHTQRLRHALRDYFPAALVAFDDLDAADTLELLAMAPTPAQATRLTTAQISAALKRARRRNVADKAAAIQAALRAEHLGQPEIVTGAYAASIQALIAVLAVLSTQVKTLQGQVEAYFGQHPAAEIISSQPGLGPVLGARVLAEFGDDPVRYATAKARKNYAGTSPITRASGKKKVALARFIHNDRLIDALMAQAFTALLRSPGARAYYDRQRARGAGHNPALRQLANRLVGILHGCLTTGTLYDEATAWSHHAENVAA

SEQ ID NO: 74898 - protein, 370 aa, unidentified
MTTSKILFIGMDVHKDSIEIAIAEGNSQEVRRYGRIGGTHDAMRKTLRKLVSQGQSLHFCYEAGPCGYELYRYLVSEDHDCWVVAPSLIPKRPGDKVKTDKRDAVQLARLLRAGELTPVYVPNREDEAIRDLSRAREDTMLVQKSARQRLKSFLLRHDIRYQGKTSWTEAHLRWLAGEVRCPSPAQQIVFQEYVNAVTESQQRLQRLDEQIEHFAQAWRLYPAVEALMSMRGVQMIVAITVVSELGDLSRFENPKQLMSFLGLIPSEYSSGPRQKRGGITKTGNGHVRRILIEAAWCYRYPAKVSREMQLRQAKVPLVIRDIAWRAQLRLTQRYKHMQSKGKPHNVTVVALARELAGFMWAIVNEVKYPR

SEQ ID NO: 74899 - protein, 453 aa, unidentified
MEEPQEVPEEEHERVWERVAAIDVAKGSGVVCTRVPDEDRPGRRKAHVHTVPARAGAIIELGDYLRGRQVQVVTLESTSDYWRIWFVLLEAAGLRVQLVNARTVKNVPGRAKTDKNDAVWLAKLTERGMLRPSFVPPPEIRRLREFTRLRASLVQDRSRYWARMEKLLERALIKISDVMSELNCVSGRAMIEALIAGERSPRVLAGLARAGLRKKQAALTEALTGRFEDHHGELARILLDQIDALTAQVDRLDTRIGELLDQIPAAWGIDAGGATGPDAGYQPGAAVLPAVARLDEIAGCGLIAARAVIAEIGLDMTVFGSPHRLVSWARRCPQTRQSGAKTSHAPPGKGSPWLNGILGEIAASAARTDTFLGERYRRIAKRRGKRKALAAIARSILVIIYHLLASPEARYHDLGPHYYDTRTDRDRKIRNHIRQLQALGLDVTIRPQAEPAA

SEQ ID NO: 74900 - protein, 392 aa, unidentified
MSQVSPRVVIGMDPHKRSVTIEVMDADERVLGGGRFATDAEGFHSMLDSVDAWPNRVWAIEGCNGIGRHIAHRLIADGEQVVDVPPKLSARARVFATGQGRKTDATDAHSVALVGTRMTGLRPVVNDEQLEVLRLLVDRRRFMGEEHTRKVAQLHALLLELIPGGAKVFLSAAQARKLLASVRPRDVVGKTRKRVATELVVDLEKIYARTKAADKELTELVKATGTGLLDLRGIGPSGAARLLVEVGDITRFPDRGHFASWTGTAPIDASSGDHVRHRLSRGGNRQINRVLHIMAVVQLRNPTEGRAYFDRKKASGKTSMEAMRCLKRRLSDLVYKTMLEDLVAAQKTGPGGQPGNDSVSSVTGSQPSAGSSDKSLPGPANTKPKRTLPAAS

SEQ ID NO: 74901 - protein, 350 aa, unidentified
MIIIGADYHPGFQQIAFVDTETGELQERRLQHREEAENFYRDLAAQGMKVRVGMEASGQARWFERLLAELNFELWIGDAAEIRSKRVRKQKTDRQDAQLILKLMLKDDFPRIWVPSWENRDLRQLLWHRHRMVQARTRIMNQLQAVALNEGLRCKKRLWREAGREQLEAVRLAPWASRRRRDRLELMDRLNPTITDLTQTIEQEVEKCPEARRLMTHPGVGSLTALAFVLIIGRAERFQCGKQIASYLGLVPLEESSGQRRRLGHITKQGNSLLRFLLVEAAQVSARSIPEWRAKYFHLAMRRGRKIAKVAIARRLAVQLFWMLRKGWDYEQVRKFGSHAGQPGNRDGVR

SEQ ID NO: 74902 - protein, 338 aa, unidentified
MYYTGIDLHKFTSYLTTIDSDGCIVKQANIKNVDYNFLQYFSDLGVEHQTTVESTCTWYWLNDLLTSINIPLTLAHAKYVKAIAYAKVKTDKVDSHILAQLLRLNFIPQAHKISNENRTLRDALRARLKIVQRCTSVTNSMALLLAKYNLSEPEGLQDIPKLQFEQLSVHASLLKEQMLTLEKSLYPYLIPNEDIQRLLWIPGIGKMNAFTIALEADDIKRFADVKNFFSYCRLSPSARNSAGKSKQRSSKDGNKYLKIVFTDAATHAVQYYPVIRKYHNSLLRKKNKIVAKTIIAKEIAEIVYHVLKYKTNFNNKFKGVELQHKKSLQWPRVVSPYA

SEQ ID NO: 74903 - protein, 416 aa, unidentified
MGYKVAGIDIHKQVLMVVVMLLVQAEGRVEKLERRRFGTTTPELEKLAAWLQALGVQEAVMESTAQYWKPVWGALEGKIPTLHLAQAFSNRARRGRKDDFRDAERWVRRRVAGELVLSFVPPPEQRNLRTMTRMQVHLTQDRGRLHNQVECLLEEMRIKLSSVLSDLFGVTGRHILGTLAKGETDPQKLAAWAGNRLQCTSQELVAALTGKVLAMHQRLLGLYLQRLQLIDDQIDELKPMIAAALAAHQEAVQRLAEVPGFGADSAQQMIAEVGPQAATFPSAGEMSSWVGTCPGQNESAEENHSSRSAKGNRYARRLLTEAANAAVKTKGSHWQVVFRRLLPRLGYQQAVWAVAHRLCRVVWKILHDKVRYVEQGVNRDPKARSNRARTLARALRQLGYSVELTPLTPAPAPTSP

SEQ ID NO: 74904 - protein, 340 aa, unidentified
MKEVSIIGLDLAKNVFQAHGAAADGSVVFRRKLSRAQLVKFFAAQPPCLVAMEACASAHHWARTIGALGHTVKLIPPAYVKPFVKRQKNDAADAEAIAEAAARPTMRFVAPKSEAQQAAAMAYRTRDLLVRQRTQTINALRAHLAEYGVVAPIGVAHVGRLAAVVEGEDSGLPEAVTTLARMLVGQIAALSGQIETLDKELRQRASGDDTARRLMTIPGVGAITASAITTFAPPCETFAKGRDFAAWVGLTPRQHSSGGKERLGRTSKMGQRDIRRLLIIGAVAVVKWAARNGAPEGSWLARMMARKPRMLVAVALANRMARIAWALMRNEEVYRDPAAA

SEQ ID NO: 74905 - protein, 355 aa, unidentified
MSSEKYIGLDVHQATISVAVMDSQGKFIMESILETKASTILEFLAGLRGSLFVTFEEGTWAAWLYDLVKPHVTEVRVCNPRKIPLLKQGNKSDKIDARKLAERLRLKDLKPVYHGETGVRMLRELARSYLTIVKDLSRVMNRLKALYRSWAIPCAGRDVYYTRHRSQWLEKIPEAGTRRRAEQLYQQLDLLQHLRQEARRELLAESRKHAITAKLRKIPSLGPIRSALAVALIQTPHRFRSKRQLWTYSGLGLETRDSGEYHYVRGQVQRRKKQATIRGLNKDYNHDLKGLFKGAATRASVQPGPFQEFYQRSLAKGIKPTMVRLTLARKIAAITLTLWKKGEDFDIGKLNSQAA

SEQ ID NO: 74906 - protein, 346 aa, unidentified
MEYYVGLDVSLKHTSICVVNPTGSIVQEGVVDSDPEAIALFVRSRAPGTVRIGIETGPTTTWLWTELKRLGLPVICIDARHAKAVLKMQINKSDRNDAAGIARIMQTGWFKEVRVKDLDSHAVKALLASRALLVKIKRDLENQIRGLLKNFGLVIGRGKFNVFAVRAAELIENRPELIAAVRPLLEARKAIEQQVDDLDRKVHKLARHDVQVRRFMTVPGVGPITALCFKATIDDPTRFKRSRSVGAYIGLTTRRHASGEIDWSGRISKCGDAMLRMYLFEAAGVLLTRVPKWSGLKAWGAKLTKRNGLRKAKVAVARKLAVILHRMWIDGTEFNWSTKKAAAEHA

SEQ ID NO: 74907 - protein, 370 aa, unidentified
MSQSSTLFIGMDVHKETIAVAYVAQDHGAEVVYLGTIGTRQCDIDQLIRKMQSKAKHLIFVYEAGPCGYWLYRYLTKKGYDCWVVAPSLIPKKPGDRVKTNRRDAVQLARLARSGDLTAVYVPKVEDEAIRDLTRAREDTLSDLKDAKFRLKAFLLRHDIRYTGRANWGPAHLRWLSEVVCPTPAQQIVFQEYIRAVTEHTERLQRLDQELHEHVQAWRLHAVVEALQALRGVQFTVAVTMVAELGDLTRFDTPRELMKFLGLIPSEYSSGERRHQGAITKAGNTHARRALVEGAWAYRYPAKVSRHLQLRLEKQPKIIQDISWKAQVRLCKRYRHLVARGKHANIVTVAIARELAGFMWAIAKQLPVAV

SEQ ID NO: 74908 - protein, 340 aa, unidentified
MPLYGGIDLHANNSVVALMNEQDEVIYQKRLPNDLPTILEQLAPYHADIEGLVVESTYNWYWLVDGLMEADYRVHLATPAAIQPYNGLKYSDDHSDARWLGHLLRLGVLPEGHIYPKADRAVRDLLRKRAHFVRQHTANVLSVQNIMVRNTGSRFSVKRIRELTAKELKHLLPEAYQVLAITSSLAILDCLSQQIKTLEKAVSKRLKHTPSYEQLLTVDGIGTILAQTIALETGQIGRFPTVGDSASYCRCVNSTKLSNGKRKGTGNVKNGNPYLAWASMEAAQFALRFQPAAQRLYHRKLAKSRNNTVLARKSVAHKLSRACYYLMRDLVPFEATKAFG

SEQ ID NO: 74909 - protein, 432 aa, unidentified
MSKFFYSPTVGIDVSADFSMVAILAPNGVIYRKAFKIKHDVDGFNHLVKEIKKVEKEFNMKTGIFMESTGVYHLSLFHFLKTKNLEVYVINPLVTNSIKNNNIRKVKNDKKDALTIAKIGKFQNIKAYSYFDVPIFTLKSLCRDYYKLVDTRSTFKKKLSADLRIVFPGYNSIFSDITGVTSIAILKCYQTPQSILDAPKEDIMKILKESSKKDLIWCNNTYIKLIKAASNAKVIAISSLGLSIKITINIETIENFNKQIELILKELENVLHSNDISSKFKQNILLLMSIPGVGFISAVTILTEIGDFQGFLKPKQLVAYFGIDPSVNESGKFKSDKDKISKRGTRFGRRALYAVALASIRTKRTGEANNKILLDYYKNNLNGKKKKVALVAIMHKLIKYIFAVLRNQKEYEQRLPKLHHKMYLENTNNPAA

SEQ ID NO: 74910 - protein, 319 aa, unidentified
MTITAAAGVDVGRDWLDVAFVRSPEAGVAGKHFRVPNTPAGIAAILSRLRRAGVVRVVIEAIGSLSARLVRALAAAGFEVGVVDPRRIAALRLAEGGRAKTDKLDAGLIARFALLMSDAIRPVPSAGALELRALSTRRRQLVEMIAMEKTRLKQAIDPVLMASSRAMITMLGEERTRIEAMLETRTRAAPEDRRKGDILRTIPGFGPAVVTTLMADLPELGASDSKGIASLAGVAPHIQQSGADPGRAHIQGGRSCVRAALYMAALSSIRSNTGFKAEYQAMRAAGKPAKVALIAIARKLLVAANAMIKQDRPWTPPAP

SEQ ID NO: 74911 - protein, 400 aa, unidentified
MRVVFGIDVSKVSSEVAILVNGEKVHNYTMSNDAIGFSRLLGDLKTVHKPEIIFEATGVYSRRLQSFLDEHGYAYTRLNPLEAKKQLDSLRVRKTDQIDAEKLAQSQFVLNRKTTYVQEEIYQNLRDLSRFYQNLTEDIVRAKNRLHKALQVTFPELENILSTPSGEQYWNLVIAFPCKDFVLDLSKDELSESIRQSTSKRISDKRVAYLAEKLIALANQSYCAVKKTSPMLEEVRYYAKELFRLSEQRQTILDEMVELAQPLPEYDILLSIPGIAETTATSIIGELGDIRRFQSANQINAFIGIDLRHYESGNFLAKEHITKRGNPYARKILFKCIHNIASASHTNPCHIANFYEKRKRQSQTTSTKPHTIASIHRLIRTMYYLIMHNKLYDYASTQNR

SEQ ID NO: 74912 - protein, 347 aa, unidentified
MRFYTGHHRYYCGIDLHARTMYLCILDHESGKILLHRNLRSEPELFLRTIEPYRDDLVVGVECIFCWYWLADLCARESIPFVLGHALYMKAIHGGKAKNDRVDAHKISVLLRGGAFPMAYVYPRGMRATRDLLRRRLLFVRRRSELFTHIRMTFHQLNLPAPGGPFRQPRSRVGLSEAIPDPVVRANVEADLALADRLDEIIRSLEHTIRQRAKIDDPETFERLQTIPGVGRILALTMLYELHDVTRFPRVQDFLSYARLVKSQKASAGKVTGTSGAKIGNAHLKWAYSEAAVLFLQKNPRGQRLINRLRSKHGRGKALSVLAARLGRASYYMLRRSTAFDMDRFMN

SEQ ID NO: 74913 - protein, 395 aa, unidentified
MNKIVHYIGLDVHKDSIAVSIAPQNSTEVRRYGIIGGTLDAMDKLIKKLSSQNVELRLVYEAGPCGFVLCRHLRGKGIHCDLVCPSLIPKKASDRVKTDRRDADQLARLYRAGELTPIHVPDQEDEAIRDLIRARTAAVNDQRQARNRLKGFLLRLGYRYTGKTSWNDAHKRYLSGLLMPRPAQQIVFQECIHAIDDAAERVARLTQAVEDALPGWKWEPVVRALMSLRGMQVLSGMTVVAEVGDLSRFENPRSLMHFFGLTPSEHTSGDKRVLGGITKCGNTHCRRVLTEVAWHYRLKPLVSEAMQKRQEHQSKEVRLTAWKAQQRLHKRFKQLVVRKKSVVAVTAIARELVGFVWAIACKVKPLQRPPAPEIIRTCRGKVYRLDPEKKMPKSK

SEQ ID NO: 74914 - protein, 307 aa, unidentified
MYIGIDVSKDRLDVHIRPTGEAFSVTRDETGLGELVTRLGVAEPALIVLEATGGFETIVATTLAAEGLPLAVINPRQIRAFAQACGQLAKTDALDAAIIARFAEAVQPQPRAVPDEAARALGELLARRRQIIGMTVAERNRRRQLTQPRLVKTVDRVLATLRKQLSAVETDIDTAIRDTPAWREKEERLTSAPAIGPKIARTLIADLPELGTLSRRQISALVGVAPFSHDSGQRRGRRAIAGGRPCVRAALYMAVLVTIRRKLPLATTYQRLRAAGKPAKVAIVATMRKLLVILNAIMRDNTAWRAA

SEQ ID NO: 74915 - protein, 410 aa, unidentified
MEVIVSRGCGLDVHQATVVACLLVGEPGTAPHKRVKTFSTMTSGLIELRDFLAAAGCTAVAMEATGVYWKPVYNLLEGHFELTVANARHIKAVPGRKTDVKDAEWIADLLRHGLLRPSYVPPPELRELRSHLRYRVKLVRARSAERNRIIKLLESANIKLSGVASDPFGVSGRLILDALKRGVATPEEMAELAKQRLRSKIPLLKLALDGRMEEHHRQLLSIQLDRLDRFDRDLKQMDAKLEAKLKPYAREMELLDGIPGIHWVVGATVIAEMGIKMSQWPTVGHLTSWAGLCPGQNESAGKRGKSSIRPGNAYLRSALVEAALAATRDKNCYFREKYYRLKAHRGHKRAIVAVAHKILVAIYHMLSSDTPYRELGADYLERLEPERLKLNLVRRLERLGFHVNLEPKRA

SEQ ID NO: 74916 - protein, 348 aa, unidentified
MNALHYIGCDVHKKTISFCVKTAAGEIVEEGSLLAQRGALREWASARPQPWRGAMEATLFSGWIYDTLQPYGEQLEMAHPAKMKAISAGKKKSDTIDARTIADLVRCNLLPACYVPPPRIRELRRLLRYRSLVVSEAVRMKNKMAGLLMETGALYVKEKLHRKKYFATLLEELEEVPESVIDLLRLSRGALEMFESTQKRLVGELLADPELAQRVERLMTIPAVGEITALTWALEVGDPQRFRSSSDAMSYCGLTAALKSSAGKQQRGPISKQRNHWLQTTLIEAAKLAPRWNPQLAALHARELERGHRNRATLAVARKLVAYLLAVDKSGQAFQVRATLEVPTQKAA

SEQ ID NO: 74917 - protein, 325 aa, unidentified
MSKETFDASLVAFEDANEMAHRKFANSRKGICSCLHWVEKRHGIRLDDVIFCAEDMGSYISEMAVCASDRTLNFNFSLISPLVIKYSMGIARGKTDRVDARRIAEYAITHYRKIALYLPAEKELCQLRTWLILRAHLAKQRVAKLVLLEKLDYKEKFADVSIQRSMLQEEIAYAETHMKTIEREMKELIAADSNICRNYKLLTSIKGVGPITAIVMLCSTLNFTKITDHRKFACYCGLAPFEHSSGTSVRGGCHTSSMANRDIKVQLNRSALIAIRCDPQLKAYYERKVAEGKHKFSVLNAVRAKIAARCFAVVRRGTPYVALQI

SEQ ID NO: 74918 - protein, 402 aa, unidentified
MNAVGIDVSKGKSMVAIMRPFGEIVSAPFEIKHTASGINSLVELINSVEGESRIVMEHTGRYYEVLAHQLSKANLFVSAINPKLIKDFDNDSLRKVKSDKADAVKIARYALDKWQNLKQYNVMDELRNQLKTMNRQFGFYMKHKTAMKNNLIGILDQTYPGVNTYFDSPARSDGSQKWVDFASTYWHVDCVRKMSLNAFIDHYQNWCKRKKYNFSQSKAEEIYGKAKELVPVLPKDAITKLIIKQAVDQLNSASTTVESLRTLMNETASKLPEYPVVMAMKGVGTSLGSQLMAEIGDVSRFTHKSAITAFAGVDPGVNESGTYEQKSVPTSKRGSADLRKTLFQVMDVLIKTHPQDDPVYQFLDKKRAQGKPYYVYMTAGANKFLRIYYGRVKEYLASLPES

SEQ ID NO: 74919 - protein, 321 aa, unidentified
MSNLEKKVIGVDVSSTILVMSFLDDENHPIIITINNNTTCIEKSLKRWDKHQFKIVVEATGSYSSKILYYAYSMGFEVYQVSGLSIKKFSEVKHHISKTDEQDAVLIRNFGEVMEMDPYEPKKENIEFLEQELNLWQDLEQEKARYTLKLKSLRQKPILNKSVIKHYETIIKRINKDIESLQKRLPSLEDKEFKENKDLLTSINGIGKKTALLLLVSTNNFKNFKHSKALCKYFGVVPKMYHSGNKKISIGKCRTSKGFIRSILYVCSWSAIRFNKQCKALYERILEKKKCKKVALIAICNKLLRQAFGIINSKIQYQLNY

SEQ ID NO: 74920 - protein, 407 aa, unidentified
MPDISFEVKIQKAVGIDIHKEKIVCGFMGVEMSTEVKEYGTFTKQLKEIVTDAQARGISHAIMESTGIYWLPLYHLLEDAQIQVVVANPLKIKQIPGKKTDSNDSLWLCKLLMNGLAAGSFIPSEEVRQLRDLHRQRHHYIGELSRVKSRVLKVLESCNVKLRSLLSNVNTLSARDIIHAMAEGETDIEALKQLLRKKARKHLPLLEDALEGTLNEHSRFLLKTHLKDWNYLEEQVASLEQRSKQIIDKQYAESRNLLVQIPGIGAQSASIILSEIGNSVEAFSNADKLAAWAGLAPGNKQSAGVRYNQHTTKGNKYLRLAMIQAAWAAVRTKNGYWKAQFNWLCRRLPKKKAIIAIARKLIKLIYRTLKDNLSYEEKGGDWYFEQKQRIKTILLQKKNEMPNSVAG

SEQ ID NO: 74921 - protein, 386 aa, unidentified
MRRTQKRGPGPSSVLITPDHAGNVVGIDPHKQTLTATVVDPRGGIAASEHFKVSGGGHRALEVWARQFGPIARWGVENAAGWGRHTAVFLVGRGYDVRDVCANRTPRQDRARQRGKSDTLDSERIARETLAHPLLPKAFKRAGQDQGPDELHQLLALWHNRRRSILTSRQHLVNEAESLLCELPLELREQLPDSKSVRPRLAALQRRNRRRRYDPPTRLRLELLDGYHTQIKALDREEKQVTAHLDELVRQSGSTLGELCGLSTRSVAELLVEVGDVRRFTEGGFRRFNGTAPLPASTAEGPGEPVRHRYNPGGNRRINAVLHRMAVTQLRHEPRAQQVYANARANHHTKKEARRVLKRHLSDVVYRRMIRDLAAASHPAQPLLAA

SEQ ID NO: 74922 - protein, 413 aa, unidentified
MRNKTKKIQIINEKVMIATIDIGMTKNTGYWRYNNISIKPFEFANNADGFKRFWQKIWTAKIINRADNVIIGFEPTGSYEQPLIHYLINKPVKLVQINPTHTKRVKELNDNSPLKTDKKDPEVIADIIQLGHYLSLVVPKGSSAQLRNLVNSRESTIKNRTMSINRLHRSVYMIFPEFLEVMKTVSSKSSMYLLKHYSTPFDIINLGLESLACCLRKTSRGRFSIEHAERLYNAANNSVGIKEGVDSIVMGIQQIIKEISLFNDFINEIETKMNHYLKEIPESQYILSIKGIGEVTTAGIIGEVGDFNDFHNQRAIIKLAGLNLYEVSSGDQKGIRHISKRGRSLLRKILFFASLNVVRKNGIMHEYYHRLIDNGMIKKKALIAVSRKLLKLIFSLARKKRYYIHNYEMKSVA

SEQ ID NO: 74923 - protein, 349 aa, unidentified
MIRNKPRGATVYGIDLGKNIFHVVGTDSAGNVVQRVKFRRDTLRAFFERAERAVVGMEACPGSQWLARKLQAMGHTVRIIPAQFVKPYVKSHKNDTIDAAAIAEAVTRPTMRFVQVKQPEQVDLQSLHRIRDQMVGSRTRLICQMRAFCLEYGVAIRQGAGLFKSDLPRVIADECNDLTPTMRRLLNELFEDLMRLEKRIAQVTREIEALAARDEKARRLMTIPGIGPLGATALLAAAGNGQQFKKARDMAAWLGLVPQQYSTGGKTKMFGISKRGNRYLRRLLIHGARSCVMHLDRSRDRLGAWLRQLHSRTHVNKVTVALAAKIARIAWVVLNRPGAIYERRDPALA

SEQ ID NO: 74924 - protein, 428 aa, unidentified
MTAQRECSEEVARVAIDVAKAWNVVLMETAAGKRRRFRVANNRSDHDRLVQLLKDQNVRCQIALEPTGNYHRPLAHRLLSEGFEVYLVSSVAAARFREAMFNSWDKNDPKDAAVILELLKQGRVQYYHDPVAVGIHDLQEISKTYVQVTMARTRLQHSLLTHHLPLYWPEFGRYWHSSRADWFVRFLIRFPVPAAVRRLDREAFIQEAGPLVGRKVNKRAQLDEIYELAGETIALPIDPGSFAIQAFRLQLERYLSLNGLRKRLEEWAEEALAASEDFALLRTIPGIGPVLALIILAETGDLRRFGHHRQFLKFCGLDLAKSQSGASRGREKLSKRGNARLRYAFWLAGTVAVRMRENSFREKYHRYIGSDPTDADLKRKALTAVMAKMARVAYAVVKTRTPYRTYFEAAVPSGSIPLSRAVEAVRTS

SEQ ID NO: 74925 - protein, 339 aa, unidentified
MLYVGLDVSVKRTAVCVMDAAGRVVREASVDSKPEVIAAAIRAAGAEVERVGLEAGVSAAWLARGLLTGGLPAIVIDAAHAAAALKTGFRNKTDRNDARGIADLMRVNKFRVVWVKSPAAQRDRALLTVREQLRRQSLDARNTIWSILQGEGLSPPKLTNAAFDTLVAQMSQEPDIGLLLRPLVAVVEELSRQVAALDHTIAARAKASTVCRRLMTVPGVGPLIALTYATGVDEPGRFRKARLLGAHFGLTPRRFQSGGTDWSGRISRAGDAAVRRALYQAANVLIHHSKGWCALKSWAVRLAKRRGLGKAKVALARKLAIVLHRMWTTGEDYRFQAAT

SEQ ID NO: 74926 - protein, 414 aa, unidentified
MLKIVYRVCCGMDVHKSFVVACIASTNEQGVTSYKSKRFSTFTGDLRRCAVWLSENNCKDVCMESTGKYWIPIYNILEHTCNIVLAHPKYVKAIRGKKTDKRDAKWIADIFKHDLVSGSFIPTADIRQLRDLVRYRWKLTNFTAGEKNRAQNCLTVSNFKLDDVFSDVFGKAASAITAKILENPAEKITDVSCFRTKGMKATNDQVLAAVDGEMCVEQAEKLRIIRSHMDSLNLCKANLESLILETTEKYLPQLNLVMTVPGIRSFAAIGIISEIGVDMSVFPTSKHLCSWAGLTPQNNESAGKKKTTRISRAGVYIKPLLVQCALCAIRAKQFPEVRNRYLALKKRRGHKKAIIAIARMLLTAIYNILKKNEPYNPELYRKADPLPAHREVSVEEAVYILQRQGYLVTTPTTT

SEQ ID NO: 74927 - protein, 339 aa, unidentified
MEVTTIGLDLGKDVFQVHGITADGTVIFNRSVRRNQLLKFFETLPSCLVGIEACGSAHHWARELIEIGHDVRLMPATYVKPYVKRGKTDAVDAEAICEAVTRPTMRFVAVKSKEQQALLTIHRVRQLIVRQKTQMLNVIRGLLREFGHVIGNGPVAAMRFIKAFQTDDSLDMPDVAKSMLKTLCEQVVALDERVTFYDKLIEYHARIDERAKRIRTVPGVGPVTASAIVATIGDGKQFKNGREFAAWLGLTPLNRSSGGKERLGSISKKGDRYIRRLLVIGMTSQVQRARGYPERVHPWIMQLLERKPVRLATIAMANKAARIIWAILTKDTYYRQAAA

SEQ ID NO: 74928 - protein, 412 aa, unidentified
MDEVVEFCAGLDVHRDTVVATVRFPQGRQRGSETKTFGTDTAELVALGDWLISHQVTRVGLESTGVYWKPVFYLLEDRIEQLWLLNAQHLKNVPGRKTDVVDSAWIAQLVEHGLVRPSFVPSPPIRELRDFTRHRRVLSEERTRMVQRLEKVLQDAGIKLTSVASTVLSKSARAMLEAMLAGESDPVVLAELAKGRMRSKIPALTDALRGSFRVCHHGVLVRQILAHVDFLDAQLAEIDEQITTRVATFEPIIERVQTIPGVARKCAIGMIAEIGVDMSVFATPAHLASWAGICPGNNASGGKARSGRTRHGPVALKTVLTEAAQAAARTKNTYLGARYHAIRGRRGTFKAVGAIRHDILIAYWHIVTADVGYQDLGVDWVARRHSREHQIARLAKQIEKLGAAVEITMPAA

SEQ ID NO: 74929 - protein, 403 aa, unidentified
MVFVGIDWAEAHHDICVVDDDGQVLAKRRVPEGIEGVGKLHALIAEHAEDPAAVVVGIETDRGLLVGSLVAAGYKVYAINPLASSRYRDRHATSGAKSDPGDARVLADLVRTDRHKHRVLAGDSNLAGAVQILARAHQGLVWTRQRQVNQLRNALREFYPGALSAFEDLDASDALAILERAPTPIRGRALSQAKIISALREGGRERNLEAKAAQIQAQLRLPQLEAPTLLAEAYGHSVAATVAVIKQLNLQIAALEQELASSFETHPDAEIYLSLPGLGVVLGARAMAEFGDDRTRFLHPKARKSYAGTAPITRASGTRKVVLARVARNRRLADACYQWAFSALTRSEGARHRYDVLRARGQTHHQALRALANRLVGILHGCLVKRQPYSEHIAWSALVEVAA

SEQ ID NO: 74930 - protein, 382 aa, unidentified
MTGTEPHAWGAGLMDDITFVGLDVHKATVCIAVAEGGRGGDVRQLGVFENRPEILSKVVSRLSKGGRRLSFCYEAGPCGYGLHRLLTGYGHECVVIAPSLIPMKAGDRVKTDRRDALMLAKLHRAGELTAIWIPDAAHEAMRDLVRARATAVRVLAKARQHLQGFLLRHERIYHGARAWTLAYRRWLSTVRFEHPAQQIVLQDYIHAVQEAETRRERLTQQIEELLPNWSMAPVVAALQAMRGVALIVAVTVVAEVGDFHRFANPRQLMAYLGLVPSEHSSGRSVRRGGITKAGNALARRVLIEGAWTYRMSARVSRKLHDRVEGLPAAVRDIAWKAQLRLCARYRRLAATGRPKVVVTTAIAREMVGFIWAIARLAQPALV

SEQ ID NO: 74931 - protein, 427 aa, unidentified
MSYRIAGIDVHKRMIVVVVADVDVAGDYEFERRQYGSTPAQLRLLAAWLVEQGVEEVVMESTAQYWKPVWASLERYWKPICEKWEGTSPMSGSLHLAQAQSNRGARGRKNDFADAERLVRRLVAEELTLSFVPDAEQRLWRTVMRTRYQLKCNQVQLQNRLEALLEEAHLKLSSLVSDLLGLSGRRMLQAMAEGETDPAVVAARADCRLRATQEQLCDALGAYQELHPVYRRLLKTALEEWERIEAQIAQLGQEMASLIGPQQEQVQRLAEVPGLGVDSGQQILAEVGASAATFPSGRALASWVGACPGEEETAGVNRNRRSPKGNRHLRRILNQAAHAAVKLKGSIFALLYRRYVVRLGHNQTIAVIAHRLCRLIWKILHEGVRYEERGPAVSQRAKQRRTARMIRQLRSLGYSVELLHAAAGVPA

SEQ ID NO: 74932 - protein, 379 aa, unidentified
MEIITRNEKILYIGIDVHKDTYSLCCFDFFRNELSDEMTIKATTKAVIKYLEAIKKKHREEILFACGYEAGPTGYGLCRGLQKAGFGCAVMAPTTMSNPDGKKRVKTDRIDARAIARILAYKSYSQVHLPSEKMEALKEYTRARDAKKRMFKKAKQELLSFLLRNGKSYPESGNYWTEKFFKWIKTVQFSEKWMQEAFSEYLAEVYSLKHKIELMDAKIKEIAGLEIIKNKVDKLVCFSGIDVSTAVETVVEIHDFTRFATAAQFVSYLGLCPGEDSSGKTKNMLPLTKAGNKRVRALFCESAKAIKRTNPYGQKSKRILERQKNASPEIVAYADKATKRIRTKMKHLEERGKNYNVSSATGARELACFVWGMMNGKIA

SEQ ID NO: 74933 - protein, 483 aa, unidentified
MAATKDGKTGTDPEGAGAAPEHGGDGAEVAEDRVQVVEYAAAIDVAKGSGMVCTRVPGSRPDRRRQKVWRVEATYAQVIALMDHLRCEGIQRLVLESTSDYWRIWYYLAEAAGLEAWLVNARDVKHLPGRGKSDKADCVWHCKLNERGMLRRSFVPPEPVRDLRALTRTRARLAQDQARHQARVEKILEDALLKISVVISDLFGASGRRFLDALVAGERSPKALAALGDPRLKATRRELEDARTGRFRDIHAFEISTHLRIIDAINEEITRLDDKIEEQLALVPRTAPACTACGLAGGGHAPGCADEQVPLLGLAARLDEITGVGECNARAIIAELGTDPSQFPTPGHAAAWARLTPRTRQSGETARPGRTGKGNRYIRGALGQAAMTAAKTDTRLGAMYRRIARKRGKQKAIVAVSRVICEIAWILICDPGARYQELGPDYHTPRSRARQTRDKIREIERLNPGKKVILAPIDPGPEAGAAA

SEQ ID NO: 74934 - protein, 343 aa, unidentified
MDHFAGLDVSVKETSLCIVDDTGRIVREAKVASEPEALLHVLMNPAYHFKRIGLEAGPLSQWLFGALAEAGLPVICVETRHMRAVLKAQINKTDRNDARGMAQMMRAGLYRAVHVKTIRSQKLRMLLTHRKLLQSKAIAIDNDLRATLRNFGLKVGTVGRAKFEARIKELVEDLPDLVILVEPLLIVRRVLREQVGILHSRLLAVVRDDDVCRRLMTVPGVGPVVALTYRATVDVPARFRHSKAVGAVFGLTPSKHQSGEVDRTGAISRCGDEMMRMMLYEAAQIVLVRSAKWSWLKAWAMKIARHRGLKKAIVALARRLAVIMHRIWVDGTEFRWTKDVAAA

SEQ ID NO: 74935 - protein, 374 aa, unidentified
MRDDSEAFVAFDTSKLRNAVAIAEGGRTGEVRFLGEIENTDAATIKLVDKLAAKHRRLTFCYEAGPTGYDLYRLIKHLGHDCIVAAPSLIPKKPGDRVKTNRRDALSLVKLLRAGELTAVWVPDARHEAMRDLTRAREAAVEDLRGKRQQVMSLLLRLGRRYPGKRTWSKAYMSWLLGQKIEHPEQRIVFEEMLLAVRQARERIARVEEAIRAAVPDWSLAKVVTALMAMRGLDLVSASAFLAEIGDLSRFQTPRELMGYLGLVSSEHSTGDRVRRGGITKAGNRRARRILVECSWSYRHPPRVGRDKQVKVAAAPPAVREIAWKAQSRLAARFRALTRRGKQPAVVVTAIARELSGFIWAVNREVAEPHAMAT

SEQ ID NO: 74936 - protein, 347 aa, unidentified
MDRNQPRDCTVFGVDIGKNVFHVVGLDGSGAIVQRVKFRRETLLQFFERAARTLVGMEACPGSQWLARKLQTMGHEVRIIPAQFVKPYVKSNKNDTIDAAAIAEAATRPTMRFVGIKQPDQVDLQMMHRVRSRLVSARTNLICQMRAYCLEHGVAMRQGAGVFKLDICRVIEDLDNDLTPMARSVLRDLHDDLRRLEARIRQVSDDIEKIADSDERARRLMTIPGIGPLGATAILSAVGNPSRFAKARDVAAWLGLVPRQYSTGGKQTLLGISKRGNNYIRRLLIHGARSCLMHLNRDKDRLGHWIDELRLRMHVNKVTVALAAKLARIVWVILTKPGATYMRQPAA

SEQ ID NO: 74937 - protein, 356 aa, unidentified
MSYEVKYIGMDVHKEAIVIAVLNGTGKLVMETVVETKASSILEFLHGLRGELHVTWEEGTWAAWLYDLLQPQVQEVVVCNPRRNALLKEGSKSDKVDARKLADLLRTGMLRPVYHGENGLRTLRELGRSYQTISKDLTRVMNRLKALYRGWGIPCAGTQVYAPRYREQWLNKIPQAGVRRRAELLYQQLDGLQTLRRNLRPEFLAESRKHKAAKLLRQIPCIGPIRAARLIALMQTPHRFRSKRQLWTYSGLGIETHDSAQFRFVRGQLQRSKKPQQIRGLNRNHNHEMKEIFKSAATRASCATGPFRDFYAALLTNGMKPEMARVTLARKIAAITLTLWKKEERFDAEQLKTQAA

SEQ ID NO: 74938 - protein, 355 aa, unidentified
MNQEKYIGMDVHQATISVAVMDGSGKLIMECILETKAATIVEFIAGLRGTLSVTFEEGTSAAWLHDLLKPHVSHLVVCDPRRNALLKDGSKSDRIDARKLAELLHGNKLHAVYHGEHGVRTLKELGRSYLTITRDLTRVMSRIKALYRSWAIPCSGTTVYAVRHRAAWLAKIPEPGVRLRAERLYQQLDLLQPVRQGARRDLMVESHRHQAVKLLRQIPSIGPIRAALLVALLQTPHRFRTKRQLWAYSGFAVETHDSGEYRFVRGKLVRNRERISVRGLNHNHNHDLKNLFKGAALSASTRPGPLCDFYVALLEKGMRPTMARLTLARKMAAITLTIWKKGVEFDAKPLNRQAA

SEQ ID NO: 74939 - protein, 452 aa, unidentified
MKEDKTKEQTKKRAIQGLPVIQPYAAGADIGDTQHDIAINNGTSGLIVRTFKSFTEDLREAVKWLIEEGITTIAMESTGVYYLPFYLMLEEAGIEPYLVNAKHVKNVTGRKRDDTDAMWIQRLHSCGLLQKCFQPDNNDRRLRTYVRQRKGLVNRCSDEVRRMQKSLELMNIKVHTVISDLQGKTGMQIIEAILDGEKNPVNLSKLKDPRIQASDEEIIKSLEGIWEDEYLFTLQQAHDTYFFFQQQIKDCETKIYDHLLNQTAMINQGDITSEQYPTTRKTKLKKNQYYFPVTPFLKTMCGVDLCQIPGISESHALEFISETGRDTSKWKSSKHFSAWLNLAPNTKITGGKIFSSRIMHKKNKAGLVLRVAASSLSRNKTPIGDFHRRMCAKYGGKGACVATAHKLSRTIFCMLDKREEFRMDMLLESQKKFRENRIKQLEKQLARMKHVA

SEQ ID NO: 74940 - protein, 354 aa, unidentified
MSQTANTAIAVIGIDIGKNSFHVVGHDARGAIVLRQKWSRGQVEARLANIPPCLIGMEACVGAHHLSRKLASLGHDARLMPAKYVRPYSKGQKNDFNDAEAIAEAVQRPTMKFVATKTAEQLDLQALHRVRERLVSQRTGIINQIRAFMLERGIAVRQGIGFLRTELPTILATRTDALSPRMLRVIEELAGDWRRLDQRIDGLSGEIEALARQDQACSRLMTVPGIGPIISSAMVAAIGTGDVFSKGRDFGAWLGLVPKQISTGDRTILGKISRRGNRYLRVLFVQAAWVVLVRIKNWERYGLKSWIEAAKRRLHHNVLAIALANKLARIAWAVLAKGRAFELTRTDDAGVRPA

SEQ ID NO: 74941 - protein, 338 aa, unidentified
MFYVGVDLHKQSISLCVVELAGRERKIIERRRFRCDEEESMADYFAELGKYQLVVEATASYEWFVQLVEPTADRVVLAHPGHLRVIAQSKRKTDKLDAQTLAEFLALDQIPEAWRPTPRVRQHRALVRHRHYVVRRSTSVKNKLRRVLSHYNADLRNLFTHAGRKYLATIELSEADRFVTDQLCEELDQHSTRLKAVDQQLKAFAKAAPVAEQEARAVLESMPCVGPVTIDVVLAEAGDVRRFGSQRKATAYAGLAPGIRESAGKGKQLGITKEGSRLLRCILVETAWRLVLRTRRWASVYEKLKARCGAKKAIVAVARRVWCVMVSMLNSGQKYQLT

SEQ ID NO: 74942 - protein, 339 aa, unidentified
MKLYCGIDLHSTNSYVVVVSEDSKIVLRHKFPNHKDKLISALAPYKEQMIGVAIESTYNWYWLVDAMMEEGYKVHLANPAAMKQYQGIKHLDDKQDAIWLAHLLRLGILPEGYIYPRESRALRDLLRQRSRLVVHKTSMKHTLQQVFCNQTGMVLTNTSLTRLNAESLETVLREEDLVYNGRSQLMAIDFLGEQVKEIERYIEKKMDGKYPFSHLRTIPGIGLILGLTIALETGPIERFDSASSYASYCRCVPTAYWSNEKQKGSGNKKNGNKYLSWAYSEAANFSIRYCKEVKAYYQRKCAKTCQPVAYRAVANKLAKACYYLMKNKVSFDVQRAFSS

SEQ ID NO: 74943 - protein, 372 aa, unidentified
MLEDWIRKLAEHHGFKDVTVGMEPTGHYWFNLGEHIKEKGMRIVLVNPHHVKKSKELDDNNPSKTDRKDPKTIAMLVKDGRYMEPYIPEGIYKELRTLMDIRWRIMKELFAIKNRISRWISIYYPEFLEVFGSWEGKAAMLILKECPTPAKIVEKGIDGIIGIWKKHKIRAVGRKRAMMLLETARSSIGSKEGMISAENELQMLLEDYESKMRQYDKTMALIESLANKIPGFEKMLGIKGVGLVTAAGFIAEIGDISRFSHPKQIQKLAGLSLKENSSGKHKGETTICKRGRKRLRYYLTFGMMPLLSKNEEFKALHEYYTSRKENPLKRMQSLVALSNKLIRIFYVILTKKVTYDPQKMMRDIRRPEVKAA

SEQ ID NO: 74944 - protein, 342 aa, unidentified
MNLPVRIGMDTSKSVFQLHGVDENEVVVVRRQFRRAEMIRYFERLPPVLVAIESCGSSHHWARLLQSFGHEVKLIPPQYVKAYVKRGKNDAADAEALCEAVSRPSMRFVPVKSKEQQAACMLMTVRERLVSVKSQLSNAFRSYAAEFGIVGPAGRQNVTALIKRVLEDDSLPEMARDLFRLQAEEYAAVQARLAKIEAKLMKWHREDDVSRRIATIPGVGPIGSSMLSMKAPPPETFRSGRDFAAWLGLTPKDHSTGGRQRHGGITKAGDSVLRSTLIVGATALLRHIRKGRHKPTPWLASLLERKPPKLVAVALANKFARIAWRLMISGGVYNRPEAAMSI

SEQ ID NO: 74945 - protein, 373 aa, unidentified
MQAGKKSGKAKVGRMNSIVTGIDLGDRESLATVLSPIGDVADRFTFPMNEEGYAFFASRVPKDARVAFESTIMAYPISRALRMHGYSDVTVAHPKTLAWIVRSKKKNDRVDSLKIAKLHMAGMLPESHLLDRNDQIVRDLLVQRVKLGVEIGRLKNSVIGYLKREGVYDSLPRTGDNFSTRRRQAIHSLRFNDNRDLVLGTMMDRLHFLEKQCTPLEDSVRENARLSDDVKILMSITGVDYYLASLISSFIGDVERFPSDDHLASFFGIVPTSRDSADVKRRGRMTKDGSSIARWALSIMVDTVMQHNELIREYYTSVKKRTGSGKLAHVSTMRKLTRMLYHMLKTKQHWKWENPQLTERKMARLQMDGGDGS

SEQ ID NO: 74946 - protein, 348 aa, unidentified
MLIIGCDYHPGFQQIAFVDKETGECGERRLSHREEAEQFYRALLGQKVRVGMEASGHARWFERLLNELQFELWIGDAAEIRSKRVRKQKTDRQDAQLLLRLLIEDRFPRIWVPDAENRDLRQLLWHGHRLVQMRTRVMNQLHVVALNEGLRRKKALWRAAGRQELESIALAPWASRRRQDLLDLLDRLTPKIQQLTGALEEEVEKRPVTRRLATHPGVGPLTALAFELVIGTPERFHCGKQIASYVGLVPTEESSGDRRRLGHISKQGNVLLRFLLVEAAQVTVRSQPEWRNKFFHLAMRRGRKIAKVAMARKLAVHLYWMWRQGHDYGQLQKLGSHAGEPGNPDGGQ

SEQ ID NO: 74947 - protein, 346 aa, unidentified
MLYVGLDLSRKRLDFDALRFDGERVDAGALPPDGDGLAKLVLRLGDADDQVLAVIESMNGARFVHDQLELAGWDVRIADALKVKGLAPLACKTDKIDCWVLAELARRDLVPEIWLPDPAVRAERERARFRLHLVKHRTSLKNRVHSILIAHGVPNPLSDLFGLGGRRLLARLALPEPWRSTMEASLALIDVLDEEIAESERELRRLGADHAYVPLLMTCPGIGWILAFTIASEIGDITRFRAPVKLVGYSGLCPKVDQSGEQDRRGPLRKNGPDYLRWALVEAAHTAAHHPRYLPLLERNRARHGKKRGTKIAAITIARKLAEAIWHMLTRNQPFAPAGATRPLAA

SEQ ID NO: 74948 - protein, 402 aa, unidentified
MNAVGIDVSKGKSMVAIMRPFGEVVASPFEVTHTGSELSELAKSLKSLHGETKVIMEYTGNYYLPIAYALHEAGLFVSAVHAKLIHDYGNNTIRKVKTDKADAIKIANYGLSHWMELPRYWPEEDVRLMLKAYSRQYAKYIKLKTMLVNNFIALTDSTFPGVNKLFTSPPRKSDGHEKWMDFAFKFWHCECVCGLREKEFIERYRKWCKREGYYFTQEKAEDIYVSALGHVCVVPMNDCTKQLVTLSINQINAVSESLAIVAREMKRLAESLPEYPVVSAFYGVGDILGPQIMAEVGEVARFRSKGSLVCFAGLEPPEYQSGKFESENRHISKTGSPHLRKALFQVMDCILKRSPQNDPIYQFLDRKRAEGKHYYSYMTAGCAKFLRMYYARVNEYIDAMED

SEQ ID NO: 74949 - protein, 360 aa, unidentified
MKTYYIGADVHSNSTELAIEHNGKIVSRHGLPTAIPAIKEVLTSLGGKIHITFEEGPMAGWLYRNLKDTVEEIIVCDPRRNKLICSDGDADDRIDSGKLATLLRGGYLRAVYHSDDEGRAEFKQWVSLYYDRVRDAVRMINKIRARCRMYGIAIPRNVIRDKSQRPQWLAGIQNKALAAQLEVLWIGYDATAIQVRRVKRQLCTLSKPYPIIKQWSELAGIGIIRAVTAFAFLDTPWRFSRPNKLWKYCGVGLQRSASGTDKKGKPKPSRLQLAWAVNRLLKNVILGAAHTAINQNKNIFRDYYERMLHESVMPSNARHAVARKMLTVMWGMWKTNSRFNENLVKEVSVAAGSSYSATRK

SEQ ID NO: 74950 - protein, 387 aa, unidentified
MPKFNDLSRSLVALEQDSTLIVVIELSRSSWLVGGLVPGLRREPRKKLTPDADGLLRLLHRWRDEATAAGREINRICVAYEAGRDGFWLARWLHRHDIECHVIHPSSIAVSREHRRAKSDRLDLGLLQRSFLGWLRGERKHCGMVAVPSVEEEDAKRPVREREHLVAEATRLVNRMTSLLALHGIQGFNVKLKTAAEKLSSLRTAAGEPLPPNTLAELRAAMQRRQAIKARIAEIEAARLERLKQPPRSGSDAMIALLARIVGVGIETAETLVLEVLSRRLRDRRAVARYAGLTGSPDESGEKRREQGLAKAGNGRVRRSLIQLAWRLLIHQPDCELVRWYRRRTADGRRVTRKVMIVALARKLLVALWDYVSTGQVPAGMRLHSAA

SEQ ID NO: 74951 - protein, 416 aa, unidentified
MLFVGDDWAEDHHDIELEDDAGKKLAKIRLPEGLEGVTRLHAVLAAHAPPEWTELPADEAAAQVIIGIETDRGPWVTALRAAGYQVFAINPLSSARYRERYSTSGAKSDAGDAHVLAEIVRLDRAHHRQIAGDSDLADAVKLLARAHQTAVWERTRQQLRLRSALNEFFPIAVQAFSDLTALDSLLLLGRAPDPERAKKLTRSQIVSALTAARRHHVQDKADALLALLRAPALRQPLATEAAYAAVVTAHVAMLMTFNEQIRQLGEVVAENFGHHPAAEIYLSQPGLGIVLAARVLGEFGDDKTRFANARARKNYSGQSPITRASGKKTTVLARFATNRRLGDALHQQAYSALSGSRGARAYYDAMRARNIGHHAALRQLANRLVGIQHGCIKTGTLYDENTAWQHHEAVAQTTAA

SEQ ID NO: 74952 - protein, 342 aa, unidentified
MNVTTIGLDIAKSVFHLVGAEARGKQVLKKQLRRKQVLAYFGNLSPCVIGIEACGGAQYWARELRGLGHEARLINPKYVKRFLRGNKNDYNDAAALCEAVAHPETRLVAVRTPEQQDVQALHRVRRGAQEERKRYVNRARGLLGEYGIVMPQGIGAFRRRVPELLEDAENGLSELFRELLAQLYEQVRALDEQLAGYEKRVAQLARTDEACRRLDEVPGFGAVISTAMVASVGDGRAYRNGRHLSASLGVVPRQHGTGGRVRLLGISKRGDKYLRALVIHGARSVVHHAEDKDDALSRWINRIRSESGTNVAAVALANKLIRIAWVILRRGERYRPALAARA

SEQ ID NO: 74953 - protein, 320 aa, unidentified
MRNTVGLDISKLTFDATAIVGNAEYSAKFDNDSKGLNQFSDRLKSLGCQNLHICMEATGNYYEEVADYFAQYYSVYVVNPLKISKYAESRFKRTKTDKQDAKLIAQYCRSAKESELVKRQKPTDEQYRLSRMTAAYAQIKSECAAMKNRHHAAKDEEAAKAYAQIIKAMNEQLEVLKEKIKEQTEKPNCKEGVKRFETIPAIGRMTAAVLFHHLTSSKFETSNKFAAFAGLSPQQKESGTSVRGKGKLTKFGNRKLRAVLFMPAMVAYRIRAFPDFIKRLEEKKKPKKVIIAALMRKLAVIAYHVHKKGGDYDPSRYKSA

SEQ ID NO: 74954 - protein, 406 aa, unidentified
MAGAVCAGVDWAKDAHEVLVQDADGERLWGETITHDEAGIIRLCRTLVTLKVARVAIERPDGLLIERLLDAGLTVLAIHPNKVAAARDRFRAAGGKSDRFDAFVLCELARTDSHRFQPLVPDSDQTKALRALTRGREVLVEQRVALCNQLRAELERFWPGATEIFRDLDSPISLAFLERYPSPADARGLGAKRLAQFLARHGYCGRKDPAELLARLRNAPSGRAADLEADARRSLVLALVAALKPIVEQITLLTSEIAHAVHAHPDGHIFLSFFKHPKSVITAATLLAEIGDCRARYPTAEHLAADAGMAPVAVESGRRKVACFRRGCDHRLRHATSTLADSTRHWHPWAHRNYADARARGHDHPRAIRTVGRAWTRVLRRCWQDHVPYDPERHNTLQRQLLIVKG

SEQ ID NO: 74955 - protein, 343 aa, unidentified
MQQQLSVVGIDLAKRVFHVAGMDDKGKIVLRKRLTREALLPFITRLSPVVIGMEACGGAHYWARRFREHGHTVKLIAPQFVKPYVKSNKNDPADAEAICEAMTRPTRRFVPIKEVEQQDLQALHRARERVVKARTALVNEIRGFLGEYGIVLPQSVTKFRSGFLATLEAERAKLTALGQELFGQLYEEFGALEKRLAYYTAKLEAISAAHPVCQRLETIPGVGPLTATAMVAAVSDVTHFQNGRQCAAWIGLVPRQHSTGGKPRLLGMSKRGDVYLRTLLIHGARATLRWIGLKTDRRSQWVRGLIDRRGKNKAAVALANKNARIAWVLLKTDAVYIAEDAAA

SEQ ID NO: 74956 - protein, 383 aa, unidentified
MKKATRFVGLDVHAETIAVAVAEGGRSGAVESLGSIPNRPDCVRRLVKRLGAVSTWRACYEAGPTGYALYWQLAELGVRCEVVAPTLVPVRAGDRVKTDRRDAEKLARLYRSGDLTMVWVPDKPQEALRDLVRAREAAKKDQLRARQRLGKFLLRHGRRPPTPMTAWTGKHLDWVRTLSFDEPAQEAVFVDYLAEVDHARTRIERLEQHIDDAVARMPAQMKAVVDALQALRGVAQTTAVTIVAEVGCLSRFPRPKQLMGYSGAVPSENSSGARTQRGGITKTGNSHLRRVLTEAAWAYQYRPNLSAALRKRQQALPDEINELAWKAQHRLHKRYQRLLLRGKPRQHVVTAVGRELLGFIWAIGVTAERQQQADGQHARRRAA

SEQ ID NO: 74957 - protein, 334 aa, unidentified
MEQVTTVGIDLAKRVFALHGVDETGRVVLRRMVRREQLVELIAGLSPCLIGMEAGSGAHQWARRFQALGHTVRLMAAKFVSPYRRNGKNDGNDAEAICEAVSRPGMRFVPVKSIEQQALLTLHRVRQGFIAERTATINRIRGLLAEFGVALPLRSVTVRRQALQATEALPQIARRAIEDLCGHLRDLDSRILGYDRELEQQARQSESAQRLMKIRGVGPLSALAIVATVGNARDFRSGRQFAAWLGLTPRQHSSGGKSRLGAITKHGDRYLRTLFILGARSVLHTAARHTDRMSRWVISLEQRRGYQRTLVAIASKNARIAWALLSKNQELRPA

SEQ ID NO: 74958 - protein, 371 aa, unidentified
MKQSTMTYVAMDTHKKAISVAIAEGRRQGEVRFIGEIPNRPEAVAKMVDRLAAKHGKLAFCYEAGPCGYGLYRQIAMLGHECMVVAPSLIPTRPGEHVKTDRRDAITQASLFRSGELTPVWVPDDAHEAMRDLCRARQAAMEALRGARQQVLSFLLRHGRIYSDSGHWTRKHRLWLCAQRFDHPARQIAFEELVKAVEEAQARRDRLAQQMQELLPSWSLAKVVTAIQALRGVALIAAITLVAEIGDFHRFANPRHLMAYLGLTPSERSSGAKTRRGAITKAGNTRARRMLVESAWTYRLPARIGAEILKRNESLPQQIKDIAWKAQLRLCARHRRLARAGKPVNVVNVAIARELSAFVWAIATNEHIAIA

SEQ ID NO: 74959 - protein, 389 aa, unidentified
MSKARKRGPGPSHLLMTPDHAGNVVGIDPHKRTLTATVADARGGVLGSAHFRVSGEGHRELEAWARQFGQIARWGVEGSASWGRHTAMFLTGRGHDVRDVCPNRTPRQDRARQRGKSDMLDSERIAREVLAHPLLPKAFKRAGQERGPDEQHQLLALWHNRRRSILTSRQHLVGEAEYLLCELPLELSEQLPDTKTVKPRLAALARRNRRRRYDAPTRLRLQLLDGYRTQIKALDLEEKQVVAQLEALVDQSGSTLGELCGLSTRSVAELLVEVGDPRRFTEGGFARFNGSAPLPASTAEGPGEPVRHRYNPGGNRRINAILYRMAITQLRCEPRAQAIFATARAKGHTKKEARRILKRHLSDVIYRRMIRDLAAADRASLSTQPLLAA

SEQ ID NO: 74960 - protein, 337 aa, unidentified
MKFSGIDLHSNNCFVVIIDEADRIMYRRRLPNKLSGILAALAPHRDELDGVVVESTYNWYWLVDGLMAAGYRVHLANTAAIKKYDGLKHSDDEADAFHLAHLLRLGILPTGYICPPQERMVRDLSRKRMQLTRCRTQQILSIENLLARQTGATMTSNRIKQLKEDGVDLLGLPEDVALALKANLAVTKTLSLQIDKLEKRLREKVHLRTEYRVLNTAPGIGEVLATTIMLETGTVDRFAAVGNFSSYCRCVDSVHTSNNKKKGEGNRKNGNKYLAWAFIEAANFALRFCPEAKRFYERKKAKTNSIVAIKALAHKLARACYYMLREHEPFDVKRCFA

SEQ ID NO: 74961 - protein, 335 aa, unidentified
MDTHADVHVAAAVDGNGGVLGVESFGADARGYRDLAGWLAGFGSVIRVGVEGTGSYGVGLARYLHNCDIAVVEVDRPNRQTRRRLGRSDPIDAISAARAALSGAARVTPKLRNGRVEQMRVLLVARRSARQQRIATLNQLRHVVICGPDEVRARFKDRYKTGLVSEAARMRPRKGNDPIIYTTNVVIRDLARRIQRFNTEMRNIDKALEQLIADTAPSLVALYGVGVDTAATLLVTAGDNADRLHTERSWAHLCGVTPLPAGSGKTSGRVRLNRGGDRQANAALYRIVLTRMSGHAETRNYVRRRRAQGLNTAEIMRCLKRYVARQTFKHLPRTA

SEQ ID NO: 74962 - protein, 338 aa, unidentified
MKLYGAIDLHSTNNVTVVINEQDQVVYEKRLPNDLSLIAQQLSTYRRSLEGIVVESTYNWYWLVDGLMEKGYRLHLANTAAIQQYNGLKYTDDHSDGRWLAHLLRLGVLPEGYIYPKEERAVRDLLRKRGQLVHQRTANLLSIQSLISRTTGNMISAKYIKALNIQRVDGVLPSPDLVLALKANLGVMNSADAQIEILEKTVQDRVKLRPQFKFLKTVPGIGPILALTIMLETGEIERFASVGNYASYCRCVGSQKISNGKRKGSGNTKNGNKYLAWAFVEAANFAIRFNSRIKSFYQKKKSKSHAIVAIKAVAHKLCRACYYIIKDQVAFDITKAFA

SEQ ID NO: 74963 - protein, 321 aa, unidentified
MVNVMNTGARYVGIDVAKAYLDIAVRPSGEVWQVSYDTQGVTNLLAQLAELTPTLVVLEATGGLEAVLVGELADAQLPVVVVNPRQVRDFAKALGKWAKTDALDAQVLAHFGEATKPEIRPLPDASTQELQALLARRRQVVEMITAEKNRYRTATQRLRPQIQEHIRWLEKQLKELDQDLSELLSSSPVWRTKEKLLGSVPGVGPVLTVTLLANLPELGRLDRREIAALVGVAPFNRDSGTLRGKRTVWGGRSLVRATLYMATLVATRYNSVIRAFYQRLLEAGKPKKVALTACMRKLLTILNAMLKHNRSWHPNLNLEIS

SEQ ID NO: 74964 - protein, 466 aa, unidentified
MEIVNPHAGGIDCGAQEHYVAVPPQSVEPGEPVIRCFSAFTEGLDALVEWLKACGVTTVAIESTGVYWIALCQKLEAAGIEVFLVNAQHVRHVPGRKTDVKDCQWLQRLHSFGLLSASFRPEDMICRLRSLQRHRLNLVWTAGAEIQHMQKALQQMNLHLHHVVSDITGLSGLRIIEAILAGQRDAVQLTKLRDYRVNKSTVAQMQAALVGDYRPEHLFVLGQSLQAYRFYQARIQECDAEIERHLQQLAQRFESSSALGAKLSPPEALNEADAPSQNPQPAKRKVKRKPQANEPKIDLADYLRRICGVDLTQVIGLNVLSVLLIVSEIGVDMSKWRSAKAFSAWLGLCPRNKISGRKVLDTRTCKVISRVATTLRLAAQSVGRTNTALGIFYRRKKAHLGPAKATTATARKLACLVYHLLKYKEQYREPDPATYQLKVEKTILAKIQKQAAALGYSLLPTALVPA

SEQ ID NO: 74965 - protein, 353 aa, unidentified
MEQFIGCDAHKKFSVFVAVYEKGQAGEALRVAHDRELYREFLARLPAHSTIAVEASGSYSWLVDEMERSGHCPRLCNPFEAKRRMGLTNKTDKLDARGLAILLRNGTLPEVWIPPSELRDQRELLRLRIFLVHLRTRVKNRIHGTLARHNLQVPGADLFGVAARLELGARLPELPVHSREAVEQELATLDFLEMQIESAERRLEVIMKVSVEADLLKTLPCVGTILSMVLMLEIGRVDRFPTAAHLASYAGLVPRVHSSGGHTRMGQVCGNVNRNLKWAFVETGNLIVINQRRLAGSHAVRLYQRIKRAKNHQKAVVAVARHLAEAAWWVLTKQEVYREPQGPRQKALSSTHG

SEQ ID NO: 74966 - protein, 465 aa, unidentified
MAARKQKRMSAQVVEDEDYQLRYEVAAGIDVAKESAVVCVRMPPAAGRKHRTSHLQTVPATVPAIGELAAELTAAGVQMVSMEATSDYWRIWFAVLEEAGLAVQLVSSSQARNLPGRPKTDKEDARWIARLTEMGMLRSSFVPPPEIRALRVYTRHIWDLTADRTRYWQRLEKLLEDALCKLTSAIARLAGHQTARAVIEAMIEGERDPQALAALGQGKMRNDKLPALAEALTGMRFGPQHAHTARSLLRSIDLLDAELKELQERVTAHLAAIPGSWGVDSGGVTGPDAGRAADAAALPAAERLDEIPGLGREAAMALIAEIGLDMSRFPTPEALVSWAGLTPTARQSGPRKGRGKKGHGNTYAKRIAVLAAYAAANTDTFPGERFRRLASRPGGGGRTKAGCAVGRSILVIVWHLLNDPAARYHDLGSDWHARHSDRSRKARNAKRQLEALGYDVTITLREDAA

SEQ ID NO: 74967 - protein, 437 aa, unidentified
MEEVTDEPLYRDRVCGIDIGKAELYATIRVPSDTSPRRRMSETRSFATTRRGVLALAEWLRSWQVPAVVMEATPACWMGPFFRLEAEGFECVLADARQVKNLPGRPKRDPSDSSWLAQCSERGAVRPCFVATKEFRVIRLHTRYRRDLINERTREKNRAEKLLETAAIKLSSVITDLHGVTGRDIMDHLIAGERDPKVLAQLARTRARAKITELQHALEGAEFFTGHHARLLKTMLERIDQIGAQISDLTAVIEELLAPYEEQLAQAESMPGWGRRSAEDAVAETGAGMTRFPTGGHLASWAGRAPLDKQSGKRKGQARHKKGNTYLGGVLGETAVCAGRTQTREGARYRKLARSRGKNKACVAVGNTQLKVSRKLLSSPGMRYADLGPDYYQRRAQNRRTIDYHVRELEALGREVTLCRLPEPEPEPGQAATTPAA

SEQ ID NO: 74968 - protein, 361 aa, unidentified
MRILALDLGKSKSVAYTVDTATGECGFKTVRTEPAVLGRLFAEGRPDRLVFEIGPLAGWVHDAAREAGVRQIEVANVAHEAWRWRHTRRKSDRVDAVRLADLSAAGQLPTVHVPQAATRQWRGLIAYRARLVARRTAVKNRIRAILASVGEPGLPRGAGGWTRQAVASLAALARPLAEVGSEDLWRGELALELEALAHLEAQVATVEAKLDTLAEADERVARLRTIPGVGPRLAELLVALFDDPHRFGSGRQVGSYLGLVPRQFQSGAMDRHGRITRHGNPLARALLVEVAWLGLRWNGRLRAIYQRVHRGSRARRKVAIVAVARRLAVFAWAMLRDGTVWRPERPEEKPTQHPAEAGVLA

SEQ ID NO: 74969 - protein, 378 aa, unidentified
MRLRLRSASRRNPIQFPTNIGRPNPGDANKIQGCDYHPGFQQIAFVDTETGDYGEQRLAHSEGAEKFYRDLAAQGKKVRVGMEASGHARWFERLLTELNFELRVGDATEIARKRERKQKTDRQDAQHILQLLMENRFPKIWVPSGENRDLRQLLWHRHRMVQARTRIMNQLQAVALNEGLRCKKKLWREKGRQQLEAFRLAPWASRRREDLLQLLDRLNPTISDLTQAIEQEVEKCPEARRLRTHPGVGALTALAFVLIIGRAERFQCGKQIAAYLGLVPLEDSSGNRRRLGHITKQGSSILRFLLVEAAQVTARSIPEWRNKYVHLTMRRGRKIAKVAMARRLAIALYWMRRKGWDYEQLRKFGSHAGQPGNRDGVK

SEQ ID NO: 74970 - protein, 341 aa, unidentified
MMIIGCDFHPRFQQIAFVDQETGEYGERRLSHPEEAEQFYRSLTGRQVRLGAEATGNFRWFRQLMQELGQEFLLGDASAIRAASPRRQKTDKRDARHILTMLVEDRFPVVWQPPVENDDLRQLLLHRCRMVRMRARVKNQLDSMAKNEGLLSSRVWSPKRRQEIEALPLPGWYGQRRADLLGLLEELSKRIKPLDEAVLTAAEDNPGARLLMTHPGVGPVVSLAYVLTIGDWQRFPRGKQVASYLGLIPAESSSSDKRRLGHISKQGNTLLRWLLVEAAVKAQRYDPSWHRQYLRLSMNKHHGVAKVAIAHKLAVRLYWMLRSGESYEQVMERGSHAGQSV

SEQ ID NO: 74971 - protein, 435 aa, unidentified
MEKIRTNVGGIDIGAKKVFTSIEGQPVVSHFTFTEDFILLRDYLLENKVKSVAMEATGVYWVILYEILEESGIDVWLVDGRQTKQVPGRKTDVKDCQWIQELHSYGLLNKCLVVDADIKELRSYLRLREDHINSSSRHINQMQKTLTLMNIRLTEVLSQIHGASGMAIIEAILNGERDKQVLVSLCHKSVLKNKKELVLKALEGRYTDAGLFALKQAHEGYKFYLQQINECDKKINVVINRIGRAGDGQELKKKRKVIRHHTPNVERLGYNILNIFEHKDATLISGITDYTWMQLLAETGPDLTRWPSEKHYTSWLGLSPGQHNSGKMRRNARKKGRPKAGQIFRVIAQGLINSKEIAIGSFGRRLRGRKGPKVAIKAMARKLAQLYWRVMVKGLDYAEKGIKQYEEQLILNKMRTFNKLAKELNINIAEKQYVT

SEQ ID NO: 74972 - protein, 339 aa, unidentified
MTVKTVGLDLAKDVFQVHGISENGRVIFNRAIKRAKLLRFFETLPSCRVGMEACGSSHHWGRQLRKLGHDVKLMPAGYVKPYVKRGKNDAVDAEAICEAVRRPTMRFVEIKTEEQQAILSIHRTRDLAVRQRTQLANMIRSLLREFGHILPIGIEAVTSFGKRHLGGDHPDMPEIASGMLGIQCYQLIGLNERIYGYSKMIEQHALMNADARRLMRMPGIGPITASAIVATIGDAKQFRTGRDLAAWLGLTPLNKSSGGKKRLGKITKQGDHYIRKLLVVGMTSRAVMAKRSPEKVDLWTAKIIADKPFRLATTAMANKAARAIWAMLTKKQEYRQPAF

SEQ ID NO: 74973 - protein, 342 aa, unidentified
MADTIAVDLAKSVFEIVVSDQPGKVVARERLPRRTFLDFFVNRPAATVVMEACGSAHFWARKIQGLGHTVVLLPPTQVRPYVVRNKTDRTDTRGILEAHRNDDIRPVPVKTVEQQALASLHRMRSAWVADRTAKINLLRGLLRELGLVIPLGARKVIPQAWAFIEDADSGIPDAVRPSLAELCQDIRTLEDRIAETEQRIAAMAKHSPAVARLRTIPGVGLLIATAIIAFVGDVHRFPSGRHFASYLGLTPREHSSGSRRWLGGISKRGDSYLRTLLIHGARSALSHAHSKPDPDRLRAWALRLEKASGARVAAVALANKMARIAWAVLHHDRDFKSVPQAA

SEQ ID NO: 74974 - protein, 424 aa, unidentified
MSKKNSSPAGLQALYARVCGLDLHKKLIVACVRILNTKDGTVQSTLRKFGTMTVDLMELRQWLTEQGVSHVAMESTGIYWQPVFNLLESHFKLLLINAQHLKKVPGRKTDMKDADWIAQLLQCGLLRPSFVPDRQQRELRDLTRQQTKLVQQRNAVGNRIQKVLESANIKLGSVASDVLGVSGRKIIEALIAGEKDVSVLAELAQRRLRGKIPELQRALEGELTEHHCFLLRQLLEQHDFLEKKIENVRERVGAVAPASFRAAVEQLDAVAGIGERAARALLAETGTDMSRFPTHKHFASWAGQCPGNRESAGKRRSGKTPAANRHIGAVLTEVAHAAVHTKNSYFKSQYHRLAGRRGKKRAIGAVKHSVLVTVYFMLRDNKPYQDLGVDYFDKLNPQQRIRYHVRRLQELGQEVELSPMADTA

SEQ ID NO: 74975 - protein, 423 aa, unidentified
MSAGAEHRRDEAMDTLYPRCAGIDVHKNNVVVCLRCADRPGKVFEEVRTFSTMTRDLLALSDWLASHGVTHVAMESTGVYWKPVFNILGGRVEVILVNAEHIKQVPGRKTDVKDCQWIAQLLQHGLLKASFVPPEPIRELRDLTRQRTQLIQERSAAANRIQKVLEDANVKLASVATDVLGVSGRDMLQALIDGETDPAELADLARKRLREKIPQLQLALEGRVTDHHRFLLRMHLDHVAHLEELIGRLSGRIEEKMAPFAQAQERLETIPGVSQRVAETVVAEIGVDMKQFPSAGHLASWAGMCSGNNESAGKRRSGRTTKGDRWLKRILVQAAWAASHTKGTYVAAQYRRLSKRRGRKRALVAVGHTLLVIMYHVLKRGTTYAELGADFLDRQEPERLTRQLVKRLEGLGHKVTLEPGNAA

SEQ ID NO: 74976 - protein, 423 aa, unidentified
MSERDYSKQVARRQRIGDRTLVVGVDIGSASNAVGFMNKEGKVLGSYPKMPNSREGFEEFVKITERVKAKHGLTDVIIGLEPTGHYWRKFGYFAKEKGYEVRFVRTTALKHHRELDESSSAKSDKQDALTITNITREGKYIDTVIEGGKMRQLRTLVKVREKIQKGNASAKNSLHAALDDYFPELHGIFWSMNARGLWVLLERCPFPEDVLTLKVSSLKEMIGRASRRKAEASQKATALSQAAKESIGLKQIGSADRYRLKMCLEEVKRTELTIKDIEREIKRMLKDIPQAQYLLSIPGIGPISAAVFLGELGDTTSFPGARQIVKYAGYDPQESDSGYRVSRKFISKKGRWLLRKHLFLMSMRVVVLSRYFQGYYQRKLQTKNRFGQLPRKKEILCAVAIKLIKVIFALLRDQRSFEDTVAC

SEQ ID NO: 74977 - protein, 352 aa, unidentified
MMIIGCDFHPRFQQISFLWEETGEWGQRRLMHTAEAEQYYRSLCGGKVRVGIEATGSYGWFRRLLSELGHELLVGDATQIRASNPRRQKTDKRDAEHILGLLVADRFPAIWQPPAENEQLRQLLLHRSRLVRLRTRVTNQLDGMAKNEGLLVPGGWSGKRRMAIEALPLPGWYGERRKDLLGLLDRLEERIAPLNKAVSQAAANNAEACLLMTHPGVGPVVSLAYVLTIGNWQRFARGKQVGSYLGLIPSEDSSSDKRRLGHISKQGNTLLRWLLVEAASTAQRYDPSWHRQYLRLSMSKHHGVAKVAIAHKLAVRLYWMLRSGEDYSQVRERGSHARQSECPGGRSKRPIE

SEQ ID NO: 74978 - protein, 389 aa, unidentified
MKIFVGIDIAKLNHFAAAISSDGEILIEPFKFTNDADGFQLLVSKLESFDKNSIIIGLESTAHYGDNLVRYLVAEFYQVCVLNPIKTCQMRKNNVRKTKTDKVDTFVIAKTLMMQDDLRFITFFDLDMMDLKALGRFRQKTIKQRTRLKIQLTTYVDQVFPEIQYFFKSGLHQNAVYALLKEAPSPKEIASMHMTHLANLLKVNSHGHFTKEQAKELRVLAQKSVGANDSAISIQITQTIQQIELLDSQLEKIEAEMTDIMKFNDSVIMTIPGIGYINGGMILGEIGDIHRFSNPNKLLAFAGLDPSVYQSGNFQAKTTRMSKRGSRVLRYALVNAAWNVVRNNATFKAYYDAKRAEGRSHYNALGHCAGKLVRVIWKMLTDEVDFNLE

SEQ ID NO: 74979 - protein, 358 aa, unidentified
MMDGSRGKPTMTVGIDLGDRYSYLCLLDTESGEVIEEGRLRTTPEAFRRRFGSEQWMRISIEAGTHSPWVSRLLGECGHEVLVANARKLKLIYAESRKTDQIDAQKLARLARLDPKLLSPIEHRGESSQAHLALIRSREALVRTRARLINHVRFTVKPFGHRLPKCSAQGFHKKVAGGIPEFLEPSLGPILQTIGELTDRIREYDRKLEAAAEELYPETRLLRQVQGVGPLTALAFVLILEDPMRFANGRAVGAYVGLVPGKDQSGDNDPQRRICRHGNELLRRLLVGCAHYILGPFGQDSDLRRHGEKIAQRGGKNARKRAIVAVARKLAVLLHRLWLSGEVYDPLYNARRAGEYAA

SEQ ID NO: 74980 - protein, 338 aa, unidentified
MEITTIGIDLAKQVFQLHGVDAHGKTVLRKRLTRSALGPFMANLPPCRVRVEACAGAHYWSRQWRAFGHDVRLMSPHFVKPYVKSQKNDSNDAEAICEAVSRPTMRFVHPKTIGQQDLQALHRIRQRRIHNRTALINQIRGLLMEYGITLPAQAAQVRRRVPGLLDDATQDLTSLGRELLEDLYRELVALDEHLLEVEGRIKRIFAATEVCGRLAQVEGVGPLIATAMIAAVGDPHAFKNGRQLAAWLGLVPRQRSSGGKHVLLGITKRGDRYLRALLIHGARAVVVRATAKTDTRSCWIAGLQQRRGTNRASVAVANKNVRILWALMTTQAPYRRAA

SEQ ID NO: 74981 - protein, 336 aa, unidentified
MEITKQCIGIDVSRDSLDVIFKEQVNQEVKIKGCRKFDNNSDGFSQLIKWGNKRKKCENVYYIIEATGVYHEELLYFLYSDDKKVCVELPQRIKYFAKSKGVKTKNDKVDSSVIADYGIERKLRLWQPPSKDFKSPSDFSREHNSIQNLKTIAENRLHSAKSSHAKDQRTINRYVDQIAFYKEQLSEIEKDIKSVIKKDKNLKEKLNNITSIKGIGMITAVKIIAETGGFYLFSNIGQLVSYAGLDVIENQSGNNVGKTKISKKGNANLRTALYMPAMTSIQHDEKMKNFNNRIMQTHQFKKQGMVAVMRKLLILSYTLWKKNEPYDENYVWNKSV

SEQ ID NO: 74982 - protein, 346 aa, unidentified
MIVIGCDYHPSWQQISWVDTATGEMGEKKLEHGSEEAERFYRQLAEPALIGMESTGNCQWFVEMAAAAGHEVWIGDAAKIRACEVRQQKHDRRDAALILKLLLEGRFPRIWTPSGAEKDLRQLLIHRYKLVRFRVQVKNELQHLAMNQGVTKKRKLWSVAGQKVLRELPLKPWASQRREDLFKLLGTLDEPIARLDEAAMQEAKQNTQAQLLMTQPGVGPITSLAFVLTMGDVNRFPRGKQVASYLGLIPREYSSGGHQRFGSISKQGNRFMRMLLVEAAQVAVRCDPQFRNEYLHRCHRKAKGVAKVAAARKLAIRLYWMLRTQKPYPEIVRIESSPRVPLVSAS

SEQ ID NO: 74983 - protein, 365 aa, unidentified
MNFIGIDVHKKQSQICVLDEQGEVCFETRVPTSRAHLKDAVLIYKRAKVLLESSTPSEWVARHFESMGMEVIVADPNFAPMYATRSKKLKTDKRDARCLAQACKLGAYKLAHRLSDEQRRVRMQLDVRQTLVETRTKLTNQIGALLLGSGYQVATGAAENYARRLEALSLPSELRGQLAPLVNMLTALNQQIGELDKQLAQRADAEPDAQRLQSIPGVGPVTALMFLAVLDGAKRFDNAHSVMSYLGLVPREFSSGEKQLRGHITKAGASRARSLLVQAAQTMMRVKKPQTEALCKWAESIAQRRGKRFAVVALARRLSGIMWAMTRDGTEYTQRPVSSPVQRVTESTQRRQARSVLKQREGHAA

SEQ ID NO: 74984 - protein, 411 aa, unidentified
MLQTLIHCCAGLDVHRLLIVATILKTLPDGRVEKTVREFTAFRRSLQQLARWLKDEGVELAVMESTGIYWKAVFEALEDEEIEAIVVNARHVKNVPGRKTDVMDSEWLADLARCGLLRSSFIPPRDIRELRLLTRYRKKLSGILSGEKNRLHKALDDCGIRLGAVVSDIDGVSAREMVRALLKGNCSPKEIARLARGRLQSKMEELELSLDGRISDRHRFLLETILRHIEGLQHEIQEIDRQVFAAMQPYEGQWQLLQTIPGMDQISAAMLLVEIGVDMSRFGSRERLSSWAGMCPGNNESAGKRKSGRSRKGNRYVRAILCEVANAARKTDSQFKGLYQGLVIRRGHKRAIIAVGHRILEVVYLLLSKKEPYRDPCVDYEALMVKRNAPRWIQALRKYGYLHEKTHEVAL

SEQ ID NO: 74985 - protein, 345 aa, unidentified
MEPMYYIGLDVHKRKISYCVKDSSGQVCAEGSLPATRFDLDRWMKALPQPWSAAMEATMFTGWIYDHLKPHAAALKVAHPLMLRAIAAAKKKNDRIDANKICDCLRCDFPPECYMASTAIRERRRTLRYRNLLVRQMVQMKNKTSMLLMEAGVSYNKQRLHKAGYFRELLATNPNIDEGLVPLLRLCRETVVRLQRTESALVRSLERDSLLMDRVERLMTIPAVGPITALTWALEVGDVQRFSSIKKAISYCGLCGAEKSSANTVQRTPLSKQRNKHLQTTLIEAAKMAPRISPELAMLYDKEKQKGNANRATLAVARKLVAYLIAVDRRQRDFQMVEASSGIAA

SEQ ID NO: 74986 - protein, 409 aa, unidentified
MDLIHPRCAGVDVHQKTVVACVRIAMKRKVVQEVRTFGTTTSDLLALSDWLSSHGCTHVAMESTGIYWKPVWHVLEGTFELVLANAMHIRNIPGRKSDVNDATWIADLLAHGLIRGSFVPPTVIQELRDLTRSRKQLVREIARHTQRLQKVLEDANVKLTEVLSDVLGKSGRAIIDALIAGEKDPEILANLVGGNRLKASHEELVAALHGRVTSHHRFLLNLHLVQIKALESAVGELEVRVGEALGPFRESAELLKTIPGVSDTVARVIIAEIGLDMGRFPTSGHLISWAGLCPGMNESAGKRLSSRIRPGAPWLKTTLAQAAWAAIRTKGSYLRAQFHRLKSRRGPKKAIIAVAASMLTAVYHMLKDHVPYHDLGGDYFDRRDKSVMAKRLINKLNTLGFHVEVSPAT

SEQ ID NO: 74987 - protein, 409 aa, unidentified
MRYYLGVDWADQTHAVWVVDEGGTKVAMRTVPHTAEGLTEWGRALDEWRAQGIELWAAIERPEGRVVDFLLDHGVVVYAVNPKTLDRARDRFRQSAAKSDPFDARVLADFLRTDHAHLRAVQPSSEAAQELKLLTDDYHRQIRQQTRLVNQLTTTLKAYYPRGLEVAELTTGLAREFLQAYPTPATITALTERQWQRWAHAHRLSETRTQQLWVVLQRPQLPVPPHVVRAKARLMQSLVAQLTLVVEVVGAYREAIEDFFARIPAAQWIRTLPIGDHGITAPTLWARLGDAPGRWESFRHLQAQAGTVPVTIRSGKQQVVRFRFACDKSLRYIIDHVAFLSLRWSEWAHAYYAGQRARGHSYRQALRALSAKWLKIIFVMWERQIPYDEQYHLAMMTRQQLRQRQEKVA

SEQ ID NO: 74988 - protein, 418 aa, unidentified
MKVVFPTCCGVDIHKSFLVATIIKTPQDSLQPIYQKKRFSMFNSDLNRFADWLHENDCMDVCIESTGKYWIPAFNILEKRGVRVIIANPKWVKAVKGNKDDTKDSKWIGDLFRIGLVKSSFIPDKDIRILRELTRYRYKLISMRSSEKNRFQNAFTVCNVALDSVVSDMFGKSAAAITDYLTSDEDFDPQHCVSLLQRSLKKKADDVLESIEGYEITQEQKTRIGIVRDHLHYIGSLVERVDTCIDTMVNRYEGYIILLCTIPGVDRSSAITILSEIGIDMTQFGSSKRLCCWAALTPGNNESAGKKKSVRISRAGVYLKPALVQVAHAAVKDKASPYYVLKYERIAKRRGKKRAIIAIARMILTAVYVMLSNLEEWNPVDLYKVDMPEHLKEKQLAKAVKQAVRFLEAQGLTVLDSA

SEQ ID NO: 74989 - protein, 427 aa, unidentified
MARAIGLDVHLEFCEVAIAEDRTVRSAGRVETKPDALELFAQSLGPDDRVALEVTGNAWEIARIVEPHVARVVVVSPADTGIRQARAKTDRLDARTLARLLWSGELDAVWMPDRVTWVMRRRLSRRGQLVWARSRAKNEIHAVLMRCLVGRPPFADLFGVKGRRWLAELELPVEERETVDAGMRQVEFLDTEIAAVERLIARDALASEEIKRLMTVPGVNVIVAASFVAAIGDIGRFHNPRKLVGYLGLDPRVRQSGSGPASHGHISKQGSVRARHALVESCWSAVRQPGPLHAFYQRVRARRGHSVAIVACARKLACLFWVLLTREEDYAYAQPSLTRKKLRLLELAAGAQRYAPEGAGVWHANEAVRAAERELAHQAEIAYQRTVRDYHATQATTKGAGATPGRASSSRQSGKQRGRATVPDPAL

SEQ ID NO: 74990 - protein, 425 aa, unidentified
MSEKIVVGIDVSKAFSDICILSPNNDIIKRLKISNDINGMKSLIYVLEKVEDEYKDRAVIIMEATAHYHQILANFFRKHNYEVIVINPIQSGALKNINIRKIKSDKTDAYNIALLYRIKNYNETITHSDTVNSIKKLCRQHKELTDEIVEHINRLIAFLDISFPDFKKVFTDLQGKTPLSLLEKYPTIQEVLSPENKQDIIQLIKENSHKSSSYAEVKYEKLFKAAEKSIEVCIVSLSSAVLIQTTVRVIFSLQEALKAIDDEIKRLSLLDEKFHKEIVLLQSIPGVGEYTACVVLSELGDISNFSKPKELVAFFGLDPGVTQSGTYNRKNNKISKRGSPHVRSILHMLAKSNVYPNRNREYLNPVMRAYFEKKIAEKPYKVVMCAIMRKMVQIIFAVLRNQKSFELRTPEEHQKLIREKSKLVA

SEQ ID NO: 74991 - protein, 455 aa, unidentified
MPKRTTSDRPELKPVNVGAAAIDIGSKMHMAAVNPARTDTPVRTFGTFTQDLHHLADWFKACGVTSVAMESTGVYWIPVYEILEQRGFEVILVNARYAKNVPGRKSDVSDAAWLRQLHSYGLLRGSFRPDAEIASLRAYLRQRERLVEYAAAHIQHMQKALMEMNLQLHHVVSDITGATGMRIIRAIVAGERNPDVLATYRDVRCHSSTETIRAALVGNDRHEHVFALTQSLELYDVYQAKMLDCDRKLEVLIAALSNRGAKPVGKLSKPRIKTKQVNTPTFDVRTALYGVLGVDLTEIHGLGPSLALKLVGECGTDLRAWPSAKHFTSWLCLAPGNKISGGKVLSSRTRRSSSRAAALLRLAATTVGRSDTALGAFYRRLSSRAGKSKAVTATARKIAVLFYNTLRHGMSYKDSGADQYEQQYRTRVLANLQRRAKSLGFVLQAIPAEAEPAVS

SEQ ID NO: 74992 - protein, 449 aa, unidentified
MKKSSSERHGLPVIHERAAGIDIGSRFHVVAVPADITEEPVQTFKAFTADVERMADWLGDLGVTTVAMESTGVYWIPVYEILESHGLHVVLANARDARAVPGRKTDVNDAQWIQRLHACGLLRASFHPDREIAALRSYLRLRERHLNYAAAHIQHMQKALTHMNLQLQHVVADITGATGMRIIRAIVAGERNAATLATLRDTRCKSSVETIQSALVGNYQPEHVFALAQALAMYDAYQAQLEVCDHQIAQSLQRLSRKRPSPSEPLPKPRHRARQPNALNFDVRALLYQLVGVDLTQIHGIGPYLALRLVAECGTDLSRWRTAHHFTSWLTLAPGCRISGGKVLSAHTRKTRNRVTAHLRLAAVTIGRTNTALGAFYRRLSARIGKAKAVTATARKIAILFYNAMRFGMAYQDPGADHYEQRYRERVVKGLHRRAAEFGFTLQAVEGVS

SEQ ID NO: 74993 - protein, 370 aa, unidentified
MLSIGIDVSKGKSTVCGMKPGGEIVYAPFEVQHTREGMSELVSLLRSSGEEVRAVLESTGSYHCPVVTALLENGIFVSVVNSLRMKRFCSQSIRKVKTDRIDAMQIALYGLAYWQELQPARLPEDTYRELQLLARQYYQMTSLLIKAKVDFNAICDQVLPGMQELMNDHAGRHKLSDFVLRYHHTTHILEMGETRFRKDYCKWAEKKGYRNCERMAALIFATAQNGIPVLPNAPSTQIVITEAIRVLHTVEASRDAILTQMQALAKTLPEYSLVREMPCIGDTLAPRLIAEIGDVRRFHSKRALIAYAGIDAPPYQSGKFRANNRHISKRGNRYLRKTGYEVMQSYVMHKPANDPIFTFIEKKRGEGKEW

SEQ ID NO: 74994 - protein, 468 aa, unidentified
MQVVYQRCCGLDIHKKLIVACLLLMSSQGVQKEIRTFNTTLADLYRLRDWLVAIECQMVAMESTGVYWRPIWNVLEEELVLMLVNAQHMKAVPGRKTDMKDAEWIAELLQHGLLRASFVPPRPQRELREVTRYRSKLVQERARLVNRIQKVLEDSNVKLASVATDITGVSGRAILRALLDGEDDPEVLAELARGRMRSKRDALAQAVQGTLRDHHRFLLKSQLRQLDFYDTQIAELDQEIASRLGVQTGPDDPEPLGSGPLHGNRASSADQAPDGVADLASHSPEPSSDPARSQAEVMAVLDAVTGINQRIAQIVVAELGIRLDQFPSEGHLVSWAGLCPEAKISAGKRLSTKTGMGNRWLKQALIEAAHSAARSKNTYLGAYYQRLKKRMGSKKAIVALAHRILVIIYHLLKEQQSYRELGPGHADEQAAESSKRWAIRRLEQLGFAVTLTPNEGERLSGAAEEEIA

SEQ ID NO: 74995 - protein, 334 aa, unidentified
MENIALIGIDLGKNSFHIHCQDRHGKALSRKKFTRPKLIEFLATCPATTIAMEACGGSHFMARKLTEPGHTPKLISPQFVRPFVKTNKNDFVDAEAICEAASRPSMRFVQPRTESQQAMHALHRVRESLVRDKVKTTNQMHAFLLEFGVSAPKGPTLIRRFAEILDTNPLPPYLIRLLQKLREHYEYLLEQIKDLESQLKRSLDEDTTGQQLLTIPCVGPLTASLLSTQLGDGKQYGSSRDFAASTGLVPRQHSTGGRTTLLGISKRGNKKLRALLVQCARVYLRTLEHRSGQLADWVRELLLRKNNFIVTCALANKLARIAWALTIRDKPFEA

SEQ ID NO: 74996 - protein, 428 aa, unidentified
MNEPSNNDDTQNDYAAFIAIDWADRQHVFSLQVAGQSTKETGTLEQKPEVIGPWVARLRERFGGRPVAIAVEQSRGALIHALLTYDFIVIYPLHPTTVAKFREAFKSSGAKSDPLDTDQILQILTKHRELLKPLNPDTEQTRLLARLVEDRRKAVDLRTSHVQALTAALKEYFPQAIELVNGNLTSRLACDFLKKWPTFEGFQQAKPSTIKRFYYGHNIRSPEVIEKVLGLATTANPLTTDSAIVESGSRLSQMYAQIIQTLNPVIVDYERRIEKVFHDHPEANLFCKLPGAGPALAPRLLSFFGTDRSRYEGAGNVQSFCGIAPVTKSSGKTRVVYFRHACPKFDRQTFHEFARLSVAKCQWARNYVDYYTAKGKKFHTIIRALAFKWIRILFRCWKNRTPYEETKYIASLKKRGSIFATLHLEQKS

SEQ ID NO: 74997 - protein, 341 aa, unidentified
MRIITVGIDLAKNVFAVHGVDDSGKAALVKPKVSREHLLSLIAQLPPCVIGMEACTGAHHWARQFRQYDHTVKLMAPKFVTPYRMSGKRGKNDAADAAAICEAVRRPHMRFVPVKEEHQQIILCLHRTRNGFVEERTATYNRLRGLISEFGIVLPQKIANLRRNIAEHLEDLPGYANRCVGDLLAHADVLDVRIAEYDRAIAQAAKEDARSKRLMQLPGIGPITASALLASIGGGHDFANGRQVAAWMGLTPGQYSSGGTARLGRITKAGDSYLRSLLVMGARAVLSGLGDKQDRFSRWARSLVERRGYWKAVVAIAAKNARLAWAVLKYGEEFRLNERAT

SEQ ID NO: 74998 - protein, 359 aa, unidentified
MNYTGIDWHKKYSVCYTVDEKGNRLAEKKIENSTPAGFADYFRTLPGPTTVVHEACWNWGKLYDWLEEMEEVEEVVLAHPHKTRLIADAQIKTDRLDAKALATLLRGNLIARVHIPGVENRARKNLLRQRLSWARLRTMIRNRVHALVDRQRDLPLPQCSDLFGVKGMAALRAAQLPEPDHRLLQDDVELLDLLKVQIKRLEAQIEAGQESSPMACRLRTLPGMGKILASVAASEIDQIERFYRAEKLCAYAGLVPTTYASGGKISHGKLLPWCNKWLRWAFIEAAWVAIGCSPYFGDLYRSHRTRGKKANTAILIVARRMCQIAWTMLQDHRDFSPVKPEPKPFPGRSHKGLKVAMAT

SEQ ID NO: 74999 - protein, 401 aa, unidentified
MVACVRIASGGEVSRAVRTFETTTARLIELAEWLEASGCTQAAMEATGVYWKPVWQMLAGSGFELVLANAAHVKNVPGRKTDVNDATWLAELLAHGLIRASFVPGPEIQELRGLLRTRKQLVREKASHVQRLQKTLEEANIKLESVLSDVMGRSGRAMIQALIAGETDPAKLAALAHPKVRAPQARLREALRGRVKRHHRFLLGLHLQQIEALDAGIAAIDREVDAGLASFRDAVKQLTTIPGVSELSAQVILSEIGTDMSRFATAAHLRSWAGRCPRNDESAGKRRSTRLRMGAPWLKAMLVQCAWAAARTKATYLNAQFVRLRARRGPKKAVCAVAASILTAAYHMLKDGTFYQDLGATHFDRRPPEAHARRLVKRLADLGFSVQLEPWQPSHDRSVSL

SEQ ID NO: 75000 - protein, 401 aa, unidentified
MTESTHIVAGADTHADTVHVAAISMTGALIGDREFPTTRTGYTAAIRFLTTLGQVQRVGVEGTASYGAGFTRALTAKGLEVVEVTRAVKSTRRLKGKSDPLDAYGAARTALAGDGLATPKGDATTGLRALHLARRSAVKHRTAVINQIKAMLVSAPDAVRERYRGLTTSKLVETLARCRPDALGDPWAQSLLVAAKILAQRVQFLETQADELETQIDALVTGANPGLRAAYGVGADTAAQLLITAGANPHRLHSEAAFAALCGVAPVPASSGKTTRHRLSRGGDRAANNALHRIALVRLSCHQPTKDYAQRQLQGCHSKSKMEVLRKLKRAIAREMFTLLTRQITVPEYADLRPARQAKNITVTAAAHHFGVWPTVISRIERGLQRDDTFADNYRNWLQAA

SEQ ID NO: 75001 - protein, 339 aa, unidentified
MFYSGIDQHKRDSFITTYDDGGPIVNQERVPNTPLRVQRYFAQFPGPHKAVVESTGSWYWLADLLRDLNVELSLAHATRLKAISAAKVKTDKVDSDILALLLRADLIPEAHMICPEQRAPRDLMRTRLRLVEKGASCKNSIARLLEKFNVRSVYELDDLYRLQAHCHEAQIVLVHEQIHTLESTLHHYLIPNLHVQRMLWIPGIGKVNAFSIYTEIDGIDRFPTAKQFFSYCRLVPGAANSAGRTKHRSGSKAGNRYLKIAFSHAAIRAVQYYPEIRAFFKAKARRKPIKIARTLVALEIARIVYQVLKTGDHFNQRFKNKPLSRTKQSQWPRLASPPA

SEQ ID NO: 75002 - protein, 431 aa, unidentified
MLGGNQEKLMSQNQPEVQYAAFVSIDWADQKHVWSLQEANSSTREHGEVGHMPEAIEAWIAQMSQRFAGRPIAVAVEQSRGALVFMLSKYEQLHIFPVPPAMTANLRKAFYSSGAKTDPADTDLLQDVLQMHREKLRRLSPDTEATRLIQNLVEERRKLVDEKTAQSNRLEAHLKIYFPQIPQWFGDVDSPLVCALLERWSALEALQKARPDTLRSFFRKHHCRKEELIESRIKAIGEAMPALKDRAVVEAQLAVVKVLVQVIQVLHQGIEDFNRQIQEAAEVHPDFFIFESLPGAGAVMAPRLLAAFGSQRERYRNAAEVQTLSGIAPVTESSGKSSWIHFRFACSKFVRQSFHEWAALSITQSQWARAYYELQCRRGKRHHAAVRALAFKWIRIIFRCWKERVAYDEKVYLAALAQHNSPLLAATKIAL

SEQ ID NO: 75003 - protein, 473 aa, unidentified
MSHRRLVGIDLGITSAHTVRVLDEAGGTIAKRKAWPTKESLSDVEATALRGCPPGTTLEVVIEPTGPAWLPIAVFFTARGHRVFRVSSQKAADLRRFLSRHTKTNGIDADTLAKLPLFDPAGLQPLALPGEERAALDRRVRACDRLTQAGAEHKRRIKDLVRQLMPMSPLHGDLGAADLAVLERFADPNALVRAGVKRLTAVIAKASHNHQGAERAREWVAAADAALELYEGHPAVAFGDLAAEVTTEVRLLRAVQAELAGHAAAREDAYRWVDPGALARSLPGLAEVGGPALVACMGDPKRFRRGKQFRSFTGLTPKASETGDTDRKGQAMSKAGSSLLRTTLVRAADHARKLDPQLARIYHVQMVERGKDHLGALCVVAASLGERCWAVMERGMPYVICDTDDRPVSAEEAKAIIAERFAVPPDVRARRRSKKSSGGKVPKNVLTGQSTPHARGAGQRGSLPPGASSALAS

SEQ ID NO: 75004 - protein, 343 aa, unidentified
MYYIGLDVHKKTISFCVKDAAGCVHREGKIGSTRHELDAWIRTVPQPRMIAMEATIFTGWIYDHLLPHAEKVKVAHPLMLRAIAAAKRKNDRIDAVKIADCLRCDFLPECHMASTEIRNRRRILRYRGLVLRQAVQMKNRVSGLLMETGVSYNKLRLHRMGYFAELMTTNEEVSESIRPLLKLCREHIDRSIRLDTTLLRSLEQDPLLADRLRRLRTIPGVGPITALTWALEVGDTSRFRSIKQAISYCGLCSAEKSSADKVMRTPISKQRNKHIRQVLVEAARLAPRYSDELALLYEKERQRGNGNRATLAVARKMVALMLAVERRNTDFVPAAEFRRTAAA

SEQ ID NO: 75005 - protein, 428 aa, unidentified
MANQADGTPTCVLVAIDLAKLWNAALIEYPDGKRQRFQFKHVRADYDRLVKLLQSTGSSCRVAFEPTGVYHRTLAYRLLQEGFQVCQVSAVAGARYRDAMFNSWDKNDPKDAQVILELLKQGLTQQYHDPLRKGTHDLEEISKTYEQISRARTRLRHGIITHYLPLHFPEIERFWYSSRNDWFVRFLMQFPTAAAVRALSREEFVAAAWEVVGRKVNKRRQLEEIHELAQNSIALPLAADSIAIETFRLQLSRYDTLNEQRCTLEARAHALLKDRRDYQRLCEIPGIGPIIALVILAEAGDLHRFSHHKQFLKYCGLDLAKEQSGVSRGHERLSKRGNARLRCALWQASMSAIRMRENAFRDKYTRYIAPDPENPDRRRKARTAVTAKLARVAYSLVKFDRPYRSRFEVGLPSGSISLNAAVEATRTS

SEQ ID NO: 75006 - protein, 388 aa, unidentified
MNYAGIDYHKRYSHVTAINEEGKVICSKRLENKPETFQTFFKGLEGPSEVVLEASRTWGVMYDLLEAIDEVESVQLAHSQKVRAIAEAKIKTDKIDAGILAQLLRADLIPAAYIPGKQTRSYKEMIRQRVFLVRMRTRLKNRIHVLLDRLHIPLPSVTDIFGKRGTDYLRKLNLPGVDGEILREDLDLLEVFNRLIKEAEREIGSLMGEDPRVKLLRTVPGLGPILAAVVALEIDRVERFSLPSKLASYAGLVPSTYASGGRIFHGKLVPMTNKWLRWALVEAAWGSLRTSPYCRSYFESHKRHKGPHTAAIALARRLIEIVWHVLMENRNYEERLPYSQRLKKPADVHSLSEGKSPSADGAGGPQRGIAQRERKPSANVSPAALTAT

SEQ ID NO: 75007 - protein, 351 aa, unidentified
MIVLGADTHKRSHTVVAVAAATGELLGEQTVPVGRRGFGALLRWARGLDGDGVWALEDCRHVSGSLQRFLIERGERVLRIPTHLTAKARRSARQRGKSDPIDALNVARAALQEGLQSFPAAHLDGAELDLRLLVDHRERLVRHRVELNNTLLWHLHDLCPELRLPGGALFSKKWSTRIARRFARAPQQTMRVRIARDELRRLRELTLAINQLEREITELVAQIAPQLLAEPGFGPLIAAKLVGEIAGAQRFATAAKLARAAGVAPIPASSGNTQRQRLDQGGNRQINAALHRVIVTRARCHPETRDYIARRRSEGKTTREAIRCLKRYLARRVWRLLQPPTPSEKSLNLLT

SEQ ID NO: 75008 - protein, 465 aa, unidentified
MKRKPAGGKAASRRSSKKGASPQQSINTQTHPDAAGIDVGAEEFVVSVPPGRCEEPVRTYTTFTSGVHALRDWLLSCGITTAAMESTGNYWITLYDVLTEAGIDVYLVNARHVKGVPGKKTDVCDAQWLQQLHAAGLLRKSFRPALGIVPLRFLMRHRTEMVGDAAKQLQLMQKSLTEMNLKLQHVFSDIDGLSAQAIIDAILAGERDPKKLAALRDKRCRSSAEDIIEALRGDYREEYLFVLGQSQRTYRQLREAIAACDEKLGELAARVECVVSGPLPEAPKGQRNVGKNSPQFAVFETAWRFYGVDLGGVPGISTGLLCALISEVGTREQMLSAFPSPERFASWMGLCPDNRISGGKVLKAKTRKVKSRLAGAFRLGVFGLQRSQTQMGGYLRRMKGKLGKAEGTTAAAHKLARIVHGMIKSQQPYDEKEAFKLTPQSEARRRKALEKQAAALGLTLQPAAA

SEQ ID NO: 75009 - protein, 342 aa, unidentified
MQYLGIDWGTRRASWCALDEHGALREGAISADQDGLARLALTVGTDEELRGCIEMMSGAVWVRDQLALVGWDIRLADARKVKSIAPLACKTDRVDARVLADLVRRDLVPEVWVPGLEERANRERLRRRSHLIRLRTSAMNRSFGLLTQWGLRRNLTALRKPDAISELAGHGVPPVWRQSITTLLAVIDDLDTQLAVLERELRPVARGDDRVKLLTTIPGIGELLGLTIAAEIGDIARFPSARKLVGYSGLTPTIKQSGQSSRTGRLSKAGPATLRWAAVEAAQQAWRPTNPWHRLYTDTKHRHAKSNPAKAAVARKVLIAAWHVLARQEPFKASAAAAARAA

SEQ ID NO: 75010 - protein, 350 aa, unidentified
MLHAGLDLSRNRIDVCLLAEGGELVAEFATPSDADGLAGLARRVFELGEAVQGVIESMTGARFVHDTLEQSGWDVLIADAQKVKGLAPLACKTDKIDARVLAVLSERDLVPQIWLPDPRVRSEREQARFRMHLVQHKSTLKNRIHSTLITFGHPCPVTDLFGVAGRELLDRLALPQPWRGTLDASLELIDHLERQIAGINKELRAGGADHPYVPLLLTVPGIGWVLAFTIAAEIGDITRFASAKKLCGYTGLCPRVIQSGERDRRGPLTKQGPKYLRWAMLEATMHALRHPVYRERYQRNKKRLGRQRGAKVAQIDIARKLTEAIWHMLTRNEPFAPTTAAAGAAFRLAA

SEQ ID NO: 75011 - protein, 406 aa, unidentified
MAEETIGWFAAVDWGSEKHQACVLDARGGVAGEREFPHSGAGLTELADWVRSITGEASVVAIAVEVPHGPVVDVLLDRGFIVHSINPKQLDRLRDRFSVAGAKDDRRDAYVAASGLRTDRHLFRRVQAADPHIAELREWSRLAEERKQERVRLGNRLHHQIWRYYPQLLELTDDVAADWFLDLWTIAPTPAKGEHLRKVAVEQLLKRYRIRRIDAETVLRNLRQPAIKVAEGVAAAASVHIRSLIVRLHLVNRELRDAERKLDELCAAFEAGKQDDVAILRSLPGIGRINLATLLAEASEPLSRRDYPALRTLSGVAPVTKRSGKSHIVIMRYAAHARLRNALDHWALAAVRHDPKSRCRYTALRQRGHSHGRAIRGVADRLLHVACALLQRQTPFDPEHDQAAAA

SEQ ID NO: 75012 - protein, 389 aa, unidentified
MKGNHRIIGLDSHPDVFAAAALSGGDAGSARAEWVHDRQPTARLEAWAQKHLRAGDIVVLEASGNSFAIAARLHACGHTALILESAQAGKIRDNFCNDDRHSAVKLARVYLSGLAKTVWQPDAQTRERREVQFAHRNAVKDTTRCRSRIRSFLNEHCVRLPKGTRLTDASGLQTALAAKSWSALQQALITQKFEQLWTGEKLRRDLEQVMVRELAAHPGWARLWRLLGIRHRVAFALMALIGDVHRFPTAKHLVGYFGLSPRKEQSGNDPRGREQGLGRGGRGDVRALLIQSAQNALTQRSSPLHRWGWKLLVKKHRHLAAAAVARKLAVSIWHLLMGHFTPLVEAGEHLRTKLLKLATLLGKDTLRDLGFEHRTAWVEHQIQSIQLST

SEQ ID NO: 75013 - protein, 356 aa, unidentified
MSMLADLIDAVVGGDTHRDTHALEIATPAGAVIATSSISNDEDGFAQAVAWIVEHAPGPRIVIGLEGTRSYGIGLARALAAAGLNVVEVVRPRRGQGGERRRGKSDPIDAHLAVLAVLRMDPDRLPVPRADGNREALRILLGARRELTLTKTRQTNRLRALLLAGDDTDRGLARGRLSDTRLAAISRRRARAGENTEQAIRRSEARRLAEGIRHATRDLAANKKQLADLVAGHAPHLLDMTGVGPVSAAQALVSWSHHGRCRNDAAFAALAGVCPIPASSGRTTRHRLNRGGDRQLNRALHDIVLTRSRICPRTQAYIAQRRREGKTDREIRRCLKRHIARELFRTLQTTTPATTT

SEQ ID NO: 75014 - protein, 376 aa, unidentified
MKEFNSIYVGLDVHKATIAVAVARGGRGEPDYHGEIENSSAAVSKLLKRLSPNGEVLSFCYEAGPCGYGLHRQLTALGHECEVVAPSLIPRKAGERMKTDRRDALMLARLHRSGELTAVWVPDEEQEAMRDLSRAREDMKSLELKARQRLGAFLLRHGKVYEGKSRWTKMYWRWLESVKFDLPVQQLVLQEYIDSVKSSQRRVAELEAQMREALKGWSLGPVAEALMALRGVSLVTAMTTLAELGDITRFDSPRELMGYLGLVPSEHSSGNTRRQGGITRTGNGHVRRVLVESAWNYRFAARKTRCIEKRAEKTSEQVQAIAWQAQKRLCGRYRTLMQAGKQNKLVITAVARELAGFIWAIACEVQGKAHGSKALV

SEQ ID NO: 75015 - protein, 403 aa, unidentified
MTSCSYFAGIDWASESHAVCVLDAAGRVELRLDIPHNKEGIERLIRQLKSFAGVAIAIERPSGVLVDALVEAGLRVVPIHPNVLKASRARYRGAGKSDPGDAYMLADLLRTDGHRFRALEQQSDEIRALRALVRTRDDLVAERVALANQLRSLLESFWPGAAEIFADIDSPIALAFIARYPTPQSAAHLGEKRLAGFLAQHAYCGRRPVGMLLERLRSAAQSCVGELEAEAKGELVHSLACILERLVAQLAKLTARIEHTVASLADGQIIMSFPRSGRVCAAQILAELGGVRERFPTEAQLAAEAGVAPVTYQSGKQRSVTFRWACNHRLRRALTCFADQSRHSSPWAAAVYHRARSRGCDHPHAIRILTRAWVRVLWRAWFSRTPYQPHLHRAAVTLQLAEG

SEQ ID NO: 75016 - protein, 387 aa, unidentified
MQVVTGQAAAPTAIQTNLRAIFVSLELSRSTWLITSLSPGAAEKMSKHSVQAGDIAGLLRRLAQIKEKARARTGRDFPIITIQEAGLDGFWIHRVLQSEGIESHVVDPASIATSRRRRRAKTDKIDGETLVRTLLAYKRGEPRVCAMIKVPTPEEDSRRLCRERKVLTAERVLHVNRIKGLLFCQGISGYEPLRRDRHERLEELQTGDGRPLPPHLKAQVNRELDRLELLLKQIKAVEAERDALLVAAHTPAAVPASMLLNIRGIGPEFAAVLWSEGLFRHFDNRRQVAAYAGLAPTPWQSGAVDREQGVSKAGNPRLRTTLIQLAWLWLRNQPHSALTLWFHERVSRNGGRLRKTTIVALARKLLVALWKYVTAGVVIEGAAMTAA

SEQ ID NO: 75017 - protein, 373 aa, unidentified
MEVVHERCAGIDVHKATVVACVRMPGARPGERHSETKTFATTTRGLTELTHWLVGHGVTDVAMESTSVYWRPVYAVLENTVRLILVNARHVKMVPGRKTDVRDAEWLAQLLECGLLRASFVPPRPVRDLRDLTRLRKTLIRERGHHVNRIEKTLELAHIKLGCVVTDLMGKTGRAILQALSTGIDDPDQLAAYAQGLLRKKRRIAEAMAPFAEPAALAQTMPGVAVRAAQAILAETGVDMQPFPTAAHLASWARLCPGTHESAGKRQPTTTGKGATWLRATLQEVAWAAVRTKKSYYRALYHRIKGRGGPKKAIVAVQHAMIVALWHMLTRRVAHHDLGADYFERRNTARIRRHHIRRLEQLGYDVVLVDKAA

SEQ ID NO: 75018 - protein, 414 aa, unidentified
MFAVGVDVSNGRSTVAVLQTKKKVILKPFEVPHTPEALGRLVDKLNSLNEETRVIMEHTGRYYESIAMFLNSKGFFVSALNPLLFKAYQEGISVHPVKTDKADAIMIAKFGLDKWDELRQYEPMDTIRYQLKTLNTQFQMASKSKTAFTNNLIALLEQNYPGIRKHFPSPARPDGSEKWVDYVGTFWHIDCVRKISLKAFVERYLKFCQKHGYNFSEEKAAELYCHAHSTIALVPKSDISRLMVREAVNQLSTISHTVETYRAEMNRLASQLPEYKTVMGMYGVGPSIGPQLMAEIGDIRRFPQRNSIIAFAGIDPEKDDSGDKVSKTGKSTKRGSPYLRKTLFVIMDILLRLQPADDPVYQFLDKKRSEGKPYYVYMTAGGTKFLRIYYGKVRDCLKEQGLWDQPTIESGNSD

SEQ ID NO: 75019 - protein, 349 aa, unidentified
MIHVGIDHHKKWDQVVALNDAGTVILERQLSGNRESWEQLKSELPSGEPTQSVLEAGWNWGKAYDLLEEAGFNPKLANPLKVRLIAESFIKTDRRDALALAQLLRMGWIPEVHVPAREVRDQKNLLRQRAWLVQERTRIKNRIHAILDRNHVEPPVVSNLFGTRGKAWMNGLTLRAPDDVLLAAHRKLLEAVQAQMKEAEGWIDEALDGHADLEILTSLPGVGKLFGALIALEINGVGRFGSAEKLCAYSGLVASTYRSAETAHHGGLIPGCNRHLRYAFIEAAWTAVRVSPYFSAYHRRLKARRGAQTAIGAAARRLCEVAFHCLRRRRFYVEKPYRFRPGRLVSVLA

SEQ ID NO: 75020 - protein, 383 aa, unidentified
MKAVCGLDVHKDSIYLCILHPDGELFEQVFGVLTFQLHEMCKLLKKHHVSEVSMESTSIYWVPIWRVLSPHFTLRLVNPYFIKQLPGHKSDVKDAQWIAECTKKELVNGSFVPPEIIQQLRQYDRRIFDLNEEIVRKESKVDAVLQRCNIRLSNYVSNIECKSYRTVVRRLSEGVTDPQELIKELHGRIINKHGRETILASMEGVVSQAEIDVLRQLREEIDIAESHKKECQDKMSEICQKYFPEELRRLQTIPGIKERAATSLIAEIGTDMSKFETANHLAAWSGLRPRNDESNKKVKSRKTTHGNSYLRRTIIQCAWAASRQKDCFFSWFSYHQTVVRRKNKMKVIVAVARKMLVSVWHVLHDNVEYIDFKHDCEESANNG

SEQ ID NO: 75021 - protein, 358 aa, unidentified
MSAEGEAIRSNDYRKDTTVKAPSTRPAAVLGLDVGKSSHWACLIDRDGEVLASAPVRNREAELDALFASAPAGTLVVVDQFRNIGSLAVRRARAAGLVVAHLPGLAASRAAGLFAGEAKTDERDAAVIARTALGVPDSLSGVPGRGEALEAARALSSQRDHVVACATRDKNRLRAVLLESCPALEAAVDLSDRRWLELLAGFGGAWGIARSGAEGPRAEAGGLEAETAALLEGDETYACLLTVPGIGPRTAAQLAVSVDIGRFPDHDHLASYCGIAPRVRSSGTSVRSVRASRRGDARLKSLLIFSCNSLVRSSGRYGEYYRACRARGMGHGRALKAVARKRLRAIYAVMRDRVPYRE

SEQ ID NO: 75022 - protein, 347 aa, unidentified
MRFYNRQHRYYCGIDLHVKTMYICVLDGTGQVLVHRNVKSTPEALLELLAPYRDDLVVAAECMFTWYWLADLCAAEGITFVLGHALAMKAIHGGKAKNDKIDSHKIAVLLRGGLLPQAYVYPAGMRSTRDLLRRRLHLVRKRGQLLAHIQNTRAQYNLPEFGRRLAYPGNRDGVVDHFPDPSVRKSIEVDVTLIDQYDALVTDLELTIVREAKRHDGDAFHRLRSVPGIGKVLGLTILYEIHDITRFDRVQEFASYARLVKCQKQSGGKTLGTSGAKMGNVHLKWAFSEAAVLFLRHTKEGKKLLARLEKKHGKGKALSILAHKIGRAVYYMLSRGTVFSMEKFLAA

SEQ ID NO: 75023 - protein, 454 aa, unidentified
MGKPIKGRSLSLECIESSAAGIDVGATEIYAAVPPDRDAEPVRCFKTFTSDLQEMAAWLKQRGITTVAMESTGVYWIPPYEILEEAGIRVCLVNAHYVRNVPGRKSDVSDCQWLQYLHSVGLLKPSFRPDATICALRSLSRHRTSLVEGAAVHIQHMHKALTQMNLQIHHVLSDITGISGMAIIEAIVAGQRDPLELAGLCHAKVHADRQTVVKSLTGNYRPEQLFTLKQSLAAYKSYQQLLAECDQEIQRLTNSMSGKIDPGAPSSYTKSSPQKRRKNQFHFDMRSELHRLFGVDLTAVPGINALTAHTLLAEVGPDLSRFPSADAFANWLALCPGNKKSGGRVLSSKTRPTNSRLSHALRVAAQTLARSRSYLGNFYRSMRARLGAPQAITAAAHKLARILYHLLTTGDAYDESVFAREQLKQNLRLQKRLSKQAQNLGFQLIPITPAAPCS

SEQ ID NO: 75024 - protein, 338 aa, unidentified
MALYAGIDLHSTNSVVAIIDEQDTLKYCKRLPNDLGTIRKALAPFRDDLCSVVIESTYNWYWLLDGLVETGYQAKLAHTAAIAQYAGLKHGDDDSDARHLANLDRLKILPEGYVYPREQRRLRDLLRQRLRLVQQSTGLLHTVQGQVSRLTGHGLSANAFRKLDADEIERLLPHALDRHAALAPIHVWDAARAEIEAIEAVVHKALREREDYGKLKTAPGIGPILGPTILLETGPIERFKSVGDYASYCRMVQATRISNGKKKGEGNRRSGNRFLCWAYMEGATFAKRYYPAVQRWYDRKASKRHKVLALKAVAHKLARGCYHVLRDHKDFDIERAFR

SEQ ID NO: 75025 - protein, 343 aa, unidentified
MGEVSTVGLDIAKSVFQVHGVDADGAVVMRKRIGRAKLLEFFAALPPCVVGIEACPSAHHWSRKLRVLGHTVRLMPPSYVKAYLKRSKNDANDAAAICEAVTRPSMRFVPIKTQEQQTGLMLHRTRQLLVRQRTMLSNAIRGHMAELGIISAKGRNGTAELLQIVGDVADDRIPPVARFCLDLLARQYLTLNAEVYAVDKRIHAWHRACEESRRLEEIPGVGPIVATALVAEIGDWRAFRSGRSLAAWIGLVPKQHSTGGKERLGSITKQGNRYLRWLLVTGAMAVIRYARAHGTKRPWLTRIMDRRPAKVAAVALANKIARMAWAIMVRAERYKEPKLLLAA

SEQ ID NO: 75026 - protein, 408 aa, unidentified
MNAVGIDVSKGKSMVAALRPMGEVALLPQEFLHTEVGLEQMAYAILALGENTRVIMEATGRYHEPVAAALHAYGIYVCVLNPLFIKQSGGGSIRKVKTDKADAMKIAKYGLDNWVDLREYTPMDTISQQLKLCSRQYNLYMKTVVSLQNNLISLTDKTFPGVNELFSSPERADGHQKWVDFVITFWHCDCICYVSAKAFTERYQKWCKRKGYHFSAEKALDIHAGSCDHFTTLPKNDNTKLLISTAAQQLLAGKVTLAALRAEMTRLSKQLPEYDTVRAMYGVGETTAAQLVAEIGDVRRFPRRSSIIGFAGVDPGIDESGKHSAKSVPTTKRGSPHLRKTLYQIVCTYLRKAPTDEPVYQFLDKKRSEGKPYFVYMTAAQNKFLRIYYARVKECLEAFDTQQSSTQS

SEQ ID NO: 75027 - protein, 404 aa, unidentified
MEDGMISVGIDVSKGKSTVCILKPYGEIVSSPFEVAHTEAGLKSLVEKLRGLGGKAKVIMEATGVYHLPVFSYLHDKGIFVAVINPLEMKRYANKGIRRVKTDKKDAVTIANYGIDNWFHLQQCKCSDETYTELKFLGRRYAHYMHLHVAALQELTHILDRTMPGIKKHLQSWNEASRKDKLGDFVEKYWHYDNITSKSQEEFSAEYMEWAKEKGYRQDTAKADAIYASAAAGITTLDSSTPSTKMSVQEAVRTLNTINNVLNEILTRMKDLAKTLPEYSVVRSMGGVGEVLAPKLIAEIGDVRRFHSGKALVAYAGIDAPPYQSGQFYGTNRKISKRGSCLLRKIGFETMRVLKSHKEPDDAAVYRFIIKKEAEGKPKKVAKIAGLNKFLHIYYARVMEVYKS

SEQ ID NO: 75028 - protein, 353 aa, unidentified
MKTYYVGMDVHRASIVIVVLNGAGKIVMQSVIETGAERVRGYLKQLRGQVYVTFEEGTQANWLYEVVRPLVTEVVVCDPRHNKLMQSGNKSDRVDAQKLAELLRLGSLKAVYHGENGVGALKELVRSYDCLVSDTTRVMNRLKAIYRGRAIGCAGHDIYRQDRRQQWLDKLTERGAKERASFLYRQLAALKPLRHEAKRAMVKEARRQRAYPWLMSVPQFGSVSVAQLLAIVSTPHRFRSKRQFWTYIGLAVVTRTTADHEVVNGVLRRSRRPVSTRGLNRNHNHLLKRVFKNAANGACHNGPFKAAYELRVRQGMAPSLARLTLARQLAAITLAVWKHGEQFNPERMKQQAA

SEQ ID NO: 75029 - protein, 323 aa, unidentified
MTTDYLGIDVSKAKLDVALLRGKQAFSAIFKNTQTGFSALKKWLEKYQSKPHIGMESTGSYGKAAAKFLYASGYPVSVINPMQIKAFARSEMLRVKTDKVDAALIARFCRAHRPRLWEPLEEALEELQGLTRRLLELKSMKQQEANRLQDPGCFGLVKDSLERSLANLEQEMAKLEQLIKSHLDQNPKLKAQKDLLKTIPGIADATAAMLLSEIGNWERYSSARQLAAHAGLTPRIKQSGSSVRGRGAIFRMGNANLRKALFFPAMVAKKYNPIIQNFCARLAQAGKPKMLVVAAAMRKLLHIVFGVLKGKEGFNPDYLTSPA

SEQ ID NO: 75030 - protein, 428 aa, unidentified
MDQVNHNRLEEFRQLRQEVRHSGEYLIVGIDIAKDRHYAFFGTATGKTLLRRLVFSNDHEGFRKLLDQAEALRVQHGLKKVVYGMEPTANYHKPLGEYLIGLGRTVVLVSGVTVKRNRETLDGRWDKHDIKDSANVADLISQGKCLYYEHPSAELRGLRGLLSLKRRLKKQEHGYKVWIRNHLIAQYFPEMDRDYAQLGAEGLSIVRWCFPASQIVQLDVDPFIERVTSRRIRVEKRRRLEVIWEKAGESIGCDGVPGVEHEAKVMVEGLRQIREMIKETEEKILGLCKQFPAYPYILTIPGFGPDVSAKVLGAIGDPDRFQNGKQVLKMGGLDLSADRSGKDSDKATPVISKRGKADLRYALYQAAFIASTKNRDFMLYYTNKLQGREKEKGIHTKMLVKLSAKMLLIAWTLMKKKEAFDPAYLITE
